United States Patent Application Publication US 2008/0168583 A1 - sequence listing, part 3

SEQ ID NO: 13658 - DNA, 420 bp, Gossypium hirsutum
  Clone ID: LIB3135-061-Q1-K1-C11
cccacgcgtccgcccacgcgtccgggcgatggtaaaacaggcgtggtgtcactcgatctcagtaggtgagtaaaccagctccagtagtcctcatggttaccagatagagtccattcaagattaacctgtctccaaacttcctgtgcagggccacaccgtgtgcttatatgtagcggagtctcagcttcaatattacagcggggacacataggggaaatagcaagtcttctattgtaaagtatagatgctgtaggaataaaattgtgtattattctccaatttgctatcttatttttgggagtgatttggagagaccaaatttttttgtaaaagtcaatattaccttgggtagagtctgtataatcagaggcatacgttaacatttgatagccactcctgactgtgtaaagtcatgtatgt

SEQ ID NO: 13659 - DNA, 52 bp, Gossypium hirsutum
  Clone ID: LIB3135-061-Q1-K1-C12
cttctcgatgcttgtgactacttcttgtgtttaaggtcctttccttattcct

SEQ ID NO: 13660 - DNA, 334 bp, Gossypium hirsutum
  Clone ID: LIB3135-061-Q1-K1-C2
acccaaaccgccggttgtgaagcctccgccatatacacccaagccaccttactatccaataccgccgggcatatcaccaccaacactgcctccaaagccaccagtctaccccagtccaccaatagtgaacccaccaacaccgccgattctgccacctcctattgtgaatccaccaacaccgccgattctaccaccaccatcaccacctattgtgaacccaccaacgcctcctatcgtgaagccaccttcaccgggaacaccgtgtcctccaccaccaccttcggcacaacaaacatgccccatagacactctcaagctaagggcatgtgtggac

SEQ ID NO: 13661 - DNA, 280 bp, Gossypium hirsutum
  Clone ID: LIB3135-061-Q1-K1-C5
gaacgaccacgcgacccacgcaaaaaaccactcattcacattctcctaatatagattatagacatttgaaaaactggagtgctttagcaaccatatggtttcgctcaaaacctactacactatcccaaaccaactctgttccttcatctattaaacccgtcggttgaatataccgactactactcccatatatcataactgctacatcaacctttttcatctttacctttctttaaaacccagatcactcattaaagatatataatagacttcttcccaa

SEQ ID NO: 13662 - DNA, 195 bp, Gossypium hirsutum
  Clone ID: LIB3135-061-Q1-K1-C6
gaacgaccacgcgtccacccaaaccgacggttgtcaacccaccaacatatactcctctgccaccttactatacaatagggtcggggatatctccatcaacacaacctccaaaaccacccctctacccacattccagcaatatttaacccaccaacaccgacgattctgccaactcctattgagaatacacaaaca

SEQ ID NO: 13663 - DNA, 224 bp, Gossypium hirsutum
  Clone ID: LIB3135-061-Q1-K1-C7
tcaatcacgcgtgcgtttcatcactgatacgagagttcaaatcctacctactcaggggtggtcggcctctacaagctcacctaatcagctatcaaaactgtctctcctatataattggtctttgcctacacaaatactctccgatatcttcttaagcgaacaatgtgagcttggactccctacaacccgatcactttaagagttcctatcgccataatgagctc

SEQ ID NO: 13664 - DNA, 245 bp, Gossypium hirsutum
  Clone ID: LIB3135-061-Q1-K1-C9
tccaagccttcacgctaaatcaatttatggtttatacagctttgacaatggaaggaacattgaccggttaacacggtgtttgtacttgaaaaaataaatttcttaaaaaggaactttgaatatatgccttgctaaccattaatcgaattaaaacacttctttatccttaaaaaatcattaattcatgatagcttattcccttccaatgattttttttaaaaacaaagaacactttttatgctttt

SEQ ID NO: 13665 - DNA, 308 bp, Gossypium hirsutum
  Clone ID: LIB3135-061-Q1-K1-D1
aaatttttaatcagttataatataaatagaacaaacaaatgtcaaagtcacataatttaaaggggaagcggctcagaaaaatgaaagcattttatcttacctacgacactccaaaagcacctgttaatgtcgacactccttccaccagctctagtctgtccaaagtggcaaaaggggggctccttctgaaaacccatttttctatctactttactggcgatgagagcgtgcaaaataaatccaatctctataaatcctatatctgccctttctacatggtcactttgaacaacacattgtcgttccta

SEQ ID NO: 13666 - DNA, 293 bp, Gossypium hirsutum
  Clone ID: LIB3135-061-Q1-K1-D10
cggcctgaatcccggtcgacccaccgtccggaaaagaaagaaaacaggaatttatcatagtgagattacatggaaatttgacagggagggattagtgaattttgtgaaccatcctacaggtttctttaccagtttttcaatgatatttacttcaaaaaaaatattattttacttactattttatatctcttttttccttactctttcatcttttattatttttctcaactattttttaccgatttttcttttttattcttttatttctcttatctttctactacttatatact

SEQ ID NO: 13667 - DNA, 416 bp, Gossypium hirsutum
  Clone ID: LIB3135-061-Q1-K1-D11
cccacgcgtccgcccacgcgtccgggaagtatttggaagatccttgtgtgtgggtagaatgggacaccaccaccctgagcattctatcatcacatgctgagattggacttggctggcttctacttgtttccttgttctcgtggcaacgcaacattgtacaaactttcatgtactggcagctgttgaagcttatgtaccattctcctgttagcgctggttaccaccagagtgtgtgggcgaagatcgggaggactattaatccacttatcctgcgttatgtaccatttttgaacactccggtttctgcaattcagaaatggtggtccagatagaagtaatatacaaaggattctttcttcgttttctagctttttttttttttttgttgggtggaggggggataaaatgaagttcta

SEQ ID NO: 13668 - DNA, 162 bp, Gossypium hirsutum
  Clone ID: LIB3135-061-Q1-K1-D12
atcattctaacatatggcccaaatttatagttttcactcccactcccctctcttggtatcagaagtattttttaaacaactctaaagcatcttaattttaaactttccttgtattcttttacattgaaaacattgcaaatatatattatccaattagctcaa

SEQ ID NO: 13669 - DNA, 419 bp, Gossypium hirsutum
  Clone ID: LIB3135-061-Q1-K1-D2
ggtgtctcttccatccttttaatcaagttttttgtccttgatttgtattctagtacagaaggtacttgataaggtcattagagtgtaattatacataggcaacttgcctaaatatgataaaagatagagaggaagaaaaaaaaagagaaatagtaaaggaggattaaccttctataatgttgtcgggtgtgcaggcggtatagaataagttatttttgtggttttctatcctgattttctaatgtaatgaaactcatatgatttgagtgaatgtgttttgactttggtgtggaaaaaaaaaaaatataaaaaaaaaaaaaaaaaaaaaattaaggaaaaacaaaattttttattttttttttgtacaaaaaaaataaatgataatttcttacttatggatatgaaaaaaaaaatttttc

SEQ ID NO: 13670 - DNA, 396 bp, Gossypium hirsutum
  Clone ID: LIB3135-061-Q1-K1-D3
cttttcaaggagggatcgttttataacgcttttaccttcttggatgccttaacttgggggggggcgggggcccaaacacttagtgttgcttattcttaagggaacatttacgtgaacggaaatggaagtggtaacaccactatggttggaggaggagctgccgcaacatcgccaccacctcagcctttaacaccgtctaccactagtgtagtttgaccaggtttatcaattcatagttcagaagtaccagaaaatccaatgggactttcaccagcagcagttactacagctaccaccaatgttttcgctagcatatttgcacccaactctcaaccattcaaaatctcagcaccgtcgtcgtttctttaggcgacgacaccattggagcgcacattc

SEQ ID NO: 13671 - DNA, 66 bp, Gossypium hirsutum
  unsure (1)..(66): unsure at all n locations; Clone ID: LIB3135-061-Q1-K1-D4
cacgccccgtccggccgaccctctatgttgacccataaacttaacgatacattctcggnntcggaa

SEQ ID NO: 13672 - DNA, 399 bp, Gossypium hirsutum
  Clone ID: LIB3135-061-Q1-K1-D5
aaaaaaccttcatctcacgagattagtcaatctcggcatccttccactttacaaggtaagtgggaagaaaagatggccagagctatgtgtaatggaaataaaaaatctcaattggccgattcggcacaggaagacactggtatagggaacaccactgaaataacagtgtcacacaagtttgaaaatgatgaagccacccaatatggcagcgagggaagaaaaaataagcttgatgagatacatggattgagctcaaattatttactggataacttaataagaaatcacatggcactgttggaaggtgggaatataaatcctgaaaacgaccgtggcgaggctttctgtagtttcccggcacggaggaaccaactgatcccaatgcggcaatggatgaca

SEQ ID NO: 13673 - DNA, 309 bp, Gossypium hirsutum
  Clone ID: LIB3135-061-Q1-K1-D6
tccacgcgtccgctcgatatcctttcctgttgtaagagcggtctctgataagctgggtgagcctgttgatatacttcatttagatgcccatcctgatatttacgattgttttgaaggaaataagtattcacatgcatcttcttttgctcgaattatggagggtggttatgctaggcggcttttgcaggtcggtatcacatctataacaactgaagggcgcgaacaaggaaaaaaggtcggaatggaacaatacgaaaagcgaacatttttaaaaaaacgtcatttctttgaaaaccttaaactatggga

SEQ ID NO: 13674 - DNA, 259 bp, Gossypium hirsutum
  Clone ID: LIB3135-061-Q1-K1-D7
aaacataaaaacacacattctgatgaataatttacgtcctttcaacgcgtccactggcttgggtatgaggcctttaacgctctctcgctgctaataatgccggaaacattcacgctaacgaaaataaaaatggtgactcaaccatagttgaaggacgacctctctcaacagttacaccacatcatgcttaaaaccgtctaccacttgtttactgtaaccacatttatcattttaaacaaaaaaactaccttagaattaa

SEQ ID NO: 13675 - DNA, 210 bp, Gossypium hirsutum
  Clone ID: LIB3135-061-Q1-K1-D9
gttttcaggctagcatatctttcgatctagcaccagaaatcgaaatgaagaaaatacaaggggcttgatcattatcaacaatactgcaaacaaaaaaaaaaaaaaaaaaaaaaaaaaaaaaaaaaaaaaaaacaagaaagagaactaaaaaaaaaaacaaaaagggtctttgcatgtacaagaaaaaaaagtgactattgctgtgtcctt

SEQ ID NO: 13676 - DNA, 412 bp, Gossypium hirsutum
  Clone ID: LIB3135-061-Q1-K1-E1
aaaaaagaaaatcctctgaaagaggaatggggaaggggctttcagcgctccgttgagcttgcgtctccgacctttcacgcgcccacgcgccgccaaatacggtggctcagaaggctaaaaaccttcgttattctgggtaaaacacaggttaatggcgcaatcttcggcggtgggtcatgatccatgcgccgattgcggcgtggcatgggaactggaaccacagcgctgatggtggctactagaacggcgtgattcgaaaaggcgcgtctttcgggatgattgcggcgcctagggtttctgaaaccctaggcttctctttattctgctaatatcttgggcccgttgggctctgtgtactttgggttgagggtggaaatgggtctgctgggtggttgggtttactgggttattg

SEQ ID NO: 13677 - DNA, 358 bp, Gossypium hirsutum
  Clone ID: LIB3135-061-Q1-K1-E10
aggacttgaatcatataataaatataaaggctcagcaaacagtgaaataaaaagaaagggtcgatacctttttagctcagccataagctctttgagctctctagtccaaatttgatcttgcagagggttagcgggagggatagtatcctcaattctggcctcatcactcttgctctatgattcagcagtactctccaacaaataaaataaagtccctttgatttactaaatctcctgaacctagcatctccacctggagccgatttcccctcaatgcctttcttttttaagttcctttagcaaataagatctgatcagtggattcatagctttttgctttagaatttttttaaaattt

SEQ ID NO: 13678 - DNA, 267 bp, Gossypium hirsutum
  Clone ID: LIB3135-061-Q1-K1-E11
aatcgaccccacccacccacgcgtacattctattagatggcggaaaaataaactagtgtttctagtactagttttatattggtgtcaggggttcacataaaggccacgtggggcttacgttctacaaaattcatctttcttccctcggccttcgacgatctagcgtttatattttttacctaacttaatttaatgccctcttttacaactactttactggaaaaccttgtcgttcccaacttatatgcccttgatcacattcccttt

SEQ ID NO: 13679 - DNA, 329 bp, Gossypium hirsutum
  Clone ID: LIB3135-061-Q1-K1-E2
gcggggtagaaatgattatgattttggtttaccttcagatttaatatcagttgctgcgaagaggaacaggtatcaaagacagaagtcattgatgctgcttgaaatggagagtcagcacgccaaggggttgccatcagttcccctcaacccccattagtagtcaaacagccagctttggaaaggagacattactggttttcgtagttttccactcacacatgaagagggcatatatatatatagattagagggggcgcatgcaaattaaatgcagtgcagttatatagggaataccataaaataaaacacgtgaatgaatttctatactg

SEQ ID NO: 13680 - DNA, 282 bp, Gossypium hirsutum
  Clone ID: LIB3135-061-Q1-K1-E3
gttagactcctgtaatagtttataggcgcttttgattgataactcaccggacagtacaccggtccatagttgaaaatctttgtatactgtctccgctagtggaatctgcatgattttccttgcaacatccatacgaaagttattcataataacagctgctttccaagtcaaaaaaaaaaaaaaaaaaaaaaaaaaaaaaaaaaaataaaaaaaaaaaaaaaaaaaaaaaaaaaaataaaaaaaaaaaaaaaataaaaaaaaatcaaaaaaaatatcataact

SEQ ID NO: 13681 - DNA, 394 bp, Gossypium hirsutum
  Clone ID: LIB3135-061-Q1-K1-E4
cttaattattaatttactacgatgtcatatttaaggcctctcgagtattttgtattgactgggtttttgggttccgaggattcagtgccgccagcatttataactattgcttgaaaatatcccaacaatgtttcagagtagtacaaccactaagtcatgttttggtgctgcaatcaaggtaagtcattacaaggttataccttcataatctgtttgaggtgttaagtgtatgtaacttggttacttgaagaaaactgaggttaagatactgatacatctatccttaacttaaacaatttgtctgttgtttacatatgtaagttatttgagtgttggagtttttaaactgctttctcaaaatttttattgactagaagttttttatgaaaatttt

SEQ ID NO: 13682 - DNA, 163 bp, Gossypium hirsutum
  Clone ID: LIB3135-061-Q1-K1-E6
gaagaccggggcgaccgcacgcgttcgcactgttgtttatcatcggtgattaacacactccggctcgttcgattaaagacgcgtcgagagcgttgttactgatctcgctttaccagcttaatctggcgagcttgctggctctgggagcgcctccagctttggt

SEQ ID NO: 13683 - DNA, 305 bp, Gossypium hirsutum
  Clone ID: LIB3135-061-Q1-K1-E7
atagccatgtttgtagacaatatctggggaaaatgttttgacatggccacatgtggttaaggatgtggactgctacactatccaactcaatgagttagaatctatatcaacaagatataagttccagtcaatgatgcgagctccactacatggatttgcgttttggtttgatgttgaattcagtgggccagcaaattcttctataatcactccaagtctatccccactcattggcatatcagatgatgatcctgttgatgatatcccaactaaaaaacgcacccatctcaacgaaccacttgtac

SEQ ID NO: 13684 - DNA, 255 bp, Gossypium hirsutum
  unsure (1)..(255): unsure at all n locations; Clone ID: LIB3135-061-Q1-K1-E8
cgttcctgtacctggagaatctggttttccttttccggggctttttgtgctcggacagtcgcaaaaggaagcagaactactcangaattatctgaagcaaatcagagaagaaacgagtgggagattgttgagtgttgcctataggcccaatggaactccaaataaatggtggttagcttttgcgaaaagaaaatttatgaatataattattccatgaaatgaaaaacgttgtatattgaatcaaaagtagaatgt

SEQ ID NO: 13685 - DNA, 420 bp, Gossypium hirsutum
  unsure (1)..(420): unsure at all n locations; Clone ID: LIB3135-061-Q1-K1-E9
gtgaagatatactttgtctcccccgacattgttaaaatgaaggatgacattaaagattatcgaacatctaggggtgtcgagtgggaagaaagtggtgatttaatggaagtggcgtctaaatgcgatgtggtgtaccaaactcgtattcaacgagaacggtttggagaaaggatccatctttatgaagaagctcgtggtaagtatatagtggatgagaatgtgttgaaggtaatgcagaaacatgctgtggtaatgcatcctctcccgaggcttgatgagattaccgtcaatgttgatgcccatccgagagctgcttattttagacaagcaaagaatggtctctatataatgatggctcttttaaaattgttgcttgttggatggtgaggaaaaaaaaggngctgtttttggattattttg

SEQ ID NO: 13686 - DNA, 340 bp, Gossypium hirsutum
  unsure (1)..(340): unsure at all n locations; Clone ID: LIB3135-061-Q1-K1-F1
gaatccctatatatatttgatnaaaactaaactagctgtgttattattgtgaaatgcaaactgaactaggataatgactttgatctgtcggtggagttgatgttgtttgcaagtgtacaacttaaagtaggtctcatggtaggtttgctattgtttgccatgagagtgttgtctaaatgtagaatcaattctcttgttctcctattgcctctaggtggccgttgtgatgtcttttaaacctgggcaccatgtctatattctttctgccaattaacaaactaagctatctaggatctgctatgtatgtatcttcaccttggctgcttctatctcgtatttt

SEQ ID NO: 13687 - DNA, 336 bp, Gossypium hirsutum
  unsure (1)..(336): unsure at all n locations; Clone ID: LIB3135-061-Q1-K1-F10
cccacgcgtncgcagctcccctcttctactggaagtggttatccgcagcttccgacagctggggtactaccacatgcattacctactgtatccgggggtggtggtgaatcagctccgtctggacctggaaacagggttcccattgatgatgtggtggacaaggtaaccggcatgggatttcctagagaccatgttagagcaacagttagaaagttgacggagaatggccagtcggttgacctcaatgtggtgttggataaacctaatgaatgatagtgatatacagccacccagagcttgttttggcaggtaaacctgtggtatctttaattcagt

SEQ ID NO: 13688 - DNA, 194 bp, Gossypium hirsutum
  Clone ID: LIB3135-061-Q1-K1-F11
aaataccgggccgacccacgcgtacggggaaaggttccatgtgaactgcacttgcactttggttagtctatcctaaaagacgggggagtcccgtttgacagcgcgtacagctcgagcttctaaagggaattggttttaaatatctgaaccgggacgcggcggctgactgcaacgtttgggagttctgagacatc

SEQ ID NO: 13689 - DNA, 283 bp, Gossypium hirsutum
  Clone ID: LIB3135-061-Q1-K1-F2
gcaccgtcccacctccccacctcggcttgttgtttgcatggtaaagatccaatttaccatgtattggcccataaacttttgctaatcacaagcttttaaattggctgatgaaagtgattgcaggcaaatgataactcatgactcagagatgaggggtaatattgatgaagaccgcaaaaaggtacctgttcatggacaatgctttcttgtggaatggtacagtacgtctgaagatgaactctttgataattatcataaaaaatactctgaagagtgtgaacag

SEQ ID NO: 13690 - DNA, 179 bp, Gossypium hirsutum
  Clone ID: LIB3135-061-Q1-K1-F3
ttctgattatatctatggtactgacaagggttatcgatatcataagaaggtcctaaggaaggtgaaagaggggtctaaagttgatggcgctcaaaacagatgctcatactattattctgctcatcacatgctatgctcagcaaaacacattctccctccaacaggccaaaagcatgaac

SEQ ID NO: 13691 - DNA, 426 bp, Gossypium hirsutum
  Clone ID: LIB3135-061-Q1-K1-F4
ctcgaaaaaggtgttccacaattttttcttccattgagcagattggacaagcatcatcggtggtgagtcttcgagtctttaggttactaagcgttgggagataattgttagaaaatctccataaaagtatttttattttactgggaatcgggaggttccataattttgtaaaataagcttttatattagtttggtctgtataataatcctgtagatgaagggtattagtcattagccatttaaaaccactctgaactatgtatttgcccgatttgtacccacgccatatcataacatcctattgagtcccgattaccaatggaatcgacagggttgccttggcttgttccctttttagtaagttctagattgcatcatagttccgcgtaaaagattctttaataattaaatctgctactttggaat

SEQ ID NO: 13692 - DNA, 268 bp, Gossypium hirsutum
  Clone ID: LIB3135-061-Q1-K1-F5
ttggaaccggatacttggtccttcatcagaaaggattgtttatgcattggtacaacacatgggtcatggcataagagaatacttcttggcctctgctgaactaaagttcaactgctttcttctaatgccagttgtggacaaattacctgcacttctccgggaagacctagaatctgcattttccgatgacatggataatgtatttaacatcagcaatctgcgacactctttgggcccacgaaagagaaatacagagattgatctcaaa

SEQ ID NO: 13693 - DNA, 292 bp, Gossypium hirsutum
  Clone ID: LIB3135-061-Q1-K1-F6
cggaacgacccactcgtccgacccctccttcccctactcacactttacagactttcatcactggtttggacactgacatggggacagatgggtacaacgacgaattaacccatgcaacttctacaaacataaacttttgccttaagaacatactttccaactctgaaatatgcaatgatgaatactaaccttgccgatattctatgaattaaaccgaaaccgatactactttaaccattcatgttacaccctaagacggatttacttatacaatgcttacaagctgttatct

SEQ ID NO: 13694 - DNA, 140 bp, Gossypium hirsutum
  unsure (1)..(140): unsure at all n locations; Clone ID: LIB3135-061-Q1-K1-F7
gaagancacgcgaccccgccatcctacaaaaaacataatctggagtttacattataggttccacatccatataaatgtgaaagagtgtatatattaagatgggtactgctccttttggggtgaccatttttatgtttcca

SEQ ID NO: 13695 - DNA, 355 bp, Gossypium hirsutum
  unsure (1)..(355): unsure at all n locations; Clone ID: LIB3135-061-Q1-K1-F8
ggaangaccggggcgacccacgcgtacacccacgcgtccgcnatggtgatcttctcacacttttgaacgtgtaccatgcttgcaaacagaacaactaggatcgatcctggtgctatgagaatttcatcaaccatagagcgctgaaggctgctgttaatgttagacaacagctcgggcgcattatgtccaggtttaatctcaagctgtgcagcactgatttcaacagccgcgactactatgtcaacattagaaaggccatgcttgctgggtatttcatgcatgtagtttatctggaggcgcacggggcactacttgacaatttaagacaaccaggtggtgcacttgcattcattaa

SEQ ID NO: 13696 - DNA, 381 bp, Gossypium hirsutum
  Clone ID: LIB3135-061-Q1-K1-F9
tcgacccacccgcccacgcgaacagtgtaccaaacaacagagcaaaaactacttcgtaaactgcatactgtccacagcgcaccggcgaggacttgattgccatgagcttttaacgtgcaactaccacttatgcctgatcaagagacccgcaacttttggaagggccacacacctcccgaattactgtagcaaaccctccctttactcaatggatagcgcttatccttcttcaatctacaaaatgagaaatattaaaaaaagaatagaatgaggtctttattgaggaggcttttgccctgaaaaatgactaatgaaaattcaaaagaatgggtctgtgcttttaaaaagattaaaatgccaagggtgaatagaaagcctttt

SEQ ID NO: 13697 - DNA, 362 bp, Gossypium hirsutum
  Clone ID: LIB3135-061-Q1-K1-G1
gagacatgctccaagaagcctaatttggagttcacattgggggttccacattgatatagatataaatgattttatatattaggatgtgtactgctcattttgaaatgatcatatatatctctgactccgaagagaggagaagggggagttggtgaagagaatcaggtaccctctctctctctctctctctctgattgtaaccccatagcccgctcttattttcttcagcttttcttcaccatttttcataaataattccatatctgagtttctttgcataataaaatttctgggttctgaggccagttattggttcttctgttttttttgttataattggtggtggtacttatggctacttc

SEQ ID NO: 13698 - DNA, 238 bp, Gossypium hirsutum
  Clone ID: LIB3135-061-Q1-K1-G10
agaagatggaaacactgaaacaaaagacttcttgcagcttctgttggacctcaagcagaagagcgatagcggaatatcgataacaatgaatcaagtcaaggccttgctcatggacattgtggtcggtggaactgatacaacatcaaccatgatggaatggacaatggctgaactaattgcaaatcctgaagcaatgaaaaaggtgaagcaagaaatagacgatgttgtcggttcggat

SEQ ID NO: 13699 - DNA, 59 bp, Gossypium hirsutum
  Clone ID: LIB3135-061-Q1-K1-G11
gctttgttagagtaccctctcttattactcatgctagcggcacccccttatccttcttt

SEQ ID NO: 13700 - DNA, 235 bp, Gossypium hirsutum
  Clone ID: LIB3135-061-Q1-K1-G12
tccgacaaccaacctggagtgtttatccaagtctacgaaggtgaaagaacaaggaccagagacaacaacttgctcggtaaatttgagctctctggcatccctcctgctcctagaggtgtcccacagatcactgtctgctttgatatcgatgctaatggtatcttaaacgtctctgccgaagacaaaaccactggacaaaagaacaaaatcaccatcacatacgacaagggccgac

SEQ ID NO: 13701 - DNA, 244 bp, Gossypium hirsutum
  Clone ID: LIB3135-061-Q1-K1-G2
ggcgacccacgcgtacgaaacatactcaagaatcctaaattggagtttacagttttaataccacatttatatatgggcaaaggagactatatattaggatccatacgtactccttttataaatatcacatatatctctgactcctaacagactagtaaagaacatttgtcaacaagaattaaataccctgtttatatccctctatatctcaatgtcaccccataacccgctcttatgtttttca

SEQ ID NO: 13702 - DNA, 308 bp, Gossypium hirsutum
  unsure (1)..(308): unsure at all n locations; Clone ID: LIB3135-061-Q1-K1-G3
gttaatatgggttcatttggaaatgaattgggtccttccgttcttccaccattaatggatgcttcttcggctttcaatgccaagaaaaaccctgtttctgaatcggtttacgtgccctgcttctccaatcccgtcgacgttcaacgcattcaactcgacacaatcgatcattttcccgagaatcctctcctcctccctgtttcatcgaatccaacagatattttcccgagattccaagctccaaaccctttcttctcggctcaacccgtcactttcccacccaatcttcacctnccttgctctgtttt

SEQ ID NO: 13703 - DNA, 417 bp, Gossypium hirsutum
  unsure (1)..(417): unsure at all n locations; Clone ID: LIB3135-061-Q1-K1-G4
cacagcanagacaagaatggtttccatggagcaaacagtgtcaaagtcacatcttttgaagaggaagcgctccggacaatgaaagcattttggcttccctccgccactccagaagcacctgttaaagtcgacactccttccaccagcacagtctgtccagagggcaaagaaaaactcaaactgaaaaccctttttcctatctacttcactgaagatgagagcgagcaaaagaaatccaatctcgataaaacctatatctgcccgagctgcaaggtcactttgaccaacacattgtcgttggtagctgtaagttcctgcgggcatgtcttttgcaagaaatgtgccgataggtttatggctgtcgataaagtttgtttagtctgcgacaaaccatgcagagagaggaatttggttact

SEQ ID NO: 13704 - DNA, 214 bp, Gossypium hirsutum
  Clone ID: LIB3135-061-Q1-K1-G5
tgggagcctagactagtctccgcgtttgaactgaagaacaataatgatgtagacaaattgcgtttcaatgctgtattattcagtggtttcgctcgtatttatttatttccaattctgcttaataataaaaatgattagtatatataatcctgtatgtgttttccaaccattttgcatgagtttattccactaataaaatataatgtccattcct

SEQ ID NO: 13705 - DNA, 226 bp, Gossypium hirsutum
  Clone ID: LIB3135-061-Q1-K1-G6
gaaggccggggcgacccacccgttcttaaagattgttttcattttactaacatgttcaccaacaacactttcttttggagaaagggtaccctcttgggaaacctctcaactttcttccttccttccatactcaccaattgaaatatacatttctttcaacaacacagtaagttcctattgctcagaaaaaccctaactgaaaacccttttttctttctacattcac

SEQ ID NO: 13706 - DNA, 237 bp, Gossypium hirsutum
  Clone ID: LIB3135-061-Q1-K1-G7
gctgtgggcaatggaacatgatcaacaagaaaatggtcaatgggggtaaagttgatttcgggtcttgtgtgaacttctcctctgaatattggaatatgtcagaagacttctgtgcggggctggtgaatatgtgtaacagcaaaggaatggtgtttcgccaaactccttcaattgcaatgcgatcagctcgtgctgatcgaattgatcagactctcatggatgtatacaaagagtctg

SEQ ID NO: 13707 - DNA, 140 bp, Gossypium hirsutum
  Clone ID: LIB3135-061-Q1-K1-G8
cataaccttccatatcacatcccttccctccaaccaataaacctttgatacaccagattgctctgacctgtaaccattattcaattgtcacatgctatcatacacagacactctttacgttcactcccttcgttaatttt

SEQ ID NO: 13708 - DNA, 388 bp, Gossypium hirsutum
  Clone ID: LIB3135-061-Q1-K1-G9
caaaaatctggcaaatcctataatcaaatagccgaagaaaccggcttaaccaacgtttacggggctcagctcctcaaacgccaggctcagctcaagcctgaaaccgctcctaagctaagggcagccttgcccgaattgcctgaggagcttctccatgagatgatgaaaccaccgttacggtcctatgatccgaaccttatccaagaacccactgtttacaggttgaatgaggcagtgatgcattttggtgagagcataaaggagattatcaatgaagagtttggtgatgggatcatgtcagctatagacttctactgctctgttgacaaaagtaaaagccttggacgggaaagaccgagttgtcgttacactttatggaaaatacttg

SEQ ID NO: 13709 - DNA, 291 bp, Gossypium hirsutum
  Clone ID: LIB3135-061-Q1-K1-H1
caaggctgctcctcaggcagtcaagagcgttgaggttgaatctaatcctggccctggaagtgtcgtaaagatcaactttgctgaaggccttccattccaatatatgaagcaccagattggaggacatgacgacaagaatttgtcatacagttatagtttgatcgaaggtggacctttgggggacaagcttgagaaaatcagctatgacaacaagtttgaagcagctgcacgtggaggaagcctttgcaagagctcgatgaaattttacactgttggcgactatgtgatcac

SEQ ID NO: 13710 - DNA, 178 bp, Gossypium hirsutum
  unsure (1)..(178): unsure at all n locations; Clone ID: LIB3135-061-Q1-K1-H10
cccacgcgtccgcccacgcgtccggctccgtcagtgctcaaagcacgaataggattgaggagctacttcaagaggatcaaaatgtaaagcgtataanggagcgtttccagaagcagtcatcacttctttcaaaattaacgcgccaacttagcatacacgacaatcgagctgcttctgc

SEQ ID NO: 13711 - DNA, 317 bp, Gossypium hirsutum
  Clone ID: LIB3135-061-Q1-K1-H2
agagccatcttttacatggtaatgcaatgcctgggcgcaatatgtggtgctggggtggtgaaaggatgccagccatcaagatatgaggtgttgggtggtggagccaatgttatgaaccatggatacaccaaaggggacggccttggagctgagattgttggtacatttgttctcgtttacactgttttctcagcaaccgacgccaagagaaatgccagagactctcatgtccctatattggccccattgccaattgggtttgcaggggtcttggttcatttggcaaccattcccatcacaggaacaggcattaaccc

SEQ ID NO: 13712 - DNA, 161 bp, Gossypium hirsutum
  unsure (1)..(161): unsure at all n locations; Clone ID: LIB3135-061-Q1-K1-H3
ccgtgccgcccacgtnnngtccgccacaccttctaaccctcaaagtatgatagcagaaacccatctgatagnaagggcggggaggtggtgaatgggtggtcgatcttgcatgaaatcaggaaggggggataaaaaggggaagaaaaaacaaaagggctcat

SEQ ID NO: 13713 - DNA, 454 bp, Gossypium hirsutum
  unsure (1)..(454): unsure at all n locations; Clone ID: LIB3135-061-Q1-K1-H4
cgggacgaccccacgcgtcgcgcacaaagaagggttacattcccattgtccacgttacctcaggtacctacaacgactcggtgactagtgttgacgggcaaggtaaatggcggccgttcacaagcggtgattccccacaagattctacccatgtgccgcagctggtcgctgtcttggaaccgtcanccaagacgcgccacttggccgttgaaggtcaacacagcaggnttggtaacccggattataagcgaagaggattcatgtcagagtggagcatgttcaaccttcaaggtgcactgaggaattcaagctgaggaagctgaaaaatgatcagcttaaggcagaggccaaggcaaggggtgaggtgattagcacaaagaggcagcctgagggcccaaaacccggtttcatggtcgagggtgcgatgttggaaactgttactcccattccatac

SEQ ID NO: 13714 - DNA, 241 bp, Gossypium hirsutum
  Clone ID: LIB3135-061-Q1-K1-H5
cccacgcgttcgaaagaacaagagtggaggcttgatgtacgttcaggacaagagggaagaagacagagacgaaattttcaagctcttgtacgatggagcccatatatatttctgtgggctcaggggaatgatgcccggcatccaataaacattgaagagggttgcggtgcagagaggagagaactgggatgagaagccttcacagctgaagaagaacaaacaattggcctgttaaagtata

SEQ ID NO: 13715 - DNA, 362 bp, Gossypium hirsutum
  Clone ID: LIB3135-061-Q1-K1-H6
acgatcactttcaactctctcgtgattctcagactcccgactctgatgacactaccgatacccgtcccaaagatcttaccaccaaccacagcccttctctccccagtggtggtggcaacggcggtgcttctcgtggtggtgccaacagtggcgacggtgctagcatcgaaatcgttcgtagacccataggtcgtcctccgggctcgaagaataagccgaagccgtctgtcatcatcactcacgagcccgaccctgcgatgagtgcttacattctcgaaatccccggatggaacgacatcgtcgaagctatctcccggttctatcgtcgcaagaacattggaatctgcgtgctcacggcatct

SEQ ID NO: 13716 - DNA, 248 bp, Gossypium hirsutum
  Clone ID: LIB3135-061-Q1-K1-H7
caaaagattgggaccctagactagtctccgcgtttgaagtgaagaacaataatgatgtaggcgaattgcatttcaatgctgtattattcagtggtttcgcccgtatttatttatttccaattctgcttaataataaaaatgattagtatatataatcctgtacgtgttttccaaccattttgcatgagtttctgtccattcctaaattaatggtccacctgttttttaaaaaaaaaaaaaaagggcgg

SEQ ID NO: 13717 - DNA, 450 bp, Gossypium hirsutum
  Clone ID: LIB3135-061-Q1-K1-H8
tccacgcgtccgcaaagctgaggctgagaaatctgatgtcaccgacaatgcagggaagaagagggtgatatactgcacaagcttgaactgtagtgcaaatggaagcaccttatttagtggttatacagatggtgtaatcagagtttggggaattggtcgatactaaaaccaacattcatgcatgcatgttgtgccttccaatgagtaatcatatagtatgaaggaacatgtattgatacttttagttgcttctcttaacattttcaaaacccttttaaaagatttttgcttaaatatgttcgtaaaggaattgcttttcattttttgtttggaaggtttttcatttgaagcccttatgcacctttattgataattttgggtttgggcgttaacatttaaaaaaattatttttaaattaattttaaccatgaaattcgttttccctctctt

SEQ ID NO: 13718 - DNA, 315 bp, Gossypium hirsutum
  Clone ID: LIB3135-061-Q1-K1-H9
cgctgaacctgtaaactaatcgaagccttagccatcttcttcgccaactaaactgtctgacggagaaacaaggacaaaagaaaaatggtaagagaaagagaaactccaaagcagcaacaacaggtttcatacacagtggagcagcttgtagccgtcaatccttacaatcccgacatcttacctgatctcgagaactacgttaatgaacaggtttcatcgcaaacctatagcctggatgctaatctctgccttcttcgcctctaccagttcgagcctgagcgtatgagcacacaaattgttgcacgcattttggtt

SEQ ID NO: 13719 - DNA, 388 bp, Gossypium hirsutum
  unsure (1)..(388): unsure at all n locations; Clone ID: LIB3135-062-Q1-K1-A1
gcgaccacgcgtccggcagtccgaatttcacccgcaatcgatcacctcgacgccactgacactaatccgctcaacctaggcttggccgtgatcgagaggcttaatgagcttcanctgaaattggggtcgaaactcgcttaccttcatgtgactcagcctcgttatcatgcctatgggcaaaccgaatcaggcaggcacggtagtgaagatgaggaagctcatttaatgaggactttgaaaaggagttacgagggaactttcatgtgcagtggtggattcacaagggagctcggaatgcaagcagtagctgaaggtgatgccgatctggtatcgtatggcccgctttttatatcaaatccagacctcgtttttaggttgaggatcaatg

SEQ ID NO: 13720 - DNA, 448 bp, Gossypium hirsutum
  Clone ID: LIB3135-062-Q1-K1-A10
cttgaactctcctgatcgtgcttgcagtcttgcgaaacaggcttttgatgaagccattgcagagctggatactcttggagaggattcatacaaggatagcactttgataatgcaacttctccgtgataacctcactttgtggacctcagacatgcaggatgatgggactgatgagatcaaagaagcttccaagcctgaggaagagaaacaaccgtgaagttcccagtctttgtggtagcattttacttctcttcttgtttttgtatggagaagttggttgatcccactctctctttagttacttgcttttagttgatcaggcctggatttatgaaccttggaagtaactgctataaattccttagcatttcactgcttattcaatttgagttgtagctttctaattgcagtgaggttatgtgcactctctttcttgattggtttcttg

SEQ ID NO: 13721 - DNA, 431 bp, Gossypium hirsutum
  Clone ID: LIB3135-062-Q1-K1-A11
atccatcttagcttccaactttggttttatggcttcagcaatgctgctctttggcctgctggtggcatttttccatccctctagtgcccaaataggtgtttgctatggaatgatgggcaacgacttaccatcaaaaccagacgccgcatctcttttcaagcatagaaacataagaagaatgcgactctacgagccaaaccaacctgctctccaagctctcaaaggctctgacattgaggtaatgtttggcctcttcaacgacgatcttccacgtatcgccggcagtcaagccgaagcaaacacctgggtccagaacaacgtcaaaaactactgcgacgttaagatccggtgcatcgctgttgggaatgaagttcaacctttggattccaaggcacgatctttatttcctggcctgcgaaacattcacaatg

SEQ ID NO: 13722 - DNA, 449 bp, Gossypium hirsutum
  Clone ID: LIB3135-062-Q1-K1-A12
gtcgagagttccgacacgatcgacaacgttaggcgaaaatccaagacaaggaagggatccggccagagcaacaacgtctcatcttcgccggaaaacagctcgaagatggccggaccttggccgattacaacatccagaaggagtccaccctccatctcgtcctccgtctacgtggtggcatgcagatcttcgtcaaaaccctgaccggcaagaccataactttggaagtcgaaagctctgacaccattgacaacgtcaaggcaaagatccaagacaaggaaggcatcccaccagaccagcaaaggctcatatttgccgggaaacaactcgaggacggtcgcaccttggccgattacaacatccagaaggagtccaccctccatttggtattgaggcttcgtggtgggatgcagattttcgtcaagacgttgactgggaaaaccataact

SEQ ID NO: 13723 - DNA, 411 bp, Gossypium hirsutum
  Clone ID: LIB3135-062-Q1-K1-A2
ctttttaactctaaagccaagaaagtaagccactaaggttttgagagaagatcaaaatggcggctaaaagatcagcttccatggtcctccttttggcactcaacattctctttttttccctagtcagtgcttgtggctcttgctcttcacccacccctaaaccaaggccaaacccaaaccccaacacccccactcctacttcatctgcacgaggcaggtgccctaaggatgccctcaaattaggtgtatgtgccaatgtgcttaacctagtcaatgtcaccattggttcacccccagtgatgccatgctgttcccttctcaatggccttgtcgacctcgaagccgctgcatgcctttgcaccgctatcagagctaacattttaggcatcaaccttaacatcccagtttccc

SEQ ID NO: 13724 - DNA, 419 bp, Gossypium hirsutum
  Clone ID: LIB3135-062-Q1-K1-A3
gaaagaggttttcgattacgctgatcgaagaattaaagggttaagtaaacaagactggtagaatggctcgagttgcgggtggatcgtcaacattgaaccccaatgcccctctgtttgttccggctgtttatcgccaagtggaggatttctcacccgaatggtggaaactggttacgacaacaacatggtaccgtgactattggatcagccagaaccaggatgaagatggcttttacgacaacacagaggatgatgtatttgatgtcaatgacattgttgatttgcttgcagatccctttgactttgtctctgacgaagatctccaattcgaagagttcatccaatctaatgaaatggaaaccatagcacctcctttaccgtcaaatggtggctttgagaagggttttgaatctctgatg

SEQ ID NO: 13725 - DNA, 336 bp, Gossypium hirsutum
  Clone ID: LIB3135-062-Q1-K1-A4
ggcgaccacgcgtacggaatctttctctttacacagcgtaatgctgaataacaagctttagcgaaaatgactccaaagcttcttggggccctggtaaacccatctacattgaacatgattgggcatatgtttttaaaaaggatgtatgactatgatgaggcttctgaacaaaattcttggaaactcctttctaaagttacctttctctcatgacaatttcctcgaagtgaatgcacttatatttgacttcattgacaatgtcaaagattacatattacatgctaataacattctgcctatggatcccgattcctatacctaatgctttttataaaa

SEQ ID NO: 13726 - DNA, 354 bp, Gossypium hirsutum
  Clone ID: LIB3135-062-Q1-K1-A5
gtccaatgctcataccttcatccacaagtctccacctcgcatccccgaaattcatttgccagaggagccattcctccaagttgcctctgcattggcaattgaacttaaccagggattgaaacttctgcgggatattgcatctggaagaaatctgaaggagttccttatggttatagctgcattctgggttctgtcaattgtgggaagttggtgcaacttcttgaccttgttctatatatgtttcgtattgctgcacacggtacctgtattatacgagaagtacgaagataaggtagatccatttgcagagaaggctgcaatcgaggttaaaaaacaatatgcagtttttgacgc

SEQ ID NO: 13727 - DNA, 323 bp, Gossypium hirsutum
  unsure (1)..(323): unsure at all n locations; Clone ID: LIB3135-062-Q1-K1-A6
ccacaatcgaaacctttaggcggcgactactactcgagcttcataacacacgaagcttttagctatggcgggtgtagagacggaggttgcggcggccggtgtgcccaagaagagaacattcaagaagtttagcttccgaggtgtcgatttggatgctctccttgatatgtccactgatgagcttgncaagctcttccctgctcgagctcgcagaaggttccagaggggtttgaagagaaagcccatggctctaattaagaagcttcgcaaggcgaaaagggaggctccacctggtgagaagccggaaccagttagaacccaac

SEQ ID NO: 13728 - DNA, 428 bp, Gossypium hirsutum
  Clone ID: LIB3135-062-Q1-K1-A7
cccacgcgtccggtctaccacacacttgcttttatttctacttggagtggccgctctagccgcgtccctcttttggtacctatgagtctcccaactatgggaagccccctactcctgtttataagcctcctaaggtgaaacccccaccttatgaacataagccacctgtctatgaacctccaaagaaggaaaaacctgaacctaaaccaccagtttatacaccaccaaagaaagagaagccagaacccaagccaccagtatatgaatcaccaaaaaaggaaaagcccgaaccaaagccaccagtttatacacctccaaagaaagagaagcttgaacacaaaccacccgttttttgaaccaccaaagaaggaaaagcctgagcctaagccaccagtttataccccaccaaaaaaagagaaacctgaacc

SEQ ID NO: 13729 - DNA, 417 bp, Gossypium hirsutum
  Clone ID: LIB3135-062-Q1-K1-A8
cccacgcgtccggttcttttttgcactatcttgcaaccaaaacatttgagactgtttatgggtgttatttgtttgatatgaacatgctatggattcaaaatgtgatatcggagtggttgatgtctacaaccccgaaattcaaagagtttccaaaagggttcagaattttgtgcatatgtttgagaaaaaaaaaaaaaaaaaaaaaaaaaaaaaaaaaaaaaaaaaaaaaaaaataaaaaaaaaaaaaaaaaaaaaataaaaaaaaaaatatcccctttcaaaatatttcatacaatttcttataattctttactatatcttattttcccacctcctttttcaaataccattttctttttttatcccccccttttttaaaaataaatttttttttctcccccttatttttattttttt

SEQ ID NO: 13730 - DNA, 431 bp, Gossypium hirsutum
  Clone ID: LIB3135-062-Q1-K1-A9
atttctgcttctactcccacttctcatttcctcttcccctgttcaagaccctgagcttgtagtccaagatgttcacagggccatcaatgcgtccaggaggaacctagggtatctctcctgtggaaccggcaaccccattgatgactgctggagatgcgaccccaactgggagactaatcgccagaagctagctgattgtgccattgggttcggcaagaacgccattggcggaagagatggtaagatttatgtggtcactgactcgggcgatgatgaccccgttaaccccaaaccagggacattacggcatgcggtgattcaagacgaaccgttgtggatcattttcgctcgtgacatgaccattcagctaaaagaagagctgataatgaactcattcaagaccatcgacggtaggggcgccagcgttcata

SEQ ID NO: 13731 - DNA, 257 bp, Gossypium hirsutum
  Clone ID: LIB3135-062-Q1-K1-B1
cgggcgacccacgcgtccggccacgcttaccaacgcctcagttttttttttattcaatttccttaaaaaaaggacatacagaacttctgtgttcttataaactccttctaaaaaacataataataaatcaaaatgacaatctaaaaatacaattcgccatatgctatatgctgaactttgattgtttgcgctcacgtacaatcgtaccggagctgtcctacttgctcagaagtggcctgcgcttaggcacacacctc

SEQ ID NO: 13732 - DNA, 384 bp, Gossypium hirsutum
  Clone ID: LIB3135-062-Q1-K1-B10
gtgggggtatgcagatcttcgtcaaaaccttaaccggcaagaccatcaccctcgaagtcgagagctccgacaccatcgataatgtgaagtctaaaattcaagacaaggaaggcatcccaccagaccagcagcgtcttatcttcgccggaaaacagctcgaggacggccgtaccttggccgattacaacatccagaaggaatctaccctccaccttgtcctccgtcttcgtgggggtatgcagatcttcgtcaaaaccttaaccggcaagaccatcaccctcgaagtcgagagctccgacaccatcgataatgtgaagtctaaaattcaagacaaggaaggcatcccaccagaccagcagcgtcttatcttcgccggaaaacaac

SEQ ID NO: 13733 - DNA, 404 bp, Gossypium hirsutum
  Clone ID: LIB3135-062-Q1-K1-B11
gaaggtgatgacgcaaccattgttaacgattggcccaacaatcccatccatgtatttagatgaaagacgtgaaaaggacaaagattacgatctcaatctctttaaactagactctaccagtacatgttggctgaccaccaagccaccatgctcggtcgtttacgtctcatttggaagcatggctaacctaaccatcgaccaaatgaaggaacttgcacggggtttaaagcaaactgggcttcatttcttgtgggtggttcggccttccgagttaccgaaagtcccacactgtttcattgaggaaatgggtgataaagcattgatagttacttggataccacaaaccgaggtacttgcgaatgatgccatatggtgttttttcacgcattgtgggtggaacttca

SEQ ID NO: 13734 - DNA, 434 bp, Gossypium hirsutum
  Clone ID: LIB3135-062-Q1-K1-B12
ggaaaacaaagaagaaaaacttaatcatggctcggttgacgttcgtgacctccatcatcctgctgctatgctccgttgccgctggatcaactttcgacgactccaaccccatccagatggtatccgatggcctcaccggcttcgaatcctccgttcttcgtgtcatcggtcacactcgccatgctctctccttcgcccgttttgcatacaagcatgggaagaggtatgaaaacgtggaggagatgaagctacggtttcagattttcgaagacaacttggatttaatcagatccactaacaagaagggactgccttatactcttgctgtcaatcagtttactgattggagctgggaagagttccagaaacacagattgtgggctgctcaaaactgctctgctaccacaaagggcaatcaccagctcactgatgtc

SEQ ID NO: 13735 - DNA, 413 bp, Gossypium hirsutum
  Clone ID: LIB3135-062-Q1-K1-B2
cccacgcgtccgcccacgcgtccgcccacgcgtccggaagatcgtgggtggatctgaacatacacttcgggcaaagctgacattttcacaggaatcacatgcaaacctcacaaaggaagctggtccagttagcatgactttcacaataccaatgtataatgtttcaaggcttcaggtgaaatacttgcagatagcaaagaaatccagctcctataatccatatcgatgggtgagatatgtcactcaggccaattcgtatgttgctcgaatatgatacagtcaaacctctctttttctttaatatgttctgtatttgttgactcccatatgacacttttttccttttttttttcccttttcactaactgctttaaacatctttatcatgtagccattacctgatttctatgtta

SEQ ID NO: 13736 - DNA, 437 bp, Gossypium hirsutum
  Clone ID: LIB3135-062-Q1-K1-B3
ggcagcagtggcttgacgttcccctttgctcccttcttccagaagccaaaagtttgagttaagaacaagggcttatgctacaatgaagccgaccaaacctggtttggaggagtcccaggagcagattcacaagatcaggatcactctctcctccaagaatgtgaaaaaccttgagaaagtttgtgctgatttggttcgtggtgccaaggataagagactgagggttaaggggccagtgagaatgcccaccaaggttcttcacatcacaaccgaggaagtctccctgtggtgaaggaacaaacacatgggatagatttgagctccgtgttcacaagcgagttattgatcttttcagctcccctgatgtggtcaagcagatcacctctatcaccattgaacctggtgttgaggtggaggttaccatcgcagattcttaa

SEQ ID NO: 13737 - DNA, 402 bp, Gossypium hirsutum
  Clone ID: LIB3135-062-Q1-K1-B4
gaaaatgatgggaaggaaattcttcgtcggtttaaattggaaatgcaatggaaccactgaggaagtgaataagattgtgagtactttgaatgctggagaggtgccttctccggatgttgttgaggttgtggttagccctccatttttgttccttcctttggtaaaaacttcactgagacctgagttccaagtcgctgcacaaaattgttgggtcaagaaaggaagtgctttcactggtgaagttagtgcggagatgcttgtcaatttgagcattccttgggttattattggtcattctgagaggagacttattttgatggagtcaaatgagttcgttgcggataaggttgcttatgcactttctcaaggcttgaacgtgatagcttgtattggggaaacact

SEQ ID NO: 13738 - DNA, 294 bp, Gossypium hirsutum
  unsure (1)..(294): unsure at all n locations; Clone ID: LIB3135-062-Q1-K1-B5
ttacatttccccttttctttcttcagtttttaaaccaaaaactttanttaagaacaatgacttattctacaatcaatcctaccaaacctatttttcataaatcccaatatcaaattcacaacatcagcatcactctcttctccaaaaatgtgaaaaaccttgataaatttttttctgatttcattcaattttccaacgataatatacttatttttaagttgccatttaaaattcccaccaacattcttcacatcacaacaattaaatcttctttatttttaaataacaaacaca

SEQ ID NO: 13739 - DNA, 107 bp, Gossypium hirsutum
  Clone ID: LIB3135-062-Q1-K1-B6
cttttattgcaatgaacaaaatttcatataataaaaacaaaagaaaccaataaagaaataaataaaattataaaaaaataaaaataaaaaaaaaaaaaacttaaaaa

SEQ ID NO: 13740 - DNA, 340 bp, Gossypium hirsutum
  Clone ID: LIB3135-062-Q1-K1-B7
ttaacgttcccatttacttccttcgttttttaaccaaaagttttaattaagaacattggtcttattctacaatgaatcctaccaaaccttttttttattacttctaatatcatattcacactatcatttccactctttcctccaagaatttcaaaaacctttataatttttatgctcatttaattcttattaccaaatataatatacttatgtttaatatgccaattataattcccaccattttttttttcattacatctacaaactcttccttttttcaattaacaaacacattttatttattcgatctcccttttcacaacctagttatttatctttt

SEQ ID NO: 13741 - DNA, 426 bp, Gossypium hirsutum
  Clone ID: LIB3135-062-Q1-K1-B8
cccacgcgtccggcagaagctggtttgactgttgctgaagttactgggagcaatgttgtctgggttgctgaggatgagctaatgagaattcttattcttgttcggaattttgtacctggttatcatcaagttattactggagattggaatgtcgcaggcattgcttatagagcttatgatctcgaagggaagacagttggaactataggtgctggccgtatcggcaagctcttactccaacgattgaagccattcaactgtaatctcctatatcatgatcgagtcaagatagatccagaattggagaaacagaccggagctaaattcgaggaggatcttgatgcaatgcttccaaaatgtgacattattgtcataaatatgcctctaactgagaagacaaagaggatgtttgacaaagatcggatc

SEQ ID NO: 13742 - DNA, 72 bp, Gossypium hirsutum
  unsure (1)..(72): unsure at all n locations; Clone ID: LIB3135-062-Q1-K1-B9
ctgatttcaacagatatattccaaatgcaaactgcaggattacttatcatagncnnannaggaataagggag

SEQ ID NO: 13743 - DNA, 153 bp, Gossypium hirsutum
  Clone ID: LIB3135-062-Q1-K1-C1
gacgtcatacctcttctataacgacacttaaatttagtatcactgaccgtggtgatataacttggggactgtaaaaactctaacattttttaactttattgccttccaataaatgctcctttatgtaaactaaacttttctttaaaaggggga

SEQ ID NO: 13744 - DNA, 351 bp, Gossypium hirsutum
  Clone ID: LIB3135-062-Q1-K1-C10
cccacgcgtccggccaaattctatggcaacatgtttgccaagatgaataaaatggattctggggattgcagtaaatcagctgcaaaggaacccgaaccaatgagcatagatagcaaggcataggtggagatgaagcaaagcttggagaccttaatcaattaaagtgaagttgatgatccctagccttttatggtcttttaactacgtttgttctatttgcaggacaacttatctttgacatagagaatttgagttgtaatggattcgtttctatctgaggtttgttgacattttaaaaaaaaaagatttctgtttattggagatttattttcaattaaggggtactgcccc

SEQ ID NO: 13745 - DNA, 382 bp, Gossypium hirsutum
  Clone ID: LIB3135-062-Q1-K1-C11
tttatgtttctctttgcttctaaaaactctctttttttgattccctattattcttctctcggctttggtgtgggtgtatttctgctatccagtctctccctccccgtgtgtccttttttacagaataaaaagaaggctttatagcctcgactactacaatttttggaaagaaatctttgatttctttccgtatttgcttcccatgtctgctgtgattttctttccttttcttgcaggtacttgcaaaaaaatctgtcaatagcaaaagcttgacgatggtccactggtggcgttgatctcaacgtgagttggggcctagaatcatggcctcgatggggtagcacgagttgaagagtcatgaggcttggcttctggaaccttc

SEQ ID NO: 13746 - DNA, 445 bp, Gossypium hirsutum
  Clone ID: LIB3135-062-Q1-K1-C12
cccacgcgtccgacttccccctcctgcagcaccattacccggtttttcagccactgaccttgtagctgacgaacgacaacttgccatgagcaagatgggtggagttcatgctctaatgcacccagagggacagcatcctctgaagcaggcagcaatgggggtgggtgctgctggagcaagccaggctatatatgatggtggatacccgaatgttgctgctgcccagcagctaatgtactatcagtaacatataaagaaataagtggttgcgtggtaatatccttatttcctgcatttgcaggtttttaatttgagttctaaataggaggaggctttttaaatgtattttcccttggatagcagtgagcctgcatgccatcctgctttttatcgttatatagcatatgtttgtcgattgtatcaatcttacgtatttccagatttt

SEQ ID NO: 13747 - DNA, 371 bp, Gossypium hirsutum
  Clone ID: LIB3135-062-Q1-K1-C2
gaacgggtgttctgagtatagatcacagaaaaatggtgaaagcagtggctgtccttagcaggggtgaaggtgttagtggaactgttttcttcactcaagagggagatggcccaactacagcgacggggaacatttctggtcttaagcctggcctccatgggttccatgttcatgccctaggggacacaacaaatggttgcatgtcaacaggacctcacttcaatcctgctggaaaagagcatggtgctcctgaagatgtgaatcgccatgctggtgatctaggaaatgtcactgttggtgctgatggctctgcgagtttctctattgtcgacaaacagattccttccttttgtgccacacttcattattgg

SEQ ID NO: 13748 - DNA, 383 bp, Gossypium hirsutum
  Clone ID: LIB3135-062-Q1-K1-C3
gcaaaatcctctcaaagaatgatgaacaccaccaaaagcaccttcatcttggctattcttatgatggcagcggcttcagtatgcgcagccaccgggcctgattttttcgatcccttttcatcatcgtccgatcaaaagctcaagacccaccagaaccaagttggtggggatgatgggttctacggaccagacgattttgatattccagggtttgaaaaagggtggggaaacgggatcatgggtggtggttacggtggtgggttcgggggtccgagtggaagtttctccaaaggtggcatcgttaggcctagtgttgtttgtaaagaaaagggtccttgttacaacaagaagctgacctgccctgctaagtgcttcacctcatt

SEQ ID NO: 13749 - DNA, 434 bp, Gossypium hirsutum
  Clone ID: LIB3135-062-Q1-K1-C4
tttcaaccaacgtcaatctcgacggcgtcgacacctccgccatcctttccgaagccacctgtgccgtcggtaaactcatcggcaaacctgaggcctatgtgatgattgtgttgaagggttcagtacccatgtcatttggtggtactgagcagccagctgcctatggagaactggtatcaattgggggccttagtccagatgtgaacaagaaactgagtgctgcaattgctgcaattcttgaaaccaagctacaagtgccaaagtcacggtttttcctcaaattctatgacaccaagggttccaactttggatggaacggatccaccttctgagcctggcatgttctgaatttctcgaaacatcagtgatgtctattcaaaacaatcttactcgtacggtgaactggtgtgagaagacattcttaaaacttggca

SEQ ID NO: 13750 - DNA, 364 bp, Gossypium hirsutum
  Clone ID: LIB3135-062-Q1-K1-C5
cgctaggcaagatatggtggtagttgaggtgtcaaagctaggcaaagaagcagccaccaaggccattaaggagtggggtcagcccaagtccaagatcacccaccttgtcttttgcaccactagcggtgtggacatgcctggggctgactaccagctcaccaagcttttaggcctccgcccctccgttaagcgcctcatgatgtaccaacaaggttgcttcgcaggggggacggtgctccgagtggctaaggacttatctgagaacaacaaaggtgctcgtgtacttgttgtgtgctcggagattactgctgttacctttcgtggacctagtgacactcacctagacagtctttgtggccaagca

SEQ ID NO: 13751 - DNA, 417 bp, Gossypium hirsutum
  Clone ID: LIB3135-062-Q1-K1-C6
ttttgattccatgagtgccggaaaaaaatcaaagagtatcgatgaagactaggggtaaaaagaagagctacagatacggcttccaccaatcaaatatgacacaaacagaaacctaaagacttgctatagaaagcagacagagacgtgctaaggtagaagacttatgtggatactgtggttttttgactatggaacctttaatgatacatattccatatacaaaacaaacactatttataatgttgcttgaaaatgaaaatggataatacaattggtaataaaagcaccataaaatttattttatactgaggatgacctgattcagaaatttgctactggtgtctacatggttactgcattgtctcttgccatctaatacccgacccttgcagctgcaccacacatggttcatcaatg

SEQ ID NO: 13752 - DNA, 395 bp, Gossypium hirsutum
  Clone ID: LIB3135-062-Q1-K1-C8
attttggacatgttgcttctgattctctcgtcaatccgccgcataaaagctcttacatgagcgctaaggagtatggtcatggtctgttcctagacttcactggtcaagaaacacaagatcaaacaccgcctcaccaattcattgataactggcccaaggatcagtctagtcgttctatcgttacttggccaaatgagttaaaacctgactggactcaactctcgatgtctattcctatggtaacatcagagttctcatcaaccttgtcctcaccagtgaaagagaaactcgacctttcatctcttatgttagttcaggagttcgatcacatccaaatgggtttaggagtgaacaatgacatcactgaacaaaccagatagcaacctaactggata

SEQ ID NO: 13753 - DNA, 390 bp, Gossypium hirsutum
  Clone ID: LIB3135-062-Q1-K1-D1
ggcaatgagccatatttattaaatcagcattttccttttcattccgatttgggcttgtcagatggaatgggatcctcaagtggctcgtgcagatttgagcgaatgcggagttaccataatgatgggttccaacaaggttatagtagctcctccagcaaccatttcgatacagagagggagtttattccacaagctagccccctacgttatgctaatggacaacaaattgatggactggtcccaaaccggtggcaaatggcatcttcggatctgtctttactcagcatgaggaatgcagatggtgaaaattacgcatactacagcccagagtatccgaatatggcatgtggcatcaatggctataccgtatttcgaccttcgaatgggcac

SEQ ID NO: 13754 - DNA, 421 bp, Gossypium hirsutum
  Clone ID: LIB3135-062-Q1-K1-D10
cccacgcgtccgacttgcaaagatctgtgttgatatactatccgtcattgataagcatctgattccatcttcctcgacaggggaatcaactgttttctattacaagatgaaaggagattattttcgttatttggcagaatttaaagccggagaggatcgtaaagaagctgctgatcagtcacttaaggcttacgaggctgccaccactactgcaaattcagatttgccgccaactcacccaattagacttggcctggctttgaacttctctgttttctactatgagatattaaattctgctgagagggcttgccatctggctaaacaagcttttgatgaggctattgctgagcttgatagccttaatgaagaatcttacaaggatagcaccctaattatgcagcttctcagggataatctc

SEQ ID NO: 13755 - DNA, 368 bp, Gossypium hirsutum
  Clone ID: LIB3135-062-Q1-K1-D11
cacacgcttccggacaatacctaaagatgtgtgtgatgccatcctccactcttacacatcggggacagaccgcgtcattactcacaccaacatgtttttaattaactagagaaggggtttattttcaatatgtgctacatattaaaatcgctatctatccaggaaaatctgaatatcatatcctgccggataaatacgctacaaccacttctgttaaataaaaattaccatccactcaaacatcttgacatagcctgtctgcgcacttcactgaaaaatacccagagagctctaccattcatactataaaatgctatctaggtgaacaagccatcgatgatgctataactttcctagcaacacttaat

SEQ ID NO: 13756 - DNA, 443 bp, Gossypium hirsutum
  unsure (1)..(443): unsure at all n locations; Clone ID: LIB3135-062-Q1-K1-D12
atgaaaaccttttctaccactactcgtctgtcgcacaaagaattggggtttacactgcccgggactatgctgatatagttgaatatctggttgaccgatggaagttgaaggaactcattggactttcacccgagggccgtgaagctcaggaatttgtgtgtggacttgcaccgagaattagaaagctagaggagagagctcaattgaggaccaaggaatcacccagtgttccattcagttgggtttctggtagagaagtgaagctctaaattggctatcctccaagtgacttgtaatacaagaaagaaacaacagggcttatggaggagcatgatgaaaactgcaactctgtgtttagctggaatgcaataagtggaggaagtgtgtgtgtgctgtttncgttgtacttttcttaaaacacgtaatatcaacatctttcttct

SEQ ID NO: 13757 - DNA, 342 bp, Gossypium hirsutum
  unsure (1)..(342): unsure at all n locations; Clone ID: LIB3135-062-Q1-K1-D3
ggtcgacattttcaattagtagtcttacttttaaatcctttttcaaaatccaaactntcgggttgaccgggaccagtaagacggtcccataacacttagaaaattctgatactaacgccagcgtaaaggccaatattctagacatggatggtactcctccatatcagctagaggtgctcttacatagtatgcaacttgatgattgccgcacgttctctgattacaacttgctgaaagaatccacactccacttattgcttcatctccatggatgaatgcatatttttggtaaaactttgactgggaaaaccattacatttgacgtacacagcttagatacca

SEQ ID NO: 13758 - DNA, 299 bp, Gossypium hirsutum
  Clone ID: LIB3135-062-Q1-K1-D4
gcgcccacgcgtccgcgaacccttgggccacgcatgaaaccacaaaggtatcgaggaagttttgggcgaattggggggcgaaatgggatctgaaactggatccaacattcaggtcaatatccactacaacatcaacttcttcataatgattttttccttgttgacttactttcatagacattggaatgttcataagaattatgatatgtattatagtatgatggataagtttaatgtgaagtatgataataagtattttgacgaatatattaacaaacttttaaacatcctttttggca

SEQ ID NO: 13759 - DNA, 201 bp, Gossypium hirsutum
  Clone ID: LIB3135-062-Q1-K1-D5
cacagatacattacacctttgtttttgcaactttacatatgctccggaatactcgactacggaggttattcaaaagtactaaacaaatcatttgtggaacaaatcctagccgcttttcatgcaccttctattatcctttgtatactattcgatccaatcaacactcatatggggctggcattgcatactggagaacatgaa

SEQ ID NO: 13760 - DNA, 287 bp, Gossypium hirsutum
  Clone ID: LIB3135-062-Q1-K1-D6
atcctaccaaagcagttgctaagttggcagctgtggcggcattatgcgtgcagtatgaatgtgagttccgaccaaacatgagcatcggtgtcaaggctctccaaccgctgatgaaagcttcagtgtcagcatcagcgacatcaccggtgacttaaaacaggcagacagatgaatatcatgatattcgccattgattgaaatttcgatgacttatgatagttagggttcggaatcaaaatacagaatttcatcagatcactaaatattaattatatacgtgtttatat

SEQ ID NO: 13761 - DNA, 391 bp, Gossypium hirsutum
  Clone ID: LIB3135-062-Q1-K1-D7
cccacgcgtccgctctcccactggtgtttcttttacctctgccggaacgaagaaaggtgatcttttcttggctgatgttaatacccagctgaagtctaggaatgttacaactgatatcaaagtggacaccagctccaatctatttaccaccataacagttgatgaacctgcacccgggctaaaggcaatctttggcttcagagtccctgatcagaggtctggcaagattgaactccagtatttgcatgagtatgctgggattagctcaagcattggattgactgccaacccgattgttaacttctcgggtgtgcttggaacaaatgttcttgcactatgtaccgatatctcattcgacacgaagactgggaattcaccatatgcaacgcgg

SEQ ID NO: 13762 - DNA, 245 bp, Gossypium hirsutum
  Clone ID: LIB3135-062-Q1-K1-D8
ttaaaatcatgggtgttgtcacttatgactatgaaaatacctccccaatcgggcctgccaggctttttaaggcctttactgttgaagctccgaaagtttggcccacggctgcaccaaatgcagtcaagagcattgaggtcgaagctaatcctagctctggaagtatcgtaaaaatcaactttgttgaacgccttccattccaatatatgaagcaccagatcggaggacatgatgaaaagaatttt

SEQ ID NO: 13763 - DNA, 433 bp, Gossypium hirsutum
  Clone ID: LIB3135-062-Q1-K1-D9
cggacgcgtgggtgcagctcctaatgacaggatcttagaagatggagatatggccttgctggacatgggagctgagtacagtttctatggatctgatattacatgcacattccctgtgaatgggaagtttacaagtgaccagagccttatatataacgctgtccttgatgctcacaatgctgttatagctgcaatgaagcctggtgtgagctgggtggatatgctcaaattagccgagaaaatcattctagagtcgctggaaaagggcaacatccttgttggaaaccttgatgatatgatggttgaacgagtgggtgctgtttttatgcctcatggtcttggccatttattgcgtattgattctcatgatcctggtggttatccaaagggcatagaaagaccaaacgaacctggtttgaagtctttgcgtact

SEQ ID NO: 13764 - DNA, 433 bp, Gossypium hirsutum
  Clone ID: LIB3135-062-Q1-K1-E1
tggagctgtatccttgggacatcctttgggttgcagtggatctcgtatcttggtcacgctggtggagggtttgaagcaaaaaaatgggaaatactgagttggtggtgtttgcaatggtggtggaggtgcatatgcactcgttgtagagcttctgtaagcggttttaaattaggttcgatattgtacgatgttgcgaccatcttctttttcgggggataaattcatgctctgccaaaacacagtttgatgttgtgcaatttttattccgctctcaaataagtcatgtgacgaatggaatgtttaattaggtttgagaagaaatatatgtccaatgtagagtttgattttcctttaaaagctgtctctagcatatggcataaggaaatctttatcattggattctctgaaacttagttacgttgtgattaatttt

SEQ ID NO: 13765 - DNA, 111 bp, Gossypium hirsutum
  Clone ID: LIB3135-062-Q1-K1-E10
aaaaaaaaaaaaaaaaaaaaaaaaaaaaaaattaaaaattaaaaaaaaaaaaaaaaaaaaaaggaaaaagtaaaaaaaaaaaaaaaaaaaaaacaaaaaaaaaaaaaaaaa

SEQ ID NO: 13766 - DNA, 449 bp, Gossypium hirsutum
  unsure (1)..(449): unsure at all n locations; Clone ID: LIB3135-062-Q1-K1-E11
cccacgcgtncgctcaatcatccacttcttctcttctttgaactcaaagtcccagctaatagtagaggcatgggtgttgtcacttatgactatgagaatacctccccagtcgcccctgccaggcttttcaaggcctttactgttgaagctccgaaagtttggcccacggctgcaccaaatgcagtcaagagcattgaggttgaagctaatcctagctctggaagtatagtaaaaatcaactttgttgaaggccttccattccaatatatgaagcaccacatcggaggacatgatgaaagtaatttttcatacagttacgatttaatcgaaggtgggcctttgggggataagcttgaaaaaattagctatgagaacaagtttgaggcaactgcacgtggaggaagtatttgcaagagctcaatgaaattctacactgtttgcgataatgt

SEQ ID NO: 13767 - DNA, 79 bp, Gossypium hirsutum
  Clone ID: LIB3135-062-Q1-K1-E12
aaaaaaaaaaaaaaaaaaaaaaaaaaaaaaaataaaaattaaaaaaaaaaaaaaaaaaaaaagggaaagggataaaaaa

SEQ ID NO: 13768 - DNA, 283 bp, Gossypium hirsutum
  Clone ID: LIB3135-062-Q1-K1-E2
agggaatgttttttagagggaagagaacggatggagagggtctcgcttccgacaagaacggggatcacgcgcctcctaataaagtctccaaaactttttctgaaggcgactctgacgattccgacgatgtcaacgtgttccacatatccaatactagaacagtttcactgcagaaccggaatggcacgatttggctagatattcctgaattctaagagcaatgataggcaacaacttgctgccaagaaaggtcgatctgtaattattgagcactgcaataatg

SEQ ID NO: 13769 - DNA, 395 bp, Gossypium hirsutum
  unsure (1)..(395): unsure at all n locations; Clone ID: LIB3135-062-Q1-K1-E3
cgagagatgttttaaacggttgtattgcaattaatcaggttactaaaggcaaaaccgatgctttcaagggtttacggaaacatcttctcgaagagcttgaacaggcatttcctgatgaagttgaatcctacagggagatacgcgcgagtgctgctgctgaatataagcggctcgcacaatcacaaagtattttacaaaatggagatgtaaaagtcaaaactgagctttagatagttgtatttggtgttcttttttccgccctttttcatctatataggtttctgtatgtacgagatttgctcaatacattctgatgtaacgacatttctggcttgtattaaaaatttgacaatttagtgcgcaaanaaaaaaaaaaaattttaaaatatataaaa

SEQ ID NO: 13770 - DNA, 194 bp, Gossypium hirsutum
  Clone ID: LIB3135-062-Q1-K1-E4
acacgcgcgccgaagcacacagattcattgaaccaatagacagaataacatgtgttatgataactacgggtctatatgactatcagcgcttttatgagtaaacatacgggccttattcacaactgaagaactatcttacgcgcttgttttgcacgaatcaccagccactaatctcagtagaacgaagagcatat

SEQ ID NO: 13771 - DNA, 421 bp, Gossypium hirsutum
  unsure (1)..(421): unsure at all n locations; Clone ID: LIB3135-062-Q1-K1-E5
gaagaggagcttaggttcgccactactcggccggcgagcagcgtgatatcgaggctggaagaggtagccaagtcggtgaagttcaacgtgaagaaaagtgagtcaaaggtgaggttacagggtcaagaatgtggaaggaaaggaaaattagctattgctgctgacatatttgcagtgacgccattgtttttggtcgtggaagttaaaaaagacaacggcgataccttcgaatacaaccagttttgcagtaaacagctctggccggcgcttcatgacatcgtctggacttcaccagccgagaagccgacggttgcttgacgggaagtttcaagattattaattatctacatgaaaattgaaaaagaaaaaaaaatgagaaagagaggatgctatngtgttatcactcttattttattaattt

SEQ ID NO: 13772 - DNA, 309 bp, Gossypium hirsutum
  unsure (1)..(309): unsure at all n locations; Clone ID: LIB3135-062-Q1-K1-E6
cccacgcgtccgttctcgaggtttttcaaggagaggtgccccgatgcttatagttacccagaggatgacccaacaagcttgtttacatgccccacagggactaattacaaggttattttctgcccatgaagagtatttgggatggttttaagtcctttctatacacaaattagtaggtttatatcaataaaatggaataaactcaaatgctatttgagcacatttcttgatgtgcatatgttctgatttgtaataatagtgtttgtcatgaatgaaaatntggagtctctatgggtttcgtttgggttc

SEQ ID NO: 13773 - DNA, 398 bp, Gossypium hirsutum
  Clone ID: LIB3135-062-Q1-K1-E7
ctctcccgcggcttctagtttttggtgctgtttacttcatctcctacccatggcggacgtggatgccgatgtcgccgcaccaggtgtaccgaagaagagaacgttcaagaagttcagtttcagaggtgtcgatctcgatgctctcttggatatgtccactgatgaactcgtcaagctctttcccgcccgtgcacgccgaaagtttcagagaggtttaaagaggaagccaatggctctgataaaaaaattacgcaaggctaaacgtgaggcgccacctggtgagaaacccgagccagttaggacacacctccgcaacatgattatagttcctgaaatgattggtagtattatcggtgtttacaatggaaagaccttccatcaagtggaaatcaagccag

SEQ ID NO: 13774 - DNA, 403 bp, Gossypium hirsutum
  Clone ID: LIB3135-062-Q1-K1-E8
gaccgacgcgtccgcccacgcgtccccaagaacacagattcattttaccaagaatcagaaaaacatgggttctgggaagcaaggggttatatggttatcagggcttttgtttctaaatatccttgccttatccacagctgaagtcctttattacgagttttttttgcaagaatcccagttcactaagctgtgtaccacgaagagcatcttgaccgtcaatggcagctttccagggcctgatattcgctttcggagaggggacacacgctttagcaccaactcccccatataaccccccaagtgctacacctccagctaagccaccaacaactacagcatactcttacgaagccaccaaattcaccatagccaccttgtacgacaaaaaatgattgcatcccat

SEQ ID NO: 13775 - DNA, 388 bp, Gossypium hirsutum
  Clone ID: LIB3135-062-Q1-K1-E9
cttaggtatgcgactgctatcaatgaaaaagatgcagttaggatggcaaaagtagccttacgctgcaggaattcattccccgcacttagaccaaccatgtctgaagttgtaaacacgcttgaaagtcgcaccctggttcctgaattaatcatggacccaagtatattttctgaagagacttgattcggagcaataaaagaccaacttaatctaatgcaatctcagactaataaaaccaccactattactcagtcattgtattctacttcaacagtattgctaggctcttgctcaacacttgctgaacatcaacgaaattcaaagcaaacttgattgatactttgaaaacttgatggacaaatgaatggctctctcaaaatttttattt

SEQ ID NO: 13776 - DNA, 385 bp, Gossypium hirsutum
  Clone ID: LIB3135-062-Q1-K1-F1
cccacgcgtccgcgtctgcacagcaggcatggctaccaagcagccaaatactggcctctttggaggactgaacaagggccatgttgtaacaaagaaggagttggcaccacgcccctctaatcgtaaaggaaaaacgagcaaaagagtccatttcgtgaggaacttgatcagggaagttgctggttttgcaccgtatgagaagaggatcactgagcttttgaaagtcggtaaagacaagcgagctcttaaggtagctaaaagaaagttgggaactcacataagggcaaagaagaagcgtgaagagatgtccagcgttctccgcatgatgagagcccacggtggaggtgcagaaaagaagaaataaaagcttattttctttggtttc

SEQ ID NO: 13777 - DNA, 421 bp, Gossypium hirsutum
  Clone ID: LIB3135-062-Q1-K1-F10
agaaagcaagccattaaggttttgagaaaagatcaaaatggattcaaaaagatcagcttccgcagcccgccttttagccctcaacattctcttcttttccctagtcagtgctaattgtggatcttgttcttcttctggctctaacccaaggccaactcccacccctactccatctgcacgaggtaggtgccctagggatgccctcaaattaggtgtatgtgccaatgtgcttaacttagtcaatgtcaccgttggttcacccccggtgatgccatgttgttcccttctcaacggtcttgtggacctcgaagccgctgcttgcctttgcaccgctatcagagctaacatcttatgcatcaaccttaacatcccagttttccttagcttgcttctcaacgtttgctcaaggaatgttcctact

SEQ ID NO: 13778 - DNA, 346 bp, Gossypium hirsutum
  Clone ID: LIB3135-062-Q1-K1-F11
gtctcagaaatgccgaatcgaactaacatgctttcgactttccagctaaacaaccattacgagctctgagaatacttgcctgctttctttaatatgcttaacgctcgccgttctattgtacctgctgctaatggacactgctcacctcgtgcacttgcacgctactatgcatccttaactgattgcggtgtggtaccaacaccacattcctctgcttcaaatacaccgcttggcagccatcctcatatccccaaatttccttcgaaaataacccattaaaagcaaaacggcatggttgatggtggtgttaaaaatgaaagaagtgatggtaggcaaaacatttaca

SEQ ID NO: 13779 - DNA, 449 bp, Gossypium hirsutum
  Clone ID: LIB3135-062-Q1-K1-F12
caaaaactgcgcctcctccttaaccagcagataccatggccccaaagaaagacaaagctcgtcctccgtcctctaagcccgcaaaatctggaggtggcaaacaaaagaagaagaagtggagcaagggaaagcaaaaggagaaggtgaacaacatggtgctatttgatcaagctacctatgacaagcttctctctgaagctcctaaatacaagctcatcaccccctctattctttctgatcgtatgaggatcaatggatcacttgcaaggaaggctataagggaattgatggcaagggggtcgattagattggtgtctgctcattctaaccagcagatttacactagggctaccaacacttaggaatcatttttcccttaatttaagtattatttagaattatatttgctgagtttatcatcattgaatgctttctttttgttatttatt

SEQ ID NO: 13780 - DNA, 247 bp, Gossypium hirsutum
  Clone ID: LIB3135-062-Q1-K1-F2
catataaacctccaactagtgaaccaggaaccaacgcttctactacaccatatatgatcggagctacagcaccaccgaccaatagctgccctgcataatgtaataccccagaataacaaccaataatcgatgatgctaatccagcatataaaacagctgataagaaaatcaacgacgctggcaaggctgctactctcacaatatttacttacaacatctgcaactgaagcatcaggattagaatgac

SEQ ID NO: 13781 - DNA, 289 bp, Gossypium hirsutum
  Clone ID: LIB3135-062-Q1-K1-F3
gtcactcatccgcaaggaggttataggggcattcgcacctgtcttgatggatgaaaggaaggatacgttgaggaaggtggtactggaacagttgacaacttctacttgctacaacttgcttttgatgatttactatgcggtgcggtgttgtgggatgaccctgggtgcgtgttaaaactatgatcaagcgtgagtatcacgaagtacagatgactgcatggtcggtctagcctagtgtgggatggataaatcaccgatacatgccgttgcaattacaagtcatttttag

SEQ ID NO: 13782 - DNA, 278 bp, Gossypium hirsutum
  Clone ID: LIB3135-062-Q1-K1-F4
gaaagaataataaaatgggtggttttctttcaaaaaaattaaaaaaaaaaaaaaaaaaaaggggaaaagagaaaataaaaaaaaaaaaaaaaaaaaaaaaaaaaaaaaaaaaaaaaaaaaaaaaacaaaaaaaaaaaaaaaaaacaatactttaatccggggcggccgttttaaagaaccaaactttacgaacccgggaatgaaacgtttaattttttttttaaggtcacttaaattaaattaattgcccggtttttaaaaaactctatattgaaaaa

SEQ ID NO: 13783 - DNA, 413 bp, Gossypium hirsutum
  Clone ID: LIB3135-062-Q1-K1-F5
cccacgcgtccgtggacataagaaagcttgtaaaggataatcttattataaaaaagcctaacataagtcgatcgggatggaggtacaggaaaggtaaggatgttgggaatcctaggagaaaaggatatgggaagagaaagggaacaaaggaagcaacgctaccatccaagctttcgtggatgagaagagctcgagtcctaaggcgactccttcgaaagtacagggaaatgaagaagattgataagcacctgtaccatgaattttatatgaaagccaagggaagcgtttttaagcataaacgtgcacttcttgaggcccttcataataaggctaagagtgagaaggatcagaaggttcattttgatcaggttatagctattaaagccatgggtaaattaggtagcaaggagacc

SEQ ID NO: 13784 - DNA, 344 bp, Gossypium hirsutum
  Clone ID: LIB3135-062-Q1-K1-F6
acggtcctactagtcgtgaaggcaaaagccaacatggacgctgcgccgatgatcgacgtgaccgagttcgggtactttaaggtccttggaaagggtgttttgcccgaggaccaaccgatcgtggttaaggctaagttggtgtccaagacagctgaaaagaagattaaggaagctggtggtgctgttgtgctcaccgcctatgttagcttttctgtttttgtggtttttggatttgaatgacatttctgttatattattatcttatgttgtttggagttgatcttgaaatgagattttcaatttattttggtcaattatatatcaaagttgcgacgatttgggtt

SEQ ID NO: 13785 - DNA, 282 bp, Gossypium hirsutum
  Clone ID: LIB3135-062-Q1-K1-F8
cccacgcgtccgcccacgcgtccgcttgttatgttctttttctatagtgttggagcgaactgatgatataatatgtttactagatatgcgttgtaactcatgttgtgaagatttcaaaaatttaattagatcagatgaaatgggccacaaaagcatgcctctcgtgatgttaaaacaatgaaaaaaaacaacaaaaaaaacattggaaaaaggatttaaaaaagaaacgaatggctggggtaaaatagggacacatggctgatcgctaggcacccccaggtt

SEQ ID NO: 13786 - DNA, 264 bp, Gossypium hirsutum
  unsure (1)..(264): unsure at all n locations; Clone ID: LIB3135-062-Q1-K1-F9
caatcanccactacttctctttttttaactcaaatacccaactaatagtataagtttaatttttatcacttattaccataaaaatacctccccanttctcccttccaatctcttcaatacctttactttttaatctcctaaattttttcccacttttttctccaatatcaatcaatatcattaatctttaatcttatcctatctcttaaattataattaaaatcaacttttttttaaatccctaccattccaatatattaatca

SEQ ID NO: 13787 - DNA, 366 bp, Gossypium hirsutum
  unsure (1)..(366): unsure at all n locations; Clone ID: LIB3135-062-Q1-K1-G1
cccacgcgtccgcaaatgttgtagcttattggccgagcgtttggttccgatacattgctggggggaacgaagtccctccttcatcttggttagctcaattcgttttgcccgccttagtgaatgtattcaacgcgggtcgatcaatcggtttggagagtcaaatcaaggtctcaatcgccattgatatgaccttgatcggtgtctcgtatcctacatcggctggtgcgtttcgtggggacgttaggtcatatttggaccctatcatangccacttaacatgggctaaaacaaccttgcttgccaacatttacacttacttgagctattcaagcaatccaagggatatctcacttccatatgctcttt

SEQ ID NO: 13788 - DNA, 416 bp, Gossypium hirsutum
  Clone ID: LIB3135-062-Q1-K1-G10
atttgtacagacatacttttgctgtgcttacatccaaagtttagagtgaatcagcccagagggctcgggatggtccctttgcaatgacttagtggatactgaagcgatcgttcgatgacaacccagaggtgggcttggtagccaacattctttgaaaaaagcgtaatacctgactggtctagctgcttgtcacctacaatgtatcaggcctcacgtgcttcaccgaaccgaccttaccttaagagctgctctttgctgtgtgaataaatgccttgtatggatgcccaatcattgagaaagaaggactctctcatatgcttaccgtcttggggagataacggctgagatccatggatctgctgacgatgaacctgctacaaacttcgtggctaggcttcgctcttttgacttttaaa

SEQ ID NO: 13789 - DNA, 349 bp, Gossypium hirsutum
  Clone ID: LIB3135-062-Q1-K1-G11
cccacgcgtccgcccacgcgtccgttcacctctcaagttatcatcatgaaccaccctggccgagattgggaatggttatgccccagtcctcgactgccacacctctcacattgctgtcaaattttccgaactgttgaccaagattgacagacgatctggcaaggaactcgagaaggaacccaagttcttgaagaacggtgatgcacgtatggtaaagatgattcccaccaaacccatggttgttgagactttctctgaatacccaccacttggacgttttgctgtccgtgacatgcgccagactgttgccgtcggtgtcatcaagagtgttgagaagaaggacccaact

SEQ ID NO: 13790 - DNA, 426 bp, Gossypium hirsutum
  Clone ID: LIB3135-062-Q1-K1-G12
ctgaagctgaaaagcgaccttatgttgataaggcagagaaacgaaaggtcgagtatgaaaagaacatggaagcctacaataagagacaggctgagggtccccaagaagatgaggaggaatctgagaagtctgtatctgaggtgaatgatgaagaagaagatgatgatgaaggcagtggagacgaggaagatgatgagtaggaaaaatcctgggaggatagcataatcaaagtaggctgtgatagtgtttgatcatcttatgttaatgctttttaaatgcaaatttcatttaagcaaaaatgtaactctggatggtgttggtttcttttgacgcttggaaattaatagttgtagatgggtcaaacaaaaaaaaacccaacaaaaattttaaatatcttttctctttttttattttaaaaaataaaaa

SEQ ID NO: 13791 - DNA, 408 bp, Gossypium hirsutum
  Clone ID: LIB3135-062-Q1-K1-G2
cccacgcgtccgcaagaatcccagttcactaagctgtgtagcacgaagagcatcttgaccggcaatggcggctttccagggcctgagattcgggttcgcagaggggacacagtttttgtcaacgtccacaatcaaggaaaccatgctgtatccctcaagtgggagggcgttaagggttcaattgatggttcgaatgagttgattcagccagggagaaacttcacttacaagatagagttaaagggtgaaataggaactctatggtggcacgccaccagtgcttgggctgcggcaaccgtccacggtgcctttgtcatttcgccggcagcgaatgaagactatccttttcccgcacctacttctgaccaaacaattatactttgggcatggttcaagcaagagttaaca

SEQ ID NO: 13792 - DNA, 346 bp, Gossypium hirsutum
  Clone ID: LIB3135-062-Q1-K1-G3
aattgtcgttgatggcaaagatttatgggtagcgaacattggtgactctagagctgttgtgtgtgataggggctctgccaatcaaattacagtggaccatgagccgcatgctgaacgaagaaggatagagaagcagggtggctttgtgactactcttcctggagatgtgcctagggtgaatggtcaacttgcagtagcacgggcctttggggatcagagccttaaagctcatttaagctcagaacctgatgtcagacatgtccccatagactccactattgactttgtaatactggctagtgatggtttgtggaaggtaatgaagaatgaagaggcagttaatttg

SEQ ID NO: 13793 - DNA, 419 bp, Gossypium hirsutum
  Clone ID: LIB3135-062-Q1-K1-G4
gtacgcacaaggaatagcgcaagcatgttgcataaagcacttgttgagtttggttatgatggtaccacaattcaaggtgctctcaatcaagctgaacgagacaagatagtcaaggaatttaaagatggtttgactcaagtgctcatttcaacggacctccttgcccggggttttgaccaacaacaggttaatttggtcatcaactatgatctttctgtgaaacacgacaaccgtgtggagcctgattgtgaggtttacttgcatagaattggcagagcaggacgttttggtcgcaagggagccgtgttcaacttactctgtggtgatatggaccaaatgataatatccaaaatcgaaaatcattttgacagcaaaatagcagaggttcctgactggaagaatgaggaagactttaaaac

SEQ ID NO: 13794 - DNA, 357 bp, Gossypium hirsutum
  Clone ID: LIB3135-062-Q1-K1-G5
cccacgcgtccggctcttcttccttttctgcgtctcatcatcaaaccccaaactcttaactggcctcttcctcctcctctttactttaatttcatttgctttcacaaatctaagaccagagctccaaaagattgaatttttaacccctcaaattaaaatcttcctttttcgccttttgggttgaaaatttatataagcaagagggtgatttagaaacaatggatgctgattcatggagtgctcgtctttcttcagcttctaagagatatcaatcggctcttcaattacgatctgatatgtttatgggggttggagaaatttgttggagaaaatgaataagagaagagcttcgatgcc

SEQ ID NO: 13795 - DNA, 267 bp, Gossypium hirsutum
  unsure (1)..(267): unsure at all n locations; Clone ID: LIB3135-062-Q1-K1-G6
cccacgcgtccggcaaagtgaaaatttactacacgctctaacacgatctgtagattaatcgggcatggggactacacaaaagctgtcactttccatgaacgcaatatgccataaatgtaaagcgaacagaataaagagtgcaaccctctatacatgctatgggtggcagggcacaggaatgtaaattactacactgccgagaggactgnccatgatacaacagatgcaccaagatagttctgaatgcaaatgctcacgttatatgat

SEQ ID NO: 13796 - DNA, 250 bp, Gossypium hirsutum
  unsure (1)..(250): unsure at all n locations; Clone ID: LIB3135-062-Q1-K1-G7
cccacgcgtncggattggccatattgccgtgttcattgaattgcctttaaacgaggtataggggaaactttctcagatgattctgtataataactttgcagggactatgcatcaaggtgcagggacgccttgttatatttgataaccctatagatgatgtcatctattttgcacctttatataccatatccaacatgcccagggtgggcgatagcctctatgtatgatctgttatgataatgacatcaga

SEQ ID NO: 13797 - DNA, 242 bp, Gossypium hirsutum
  Clone ID: LIB3135-062-Q1-K1-G9
ataggccaacaaataagcatttgcttttatggtcctctgtttagatttcctaccttaatgtaggacaggatggctgtttcatcctttcatattttctagaaaatgtaacatttttccttgtcgttaagagtcaatacttttatcgtacccggtgtcagtagaatccttgttttattcggcgcagctcccttcatatacaagctcgcaatatacatatactcagtaacgaggatttcagtttc

SEQ ID NO: 13798 - DNA, 273 bp, Gossypium hirsutum
  Clone ID: LIB3135-062-Q1-K1-H1
gattggtccttacaaatgtcgtcatgaactgtgttgaagctgcacatcctgaacttgtgaaggttgaaccggctgatattggattcttggctgatacctgaatatggaaccgggatgtcaaaccgcgcataccagattgactagttgcatactgcgggtacggctgaaaatggctgtgacgactaaatcagcaagaaagttacatgaatgataagcagattcccttacactctaaccattttattttagctatgagaaagatatagcgttcac

SEQ ID NO: 13799 - DNA, 367 bp, Gossypium hirsutum
  Clone ID: LIB3135-062-Q1-K1-H10
gaattatatatgagagtaggtcggtgtttttatgtgtggaggccttccattccgatttatctttaattgaattaggcgtgctatatcattgccacctggcaactcatgctatcttccttgtaggataggataatgtaaataatttgtaaagaaaagaaatgggtatcaaagataataaataatacagtctcaactttaatcatttatatcagactgcgacaattcccgttatctgaggcaaagggaattgaaattaataagatgataagttggcaagatttgacccactaaaaaaaaaaaaacttgtttgttgggggaccgatagtaacttttttctcaatggacggatcaaaggactaagaccaaa

SEQ ID NO: 13800 - DNA, 455 bp, Gossypium hirsutum
  Clone ID: LIB3135-062-Q1-K1-H11
ccacgccgtccgctgtgattttatgagacacatggacctaccaacctcttcttatcatttgacaacctcttaccttcaaggaggctctgtgagctggagcagaacagatgtgcctcgttacacctttgccacactgacaatagttctctctttccgacacctgtttatccgtacattgtgccgacaaaatatgacgtgctgattgaggatgactttcctttgcttgattacacctgaatgctcacactcattatagagactggtcgcgaagtacagagccacataaaaataaaagggatcagtctcttggtctagttaaatctgcgcccttggaactcaaaaataaaaaagtcatttggtcttccaaatgatatcaaacacgtggttctacttggtttattttacatatgttttgtttaataatattgtgcagtttcaacagcacaagacgtcac

SEQ ID NO: 13801 - DNA, 453 bp, Gossypium hirsutum
  Clone ID: LIB3135-062-Q1-K1-H12
gaccacgcgtccgggagtgtgaaggcaatcagaagaaagaccactggaaccggtaggatgaggtatctgcgccgggtcccgcgcaggttcaagactggtttcagagaaggtactgaagcagcaccgaggaagaaggttgcagcagcttctgcttgaggtattacaaggttgttttggatgaagccttctttttttaggaaaacttttacgagaacatttttcttgaggggtgtcattacattgaatgctttagctgtttttagtttatgattatggagttgcattaaattttgaacaaggatgaatgctttagtttttctctagtttatttttgaggagttgcttcaaattttgaacgaggatggacaaggctattgttggttgacacttagttacttgatacatttttttgggatgaaggtaatgtatgttcttgtttttggtaaaaatgat

SEQ ID NO: 13802 - DNA, 240 bp, Gossypium hirsutum
  unsure (1)..(240): unsure at all n locations; Clone ID: LIB3135-062-Q1-K1-H2
ngggaaggtaagaatgttgttaccacaggtcgcaagattatcggagccacaaacccagcgaaatccgggccgggaacaatccgtggtgactttgcaattgacattgggaggaatgtgatccatgggagtgattccgtcaagagtgcaaggaaggaaatcgccctttggttccctgaatgccctgttaactggcagagcagccttcacctttggatctacgagtagaaatcatttggtaaa

SEQ ID NO: 13803 - DNA, 421 bp, Gossypium hirsutum
  Clone ID: LIB3135-062-Q1-K1-H3
tgccttcattgagcttcttgactgtggcacttctaactaccctggatcttcaagagactgcggtcttctggctgcgtgtgaagcacatgagactcttcctcaaagtgctgaatttccttcctgtgtttacttcttgtcttactacacctatcaaaatgacattgagatggtgcatactttggctttctgttccggtgttttggattctctggccgttggattgaaagcatcaaaagaattctctaagttatatgcacgcattgcagtactttggcttcacataagcttgaaccagccctctgttgtatattggttcttcttctttttttttttttatctttttcctttgattaatgagaggtgatgaagaattggcattattttctcacgaagataaatttgggtttagaaaattgaatac

SEQ ID NO: 13804 - DNA, 442 bp, Gossypium hirsutum
  unsure (1)..(442): unsure at all n locations; Clone ID: LIB3135-062-Q1-K1-H4
gctgtcaaggatccaaacaagccaaagaggcctgctagtgccttcttcgttttcatggaggggttccgggagcaatacaagaaggatcaccctaaaaacaaatccgttgccgctgtccgcaaagctggtggagataaatggaagagcttgtctgaagctgaaaaaacaccttatgtacccaaggcagaaaagcgaaaggtcgagtatgaaaagaacatgaaggcctacaataagagacaggctgagggtcctaaagacgaagatgttgagtctgacaaatcagtgtctgaggtgaatgatgaggatgatgatgaagaatgcagcggagacgaagaagatgatgagtaggaaggtccgtggtggatagcataatcaatgtangctgtgatagtgtttgatcaaaaccatatggtaatgctttcgatgtttncatgttattctt

SEQ ID NO: 13805 - DNA, 400 bp, Gossypium hirsutum
  Clone ID: LIB3135-062-Q1-K1-H5
aaagaaagaaaagcatgaacacatgccaccggtgtatgaaccaccaaagaaaggagaacctgggcctaaaccaccagtttatgcacctccaaagaaagaaaaaccagaacccaaaccaccagtttataagcctccaaagaagccaccagtgtatgagcctaagccaccaaagccaccggtttatgcaccaccaaagaaagagaagccagaacctaaaccaccagtatatgagtctcccaagaagccaccatatggtcactatccaggacaccctccattggagaagcctcaatagagagatttcctcggctaacccattccgacaactgagctactatggctacatagataaattattatcactgcaataagagctgcttgccgctcatgttctgttttc

SEQ ID NO: 13806 - DNA, 451 bp, Gossypium hirsutum
  Clone ID: LIB3135-062-Q1-K1-H6
cggaagacccacgcctaccgcgactcgtaacgatccaaacaagccaaatacgcctgctacttcctttttctctttcatggagcgcttccgtgggcaatacatgactgatcaccctacaaacaaatcccatgcccctgtccgcaaatctcctttatataaattgaagaactcgactgaagctgaaaattcaccttatgaagccaacgcagtattgcccaccgtcgaatatgaaaagaacatgaacgcctacaatatgagacaggctgagggtcctaaaaactaagatgtttagtctaacaaatcagtgtctgaagtgaatgatgaggatgatgatgataaaagcatcccgcgaccaacaagatgattagtttcaaatgccgtggtggataacataaacaatgaacgctgtgatagtgattgatcaaaaccatatatttatgctttcgatgtt

SEQ ID NO: 13807 - DNA, 426 bp, Gossypium hirsutum
  Clone ID: LIB3135-062-Q1-K1-H7
ccgcaaagaccttgtcggacgagctgttggctttggacaaccagatgaaatacttccaaatgccaccatttattgaaggaaactgggacgccactattgatgccttcctcaatggagatgcaacacaggatggtggaaacccgatggatctttggaactttgatgatttccctgccatggcggagggtgttttctgaacgaactttccataataactagtgtttgtaaataaagcaacatgaatttggtcaaaatctgttgtgaagttgaagtaaaaaccaagctatgcatgcataagccttgcctgcactgctttcagaggttcttagtatgtaccctttttttatgtgttttttttggggactttggactaaattttaaatttgagtgacttgaaaagtgattgtgtctgaatttgttatgttt

SEQ ID NO: 13808 - DNA, 431 bp, Gossypium hirsutum
  Clone ID: LIB3135-062-Q1-K1-H8
gccagaacaagcttgattatgtcttggctttgactgttgaaaacttccttgagcgtcgggggcaaactctcgtgttcaagactggtatggccaagtcaattcaccatgcacgtgtgttgatcaggcaacgacacataagggtcgggaggcaggttgtgaacatcccgtccttcatggtgagggtcgactcccaaaagcatattgatttctctcttactagtccgtttggaggtggccgccctggaagagtgaagagaaagaaccagagagcagctgccaagaaggctgctggtggagatggtgatgaagatgatgaagagtaaaccttatgctactatcaaccaccactaggaaccctttaaaagcctttgtttggaacttacaatatcctccattggtagacatggttttgagttttgtttccagaactt

SEQ ID NO: 13809 - DNA, 437 bp, Gossypium hirsutum
  Clone ID: LIB3135-062-Q1-K1-H9
cccacgcgtccgcaaaatcggccgtcgtttacgtttccttcgggagtatcgcggcgttgaagaagcaacaagtggaggaaatcgctcgagctttaatatccagccggcgaccgtttttatgggtgatgaggaaccggaaagatagaggcgaagaagagaaagaagaagataagttaacttgcagggaagaattggaacaatttggaatggtggttccatggtgttcgcaagtagaagtgttgtctcatccgtcgttgggttgcttcgtgacgcattgtgggtggaactcgacgttagagagcttggttgccggtgtaccgatggtagcttttcctcagtggacggatcaagggactagtgcgaagctgattgaagatgtgtggggcactggggtgagagtgagcactaatgaagaagggatggtggaacgtgatgag

SEQ ID NO: 13810 - DNA, 829 bp, Gossypium hirsutum
  Clone ID: LIB3135-055-C6_FLI
attacgtttcataaagaaataatcatctttttttaacttatttatctttactactaaggttttttttttttttaattttatttgggtcctgctattatatattataaacaaaactcctataatggctacatcctcgggttcatcagcaacacaaatcaactcaggctcagaagaagcattaatggacgaaaggaaaaggaaacgaatgatatcgaacagggaatcagcaaggagatcaaggatgaggaaacaaaagcatttagatgatctaatgactcagttgactcagttgcagaaacaaaaccatgagatcatcacaaacataaacttcaccacacaacacctcttgaatgttgagtcagagaactcggtgcttagagctcaactcaatgaactcactcataggttacagtccttgaatgaaatcatcagcttcttgaatgatgatcatggcgatgacgacgacgatgatgataaaacaagcattgacttcactcagcctgctgtagctgatactgccttccttaatcctttccatttggctttcttgaatcaacctatcatggcctctgctgataacacgtttcagtattaattttctataatgccataattttaatgggatttttaatctcagtttatatatatatatatatatatagttgtacaagcagtagtatgaaataaaatatgtgaaaatcataaagctatggtatggttaatggtagatttttttcagctttgtggtgtttccaaaggttgttgataacagttgtttttgaccgatgaataatatgaaagaacatataatgctcaatttccgaacttg

SEQ ID NO: 13811 - DNA, 516 bp, Gossypium hirsutum
  unsure (1)..(516): unsure at all n locations; Clone ID: LIB3135-014-F2_FLI
ggaaacaagaaagcattgttttttattttactcaataatattaattagtatggcagtatgatacgtcatagtcaaccacactctgcattagcatgcacgcttacaacttataatatttttaagcatgcncattttgcaactaaaatccccctccaattcctccaccataaccgcctctccttccccctccaccatatccaccggatccaccgccataaccgccaccaccgccgccgccgcgtccggatctagatgatccacgaacagggttgccgttggggccagtgacctcaacagccttggggcgaccttcagaagactcgacaacgtactcgacctcttcaccatcagcaaggctacggaaaccctcggaacggatggaagactggtgaacaaacaaatcgtcgccgccgtcgtcaggggatatgaagccataacccttttggtcatcgaaccacttcaccttgccggtcatcctattctcacccatctttaaaatcccaacccacgcgtccg

SEQ ID NO: 13812 - DNA, 387 bp, Gossypium hirsutum
  unsure (1)..(387): unsure at all n locations; Clone ID: LIB3145-001-P1-K1-A1
aacaccttttaaatttcagtctttctttttgtttaatctctgcgtcgtgtagaacattacagggacggatatggcttttatagccatttcaatacaatatttctatgtttttttgctactgctctctgtgttgtctactgctatttctgcattttttactcttttttgccttcttttgtaggttttgacgagagcgatgggacgaggccagaggttgctgtgctgaggccacttttgttggtttnaaaaaaaaaaaaataaaaaataattttaataaaaataataatatattaatattatttctttatttcggtcgtttttttttttatatacttttatttctctttttattttttttattttattattttatatttttttgggggg

SEQ ID NO: 13813 - DNA, 291 bp, Gossypium hirsutum
  Clone ID: LIB3145-001-P1-K1-A10
cccacgcgtccggttttaattagcagtgtgcttctgttaataagtttagtcggctggtggggaaattctgttaattatagctctggaattagagagtgcctgcaggtgtggagcttagtagtttaaaataagctgaaaaagcttgtactaagaattcctcagttatatatggtgcctggtcgccagtggctgtgctttaaatgagatgttttggctgtcggaagtgaccaaattatatttgatatgaaaataaatattttttaattttaatatattttcatctctatattt

SEQ ID NO: 13814 - DNA, 440 bp, Gossypium hirsutum
  unsure (1)..(440): unsure at all n locations; Clone ID: LIB3145-001-P1-K1-B11
gcctttcagcttatctgaatgctttcacagttgcaccgaatttccttttagagctgatacagaatagcccaacgtcacttgttctcattctggatttaccacctcgaaaggacccagtcttatatcccgaataccttcaaactttttatgagaacacccggcttgaatcacttaggcaagcgcttgagaaactcccagaagttcaaccctactactcctcagcactttacattcgatgtctcacctctcccacatcgatcatgatccgaatcaacacagaggggactgagggagacggaccaggacgcatggaggagattataaaggatcacatagatcccgtggtgaaagaagcattggngatatggttggatcaatgtgcttgtggaaacagaaatgtggatgaagcggaaaaggcatatttggagaagagggatgga

SEQ ID NO: 13815 - DNA, 138 bp, Gossypium hirsutum
  Clone ID: LIB3145-001-P1-K1-B5
accacgcgtacgcccacacttccggatgctgtaaattatcgggcttcttcttttgggaatggctacgacagtatttttgaagctaaaggaattgcttgtaatatagtgcatgccgttgcctacaacaaatgctatcat

SEQ ID NO: 13816 - DNA, 409 bp, Gossypium hirsutum
  Clone ID: LIB3145-001-P1-K1-B6
cagcaactaagggttgaagctcaagataaagttttttttatcaacgcgtttagcgaaagacgcgggggaggtctgcttgtattcttattggaagcctttgaagagctgggtcttgatgtcttccaagctagggttttctgttctgaaggttttctttttgaagctgttggagttaattatgaccaacgttcattagagtgcttaaatgaaccctactactcctcagcactttacatttgatgtcttacctctttcacattcatcatgattcgaatcaacacatatgggactgtcggagactgaccaggactcttgttggagattataaaggatcacatagatcccgtggtgaaagaagcattggggatatggttggatcaatgtgcttgtggaaacagaaatgtggatg

SEQ ID NO: 13817 - DNA, 176 bp, Gossypium hirsutum
  Clone ID: LIB3145-001-P1-K1-B8
atcatcttcctcctaccatcgtccctcttctctctttctctcgtctctgcaaatcagcttgggtttgccttctcttctcatctcaggtctcacccaccgccgtgtccgctggtttttgccgcatctgacctgtatcccgcgtcggatcgtatcgacacgggtactgcaccccaaat

SEQ ID NO: 13818 - DNA, 450 bp, Gossypium hirsutum
  unsure (1)..(450): unsure at all n locations; Clone ID: LIB3145-001-P1-K1-C8
gggttgagccatcaagttccgtattatgattatgcacttgatttgattttggacattgaatcttctcatggcgatatgttcaccgaagaacaaaatgaattggttgaatcagctgctgagatgttgtatggtcttatacatgtccgttacatattaactagcaagggaatgtctgctatgttggagaagtacaaaaactatgactttggaagatgcccgagagtttgctgctgtggacaaccttgtcttccagttggtcaatcagatattcctcgctcgagtactgtgaaaatctactgcccaaaatgtgaagatatatattaccctcgatccaagtatcaaggcaatatcgacggagcatatttcggtacaacatttccacatctatntctgatgacatatgggcacttaaagcctcaaaagccaactcaaaactacatcccacgagtt

SEQ ID NO: 13819 - DNA, 442 bp, Gossypium hirsutum
  Clone ID: LIB3145-001-P1-K1-D1
ttctgcttgaaattttgcaccatcagggactcgtccgaccagttaatcccttctgtttcggttattcgcttctgttgctaaaatatgtgctaagctatttgtagatctagggatatgctcaaacttgcattctttaaaataaaacgaaagctgatggatgtcatggataaacgcactcaccactgatttatctgggctttttgctttgcacttttttattattgatagagaatctccttcgataataactctttcccactgtttgtgaacgccgatttggagagctttccggcacgccattgcttccgctccaaaagctgaggagaccctttgatgaacctccgaaaaagataagagaactaaaccctctttgtctctggctacaactccaatagccgctttattctgtcctttttcatatgctgcatcaaagttaattttg

SEQ ID NO: 13820 - DNA, 432 bp, Gossypium hirsutum
  Clone ID: LIB3145-001-P1-K1-D3
gcaacacttgcagccaatgtaaaagcagtgttcacttgcctacttgaccaagtcagccaagatattactgatggactggaacgggctagagatagcttgactgaggctgcagccatgagggaaaggtttgtgctaggtacaaatcttagtagaagggtggctgctgcagctgcttctgcggcagaagctgcagcagctgctggtgagagcagtttcagatctttcatggttgctgtacagcgttgtggcagtagcgtggccatagttcagcaatactttgcaaattctatatctcggctcttattgcctgttgatggtgctcatgctgcttcttgtgaagaaatggctgcagcaatgtctagtgcagagggtgctgcttataaagggctttagcaatgcattgaaactgtgatggctgaggttgaacgatta

SEQ ID NO: 13821 - DNA, 203 bp, Gossypium hirsutum
  Clone ID: LIB3145-001-P1-K1-D4
cccacgcgtccgcaatcgggaatggtctaatagatcctgaaatccagtatcaagcggaccgagattatgctttgaacacaagtataattacacaatctgattatgtcgatatcaaaaagttggtcccttcatgcgtgcaagcaatcaaaagatgtggctctaaaggtggagatgcttgtgtggatttttttgatacttgtaac

SEQ ID NO: 13822 - DNA, 205 bp, Gossypium hirsutum
  Clone ID: LIB3145-001-P1-K1-D5
caatgctttagcgatgcttaatgggttatctatcatcgcgaaggaacttaacattgcgaacgtgggcaacattgacaccacggaggtcaatcgtaagcttttgtcggctgaggatatgcctgagtggattagtcaagctgaccgaaaactcctttaagcataaccaatggatttgaagcctaacgttttggtttcttaagattgt

SEQ ID NO: 13823 - DNA, 399 bp, Gossypium hirsutum
  Clone ID: LIB3145-001-P1-K1-F1
ggaacggtctaaagcatatggtttcacatcggatggtgatttgattcatgttttgctgttgggtgatagtatgaacttcaagtgcagggttaggtccaagaaaaagttggaaatgaatgagcctcttgcttttctggctattaagggatatttgcttatcgttgatctggaaaagatttttgtgtataatgtttctacgctgcattatgttagggctggtgcgccaaggtttcttttctctgccggcttggatgagatcaggtcttcgtttttaactcaccaagtggtggatacaaataaagagagaagacacgtgacacccttaatagcgagtgaccgtgaaaagctcactgttcttggccttggaggtgattacattggaatgtatcgctctaacct

SEQ ID NO: 13824 - DNA, 374 bp, Gossypium hirsutum
  Clone ID: LIB3145-001-P1-K1-F10
gctagcttcttgatgcaggcatacactttaaccaaacgctcattcatcaacatgtccagagactttggctattattggctgagactactaatatatgttgtagtcactgtctgtattggaaccatttatctcaatattggaaccagctacaactcaattctggcaaggggttcatgtgcatcttttgttttcggttttgtcacattcatgtcaattggtgggttcccttcttttgtagaggacatgaaggtttttcaaagggaaaggttaaatgggcactatggtgtcaccgcatttgttattgggaatacaatctcagctatgccattcctcattatgatcactttcaattttggaacttattgtttctttat

SEQ ID NO: 13825 - DNA, 218 bp, Gossypium hirsutum
  Clone ID: LIB3145-001-P1-K1-F2
aaaataaggaaaaaaaaataaaaaaataaaaatagaaataaaaaataaaaaaaaaaaaaaaataaaaaaaaaaaaaaaaaaaaaaaaaaaaaaaaaaaaaaaaaaaaaaaaaaaaaaaaaaaaaaataaaaaaaaaaaaaaaaaaaaaaaataaaaaaaaaaaaaaaaaaaaaaaaaaaaataaaataaaaaaaaaaaaaaaaaaaaaaaaaaaaaaa

SEQ ID NO: 13826 - DNA, 450 bp, Gossypium hirsutum
  Clone ID: LIB3145-001-P1-K1-F3
aaccgccaaaactattgcttcacctggtcgtggaatactggcaattgatgaatcgaatgcagcatgtgggaagagattatcttctattggcttagacaatactgaacccaaccgccaggcttacagacagcttctgctcacaactcctggcctcggagaatatatttccggtgccattcttttcgaggaaacactttaccagtcaactacagatgggaagaagtttgttgatgtcttgcacgaccagaaaatcgtacctggcatcaaagtagataagggtttggttcctctacctggatcaaacaatgaatcttggtgccaaggcttggatggattgtcatcaagatctgccgagtactacaaacaaggtgctcggtttgccaagtggagaacagtagttagcattccttgtggtccttctgctctggctgttaaggaagctgcatgggg

SEQ ID NO: 13827 - DNA, 177 bp, Gossypium hirsutum
  Clone ID: LIB3145-001-P1-K1-F8
aaaaaaaaaaaaaaaaaaaaaaaaaaaaaaaaaaaaaaaaataaaaaaaaaaaaaaaaaatgaaagtaaaaaataaaaaaagggaaaaaaaaaaaaaaaaaaaaaaaaaaaaaaaagaaaaaaaaaaaataaaaaaaaaaaaaaaaaaaaaaaaaaaaaaaaaaaaaaaaaaaaaaa

SEQ ID NO: 13828 - DNA, 268 bp, Gossypium hirsutum
  Clone ID: LIB3145-001-P1-K1-G1
gtccaaaataattgaatagtcgactcgtttttatcttaaattcgtacgagttatcttagctgctgaaggctcggggatagtcgaggattgtcaccatactatcgaattcattttggtacttttgaaagtgtaaatatttttaagtatagcatgtataggatagaatgtctatgtatttaagttttgatatgtatatatgttatgccatgagagttggctagcaaatggtatgtttgtgcttagttttggtaaatggtttgtgatgctt

SEQ ID NO: 13829 - DNA, 415 bp, Gossypium hirsutum
  Clone ID: LIB3145-001-P1-K1-G10
cccacgcgtccgcaacaccgtgtctttaagtcccccggtgggaaattagtctatgagacggctaagaagagagcgagtgggcctaagtgtcctgttactggaaagcgaattcagggtattcctcacttgagacctgctgaatacaagccgtctcgattgcctaagaaccgtaggacggtgaatcgtgcctatggtggtgttttgtctgggagtgctgttagagaaaggataattcgggccttcttagtcgaagagcaaaagattgtgaagaaggttctgaaaattcagaagactaaggaaaagcaatcatcaaagagctaggaatttttaaatgctgatgaagcttgattgtgtttggcttgttagatttatctgaaagaaaatttttgtttggtattattggggaattgatgaa

SEQ ID NO: 13830 - DNA, 227 bp, Gossypium hirsutum
  unsure (1)..(227): unsure at all n locations; Clone ID: LIB3145-001-P1-K1-G4
nccacgcgtncgcaacaccgtgttgttaagttcctcggngggaaattagtctatcagactgctaagaagagagcgagtgggcctaagtgtcctgttactggaaagcgaattcagggtattcctcacttgagacctgctgaatacaagcggtctcgattgcctaggaaccgtaggaccgtgaattcgtgcctatggtggggttttgtctgggagtgcttgtagagaaa

SEQ ID NO: 13831 - DNA, 93 bp, Gossypium hirsutum
  unsure (1)..(93): unsure at all n locations; Clone ID: LIB3145-001-P1-K1-G6
gattactncatcacagaaganaacgtggggttgctnaagnnggctaaagaagcaggggaggggtgtttgattaccggatccggacattgcacc

SEQ ID NO: 13832 - DNA, 190 bp, Gossypium hirsutum
  unsure (1)..(190): unsure at all n locations; Clone ID: LIB3145-001-P1-K1-H10
cggaacattcccgattcaaatcaatcaaacaaattcccctgatattttctncctccaccttccggttncgttatatatatttcatgttcaatccttttcatgcttggattaacaccatcatcggttttaagttttcagcactctttcttaaatatctggttgttttcctgttgtgaaaaaaaagttttta

SEQ ID NO: 13833 - DNA, 446 bp, Gossypium hirsutum
  Clone ID: LIB3145-001-P1-K1-H8
cccacgcgtccggtttataaattcaatgttttatataaaattatcacttactctattggcatggtcatgcaccccacacctatcaggaacttggttgggacttgggagtgggaccacgttaggcacaatcatcatttttataagtgttcacgtataatattaccaaattttgtaatatctgaatctgctaaaattctttatatatatatattctcaaaatacaagcattacgcaagtaataggtttagatatctaagtcggagtcctattcaaataaataatataaatttagataataaatatttgaatatttatttgcatctgttgtaaatttgtaatgaattaaaattcataatatttgaaacaataatattcgaatccataaaatatatatatgaattgaatattcgaatctataatccaaattattatcctttaacttcaca

SEQ ID NO: 13834 - DNA, 421 bp, Gossypium hirsutum
  Clone ID: LIB3145-002-P1-K1-A1
aaacttgccacttgtgccagtgagaacaattttcgaaaattggcgtacctgcatgatgctgtgacatactatattatgattcgacggagggatatataatgatcttagtgatggacttcttgaaactgttgagacggaacttacaagtgtacaacgtctatcatactggctgtattctgcctatagtgatacagctgaggctaattacccgcatccttcaaactactgaatgcctttgcacagacatgccataacagaggtctgctaaaagaatgatgggtctgctgccggggctagcattgtggagcatatatataatgcatacagcgtatattacaattgtactggagatgctgactggatccaactcgatgacgatcctcatggcactgatgggtagaactggcacgcatgcactgaa

SEQ ID NO: 13835 - DNA, 454 bp, Gossypium hirsutum
  Clone ID: LIB3145-002-P1-K1-A10
gattcctctcaacaatattccaggcaatggggattcgagaagcttctgtttagagaatcaagaacgggaattcggcgtgacaggaaatatgcaattcaggcgaagaatgcattcgcaacgggagtgcatatgtcggagaatgttattgggaaaacattacataaaacagaaacaaagattcgttattatcactatcacaacaccattaccgtacaccaagagctatgcagagagtacctccctccctctgccaaaaacaatgtcacttggttcaataagctaccctatgtctacgatgataacatgaagaaactggccaacaccatcaaggaattcgagcataaaaccattggagacctcggttctctatgaccccacaccccacattccactccagcagctaccacatgtatcagtttaatgcgttaatggttgagcattcatggcatatgtg

SEQ ID NO: 13836 - DNA, 456 bp, Gossypium hirsutum
  Clone ID: LIB3145-002-P1-K1-A11
cccacgcgtccgcccacgcgtccgcccacgcgtccgcccacgcgtccgcccacgcgtccgctcagttggagcagatccacggcgaaatccgggatcttttccgtgctctttcaaatggcttccagagactggataagatgaaagattccaataggcaaagcaaacagctggaagagcttactggcaagatgagggaatgtaaaagattaatcaaggagtttgatcgtgaaattaaagatgaggaaagcaaaaatcctcccgaagtgaacaagcaactcaatgatgagaagcagtctatgatcaaagaactgaattcgtatgtagctatgaggaaaacatacatgaatacccttggtaacaagaaaattgaactctttgatatgggagctggagtcagtgaacctacagctgatgaaaatgttaaaatggcatcatcaatgtcaaaccaagagcttg

SEQ ID NO: 13837 - DNA, 339 bp, Gossypium hirsutum
  Clone ID: LIB3145-002-P1-K1-A12
cccacgcgtccgcccacgcgtccgaaattgttcaaaaattatctgcttttgtttttgaggttgtatttgttgtatatttcatatttaagtttcttcttttcccagcatttttagtacaaatcataaggaaaaaaaaagtttgctttcggtatgtaagaaatgacatgtttccattctgtctttttgtgattcgaacagtatttaatgaatcaatttcttgctttcttgtttattaaaaaaaaaaagcaaaaatactaaaaaaatgaacaagcatactaaatgataaaaatcaaactatgatcaaagaactgaaattcgaatgtacatatgaggaaaaca

SEQ ID NO: 13838 - DNA, 131 bp, Gossypium hirsutum
  Clone ID: LIB3145-002-P1-K1-A2
aaacttgtcacttgtgccaatgataacaatctttgaatttttgcgtacctgcattatgctgggacatgctatattatgatttgacggatggatatacaatcattttaatgaaggaatttttgaaactgttg

SEQ ID NO: 13839 - DNA, 353 bp, Gossypium hirsutum
  Clone ID: LIB3145-002-P1-K1-A3
cgacccacacactcgccacttgtgccaatgataacaatttacgattttatccatacctgcatgattctgtgacagactatattataatttgacggagcgatatataattattttaacgatgtacttcttgaaactcttgacactgaacttacaacagtccaacgtctatcacactgtttatattctgcatatagttattcagcagaggctaattacccacatcctttaaactacttaatgcctttacaatgacatcccataacagaagtctgtatatataatgatgggtctcctaccagatctagcattcttgaacatactaatattcctaaaagcgtatatcacaattatac

SEQ ID NO: 13840 - DNA, 410 bp, Gossypium hirsutum
  Clone ID: LIB3145-002-P1-K1-A5
cttttacgtattatggatgatctagtcaagaatggcaacgagatcgaggccgtgtacttggccagaccagctggccttacagagagatctgctactgtttctgtactcacgtcctatcagcagaattgcaaaacgaatgccagccacaatattgaacaatggaaattattccgcagctgcaatggaggagtcaaaaaatgtggagctgaattcaattaaagctatcatcaaatgcgttgtagaccatatgctcgaatcagagttttctactgactcgttaagaaagcgagccacgcagctggcaaaagtcaagtcagataggaaaaagagttcagcagccgctggatagcctcagaatacacgaagtcatagtgctggtagtgcccgacgcagtgaaccacctgctttcc

SEQ ID NO: 13841 - DNA, 456 bp, Gossypium hirsutum
  Clone ID: LIB3145-002-P1-K1-A6
cttttacatattatggatcaactagtcaagtttggcaacgagatcgaggcagtgtgcttgggcagaccagctggccttacagagagatttgctactgtttctctactcacgtcctatcagcagaattccaaaaagaatgccaccacaatattgaacaatggaaattattccgcatctgcaatggaggagtcaaaaaatgtggagctgaattcaattaacgctattatcaaatgcgttgtagaccatatgcttgaatcatagtattctactgactcgttaagaaagcgagccacgcagctggaaaaagtcaagtcagataggaaaaatagatcagcagccgctgaatagcctcagattaaacgaagtcatagtgctggtagtgcccgacgcagtggaccacctgctttccgtaccgcataagcagctaagttttcaaatgcttatccccctttcaat

SEQ ID NO: 13842 - DNA, 336 bp, Gossypium hirsutum
  Clone ID: LIB3145-002-P1-K1-A8
cttttacatattatcgatcatctattcaattatgccaactacatcgaggcaatgggcttggccagaccatctggccttacagagagatctcctcctgtttctctactcacatcctatcatcataattccaaaaataatgccaccatcaatattgaacaatggaaattattccgcaactgcaatggatcagtcaaaaaatgtggatcttaattcaattaaagctatcatcaaattcgtttaaaaccatatactcgaatcatagtattctactgacttgttaataaagctatccactcagctataaaaagtcaagtctcataggaataatagattcat

SEQ ID NO: 13843 - DNA, 229 bp, Gossypium hirsutum
  Clone ID: LIB3145-002-P1-K1-A9
cccacgcgtccgcccacgcgtccgcccacgcgtccggctaggatgatcttttatggttcggatgagctcctaaagcatgcatatatgatcaaaaactaaaaaaaaaagggcggacggtctaaaagatacaagcttacatacacgagcatgctacgtcatagctactgtatagagagacctaaattcaaatcactggacgtagatttacaacgacgggactggaaaaacc

SEQ ID NO: 13844 - DNA, 376 bp, Gossypium hirsutum
  Clone ID: LIB3145-002-P1-K1-B10
cccacgcgtccgcgagtatttgctgctgttattgcagttttaagattgttgtatgtttgttaatttgatagatagagattgatctctaatgccctcttctaacttggacttagcattgtgattttaaaattaaataaaaagggaaaaaaaactaatgacaaatattaaaaggaaaaaaaaaaaaaaaaaaaaaaaaaaaaaaaaaaaaaaaaaataaaaaaaaaaaaaaaaaaaaaaaaaaaaaccataaaaaaactaaaaagtaaaagatttataaaaaaaaaaaaaaggggcggcccttttaaaggttccaagctttcgtacccgttcttgccaacgtataacttttttttaggggcccctaaattcaatccaa

SEQ ID NO: 13845 - DNA, 214 bp, Gossypium hirsutum
  Clone ID: LIB3145-002-P1-K1-B11
caagaagatgctaaagagggtgaagctgaagacgaggaaggccttgcaatatacccttacgaacgtctcagaataacatcaaccgatcccgtttctgagatagatgtgaccagacgagagacatacctgtcatccgaagagttcaaggagaaattcgggatggaaaaaggcgcattctattaattggcgaagtggaaaccaaaccagcttaaaa

SEQ ID NO: 13846 - DNA, 236 bp, Gossypium hirsutum
  Clone ID: LIB3145-002-P1-K1-B2
cgaacgcgtgtgccgacgcgtgggcaaacgcttgggttaaaaatagcctgcttattaatgggcgatgagaatgacgttacttctgtgaaagactccaactgttgctgaaaactgtgaagcattatacggacctttcatatagaatcaaactccgaaagtccaaccaattttagattcctacaaagtagagctggttaaattgatttcatgcgaaacctaagtacctttaaataatg

SEQ ID NO: 13847 - DNA, 91 bp, Gossypium hirsutum
  Clone ID: LIB3145-002-P1-K1-B5
atcgaaagcacttgcaagacacataacatttatctgggcatgttgcctcacgagtaaagcgtcaatgataactgtcacacagccatatact

SEQ ID NO: 13848 - DNA, 358 bp, Gossypium hirsutum
  Clone ID: LIB3145-002-P1-K1-B6
gtcgaacgccattggaagaaacatgtcaaatctcagggcatgctgccgaaagattgatggtgtagtgatgattgtcacactgctttacatggtgtcatattcgaatccagatgaaggcaaggaacggacctatgtagtactagtctagtatgctgactctagctctataatgcatcgctatatgtacgaaattatagcgactagaacatgctgaaagtgattgtaatgctgtactgcatgctgcgataaatgtatgatcatagactaacttttgttacgtgcattgatacatatgatttagtaagtgaaagatgcatggaaaccttaaccgagcatttgaatccaatattgacttgac

SEQ ID NO: 13849 - DNA, 192 bp, Gossypium hirsutum
  Clone ID: LIB3145-002-P1-K1-B8
gagaactctcaacaagctggaactaatcaatatcaataggaagagaagctactggaattagataacaaaaggtgtcaatctggtttatgcgatgtcttattcgaatacagatgaattcaaagaaagtactcttatagtactagtctactatgatgactctagctctatgatggatcgctatatgtacgaaat

SEQ ID NO: 13850 - DNA, 431 bp, Gossypium hirsutum
  Clone ID: LIB3145-002-P1-K1-B9
cccacgcgtccgcgaaacccctgtaaactctctgtctcctgtcaagagtctcgaaaaattccctattcttgatccaatttttctctgattttttaaaatttgtttttcagggttcctttacattttctattggaggcttttgggggggtttttttattgaatttttccttcggtcgtcatcgcagacgaagaacaacaacgttaacataaccatcggcagagtcagcaacacaaggcggagaccctgaagttctcgcgagttcggatttctagttgtattttgtttttgggttttgtgcctgttttagggtttgagtaggtttccaatcggagcccctaattttggtggtgtaatctttcctttatagtcttattattaggaaaaagaaggattagctttttattctggaatttcagattcaattttggct

SEQ ID NO: 13851 - DNA, 92 bp, Gossypium hirsutum
  Clone ID: LIB3145-002-P1-K1-C1
gtgatatgaacaccccagaaaagattgaagccgcatgttaaaagaaggtagaaggaaatgtattgggcaagtcttgaaaatatgccagagct

SEQ ID NO: 13852 - DNA, 430 bp, Gossypium hirsutum
  Clone ID: LIB3145-002-P1-K1-C11
caccattaagatgatgggccctaaggagatggcggtggacggacaattggtgcttaattcgttccttacaatccatctttgaaccatgctgcttaaatggatgtttggagctggagactggattgtgctgcttgctttatttatttaatattcaagggttttgagaacattaatgttaatagctattattgtacgagattttttcaaaaaaacgttagtgccagtttgcgcggtcaaacttctgggaaaattatattcaatgaaatcatattgtgaatcctttttgttaaaagcattgatcgctgcgtttctaagtattggcaggtgaatagcatgattggtcagatgctcaatgctggtggtcggtcttcgattgtaatcagagtcattgtcattcttcttccatcttgaattcgttaaaatgttaaac

SEQ ID NO: 13853 - DNA, 314 bp, Gossypium hirsutum
  Clone ID: LIB3145-002-P1-K1-C2
gtgatatgaacaccccagtaaagattgaagtttcaggttaaaagaaggaagaaggaaatgtggtggtggagtcttgaaaatatgctagagcttctaagagattttaaaaggcactaaagtatatctattatgattctcacttcaacgaataggataaaactcaatgccaaggcattgaaagttgcttgcaatctgaacattgctgcttgcaagctgaaactgaacgattttaagcaagcttagaaactgtgcatcaaggctttagacatagaaagttcgaatgtgaaatcgttcgatataatggctcaagcata

SEQ ID NO: 13854 - DNA, 147 bp, Gossypium hirsutum
  Clone ID: LIB3145-002-P1-K1-C4
gaccgacgcgtccggacatattaacaccccattaaagattgaagttgcagtttaaaagaatgaagaaggaaaagggagaagttcgacttgaaaatatggccagagcttataatataaattaaaattcagaaaattatatactactat

SEQ ID NO: 13855 - DNA, 204 bp, Gossypium hirsutum
  Clone ID: LIB3145-002-P1-K1-C5
ctaaagcttacgcgtcagcaattccatcgtactaaccctcgtatacttcaccatttcgagggacgccacactaggacgctaaactacacgtcaactcgctaaaggccagccataaagccggatacattgtctgcaagttagcctacagacagatacagactgacgaacacggctccggaagactctcagcacctactaccatac

SEQ ID NO: 13856 - DNA, 336 bp, Gossypium hirsutum
  Clone ID: LIB3145-002-P1-K1-C7
ctaaaccttacgcgtccgcaatattttcattataactcacgtatacttcagcatgggcacgcgctccgtactaggacgctaaactacacctccactagctaacggccatccattcatacggatgcattgtctgcaagatatactacaaacagattcatactgaccaacacagcttcgggagactctcagcacctactaccatacaactctaagcttacttcctaatcaacaacgctatacgtctcaacatatatgactatatgactgctgacaatcactatctgatcaggatcttcctgattgtaccggcttaatacaccatagggatgataagca

SEQ ID NO: 13857 - DNA, 384 bp, Gossypium hirsutum
  Clone ID: LIB3145-002-P1-K1-C8
ctaaagcttacgcgacagcaatactttcattataactctcgtatacttcagcatgggcacgcgctccgtactaggacgctaaactacaccttcacttgctaacggccatccattcatacggatgcattgtctgcaagatagactacaaacagattcatgctgacgaacacagcttcgggagactatcagcacctactaccatacaactctaagcctacgtgctgatgaacgtccgaatgctgtctacatatgagactataggaatgttgaaaattactagctgatcaggatcgtcctgattgtacgggcttaatacaccatagggatgataagcaagtagattgaatcgagattaaagtgataaggctacgagagattttcaca

SEQ ID NO: 13858 - DNA, 327 bp, Gossypium hirsutum
  Clone ID: LIB3145-002-P1-K1-C9
atttaattctgtttaattttgctacaaactcttctagttttcttctaataaaaaattattgtgggaaaaaaaaaaaaaaaaaaaaaaaaaaaaaaaaaaaaaaaaaaaaaaaaaaaaaaaaaaaaaaaaaaaaaaaaaaaaaaaaaaaaaaaaaaaaaaaaaaaaaaaaaaaaaaaaaaaaaaaaaaaaaaaaaaaaaaaaaaaaaaaaaaaaagggccccccctttaaaagacccaaatttacctcccccggccttccaactaaaaacctttttaaaggggcccccaaattcaaatcaatggcccccctttaaaaaccgctagccc

SEQ ID NO: 13859 - DNA, 349 bp, Gossypium hirsutum
  Clone ID: LIB3145-002-P1-K1-D1
caaaatctgagtttttattatttctacgtttataaaacattgtataattttctttgttagttgtctgagatgccgaaagtttgcttctctaaagacattatgatcatgtttgtggctcttgtgctctccgtcgccaccattgtatcagctcaggacagtgcaatggcgcccgcaccgtcaatggacactggatctgccttctcaacgcccattactggtgttgcccgtaacgtgtctcttaataattcccttcttgctcttttgaagccatgaggtacataatttgaattgctgggtgacccatggattggcatattttggaattattaataataataatattaataat

SEQ ID NO: 13860 - DNA, 316 bp, Gossypium hirsutum
  Clone ID: LIB3145-002-P1-K1-D10
gagaatatgttcttaggcttatcatgcttgcaattacatcagtgtgctggtatcaagttaatctggttttctttgtggcaatggttactgggaattatctcagtttacttaaaatttagagactgcatgcttgggaggtcattcagccaataaggtggtttttgaggctacatgactaaattttgagcttgaggtggcgaaaagaagacataatgttgacaatcttacttggtggttctgttagatacatttggtattgaggttctcgagcttactatattctcttctgtgttaatcatctcttcatcttatttca

SEQ ID NO: 13861 - DNA, 413 bp, Gossypium hirsutum
  Clone ID: LIB3145-002-P1-K1-D11
aaaaataaaaaaataggcataataatagaaagcaaaaacataaaagagaataggaataaagaaaagctgagatataaatgaggcaatggttacatgggaattatctcaatatacttaaaaatttagagactgcatgcttgggaggtcattcagtcaataaggtggtttttgaggctacatgactaaattttgagcttgaggtggggaaaagaagacataatgttgacaatcttagttggtggttctgttagttacattcggtattgatgatctagagcttcctatattctcttctgtgttaatcatttctttttcttatttcagtgatatgtataggtaagttgtacttgatgtgcattgcatgactgcatggaagactttggacctatgatatgaagggtaactttcagatt

SEQ ID NO: 13862 - DNA, 445 bp, Gossypium hirsutum
  Clone ID: LIB3145-002-P1-K1-D2
caaaatctgagtttttattatttctacgttttaaaacattgtataattttctttgctagggctctgagatgccgaaagttcgcttctctaaagacattatgatcatgtttgtggctcttgtgctctccgtcgccaccattgtatcagctcacgacagtgcaatggcgcccgcaccgtcaatggacactggatctgccttctcaacgccgattactggtgttgccgttacgttgtctcttattatttcccttcttgctcttttgaagcactgagttacataatttgagtggttggatgtctagtgtattgtcatatattgaatctattattattattattattattattattgcatcaataattttttatttgtaattaataattatactaacgttttggaattttctgcgtaaaattgacaacaccgtcggtcgctctataagat

SEQ ID NO: 13863 - DNA, 363 bp, Gossypium hirsutum
  Clone ID: LIB3145-002-P1-K1-D3
caaaatacgcgtatttattaagcctacgctttaaaactttgaataataatcttcgttacttgtactgtatacctaaagtatgcttctctaaagacattatgatcatgtttgtggctcttgtgctctccgtcgccaccattgtatcatctcatgacagagcaatggcacccgcaccgtcaatggacactgtatctgccttctcaacgcccattactggtgttgccgatacatagtctctcattatttacacttcaagctctttcgaatcagctagttacaataattgagtacttggaagtcttatgtatagcatactttgaatttattattaatattattattattattattggatcaataatt

SEQ ID NO: 13864 - DNA, 214 bp, Gossypium hirsutum
  Clone ID: LIB3145-002-P1-K1-D4
caaaatctgagtaaaattatttctacgtttaaaaattttgtataactatctttgatagtggactagtatacctaaagatcgcttctctaaagacattatgatcatgatagtgtctcttgtactatacgtatactccattgtatcagctcacgacagagcaaagattccctcaccttcaatggacactgttatctgccatctcaacttctattac

SEQ ID NO: 13865 - DNA, 419 bp, Gossypium hirsutum
  Clone ID: LIB3145-002-P1-K1-D5
cggaaccacttagatccacagtgtcttatattatcagcggcgatgaaacggcaccggtcggggtatatatgtgctccaattgtgcactagactactgctgcatgggatctgcatatactacgagtaacagtggagctgtatgtgcttgaataagagggacgagactatgcataggcacagtaatgtatagtaccaagttgttatatatggaagacagggactatacagcttgaaggtatatgacattatgacactagagatcaatgataccgtcaaatcatattacctatacgaatgcttgtatcagtacatgggaggaaatggaaagggcgatgcaggtgaagtctgtaaaatggacatcaggaattgtaagcaggtgctgcgttatagatgacgcaaacttacgtacgcttgcatgc

SEQ ID NO: 13866 - DNA, 326 bp, Gossypium hirsutum
  Clone ID: LIB3145-002-P1-K1-D6
ctgaaccacttacatccacagcgttttatattatcagcggcaatgaaacagcacgggtcggtatatatatgtgctcacattgtgcactagactactgctgtatggaatctacatatactaccactaacagtgcaacgtgtatgtgcttgaataagagggactagactatgcataaccacagtaatctatagtaccaagttggtatatattgaatccatggactttacagctttaaggtatatgactttatgacaatacagatcaatgaaaacgtcaaatcatattaaccatagtaatttttctatcagtacatggtaggaaatgga

SEQ ID NO: 13867 - DNA, 446 bp, Gossypium hirsutum
  unsure (1)..(446): unsure at all n locations; Clone ID: LIB3145-002-P1-K1-D9
ncgccacgcgtncggtcgcctcattttcttcactcgttcagtctttggttggttttgttcggtcttgaaaatgcttgctcggctcgcgtctcgacgttttctcgagatccgtcaagctttccgtcaatcttctcaggcctctcgatctttgtccactgccctgaactatcatcttgataccccagataataatcccgaccttccatgggaattttcggaggcgaacaaacaaaaggtcaaggagatattgtctcattatccatccaactacaagcaatctgcagttattcctttgctagatcttgctcagcagcagcatggaggatggcttccagtttcggcaatgaatgcagttgcgaaggttatagaagttgctcctattcgtgtgtatgaggttgcgacattttattcaatgttcaaccgatcaaaggtcgggaaatatcatc

SEQ ID NO: 13868 - DNA, 463 bp, Gossypium hirsutum
  Clone ID: LIB3145-002-P1-K1-E1
accacgcgtccgcattctttattgcgagactatggacatccccgatggggttagcgtcaaggtaaaagccaaggttatcgaagttgacggtcccaggggtaagcttatccgcgacttcaagcacctcaacctcgacttccatctcattaaggacgaggagaccggcaagcgtaagctcaggattgaggcttggttcggctccaggaagactagcgccgtcatccgcaccgatctcagccacgtcgagaacctcatcaccggcgtcaccaagggataccgttacaaaatgaggttcgtctatgctcactttcccatcaacgccttcatcactaacgccaacaagtccatcgagatccgtaatttccttggcgagaagaaggtgcgcaaggtggatatgttggaaggggtttccatagttcgatctgagaaggtgaaggatgaaattgttttggatggtaatgat

SEQ ID NO: 13869 - DNA, 398 bp, Gossypium hirsutum
  Clone ID: LIB3145-002-P1-K1-E10
cccacgcgtccgcagaagaagatgctgctgcactaataaaggaaagtgggactgaaaagcccattgttgccttcattgctggacttactgctcctccaggacggcgtatgggtcatgcaggagctatagtatcagggggcaagggtactgcacaggacaaaatcaagactctaagggaagctggagtgacagttgctgaatctcctgcaaagattggagtagcaatgcatgatgttttcaagcaaagaggcctcctgaattaacacccttttttttttcctagaaaaaggaaaactttttttcctgaataagtttcaggtggacatttttcatataattccattggtcttcttttgtccaaaattatgactatactaaaaaaatgagggaaaatctta

SEQ ID NO: 13870 - DNA, 451 bp, Gossypium hirsutum
  Clone ID: LIB3145-002-P1-K1-E11
tcgaccacgcgtccgcagaacaagatgctgctgctctaataaaggaaagtgggactgaaaagccgattgttgccttcattgctggacttactgctcctccaggacggcgtatgggtcatgcaggagctatagtatcagggggcaagggtactgcacaggacaaaatcaagactctaagggaagctggagtgacagttgctgaatctcctgcaaagattggtgtagcaatgcatgatgttttcaagcaaagaggcctcctgaattaacacccttttttttttcctagaaaaaggaaaactttttttcctgaataagtttcaggtggacatttttcatataattccattgggcttcttttgtccaaaattatttttatactaaaaaatgagggaaaaatcttataccttagtcaatgaaaccagatttggcataaacaagacgggcaatactt

SEQ ID NO: 13871 - DNA, 359 bp, Gossypium hirsutum
  Clone ID: LIB3145-002-P1-K1-E12
ctcagtgctgaggagtctcgcaagataagccaacttccacagttcaaagggtttccagctggggaatttgtatcagatgatggtccttacaagtctcttgaagagctttgggatggagagatttgattttcattatctaccggatttattacaaataaaccaaatggacccatatgcaaatctttatagtttggtggtattgtgtatatatgggaccatcattttattgtgttggaaccagcatttagcagacgagaactatggggacaataaaatgtgattgtggagcttattgagtcaagagtcatcctatttttctgtttgtcctttcttgtggagtaacatgttgcaagtattag

SEQ ID NO: 13872 - DNA, 149 bp, Gossypium hirsutum
  Clone ID: LIB3145-002-P1-K1-E2
accacacgtgcgcattcttcattcctagattttggttatacccgatgggcttagcgtcaagatagggtccaaggttatcgaatttgacgatcccaggggtaagcttatcccctacttcaagcacttaaacctggacttccatctattta

SEQ ID NO: 13873 - DNA, 224 bp, Gossypium hirsutum
  Clone ID: LIB3145-002-P1-K1-E5
ctcacttactggcttactgcctggttagatcttagcaagttgatacatgttcattgttcattgatgcatgaattagactatcttgcatgacattgggctcttatcctagttaggagaagccattgttcatgataacatcgacaatgttatgactatgtcttttgataaacaccttgctcgtattggaagagtgaagctgatcagcggcttaatctatgaggaaa

SEQ ID NO: 13874 - DNA, 138 bp, Gossypium hirsutum
  Clone ID: LIB3145-002-P1-K1-E6
ctcacttactggcttactgcctggctagattttagcaagttgatacattttcaatgggcatgttttcatgaattagactatcttgcatgacattgggctcattacatatttaggagaagccattgttcatgataaaat

SEQ ID NO: 13875 - DNA, 295 bp, Gossypium hirsutum
  Clone ID: LIB3145-002-P1-K1-E7
ctcattcactgccttactccctgtttagattttagcatgtagatacattttcatggttcaggtatgcttgaataagactatcttgcatgacattgggctcttatcatactatcgccaagccatttttcattgataacaacgtcaatattatcactatgtctttagataaacacctcgccagtatagtatcagttaatcttatcagtctacttaattaactgatgaaatctcattgatttatcaagaacttatttgaatgacatctttctctaaacgatcacatattcgtaacact

SEQ ID NO: 13876 - DNA, 127 bp, Gossypium hirsutum
  Clone ID: LIB3145-002-P1-K1-E9
aagcgacgtcctctgatcgagatcttcattatacttgtcacttgttcatggatattttggatattttaccgtaatcccggattttatgctccaattttaaatgggttaatcgacactgttggtgacc

SEQ ID NO: 13877 - DNA, 198 bp, Gossypium hirsutum
  Clone ID: LIB3145-002-P1-K1-F1
ccagaacatgctgcaattgatgctgcggagtaccacgtttgtatgcatgactacccggcgtggcaagggaaagtagcatcatgcagatccaggtgctgcgtaaaaatgatatcagagttagtagctgtgcgctgatagctgaacgaaggatcagtcaattactaggtgtctagtgacgaacactatggaacgccctag

SEQ ID NO: 13878 - DNA, 313 bp, Gossypium hirsutum
  unsure (1)..(313): unsure at all n locations; Clone ID: LIB3145-002-P1-K1-F10
tcgtcccacgtcgtctcgtaaattttgtcaatgggattattccatctgtgtggatctgnnaaaaggaagtctaataggggagtattgctttggagtatcctaaacagttgatcgatgatggacatggaggaacattgaagggtcggtgccttagaaatccatccattgggtacatatgttagcttgggaaatctcaattccattaaatcggcgctcgttggatatattgataccaaagcttgttggttaatcaagtttgtactggtacttgcattggtatgtatgagtaggtttaggttatagcttaaggact

SEQ ID NO: 13879 - DNA, 287 bp, Gossypium hirsutum
  Clone ID: LIB3145-002-P1-K1-F11
cccacgcgtccgccaacatcgatagtgagttacaaccatctgggaaataatgatggcatgaatctgtcagcaccccaaaccttccgttccaaggagatctcaaagagcaatgttgttgatgacatggtttcaagcaatggaatcctctatgagcctggtgaacatcctgatcatgttgtggtcatcaagtatgtgccgtatgtgggagacagcaagagagccatggatgagtacacatcagagatattcatgggaagcaagaacaccattgtgttgcacaacacatg

SEQ ID NO: 13880 - DNA, 349 bp, Gossypium hirsutum
  Clone ID: LIB3145-002-P1-K1-F12
cccacgcgtccggtgctataattatgtttgacgttactgcccgtttgacatacaagaatgttcctacctggcaccgtgatctttgcagggtgtgcgagaatattcctattgttctatgtggtaacaaggttgatgttaagaacaggcaggttaaggcaaagcaggttacattccacaggaagaagaatctgcaatactatgaaatctcagccaagagcaactacaattttgagaagcctttcttgtaccttgcccggaagcttgcaggtgatcctaatcttcactttgtggagtcacctgctcttgctcctcctgaagtacacatcgacttggctgcacagcaacaaca

SEQ ID NO: 13881 - DNA, 140 bp, Gossypium hirsutum
  Clone ID: LIB3145-002-P1-K1-F6
cctagaaccaactgctacatgctttccttttttaggagtacatattatataaagagctaagggaaagttatgaaaggccttataaagagcgtcataaaggacaaagaataacatctcatgaattgaaatttaaataataa

SEQ ID NO: 13882 - DNA, 204 bp, Gossypium hirsutum
  Clone ID: LIB3145-002-P1-K1-F7
ccttgaaccaactgctacatgctatttctttttatgagtacatattataaaaagaagtaagggttggattagaaaggccttataaagagcttctaaaatgacaaagataaacagctcatgaattgaaatttatataataatttaattcttctattgttttcaattcagtattttcatctaattcgattattatgaatttctaaa

SEQ ID NO: 13883 - DNA, 201 bp, Gossypium hirsutum
  Clone ID: LIB3145-002-P1-K1-F8
cctagaaccaactgctacatgctttccattttaggagtacatcttataaaaagagctaatgaacggaaaagaaaggccttataaagagcgtcaaaaaggacaaagaaaaacagctcatgaattgaaatttatataataattaaattatactattgctttcaattcagtactttcttctaattcgattagttgaatacctaa

SEQ ID NO: 13884 - DNA, 428 bp, Gossypium hirsutum
  Clone ID: LIB3145-002-P1-K1-F9
gcagattcatgagatcaaggacttccttctgactgctagaaggaaagatgcacgctctgtgaagatcaagaagagcaaagatgttgtcaagttcaaggtccgctgctccaagtacttgtacacactttgcgtgtcggatgctgagaaggctgacaagttgaagcagtcccttcctccaggtttgagtgttcaagacctgtgaaaatatggcagcctcaggtttgtcacctgatttataggtgatgaaagctagattttagttttgggtttattgtatttctggtcattctgcaacagtgaagctcaattttctgtaattggatctatgtttttttgttgattaaggattttagtgatatatgcacttttcaattacaatgaatgttctttttaatgaaaaacacagaaaaatttgatgttgcttcgct

SEQ ID NO: 13885 - DNA, 327 bp, Gossypium hirsutum
  Clone ID: LIB3145-002-P1-K1-G1
ggccgatcaacttacggacgatcagatctcttagttctaggaggctttcagcctttctgaggagatggcgatggctgcattactaccaaggagcttgagactgtgatgcgatcacttggtcagaaccctactgaggcagaactacaagatatgatcaatgaagctgatgctgatggaaatgggaccattgattttgctgaattgcttaacctaatggcacggaacatgaaggatactgattccgaggaagaacttagagaggcttttacggtgtttgacaaggaccataatggtctcatatctgctgctgatcttcctcatgtcatg

SEQ ID NO: 13886 - DNA, 378 bp, Gossypium hirsutum
  Clone ID: LIB3145-002-P1-K1-G10
gggatatgaacaccccagaaaagattgaagccgcaggtaaaaagaaggaagaaggaaatgtattgttcaagtctggaaaatatgcgagagcttctaagagatatgaaaaggcagtaaagtatatcgattatgattcttccttcagcgaagaggagaaaaagcaagccaaggcattgaaggttgcttgcaatctgaacaatgctgcttgcaagctgaaactgaaggatttcaagcaagctgagaaactgtgcaccaaggttttagaaatagaaagttcgaatgtgaaagcgttgtatagaagggctcaagcatacatccatctggcagatttagatttggctgagtttgatgtcaagaaagcccttgagaatgatcctg

SEQ ID NO: 13887 - DNA, 451 bp, Gossypium hirsutum
  Clone ID: LIB3145-002-P1-K1-G11
ctagaagcctagctgatgccatggttaggttggtatgctccgacaggaagagcggccaagttgtcttcaaaaaggagggatacaccgacaaaaccggaaaataccagattcgtgtatccgaggatcacttggatcagatctgtgatgcagttcttgtgaagagctcccagcttggttgtgccacaatgtcccccggtcgtgaacgtgcccgtgttatcttgaccaacttcaatggcatttcatccaccacccgttatgccaatgccatgggcttcatggttgacgagcctgaagcaggctgtgctgagatgatgaagatgtatcaggaggatgaggaggatgtctagtgtgttggtttggatttatttgcatatgaaatatgatgttgtctgctatttgttatgtgaattgctccgttatttctacgtttagaggacttctataacttatt

SEQ ID NO: 13888 - DNA, 379 bp, Gossypium hirsutum
  Clone ID: LIB3145-002-P1-K1-G12
tcgctaaaagcctaactgatgccatggtttggtttgtatgctccgacaggaagagcgggcaaagtgtcttcaaaaaggagggatgcaccgaccaaaccggaaaataccagattcgtgtatccgaggatcacttggatcatatctgagatgcagatcttgtgaaaagctcccagcttggttgttccacaatgtcccccgttcgtgaacgtgcccgtgttatcttgaccaacttcaatggcatttcatccaccacccgttatgcctatgccatgtacttcatggttgacgagcctgaatcatactgtgctgataatatgaacatgtatcaggatgatgaggaagatgtctaatgtgttggtttggatttatttgcatatta

SEQ ID NO: 13889 - DNA, 199 bp, Gossypium hirsutum
  Clone ID: LIB3145-002-P1-K1-G3
ggccgatcaacttacggacgatcagatctcttagttttaggaggcttacagactttctgagaaacagggcgatggcagcattactaccaaggagctggacactgcgatgcgatcactcggtcagaaccctactgaggcagaactacaacatatgatcaatgaatgtgatgctaatcgaaatgggaccattgattttcct

SEQ ID NO: 13890 - DNA, 191 bp, Gossypium hirsutum
  Clone ID: LIB3145-002-P1-K1-G5
gttaggaccgcatcctacgacagctttagtttttaaggtccttgaccactatcagggctagggtgctataaatcagcatctacctacactaaatatgcatcagctcacataaattgcataaaacttataccgatctcctcgtctctaaattctgaaacgactatactttctaaatatgatacactcatata

SEQ ID NO: 13891 - DNA, 418 bp, Gossypium hirsutum
  Clone ID: LIB3145-002-P1-K1-G6
gtgaggcctgcatcctacgacattccgagttatcaaggtccttgacgaatatcatactgagggagctaacaaagcaacgtcacaatagatattatatgcaccagttcacttcttatacatagaatgtatacctgtctccatgtctatagatcctgaaacgacgataatatataaagatgatcgactcatctagaagtgggctataagactgaccttcgatgacgaacaacatccgtatctgccatagcatatgctatacagacatatagaacagttcagtgatggagtcggatatagttggatcgatggtctcaaggtctatgctagcagacatgtgactcttaatatgatgttcaatgctactctcatatttacttacacacactatctacttaagaagcatattactacatgatga

SEQ ID NO: 13892 - DNA, 261 bp, Gossypium hirsutum
  Clone ID: LIB3145-002-P1-K1-G7
gtaagaccttcatcctactacagattgagtttccaaggcccttcaccaatatcatgggctagggtgctaacaaagcaacatcagcactagactataatatgcattagctcacttataatacaaacaatttataccttcctccatgtctattaatcctgaaactactataatatataaagattatacactcatataaaatagaactataaaactgaccttctattactaataacatctctaactgccatagcatattctata

SEQ ID NO: 13893 - DNA, 320 bp, Gossypium hirsutum
  Clone ID: LIB3145-002-P1-K1-G9
tggaatcgtggtagcactggtactgatcaaaattcgcaaagaaataacagctgcaagttgaactactcagcttcttcatcggttttcagcatgataaggaattggaaaacgtttcacttagagctgaaggtacggttgattcatggaattgtcatgcagaccagtagaataattacttacatgaaatttgtaatgcagagaactagaattttaatgtgaataggcttttcaagcagtaatcatgttctcttctctcttttctttttcttctcattttagaaataaataagaaatttaaactgcaatttgttcggtgagaa

SEQ ID NO: 13894 - DNA, 272 bp, Gossypium hirsutum
  Clone ID: LIB3145-002-P1-K1-H1
ctgatttgttcttcatttctttcagctaaatttattattaaccttccattaaggctttaccgaaaggtgatactaaatgtgtgtttcttgacactcagtgcacactaagcgttccattgatagccaataaagagcttgaacgacgaaaatatagtgttagcttgataggtaatctggtcacacagaaatgtcatgcaacatgacagcaacaaagattagcattcgctgtgaaactttaaactcgattactgtgacgctagactccggattct

SEQ ID NO: 13895 - DNA, 361 bp, Gossypium hirsutum
  Clone ID: LIB3145-002-P1-K1-H10
ggaaaaaataaatctagatcatgtttttggtcgattgcctctatgggattcttgcttccctcggtctatggcataaagaggccaagatcttgtttttagggcttgataatgctggcaaaaccacgctccttcacatgctcaaagatgagagattagttcagcatcagccaacacagcatcccacatcagaggaattgagcattgggaaaatcaagtttaaagcttttgatttgggaggccatcagattgctcgaagagtttggaaagattactacgccaaggtggatgcagttgtttacctggtagatgcttacgacaaggagaggtttgctgagtcaaaaaaggagttggacgctctcct

SEQ ID NO: 13896 - DNA, 319 bp, Gossypium hirsutum
  Clone ID: LIB3145-002-P1-K1-H11
ggaaaaaataaatctagatcatgtttttggtcgattgcctctatggcattcttgcttcccggggtctatggcataaagaggccaagatcttgtatttagggcttgataatgctggcaaaaccacgctccttgacatgctcaaagatgagagattagttcagcatcagccaacacagcatcccacatcataggaattgagcattgtgaaaatcaagcttaaagcttttgatttgggaggccatcagattgctcgaagagtttggaaagattactactccaaggcggatgcagtcgattacctggtagatgcttacgacaa

SEQ ID NO: 13897 - DNA, 152 bp, Gossypium hirsutum
  Clone ID: LIB3145-002-P1-K1-H3
ctcatgcgtacaacatttctaacagctacatttacttttaaccttccattaatactttccagaaaggtcatacttaacatttgtatctacacacgcaatatatactaaataatccttaaatagccaataaagaactacaacaaataaaatat

SEQ ID NO: 13898 - DNA, 222 bp, Gossypium hirsutum
  Clone ID: LIB3145-002-P1-K1-H5
ggacgcataccacggatcgttgtttcgagttcggcgacagttatgtaccttctaaagaatgagtgaatggtcaaggtagcatcactgaaccgctgtgaggttctattgaaacctgggctggataactgccgttgcttctaggaggaaggctttgaccatgtatatgtcggttacagtatccgtcatgcatctgatcccggctccagagctacacagattcta

SEQ ID NO: 13899 - DNA, 367 bp, Gossypium hirsutum
  Clone ID: LIB3145-004-P1-K1-A11
gatggacactgccaaggcgctcaagggccccttctccatccgcctcaccagcgagtccggcaagaaggtcatcgccaaagacgtcatcccgccgaactggagacccgatgccgtctacacttccaacgtccaattctactagactttgaattcccttcgattcatccggcgcggtgggctatggacctgcagcagcaagctaattaagtttatatatattgcatgagagagcatgcaccgctaaccatatatactactgagacttctgaattctagtatatgtaatccttttgtttgggtttaggaggcaattctaatcatgtatgccgaattccaaagagtggaaaacaagcaaaatgttaaatat

SEQ ID NO: 13900 - DNA, 457 bp, Gossypium hirsutum
  unsure (1)..(457): unsure at all n locations; Clone ID: LIB3145-004-P1-K1-A9
gttatttgggtgaaacctctggacaatgattgttacaagaggcgagcacatggtacagagccacctctatgcaaaagtggcaatgatccagattcagtatggggagttccaatggaagcttgcattactccgtatcctgaacaaatgcacagagatgggggaactgggctagctccctggcctgcccgattgacagccccgcctccccgtcttgctgatttgtacattactgctgacacatttgaaaaggacacggaaatgtggcagcaaagagtagaaaactattggagtttgctgggcccaaaggtaaaaccagacactattagaaacatcatggacatgaaggcaaactntgngtcatttgctgctgcactcaaggagaaagacgtatgggtgatgaaatgtgtgccacatgatggaccaagcaccctcaagataatctatgatagagggctga

SEQ ID NO: 13901 - DNA, 351 bp, Gossypium hirsutum
  Clone ID: LIB3145-004-P1-K1-B11
caccgagagaggaacgcgaacaaccaacgatcgcctcatcgccatggctcgctctgtccccatcggcgtcgccgtcgcgcctctgctcctgctcctcctcgtctccactgcgtccgctgcacggaccgtgggcgacaccgtgcaggacgcgtgcagcaagacacaattccccaagatctgcgtggacagcctcgccgcaaagccagagagccagaaggcgaccccgcgccggctggcggagctgttcgtgaacatcgcggccgagaagggatccgggatggccacgttcgtgcacgggaagtacaacaacgccaaagacaagaccgtggtcaagtgctaccacagctgctc

SEQ ID NO: 13902 - DNA, 456 bp, Gossypium hirsutum
  unsure (1)..(456): unsure at all n locations; Clone ID: LIB3145-004-P1-K1-C11
atgacgctgtgcgggtgcgggctgcagagaggagaggagtagagcggcgtacgtagtacgtaccgtcttggcgtggtcctggatgcggagcggcggcgcggaggcgcaccgaaccttccaggcggcgagcgcgggcgcgaggcggcgctgcatgtcggcggtgacctgcgccttgagctgcggcgacttgaagaaggcgccgacgaggccgtgcacgcgccgctgcaggctgccgttgatgagcaggatggaggactcgcccatgagctccgtcagcgaccgcgggtaccagggcacgaaggcgcgcgcgtcgctgtgcagcacgaaccggctcaccttcgcgtccgacgtcaccaccgtcgccgagccgatcaggtgcgaccggaacaccgngctcccgtgcctgcgcgccaaacccaccgtcatgccgcgccatgccacaacgcacgtgcgtac

SEQ ID NO: 13903 - DNA, 497 bp, Gossypium hirsutum
  Clone ID: LIB3145-004-P1-K1-C9
cacgacaagatggcatgcacagacaatgcgatgagagccttgttcctcctggtcctctgctgcatggtgcatggtgagaaggaagagtcaaagggcatcgatgcgaaagcgtccgggcctggtgggtccttcgacatcaccaagttgggcgccttcggcaatggcaagacagacagcacgaaggctgtgcaggaggcatgggcatcggcgtgcggcggcactgggaagcagacaatcctcatacccaagggcgacttccttgtcggacaactcaacttcacaggcccttgcaagggcgacgtgaccatccaggtggatggcaatctgctggcgaccacggacctaagccagtacaaggaccatggtaattggatcgagattctacgcgtggataacctggtcatcaccggcaagggaaaccttgacgggcagggcccatccgtgtggagcaagaactcctgcaccaagaagtacgactgcaagatccttcccaactc

SEQ ID NO: 13904 - DNA, 484 bp, Gossypium hirsutum
  unsure (1)..(484): unsure at all n locations; Clone ID: LIB3145-004-P1-K1-D11
tcgcctcctaatcgcgaacgagcgtctttctcctccgtccgcgcccgtttgctcatcggttttgcctgccggtgggggaccgcctgcacgagcagcggctagccagacgtacggccttcgtttgaggctggagtcctgattggcaggtgcaagcacagagctcgatcgccatgtctttcaccggcacgcaggacaagtgcaaagcctgcgacaagacggtccacatcatcgacctcctcaccgccgacggcgtctcgtaccacaagacatgcttcaagtgcagccactgcaagggcgtcctctcgattagcagctactcttccatggacggcgtcctgtactgcaagacgcactttgaacagctcttcaaggagacagggaccttctcaaagaactttcaaggtggagcatcttcaaacatgaacgacncgtcatatgtctcaagcatgctatcatctgcattctctggaactcaagataaatg

SEQ ID NO: 13905 - DNA, 270 bp, Gossypium hirsutum
  Clone ID: LIB3145-004-P1-K1-D12
ttaatccgctggtccacccactcttccgcttactcttttcctaacgcgtaggcttcaccctttcatcaccctacctctccactcaagacttgagtacatcctccactcggctcccgtccattccctaacattctatctttgcatcccacaaccaactctctccaaaggactgacaatccctagaagcttcatcaaccacttcctctccagcaaagcctcctctccgaatattccccttcacacctctgctcccaacacgaaccttcaaaa

SEQ ID NO: 13906 - DNA, 478 bp, Gossypium hirsutum
  Clone ID: LIB3145-004-P1-K1-D9
ctgacgcgtggtgcaaggtgggcctcataaccataccattactggctaggctgttgcgctcaaacaggcaactactccagaatacagagcttaccaagagcaagttatcagtaattgtgctaaatttgcgcagagcctgatttcaaaaggatatgaactcgtctctggtgggactgacaaccatttagttctggtgaatctcaagaataaggggatagatggttcaagggtggagaaggttttagaaagtgtgcatattgcagcaaacaagaacacagttcctggtgatgtttcagctatggtgccaggaggcatcaggatgggaaccccagcccttacgtcgagaggatttgttgaagaagatttcgctaaagttgctgacttcttcgatgcatcagtgaatctggccttgaagattaaggctgcaacgacaggtggaacaaagctgaaagactttgtgccactttgcaatctgata

SEQ ID NO: 13907 - DNA, 392 bp, Gossypium hirsutum
  Clone ID: LIB3145-004-P1-K1-E11
tcgatcaccggacgtcgagcgagcagtctcccaattgtacccaataactaataacatctacgggaacgggactttccttggaccactatatccaggagcgacgaagtgatacaccctgcagccattgagatgaagaaggcactttgcgccgtactcgtcgccgccgcctcctccaccgccgtgctggcctcattcgcatcctaagctcattctgaggcgcccgccgtagcggccgttggtgcggctgatcctagcgcaagccgtgccgacgccgtacgcgtgccctgcggatgtgcgctcgtcgccttcttactagcatactacctctactgatcgacgacacgctgagcggcaacgttgagatgcatcgtgcttgcttgatccgattaata

SEQ ID NO: 13908 - DNA, 280 bp, Gossypium hirsutum
  unsure (1)..(280): unsure at all n locations; Clone ID: LIB3145-004-P1-K1-E12
ttcattgaatcaccaagtcgaaaaactcacagttaggtacctgttacatgttctggggtgtctagtctncagcgaacattcaatactgagagggagattctgagcctacattaacctatgatacaacttaacgctaatcagctaatatcattgatcggtccagagctgctccaaaatcgcttgaaggattatgtgaagggcgtagtgagtgaagatttgcttatacatgctaaaatcttgcgtttcgttaagatgtttgaagatcaactaccattgaaat

SEQ ID NO: 13909 - DNA, 497 bp, Gossypium hirsutum
  Clone ID: LIB3145-004-P1-K1-E9
acaccctcggtgagtgcaagtacaccatcggaggtgacctcggtggcggcgagggccacaacgggtgggtctcctgcgtcaggttctccccaaacacatttcagcccaccattgtctccggttcctgggaccgcaccgtcaaggtctggaaccttacgaactgcaagctgcgctgcactctcgatggtcatggcggatatgttaacgccgtcgccgtgagccccgatggatcgctctgcgcctccggcgggaaggacggtgttactctgctgtgggatttggctgaggggaagaggctgtactcgctggatgcgggctccatcatccactccctctgcttctcgcccaaccgctactggctctgcgctgcgacccaggactctgttaagatctgggaccttgagtcgaagcacgtcgtgcaggacctcaagcctgacatccagatctccaagaaccagatcctgtactgcacaagcttgagctggaccgccgatgga

SEQ ID NO: 13910 - DNA, 357 bp, Gossypium hirsutum
  Clone ID: LIB3145-004-P1-K1-F11
ccccgatcagacaaccaggacctgtcatttcctacaaaatattcacagaatttctacggtcaatgtgccgcaaacttttggaagcaataccgttcctactggaagaatccgccctacaatgctatgcgctatctgatgacatgtctctttggccttgtatttggtacagtattttggcaaaaaggaaagaacatagattcacaacaagatttatataatctgcttggagccacttacgctgctacattctttcttggggcttcaaattgcatcacggttcagcctgttgtatcgattgagcgagcagttttctaccgtgagaaggcaagcgggatgtactctccgttatcctatgca

SEQ ID NO: 13911 - DNA, 498 bp, Gossypium hirsutum
  unsure (1)..(498): unsure at all n locations; Clone ID: LIB3145-004-P1-K1-F9
gtggatattaggaaggatctgtactgcaacatcgtcctctccggtggcaccaccatgttccctgggatcgctgacaggatgagcaaggagatcactgccctggctcccagcagcatgaagatcaaggtggtcgctcctccagagaggaagtacagtgtctggatcggaggatccatcctggcatccctcagcaccttccagcagatgtggatcgccaaggccgagtacgacgagtccggcccatccatcgtccacaggaaatgcttctaattctttgggcccgagaaatgcaagccgtgggggagccgttaccgtcgccagcctctcctgcccccgttttcgttgccgtttcttcattagcgcgaacaaagttttgtgccggtctatcggccgtcgctttcctcccctattcatcaagactgcaataactgtcgctacctatgctnctaacctgtatttttggacacaatatgttaaggtccattcaattctaatgag

SEQ ID NO: 13912 - DNA, 328 bp, Gossypium hirsutum
  Clone ID: LIB3145-004-P1-K1-G11
attcccgtttcgacccactcttcctatccttcgaaatcgtatcttttgaagcatggacttcatagcttctatcctgtttctagctcttgtgatcttctgtgacatatctttagacccttgcagctctcatccatattactcttacctttatttcatccctatctattacaaatgttcactattcattccacttaaacctttcttaagttctatcttaatcattatcattttatcctttttccttttatttttctagattttccattattctattttttttattacttctttttcctatcctttctttcatctcatttttttttctcac

SEQ ID NO: 13913 - DNA, 496 bp, Gossypium hirsutum
  Clone ID: LIB3145-004-P1-K1-G9
tccacccatgctttcgagctgaactttccgaacataatcttctgtatcttatctttgacgccagacttccagacggtatcagcgtacttgatgccccctgctagagccctatatctactaacactaacacaagacaacacctgctgacacttttactataaactcctattccgctaaactaaaatctgacgatcactatttcaagtgctcttagtagatgatctactactttgagaccaggaatgactggtcaataagccaatgatgcaaccggaccagcaaggcagatctcacatcgtcggactactctgcttgcagagctcataactcaaagccatgcataaaacatgtgctatcacttcaagaatgttacactactttcttcatcattatcgacagtgattcgatttgtttcgagctgtcattcattgtatgttgattgccgcataaggctgttaattcgcatatataattcctgtttccagatattcataca

SEQ ID NO: 13914 - DNA, 498 bp, Gossypium hirsutum
  unsure (1)..(498): unsure at all n locations; Clone ID: LIB3145-004-P1-K1-H10
ctccccttttctccagccgaactaagccaaacccttttggccatggccccatcgcaacctacaagcgaccgagttactaccccgtgattcctcctccactttcgacttcaacgaggcaaggaagaatcaatggcggattcacgaggtaaggcttcatttttctcttttcttttatttttagatgcaaagaatgaaaaagaaaatcagagggagcagatcaagagagaaaaaacgtaataaaccctagagattcaaaacaggaaatcaccttgctctgttttttttttgctttctattgcttctgtatgcctccagaagactttacaatcgcaaaacgaaaggctttatagccgagtgttccaaaaaagaataaaaataaattacaattttttctttttctctttggtttcgtgttgctgctggtggtnttttggttcttcgcaagtaccgggtgcgttggaatcttacggaggctgtgctggcgcttggcgtgaggcg

SEQ ID NO: 13915 - DNA, 392 bp, Gossypium hirsutum
  unsure (1)..(392): unsure at all n locations; Clone ID: LIB3145-005-Q1-K1-A1
gtcgacccacgccgtccgccttttttggaatggttaatcctggtggtccagcattattagatcaagtagaagccaggggagcactgaagccagagaagctacgagccacaaggcacgttctttcagagtatggtaacatgtcaagtgcttgtgttctatttattttggatgagatgaggaagaaatcaagggaagatgggcttcagaccacaggagaaggattggagtggggagtgctctttgggtttggacctggcctcactgttgagactgttgtgctccatagtgttgctgcttaaagttaaacaaacatgccttttaagtaattggtcgtgctccacttggcttgcagntttatcttcttcttttttccttttttagaatcctatgaa

SEQ ID NO: 13916 - DNA, 370 bp, Gossypium hirsutum
  unsure (1)..(370): unsure at all n locations; Clone ID: LIB3145-005-Q1-K1-A10
gtaactannnaagatgatcaaccgaaaatggcaaaaggaggtgaatcattttttacagtattatcaagaagagttttagggatttctcaagatttaatcaaacagaggaacgtgggaaaagtaacatttcagttaacggacatcctattcctgaacgtgtggttaaaaaagctgaaaagatagctggaccggttcttcctggacagtattggtatgatttccgagctggattctggggtgttctcggcggaccttgtcttggcataattcctccttttatcgaagaatttaaccatccaatgccagagaactgtgctggtggaaccactggtgtttttgtaaacgggagagagctccatcaaaaagattt

SEQ ID NO: 13917 - DNA, 247 bp, Gossypium hirsutum
  unsure (1)..(247): unsure at all n locations; Clone ID: LIB3145-005-Q1-K1-A11
aaaaaatagagatgtcntctgnaatatattctgcaatcttaattctgtcngtgttccggccttttttctaaagttcgggtgtttntttactccangaacagcccaatgatgaccccaaaaacatgcactctattcctcccatttatgcactcaaccctacccaatttaatggacccagtgttgacattcacgaatatcattttatcccaaaaagtgcttaaattggtactcttcttttttgttttta

SEQ ID NO: 13918 - DNA, 373 bp, Gossypium hirsutum
  unsure (1)..(373): unsure at all n locations; Clone ID: LIB3145-005-Q1-K1-A12
cgcgggcatntgagaaggatatgacgccttttttatagcnaaagagcgcatggggagatactcgccgcctgatcttatgagagcgggcgaggcggggaaactcntattccaatcctccgtaggcttagtctagcgcttctttaggaccttttaataacttaagcgaacttgaaacattctgaattagctaatatgaaagggagcataaagcgacaagaccaactgtcatccatgagacagataatgccaaaggcaactcaagtagagtggaggaggtgatcttattgtgatttgaggagttgttggcactattaggttcaagatacatatgctttgtggtgtaaattaatagaacttgctttgaaactgaaac

SEQ ID NO: 13919 - DNA, 330 bp, Gossypium hirsutum
  Clone ID: LIB3145-005-Q1-K1-A2
caccccttcattttggtttttggtagagtattgggcatagtacagaggtgggcccgaacatgatggagtagttatgtgtatcgcagaagacttgactccgaaaacaaacatttactatatagtgctctttgtttaacgagacataggaactctaattaagagtgaagttgcgtctggaatgtccgtaaaagaattcacagatgccactgtctactgctgatatcttcctgagaagaagaagaagaagatggtacctgaagacttgaaagaaatggggctcgctgattctaagaggaaaacaattgtcattcgatctcgcctggtaaatac

SEQ ID NO: 13920 - DNA, 376 bp, Gossypium hirsutum
  Clone ID: LIB3145-005-Q1-K1-A3
gggaaacaatgccttaatttgacatgaattcactgatggaaccgaggaggaggagtctgattctgactatgaggaggatggtgacgatgagtatgcataaatctattagaaaatgcttggcttttttcaaatcagacgatccaaatttagaaaggtaaacttttctgttaagttgaaacgcattgatgaaccatctttgcaattcttaaagaacatcacagaccgtcttaatcaagttgcctcatattttacgtagccatacataacatgtgtcatggtttcggtaggtcccagtatttgtattaggagaatgtgacaatttccattccatttatttaatcacataaacatttgtgtacattctgctagtctaaga

SEQ ID NO: 13921 - DNA, 247 bp, Gossypium hirsutum
  Clone ID: LIB3145-005-Q1-K1-A4
ttttcttactacgtggtcataaagatagcacccggctgtcaagagtgtgtgttatgtgaccggaattctgttgcttgatatgttctggtggagaaagttgaaaagcacaaagtggtgaaaattaaacggttgtgggccatccggaggatgacttgcgatatcacttcctgtggttgtcggaagtcgtcggcttaatttcaatcgaagggactggtgaaaagatgccaatagagaaaaggagctacat

SEQ ID NO: 13922 - DNA, 328 bp, Gossypium hirsutum
  Clone ID: LIB3145-005-Q1-K1-A5
ctttaaaaatttattatttttaaataaattttttaataaaccaagtccttaattcgaccgaatattttaatgagctggagtcattcttatactaattaaaattaaataattttttaaattattaaataataatttaagtcaagctgatttaatccgaatttataaaaacattattcaaaactttacccaaccagacaaatatcttaacccttgaaagcttgaacatgtctttaaaaagtttggaagtcatgtgaccaaaacattggttttggattgtaagcatattttgaaatacaaatttaaataattttttattgaaagaatgatg

SEQ ID NO: 13923 - DNA, 318 bp, Gossypium hirsutum
  Clone ID: LIB3145-005-Q1-K1-A6
caagttgttctaaccgggcccgggaattttctctcgatacatcctgatgctgaggagaataggattgtttctttatcagcaaacttggactttatgatcttcaatcacagagcgaaagcacttccttcagaaactgatatgaagctgaagcattaagatcaaagaagcttcatagtcctttgattaaggagattagcactgttggcaggtctgttgaacgtaagagtagagagcctatgtcttaagtcattgtcgattgttttctgaagtgatagtgtttttttaccctttcattacttgctagaatttggattttgg

SEQ ID NO: 13924 - DNA, 430 bp, Gossypium hirsutum
  Clone ID: LIB3145-005-Q1-K1-A7
gaagaacgagcacatgacagaagatatgttttgtaatgaattccacctcgttgatcgtggagtcatggagaattgcttgaaagtttccaaaggagtggaccatgtcttcaacctcgctgccgatatgggtgggatgggtttcattcagtcaaaccactctgtcattatgtacaacaacactatgatcagtttcaacatgcttgaggctgctaggattagtggagttaagaggtttttctatgcctcgagtgcttgtatctaccctgaatttaagcagttggacactaatgtgagcctaaaagaatccgatgcctggcctgctgagcctcaagatgcttatggcttggaaaagcttgcaactgaggagttgtgcaagcactacaccaaagattttggaatcgagtgtcgtattggaaggtttcacaacatt

SEQ ID NO: 13925 - DNA, 377 bp, Gossypium hirsutum
  Clone ID: LIB3145-005-Q1-K1-A8
gatgaacttccagaatacatgaaaccaagctacaaggcactgttagatgtttatgggggaatgaaacaactggtggctgagcatgggagacaatatcgtgttgaatatgcgaaaaatgcgatgatacgacttgctcagtcttaccttgtggaagccagatggactcttcaaaactacaaaccatcattcgaggagtttaaggcaaatgcattgccaacttgtggttatgccatgcttgctattacatctttcgtcggcatgggagatatcgtaacactagaaacctttaaatgggcagccaatgatcctaagatcattcaagcttccacaattatttgtaggtttatggatgatgttgctgaacacaagttcaagca

SEQ ID NO: 13926 - DNA, 375 bp, Gossypium hirsutum
  Clone ID: LIB3145-005-Q1-K1-A9
cgataagatatacgcacctcttataccctttcttcccacacagaggcaaagccccctgcggcctttttaaaccggagaatcaaccaaaaccattttaaaactttccatctaaaatttctaagtcagcgcagaatggttccccctgaaaaccccaattactggtctcacttctattactcaacctagatcgacgatatccctgttcccgaccgaccttacaccggtttttcttggtccacgcaatcaaccaacgctcctaccgctgtcaatttggaaatttacaactcatttaacgatctggatagccattcagaatctttttcaaagaacacaggtacatctgaatcatgcaacccttctatctcaaaaacattt

SEQ ID NO: 13927 - DNA, 391 bp, Gossypium hirsutum
  Clone ID: LIB3145-005-Q1-K1-B1
gcccacgcgttccggcttaatttatgggggtttttaacaaattgcctagtttcgatccggaactagccgtaggcgaagtttgggaagttgctgaaggcaaggtcggccctgatgttaaagtttttaatgtggtggatttcggtgccaagcccgatggaaccaccattagcactatcaattttattagggcattcaaagcagcttgcaatcacaatggccgtgcaatgctggtgatccctgagggaaatttcttattaggatcgatgttattgtccggaccttgcacttttcaacctccgttgatggttcaattcaacggaaaccttttgccgcaaggttcaacgtccacggccgaaaatgcagactggatcacattcataaactttaatgg

SEQ ID NO: 13928 - DNA, 400 bp, Gossypium hirsutum
  Clone ID: LIB3145-005-Q1-K1-B10
gaaaaccggggcgggcacgcgtgcggaacattcccatttccaatctccagcttctcaaggtaaatatgccgatcagaaacatcgggggtgttcggcccgaagaggctactcaccccgatgctctcaaggctgctttggctgagttcatctcaaccttgatcttcgttttcgctggatcgggctcaggaatggcctttaacaagttgactgacaacggagcaaccaccccggctggtctcgtagccgccgctctagctcatggcttcggtcttttcgtcgctgtctccgttggcgccaacatctcaggtggccacgtcaaccctgccgtcaccttcggtgcttttgttggcgggaacatcactctcttgcgcggcattctttactggatcgcccaacttct

SEQ ID NO: 13929 - DNA, 290 bp, Gossypium hirsutum
  unsure (1)..(290): unsure at all n locations; Clone ID: LIB3145-005-Q1-K1-B11
cttcaacgcatttnaaaacgttttacatnaagagnncnaagccatcactgccgcatttttttaaagggatacagccccaccacttcatttgcttgccangcacctacatgtcgatccctccaagtcaatgaactcaagcctatggaaggaagatacaatctgcattgaatggcttaacaaacaggaacccaattcaattgtgtatgtgaactatggaagcattactgtcatgttcgaaaaacatctcaaaaaaattgcatgggggttggctaactctaagcacccatttt

SEQ ID NO: 13930 - DNA, 331 bp, Gossypium hirsutum
  Clone ID: LIB3145-005-Q1-K1-B12
gcgcccacccctccgcccacgcgtccgattctctctctttgtcataacagccgtagcatcgtgcgtcaacaactctttccttcccagagttcacagagatttgcagcgtaaataagatcttattaagatatagtttgggggttgtagatattgctacccgttttgtttaaacatggtgatggtagagtcgattgcaacaacttcacttcttggacaccgccctttatgtggaagattttccgctagggatgtctcctgcaaacagaaatctttgagtaacttcctgtcttctttcaaagaatttattggccaaacgaatggtggtccttct

SEQ ID NO: 13931 - DNA, 392 bp, Gossypium hirsutum
  unsure (1)..(392): unsure at all n locations; Clone ID: LIB3145-005-Q1-K1-B2
tcggccacgccttccggattcttgtcgaacccgagggaaaaatttaaaatcccatctttagggtgtaccattttctcaggagaaacacanaggtcatataaaggaaggcattgcaagaagttctattcggaggaagggtgtccttacggtgataattgcacctttttgcacgacgagcagtccaagaatagagagagtgtagctataagtttgggccccggagggtacggtggtggtggcgccggcggaagaggaagtggcggtggtggtgggaatggatcaaatgcaaagccgtctaattggaagacaaggatttgtaataagtgggaacttactggttattgccctttcggaaataaatgccattttgctcatggagctgcagaactaca

SEQ ID NO: 13932 - DNA, 230 bp, Gossypium hirsutum
  unsure (1)..(230): unsure at all n locations; Clone ID: LIB3145-005-Q1-K1-B6
gtcctaagtctcaataccataaacgatnngccgaccagggattcaggcggatnggttgctttcagagaccctccgccggcacccttatgaagannaatcaaagtnnctttgggttccgggggagagtatgagtcgcaaaggctgaaaccttaaaagggaattgaaagaataagggcnnccatcaatttcaatgaatattatatanntagttgtatacccgtttgaatttg

SEQ ID NO: 13933 - DNA, 100 bp, Gossypium hirsutum
  Clone ID: LIB3145-005-Q1-K1-B7
aatattgaatttcaaaaaaaaaaaactatgatggttggtcaaaaaaaaaaaattcctaaaaaaaaaaaaaaaacctttttttttaaaaaaaccaccaaaa

SEQ ID NO: 13934 - DNA, 349 bp, Gossypium hirsutum
  unsure (1)..(349): unsure at all n locations; Clone ID: LIB3145-005-Q1-K1-B8
taaacccagctgtancgctcgaattcacggcaccgcttcagcagcgaagaccgcacagtataaaaggggatggggcacctcgatccctccggagcaacccaactagtcacacagagacgcttgacaggacactcgcggaacacatgttccctagttttcactccatcttggcaccgacagcaagttgcagagcccctcatttgccgatattgaagattactgaaagtaggaagatagttgcgagaaattcgccaaactgtaatctttattntagatggaagatcaagagtccacaatttttttgtaaattgtttggatcttacttgtaaattattaagaccatcatgtt

SEQ ID NO: 13935 - DNA, 313 bp, Gossypium hirsutum
  unsure (1)..(313): unsure at all n locations; Clone ID: LIB3145-005-Q1-K1-B9
gatcaataccaaaatatcttnccgatctttttctancacacccactatganaaaacgcgcgagcttttaaagcgagctgacgccacgttaacatgaacctgcncaaatagattattataacgatggccgactgttttaatgatttgagcattgaaaatcttgcttctttttaacaagagatggataactctttcactcttattcgttatataaagtatctttttcttttcaaccagatctatactttcatcaaaaatgtgaataatgttgaagatatacacaaaaatctcttacattaacttcaattccttaa

SEQ ID NO: 13936 - DNA, 398 bp, Gossypium hirsutum
  Clone ID: LIB3145-005-Q1-K1-C1
tcgaattaaatttaaccggaacttcattaaaattttattaaatggaattttaattttcaatggagccacttataaaaactctatttttgctatttaatacggacaaatttaattacatcatttatttcaatatgaccattcttttgaaaacatgtacttagatattcatggttcaacagatggatggaacgcaatccgagatatggtggttcgaggggctcctgctattgccataactgcagccctttcactggcggttgaagttgccaacttaaaagactttaatggcggatcgaaagatgccgcttcttttcttgaatcgaaattagaatatcttgtctcaagtcgaccaacggctgtgaatctttctgatgctgctataaagcttaaagaaatta

SEQ ID NO: 13937 - DNA, 288 bp, Gossypium hirsutum
  Clone ID: LIB3145-005-Q1-K1-C10
cataccacccttatttacaagacatctttttagggggactgaggcatataattctttatcgtcatccatcaactcgaggacctgatctttagaaatttggttgttcgaacccttttaactgattctttactatgggttctgctgcataacgttgaaacttatcttttaaatattttgctcctgtttcttaattaatacgattatgttttgtgcatttttagactagaaatttttcttgatcattaagataaattaggtaccttttttatacaccttaaataaaatttt

SEQ ID NO: 13938 - DNA, 295 bp, Gossypium hirsutum
  Clone ID: LIB3145-005-Q1-K1-C12
cttttatccaagctctaccataggaacattataaagtttgtagcagcatgcagaaaagcgccgttttattgtgttataacggaatatttatcggagggttcgttaagggcatatttacacaagcttgatcacaagtcccttcctttgcaaaagataattgctattgctctcgaagttgctcgtggaatggaatacattcattctcaaagagtcattcatcgggatcttaagcctgaaaacattcttatcgacgaagaaattcaattgaaaattgctgatttccgtataacttggg

SEQ ID NO: 13939 - DNA, 366 bp, Gossypium hirsutum
  unsure (1)..(366): unsure at all n locations; Clone ID: LIB3145-005-Q1-K1-C2
aaaacattgangggtttctttccttatggttctggctgtccaaagacatttcctgccgcgcgggccaggcttgtcttttctatgatctcattaacaacaagagaatctggtttgatatttggcgacaatcctgtctataccaatagagttgttcagtgggcagagtgggaaattgaattttttgtacgtttggtgaaggaaaatgcaccaccttcagagacaatttctgcactacgtgcagctagcatttgtgttcaggacagccttaactactgcttattgctggaatcacaagggttgaaactctcgaagttgcttctggtgctcttgcgtccgtatcttgaggaagttctggagttgaatttt

SEQ ID NO: 13940 - DNA, 355 bp, Gossypium hirsutum
  Clone ID: LIB3145-005-Q1-K1-C3
gccacccttccgccaatccgtccggctgttttgatccataagcataggcagactactgagggtatgcaatggatggttaggtgattccacaaacaataatggcaactacatttcataacgagcactttcctagtgctaactttaacttgaccagaaatagatgagggaaccaatcagtcattgccggtttgattgatatgggtcaagaaaattaggagtaagagaaggatgtcttggtgggtttttgtttcttttattcttttaaagttttttttgatattacgtagatgggggtggtgaattaaattggtgtataattagcaatatttttgtacgggatacataataatcaaca

SEQ ID NO: 13941 - DNA, 274 bp, Gossypium hirsutum
  Clone ID: LIB3145-005-Q1-K1-C4
aaaatgtcgctcctccaatcttccgtctatcctccgtcaacacttcgtcgtcgccgtcactggcatgcgcagcggcacaccccatcgcctcctcccatagagttccttccacttcgaattccttcgtcgcgttagaatcgtcatcgttaaagaccgttaactctatttcgagcgctaagaacaatagaaggaaaggcgttgtcggaaaggtgaggtcgagcctggagacggcgggagcaacggtggggcaggtgacggaggttacaaaggacac

SEQ ID NO: 13942 - DNA, 157 bp, Gossypium hirsutum
  unsure (1)..(157): unsure at all n locations; Clone ID: LIB3145-005-Q1-K1-C6
atgggggtattgtggaaaaggggatttctggttttttaatgggttaaaaccactgaggtctggtatagggggtttaaatgtgcttcctgatcaaaactagtgacttcgaatatttattcatatattgtaaagcaaaananaaaaaanaaaannaaaa

SEQ ID NO: 13943 - DNA, 323 bp, Gossypium hirsutum
  Clone ID: LIB3145-005-Q1-K1-C7
caatgcgccaccgtggtcgagagaaacctcttagctgacacggcggtgatcgttggagagaataaaaactgtaaacggaaagatgatttgaggaagatcgtgaccgacggtttactgtcacttggctataactcttcaatttgcaaatcaaaatgggacaagtctccttctttccctgccggtgattatgagtatatagatgtggttatggaaggggagagaatgttgatcgacgttgatttcagatcggagtttgagatggcgcgatcaaccgggacttacaaagcgatcgtccaatcactgccgttcattttcgtcggaaa

SEQ ID NO: 13944 - DNA, 364 bp, Gossypium hirsutum
  Clone ID: LIB3145-005-Q1-K1-C8
cccacgcgtccgggagaattgttgaaccattgttgtctccaattgtaaccccagaggggcttgagctgcctccattccgggaactgaatgaattatgcgactctcttggatattttattaaggaaaaatgtataaataagggggaagtggtgcacgccgagcttctattgcagctagatcatgatttgttggtaggagaggggtttgatagaagtagaaaagtagcaaaaggaaaagccgcttcttgtctgttgaaggaccttgagaacagaggaatctcccggaagaaaaaggaaacatgactatgtggattcaagtcaaaccatggatgatgactcgttagaaccaacaatccctaagatgc

SEQ ID NO: 13945 - DNA, 277 bp, Gossypium hirsutum
  unsure (1)..(277): unsure at all n locations; Clone ID: LIB3145-005-Q1-K1-D1
ttttttccttcccaagggcccatttttgtttaaggttttttacaattttctttctaaacttgtgtgtattgtacttcacattttatgctattataagcacttgcccccnnaaaaaaaataaaacataaaaaaaaacttaaatgatcccaataaaaggggaaaccccaaaataaaaacaacatcttttttngttnttttggcaaaaaaaaagaaaataataaaaatattggcggggggccgctttcataaaaaaaaaattttttggccctcttttttg

SEQ ID NO: 13946 - DNA, 239 bp, Gossypium hirsutum
  unsure (1)..(239): unsure at all n locations; Clone ID: LIB3145-005-Q1-K1-D11
ccttacactgggtttgcactggcaaggtacgattgcgattttttataggggggggcggggacattttatanttnnntaactgaacttccaattacatctattgctaanttgattgagaccatctgctgtaagatgatggagttgatgattactcagaagtcagattcatgtctggggttgacaaaattaactccagctgtggggttcaaattagaacaacatattctttaagctaacat

SEQ ID NO: 13947 - DNA, 297 bp, Gossypium hirsutum
  unsure (1)..(297): unsure at all n locations; Clone ID: LIB3145-005-Q1-K1-D12
ggaaaaacccgggcgcgacgccagcgcagtccgttctttagctgttgatagtanntaatatgctatagncatacccagagatggagaggccaaagaacgcaagcattgtttaggtgtgttgagtgtcggnttttaggtttgctgcccttttttcttcccaccaatagaggtcaattagcagtgaccctccaactggcnccttggtgagcccagaaaaacctactatctctagctccttgaccctcatagctggaaccctcccccttcaaggttcacaatggcacaaaccaccatctt

SEQ ID NO: 13948 - DNA, 360 bp, Gossypium hirsutum
  unsure (1)..(360): unsure at all n locations; Clone ID: LIB3145-005-Q1-K1-D2
tcgnccacgcgttcgnccacgccttccgaaacccgctgatcaaaccggttaaatttatttttggggtgaaaggccaggatgggaatgaagtgttttttaggattaagagaagtactcaactgaagaagctgatgaatgcgtactgtgatcggcaatcagtggatttcaactctattgctttcctgtttgatggccgccgtctgcgagtggaggaaactccagatgagttggaaatggaagaaggggatgaaatagatgcaatgctacatcaaactggtggtgctatggcctaagtagctagtttttaggttacgtaatgcagtaggatttaaacggtagtacttacgaaatcaggatcta

SEQ ID NO: 13949 - DNA, 387 bp, Gossypium hirsutum
  Clone ID: LIB3145-005-Q1-K1-D3
gcgattaaaatgttaaacatgtaaaccaatcttggcttttcttaagccttttaaaaattttggggggcccccatgtgatgtttggattaggaatgtatatttatccgctgatatttgtcccaggaagggattcttgaaccaataattgattgtttttgcatttaatttgcatgccctatttgtatttcaaacaataggaccgatgcgtagatatctaactcttggttacctatttgtctagtcttctacttattggtgcttaccttgttaatgtggttgcacataaagtgtttgtcattcacaagcctcatggtaaactaatcagtaattaaatcatccttgaagtaaaagtttgaactatcagggtatactttttgcaaaagattt

SEQ ID NO: 13950 - DNA, 231 bp, Gossypium hirsutum
  Clone ID: LIB3145-005-Q1-K1-D4
cgtccaatcaaaggattggccggtggaaacgacgcgctcgttgagggccaaggaaggaaggaaggagagagagagagagataaaaaggagaatctgcttcaaagtttcaaactttcccgtctcatatctaatccccaatttctctcttctgctctaggttccttcctgtcctcttaagattcttggtctgttcaaagcgtcatggcctcgaagcggattttgaaggaactc

SEQ ID NO: 13951 - DNA, 145 bp, Gossypium hirsutum
  unsure (1)..(145): unsure at all n locations; Clone ID: LIB3145-005-Q1-K1-D5
attggcaagttctcagactcacatggaagagaagtcagcaccagcaatgcgatattcgtgacaacttcgacattaactaaagaaactcaagttgtttgtcataaacagcacacatctgangataaaatattgggaaccaagggat

SEQ ID NO: 13952 - DNA, 274 bp, Gossypium hirsutum
  Clone ID: LIB3145-005-Q1-K1-D6
aaaaggtattttattttgaaccaaagttccatccgtcctaatcgaccacctttggcggggatcaaattccacggaagccctctgtccactgctacacaaagggttcttgcatgcctttacgagaaaggcactgattttcagtttgttcccataaacatggctgctggtgaacataaatccgaaaactacctttccctcaatccattcggtcaagttccagcttttgaagacggggacttgaagctcttcgagtcaagagcagtcacccattaca

SEQ ID NO: 13953 - DNA, 448 bp, Gossypium hirsutum
  unsure (1)..(448): unsure at all n locations; Clone ID: LIB3145-005-Q1-K1-D8
cggaaaacccggcgggacgcacgcgtccgcccacccctcctgcctttgtaagcctgacactgactctattcttaattcgggtcggcgcccaatttgggaagctgtacgagaggaagccaagctggaggcagaaaaggaacctattttaagtagcttcttgtatgcaagtatcttagcgcatgattgtttagaacaagcattggcttttgttcttgccaatcgtctacagaatcctacactcttggcaactcaacttatggatatattttctaatgttatgatgcatgatagagatattcaacgatcaatacgcctggatgtgcangcattcatagatagagatcctgcttgtttatcgtatagttcagcgttactataccttaacggataccattctcttgcatcatatcgagtagctcatgcctttatggaagcagggcgaaatgtg

SEQ ID NO: 13954 - DNA, 363 bp, Gossypium hirsutum
  Clone ID: LIB3145-005-Q1-K1-D9
cccacgcgtccgacaaagtcgaagaacgaagcagttcgcagccaggactttgagagaggtggggtattacgtgatcgggaaattgaactcagggctcagatcactgcaatccaagagaaagacaaggagatgaataaggcagaggcggaggcaggggatggagggcctgtagtgactgaagtcgacattcagcatatagtctcttcatggactggtattcctgtcgagaaagtatcaactgatgaatctgatcgcctacttaaaatggaagagacccttcataagcgagtcattggtcaggatgaagctgtcaaagccattagccgtgctattcgacgtgctcgtgttggtctcaagaacccc

SEQ ID NO: 13955 - DNA, 354 bp, Gossypium hirsutum
  unsure (1)..(354): unsure at all n locations; Clone ID: LIB3145-005-Q1-K1-E1
tcggggcattctcgaaataaatgggtcattggttcaactatttcttcacattcgggaccatttggggttaactgttaccttcctgtcctcaatattaaccttggtaggcaaataattccatgaaagcctccatattgtaagctntatttttgttggtagattcaggctctaaagttttttgtagaattttctgtagatggtttgtaaagcataagctctaggattttcatccgaactctgtaatagtttataggcacttcggaccgtgaattcacccgacatttcacctccccaaatgagaaaatctttatgaggtgttcgtgccagagggattcgaaagattcttacagcgtc

SEQ ID NO: 13956 - DNA, 370 bp, Gossypium hirsutum
  Clone ID: LIB3145-005-Q1-K1-E2
gcgcggaactgctggtgtttggagaattaaagcctctggaggaatccggaggctggcttgggggactactgtagaggacatggacatagctgttcgtgcgcatcttaatggttggaagttcatcttcctaaatgatgtgaaggtcctttgtgaagtccccgagtcttatgaagcatacaggaagcaacaacatcgatggcattcgggaccaatgcacctattccgcttatgccttccagcaatcataacttccaagatagcaatatggaagaaagcaaatttaatacttctgttctttttattgaggaagcttatccttcccttctactccttcacattgttttgcataattcttcctctcaccatgttt

SEQ ID NO: 13957 - DNA, 385 bp, Gossypium hirsutum
  Clone ID: LIB3145-005-Q1-K1-E3
agatgtggcaaaacttggccgtcgttacggtggggggagctgaaaaaggggactccggcatgagggcataccagagtgcaagaaaaaccgagacttcattgtctaaatgtgcactcatggcaagaatgacaacaaagatctcttgtgatgagaacataagttctcccggtcgtgttttgagggaagacgaaaacgatcaaagtatgggtattattaagaggaagaacgataacagccttaattggaagtggatcgccatagccggaaccgtggcgctggctttcggacttcgctcaggcgtaattggtaaggcattgttagttggagcagggcagagaattggccgacggtgagattttttttttctttggtctttttacatttg

SEQ ID NO: 13958 - DNA, 226 bp, Gossypium hirsutum
  unsure (1)..(226): unsure at all n locations; Clone ID: LIB3145-005-Q1-K1-E4
gtcacctactcttcattccatttgcagttcatcacagaacgagaagcagagactttttttctgacagatgatgatttaaagcatttatataaattagttgaagaaaaagatggaggtcctgcttggattcacatgatggataagtccaccccaactatgggatatcaagcttggcaaagagatcttgagattggtcctacacaatatncgtaccggactgttttca

SEQ ID NO: 13959 - DNA, 235 bp, Gossypium hirsutum
  unsure (1)..(235): unsure at all n locations; Clone ID: LIB3145-005-Q1-K1-E5
ttttatttcttctttaaccaggctttaacctttgggccaaaacctttccacgcgtgggttatccaaggctgggatgcctccattcanagttgctatctcggagtgcatgactgccttcggtgcgaggatctccccctcctcgttccgtacgagcaaacctgtagtcgatctggacgataatcggttgaaagctgcctcaaaataaaactgtgatcctttccccttctacctattt

SEQ ID NO: 13960 - DNA, 273 bp, Gossypium hirsutum
  Clone ID: LIB3145-005-Q1-K1-E7
ggataaaattgcgccgttttctaaaggggaatggtagttaattcaaagtgagttaaaacctggaagtttcatttgcccaaaaaaaaaaaaaaaaaaaaaaaaaaaaaaaaaaaaaatttaaaaaaaaaaaaaaaaaaaaaaaaaaaaaaaaaaaaaaaaaaaaaaaaaaaaaaaaaaaaaaaaaaaaaggggggggccgttttaaaaaatccaaatttacttacccgggattgcaaataaataatttttttttagggcccccaaaataaaatt

SEQ ID NO: 13961 - DNA, 403 bp, Gossypium hirsutum
  unsure (1)..(403): unsure at all n locations; Clone ID: LIB3145-005-Q1-K1-E9
ggaaaaccggcgcgcgcacgcgtccggtgcccttgaacttcaaactcttctgtattttttaaccttcatatatatatagataccgccgcttttacgagggagctagtgtancctccaactcttcatcgtcttaggcttcttcttattataattctcttgccattacactatcgaaaaaaaaaaaaatattttataaaaaaaaaaataaaaaaaaaaaaaaaaaaaaaaaacaaaaaaaaaaaatatataataaaaaataataaaaaaaaaaaataatactattcataataaaaaaaaaaaaaaggccgccccttttaaagaaccaaatttttcgacccgctcattcacaaatataattttttttattgtccacccaaatttaattttcttggccgctttttta

SEQ ID NO: 13962 - DNA, 339 bp, Gossypium hirsutum
  Clone ID: LIB3145-005-Q1-K1-F1
ccacgccttccgatcccaaccttttttttttgaagggaacgtaacctatggcaccatggcgcctttggaagtgccagtaaagggtattcttattaacgggcaattcccgggaccaaatattaactctaccaccaacaacaatattgtgatcaatgtattcaataaccttgatgagccattccttgtaacatggaacggcattcagcataggaagaactcttggcaagatggtgttctgggaaccaactgtcctatcccccgtgggaagaattacacatataaattccaggtgaaggatcagattggcagctacatctactatcccgtgacggctatgca

SEQ ID NO: 13963 - DNA, 362 bp, Gossypium hirsutum
  Clone ID: LIB3145-005-Q1-K1-F2
tcggcggcttctgcttctatttactaatttcttactcttccacctccttgggcccatcctttggaccttttccaagctggttaaagaccaccctctggtgttgaagtaccacaatgggccactcttgaaggggaagatcaccgttaatctcatctggtacgggaagttctccccaacccagcgctccataatcgtcgatttcatcaactctttgagctctgccgtcaaacccaaagattccgtcggcgtcgttttggtggaaaacgacggagaaatacaagtccggttcctccactttggtcgtgggcaaacaaatcctcctcgaaaattacccgctcggtaaaatccttaagaacccacac

SEQ ID NO: 13964 - DNA, 197 bp, Gossypium hirsutum
  Clone ID: LIB3145-005-Q1-K1-F4
tgtatagaggtgaaacaacaacaacgacgacaacaacagaggcaggtttttttttgagaggacaagatcaacaagacaacagttcaccaccaactgatcaaactgaaaactggttttggtatagaaatgaagatattccttacaagggttttgaactatggcaacaacaacaacaacaacaacaacatatttacatg

SEQ ID NO: 13965 - DNA, 242 bp, Gossypium hirsutum
  unsure (1)..(242): unsure at all n locations; Clone ID: LIB3145-005-Q1-K1-F5
ttcctgaaaaaaaactaaaattcttaggatgtaaagaggagattgacgatggtaaattttaagcagcagaacccagttcaagcaagccagtggaacaaaaagctaaaccaccagagccacctaaacaagactacatccatgtgcgagccagaangggtcaagctactgatccccacagcatcgctgaaagattacgcagagagagaattgcagagagaatgaaactcttcaagactgtttcc

SEQ ID NO: 13966 - DNA, 392 bp, Gossypium hirsutum
  unsure (1)..(392): unsure at all n locations; Clone ID: LIB3145-005-Q1-K1-F7
cggaaaacccggggggacgccacgcgtccgcccacccctccncaaaagcttaacattttcttagagaggggccaaatcgactctatacgccgcattaactatacagaccgagggattgaaggagatgataagaggacatctagaacaataattatccagaattcaagaaccccagggacacttgtgcatggtaaccaacatgacaatagcagtctgagcattggccgtgtaacagctggtatagagtttagtcgaccactgaggccaaaatggagtgggacagcaggtcttatttttcagcatgctggtgctcgtgatgaaaaaggaaatccaattatcaaggacttctatggcagcccacttactgcaagtggtaagccttacgacgatat

SEQ ID NO: 13967 - DNA, 308 bp, Gossypium hirsutum
  unsure (1)..(308): unsure at all n locations; Clone ID: LIB3145-005-Q1-K1-F8
tgcacagccaantgatcttaattggtatgtgtgagactgtgatgaatgagttagggccatattgtttgatagggtaatgggagctaatcagttgacagtgaacaaatttttttgtctataaaaaaaaaaaaacaaaaaaaaaaaaaaaaaaaaacaaaaagaatttattaaacaaaaaaatcaaaaaaacgaaaaaaacatcaactctttaagctctgtcatcaaacccaaaaatctcctcggcgtcaattttaacggaaaaaccaccgagaaatacaagtaacaggttcttcactgtcgtctttttc

SEQ ID NO: 13968 - DNA, 375 bp, Gossypium hirsutum
  unsure (1)..(375): unsure at all n locations; Clone ID: LIB3145-005-Q1-K1-G1
ggaaaaaccggccgagcgcgcgtgcgnccacgccttccgaaatgttggtgggcctttttgaattcctaccggggggattccatatcgaggtgttcttggtaaaaacggtggtaaaaatggcggtggtttacctcangagctacacaagaatggtggtaacaacggtggtgggaacggtggcaaaaagggtgctcccaacggtgtttccgatgggtttcctaccatgggtggcggcgctaatggtgggaacatgagtcaacaacaaagggctgctgccatgaacatggcaatgggccaaatggggagcttaccccaaatgggtaacatcccagcagtgcaagggttaccggcagcagccattaacggcggcggcgg

SEQ ID NO: 13969 - DNA, 391 bp, Gossypium hirsutum
  Clone ID: LIB3145-005-Q1-K1-G2
tcgggaatttattggtggtaccaaactttattacaaccctcctgaactaactgctggttcctgcgccactgttctgagagatggttatgatccagttgtctcagtgttgtctcgacatggagctgctttgcatattccctgcttagagatgatggacagtgaaaccccaccaacctatctttgcagtcctgaaggattactgaaacagatgcagtctgtttcaaagaaaaggatcgttaacttgattggaagaaatacaaccgaacgacttgacaaaactggactatggaaaattcgttcaaactgttacaatccccaagcagaagttgtaagatcatttacttatttcagaatgaatgatagtatatttagggttgaaaattggaataac

SEQ ID NO: 13970 - DNA, 278 bp, Gossypium hirsutum
  unsure (1)..(278): unsure at all n locations; Clone ID: LIB3145-005-Q1-K1-G3
aatttcaattacantttaatatctgcgtttatgggctcttagcctaccccattcagagttgtcaagtgtattttatgacaacgttttacttttggcctgaggattcaacaatatcttcattcttatcatcggtatatttgaatttatatgcgcaacagttggtgtgttactagtgatggaaaccctcagcgcattcttacacgncttgaagcttcattaggttgaattttcaaagtaagttctactaaggagaccgttataaatntcaaccattttca

SEQ ID NO: 13971 - DNA, 187 bp, Gossypium hirsutum
  unsure (1)..(187): unsure at all n locations; Clone ID: LIB3145-005-Q1-K1-G4
tacttcactctccctctgtcttcaagaaatggatcgtagaagtgcatttgcaggtgctttgatttgctgtgtggtgaccgctgtcngtggtcaatctccggcagcctcacctactaaagctccgccggccgcggctactcctgctactgctcccgctactgcccctgttagcaaacctaaatcaccg

SEQ ID NO: 13972 - DNA, 172 bp, Gossypium hirsutum
  Clone ID: LIB3145-005-Q1-K1-G5
aaaaaattggccacccaaagttatcacactatcagcacccgcctgcaagccagaaagcttaaatctggcaaatcctacaatcaaatagccgaagaaaccggcttaaccaacgtttacgtggctcatctcctcaaacgccaagctcagctcaagactgaaaccgctcctaaac

SEQ ID NO: 13973 - DNA, 430 bp, Gossypium hirsutum
  unsure (1)..(430): unsure at all n locations; Clone ID: LIB3145-005-Q1-K1-G7
cggaaaacccgggccgagcggcacngacgtccggttctaggtgttcttcccagcaaacctttatcaggngaaagggcgtgcagagggcagaacgccgcnccgagttgataaggtctagatgatcgttgctgttttatatgcatcgatgctgccttacctgtgctggaccagtatgtggaacacagggtagactgcatgatagatgctggtttgctcaatgaagtgtatgacatttacaatccaaatggaaattatactctaggtttgcgacaggccataggtgttcgagaatttgagaattttcttcaggcttacttttctgacagcttggatgatgagacaagtgattcttctgatggaactcttctaaagctgtcaacaaggattgatgataaattgttcaaagaaaatactangggaatactaaatt

SEQ ID NO: 13974 - DNA, 447 bp, Gossypium hirsutum
  unsure (1)..(447): unsure at all n locations; Clone ID: LIB3145-005-Q1-K1-G8
acaggntagaaaacccggcgcgacgcacgcgtccggccgtaactgtactatgcttcatcctggttatggtttccttgctgagaatgcggttccgctagatatgtgcggagatcggaggatcaactttattgggcctaaccctgacagtattcgtgttatgggtgacaaatcaactgcacgagaaacaatgaagaacgcgggtgttcctactgttccgggaagtgatggattgttacagagtacagaggaagcaatcaagcttgcccatgagattggctttcctgtgatgatcaaggccacagccggtggtggagggcgtggaatgcgtcttgctaaagagcctgatgagtttgtgaagttactgcagcaagccaaaagtgaagctgcagctgcatttggaaatgatggagtttatttggagaagtacattcaaaattcaaggcacat

SEQ ID NO: 13975 - DNA, 223 bp, Gossypium hirsutum
  unsure (1)..(223): unsure at all n locations; Clone ID: LIB3145-005-Q1-K1-G9
attattttacntttatctaaatttatatattacctctcaacctnattcncaatacaaaaaaataaaactcgattctctttttactattactgtttcaaaaaaactttgctcaaagaaatacaaataaacaattgatatctaagtttgctattcaatcttataaaactcattttttattttctaatcttttttctcatataaaaaaaaattttcatatttttca

SEQ ID NO: 13976 - DNA, 195 bp, Gossypium hirsutum
  Clone ID: LIB3145-005-Q1-K1-H3
tggctaaagcagttcaatatgatgaaagctttggtaacacagaaaagaagaattagtgagggaatgatgcaacaaattaccttatacatgtaaactaatcgcaaccagcaaccttacgccatgtaattgaacaaaaaaaaaaaacattatgcaatgtatggatgtctatatttataaaggctaccaatttttctc

SEQ ID NO: 13977 - DNA, 216 bp, Gossypium hirsutum
  unsure (1)..(216): unsure at all n locations; Clone ID: LIB3145-005-Q1-K1-H5
ggcttaggtccagttcacatagtcttggcaggtcaaggtcaaaaagtcgaggcagacttgaagctggaaatcctggcaacacactntatgtgaccggtctatctcaaagggtcacagagagggaccttgaagagcatttctccaaggaggggaaggtggcatcgtgtttccctggttgttgaacctcgtactcgcatatctcgtgggtttgctttt

SEQ ID NO: 13978 - DNA, 219 bp, Gossypium hirsutum
  unsure (1)..(219): unsure at all n locations; Clone ID: LIB3145-005-Q1-K1-H6
cttcctgtgttgtggacctttttattttcagttaatatggatgaggaaaattatgaaaacccatgtctttttgaaccatggagatgggagaaaattggagctgctgctaataacaatagttntacaccatttggaggtggccaaaggctttgccctggtttagaactatcaaggcttgaaatttcaattttccttcaccatcttgtcaccacttacaga

SEQ ID NO: 13979 - DNA, 379 bp, Gossypium hirsutum
  Clone ID: LIB3145-005-Q1-K1-H7
cccacgcgtccgccagctgcagattcttgagttgcttgagaatgctatttttacagctggctataaggctgtcttgcatgttcattccgttgttgaggaatgcgagatagttgaactattacagcaaattgatccaaaaacaaggaaacccatgaaaaagaaagttctttttgtgaagaatggtgctgttgttgtatgtcgtgttcaggttaacaactcaatttgtgttgagaagttctcagattttcctcaacttgggaggttcactcttcgtacagaaggaaaaaccattgcagtgggaaaagtcactgatcttcctgttgcttaaaacaattttgttcttagaggcgagaatataaaggtacaaactcgtatacct

SEQ ID NO: 13980 - DNA, 302 bp, Gossypium hirsutum
  Clone ID: LIB3145-005-Q1-K1-H8
ctttatacccccactttctttttcaaaagtcggattgtcgatttattcggtttgatcagctaaattataagaaaaattaggttaaaaaaaaaaaaaaaaaaaaaaaaaaaaaaaaaaaaaaaaaaaaaaaaaaaaaaaaaaaaaaaaaaaaaaaaaaaaaaaaaattttaaaccccctaataaaaaaaaaaacttccttaaataaaccaccaaaaaaaaaaaatctacccggcggttaaaaacaaagaaacaattaaaaacccccctgatttccaaaaaaaaaatttttaaaaaattacccc

SEQ ID NO: 13981 - DNA, 124 bp, Gossypium hirsutum
  Clone ID: LIB3145-006-Q1-K1-A1
gatttcccgtgcgattgcgaaccgcgaaaacgtggctggttaaaccattgggcctacggaggcatagagctactgtgcggctgctgtttcggcacctcacaaagaaggtgactttggggacgcc

SEQ ID NO: 13982 - DNA, 416 bp, Gossypium hirsutum
  Clone ID: LIB3145-006-Q1-K1-A10
gtcttcttgggactagggttgagtggctttaccatatcctccaggccttcaactcaggtgatctagctcgctatcaagaattgtgtcatgtgcacaatgctgcattgagggctcaaccagccttggttgagaatgagaagaagctgtctgaaaaaatcaatattctatgcttaatggagattatcttcagccgcccatccgaagaccgaaccatacctttaaaagttattgctgagcgaacaaaactgtccattgaggatgttgagcatcttcttatgaagagcttgtctgttcatctgattgagggcacaattgatcaagttgagggtacagttcatgtctcctgggtgcagccgagagttctgggaattccacagatcaaatccttacgtgacaggttggataattgggtaggc

SEQ ID NO: 13983 - DNA, 422 bp, Gossypium hirsutum
  Clone ID: LIB3145-006-Q1-K1-A12
gatgagaaaaaatcttgatttcttcaatcctgaggtttcggccaaagattctccagcgcgtgacggaccatttctggtaccccctttccaggtaaaagctttctcttctcttaagagcctccgtagcaatagtatgggtgtagatgttttttttttttgaataaaagtaaacttaactcttggaaactatatttcctttcttgaatatatctgataattgctccgataaccgatctgtcaataatggagctttgacacttcttgataacagttttcgagtttcctataatgtcgattttgttgattcccaaactaatacctagttttattgcctgtaaacctgcatatgcctctgctgtgaatggattttcaatgttggagtgttgaactgcctgtgttgcaaggatttccccttccccgtt

SEQ ID NO: 13984 - DNA, 298 bp, Gossypium hirsutum
  Clone ID: LIB3145-006-Q1-K1-A2
tcgtccacacgtgcgctaaaatggtacaatctctggacatgctactcccaaatgactacgtttacggttgagcacgccaccatcatgcaccgcaaaattggctctttcgtaatccccgcaggatctttctccgcttttctcattatcagcattctcctcttcacttccctaaatgaaaaatttttcgttcccttggctcgaaaaatcacccataatccccagggaatcactagcctccagaagattgggattggactagttttttcggtagctgctatggtaggggctgctattattg

SEQ ID NO: 13985 - DNA, 186 bp, Gossypium hirsutum
  unsure (1)..(186): unsure at all n locations; Clone ID: LIB3145-006-Q1-K1-A3
agaaatggcaaaagcttctgggatctcccttctttccttatttatttgcattttctcctcactgagctttgcctatgcttcaactacagctccacctgcatcgttcaatcaacaaatgaagattcgagggcgtaggtcatgtttattgcgacacttgtcgngttgaatttgagacatctatcaacg

SEQ ID NO: 13986 - DNA, 381 bp, Gossypium hirsutum
  Clone ID: LIB3145-006-Q1-K1-A4
cccacgcgtacggattggagcatgcttcttgccgctatcacaaccattttcctggctgctgagaagcaatggatgatgcttgattggaagccaaggcggcctgacatgctcattgatccttttggtatagggaggattgttcaagatggtcttgttttccgtcaaaacttctcgattaggtcttatgagataggtgctgaccgtacggcatccatagagacgctaatgaatcatttacaggaaaccgcgattaatcattgtaaaagtgctggactgcttggaaaaagttttggtgctacccctgagatgtgcaagaagaacctaatttgggtggtcactcggatgcaagttgtgtttgatcgatatcctacttggggtgat

SEQ ID NO: 13987 - DNA, 420 bp, Gossypium hirsutum
  Clone ID: LIB3145-006-Q1-K1-A5
gcagccggtcgctcaactttgttcaaattgtggcgtcaacatgggagaatatttctgtgcaatttgcatgttctttgatgatgataccgagaaggagcactttcattgccatgattgtgggatctgcagagtcggaggtcgtgataacttttttcattgcaaaaagtgcgggtcttgctatgccattgcgttgcgagataatcatttgtgcgtggagaactcgatgcggcatcattgccccatatgttatgagtacctattcgattcgttgaaagataccactgtgatgaaatgcggtcacacgatgcactgcgaatgttactatgagatgataaagcgaaacaaatattgttgtcctatatgctcgaagtcagtaatcgatatgtctagaacctggaagaggatagacgaagagataga

SEQ ID NO: 13988 - DNA, 399 bp, Gossypium hirsutum
  unsure (1)..(399): unsure at all n locations; Clone ID: LIB3145-006-Q1-K1-A6
atgagagtgagtgtaaattatgcgaatcctttgtgacgcttgtgaaagtgctcctgctattgtcttctgtgctgctgatgaagctgctctctgccattcttgtgatgaaaaggtccatatgtgcaataagcttgctagccgtcatgtccgtgttggactagcanatccaagcgctgttcctcgttgtgacatatgtgaaaatgcacccggtatgcatacagctttcttttattgcgagatagatgggagttccctttgtttacaatgtgatatgattgtacattattgtggtaaaaaaacacnatggaagataccttcttttaaggcnaaagagtcgagttttccgggtgaatacgtcggttgaacccgagtgaaaaccgggagaggccaaaatcaact

SEQ ID NO: 13989 - DNA, 124 bp, Gossypium hirsutum
  Clone ID: LIB3145-006-Q1-K1-A7
tcgtccacgcgtgcgctcaaattggacaaactagtttcatgatgaaatacattggcgacgagaacgatgatgaacacgacgacagtgcagagaaagggttgaatttgatggataaaaccttttt

SEQ ID NO: 13990 - DNA, 133 bp, Gossypium hirsutum
  Clone ID: LIB3145-006-Q1-K1-A9
atgcgtccacgcatacgtacggccacacctgcggctatcatatactcttcaactgccactgtctctgggtctctctgaaccaaaatatttcaagcttttcacttaacgagataccatgttggttaaccaggat

SEQ ID NO: 13991 - DNA, 422 bp, Gossypium hirsutum
  Clone ID: LIB3145-006-Q1-K1-B1
cccacgcgtccgcccacgcgtccgcccacgcgtccggctctctgtagccgccgcctgcgtctctctcttcatctctctgaaccaaaaagtctttagcttttcgcttcgagagagaccatgttggtttaccaggatctcatctccggtgacgagcttctttctgactcattcccctacaaggaaatcgagaatgggatgctgtgggaagttgagggaaagtgggttgtgcaaggagctgtcgatgttgacattggtgccaatccttcagccgaaggtgctgatgaggatgaaggtgttgatgaccaagctgtgaaggttgttgacattgttgacactttcaggcttcaggagcaaccccctttcgacaagaagcagtttgtcgtgttcatcaagaagttcatcaagaacttgacaccaaaact

SEQ ID NO: 13992 - DNA, 414 bp, Gossypium hirsutum
  Clone ID: LIB3145-006-Q1-K1-B10
aagaaggcacgggataaacttccgagctctaggaagaagaaaagcaaattggctagtgctgaaaaatatccggtttctggagatgatggaattgatgttcgtccaaagaaaagcaaaagctctcataaaaaaaaggtttccaccaatgacaaggttgttggtaaggacaagccagctgacattcagggagaaccagagaattcaagcacccctgaaattgatgaaactggtgatgacaaaaccaatctggggaggtcctcccagcttcaaaacactggtaaagggagtgctgatgaacttattacaactactgaagttaaaaagctccctagcagaagtgcacgacgtaaaaaggctaaaaggcgatggttgagggagcaagccaaacttgtaaaggaaaagccgcagtcaaaa

SEQ ID NO: 13993 - DNA, 416 bp, Gossypium hirsutum
  Clone ID: LIB3145-006-Q1-K1-B11
gttcttagagaaagatggattggaataagtggaaggatatctacattgaatggacaagaagtgggtacacgagcttgtacagaactgtcacgagcatatttgtacactacaagtccacatctgttcagcggagatgctaatgaggcatttgcccgtgttagagataaggtcaaagtgccactatatggctgtgactgctacgcttatgccctcttggcttctggttatgtggatcttgtcgttgagtccggcctccggccatacgatttccttgcacttatacctgttatagaaggtgctgggggtgttgttactgactggaaaggcaatcatcttcattgggaagcttcttcaacttcacgtgcaacaagctttaatgtagtggctgctggagataaacaaattcatcaacaagc

SEQ ID NO: 13994 - DNA, 423 bp, Gossypium hirsutum
  Clone ID: LIB3145-006-Q1-K1-B12
cccacgcgtccggggttgataaagaaaggatccttccctttgtcttcaccctttggctttcccatttttttatttttattttcaatttgccccttaatctgttcttcgttaacatctccagcaatccccaattttcaatttcgttttgttcactgcataagttttttttagaaacctaaatccgatcacaagagaaatctcatggccactactggaaacaagaacatcaatgctaaattagttctacttggggatgtcggagctgggaagtcgagtcttgtattacgctttgttaaagggcaattcgttgaatttcaggaatcgaccatcggtgcggcttttttctcccaaacggtggccgtgaatgatgcgacggtaaagtttgagatttgggataccgctggtcaagagagataccatagc

SEQ ID NO: 13995 - DNA, 427 bp, Gossypium hirsutum
  Clone ID: LIB3145-006-Q1-K1-B2
tttgcccactatctgtctctctctctctctctttcacttcacttccacagccttctcttctccaccaatccaaaaaaaacaaagatgcagtacaaaaacctgggcagatcaggcttaaaggtgagtcaactatcgtatggagcatgggttagtttcggtaaccagctcgatgttaaagaagcaaagtcacttctccagtgttgtaaagacaacggagtcaactttttcgacaacgccgaggtttatgccaatggtcgagccgaggagatcatgggtcaggctattagggaacttgggtggaaacgatcggatatcgtggtttctaccaagatcttttggggcggtcctgggccaaatgataagggtttgtctagaaaacatattgttgaaggaaccaaggcgtccttgaagaggcttgatatggatt

SEQ ID NO: 13996 - DNA, 425 bp, Gossypium hirsutum
  Clone ID: LIB3145-006-Q1-K1-B3
gtgggatggctatgaaggaggatctaatagatctcgcattaatttcgaaagaggacattgatatacattgttctgtagcttgtttattttctcttgtagacttttaaataatcatatttctcttttattttatatttggtcgatttcttgtcccatgatcatctgtttgcatttcatgaaatagtataatctatagaggatagttgcttcttctcatttccctttctgttcgttgatagttaggccccgttctcctttgctttttagatggaattttgccaaaaaaaagtccgtttctcttaaaagtaatgaagaacagcatccactccagaaaaattttcatcatctgaaaagtcctttttggcatatggagaagttaaataatttaacttttcttcagccaaaagtgcttttggctaataatt

SEQ ID NO: 13997 - DNA, 412 bp, Gossypium hirsutum
  Clone ID: LIB3145-006-Q1-K1-B4
cccacgcgtccgtgaatctgcaaagagcaaagaattgggctctcaatcttcttgcaccactcccgtacatgcggtcacttccagtacagtacaaagaggaagtcctgtgccacattgggagcctctgaagggtgataattactttcctggccagcctcgagtgagtagtttacttccctcatctacattatctgcaaaactttgtgaaacgcagtcttttcaagttatcagaagtcatggggttgaaaattgggaccgtggttccattaacattaacgaaaatttgaacgagacctctgaaggtcaaattattgctggaaatgtgaaacaagaaaatagtgagggaaaatctggcaaatcttgtgggcaaagctggaaatcacctttaaatgatgcttcaaatggatgggat

SEQ ID NO: 13998 - DNA, 425 bp, Gossypium hirsutum
  Clone ID: LIB3145-006-Q1-K1-B5
atagatcacatatgacacttgtggagactttcagaaacatgccaacagaggaggagcctcttgagaatggtgaccttgatcatgagaatctagaggatcagaatggagaagagggtagccaagaggaggctgttgttgtggatgctgattcaaacgatggtgcagtgctcgttaatggcaatgaacctgaagaagagtgggtgcttacaccggatcactaggttccttcaagacattcagttcgagctctattcagaacatatttaagatttcgacctagacagatgtgatattaaaatatagagatggctgattgtcttgcgttcctggaagtttggtttggatctatctacaaaagcacattgaattttgggatgggggcataatacaaagtattttcaattaagcgttccagttatgatatt

SEQ ID NO: 13999 - DNA, 145 bp, Gossypium hirsutum
  Clone ID: LIB3145-006-Q1-K1-B6
aacgcgtgggcgaactcgtgaaacatccctttataggaggaacgtattaggagtgtggacctttatcataacaatcttgtggtaaaaaatttaaaaaacgttatacaatatgaaaatattttttaaaatattgaatcaatctaat

SEQ ID NO: 14000 - DNA, 160 bp, Gossypium hirsutum
  Clone ID: LIB3145-006-Q1-K1-B7
gccaccatctgcacctgcgatctgttggtatggtcggtcgattcaatgatctttgttagcccacccggttgcgattcaacgtccaaaatacatgaccgggggaccacgcttagtttagttagaggataaagatcaattggctgaatgcatgctaccacag

SEQ ID NO: 14001 - DNA, 404 bp, Gossypium hirsutum
  Clone ID: LIB3145-006-Q1-K1-B8
catactatgctgtgaggcccatccaccttataacctctggtggatttagctgatctgctacacattacttttctctaatgttctattgcctcatttaatacaagccatcttatactgaatataaatgtcacatgggtattcgcgagtctcatacctatatcgaataaaaaaagaactactcttttttctgctaggcaatggagaggcacaaattaattaaggaagctggtgatggaacattagatactgttctaccatctattaataagctctctggcgaagttgatgcaattaataaaatgagaaaaaaatattactcatgggaagagtgtgagactctaataaaacttaattacctgcagagaatgaatcataccaatatcgtgaagcttaacgatgtcatt

SEQ ID NO: 14002 - DNA, 372 bp, Gossypium hirsutum
  Clone ID: LIB3145-006-Q1-K1-B9
aactatatggccgctgacggggactatatggtcaatcaaaagtgggaaagacatattataaaggggccaatgaactatcaagggcatctagtgctaatatgggggagaccatctgatgaaagaacatggagaaaaagaaaactaaaaagtcaaaggcatgtttgcctttgacagaatgaacaaacacgaggagatggaaaatgtgacactatatccatacagctaacatgcttaactagccagtgctactgggtagcaccttccacggatgggacagttgagaagcaataaatgtactgaacatcgaaatttatgactgtttgttgagggaatgtctactgaaatgttatcaatgatgccatactgtaactg

SEQ ID NO: 14003 - DNA, 425 bp, Gossypium hirsutum
  Clone ID: LIB3145-006-Q1-K1-C1
gaaaaaaaaaagatggcgtctgtaataaaatctgcaatcttaattctgtcggtgtttttatctgtaagcttcagttcgggtgttaggttgctccaggaacagcccaatgatgacctcaaaaacatggacgctattcctcccattgatgcactcaaccctaccgagttcaatggacccggtgttggcattcacgaagatcatgttgtcccaaaaggttccgaaattggtactcttggttttggttttgaaggtggtcctgaaaaatgttgttcttctggatgttccggtaattgtaatcctggtggtttcgttctaccatttcctcaaattccagaaatcccaagaattccacagatcccacagatcccacaaatcccacaaattccactaatcccacagatcccacaagtcccacaaatcccact

SEQ ID NO: 14004 - DNA, 380 bp, Gossypium hirsutum
  Clone ID: LIB3145-006-Q1-K1-C10
gacatttgaggaagggggatctgtttgtgttaagaaaaacgcaagacatcatccatgaaacactcaagcttcaaatcatgcgaaaggggaacagtcccatggcacaaaatcagttcacttgtttcaacagcacagtgcagtcaccaatgcagctccagaatcaaaccaaccatgataaccaactcaaggcatctcgagacgttgcaatggccacagatgctaaagcaaaacttcttcttctggagctgaaaactgttaaagcagatttggcttttgtaaaggaacgatgtgctcaactggaggatgagaataaacttcttcgggagagttgagagaaaggggataatcctgcagacgatgacttgattccactgcaactg

SEQ ID NO: 14005 - DNA, 72 bp, Gossypium hirsutum
  Clone ID: LIB3145-006-Q1-K1-C11
aaaaaaataaataaataaaaattttatttaaaaaaaaaaaaatctaactctttttattaaaaaccccccccc

SEQ ID NO: 14006 - DNA, 385 bp, Gossypium hirsutum
  Clone ID: LIB3145-006-Q1-K1-C2
cttttatttttgatgaaaagaacaaaacaccctctacccctttgtttctcaactctctgcattggctatgaaccctaacctttgcgccgccagcccgtccatcgaaaggaaaaaaggctctactctcctccttttgggtctgacttcaccaaccgagagagtctgcggcgacacaatcacagggattgcatggaagccctctccttctcttattatttccgtttagaagagatttaaaaatcaaagatgaaaaatgtatcaaaaatatcgatgagataagaaaacacatatgcggaatggaaccaaaatcaactttgtgttgcttctatatttgcttttcgaaagactaatgcttcattcaaaaaaaatacaaaagggatccttt

SEQ ID NO: 14007 - DNA, 318 bp, Gossypium hirsutum
  Clone ID: LIB3145-006-Q1-K1-C3
aatacaaaactgtttacttttgtctatcgacattccccaaagggtgggtgcgttactatgtagaacagatgcgtaaacaacgctagagggatatataatgcattatctctatttgctctctcaaaacacgtaccaatagtaagttcttatgaatcgttggtttcaaatataaaaaacaacatgtctgggcttcttccaaaataggaactcttgaatttggttttaaaagaactatcttagggctgtcgctctataggatccaacccttacttacacttgcttgcaacatcatacttcttttttttcgacacctaaatt

SEQ ID NO: 14008 - DNA, 422 bp, Gossypium hirsutum
  Clone ID: LIB3145-006-Q1-K1-C4
tgctcacatccatggatgcagcaaaaactagatttgagtttacctgtaaatgattataatctggggtacgaacatatgctggccaatgggttgcagaacttgggaagtggggatctgataagacagcagttgcagcattctttttaatatgttcaacagtcagtcagccattatttactgttgcagtagcagcaccagcaatctgtttcacagtttgttgcacacaacattgtgcaggcatcagaatcccaaattctaaacgagggttttttcccagtccctggacgggaacaagtaggcaatcaatcggatgaactggctcatcaacagcataacacgactcaaagtgatcagcaccagcagaggcggccggtgaatgtgccttcatcatttctgaaaccagatttttttgactcacgatc

SEQ ID NO: 14009 - DNA, 420 bp, Gossypium hirsutum
  unsure (1)..(420): unsure at all n locations; Clone ID: LIB3145-006-Q1-K1-C6
aagacttccatctgatatagccctcgatgtcctaaacaatcttttaagcttgagtggttggttggaggggttttgtagtttttgattttcccatgctagtattaaagttaaggttctattttgccctgtggctctggattctctttcctttttgttacctaaaaagatcatgtctggatgattttgtttattgcattatttgacattaaatatcacgagactagctgcttcattttnaaaaaaaaaaaaaaaaanaaaaaaaaaaaaaaaaaaaaaaaaaaaaaaaaaaaaaaaaaaaaaaaaaaaaaaaaaaaaaaaaaaaaaaaaaaaaaaaaaaaaaaaaaaaaaaaaaaanaggggggggcctttttaaaaaaacaaattttacttccccgggtttgcaaaaaaaaaatttttttt

SEQ ID NO: 14010 - DNA, 421 bp, Gossypium hirsutum
  Clone ID: LIB3145-006-Q1-K1-C7
atcggaaccatttatcattgctgcaactggaactgggacgattcccgcttcagctctggcggctgctggagcctctgtttgtgcgcaggggaactctgtctctgctggtttgcataccaaaatgggactgggggcatgtactgggtccaaagataggaataattgggcaatgttgggtggtaatttaggaagatcccaaatcccaagtggggcatggtcttctagtaatggaattggatcagggcttgttcaagcttcagagcaatccacatcagcttcaaattttgggaatgaaaactcaaatcatatccaccaaaactatgggttccaggggcttgaatttccaaatattaatatgggttttgtgagtttttcgtcgctgctcaacggtagtaacccccaggttccaggtttggagctt

SEQ ID NO: 14011 - DNA, 414 bp, Gossypium hirsutum
  Clone ID: LIB3145-006-Q1-K1-C8
agccaaggcaattttaacttgttctcttctatccattttagtgaactcttgtaagacagtatgaaacattattcagttgaaaatatttgtgaggtgtgacaatgtaaatccatgaatcaatcaagatttgcaataagattaatattttcccttccaaaaaaaaaaaaaaaaaaaaaaaaaaaaaaaaaaaaaaaaaaaaaaaaaaaaaaaaaaaaaaaaaaaaaaaaaaaaaaaaaaaaaaaaaaaaaaaaaaaaaaataaaaaaaaaaaaaaaaaaaaaaaaaaaaataaaagggggggggcctttttaaagaaccaaattttctttcccgttttttgcaaataaaaactttttttttggggcccccaaattaaattttttgggcggtgtttaaaaaacgggggattggaaaa

SEQ ID NO: 14012 - DNA, 428 bp, Gossypium hirsutum
  Clone ID: LIB3145-006-Q1-K1-C9
acgaaaaaaagtaatttttttagaaaattatacaatttgattataaaatataaaaatacaggggatgggccgtttattacaaaacataaaaatacaaaattagttaaaattacaaaaagaaactaaaaaaatgttcacaaaatattttgaaaaattcaaaaaagtaatgttaaaattttaaaaaataaaaaaatttacaaaaatataaattaaaaaaattgaccgatcaattactgtaaattgtttcaatctttttctatttaaatttattacaaaaaataaactatattatattttattaattgttataaatttcatatatgtattatattctcaaaaaaattatctacatactttgaatttatatattttttaatttaaaagtcttgaataatgaaagacgaatgcacatttcacttctctatttt

SEQ ID NO: 14013 - DNA, 386 bp, Gossypium hirsutum
  unsure (1)..(386): unsure at all n locations; Clone ID: LIB3145-006-Q1-K1-D1
aatgaatcgaaattgagggaggtactgaaattcgcaaatgcatgtggagccataaccacaaccaagaagggagcaatcccagcccttccaaccgaggctgaagtccttgccttaatcaatggagcttaggattattagcagcanacttcaataatctatgctcatctttttttttttttggattctctttttttaatttcttacattttcagagagagggttttgaaaagtatcaattttttctttccactcttttgttttcctttttcacctcgtttttcctccatcccctccctgtgtaatattgntaggctttgtgctttcaaagaggagtaggaataaaaataaaccttttttttttttctttnnnaaaaaaangggggggg

SEQ ID NO: 14014 - DNA, 452 bp, Gossypium hirsutum
  unsure (1)..(452): unsure at all n locations; Clone ID: LIB3145-006-Q1-K1-D10
cttttgagctatgttatttaaactcttcattttcaaaaaaaaaaaaaaaaaaaaaaggggaatcgtgaaaaaaaaaaaaaaaaaaaaaaaaaaaaaaaaaaaaaaaaaaaaaaaaaaaaataaaaaaaaaaaaaaaaaaaaaaaaatatctaaaattaaataaataataaaatttatattaatatataatactcttntaaatattaaaaaaaataaataaaaaaataaaaaaaaataataataataaaataaaaaaaaataaaaattaatatttcttaaactatattataattcaaattataataaacattattttattaaaattatttaattatattagaaaattatataaatagctctccatttatataaaatattattttaaaaaatataataaaatttaaaatttaacaattaaaatattatctgtaaaaaattaaaaatttttcttt

SEQ ID NO: 14015 - DNA, 422 bp, Gossypium hirsutum
  Clone ID: LIB3145-006-Q1-K1-D12
gcccagaaaagatgctagaaaaaaggcagttgttgcgtgatgcagtaagaaaagagatgggttgggaagataatgatatgcttgtgatgtccctaagtagcataaatgctggaaagggccagctcttccttcttgaggcagcacacctcttcattgatcagtatcctttgcaaactggttctgaagttaaaaaatcattagatatcaggcaagatcattccaccttgggtgtaaagcatcatttaagaggtttggttttgaagtcgagcaatggtgatttatcttctaaagatttgcggaccaaaaacagtcacagaaggaagatgctgtttgatagccaaggaacagaagaacaagctcttaaagttcttattggttctgttgggtctaagagcaataagatatcttatgttaaagaaatt

SEQ ID NO: 14016 - DNA, 425 bp, Gossypium hirsutum
  Clone ID: LIB3145-006-Q1-K1-D2
agatagttctagtacgatcgaacatagccctcaaagaccagaacctgtaaaacaccacatcgcaaaaactgacaatgtcaaccaagagagaatcctgttggaagagcggatcaaagctgaaaaggtcaaggcagtcaacttaaaaaggtcagggaaacaaactgaggctttagatgcacttagaaaggccaaaatgctagagaaagctaaattccttgtcttaataaaatactaaaatcatataaatttccattttcagctaggaaaatgatttgaggtacataatatttgtggctaccatgtgaaaaatgatttatttccatcttaagcataagtatactaaattttgtatcatcgattcttaggtggaaaatgctcttcatttcgataccatttgcatttgcaataaaaagattgaacatgat

SEQ ID NO: 14017 - DNA, 426 bp, Gossypium hirsutum
  Clone ID: LIB3145-006-Q1-K1-D3
ggcgctattgatgttgttgccaagtttggcgcaaaagctgacgggaaaacggatctgagtaagccatttttggatgcttggaaagaagcatgtgcctctgtaaccccatcaacagttgtgattcctaaagggacatatttattatcaaaagtaaacttagaaggtccatgcaaggctcctattgagattaatgttcagggcactataaaggctccggctgatcctggtgctttcaaggaccctaattgggttagattctatagtattgaaaatttcaaaatgtccggcggaggaattttcgatggtcagggaagcattgcttatgagaagaataaagatccccacaatcgtgcatttcgtgtcaaactccccgttaatataaagtttgactttgtgaccaacgcattgatacaagatataactagc

SEQ ID NO: 14018 - DNA, 377 bp, Gossypium hirsutum
  unsure (1)..(377): unsure at all n locations; Clone ID: LIB3145-006-Q1-K1-D4
cccacgcgtccggttttccttgtttttttttacattcagcgaaggggtgctctgaaatcacataccaaaggggtgaaggccgttgccgtccttggcagcaatgaaggtgttagcggaactgttttcttttcccaagaaggaaatggtccaactaccgtgactgggaacctttctggtcttaagccgggactccatggcttccatgttcatgcccttggggacacaactaacgggtgcatgtcaactggaccccattntaatcctgctggcaaagagcatggtgctccagaagatgagaaccgccatgctggtgatctacggaatgtcactgttggtgatgatggctgtgcaagcttctccatcaccgacaaacagat

SEQ ID NO: 14019 - DNA, 423 bp, Gossypium hirsutum
  Clone ID: LIB3145-006-Q1-K1-D5
cccacgcgtccgaaaaaggcggccggcgggagtcagtggttcgtcggaggaagtttccggacaggccatggcggaggataaaaagggtaattagattcttcaaaagaatcaactgttaatggaagactaagctaaacaaagccgtaattcggcgaaggaaaatacaatgaaactgcagcaacgtcctttgtactgtatataacatatgtctccaggctcttgtatcctgtatcatgtatcctgtatcctgtatcctgtaaggattacttcctcctttaattaatgcctatattttaaattagttcttgagcttaaaatatataatataagtccgtccaattttattatcacaaaaaaaaaaaaaaaaaacaaaaatataaataaaaaaaaaaaaaaaaaaaatgattgaattattttaattat

SEQ ID NO: 14020 - DNA, 427 bp, Gossypium hirsutum
  Clone ID: LIB3145-006-Q1-K1-D6
cccacgctttctctctgagagtatctggacctgcaaggctcctttgtgcaagatcattggacagaatgggtctggccactaatgcgctcaaatctctgtctttgtctgctgctggatcacgacctcacacaccaaataggacctctgtttctaggggtgccagtccttctacggcaagacctttcactacacctacaagaggggtcattgcaactacaaggagagacattacatctctgatgaggacatccaccttatctaatcaattccacagctcaactctaggtcttagttttattgcagatattaataagggaagaaaaggtgcaaactacatacaagatgctcattaactgcctcttctttataatcgatatttgcagtggcgatttgctaatgcccgatcatacactgtgctgtacattca

SEQ ID NO: 14021 - DNA, 213 bp, Gossypium hirsutum
  Clone ID: LIB3145-006-Q1-K1-D7
ctttttgattgatgtaatttgatgttgatggagctgttaaccagctttgtgttaatgtacaaggtaagtttttgttatttggaaagcttagtggaagtaggtgtatgtttaggtagaaatttgacttgtaagttttttttttatttttgatatatgtaatggcaatctgtctatgatgtaggtatgaaaaaaaatacaattcattttttcatc

SEQ ID NO: 14022 - DNA, 407 bp, Gossypium hirsutum
  Clone ID: LIB3145-006-Q1-K1-D8
acgcggacgcgtgggcggacgcgtgggcggacgcgtgggcggacgcgtgggcggacgcgtgggaaggaaaaaaaaaaaaaaaaaaaaaaaaaaaaaaaaaaaaaaaaaaaaaaaaaaaaaaaaaaaaaaaaaaaaaaaaaaaaaaaaaaaaaaaaaaaaaaaaaaaaaaaaaaaaaggggggggccgttttaaagaaaaaaaatttaattacgcgtgattggaaagtaataatttttttttagggtaaccaaaataaatttaacttgggaaaattttaaaaggtcgtaattggaaaaaccttggttttacaaaattaaattgctttgaaaaaaaacccttttttgaaaaatggggtaaaaaaaaaaaaggccgaaaaaagctcttcatttcataccattttgcattt

SEQ ID NO: 14023 - DNA, 396 bp, Gossypium hirsutum
  Clone ID: LIB3145-006-Q1-K1-D9
cttctgactcaagagtcactgaacgagtcgagttcgaattcagattacccaaaatggcggtcagattgaggagtgtgaaagtaccgcccaactcaacgagtttggaagaagcaaggagccgggtcttcgatttcttcagaaaagcttgtcgatcaatccccactattatggatatctataacctagacgacgtcgtcaccaaatccgagctccgttcttccatctccttcgagatccgtaagaactctcatgttactaaccctaaggtaattgatttgctgctgtttaagggtatggaagagctgaacaacattgttgaacatgcaaagcaacggcaccacattatcgggcagtatgtgctgggtcgacaagggcttgcacaggatttggacacca

SEQ ID NO: 14024 - DNA, 362 bp, Gossypium hirsutum
  Clone ID: LIB3145-006-Q1-K1-E1
gtttaagcttggcaaaatcctggaggaagggagcgaaccaaatgggaatttgaagcgttagctactaaggccggattcagtggcataacatatgagtgtttcgcttgaaactactcggatcatggagttcttcaaataattggatttcatatcattgctgagctaccaatgcaaccgaaaagaataaaagggatgcttggatttactttaccttgaataattatgatgagatgtgatgaccattctaataattacattttcatctagctgttctatgccggctgaatataaaactgggaccagtggaatgttctacgtgatcatgcagaggcaatcgataaagcacttgctgagaactcgta

SEQ ID NO: 14025 - DNA, 419 bp, Gossypium hirsutum
  Clone ID: LIB3145-006-Q1-K1-E10
cccacgcgtccggtggaagtggctgtgtgtttgacaaatatgcttcattttctgattgtgtgtgggggcctgaaaaggaaatcaggatcattcaatatccttatgtcaaaagaagggataacctgccagaaccaaaggagaaagagaagccagttggcttgtggtctattatcaaggataatatcggaaaggatttatctggtgtctgtcttcctgtgtactttaatgaaccactctcttcactgcagaaatgctttgaggatttggagtattcatacttggttgatcgagccttggaatggggaaagcaggaaaatgacttgatgagaattctaaatgttgcggcatttgctgtatctggttatgcatcgacagaaggtcggcagtgcaaacctttcaatccacttcttggagagacc

SEQ ID NO: 14026 - DNA, 417 bp, Gossypium hirsutum
  Clone ID: LIB3145-006-Q1-K1-E2
caaatgaaagacgtcgaagatgcctgatcgaagaaaataccatagaaaaaaaaaaaaaaaaaaaaaaaaagaaaaaataaaaaaaaaaaaaaaaaaaaaaaaaaaaaaaaaaaaaaaaaaaaaaaaaaaaaaaaaaaaaaaaaaaaaaaaaaataaaaataaataaaaataaaaaaaaaaaactaaaaaaataaaaaaaaaaaacggggggggcctttttaaagaaacaaattttatttcccggggtttgcaaatataatattttttttttgggcccccaaatataataaatttgcccgcgtttttaaaccggggggatgggaaaaaccttggtgttcccaaatttattaccttggaaaaaaaacccttttttccaagttgggatatttacaaaaaggcccaaccatatactttttt

SEQ ID NO: 14027 - DNA, 352 bp, Gossypium hirsutum
  Clone ID: LIB3145-006-Q1-K1-E3
acccttccgtcttaaatgggaacattgtgcccattggaaatcttaacacccttttgattttaggttgttaaagttggttaaagttccaagaaacctcctactgcttttgaatttttgagggaatatgtaatttccataatttagaatagaaattttttcctcggtatgtaacattaatccattacgatcaaggttggtctgctgtaatagtttataagcactccttacggagaactcccctgtcggttctcctctccatacttgaaagtcctattgtactgtctccgacaatgggatctgtaaaaatttttttccgcaattgaccgggttggaaagtccaagatgggaaatt

SEQ ID NO: 14028 - DNA, 333 bp, Gossypium hirsutum
  Clone ID: LIB3145-006-Q1-K1-E4
cggacgcgtgggcggacgcgtgggccataatcgagccaaaatcggtgaaacccccccccccaaagaaaaaaaaaaaaaaccagtgcagaccagtttgctaaaatttatatttccttggtaggacataaatgtttttattgtacttaaaaaaaaaaaaaaaaaaaaaaaaaaaaaaaaaaaaaaaaaaaaaaaaaaaaaaaaaataaaaaaaaaaaaaaaaaaaaaaaaaaaaaaaaaaaaaaaaaggggggggccgttttaaaggatccaagtttacttccccgtgcttgcaacgtaatagtttttttttagggccacctaaattaaattcct

SEQ ID NO: 14029 - DNA, 426 bp, Gossypium hirsutum
  Clone ID: LIB3145-006-Q1-K1-E5
tggttacaactaaggatgcaggagatgctgttaccttgttacagtcattggctggctcaacatgggacagcggccaacttgtattgacagcttgtatgggttatcaaaatgtaaatgagaaaagactacatgatttaagagagaagcatcgatcagctgtaatagctgcagttgaggaaagatcaaaggggcttcaagcttggagggattctcagggcctagcatctaagctatataattttaagcaggatcctaagtccatgattatggaaacaaataagacaaaagcaaatggggatctctctcattctgagtctggttccacaaactctgacgaagttcttattagtctgactggagatgctgacacaggtgctgttccagatcttcaagagcacgttgtgtggttaaaagttgagttgtgca

SEQ ID NO: 14030 - DNA, 420 bp, Gossypium hirsutum
  Clone ID: LIB3145-006-Q1-K1-E6
gcgaccaaataaaaacatggcaccacaccttaatattgttccttccatgtttgtacttttattattggtcattgcaacctctaaagttcaatcagatgcttttgatgttgttgccaagtttggcgcaaaagctgacgggaaaacggatttgagtaagccatttttggatgcttggaaagaagcatgtgcctctgtaactccatcaacagttgtgattcctaaagggacatatttattatcaaaagtaaacttagaaggtccatgcaaggctcctattgagattaatgttcagggcactgtacaggctccggctgatcctagtgctttcaaagaccctaattgggttagattctatagtgttgaaaatttcaaaatgtttggcggaagaattttcgatggtcaaggaagcattgcttatga

SEQ ID NO: 14031 - DNA, 400 bp, Gossypium hirsutum
  unsure (1)..(400): unsure at all n locations; Clone ID: LIB3145-006-Q1-K1-E7
cccacgcgtccggatttttattttttgtgaaggttgagtttgatattctataaataaatgttgactttcatatgcttagtgaatgcactcctttgggttagcaaaaaaaaaaaaaaaaaaaaaaaaaaaaaaaaaaaaaaaaaaaaaaaaaaaaaaaaaaaaaaaaaaaaaaaaaaaaaaaaaaaaaaaaaaaaaaaaaaaaaaaaaaaaaaaaaaaaaaaaaaaaaaaaaaaaaaaaaaaaaaaaaanggggggggccttttaaaaaaaccaaattttactcccgcgggtttgaaaaaaaaaattttttttttggggcccccaaaataaaattaattggccggtttttaaaaaggggggaatgggaaaaacctgggggtacccaaattaatagcttttg

SEQ ID NO: 14032 - DNA, 336 bp, Gossypium hirsutum
  Clone ID: LIB3145-006-Q1-K1-E8
aaaattctttttcaaaaaaaaaaaaaaaaaaaaaaaaaaaaaaaaaaaaaaaaaaaaaaaaaaaggggaaaataaaaaaaaaagaaaaaaaaaaaaaaaaaaaaaaaaaaaaaaaaaaaaaaaataaaaaaaaaaaaaaaggggggtcctttttaaagaatcaaattttatttccccttgttttcaacgtattattttttttttagtgtaacttaaattaaattaattggctggggttttaaaacgttttaattggaaaaacctttggttaaccaaatttaatggttttgaaaaaattaaattttttacaaattggagtaataaaaaaaagtccct

SEQ ID NO: 14033 - DNA, 378 bp, Gossypium hirsutum
  Clone ID: LIB3145-006-Q1-K1-E9
acgaataagtttttttatatgaatttaattacatacatatcatttcctaacttttaaccattcgcttgtttgctttctaatctatgattttctacatctatgcattttaatctttataaattaacttttttaaaactatatttttttaaaaacattataccaattattatactccaccacctattgaaactcctaccaattactttttactcttaccacacataacatccttcttttaataaaacgatattttcatatattatcaaaaattctatttttatttacccatcacatgatctttaaattgtaccttaaactacaatcatattcaacttcattattaaaataccaaaatttttcaacgcaaaatattaactt

SEQ ID NO: 14034 - DNA, 404 bp, Gossypium hirsutum
  unsure (1)..(404): unsure at all n locations; Clone ID: LIB3145-006-Q1-K1-F1
cttgtttgtttgcatttgcaaaaattgtgaaatccggtattcttcatatcagcttctggaatttttgagctttgacccttttctcgacttttcgtctcgatgatgatgttattcgattgtgccatcgagttctttttcccatttgcttgcacacgcaccttcattgaagacaaattacttggatgctcatattcatgatgtttatagctcatgcttctgttgtgtttaccaattacacagctcgggcgttctaagtggaacggaaatgttgggaactcggngatagtagtaagagttgacacgccgctgtccagtgtgggacgtccatccttttctgttctgataaaccacgtaattgaattttgatagtttgacacccaaagcatggggtagagtgttatata

SEQ ID NO: 14035 - DNA, 419 bp, Gossypium hirsutum
  Clone ID: LIB3145-006-Q1-K1-F10
ggagtctcctatgtcgaaccaaccactccactaaaacttggagaatactacggcgtagccgacaaggttttcaagtatgataccattcccgatgagccaccaagtgacaacactagggtaactttggcacctattgtcctcaacatgacacacagaagctttgtggaaatcatcttcgagaatcacgagaccgccattcagtcttaccacttgtctggctactcattctttgccgtgggcatggacattgggaaatggagccctgagaagaggatgaactacaatcttctcgacgccgtgagcagacacaccatacaggtattccccaactcctggtcagcaatcctattgacattcgacaactgcgggatgtggaacctgaagtcggagatatgggacaggcattaccttgtgcaaca

SEQ ID NO: 14036 - DNA, 211 bp, Gossypium hirsutum
  unsure (1)..(211): unsure at all n locations; Clone ID: LIB3145-006-Q1-K1-F12
aaaaaaanacggcccacacaaacaaacacgcgtnanattnnntaaaaaaaatccattataaatttaaaaaaacataaacccgcgtccgttgatttttaaaactctccnatccaactctaaacaaaaatttaaacaattaaatacaacttcaaatttttaaaattaaaaataataattatcccaattataaaaaacaaaaattattcttaca

SEQ ID NO: 14037 - DNA, 420 bp, Gossypium hirsutum
  unsure (1)..(420): unsure at all n locations; Clone ID: LIB3145-006-Q1-K1-F2
acagttctgaagactataccaatagtattaagtgcgatatctatggcaatagtagatgttggatttagatcataattattaacttagaagccagactgatggacggtaaagtgcttcatttatgatttacatcagtgtattagccgtaatttatgcagacaggtaccaatcatcccgtctttgggtctactttctctcatttcttttcttcggataaatcattattaattgtctactttgcatatacaggaaaatgtcttttgtgaccacaagaaggcaagaagaaataagcaacgacttatgttaagatctacgacattttgaacttgggaaatccttttcaaggacattgtgcanatagtgaatgaactgttaatactccaaccccaaattttcatttatgggttgtgtctatattta

SEQ ID NO: 14038 - DNA, 414 bp, Gossypium hirsutum
  Clone ID: LIB3145-006-Q1-K1-F3
aattttgaaccctcagaacaaagctggaaggattacagttatcacaagaatgggtgctgagaatatgagggtgaagcttccccatctaattagggcagtgcgtcgtgctgggcaaattgtcacttgggtcagtgaccctatgcatggaaacaccatcaaggctccttgtggtctcaaaactcgccccttcgattccataagggctgaagtgagagctttctttgacgtgcacgagcaagagggaagtcatcctggaggagttcatctagagatgactggacagaatgtgacagaatgcatcgggggatcccggactgttacattcgatgacttgggttcacgctaccatacccactgtgaccctcttttgaatgcctcccaatcttttgagctcgccttcattatcgccgagcg

SEQ ID NO: 14039 - DNA, 427 bp, Gossypium hirsutum
  Clone ID: LIB3145-006-Q1-K1-F4
aaataaacagtgattatcaacttatctggaagtagatattggatgtgagtcttacgaggaggcgattgcggctttgtctaagcttctcagtgagaaagctgatctcggaagtgttgccgctgaaaaaatcaagcaaataacagccgacttagaggcagctggcagttgcgacaccgacaaccggatcaaaaccggtttccttcatttcaagtcagaaaaattcgagaaatatcctgatttgtacggtacacttgccaaaggccaatgccccaagtatttgatatttgcatgctcggactctcgagtgtgtccgtcccacatcctggatttccaaccaggggaagcttttatggttcgaaacattgccagcatggtcccgccatatgacaagaataaatactgcggagttggtgcggctattgaatat

SEQ ID NO: 14040 - DNA, 419 bp, Gossypium hirsutum
  Clone ID: LIB3145-006-Q1-K1-F5
ctctgatggcaatacaaatatttgagttgattgggtggcatcaacataagactcttcctactgggtaccgtgaaattatggagtctgctattgaacgggcaataagggaaacatgggaagaggcaggtgctgaagtggaagtcatttccccttttgcacaaatggatattccctttattggacaagttagaataagcatccttaatttacttctgtatctcatgtacatttatggaagatgtttatgtatctaacatcgctttgtcttttttggagcagacttatgtaatcttcttggcaaagctgaagaagccccaattttcaccaggaccagaatcatccgagtgcttgctctttgaattggacaacattcccttctttggaattttctcccatttttgttactttgaatttgtata

SEQ ID NO: 14041 - DNA, 415 bp, Gossypium hirsutum
  Clone ID: LIB3145-006-Q1-K1-F7
cccacgcgtccgcccacgcgtgcgggagcataaataaacgtttgggttttctttaaaattaatcaagaaaccaaaaattgaaacgcttctgttttcctttttccgtttagttttgcttgcttcgcttacttatcctcttctttgcttctgacatttttcctacactcaggaaccaaataggaaattagggttcttgttctgaaattcaatgactttttatgatggtaatagtgacagtgatggaggagaggtggtgccagagctgaaagtaagagttgagggtgacgatgatggtgttaatggaaaaagggtaactttgagacagcgattattggaagaatgtgaagcagaagagaggtatttgttggtaaaggagcctgctttttcttgtgtacagaaaaggtctatttggttt

SEQ ID NO: 14042 - DNA, 391 bp, Gossypium hirsutum
  Clone ID: LIB3145-006-Q1-K1-F8
cccacgcgtccggttgaatggacccggtgttggcattcacgaagatcatgttgtcccaaaaggtgctgaaattggtactcttggttttggttttgaaggtggtcctgataaatgttgttcttctggatgttccggtaattgtaatcctggtggtttcgttctaccatttcctcaaattccagaaatcccaagaattccagaaatcccacaaatcccacagatcccacaaatcccacaaattccactaatcccacagatcccacaagtcccacagatcccacaagtcccaaaaatcccactaatgccaggacagtcgggatgtgagagtggagagtgttgccgtcagggttgtggtgggacttgtgctgagtgtggtcagcccaagtgcgca

SEQ ID NO: 14043 - DNA, 339 bp, Gossypium hirsutum
  Clone ID: LIB3145-006-Q1-K1-F9
attccctgaaaacctttttgaagctgttattgctagacttcccattgccacattattcggctggcgctctgtttgtcgtaaatggaattccttcctggaatcacaaaaattctctcatcattgtgctgaaatcccactagccaatccctggttttataccattactcatgaaaatatcaatgttgtagccatgtatgacccttcaaccaataaatggcaccacccgacaatctcttttcttccaccaaagatgattgctctgccagttgcttctgtaagtggactaatttgctttcttgatattggacatagaaacttttatgtctgcaaccctttgac

SEQ ID NO: 14044 - DNA, 402 bp, Gossypium hirsutum
  Clone ID: LIB3145-006-Q1-K1-G10
tgcaaatgtaatgttgttccagcagcagaaaagtgtacctgttaaaaccgatctcttgggtggcggtgaactcaccggttatgcaaccaaccaggtacctgatagtgatatggttggtgaagatggagcctccgatgatgatgatgatgatgaggttgaaggtagtagctcagatgaagcatagacattttgttttggaaaaagatggaaggctcgatttttggtagttagggcttgctcattgtaactggaatatgtttttcttttcccttcttaatatgataaacatttgaccaagttaaattaaatttatgttttttcgttgtaattcgagaaaagaaaatttcttaatattttattatgagcaattttgttttaaaaaaaaaaaattacataaatata

SEQ ID NO: 14045 - DNA, 420 bp, Gossypium hirsutum
  Clone ID: LIB3145-006-Q1-K1-G11
gcaactaagtaaagtgtaatcaactttttttgttcccctaccttaaacccatcccccggcgccgtgcaagccactattctaaccttacgcgccactgtaatccccacgaataaaccactcacccctcctccaaaccgccgccgatgtcttttcataacggcacaatcccaagcagccgtaacacccgaccctccctctccacccacagtaaaactcaacaaatatagctcaagagtaacggaaccgaagtcacaaggcgggtcccatgcgatgctatacggggtaggattatcagaagacgacatgtcgaaaccccaagtgggaatttcgtccgtgtggtacgaagggaacccgtgcaacatgcatttgttgaagctgtcggacgaggtgaaacggggtgttgaagacgctgggatggtt

SEQ ID NO: 14046 - DNA, 425 bp, Gossypium hirsutum
  Clone ID: LIB3145-006-Q1-K1-G2
tccactttaaccttgtccactactattacactgccggaaaaaaatcatggccaccgtcacgacgcaggcgtttgccgctgttttccggccatgtgcatcgaaaacacggttccttactggttcttccggtaagttaaaccgagacgtttcatttaaaccagtggctgctacatcgactagctcattcaaagttgaagcaaagaaaggggagtggttacctggtcttccttcaccagcttacctgaatggcagtcttccaagataatggctttgatcctcttggattggctgaggaccctgagaacttaagatggtatgtacaagctgagctcgtgaatggacgttgggctatgttgggtgttgcagggatgcttctgcccaagttttcactaagattgggataattaacgctcctcaatggtatg

SEQ ID NO: 14047 - DNA, 192 bp, Gossypium hirsutum
  Clone ID: LIB3145-006-Q1-K1-G3
cgattttcaaatccaattcattcctcttttcaaaggaccaaaaagaagatggcttcaacattcagcggcgaggaaactgctcctttcttcggctcttggtgctgtgctgccctcgttttctcttgtatgggagcagcttatggtacagcgaaaaagtggtgtttggtgtagccatcaaatggggtgtaaatg

SEQ ID NO: 14048 - DNA, 359 bp, Gossypium hirsutum
  unsure (1)..(359): unsure at all n locations; Clone ID: LIB3145-006-Q1-K1-G4
aaagttctcacagaacttggcattgctgggggcattactcttctttatcggcatgaaaaactcggtcccgccggacaactcaagaaaaaggctcctaaaaccaaaacagtttgaaggaggaacatctggtaaaccaagggtctattgctcaatctctacgttttccttagtcaacccagatttattttttgtatgctttgtatcaaggctttgttcttcaatattaggtggggaaaagggcatactactttcattatgatactgttaactaagttgatgctgatttaattgagtttgagaattttatctccnaaaaaaaaaatatactcattaatattataatataaaatttaaaaatt

SEQ ID NO: 14049 - DNA, 425 bp, Gossypium hirsutum
  Clone ID: LIB3145-006-Q1-K1-G5
ctggaattatcttctgcagtcaactccaccatattcctaagtttctctctcaagctctttgcgggcccagggggagaaataaaaatcttcttgggtttgtcttttattgccttccatttttcttttattttcagaagaaaatggaaggacatggcagccgaggaggctcttgacttgtcaactttgcagtctcagctaagtgaaactcatgaaatgtggaaccaggagatggaaaaacaccaatgccaggtagattttttacaagacaaaattatggaggtaaaggcttgcttacagggtccggaggaggaatcaaaggaggtagatttctttggcgtaaggtaaaaactactgcaactttgttggctaacttgaaatcaaaagcaagagtgatggctgttcctgatttagcccataagtcatgc

SEQ ID NO: 14050 - DNA, 420 bp, Gossypium hirsutum
  Clone ID: LIB3145-006-Q1-K1-G6
cccacgcgtccggcaggacatcctgagggctccggcattgggtataaagaggaagacaaacccggtttcgctgtttccttctattcaaaaaccaaggctatggttgaagagctgttgaaagaatatgaaaacgtctgcactctcagagttcgaatgccgatctcatctgacctaaacaaccctcgtaactttattgccaagattgcacgctacaacaaggtggtcaacattcccaacagcatgacaatcttggatgaacttctgcctatttctatcgagatggctaaaaggaacttgaagggtatctggaactttacaaaccctggggttgtaagccacaatgagatcctggagatgtataagacttacattgacccaaagtttcagtgggtgaacttcacattggaagaacaagccaag

SEQ ID NO: 14051 - DNA, 188 bp, Gossypium hirsutum
  Clone ID: LIB3145-006-Q1-K1-G7
gggtctattaattgattcaaatttagggtctgtttaggtttggctgattttgggctaggaatcgcggtttatatttagtatttgggttaaggactgaattaggctttgaatctgtaaatggacatttattttttgaatttttgatttgattttaatatttataaaaactaggctgttaatagtgaatc

SEQ ID NO: 14052 - DNA, 158 bp, Gossypium hirsutum
  unsure (1)..(158): unsure at all n locations; Clone ID: LIB3145-006-Q1-K1-G9
ccacgcgtncgaaaaaaaaataaaaaaaaaaaaaaaaaaaaaaatttaaattaaacccaaaaaaaaaacccgcccccgttaaaaataaaaaaaaccccacccccacataaaaaaaaaaaaaaaaaaaaaaacaaacaaaatactcatctctcccttac

SEQ ID NO: 14053 - DNA, 384 bp, Gossypium hirsutum
  unsure (1)..(384): unsure at all n locations; Clone ID: LIB3145-006-Q1-K1-H1
ttccacaaatggggtgggttttggccaaaattttggcggatcggacggcccggttttgcctccgccggcggaaatggagcctgaggaaggtgttgctctcagggaatggagaagggagaatgcaattcggttggaggagaatgagaagagggagaacgagttattgagccaaataattgaggaagctgatcaatacanagttgagttttattaagaaaagggaggtgacctgtgaaaataacatggccaattacagagacaaagagaagatatttgtagccaatcatgagaaattccatgccgaagctgataagcattactggaaagcaatcgcggagctcattccttaatgagtgccaaccatagagaaaaggggaaaaagga

SEQ ID NO: 14054 - DNA, 429 bp, Gossypium hirsutum
  Clone ID: LIB3145-006-Q1-K1-H2
cccacgcgtccgcccacgcgtccggaaaaacgtagtgagcaagaatctgcagagaacggtgccataaaaggtggaaatagagcagttggacagaagcaaccttatcctaatggaattgtgaaatctctgaacccggcacctgccgaaataagtcagacactctctgcagccacttctgttttgaatacagatcttcctttaaaacatgaatcgtccatagggaaagaggacacaaaaaacgtaggaattgaaggctcaaattagcttagtaagatagttctctcactatcagtcagcgttctttcttatgtttcattatctcgcagccttttaattcttggatctgatgttggggccaattgtttgaggaattaacaccattatagctagacacagagtcccttatccatctttaaacattaggaacag

SEQ ID NO: 14055 - DNA, 395 bp, Gossypium hirsutum
  unsure (1)..(395): unsure at all n locations; Clone ID: LIB3145-006-Q1-K1-H3
cggacgcgtgggcggacgcgtgggtgtttacagaccaacctatcctctggccgactttcagatgtggtgatagcaagaattcggtccactgtactctcatcaacaatctttagaagcagcgctctatcccacgtacacgtttctgcatcgattaattgattaaccgtagaccatgaaggcctaatttcctgtgcttgaatatggatgttctctctaccaggaatatttttatacattttcaattcttaaacattgcgaattgagaaagatatcattatcctgaaagcgaatagaaaactcttaaccntgnnacataatctgacagacttttaataaataaatctaaaaatgggggccccctctttaaagtatcaaactttttttacgtggacaca

SEQ ID NO: 14056 - DNA, 417 bp, Gossypium hirsutum
  unsure (1)..(417): unsure at all n locations; Clone ID: LIB3145-006-Q1-K1-H4
cccacgcgtccggtttcaggggaatgtttaaaggaaatggtactaattgtgctcgcatcattcctaactgagcagtgaagtttttcagctacgaagaagcctctaaggggattttatacctatatcggcagcaatcaggaaatgaggatgcacaattcactccacttctacgccttggagctggtgcatgtgctggaatcattgccatgtcagcaacttatccaatggatatggtacgaggttctaacagttcagactgagaagtcgcctcgccaatatagaggaatctttcatgctctnttaacagtattaagggaagaaggaccccgtgcattgtacaaaggctggttaccatctgtaataggagttgtaccttacgtcggtcttaattnntgctgttatgaatctctgaaagat

SEQ ID NO: 14057 - DNA, 420 bp, Gossypium hirsutum
  Clone ID: LIB3145-006-Q1-K1-H5
ggcaatctcggaagacgtggaggcttccttcaacttcagatctgcatcgggggcatctgtcatgggtagcggctctcctgattctgagattagcaaagtttggaataaaatcccaagagatcctccagattgtaaatgcaatttttgatggcatctgtaggctccaaagtttcttgtaaaattcttttgtttcggtctataataaatagtttttaagatccagattagcatcttctaatagtttataggcactgcggactgaaaactcgccagaaaattctcctttccaaacctggaaatcctcatgttcaatctctacaaggggaatatgaagaatttttcgagcaatgtcctcttgaaagctatcttcccatatcgagatgttgtcccctctgtccactctacaacacatcccttttt

SEQ ID NO: 14058 - DNA, 423 bp, Gossypium hirsutum
  Clone ID: LIB3145-006-Q1-K1-H6
gaaattgggatctgggggagtcttccatttggttgttttatacataggctttcaaagaatgagggatctgatattgttgatgggaaattggggatagacagctcttgtcttgttttgatggcaatccactagttttagtctgtagtctttccgtaattatagctataaacctccttccaacttaaaaataaataattttaagttcaaagccaagttttaaacttctcgttaagtagaaaatcagatgcagagtgaccaacaattttacccccaaaaagcagtgcccatacttgcagatcaagtgggcaataattacatgcatataccagttgcatctgcttttggaccagtttttcctccatgtgcaaaacccttgccgcccctccatggcattgagtttcaaccctctgaagtttgtcccaa

SEQ ID NO: 14059 - DNA, 426 bp, Gossypium hirsutum
  Clone ID: LIB3145-006-Q1-K1-H7
caagcctaaggaagccgtggagcatttgtccatttatttgtccggccccaataaggttgaatcgccattcaatcaaaaagactgtgagcagtggctaacagaaaaacccatcgattgtgaagaaccaaacggaggaggaggaggagcagcaacagctgccaagaacccttcccccgagggcatgcaggaattcatgtttcttaagccagaagaagcatgtggaacactttacgcaaatcttgccgccttgtacgcaacacaaggcgaactagatcgtgcccaccaattaacgacacaagcattatcgctactacccaacagtactgaagccaccatgaccgcaatttacatcgatctcgtgctcggtaagtcacaagaagctctatccaagttaaaacgttgtagtcatgttaggttcctttcaag

SEQ ID NO: 14060 - DNA, 444 bp, Gossypium hirsutum
  unsure (1)..(444): unsure at all n locations; Clone ID: LIB3145-007-Q1-K1-A1
gcgttcggccaagccttcggccaacccgtccgttgggtcagggctctaatggctgccaacaacatgccaggtggaatagacaaagagcaggcctttggcatggcggaaacagagatggaatatagggtagaactttttaacaggcttgcacaaacatgtttcaacaagtgtgttgacaaaaggtacaaggaatctgagctaaacatgggggaaaacagttgcattgatcgctgcgtttctaagtattggcaggtgaatagcatgatcggtcagatgctcagntgctgtggtcggcctccgatgtaaaacacagtcattgtcatcctcccatcttgaattcgtttaaaatgtaaaacaaggctaagtcctgcaattgacattagcaatttatcttttgtttggacagctaatcaaaaactcttataaaccaagctttcatncatg

SEQ ID NO: 14061 - DNA, 455 bp, Gossypium hirsutum
  unsure (1)..(455): unsure at all n locations; Clone ID: LIB3145-007-Q1-K1-A10
gaaggaacagctaaaggatgtggatgccgtccaatccaaggaaatacccttattctggtgtggcatggctgagagcgtacaagttatggggtcattcgacggatggagtcaaggggaacacttatcaccagagtacaccggttcattcgccacgttctccaccacattattgcttagacccggaaggtatgaaatcaagttcttggtggatggagagtggcatctatcaccagaataccctaccattggtgagggattaatgcaaaataacttgctcgttgtagactagagtcgagtatttgatacagctttatgttagacagatatgcgtaagtcttttttgtagtcacattcaaatatgtgttgaatacaagtacatatattattagggaaaatgaaaagattttagctactttgatgcaatgattatgagctttncaatagtaaaagattta

SEQ ID NO: 14062 - DNA, 436 bp, Gossypium hirsutum
  unsure (1)..(436): unsure at all n locations; Clone ID: LIB3145-007-Q1-K1-A11
cccacgcgtccgcccacgcgtccggaaaggagaagaaacatttctgtgaataactatgtggaacgctattaagactcccctcgagtcccaacctacaaggccggacactgaactggaggtattactgtcgtacgctgcatcaaaatggatcctggctgtcggtaaaaccatatccaccatagcgcatagcaaaaggaaaagcattggtcattgtttcccctcttgaaaacccagggcaatctcgaaagatgtggaggctgtcttcgacctcagagctgcaccggggacatctgtcgtttgaaaccactctccttatactgagattaacaaagtttggaataaagtcccaagagatccgccagattgtaaacgtaattttagatgggaactcaccagataattccnctttccaagcctgaaaatcatcatgcgcaaa

SEQ ID NO: 14063 - DNA, 433 bp, Gossypium hirsutum
  Clone ID: LIB3145-007-Q1-K1-A12
cccacgcgtccggttcgacaactcagaaaggaggagcaagttagagagagtaagcatgtgcggtctggcttcatcttcaatccccacttctactttcccctcttttcaacaatctaaggttcaaaccaagccttgtatcaatccgtgcaactctcttgtgcttcctcctactaagctatgttcctcagatctctgtcttacaagttttagctttggtggccccagactgattcacagaagtagtgttatctccagaagtagcactggacctggtggtgctcctggttcaggtgataatgaaagcaggaatgtgctggatgcttttttcttagggaaggctgtagccgaagcattgaatgagagaatcgagtccacaattggggaatttttgagtgttgttggaaggttgcaggctgagcaacaaaagcaagtg

SEQ ID NO: 14064 - DNA, 329 bp, Gossypium hirsutum
  Clone ID: LIB3145-007-Q1-K1-A2
gcgccacgcgttcgattctttattgacaattggggcttttggacatgtttggaataggggggtcaggctatagaacagtcccaaccagtatttctgagttggtcttatcatttcttttgttgttttaaccccaaatgatgattaccgaaactctgttttttgtggtaatttcatcgggaactaataatatgataattcacttgagaaccaaagtggatactgtaagacatgcttttcatttaagtggcatccatgttcatgaggaacattcttttatatcatctgcttcatttgcgatgcgcaaagcgaatgaataaatccttattttt

SEQ ID NO: 14065 - DNA, 197 bp, Gossypium hirsutum
  Clone ID: LIB3145-007-Q1-K1-A3
gtttaaaatttaaggtccagtatttgcctaatggcctggctcaatatcagaacttgtactgtaaaacatatctacataataataaataaaaaacattatgtcatagaaaaaaaaaaaaagaaaaaaatataaaaactatgatagaaaaaaaataccaaagtgtggataaggggggggccgctctaaaagaacaaaaa

SEQ ID NO: 14066 - DNA, 268 bp, Gossypium hirsutum
  Clone ID: LIB3145-007-Q1-K1-A4
cggcttaagaacatgacaggataaaaggcaagtctttgaatctgggtttcctccaatatttcggtggaatttcctctcttttaaggtttgttgtttggatagtgggaaaactatgatggaaggtttggactgtactttacagtttacagacaaaacctggtgggtattgttcataaaattagataatgttaaaaagatgtctttttaagttactatgtaagggtcggtgatattttcattgataaataaaattattaattagtttatt

SEQ ID NO: 14067 - DNA, 81 bp, Gossypium hirsutum
  Clone ID: LIB3145-007-Q1-K1-A6
cgccggtctagaagattccagcttaccttccccttccttccaacgtctgtggtttttttttggggtaacttaaattcaatt

SEQ ID NO: 14068 - DNA, 423 bp, Gossypium hirsutum
  unsure (1)..(423): unsure at all n locations; Clone ID: LIB3145-007-Q1-K1-A7
cccacgcgtccgctttttttttttttttttttttttttttttttttttttttttttgttgtttttttttttttgttttttttttttttttttttttttttttttttttttttttttttttttttttttttttttttttttttttttttttttttttttttttttttttttttnaaaaaaaaaaaaaaaaaaaaaaccccttttttccccccccacccccaaaaatttttttttttttccccccccccccgggggaaaaaaaaaaaaaccccccccgaatttttttcaaaaaccgtaaaaaaaatttcccgggttttccccacccccccccaaaaaaaatttttttttttttttttaaacaaaaaaaatcacccccctttaaaaaatgggggccaaaaaaaaaaaaaaaacggggggggccccc

SEQ ID NO: 14069 - DNA, 412 bp, Gossypium hirsutum
  unsure (1)..(412): unsure at all n locations; Clone ID: LIB3145-007-Q1-K1-A8
ccccagtctgccgatcaacaagcggattcgggacctcatgcgacggatgagtctcgatgagaaagattggtcagatggtgcaaattgatcgtaaagtagccactccggaggtcatgagggactacaaaataggcagcattttaagtggaggaggaagcgtaccgcatctgcaagccaccccacaggagtggctcaacatggttaatggtttccaaaatggttcactctcaaccaggcttgggattccaatgatttatggcattgatgctgtccatggacataacaatgtctataaggccaccatatttcctcataacattggccttggtgctacaagggatcctgagcttgtaaaagaggattngtctgcaacagctcgtgaagtagagctactggcataaactacgttttc

SEQ ID NO: 14070 - DNA, 419 bp, Gossypium hirsutum
  Clone ID: LIB3145-007-Q1-K1-A9
aaaaacataaaagatggtaaaggttccttttgttgtgttctcattggctttgttgctgtgaatccaattcgtagtgggacatgatgagaaggctttagatgaggcagcatccccggaagctgaagatgcacttttaagtttaggggtagctcaacttgttcaaaactttaaaagctctgctggagataattcccaaagtgtggatgggccaacttctggcttagctgatgagattgcagctactccagaatcggatgtagaagttgctactgaatatgccgatgggccaacttctggcttagctgatgagattgcagcttctccaaaatctgaagtagaagttgctactgaatctaccggcgggaggaagcgtaaaatggcctagtagaccccgatgaggtctagaaagcaacatcata

SEQ ID NO: 14071 - DNA, 358 bp, Gossypium hirsutum
  unsure (1)..(358): unsure at all n locations; Clone ID: LIB3145-007-Q1-K1-B1
cttctgnnacttagctgatgagaaattgcannacttctccagaaatcanngaagtagaagcctgctttactgaatcagccgatgggccacanttctggcttagnctgatgagaaattgcagtttcttcctgaatcagnnaagtagaagttgctaccagaatctgtcgatgggaggaacgcgtaaacatggcatatgtggatccccgatgatgtgtagaaagcaacatagacccaaattttctttaaagaggcagctaaagctgctaaaaataataaaaacaatggaaacaataataaaagtaacatccatagtttttgtaaaatatgtcttgcagtaatttacttttataaataaaaa

SEQ ID NO: 14072 - DNA, 398 bp, Gossypium hirsutum
  unsure (1)..(398): unsure at all n locations; Clone ID: LIB3145-007-Q1-K1-B10
cccacgcgtccggcggttataatcagctccttcctgtggttgtcccagctcctaatcctggtgttgccaaaccaaagccggcgccaaaacccaaattcactccaacccctgctacatcgtctaatccaattaccatagagcagaagatgacaacttcctggaatgccaagggaaaaacctactacaggtattccacaatagtgaccaacaagtcttacaagacactgaaggatctcaagctttctatatcaaagctttatggtcctctatggggtctctccaagtctggcaattcttatggtttcccaacatggctcaactctctacctgctggaaagagtattgagtttgtatacatccattctaacttctnctgctgatgtctcggtttcaagcta

SEQ ID NO: 14073 - DNA, 416 bp, Gossypium hirsutum
  Clone ID: LIB3145-007-Q1-K1-B11
ggataattaataaattactgtcgggcgaaaaaaaagggtaagagatggctcgattaatgggaatatcgatgctatttctcttggcaggatcaatgcttatggtccagggcggagatcccacccttttttttcgaatggaacgtcacctatggcaccattgctcccttgggagtgccagtaaagggtattcttattaacgggcaattcccgggaccaaatcttaactctaccaccaacaacaatatcgtggtcaatgtgttcaataaccttgatgagccattccttgtaacatgggacggcgtgcagcataggaagaactcttggcaagatggtgttctgggaaccaactgtcctatcccccctgggaagaattacacctataaattccaggtgaaggatcagattggcagctacat

SEQ ID NO: 14074 - DNA, 311 bp, Gossypium hirsutum
  Clone ID: LIB3145-007-Q1-K1-B12
caagaacttcggcctgtatataattcatattttctgcttcgtagtatggataaagtggggtacccattctgacagattaccacttcgatttagctttataattatcatcaaaaaaaaaaaaaaaaaaaaaaaaaaaaaaaaaaaaaaaaaaaaaaaaaaaaaaaaaaaaaaaaaaaaaaaaaaaaaaaaaaaaaaaaaaaaaaaaagaaaaaaaaaaaaaaaaaaaaaaaaaagaaaaaggaaaaaaaaaaaaaatgagaaaagaaaaaaaaaggggaggaggggggaaaaaaaaaaaaaagaaggggggg

SEQ ID NO: 14075 - DNA, 436 bp, Gossypium hirsutum
  Clone ID: LIB3145-007-Q1-K1-B2
ccaacgcgtccgcccacgcgtccgcttggtcagggctctaatggctgccaacaacatgccggctggaatagacaaagagcaggcctttggcatggcggaaacagagatggaatatagggtagaactttttaacaggcttgcacaaacatgtttcaacaagtgtgttgacaaaaggtacaaggaatctgagctaaacatgggggaaaacagttgcattgatcgctgcgtttctaagtattggcaggtgaatagcatgatcggtcagatgctcagtgctggtggtcggcctccgatgtaaaacacagtcattgtcatcctcccatcttgaattcgtttaaaatgtaaaacaaggctaagtcctgcaattgacattagcaatttatctttgtttggaacagctaatcaaaacttcttataaaccaagctttcatccatg

SEQ ID NO: 14076 - DNA, 146 bp, Gossypium hirsutum
  unsure (1)..(146): unsure at all n locations; Clone ID: LIB3145-007-Q1-K1-B3
aaatttgggaccttttaaatttacttttttggtgagacattggttgatttgcttttttaaaccaaattctagttntaatgttttaatggtttttcaattctgagcgtttcttttttnaanaaaaaaaaannnnnnnnnnnanaann

SEQ ID NO: 14077 - DNA, 405 bp, Gossypium hirsutum
  Clone ID: LIB3145-007-Q1-K1-B4
cccacgcgtccggcggttataatcagctccttcctgtggttgtcccagctcctaatcctggtggggccaaaccaaagccggcgccaaaacccaaattcactccaacccctgctacatcgtctaatccaattaccatagagcagaagatgacaacttcctggaatgccaagggaaaaacctactacaggtattccacaatagtgaccaacaagtcttacaagacactgaaggatctcaagctttctatatcaaagctttatggtcctctatggggtctctccaagtctggcaattcttatggtttcccaacatggctcaactctctacctgctggaaagagtattgagtttgtatacatccattctacttctcctgctgatgtctcgggtttcaagctacaatttg

SEQ ID NO: 14078 - DNA, 393 bp, Gossypium hirsutum
  Clone ID: LIB3145-007-Q1-K1-B5
gaaagaatgttttcccggagagacctggcgagcctgagtgccaattttacatgaagactggtgattgtaaatttggtgcagtttgtaagttccatcacccaagagagagagttcttcctgcccctgattgtgtgttgagtcctataggccttcctttacgcccgggtgaacctctatgcatattctattctcgatatggaatttgcaaatttggtccaagttgcaagtttaaccatcctatgggaattttcacatacagttactcaccatcatctccatctgatgccccagttcactgtttcttgggttcgtcgtcaggaactgctgggttaaacctgtcatcagagggacttgttgaagcagtccctacaaagccccaggcgactatcactg

SEQ ID NO: 14079 - DNA, 407 bp, Gossypium hirsutum
  unsure (1)..(407): unsure at all n locations; Clone ID: LIB3145-007-Q1-K1-B6
tccccggccgaatcccgggtcacccacgctcgaaggtttggtgtttggccttgccctgtctctctttgctgctgataacgccacagtttnggctattggagttccatttccagcttctgtatactatatttacagtgccatataactgttccctggcacagtgttctatggtgttaatgtttgaaagatttcactacacaaccaacttaaaggccgatgtctatgtactatagctgatcttttcaagagaaagtagatacattcagtgttgtattggcatcactccaacttacgtcgtgctgcagctacatatgttactaacactacaatattacccacgcttggccatccatcgaatcaacaagcagctgctgaagctgagaaacttctcttctcatctttgtcaa

SEQ ID NO: 14080 - DNA, 449 bp, Gossypium hirsutum
  Clone ID: LIB3145-007-Q1-K1-B7
gttcagttagggaagctagtcttgcctgctaatctagatcttctagttgtacattctgcgatctcaccatgaccctcaactatggggagatgaggtacatctttttaaaccagagagattcgcagaagggattgccaaagctaccaattacaatgcaggtgcattttgtccctttggattgggacctcggaattgtgttggtatgaactttgcaatcatcgaaacgaagattgcactctccatgattctacaacgctacaccatttctctttcccctgcctatgtccactcaccaattccttatatcaccattcaaccacaacatggaattcaagtaatactcgagtcactgcataacgatgcgtaatgtaacatagctgctaagaattcagggtttaaataagtttagctgctataaatttggggtttaaataagtttattcatgtat

SEQ ID NO: 14081 - DNA, 445 bp, Gossypium hirsutum
  Clone ID: LIB3145-007-Q1-K1-B8
cccacgcgtccgcccacgcgtccgattcacgcagctgccccttcatcactctgccaccggtgtattcaacctccgtcgcctcgccatggcatcagagaagaagctgtcgaacccaatgagggaaattaaagttcaaaagcttgtcctcaatatctctgttggtgaaagtggtgatcgtctcacccgtgctgccaaggttttggaacaactcagtggtcaaacccctgtcttctccaaagctaggtacactgtgagatctttcggaatcaggcgtaatgagaagattgcttgctacgtgacagtgaggggagagaaggctatgcagcttcttgagagcggtttgaaggtcaaggaatatgagcttttgaggaggaacttcagtgatactggctgctttggattcggcatccaggagcacatcgatcttggaatcaagtatgaccct

SEQ ID NO: 14082 - DNA, 155 bp, Gossypium hirsutum
  Clone ID: LIB3145-007-Q1-K1-B9
ggatctggcaaatgaactctgctttcattcgaccttatccaaacgataaggagtccggagaggaccgaatagaagttaatccaaaagtcaccattgattaattaattattgtacctcctgctattcaaaggaaaatgaagtttcttgttttttgt

SEQ ID NO: 14083 - DNA, 452 bp, Gossypium hirsutum
  Clone ID: LIB3145-007-Q1-K1-C1
cggcctctttgtgctgagaccaataaaatacgtgggtattgaagtctggcaggtaaagggtgggtcggtttttgacaacatattgatttgtgatgacccacaatatgcaagagaagttgtagaagatatatgggccaggaatagggaggctgaaaaggaagcctttgaagaagcagagaaagaacgaagagcccgggaagaggaggaagcaaaaagagctagagaggaaggtgaaaagcggagaagagagagggaccaccgacatagagacaggaggcaccgtagaaggcacgatcctcgtgattatctggacgattaccatgatgaactatgaggttgtccaccacaatttcgcgagttttaggatcccatttcgattacgaaaaagagaaaaatcgaagcaaggttccacgctgagagagttggggttactgtgtactggttgttctcat

SEQ ID NO: 14084 - DNA, 436 bp, Gossypium hirsutum
  unsure (1)..(436): unsure at all n locations; Clone ID: LIB3145-007-Q1-K1-C10
cccacgcgtccgctcaatttcacccatgtcgatacctccctcttccgctacacctcctgggtcctcatcctcttgtcaattcacctaccaaacgacggcaaatcaatcgtattttcctttgccctttcatctccagcaacagccccagcattatgcctccgcgcccccctccgtttccgtcgccccggctcctgtctaccctgcctctgttgctcccgtacccggcgtctattctctccctcaataccaacaggcccaacagttatttcaaagggatgctcaaatagttaccccagaagcactagagagcgtaaaggctgctcttgcaagcagtgagattgagcacaaagcagaaactaagaagaaagcgatcccacggaaagctgctggtcagtcatgggaggatccaacgctngctgagtggccagaaaatgac

SEQ ID NO: 14085 - DNA, 427 bp, Gossypium hirsutum
  Clone ID: LIB3145-007-Q1-K1-C11
gaagagactacctgtgagggcggactcttcctacagttgggggctggcatttaaagcaggcggaaacaatttactagtaataggagctggaggtcatggagggcatgatgatggagtaaatgttctgcattcttagaatccagaggagagaaacagggatggacaagagtggaatgtgcttgctgtcaaggcacaggcaggtgcttttgtgtataattgtgcggtaatgggctgttaatgagagttgccgcatctttggtgcaaacatcgacatctggaagaccaagatcaacgatcttctatctgttataatttttattgtctcagtatcattaattttattgttctttttcccattttatgattcagaaagaataattgacctcgaatcaatttcttaaagttatcaaccgaatgtgttgatccc

SEQ ID NO: 14086 - DNA, 390 bp, Gossypium hirsutum
  Clone ID: LIB3145-007-Q1-K1-C12
aaaacctttggtttggtttttagttttgttaattatttttcgagtttcggtttcgttttggttttcccatttgttgtattctattttcttctcctgttgttctccaccaagaaaggaatcagggttcctctgctgtttctataaatcatttctcaattccctttcttttttttagtcagattctggatttggaaaaaaaaatatcttctctgtcttcggatttcctcacgttttcttaaatcatcgatcaacgccgacctagaacaagaataaaacgaggaacaaacaacctctgattgtcgaattaacgagaaaccaaaagcaaacgcataaagaaatcatgggttctgaacagaatgaaggaactagcttccctccatcggagccaaa

SEQ ID NO: 14087 - DNA, 220 bp, Gossypium hirsutum
  Clone ID: LIB3145-007-Q1-K1-C2
cggattattgcatggttacaagaagtaatttaaagaacctatattggatagtgactcaacaggtagcacaccacacaatcaatggttgcaacctgaggccaggcgatctccttagaactgggaccattagtgggaatttgaatcatttggatgtttgctggaactaacatggaatggacaaaaacaatttccattaaatgggacaactcaaaaattctta

SEQ ID NO: 14088 - DNA, 98 bp, Gossypium hirsutum
  unsure (1)..(98): unsure at all n locations; Clone ID: LIB3145-007-Q1-K1-C3
tcggccacgcgttcgnttgggaaaatatgtagcaaaagccttttttgccttgacccctgcaggggggaaatttggcaaatccacatgggacaaaagga

SEQ ID NO: 14089 - DNA, 420 bp, Gossypium hirsutum
  unsure (1)..(420): unsure at all n locations; Clone ID: LIB3145-007-Q1-K1-C5
ncctttaaattcagttcagttactatgggttaacctgatcatggatactcttggagcacgtggattggctactgaaccaccaacagacaaccttatgcataggtcaccggttggccgaagggaacctctaattacaaacatcatgtggaggaacttactcctacaggcttcgtatcaagttactgtcctccttgtgctcaacttcgcgggcttgaccattcttcatttgaaggatgaccgtgacagggaacatgcttatgacgtgaagaataccttgatattcaatgcatttgtcatgtgtcagatattcaatgagtttaatgctagaaagccggaagaaatcaactgcttcaaaggagtgactaaaaactacctttntatgggaataattggatttacatttgttcttcagataatcat

SEQ ID NO: 14090 - DNA, 445 bp, Gossypium hirsutum
  Clone ID: LIB3145-007-Q1-K1-C6
ggaagaacccatttattaaaccccaaaacccccatttcggaaaaccataaaatttccaaccggggtttcagttccatctcccagtagtcaagtttgaaagcaaaccatggttcccccccaacaagaccatgatcttgtctataaccttaggctctcatcggttggaccaggttgtgtcaccggttcggacgtggttcatgacctaagcggcctggacttgaccatgaaactccattacctcaaagcggtctacttcttttccagccatgcagtggaagggctaactatcatgaacatgaaagaagccatgttttacttgcttaacgattactacatcacctgtgggcggatcaagcggtcggagtcttcgggtcgaccgtacataaagtgtaatgactgcggcataagggtcgtggaaggtgtttgcgatgaaactgtggatgaa

SEQ ID NO: 14091 - DNA, 487 bp, Gossypium hirsutum
  unsure (1)..(487): unsure at all n locations; Clone ID: LIB3145-007-Q1-K1-C7
cgcaannattgtttcaagggaatatgagggactcatttttccaatatgcctgccctttctgtgctccaaggggggtnnttgtgacnnatgtcaaagggtctgggagaaaattcgacgaggagaatcgcagctacaccaatgcncggaacagtaccaaaacaaaatggtctcgatcctttgcaacgattgcgagacaaaatctctagttcggtttcatgtcctggctcagaaatgcccgaattgcaagtcatacaatactaggcaaacacgaggctgaagtggcttagagtgggatgtagaaaccgacttggatggcatattttccaaatcgatgcatcaagcattgggttctggttaagcttctgcaacgtgtattggtaccagtcgtggcgcatggttccttcgggggttcggtttagtgcttggtattttcaattcttttgtagatgattcaatcaataggccaacaaataagcatttgctttta

SEQ ID NO: 14092 - DNA, 438 bp, Gossypium hirsutum
  Clone ID: LIB3145-007-Q1-K1-C8
gaaacaatggagtccaacaccaaaatgtcagctcttcttttgatttgcatgcttttcaggtcttcagtgacaccaattcttgggtgtggttcatgtgggaaagcacacaagcatcgaaagcctaagggaaagtcccctaaaggtcccatcactttgcctccccttgtgaaacctccaatcaagttgccaccggttgttcctccaatagttaagccacccattgacctccctccggttacggtccctccaattaaccttcccccagggacggttcctccagtaactaagccaccaagtgggaaaccctgcccaacaccaccaaccaaggacacttgccccattgacacactgaaattgggtgcttgtgtggatctgctgggagggttggtgcacattggactaggtgacccggttgtgaaccaatgttgtccggttctt

SEQ ID NO: 14093 - DNA, 464 bp, Gossypium hirsutum
  Clone ID: LIB3145-007-Q1-K1-C9
gaaaaggaaaaagaagattagatttgagagaatttgaagatggggaatgctctgagatgggtgtatagccattgctgcaagccaaccacagctggagactcccaaggcaaggatggagtttcagctctttcccatgatctcttccaatttgatatcacctctcaggttcctgaagggctaagttatcacgtcgtttcatccaagaaagctcaggctaactggtatagaaagttattagatgcttggagagaagcaaaaccaccaccaaaaacacctgaggaagcttcaagctttgtcattcagacattgaagagacaccaaaaggcagatgtcgagggattattggcatactatagtcttcctcagcagccttctgctagcgccacaacatcattgcctcaaggagttaagtttgaattgcagactttaccagtggacaccaaagcagtacctgatggagatac

SEQ ID NO: 14094 - DNA, 464 bp, Gossypium hirsutum
  unsure (1)..(464): unsure at all n locations; Clone ID: LIB3145-007-Q1-K1-D1
tcggccacgccttccgttttttcgtccgtatgtagtctgtattaattgattggggattcattcgggtgtgatttaacccccatacctctcttcttcttcttccttctggaccttgggtaaagctgtatatataaagcttgttcttcttgataaaaagtggaggtctggcaggggtcaaaaccatagcctttaaaatggctggtgggagcgggaggaaggaggaagaggaagatcaaaatcagcaagagaaagataagagtgaaagagaaattcatggatttttggcataagatgattttccctgttcgtagattttggtttactgtttcttctcctctcaaagctcgcaaaaacggtgcagggctattgaaactacgtgatgatatacaaacatgtgggtaccaagatgtgcangtgatgtgggagatgcttagaagatccgaaactgagcatcatcatcatca

SEQ ID NO: 14095 - DNA, 449 bp, Gossypium hirsutum
  Clone ID: LIB3145-007-Q1-K1-D10
aacgaaagcttggccgtacccttcaaggtaatttggtatctttgaataagccattttctgctccaagggcaagttgaagaactcctgtgtatcggtcttcattttctcaatcacttcatctgctatcccatggttgattaactgttgcacccaacagtaagaatgaactactgaatccatagacgtaaaaaaagtataattgtgtttcaattaggtacctggaagaaaccccagtctttgcaagcctggtggagttttttctgttcagcatcatggtctagtttgctcatgtcaattacaggaatctgctgggattcatctatggaaaccacatcgaattcgacctctggtctgatgtatctggatgggattctgttgaggttcttggatgcaagagcttggacattctcaactggtaaagaatataacatatctgtgctctgcacttt

SEQ ID NO: 14096 - DNA, 453 bp, Gossypium hirsutum
  Clone ID: LIB3145-007-Q1-K1-D11
atgactacagcttatacggaatacaaaaacaagcagaaaatgcaagatgttgcaacgggggaaccatccaccccgttcgaccatggtgctggacatgtggatcccgtttcagcgcttaatccagggcttgtgtatgatttgacagcggaagattatctgggtttcctttgtgccttgaactacacagagttccaaatcagatccctggcgagaagaaacttctcatgtgatgctagcaagagatacagagtcactgatctcaactacccttcctttgctgtcaattttgattcggtcatgggtgggtcgaatgttgttaaacacacccgaactctcaccaatgtgggctcgccaggaacttacaaggtatcggtatcacctgaaactccaggagttaagatatcagttgaaccacagactttgagttttagccaagcaaatgagaagaaatca

SEQ ID NO: 14097 - DNA, 454 bp, Gossypium hirsutum
  Clone ID: LIB3145-007-Q1-K1-D12
cccacgcgtccgctaatgctcagtatgatgatcctgacatactagatcggttgagagttgagatgatgccacacggcactggtgaccgtggatgggatgtattctcattggaatatgatgctagggttcctttagatacagtgtttactgaatctgtcatgacaaggtatttaagaatttttaattttctgtggaagcttagacaggtagagcatgcactcattggtgcttggaagacaatgaaacccaattgtcttacttcacatgtatacacaaagctgcaacatgctgtaaaattgcaattgctttcaacattgaggcgatgccaggttctttgggatgagatgaatcattttgttaccaacttgcaatactatatcatgtttgaagtctttgaggtgtcatggtccaatttttccaatgaaatggaagtagccaaagatcttgatgatct

SEQ ID NO: 14098 - DNA, 458 bp, Gossypium hirsutum
  Clone ID: LIB3145-007-Q1-K1-D2
cccacgcgtccgctcgttactggagctgcaggacaaatcgggtatgctcttgtacccatgattgctaggggagtcatgttgggtgctgaccagcccgtgatccttcacatgcttgatatcccacctgctgcggaggctttgaatggtgtcaaaatggagttggtggatgctgcatttcctcttctaaagggtgttgttgctacaactgatgctgttgaggcatgcactggagtcaatgttgctgtcatggttggtggtttcccaaggaaggaaggaatggagaggaaagatgttatgtcaaagaatgtgtctatttacaagtctcaggcttctgccttggaacagcatgcagctcctaactgcaaggttttggttgttgctaaccctgccaacaccaatgcattgatcctgaaggaatttgcaccttcaatccctgcaaagaacattacctgtttgac

SEQ ID NO: 14099 - DNA, 453 bp, Gossypium hirsutum
  Clone ID: LIB3145-007-Q1-K1-D3
ggtggaacgcccaaagggccattaccttttcttccttaaggattaatccgaattaaatccgggcgagcgtgtcaaagtaagtagaaacagtcacggccagcctgttggatctaaagctcaacttttagcaggctatttgagcattatagcacgaaatgctaatatgttgcccatcaactacgaatcatggcatcacatgcctgatagcaacaaaaatcaggctctcgataatattaaggagagatttgctttagaggtctccgatgactatatcaagaaaggcattgggtaaaaaatagagagaccataaaaaacactttgagaaaactatattttaagaaagacataagcctcgaggaaaaattgagaaatgtcccgccgggaatgctgaggtaccaataggaaagatgcggttagattctggaattaaaagaaagggagagaccgtgagcg

SEQ ID NO: 14100 - DNA, 443 bp, Gossypium hirsutum
  Clone ID: LIB3145-007-Q1-K1-D4
cccacgcgtccgcccacgcgtccgcaagaacaagcaacaagaacgtacaagccaagctggtactgcttggggacgtgggaactgggaaaacaagcttggttttgagatttgtcaaaggccaattttctgattttcaggaatccacaattggagctgccttcttcactcaggttctgtctctaaacgaagccacggttaagtttgatatatgggacacagcaggacaggagagataccatagcttggctcctatgtactatcgaggtgctgcagctgccatcgtggtctacgatatcacaaactcggaatcctttgagcgtgccaaaaaatgggttcaagaactgcaaagacgaggaaatccgaatctgataatgttcttggtagcaaacaaggttgacctgaaagaaaagagagcggtgggaaatgaggaaggtgaagtatat

SEQ ID NO: 14101 - DNA, 460 bp, Gossypium hirsutum
  Clone ID: LIB3145-007-Q1-K1-D5
cgaaaggaccacttaaaggatgtggatgccgtccaatccaaggaaatacccttattctggtgtggcatggctgagagcgtacaagttatggggtcattcgacggatggagtcaaggggaacacttatcaccagagtacaccggttcattcgccacgttctccaccacattattgcttagacccggaaggtatgaaatcaagttcttggtggatggagagtggcatctatcaccagaataccctaccattggtgagggattaatgcaaaataacttgctcgttgtagactagagtcgagtatttgatacagctttatgttagacagatatgcgtaagtcttttttgtagtcacattcaaatatgtgttgaatacaagtacatatattattagggaaaatgaaaagattttagctactttgatgcaatgattatgagctttccaatagtaaaagattttaga

SEQ ID NO: 14102 - DNA, 455 bp, Gossypium hirsutum
  Clone ID: LIB3145-007-Q1-K1-D6
gccgaaaaaccaacccttaccaaaccacctgaacctaacatcatcatcatccatggcggcaccgaggtggctatgggctttctctgtagccctaactctggttccgtctgtttttggaaactctgaaggagatgctcttaacacgttgagaaaaagtttgaccgatccagataacatactccagagctgggatccgaaccttgttaatccttgtacttggtttcacatcacttgtaaccaaaaataatcgagtcactcgagtagatttaggtaattctaacctgtctggacatttggtacctgagcttgggaagcttgagcatttgcagtatctggagctttacaaaaataagatccagggaaccatcccaactgaacttgggaacttgaagagcctcattagtttggacctatataacaacaacatctcagggaccattcctccttcactaggg

SEQ ID NO: 14103 - DNA, 461 bp, Gossypium hirsutum
  Clone ID: LIB3145-007-Q1-K1-D7
atctctctgtctctctcccatttacctccatggctgtctcttttaaaatgtgtgtgagtggcggtctatttgtgggtcttatgatgctgggtctggtaagctcagctaagttcgatgagcttttccaacctggttgggctatggatcacttcatctatgaaggagagctccttaagctcaaactcgacaactattcgggtaatttccaccctttcttgctctccaagtacccacctacttatgttcattgactccctgtttttcattacaatatggtacttccaacttttttcttcgttgtaaacatgccagcttatagattaatgaaaatggtgggttttggtgatatcaggtgctggctttgcatcaaaaagcaagtatctatttggcaaagtgaccatgcagattaagcttgtagaaggcgactctgctgggactgtaactgcttactatatgtcatc

SEQ ID NO: 14104 - DNA, 406 bp, Gossypium hirsutum
  unsure (1)..(406): unsure at all n locations; Clone ID: LIB3145-007-Q1-K1-D8
cacacaattgcatttaacattgtccataggcataaaattaatgtgaagaacctgatttggagcttcttcagagggttttttataatactgcaagaggatccctaaaagagcatgaagggcctgctaggagtagataataactacttattgaccaagtagagcagcaaagttttatgtgatttgtttatatattatatacatatattctgtcataatgaggtcttttttgcaacataaattaaattcccaagtttagttgtctgtttaggaactgattttactttataatctttttttttagttctttaatatcttttgtttacccagtttttttgttgtcagtttcgtaagagtcatcatatatcaattcattaatgcacaactatgtggaattaaagatggnttt

SEQ ID NO: 14105 - DNA, 457 bp, Gossypium hirsutum
  Clone ID: LIB3145-007-Q1-K1-D9
gaagcttcttagagagaataatagcctcccgagctatggtggtccagccgacgtctgcggtgaaacagtttatacattgtccagaagttgcttggattcacttttatctctgttcaagcaagcagttgaactagaaccaagtgataaatccatggaccgcagagaacctgtggtgaaacaaatagctttggaggcagataatctctcatggttgcttgagattttggctgacaggcaatcagcagatgaatttgcactaatgtgggctagccagcaagaattagcaacattacattcgaagcttcccattgtgtctcgacaccatgttagttgcattacagctcggttatttgttggaatcggaaaaggggagttgctaccagcgaaggacactcgtcagttattgttacaaacctggttgcaaccattgatcaatgactacaactggttgcaacat

SEQ ID NO: 14106 - DNA, 421 bp, Gossypium hirsutum
  unsure (1)..(421): unsure at all n locations; Clone ID: LIB3145-007-Q1-K1-E1
catcaagcggctgccagaccgaccaaacttcagcggatgccagcccatcagggaatgcaagcgaagcttatggagcacttagcaatgctattcaaaccataattgccgactcagatggctcaattactaataaagagcttgttctgaaggccaggcagatgctcaaaaaacagggcttcactcagcaacccggcctttactgctgcgaccatcatgtcagagctccatttgtctgcgaatactagtcttttatctgcaagcttcagaaacaaataaagtctatgatttggtcagagaattgttgttgatgagattgtactgcttgtctttcactgttcgctttatccatatatttacagtttgtgtgcttctggacaatgaatggattttgaacaaaaaatgattaatctattgcagctna

SEQ ID NO: 14107 - DNA, 449 bp, Gossypium hirsutum
  Clone ID: LIB3145-007-Q1-K1-E10
ctcaaatcaaagcacgagaatacttgaatctttctcatttgatagctctagctcaacatggacctagccaacactcttaaacatacctgagctgacaggcttatcgttgaactcttctgcagcatccataaacaccttggactgctcacatatctttgcatgctcctctttcgcagcactcaactcagccactaacttggatatcctcaaacccgcactatccagcttttgacgttccattaaaccgatgtatgcacaagcaattttcttcaaatgttccatggcgaaatccaccttgaaattaatgcgtaaagcatctttgaatgcatccctccacttcaatatcagatcctcggtgacgtgcttctgtgaaagagatttgcgatctatgcctgaagcaagttaccaagtggagggatgcaataaaggatgctttacacatcaaattc

SEQ ID NO: 14108 - DNA, 443 bp, Gossypium hirsutum
  Clone ID: LIB3145-007-Q1-K1-E12
cccacgcgtccgctttctcaggatgctattggaaccggttttacctgtcacttctccactgggccatggaaatgaagttattttaagagagactttgtatgatgcggttataaagatggaccatgcattccttggtccagagggaggaattctgctaccaggcagacaagtaaaagatctcgcattgacatggtcctttgttgctgacaatgccatacggtcagtgagggagaatggtaaccagaccaaagctatctcttacataaatgctttctccgaatcttggctactctctcagttgataagataagtagcaaatattcagctgagaatcttgcttgcatggttcatgagaggaaagaagacaaaacagctgataatgatctagagatgattgattcaatcgatatggttcccttgtctgctccttgctcgatgaaatc

SEQ ID NO: 14109 - DNA, 366 bp, Gossypium hirsutum
  Clone ID: LIB3145-007-Q1-K1-E2
ccaacccttccggaaatactcgaagaacgagttgcagttgggaagcttccccactatacgtggcttacccaaacactcagctaagccaataaagtatgcctctgagaagagggatgttgattcattgatggccttcgttaatgccctccgatgaagggattcataaattatttgtcgagttaacaaaaaatcaacttttgagcggtgattcatgctggtttacaatctcataaactaactcatgaacccggagtttgtcatgcttccatcgtccgtagcatcataatgaacctcgggcgtttctgtatactgaacacaatgttccatattttgacatatatgtgtgaaattgatgagttctttatt

SEQ ID NO: 14110 - DNA, 103 bp, Gossypium hirsutum
  Clone ID: LIB3145-007-Q1-K1-E3
gtcaatcgcttgacacaagaagtggttccaaagtttaagggccagtttaaaaaaattagggggggccccccagtccttgtgggaggccatttggttgggaaaa

SEQ ID NO: 14111 - DNA, 464 bp, Gossypium hirsutum
  unsure (1)..(464): unsure at all n locations; Clone ID: LIB3145-007-Q1-K1-E4
ctnccgccaccccttccggccaagtccatattacctgatttactaaatcattggctatcacttggtggggcatgagaggatcctattccacttggtttttgtgtcgttttctcattctcttaactcactcttctttctctttatattatatgatactaatgttataaaaattacctcagttctaccagcaagaagcaaccaaactccgacgacaaattcgtgatgttcagaacatgaacaggtctcctatcaatttctcttcttcttcctacactctatatctatatctatatacgaatgatgtttgttgcaggcatatccttggagaggctctgagctcattgacctttaaggaactcaagaaccttgaaggcaggctggagaaaggcatttgtagaatcagatcccaaaaggtttttgttttggtgtatattaaaatctttcattctttccttccatcttaa

SEQ ID NO: 14112 - DNA, 457 bp, Gossypium hirsutum
  Clone ID: LIB3145-007-Q1-K1-E7
gtttgggatagggatctaaagagttcaggtcttttcatggagaaaataggccccggttcggctccaaaggtattccttttgtctaattctataaatttttccagaggaaatactactcctggtgcctatgacttgaccgtcatctcgaagcccttgagggctagcatgttagcagcatctctacaacgagccatgggcattgggaacaaagggaatccctgtaatggagagttacctagcttgtctcttcggaatcttcttcttgggagaaaaattctaattgtcgatgacaacaatgtcaacctgaaagttgctgctggtgcactgaaaaaatacggagctgatgtggttagtgcaacaagaggaataaaggctattgaactgctgacaccacctcaccactttgatgcctgtttcatggatatccaaatgccagaaatggatggatttgaagcta

SEQ ID NO: 14113 - DNA, 436 bp, Gossypium hirsutum
  Clone ID: LIB3145-007-Q1-K1-E8
ggaaaagtgagagcatatgttttaggagctttgtaagcatttcaagaaatcaataaaaggtctccctcacggagaatttccagtaaaactattctcaggaggcttatagccaaaatctaggatttaggagattcaaagagtttctgaaaattttcagagatcttttctggaggcgttgatacggcttggtggtaagacccgagaggcggcagtaaattccagtagccatccgcttgaaaagagaaaatcagcagaaacaggagaatcattccaaccaaacaaatccagaagaacgatggaaggtgtagattgcaaatttttctatcttcctacggataatagtcgctaagcactcaagggcatcgcctcacagagaccaaaatcaaacaagcacgacaaactaacataaaaaaatatagcaaaacctaaaacttat

SEQ ID NO: 14114 - DNA, 445 bp, Gossypium hirsutum
  Clone ID: LIB3145-007-Q1-K1-E9
accccatgcccgaaatcgagaagcccatgtttgaactagtctcagcagcccaaacgatcgggccagatagtgatggtgcaattgatggtcaccttcgtgaagttgggcttacatttcaccttcttaaggatgttccggggcttatttcgaagaatatagaaaagagcctggtagaagcatttcaaccattggggatatccgattggaactcccttttttggattgctcatcctggtggtccagcaatattagatcaggtagaagccaagttagcactgaagccagagaagctacgagccacaaggcacgttctttcagagtatggtaacatgtcaagtgcttgtgttctatttattttggatgagatgaggaagaaatcaagggaagatgggcttcagaccacaggagaaaggttggagtggggagtgctctttgggtttggacc

SEQ ID NO: 14115 - DNA, 417 bp, Gossypium hirsutum
  Clone ID: LIB3145-007-Q1-K1-F1
ttggggcaagttttctctctaaaaacccactctccagtcatgcgtcaccatggatgcggcgaaactgaactagttgaagaagttcatccaactctgcaaatctaatccttgcattctcgatgatccttccctctccttcttccgcgactatcatcaaagtctcggagctaagatcccatcctcggatgacaccgccgacgactccaaatcgaggagttatgtgctggaggaaagcgacgaggagcttgcggatgcaggagtgaaaattaatatagaagaagaggaagacgaagatgacattatcgaatcggatatcgagctcgaaggtgacaccgttgagcctgataatgagcctccacagaagatgggagacccttgtgtggaggttaccgatgataaccgtgatgcttcccattc

SEQ ID NO: 14116 - DNA, 87 bp, Gossypium hirsutum
  Clone ID: LIB3145-007-Q1-K1-F10
acgcttggtatgtagccaagcccaagaaaaaaggaacgaggggaagaatcgacaaggaagtgcataacaaaaaaaaaattgtgaatg

SEQ ID NO: 14117 - DNA, 393 bp, Gossypium hirsutum
  Clone ID: LIB3145-007-Q1-K1-F11
gtagagatgaggaaaatcatgggtgccaaagttctcttcttctttgctttgctttccgggtcagctgtgtcggcatttgcacaggatgaggaagaccaaggtcttgttatgaacttctacaaggattcttgtcctcaggctgaagacattatcaaggagcaagttaagctactgtacaagcgacacaaaaacactgctttttcttggctgagaaacattttccatgactgtgctgtccagtcatgtgatgcttcactgctgctggactccacaagaaggagcttgtctgagaaggagacagacaggagctttggcctaaggaatttcatgtacattgagaccatcaaagaagctgtagaaagggaatgtcctggaagctgttcttgtgctgat

SEQ ID NO: 14118 - DNA, 434 bp, Gossypium hirsutum
  Clone ID: LIB3145-007-Q1-K1-F2
cccacgcgtccgcttcgcccccttcagtttccatttctattaacaaaaaaaatggatccagggaacacatggggcaactcctcccttgaatccgtcgacccagaaatgcatgacctcatcgagaaagagaagcgtcgtcaatgccgcggcatcgagctcatcgcttccgagaacttcacttccttcgccgttatcgaagccctcggcagtgccctcaccaacaagtactccgagggcatgcccggtaaccgttactacggtggcaacgaattcatcgacgagatcgagaatctctgcaggtctcgcgctttgcaggcttttcatctcgaccctactaagtggggtgtcaatgtgcagccgtactccggttctccggctaacttcgctgcttacacggcggttttagagccgcatgatcggatcatggggctgga

SEQ ID NO: 14119 - DNA, 389 bp, Gossypium hirsutum
  unsure (1)..(389): unsure at all n locations; Clone ID: LIB3145-007-Q1-K1-F3
atgagtttgtatgtatttaaaggtaggagttgtaatacccatctgtaatagtttgtagacgctgtgcatcgagaacactcctgatggctcacccctccaagctagatcatcttcataagaaattactgccagtgtgatttgaaggatcctttccgcatcaaaggtattagaaattnaaaaaaaaaaaaaaaaaaaaaaaaaaaaaaaaaaaaaaaaaaaaaaaaaaggaaaaaaaaaaaaaaaaaaaaaaaaaaaaaaaaagcatgcaacaaaaaaaaaaaaatgtgggggggctctacataaaatccaatctccgtccctcttcaaaaccaaaacttactaaaacaaatggtggaaccaaaataaattatcttggagtacatctacct

SEQ ID NO: 14120 - DNA, 399 bp, Gossypium hirsutum
  unsure (1)..(399): unsure at all n locations; Clone ID: LIB3145-007-Q1-K1-F4
atttactcttgagaatgcttttggtgaatcttttagactgctttttgaaagttttgttgaaggtatatatgagtaagcaaaacagtttattgaaaaaaaaaaaaaaaaaaaaaaaaaaaaaaaaaaaaaaaaaaaaaaaaaaaaaaaaaaaaaaaaaaaaaaaaaaaaaaaaaaaaaaaaaaaaaaaaaaaaanaaaaaaaaaaaaaaaaaaaaaaaaaaaaaaaaaaaaaaaaaaaaaaaaaaaaaaaaaaaaaaaaaaaaaaaaaaaaaaaaaaaaagggggggcccttttaaaaaaaaaaaattttaaaccccggttaaaaaaaaaaaaattttttttaatgggcccccaaaaaaaaaaacaaccgccctaatttaaaaaacgtaaaaaggaaaaa

SEQ ID NO: 14121 - DNA, 454 bp, Gossypium hirsutum
  Clone ID: LIB3145-007-Q1-K1-F5
cttccggaatttcgatttcggcgattcggcggcggtcttccaaaaatgcaaattccttgtccgggaggcacaatcaggacaacaaaacgttgttacggcacaaaaaagattggaccataatcagcccacagcttttgtgatcatggacagtgaaatcatcccagatgctgagcttgcaccagcgaagaacgaattcccagcattccttggtcgtccatggggtaagctatccagagctatcatcatgcaaacttacattgacgatatggtacaccccgaaggttggactagttgggatcccaaagaaccgacaaatctttgccaatacgccgagttcaataacactggccctggtgcttccacttcccttcgtgttaaatgggccggagttaggttgcttaacgaggcagaggccattaactacactccacccaagttcttcgacgtcggcgat

SEQ ID NO: 14122 - DNA, 451 bp, Gossypium hirsutum
  Clone ID: LIB3145-007-Q1-K1-F6
cttcggtcatttttttggttaaggaccattccaccattgttcgtggtgtccaaaaggttctccaaaactacaagaacttgcaggatattattgctattttgggaatggacgagcttagtgaagatgataaattaactgttgctcgtgctcgcaagatccaaaggttcttgagccagcctttccacgtggcagaagttttcactggtgcccctggcaagtatgtggagttgaaggagagcatcaccagcttccaggtacaattatatctcttcctagcttgcttctattgcatcatattagtgtgtttatgacatcttaagagcaagtgattaatttcttatgataggtggatccatggattgatatactttattattaaaattagtataacgttgaaaagtatgcatttttagtgtctgtgttaattggtagatggtaatcttttcatata

SEQ ID NO: 14123 - DNA, 457 bp, Gossypium hirsutum
  Clone ID: LIB3145-007-Q1-K1-F8
atccgacctctcttcaagattaaaacaaaagtcatcgagaacaacctgaatcccatttggaatgaaacgtttgagttgattgccgaagatagagagacgcaggaactgactgtagaggttttcgaccaggacattgggcaagacaagaggttgggaattgcgaaattccgtttgatcgaactagaaccggagacaccaaaggaggttaatctgaaccttctgtcctcactcgatacacttaaaataaaagataacaaggacaggggaagttgtaccattaagcttttgtaccatcaatttaacaaggaggaacagttgattgctttggaagaagagaagaggatcctagaagaaaggaagagattgaaagaagccggagtaatcggaagcacaatggacgcacttgacggagcggcttcactggttggatctggtgttggtatggttggtaccggta

SEQ ID NO: 14124 - DNA, 450 bp, Gossypium hirsutum
  Clone ID: LIB3145-007-Q1-K1-F9
gcacatttgtatgaggagtacggggaagactttgtggacatgttggatggaatcttctcgagttgtgctattggatactcgtgacaatagctatattgtcgctcgtgatgccattggtgtcacctcactttatattggatggggactcgatggttcagtttggatagcatcagaattgaaaggattaaatgatgactgcgaacatttcgaaagctttcctcccggtcatttatactcgagtaaatctggaggctttaggagatggtataatccaccttggttttcagaggtcactccatcggttccatacgatcctcttgttcttagacgtgcatttgaaaatgctgtgatcaaaaggttgatgactgatgtgccttttggagttctgttatctggaggacttgattcatcattagttgcttccatcacagctcggtatttggctggtac

SEQ ID NO: 14125 - DNA, 450 bp, Gossypium hirsutum
  Clone ID: LIB3145-007-Q1-K1-G1
tcggccaagccgtccgccaacccgtccggcctatgacactgcaccagcaccagagacggtggtggtgcaaaagctttggtgtgtggctaagccgagtgtccctacggagacactgcaagaagcaatggactacgcttgtggtgaaggcggtgctgattgtaaagaacttatgccagatgggagctgtttctatccagacaccattgttgctcatgcttcttatgctttcaacagctactggcaaaagaccaagagaaatggaggaacttgcaattttggaggcactgctatgattatcaatgctgacccaagtttcctcgagtgtcggtttgttctcagtagaatggagaatgttgggattgtttgagtacaatgtaggatgtgtggggtctaattgctaagtggaatgtctggtttttaccctttattcttagtgagtagttgtggtgt

SEQ ID NO: 14126 - DNA, 454 bp, Gossypium hirsutum
  Clone ID: LIB3145-007-Q1-K1-G10
gggaaccaactgttacacacagcagcagcagcagcagccatggttcgtcaatcttccgcatttcgggaacatctttccatttttttcttagagaagtattcaagtttcattccaaattcttttcgttttcattatatttttattggtttgatttgttttctctctctctctctttttataggtgaagtactcaagagaaccggacaaccctactaaatcttgcaaagctaggggttctgaccttcgtgttcattttaagaatacacgagaaactgcctttgcaatccgaaagctacctttgacaaaggcaaaaaggtacttggaagatgttattgcccacaagcaagcaattccattcaggcgcttctgtggtggaggtgggccgaaccgcacaggctaagaatcgccattctaatggacaagggccgtggcccatgaaatctgcaaaattcat

SEQ ID NO: 14127 - DNA, 409 bp, Gossypium hirsutum
  Clone ID: LIB3145-007-Q1-K1-G11
gaaacttagatctgtgagaaagtacacaaaaccagctgccggaccaacatttccagtgtgcgccgccgccgaccccgacagacccctttggttcccaggcagcactcctcctccatggctggatggcagtctccctggtgactttggtttcgatcctctcggtcttggttctgaccctgagacattgagatggaacgtacaagcagagctggtgcactgcagatgggcaatgttgggagctgctggtattttcatcccagagttcttaaccaagattgggattttaaacactccatcgtggtactcagctggaacagaggaatacttcactgacaccacaactctcttcatcgttgagcttatttttatcggctgggctgaagggagaagatgggctgacattctcaag

SEQ ID NO: 14128 - DNA, 430 bp, Gossypium hirsutum
  Clone ID: LIB3145-007-Q1-K1-G12
ccttggtgtcaagcaaatgatttgctgttgcaacaagatggatgccactacccctaaatattcgaaggctaggtatgatgaaatcgtgaaggaagtctcttcctacttgaagaaggttggatacaaccctgacaagattccatttgttcccatttctggttttgagggtgataacatgattgagaggtctaccaacttggactggtacaagggccctacacttcttgaggctcttgaccagatcaatgagcccaagaggccttcagacaagcctctccgtctaccacttcaggatgtgtacaagattggtggtattggaactgtcccagttggtcgtgttgaaactggtgtcttgaagcctggtatggttgtgacctttggtcctactggtctgaccactgaaaagtaagtctgtgagatgcaccatgaa

SEQ ID NO: 14129 - DNA, 448 bp, Gossypium hirsutum
  unsure (1)..(448): unsure at all n locations; Clone ID: LIB3145-007-Q1-K1-G2
cttcccggaccccttggttttaaacagtcgtcttttttctctcaattttgatatcttagacgctccctgtccactgctcgacgaacgatattcggaaccttcccaaccagttgctatattggggtggattactggttttgaaaccaaaaatctcccttggctactttaaaccaataaacctggaaccaatcttgcttggttgcttgatcgaaaacctgcattcaaaaaaaactgacccactcgttcttctttcttcagttctcggaccaccatttcctgccaaattacccanagcccacaacagaaaagttggcactgttcatttgaccctcgactaaaaacccatgacatccacgaaagatatgattgcaatcctcctcttcttggttgcatcaaggacaccgggcatcagcaactatacatttaatcttcagattagcaaaagtag

SEQ ID NO: 14130 - DNA, 359 bp, Gossypium hirsutum
  Clone ID: LIB3145-007-Q1-K1-G3
cgcggaagaacccccgcgacgcgcgccgccggccacaccttccaaccaaaactgagttgcctatccccaataatgccctcttttgcgctgcgcgtaggcaaattacaaaggccgcaggatgtatcatcgtcattggcaacatcaatcatagagggtagatcaaaactgttctttacggtgctgatgattgcctcgacccttttcctaatttcccgctaggtgcttttctttcgggatggtctgtgcttgtccgaacacatgcttcacacgtaaggtttgtgtttgtatgtttaggcgtgcgggtgtagtgttgttgatatgaatctttggtgaatttgataagttctattagtttttat

SEQ ID NO: 14131 - DNA, 404 bp, Gossypium hirsutum
  Clone ID: LIB3145-007-Q1-K1-G4
ttccgaagtcccggttccaagctctatcctcttcctttgctaactgttctactttacacgttggaacacacgtctttctttcttcttcttgtttctttcatttccttcttgttgtagctgctagttttttaagtgatatacaggagatttagagtacaagaggagaataattttgtttagcttagtcgcctccggatataatggttgaattgttttaattttgacaagcgtgctaaattgtgtgatggtaattgtatcaaagtgagaagaatctgtatgatggccactgctgctgtgattggacttagcaccggaaagagactcttgagctcttccttttcttattcggaaaccgtagataagctgtcgtatgctggtgattatggatcttcatattatcaaac

SEQ ID NO: 14132 - DNA, 331 bp, Gossypium hirsutum
  unsure (1)..(331): unsure at all n locations; Clone ID: LIB3145-007-Q1-K1-G5
agccttccgcctacccgtccggttgtgccatctattcgtaggtaacttggtattgtgaagttctttgggatgtcttctgtcagaagcaaaaggatgcaaaaggattgactcttttcatattgtactcttcatatttgatgtaaaaggattgactcgtttcattacgttgaggaaaaagaaattagatagaggtgaagtcactttgcctggatccaaaaaaaaaaaaaaaaaaaaaaannnaaaaaaaaaaaaaaaaaaaaaaaaaaaaaaaaaaaaaaaaaataaaagaaaaaaaaaaaccgggcggccgttttaaaggatccaagtttac

SEQ ID NO: 14133 - DNA, 353 bp, Gossypium hirsutum
  unsure (1)..(353): unsure at all n locations; Clone ID: LIB3145-007-Q1-K1-G6
gcagttctcggaaccggggcgggggtattggtggtggttggataccggaggtgggcacccccgtgaagggggaagtacggtgacggcgggatcttcgttacctcaagaaagagcggcggtgccatcttgtaaggcannactgtgaggtcttaaatttannggtttcaacagtgggctttgaggcctatannttgttatgggtnnttggtttgggtnnttggtagttggtaaattcttaaagttacttctgtnntactgtttggtnnttgggttctcttcgttatttgaatcgaatgttgttacctgtatctcttaaaaagcatannaaaatggaatgaagtatcnttcttttc

SEQ ID NO: 14134 - DNA, 451 bp, Gossypium hirsutum
  Clone ID: LIB3145-007-Q1-K1-G7
cccacgcgtccgtaacaaagcaaataataacaatcaccggcggatccccattcaccaggtgttaaacgcaggtctcattcatttccagtgcgtttaataacccctttatacgccatggacatgaagaaggtctccaccgccatcattgttgctgccgcctcaatgagcgtcgtcatggctgccggtgcaccatctcctgccccttcagccggtggttctagtcctagctcctctcctggttccgccccagcatcaggaccggattccagcgtggctgccgctaccttgcctgttcttggatcattggcctccattgtttctttgttttcttacatgctgcaataagttacatgtatgaaaaatgaacatgtcaacgaatgttttattttattcttttcgaaagaaacatgtgatgaattttgaaaaaattgaataaaatggagctttgaat

SEQ ID NO: 14135 - DNA, 461 bp, Gossypium hirsutum
  Clone ID: LIB3145-007-Q1-K1-G8
attttagaccacgccaacattccccacctccaatctctccaagttttgttttcattctcgggtgtatatttgctccattccatctcgttttctatttgtaatttcataaccaagctttccaagtctgttcaatatgaaggcaagtcattggcttaacagcttcatcgtactgttagtcctcatcctgacgatggacttccgccatggaatttattatgctcgggctgatgctggcggcaccggtttcgttcaaacaacagcaactaagtttgtcataaatggaaagcctttctacttgaatggcttcaatgcatattggatgatgatgtttgcgtctgacaattctacgaggagcaaggttactgacgcatttcgagaagcctccaagtatggcatgaacatagcaagaacttggccttttaacgatggtgattacaagcctcttcagaattccccaggtt

SEQ ID NO: 14136 - DNA, 402 bp, Gossypium hirsutum
  Clone ID: LIB3145-007-Q1-K1-G9
ggagtataagaacaatccttgtaggaagtaggaaaaggaaactcatctcctaactggtgcgtatgtaagttggcctaacctaaaccaaaagtgaattacctcacatcacagagcaacatatttctcaactttctttttaatggaaatttgagaagtaataaattttaaaaatactaacatgaagtgattcacacttattatattaaaaaagaaagcatcaaagaagacagcccaacccgcaatgacctgagcatctctatctgatggccaacacagccaagattaactatgatgaacctgcttaaatagtaaaggggaagaaaagtgtctgcgaacattactaactgtgagactatattataaatcatactgtatgtgtaacttgatctgacaacctcaaca

SEQ ID NO: 14137 - DNA, 411 bp, Gossypium hirsutum
  Clone ID: LIB3145-007-Q1-K1-H1
tagaagtctgcattatgtatcatgctcttgtgatctgaggccatatatgacaatcatttcggggggaaactctctcagagagatgacttagcatccaggttggctttcacagttgataatgcttcagttggacctcttctactttcagattcattaattactataatggatacaaatgactactcttcaattcctcaagaactcaaagatcagctcggtgagaggtatcccgctgctaggcgagcttatctgaaaacaggcggggatttcccatttctttcccgcccagatgaagttaacctacatcttcaggtacataacgtgtaatacttaaatacatgacttctctcataatgtttagtactgtcagtatgttcagaagcctgttatttctactggtgtgttaaacat

SEQ ID NO: 14138 - DNA, 423 bp, Gossypium hirsutum
  Clone ID: LIB3145-007-Q1-K1-H10
ctccttcaatttttcagatgtgggctgcttcatgccttgcatcgtgctgtgcggcgtgcgcctgcgatgcgtgccgcacggtggtttcggggataagccggaggtctgcaaggatggcctattgtggactatttgccctttctctgtttgtttcgtggatcctccgtgaggttgccgcccctctcatggagcagctgccttggatcaatcattttcacaaaacacccaacagggaatggtttgaaacagatgcggtgctgagggtcagcttgggaaattttctctttttcactatcctatcatttttaatgattggtgttaaaaatcagagggatcctcgtgatggtttgcaccatggtagatggatgatgaaaattgtctgctggttcattttagttattttgatgttttttgttcctaatg

SEQ ID NO: 14139 - DNA, 421 bp, Gossypium hirsutum
  Clone ID: LIB3145-007-Q1-K1-H11
atcttctccctctcttcgcttctgatttctactttcagatggattggcaagggcaaggggtagcagagcagataatgcaggtgatgctattggtatttgcagtggtttcatttggtgctggttatgtgttgggatcatttcagatgatgatgctcgtatatgccggtggtgtgaccctcaccactttgattactattccaaattggcctttcttcaaccgccacccactcaagtggttggatctaagcgaggccgagaagcatcccaagccacaagtagctgtgagttcaaagaagaaatccaccaagaagtagggtcattttggtttcatcttagcatcattagaaagttgctaggggtatgaattgatgttttctgctttctttcatctaatcggctaggtttctcaaagtttttgaac

SEQ ID NO: 14140 - DNA, 392 bp, Gossypium hirsutum
  Clone ID: LIB3145-007-Q1-K1-H12
taaatgtttaaaattcttcttatttaattgatggttgctggtgtttaaatgctgtaaatggaagtatttaaatgctgtaaattgaagtatttaaatgttgtaaattgaagtgtttaaatgttctttgtgtagcattttaagaacttcaaagctcacagatgatttgttatactctatatgagttcattgattctatgtttttgcaattttaggtatgatcatgggtgcaacagcttcaactaacaaggacttgtgcaggtctggagcaggtcaatcaagaagctctgctggaattaaactgacaagtaattgtagtatgcttgtagttgaagtttcttatagtgaacatcatgttgtttattcgacaaaagtttcaaagaatttactttttt

SEQ ID NO: 14141 - DNA, 407 bp, Gossypium hirsutum
  Clone ID: LIB3145-007-Q1-K1-H2
gtcaattcccctggagggtcagttacagctggtatggctatatttgacaccatgaggcatatgcggcccgatgtctcaactgtgtgtgttggacttgcagctagcatgggagcctttctgctaagtggcggaaccaaaggaaaacgatacagtttgcccaattcaaggataatgatacatcaaccccttggtggagctcaaggtggtcaaactgatattgatattcaggcaaatgaaatgctgcatcataaggcaaacttaaacgggtatcttgcttaccataccggccaaagtttggagaagattaaccaggataccgaccgtgatttcttcatgagcgcaaaagaagcaaaagaatatggacttatcgatggtgtcattatgaatcctctcaaagctcttcagcc

SEQ ID NO: 14142 - DNA, 51 bp, Gossypium hirsutum
  Clone ID: LIB3145-007-Q1-K1-H3
ctactttatttctcttctatagtgggggggatattcaagggagcggggcgg

SEQ ID NO: 14143 - DNA, 286 bp, Gossypium hirsutum
  Clone ID: LIB3145-007-Q1-K1-H4
attctttcatattgaataaaagatcctgcacgtgcatctcaaggagcgcggcatttcacggctattcataaacatgtttgggaatcttaaccaattagtgcaaaacgcactatgatacatgggcaggaaaggacaaaaaatcaatgatgaggacccacacgcatgagtctatgaacgaatccaccctagcctagtcatggagcacttatggaatcaaagtacataaaatgcactgaacaagcattggtataggcgcacctgtccatgctggctctcaaacctatac

SEQ ID NO: 14144 - DNA, 338 bp, Gossypium hirsutum
  Clone ID: LIB3145-007-Q1-K1-H5
actaaacccaattcttctctttatcctgaccttcaaagacttcattttccctctcttcgggggtcaatcaaaccaagaacccacaaaaagcttcgattactacattgtagggacctaagtagttattaacttcaaatttgtatgttttttttgtcgtaatttgcaatattactactttctagggacttaagtagttattaacttcaaatttgtttttttttgttgttgttgtaatttgcaatattactctttttatctatattatttattaactgttttaatgaaaaaaaaaaaaaaaaaaaaaaaaaaaaaaaaaaaaaaaaaaaaaaaaataaaaa

SEQ ID NO: 14145 - DNA, 452 bp, Gossypium hirsutum
  Clone ID: LIB3145-007-Q1-K1-H6
cccacgcgtccggggaattattagttttatcccttacttcaattggctgagctgggtttgggcttggcttgattctggaaagcggcgctacgccgtgtattctgttgtatacttggttccttacctcaggtcaaatttctctctttccccagaagatagctggcttcctattgctagcatactattttgcattgttcatgttcagctggaagcaagcataagaaatggcgatcttcaaggctttcaaatttttagtgaggctgctaagcatctttcatcaaggagtagagaggaagatgaacatttcaaagggtataatgaacccaagaaaggagaacataggaatctgcctgatgctgaagaacattcaagaaatgagatcccgcattggggaattccgaaaggccctcacaacatcatgaaacagctgatgattttgaggatgatggaaa

SEQ ID NO: 14146 - DNA, 427 bp, Gossypium hirsutum
  Clone ID: LIB3145-007-Q1-K1-H7
cccacgcgtccgcaacatttggctcgaccatctttcccttcaccattgcgtcgatggtcgtatcgatgtcattcaaggttccactgccgttaccagttctaattgccacttcactgaccacaacgatgtgatgttgttcggagcaagcgactcatatagtgccgacgagaagatgcaggtcactgttgctttgaaccacttcggtaaaggattggtagagaggatgcctaggtgccgatttggttttattcatgtcgtcaacaatgactacaatcactggttcctgtatgccattggcggcaccagccaccctacattatcagccagggcaacaggtactccacgccaggtaccttcacagctaaggaggttacctgtaggggcctcttaaaaccggcacagtggaagaattggaactgggtatcat

SEQ ID NO: 14147 - DNA, 453 bp, Gossypium hirsutum
  Clone ID: LIB3145-007-Q1-K1-H8
cttgaagctcttgatgatactgatcggattcacattgtggactttgatattggttttggggctcaatgggcttcctttatgcaggagcttcccatgaggagtagaggagctccctcattgagaattactgcctttgcctccccttcaacgcaccattctattgagcttgggcttatgcgtgatattcttatgcaatttgctaatgaaattggtctaagttttgagcttgaggtggttaatttcgattctttagatcagaaccctcattctttgccaatgtttcaatcaaatggaaatgaggcaattgctgtgaatttccctgtttggtcttgttcgaatcggccctctgctttgccccatcttatgcgctttgtgaagcagctttcaccaaaaattggggtgtctttagaccaaaggtgtgatagaaatgatctgacattcccacaacatgtg

SEQ ID NO: 14148 - DNA, 251 bp, Gossypium hirsutum
  Clone ID: LIB3145-007-Q1-K1-H9
aataaagcttataacaagagaggctatttttggtagccagaaagaaaagtaggtaaaaatgagttagaaagtgtactgtatagatactggggagtatgatatggtggtggtagttagaatttatggtatttcgctgtaaaggttttgatctgccgtagttagtaactgctttgtcatctgaagatgaccaaagccaaaactctatttgccatcatcctcgcataaatctgtggagcatatttcattactgc

SEQ ID NO: 14149 - DNA, 381 bp, Gossypium hirsutum
  Clone ID: LIB3145-008-Q1-K1-A1
cccacgcgtccgcactttttggtgtcgtagcttgtctctcctatcctattagggtcctatgggcatgcaaccagttgtttccaagagttaggctttcatagttaaaataacaactgctatgggtatttctagttatagttatagtttttttatattgttctatgttgtggtaatcccaaccctagaagctcacatcactgaatatgatgagtattggaaggcacgagaattggaagctgttgagaacctggacaaggcctatcaccctaacccagaagaggtggtccgccattacagtgaccacttctctagaaccatgctcgagttttatatcaccaaaagagtgctagcggaatcaaaaaatggtccctgtgaggttac

SEQ ID NO: 14150 - DNA, 136 bp, Gossypium hirsutum
  Clone ID: LIB3145-008-Q1-K1-A10
cccaccacccaaccccccgccccaaccagtcctttttctcaaaaccccttccaccccccaaaaccacccctcctttctcacacctttacccctctttctcttttccccaactcttcaaacccctatttccttccca

SEQ ID NO: 14151 - DNA, 445 bp, Gossypium hirsutum
  Clone ID: LIB3145-008-Q1-K1-A11
gctgaacgggtctatcgtgaactatccaccatactagagggagaagcagacctggagtgggcctgcattatggttcaggccttgaatttgattctactcacttcttctgagctatctgtgcttcgggaacttttaaaacagtcacttgttaatgctgctggaaaggatttgtttgtttctttgtatgcttcatggtgccattcacccatggccattttaagtctttgtttgttggcacaggcatatcagcatgcaagtgccgtgattcagtccttggttgaggaagatattaatgtcaagttcttggttcagcttgataaattgattcgcttgctcgaaactcccatctttgcttatcttagattgcagcttcttgaaccaggaaggtatatatggttgctgaaagcattgtatggtcttttaatgttacttccacagcaaagtg

SEQ ID NO: 14152 - DNA, 437 bp, Gossypium hirsutum
  unsure (1)..(437): unsure at all n locations; Clone ID: LIB3145-008-Q1-K1-A12
tctcatgcccctcatgctcaagattacttactgttgatctgactacgaatgcagatggggggcaatctagcaaaacaacactgaaggggtttaaatcctcaagtattctgaacagaattcaattaaatgattttcagacgagcactaaaatagaggctttggtatgacttactgggattcattaattgctaaaaagttgctagactattttgagaggatcaaatcccaacagcgaaggaaacaagtactgcagctgctgctgctgccagtccatctcatgatacttcactgcattctgttaatttctgtgaaacgacaataaaaaatggaactggtgctattttgcctgaaaagccggtctcaactggccagactaataacctgatatcagctaagacttcagagacagctctgcttgatgagaggtctntgttggc

SEQ ID NO: 14153 - DNA, 72 bp, Gossypium hirsutum
  Clone ID: LIB3145-008-Q1-K1-A2
aaaaaaaaaaaaaaataaaaaaaaaaaaaaatttaaaaataaaaaaaaaaaaaaaaaaaaaaagagaaaggg

SEQ ID NO: 14154 - DNA, 334 bp, Gossypium hirsutum
  Clone ID: LIB3145-008-Q1-K1-A3
aaatactttgatcagtttcataaaaaagaaataaatcaaatatgggttccatttccaagaggttccttctccttgctcttctagctgctgttgttcttctcatttcttcggaagtggcagctcgagatcttgctgaaactaccactgaaaacaacaatggtgaggtggctaccgaaacaacccaacctgagctagaaaaataacgctcagcttataatggaagaagacacggaggtaaaagaaggtattgaggtgggcaccgaaggtattgaagtgggcaccgaaggtattgtggtggacaaccgaggtattgtggtggacaccgagggtattg

SEQ ID NO: 14155 - DNA, 378 bp, Gossypium hirsutum
  Clone ID: LIB3145-008-Q1-K1-A4
cataggtattgctgttgatcaccgccgtaaatatagatctcttgaaggtcttcaagccaatgttcagaggcttaagacctacaaggccaaacttgttgtcttcccaagatgtgctcgcaaatttaaggctggtgattctactgtcgaagagcttgcaactgcaacccaagtacaaggatcatatatgcctatttctcgtgagaagccttcagttgatcttgtgaaggtcacagaggagatgaagtcattcaaggcttataacaagctccgtgtggaacgaatgaatgagcgccatattggtgccagattgaagaaggctgctgaggctgaaaaagaagataagaagtaacgttgtttgatgtgttctgggatttaact

SEQ ID NO: 14156 - DNA, 363 bp, Gossypium hirsutum
  Clone ID: LIB3145-008-Q1-K1-A6
cactccttctcccacgcgtactttcacgctttcggtttggattatatggatggggaagggtgtgaataaactaaacaagaataacaagttggtgaacaaacttgccaagaaatatcatgcctttttggcttctgaatctgtcatcaagcaaatccctcctcttttgggtcctggtctcaacaaagcaggtaaattcccaacccttgtcactcaccaagaatcactatagtcgaaagtgaatgagacaaatgcaatggtttagttccagctgaaaaaagttctatgcatatgagttgctgttgggaatgttgcaatggaggagaaacacgtcttccaaaatgtgcaaatgagcgtcaatttcct

SEQ ID NO: 14157 - DNA, 377 bp, Gossypium hirsutum
  Clone ID: LIB3145-008-Q1-K1-A7
attgtcttcaacaagtttcactcagtagtttcatttgtgccaacagtgtcaactgttttatgacctgaaattgttgaaagggaagctgaatctgggggaaagcttggtgatctagactcgtatgaagttgagggtggtgagacaaagggcgaaatacttcaaaatcttgcagagttccagttctcttgtgtaatgttcaatgcagtgttggagaatgcttgtagcgagcaaggagcaagaatgtccgctatggatagttcaagcagaaacgcaagcgacatgcttgatcgcttaactcttacatataacagaacccgtcaagcatcaattaccactgaactgattgagattatatccggagcatcggcattggaagg

SEQ ID NO: 14158 - DNA, 374 bp, Gossypium hirsutum
  Clone ID: LIB3145-008-Q1-K1-A8
gacttctatggtcaagatgcagccattgcatttcgtaaggacctagcgaatcccgatgaatggaacatctttaccaacacggagatgagtttgttttggggggttgaagatgaagttgaaaattcagatgtgaaggttggtgagagtaacgatgttactttggacaaagccatctcagaatgcaatgcaagcgactttaaagagggtaatcatgttgaggacgcaaatttctcagttattaaggatggtcctgaagataatgaagcaacaattgagtttaggaaagacatcttggtggaaggtgcagcagtggcagataaatctccccttccaaagacttcagaaatcagaagagctgtggacggtgaagaagc

SEQ ID NO: 14159 - DNA, 375 bp, Gossypium hirsutum
  Clone ID: LIB3145-008-Q1-K1-B1
caccttttcccctcgatttccattcctttgacttcccttcatcatttcaagaaatgggttgaggagaaaaggtatttgtttatgaagatctggtgaagcacaaagacagaaatgattgttggcttttgatctctggaaaggtgtataatgtaacccaattcttggaggaccatcctggtggagatgaagttttgcttgctgctagtggaaaagatgcgaccaatgatttcgaagacgtaggtcacagtgatgatgcaagagagcagatgcagaagtactatattggtgaggtcgatgccaccaccattcccgcacgaaggatgtacaaagcacagacgtcaaccgcggcaactcaacaagaggagcctggctttc

SEQ ID NO: 14160 - DNA, 441 bp, Gossypium hirsutum
  unsure (1)..(441): unsure at all n locations; Clone ID: LIB3145-008-Q1-K1-B10
tgaagaggttgattatgttgcttgggtattctaccaggatgcttatgcatgcagtgatganaaatgctcagctcaatcaatgctattcatgcatgagaattggtcaacgagttcactcatatctaaaataaaagatcttgctgagagaaggaagttagcagatttaactgtcggtcctgtccttactgtcacaactgaagcaatgttggagcacaaaaagaaattacttcaaatttcaggttcgaagttactttttggcggtgaacccttagaaaatcactcgattccagccatttatggtgctataaagccaactgccatatacattcctctcgaagaaattttaaagccagctaactatgagcttgtaaccaaagaaattttcgggccatttcagattataaccgattataagaaggatcaattaccaatggtattgga

SEQ ID NO: 14161 - DNA, 447 bp, Gossypium hirsutum
  unsure (1)..(447): unsure at all n locations; Clone ID: LIB3145-008-Q1-K1-B11
gaaaacccgggccgaccgacgcgtacggccgattcaacatccgtacgcccttaaactaaataaccagatgcctgaacaccatgaagcaacaaccatctgtcatgatgacaaacgccantttggcggaacaaaaagattgatcgaagaaagacccgaggattctccaatcaagtccatcaacttaggttggaacagcccacaaaatggcattataggaccacccttttggtcaattccaccccttcttcctactgtgtcttgcagtcttggagctttgttatccaagctgccttctgtcatcccatcttatagcgttagcgaacctcctgaaataaacatcatcaaccagaccaacaatacaaaccaaagaggaaaggccgataatggaggttcgttcggtgaagttcccattgctgagacaaaaatagaagcttcaaatcaattgga

SEQ ID NO: 14162 - DNA, 410 bp, Gossypium hirsutum
  unsure (1)..(410): unsure at all n locations; Clone ID: LIB3145-008-Q1-K1-B12
cccacgcgtccggcaaaacatagcaaaaattaaaaatggcaaaatcagcagaggaagatgaccaacaaaaagcttttggttgggctgctactgataattctggaatcctctcccctttcaatttttccagaagggaaaatggtgatgatgatgtcactttaaaaattctttactgtggagtgtgccattcagacctacatactttgagaaatgactggggtttctccttttaccctgttgttcctgggcatgaaatttcaggtgttgtgaccaaagtggggaagaatgtgacaaaattcaatattggtgaccgggttggggttggagttttggttggttcctgcaagacatgtgaatgctgcgagcaggatcntgagaactactgccctcgtataatatntacctacaac

SEQ ID NO: 14163 - DNA, 374 bp, Gossypium hirsutum
  unsure (1)..(374): unsure at all n locations; Clone ID: LIB3145-008-Q1-K1-B3
gctttccctcccctgcgtgctcatcggcgaccgtcggtaaccaggtgttgttgcggatatgtgggaagcacgaggcgtgacaaagagggactgctggtagcgcacgtctcggaggtgcggtggatggtggagtgggacgctggtgagaggcgtgcggcgcaagggctcaagcaacagctttaggtttctgtttgtttgggccttgtttgggtttatttttgggcctgtgttttagatgtaaatgagtcttggatttgggagctttgagcccgggcattaatttggtcctacagctattaataatgaatcattatcatctgcatggatgtattatacatncatccctacccatactgctgcatttcaatttaaat

SEQ ID NO: 14164 - DNA, 377 bp, Gossypium hirsutum
  Clone ID: LIB3145-008-Q1-K1-B4
ggagattgtagttcttagaggaaagaaagattgaaaaagctgtttgatatttgttcaattgtgacagggttgataaactagttttcttatgttgttagattaggctctggcttttaaggtgggtctcttttgtattaatttgttatctattcctcgtacaaaatttagttttttgaattgtcatccattgtcttgtgtagtaatacggatagggatggaacttgtgagagtttgtcttgaagaaaagaatgatgatatttcatcagttccaccaggtttcgagcctcgtgcattgtttaccttaaagagtgaggcacaggatactaaaagacatgagcgtgataatttgatctgttgttcagcctctactagagcca

SEQ ID NO: 14165 - DNA, 372 bp, Gossypium hirsutum
  unsure (1)..(372): unsure at all n locations; Clone ID: LIB3145-008-Q1-K1-B5
ggggttcattatggaatttgcagagaatctggtgttgaggttaatggaggacccggaagagagggatagaaaattcagagaacacgtttactctatgaaggatcgatgcgcaaaaaccaaggagatgtggagttatccactgcggccttatgggttttggacatttgagcgccacaatgctcagctccgttgggatcctcagattagccaagtccccggccgcagggatccttatgatgaccttcttcaagacagttatgcgtcttcctccaaacgaaactgagaagccattagcagatggtttggagcttgatctacanatgggaagtggacattgaaaccctntttactgtttgtttgaatttattttca

SEQ ID NO: 14166 - DNA, 360 bp, Gossypium hirsutum
  Clone ID: LIB3145-008-Q1-K1-B6
tggaaaacccgggccgacccacgcgtacgcccactcttacgctaatatttacttgtttttttgtccagtgtgagcatctctgcggtctcagtatatattgtgactattacataattaatgtaaggaagtgagtcatattcctaatgaatgagaagaatctactatttctctttaaaaaaaacaaaataaaaaaaatttgaaaagaaatacatagtattgtgtaaaaaataaagatagggatggaacttgtgagagtttgtcttgaagaaaacaatgatgatctttcatcaatttcaccatgttttgagcctcgagcattgtttaccttaaagagtgaggcacaggatactaaaatacatg

SEQ ID NO: 14167 - DNA, 340 bp, Gossypium hirsutum
  unsure (1)..(340): unsure at all n locations; Clone ID: LIB3145-008-Q1-K1-B7
ggatgagagtgagtgtaaattatgctaatcctttgtgacgcttgtgaaagtgctggggctgttgtcttctgtgctgctgatgaanctgctctctgccattcttgtgatgaaaaggtccatatgtgcaataagcttgctagccgtcatgtccgtgttggactagcaaatccaagcgctgttcctcgttgtgacatatgtgaaaatgcacccgctttcttttattgcgagatagatgggagttccctttgtttacaatgcgatatgattgtacatattggtggtaaaaaaacacatggaagataccttcttttaaagcaaaaaatcaagtttcccggtgata

SEQ ID NO: 14168 - DNA, 368 bp, Gossypium hirsutum
  Clone ID: LIB3145-008-Q1-K1-B8
cactgcttgagtatgaaaagcataaaatacacggtggcatgctccctcatgcagatacttcggttgttgagcctaatggagttgaagctcaagctggtagtaatcaagctcctgggtcaggtagggcaaagagagatgctgctgctcgtgcgatgcggagctggcattctcaacgtgttctcgataatggtgaggtctgtcatccaatcatcaaggacaagacctctagtccgacgctcaaaagtgacagacaacttaaaaattttggtttattgaagcgtaaaaagccatccactttggactctggtgtccgagtttctcaacttaaggcaactaaatcacagcgttcttttggtaggttggatact

SEQ ID NO: 14169 - DNA, 434 bp, Gossypium hirsutum
  unsure (1)..(434): unsure at all n locations; Clone ID: LIB3145-008-Q1-K1-B9
gcgtacgcgacaaaatgaaagcttctaancatttttttaataggcgaggggatcattctcatcacgaatcattttaatatgtgtggatgaacaacaatcaaatgatgcanaagcaactgaattgctggacaaggggtttatggagtatggttgcccacattatcgaagaaggtgccggattagagctccctgttgtggtgagatatttgattgtcgtcactgtcataatgaggcaaagaacaatatcaatgttgaccagaagctcagacatgatctcccacgccgtcaaatcagtaagattatttgttcgctatgtggcacagaacaagaggctcaacaagtttgcatcaactgtggtgtttgtatgggaaaatatttctgcaacacctgcaaactttttgatgatgatacatcgaagagacagtatcattgtg

SEQ ID NO: 14170 - DNA, 351 bp, Gossypium hirsutum
  Clone ID: LIB3145-008-Q1-K1-C1
aattcaaattattcttacaataataataaaattaacagtgttaagaatattcttacaataattaaatcacactaaaatgtttacacaatcacctcccagaaacaggtgcaacagtaaccacaagaacaaaaaaaaaagaaaaatacacaaatccagaaacaacagtttttggcaatcactttttcaggagtaataccgaaaaaataaccccctgatttcaacaaaaatgacacattactcagaagtctgcttgctttgtcttcagtttcaaatcttaactgtagaaaagtaacttcaagggtgattaatgtaaaagcctttttcagctgaaaataacgataagaagagaag

SEQ ID NO: 14171 - DNA, 453 bp, Gossypium hirsutum
  Clone ID: LIB3145-008-Q1-K1-C10
cggggcgaccggggcgtccgcccacgcctccgtgctgtttcaacaggctttctctatatgggtatgatccagttctaacgaaagcttatttggaaccaaatattattgttaagagttgttgtggttcaagaaagaagggaaagagtgggaataaaaaatacattgacaagaagagggcagctaagagaactgaatcgaccatccctattttcaatatggaagacattgaggagggtgttgaaggatatgaggaagaaagatctcttctcatgtctcagaagagactagagaagcgatttggtcagtccccggtatttattgctgctaccttcatggaacaaggaggcattccaccatcaaccaatcctgcaacacttttaaaagaagcaatccatgttattagttgtggatacgaggacaagactgaatggggcaaggagattgggtggatta

SEQ ID NO: 14172 - DNA, 420 bp, Gossypium hirsutum
  Clone ID: LIB3145-008-Q1-K1-C11
tccatcttcactcccccacgtcccccaaaccctacaaaatggccgccgccgcgcgcgctgttgtctccgtccaaaccatagagtctgacatggctactgatgccaccccaaccgttcctctcgctgatgtgatgaaagcctcgattcgacccgacatcgtcaccttcgtccacgacaatatatccaaaaacagccgtcaaccctatgccgtctccaaacgcgctggtcaccaaacttcagctgaatcctggggtaccggtcgtgccgtctcgcgtatccctcgtgttcctggtgggggtactcaccgtgcaggccaaggtgctttcggaaacatgtgtcgcggtggacgcatgtttgctcctaccaagatctggcgccgctggcaccggaaaatcaatgttaaccagaagcgttacgccg

SEQ ID NO: 14173 - DNA, 443 bp, Gossypium hirsutum
  Clone ID: LIB3145-008-Q1-K1-C12
cccacgcgtccgcccacgcgtccgcgaatgtctctgatgctcacaccatcaatggccgcgctggatctaccccgagctgcccttcaaagggaggatatacattggcagttaaaccaggaaaaacatacatgcttcgtatcatcaatgctgcactgaatgaagaactgttttttatgattgccggccatcaactcactgtcgtcgaagttgatgccacatacgtgaaaccttttaaaacagacaccatcgttatatccccagggcagaccacaaatgtccacgtaacaacccatcgtcgtgccggaaagtacttggtcgccgcctcgcctttcatggacgcacccatcgcagtcgacaacctgaccgccactgctaccttacattacgccggttctcttacgagtgccgccactactctcgtatcaccccctcctaaaaacgct

SEQ ID NO: 14174 - DNA, 377 bp, Gossypium hirsutum
  Clone ID: LIB3145-008-Q1-K1-C2
gcttctctcatttcataacatgtatataggtgtaaatggatgctctctgaagatggctgagaatcttgatgttgtgaggggcatacctgttgaaagaatgatgattgagactgattctccatattgtgaaatcaagagtactcatgctgggattaattttgtgaaatccttatggccttctaagaagaaagagaagtatgacaaagagtgtcttgttaaagggcgtaatgaaccttgtttagtgcttgttaaagcaacaattgagaggtacaaaaaggcttctgattcctccaatactgggtcagttgctgaagttaatgctcagttctatcagcaagaagctgagaaactccgaaatcaaatccggaatttgcaga

SEQ ID NO: 14175 - DNA, 380 bp, Gossypium hirsutum
  unsure (1)..(380): unsure at all n locations; Clone ID: LIB3145-008-Q1-K1-C3
ctttgagatcgatcctgatgggtcagtcttgtcatttgctgacatgatgaggaagaaaatgtccatgccagcccacttgatgtatgatggccgtgacgaaaaccttttcgaccactactcgtctgttgcacaaagaattggggtttacactgcccgggactatgctgatatagttgaatatctggttgaccgatggaagttgaaggaactcattggactttcacctgagggccgtgaagctcaggaatttgtgtgtggacttgcaccgagaattagaaagttagaggagagagctcaattgagggccaaggaatcacccagtgttccattcagttgggtttctggtagagaagtgacgctctaaatnggctatcctccaa

SEQ ID NO: 14176 - DNA, 386 bp, Gossypium hirsutum
  Clone ID: LIB3145-008-Q1-K1-C4
ggccgaccgacgcgtccggattactttcccaggagaagctgatgaagcttccgatacggttactggggacattgtattggtcctggaacagaaagatcatcctaaatttaaacgaaagggtgatgacttatttgtagagcatacattggcacttactgaggccctttgtggctttcagttcatactgactcacttagatggcagacaacttctcattaaaacccaacctggggaagtcgttaagcctgatcaattcaaagcaataaacgatgaaggaatgccgatttatcagaggccatttatgagaggtaaacttttcattcacttcactgttgacttccctgactcgttgaccccagaccaatgcaaggcactggaggctgtgc

SEQ ID NO: 14177 - DNA, 398 bp, Gossypium hirsutum
  Clone ID: LIB3145-008-Q1-K1-C5
gaaaaccgggccgacccacgcgtgcgcatcaagatggattgctccacacaacttgtttaacccctgcatatgtagctcctgaggttataaaccgaaagggctatgacggggcgaaagctgatatctggtcttgcggggttatcctctttgttctactggctggttatcttccatttcatgattcaaatctgataggaatgtataagaaaataagcaaagcagattacaagtttcctaattggttctcacctgatgtcaccaagctgctatcgagaatcctcaatcctaatccaaaatctcgaatttcaaccgcgaaaataatgacaaactcctggttcacaaaggggtttaaattgaaatcaagtcacaaaactgccgaaaaggacttgccttctaca

SEQ ID NO: 14178 - DNA, 372 bp, Gossypium hirsutum
  Clone ID: LIB3145-008-Q1-K1-C7
gggaaaattaccttccaaattgatccctacttcacggtcgatggatactccagttggcgagttagtccttattctccatggcttgtattctaaattgcgttcgccatagagactaccacatgtgccatcttctctatctttgtgtaaccagatactattcattgccaaagctcttttagattgcgctcgtaaagacaagtcccagcctatcatgccgcttccacccctaacgccattcttgcctcacaaaaagaatcactgtgacccagccgaccataataaaaacagaaaagagtcagctttcatatttgaatctgacatatgaacagttccctgagaacataacctgctttttcttctttaatgtgtgac

SEQ ID NO: 14179 - DNA, 402 bp, Gossypium hirsutum
  Clone ID: LIB3145-008-Q1-K1-C8
gaaaacccgggccgacggacgcgtccgcaacgaaaaaaatctttccagtttctattttttaaaaacaaaactgaaaatgtctggctgcgtaggaaactgtggctgcagctctggttgcaagtgtggcaatggctgtggaggatgcaagatgttccctgacataatagagaagactacaactgagactattgttcttggtgtgacaactcagaaaatgcactttgagggatctgagatgggagttggggttgagaatggatgcaagtgtggagacaactgcacttgcaacccttgcaattgtaaataagagggggggaaaatgaacaacaaagagaagcagagaggcctttgtcttttaactaaataaattctattactttagtatgtatcagcaaatcttta

SEQ ID NO: 14180 - DNA, 463 bp, Gossypium hirsutum
  unsure (1)..(463): unsure at all n locations; Clone ID: LIB3145-008-Q1-K1-C9
aaaaacgggccgccgacgcgtacgcccacgcctccgctgaattattagattattccctttgcctccttttgctggcccctctgcctcttttaaagggttgtggagtctcaaaattcnaaatcatcaaanagggagacgcctcgcagttatacactcaattaagcctcgttcatcgacccaatgaccgtgccattacccatagtcgccttgtttcgaagaaaacgttgcctaacaagagggaagagcatgcaaagggagagggtattcataataagaaggtgaatcccaaggaaaaaggaatcaaacaaagggaaaaagaagaggccttcgttgataaacaaggttttgaggatgatgtatgtgatagaaacgatgacatttcatacacacgatcaccaagttttagggtatactgcattccatctcaatctgacgatggtaataatgaatttgatcataatct

SEQ ID NO: 14181 - DNA, 300 bp, Gossypium hirsutum
  Clone ID: LIB3145-008-Q1-K1-D1
tcgacacgctcgttaagactcttaaatctgaactgatttacatgccatcttgtatgtgatggtactaccaccatgttacacataaggaaagcagctaaggagttctatgctgtatctatcttttactgacttaaggggtgtactgatccaaataaaaacaaagcggtgcatggaaaggtaccaaaaataaacaggagttaacgttattgatgtatgtaaagaaaaaaaggaaatcatggagtaatgtaaattggctaccaactgatcatgccattctgaaagtacggaagattttctccc

SEQ ID NO: 14182 - DNA, 426 bp, Gossypium hirsutum
  Clone ID: LIB3145-008-Q1-K1-D10
cctcccctttctattttacatattacaccatgaatttggtagcaggatattaaattgtctgctccccacaaaaaaaaaaaaaaacaacaaataaaccacgaaaaacatacatacaaaaaacacaacaaaaactacactaaataaacaaactgttaacactgattgccagccataacactcactgtcgtcgaaaattaatgccacatacataaaaccttttaaaacacacaccatcgttatatccccacttcaaaccacaaatgtccacataacatcccatcgacccaccaaaaagtacttgatcaccgcctcttcttaacatggacgcacccataaaactcgacaacctcaccttcactgctaccttacattacgccttttttctactagtgcatacactactatggcatcaccctctcctaaaaa

SEQ ID NO: 14183 - DNA, 447 bp, Gossypium hirsutum
  Clone ID: LIB3145-008-Q1-K1-D11
aaaaaaaaaaaaaaaaaaaaaaaaaaaaatttataaaaaaaaaaaaaaaaaaaaaaaaagaaaaaaaattaaaaaaaaaaaaaaaacaaaaaaaaaaaacaaaaaaaaaaaaaaaaaaaaaaaaaaaaaaaaaaaaaaaaaaaaaaaaaaaaaaatgccccccccccttaaaaaaaaaaacctttccccccccaaccttacaaacataaattttttttttatttcccccaaaaaaaaaaaccccccccagattttaaaacactctcactttaaaaaccccttccatccccaaattaaatccctttacaccaaatcccctttcaccaaatttgtaaaaaaaaaaaaaacccccccccaacccccctcccaaaaatttccccccctaaaatgcaaattttcccccccccttttccctcccataaaacccccctttttttttttcccccc

SEQ ID NO: 14184 - DNA, 159 bp, Gossypium hirsutum
  Clone ID: LIB3145-008-Q1-K1-D12
accaacaacttacttacacctccaccgacaaccaccattaaggagaacatctcaacccacatccgcaaggccggcatccacattataaactcgttctgggagcccgactgcctctagcatgactttcacgccgatcgtcagatgccctactacaagacc

SEQ ID NO: 14185 - DNA, 224 bp, Gossypium hirsutum
  Clone ID: LIB3145-008-Q1-K1-D3
gcgcggacgcgtgggttccaaccttctccctccttttcatgctactatcctgaccagccctttagcaaagcctaacattcctaaacacccgtaaaaaaggccttcatttacaattcttttaaggtaccaaattaccaaaaattaccaccattgtttccaaagttcttcttattcctgtcattccaatggtttttgttacttttttaacggaaaatgaacttatc

SEQ ID NO: 14186 - DNA, 378 bp, Gossypium hirsutum
  Clone ID: LIB3145-008-Q1-K1-D4
gtggcctccgatctcaaccttcctgcttactctttcctcccatccgccctcggtgctgttggttgctgactttatttgcccaccctcagtaacaaatttactcaaagcttccaacatctcaacgttttccttgatatccctggtgcgccaccgattccatctgcagatatgccgccgacaacgttcaaaggcaacaagctgtatgacattttcttagacatcgccaccaacttgcgccgttcaactgggattattgtggacacttttgaatatctcgagccaaagagcttcaaagagattaatgatggactctgcttgccggactaccccacgcctcccctttactgcatcggacctctcattgttaacacgaccgtg

SEQ ID NO: 14187 - DNA, 345 bp, Gossypium hirsutum
  Clone ID: LIB3145-008-Q1-K1-D5
cccacgcgtccgcccacgcgtccgtccacgcttccggtgtgtgtgtatttttcagagtagagtcttcactaagcttactccctccctccttcccgctctctgtttctgtcgcttccatggctgtcttgtttaaaatgcctgtcgttttgggtttctttgtgggtcttatgatgctgggtttggctagctcagctgagtttcatgagctttttcaacctgcttgggcaaacgatcatttcatctatgaaggagagcttcttaagctcaaacttgataacttttctggtgctgggtttgcatcaaaaagcaggtatttgtttggaaaagtatccatgcagattaaac

SEQ ID NO: 14188 - DNA, 377 bp, Gossypium hirsutum
  Clone ID: LIB3145-008-Q1-K1-D6
tctatgcccattaagaaattgaaggttgagatttcagagcctgagaagagtgaagaggctgcagcaactgaaagggaatgcgtggctgaaccttcaacaccttctgaagatagaatggcagttgatcagagttgagaaattccatttatcacttgttatccatctaacaaaaggttaaaaaggtctaatgttcaaaaaccagcacttctccctcagccttgctcgcctgtaagttttagcatgaaagagaggagaaaattagtgtaaccgaactcagtgttaaaatgttaattcctataaactgaaagaagggatgaaagaaatgatgatcccgatatgaagaggcgattaagatgtcctaacatttcatatttatt

SEQ ID NO: 14189 - DNA, 398 bp, Gossypium hirsutum
  Clone ID: LIB3145-008-Q1-K1-D7
gaaaaccgggccgaccgacgcgtgcggcttgcttgagtgcatggcgaacagttgatttccgaacaagagaagcacttcggggtagcgttctttcagatcttattgcgagctatgaggactgcatacggaccttcatccaggaacgtggacatggggatgtccttgctttacaggtccaagatcctttccatagattgttgctgcatggtgtctgtgagttctacaacgtggtctcggtaacagttacacagtcaaagggtgcggagtcactaaaggtgacgaggataaagaagaagaagacaggggtggttgagctccctaatatcaccttgtccaatttcctgaaaatgtcaaaggagggcatttggtagttctaggggcagaaattcgcccccccc

SEQ ID NO: 14190 - DNA, 365 bp, Gossypium hirsutum
  Clone ID: LIB3145-008-Q1-K1-D8
cggccgacgacgcgtacgcccacgcgtactttggaaacaaattttggattaaaatcgatcttacaaccgcgggggcttggacttttatctgcattgtcggtgctcaattacctggtcaatcaccgagcgccgctcccactaaagcaaccccggctgctactacaccttctactgcacccgctactgatcctgagagtaaatctaacacaccagctcccactgctgttccaactactttaccaccggctgaggctccgtcagattctgccgccgctccatccccatcaaaattttctccagcttcttcccctccagctactactccagtgagtacactacctgctacagctactgtaagcacatct

SEQ ID NO: 14191 - DNA, 345 bp, Gossypium hirsutum
  unsure (1)..(345): unsure at all n locations; Clone ID: LIB3145-008-Q1-K1-E10
gaanacccggggcgacggaggcgtacggttggataatgtgcaaacacccgctcttttatgaatcataaacctgctggccacactagcttgcttataatcgagacactacatcattctttcaattaaaaaaaaccccccttatttagtttgttcaaaaaaaaaaaaacatacaaaaaaaaataatttaaaaatttataataaaaaaaaaaaatccatataaataaccatatacatttacaaaccaacggtttaacaacaaaaaaaaattggggggcgcccctttaaaaaaaccaaattttattaccccttcttttaaagtaaatattttttatatctgcccccaaa

SEQ ID NO: 14192 - DNA, 433 bp, Gossypium hirsutum
  unsure (1)..(433): unsure at all n locations; Clone ID: LIB3145-008-Q1-K1-E11
aaaaccgggccggcgaggcgtacgatctgctnnnacaatctaaagcctcatattatcacaaatggttgatggttgcctccaagcttgctttacagacgaggataaagggttaccgaatgaacaatctcgatctttcaaagggtccagctgaagtaaggacaagggataaatttgggttccatgaagacaacaaattcgagaaccttaacttcaatatgttgaacttggactccaagatcggagatagtgtaagcaaaagtaccttccgaaatggtatttacaacaccgatgctgtttaccagaaaaataacagccacaacattgggaacctgtctgccaacaaatatagcggcaacaaccatagcaacaaagatattaataataacagcaacaccaactccaacaacaacgaaaacaacaatgcaaacaatgc

SEQ ID NO: 14193 - DNA, 441 bp, Gossypium hirsutum
  Clone ID: LIB3145-008-Q1-K1-E12
aaaaccgggccgaccgcacgcgtccgcccacgcctccgcccactcgtccgcaatttctgaagtttagtatggattcctcggcttcgctgttaaacaagctcatgggtgcggatccatttttcttgttagcgggtcccaatgtgattgaatctgaagatcacattctaaggatggctggctacatcaagactatcactaccaaacttgggttgcctttggttttcaaatcaagctttgataaagctaaccgaacatcatcaaaatcatttcggggtcctggaatggctgaaggcttgcagatccttgagaaagttaaagtagcatatgacattccaattgtaactgatgtccatgaaactattcagtgtgaagcagttggaagagtcgctgatgttattcagattccagcattcttatgtcgtcagacggatcttctagttg

SEQ ID NO: 14194 - DNA, 378 bp, Gossypium hirsutum
  Clone ID: LIB3145-008-Q1-K1-E2
atcaagctgcaacaggagctcattgttacaagtgataagaccattgatgcgaggggagccgatgtggaaatttgtaatggtgctggtatcactatccaatttgtgaagaatatcattatccatggccttcaaatccatcacattattcccgccaagggtggcaagatcaaggatggtgaaaaccaccatgggttacggggtgacagcgacggagacggggtgtctattttcggatcaaccaatgtttggcttgaccatcttgcccttcaccattgcgccgatggccttatcgatgtcgttcaaggatcaactgccgttaccgtttctaactgccacttcagtgaccataacgatgtgatgttgtttggagcaagcgac

SEQ ID NO: 14195 - DNA, 170 bp, Gossypium hirsutum
  Clone ID: LIB3145-008-Q1-K1-E3
ataatgcgcctatcactatccaatatgttaaaaatatcattatacatgcccttcaaatccatcacattattcccgccaagggaggcaagatcaacgatgttaaaaaccaccatttgttacagtgtgacatcgacagaaactttgtaaatattttctgatcaaccaatttt

SEQ ID NO: 14196 - DNA, 377 bp, Gossypium hirsutum
  Clone ID: LIB3145-008-Q1-K1-E4
cttgtgcttggaccgtatcaggaagcttgctgataactgtaccggtcttcaaggtttcctgtttttgaacgctgttggtggaggcactggatctggtcttggttccctccttttggagcgtttgtctgttgattatggcaagaaatccaagttgggtttcactgtctacccatcaccccaggtctccacatctgttgttgagccctacaacagtgtcctctcaactcactcccttttggagcacactgatgtggctgttcttcttgacaatgaggctatctatgacatttgcaggcgctctcttgacattgagcgacccacttacaccaatcttaaccgtcttgtctcccaggtgatctcctctttgactgcttcac

SEQ ID NO: 14197 - DNA, 368 bp, Gossypium hirsutum
  unsure (1)..(368): unsure at all n locations; Clone ID: LIB3145-008-Q1-K1-E5
gggatcttgtgggaatatggttcaattgcattcaatcgtttggttgcagagattgggaacgaaggagtcaatggactgcaataatanagctggaattctttacaaggaattgcaatagtagagctggattttagtgaagtaaatgctctgggatttgcaagtcaccatcattatttcactgtcaatatcagctccagattttgccaagctaataggacatgctatgtggattacctgggaattgcaataataggggagcttgctcattctctatacgctggtgttgaaatgtgaaaagctattcttttaagaatttcattttgttagactaggtttctttccttaggcaggtttgtgagctggtccta

SEQ ID NO: 14198 - DNA, 359 bp, Gossypium hirsutum
  Clone ID: LIB3145-008-Q1-K1-E6
aaagagagatggcgtctgtaataaaatctgctatcttaattctgtcggtgttttggtctgtgcgcttcatttcgggtgttaggttgctccactaacagcccaatgatgaccccaaaaacatggacgctattcctcccattgatgcactcaaccctaccgagttgaatggacccggtgttggcattcacgaagatcatgttgtcccaaaaggtgctgaaattggtactcttggttttggctttgaaggtggtcctgataaatgctgttcttctggatgttccggtaattgtaattctggtggattcgttctaccattttctcaaattccagaaatcccaagaattccagaaatcccacat

SEQ ID NO: 14199 - DNA, 401 bp, Gossypium hirsutum
  Clone ID: LIB3145-008-Q1-K1-E7
gaaaacccgggccgaccgacgcgtccgcttacacacagagggggtgcacttgttgccttatgggtgacaaatagagagaaatggcgtggcgtcattgagaaagagctattccctgcatggggagttagatatgtgtctactatttactggttgaaggtgaaaggggacggttcattgatcagtgatcttgacctctttcatcatcggccatatgaatgtcttctcctgggatactgtcaaggaaaagaaatggattcaaattgcccttcagtatttaggtcgataaaagatgaacatattatcataagcattcctggaggttactcgaggaaacccccaattggagaattactattggaccatgttcctggagttaaacctgctcgatgtattgaactctt

SEQ ID NO: 14200 - DNA, 353 bp, Gossypium hirsutum
  Clone ID: LIB3145-008-Q1-K1-E8
gaaaacccgggccgaccgcacgcgtacgcgccgtccttggttgcaccgccgtgttccatttcatcatcatcgaattcttggggactttgtctagtacaactcctctcacttgcttgcaatggttcgtaagcgttgtcataggattcttaggcatgccgatcgctgctgctttgaagacgatacccgtatgaaccactatactagcaatgctgttttccgagtgaatagcaagaaagttttctctgctttatttacagcgattgattgctatcggatcgtaaatagagatttcgggactaaagatcaccataaaaacaaacattttgaaacattttctgtattgaaattctttt

SEQ ID NO: 14201 - DNA, 431 bp, Gossypium hirsutum
  unsure (1)..(431): unsure at all n locations; Clone ID: LIB3145-008-Q1-K1-E9
gacccacgcgtacgatttattcctttgctttcgtccaacactattataatagaacgggccatggggatcaaccagttcatccttacacttatctcttccccttatctcttgtccttctcaacctctaccaatgcgcctccatccctttctgacgcttctagccctacttcttcagaactttatgatatgattgaggttatgtctgaatcaccatctccatttgcatttgatggtataacattggaaagtattgacaatttattaagcatactacctagcggtgtcaaccctgcccttcagcaaatttgtgggaacactgatcaccccgtcgaatgtataatagcaactatgccattcctagatgagaaaactcctattgagcctctntctgtccttaaagctgggattgaagcaatggataaccagaccaa

SEQ ID NO: 14202 - DNA, 380 bp, Gossypium hirsutum
  Clone ID: LIB3145-008-Q1-K1-F1
cccaacccatgccctctcctctgggttcaccgacaagctcccggtctgtaacccagaccgggaatggctcccaccgtttcacgatcaaagggtattccttagccaaaggcatgggcgttggcaaacacatagccagcgagagcttcactgtgggaggctatcaatgggcaatatacttttatcctgatggtaaaaacccagaagatcattcaacctatgtctccgttttcgtagctttagcaagcgaaggcacagatgttagagcccttttcgagttaactcttttggatcaaagtgggaaagggaaacataaagttcatagccatttcgatcgagctcttgaaagtggcccttatacccttaagtataggggaagtatg

SEQ ID NO: 14203 - DNA, 467 bp, Gossypium hirsutum
  Clone ID: LIB3145-008-Q1-K1-F10
taggtctggaaaacccggggcgagcgaggcgtccgcgcggctctgacaagatacatccccacatttatatccctgaaatcaattgggtgctcatgatcctcttcattgctgtgactattgcctttagagacacaaaacacatggggaatgcatcacgattggcagtgatgactgtgatgttggtgacgacatgtctcacatccctggttattatcctctgttggcacaaaccccctattgtggctcttttctttcttcttttctttggttctattgagttgctttacttctcagcttcactcaccaagttcactgaaggggcttggctccctattctcttggcccttttccttatgacaatcatgtttgtttggcattatgcaaccatcaagaaatatgaatttgatctccacaataaggtatcactagaatggctattagcattgggtccaagcttatgaattgct

SEQ ID NO: 14204 - DNA, 471 bp, Gossypium hirsutum
  unsure (1)..(471): unsure at all n locations; Clone ID: LIB3145-008-Q1-K1-F12
taggtctggaaaacccgggccgacggaggcgtccggagagatnncntctgtaataaaatctgctttcttaattctgtcggtgtttttatctctagacttcatttcaggtgttaggtggctccacaaacagcccaatgatgaccccaaaaacatggacgctattcctcccattgatgcactcaaccctaccgagttgaatggacccggtgttggcattcacgaagatcatgttgtcccaaaaggtgctgaaattggtactcttggttttggttttgaaggtggtcctgataaatgttgttcttctggatgttccggtaattgtaatcctggtggtttcgttctaccatttcctcaaattccagaaatcccaagaattccagaaatcccacaaatcccacagatcccacaaatcccacaaattccactaatcccacagatcccacaagtcccacagatcccacaagtcccaaa

SEQ ID NO: 14205 - DNA, 380 bp, Gossypium hirsutum
  Clone ID: LIB3145-008-Q1-K1-F2
ggaaatcaagaagcgtgattacagcggctcctgctatctcgatttctacttcgtttacacgccccagtccccttttcttctttccttttatttactcttcccataacattacattcccctttagcactcaaacccagaaaactgaaaaccttttctttctcccctaagagagctcaaaatgggagttgactactataacattctcaaagttagccgtaacgcgacggacgacgacctccggaagtcctacaagcgccttgccaggaagtggcaccccgacaagaaccttgtcaacaacaaagaagccgaggctaaatgcaagcaaatttttgaagcctacaacgtcctcagcgacccgctaaagcgtcagatctatgatc

SEQ ID NO: 14206 - DNA, 274 bp, Gossypium hirsutum
  Clone ID: LIB3145-008-Q1-K1-F3
atcatgccaacctcgacgcatgcttaacgcctttaacctaccctgatcctacctattactgcgccggggatcactctctcgaacacattgccgcttatgctctagaactccacctctacatctgcataaccgattcacaataaaattacatccatggcgctgaaaacatcaagtcaaacccagatgtgtccttccctgagactgatcttgaaacttctttcattactttgattatcaaacctcctaacaatctcatccaatatctcctacaaac

SEQ ID NO: 14207 - DNA, 378 bp, Gossypium hirsutum
  Clone ID: LIB3145-008-Q1-K1-F4
cccacgcgtccgctcaactaaacttataacgttcgatcgtttaacgcaaacccatttttaagtgagggaaaggtttcagttcagagtcataagcaacatcaatggctccttcaactctgacggctcttgcggaagagaaaaccttgcaggcaagcttcgttcgtgatgaagatgagcgtcctaaggttgcttacaaccaattcagtaatgatatccctgtcatctctcttgctggtatcgatgatgttgatggcaagaggggtgagatatgcaagaagattgttgaggcttgtgaggattggggtgtcttccaggttgtggatcatggtgttgatactaaactcgtgtccgaaatgacccgtcttgcgagagagtttt

SEQ ID NO: 14208 - DNA, 346 bp, Gossypium hirsutum
  Clone ID: LIB3145-008-Q1-K1-F6
cccacgcgtcctaaaaaaaaataaaccctaatgaaattccccccaaatccgaggcgaaaaggcagagattgtgaccatgatcagcattctcgctcaggagcgtttgcttggtgcaacattatgatgcgcattgacggggatcgttgtattcgagcaacggaaacgcatatatgattccgtttcaagttatcaatctgagatgaaagaactgatatttggaaagaaatctcgctcagagtttgcccttctatggaacaaaacggtggaccaaatatttgtcccagtaattgaagccattagttcccgtcgatggtagacgatttggggtaatttatactgtcaacta

SEQ ID NO: 14209 - DNA, 398 bp, Gossypium hirsutum
  Clone ID: LIB3145-008-Q1-K1-F7
gaataaccgggccgaccgacgcgtccgcccacgcgtccgatttggcctcacctgaatgtttctcatccgttgaatggatccagggttcgctggccacacagagtcgccagtcaatgacctggtacaaggcatattttgatgcaccaacaggtaacgaaccattggctttggatatgcggagtatgggaaaaggtcaagtatggatcaacgggcaaagtgtaggaagatattggatggcgtacgggaatggtgagtgcagtaagtgtagttactcggggacgtaccgacctacaaagtgccagagtggttgcggccatccaacacaaagatggtaccatgttccgagaacgtggctaaaaccgaaacagaatttgttggtagtgtttgaagaactcggc

SEQ ID NO: 14210 - DNA, 361 bp, Gossypium hirsutum
  unsure (1)..(361): unsure at all n locations; Clone ID: LIB3145-008-Q1-K1-F8
aaaagacccaattattagggtttcaaaacatcagatttttgaggctttccccttgcttttgcgatcactcgattgctactttccaccattgaaaccgatggatgatagctcaccatggagacgttttgttttcttactctaaacctctcccaaaagggtatggaggtgccagggaatggtgcttgcagaggcgtggggtggcaaaaggcatgggggtgaccagggttnttccttttttgctgtttttttattattggtttgggctagagttagtggtttgagctgatgtaatttgggtttgggtattttggttttgggccgggcataattaggcctgtacaaggattttatccatgtaacc

SEQ ID NO: 14211 - DNA, 437 bp, Gossypium hirsutum
  Clone ID: LIB3145-008-Q1-K1-F9
gaacacccggggcgacgcgggcgtacgcttgggatcacgataatcactactctagttctaaagtcaatctgtaattttattgagcagtcgtggttatatactagttttaacgctttccctaaacgcataattgtgtcaaaggagaagctaatggacgaggcccatagcacggactatagcttggttcttgataatgacggatggacttgcttcttactcagagcaaggaagagggctatgcacaactcaattttcttgcaaccattattccaggttaggcaagattactgatgcctttctctttggacgaggatgatgagtactgtagctctaaagccaatctgtaattttgttgaccttggtgggaatcctgttttaacctttggttaaaggcataatggtgtcaaaggagaaggtaatggatgaggcccatagca

SEQ ID NO: 14212 - DNA, 268 bp, Gossypium hirsutum
  Clone ID: LIB3145-008-Q1-K1-G1
aagattatttgataatggggtggagtgccgttaggtcctagatgctattattgatagatgtgcagcactacagaacatacggcaagcagttctgcactataggaaggtgttcaaccaacagcatattgagccgagggtgaggagagtagctctgaaccgtggagccgagtacttggagcggtactttcgcttaattgcttttgctgcatatcttggcagtgaagcatttgatagtttttgtggacaaggagaatgtaagatgtcattt

SEQ ID NO: 14213 - DNA, 469 bp, Gossypium hirsutum
  unsure (1)..(469): unsure at all n locations; Clone ID: LIB3145-008-Q1-K1-G10
gaaaaacngggccgaccgaggcgtacggtcggaattattttaatcacactcctttttatatattttacactagtgtcccaatggacgcactttttaaacgatttgtaaggctaccattcataattcttgcccaacttgccgcaacgagctcggaaatataaggtgtttggctctagaaaaagtaacggagtctttagaacttccttgccgataccagattctgggttgtcatgatatttttccgtactacagtaagctgaagcatgaaaaaaactgtagataccgcccctataattgtccgtacgcaggagctgaatgctccgtcaccggtgatattccatttctcgtcatgcatctaaagaatgatcacaaggtcgatatgcatgatggttgtactttcaaccacacatacgttaaatccaatcctcatgaagtcaaaaatgctacctggatgttaaccgttttcaac

SEQ ID NO: 14214 - DNA, 414 bp, Gossypium hirsutum
  unsure (1)..(414): unsure at all n locations; Clone ID: LIB3145-008-Q1-K1-G11
ccctctctnntctcaaatttctgggctccgngcccctaatacnaaaccgacattttccaactctgattgactcctaattgntactggccgggtattttccatcactttcctgggaaaaaaaagcataaaaggaaaaagtttcaggagaaatgtactcagctattcggtcgttaccgttgaatggaagtgtaggagattatcaagggtcgtttgatggaaccaacttgcctagcgatgcttgtttggttttaacaacggatcccaagcctcgactccgttggacagctgagctccatgaacgtttcgtcgatgctgttactcaacttggtggccctgacaaagcaaccccaaagactattatgagaacaatgggagtaaaaagccttaccctctatcacttaaaatcacaccttc

SEQ ID NO: 14215 - DNA, 471 bp, Gossypium hirsutum
  unsure (1)..(471): unsure at all n locations; Clone ID: LIB3145-008-Q1-K1-G12
gaaaacccgggccgacgaggcgtncggtgtgaanataaattatcatgccgctatttctctttgcactccattccattggatcaaagctggattattgtaaaggactgtctcataactgcaactgcgaaggactgtagtctgatgattagttttagaccaaaggaagatggtagactcccttctcacaatactgtatatctaggatcaactaaccaagcttttgagtacaaggtgtatttcattgatctggatctgaaacccttgaagaaaatggaggcttattacgagttagataagaaaattgttagctgctattctcagatggtgaaaactgagcatgaaacagataaagctgttacaataaactccaatggaagtgtacgagatcaaagatacgcattagaagacagtttgtttactgaaggttgtactggtaagtgcaagtagttcttattatatgatccctgaact

SEQ ID NO: 14216 - DNA, 380 bp, Gossypium hirsutum
  Clone ID: LIB3145-008-Q1-K1-G2
cttgcattaagtctcaaagatatcactgcatgaaaaaaaaaaaaccagacatggcttccagcactggggcatccgctgctcttcttcttaccttgaacttgttgttcttcactttggttagctctacctacgtgccttgcccaccaccaccaaagagccacaagcctacccacaaaagcccaccctcggcacctgaacagccaggcacttgccccagagatgcactgaaactaggcgtttgtgctgatttgttgggctcagtgcgcgttgttgttggaccgtcgaggaccaaatgctgctctctcatttcgggtttggctgatctcgatgctgctgtttgcctttgcactgctattaaagctaatgtgttgggggttaac

SEQ ID NO: 14217 - DNA, 328 bp, Gossypium hirsutum
  Clone ID: LIB3145-008-Q1-K1-G3
cacttcttttactaaacacttttcccttttcaccaaatgctaattacgggcgttacggcctcaaagatggggacgtgctatccactttcttctaatgcggaactacccaacaaaacccacctattgcataaatgagtaaacttcatccttctcttcagagtttggaagctgtgaaacatgaaagtctttcttttgcctgttagatctgatggattcacatacctgccatgcggtttcaacacaactggcttttggtttccttcggattgagcttataactatactgtttgctccgatttcttttgaattgcgattgatattgatcatt

SEQ ID NO: 14218 - DNA, 370 bp, Gossypium hirsutum
  Clone ID: LIB3145-008-Q1-K1-G4
acgcacgcgtccgtggaaagccatatcagcttgttccaggtttttcatactttcatgctgttcctgctgctgtgcaggtgaaaccggcagagcagaaacaacctgtcggtgagtagaaatatgcgctttgtgcttcgtattgctatcaccatacaggaaacaagatacagcactgagaagagattttggcattgcagttccttgttgattgtgcttaccatatcatccaagacgctcataaactttcttgacaaggttgatcattgtccagtctaattaaattagaatggttagatgcgcgaaagatgggaaactaggttgtcaacaatgtttttgtagggcaaatgaagatggtgtaggggaatagggc

SEQ ID NO: 14219 - DNA, 125 bp, Gossypium hirsutum
  Clone ID: LIB3145-008-Q1-K1-G6
cccacgcgtccggtaaaaattgttcactttcacttccatttcaactgttaatgggcttgtgaattgtccttccttctttgatcctccatgtatgaactattaatggagttccccaatttttgttc

SEQ ID NO: 14220 - DNA, 392 bp, Gossypium hirsutum
  unsure (1)..(392): unsure at all n locations; Clone ID: LIB3145-008-Q1-K1-G7
cgggccgaccgacgcgtacgcncacgcctnnttaattatttactcttccttttttatcaactaaagcttatagcgggattggtgagtattcaaccataaaggagttaacgctaatgaaacaggaattgcttttgtttgcacaatctgcaaaaagcatgttgcaagaagtggatgaatctgcaaagcaagaaccgagtggttcctcaaaaccttctttagatgctgtagccgaacaaccaaaaaatcctgctcccgaaagggccaaaatagttatttcaatccagaacaaggatgaaatcaagcaatttcgtatatacatggatgacaagtttgagaagcccttcagcttgtatgccaataaagctaagcttgacctgcaaagcttagtattt

SEQ ID NO: 14221 - DNA, 318 bp, Gossypium hirsutum
  unsure (1)..(318): unsure at all n locations; Clone ID: LIB3145-008-Q1-K1-G8
gacggacgcgtacgcccacgcctccggngatttgagatttctagttccgagcaggcgaaagcnaaaagggggcgatccgatgtggatgctaattaccattatatgaaagtttatgatcggttggctgtagatcgatggcaaagacagaggattccatgtgaaaatatgcaggagcttagcttggtcaattgcatcatcagccctggaagagggctggcttgtgtattagggaagtgcatgaacttgtagaaaattcacttggacatgttcgttggagtacgagactctgatatttgaagcttagcacataaatctagt

SEQ ID NO: 14222 - DNA, 452 bp, Gossypium hirsutum
  unsure (1)..(452): unsure at all n locations; Clone ID: LIB3145-008-Q1-K1-G9
aaaaccggccgaggaggcgtacggtttgattttttttttgaaagacccgatttttgatcttcaacggtagcaagatcggaagcatgatcttgaacggtaacaagctcgnncatgaaatttgaaatatacgaagcatgatcttcaacggtaacaagatccgaaacatgatcttcagcggtaacaagcttggcggtgatgtttgaaatatccgaagcatgatcttcaacggtaacaagcttggcggtgaagctccaacggctagattttgggatacccactcccatctatctataaataagcatcaccagtaggttcatcatctatctaagcttttcagcatcctctcctctgtccttttgcttttaattttttgtgctttgattcattctttaaaccatggaatcaaattcacgaaagagaaagggatttctcaaccctttgagaaatcccat

SEQ ID NO: 14223 - DNA, 310 bp, Gossypium hirsutum
  unsure (1)..(310): unsure at all n locations; Clone ID: LIB3145-008-Q1-K1-H1
gcggaagatcttacacgtgattttgacagagattatattgctaaaatggctaaatagagtggagtgtcatgtccttccgcctgctagaatcccgaatggtttcatttgactatcactggctgggataatttgacattgtactaaatgaatttttatttgaaaactattttttttactcataatttcgactataatgtacttgtgttctttttttttttgaaatgatactggtcatttgctattatttaaaaaaaaaaaaaaaaaaaaaaaaaaaataaaaaaaaaaaacatcgnctcttaaaaaaataaa

SEQ ID NO: 14224 - DNA, 369 bp, Gossypium hirsutum
  unsure (1)..(369): unsure at all n locations; Clone ID: LIB3145-008-Q1-K1-H10
cccactcttcctatttattcatgaccctgtttatgcaacccacaatgaactgttcaattgtatgatttaaaactgcgagccgtttnaagtancacctatctacgatgccaagtgctttaagcgataaaatatcttcttaattttacttttttatatttctggtacctctttgcatgtcaagttttatttatagatcgctgcaaacacactttaattaaggcaacattacaattaagtttttatgttctaagatgtttgatttgaaatgctctatatacataatattacagagatataaaatctattgtacttaataaaactagacaggttcccatttatttaaatttttggtgtaaaaaaaaaacaaaa

SEQ ID NO: 14225 - DNA, 432 bp, Gossypium hirsutum
  unsure (1)..(432): unsure at all n locations; Clone ID: LIB3145-008-Q1-K1-H11
ttccatctccnccataaccaatttttttccaaaaaaccttaaattcctggttagcgttttatcctacacctgtcgtcttcccctgttttgactgttgtgttcttctaaacaagatccctgaacaacgaatggggaataattgagtactttactactctcttcgttgttcaggatcgtttagaacaactccctatttacaacagcaaaaaaaaaaaaagtacaaagagacgaggttcatttcccatattcattattcgagaaggacagagcagtctccattgtcgcggaaatacagaaggaaaagaaaagggtcaaccaaacttcaccacggcaacaattaaggcacgccaacatccaaataatcccaatcatctttcagtcctgtaacattgacaatgtctatcccgatgatccttaaaaacccaaactccc

SEQ ID NO: 14226 - DNA, 463 bp, Gossypium hirsutum
  unsure (1)..(463): unsure at all n locations; Clone ID: LIB3145-008-Q1-K1-H12
ggaaaaacccnccgacgacgcgtacggatgaatccttcnctttttattactcctttttttatcttttcaacctttcttgnattatttgattgtttattacaactggtcgccancaacatacaaaaaagcatcaatttgatggagtgcttccctgacttgttcaagccactagatatgtttaaaatattggaatctttgctaaatttgttattatctgcaagtttttaggctttgcaccagcttgtaagataacatacggtttgatctggaaatgtcattttcaatggaagaaatggaaattaagaaaaaaaatttcganaaaaaaaaaaaataaaacaaaaaaaaaaaaaaaaccttaccatctaaaaaaaaaaaacacaacaaacataaaaataaaaccaatcaactttcatttctgtaaccttaaatataacaaactcccacctcctctaaaaaccccaaa

SEQ ID NO: 14227 - DNA, 320 bp, Gossypium hirsutum
  Clone ID: LIB3145-008-Q1-K1-H2
cccacgcgtccggttgttaaagccttatttatctttcttaatatcgtaccttctctctatggtcgtggccatgaaaccttatacaatcaggaaagattatatgatttgcttattgttgaatcattttgaccagacaaaaaaatgccgttacccaactcaatttaattgcatcacatcacattctcgtctgctgacctaatatcaaagaggacaggcccgatcggacttccctacagaaccgctgcctaaattgaaaatggaacgcgacctgcagctgcgcatttcattaagcgcatgtgttagttacgctcagcgcaacc

SEQ ID NO: 14228 - DNA, 379 bp, Gossypium hirsutum
  Clone ID: LIB3145-008-Q1-K1-H3
atctgaacttggcgtgcagtttggaaactgtttggaggctcctcatgttattgatatcaaagcccaggtattctgttacaggtatggtctgctgtaatctcccatggcccagacaattaccaattggatgcaagttacaaaacagcggatcaatatgctttccaggactcacttggcaaatccttggaagaaattttcaagattgttccaggtggctgtctgatattcttcccaagttacaagctgatgaagaagcttagtgatcgttggcataacacaggccaatggtctcaacttaaagcacgaaagcccctttttgttgagccaagagggggtgatcaggaagaatttgagactgttctgaaaggttattataatt

SEQ ID NO: 14229 - DNA, 388 bp, Gossypium hirsutum
  unsure (1)..(388): unsure at all n locations; Clone ID: LIB3145-008-Q1-K1-H4
cgcgtgcgatcatgattcttcgatgacaggtaattggattcatttgttcactgatggagctgttatgtgggatgcgtgttttgcggcttgaggagggatgncntgtaagcaagaagaggagtggatcgttgggttcaattgttatttgggattatgcacagtcttcgatgctgaactatggggtgttctagatggcataacactcgtccatgaaaggggatatcaaaaagttgtgattcatacgaaaaatttggaagtagtcaaagttattcaagatgccaatttgacagattcatgcttagctttattacgtagaatccacgtgagtctacaagctatacaacattggaagataaaacatgttcaaagagagagcaatcaagttgct

SEQ ID NO: 14230 - DNA, 373 bp, Gossypium hirsutum
  Clone ID: LIB3145-008-Q1-K1-H5
atcccaactagtgtttgatatgttttcatataataatttattcctatttgtccagagtaacgagagcccacaacagaaactcctgcactgttcatttgtcccttggctgaaaacccagggcacagatagaaaacatggaaactatcttctccttcctgaccgcatctcgagcatcgatcctcagccatcactgtccgcattttcagattgaaaaagtggaaatgtagttccaagctattctccaaattgtaatcttgatttttgagggtaaatgtaaattccatagttttctaaagaaattttttgtatcggtctgtaaataaacactaggatcaattgtagctttctgtaataatttataggcgctccttac

SEQ ID NO: 14231 - DNA, 396 bp, Gossypium hirsutum
  unsure (1)..(396): unsure at all n locations; Clone ID: LIB3145-008-Q1-K1-H7
aaaacccgggccgaccgacgcgtgcgcaaaagccaaggtcaaacgaaggcttaaatattgttttccatggaaggggaagctggttcatgcgaggacgttaagccaaacgtcgtcnctaaacaaagtaatggcgatgttgtcggggataatggtgttggaaatctgggatccgttgaagcccctgattttctttccaagaaaaatttccagaactgttccgtggcaactcctgcatctggactgaattccactggccctgctccatctcaactaaccatcttctatgatggacacgtttgtgtgtttgatgcaattcctgtggaaaaggtgcgggagattatgcttattgctgcaactggtgctgctaactctgttgacatgaagaaagttgcaact

SEQ ID NO: 14232 - DNA, 469 bp, Gossypium hirsutum
  Clone ID: LIB3145-008-Q1-K1-H9
gaaaacccgggccggccgacgcgtccgattgttttaactattatttaatgtctcatttaaatatttttgcatatattattttaatcgttaaattattattttaaaaagctttttccttttgtttataaaattattgttcggaaattctttatattatattcttttaatatattagttagtatttcattttaatgtttctttatatatatatatgtacatatatagcaaaatcaatttaatcttgtaggcatctccatgttatttttataaataattatttctaaatttgtatataatttataagataatctaattttatatgtattattgatttcatattttgtttatataaataattattcctatatcatatgtgcatgtctcaaaaaaaaaaatctattatgtgaactatacctcatcatgtattttccttcttttgtatttaatacattatttaaagttatcatgt

SEQ ID NO: 14233 - DNA, 369 bp, Gossypium hirsutum
  unsure (1)..(369): unsure at all n locations; Clone ID: LIB3145-009-Q1-K1-A10
acgcccacgcgtccncccacgcgttcgcatgagggtgttcttttatctatacgtggatcacccggccctttgtttggtgctgttgccccttcggacaacaagtatgtcaaggctgttgctttagtgagtcagccggctctttattccaaggagcttatgaaggagcatcctgttggaccagctatgatccatccaactgaaactgttcatggtccaagttggagtgatctctttgaacccggagtcaagcatgctttactggtgggggtgggaattcaagtacttcagcagttcttgggtataaaaggtgttctgtactacactccgcaaattctatagcaagccggggtcggatttcttctttccaac

SEQ ID NO: 14234 - DNA, 423 bp, Gossypium hirsutum
  Clone ID: LIB3145-009-Q1-K1-A11
gaaacaccccacttccttgttcttattgcttctctcacctcttatacagaaagtatttaggaggtggttttagatatagaaagtaccttttacgacatggttttggtatctctgttcgtaaaatatctattttgaggaggttagagggttcgggaatcagagtcgtgacatggtaaattaaggtcaatggttttcagtagggttttcttgtttagtttctccttgagataaactattgtacggaatttgacagagataaggcaacatttagtccttaaattgtgcagctttttccaattttggcacatgtggtgatgtgaaacaatatcaaagtgtcacgtcatcacattgaccaaaatcgggaaaatttgtcaagctccaacattaatttggattaaaaaattcacggattaagttggaaaa

SEQ ID NO: 14235 - DNA, 430 bp, Gossypium hirsutum
  unsure (1)..(430): unsure at all n locations; Clone ID: LIB3145-009-Q1-K1-A2
catttttgaagaaggcatatggggaccgcatgcacaaggttttgcatgtaggccctgatacctgttgagttgtctccaaacttttgaaagaagaggatactgaagcctgnggtgtggaaccatatgatatagaggatgttgaagaaagttgcaagagtcttgtgggcaaagggattgtacgtgtggcagatatcaagtaccctcttccctataggccaaagtctttttctcttgttattgtgtcggatgcccttgattacttgtcttcaaaatacctgaacaagactctgcctgagttggccagggttgcctcggatggtctcattatttttgcaggtacccctggtcatcagaaggctaaagtggcagaactgtcgaaattcggtcgtccagctaaaatgcggagttcctcttggtggattcgtttttt

SEQ ID NO: 14236 - DNA, 436 bp, Gossypium hirsutum
  Clone ID: LIB3145-009-Q1-K1-A3
cccacgcgtccgcattgagacattttttaaaacagatagtgtgtgtgagtgagagagaaagaggaagaatggagctctcacagcatggtttcttagaggagttaatggctgctgctccaagaagggacagttggaccactttttcaaatggggtgaccgagttcttccctaatggatggaacttcgaatcttttgatgctacaccaccaaatcttgccttcttagggttctctacaacaacaactgatgaaattgaaaacccaagctttgaatgtccttttagtgaccaaccttacccttttggtgatgggttttcagtatcagagatggatgcttcaacttcacctttcccacctgctcatgaagattacccatcaatggttgatgatgaagatcagcttggccttctcaccactgaccaccatcatcagcagca

SEQ ID NO: 14237 - DNA, 452 bp, Gossypium hirsutum
  unsure (1)..(452): unsure at all n locations; Clone ID: LIB3145-009-Q1-K1-A4
cccacgcgnacgctagcaggctgaaacagcatcactactatcatcatctttctttatagatccttttccctcaacctgcacgatttattcttgtagaaacgaactctcagnagttcttaaatgccatttcctccgacccatttcatcctcatctcatagaccttctgtcttttccatctgtcgcttctactctaaaaggcgcctcctcaatccatatcctccgcgatgaccattgttttccctcctccgccattgtatgtgctatttagttcaccgatcaacccacaaagctacaatcaaggagtccccctccaccaccagccttcagaatctcagttctttagctaccgtcatcgcttgtaagcaagctctcacctcagccgtatttgcatcggccacaaagttatttcaataagtacaggctgccaaagtatacctcttattgtctctaa

SEQ ID NO: 14238 - DNA, 410 bp, Gossypium hirsutum
  unsure (1)..(410): unsure at all n locations; Clone ID: LIB3145-009-Q1-K1-A5
gtttttttggcttgtagggtctgccctctttgtcgtggggatatatgcggacctgatttgatggctggggagaagtagagcttctggtttttatacgagaggagcattggcaactgactttggttacaaaagggaaaaagaaagagaagagaagtgataattatatactattattattgaggatgaatgtgaatgagtttgtttaatataccatctgtgatcagggtgatcaccttttggctgcacaataaaataatacaggaatgggttgggagtagtaaggggctattgaactttgtgatttgcagtgtaaggctgtgtgtaagccttcttgccttggggccacaactcagctggaagaaagaaaggaaggggaagaaatttgattgttcnnnanaaaaaanaanana

SEQ ID NO: 14239 - DNA, 351 bp, Gossypium hirsutum
  unsure (1)..(351): unsure at all n locations; Clone ID: LIB3145-009-Q1-K1-A6
caaaagcgaagaanaaaggaatgaaaaaaaaaagaaatataagttgctaactcaaaaccaaatccgcagagattttgttgcaatcaatatagtaaatcaatatagatttatagtaatagtaaataataagaataagaataagtaatacaacgatttcgaactctatttagaatcaaaccaccgtacggtattttctttaagtatcttgtaggatactgttgttccagccacatttctcttttcgctctactagtaatttaattggagcttgaacccgagtttcggtgaagttgaatccacttttttcgttctaccttccttatttattttatctaattcttatctaattct

SEQ ID NO: 14240 - DNA, 380 bp, Gossypium hirsutum
  Clone ID: LIB3145-009-Q1-K1-A7
cccacgcgtccgcccacgcgtccgggcagaattacaggaacagcgaaggacgtatttttgggcggggcctggaagagcagtccgagggttgtttattcttatactgaaatggacgaaatcgtccatcctggtggatggtctagtaatcgccaacctgaacgagccgacactgtgtactacggagaatacaaatgcacggggaaaggcgcgactcctgctacacgagagaaattcgtcaaacaactatcggatgcggaagctaaaccattcttggttcttgactacgttgaaggtaccaaatggttacttccccctccgacagtacctaaataattcattcattcccaactttttcatgccggcaacatatcctcacagta

SEQ ID NO: 14241 - DNA, 425 bp, Gossypium hirsutum
  unsure (1)..(425): unsure at all n locations; Clone ID: LIB3145-009-Q1-K1-A8
aaaagccanaaaattttcagctgatagtaattactcatgacgaacgctttgctcaacgcacgccgtcatctgcaacacgcagagaaatattatcgtgttgcaaaagacgaccatcagcatagtataattgaagcccaggagatatttgattgaattctttcaacgggttttcctcgatacttcatccccagagcgccgtttcatcgagattgaatctgtacatgcaacccgatgctgctcctgaaatcaaagtgaggggtttgtttgttatatgtagagtttataaatgtagtaactaaatacattatccattttccttgtcatacaggttgtgttgtgtatttcaagttcttgccatggaaatgcaaaaaaaaaaaaaaaaaaaaccactgtatgattatgtttaggcacagtgcatgcttttt

SEQ ID NO: 14242 - DNA, 420 bp, Gossypium hirsutum
  Clone ID: LIB3145-009-Q1-K1-A9
ctggatcaatgaggattctacttacaagtactttgaggttatcctggtggatgttgcgcgcggggctatccgcaatgacccaagaattaactggatctgcaatccggttcacaagcacagggaacttcgaggacttacatctgctggtaagaaaaacaggggtctccatggaaagggtcatttgcaccacaagaaccgtccttctcgcagggcaacctggaagagaaacaacactctctcccttcgccgctaccgctgagttactgtgttcaactttttatccttgttgattttagaagtcatcgttttgagtttgaaatttttggaagttttaaaaaacctgactctttgattttacatgcaatttattttcgttttggatgctatgaatttctgaagttattgctacgtgcttttcag

SEQ ID NO: 14243 - DNA, 432 bp, Gossypium hirsutum
  Clone ID: LIB3145-009-Q1-K1-B1
agacggtgccgatgtcacaatgagagatatcactaacgataccaaagggtcgcaattggatccctcggaatcgacatttttgggtttagatgataataggttgtgtcaatgggatatgagagatagaaaaggggtggttcaaaacattgccacaagtgattcacctgttttgcattggtctcaagggcatcaattctcgagagggacaaattttcagtgctttgcgagcactggagatgggtcaattgtggtcggatcacttgacgggaagattcggttgtattcgaagacatcaatgaggcaggccaagactgcatttcccggtctcggttcaccgatcactcatgtggatgttacctatgatgggaagtgggttttgggcacaactgatacgtatcttgtcctcatttgcactctgtttacagataaaga

SEQ ID NO: 14244 - DNA, 133 bp, Gossypium hirsutum
  Clone ID: LIB3145-009-Q1-K1-B11
ggttgtaggcactttgagcagaaaagatgcctgatggttctcctccccatgcttggaaaccgtcatgtatttatcttgccaaagggatctgtataatatttttcgcaatatcagcactaaaggttttaactag

SEQ ID NO: 14245 - DNA, 434 bp, Gossypium hirsutum
  unsure (1)..(434): unsure at all n locations; Clone ID: LIB3145-009-Q1-K1-B12
acccacgcgnncgagagcggtaaactttnntgacttnttttgtgtcttttgtttaggccaaatccaatgcccccggcttttaattggggatttaaaaaagtaccaaaaaatattgattttcaatgtcttgggctggccctgatgatatctttctctccacttctcttgctacttatctagacaagaaactccttgtcttgcttagagatggccggaagcttttgggattactacgttcgtttgatcaatttgctaatgttgttctagaaggagcttgtgagcgagttattgttggcaatttgtactgtgatatccccttgggtctatatgtaatccgcggggagaatgttgtcttaataggagagctggacttgtaaaaggaaaagctttcatctcatatgactgctgtcttggctgctgagattaaaagggca

SEQ ID NO: 14246 - DNA, 434 bp, Gossypium hirsutum
  Clone ID: LIB3145-009-Q1-K1-B2
cccacgcgtcctaatttgtggaggactacctctgacgataatatagacttggagcgatttgcggccgcaatatataatgcagtgcgacaagcatcctaagtccatcgtcaggttcggaaatacatcagaagtatcttgaaacctgcaatgttaatgactgatctatgtgagaccttggagaacacagttcgcaagctcatttcagagaatggtttgcaagcacggattgcatttcctactggatgctcactgaattgggtcgctgctcactggactcctaattctggagacaagactgtgctcgagtatgatgatgtgatgaagttagattttggaactcatattgatgggaatatagttgattgtgcctttacagtggcgtttaatcctatgtatgatccgcttcttgaagcttctcgtgaagcaaccaatac

SEQ ID NO: 14247 - DNA, 432 bp, Gossypium hirsutum
  Clone ID: LIB3145-009-Q1-K1-B3
cgcttgttccgagacctcttcattcgtgaaggtttccagttttattacgtgtttgattggacgatcgtaaagtatcagcaatctcagattgccaatcctcctacccgtgctcttggctctggtgctggaactagctctggcttacctcctgcaggtgcaattgctgataggcagtcaggtgaagagaccagaccttctggttggtcttcagcagatcctacacgcaggaggcattctggcctgattgcaaattctggaagtttagctaaacaaaaaggtccagtagctaatgatctttctgctgctaaagatcctatgttgtctagttctaatttcttgcgttcaagtggatcttcgaagcgagctgctgtttctagcagtcatgatgccgcaacaatcgcagttagtggccctgaacgctctcactttcgt

SEQ ID NO: 14248 - DNA, 439 bp, Gossypium hirsutum
  Clone ID: LIB3145-009-Q1-K1-B6
gcagatcttcgttaagactctaaccggcaagacgatcactctcgaggtcgagagctccgataggatcgacaacgtgaaggccaaaatccaagataaggaaggcatccctccagaccagcagcgtctgatcttcgccggaaaacagctcgaagacggccggaccttggccgattacaacatccaaaaggagtcaactctccacctcgtcctccgtctgcgcggtgggatgcaaatcttcgtgaaaaccttgactggcaagacaatcactctcgaggtcgagagctccgacacgatcgacaacgttaaagcgaagatccaagacaaggaaggcatccccccagaccagcaacgtctcatctttgccggaaaacaactcgaagacggccgtaccttggccgactacaacatccagaaggagtcaactctccaccttgtcctt

SEQ ID NO: 14249 - DNA, 373 bp, Gossypium hirsutum
  unsure (1)..(373): unsure at all n locations; Clone ID: LIB3145-009-Q1-K1-B7
acgcgccccgatnttgccaacccnngcaaattctgaattccatgtgtattgttgtacccgaagccctccgttcaaagccacatcacttcataatgaaatggacgatcgagcgcccgcctaaaagaaaaacccctagaagaaaaaaaccttnngccagagaggccagaccagagacccgtgctnnagggtagccagacccttttnnttaattattannaactcaattgcaaaannacctagtnnaaatttataatctaaatatatatangnntttcaattaaaaaaattatttaataccccaaccaaatcgtnntgggtattaattgtacctnnttcaaagaaagagaatgccaaanntttaaacccatttaat

SEQ ID NO: 14250 - DNA, 435 bp, Gossypium hirsutum
  Clone ID: LIB3145-009-Q1-K1-B9
ctcggacagagactagaattagtaactattctataatgtatattacatagggtagaacgatcgctttttgagattcgccatattgtaattttcagttagagggtaattttaagcctcacattttttttttgtaaaaatcccctatttctgcctgattgtatacatgtgtagcctctttactctgctgtagtagagctttgtatgcgctttggactgtgaaaaaaaaaaaaaaaaaaaaaaaaaaaaaaaaaaaaattaaaaaactcaaaaataactacattattaatcagattcactactgattataagtcacgcatggagtctcttaattacaatcttttgatcctactaaatataatcgtgttacatgaaaaacacatctgataatcccacttatttatgtttcacaattttgccatttttattttgtttaca

SEQ ID NO: 14251 - DNA, 436 bp, Gossypium hirsutum
  Clone ID: LIB3145-009-Q1-K1-C1
gattcttcagtatgtcagcgtggggaacctcaatgatattagcttatgaatacttgaagcgggtatgcgtgaaagatgactaaatgtgaccgataaagtcaaacaattttggttcttgtcacatgaagagcagaggatataggaccttgagctgactgagagtcattatatttcagaaggcagctgttgtcagattattattttcttgcattctcccaagtagcctgcgattgtgcagcaaatttggttacctatcttcttacaaaacaccaatttaactacttcattaaacagattagctactgattttaagagacgcattgtatctgtggctaagattctttgatgcttttgaatattttttgtttacatgagaaaagaactgaaaatagccatttgtatgtctcacaaaaagcaataaaatcttgtatacaac

SEQ ID NO: 14252 - DNA, 422 bp, Gossypium hirsutum
  Clone ID: LIB3145-009-Q1-K1-C10
atggtttttaattgtcccaatttgaaagaggtattcttataattttctcgccaagaaacccgccctacctatcttacaaccatggttgatgcaatgggtagaagttgcccaaggttgcaaaacatacacattgtatcagttcgactttcacatgctgtagtgctttctcttacagctgctaatttgaggggcttgcggatgctttcgcttgttcttggctcagaaatcacagatgcatctgttgctgctattgcttcaagttattcaaaattagaattgcttgatctcagcgggtctagcatcagtgatagtggcattggaatgatctgcaatgtgttaccaaacacactgtcaagactcctccttgctctttgtcctaacataacttcaagtggaattcagtttgccacagctcaactacc

SEQ ID NO: 14253 - DNA, 431 bp, Gossypium hirsutum
  Clone ID: LIB3145-009-Q1-K1-C12
agataagtaagatatttgtctaagaaggtaggggagttagttatgcttattatctgagtgaaagggatgattgtatatcttgttgttcaaactatagtttgagtgtctgatatatatgtttgacacgggtgtgttatgttcatttttttgtccaatttttttaatgtatttggaggatttttagaggattatctccctatattcattctggtcccagacttgcatcaaacatggatgcataaaggaaaagaaagagtcgaactaacatagagttacagatgtttggtctgctgatctgcgttatgcttttttggttcaatgccagattgcttaaaagactgagatgtctgccttcattcatcttcagttgctgaaattcgcatttgagttcggatgaatgtttctcccacagtttaaaacatcaatgacaa

SEQ ID NO: 14254 - DNA, 438 bp, Gossypium hirsutum
  Clone ID: LIB3145-009-Q1-K1-C2
ggatgagaacaagtcattgatcttaaagattgttgagagccagaattccgggaaatttagtgaatgtgctgagaatcaagcacggctgcagcgaaacctcatgtacttggctgcaattgcagattctcaaccgcaacctccggccatacatgcccaggctggagggcactacatgcagcaacagcaacaaactcaacagatgacaccgcaatcgctaatggctgcacggtcctccatgttgtatggtcagcaaccattttctgatctccaacaacaagttctgcatggtccacttggcatgagctccggtggaagcacgggtcttcacatgctgcaaagtgaagctagcactacaggtggcaatggagcacttggagctggagttttccctgctttcaggcatggctcttctggagaaggcaagcaagacatcggtag

SEQ ID NO: 14255 - DNA, 437 bp, Gossypium hirsutum
  Clone ID: LIB3145-009-Q1-K1-C3
cccacgcgtccgcccacgcgtccggcttattgctattcttgcttttactcagctagcacggatgcgcgcaaggaataaacagttaggatggactcgccaaaaagtgtttcatatactgattggaactactaatactggttacttcatttattttgtcttgagtcttgttgctgcatgccgagggtggctatgctggtcttactcttgtggttttgtagccatggccttccccagaattctattatttgcaacatttcttctacttttgtcattctggcagatgatgaagaggaagaggatgatgaacagggatttctagaagctttaatacaaaattctttaaatagaccaaggtcttcgcctgcagatagtcgcagatcatgttatcctttccgtttaattcatgttggaagccgtcaaaagatagtgattctggt

SEQ ID NO: 14256 - DNA, 283 bp, Gossypium hirsutum
  unsure (1)..(283): unsure at all n locations; Clone ID: LIB3145-009-Q1-K1-C4
cccacgcgtccgttaaacctgnttcttattatatttgttattttttaagctcacacagagaccgctgtggttcttctcattaaaacggtggagcaggaagacctttcaacttatcattaatgtgaaccttccaaatcaaagagatctagacgggaaggattcttagaagttcttatattaactctattgaaaaataactctctttgtggcattccattataatgcgtaaaagtactacttttgaaagaaaataataaattatatttacgcatagctatatttc

SEQ ID NO: 14257 - DNA, 430 bp, Gossypium hirsutum
  Clone ID: LIB3145-009-Q1-K1-C5
aaaaaaaatttctctggaaacaaagcaactatcaactacgtttacctcagatctaaaacaccccgccgcagatccactaaattcaccatgtctactactttcagcggcgatgaaacggctcccttcttcggcttcctcggcgccgccgccgctctcgtcttctcctgtatgggagctgcatacgggacggctaagagcggtgtgggtgtggcttcaatgggtgtgatgaggcctgagttggtgatgaaatccattgttccagttgttatggctggtgttttgggtatttatgggttgattattgctgttattattagtactggcatcaatccaaaagccaaatcgtattatctttttgatggttatgcccatctttcctctggtcttgcttgtggacttgctgggctttcagctggaatggcaatcggaa

SEQ ID NO: 14258 - DNA, 432 bp, Gossypium hirsutum
  unsure (1)..(432): unsure at all n locations; Clone ID: LIB3145-009-Q1-K1-C6
cccacgcgtccganaaaataacattgattttgtcagcataataccacctttggtggtcggtccgtcgttatgcaatcaatgccgccaagcctcataactgcactttctcctatcaccgggaacgaagctcattattcgatcataaaacaaggccaattcattcatttggatgacttgtgcagagctcatatctttctattcgagaatccaaaagcggaaggtcgctacatttgcgcctctcaccatgctaccattatcgatcttgcgaaaatgctcagtgaaaaataccctgaatataatgttcccaccaagttcaaagatgtggatgagaacctgaagagtgtggagttctcctcaaagaagctcttggacttgggatttgagtttaaatatagcttggaagacatgttcgtaggagctgtcgagacatgc

SEQ ID NO: 14259 - DNA, 435 bp, Gossypium hirsutum
  Clone ID: LIB3145-009-Q1-K1-C7
cccacgcgtccgaacaaattttgagagagaggtagatccgatggggaggtcgagaaggaaagagaaacaatctcgtgccaaggtcaaagtcggtctccccaggaaaaaccctcacgtctttaagccatgcttcactcttcctcccaagctccgttcactcgccaacgtcgacgatgccctctccaagtgggacgacaaagccagcgtcatccaaaactacaagtcctttggggttgtttctaaccctaactacctcggcgttcgttctcgtacttcccacatcgtggagagcgattcactccaagtccctcattctccgccttccgatgaaccggctgatgaattcgagcccattgattcgggcagcgatctcgaagaagatgacttaaaaacagcactggggaagaagcgaagagatggaaaaagcacacattt

SEQ ID NO: 14260 - DNA, 429 bp, Gossypium hirsutum
  Clone ID: LIB3145-009-Q1-K1-C8
tccccctaaatttaaaaaggaccaacctctttgtttcttcttcttcttcttcgacctaaccgccccgctccttctcttcttcctttacgatttatcaacggtcatcataaaatcttctgatcatcaatcatggacgctagtgacagtaatttcaataaagctggcaacccttttgtctctgaacaacaagtacaaggaaacgacaatgtttcgttagaaaccggcgctgaatctcctcctccttctactactttcaacgacatgaaactcccctcccctagaaaacgaaaacctatacataaaagagtggtgtcagtgccaatcaacgacgttgatagttcgcgcctaaaaggggaaagtgctccaccgtctgattcttgggcttggcgaaagtacggccaaaaacccatcaaaggctctccttacccc

SEQ ID NO: 14261 - DNA, 437 bp, Gossypium hirsutum
  Clone ID: LIB3145-009-Q1-K1-D1
cccacgcgtccgagaagctggtgcttctgcgatcctcataataaacaaccaaacagaactcttcaagatggtttgtgaatcagatgctgatgtaaatataaaaatacctgctgtcatgcttcctcaggacgctggttccaatttggaaaattatataaataataacaccagggtttctgttgcgttttactccccaaagcgtccggcggttgatattgctgaagtttttctgtggctaatggctgttggtaccattttgcttgcttcttattggtctgcatggactgctaaagaagttgctattgagcaagacaagctactaaaggatgcatcagaagaatttctacaagtgggaagtgcaagttcaagtggttttgttgacataaatacaatgtcagcagttctctttgttgtgtttgcttcatgtttcttggtca

SEQ ID NO: 14262 - DNA, 432 bp, Gossypium hirsutum
  unsure (1)..(432): unsure at all n locations; Clone ID: LIB3145-009-Q1-K1-D10
gggctaagacatatagaaagcattgcttagagatttttttttttcaccatggctcatacccgccggttaaatctattgtcacacgtcttattccccttccttctcaggaggagaaggaactaaaggagacgttgcacgaaataattggacaggggaagcacgttaagctggaacagaagatcgatcctagtattcttggtgggcttgtcgtacagtttgagcaaaaggtatttgacatgtccattaagactagggcacgacagatggagaggttcttgcctgagcctatcaactttggttccctctgaacgatattataaccgccaagtgaccatttcagtttccttgtgcaccaattgcgttatttctagaactgcaaaaaataattaatggtctttntgctttgcctctcgtttcttctactcttgacat

SEQ ID NO: 14263 - DNA, 231 bp, Gossypium hirsutum
  unsure (1)..(231): unsure at all n locations; Clone ID: LIB3145-009-Q1-K1-D11
ctataattattaactattctattatttatacacatancatanaanccccgctttttaatattcgccataccctaacttttacatantatgtttattttaaacctcacattttttttttgtaaaaatcccctatttctccctcattctatacatctttaacctctttactctcctctaaaacaactttttatgcactttctactctaataaaaaaataaaaatcaacttttt

SEQ ID NO: 14264 - DNA, 421 bp, Gossypium hirsutum
  Clone ID: LIB3145-009-Q1-K1-D12
aaaagagataaaaagaaaaagaaaatgtcgggaatagtttaaaaactgaaggacatgatgggtcgacgtgtactaggacgacaagaaggacaagaaggacaaaaaggacaagaaagacaaagatcacaagaaaggtaaagatcataaagaagacaaagatgaagggatgatggataaaatcaaggacatgatcacgggtgataaagatgacgataagcataagaaagatgaccataagcacaaggaccgcaaagagcacaaggatgaagggatgatggataaaatcaaggacatgatcactggtgataaagatgacgataagcacaagaaagatgaccataagcacaaggaacgcaaagaacacaaggatgaagggatgctagataagatcaaagacaagatccacggggatgacgatcgt

SEQ ID NO: 14265 - DNA, 154 bp, Gossypium hirsutum
  unsure (1)..(154): unsure at all n locations; Clone ID: LIB3145-009-Q1-K1-D2
atgaatatgctgttgttgttggttatttatatatattagtttataatgtgatatgtattacgcatgattttacatatttaatatttaattaatttttaaaatattatattttttaaaaaaaaaaannnnnnnnaaannnnnnnnnnnnnnnnna

SEQ ID NO: 14266 - DNA, 54 bp, Gossypium hirsutum
  unsure (1)..(54): unsure at all n locations; Clone ID: LIB3145-009-Q1-K1-D3
acgaccacacgttcanccacacctaccgtcaatcttagattttaaataatgtct

SEQ ID NO: 14267 - DNA, 335 bp, Gossypium hirsutum
  unsure (1)..(335): unsure at all n locations; Clone ID: LIB3145-009-Q1-K1-D4
gccgcctgttgttccgtccatntggttgaaaaatatgtctgccgatgagtgtatgccttctttgctgactacacgccaagctcacctgaagctctctgagctaggatttgctgatgcataagctgatggttgcggaatagaatgaagccaacaacatttgcctccacaaaatgaatgtattgggttttgtcatctctcagtagtttatgggcagttgttgcttgatgaatatgggtatttgcagttttattttgttgaacatgttgaattgagtttgtgggagatttcgatggactaaaaagctctttcgtaataaataatatacaatttattcc

SEQ ID NO: 14268 - DNA, 433 bp, Gossypium hirsutum
  Clone ID: LIB3145-009-Q1-K1-D5
ctgagtgtggatcaaatcaaagaaaaccagtatgagttcattcgctatcagatcggcaaagccgcttagactttctgtttctacgacacgcaactcttctctagcgggtgtgcaacgtacctccaagatgtggtattcaacaggttcgcttgatgacttcgaaactgaggaagcgaaaagcgaagagatagatgagattcttggcgacaagcctaacaggcgtgagccactgctccaaggtgtcagacccggaaagggttggaatttccgtggtgtacacaaggcaattatttgtggaaaagttgggcaagcccccgtgcagaagatattgcgaaatgggagaactgtaactatatttactgttggaacaggtggtatgtttgacctgagagttgtacgggaccagaacacaccaaaacctgtccaatggcat

SEQ ID NO: 14269 - DNA, 339 bp, Gossypium hirsutum
  Clone ID: LIB3145-009-Q1-K1-D6
ctaaaacattactcttttacatgatatcctttattcaatttctcaactccttctctcaaccatcgcttccctgttacttaaattcaccactagtcccctcggagtaccacctttcccactatcatccgacgttggatcattaaacgccttccttttctaaatcgtcattactttctcactgttgtacaccgtttactccacagccttcgatcctaaacaatgcaacttcgtaatgatcgcaccgtttgcgatcggtttaatcgtggcaaccaatattttaactgctagggcattctacggaaccttaatgaacccaaccgtttcatttccaccaacctt

SEQ ID NO: 14270 - DNA, 434 bp, Gossypium hirsutum
  unsure (1)..(434): unsure at all n locations; Clone ID: LIB3145-009-Q1-K1-D7
gggacatgaggcanactgttgctgtcggcgttatcaatagcgtggagaataaagatccagacggagccaatgtgaccaagtctgctgccaataagggtgggaagtgaaccgtgcgggtttcagttgatccaaccgaactatatcatggctactacaataaaacattgcttcttattagtaggtcagccatcattggaggattagttgtgtgttttgatggtcatagttttaagtcatcaccgtcttgtagaggatgttgttcacagaactgggttcttgatagacggtggtgaggcttgtgtttttcagagtctgctgtctgtgagagtaattataaactttgaatggtgtctgtgttcccattatttatggcaatcagctcangagttttaagtctggtcctgggttttctgcttgaatttgttctatcaaac

SEQ ID NO: 14271 - DNA, 436 bp, Gossypium hirsutum
  Clone ID: LIB3145-009-Q1-K1-D8
attgaccacttgcatgagttgcaaattcttgaacttggttcgaacagattacgggtaagggagaatttgcaaaatttcacaaaattagaagagctgtggctgggaaggaatcgaattaaagctataaacctttgtgggctcaaatacatcaagaagattagcttgcaaagtaatcgtttaacttctatgataggattggaggaatgtgttgctctagaagagttatatttgagccacaatggtattttaaaaatggaaggtctatcaacattggttaacctccgagtattagatgtttcatcaaataagctaacatcagtaaatggcatacaaaacttgacaaggttggaggacttatggctcaatgacaaccaaatagaatcacttgaaagtgtagctgaggcggtttctggttcaagagaaaagctcaccactg

SEQ ID NO: 14272 - DNA, 436 bp, Gossypium hirsutum
  Clone ID: LIB3145-009-Q1-K1-D9
cggaatgcatgactattttcgcaacacttatgaacccatttactcttgaaagaaagctgaggggctgtttaagagccaacaagatcacccgtcaagagggacagccagagaaaatgtatttaatcataaatttactggcagagagagtagaaaatttaaaggtgcccagccaagagagggtttccacagatggagtaaaaatcttctagtaaaactgttcaacgacaagcaaagaggcagcactaccttgtcccataagagaaattttggaaaaggaaaagaagggacaatatttgaatggggagcatcatttatctgattttgtagagccaggtaagacacaatccatttgactgaagtgggtacatgaaaaaggaaaagaagaaagcaaaggaagaaatgagtgggtatccatatgccaccgtctcactctttc

SEQ ID NO: 14273 - DNA, 438 bp, Gossypium hirsutum
  Clone ID: LIB3145-009-Q1-K1-E1
gcttccatctccagaagagccgttgctctgcctgtgctttccctgctgcccgtaagaggaaatgtaggtggagtgttaaggcaatccgaagaaagaccactggaactggtaggatgaggtatcttcgccatgttccttgtaggttcaagaccggtttcagagaaggtactgaagcagcaccgaggaagaaggttgcagcagcttcggcttaagttggctatgaggttgttttgatgaatccatctattttagtaaaagttttatgggaacattacatgagaaatgtcatttattgcattggattcttttaaatatttgtagtttctattttcatgtagctgcttaggctattgttgcttgacacttaattactggatatttttgtggacgaagttaatcatgtgcttgtttcggttatgatgcccttcatcttgtttc

SEQ ID NO: 14274 - DNA, 370 bp, Gossypium hirsutum
  unsure (1)..(370): unsure at all n locations; Clone ID: LIB3145-009-Q1-K1-E10
aattaacccnaattatttatcttacctcctttttttctgcaaactacaacgaaccccgcccttattttgatgttgatgctctcttcattaatgtaactacacttaatccgaagttcattgatatcataaaatcacctgaaatgaacaagaatgcctaatgttatcgatttgaagctatcacagtacttacattagctgttccttgccaatagaaggtttattatctgttccataataaaacttttataaagaaaattaaatactaattttcaaagaataattcacgcttttattcacaccaataccttaaactggattatctgtactattaacaattttaatgtttccccagaaatgcatttttcatttc

SEQ ID NO: 14275 - DNA, 321 bp, Gossypium hirsutum
  Clone ID: LIB3145-009-Q1-K1-E2
gaaatgccgaccgaaatgaacaaagaaaacttaagctttgatggcacgcctggtttagttacgcgcgaaaaagatgctcttatccttgtggctaggaagattaatgattaatcagtgtatcattatagtaacttatttgatgcttattgctctagtttctacttagtacagtttcatattgaacacttatcaaacgttagtaacacctcgcttgtttaattaaccagcagtttctgctatgtttgtcaagctaccatctcatttgaatatatttatatatatatatatatacattgcaaaaagcaatttatatatatctgc

SEQ ID NO: 14276 - DNA, 417 bp, Gossypium hirsutum
  unsure (1)..(417): unsure at all n locations; Clone ID: LIB3145-009-Q1-K1-E3
ggagacggagcttggagaagtgacttccggagataagcgctgtgattcttgagaagatctggcggtgtttttattgggctcttcaatattcaaggtaattgtcttttctcattaatatctatcttgcataattactccggggatagtattcatgcctaagaggagaatctgcgacgtgcattttacgtctgctgcattgcataatggtgtacttacagttatcttatgtgattgttttgacttagaaagcagacttatataggtaaatgaatgcagtaactacactatgtatgattgctgctatataataaaacaacagcagtacaatcgtgaaactcgactgtatatagactaattgtaatgtatgcaaaattggatttgtttcctttanaaaaaaaaaaaaaaaaaaannnnnaa

SEQ ID NO: 14277 - DNA, 435 bp, Gossypium hirsutum
  Clone ID: LIB3145-009-Q1-K1-E4
cggacgcgtgggcggacgcgtgggcgggattacccgctgtgtttaagcatatcaataagcggaggacgaagcgattgctttgactgatagttctgttaatcttgagaacattgataacagaattatcactgaagttttgggtcctgaaaggtacggtcaggttcgatttcaaggatctggtgttaccccgacccaatattttggatccggctcccagcaatacatgccttccgggagtcaagctcaagctgaagttcagaggttaagagaccagatagctcaaatgcaagcgagcaagttgagcaaattgccgaggttcaaagaaaatatgaactccagcaagaacttagagcggatgcagcagtgagggaggcagtggcagtagcgagggaggcaacggcagcagcgagggaggcaaaagcagcagcgatggca

SEQ ID NO: 14278 - DNA, 443 bp, Gossypium hirsutum
  Clone ID: LIB3145-009-Q1-K1-E6
ccccgcgtccgcccacgcgtccggttttggccccaccggaatccacgcttccgtcgtttctgatcatgaccgccgcagaagtacttcgtcgtcttcctatgctaactggtgggctctcctttttcgagtttcatctgagccggattacataggatccgataagaaatcggaggtcacggagagaagagagggcggatcggaagcggatccgcggctaaatatggcgagatcgaagttttaccccggttgctttacggagaagaaggcgaagcagctccgattgatgattaccaactcgtcgtcgtttcatgacgttatgtaccactcggcgatagcttctcgactcgcctctgacttcaaaggtcgatccgatctatgagtgtcaggcaagtaactgaagtcagacctattaaaaccaagtttccgttaatttttttttcttc

SEQ ID NO: 14279 - DNA, 431 bp, Gossypium hirsutum
  Clone ID: LIB3145-009-Q1-K1-E7
actcgtctgaggatttatatgatgcgaaattatgtgtaatatgctatgatgatcaacgggggtgcttcttcttcccatgtggacactgtgcgacttgctatgattgtgctcaaaggattatggacgaagataacaaggtgtgtccaatatgtcgaacattgattcacaaagtaagaagattgtttagtccatacaaatacgtaatgaaatgagattgtatattcatgccagcatggtggctatctaccgaactgagtgcctcgtttaggtttttgtacaaatctgggttctgaagacgaaacccgtgcaagcaacatgtgggcagtcattgtttgtccccatcgtgaaatcatgtgtagatttgcttacaagatcaccgtgtttatctctaaaccttacttggtggacttcgaagaagttaaaaatgagaa

SEQ ID NO: 14280 - DNA, 413 bp, Gossypium hirsutum
  Clone ID: LIB3145-009-Q1-K1-E8
gcgtacggaattttgttaggtggtgtctaaaatccacatattcactcaagaagaagtggagaagaccagccttttatttgggagcgatgacacgcaaagctgtttggagcaagcagcagtgataatggaagcatcaaagtcatcctcagtggggcagccagattcatcatctccaatgtaataagggtttgaagatttgatgtttgtttgtttgtttgtttgcttgtttgcttgcatgttttttttgttgatgttgtgtttgctatgtgtgcaacaagttgtttaaatgaatccttaaagaattattttatctaccaagtaattgtcaaattggaagctaaaagtggccttctgccattattattattataatggtatgtttgacaattgaaggttttggcgttttgcctatt

SEQ ID NO: 14281 - DNA, 434 bp, Gossypium hirsutum
  unsure (1)..(434): unsure at all n locations; Clone ID: LIB3145-009-Q1-K1-E9
acgcccacgcgtccncatcaatttaccgtaacttcctcatattgctactaaacttgcgatcagtccgctaacctctgcaacgcctacccttaaccacactactctagaagaagctgaaggcgtaggctcttcagcgtcatcgtcgtcgtcggaatcgggctcaggaggcgatttcgacctggacttcgccttcgccttcccgggagattcagccggcgattctgatggtgaaggggactccgcttcatcttcatcctcctcttcctccgatggaccaggggaactgggggacttcttgggagcagcggccgggggcttggaagaacccggtggtggaagaagagcaaggatggcatcgccgaaaccaggaactacaatgggtgtgctaatgtgaagcacagataagttgaaaggctgggagatgacagacccca

SEQ ID NO: 14282 - DNA, 438 bp, Gossypium hirsutum
  Clone ID: LIB3145-009-Q1-K1-F1
cagcagaacccttcaaatcccccaaaatcttttagccttctgctacacgtttccaaaagatcagttcgtttcctcagtctggagcccgtggccttctcctttccagaactcttcgaacatgctccggaattcccccatccaggtaatgaccttcattttctttcaacgcttcttttgcaatcacatgagcaaaggtgttttctgactttggaatatggtgaaagtttattttctggaagaaatgtttcatatcttgaatgtcccttattatagccccaataatcgagttatccctgtctgtactctggcatttttttataacagttcttgaatctccattaatgtcacattcgtgaagacccaatagaatcgctaactttactgcttgtgctcctgcatgtgcttccgccgcgaacggtgaggcgacattctcatgga

SEQ ID NO: 14283 - DNA, 213 bp, Gossypium hirsutum
  Clone ID: LIB3145-009-Q1-K1-F10
aatttaattaaatacctattatcgccctcctcaactactcttttctcatctataccataaagctaacatttcaaatatctaccccaacaaaaatcatccatctctcatttctaacatatctcaacacaacacactttaaatattccaattcccacatattatatatccacactaagattacactcaaactgcctaacaccattcatattccat

SEQ ID NO: 14284 - DNA, 312 bp, Gossypium hirsutum
  unsure (1)..(312): unsure at all n locations; Clone ID: LIB3145-009-Q1-K1-F11
cccacgcgtacgcgcacgcctccggcttcatgctantgtttagtagtttttatgtttttacagctttgcaccccgccattaattcaattggtatcttctcctctcctgctcataataaatgtgctgatgctgtctttttgaattaaaataaacatctttggtttcaagcctggtttgctgaaactaatggagagttttgggtaagatgagtgatcttacgcctaattgcttggttaagctacttgctataatctttatactggccatgaaataacattattgtttgacttcttaaaaaaaaaaatttatatt

SEQ ID NO: 14285 - DNA, 410 bp, Gossypium hirsutum
  unsure (1)..(410): unsure at all n locations; Clone ID: LIB3145-009-Q1-K1-F12
gcgtaccacggagttcccttttcgtcgctgtctcagtctttgtttacatctccggtggccatgccagcccctcctttacattcggtgctttccttnncngnaacattactcttttacgtggtatcctttattggattgctcaactccttggctcaaccgtcgcttgcctgttacttaagttcgccactagtggcctgggagtaccagctttcgtactatcatccggcgtgggagcattaaacgcgttcgttttcgagatcgtgatgactttcggactggtgtacaccgtttacgccacagccgtctatcctaaacgaggcaacttgtgagtgatcgcaccgttggcgatcggtttaatcgtgggagccaatattttatctggtggggcattctacggatcctcaatgaac

SEQ ID NO: 14286 - DNA, 432 bp, Gossypium hirsutum
  Clone ID: LIB3145-009-Q1-K1-F2
taaggaactaactaaatggtggaagaatgcacttgctagtgataatgttgatgaagtgaagatgagcgaccgtttggacaacactccttgtgtggttgttacatcaaaatacggatggagtgctaatatggagaaaatcatgcagtctcaaaccctatctgattctagcaagcaagcttacatgcgcggcaagaggatcctagagattaacccaagacacccaatcgtcaaggagcttcgtgagagagttgccaaggactctgaggatgagggtgtgaagcaaacggctcagcttatttaccagacggctctaatggagagtggtttcaatctacccgatcccaaggattttgcttcacgcatctacagctcggtgaaatctagcctaaatattagtcccgatgcaacaattgaggatgatgatgatgatgt

SEQ ID NO: 14287 - DNA, 51 bp, Gossypium hirsutum
  Clone ID: LIB3145-009-Q1-K1-F3
taatcaacccagaaatcaatactgatggatagtgactgctaaacagccttc

SEQ ID NO: 14288 - DNA, 432 bp, Gossypium hirsutum
  Clone ID: LIB3145-009-Q1-K1-F4
gaaatatctttcttttttttttattaagaacaataaagatagagaaaaaagccaaaaccatccgcgcgttctttaatgctcaacatagttttaagttaaaaaaactactttcaagttcttgccctcaatgtgatcaatgatggtggtttagaagtcaatggttgctcaacctaaagcaaatggaaaccaatggtactaatcaccattcccgtgaaaatcgcccttcaacgggttcaaataatgctaacagaagtcaatccactaaagaggaggtttttgttaaccaaggtttgcttgtctttatctgaatatggacttcagtagcagaaactttatcaacacgagattggtgtgaactggctatggtgttgcgaactatctggacttattgttgttggggtgtatgacgtttctcaataaaggggttataaa

SEQ ID NO: 14289 - DNA, 435 bp, Gossypium hirsutum
  Clone ID: LIB3145-009-Q1-K1-F5
cttgtttaaaatataagaaaaaaaatcatacgcaatgagcactgctggtcaggttattcgtcggaaagctgcggtggcatgggaggcggggaagccactatcgatagaagaagtggaagtggcaccaccccaaaagcatgaagtccgtattaagattctcttcactgctttatgtcacactgatgtatactactgggagtgtaagggttacactcctctgtttcctcgtatacttggtcatgaagcctcagggatcgtggagagtgtgggtgagggtgtgaatgatttgaaacctggagatcatgtgctccctatcttcaccggagaatgcaaagaatgtcgccactgtctgtcagaagaaagcaataacatgtgcgaactgcttaggatcaactgcgaccgaggtgttatgcttgctgatgggaaaaccagatt

SEQ ID NO: 14290 - DNA, 415 bp, Gossypium hirsutum
  Clone ID: LIB3145-009-Q1-K1-F6
ttgctcccatatttgtacaagctccatcagttattggttttactggttttatggcccgccccctcatgggaggagtgtctgcacctctttccaagacagctgctgctccaattgagcgggtaaaacttctaatccaaaatcaggatgaaatgatcaaagctgggcggttgtctgaaccatacaagggaattactgactgctttgccaggactattaaggatgaaggtgtcatttctctttggagaggcaacactgcaaatgttctcagatacttccccacacaggctttgaactttgccttcaaggattatttcaagaggatgttcaacttcaagaaagacagagatggctactggaaatggtttgcaaggaacttggcatctggtggtgctgctggtgcttcatcacttctttt

SEQ ID NO: 14291 - DNA, 429 bp, Gossypium hirsutum
  Clone ID: LIB3145-009-Q1-K1-F7
ttcacttgatccatcatataatgataagttacaaatgcacttctatgaaacttgtccttgtccgaaatttgctcattttacagctaatcaagccatattggaagctttttcaatggctaatagagttcatgttattgattttgggctaaaacaaggtatgcaatggccagctttaatgcaagcacttgcattaagacccggtggaccaccggcgtttcgattgaccggaattggaccacctcaaccggatgatactgatgcgttgcaacaagtggggtggaagctagctgaattggccgaacgcatcgggatcgaattcgagtttcggggattcgtggctaataatttagccgatctcgaacccgaaatgctcgatattcgtcctcccgagattgaagtagtagcggtgaacgctgttttcgagcttca

SEQ ID NO: 14292 - DNA, 437 bp, Gossypium hirsutum
  Clone ID: LIB3145-009-Q1-K1-F8
gcttaaaacgatcgagccacagttttaagcttagcggttagagagagagagagagatgcgtgggtgcagcggcatggcatcggctgcctcggggttcttgttaatgcccaatctcaccggcactgctgcttctaagactaataacatcagcatgctcttttccccttccagaaacaactactacaatagctcaaggctcgtcgtaagggcggctgaggaggaggcttcgccaccagcaccaacaccagcaaccaccactgcgccaccagaaggtggtgaagctcctaagcctaagccaccaccgattggaccaaaaagaggaaccaaggaccccaagactcggtacccggtggtggttcgattcaacaaagtcaactatgccaatgtatctaccaacaactatgcactggatgagattgaagaagttaaatgagatt

SEQ ID NO: 14293 - DNA, 384 bp, Gossypium hirsutum
  Clone ID: LIB3145-009-Q1-K1-G1
caatctatggctcaactagggtcgtctctgtcagcagaaaccgagacactgagcaatgtcctaggcggggtggaggccttcagagcatttgattcaaacaacgatggcgcaatcaatgctgcagagctagggggaatcctgagttcgctggggtacaacgctagcgagcaagacgtgagggccatgatgcgagaaggggacgccaacaaggacggattactgagcatggaagagttcctagagatgaacaccaaggacatggagcttggggagcttgccaatttcctcaggaccgctttccaagcttttgaagtcgaaggggatgatgctttgactgctgccgacttgtatgaggttatggggaaccttggcatcgatcagctt

SEQ ID NO: 14294 - DNA, 406 bp, Gossypium hirsutum
  unsure (1)..(406): unsure at all n locations; Clone ID: LIB3145-009-Q1-K1-G10
tcaaaaatcctttaagaagtttattttttgtgccgaacnctggccgaccgcattttataattcatgtactgcctcaaaaatggcaaatgtgatctaccatgctatggttttgctaaggcacaaacatgtaaagatagaaaatgttctataagttctcggcgaagattctctcaatcggctatagaggagaagcaaagccgtgcatcaaccaaaagttaaatgtaaactgtacttttgctaaggtctagatttgcagcttttatcccatgcttacgttgttttcaataaattccaaataacctatctctgtcataattaccagttttttgcatttcttttcgaaatacacgtattttgattttacttgaccttttcttgtatcacaataaaatgcattttgtttctt

SEQ ID NO: 14295 - DNA, 413 bp, Gossypium hirsutum
  Clone ID: LIB3145-009-Q1-K1-G12
cgcacgcgtccgctccctttcgatgatagaaaccttgcttttctttatcaaaagattcccagaccggatcctcagatcccgaaatggttgtcacctggggctcggaacatgataagaaggattcttgacccaaaccctgaaaccaggataacaatgacgggtatcaaggaagatgactggttcaagcaagactatactcctgctgtacctgatgatgaggaagaagatatatatattgatgatgaagctttctcaatgtgtgaagtgggttgtgatggaggtaggagtcaagaatcacctactctcattaatgcttttcagttgataggaatgtcatcgtgcctagacctttctggtttctttgagaaggaagatgtatcttaaaggaagatcagatttacctcaaatcgttc

SEQ ID NO: 14296 - DNA, 423 bp, Gossypium hirsutum
  Clone ID: LIB3145-009-Q1-K1-G2
cactcaccaaacctttacggccagtctcttgtacttccacaagagaatagttctagccctgtggcgggtacattggtcactgctgccgagaaacaaacgagtactggtaaagaaacagtcagttctgaagagaatggtagtgagaaggagagccctcattgtgaagatggtaatctgccagaaagtttggcataaccttcctgatagtccgtttgcgtctcctgcgaaagcctataaagagtacctgtctttcaacaacgctgtcatggagaaggatggaaccatctcggctaacaataattggattccttcaaccttacttgctgcaaataatgcattagacatgtcatgcttcaactccttcaactgccaaatccccaggttctcatccggacaaaggacaatcggtatgtacacagggac

SEQ ID NO: 14297 - DNA, 432 bp, Gossypium hirsutum
  Clone ID: LIB3145-009-Q1-K1-G3
cgaatttctcagcaaccaaacaaaatcttccattgtcttctagaactttccaagcacactagaggtagtcaatggctcgtacaaagcaaacagccaggaaatcaaccggtggaaaagctccacgtaagcaactggcgacgaaagccgcgaggaaatcagctccagccaccggaggagtgaagaagcctcaccgtttcaggccaggaacagtggcgttgagagaaatcaggaagtaccagaagagtaccgagcttttgatccgtaaacttccgttccaaaagctagtaagggaaatcgctcaagatttcaagacggatctgagattccaaagtagtgcggtggcggctttacaagaagcggcggaagcttatctggttggcctgtttgaggataccaatctctgtgctattcatgccaagagggttactatta

SEQ ID NO: 14298 - DNA, 434 bp, Gossypium hirsutum
  Clone ID: LIB3145-009-Q1-K1-G5
ggaaggatagaaaatggaagaataaaatcgtgaggagcatagagtggagagtacaagctcttgggccggatttgtcaagacccagtgcgattgaaatggaacccatcaacgactctgatcaccttgatcagattctggctcgtgctcgacagctctctcagcctattatcattgattggatggctgcttggtgccggaaatgcatctatttgaagccaaagttggagaaattggcagctgagttcgataccaagtaaagttatctttactcaaaaagtgttgatatttaatacactcactttgctgaattttacacatttactacaaaagcaaaatggttccacaccatctaaaatttttaaaaataaattcttattggtattgtataatttaactgattacttttggagatgggattatatctgtacaccttt

SEQ ID NO: 14299 - DNA, 196 bp, Gossypium hirsutum
  unsure (1)..(196): unsure at all n locations; Clone ID: LIB3145-009-Q1-K1-G7
gaccgacgcgtacgtacttgtggancttcttgtgttcattgagtgaatctctttatttgaatcagacttcggggccgcattttaaactttgtttatcttcaatttatacttcctcaaatcatgattactaacgaaatgatttcaagtcttactttgattttgaacatctctaacaagccacatctgttttccatca

SEQ ID NO: 14300 - DNA, 428 bp, Gossypium hirsutum
  Clone ID: LIB3145-009-Q1-K1-G8
gtaaaagtaccacacaatcaaaatcaggcttctcatcattttttatgcttttctcttccgaccgcattataacaacgctgctcctatgggtattattctttggagattcattttcatattatggtatcatattgcttacctctaagctaagtagtggacaaagtacatgtttcccatctctccaaagcaatataaatccccacgatgatggtctctacctaaatgcattcatcaccagtatggcagagctacctgggcttcttctgtcagcaatattgcttgatagggttggccgcaagcattcgatggcaattatgttcggcttagcatttattttcctcacaccactgctaatccagcaacctgctgtgttaactacttgcttattatttggagctcgcatgaatgccatgggaacctttacaatt

SEQ ID NO: 14301 - DNA, 437 bp, Gossypium hirsutum
  unsure (1)..(437): unsure at all n locations; Clone ID: LIB3145-009-Q1-K1-G9
ctttgatgcanaatcctctatcatctggccaactgctttccaatgctgtattgcctattgctggtcctggtgtacatggtgtctcaatgcctgggactgcagcagttgttcctggtagtgggctgtctggtcttccaaatgaagaggctgctcgaaaagctgcactgcaagctgctctcaatttacagcataacctagcaaagattcaagctgatgttatgcctgaacattatgaagctgagttggagattaatgaattcccacaaaatgctcgatggaaggttacccacaaggaaactttgggcccaatatcggaatggactggagctgccattactacgaggggccagtatttcccacctggtcggatcccaggaccaggagaacgcaagctttacttgttcattgaaggacctactgagttatctgttaagaga

SEQ ID NO: 14302 - DNA, 441 bp, Gossypium hirsutum
  Clone ID: LIB3145-009-Q1-K1-H1
cccacgcgtccggctgatttcggattagccaaattcttggtggatggaggtgcatcggagtgcgggtgcgccattgcaggatcctatggctacattgctcctgaatatgcatacacgttgagagtagatgaaaaaagtgatgtgtatagtttcggagtagttcttttagagatgatcaccggacgaaaaccagtgggtgaatttggagaaggtgtagatatagtacaatgggctaaacgatcgacaaattgtcgaagagaagaagttagtaacatcgtggaccggaggctaacatcagtgcctaaagacgaggcaatgcacttattgttcattgcaatgttatgcgtacaagaaaatagcatagaacgtcccaccatgagagaggtagttcaaatgctatcggagtttgctcgacattcacttgactcccaatcttcatct

SEQ ID NO: 14303 - DNA, 384 bp, Gossypium hirsutum
  Clone ID: LIB3145-009-Q1-K1-H12
cccacgcgtccgcccacgcgtccggtccgtcagtattgcactgagagaggttttagtgtctaatattgctggtcggacatcatgcaaacatttttttctggatacagcagcagtgatgaatttctgggagcattcagtggatcattcatttatattttagatgtagatatctatataacattccttttagaggatgaaccacagattaatctgcatttggtgactactggttggttggacagaggattttgtttgattagttttatcaagttcagtagccattttcatcagttgcttagatgtaataccttgaatatttgttcccatcgaagataacagtgcggtaatgtcaaaaggtcaattaaaaacctggattttgcattt

SEQ ID NO: 14304 - DNA, 406 bp, Gossypium hirsutum
  Clone ID: LIB3145-009-Q1-K1-H2
gcagcaaatatggcagggtgaagcatatatatgtagacaagaacagtgccggatgcgtctatcggcgatttgactccgcagaagcggcaggtaaagctcaacgtgcaatgcacatgaggtggtttgcaggccgatcaatatcagccttatttatgcaaccccaggagtacgaagcgaggtttaaatgctgaagcagaagcaatattggatttgtttgttatgatatgatgtgtgttgatgggtggtagggtattacttttgaagacgcgttttattctgctgagtttagaattttattattataagcatagtacacaacgacctaattgtaagataaatgttatttgctaactcatttttttgttctgtaataacgatagaatttcggatgtctttatgattcaaa

SEQ ID NO: 14305 - DNA, 426 bp, Gossypium hirsutum
  unsure (1)..(426): unsure at all n locations; Clone ID: LIB3145-009-Q1-K1-H3
gacccacgcngccgatcaggcctggataatggaaatggcttctcatgttaaatccatagacagaaaccacttgcccgccgctggtttataaggattttatggacaatcaactcctcanaagaagaggctcaatcctagcttggatattggaacagatttcattgcaaataatcagattcctggcattgattttgccacagtccactcataccctgaccaatggttatccagttcaagtgaacaatatcagctctctttcttgaacaactggctcgatgcacacatccgagacgcgagaatcatcctccgtaagccgatactccttgccgaattcgggaaatcgtggaaagaccctcgtttcaacacttaccagagggaccaactgttcaacatcgtctacaacaaaatatactggtcggctaaaac

SEQ ID NO: 14306 - DNA, 349 bp, Gossypium hirsutum
  unsure (1)..(349): unsure at all n locations; Clone ID: LIB3145-009-Q1-K1-H6
cggacgcgtccgcccacgcgtgcgcccacgcgtncgaacgtatcgcctgaattggacccggaggtgggcttgagttttttaaacagtatggggaaattgaagaaggtccaatggggcttgataagcagacagggaaacctaaagggtttgctctttttgtatataggtcggtcgagagtgcaaaaaaagcgttagaggagcctcataagaattttcaaggtcatgttcttcattgccaaaaggccattgatgggccaaaacagactaaaggtgtttctggtgggcatcatcagcagtatcagcatcatcaccaagggcaacatcagagccagtctcattaccatcatgc

SEQ ID NO: 14307 - DNA, 415 bp, Gossypium hirsutum
  unsure (1)..(415): unsure at all n locations; Clone ID: LIB3145-009-Q1-K1-H7
aaacgacccgcgcggacggcaacaaatagggcannntnaagcatatatatctacactagattattgcccaatgcgtatatcggccgcttgacttcatagaagcggcacgtaaaactcaacgtgcaatgcacatgacgtggtttgcacgccgatcaatatcagccttatttatgcaaccccaggagtacgaagcgaggtttaaatgctgaagcagaagcaatattggatttgtttgttatgatatgatgtgtgttgatgggtggtagggtattacttttgaagacgcgttttattctgctgagtttagaattttattattataagcatagtacacaacgacctaattgtaagataaatgttatttgctaactcatttttttgttctgtaataaccatagaatttcggatgtcttta

SEQ ID NO: 14308 - DNA, 294 bp, Gossypium hirsutum
  Clone ID: LIB3145-009-Q1-K1-H8
cttgccttgttttgttattatctatatagggttttattttggttattaagcattttcccggcccattaaatctaatgttcgaattgctaaacaaataattcatagaataacatgtaatgttctgtccttaaaatataaaccttatttatacaaccccaaaaatacaaaacaaaaatttaaatgcttaatcataaacaatattaaatttctttcttatgatatcatctctcatttatgcgttataaacgtatcacttttgcagacgcctttttattatactcaaattacaattcc

SEQ ID NO: 14309 - DNA, 329 bp, Gossypium hirsutum
  Clone ID: LIB3145-009-Q1-K1-H9
aaaagaaggctcaattcacattcacatgagccctatttgtttagcatcaccgtttacgacacgcccggggatagaatgcaaaaccctgtctccaaggttgccgtggtgggaagcggaatttcagggtctgtttgtgccgctactttggcaaggaatggaatttcagtgaccctttttgactctgccaggggtcctggtggccgcatgtctcaaagaagagagataagtgaagatgggagagagctgttattcgatcatggtgctccttacttcacagtgacaaatcccgatgtgttgaatgttgttactgagtgggaattaaaaggcct

SEQ ID NO: 14310 - DNA, 356 bp, Gossypium hirsutum
  unsure (1)..(356): unsure at all n locations; Clone ID: LIB3145-010-Q1-K1-A1
nnccggcgatgggtttggatctaangcgatatggttatctcttccatacaagcgacacgcttattacttggtgaggtggtatttacagcagcgtggttatggaatcacttggcaaggagtttgacctggatggtaaccgggtaaatcaaggaatatctgtttatgggaataaaggaagcacagatcagcatgcggaacaagatcagctctatatgcaaaataccgagagttccgttcttgtaaccgccaaaaagggacaccttaaattggtggggcctctgtaactttttattaaccaacaagtggactttattccttaattggccacattaatgcttaacattaaactggtgggg

SEQ ID NO: 14311 - DNA, 295 bp, Gossypium hirsutum
  unsure (1)..(295): unsure at all n locations; Clone ID: LIB3145-010-Q1-K1-A10
cgcgggcgggtgattttcggacaattctcnaacgtatttgcaattcaattnaaaatcattcaccccgcccatttttaaaaaanttctaaccctcatatacannaattcttctcaaaattctctgttgccgaaatccatgattcaactgaagactttgacccttctttcaacattgcataaggagcatatccgaacgtttatagatatacccttcgtcacacttaaattgctataaaaatgctccatcaaaataacttacaaaggcccttgcaatttcaaaaagaaggtgatattt

SEQ ID NO: 14312 - DNA, 367 bp, Gossypium hirsutum
  Clone ID: LIB3145-010-Q1-K1-A11
aaattcatctgatctactttctattcactagtatacgcaaaactaaccgcccttggcttctctccaacagaaatggcacccgcttccttccatcacgagaaagtttgcgtgatggatgcctccggtcgcctgggctctaccctggttgaacgcttgctggaaagaggctacattgtccatgctgctgttcaaggccatgttgatgatttgaaactgaatggggtagctactgaaagggaaaagaagctcaaggttttccatgcagaccctttcgattatcagagcattaccgacgccctgaaaagctgctctggtttgttttacgcctttgagcccccacaagaccaccctgcctatgatgaatata

SEQ ID NO: 14313 - DNA, 345 bp, Gossypium hirsutum
  Clone ID: LIB3145-010-Q1-K1-A2
aaaaaactgatgcctctctttttgctctgctagggtttggaaccctagcgtccttgcgccgcgtctcatgcgatccggcctcgattccgaccccaactcaggtaagttttctttcctttgttacttttttttaaaaaaaaatcaaaacaaatgaaataaaaagaataataaaacgaaaaaatttcaccttgaatcaaaaacaatctgtattcagtgcttttttctatttcttgcgtattttctccgttcatcaatcgtcccttttacagatttaaaaaggccttttataggccgaaaaaaaaaataaatcgaggggaaaaaaaacaatattgcttgctggttttt

SEQ ID NO: 14314 - DNA, 254 bp, Gossypium hirsutum
  unsure (1)..(254): unsure at all n locations; Clone ID: LIB3145-010-Q1-K1-A3
taaactattttttcattctcaataccaaacccaatccccgcctctgatctaatcaagaggcggctcaaatccaaatccaancatnttatgaaagggatgaagaacatggcggaacgcttcacaagattgaaatctgaaatggaagaaataagcgaggaacataagaatatcagggaagggcaaaggcatgttaaagacaaattcggaatcattgaatcccagcgcgaggaattgaagaggggaactaggctcat

SEQ ID NO: 14315 - DNA, 227 bp, Gossypium hirsutum
  unsure (1)..(227): unsure at all n locations; Clone ID: LIB3145-010-Q1-K1-A4
caatttggcctttgcctttttttctggatgttttttgatgtctcaagtaacctaaagccgcttaagagctgacagctaaagctttantttgcccttgtttttttgtaagtaatgttggccaagggtgcgctagcccacggtggctattgatgctttgtcattcaagctgccaccgtgagcggcggatatattacataaataaataaagagattaatggggtatgtgt

SEQ ID NO: 14316 - DNA, 399 bp, Gossypium hirsutum
  Clone ID: LIB3145-010-Q1-K1-A5
ctttttaaaaccattattcttatgtggtttgctattaggcgtgcatctcgtgatataatcgtgctatcaagttactctccgtttgtgaaatatacacctcaatgcaaatggctcgaggaagaattaaacagggttgacaggaagaagaccccatggctcattgtgcttgtgcatgttccgatctacaacagtaacgaagcacatttcatggaaggtgaaagtatgcgagcagtgttcgaagaatggttcatccatcacaaagttgatgtaatcttttctggtcatgtccatgcttacgaaagatcctatcgaatctcaaatataaggtacaatgtatcaagtggtgaacgtttccctgtaccggacgaatcagctcctgtttacatcactgttggagat

SEQ ID NO: 14317 - DNA, 337 bp, Gossypium hirsutum
  unsure (1)..(337): unsure at all n locations; Clone ID: LIB3145-010-Q1-K1-A6
aaattaaaaacattccattacgccagcaggagcttgctgcctacttaacccactgcaaccttcaattaccacacctaagacttgccctgctgaatgcaatgactgtctgctacaaggcaaagaacctggctacggcaggtaactttgcccggcgactgctagaaacaaaccccacaaatgagaatcaagcgaagacagccaggcaagtacttcaagctgctgagaggaacatgacagatgcttctcagctgaactatgatttcaaaaatccatttgtgacatgcggngcaacttatgtgcctatttaccgagggcagaaggatgtatcgtgcccata

SEQ ID NO: 14318 - DNA, 345 bp, Gossypium hirsutum
  unsure (1)..(345): unsure at all n locations; Clone ID: LIB3145-010-Q1-K1-A7
gtcaactccgacttggactgctttctgacaggcaattgcttcagtagcaaaagcagatggaactccattgtgaatttctaaacaggataaaaggatttttccgtccgagtctctagccacaacacttgaggctgaccggttctgaaactgattatatgcaccatcaaaattaatctttatggaatcccactgtgggtgtgtccatctcttatnttctttcattatttctgagcttctttgttcaagaccagttaactcaatgatatagttactaacaaaagttgcaacttctatgcccatactaactatgccctcatgtatatttctgttctggctcccatatag

SEQ ID NO: 14319 - DNA, 213 bp, Gossypium hirsutum
  unsure (1)..(213): unsure at all n locations; Clone ID: LIB3145-010-Q1-K1-A8
gttttaaattggccttgtgagcaaattcttttattttaaatataccanataatccgatggaatggaagttctttgacgatattatcaattagaattcagttgttaaataaaaaatagtaaagggactagatcttttgaattaaaagtagtggtctaaatttcaaatgtgtgaagagtacaaggattgggagcataattggacttacttttttt

SEQ ID NO: 14320 - DNA, 261 bp, Gossypium hirsutum
  unsure (1)..(261): unsure at all n locations; Clone ID: LIB3145-010-Q1-K1-A9
gaaaacccgggccgacgccacgcgtccgatccccaaaaaaatattaaaaaaaattatctctcatattttcagatctgcttctaccagcnccttatctctcctttcagcatccaaagcttctcgcttttactctgaaaggcgagctgtaactgccgctgcaccagtttcacttggcggtaaagtgcctcttttggcttcagcttatggaagtactgcttctgccaatgcatctagagcatggctttcaagaatttttgctct

SEQ ID NO: 14321 - DNA, 138 bp, Gossypium hirsutum
  unsure (1)..(138): unsure at all n locations; Clone ID: LIB3145-010-Q1-K1-B10
gtgaantactaatatttacttgtttttctgtccagtgtgagcatctctgctatctccgatatattgtgactattacataattaatgtaaggaagtgagtcagattcctaatgaatgagaagaagctcctatttcgttt

SEQ ID NO: 14322 - DNA, 377 bp, Gossypium hirsutum
  unsure (1)..(377): unsure at all n locations; Clone ID: LIB3145-010-Q1-K1-B12
ggaagaattgcaatattacttaactcggagaactcgcttaagctatgatncggtcgatactcagtgtcgttgcactcgaatcaattgaaaatggagctatgaagtccgaaagaagctcgaaatggttagatttatcaaaaaaaaaaaaaaagttctaatgatagctagtattgtatatatattatatatatcagaaattagcagggaagtagaagagaggcctcaccatatatatatatcatttggtttccatgtgttctatttagccgacttcaaatggaaaccttcgatttgtaaggactggagcatgaaatctcagtatggtggtattatatatatantgtatatactaactcggagtcattcaatcaaatact

SEQ ID NO: 14323 - DNA, 366 bp, Gossypium hirsutum
  Clone ID: LIB3145-010-Q1-K1-B2
ctgaggcatatttcaggtggcaaacttctgttagagctcaaccgagtcctccgacctggtgggtacttcatttggtctgctactccagtttaccagaagcttcctgaagatgttggcatttggcaagagatgtctcgactaacaaaatcgatgtgctgggatctggtgactgtcaaaaaggacagattgaatgctgttggagctgcaatatatcaaaagccagcttccaacgactgctactacaaaaggtctaaaaatgcacctccactttgtgaagaatctgatgatcctaatgcagcctggaatgtatcccttcaggcatgcatgcataaagtgcctgaagattcaacagagcggggatccctt

SEQ ID NO: 14324 - DNA, 203 bp, Gossypium hirsutum
  Clone ID: LIB3145-010-Q1-K1-B3
cgcgtccggtcaggcgtaattacccgctgagtttaatcatatcaataagcggaggctttatgactgacgctcttgcttttaccggttcctgtacataaataatcccttttttctgccctctcgtatgaatatttgaacagttgcctttaagttgcaatttgctatgctatgatctttttcataaaaaagacaaattaaatact

SEQ ID NO: 14325 - DNA, 422 bp, Gossypium hirsutum
  unsure (1)..(422): unsure at all n locations; Clone ID: LIB3145-010-Q1-K1-B4
ttaaatttgttatcaacaccctttttggttcccattcaaaccccnncngctccgccaactttcatganatgcaggacacgcaaaagtttgctgcacagttgttgccaaattttgttgcctgactgaaatccaatttcacattgcacattgatgcactcatggcatggggtattatacttttacaatatttacttcatttcctttctaaacggctggggttattgggattactagtttgggaaattacccaataaggttctcattcattaatgatattatattgcccccgacattcaaaagatatatttgatgaacaagtttggttagcaaacggttttttcggctttatagatgggaaatattttgagttttagactgtcagagtttagacggttgacagatatatatatattttaaaataa

SEQ ID NO: 14326 - DNA, 303 bp, Gossypium hirsutum
  Clone ID: LIB3145-010-Q1-K1-B5
cttccgttaattttttttttgggactcctgtaattgaaagttgaaaaagccacgatgcatccggtgggtgcggttttggcggcgaggatgctatttaacacggcggcctcggtcagtgaatccgtcggagaagggattccgttcggatctccatggtggtttatctacgccgggatttcttgttttttagtacttttcgcggggatgatgtcgggtctcaccctcggactgatgtcgcttggtctcgtcgaactcgaaattcttcaacggagcggcactttcaccgagaaaaaacaagcagct

SEQ ID NO: 14327 - DNA, 447 bp, Gossypium hirsutum
  unsure (1)..(447): unsure at all n locations; Clone ID: LIB3145-010-Q1-K1-B6
aaaaaccgggccgacccacgccgtccaaacaaaaaaaaacaaaaaggcctccccttttttctttgctagggtttcaaaaccctagctgttgcgccgccatcgcctttcattcctccaccgaggacggtggttgtgacagcaacaaacaggcttttcagcccttgattgagccacgtttgaaggccaaaccttcaaagtctgaaaaatcgagataggaagacacctccccaccttcctcaggttcgaactcgacagcggagggaggatctccggcgaagcattcacggaaacccccgtaagttccctctttcttctttttattcttttttaaaatcgatgaaaaaatagatcaattaataaaaaatgatcgaaacgaaaaaaacgagaaaacgagattctaaaatcaacctctcttctgnttttgctttttcgattctttaatctgtg

SEQ ID NO: 14328 - DNA, 214 bp, Gossypium hirsutum
  Clone ID: LIB3145-010-Q1-K1-B7
aaaaaccggaccgacgcacgcgtacggtggatttctaacattcaaacttcaacatttctacctatacctcactcttcaaacggccgccctattattacatctggtgcgtccatatatcatcatctgcctttctacacctcttatttggcttcttacaactcccataacaagaactaaattcaaatatctaaacactgccaataaaaaccaaccc

SEQ ID NO: 14329 - DNA, 211 bp, Gossypium hirsutum
  Clone ID: LIB3145-010-Q1-K1-B8
ggtaaacattacgcaggcattgtctgaatctaatcaaattgaactcccaacttagcggggtatctatctctaaaaggtcatattatggttttagtccctatattttaattcatcataatttaatcttaaaaaaaaaaaaaaaaaaaaaaaaaaaaaaaacaaataactaacaaaaaaaaaaaaaaaaaaaaaaaaaaaaactaaaatatat

SEQ ID NO: 14330 - DNA, 371 bp, Gossypium hirsutum
  Clone ID: LIB3145-010-Q1-K1-C1
gctgatctcatgtcaactatttggaaacaaatggctgatgctgggatcaagtacattgcgagcgacactttctcttactatgaccaggtgcttgatgccacctcaatgctcggtgctgttccaccgagatatgggtggaacggaggtgagatcagattcgatacttacttctccatggctaggggaaatgcctctgtgcctgctatggaaatgaccaagtggtttgacactaactatcacttcattgttcctgaattgacacccgatgttaacttctcttatgcatctcacaacgcagctgatgaatacaaggaaacttaatcgcatggagtcgacactgtacccggccttgatggtcctgattcatactt

SEQ ID NO: 14331 - DNA, 149 bp, Gossypium hirsutum
  unsure (1)..(149): unsure at all n locations; Clone ID: LIB3145-010-Q1-K1-C10
cccactctttctttaactcctnncctgtttcatanatctatccctccctttttaccccgccctgttaataaaatcgaccacctctaaaaacattcttnttaccatanaatccttttatatatccacccacacactctttcaatttcttt

SEQ ID NO: 14332 - DNA, 419 bp, Gossypium hirsutum
  unsure (1)..(419): unsure at all n locations; Clone ID: LIB3145-010-Q1-K1-C11
aaacccggggggacggaggcgggcggttgtttancatcatccctttctctttctctttctctatctctctctttctactcggggagttcttattcacctaggagggtcatntactttcataaatacgtatacagcttgctttagagagagagagagagagagagagagggatttctgctaaagcaaaagcaaataaaaaaaatgaaaaaaccttgtgttgggtgattgttaaagggtcaattttgtgtctataaatgtctatctggtaaagcagaaaactgcctttttttgcaacacaaaactgtagctctacttaacctatattcatcaaaagaaggggaagagttggaattcaagagcttagcctttctcatagttcaattccttgccagctttgaaccatggagttccctaatcta

SEQ ID NO: 14333 - DNA, 442 bp, Gossypium hirsutum
  Clone ID: LIB3145-010-Q1-K1-C2
ctgggaatcaataccatatccagaggagaggtgactagcaggcgtgcaatcttttgagattgtattatttggctcacgcaccctggatctcaaacttttgtcccttttcttttgaagctgcagctggtagaagcactctataaacatacaccccgctgttgtcgtcgatcattgtctccacgattttttttcttcttttactggcatacgaaacataagctgattaaaagcgataaagagaaagaacgcgaattcccgtttagtatacggtatgactgactttgacgaacaatcgtgtaataccatcccgattctgctggttccatttgtatgaaataagaaaactattataagaaaaaaaaatgaaaaaaagaatgtagcagatgtatggttggtgctgatatgtttgaactatttgcatctctggtttttttcttctttt

SEQ ID NO: 14334 - DNA, 405 bp, Gossypium hirsutum
  Clone ID: LIB3145-010-Q1-K1-C3
ttcaactccaaatcttgcttgtcatttggatcttcaatccgcgtacctgcatcttcagcacctcagtggcctaatgatgggaaacaaactacagtcttcgcaagccatacgcagcttaacgaggttgctgcagagaaatcatcgaattctgtagcggttgttgacatgaaacctaaagttgcattgcctgaggaagatgataaaaaatccgcagagaaggctattccagatgctgcggcaatttcagaattcatggcacaagtttcagaccttgtaaaacttgttgattcacgagatattacggagctgcaactgaagcaatcggattgtgagcttgtcataagaaagaaggaaagcttgcagcagctggaatcagcatctccaattgtcatgcagcagtacatg

SEQ ID NO: 14335 - DNA, 285 bp, Gossypium hirsutum
  Clone ID: LIB3145-010-Q1-K1-C4
cttccgccaacccctccgccaacccttccggtcggatgtgatgaggtttttacagagggtgaggcgcggggaataccgccagcatccatcaattgttagggtcaaccatcctactcgccctgacaaggcacgccgcttgggttataaagccaaacaaggttatgtggtttaccgtgtccgtgttaagaggggtggtcgcaagaggcctgttcccaagggtatcgtgtatggtaagcccacaaaccaaggtgtcacccaattgaagttccagcgcaacaaacggtc

SEQ ID NO: 14336 - DNA, 277 bp, Gossypium hirsutum
  unsure (1)..(277): unsure at all n locations; Clone ID: LIB3145-010-Q1-K1-C5
taaatttccggaatcgtttgcttagcttagcttaccttcaccgccccggcaccgtttcggataatgtaagcctnctttcctctggtttcacatgaacttcactcctccgcctcacctttttgttttccccgtttcttcacgcgatttattattttgtttgattattttcttatcgacaaattgatattttcttttagttcatgaactttgagtaattgattaaattgtaattattgaatcatttgaattagagcggggaacttattattatgtagct

SEQ ID NO: 14337 - DNA, 416 bp, Gossypium hirsutum
  unsure (1)..(416): unsure at all n locations; Clone ID: LIB3145-010-Q1-K1-C6
cttccgcggccccttggccacttttccattaaccctttcacttgcaaaacccttcctaactttcccgcttgttttccgcgtagtatatcaaatggaaagagtgacaaagttggcatccgagaagccagtggtgatcttcagcaagagttcgtgttgcatgtcccacaccatcaaaacccttttctacgactttggtgtcaaccctgcggttcacgaactcgatgagatttctagagggcgtgaaatcgaacaaactctttcgaggcttcgttgcaacccttctgtcccagccgtcttcattggtggtgaattcgttggtggagctaatgaggtcatgagtcttcatcttaatcgatccttaattccaatgcttagaaagttggggcactntgggttaatccaaaaataatccacta

SEQ ID NO: 14338 - DNA, 309 bp, Gossypium hirsutum
  Clone ID: LIB3145-010-Q1-K1-C7
gagaattctggagccttctttattttctctaaatctcagtcatccattgaacaatgtcgcttataaattatatcccaaacccaaatcctttccctcaagcaatttgagtgattctttctttttcttgtggtctccaaagcatctctgttatatcggttattttctctcaagaactgacgaaaaaatccgaatagattaaaacttaagaaagatcaaaagatgttcggaagagcacctaagaagagtaataacaccaggtactatgagattctgggtgtttcgaagaacgcttcccaggatgatttgaag

SEQ ID NO: 14339 - DNA, 352 bp, Gossypium hirsutum
  Clone ID: LIB3145-010-Q1-K1-C8
cacggcaattagcaggcgatttacattcgagtaacccaaaatttcgggggtggatccgcctccgcctgcgaacagttgtcaccggaatcggaaattcagataagtgaagatgaatggagaagtccccaacataaagaaatgggttgttttctatcctgtttatattaattcgaagaaaacagtagctgagggaaggcgaatcagtttggctaaagcctgtgaaaatcccacttgtgttgaaattgctgattgctgcaaccatctcaaagtccctaatgccattgagattgataaggcgtaccctcgtgatttcatgcaaagagggagagtgagggtccaattgaaaaaggaa

SEQ ID NO: 14340 - DNA, 308 bp, Gossypium hirsutum
  unsure (1)..(308): unsure at all n locations; Clone ID: LIB3145-010-Q1-K1-C9
ctgaatatggtgttgttccnataaaggttaaacacatgtttgatgtctgttaagtctcggcatatgttgattgtgagcgggtaacattggtgtttatgttttgagtacatcttagatcttgttagatctgttggatttataaacaaagtgcttatggaatttgttcatctcaattatacaccttgcttctttttttttttttttttttttgactttcttcaaagattcgtccattgtggaggcattacttccaaaacacacaaggactcatttttgtggttgatagcaatgatcgtgatcgtgtggtc

SEQ ID NO: 14341 - DNA, 458 bp, Gossypium hirsutum
  unsure (1)..(458): unsure at all n locations; Clone ID: LIB3145-010-Q1-K1-D1
cgcccacgccgtccgggttcgcaaggattggtatctacacttagggaggaggtcccagaaaatgaagcgcgggatcatntgagttcaaaggggtgaggaccaattcantttccacacggaggcgtagatggaaaggaaatgatgntgtccatcnagcatctagtgcagagaanttgttagcttttctgttaagaggcataaggagtggtatgctatagtgacattgcaaatggttagaacatggatcggtttgagttgaaaagtgacagtttatcagatgtagatgatggcaggaatagtatagtcaaattttgcacttgttgtgaaggtaatagtgtacgatgtccactatatataacataaattatgtaaaatccgaatcaatcagggtgtccttttgtcgcgtgtacggaggtagtcataccttcgtattgtgatatgtgaatgtaagttaaata

SEQ ID NO: 14342 - DNA, 395 bp, Gossypium hirsutum
  unsure (1)..(395): unsure at all n locations; Clone ID: LIB3145-010-Q1-K1-D10
aaaacctttagagttaatcaaacntttgtgtattatattcaattgcaaaaagttccccgcnctatttaacaaatgaagttccaacctaacattgtanttgataaacctaaacaagcaaccctgccgcctccgccgccacttccacgattctgggcgaggaagactattgcagacagtgtaacaaaccgagagattgctaagttctggaggcagaaacatgccgaggaagaggatcacctcctagctgccatcaaagcttcagcacgcaaaaaggcctgcaatctttcggaagaaaactacaaatgtttcatggaatcactaaatgattaaaattattaaacttaacagaatatcacaaccccaacaaatcataacaattgccaataaattctttt

SEQ ID NO: 14343 - DNA, 442 bp, Gossypium hirsutum
  Clone ID: LIB3145-010-Q1-K1-D2
tccgggaacccttattgttttatggaatgttgcaaagaagtgtttcacggttggggttatctggcgtacagtttcagatctatttgccagtattgtcccagtccggggtgcctcaatgtctcccacatttaatcctaaaaccaattccttgcttgattcattgagtgatgatcgtgttctggtcgagaagttgtgccttagaaagtacaaattttcacacggtgacgtgatagttttctgctctccggataatcacaaggagaaacatataaagagaattgttggcttgccaggtgattgggtcgggactatttacgacgtggtgcatattccagaaggacattgttgggtcgagggagacaactcagcttccagcttagactcgaggtcttttggccctgttcctttgggtttggttaaaggaagggtcacccatattttg

SEQ ID NO: 14344 - DNA, 402 bp, Gossypium hirsutum
  unsure (1)..(402): unsure at all n locations; Clone ID: LIB3145-010-Q1-K1-D3
gttcaaaccttgggaaaatttcaaaacggcgaagatgactgagctgttgcaggctgttcaagaaaacatgagagaaaaccaagcatctcggatcgaacagccagccatcagttctgaaggaaccatgctcagagataaagcaacgcatgattcaaacaagcagtcataagtttggagtgtggaatgttgtagagtgttttagtataatgaaatagactatgtaaaatgttttaaaatcctaaacaaggtgaaggagctagacttccccgaagggctaacctaaccttaaaagttagagaaggctgcagcatcggattttctttgctctaaccctnttaagattagaactgttgccattacttagaataaaagctttcgtttntcagtttatagatatatata

SEQ ID NO: 14345 - DNA, 380 bp, Gossypium hirsutum
  Clone ID: LIB3145-010-Q1-K1-D4
ccaacccgtccgcccacgcttccgcgaatgtgatgtttagatacggttatttgatccgcggttaaggattgtgaatttaactgtaaaacttgatatttacatgctactgcatggtggtttgactgttcagaaggtgcgcgagctgctctgaatcatgcagggactatgcttggattctacccagttagggtgctaccttcgaaaacagctattgcaccagttaatccaacatttttgccgaggaatgaagatgaacgccagatgtgtgcaagaactatctactgtacaaacattgacaagaaggttactcaagctgatgttaagctcttttttgaaacagtctgtggggaagtttatcacctgaggttgctgggggacta

SEQ ID NO: 14346 - DNA, 87 bp, Gossypium hirsutum
  Clone ID: LIB3145-010-Q1-K1-D5
cttacactgtttttgaactttccaacattatacaagacatgcacccgctctttttaaaaaaaaagggccccccaaataatataaaaa

SEQ ID NO: 14347 - DNA, 365 bp, Gossypium hirsutum
  Clone ID: LIB3145-010-Q1-K1-D6
ggttgaaacaaaatcttcaacggagccaaaaggaagatcatgccagacgcgggtcagaggcgcagcagcaaatctattcctcaaaacttcttcaagctttgagtcaggtcagtctcggtactccctctccttcggctccacgcggtggtcgagctgtccgtgaagccgctgatagagtgttggcggttgctgctaaagggagaaccaggtggagccgggccattttgacgagccggcttaaactgaaatttagaaagcagaagagatcacagagaggatccgctgctgccgttgctgccgcaacaaggactagccggtcgaagaaaccgagagttagcgttttgaaattgaaagcgaaaagtgta

SEQ ID NO: 14348 - DNA, 365 bp, Gossypium hirsutum
  Clone ID: LIB3145-010-Q1-K1-D7
gccattggcattcccaaaagatgtaacattaggaacaggcaagctggaaaaaaatggcgaagctacacagtcccatgagacaaactaataccttatacaagaagagaagagagagctaataaataaacaagtgcagcattgcatttgcatggtcattgctgattcatccttccaaagcaattgtttatgtcgtttttaatgtaatcttcagcagctaagttacattatcatcttaattgagcaaatgctatttttatgctcactttccattatgttagtattatttcaaaaataatttctctttctctttcactaccgatttgtatttgatatcttgataatatataaaacttacttttatattt

SEQ ID NO: 14349 - DNA, 423 bp, Gossypium hirsutum
  Clone ID: LIB3145-010-Q1-K1-D8
cccacgcgtccgggaatttcacgtgtaatatagacttctcttcctgttgaggagaggagaaaggtcttaacaaagaagggatttgaggtgatgacctccgatgatgcaggacggtttgtgtgcaattatgtttactatcactcccttcgctttgccgaacagaatgggatcaaatctctctttgtccatgtccctctcttcttgaccatagatgaggagacccaaatgaaatttgccgcttccttgttggtggtactcgcttctctatgtcagtaacatactgcatccactcatctttatgtccagaaattgatatggttgtacggttgtatgtgagtggtggatggaaggatgcatgtttgttgaaagtctttaataaaaggataagtgtatgtgaatgaataaaaactgtattttagcaca

SEQ ID NO: 14350 - DNA, 282 bp, Gossypium hirsutum
  Clone ID: LIB3145-010-Q1-K1-D9
aaatacaactcttgggttacacaaactcgttctcaagtactctttgaagctccaaagcgtaagttgattatcattgccaacaactgccctcctcttaagaagtcggagattgagtattatgccatgttgtgcaaggttggagttcaccactacaatggaaacaacgtagacttgggcactgcttgcggcaaatactttagagtgtgctgcctcagcattattgaccctggtgactctgatattataaagagcatgcccggtgatcactaaactatgggggga

SEQ ID NO: 14351 - DNA, 404 bp, Gossypium hirsutum
  Clone ID: LIB3145-010-Q1-K1-E1
ccaacccgtccggaaattaatcagccttggttgctgcaacatgattcattgtggagcatgtcgaaaatagacgcctgagttattaccacacactgagatggtcaataaaacttttactggaaaacacaagcgaagttctagctctggggttcgacgagaagttcatgaggacatgggaatactatttcgattactgcgctgccggttttaagacaggaactcttatagattaccaacatgtattttcaagggccggaaatttcggtacactcggagatccatacaaaggtttcccttctgcatattccttcatcgatgattgaacaaagtgtggttcaacattgatccaaagtagcatacaaaattatcaccacatgccaatgttaagaacaatctatctccct

SEQ ID NO: 14352 - DNA, 449 bp, Gossypium hirsutum
  unsure (1)..(449): unsure at all n locations; Clone ID: LIB3145-010-Q1-K1-E10
gaaaacccggggcgacgcgcacgcgtccgctctnctncaattgaaaaggagaaagatgtacacaagactgtataaatatacaacccgccccgttctgcttgcggtcgtgtaccanatatgattgcaaagaaatatgtgccgacactggatttgcagggaagcttaatttaacgttagatctgaattctgaatagctgatgtgagtgctataagtaatgctgattcatgcaagctaaaatagttttattgttgtccatagatttattacttgtaatgctgggcagtcatttgcatgcttcctgactcctggaatgaatattcagcttattggagacgctaatgattttggaggaaaattattttttactgaaatgctacctttcgttttctgttgggaataaaaaaaaaanaaannttaataaaaataatattaaatttataaataaaat

SEQ ID NO: 14353 - DNA, 337 bp, Gossypium hirsutum
  unsure (1)..(337): unsure at all n locations; Clone ID: LIB3145-010-Q1-K1-E11
attattcttatttttttttttttcttaatttttattttttttttaatttttattattttattttattttatttttttatatttttttttttttttttttatatttattttttttttttttaatttattattttttttttttttttttttttttcatttattttttatatttttttttttattttatttattttttcttaattatttttttttttttcttatttttctatactttatttttctttttttttattnttttttttctattcttacacttattatttttttttattattttttattatcctttttttttatcttatttttttttttttttt

SEQ ID NO: 14354 - DNA, 223 bp, Gossypium hirsutum
  Clone ID: LIB3145-010-Q1-K1-E12
atatcacgaaaatctaacgaatggaaatcttcaccactatccaaccatcaaccctggcttaagttccgctcgttatcctcgttgcctttctctcttacaccctgattccgacaaagcttaatggacaattacttcaattttggacgatgccactgcaattgctttctcttatatctgcggaaatcttattcaatacatcgctttaatactccgatccctttcc

SEQ ID NO: 14355 - DNA, 371 bp, Gossypium hirsutum
  unsure (1)..(371): unsure at all n locations; Clone ID: LIB3145-010-Q1-K1-E2
caccccccagaaaatccattccaaccccgcaagtttttccaccgccgttgtttaacaccgtaatcggtaccattcaagcctttctcaaactcaaactaagccatgcattctctattttctaaatatacaaagaaaatcactaaaaacagttctcaccacagacaaagcaaactagaataactctataataccttgctccgtcaccgaacaccgccttcgcctgccgtccaatcagccaccggttttgactcgcggcttgtcctcgactttgatggcttccccactatccggattttgactagtgctttggttttcaaagatctgtaaaggatggctcctccttttaattgcttctccggnttctttctttc

SEQ ID NO: 14356 - DNA, 432 bp, Gossypium hirsutum
  Clone ID: LIB3145-010-Q1-K1-E3
aaaacaaacccctttttccaaacttggtttccgggggtggaagcctcaaccttataacgccctttttttttcgggttccaaagaatccctcaaatgttggtgtgagaactataaatatagagatagtaggaggcagccaccatgaccttgttcatcactgtgtcgttggaagtattttccttcacaatggaaacgtaaaattgcagaattcaataggagaatacgtctcgttgatcagatcatgcggaatctcggaacatggaaggttaaagtcggtataaaacctccaatttgaggttggttatttttgttcactattattgttttctaaacacacgatatagttactacatgattcgttaccatgtctaaaacgtacttatattggtttgcattacatcctccttattaaataaagatttgccttttatt

SEQ ID NO: 14357 - DNA, 311 bp, Gossypium hirsutum
  unsure (1)..(311): unsure at all n locations; Clone ID: LIB3145-010-Q1-K1-E5
tcggcgagccccggccgaaccgcccttcgttccaattcttggtggtagtaccaaatattcaaagaagaactttaaaggccgaagaggggaaaggttccatgtgaacggcacttgcacatgggttagtcgatcctaagagacggnggaagcccgtccgacagcgcgtncagcgcgagcttcgaaagggaatcgggttaaaattcctgaaccgggacgcggcggctgacggcaacgttagggagtccggagacgtcggcgggggcctcgggaagagttatcttttctgtttaacggcctgcccaccctggaaa

SEQ ID NO: 14358 - DNA, 323 bp, Gossypium hirsutum
  Clone ID: LIB3145-010-Q1-K1-E6
ggcggtggattgtaattaaacaattcatttaaaaaaaaccaacactgggtcacgggaagatcgacgtctgattatcgagaacgctacaaacaggcaagtcacttattcaaaacgaaggaacggtttattcaagacagcccaagagctcactgttctttgtgacgcccacgcttcattgatcatgtactgcagcactggcaaattccatgagtttcttagccccaacatctctacaaaagggtgtttcgatctttaccaaaagaccacacggatcgatctatggaactcccattatgaaagaatggaataaaactacaggagct

SEQ ID NO: 14359 - DNA, 428 bp, Gossypium hirsutum
  unsure (1)..(428): unsure at all n locations; Clone ID: LIB3145-010-Q1-K1-E7
cccacccgtccggttggattgagatcatctaggtccgtgagcgtggtactggcaccacgcctgtttctgaatatctgcgtggcggtaatagggataggggcggtggcgatgacccaaaatgcgttggccacggaacggcaggacagttgcccggacaaagttagtgggagtataagctgcttcttaaattgcgaaattttcagttgtcttgcaggttgcttcacgaatccaagcatgggatgcggcctaatgtgttttgcccgaaacgtcggttgcaccactacctgctccattattgaatttccagacccatgaacatcacctggcaaaagccgtatatggacgctgtttctcactttatgttattaccgtctntgtaattattacaaaagcaaaaatatgatgatagacaattaataaagtaattg

SEQ ID NO: 14360 - DNA, 402 bp, Gossypium hirsutum
  Clone ID: LIB3145-010-Q1-K1-E8
ctgatactccttttgagaagaggatggatagatattccatgtcttcttctttgcccccgcatttatagattcattggttttcaattatcaactcttgtgtgacggttctccttttgactggtttccttgcaacaattctcatgcgggtcttgaagaatgatttcattaagtacggtcaagatgaagaagcagctgatgatcaagaagagactggatggaagtatattcatggagacgtattccgtttcccaaagtacaaatctctctttgctgctgctctcggatctggaacacagctgttcactttaacggtcttcatttttatgcttgcactggttggtgtcttttatccatacaacagaggagctctatttactgccctggtggtaatatatgccctta

SEQ ID NO: 14361 - DNA, 235 bp, Gossypium hirsutum
  Clone ID: LIB3145-010-Q1-K1-E9
accaactataacttttctcattcaaactaaaatccctgcaccatgtcaccaacaaaacataaaaaataattatattaaatgccggccttactaaaaacccaaccttatcacccatacactccacgtaataacattcatatagactcacccaaattcaaatcactcaccttccttttacaaccttcttaccgttaaaacccacaccttaccactctaactcccctcacaataaatc

SEQ ID NO: 14362 - DNA, 436 bp, Gossypium hirsutum
  unsure (1)..(436): unsure at all n locations; Clone ID: LIB3145-010-Q1-K1-F1
cttccggggtagggttcttccaggaccagcccattgttgaccccaaaaacatggaccctattcctccgattgatgcactcaaccctaccgagttgaatggacccggtgttggcattcacgaagatcatgttgtcccaaaaggtgctgaaattggtactcttggttttggttttgaaggtggtcctgataaatgttgttcttctggatgttccggtaattgtaatcctggtggtttcgttctaccatttcctcaaattccagaaatcccaagaattccagaaatcccacaaatcccacagatcccacaaatcccacaaattccactaatcccacagatcccacaagtcccacagatcccacaagtcccaaaaatcccactaatgccaagacagtcnggatgtgagagtggagagtgttgccgtcaaggttgtggtgg

SEQ ID NO: 14363 - DNA, 439 bp, Gossypium hirsutum
  unsure (1)..(439): unsure at all n locations; Clone ID: LIB3145-010-Q1-K1-F10
aaaacccggggcgacggcaggcgggcggtggtgtttatcagttgttttgcggtctatgtgtctataaggattctttgaatgcccggctttatatataaggttactgaatttangatgattgaaattcttttcgtttatttccttaatgaattgagcaaacctctaggttatattttaggatctgttgacaagtggcttggcttttatatgaagaagattgtttgaactgttctgtgagttctatctctctcatggactggaatgccaaaaccccgttgcaatgggagtgggagaacctaatgatgttaaatgcgacaccaactgaaattccaaggaagctaagatcggcagagtgggatattgagggcgaggaagagctggactcttgggctctctattcttctggtgctgctgctggaggtagtggtggttctggatc

SEQ ID NO: 14364 - DNA, 368 bp, Gossypium hirsutum
  unsure (1)..(368): unsure at all n locations; Clone ID: LIB3145-010-Q1-K1-F2
tcctatgcatttttcttggagaagggtcaaattgctcaattagttgatccttacctagntgaagaaaaagcaaacccagcatttccatcanccttgaaccagtttgggaaattgaccctgatacctcggaccattaatggattcanntatgggttggtgaacaaatgttgaagccagagacagtatnnggtagtggatcccaagctaatagttctgaaccaatcnncagggttcctgaagaaaaanaaccaaactcatancccctctagagatgnaggcagaacatatgcagaattgcgaatgctgttcgtgtgctgtcaactttaggtttcagtatcgatgcagatttgatcctggagacaagtgag

SEQ ID NO: 14365 - DNA, 284 bp, Gossypium hirsutum
  Clone ID: LIB3145-010-Q1-K1-F4
attgttgaatgtaataccacatttgctaaaatacttcattttaaatgtcatcccagctcctttaaaaaaaaaacccacccaaaaaaaaaaaaaaaaaaaaaaaaacaaaaaaaaaaaaaattccggccgtcctaacacgtcccaacaaccaaacgcgcccctcctacctccacctaatataaatccccccccatctccaaacaccttccaaccattaacaacctgaacactccaaaaacaccccccctttcccaactaacccccctttcccccccatccccaaa

SEQ ID NO: 14366 - DNA, 216 bp, Gossypium hirsutum
  unsure (1)..(216): unsure at all n locations; Clone ID: LIB3145-010-Q1-K1-F5
gggggaagaggaaaatcctttaatgccggttcaaggtccggcttggacgtgtctaatatgttggcggggtggcatacntttaacacattgccgtttgctgggaaaagtgcggtttatatcgatgatagagcgaccgtgctgcctaggaagttggagtggtcgggattcgttttgaattctangttgcttttggaaagatggagataagccggaatg

SEQ ID NO: 14367 - DNA, 315 bp, Gossypium hirsutum
  Clone ID: LIB3145-010-Q1-K1-F6
gtccgggaaagatgtcagcaggagctgaaaaaggctgccatggaatggggtgtgatgcacctgcttaaccatggcatctccgaggagctcatggatcgtgttaggaaagttgggcagaaattctttgaactccctgtggaggagaaagagaagtatgccaacgaccagagctctgggaatgttcagggctatggtagcaagcttgctaacaatgctagtgggcagcttgagtgggaagactacttcttccatcttatttttcctgaggataagagagacttgtcaatttggcctaaaatccccagcgaatacact

SEQ ID NO: 14368 - DNA, 427 bp, Gossypium hirsutum
  unsure (1)..(427): unsure at all n locations; Clone ID: LIB3145-010-Q1-K1-F7
gaaaagctttcacttgtcctccctgaaacacccccttatgttccaaggcagtttggccgctgtgctgttataggcaactctggggatcttctcaaaacgaggttcgggaaagagatagatagctatgatgttgtcatcagagagaatggtgcccctattgagaactatacagaatatgtgggcaagaaaagttcatttcggcttcttaacagaggatctgccaaagctcttgataaagttgtagagttagatgaaacaaggcaggaggtcttgatagtcaaaactacaattcatgacattatgaaccagatgattcgggacattccaataagaaatcctgtatatctcatgctaagtgcatcctttggttcagctgcaaaagggacagggcttaangctcttgaattgctctctctatatgtgattc

SEQ ID NO: 14369 - DNA, 318 bp, Gossypium hirsutum
  Clone ID: LIB3145-010-Q1-K1-F8
gtagttgttcaatggctcgacccccgattagacaaggatgtcgcatctccacaagcccgccacgatcagctcaatggtttgggtgctgattgaattgcagtgctggagattcaaccccaccagggtcttgcccaatttttttaggaaggtcatgcttttgtttgatactcctgaacaacctgaaaacgaaaggacttgcaagttgagttgctctgcgtgagacaaggctgcaataccgacatcggtgattgcacaccttgacacatccaagtcgctgaggaaaacacaattttctgcaactgcagccaaacttgcatc

SEQ ID NO: 14370 - DNA, 112 bp, Gossypium hirsutum
  Clone ID: LIB3145-010-Q1-K1-F9
gaaaacccggcccgacccacgcgtccgcccacgcgtccgcccactcctccgcccactcatccgcagccacacaaagaaaaaaccccgcaaatataaaaaaaaaaaacgccca

SEQ ID NO: 14371 - DNA, 386 bp, Gossypium hirsutum
  unsure (1)..(386): unsure at all n locations; Clone ID: LIB3145-010-Q1-K1-G1
gcaaattgtgcggagatctggtaggcgtaagaagcacatttcaggaaggtgaatttaagtgatgaggaggaccttggtagccttccaaaaaagactaaaacaagtggatcaccctgtgccaatgaagaaactaaagaaatgcctaatgaagacgagtctaaacagaaaaatcgagctggtgaagtgaaatatcagaatgcaagggatcatagagaaggtaagggttttaagtcaagctttttaaaggaaatgagtgacggagatgatcttaggaaacctgngaaagcttatgctgatggccttaaggaaaatttaaaccccattgttgatgattctgtgtcagatttgagccaaaaagaaacaaaggagccccctgtttttgcatg

SEQ ID NO: 14372 - DNA, 211 bp, Gossypium hirsutum
  unsure (1)..(211): unsure at all n locations; Clone ID: LIB3145-010-Q1-K1-G11
cgggccgacgcacgcgtgcggtagaatccttaagcccttgccgtcccctttctttttcccaattcnaaaatcaaccgcncgcctccaccaatctacctccacccatccacctccnntcctccacnnctccactcaattcccnaatcanaacttaaaaccntccttctacctcttctacctttaaatttcaaacaaacaacttacatttaaa

SEQ ID NO: 14373 - DNA, 447 bp, Gossypium hirsutum
  Clone ID: LIB3145-010-Q1-K1-G2
ccggccgacccacgcgtccgcccacgcttccttttttttttctggggttaaggcatgggttcatcgactgcaccacttcgggccaacaatggtactaccattgatcaaggaattgcttacattctccttttacttgctctggcgattacctatctcatccattgatgatctttttttatattttatttttattgggatatgagctataaatgatttttttatgtattttctccatatatctaatgagagaaattgcagcaattttgtatttttcttctctcctatctctgtgttgtaaatctatgcagaaaataaatccagttgagaatttgagatcacataatcattttactatatatttttttgctccttgtggaatttgaaatatatttagattcatatgaccaaatcgatagatcaaaacgtttgtatattagcagatgattc

SEQ ID NO: 14374 - DNA, 338 bp, Gossypium hirsutum
  unsure (1)..(338): unsure at all n locations; Clone ID: LIB3145-010-Q1-K1-G3
tcctttaaactggcttatcttctactatccaaattgtttcacctccgcccgttttaaacaaacatggcacctttatactncttcacgtattccttcaactggctcancttctactatacaaactgtttcacctgctgtagtcaatgcacaaaccttgcagcgttctactgcttcagggatcccttcaactggctcagcttctactatgcaaactgattcacctgctgtagtcaatgcacaaactttgcagcgttctactgcttcaaggatcccttcaagtaactcaacttctactctgcaaactgcttcacttgctgcaatcaatgcacaaaccttgc

SEQ ID NO: 14375 - DNA, 239 bp, Gossypium hirsutum
  unsure (1)..(239): unsure at all n locations; Clone ID: LIB3145-010-Q1-K1-G4
tttggaatttcacagatgctanctggtgatcatggtggaaagtagatcattgggatccccgcctgatcaaatgacttttatcttcacttctgcttacttgatggttaaccacttgaatgtcaaataatgctcaagaacctattatttgcctatgctttagggaataagaggcatttatttttagtatataagtagtaaaaacctgtcatccttctttaggtcttgaaggaggcctttag

SEQ ID NO: 14376 - DNA, 387 bp, Gossypium hirsutum
  Clone ID: LIB3145-010-Q1-K1-G5
tgaagagaaaaccttagtcgtttggaattcaaggttgctaaactattggaaagcctctccgtactatcttgaagaacatgtttcaaagaaaagccagagtatggatattgaaagattttctgactgggggaagccaaagaacacctcaaaacgggatagccttaaccaggttctacaactccaatctcataattttcctaaagaattgattggaggtttgcaactgaaaccacttatggaaatatttacctgattgtaatgatatatttttatatattgtacttgagagctttcatctttccctttgctggtttggttacaatcgaacattggaatttcagattcaaagagagcgcagcgaagtgccaaaagaatgcgatggaatct

SEQ ID NO: 14377 - DNA, 406 bp, Gossypium hirsutum
  unsure (1)..(406): unsure at all n locations; Clone ID: LIB3145-010-Q1-K1-G6
ggtgttccaatntaaaattggcattgcaggggataaataagatattggagaccacgggaccgcagctgaatcttgattattcggaatggacgcangagttaaacgagcagaagctgaaattccctttgagttacaagacctttggtgaagctattccacctcaatatgcaattcacgttcttgatgaattaactggcgggaatgcaattataagtaccggtgttggccagcatcaaatgtgggctgctcaattttacaagtataagaagcctcgtcaatggttaacgtctgggggattgggtgctatgggatttggattgcctgctgctattggagctgctgttgcaaacccggaggcagttgttgtagacatcgacngtgatggaagttttatcatgaatgtgca

SEQ ID NO: 14378 - DNA, 255 bp, Gossypium hirsutum
  unsure (1)..(255): unsure at all n locations; Clone ID: LIB3145-010-Q1-K1-G7
aaaaaattttttacattctaattttactttctcttnccattacctatatcatccattcatcatcttcatctatatattattttcatcnccatattaactataaatcatttaattatatattttctccatatatctaataacacaaattgcaacaaatttaaattactcttctctcctatctctncntatgaaatctatccaaaaaataaatccaattcaaaattttaaatcacataaatcatttactatatattt

SEQ ID NO: 14379 - DNA, 309 bp, Gossypium hirsutum
  unsure (1)..(309): unsure at all n locations; Clone ID: LIB3145-010-Q1-K1-G8
ggctgangaaaaaggtgctagtgtgttgtttctaggcctcatgaatcagggtgaagacgtaaacatgtacagtgaggtgtatgtgaagaagcatcctcagttgaaagtgaagttagtggatgggagtagcttggcagttgcagttcttctaaatagcataccaaagggaacaacccaagtactccttagaggcaacttgactaaagttgcttttgcagtcgcctttgccctgtgcgaaaagggcattcaagtcactgtattgcgtgaagatgaatatgagaagcttgataagtcacttggcaccaaatc

SEQ ID NO: 14380 - DNA, 225 bp, Gossypium hirsutum
  unsure (1)..(225): unsure at all n locations; Clone ID: LIB3145-010-Q1-K1-H10
cctatgcatgcacccttcacaacgggcggcgtcatacaaaactcctccggcctcacaattcctcaactanttcactcatatctaaaacaaaacatcttcctcacataacgactttaacacatataacatctcctactaaccttactcccacaaccaaatcaaagatccaccacataattaaatcacttcacatatcaaaaataatctcaccatttcatattataa

SEQ ID NO: 14381 - DNA, 274 bp, Gossypium hirsutum
  Clone ID: LIB3145-010-Q1-K1-H11
cccacgcgtccactcatataataatatataatatatctatataataatccaacatatatgtatatccccgcgcgtttttttactattattccacctaaataatttttatcatacacttctcttatatataacatattaatcaaataatataaataaaataataataaaaactttaattatttacttaaataatacaactaatacatacattattacacaaatatatattatattaattatacatatattttatttttgccatacacttcccact

SEQ ID NO: 14382 - DNA, 428 bp, Gossypium hirsutum
  unsure (1)..(428): unsure at all n locations; Clone ID: LIB3145-010-Q1-K1-H2
gtccgaacaagtccaatctgttgtggatggggccatgctgatgtgcactgcaactgatatggcggggctttgtgggggtaatggggaggtttgctattccaaatatggatcatatccattgagagggaaatattgccacgaaatggctttgaggatcctcctagcctgcattgagagtcatgcgaaccggtacaagcgttatattgttcctgttctctctgttcagatggacttttatgtccgtgtttttgttcgtgtatacacttctgcaagtgcaatgaagaatactccccttaagctctcatatgtctatcaatgcattggttgtgattcttttcatctacagcctattgggagaactgtttctaagaataccagtgtgaggtatctcccangctttgcacctgttgtccctcaagagtgtagtg

SEQ ID NO: 14383 - DNA, 444 bp, Gossypium hirsutum
  unsure (1)..(444): unsure at all n locations; Clone ID: LIB3145-010-Q1-K1-H3
ctaccggttgcttattccaaatctttaaaaccctgttcctgttcccaaggaatacgttcacatcccgattcattatcggaacggtgggaaaagcctgaccactgttcagggattgaagaaagaatttagctataacaaaattctcaaggacctcaagaaagaaatttgttgtaatggcactgttgtccaggacccagaattagggaaagttattcaacttcaaagagatcagaggaagaacgtctccactttcctcgttcangctcgtattgtgaagaaagatagcatcaaaatccacggtttttaagtcttagctacgagagtttcccggagaattaaaaggtctatcatgttctaagccggaagagctacccgatgaagtattagttatataggtggtgtcatattatctataatgttaagctgatactctgatatattgca

SEQ ID NO: 14384 - DNA, 467 bp, Gossypium hirsutum
  unsure (1)..(467): unsure at all n locations; Clone ID: LIB3145-010-Q1-K1-H4
gacgcacgcgtgcgcccaattgctagggtttcggcgccgcagctctgtggcttttccagtcccctttgccctggtcgctgacttgcangctaccacggcaccacgcgcgccttcatcatccgtcgtagctctgaccggatccccaaggatccgtttggccttggacggagaggcaactgtcgattaagtcggcgtcgatcgacaggtaagagatcctcccccttctttatactcgtatcacagataaagaaaaataaataggagataaataaaaaagaaaaacgatgaatgaacaaccttgaaatctttgctttctctatttgattgcttgatattcgtttgttttttggtgcgtatctctgtgtttatgttgcgttcgtaaatgtgcgtaaccaaatacaatcgatcaattcctggctttatagccgaaactaaaagggaaaataaaaaatcaaaatacaatcttt

SEQ ID NO: 14385 - DNA, 400 bp, Gossypium hirsutum
  unsure (1)..(400): unsure at all n locations; Clone ID: LIB3145-010-Q1-K1-H5
gcgcccacgcgtncgtgcttgggtatgtgaccaggatgcctatgcatgcagtggtcagaaaggctgagctcaatcaatactattcatgcatgagaattggtcaacgagttcactcatatctaaaacaaaagatcttgctgagagaaggaagttagcagatttaactgtcggtcctgtccttactgtcacaactgaagcaatgttggagcacaaaaagaaattacttcaaatttcagaaattttcgggccatttcagattataacggattataagaaagatcaattaccaatggtattggatgctttggaacgaatgcatgcacatctaaccgctgcttgtgtctcaaatgatcccttcttcttgcaagatgtgatccgaaaaacggtgaatgggacaacc

SEQ ID NO: 14386 - DNA, 377 bp, Gossypium hirsutum
  unsure (1)..(377): unsure at all n locations; Clone ID: LIB3145-010-Q1-K1-H6
gcggctgttttgtatttcatcttgtcttttccttttccttttttcgccggcattgtttgaacatgccgttgtgcgcccgtcaattccagttaaatatggtgacttttgtttttcaaaaaaaaaaaaaaaaaaaaaaaaaaaaaaaaaaaaaaaaaaaaaaaaaaaaaaaaaaaaaaaaaaaaaaaaaaaaaaaaaaaaaaaaaaaaaaaaaaaaaaaaaaaaaaaaaaaaaaaaaaaaaaaaaaaaaaaaaaaaangggggggcccttttaaaaaaatcaaattttatttacccgtgaatgcaaataaaaaattttttttaagggaaacaaaaaaaaaattaacgggccgcgttttaaaaacgtgggaatggaaaaa

SEQ ID NO: 14387 - DNA, 376 bp, Gossypium hirsutum
  Clone ID: LIB3145-010-Q1-K1-H8
ctgttgaaaaacctgcactgcagccaagcttttgaagtaaaactcattaactgttggcgattcagaatccagattttccttcggcaaacatttttccacattagaagcaacatcagcaactccattaggtagcctagttcgtgccatcaacaaatgctttgcatcatatgagggctgaaggaataaccagcttgaaggatttgatatctccataatttcaaacttgtgtctatgtagcccagtgctttctaacagctttagaagttcagacaacgccctcttcttcccttgacttctgttaacatccatccaaaagtcaccacaatccatagtcgttctacctattttttcaagtgtgtgccacaaatcattccac

SEQ ID NO: 14388 - DNA, 415 bp, Gossypium hirsutum
  unsure (1)..(415): unsure at all n locations; Clone ID: LIB3145-011-Q1-K1-A1
gccgagtcaagttctcgcccaccgcctccgctgatttttgccggatctgtcccgtataccgtgtcggatcgtgtcgacacgagtactcatcccaaattgctctgagcccggattgttgtttggcaatttcttcatggttcaaatggttcagatgtgctagcaacaaaataggccttgtttttcatcgtcttgtttcagtatatccctcgatttcttagagttatacacttaacatcagaaatgaaaaggacaacagatgtctttgctgaaactgcttgggctggagctgcatattatttggtattatatatgctttgtagtcatgtgagaagctgcccattgtgatattgagagctgagcttgaccatttggcttccctagcagttntaaaacagttaaatgacatcttaagtgc

SEQ ID NO: 14389 - DNA, 270 bp, Gossypium hirsutum
  Clone ID: LIB3145-011-Q1-K1-A10
ggcgtgtccatggcttggattattatggactgattgaaacgggcgaagccaacggacgttgggcatgtgtgagaagagggaaagggttctgatgtgactatcaatggatctgagggggagaaaaaccttgacacacactggcaagagaggttgaagggtcaagatcctttagaattaatgacggctaaggagaaactaaatgctgctgctgttgaagctttggatccttttgtcctgaaaatcaaggatgaaaagtatggttggaagtat

SEQ ID NO: 14390 - DNA, 422 bp, Gossypium hirsutum
  Clone ID: LIB3145-011-Q1-K1-A11
ggtggatttgctttaaaaaaagagatgctagacgatagacggttccccaaaatgcggctaaatttgcaacgtctcctgcaggtgattgcccatggggagcaagtatttcctcgagtgaaggaaaaatgttcttctaaacattggtttgcaagtgaagacatcggctcccttgaagagcttattggacgcttgaggaggctgaaagagaatgtagggtttctagcaaatcgtgtgactgcaattcaagccggtttggatagctggcagtctgagcaaattaacagaaaactctattatctctctttcctctctataatattccttcctttatccgtcatcaccggagtgtttggaatgaacgtggggggagttccatggactgtgcaaaaggatcctgcactaaaagatggtttccgcaatgt

SEQ ID NO: 14391 - DNA, 380 bp, Gossypium hirsutum
  Clone ID: LIB3145-011-Q1-K1-A12
ggtgagtcaacacagcaagtacttttgctttttttgtggaaagtatgcagtgaagagaagagctgtttgaatctggggctgcacggattgcgggaaagttaaagctggtggtgcttatactttgaacactgccagcgctgtgacggtgaggagtactattagaaggttgagggagcaaactgagagttgagctgctgctgactacgttatgttcacaactttggtatgatgttcgtgtatgtgttggctacaaaccagttgagtcattttgttgacaattatggcgcttagttcttaattttatatcttaactctggtgctggagctttatttaaagttaaaatattttgagtatttctaggtttcatgaaatgtccttg

SEQ ID NO: 14392 - DNA, 290 bp, Gossypium hirsutum
  Clone ID: LIB3145-011-Q1-K1-A2
ctctggtcgaattatacccccaaaagtggatccaacagcatgcatcaagtccttcttatcacattcgggtggacacgggccaaacgtaagccaaaacagagaataaattagtcgaatcttgtttcgctcaattgacttcaatagccgatcaaaaatagttaattgttttcgaaaaaaccatggatgcccttccataatatgctcaaaatcattctcatcttcgaaagatattatgaacaagttttgccctgcaacaaggatctcaaacttcttttttgttttgcagatgc

SEQ ID NO: 14393 - DNA, 406 bp, Gossypium hirsutum
  Clone ID: LIB3145-011-Q1-K1-A3
ggcttttctggagttatttggctaaaaagaatcaattgatgtagaggtgactggaaatcatccccaatttattctgtttcacatttgctccattctccaatcacagccgatctttatcgcctttgtgtatgggagtcttgataggcaaaaaatgaagattccttcggagggatttgagtttgtctattctgccagggcatttttcatggatggccatcgaggattttaacaccattctctcgccggatgaaaaaaaagtggttggaaatgattgatcacataattatgttcatagttgaattaatagattaagggggaatgaaaaattgttagttatatgaattagatataactcccccttttaatttagtccgtctttggttggccaatgtaacttgtcatattt

SEQ ID NO: 14394 - DNA, 418 bp, Gossypium hirsutum
  Clone ID: LIB3145-011-Q1-K1-A4
gttttcctcttttaacggcaatagcattttctaacatagccttgtcatacatttatttaagaaaaccatttccggaaaaggaatgcaactaataaatactatgctgttgtacttaaccgagatctgcgagtgttgttcatctacaggttgacatccctgttctcatcgattggtctcgacattttttcatgcttggatattatacgtttctctcgacctacatggatcctgttataaggtcatggttaaatggtttgccatctaaagtgaggtatgaatggaagaggcaccttgaggcttggaaatatggatctggtttagactacaggctatgaatttcgagttgaattgatgctctttttcagctttcaaacttaactcgaaagaccacccaaccagcaattgaaattcattgaaa

SEQ ID NO: 14395 - DNA, 424 bp, Gossypium hirsutum
  Clone ID: LIB3145-011-Q1-K1-A5
gggtattgaggaacggtgcggtgcggaaactgggcgatgattttgagcgagtggcgaagaatagcggcttggtgagcaaaagagaggaactttagcgatgggataggtagcgatgtgaagaagatggtggaggaggttaacaatgaaccggaaagtgaaggagataaggagaaaacagaggcgcagagtgggagtagtaggacttcaccaagataggcaaggcgtagccgctattaaggttaatttcaagtgtatgcaacgtattctgtcgccacctcaagagctcgatgacctatacaaatcgacttgtggaggagactcgaggaatattagccaacattccacaaaaagtatattgagatgtgggagtgtagcttcaaagagtaggcaacattgccgtagaaggccaaaacgagtacctatc

SEQ ID NO: 14396 - DNA, 306 bp, Gossypium hirsutum
  Clone ID: LIB3145-011-Q1-K1-A6
cccacgcgtccgctcagattccatcctacttgaacggcgagttccctggtgactacggatgggacactgccggtttgtcagctgaccctgaggcctttgctaggaacagggctcttgaggtaatccatggaagatgggcaatgctgggagcactaggctgcatcaccccagaagtccttgagaaatggcttaaagttgacttcaaggaaccagtatggttcaaggcaggagctcaaattttctcagaaggtggcttggactacctatgcaaccccaaccttgctcatgctcaaagcattctcgctg

SEQ ID NO: 14397 - DNA, 408 bp, Gossypium hirsutum
  Clone ID: LIB3145-011-Q1-K1-A7
aaggcatacttggggcgtccctggaaacaattcgctaggtctatcataatgcaatctaaaatcgacgacatcattcaaccagagggttatgccccaatgacaggtaccataggaatagacacttctttcattgccgagtttggaaataggggacccggtgctgataccagccgtagggtagcatggaaaggtataaaaaagatagatataaatgaagccaacaaatggactcctcgcgtctatcttgaatctgagacttggattccgagttccggcgttccctatagtcccaacatggtccctggagtttaaacagcttattattgataccaacgccattagtatgcttattatcatatcattgttctaattatgtcgtttttaactaattaattaaacagttttttt

SEQ ID NO: 14398 - DNA, 278 bp, Gossypium hirsutum
  Clone ID: LIB3145-011-Q1-K1-A8
ccaaaaaaaaggttaaacatttaccttaagttggtttccacggaaaggtataaaaaataaaaaatccttgaagacgtctaaaggaatgctagggtctatctaaaataagggacttgttaaaatagttaaacagttgggtataaaaaaatcttggaacctgaagaagatacagattattgttgataccaacaaaacgagaaagcttattgtcctatcattgaggtacaaaagtttttttcaacgtactatataaagatgttttttaaaattatttcacc

SEQ ID NO: 14399 - DNA, 120 bp, Gossypium hirsutum
  Clone ID: LIB3145-011-Q1-K1-A9
catatacaacataaatagctgataattttcttgatgctgtaaagcattttctccagaggtatttatttgtagaatcatcagtgtttgttaattatagtagaacttttattattgtggccc

SEQ ID NO: 14400 - DNA, 442 bp, Gossypium hirsutum
  unsure (1)..(442): unsure at all n locations; Clone ID: LIB3145-011-Q1-K1-B1
tttgatttgtttctaaggatttaatctctaaaccttcttcccatttcttcattacattgttcaagaacaaacaaaaaaaaaaaagaagcaaaaaaacatggccaaagttctgttgttcattgctctatgtgtgcttccagctttggttagtgctacacgcattctgaataaccaattggtggttgaaggctatgtgtactgtgatacttgccgtgctggttttgaaacccctaagactagaaggctagctgatgccatggttaagctggtatgctccgacaggaagaccggcggagttgttttcgagaaggagggatataccgacaaaaccggaaaataccagattcgtgtatccgaggatcacttggatcagatctgtgatgcagttcttgtgaagagcccncagcttggatgtgccacaatgtcccccggtcgtgaacgt

SEQ ID NO: 14401 - DNA, 372 bp, Gossypium hirsutum
  Clone ID: LIB3145-011-Q1-K1-B10
gtccttactaaaggattattctttaatgaatggaactttgagagatcaagaaaaagagattgaacagttgaggaatgatcttcttcagcttaagcgcgagcatgagaagcaaaatgttcttgtgctaacactttcagggtttttagctgatcaaatgaggcttgaaaacgagaagctaaaagatgaaaatgcatcattgaggaagaatgccaatcctaattgtaacttaccacagcttgcagaggagaatgcaaaattaagaattgaaaataaagtactcaaggtgcagaatgatgctttatgtgggaagattatcagtgacgatgacaagaagcgtgaacaagaacggttagctaaattaccactactatt

SEQ ID NO: 14402 - DNA, 388 bp, Gossypium hirsutum
  Clone ID: LIB3145-011-Q1-K1-B11
agtaactataaaaagagtatcaagaaggaagcttgctggaccatctcaaacatcagtgggggaaatgtagatcagatacaggctgtaatcagcgctggcatttttgcccctctagtccatctacttcaaaacgcagagtttgaaatcaagaaagaagctgcttgggcaatttcaaatgctacctccggcggcacccacgaacagataaagttcctggtgagccaaggttgcattaagccattgtgcgatcttctaaactgtccagacccaagaattgtgacagtttgtttagaaagccttgagaacattctgaaggttggggaagctgaaaaaaatttgggtcacaccggagaggtcaatctctatgcccagttaattgatgatgctg

SEQ ID NO: 14403 - DNA, 424 bp, Gossypium hirsutum
  Clone ID: LIB3145-011-Q1-K1-B12
gcaaataataacaatcatcggcggatccccattcaccggtaattaaacgcgggtcggtgtgatttccggtgcgtttaataatcactttatacgccatggacatgaagaaggtctccaccgccatcattgttgctgccgcctcaatgagcgtcgtcatggctgccggtgcaccatctcctgccccttcagccggtggttctagtcctagctcctctcctggttccgctccagcatcaggaccggattccagcgtggctgccgctaccttgcctgttcttggatcattggttggggctttcattgtttctttgttttcttacatgctgcagtaagctacatgtatgaaaaatcaacatgtcaacgaatattttattattttattattttgtgaagaaacatgtgatgaatattggaaaaaatgaat

SEQ ID NO: 14404 - DNA, 423 bp, Gossypium hirsutum
  Clone ID: LIB3145-011-Q1-K1-B2
gtaattttcttcctttctgccaaggctgccgcttgggagacaggatgaagaccattctttcttccgagacgatggacatccccgatgggattagcatcaaaataaaagccaaggttatcgaagttgagggtcccaggggtaagctcatccgcgacttcaagcacctcaacctcgacttccatctcattaaggacgaggagaccggcaagcgtaagctcaggcttgaggcttggttcggctccaggaagactagcgccgccatccgcaccgctctcagccacgtcgagaacctcatcaccggcgtcaccaagggataccgttacaaaatgaggttcgtctatgctcactttcccatcaacgcctccatcactaatgccaacaagtccatcgagatccgtaatttcctggcgagaagaagtgcgt

SEQ ID NO: 14405 - DNA, 362 bp, Gossypium hirsutum
  Clone ID: LIB3145-011-Q1-K1-B3
atagcacacctactatttcacaggccttaagatccatctcaaaggccagttactgatactgcattgttgaagtctcatggcaagatccatggctctatcacgaatccacctctgatgatgcctgaaaaagtcattggtcacgaagaaactgatgccgtttcagataaaaaagtgccgacaaacagtaacagcaggtaactgggaatttattaatatctttgtaaaatttaatctatttgtttatgataatgtataatggtggtcgctgtgagtccagccgacacataagatgcaggtttccttccctgttttagacccttttttttttatatcttagacaccccatggtcttttattagtct

SEQ ID NO: 14406 - DNA, 437 bp, Gossypium hirsutum
  Clone ID: LIB3145-011-Q1-K1-B4
attgagaattgaggaaatcaacgacccagcaaggcagtggcactgcccagcatgccagggtggtcctggtgccattgactggtatagaggccttcagcctctgatgacacatgccaaaacaaaaggagcaaaaagggtgaaactccatcgtgaacttgctgaactcttggatgaggaattgtgtagaaggggtacttcagttattccttctggtgaagcttttggcaaatggaagggtttaaaagatgaagaaaaagatcatgaaatagtctggccacctatggttatgataatgaacacaaggctggaacaagatgagaacgataagtggattggtatgggaaaccaagagcttcttgattatttcagctcatatgctgctgtgaaggctcgacactcgtatggtccacaggggcatcgtgggatgagttgtctga

SEQ ID NO: 14407 - DNA, 434 bp, Gossypium hirsutum
  Clone ID: LIB3145-011-Q1-K1-B5
aaaaaaatacaatcggtgccttcttggctttatagccgaaactaaaatagaaaaatacaatatttccttgctttgctgctgttgtgtttgtcttgttcacaggtacggagcagaggacatgcgctggcccttggcgtgaggcatacggggctgtgctggcgcgggtatgggggctgttctggagggtacagaggtagctggcgtgggggctagggtcgctgttgcggcgcaagcaggagccactagggtttctgctttggttcttggtttgggcattgggcttgttgggccatccgggttttaggttagggttttaagtttggttttttgtttttgtgttgtaacgggccgggcaaattttgggccttacaaagactaaaggccaaacacacgcacgccactgtctcgccagcccgtatctgtgttaacacatg

SEQ ID NO: 14408 - DNA, 385 bp, Gossypium hirsutum
  Clone ID: LIB3145-011-Q1-K1-B6
aaataagtgagactggagtactgacagagaacgaaagagaaggccaatattacacttttgaattgcgtatactttttcttttatatacgaatctcctttggtatagatacatctttatgaacttgggggtgttgcacagtgataatgaaatcaaacctcttattctttaaattttatgggaggaattgcatctgtctctctctctctcctctcagccggacgaaatatatgaaatgtacgttggtataaaaatgcatgtgactgatagactgactattgcaattcagagagattggagcggtgtctgcaaccgattctgagctcatagaagtgctcatatgaagcttctaaaagatataagctctttcgaatacgaagatgtgcg

SEQ ID NO: 14409 - DNA, 423 bp, Gossypium hirsutum
  Clone ID: LIB3145-011-Q1-K1-B7
tgcttttccattttttacttactggagtatttctggctacatgttgttggttcttgacaaatgcttaccttcgggaagaggctccaaatagtcatgttgttgaacaacgggttgaatggctgtatgcatttgatgtgcactgcaattctttcttcccgatgtttgtaatgctttacgtaatacattattttgtgtcaccgcttctggtagcccatggttttatacctgaacttctgtccaatctgctgttcatggtggcagcttcttactatcactaccttaactttttaggttatgacgtacttccctttttggagagaacaacctttttcctctacccaattggtgtcataattgttctatcccctatcttgattttaagtggcttcaatccttcaagatattttatgaatatgtatttta

SEQ ID NO: 14410 - DNA, 433 bp, Gossypium hirsutum
  Clone ID: LIB3145-011-Q1-K1-B8
agaggatccatgcttcgactcttctatgaatggtgaaaatcagttaaatctgctagatgcaaatgaagggcaaaagtttgagattttggagctagagagtcagattgagaagaacaacttaattttgaagtctttgcaggatcttgattctacattcagaagattagatgccttagaacagattgaagatgcattgacaggcttgaaagttattggctttgatggaaactgcattaggctgtcgttacagacatatattccaaaagtagagggtgttttgtgccaaaacgtgagtgaggatatttctgagccatctgaaatgaatcatgaattgctggtagaaattgtggatggaatcatggaggtcaagaacgttgaaatgttcccaaatgatgtttacataggcgatatagttgacgcagcaaagtctttc

SEQ ID NO: 14411 - DNA, 276 bp, Gossypium hirsutum
  Clone ID: LIB3145-011-Q1-K1-B9
tcgcccactcttcctgcaagcaacctgttttttctctcttcctcttcattatacttcagcggattcacatttactagcatatcttaacaaatccctttgcagcatttttacacagattccatctgggtctttctcattcaatggagaatccacactcacccatttctatcccagatacttcttctaaaccttacaagaaaaactatgttactactctaatggaagccgctagtcttctctctccttaaggaagatacctattttacctcccatttg

SEQ ID NO: 14412 - DNA, 419 bp, Gossypium hirsutum
  unsure (1)..(419): unsure at all n locations; Clone ID: LIB3145-011-Q1-K1-C1
gcctcccagtcttgatgatgatggtttgattagtttgttttcagcttatggtgatattgtgatggcaaaggtaatcaaggaccgggttactggactgagtaaagggtatggttttgtgaagtatgctagtgttgacatggcaaacaatgctattaagggaatgaatggtagtcttctagagggaagaaccattgctgtgagagttgctggcaagccaccacaacctgcagtgcctcctggtccacccacattgtcaatgcccagttaccctgtctctagtcagccagttggtgcctatccatcacgacaatttacaactggaggtcctattcctaatgctgcttctgctagttatgcaggaaatccagttccatggggaccaccagttccttctnnctccncttatgccccttatgccc

SEQ ID NO: 14413 - DNA, 421 bp, Gossypium hirsutum
  Clone ID: LIB3145-011-Q1-K1-C10
cccacgcgtccgctaagctgagctcttcctagaggaaaaaatccaatggagaattgaaggcaggaatcccacctccgatccgataacgccgtaacctacgaatcaccctacccactctacgccatggccttatcttccacgcccgccgtcacccatctcaactaccaacgcatcgctctcggcagtttcatcgaggattacactaacagagtccacataatctctttcgaccctgaatcacttaccctcataacccacccatctttgtcgttcgaccacccttacccacccaccaaacttatgttccaaccccaccggaaatcccctttctctttctcctccgacctcctcgctttattcggtgactacctccgtctctgggaagttgggcactcttctatcgaacttatcttcgttctcg

SEQ ID NO: 14414 - DNA, 66 bp, Gossypium hirsutum
  Clone ID: LIB3145-011-Q1-K1-C11
agctgaccctccactcttaaattagaaatatctctcatgttccagtagttccggagtgatgcatat

SEQ ID NO: 14415 - DNA, 395 bp, Gossypium hirsutum
  Clone ID: LIB3145-011-Q1-K1-C2
aatgcactaattgttgagggaacctggcgaagaatagctaaaatactaccaggacatgcacaaatggaactatggggcctggtgatatcgaacattgcaatggaaatggtaactagagtagaacctgatcatgatgtgaatagacgaatttttaaggggacctaacttaacctctactgtttatttgaaatgggatagaggtcatacaaggtccctaaagtgattgttaaaccattcctctactttgtcagctgatctaattttgcaggcagttgattttcacgaatgggacaatgaaatgatgcaagaaaattaattccatgatttgttgtgtttggtattggtgaatgaacatggatacactaattgcaagtagggggtgaagctagaatttt

SEQ ID NO: 14416 - DNA, 421 bp, Gossypium hirsutum
  Clone ID: LIB3145-011-Q1-K1-C3
cccacgcgtccggaaaaaaaaatggcaggaagattgagtaatgtagcatcaaagatcatgggcggaaacggcatcgtttcacgctccgctgcctcctctctccgtctccgttccggcatgggtctccctgttggcaaacatattgtgcccgacaagcctcttcctgtaaatgacgagctaatgtgggacaatggaactgcctttccagaaccttgcatcgatcgaatcgctgatactgtcggaaagtatgaggcattggcttggatgtgtggtggtttgagcttctttgcatcgttgggattcttagcttggtggaatgataaagcctctaagattccatttgcacctaaagtatatccatatgacaacctgcgagtggagcttggtggagaatcataggtagatctgtatgagcaattgt

SEQ ID NO: 14417 - DNA, 434 bp, Gossypium hirsutum
  Clone ID: LIB3145-011-Q1-K1-C4
gcaggataaccctgatcttggctatgatgcagccaaaggtgaatatgtcgatatggtaaaggctggtattattgatccattgaaagtaattagaactgctttggtcgatgctgcaagcgtgtcatcattgatgacaactaccgaagctgttgtagtcgaacttccaaaggatgagaaggatgttccggcaatgcctggcagtatgggtggcatggattattaaggttattccccctaacaatacactgattttaagtgctttcctctaatctatttccatttcctcaacatctgtgagaaaaagaatatccgagtctcgatgtctaagttggaaggtggttttggtgataaagggtcaacaggactctcttattgttgttgctagaaagaacgaactagtttgtattgggccattttatcttgaaataaatgga

SEQ ID NO: 14418 - DNA, 431 bp, Gossypium hirsutum
  Clone ID: LIB3145-011-Q1-K1-C5
aagatacaagaaagcatagtgatgaatgacaataaacaatttcctcccaaaatcacacaggattacaagctaacataattgtgtatattctctacatagtgaataacacaatgtagcaacttaggtatctttttgagggttgttgatcggaactctttagtccctctgtctgaaccaacttcatcatcagttcgagattttaacctttgctttttagttttaccttgaactacttgacctgttgatgttggtttattcagcactggatgtactgtttcctttgataccaccaacccagtactgtttaactgcaactagaattttttctggcacaaggggaccatcctcgtgatcattcatcttggtgtcccatctcatgcctccagcaattttcctaaccttggttaggacatcgacatcatcccggaata

SEQ ID NO: 14419 - DNA, 435 bp, Gossypium hirsutum
  unsure (1)..(435): unsure at all n locations; Clone ID: LIB3145-011-Q1-K1-C6
cccacgcgtccgcttcttcttcgtccaactttgtgtctgtaagaaaattcccttgttcatgtttttttctattctaaacggtaccctcacagtttgcagagatgcagctggaatcgctgggaacatctttgctttcgggctgttcatatcacccatacccacatttaaaagaattatcagaaaccaatccaccgagaatttttcgggattgccttacatatatgcccttttgaactgcttgatctgcacgtggtatggcacgcccctggtatctcatgacaacgtactggttatgacggtcaattcaatcggtgctgtttttcagattacctacattgtcaccttcattgtatatgccgataaagagaaaaagatgagaatgctnggaatgctactcggagtttttggcctactggcgatcatagttgctggtag

SEQ ID NO: 14420 - DNA, 355 bp, Gossypium hirsutum
  Clone ID: LIB3145-011-Q1-K1-C7
gtcaaactcacatatagaaagaagctgcatctccctgaactaaaaagtaagagctgcaactcgctccaaataatataactataatctattgttctatgtatgtagtaaatattactgattggtattactacatttggacgaacatatactaacggatttcatttatctctggcattccaagtgcaattgtacatgacaaagttagtcagtgccaaagtaacctttacgtcttactgattctctttaagcaatagacttgacgcgtggaggtttgaactacttcgcaccggttggatccttaacttgaatgaatgcataaacctataatatttcatattgccctaacgtttattct

SEQ ID NO: 14421 - DNA, 153 bp, Gossypium hirsutum
  Clone ID: LIB3145-011-Q1-K1-C8
cccacgcgtccgtaaaaaataaatcaacataacaatagaacataaaaaaaaaaaacggtaagcgaaaaaaaaaccaataaaaaaaaaactatggctgtctgtttttagtaaaaagaactgattgccctaattacttgtgcacggtcttatact

SEQ ID NO: 14422 - DNA, 380 bp, Gossypium hirsutum
  Clone ID: LIB3145-011-Q1-K1-C9
ggagtttcgaagaagagatcttaattccggaacaggtggctttaccggaaacggggggggattccggcgagtcgaggccggagttagggtttctgtttgaagcttcggatgatgaactgggtttgccaccgagtttaccggcggttgaggtggagcagagatttgagaccgcctttgatgtggatgaaggtggagggtcaggtggcgttggatttggggaaatgatggggaatgagttcccgattccgatctacgaaccgtttgaattcggaatcggcgttgactcagataccaataacagtttccatagtaataataccggcgatttcgtggcgttaggaggtttgtttgaaccggcggctgatatttcggagctgacg

SEQ ID NO: 14423 - DNA, 410 bp, Gossypium hirsutum
  Clone ID: LIB3145-011-Q1-K1-D1
gagatattcaagtgcggtcacaaatgtagtaactcaaactctttctgtcattctatctgttgttgctacactcacagtaacagctctgcttgtgaccactatactgcatgcctttgtccaacgagacctcttccccaatgacattgccattgctattagcgacagaaaaccaaaatctcataggaggtggttcaatcttattagacatggaagctcagagcataatgcagacattgacactttcttgaaatttgcaaatggcgacaccaaagacatagaagctgggctgaaaatttccagtgcagaagctaaatgagtttagaaacttcatgcatgtgccactgtgatcagccttaggttcaactttcatcaggttcttgcctcttaagcagtcagacatgcgaggaacg

SEQ ID NO: 14424 - DNA, 400 bp, Gossypium hirsutum
  Clone ID: LIB3145-011-Q1-K1-D10
gttttaacagaaaggatccgtttactctttagtctaactaatttgtccgcttttttagaagataggggcaagatgcaatctgactattagcactgatactttttcctaaataactactatatgtaatagtcgggattcagatgtctcctcgtatcgccgcacgtatgaatttggtctcaattggtactcgatcattttgcctcaaaccaaatcctggtatgtttggtgatccaggaaagagtcggaatcccatttttgatcaccacactcgagtctcgagtccagttagcatagaactgaactatactacaagagctctgcatagcattgaaagcggagaaaacaagtttggcacaatagtagttgataagtctatatgatttttaatagacaaattttt

SEQ ID NO: 14425 - DNA, 339 bp, Gossypium hirsutum
  Clone ID: LIB3145-011-Q1-K1-D11
gagtgtacaacagagcctcgggttctttttactctaactaatgcgtgccttttgggggaggattctggcactatgccacctgactattatcacggccactttgtggtaaataactactatatgtaattgacggaattcaaacctgttcttatatctgcaaacgtttgaatttgggctgcatagatactcggtcattttgcctcagacctaatcctggaatattatatgatccatgcaggagtcaaggatccatttgtgcatcccacactcgagtctcaaatgcaagtagcattgaactcgactatactacacgagctctgcttaaacatcgatagctga

SEQ ID NO: 14426 - DNA, 371 bp, Gossypium hirsutum
  Clone ID: LIB3145-011-Q1-K1-D12
tcccactcctccttaaaaaaaaaaattttttttataaaaaaaaaaaaacctttttaagaaaaattataaaaaaaatacaaacctactattatcacttacacttttttctatatcactactatatataattattctttattcaaaactcttctcctttattcacacttattaaattagtctcaatacttactctatcattttccctcttaccaaaaacttctatatttaatttatccacgaataaatttaaaatcccttttttcatctccttacttcaaatctttatatcattttttctttttaacttttactttacttcatttatcctttttacatccatctataaaccctattaaaaccaactctatttt

SEQ ID NO: 14427 - DNA, 428 bp, Gossypium hirsutum
  unsure (1)..(428): unsure at all n locations; Clone ID: LIB3145-011-Q1-K1-D2
atggacttaaccatgttacctaccttattgaacagaacaaggcacaattggttgttatcgctcacgatgtggatcccatagagcttgtagtctggcttcctgctttgtgtagaaagatggaggtcccctactgcattgtcaaggggaaagcacgattgggatcgattgtctacaagaaaactgcatccgtcttgtgcttgaccacggttaagaacgaggataagatggaattcagcaaaatcctcgaggcaatcaaggccaacttcaacgacaagtacgatgagtacaggaagaagtggggaggtggtatcatgggctcgaaatcacaagccagaaccaaggcaaaggagaagcttcttgcgaaggaagccgcacaaaggatgacttaagccaaccattactccctttggtaccaagtcanattactc

SEQ ID NO: 14428 - DNA, 436 bp, Gossypium hirsutum
  Clone ID: LIB3145-011-Q1-K1-D3
tattgtgctgtattgacaattaactcattcgttgtatcagctggaataattcgagtttttgggcaagaaattgctgaaattcctttagttgctacaagcatggctaaccatggaaagggatacttccagctgttattctcttgtattgaaaagctgttggcattcttgaatgtaaaaaatatcgttctcccagctgccgaagaagctgaatcaatctggacagataaattcggtttcaagaagttaagacctgaccagctcagtgaatatagaaaatcatgctgccagatggttattttccaaggaacttcaatgctacagaaagaagttccaaccaatcaactcgttagcagcatcgagcgcacagaattatacaaacatatgaaccaaggaagatcttattttctagagtgaagatgataaagaagtggagctc

SEQ ID NO: 14429 - DNA, 174 bp, Gossypium hirsutum
  Clone ID: LIB3145-011-Q1-K1-D4
cccacgcgtccgaaaaaaaaaaaatgattaaaaaaaataaaaaaaaaataataaaaatatgggggaaaaaaaataatgaaaaaagggttaaatgataaaagaatgaaataaatatgggggggggtggttgtagggtgtcatatgtttagtattgaatacatgtgaggattattg

SEQ ID NO: 14430 - DNA, 345 bp, Gossypium hirsutum
  Clone ID: LIB3145-011-Q1-K1-D6
cccacgcgtccggaggttacaccaaaggccatccgattaaggaagagatatctggatgtaaacaagcgcaaagccatgagtaaaaaggccaaaaattgagtcttctcctaacatactataattttgtaactatagttggggttgggttcaatttttgtccccacaatttatttatagaatatcaacgatattatcttttttatgacaataataaggggcaaagaggagttcatgttttgtctgtgtaattgccaaagaaacaacaatggctattattattattattaagaaaaaaaaaggggacacaacaatgctacaactcaaaaaacacaaccagtgaaaagg

SEQ ID NO: 14431 - DNA, 435 bp, Gossypium hirsutum
  Clone ID: LIB3145-011-Q1-K1-D7
cccacgcgtccgatttttttccattgcacatctaatttaagaggaaaatgactttcagtggaacaacagagaaatgcaaggcttgtgataagactgttcatgttattgatttattaacagctgacggcatttcttatcataagacttgcttcaaatgtagccattgccatggtgtgctggtgatgggaaactattgctcaatggacggtgtcctgtattgtaagccacactttgagcaacttttcaaggaaactggcacttaccaaaataagaatgcaaaaccctcatccgaaaagtcaaatggaacgggaaaggctcctagcaaattcgcatcattcttctctggtacacaagacaaatgcggtgtctgtaagaaaactgcataccccttagagaaggtgactgtggaaggagaaaactaccataaatcatgct

SEQ ID NO: 14432 - DNA, 430 bp, Gossypium hirsutum
  Clone ID: LIB3145-011-Q1-K1-D8
cccacgcgtccgcccacgcgtccgccatctcaagatgatccccgttccatggcacctcttcctggtcgcatgggcagtcggatggaaccaccacccccatcaggtcctgctgctacatttggtgcttcagcaactgcaaaaattagtgtggatgcttcccttgcaggagccatcatagggaaaggcggtgtgcattcgaaacagatatgtcgtcaaacaggagcaaagctatctattcgggagcatgagtcagatccatcacttaggaacatcgagcttgaaggatcgtttgagcaaattaaagaagcgagtgcaatggttagagaactaatcagcagcctaggtccggttccaggtcctgccaaaacacccggtgcgcatggtggtcaagggcatccaggaagcaactacaaaacgaagttgtgcgaca

SEQ ID NO: 14433 - DNA, 248 bp, Gossypium hirsutum
  Clone ID: LIB3145-011-Q1-K1-D9
cgacccacgctcgataggaaaagagaacaatttgacagaggaacactgcggtgaggccggcgtgatgctcggatgagaagacaacctacctttagcccatgcgctaactgaaggacctttgacctaaaacggtcgttgcacaaacccgccgtgtggggtactgtttgtctgagaggtgatgagcccgaaaagtagtatctatttcttaatataggccgacttgacgcgaagggtactgactgaataca

SEQ ID NO: 14434 - DNA, 434 bp, Gossypium hirsutum
  unsure (1)..(434): unsure at all n locations; Clone ID: LIB3145-011-Q1-K1-E1
gcgagggactctcctttgattatgattgctgcccatttcttttcaactcttatttggactgctttccgacatgcaattgcttcagcagcaaaggcggagacgaccccttgatggatctctgagcaagataagagcactatcccttcttcatttctgaccacaatacctaaagccgaatgattataattcctatcatacgcactatcgaaattgattttaatgaactcacgaggtgggtggctccaacttctagtctccttcgtaattactgattttcttttttcaagaccattaagttcaacaatgtagttgctaatgaagtttactatttccttgcatgtactaattctctnttcatgtattcttgggtttctatctcccatatggccctgagtgcacagcagaaatngcggtattgacaagggtaaactgat

SEQ ID NO: 14435 - DNA, 356 bp, Gossypium hirsutum
  Clone ID: LIB3145-011-Q1-K1-E10
tagaggtttctttttgcagcgacgcatcattggcgaaggaagctttttattatgaatggaaccgccccccaacacaaagatcctgttcgtgtcaagatgaagactttgcaagctgtgctggaagagcgccacagagctctcgaattgcttatctactgctaagatggaaccgacgatcgacgatgaatacctcaacacgtaatagatcaagtgaaccattcatgagaactcaacgtcctctatcttatatcagatcaagaagcatattatttgtacgatcttctcaaatctagagttcaatgccctgactttcctgataacttgagtgtcttcagttccattccctaaaacattcc

SEQ ID NO: 14436 - DNA, 421 bp, Gossypium hirsutum
  Clone ID: LIB3145-011-Q1-K1-E12
tcgattttgtggagaattacttccaatgtgacatacatgtgcaatatagtgacttactgggggtgttcgagtatggggttttcctcctcatgctaattacctatttctaggcgactatgttgatcgtggcaagcagagtttggaaacttttggagataaccgagaagtggaacatggcttgtctgtaaaattgcaagttcaaaagttaattctccaagctacatcacatgaaaatttgtgccagaactatgttgggtggtgtcctttttggtgatctcaagaacaaaaaagaaatggctgattatgcatgcacacttgaagaagtgcagtagcattaattctctgcaggaagattcctagattcaagcttatatgcaaaatgtgagttatatatctggagaagggaatgataggctgctta

SEQ ID NO: 14437 - DNA, 409 bp, Gossypium hirsutum
  Clone ID: LIB3145-011-Q1-K1-E2
cccacgcgtccggttaccatggcagggttatcagggtgataacaagagttttctggtttgcaagaaaaagatggccacttctccagagttgatgtgttgcttttgtcctgccccgtttaagcagttccttgaggctgttacaaatatgaaatttgatgaggagcccaattatgcgaagcttatatccttctttgagagcctaattgaaccatgcactccattgagaccgataagaatcgatggagctcttaaggttgggcaaaagcgaggaagactggtcattaatttagaagaagatgagcaacctaagaaaaaaatacgactaggtagtcctgctactcagtggatttcggtttacaatgcacgttgtcctatgaagcagagatatcactacaatgtagcagattca

SEQ ID NO: 14438 - DNA, 436 bp, Gossypium hirsutum
  Clone ID: LIB3145-011-Q1-K1-E3
caccaacttcctctcccactacttctcccccagctcctctcgctggttctcccgctggctctccccctaccgctgattctcccacgaactccatcagcgagacaccaggcagctctcccacttctcctacgagtgcagccgcttggaacagagtcaccgtcgctggatctgccgttgcagtcgtttttgctgctttgttgatttagatctgactttcgggggaggacaggatttggatttgatgatttttattttaggctcattgttaatttctcatttttagtagtgtatttcttttgttcttatttatttttatttatattttgacggtgatgatgattttatatcactatagcgtgttgctattttgacggttgagatttgatgatagcttactctcgattgttattataattattatgagtagttatatatt

SEQ ID NO: 14439 - DNA, 428 bp, Gossypium hirsutum
  Clone ID: LIB3145-011-Q1-K1-E4
ccgaattccaaaaataatcgtaaggagcaggagaagaaccggaagggtaagttatctgaaaaggcgtcgtcgtttcacgggaaattcccgacggtggctccgtctgatctgaggcggccgaagacgctgcccgacctattctcagagaggactacttccgtcttaccggatgcgaggccgaagttgacgaagctgctgttgaacgtgaccattcaagggagtctcggagctgtacaagtagtgctgtcgccggaaaacactgtcggtgacttaataaccgccgccgttcgtcagtactcgaagggaggtcgccgtccgatcttaccgtcaacggacgcctcgctgttggacctccattattctcaatttagcttagagagtttagaaaggggagagaagctgatggcgctgggatcgcgaaatttctt

SEQ ID NO: 14440 - DNA, 429 bp, Gossypium hirsutum
  Clone ID: LIB3145-011-Q1-K1-E5
atcgtaaaaaggttctcagagaactcaactctttgatttccggttcaaccgccaccactgacgacgccgtcgatgaagaagtcaccgacaccgaatggttctttttagtttccatgacccaatctttcgttaacggcaacggacttccgggacaagcttttttcaattcatgtccagtatgggtcgccggatcggaccgcttagccaattctacgtgtgaaagagcgaaacaaggacgggttttcggtatacaaacgatagtttgtataccgttgacgaatggtgtcgtggaattagggtcatcggaattcattatccaaagctccgatctagtgaataaggttcgagcgctgtttaatggaattgaagctgaaacttggtctatgagcaacaacactgacgacccatcatcgttttggattagtgatc

SEQ ID NO: 14441 - DNA, 433 bp, Gossypium hirsutum
  Clone ID: LIB3145-011-Q1-K1-E6
cagttcttcaccatttcccctcgatttccattcctttgacttcctttcatcatttcaagaaatgggttcaggagaaaaggtatttgtttatgaagatctggtgaagcacaaagacagaaatgattgttggcttttgatctctggaaaggtgtataatgtaacccaattcttggaggaccatcctggtggagatgaagctttgcttgctgctagcggaaaagatgcgaccgatgatttcgaagacgtaggtcacagtgatgatgcaagagagcagatgcagaagtactatattggtgaggtcgatgccaccaccattcccgcacgaaggacatacaaagcacagacgtcaaccgcggcaactcaacaagacgagcctggctttctgtttaagattatacagttcctggtacccctcttgatcttaggcttcgca

SEQ ID NO: 14442 - DNA, 433 bp, Gossypium hirsutum
  Clone ID: LIB3145-011-Q1-K1-E7
cggacgcgtgggcggacgcgtgggcaaaattctaattaggccaatcaagtatagtctagatgtatttagggatgacaaagaaaaaacccgaatctgacccaattcgttagagttgcattctatttagaaatcgggtttggagcggggtgggctgggtgaaattaaaaaaaatatataatggggttgggctcaggtttgaggtaaatccactcgtcctactttgcagtatttactaaaatacccctgatatatatattaagtttttgcttcaataaaaaattatgtatatattaagttttaggtctaagctcaaaaaatttaatcttagtttcttcaaaatgcacattaaaacaattaaaaaatgtgatcttaattgtttcaaaataaaaataggaaattaaattaaattcaaatatggttggtgtggagtcga

SEQ ID NO: 14443 - DNA, 405 bp, Gossypium hirsutum
  Clone ID: LIB3145-011-Q1-K1-E8
ggacatgaaagcaatggatccggttgaacttctcggaatcttgcctacctgcaatttgggcaagttctgctcgaaaaagtaccttgccatcgttcatcccaagatggaagaatgcttgttcggggacttggagcatcgcaaccaagtgatggccgggattcatacaaggagtcagatttatggggagttcttggggctggccaaggcaattgggctgcttcatttgcttgctttatcacttgacccttcaccaagccaattcgaagcaagtcggggagcagagtttcatccacactatatggaaagcgtcagcaagatttctggtgggcgagtacctacaggtcagattgttggattcccagttagccctgggttcaagctaggaaatggttctgttgtgaaggc

SEQ ID NO: 14444 - DNA, 419 bp, Gossypium hirsutum
  Clone ID: LIB3145-011-Q1-K1-E9
tcgcccacgcgtccgcgaagatagaggtatcaggttggagcgacgcatcattggcgatggaagcagaggagatgaagggaaaggttgtggaagagaaagatccggttcgtgtcaagaggaagactttgcaagctgtgctggaagagtgccagagagctctcgaattgcttagtaactgcgaagatggaaccgacgatgacgatgaagacggcaaaggtaaagatgaagtgaaccatcaaggagaactcaacggcgtcgatcttagaagagatcaagaagcagatgagttgtgtgatcttctcaaatctagagttcaatgccctgcctttcttgataagctagagtgtgctcaggtaccagttccagaaaacattgccgaagatggtagttcttgtgacatggtcaaccccaatgatctt

SEQ ID NO: 14445 - DNA, 435 bp, Gossypium hirsutum
  Clone ID: LIB3145-011-Q1-K1-F1
atctttgatgatcaggtgtttgagatgttgaatcgtgaagcattcaaccaatctattggtgtgaatgtaactggaatacgagaaaattatttacaattaagcataggtcaaggaaacactcttttcatatcacttgtgccatctagcaagggtgatgatcaggacgctgccaatacccaggattcagaatctgcaattgtgcctttagactcatttgataatgtgaaattagaagaaggaaaacatggtacttctaaaaggaaatggggtttccctaatcgtaccagttgcgaaatttatctgcagcaaattgttcatgaacatgcatttgttaaggcaaaggataaaccaaatttatctggtactcgtgtatctggtcaatcaggaaaggatggacctggtcttcttggtcatttctgtctgtctctggctcat

SEQ ID NO: 14446 - DNA, 428 bp, Gossypium hirsutum
  Clone ID: LIB3145-011-Q1-K1-F10
cattcccattcccatttgttttattagcaattcatttgtcaaacaaaaacaaatatcaatggccaagattgttttgcttctggtattctcattggtcctggttctatcaatcaactccgccgtaggtcacgacgcccccgcaccttcccccgaagagacaaaccaggaaacttcagagtatgcagacgccaccgggcagaatgaagagggtcttgacgagattgtggacgcaatgtcaccggaaatggcaccagcaagttcacccacaatggcatttgaagagtcttttggacccggaccagctatgaccattgaagaaggtgcggcggagggagaggcataggcggagggagcgccagaaagttagatacgcagtaccagtatatttaaataaggatctcgatccatatgttcgttatcttactatt

SEQ ID NO: 14447 - DNA, 400 bp, Gossypium hirsutum
  Clone ID: LIB3145-011-Q1-K1-F11
cccacgcgtccgtggggaaatggtgtggggtgtttggggttgctgcactactgttggtggtgagtgtgtttttaggggttagaggtgctccccaagtcccttgttactttatttttggggattcattggtggataatgggaataataatcaactgtcgtcattggctagagctaattacttgccttacgggattgacttccctaatggaccgacgggtaggttttctaatggtaaaactaccgtcgatgtcatagctgagcttttgggcttcgacaattacatcccgccttactcaaccgcaagcggtcgacagatactcggaggagttaactatgcatccgcggcttgccgaatcagagaagagtacccgacagcactgtgagctcggatcagtttcag

SEQ ID NO: 14448 - DNA, 259 bp, Gossypium hirsutum
  Clone ID: LIB3145-011-Q1-K1-F12
tctatccttatgtacccacttttcttttatttctctgtgactctcataaaaaaaagacttcttcattatttgtctcccctctcccccccacatgtttcattttgtatatatcccacctagatgactacatacttactcgcacatttatctacttatttacacctctaaaccaaaaaacacaagaacaatctacctcatctcctacatgctccaaaaaatatccatccctcaattatacacccaccaacacctctattca

SEQ ID NO: 14449 - DNA, 440 bp, Gossypium hirsutum
  unsure (1)..(440): unsure at all n locations; Clone ID: LIB3145-011-Q1-K1-F2
cccacgcgtccgcaacaacaaaaaaaatctttccagtttctattttctaaaaacaaaactgaaaatgtcttgctgcggaggaaactgtggctgcagctctggttgcaagtgtggcaatggctgtggaggatgcaagatgttccctgacataatagagaagactacaactgagactattgttcttggtgtgacaactcagaaaatgcactttgagggatctgagatgggagttggggttgagaatggatgcaagtgtggagacaactgcacttgcaacccttgcaattgtaaataagagggggggaaaatgaacaacaaagagaagcagagaggcctttgtctttttaactaaataaattctattactntagtatgtatcagcaaatcttcatgaggatttggttcttaattatgtgtaatgtgggcttttctgctatgtc

SEQ ID NO: 14450 - DNA, 422 bp, Gossypium hirsutum
  Clone ID: LIB3145-011-Q1-K1-F3
ctggcgttttcgggtgttccctattataatcattgcaagttacaggctctaacggcgagggaagcgcatatgatggctgcacacgctgactaggaatgtgggatgctgctggacgaaagggaatgtgagggaactgacaaaaagagcgatatctcaaaattagatcttgtcggagtataattttaggatatgcaacatggaaggaggtatctgataaaggctaaagggacagtggttggggtgatgatcgtgaatgtttgcatttaatggcttacggaaacgaggggatcggatatcttttgccgcatttgactgcctatgagtttcggtatgtcgtgtttttaggcctccgatccatagacttagctttatggccattacttactaataccagaggattgcgattcacatatgttgcttat

SEQ ID NO: 14451 - DNA, 425 bp, Gossypium hirsutum
  Clone ID: LIB3145-011-Q1-K1-F4
ggtgccaatggccgtaagctaatatggcaaggaattccaaggagcattcgcgacagtcataggaaagttcgtgacagtcaggacggactggtgatccaaaggaacctagctctatacttctcgggtggtgataggcaagagctgaagttgagggtaaccggccgtatatggaaagaagaatgataataaaaaaaggatgttgaatcgagatgattttgtatagtatcagaaacattccgagtctcattggcaaacaaatgaaagcttcggttgtaatcggggctttatgtccactgcattgcaatccctctgctgaccgaccaccagcccggctgccaccttctactgaatgttttagggtaggaaatgatttgtatgagtctgcttggttgctcaaagtttaatgcagcaacatgtatggagcg

SEQ ID NO: 14452 - DNA, 433 bp, Gossypium hirsutum
  Clone ID: LIB3145-011-Q1-K1-F5
cgcattctccatctctgtctttactttctttggttttttcttgcatcatcaaaccttgttctcttctgctctttttacgataaccaaatttcctaaaaagaatcaatccgtgcgggtttagtttaactcttttgcagagttgattttcgattgttcagatggctgccatcgctcggtatcgtttctcggacctgacgagacaattccctaacacgagcggtgctcgccctctcaagtcacaaccaccccatgttgtttccttccctcgaaaccaaccgttccggtttcagccttctcagatttccattcccaaacttcagttttcatgcggcggaggcgacgacggaaaccatggggttggtggtaatggaggtggtggtaaaggcgatggcggttccaactctaacgatgatccatggcagcgctttggcat

SEQ ID NO: 14453 - DNA, 431 bp, Gossypium hirsutum
  Clone ID: LIB3145-011-Q1-K1-F6
gaaagggatgggaatcgactggtcttctgtgagaaatgtcatggatatgaaagctgtttatggagggtttgctgcagccctgaaagacttgaaagtctgggttatgaatgtagttccaatcgacggtgccgatacacttccagtaatctatgaacgtggattgtttggaatacatcacgattggtgtgaatcatttaatacatacccgagaacgtatgatgttcttcatgcagatcatctattctccagtattcagaacaggtgctagttggttgcggtaattgcagaagttgatcgaatcctgaagccagaagggaagctgattgtacgagacaaagccgaaacgataagcgcaatggagagcatggctaaatctctacaatgggagatccgaatgatttattcgaaagactgtgaaggattgctttgtg

SEQ ID NO: 14454 - DNA, 433 bp, Gossypium hirsutum
  unsure (1)..(433): unsure at all n locations; Clone ID: LIB3145-011-Q1-K1-F7
gcttacatgtgggtttgtttgacaaaattacaagaaacaacggtatcacaacaaatctcatcagctgatgactccgatgagctttcttatttcctatttgcagtagattgtagaggccacttaaaattacctgccacatactttgggaactgtactatagcacgcaccgtagcagttaagagaagtgcgctgatgggagaaaatggaattgtggtggcaggcaaggccattggaagagaagttatggaaacgtacaaaggaccactgaaaggggcagaaagggaaaagttcaaaagtagacaccctcctatcatggtttcagcatcaccaaaattcgaattatataaggtagattttgggtggggaaggcctagaaagacggaggtcgccaacattgggtcgntgggatctctttctctgttttctattgcag

SEQ ID NO: 14455 - DNA, 424 bp, Gossypium hirsutum
  Clone ID: LIB3145-011-Q1-K1-F8
gcgcgtgacacccatagaccctaatatgcttgcttgccttagaaaaaacgagtttttaataaaaatggagaaaagtttgtggatttctaggtgctgtgccgataaaggatgagtacactggatgcaactagagcagaacttgctcttgtagttacgcatttgaataacgctgaagcaagggataagatatgcagggctatacaatatggctcgaaattattaagtgatgggcagactggcacagcacaaaatgttgacaaatcaactcaattggcacggaaagttttccgcctttttaagttcgtgaactatttgcatggccttattagcccagttcctgaaggtactcctgatccacttgttctgctacgaaagtcaaagaatgcactgctgtcaactatcttatttctcgatcaaatagagt

SEQ ID NO: 14456 - DNA, 372 bp, Gossypium hirsutum
  Clone ID: LIB3145-011-Q1-K1-F9
gctgcaggttaaaaggttactgcctaacttacacatattcaatgcaagaccaattgataaaagcataaaaaacaaagagggtgatatcgtcaacattgcttcgtatagttcagatattcacatggaggagaaaacaggtcagaaaagaaaaaagaatcccgaatttctagtgtcggttgagaaacaagacgttaatcatgataataatgccactgcttttgataccgagaaagaattgaagaggaaaaagaagaaaggaaacgacaagctgtcgacagaagttcccattgctgaagacgacgtcgtcgttgagaaggaagaaaaaccgaaggtcgaacaaaaaggaaaggaaacaaatgataagttcttaac

SEQ ID NO: 14457 - DNA, 372 bp, Gossypium hirsutum
  Clone ID: LIB3145-011-Q1-K1-G1
accgcggacgcgtgggcggacgcgtgggtgacaaaattacaaaaaacaacagtataacaacaaaggctgatcaaatgatgactacgatgagctttcttatttcctatttgcagtaaattgtagaggccacttaaaattacctgccacatactttgggaactgtactatagcacgcaccgtatcagttaagagaagtgcgctgatgggagaaaatggaattgtggtggctggcaatgccattggaagagaagttatggaaacgtacaaatgaccactgaaaggggcagaaagggaaaagctcaaaagtcaacaccctcctatcatggtttgaccatcaccaaaattcgaattatataaggtagattttgggtg

SEQ ID NO: 14458 - DNA, 420 bp, Gossypium hirsutum
  Clone ID: LIB3145-011-Q1-K1-G10
atttgctatagtatgtgcataaatattctgtgctttagggacaaaagtaaactcagtctgctggaacctgttttttagactttggatatctgtgataattgctccaatgactgatttatctgtgaagaagctttggcatttcttgataacagttttggaatctcctaaaactgttaatttatttactcccagtctccctaattttattgcatgtaaccctgcatatgcctctgctgtgaatggatttgcaatgttggagtgaatgactacctgtgatgcaagaatctctctattctcgttccgtactattatacctgaagccgatctgaactccagacgatcgtaagctgcatcaaaatgaatgaaggtccatccccttttgtgtatctgttggagatttgcagatgaatggaaatgatt

SEQ ID NO: 14459 - DNA, 154 bp, Gossypium hirsutum
  Clone ID: LIB3145-011-Q1-K1-G11
cgcccacgtcgtccgggttcagatacggatgtaccggagaaagtagcgagaggtgatgcttcacgagggcgtgaaatccgcatgctcataggtgcgaatgcaccccaagagcaagctgatagcgagtagcatgttctacaatgatccgcagttt

SEQ ID NO: 14460 - DNA, 385 bp, Gossypium hirsutum
  Clone ID: LIB3145-011-Q1-K1-G12
attcatttccggtgcgtttaataatctcttttatacgccatggacatgaagaaggtgtgcgccgccatcattgttgctgccgcctcaatgagcgccgtcatggccgccgatgcaccatctcctgccccttcagccggtggttctagtcctagctcctctcctggttccgctccagcatcaagaccggattccagcatggctgccgctaccttgcctgttcttggatcattggttggggcctccattgtttctttgttttcttacatgctacaataagctacatatatgaaaaatgaacatgtgaacgaatgttttattttattctttttgaaagaaacatgtgatgaatactgaaaaaaaaaattgaataaaatggagctttgga

SEQ ID NO: 14461 - DNA, 72 bp, Gossypium hirsutum
  Clone ID: LIB3145-011-Q1-K1-G2
gtgcttaggaaggccatgctattttgatttccacgaacgtttaaaataatgaatgtagcacgtgttgcagca

SEQ ID NO: 14462 - DNA, 293 bp, Gossypium hirsutum
  Clone ID: LIB3145-011-Q1-K1-G3
tgaatgcttacatggacacgtttctgcatggtatgcgtgagcttgtcaattgaaagcatggtgggagagaggataccccccccccccaaatgtcttatggcttgaaaaagcttggaatcagttgtgcattcaaatgccatggatataccttattcgaagcttactcagagtgtgttttagttcatgatcagctatatttattcttatgtgagcacaacttatatctttttagttgcagctatatgatttaagaataaaaatcatttcatcactacatgtgctttttatttatt

SEQ ID NO: 14463 - DNA, 251 bp, Gossypium hirsutum
  Clone ID: LIB3145-011-Q1-K1-G4
cccacgcgtccggccaccggcttataagcctccaaagaaccgagctattatgactagctgaatggataaattagtatccatgcaataagagctgcttaatactcatgttctgttttcttgtatgttatgtattaatgttttcttttactagcgagagtgcttatggcagtactcattggaatgcctattttatgtcttcttatttctcaatgagcaatatcctgatttcaacaaaaaaaaaaaaaaaaaat

SEQ ID NO: 14464 - DNA, 434 bp, Gossypium hirsutum
  unsure (1)..(434): unsure at all n locations; Clone ID: LIB3145-011-Q1-K1-G5
cccacgcgtccgggagactcttcagtggaggttaacgatgagaaccgcgatgctgcgcagttggctaaagccaaagccatggatgctatttctgaagggaagttagaggaagctatagagaatctgacacaggcgattttgctgaatccaacatcggcaatcatgtatggaacccgagctagtgtttatatcaagatgaaaaagccaaatgctgccattcgagatgccaatgcggctttggagattaacccagattctgctaagggctacaagtctcggggcattgcacgagcaatgcttggtcaatgggaagatgccgccaaggatctacgcttggcatcgaagttggatcacgatgaggaaataaacagcgtccttaagaaggttgaacctaatgcacaccgcattgaggagcaccgtangaagtatgatag

SEQ ID NO: 14465 - DNA, 416 bp, Gossypium hirsutum
  Clone ID: LIB3145-011-Q1-K1-G6
cccactcgtccgagaaactcttcattggttgttaacgatgagaaccaatatgcggcgcggtgggctaaagccaaagccatggatactatttctgaagggaagttagaggaagctatatagaatctgacacaggcgattttgctgaatccaacatcggcaatcatgtatggaacccgagctagtgtttatatcaagatgaaaaagccaaatgctgccattcgagatgccaatgcggctttggagattaacccagattctgctaaaggctacaagtctcggggcattgcacgagcaatgcttggtcaatgggaagatgccgccaaggatctacgcttggcatcgaagttggatcacgatgaggaaataaacagcgtgcttaagaaggttgaacctaatgcacaccgtattgaagagca

SEQ ID NO: 14466 - DNA, 302 bp, Gossypium hirsutum
  Clone ID: LIB3145-011-Q1-K1-G8
acgcccactcgtacgggaaactctttttttgtttaaacgacgaaaaccactatgctgggcggttgattaaaaccaaagccatacatactattttaaaacggaagttatatgaagctatatagaatctgacacaggctatttttcttaatccaacatcttaaatcatgtctgtaacccaagctcttttttatatcaagataaaaaaaccatacgctgtcattcaatatgccaatgcagttttggagattaacccatattatgttaaagcctacaattcttattgcattgcactagcaatgctt

SEQ ID NO: 14467 - DNA, 356 bp, Gossypium hirsutum
  Clone ID: LIB3145-011-Q1-K1-G9
tgcaaatttttgcactgtctgggcatgataatactgtttgctcagtttttactcgaccaacggatccgcaaattgttactggttctcatgatacaaccataaaattctgggaccttagatacggaaaaacgatgtcaactctaacacaccataagaagtccgtgcgagcaatggcaccacatcctaaagagcattcttttgcatctgcatcagctgacaacattaagaaattcagtcttccaaagggagaattcttgcacaatatgctctctcagcagaagactataattaacaccatggccgtcaatgaggatggtgtaatggctaccggaggggacaccgggagttgggggttt

SEQ ID NO: 14468 - DNA, 404 bp, Gossypium hirsutum
  Clone ID: LIB3145-011-Q1-K1-H1
ccatctctccctccgtgagttatttttttggtggatctctttcaattgtgcagattttcatttcgttctttttgtttttttttcttttttgggttcgtacgattcttggttttttttttgttggtacaaacgattcttggtagttgatattagctaaggtctccaggttttcgattagtcggttagattctaggattgggatttcttgaacaacgatgtgattctggagagattagctttagatcttaaaatatgtagcccatgttttattgatttctttctttcgaattttgggctgttaaatacattgaatgggtattagcatcacaaaggaaacaaaacgcctaaaaacaatgctattgcattggtactgctttgatgaaatctgccttcattactagctt

SEQ ID NO: 14469 - DNA, 281 bp, Gossypium hirsutum
  Clone ID: LIB3145-011-Q1-K1-H11
taaacaaataattcatacccggtgctttttccagccgtagggtagcatggaaaggggtgagacagatagatataaatgaagccaacaaatggactcctcgcgtctttctcgaatctgagacttggattccaagttccggcgttccctatattcccgacatggtctctggagtctaagcagcttattatcaataccaacgccattagtatgcttattatcatatcattgttctaattatctcattagttactaattaattaaacagtttttttaaatctttt

SEQ ID NO: 14470 - DNA, 355 bp, Gossypium hirsutum
  Clone ID: LIB3145-011-Q1-K1-H12
cggacgcgtgggttgaaatcggagaatatgaatgactttgacttgggactcaatgccctggactatgaagtctggctatctgacagtcagcattggatctagcagaacttgaaaaatctgcaaagatgggcaaaaacggaatcagttatattgagattcctatctctttcatgcctaacgatttcggatctgctctgtgggacatgattaggggaaaaggaacaggttactctatgaaaggtcacatcaacgttgacactccgcttggagctatgaaactacccatcatcaaggagggtggcacaacccgccttatgaagaatagggaagacggaggtgatgatgatgatgatga

SEQ ID NO: 14471 - DNA, 436 bp, Gossypium hirsutum
  unsure (1)..(436): unsure at all n locations; Clone ID: LIB3145-011-Q1-K1-H2
ccatctctccctacgagagttatttttttggtggatctctttcaattgtgcagattttgggttggttctttttgtttttttttcttttttgggttcgtacgattcttggttttttttttgttggtacaaacgattcttggtagttgatattagctaaggtctccaggttttcgattagtcggttagattctaggattgggatttcttgaacaacgatgtgattctggagagattagctttagatcttaaaatatgtagcccatgttttattgatttctttccttcgaattttgggctgttaaatacattgaatgggtattagcatcacaaaagaaacaaaacgcctaanaacaatgctattgcattggtactgctttgatgaaatctggccttcattactagcttaacttgaacttgaattttggccaaatatccc

SEQ ID NO: 14472 - DNA, 433 bp, Gossypium hirsutum
  Clone ID: LIB3145-011-Q1-K1-H3
tgaatagccaatcttttcgaggtgcagtgctatcaaaaccaaacaagcctgggaggaaaaagcagaagtttgatcatgaaccggattcatccgttggacgtgaatatgatgtgtatacaaactttagattatacgaaagtgcttcagcccgaaagagaaccgtgacaacggaagaaagagagagggcaattaacacagccaaatcgtttgagccgatgaaccctttctgcagagttgtcttacgaccatcatatctataccggggatgtattatgtacttaccatcatgctttgctgagaagtatctaagtggggtttcgggatttattaaacttcagcttccagatgggagacaatggcccgttcgatgtcgctatagaggtggcaaagccaagtttagtcagggatggtacgagtttacgttggagaataa

SEQ ID NO: 14473 - DNA, 446 bp, Gossypium hirsutum
  unsure (1)..(446): unsure at all n locations; Clone ID: LIB3145-011-Q1-K1-H4
cccacgcgtccgagaagctggtgcttctgcgatcctcataataaacaaccaaacagaactcttcaagatggtttgtgaatcagatgctgatgtaaatataaaaatacctgctgtcatgcttcctcaggacgctggttccaatttggaaaattatataaataataacaccagggtttctgttgcgttttactccccaaagcgtccggcggttgatattgctgaagtttttctgtggctaatggctgttggtaccattttgcttgcttcttattggtctgcatggactgctaaagaagttgctattgagcaagacaagctactaaaggatgcatcagaagaatttctacaagtgggaagtgcaggttcaagtggttttgttgacataaatacaatgtcagcagttctctttggtgngtttgcttcatgtttctaggtcatgctttaca

SEQ ID NO: 14474 - DNA, 424 bp, Gossypium hirsutum
  Clone ID: LIB3145-011-Q1-K1-H5
cgccttgtaagctggagcactgtataagctggagaaagataaggagtttgtgtaggaagattaaatcaataatcaagaccattgttatcatttgtcttgactttcgtgattttgatcacaacaaatgatatgtttgttaacatttcttacgctatccccagattgctactcaaatctactagcttggatatgctgagctgtcaatcacaacactgaacttacctgttatgttggtaatgctgtcttttactacgattcaaacgtatgtcatgtctgttctagaggagaaataccacattttcttatatacattcacaatcatctatatctatttataaactgctgagaagacgctgacaacaacttcgcccgtggccactacactattggcaaagagatcgttgacttgtgcttggaccgtatc

SEQ ID NO: 14475 - DNA, 328 bp, Gossypium hirsutum
  Clone ID: LIB3145-011-Q1-K1-H6
acgatgatccgtctatgttgattgtaacatacgaaggggagcaccggcacagtgaaggcgcggcgcaggagaacatggctccaggtgtggggctggtagtattcaagtcaacttgataaacaaataaacgtagagttttgtaatattttagagtggttgagggggctgaatgtaaatttgttttttctttagatatatttataaattttcctagtgaaaaaaaagctagatcataaaaaatttcaaacatataaacatgatggtcttgaataaaaaaacggaattgttgaaaacaaatttacgatactatgcatctcattataaaact

SEQ ID NO: 14476 - DNA, 337 bp, Gossypium hirsutum
  Clone ID: LIB3145-011-Q1-K1-H7
ggtcgttttaccaacgggagatgtgcttattgttaacggtgccaagaccggttcagcaggttgggataatgctagggagcctaatttgaaccctgttttgtacaaattccatactgatggaactggttccaagttcaccgtgcttaacccatccaacatgcttcgcatgtaccactgcatgatttgtacatactacgtgatgcaaaaatcctcattgctggaagcaacacgaaccctggttacctcgatgatgcaatgtttaccaccgaagttcgggtcgagaaactcttaccacattacttggaaccgaacttggtcgtgtttcgactagagatca

SEQ ID NO: 14477 - DNA, 232 bp, Gossypium hirsutum
  Clone ID: LIB3145-011-Q1-K1-H8
gtccgcttcatatgcggagcttgttcatgtatcggcctatgctcaactatcgactgcgcgcggagaacttactgatggcggcatggtagattagactgcacgggacaagggatttatgcgagaacgatgatacgatgtacatcctatgcatccatcaattggggcaggttccatttatatttatgtggaggagggattgtatgaagcacctacgaaacaacagactattctg

SEQ ID NO: 14478 - DNA, 341 bp, Gossypium hirsutum
  Clone ID: LIB3145-011-Q1-K1-H9
gctatagctcagttaaacataagatgtgtcctataagaggggaaaatgtacaaacacaggctcctgctcgaagtacgcctgataaatcacacaagcctgaagatggccttagtaaagacattgaaattaatttttttgagaacaaggataccaccacttcttttcaagatgaggcgtttaacacctttgttgctgaatttgatagtaataagatcagttctggaattattaataaaaatactggaaaagaaaaagcattggaggctgaaatagtgaggctgaaagaacagctaaaacaatccaacttggagaaggctgagatgactttcaaatttgaaaag

SEQ ID NO: 14479 - DNA, 447 bp, Gossypium hirsutum
  Clone ID: LIB3145-012-Q1-K1-A10
agagttgtatgctaagaataacaagctgagggaattagcaaacctcgttgttgttgctggttacattgatgtaaagaagtccaaagacagagaagagatagcagaaattgaaaagatgcatgaccttatgaaagagtataaattagatggtcaatttcgttggatagcagcccaaacaaatcgagcacgcaatggtgagctctatcgctatatagctgactcaaagggtatatttgttcagcctgcattctacgaagcctttggacttacggtggtggaagccatgacatgtggccttcctacgtttgccacattgcatggtggtcctgcagagattatcgaacatggtatatcagggttccatattgatccataccaccctgaccagaccgctgaactcctggcaactttctttgaacgttgcaaggaggacccaagccactggac

SEQ ID NO: 14480 - DNA, 222 bp, Gossypium hirsutum
  Clone ID: LIB3145-012-Q1-K1-A11
cccacgcgtccgtccacgcgtccgcccacgcgttcggaaaaaaataagatgaagataatggatacgttgatgtaaaaaaaaaaaaaaacaaaaaaaaagatcacaaaaaaaagaaaagaagaataaaataataaaaaaggggcggccgttttagaggatccaggtttacttccgcttgcttgcaacgaaataccttttttatagggccacctaaattcaatt

SEQ ID NO: 14481 - DNA, 311 bp, Gossypium hirsutum
  Clone ID: LIB3145-012-Q1-K1-A12
cttggaacggttgtactatggctaacaccttgctcctggctcatgaatgggtgagtgagacggaatgctttgagccctcgctgaaggcgctgaccactaggacaaaacctgactatcgaggacatgctggtaaagaaaggtctcgacatgctgactactgtattgccactgaacagcatgcgggctgatatgtatatacatgatggaaaagaacaactaataatcgtggcaagctggtgctgatgctgtggagaggacagcgataccaaatggttctactacatggacacatgtgctggacactactggtg

SEQ ID NO: 14482 - DNA, 390 bp, Gossypium hirsutum
  Clone ID: LIB3145-012-Q1-K1-A2
cccacgcgtccggtcatttcgtcttcccatcatttcatttccattccgacgatttctctggcaaagcttcttttgaaccgtttcactttctttagttttgaagcatttcttcctttcttccctcatcttctgtcattttctagtctggttcacgcaaccagtcatatcttctctgctcctttgcatactcaggaacctctatttcaaggtaaatctcctctttcctctttaaggtttccgttgcaagaatgtgtgcgagattatttgcagatcttggtgtgcgctgaaatctgactttattaaacttactgatttcctactggatatcatgaatataaacccccaccattgatcgatcttgatctgtggaatagcatttttttaattatt

SEQ ID NO: 14483 - DNA, 411 bp, Gossypium hirsutum
  Clone ID: LIB3145-012-Q1-K1-A3
ctccaagctccattacatgcgcgatattattcttcgttactctcctgaaagcgaacgtactcgcgttcaaaagcagcgagaatacaggcaaaagattatatcacactatcagcctctacaaagggaactgtatgccatgcatgcctcaaacttctttgcgccctcatttctcaaagcaattaatgagaataaaggggaaagttttagaagtataatggctgaacctactcaaggagtttttacatttgaaaagcttcagccccatttctgtgaattgttgttatctgaggtagaaaacttcgaaaaatgggtccacgagacaaaattcagaatcatgcgaccgaacacaatgaacaaatttggtgctgttttagatgactttggtctggaaaccatgcttggcaagttgat

SEQ ID NO: 14484 - DNA, 124 bp, Gossypium hirsutum
  Clone ID: LIB3145-012-Q1-K1-A4
cccacgcgtccgctttgggttagggattgtaattagggggtgtttacccgtttgtttgttttgtgggttgtgtaattcgtgcttcgaattgcagatttcaatgaaattttaacttcattttgtt

SEQ ID NO: 14485 - DNA, 399 bp, Gossypium hirsutum
  Clone ID: LIB3145-012-Q1-K1-A5
gaagaggattaaacggccttatcagtcaaagacctttaaagtggagatcagctttgctgcaaagattcccatgcaagccattcaaaatgctctgcgtggacaggaatcagaaaactcacaagaagccctaagggtgttggatatcattttacggcagcatgctgcaaaacagggatgtctacttgttcgccagtcattctttcaaaataatcctgataattttacagacattggaggtggtgtcctaggctgcaggggtttccattctagcttcagagcctctcaagggggcctttccctgaatattgatgtctcaactaccatgataattcgtcctggtccggttgtggactttttgcttgccaatcagaatgccagagatccgtactccctggactg

SEQ ID NO: 14486 - DNA, 251 bp, Gossypium hirsutum
  unsure (1)..(251): unsure at all n locations; Clone ID: LIB3145-012-Q1-K1-A7
gaaaattcgtaattgctgatttgagaactttattggtatatgaacagcggcatgacttatatgttaaaatgtggtaatatcatggtcctttttattgcaaaaatgagatgacattctattatttatattataggggaaatttgtagtcacattttttttggtttttgacttttataacatagtagtaatgttggttttatttgtttaatncctcatcccactaaaaaaaaaaaaaaaaaatatatttatta

SEQ ID NO: 14487 - DNA, 300 bp, Gossypium hirsutum
  Clone ID: LIB3145-012-Q1-K1-A8
attatatatatattatgctgtgcaagtgacaaaaatccatgtcagattttcgatgttttgaaccgacatttttggctcagaggttgttgcattgtcgcagtatatacattcattacacggttttctagtcaaaatttaacactgtagaaggtacttttgtttagatatgtcgtcgtaattttgctgatatatagtttttagaccatctctgcttaaaaaaaaaaaaataaaaaaaaaaaaaaaaaacaaaaatgaaaataataaaaaaaaggagccacaaaaaataataaaatatgcaag

SEQ ID NO: 14488 - DNA, 439 bp, Gossypium hirsutum
  unsure (1)..(439): unsure at all n locations; Clone ID: LIB3145-012-Q1-K1-A9
taataaaatcaacggcgaaatcccaagctccattgttcaactttccagtttaaaacacctcgatttgagcaacaacctcctcaccggcgaagtcccggccaactttggcaacctgaaaatgctgagccgtgcattactgagtggaaaccaactcactggtacgatcccaatctccatcagcaacatgtaccggttagccgacttggatttatcgagaaacaaaatacagggtcaaataccagcacagttaggcaaaatgaaggtgctcgcaacgttggacttaggcagcaacatgctcaccggcgaaataccgccggcggttctgggtagtaccggtttgggtatcttaaacttgagtcgaaactcccttgaaggcaacataccggacgttttcgggccgaaatcgtacttcatggcacttgatttatcgntcaataac

SEQ ID NO: 14489 - DNA, 368 bp, Gossypium hirsutum
  Clone ID: LIB3145-012-Q1-K1-B1
ctccaactgcaatttttttgcttcacgtcatattgtcttggtttgcttattacttagatatgactcctttgttatcccatggtaaactggttcacaatatagctaccacgaagtcgtccatcattcatcttccacactgttgatttttctacacaatcttcattttgcagatccaccacagctgagtctgtctccgctatcatctgtttgtataaatctaaaataagctgcatgtctgaaaaaacacatactggatgtagtgtatgtattatcactatatacatttcaaattgttcactaagcttgagtgtaagcatatcaaatatcgataatcatatttatctccggttcttaaattgaaaattaaa

SEQ ID NO: 14490 - DNA, 448 bp, Gossypium hirsutum
  Clone ID: LIB3145-012-Q1-K1-B10
cccacgcgtccggcagtctgaaagtaagaaggatgagccagtttctgatgctgtttctgataaggaaagtgctgaggataagagcaacgttgctgtaaatgaagaaactcaaaaggaggtcaatgatgaaaaactggcgggagttgaggccaaggatgaagataagaaaggtgacgagactgcaaatgctgataacaaagataagagtagtgaaaatgccgattcaactgcagaaggtgcatcattgagttcattccagcagctttcaagtagccagaatgccttcacaggactcgctggcactggattttctacttcttcattctcctttggatctaccacaaaggatggtcctacaggtgcttttggttttggcctttcaacaaatggaaattcatccctcttcaacacatcagggacttcaattgtttctaagagtgagggaagt

SEQ ID NO: 14491 - DNA, 128 bp, Gossypium hirsutum
  Clone ID: LIB3145-012-Q1-K1-B11
gattctggagtttgctttgcttatcttgcttttcttttgaatgatgaataataacaaacaatattccactgtacaaaaaaaaaaacataaaaaaaactcacgaaacacaaccaccataacaacaatat

SEQ ID NO: 14492 - DNA, 450 bp, Gossypium hirsutum
  Clone ID: LIB3145-012-Q1-K1-B12
caaaatcaaaacaaagaacctaagcttcctatttctctctcactcagtcgaatccaagaaaaacactccaactacgattttgcttccatattcggccgaccgatgctacgccaccataacaacgatctacatgcccgccgttcgactgcttttcagccttagatcccctctatgcttcgatttcgacaaagcaaaaggaatccacggcatttggtaatgtttttcttttattttcaaatgttttaaaattataatgaaaaagaatagaaggaaatagaatcgaaataaaagcatagaacctagaaaagatgaatctaaaatcaccttttaaaaactgactttggattggtcttatattttctttacaatatgcgtgtatttctctgggaaaaccgaccccctttacaattgattatctggctttttatagccgaataaagagaaataaga

SEQ ID NO: 14493 - DNA, 342 bp, Gossypium hirsutum
  unsure (1)..(342): unsure at all n locations; Clone ID: LIB3145-012-Q1-K1-B2
cgattgtgcagcaatggaagacaacgagtcggtgagggtggattcgggtttgaaggcctccgattggtggtgatgtagcagttgagggccatcataaacttaggccgatcgccggaagtagctgagggtaggtgcgcaaaatgtgcctggcggctgctaggggacaatctaacgtgatgtgctagaaggactagattgtagaagacgcaaaaatctcagggccaaaatgtaattttagaaaaatttgaaggccaaaatgtaaatattaaaaagtaggggccaaaatgtaaatagtatatttttgtatttttcaaacnaaaaaatattntataataatattta

SEQ ID NO: 14494 - DNA, 379 bp, Gossypium hirsutum
  unsure (1)..(379): unsure at all n locations; Clone ID: LIB3145-012-Q1-K1-B4
ggcgttagagagcttggctgcggcgcaagggagataaccctagggttttagggttttaattttctaggcctatcgggcttgtattttgggtcttgggttaatttggggattgggtattaatttgggcttgtaataattttggactgatggactgtaaagggacatttaatatcatttatttatttttttattatatatttttttatttttatttattttgtatttgctcttctttgggcccgggtaaattggcctgtttacagttgtaatttagccattcgaataattgagttgaattaggtggcgtgtaaacaaaggtgtattctatatgtagagttgtaaggtggaatgacatgtttaatttctttatagntttctt

SEQ ID NO: 14495 - DNA, 301 bp, Gossypium hirsutum
  Clone ID: LIB3145-012-Q1-K1-B5
agggcgtgtcaacgtgaaatatgggaggtttaagcgtgggctgaagcaatgccctccaacgaagcggtacggggagatgtgaagagggcgttcatgggcatgtcaacgtgaaatatgtgaggaggaagcgtgtgctgaagcaatggcgtgcgtattggctgacacaaaagcagcagcaccgcaaggtggaaagggaaagggttctgttaactccaaaaacctgtgcctactgggcttggttcatttcattcagtattatgccatcgtcaaactttgtgggcctgtccaaaatgcaattggc

SEQ ID NO: 14496 - DNA, 334 bp, Gossypium hirsutum
  Clone ID: LIB3145-012-Q1-K1-B6
gaaacggttgatgaaaatgttcgacatttattattatgggatgagaagttggttggagttccacgtgttttggaggaaatgaaaaatgtttgaacagtaatcatccagaatgcttcaaaggaatcaaagactacttatgaatcacttataaatctgtgtctctccaatttcaagtatctacgagcattagatttaaggaattcaccattgacggctttaccgaattccattggtaccttaaagcacttactacaccttgacttgatcggatgttcgagtctacttaaactcactaggtcttttgataagcaacagagcttgtatttgttataat

SEQ ID NO: 14497 - DNA, 396 bp, Gossypium hirsutum
  Clone ID: LIB3145-012-Q1-K1-B7
ctttttccagttttcttcttcttttttctttttttttttccttttttttttcttctctcactttctcgaggcctccatttttgaaccctagctggagaaaaaaaacgtaattttcttggaaaccaaacacttcgattaatttatctccagtcaatcgccaagaaaaaaaatgcagcaccagaggctgaagcaacagcaacaagccttgatgcaacaagctcttcttcaacagcagtctctctatcatcccggcatattagctcctcctcagatagagccaattcccagtggaaatctgcctgctggttttgatccaagcacttgccgcagtgtgtatgtgggaaatatccatacacaagtgactgaaccactacttcaagaggttttgcaagtact

SEQ ID NO: 14498 - DNA, 291 bp, Gossypium hirsutum
  unsure (1)..(291): unsure at all n locations; Clone ID: LIB3145-012-Q1-K1-B8
cgacccacgcgtgcgnaaactttatttttaccacaaagtcaattttcctaaggctctatgtgttttattgtctgggctaattcaccccgaattttagcaactcttaataaataaaaacccggtcttagtgttaaccccgaacaatctaggctgttattgatgaaggtaagccccaacatcatagacctctcatgaaaggcaagcttgtcatacatttccatgttattgtttccagatcctggaggagccccacctaatcaacgcgggtacattgagagtgtatcgcccatg

SEQ ID NO: 14499 - DNA, 450 bp, Gossypium hirsutum
  Clone ID: LIB3145-012-Q1-K1-B9
aagaaatcgttgggattcacctttgttcgagctatgggctcataatgatggagtggagagatcttctattgccattgtagatgtggtttcgtatttgacaaaaaaagcagactcgaaatctcgggatgttaagattttgcagccaaccattgccacacaaaatacccggttttcagaggcaaattcactgtatgagatggacagagccacgcaggaggtgattaatgctattgtggaagcacaatcccagtcaattggaggacctcttgccagtatctccattggtcaaggtttaccgaatatcgatatttctagatcggttgggttgccggagctacggagattgcggagaacattcatcaagttaacaggacaaacaagtttgagtggacgacctcccccttccgattccagcagtgcaaagaggatgtttgtagactatctgaatcg

SEQ ID NO: 14500 - DNA, 150 bp, Gossypium hirsutum
  unsure (1)..(150): unsure at all n locations; Clone ID: LIB3145-012-Q1-K1-C1
cccacgcgttcgcccacgcgtccggttgtattcggagccaggttgatcggcattgacaacaacccaataaagcttcaaatctgggacacggcctntttttatttatttatattcataattttggtcttattttctacacttttaattttt

SEQ ID NO: 14501 - DNA, 450 bp, Gossypium hirsutum
  Clone ID: LIB3145-012-Q1-K1-C10
cccacgcgtccggatggctcacatttgaccttaccaaccaaacctactcttctttggtttccctttatttttatttgtttggtatttttaggttcaaccccagcacacagagtttgtggttggttagtggcaaccacaagacaacaatattaagttttgggttcagtttgatcagctattctgtgctgcccttcttcttcttcttcaaacaagcagaaaaacaagaggaaaaaaatgggtggagaaagaaaggtctacactttggctgaggtttctcaacacaaccatgctaaagactgttggcttgtcattgagggcaaggtatttgatgtgactaaattcttggaggaccaccctggtggtgatgatgtcttgctgtcttccacagggaaggatgcaactgatgattttgaagatgttggtcatagtagcagtgctcgagcaatgatg

SEQ ID NO: 14502 - DNA, 451 bp, Gossypium hirsutum
  Clone ID: LIB3145-012-Q1-K1-C11
cccacgcgtccgcagagagtgcctcagttcaggcaatattagattggcagagaaggacgatggacatgatgtataaggatgttgttcaggctctcagagccaagggtagcgatgagaatcccagaaactatttaacatttttctgccttgggaaccgagaggttaagaagagtggagaatatgaaccttctgaaagacccgaccctgatacagattatgccagagctcaggaggcccgtcgtttcatgatctatgttcatgctaaaatgatgattgttgatgatgaatacataataattgggtctgccaacatcaaccagcgatccatggatggtgctagagactctgaaatagccatgggagcctatcaaccatatcatttatcattaagggaaccagcacgaggtgaggtccatggtttccgtttgtcactgtggtatgagcaccttgg

SEQ ID NO: 14503 - DNA, 407 bp, Gossypium hirsutum
  Clone ID: LIB3145-012-Q1-K1-C12
cttgaatgagatcgcgagtgagggaccatatggaccctagcgcatatccgcgaacccgccactggttatcgctgctgttctggaaaacacatgacactctctggacacatgaagacactcttctacttgaaaataacattggggacagcgggcataatgaactaaccctacatacgctgagattaccaattgagggatataatacaatgaaatcctgccattgttatagcaatttgtgaaggcagtatggcgcatgatactctctctgtaacatttcatatttcgcggctgaataagtggttactcgctgcatgaccatttcagttgactgtatactcactacgtactgaaaactcaccagatatgttcttcactccacacctgaatattctcatgttcgagctctg

SEQ ID NO: 14504 - DNA, 388 bp, Gossypium hirsutum
  Clone ID: LIB3145-012-Q1-K1-C2
gaagcttcaagtgctaaaatctagggatttgcgggtggagaagacgagagcccatctctctgcttcaaagctcctgtccaggtagaattctcttcttcccttgcgttgtgttctttgctgttcaatcgccatggcttcaaagcggattttgaaagaactcaaggatttgcagaaagatccacccacttcttgcagtgctggtccagtagctgaagacatgtttcattggcaagcaacaatcatgggaccctcagatagcccttatgctggaggtctgtttttagttactatccatttccctccagattatcctttcaagcctcctaaagtcgcgtttatgaccaaagtcttccatcccacattcaacagcatggaagcattgtcttga

SEQ ID NO: 14505 - DNA, 408 bp, Gossypium hirsutum
  Clone ID: LIB3145-012-Q1-K1-C3
cccacgcgtccgcccacgcgtccgcccacgcgtccggacaatttactcaccggtcagattcctcaacaattaggctttctatcacggttgtcagcttttgatgtttcttacaacaagctttcggggccaataccagcctctttagggaacagaagtgggaaccagccgagtttcaatgtcacttcttttgaaggcaataaggatctttatggataccctttaccacccatgaaaagcaaagggttgtcagttttggccattgttgggatcgggttaagaagtgggcttgctagtttggtgcttagttttacaggagtttgtatctggttgaagattagagatgaaaagatggctgccgaagaagggaagatgagtcaccctatgcctgattattaaaagcttgaatct

SEQ ID NO: 14506 - DNA, 382 bp, Gossypium hirsutum
  Clone ID: LIB3145-012-Q1-K1-C4
gggtgttaatggagctttatttgttctaagggagatcctgtttattacaagaccacttatttatgttttgttcattagaagatacggaattaggtcatggattccttggtttctttctctgggtgtggacttcattggatacggctttctatcacatgttacaaaatccaggatggttgaaagagaacaatggttccatctttctgcctctgaaaaggatgaggttaaacgacggaaactgttgtgggcactttacctcatgagagaaccattctttagcaagtataccaggcaaaagcttgccagcactgatagcctattggagcccgctcctttaattgggactctaacatcaaaactggttgagcttataattgagctc

SEQ ID NO: 14507 - DNA, 347 bp, Gossypium hirsutum
  Clone ID: LIB3145-012-Q1-K1-C5
gctagtattaacccaatcgactggaaactacaggacggggtagctgggccattgttacctgggaaattcccccacattcctggtaccgatgtagctggagaagtcgtacaagttggatcagaagtccagagtttcaaagttggggagaacgttgttgccgtacttggtaatggaggtgcactagctgactatgctgtcgctaatgaaggttccacagtggcaaggcctccagagggatcatcccgtgaagcggcggctttgccaattgctggcctcgcagcttaccagtcactcacccagcctgctgggctcaaactctatggaaccgagccggatgcgaatgtatt

SEQ ID NO: 14508 - DNA, 347 bp, Gossypium hirsutum
  Clone ID: LIB3145-012-Q1-K1-C6
gttctctctctctcttattagaaattagacactactagacttgtagaaatgcaagggctcgtcttgttgccggtactcctttgcgccacctaccatatcgctctttccgcgaccaacgttacggtggcggacgggctgttagataatggtaactttgagcaagccccgaatgcctcaaacatgaagggcacggttgttgtggggcgttatgcaataccaggatgggtaaacgaagggtttgtggaatacataaagtccgggcaaaagcaaggggacatgttgctggtggtgcctgagggagcctatgcagtcaagttggggaacgaggcttcaatcaagcaggagat

SEQ ID NO: 14509 - DNA, 327 bp, Gossypium hirsutum
  Clone ID: LIB3145-012-Q1-K1-C7
cggacgcgtgggtttggctctcacctccatcatccccaaccgcaggcgtatttgccttttgaagatgattttcggcctcaagacccctccttcactctcgatttcgacggagcaaggaggagtcaacgacaaactctcgaggtaagcctctttcgttttctttttcgaataccagaatcacaaacccacgaaagaaatgaaaaaaaatagaaacggcgggagtaaagtatggagggattttgattcgaaagtcacctttttttgattactttgtatcgagcgtgtgtattatctctgtgaacgtaaccgttacaaagattaaaagct

SEQ ID NO: 14510 - DNA, 449 bp, Gossypium hirsutum
  Clone ID: LIB3145-012-Q1-K1-C9
caaagaacaggcattctaactgacaaggtcgctggcctgtaaaatcggcaaagttcattctagatttgctgaagaatgctgagagtaatgccgaggttaagggtttagacgtcgatgcactccatatttctcacatccaggttaaccaggcccaaaaacaaaggcgtcgtacttaccgagctcatggaagaatcaacccttacatgtcctctccttgccacattgagttgattttgtccgagaaggaagaacctgtcaaaaaagagcctgagactcaattggcagcaagcaagtccaagaagtcccaagcttcttcttgagtgaacaaagtttgaaactttatcaagtcagttaatgtagtgatgtctggtctttggatttcatacactatttttgaagtttttgacattaagatgtgttggatggttttttatttcaaagcatgtttt

SEQ ID NO: 14511 - DNA, 398 bp, Gossypium hirsutum
  Clone ID: LIB3145-012-Q1-K1-D1
atttagatttgtatcctagagacaatattattaagagaaacagtcacaaaccttgaaaggattagttttcataaaccataaaaatggagatgaaagatacttttggttataccaaaaataaatatatcaacattgcatcaataaagtcttttcgttcacctactttgtaacttgggaattaaattctaacttgaatatgacatggagcatgtttagaacacctgaatcaaatttatatacctaatatatgaaaactttgtatctaacgtgtttgttaaagaaaaaaataatatcattaaaatttatgaatgccatttattaacgcattagatccaagatgcctatgcaatcatatacgttaaaatttgagccacgagttcaaaatatgctcaacatca

SEQ ID NO: 14512 - DNA, 409 bp, Gossypium hirsutum
  Clone ID: LIB3145-012-Q1-K1-D10
cgcccacgccgtccgcccacgccgtccggtcacagggacccctaaaaggatacgaccagctactgaatcttgtcctggatgaagctgtagagtttcttcgagaccaggatgatccgttgaagactactgatcagactaggcgtcttggcttgatagtttgtaggggcacagcagtcatgctggtgtcacctaccgatggcacagatgagattgccaatcctttcatccagccagatggagcctgatctgatccgttttcaaaatatggcatttcctttgctctactacttatatattctcttaacattttcaagtctgtatttctatgagcatgttgttatctctttgaaagctaccaaaaaaccaaaccatcaaagccttaaatcttaatatcatttggagttgaaaa

SEQ ID NO: 14513 - DNA, 432 bp, Gossypium hirsutum
  Clone ID: LIB3145-012-Q1-K1-D11
cccaatgctggctctgatgttgttagcatgaagtgcaaagctgatcgggttgatgggggttatcttctaaatgggaacaagatgtggtgcactaatggtcccgttgctcaaacattggttgtttatgcaaagacagatgtcacagctggctcaaaaggaattacagcatttattgttgagaagggaatacctggatataccactgctcagaaattggacaaacttgggatgcgaggaagtgatacatgtgagcttgtctttgagaattgcttcattccagaagaaaatgttcttggcaaagaaggaaaaggagtttatgtattgatgtcaggactagatttggagagacttgttttgtccgctgggcccattggtataatgcaggcatgtcttgatgttgttcttccttacatacgagagaggtcacagttt

SEQ ID NO: 14514 - DNA, 335 bp, Gossypium hirsutum
  Clone ID: LIB3145-012-Q1-K1-D12
cccaatgctgcctctgatgttcctagcattaagtgcatagctgatcgcgttgatgggggggatcttctaaatggtaacaagatgtagtgcactaatggccccgttgctcaaacattgactgcttatgcaaatacagatgtcacagctgtctcataaggaattacagcatttattgttgagaagggaatacctggatataccactgctgacaaattggacaaacttgcgatgcgaggaagagatacatgcgagcttgtctatgagaattgcttcattccacaagaaaatgatcttgtcaaagaatgaaaaggagtctatgtattgacgtcaggact

SEQ ID NO: 14515 - DNA, 394 bp, Gossypium hirsutum
  unsure (1)..(394): unsure at all n locations; Clone ID: LIB3145-012-Q1-K1-D2
attgcattactcttgataagctatatgttgcagagcagaagctttacaaggaagtaaaggaggaagaagttaccaaattggagcttgaaaagaaattgatgttgctccaaaagcaagatgaaaaccatgactggaccaagactcagaaaatcaaatcaagtgttgagaatctggagaatgacatgacacgcttgcaacattcaataagtacagcctgttcatctatattggagctcattgatgaggagctttacccacaactggttgcattaacttcaagtctgatggggatgtggaaaatgatgtacaaatctcatcaatttcagaaccatatttcaaagcagntgaatcatctcactgatcatttaagcatggatttgactactgaatcccg

SEQ ID NO: 14516 - DNA, 380 bp, Gossypium hirsutum
  Clone ID: LIB3145-012-Q1-K1-D3
gcgtgtcatagcagagagactctctgaggaagaaattggtggcttgaaagagttgttcaaaatgattgatacagacaacagtgggacgattacatttcaggaactcaaagatggtttaaagaaagtgggatctgaacttacagaaacggaaatcaaggatttaatggaagctgctgatattgataacagtggaacaattgactatggtgaattccttgctgctacactgcacataaataagatcgagagagaggaaaacttagttgctgctttctccttttttgacaaagatggtagtggttacatcaccattgatgaacttcaacaagcttgcaaagagtttggtctatgtgatgtgcatttggatgagatgatcaaag

SEQ ID NO: 14517 - DNA, 391 bp, Gossypium hirsutum
  Clone ID: LIB3145-012-Q1-K1-D4
cccacgcgtccgttgcttcacaatggcctctacaaccatggctctttcttccccatcattcgccggtaaggcagtgaagttctccccttccacccctgaaatccggggaactggccgtgtttccatgaggaaaaccaccaagcctgttccttctggtagcccatggtacggtcctgaccgagttttgtacttgggtccactttccggtgagccaccatcttacttgaccggtgagttccctggtgactatggttgagacactgctggactctcagctgatcccgagacctttgctaggaaccgtgagctcgaagtcattcactgcagatgggccatgttgggagctcttgggatgttttccctgagctgttggctagaacgggtcaagttc

SEQ ID NO: 14518 - DNA, 395 bp, Gossypium hirsutum
  Clone ID: LIB3145-012-Q1-K1-D5
taccatcaaaaccagctagctaaatcaaccgcatttcaccaggatggctagaggattgaagaaacacttgaagaggctcaatgcccctaggcattggatgcttgacaagcttggtggtgcttttgcacccaagccatcatctggaccccacaaatccagggaatgcttgccattaattctcattctgcgaaacagattgaagtatgctctcacgtacagagaagttattgctattctcatgcagaggcatgtcatggttgatgggaaggttcggaccgataagacttatcctgctggtttcatggatgttgtgtccattcctaaaacaaatgaagactttcgtctcctttatgacaccaaaaggcggtttcgtctccatgccattcacggtgatg

SEQ ID NO: 14519 - DNA, 378 bp, Gossypium hirsutum
  Clone ID: LIB3145-012-Q1-K1-D6
gtttacacataaaagaaaaaaggaaagaaaaatagtaaaatcgtaaaaggaaaaaaaaacttcaagaatcacctttaacaagtgttgtaattatcgatctctgcttgcttttgattttgtatctatattctctctaaccaaaagtaaaacaaaaacccctcgtacaaacaaaaaatcaaagcttttatagccaaatacaaacggttttctggccattttcttgcttcaaaatcgcatgttgtggagttgtggaggagtgcatgatcgtggggcatggacgcacgagccaaggggtcgtgctcggtgtgccgactcacgtggtggaggggagcaacagctctttccttttttttgtgaaaagttagtctaatattgggc

SEQ ID NO: 14520 - DNA, 341 bp, Gossypium hirsutum
  Clone ID: LIB3145-012-Q1-K1-D7
gaggctaataaacaataaagaaaaaaaaattgaaggcctcagtttcaaaatggcttcaatgaggctccttgcaataattgccattctggttcagggcttagttaatggtgattctcacgaattgcctagtttcgatccggaactagccgtagccaaagtttgggaagttgctgttggcaaggtcggccctgatgtttaaggtgttaatgtggcggattccggggccattcctgatagaaccaccattgacaccttcattgctattttgtcattttatgccacttgcgatcgcggttgcctcaccattgatgaacttcaacaagctttgcaagagtttggtc

SEQ ID NO: 14521 - DNA, 307 bp, Gossypium hirsutum
  Clone ID: LIB3145-012-Q1-K1-D8
gattgaacagctgtaggaaaccttaatgattactggtttacttatccctgtaactttgtatcccactggcaaatgggcaagttctttaatataaggtttaagtgacttggcggggaaagggatctttttctttgatgagcattattccattattggatacagttgttcatcggatggcaagtatgatatcaaaacgttattatatgcctcacctcatgtaactcatgtctggtctcttgcttgatgtaaagtggtgaagaatgttgtggttaatggtacctattagcttgtgagcggtaaatatgag

SEQ ID NO: 14522 - DNA, 445 bp, Gossypium hirsutum
  Clone ID: LIB3145-012-Q1-K1-D9
gctggtatctctaaagatggtcagactcgtgagcatgctttgcttgcttttaccctcggtgttaggcagatgatttgctgctgcaacaagatggatgcaacaaccccaaagtactcaaaggcaaggtttgatgaaattgtcaaggaagtctcttcttatcttaagaaagttgggtacaaccctgagaagatcccgtttgttccaatctccggttttgagggtgacaacatgattgagagatctacaaacctcgattggtacaagggtcctactctccttgaggctcttgaccagatcaccgagcccaagaggccctcagataagccacttcgtcttccacttcaggatgtctacaagattggtggtattggaactgtccctgttggtcgtgttgaaactggtgtcctcaaacccggtatggttgttacttttggtcctactggtc

SEQ ID NO: 14523 - DNA, 399 bp, Gossypium hirsutum
  Clone ID: LIB3145-012-Q1-K1-E1
agaagatttatgataacatgcagaagcctgcattcgtcttcgatggccggaacatcgtggatgtagctaagctgagggaaatcgggtttattgtctactccattggaaagccattggatgaatggctaaaggacatgccagcggtggcataagactgtattctggaccatggttgagctacaactttataatctcgaggaaaacattatccgatagtatactttataacattcatttcttttagaattaagattatgggatttcaacttatattggattacttgggagagctgaaacattagtgtctggatctgtccttagccgccacagtatctgctttgttattagtttaatataataaaacatttaccatttaattttataccacactttacctta

SEQ ID NO: 14524 - DNA, 436 bp, Gossypium hirsutum
  Clone ID: LIB3145-012-Q1-K1-E10
cccacgcgtccgcggacgcgtgggaaaacagttacttggatataatttccccttgtcaaaccgaccctctgtaagcaatccgccatggacacattagcagctcgattcaagctcattgttttgccctttctatccatttctttgcttttcttaccttttctccaggccactgatttcgattactgcgataataaaggtaattacgttgtaaaagtcgatggagtcgacatatcacctaatcctgtgattagcgggaaaccggccaccttcacgatctcagcttctactggtcaagctatcactggtggcaaagcggtgattgacgtttacttcttcgggtttcatatccatcaagaaactcatgacctttgtgaggaaacatcttgccctattactgttggcaactttgtgctctctcacaatcaagttttacctg

SEQ ID NO: 14525 - DNA, 395 bp, Gossypium hirsutum
  unsure (1)..(395): unsure at all n locations; Clone ID: LIB3145-012-Q1-K1-E11
aattcccggggtcggacccaaacgcgtccgcgccctttcnntttcaatcnncaaatcctaaatctgttcactctngtcagttannacccctatgngtnctcgtaccgaagcaaaccagcaagtgtataatcaagccgtgtggtaaagtnctccacgtaaggcannactggctacgaaggggcggctcggaaggtcggcttccggcaactcggagtgagtgtatagaagcctcatcgttttagggcccggaacctgttgcttcttagagnnaaatcaggagagtaccagaagagcactcgagcttttgatcaaggaaacttccattccaaagggttggtgacgagaaatcgctcaagactttcaaggactgatttgagtgttccagggagtagcgc

SEQ ID NO: 14526 - DNA, 377 bp, Gossypium hirsutum
  Clone ID: LIB3145-012-Q1-K1-E12
cccacgcgtccgctccgatagaagaaaaaaaaaagaaaaaaagaaatttgcaaagtcgcggcgaaaactcaaatgctaaacgggaagaagcctttgttctgaaatcaaaattagggtattgcctgtgtacataatgaggaaccaaactttgttcggcaccaagcttgtatttgatacgattgttgggtttctttatcataatcagccgcactggaagtgtctttgtcttaaaaaaaaaaaaaaataaaaaaaaaaaaaaaaaaaaaaaaaaaaaaaaaaaaaaaaacaaaatataaaaaatttaaaataaaaaaaaataaaatattaaaaatttccttatcccaaattttaaaaataaaattaatggggggggccct

SEQ ID NO: 14527 - DNA, 393 bp, Gossypium hirsutum
  Clone ID: LIB3145-012-Q1-K1-E2
gaagaatgtttcttggccgggacaaaagatggaagtcttcttgtgtattctatagaaaaccctcaacaccgtatagctagcgtctcccggaatccaaaaaccaaagtttctttagcaggctaagcaatgattcaggattggaatgactggtttgacaattacggattgattggcggtactgatctcaggaagcatttgaaaagcctatccattccatttccaggtactggggccatactgatctatatatttagcacatgaagaatactgattagtctttcaacagcgttttattatccaacatacaggattcttacctattttgtaacatttaagatatagggaaggttaagatgtgcaaaacttttttaagaaattcaatttgcctatttt

SEQ ID NO: 14528 - DNA, 277 bp, Gossypium hirsutum
  Clone ID: LIB3145-012-Q1-K1-E3
ctgttctgtaaaccaatttggtagtttcgtatctggataatatctattgtaaacttaaaagaacaaagctcattgtttcttatgtcctactgccaaaattttctcctacctgcatttgctttgaatttactcaaataactaaatgataagctaccattctctgttccttgtggttaaaaaaaaaaaaaaaaaaaaaaaaaaaaaaaaaaaaaaaaaaaaaaaaaaaaaaaaaaaaaaaaaaaaaaaaaaaaaaaaaaaaaaagaaaaaaaattttgg

SEQ ID NO: 14529 - DNA, 394 bp, Gossypium hirsutum
  Clone ID: LIB3145-012-Q1-K1-E4
ccatcaccggatcctctcaatggaagagatgttgccaaatctgaaccttctgcgaatggaaaatttaccggtccttcacatggctctgaacaggacagttacaatctaccctcccccaaatctcccgaagatgatgattttgatgacaataaatctggggaattggatcgtagcaatcgacggaggcagagacctcaacgatattcagcgaaggaattcgttgaagctgtttcggataacgaggctgactttgacagtgatgatgatatagttggagaagcagtatatgatgaggaatacctaagataaagaaaacagagaaggcaatccagcagctcagaaagagatgaggaataccgttgggacgaagaaatgctgaagatgaggaggagga

SEQ ID NO: 14530 - DNA, 394 bp, Gossypium hirsutum
  Clone ID: LIB3145-012-Q1-K1-E5
tcttgagtaacacactcatgaacagaatctcttatgacctccgtgtacccattgattcctattcgcccagatagcccaaatggcgcagacaaagatgcagcattccttctctttactgtgcaacaatacccagggtagggaggtagttgagaatggtattccaagctgtaatacgtacctttgaggggagattacaattccacagtttcttgtaacattttgtaattacaggcaaactgtaaccattactgttgtaatcattgccttttaataatagtttgtaaccactgcgcacagtatattggcctgatgcttctcccctccatatcaaaagatcattatgtgaacgctgggccaaagggatttgcaaaaacttttgaacatcaactttcgc

SEQ ID NO: 14531 - DNA, 133 bp, Gossypium hirsutum
  Clone ID: LIB3145-012-Q1-K1-E7
agaagatcaaaggagccacgcatcagcagcaatttaaatattctagcccgttcccaccctccaacaaatcccagtctttagcaatcctttagctgcccatacactcttccagatatatgaaggtagttgtcct

SEQ ID NO: 14532 - DNA, 335 bp, Gossypium hirsutum
  Clone ID: LIB3145-012-Q1-K1-E8
gttgatccgaaagaacatccaatgctacttgctgagccttcttccaacactcaacaacagagggagaggacagcagaactcatgttcgaaaagtacaaagttcctgctttgtttttggccaagaatgcggttcttacatcttttgcttcaggacgtgctacctctgttgttgttgacagtggtggaggatcaactactgttgccccagtacatgatggttatgttcttcaaaaggcagtgtcttcttctcctattggaggagaatttcttaccgattgcttgatgaatagcttgaatagcaaaaggcatcggataaaacccgaggtactcttttt

SEQ ID NO: 14533 - DNA, 445 bp, Gossypium hirsutum
  Clone ID: LIB3145-012-Q1-K1-E9
caaccactttattttatgtactttgcggtcttattggatatgcagcatttggcaacgatgcaccagggaattttcttacagggtttggtttctatgaacccttttggctgattgactttgccaacatctgcattgccatccatctcattggtgcataccaggtttttgcacaacccttattcgggttcgtggagggttggtgttccaggaactggcctaatagcaagttcattacaagtgaacatgctgttgatgttccattctatggtatttactacctcaacttcttcaggttggtatggaggacggcatacgttatcataacagccgtggtagccatgatctttcctttcttcaatgatttcttgggtctcattggagccggctcgttttggccgttaacagtctactttcccatcgagatgcacatcgcgcaatcgaaaac

SEQ ID NO: 14534 - DNA, 404 bp, Gossypium hirsutum
  Clone ID: LIB3145-012-Q1-K1-F1
ggactctgctaactggtgagtgagcgcctgccgattcttaaactgatgccttcaatctctgtctgatcaccaattcccgccgctatcacacccgatattgaccgggcgctattaaagatcattgagagaaacctgttttcaccaaagcggaccaactccgccctgacactattgttcacactcttactggcaaggttgccaatacaaagatggtatcgcaaaagggtcaggctgatggtcctcaggtgcgtcaaatgcgaattgctgaacgcttggtacgagatgaaactggaatgattatctttactgctagaaatgaacaagtggacttaatgaaagagggtactaccattactcttcgcaatgcgaaaattgacacgtttaaaggatcgatgaggcttgct

SEQ ID NO: 14535 - DNA, 454 bp, Gossypium hirsutum
  Clone ID: LIB3145-012-Q1-K1-F10
gtcactcttgggacccttataccgataaggccaaaatgatccaccatgatggtccgatgcttaccaagaacgttaaactagccttaatatggtacggagattgtggaaaagacataaagaatacgatgaggaatttcataaaatcgttggtgttgccaggcaaagaccaccttcaacctcaagtcacccgttggtgggaggtggtggaaagttatcaagccatgatgccaggcgcaaagcctgggaaaagccccaaaatcaaggtggaagtggtgaaacaatcgactaataaatcatataaacatggaaaagtcttgactttgcaagcacatatcccaattcttatcgaggaactcactaagggcgatactagtgtccttcccgtcatcgttgctgcaagagatgtctccattcaaggactttgcaatggaaagtgtgccgatcatctacttac

SEQ ID NO: 14536 - DNA, 432 bp, Gossypium hirsutum
  Clone ID: LIB3145-012-Q1-K1-F11
cccacgcgtccgcccacgcgtccgcccacgcgtccggttcgaaacctctgattttaatgctattttctccgtcgccaatagacttgaaaagcttcatggtggaaaggtgtatgtggggcttcacattccggatgtcaacactggctctcgacagaatatcgatattgttcttgttactaaaagagaagcaacagttatttctgtccagaatctagcagggttcatttctataaatgaggatggtagctggacctgtgaaggtggcagtagccaaagtgcagtgtgtaatcctgatcccgtttcagaggctaaaaaccaagcttcagtcctcgaatcatatattgaacaaaggggagttgctatacctgaaggatatttttcatacaaagttgtaattcctaatccaaaattccgtaccttttataaacattt

SEQ ID NO: 14537 - DNA, 317 bp, Gossypium hirsutum
  Clone ID: LIB3145-012-Q1-K1-F12
cccacgcgtccgattgattaatctgaacaactttttcctattattataatattaataagagtattcaactcttattgaaggcaaaaaaaaaaaaaaaaaaaaaaaaaaaaaaaaaaaaaaaaaaaaaaaaaaaaaaaaaaaaaaaaaaaaaaaaaaaaaaaaaaaaaaaaaaaaaaaaaaaaaaaaaaaaaagggcgggcctttttaaagaataaaatattacgtcccattgcatgcaacgaaaaagttttttaatacgcgaacctaaatcaaattcactggccgagttttaaaaacgtggtgacgggaaaaaccct

SEQ ID NO: 14538 - DNA, 355 bp, Gossypium hirsutum
  Clone ID: LIB3145-012-Q1-K1-F2
tttgctttcgaataaaaaaaaaacaacacaaaacgaagaacaataaaaaaagaggaacgcccgcaaatctaaatcggaaaatcgccttcgaataggtggccttttctttgtattcaatatgcaaatagtgtctgtttgtattgcgttcgtattgcttgcgttcgttccccaaaaaaaaaccagtttacaatcgaaattaataggctttatagccgaatgtaaaaaaaataaaataaaatacaattcttctttcttcgtatttttgttgctttcgtttgttctcttttgcaggtaagagtacggagctgtgtgttggcccttgcgtgaggcatacgaggactgcgtgctggtcgta

SEQ ID NO: 14539 - DNA, 390 bp, Gossypium hirsutum
  Clone ID: LIB3145-012-Q1-K1-F3
cccacgcgtccggtcctgattcaatgggatttggccctctcattccgacggagactgaaaggtctttgatggagcgtgtgagacgggaactcaaacacgaactcaaacagggttacaaagagaaaattgttgacataagggaggaaattttacgtaagagaagggcaggaaagcttccaggggatacgacgtcggttttaaaagcttggtggcaggcacattccaagtggccatatcctactgaggaagataaggcaaggttggttcaagaaacagggttacaattaaaacagataaacaattggttcatcaatcaaaggaagcgaaactggcacactaatccatctacttctaccgccttgaagaccaaacgtaaaactattgcaggtg

SEQ ID NO: 14540 - DNA, 344 bp, Gossypium hirsutum
  Clone ID: LIB3145-012-Q1-K1-F4
cgggcttattagatgggaatgggggatattcactgggttatggaggtaaccaaaggaaccgggtgcttggtggggatttcccctggcacatggttgtggccacagtggaaaagctgcgcgtgttgaaaagctcggaactgtctgcccttagccttggaagcagtaaacgagggaagtaccggcttgactctgtctccaccaaagtttgaagatgaggcattgaaatttgaattatgttcatgttttgacattttgttccctgttttgcctttaaacctgacgcacttactgtatatattagtaggtcggtatgtaatttttgacttcgttttctttctttccct

SEQ ID NO: 14541 - DNA, 396 bp, Gossypium hirsutum
  Clone ID: LIB3145-012-Q1-K1-F5
ggcagccgccggttcctttgaccaccaccaccaccaccaccacctctctgtgatcaaccttcactctctttttcaaggaaattagctgaaatggctggaggattaatccaccaggttttaaggaggaaatttcaatcacagtctgctgttcaagctttatcatggttttcatcaaggaaagttaatgacgatgcgggttctgctggtatgaggaccgttgcactccttggagctggtgtttcaagtttactaggttttgcaacagtagcatctgctgatgaggcagaacacggtttaggagttccaaattatccttggcctcacgcaggcatcctcagttcatatgaccatgcttcgattcgtcgcggtcaccatgtttaccagcaagtgtgtgca

SEQ ID NO: 14542 - DNA, 262 bp, Gossypium hirsutum
  Clone ID: LIB3145-012-Q1-K1-F6
aacttagaggcaaagatgctgatatcactcaagaagctgcagaaattcaaatgtacattgaaactcttcaaagcctaccaaaaactagaatgctggatttgtttcaaccaaaatacattcgttcagtgatgattggagttgcattaatggtctttcaacaatttggaggaattaatggaataagtttctatgcaagagaaacctttgcatcagctgggctttcttcaagaaaagctggaaccatagcttatgcttgtgttca

SEQ ID NO: 14543 - DNA, 223 bp, Gossypium hirsutum
  Clone ID: LIB3145-012-Q1-K1-F7
gttgcacccactattgttttgaagatcatatgaagaattaaatttacttaaaaaaaaaaaaaaaaaaaaaaaaaaaaaaaaaaaaaaaaaaaaaaaaaaaaaaaaaaaaaaaaaaaaaaaaaaaaaaaaaaaaaaaaaaaaaaaaaaaaaaaaaaaaaaaaaaaaaaaaaaaaaaaaaaaggaaaaaaaaaaaaagggaaaaagaatgaaaagatgaacatgt

SEQ ID NO: 14544 - DNA, 379 bp, Gossypium hirsutum
  Clone ID: LIB3145-012-Q1-K1-F8
gaaatgtagaggagttacttcagaaggggcagattggttaagagcaactcgaggatcacttgtcgttaatttggatatcaatttggatatgggcgagcatttagatgcaagtgccagtgatggtggggcacaagataatggaattgaatttcctccaatggtgggcagtcaaattggagcttctagtattgcatcgagcagtacaggtcgatcgacatcattcaagttgttagggcttatgagtgggaggagttttgtggcttgcacattaaggaggttggcaagtagttctcggagttaactcggaatttgcacaaccaccaaaaggaaaagagggacaatagaaaagcactttggtatgaactggttacattatttt

SEQ ID NO: 14545 - DNA, 446 bp, Gossypium hirsutum
  unsure (1)..(446): unsure at all n locations; Clone ID: LIB3145-012-Q1-K1-F9
aaacttttggggtggagtccaaaagggttgtggatattggtaccattgacggtttccagggacgggaaaaagatgttgtaatattttcttgtgtgagggctagcaaagatagaggcataggctttgtgtctgattttcggcgaatgaatgtcggaatcacccgagcaaagtcttctgtactggtggttggttcagcatcaacgctgaagagggacgagcattggaacaacctagtagaaagtgctgaggagcgaggatgcttatttaaggtagggaagccttatacatcattcttgaatgatgaatatctagaatcgatgaaggttattaacaaggatgcacaaatgatggaagatatggatgaccttgataatgataatgtagcagcctataatatggccggagatgctgatcaagctccngtggaagacaatgattatggagat

SEQ ID NO: 14546 - DNA, 392 bp, Gossypium hirsutum
  Clone ID: LIB3145-012-Q1-K1-G1
cccacgcgtccgctgggtcaaaaaaggggaagagctctttttgagctggaagatggtgagcagcttaagaagaaacttcggctaggttctcctgcttctcagtggatcacagtatatagttccagaaatccaatgaaacagaggtatcactacaatgttatagattcaagactccagcaacatgtggagaaaggaaaagaagatggcttgtatattagctgtgtagcttcatcattgaatctgtgggccattgttatggatgcagggacagttttcacatctcaggtttatgagttatctcctatctttttgcataaggaatggataatggaacaatgggagaagaattactacattacttcagttgctggtgcttgcaatggcagtgcact

SEQ ID NO: 14547 - DNA, 442 bp, Gossypium hirsutum
  Clone ID: LIB3145-012-Q1-K1-G10
cccacgcgtccgtgaatcccaagtccaagcttctgtcatttgtgcaaagaggctcgatattcacctcagattccgtagtggaggccatgattacgaaggtctctcttacgtatcccaaattgaatcacctttcgtcattgttgacctctccaaactgcggtcaatcaaagttgatatccaggacaacagtgcttgggttgaagctggtgccaccattggtgaagtttattatagaattgctgagaagagtaacatccatggcttccctgcaggtctttgtactagcctaggcattggggggcacatcaccggcggtgcatatggttcaatgatgaggaagtttggcctcggtgctgataatgtcatagatgctcgaatcgtggatgttaatggaagagttcttgaccgagcagccatgggagaagatcttttctgggcaatt

SEQ ID NO: 14548 - DNA, 447 bp, Gossypium hirsutum
  unsure (1)..(447): unsure at all n locations; Clone ID: LIB3145-012-Q1-K1-G11
gaacaaagcaccattaccgccgtcaggtgcattaggaaagcaagcagtggcactgaggatatcagcagatgcagcagcctttatcggttgcaagtttattggagcacaagatactctttacgatcacattggcaggcactacttcaaacgctgctacatccaaggttcagtagatttcatattcggaaatgggctttccctctataaacactgccacttgcatgccgtaaccaacagctatggagccttgacagcccagaaaagggaaagcatgcttgaggaaacaggcttctccttcgttaaatgcaaggtcacggggtcgggcgccctctacctcggtcgggcttggggcgttttctctagggtggtctttgtttatacttacatggacaagatcatcacccctagaggatggtatgattggngagacaaaaatagagaaatgac

SEQ ID NO: 14549 - DNA, 441 bp, Gossypium hirsutum
  Clone ID: LIB3145-012-Q1-K1-G12
aagaaacttaccaggattcccctagtaacggcgagcgaaccgggaaaagcccagcttgagaatcggtcgccatcggcgtccgaattgtagtctggagaagcgtcctcagcgacggaccgggcccaagtcccctggaaaggggcgccggagagggtgagagccccgtcgtgcccggaccctgtcgcaccaagaggcgctgtctacgagtcgggttgtttgggaatgcagccctaatcgggcggtaaattccgtccaaggctaaatacgggcgagagaccgatagcgaacaagtaccgcgagggaaagatgaaaaggactctgaaaagagagtcaaagagtgcttgaaattgtcgggagggaagcagagcagcgtcagaagttcgatgaactccagtagcagcttcagagcatgatgaagatgtttcagcaatcgcaacagtc

SEQ ID NO: 14550 - DNA, 324 bp, Gossypium hirsutum
  Clone ID: LIB3145-012-Q1-K1-G2
gaggtgtaagacctttgaaggatcatatctatctccacttgaatcacttgcctccagaggtgcttaaagagaggcttccaggtatctctgagactgctgccatttttgctggtgtggatgttacgaaggagcccatcccagtcttgcctactgtacattataacatgggtggaattccaaatcatcatggagaggtagttactatcacaggcagtgatccagattctgtggttcctggactgatggctgctggagaggcaacctgtgcatcaattcatggtgctaatcgagtgggtgcaaatttccttcttgacatagtcgtct

SEQ ID NO: 14551 - DNA, 358 bp, Gossypium hirsutum
  Clone ID: LIB3145-012-Q1-K1-G4
gccttctggattcaagcaaagggtccgctattatgagcggcaacggtgggcggccatgcgcggtgtcgattaatgccagatgatcagaaacctccccgaggggctccggagagatatcaagtaccatctttgcctggatttagttagacaggtaccattgcctcaacacatggatgatttggtcctagagaacatttgtgatcgtgtcaaatctgtaatttttaccaaaggagaaactataacaagggaaggcgacccagtacacagaatgctatttgtagtaaggggacatcttcaaagcaggcaagttcttagagatggtgtgaaaaagttgctgcatgttaggggccccgaaatt

SEQ ID NO: 14552 - DNA, 398 bp, Gossypium hirsutum
  Clone ID: LIB3145-012-Q1-K1-G5
attttcttggtgaaaatcagatctctactgtaaattaccatggcgaggtgcctgcagaacaaagggttgaaaacctgaacaagttcaagagtgatgatggagactgtcccacattggtttgcacggacttggctgctagagggctggacttggatgttaatcatgttatcatgtttgatttccctttaaactctatcgactaccttcatcgcactggaagaactgcacgaatgggtgccaaagggaaagtaacaagtttggtggctaaaaaggacttattgttggcagaaaggatagaggaggcaataagaaagaatgagagtttggaatctcttacagttgataatgtccgaagggatactgcaaggactcggattaccgagcagaaggggaagaat

SEQ ID NO: 14553 - DNA, 313 bp, Gossypium hirsutum
  Clone ID: LIB3145-012-Q1-K1-G6
cccacgcgtccgctctgcgttacttaaatctcttctttctttgctgatagatacaaagttctcaagttgactactgctccatcatcgaagagctgggtgaggagaagagagaagaaagcaaaggcaatcaagatgaaacgaacaaggaagaagagcctgcagagattgtactcaaagttgacatgcactgtgaagcttgtgccagaaaggttgctagagccctcaaaggatttcaaggagtggaggacgtatccacagatagtaaggcaaataaagtagtggtgaagggaaagacagttgaccccatcacggt

SEQ ID NO: 14554 - DNA, 377 bp, Gossypium hirsutum
  Clone ID: LIB3145-012-Q1-K1-G7
gcggccaacctgcaaagaagttatatcgagaggtgatgactattaaggtggaagaccaaaaagtttagttggtaatcatctcctcaaatattttgcgaataattttagttgtgtactttttgtgttttttaacataaggaagagtccctaaatagtggatgatacccatgtttgtcacttgtctgtactcttgctttgccgtgtttgatgatagatggtgtgattgagacttgaatcaagcaatatatggtgatgggaagactagaattttccattgcagtcaaagttatgtcttactactacaagacatgaatgatgtttttcttatttgggtaaactttttaaatgttaaaggaggataaagttttttcttttta

SEQ ID NO: 14555 - DNA, 362 bp, Gossypium hirsutum
  unsure (1)..(362): unsure at all n locations; Clone ID: LIB3145-012-Q1-K1-G8
aaaataatcaaattcggagttcttccggatcatcatcttcatcattactcaaaagctgtcaagatgattgatgaccaagaccttggcttcttcgcgaatttccttgggatcttcattttcgttctcgttatagcctatcattatgtgatggctgacccaaaatttgaaggcaactgaggattttgcactttttgtttgtgtctgcaatggatatttagatgataattttggtagactgagttgtttcagaaacgaagacgaaacaatgttgttaaaaaccttcaacaagttatggatataaatgtcatctaatggctnaaaaaaaaaaaaaagaaaaagaaaaaaaatttaagagggaaaaa

SEQ ID NO: 14556 - DNA, 448 bp, Gossypium hirsutum
  Clone ID: LIB3145-012-Q1-K1-G9
ctcaaaatgaaaaatcactaatgctggaaagtcagaagtcaccactgtgtcacacagatttaaatgatatcctcaactttgaggagtttgtgaaacatttaacaaatgaagagcagcagcagatgttgcagtacctacctccagtcgacattgccaaactttctgatagcctgcaaagcatgtttgaaagctgtcaattcaaggagaacctatgttactttcagcaactgcttgcagaaagggtttttaatatctctgtcccaggggtgaaagctgaagattgtaagactttgaaaagacttgcattatttaatttgactaaatcccaatgggtggaacgccgtcatgtacttaatagatgtcaagatagtattggagcgcctgtagttgctagaggaccaaccgccactacatcgaacaatttagtgatcatgatgagatcatgtga

SEQ ID NO: 14557 - DNA, 407 bp, Gossypium hirsutum
  Clone ID: LIB3145-012-Q1-K1-H1
ggatattgacacagagttgtctactgctgcaataagtccccagtcatttggtgtgccaaacatacctttcaagactggatgttcaaatgatgttgccataaacgatgcaggagttttaaatggtggattggggccaaccaaactcaacggatagcgaacatatacaaaggtacaaaagcgtggctctgtgggaagatcaatcgatgtgacccgctacaaagggtatgatgaactcaggcatgatctagcccgcatgtttggtatcgaaggacagatggaagatccacaaagttctgactggaaattagtatatgttgaccatgaaaatgacatattacttgttggtgatgatccttgggaagaatttgtaagttgtgttcagagcattaaaatactgtcatcccttg

SEQ ID NO: 14558 - DNA, 427 bp, Gossypium hirsutum
  unsure (1)..(427): unsure at all n locations; Clone ID: LIB3145-012-Q1-K1-H10
cccacgcgtccgattcacccatagcaagcaggacttctactgccattgagatacccacacagctggcaggaactcaaggtgacacgaacactgtgcgatatggtgaagagactataaataaacaagttaaatttcttgtccctgtcagcaatagcgagatggattatcctgatgctgagggacagcagattgaaagagaacttccctccaattggcgttcaggaaactcgccttatacacctgcacaggatgatcccagttcctcctatcctccttatctaccatcagtacttgaagagccttcatcttctttttctgaggctgcagaagatgatctgcttncagctatagaaggtctncaaatttcaggggaagcttatccaggaagggagctacaggcgtgtggatattctattaatggaacaac

SEQ ID NO: 14559 - DNA, 383 bp, Gossypium hirsutum
  Clone ID: LIB3145-012-Q1-K1-H11
ccggcgttcggcattttttattttaagaaagccagttagtaatctctctacacgcttgaatgaaaaagagagggtgccaggattatgaattgatgacaagccaaatgaatgaacatgatgatcatatcgctcttatctgccaaatctaccctggattttacacccaaattgcaacacaccacggggaaccgaagcccccacagcttgagattatgaacatggtaggggagaacaggcagtgttcggtcgctcaaaaatggacgcataacctggaacaagtcactctgcttgaacttaattttggtcactaacataaactacaatcagaaaggaaagaccggaatgctttagagcttgggacttgacccgttgacaggtttgct

SEQ ID NO: 14560 - DNA, 412 bp, Gossypium hirsutum
  Clone ID: LIB3145-012-Q1-K1-H12
gtcgttaacattttataccagcagagggaagtacggtccattcggtgaggaggtaggcacatatttcacttcaactacaacacaggggaaggtggtggggttccatgggagatgcagctcttacttggatgctattggagttcatatgcagcactggctgggaaatcagaaagcctctaagatgtctctcttcaaaattttcagttgaatatctattgctctgctcttttggtttagtataattaagatgaaactggtaccaaataatgaattattactatcttgattcacacacacacaaaaaggaagcccaatccaattccaggttcactctggtcctgttgacttgaaggattgttattgtaatctctatctctgagttgataaaataaatgaaagtgtatgctctatg

SEQ ID NO: 14561 - DNA, 397 bp, Gossypium hirsutum
  Clone ID: LIB3145-012-Q1-K1-H3
tgattttccatccgttaccgccttttgctaccttgttgctgctactggcttgcagagttgatggagcttatcattagctattattgacatttatgctcttctagtgatgcgttcacttcagaattatcgagttgttactttctttaccattggtgatgggatcgcatccactttgacatttgccgcagcttgtgcttctgcaggcataaccgttcttattgacaatgatcttgatatctgttcgcagaaccattgtgtgcagtttgaaactgctactgcaatggccttcattagctggtttactgcattaccttcatttctcttcaacctttggtcactggcatcccgatagaaggttacacagaaaaaatcggtgtaaatgatgcattttattatg

SEQ ID NO: 14562 - DNA, 325 bp, Gossypium hirsutum
  Clone ID: LIB3145-012-Q1-K1-H4
agatttctcatcagatacctgcttttgcttccttgtttctgctactggcttgcagagagaatggagcttatcattagctatgattgacattaatgctctcataatgatactgtcacttaaaaaatatcgaacttgatacttctctttaccattaggaatgcgatcgcattcactccgacatttaccgcatgtagaacatctgcatgcattaccggacttattgacaaagatcttgatatatggtcacaataccatgatgtgcagtgtgaaactgtgactcgcaataaactgtattaactgttttcctgctttacttaatcagtct

SEQ ID NO: 14563 - DNA, 397 bp, Gossypium hirsutum
  Clone ID: LIB3145-012-Q1-K1-H5
acgcgtccgtgattttacatccgataccgccttttgcttccttgttgctgctactggcttgcagagaggatggagcttatcattagctattattgacatttatgctcttctaatgatgcattcacttcagaattattgagtcgttactttctttaccattggctgatgatgatcgcatccactttgacatttgccgcagctagtgcttctgcaggcataaccgttcttattgacaatgatcttgatatctgttcgcacaaccatggtgtgcagtttagaactgttactgcaatggccttcattagctggtttactgtattaccttcatttcttcttcataccttttgtcactggcattcccgttagaaggttacaactaaaaaaatcggtgtaaatg

SEQ ID NO: 14564 - DNA, 372 bp, Gossypium hirsutum
  unsure (1)..(372): unsure at all n locations; Clone ID: LIB3145-012-Q1-K1-H6
gggaaaaccaaaagatggtgcttgttttttatagcagttgggaggaaaacaattaggtttggtatttttattcttcatcactattcgacaatttcgcatctttcacgttatttcaccactatttcttcgagcacttcattgcacttgtattcttgcgtcactttcgtctttgatgatttccatgcgtcggagtaactcgttttaacaaagcttctttatcagtttactcccatttggtatctttaaatgattgcattgcttanaaaaaaaaaaaaaaaaaaaaaaaaataaataaaaaaataaaaaatatatataataattttattatataaaaaaaaaaaatatatatattatttaatttattattatttt

SEQ ID NO: 14565 - DNA, 224 bp, Gossypium hirsutum
  Clone ID: LIB3145-012-Q1-K1-H7
cccacacgcacagccaagcgggcgatggtgaggggcgcttggggtaatctttggcccattggtgccgccgtcgtgcaggagttaaagacctttaacataatcaatggtggaccagacttacgagctaccagtctgtctgcagattacgatgctagccgaacgcttgatatgccctgtagtgcttgtgcaaccatcaccgatatggaaggaagctgcgatgcgat

SEQ ID NO: 14566 - DNA, 443 bp, Gossypium hirsutum
  Clone ID: LIB3145-012-Q1-K1-H9
cccatttctcaatttaagaaagccagaaaagaaaacactcgaaaagctagaaagaaaaagaaaatgagccaagattatgaaatgatgacaagccaaatgaatgaacatgaagatcatattgctcttatctcccaaatctaccctggattttacacccaaattgcaacacaccaaggggaaccgaagccccgacggcggcggaagaagaacaagggaggggagaacagccagtgggcggtggctaaaaaaaggaagcttaaccaggaacaagtcactctccttgaacttaattttggtaacgaacataaactagagtcagaaaggaaagaccggattgcttcagagctgggacttgaccctcgtcaggttgctgtttggttccaaaatcgtagagctcgttggaagaacaagaagctggaggaagagtatagcaagctcaagtc

SEQ ID NO: 14567 - DNA, 334 bp, Gossypium hirsutum
  Clone ID: LIB3145-013-Q1-K1-A11
caaaagcacaggccttgaaggcttaaaaagcactgtaatctggggcgcttttaaaaatagggcgcggtgaattcgaacaaaggtttcctttcacacagccaaggaccttgaagaaagataggaacccgaagtatccgcgcattattgccccaccgaggaacaagcttgaccattaccagattttcaaaatttccctcacaaatgagtcagccatgaagaatatagaggacaataacactttattatttattgttgacatccgcgcagacaagaagaagaccaaagatgctgcgtagaaaatgtatgatattcaggccaacaaagtgaacacctt

SEQ ID NO: 14568 - DNA, 335 bp, Gossypium hirsutum
  Clone ID: LIB3145-013-Q1-K1-A2
cgaacaacgtccttagcactgcacaacaagtgtggcttcgcaaattaggtggtgcaaaggctgttgttgatgagagtgcaagtggaattattactgcaggacgtgcaaaacggtcagctgctcagccagcacgggctggggataggttcaggcagttaaaagaagacgagaagaagaagaaagtaagcaaggctctgccagcagaagagtttcagagtctagactcagcatctgattctgatggggaatcagatgaagagacaaagggcaagggtgatgaggctctcgaagaagcatattcttcaagtgcaagcaatcaagtcctaatatttctc

SEQ ID NO: 14569 - DNA, 395 bp, Gossypium hirsutum
  Clone ID: LIB3145-013-Q1-K1-A3
ctggagatagtaacaggtcgccgtgcagttgacaagtccaaacaaagtcttgtaatatgggcaaaaccatttctggaatcaaatcaagtaaaggaattggtcgatcctcggctcaaagatgattataatccgagcgaagtgcaacgaatattgattacagcttcaatgtgcttaagtcacttacccagcaaccgtccaaccatgacaaaggttgtaaggatgcttaagaacgaagatggtccaattgagtttcaccaaatatcttgtggaaggaaagcagtgatttttgacggccatgatttgaaagattctagttgtaaaaactatctatataccatgcgtccaacataattatgtaattggaaaaccatatctatacatttacgttcgaatac

SEQ ID NO: 14570 - DNA, 374 bp, Gossypium hirsutum
  Clone ID: LIB3145-013-Q1-K1-A4
gttttattagacatgaggcgtctctaccaagagaactgaggcggcatctaaattctctggaagagaggcttttggagagcatggtgtgggataaaggttcctcaatgtacaattctttgatagttgcaaaacccgccctatctgctgaaataaatcgtcttggcttattggctgaaccaatgccacctttggatgcaattgcgacacatgtgaacttttctggaagtacacctccagtgccttctttgcagaaacacgaaacatcaacgggtaatgctggtagctcaatcttatgacaaaatggggatgtcaggtctcccatgagaccttgcactgaattgacgagtgtgttggttgaacggaatgcttttaca

SEQ ID NO: 14571 - DNA, 265 bp, Gossypium hirsutum
  Clone ID: LIB3145-013-Q1-K1-A5
cccactcggcctgagcgtgggactgctacctgtgagactaacctgggtcacagattaagcatcatatatactggaataacttatgctagactgatgacttgcaaacaagccctgagcgacaaacctgctactcggtaggccattgggttgactctgatccatgactggacattatgaaaaggagtacagtatgggcgactgtgattctcacagaggaaacgaatttacaaccatagaagaaacttgtctggcgagcatctaaaca

SEQ ID NO: 14572 - DNA, 376 bp, Gossypium hirsutum
  Clone ID: LIB3145-013-Q1-K1-A6
cccacgcgtccgcccacgcgtccgaaagaggttagagtggctgtctccccagggaaagcggaaggacatagaagaaataacgaggagtacatggagagagaggatttcagctttgggaaccgaggattggaacgagaaatgaccaacaaccacgaaggtgacaaagtgggggatggcaagcccaaaactatgcctcctgcaagtgtcatcacaaggctgatactgatcatggtttggagaaagcttatcagaaatcccaacacttattcaagcttaataggactcacttggtctctaatctcattcaggtggaatgtacaaatgcctgccataatagccaagtccatttccatactgtcagatgcaaggcttggca

SEQ ID NO: 14573 - DNA, 408 bp, Gossypium hirsutum
  Clone ID: LIB3145-013-Q1-K1-A7
ctcgaagacggccggaccttggccgattacaacatccaaaaggagtcaactgtgcacctcgtcctccgtctgcgcggtgggatgcaaatcttcgtgaaaaccttgactggcaagacaatcactctcgaggtcgagagctccgacacgatcgacaacgttaaagcgaagatccaagacaaggaaggcatccccccagaccagcaacgtctcatctttgccggaaaacaactcgaagacggccgtaccttggccgactacaacatccagaaggagtcaactctccaccttgtccttcgtttgcgcggcgggatgcaaatcttcgttaagacgcttaccggaaagacgatcactctcgaggtcgagagctctgacacgatcgacaacgtgaaagccaaaatccaagacaag

SEQ ID NO: 14574 - DNA, 343 bp, Gossypium hirsutum
  Clone ID: LIB3145-013-Q1-K1-A8
cccacgcgtccggcgatttgcaagcacaagtttgtgtttcacgcactctgcggaccgaataaaaactttacatctcagtctggtttatttgcaataaggcatgggcacttacttagatcctggaatacaagtagtcatcaaaaggtgaatagtcattcgcaaaagatcagagaacatttctcggttgttttcgttcgcttagttgctgctatgttgctggttacttctgcttccgtcgctctaagcaacacgccctcatgggcgctttctgaagaaaatctcctctttctagaggcatggagaacgatagaccgtgcatatattgacaaaactttcaatggac

SEQ ID NO: 14575 - DNA, 427 bp, Gossypium hirsutum
  Clone ID: LIB3145-013-Q1-K1-A9
gcctacccttccccgactcgctattactcagttaactcgccctcccttcactcactcccaccatggcattccatttttctgcttaaaagctctttcctttccttttttgtttttttttcctcaaatctcatcttttgaagtaaattatttttatcattattctttagagtaaaagggagagtaaaagggagagatgtatatggtgccgccaccccagcgatcggatccgggttccatcggcggcgggtcgggtgatttacgggtttaccaagcttggaaaggcagcaatatatttttatttcaagggaggtttatatttggaccggatgtaagatcattagggctgactattttgcttataagagctccagtttccattttctgtgtttttgttgcaaggaaattgatggatgatttttctcatcac

SEQ ID NO: 14576 - DNA, 301 bp, Gossypium hirsutum
  Clone ID: LIB3145-013-Q1-K1-B1
cccacgcgtccgaaataatttgctcattatataaaaaaaaaaaaaaaaaaaaaaaaaggggaaaataaaaaaaaaaaaaaaaaaaaaaaaaaaaaaaaaaaaaaaaaaaaaaaaaaaaaaaaaaaaaaaaaaaaaaaaaaaaaaaaaaaaaaagggcctccctttaataaaaattcaaagtttatttacccacactttcaacactataaattttttatatgttacccaaatttaatttcattgcccatattttaaaaacgccggaactgaaaaaaccttgaattcaccaaattaactccct

SEQ ID NO: 14577 - DNA, 419 bp, Gossypium hirsutum
  Clone ID: LIB3145-013-Q1-K1-B10
cggacgcgtgggttagccgatccctacctctttagcactagcgccgatctgccttcacacgcaggagtcgaccagttcgggttttgaagggctaccttgtagcctctaagctccccttaaaactccgatttcgatggagcaaaagaaaaccgatggccctaaagcaaggtaaagctcatcccatccctttccttttattttctcttttttttaaaaaaaaaatgatgaaagattcaagtaaataacagcaaaaaaagagaaaagattatagaaatcgaaagtggcaatcaccttctctgcttttggttgctctgcgttttgttttttgtaaatgtgtgtaaccgattacaagattagaatctggctttatagcccgaaagaaagaggaaaattaatcaaaatacaatatgtgttttttt

SEQ ID NO: 14578 - DNA, 362 bp, Gossypium hirsutum
  Clone ID: LIB3145-013-Q1-K1-B11
acgcccactcctccttccactcatcccttatttcttattttgctttcatttttttcttttcgcgtcttgttcttctacttattgtatgtgcacccacattaaaccactaaaacttcatctcacttgaaactttttttcttcttttcaaagaacaccgacacctatgttttagttcttgtcacataattattttattccaccttgcaagtttcacaaaacctctcctctttatttactttcttcatcttatgaacagaaaactaatttgttggatctaacaacaccacctcttttattttttgaatggtggcgaatggaatttgaaaaatcaacttctcttttatgttttcccaaaacaattt

SEQ ID NO: 14579 - DNA, 436 bp, Gossypium hirsutum
  unsure (1)..(436): unsure at all n locations; Clone ID: LIB3145-013-Q1-K1-B12
cccacgcgtccgcctcaacatttcagaggtggtacctggagcaatggacattgtcaccatataaagctgccagactttggtccatttcctgataaaactgaagaacacgtcgacatagtacgagatgtgttatcaaagcatccaggaagggaacaagtgattgaaacaatgaatgtgactcccatgacatatcaaagacaagatggccatacatctttgtatcatttcggacgaggaaatgaaacggaacctccgggcgaagattgtagccactggtgcttgccaggggtacccgatttgtggaatgagcttctctatgcactttttctcaagtgggaatctgatcactcctccactccaactngattttcttctcattcttgtacatagaaattcatatgaagtattgagtgtgttgcatgcagtttgaatcaag

SEQ ID NO: 14580 - DNA, 415 bp, Gossypium hirsutum
  Clone ID: LIB3145-013-Q1-K1-B2
ccggaaaaaccggagggacccacgcgtccgcacatactacctaaagaaccttttttttttatcaattctcaattaaaacatcactttacgctcacggggaaatataatgggtgatgacaacgttcacatcaaccttgatgtcattgtccatgtcaactctgacaagacgaccactaccgatcattttatctacaagctagacagtattgacaagcgtgtgattgaaacgttcgataaagaggctgcttaaatgaacaaaatgtcatttaactatgctttgatgcttcacacgcttaatgctcatcgtgaacaaagtatcaccattgatattgccctgtgaaagtttgacaccactaaatactattgcacctttattgatacaccttgacaccgttactttaataaaaacattatt

SEQ ID NO: 14581 - DNA, 352 bp, Gossypium hirsutum
  Clone ID: LIB3145-013-Q1-K1-B3
cccacgcgtccgcccacgcgtccgcccacgcgtccggccgagcaaggaactggcgtaggcgagcgtcgattcgagagaagtagcgcaaaaccgtaactcgtcttcgaggggttcgagttcgcattgtttgatcgtgtattcgatagctttggcttgatccgagtcttttgagaatcggaaaaaatcaatgatttgtgcgatttttgccgatgaaaaagggattgagttagcttcttctctagaaagtaaatgaggtgaagttgaagggtctttgttggtgagataaatagccattgttttaccaactttaagatcttccatcttgaagaaaattttacccgaaggatctata

SEQ ID NO: 14582 - DNA, 89 bp, Gossypium hirsutum
  Clone ID: LIB3145-013-Q1-K1-B4
acgcccacacgtccgcttaaataatatctgacttgtgtgtattcttctttgacatatgtaatatgggtagcatttaatattttgcattg

SEQ ID NO: 14583 - DNA, 424 bp, Gossypium hirsutum
  Clone ID: LIB3145-013-Q1-K1-B5
agtcaattagggtgataatgcgttgccttctttttgcttgtttttctgcttgcaagagtaaaaaagaccagcatttggtggatgggacttcctctattgatcaggttagttttgttcttcactttcattgtttatgattcttggtttttttttttttaataaatttataccatccagaaacctgaagccaatgaagcagttcaatcaagtaaagaagattttgggataccctttaatcccattatagtgaaaaagtaagttatggtaatccagtttcagacccttttttgtaaattattatttatgtttatgcatgtgttgatttgcttgtttcatgtcaatttatgtagagagaagctaggggagctattgaataacagtggtcaagagaagttaagttttgatttgtatgtgaagactcatg

SEQ ID NO: 14584 - DNA, 152 bp, Gossypium hirsutum
  Clone ID: LIB3145-013-Q1-K1-B6
acggtaatgttatcctattaacctccaacttatactgtattatcatatatgcccgctactctgaatttattaactgtctcttcaacttttacttcgacttcacaaattctaccaaactcaattcttataacattttattattcaacttcaaa

SEQ ID NO: 14585 - DNA, 289 bp, Gossypium hirsutum
  Clone ID: LIB3145-013-Q1-K1-B7
gcgaccgccggaatcggtcgacccagcccgttgttgttgaaactcactctataatggcggtcccggtattaccccacgctgtgaaagaactgcatggatcaccattgaactgattttggagaggggaccctttaaccttaattatatagtagagcaccttaaaggctaagtctgaggttgatacacttaccagaacgataatagattgggtctactcttgattttaagacttgtgcggttgatacatggttcagagagcatatcatgcacatgttgtgtaagacttgaa

SEQ ID NO: 14586 - DNA, 276 bp, Gossypium hirsutum
  Clone ID: LIB3145-013-Q1-K1-B8
cgtagctgcaacattgcatctaaacaagattgagagggaagataatctcatggcagccgtctcgtatttcgacaaagatggcaatggctacatcactcaagatgagcttcaaaaagcttgtcaagaattcggttttaaggaaatccacttggataaaataaccgggaaagttgttcaggccaatgttggccggttgaataccattgagttgggggcattaatccaaaaaggcacccttatttttgttaaaaaaaccttcggaataaaaaaggcttt

SEQ ID NO: 14587 - DNA, 291 bp, Gossypium hirsutum
  Clone ID: LIB3145-013-Q1-K1-B9
ttttatttgaggaatttgcaccaagccctaccctagtggattggtgagaggttgcggccatgttcagataaaaaaaaaaaaaaaaaaaaaaaaaaaaaaaaaaaaaaaaaaaaaaaaaaaaaaaaaaaaaaaaaaaaaaaaaaaaaaaaaaaaaaaaaaaaaaagggggggccgacataaaaaaaaaaaaattccaaacccatgcaactaactgaaaaatttttaaaaagggaaaaaaaaaaaaaattcattggccggcgttataaaaccggtagccaaggaaaaaccctg

SEQ ID NO: 14588 - DNA, 424 bp, Gossypium hirsutum
  unsure (1)..(424): unsure at all n locations; Clone ID: LIB3145-013-Q1-K1-C1
gaaccatccgatgagaaggagaaagttgaaaccgcagtgaaagaggcacttgagtgggttgatgacgaccagagtgccgagaaggaagactacgaggagaagctcaaggaggtagaggcagtatgcaacccaatcatcacagcagtgtaccaaagatctggtggagccccaggtggtggatcaactgaagaagatgatgattctcatgatgaactttaaaaaactggtaatgccattttgattgctgaaacaagcaaagaaaagcaaagggtgagaaggatgagagcatangtaggtgagatgaggatatactgtaattgttctccatggtagaagttaaaaaagggagaagtatatccccctttgttcggatgttatttttgggtgaatgaatacgttttaacggatattttttttggttttc

SEQ ID NO: 14589 - DNA, 427 bp, Gossypium hirsutum
  Clone ID: LIB3145-013-Q1-K1-C11
aaaataatctaaaattaacagtatccactctttttttgcaccaatgattggctaatcattgtgttggacttaaaaacattatttttttgggttctggcctgtcaatggtcggaactcatgtatttttttaaaaaaattgtgtaatactgaaatacggatgtacgaaaaagaaaaaaacaaaaaaaaatttttggtgctggcctgtcaatggccggcacccagtacacagtacaaaaaaaaattaatttttttttcgtgtcagaatcagataaaaaaatacgaaaaaaataaaaaaaaaatttgggtgctggcctgtcaatggccggcacccagtacacagtacaaagaaatttttttttttcgtgtcagaatcagatagattttttttcgtgtcaatggccggcaacatccgacacgatccggatcg

SEQ ID NO: 14590 - DNA, 359 bp, Gossypium hirsutum
  Clone ID: LIB3145-013-Q1-K1-C2
cccacgcgtccgaaccgatcggtgagggaggaaggacaggggatgacgacgaagacgaaagtgagtggtggagggggaagaggaggaggagcaagggcagtggcggctgtgctgaggagatcgaaggtgaaggagactgtgaagatggcagctctagggtttcgattaagtgaaattgttttatgcttgatatctttctctgttatggctgctgataaaacctcaggctggagcggtgactctttcgaccgctataaagaatacaggtattgcctatcggtaaatgtgattggatttgtatatgcggggtttcaagcctatgctctagcttatcatctcatcatgcgaaaacatgtcat

SEQ ID NO: 14591 - DNA, 332 bp, Gossypium hirsutum
  Clone ID: LIB3145-013-Q1-K1-C4
cccacgcgtccgaggagttgatgaattggaggaaggagaagagcttcaatgtgatcctgtagcttataattcacttcacgcttttcatattggatggccttgtttgagctttgatatcgtacgtgattcgttgggttcagaccggaaagattttccacattcggtgtattttgttgcagggactcaggcagagaaggcttcttggaactctattggagtgtttaaagtaagcaacatttcgggaaaaaggcgtgagctagttcctaagaaatcttccgaggatgatcctgatatggatggtgaaagtagtaatagtgatgatagtgaggatg

SEQ ID NO: 14592 - DNA, 298 bp, Gossypium hirsutum
  Clone ID: LIB3145-013-Q1-K1-C5
tcgcataggccaatggccatatttaatggggtaccgacagaaggcacaggggcctgtgaaagaactaagctatgccaggtggaaaactgctgagtctaacagtgagactcaagattatggaggtatgatatggcagaaatccagaatgcatatacaaactggtgaacccaagaatccttggatgtcaattactaacctacacaagatatgcgggtttaaaatttacaaacttgatctaagagctgagtaaaccacgtaaaagatataatgcttatgaagttaattttttcccttttag

SEQ ID NO: 14593 - DNA, 239 bp, Gossypium hirsutum
  Clone ID: LIB3145-013-Q1-K1-C6
cggacgcgtgggaaattatcccgagtcagaaactgtataacagattatatggtatatgaacaatagttttcatatgaaaaaaaaaaaaaaaaaaaaaaaaaaaaaaaaaaaaaaaaaaagggaagatgatataaaaaaaaaaaagaaaaaaaaaataaggatgaaaaaaaataaatttacttatgtggaatgtaattttaataaattgtatgtagttttaaaaggaaggaacggtgaaa

SEQ ID NO: 14594 - DNA, 192 bp, Gossypium hirsutum
  Clone ID: LIB3145-013-Q1-K1-C8
atcttataagattaataattttagaccttataataacttcaacgagatcctggcgcttgtcaattacttcacgctttacacattcgatgaaccttgattagctctgatatactactccattctttagcttcatacccataagactttacacattcggcgtattttgttgaacaaactcacgcatactaactt

SEQ ID NO: 14595 - DNA, 331 bp, Gossypium hirsutum
  Clone ID: LIB3145-013-Q1-K1-D1
gcgggattaccccgcttggtttaaacctattaataaaccgggaccttaaggcttaaaaaggatcttgggttattaaaaaaccgggtattaaatacctctattccttctttaaaaaaaacctccagaaggggattggcaaattgaaccggcccgattcaccttttatttaggtgggcatgacttacatggtttaagaaccgatgtgtactgaaatcaaggaggagtggttaagaaaggcccgcgctcaaatagcatgctacaagagatgcaaattcaccattgtgttgagcaaagctgggcgcttgaatcaacaaattttagaatcatgtat

SEQ ID NO: 14596 - DNA, 257 bp, Gossypium hirsutum
  Clone ID: LIB3145-013-Q1-K1-D10
cacgcgtacgcgcacatttactcccactctttcgcccactctttcttattcttatttcaaaaattaatccgggcttgtgtaattcttaacaaattcacactatcaaactgctaatggctcattaaatcacttatactttttttgatatgaatatgctactctctcaaccctattaattatagatcttattcattcaacatacccctactttcgaaatcgattcctttattatataaaaagaaaacgcattctttttc

SEQ ID NO: 14597 - DNA, 296 bp, Gossypium hirsutum
  unsure (1)..(296): unsure at all n locations; Clone ID: LIB3145-013-Q1-K1-D11
ggtagancacgcgtacgctgaaaattcacccaaaggttcatcgctccaagcctgaaagtcctcatgaggttcttttgccagtgggataccgaggatcttacctgctgcttcttctgagaagttattgacaattaactccctgttccattctcttacgttattattgattaactcagcatccttaaaatcctgtgaattgacctcaccagaataaaaactagcatttctaaaagcctcctatgctaccatagaaaaaatataacacaacaacaaccccctttaatgtgtcctacccc

SEQ ID NO: 14598 - DNA, 390 bp, Gossypium hirsutum
  Clone ID: LIB3145-013-Q1-K1-D2
aaaaaagggaataattttcgtatccattcaatctttctgccgctgaccattctttcctgagggcattatggatgcgagatttgggctcttgttcctcttcatgttgggtgctacttgggcatgtaacgcccgacaactagaagttgttgagatagaaatctcggatccatcagttgtccaggtaaactggaggcaagatgaaaaagtgatagaaacggttgctcggaacgacaacgtgtgcaccttgtgtgagcaatttactactgaggcagttgattacctttcacagaataaaatgcagactgagataattgagattcttcacaaaagttgctcccgtttacgagcttttgagccccagtgcattacacttgtggactactatgcacc

SEQ ID NO: 14599 - DNA, 412 bp, Gossypium hirsutum
  Clone ID: LIB3145-013-Q1-K1-D3
accacacgtaataattttaatatccatacatattttttaacacttaccaaaatttactgcggacgtgctcattctgaaatttgtactctaattattataaaattttgttcctacttagaccaaattatcacctactactatccaaattttaaaaataactatctttttcattcattgttcaactaaacttggactctagatgaaaaagttataaaaactgttgatcttaactacaacgtgttcaccttgttttaacaatttactacctactcagttgattaccttttacataataaattccagactttgatcattggaaattttttaaaaaagtggctcctcatattataacttttttaaccctcaatccattacaactttttgaactaatttttcaccctttttttttttt

SEQ ID NO: 14600 - DNA, 282 bp, Gossypium hirsutum
  Clone ID: LIB3145-013-Q1-K1-D4
ggagtatgctaaaacactacgggattgaattcaatccgtgttcatgttgtcaaatgtcaaccagaaacaatataccgaaaagttggtagtgccttcctaacttaattatggccacaaagacaaattaacattagcagagtgaaggagacaaacaagattgtaatccaatagcatcaaaacccgtttaatgcagagtcctctcttccacccctccccatacaatcacaagtgatacgagaaagcaaagtctaagatatacaaggaaagaacttgatctactta

SEQ ID NO: 14601 - DNA, 272 bp, Gossypium hirsutum
  Clone ID: LIB3145-013-Q1-K1-D5
ataatctatcttgaccaacattaataccatcaacacgatcacgaacggcacgaccgggggaggctttatatcctgtactgcttaacttacggactctctctaaactctcaactatcatgaacgaggaaacgacatcaaaacctcatacttaccatactctcaacaacaacagcaacacagaaaaagacttagtgtaaaggaactaaaagaagccccaaccctgactcacatgatcggtaaattcaataagtgccctaccacactatataaat

SEQ ID NO: 14602 - DNA, 437 bp, Gossypium hirsutum
  Clone ID: LIB3145-013-Q1-K1-D6
caagaaactgctctctctgtcttaacgctataatcattgaagaaaaatgggggtgaaggaggaattcgaggagtatgcggagaaagctaagacccttccccagaacactaccaacgacgacaagctcattctctatggactctacaagcaagctactgttggaccagtgaacaccagccgtcctggaatgttcaacatgaaggaaaagtacaagtgggatgcatggaaggctgttgaagggaaatcgaaggaggaagcaatgaacgattatatcactaatgtaaaacagctgcaagaggctgctgctgcatcttcttgacgtgtgtgtgagaatagaaaatggtgtaattttcaagccctttgatacctatgggtttgaaaaggtctaaaactatgaataagcaatgtactatgttttattgctattaaagtatatt

SEQ ID NO: 14603 - DNA, 396 bp, Gossypium hirsutum
  Clone ID: LIB3145-013-Q1-K1-D8
acgaaccagatagtggatctatgagagaggatcaagattatgatgactggagaggtggacgggagcgtggtagggatgaagaggagcctcaagggagagaacaagaaagagatgagattgaccataaatatagaagtcgtggaagggatgaggaggagcaccatggaagtcgtaggcacagaaaaggggaggaagatgatcgagggaacaaaggtcatgtgcgggatagacaattcgatcattctgagaaaatggcatataatgatactcggtctagtgacagaagatcgtgtagagatgaccgacgttgatggttgtggcatcatactggcttcaagtacaaaatggaaccacttcaaattgtcttcaggcttttcgaatgcgggtgtccttttt

SEQ ID NO: 14604 - DNA, 442 bp, Gossypium hirsutum
  unsure (1)..(442): unsure at all n locations; Clone ID: LIB3145-013-Q1-K1-D9
acgagtttataagctctgcagaccgaaaactcaccagataattctcctttccaaacctggaaagccttgtgctcaatctctgtgaagggaatctgaagaattttctgagcaatgtcctcttgaaagcaatctttccatatcgagattttatcccctctgcccactctccaacacatccctttttggagaagaccctttgcagcccacatacttttccaagtaaaagaaggagcaaaaggatatgacgtctactcccaaaatctgccaacatttctggtaaaatactgctggaaatccatcctaccctgaagccttccttggtcccatatcaaaaattgcttgcttgatttcctcccttgtatatggtgctgcaagattttgattgccctctacttgaatacatcgttcaatccctgtttgttcaaatgntacaccttttttt

SEQ ID NO: 14605 - DNA, 356 bp, Gossypium hirsutum
  Clone ID: LIB3145-013-Q1-K1-E1
gctggctgatccctggtatttgatcacggattaaggagaaactcccacccacggattctaggctgggaccagaccaacggcatttggggaatggaaaatatgatagagcaaatgctgagaaacaacggttggtaaggaggcggagaatgtgaagaaaactacatgaaaatgggtggaagcctagatggctccatcaagatagtgaaaacggatccttacgctacacgggccggtattgggaagcatgaaaacaacgaaaatgggatggatgtccaaatatatatggtgtattcgacgaaaaattagatgattggtgtgaatgatcctgatttcaactttagatcaatattgagatg

SEQ ID NO: 14606 - DNA, 457 bp, Gossypium hirsutum
  Clone ID: LIB3145-013-Q1-K1-E10
cccacgcgtccgcccacgcgtccgaacaacccaaagctgcaattcacgaagaaatactccgggggagaaccgaaatcgccggagaaacggccgccttccacggcacgcaagagaataataagcaacgcccgtttagaggagaagtttaggacgacgatgacgaagtcagaagagatatccaagggcgggcacattactaggcatgtttttagaaacaaggtacggagatataaacttttggatgaggtttcaagttaaacacacacacacacaaacacacatataaacatacaatttcttgtctgaaaatgaaactacaagagactgttttatggtttggtttttctttcattttccctcgatccaaacagataaaaaaaagtgtaatttgggagaaagtattattggaatgatggtaaaagaatcatggatatattaccatcgatgtcatgtcata

SEQ ID NO: 14607 - DNA, 447 bp, Gossypium hirsutum
  Clone ID: LIB3145-013-Q1-K1-E11
cgatttctttgtctctttctctgtttatccccttttacagatttaaaagggccttttataggcccaaaagaatttaaatcgagggaaaaaaaaacaatattgcttgctgtttttttctctttggactccttgagtccgtttttcaggtgttcgcggagagtttggcgcgcgtggaggctccaagacgtgcgcatgtatgctgaaacctgcagcggttgggggctgttggagcggcacacatgcaaggctgcttatggttctaggttttctttaattgctggactaaggaccattatttttggcctgtacttacgtttattattttttttgggccactgtattgggttgtcaattgggccctattacatatatattataaaattaacccatatttggaaaatttatttttaatagtgttaaatttattattattatctagaatgtaat

SEQ ID NO: 14608 - DNA, 414 bp, Gossypium hirsutum
  Clone ID: LIB3145-013-Q1-K1-E12
cggacgcgtggttcggggcagaccccgtgcccgatatcgagaagcccatgtttgaactagggtcagcggcccaaacgatcttgccagatagtgatggtgcgattgatggtcaccttcgtgaagttggtcttacatttcaccttcttaaggatgttccggggcttatttcgaagaatatagaaaagagcctggtagaagcatttcaaccattgggcatatccgattggaactcccttttttggattgctcatcctggtggtccagcaatattagatcaagtagaagccaaattagcactgaagccagagaagctacgagccacaaggcacgttctttcagagtattggaacatgtcaagtgcttgtgttctatttattttggatgagatgaggaaaaaatcaagggaagatgggc

SEQ ID NO: 14609 - DNA, 408 bp, Gossypium hirsutum
  Clone ID: LIB3145-013-Q1-K1-E2
attgaacctaaaaccgataaaattaattatttagttgatttgatcatcggtctgatttaattattgtttttcagaatattttcttttatcttttgtgatattttttactaatttaaatataaaaataatcataagttattattttcctttttgtcttcaattaaatgaaaaaaatcagagcttcttgggttatctccgagctcaccagacgccgccatcttcaccaactcctcctctaaagcaacgacacccagtacttcaacaaccaccgcaacgccgtcttccgcggccgataaaaccgatagcaaatccagtggaatcaagcttggtccccacttcgtcggttccacggcggcgctactggttgctacagcggccgtgtttttccttgtattcccagctggattt

SEQ ID NO: 14610 - DNA, 359 bp, Gossypium hirsutum
  Clone ID: LIB3145-013-Q1-K1-E3
cccacgcgtccgcccacgcgtccgcccacgcgtccgagagactacaaagaatcggcatgtcctcggcgataaaagatggtttatgcctattaccatagctggctttattgccgggacgatacttatctcgagcttcataaaaaccgccgattactccatactatgttcgctcgccaaaaccagatccatagccgtagaggaatactcctcctcgccggtccaactccaagctatcatgcactacgccacttcatcaatagtcccgcagcagaacttcaaggagatctccgtaacctttgacgtactcaagaaacgctctccttgtaatttcctcgtctttgggctcggctacgactccc

SEQ ID NO: 14611 - DNA, 424 bp, Gossypium hirsutum
  Clone ID: LIB3145-013-Q1-K1-E4
cccacgcgtccggggattcacattgggagatcggatggggtcaatgttcttaactcggggataaaaactggtgatgattgtgtttcaattggggatggttccaaaaatttggttatcaatggagtaacttgtggaccaggacatggtatcagtattggtagtctcggattgtttaaaaatgaagaaccagttgatggagttacagtaaaaaattgcaccatgactaatacttccaatggtgttagaatcaaaacttggccaggtgctgaacctggcacttgttcgaacattcactttgaggatattaccgtgaccaatgtcagttctcctattataattgatcagaaatattgcccatggaacaaatgcaaaataaatgaagaatcgaaagttaaactaagcaacattagtttaaaaacattta

SEQ ID NO: 14612 - DNA, 346 bp, Gossypium hirsutum
  Clone ID: LIB3145-013-Q1-K1-E5
aaaaaagggcgacttttctaattaaaatttacctgtctcttaaccttgtttgtagtagagattagtgaaggaagaaaacggaaaaagaagggaaaaaatttcctttagaaaaaaaaaaaaaaaaaaaaaaaaaaaaaaaaaaaaaaaaaaaaaaaaaaaaaaaaaaaaaaaaaaaaaaaaaaaaaaaaaaaaaaaaaaaaaaaaataaaaaaaaataaaaaaaaaaaaactataacgaaaattaaaaacaatagaataaaaaaaaacaaatggcggtacagagaaaaaacctgctggtaacaaattatacttattgacatttgggggttgagtttttaaaatttta

SEQ ID NO: 14613 - DNA, 386 bp, Gossypium hirsutum
  Clone ID: LIB3145-013-Q1-K1-E6
tgtttatgtaaaagcagattttagacataaaaatcgtccatcccactgtcttgtatatagttctttcaagatttgtaacatcatcatggagaccaacttatgttctactgtcatatatgttcttgtatgtaatgtaattgtcgagaccctagtagtgacggaaaaaaaaaaaaaaaaaaaaaaaaaaaaaaaaaaaaaaaaaaaaaaaaaaaaaaaaaataaaaaaaaacaagggaaaaaaaatcaaaaaaaagaaaaaaaactaaaccaaacactaagatcaaacaatcactttaaaaaaaataaacaaaaacaaaagggggggcccctttaaaaaaaccaaatttatattgcccgggttggcaaaggaaaaatttttttttagg

SEQ ID NO: 14614 - DNA, 348 bp, Gossypium hirsutum
  Clone ID: LIB3145-013-Q1-K1-E8
acggtgaaaacactgacttctaaagaatacatgatcgccaggtgggcacctaaggtgaattgttgaataaactggaaacagtaatgtgtttaaagagtcaaaatatgtaataaaatgtaaggaattgtgatgtaataaaatgtttgaatatatgaatgttaatgctacttaataattggtaaacaattaatggaattacaataaaaaaattgaaccatgactaatactttcaatggtgttaaaataaaaacttggacaagtgctgaacctgtgaattgttcgaacattcacttttaagatattaacgagaccaattgttggtctcctattataattgatcagaaatat

SEQ ID NO: 14615 - DNA, 440 bp, Gossypium hirsutum
  unsure (1)..(440): unsure at all n locations; Clone ID: LIB3145-013-Q1-K1-E9
gcaggctccaagtttctcatcccatcctccgttccagggtccgctttgatgcttcctgcaagactggttacctcgtaacgccttctaacccccatgttcaaatccaatcctttgatcttcaatctacttctcacatactccaaagctccctgggcgattcccacatcgattcccaccacgttttactcgagcacgagttgaataggaactcatggaaccgcactgatggtgaccaagctgactgggatgtctttttcgccagcctttacactataagagacgcaaggtggtttttggtgttccggctacacacgtcagcttgtgaccgcgctgccgcggtgggactgttgagggaattattagagatggtgggtggcggaagagccaaggcggaggaggagatagagcaagaggtggggattgaagattngattcctagt

SEQ ID NO: 14616 - DNA, 342 bp, Gossypium hirsutum
  Clone ID: LIB3145-013-Q1-K1-F1
agcagagacaatgagaggaacattgacgttgacttggattctgatggtttgcatctcgcaagtagcggtgcagagccaatactactcagagagcttaccatatgatcccaggccggttaaggtcactaatcttcacttctttttgcacgaaactctccgcggtaagaacccaacagtagtcatggtagcccaagctaacaacacaagcaacgacaactactcatcagtgccatttggcaccctatatgccattgatgatcccctcaagataggtcctggggacaactcagaggtgattgggaatgctctgggacttgggatcttggccggcaaaattcaacg

SEQ ID NO: 14617 - DNA, 445 bp, Gossypium hirsutum
  Clone ID: LIB3145-013-Q1-K1-F10
ccaacttgggtattttaactttactccatcttcctcctcttccttcttccgttttaggatctgggttttttccccccaattttttaaggttataaaaaaagaaaatggggagaggtagggttcagttgaagaggattgagaacaagatcaacaggcatgttactttctccaaaaggagagctgggttgttgaagaaagctcatgagatctccatcttgtgtgatgctgaggtcgctttgattgtcttctcccacaaagggaagctctttgaatactccactgattcctggtatttccccccttcattctgggtatttttattttttgtaaaaagtattctccaaggttttgagaaacaaagatatagttacttttgttttttggctcttaaactaaaatagatgtttatgaaagtggtttttgaggcactgtctttagcagtttt

SEQ ID NO: 14618 - DNA, 423 bp, Gossypium hirsutum
  Clone ID: LIB3145-013-Q1-K1-F11
gccactcttacaaaaatttttaaaaaaatgtcaattgagaggtttattgagaactgccccggtgtgagccccactgtgaatgacacccagaatgtattccactctgataacacctatcttgctactgagctcgttcatgagacctatcatggagcctatcaacccgttgctgtaccctatgctttcaagactgatttccatactcatatacatgtgcctatactggtggtattgcttggaaacaatggatgaaccattggctgaagcgtcatcgctagcgttgaagctatctattaggctacttatggcgctgctcatgacgctgttcactttgcttcattctctggatcatcgactatcccatcaacgatccacattgggtactacattgatgctccaatttatagtccatttaatatggtg

SEQ ID NO: 14619 - DNA, 395 bp, Gossypium hirsutum
  unsure (1)..(395): unsure at all n locations; Clone ID: LIB3145-013-Q1-K1-F12
gcttgggggtgataactttgatggtctttgccgggatttgcatcctggcccggttagtgtgttacattggagtggaaaagggaagccatgggcgaggcttgatgctaaaacaccctgccttttggatgctttgtgggcatcttatgatctcatggatacttcatttgcttttgattcttgaatcgaatgccaaaattatgcttcgggtgtaagtgtttgttggctaggaaagtgacggaatcgtcgagaaacggtggagctataaaagctctaagctgcaataatgccagggcggagctttagctatgtgtttacaaacgattgacggattaaattaaatgtgaaccaaattgatttaatcctcaacaggtttcaactntgattataggagtaac

SEQ ID NO: 14620 - DNA, 382 bp, Gossypium hirsutum
  Clone ID: LIB3145-013-Q1-K1-F2
aaagagatggatcgagaagcaactttaaaatattccatcgaagagctcgaagccaaagggaaagaatcattacacctcaagaaacaagtcaaagagttggaagataaattgcaagaagctgaagctaaaatgaaggttgcgagcagtgcagctgaatcgaaggatagtgtagaggtgaattccagagatattgacggattaacattttcaacaccaacaaaacgaaggagtaagaaaaagtcggaagccgcttccgtacaagttgcttcctcttcttcatcagctacccatactgaggcttctactttgacgaacttaaagttcgttctcggagtagcccttgtgtcagcgatcattggtgttattcttggaaagcgttatt

SEQ ID NO: 14621 - DNA, 389 bp, Gossypium hirsutum
  Clone ID: LIB3145-013-Q1-K1-F4
cccacgcgtccgcgaggatgaacgtgatgctgaagatgctattcgtgaacttgataatagtccttggggttatgaccgacggcgactgtctgtggagtgggctaagggtgaacgtggtcgacgtgttgatggttctaggtcagtgacaaatcatagacccaccaaaaccttgtttgttatcaactttgatccaatccgtactagggaacgagatattctaaggcactttgagccatatgggaaggttcttcatgttcgcattaagcgaaactttgcgtttgttcagtttgcaacacaagacgatgctaccaaagctctcgaggctacacaaaagagcaagttactagacagagtcgggtctgttgaatatgctttaaaggatgatgatg

SEQ ID NO: 14622 - DNA, 383 bp, Gossypium hirsutum
  Clone ID: LIB3145-013-Q1-K1-F5
ctttgtgcgatgacaggggcaaccatttctttaaggattgccatattcgtggcactggggatttcattttcggaagcgggacatctttatatctgaacacggaaatattcgtggtaggagatccggaaggagatccggaaatggcaataattacagcacatgcgcgagaaagttcatcggaggacacgggttattcgttcgtgcatggcagaattacaggaacagcgaaggacgtatttttgggcagggcctggaagagcagtccgagggttgtttattcttatactgaaatggacgaaatcgtccatcctggtggatggtctagtaatcgccaacctgaacgagccgacactgtgtactacggagaatacaaatgcacgggg

SEQ ID NO: 14623 - DNA, 327 bp, Gossypium hirsutum
  Clone ID: LIB3145-013-Q1-K1-F6
gaacttttgaaacagtcacttgttaatgctgctggaaaggatttgttttttggtctttgtatgcttcatggtgccattcacccatggccattttaagtctttgtttattggcacaggcatatcagcatgcaagtgcccgggttcagtccttggttgaggaagatattaatgtcaagttcttggttcaccttgataaattgattcgcttgctcgaaactcccatctttgcttatcttagattgcagcttcttgaaccaggaaggtatatatggttgctgaaagcattgtatggtcttttaatgttacttccacagcaaagtgctgcat

SEQ ID NO: 14624 - DNA, 323 bp, Gossypium hirsutum
  Clone ID: LIB3145-013-Q1-K1-F7
tcgacccacctcaaattatactcatatggagggatgatttgagattaaaacagcactggggtatgcactttcgccaaattacttaacagagcatcaaggtccaaacaatgttgattcatcatacaaacgataatggcacagatagatgactaacaacataatgatctcaaagcaaatgggtgcaagaactctctctcagtcctctgcggaaaagagattcagtcacccaatgatctaagcatgcttaggaattcgattaagccgtattagcctctctaattgctatttatgactaccctattttgaactatctttgtgatgtg

SEQ ID NO: 14625 - DNA, 293 bp, Gossypium hirsutum
  unsure (1)..(293): unsure at all n locations; Clone ID: LIB3145-013-Q1-K1-F8
gcgaccggccgatcgggggacccacgctcaaacaatgggattggtcaatggattcgaagtagagccgctttggggaacacttactcttgcaatatgtaaaaaatctatcgggagcaaatgtcacctgcaacagcctaccgctggggatatcatggcagtcatgatctaatgaagctttaacangagcatgtccgatcaaatactttatggaattgtgatcagtatatatctgaattactatctttgtttaaggcagatctgtatatacctttgcgggatatgaaccacactac

SEQ ID NO: 14626 - DNA, 374 bp, Gossypium hirsutum
  Clone ID: LIB3145-013-Q1-K1-G1
catgaaatggttccaggtcaaatattaatgtgtcattcttaacaagtcccaaaatattttgcgctgtgtaacatttcagaatgagtttatttttagatttgaatacctgatttttgctattttatatatatcagatcttattttcctgaacaaatttattttatgttttaaggtggaatcctaagtttaaaaataaaatattttatattctaaattttttctaatatattttttttttaaaaattcttcttttttaaaatgataattcttatacaatccattttaatccttatacccaataattctttaatttatattatatattttttaataataaattggtgccgcccccttttatataatttcaaattttt

SEQ ID NO: 14627 - DNA, 128 bp, Gossypium hirsutum
  Clone ID: LIB3145-013-Q1-K1-G10
gcgtacgcccacgcgttcgaaccacctcctgtctggatacctggcccacgagttactcactcacagcacggctgtttgtcaaacgtgccacctgtctctaccgcaacaaactttcgccgactccagaa

SEQ ID NO: 14628 - DNA, 453 bp, Gossypium hirsutum
  Clone ID: LIB3145-013-Q1-K1-G12
tcgcccacgcgtccgcccacgcgttcgcccacgcgtccgggaaactgaagtaaatatactgatggtgctgatgggcatgaaatgggtgcaaagcgtcagcggataattgatcaaggcccttcattctatggaaactctccaggttcaagcttcatgtatactgcccctcctcctccttactcatatgttagccaacctccacctttccctgttgttcgacttcgtggtcttcccttcgattgcacagaaactgatgtggctgaattcttccatggtctggacatagtcgatgtcctttttgtccataaaaacagcaagttcactggtgaagctttttgtgttttgggttatcctcttcaggttgattttgcccttcagaagaataggcaaaacatgggcaggagatatgtagaggttttcagaagcaagagacaggaatattataaggcaata

SEQ ID NO: 14629 - DNA, 279 bp, Gossypium hirsutum
  Clone ID: LIB3145-013-Q1-K1-G2
cccacgcgtccgcccacgcgtccggagcattaccacaaagcagccttgaatgccattcgggcagggtttgatgggattgaggttcatggagcacatggttatctcatcgatcaattcttaaaagatgggatcaatgatcgcacagatgagtacggtggatcattggcaaaccgctgcaaattcttaatgcaaattgttcaagcagtagcttcagccattggtatagatagagttgcgatcagaatgtcgcctgcaattgatcacctcgatgcaaccgac

SEQ ID NO: 14630 - DNA, 360 bp, Gossypium hirsutum
  unsure (1)..(360): unsure at all n locations; Clone ID: LIB3145-013-Q1-K1-G3
agcagcttangcaaccagttcgcagccatggtgaagtattcgaaggagtcagataatccggccaagtcctgcaaggcaaggggctctgatctcaaggttcatttcaagaacacaagggagactgcgtttgctatcaagaagttgcctttgggtaaggctaagaggtatttggaggatgttatggctcacaaacaggccgtacccttcagacgcttctgtggtggtgttggacgtacagctcaagcaaagaacaggcattctaacggacaaggtcgctggcctgtaaaatctgccaaattcattctagatttgctgaagaatgctgagaacaatgccgaggtcaagggtttggatgtggat

SEQ ID NO: 14631 - DNA, 249 bp, Gossypium hirsutum
  Clone ID: LIB3145-013-Q1-K1-G4
agtatgtattgtgggtctccaagaatacattgtattagatgatcagacaatcaacttcgtgatcggtagaataaattcaacaagaatcactcacaccactgtatcgaatgacgaatctttaaagtcacatgccattcttcaacttgccatcaagagatcatcttatggcacctaatcaaaacctcctaaacctgtagggaaactttacttcatagatcttgcttgaaaagagcgtggtgctgatacaac

SEQ ID NO: 14632 - DNA, 296 bp, Gossypium hirsutum
  Clone ID: LIB3145-013-Q1-K1-G5
agaactcaaataaaaaaaattaaccctaattaaattgcccccaaatacgcgccccatgttcatagatggtgaccattatcagcattcttgctcatgagcgaacgcttggtgcaacattatgatgctcattgacggggatcgttgtattggatcaacgtaaacgcatatatgattccgttacaaactatcaatctgctatgaaagaacctatatttggaaagaaatctcacttaaagtttgcccttctattgaacaaaaccgaggaccatatatttgtaccagtgattgaagccatt

SEQ ID NO: 14633 - DNA, 220 bp, Gossypium hirsutum
  Clone ID: LIB3145-013-Q1-K1-G6
gcgaccgccggaattcggtcgacccaccctcggacctgcgacctggctgtgatattgtggaggtaggaagggggatattttgcctgggaatgctttttatggacgatctatatttacaggtctaaataaaaagtagatgctgactggatgatacaatactgtcttttattgcttgttggcttcctattcgttacatacttgtgttatgttggtgacaatt

SEQ ID NO: 14634 - DNA, 271 bp, Gossypium hirsutum
  Clone ID: LIB3145-013-Q1-K1-G7
ttagagaaagtcctgttgactgttaaaccacaatatggatttggtgatgatggggggccggctactttcggagaatgctctgttcctccaaatgctaccctccatataactgtcgacttggtttcttgtaagaatgtttcttatatcacaaaatacaaaaaggtctcgaaatagattgtgaaagaagcagacggttaccaacgaccacttgatggaacagtgtttcaagtcaaattaataggaaaactaccgtattgaacgatcttgataa

SEQ ID NO: 14635 - DNA, 245 bp, Gossypium hirsutum
  Clone ID: LIB3145-013-Q1-K1-G8
cacctcgattgttatgaaaacaaactaagttgtttttgtcaagcaagaaacccaaaattatatttgtgaaaagacaaaattattatttctagtgtagtgaattttaataaaaattaaaaagtcaacactttgggattttaaagatcatttggacttgttgcgcgtacccgatattgagaccgcataacttattgacgtgacatgagatttgagtgacgacagtcgaccgattcagcccgattgta

SEQ ID NO: 14636 - DNA, 421 bp, Gossypium hirsutum
  unsure (1)..(421): unsure at all n locations; Clone ID: LIB3145-013-Q1-K1-G9
gcgctgaacaccatccatcgagtggatgaactaatagcattgatcctaatggtacccatatgaggagggggaatccttctcatcacagcctatgctcancaaaacacattctccctccaacaggccaaaagcatgaacagtcacctcaccaagtcatttgagatccctgctggttccatgactgtcttcaccatggtctccatgctctccaccataaccttgtatgaccgtgtttttgtccgcattgcccgtatatacacattgctcaagcgaagcatcagctttcttcacaatatgtgaatatgattcatgatatcattattagccactctggtagcatgcttcgtgtgaagtgaaacgtaaacaagcttctttaccacattggcttcattacaaagctcattcaatcatccccatctca

SEQ ID NO: 14637 - DNA, 95 bp, Gossypium hirsutum
  Clone ID: LIB3145-013-Q1-K1-H10
aaattagtcccatgtacacgctttaagcgtgaaataattttattaaaaaaagaaagaagatgatgagatgatcaggagaaggggaaatttgaggt

SEQ ID NO: 14638 - DNA, 303 bp, Gossypium hirsutum
  unsure (1)..(303): unsure at all n locations; Clone ID: LIB3145-013-Q1-K1-H11
caggtatgatcatgggtgcagcaacttcaactgaaaagtacttgtacaggtctggagtagggcaatcaagaagctctgctggaattaaactgacaagtaattgtagtatgcttgtagttaaagtttcttatagtgaacatcatgttgtttattcagtagaagtttcaaagattttactttttagaagaaagtgtattgtagtcattatattgggttttcaaagattgattatgaacattttgatcaaatgaaaagttctcttattaatgtttttgaactcaaaaccccannnntttaattaat

SEQ ID NO: 14639 - DNA, 244 bp, Gossypium hirsutum
  Clone ID: LIB3145-013-Q1-K1-H12
atttccttgaaacatccatgtggccacccttgcgaaagccattccttttttaagactgtgggtaatccactttgaaacgaccttgctgtggtagataaattagacgattgaatctaaataaattaggatgaaactgttttaaattgttaaaaaaaaaaaaaaaaaaaaaaaaaataaaaaaaaaaaaaaaaaaaataagacgtaaattttaaaaagaaataaaaaaattgatatggggcatttt

SEQ ID NO: 14640 - DNA, 196 bp, Gossypium hirsutum
  Clone ID: LIB3145-013-Q1-K1-H2
gcgcccacgcgttcgcccacgcgttcggagagctcttgcaacatatgggactcaagcactgggggaaatgatccaaaattgtatggcacaagatttttcatgggaaggaccattaaaggtgggggaaaaaaatttggttaaccttcgggtggcttgcaatgaaccttgcatttaaagaaaagaaggtggttctttt

SEQ ID NO: 14641 - DNA, 224 bp, Gossypium hirsutum
  Clone ID: LIB3145-013-Q1-K1-H3
ctgaaggctgtaatcaagcgcattgaggatcataatattaaagagcaataccctgctcgtccacttgataaacaatttctcctatcacaaaaagttaaagcacacaccaatcggatcaactgaaactgaaaatcctcaacctaagattgcttgtccctatacctcacaatataggacacgaggcacttactcttcccctgacaaatcattccacactctaacca

SEQ ID NO: 14642 - DNA, 424 bp, Gossypium hirsutum
  unsure (1)..(424): unsure at all n locations; Clone ID: LIB3145-013-Q1-K1-H4
gttcttcggtgcagccattctaataaactccattaaagatatgctgggtaagaaatggggatcctacattccacttccgatggcaatggcaatacctttttacctcggcccgtactttgccattgacatgtgtgtcggaagtttgattttgttcgtttgggaaaagttaaacaaagaaaaggccgctgcgtttgcaccagcagttgcctccggtttgatctgtggtgacggtatatggactttgccaagttcaatacttgctctagccggggttcaaccaccaatttgcatgaaatttctctcgaaggcaacaaacactaaggtcgataatttcttgaactcaaaaagttgaatgcattcgtacaaaatctatagatggttacacttgacacgtaaaacagcatcgncaattatttataatttt

SEQ ID NO: 14643 - DNA, 323 bp, Gossypium hirsutum
  Clone ID: LIB3145-013-Q1-K1-H5
actgaggatcgatcgatcatcttcctttcagatgagtgaagttttcgaagggtgtgagcggcagtattgcgagctatctgcgaatctttccaagaagtgtacggctgctgttgctcttactggagagcagaagaaacaaaaactttctgatgtaagagctggagtggaagatgcagaagctctgattcgaaagatggacctcgaagcaagaagtttgcagccaaatgttaaggctgtacttcttgctaagttaagggaatataaatcagatctaaacaatctgaaaagtgaagttaaaagaatcgcatctggtaatttgaatg

SEQ ID NO: 14644 - DNA, 334 bp, Gossypium hirsutum
  Clone ID: LIB3145-013-Q1-K1-H6
tcgcccacgcgtccgcccacgcgttcgatgggatataatgggagaagaagcatcgaggactggaaataaaatttttcagctcttcactcacgtttcttttttacttgaacttgtacacacgcacatatcaccttatgcaaaagacactctcattggccttattttaaatcattgaaacgctttcagctgttccatcccctgaacttgcattaaggttgtacctgcaatgtgctgaggtaatcttgagtcttgacttaaaccaactctgcatcacacacataggttcaatagagagttgtaccctgaaaattattttaaatgataacaaatttta

SEQ ID NO: 14645 - DNA, 324 bp, Gossypium hirsutum
  unsure (1)..(324): unsure at all n locations; Clone ID: LIB3145-013-Q1-K1-H7
tccaaacactantagaaggtttagttttacaaacatggctagttccggtgtcgttaaggtggtttccatgattctcatggtgtgcatgacgatgatgagtgcacccaaagcagccaaagccgccatcacgtgcagcgacgtgttgaaccacttgatcccgtgcttgtcctacgtacaaaacggcggtacacccgctgctgcatgctgcaatggggtaaaagcactctactgcgaggttcaaacctccccggaccgccaaaacgtgtgcaagtgcattaaaatcgcggttaaccgaatttcctacaccaaccataacctcaattt

SEQ ID NO: 14646 - DNA, 317 bp, Gossypium hirsutum
  Clone ID: LIB3145-013-Q1-K1-H8
cggaatttcgaatgggattacagatggatggactaccctccacaggctagaggtttggggcacccaaatgatggatcagtggctacttataaaggtcactcagtgttgcgcactcttattcgctgttatttttcacccgaatacagcacgggccaaaagtacatttacaccggatctcatgattctcgggtttatatttatgatgtggtcaccggagcccaaattgcggtactgaagcaccatacatcaccagtaagagactgtagttggcacccgcattaccctgtgttggtcaactcctcttgggacggggacgt

SEQ ID NO: 14647 - DNA, 457 bp, Gossypium hirsutum
  Clone ID: LIB3145-013-Q1-K1-H9
acgaccaagccttgtctcaacaaaatggttctttaaccaaagtagatcctcaacatccttcagcgaaccttctaagtgatcttttgggcccacttgccattgaaggccctcctggtgctactgtccaatctgagcacaatgcagtctctggattggaaggtggtccagatgcagttgatggttcagccatagtgcctgtcgaagagcagagaaatacagttcatccgataggaaatattgctgaaagattccatgctttatgcctgaaagatagtggtgttctatatgaggatccttacattcagattggcattaaagcagagtggcgagctcatcatggacgtcttgttcttttcttgggaaacaagaatacagctcctcttgtttcagtccaggctctaatgttgccccctgctcatctgaagatggagctttcattagtgcctgacactatacc

SEQ ID NO: 14648 - DNA, 311 bp, Gossypium hirsutum
  Clone ID: LIB3145-014-Q1-K1-A1
cggacgcgtggggtaagcttcagttcgggtgttaggttgctccaggaacagcccaatgatgacctcaaaaacatggacgctattcctcccattgatgcactcaaccctaccgagttcaatggacccggtgttggcattcacgaagatcatgttgtcccaaaaggttccgaaattgagtactcttggttttggttttgaaggtgagcctgaaaaatgttgttcttctggatgttccggtaattgcaatcctggtgggttcgttctaccatttcctcaaattccagacatcccaagaattccacagatcccac

SEQ ID NO: 14649 - DNA, 444 bp, Gossypium hirsutum
  Clone ID: LIB3145-014-Q1-K1-A10
ggggttcattatggaatttgcagagaatctggtgttgaggttaatggaggacccaaaagagagggatagaaaattcagagaacacgtttactctatgaaggatcgatgcgcaaaaaccaaggagatgtggagttatccactgcggccttatgggttttggacatttgagcgccacaatgctcagctccgttgggatcctcagattagccaagtccccggccgcagggatccttatgatgaccttcttcaagacagttatgcgtcttcctccaaacgaaactgagaagccattagcagatggtttggagcttgatctacaaatgggaagtggacattgaaaccctttttactgtttgtttgaatttattttcaattgtgctacaaaaagattctgcttgttttgtagtctacttttgaacatttgagttgggacactggtttatg

SEQ ID NO: 14650 - DNA, 469 bp, Gossypium hirsutum
  Clone ID: LIB3145-014-Q1-K1-A11
tcgagccacgcgtcacgactgacgatagctggtactgtaaattactatgacattagaaagcagtgtgaaggagacgtgtgtgacgatttctcggacgtcgagacatttctgaacctgaaatcagttagagaagcactcggggtcggagacatcgattttgtctcatgcagcagcgtggtgtacgaagctatgcttatggactggatgagaaacttcgaagttggtatcccttctctccttgaagatggcataaaggtcctcatatatgctggagagtatgaccttatatgtaactggcttgggaattcaaagtgggttcatgcaatgacatggtccgggcagaaaggtttcggttcatcccctattgttccgtttggtgtcgatggtgtagaagccgggaaactgaaaacccatggtcctctcactttcctcaaggtccatgatgctggtcacatggttccaatggatc

SEQ ID NO: 14651 - DNA, 450 bp, Gossypium hirsutum
  unsure (1)..(450): unsure at all n locations; Clone ID: LIB3145-014-Q1-K1-A12
ggaatggggagggaactcacggatgtggacatggacggtaagccaaatggtgtggtgaattcaaatggcaacctaacagtttcagaaggctccgagtctaataattatgaggtcaaggaatgcactgcaaaaaactcggtcgtggacaatggtcatgagaagcaagaagcgctgggtgttaaaagcataaattttggtactgacatccctgaagatcagaagtgcatggacaatgacgagcttagcgcgactgcatcgaaacccattggtgctggacaagctcaccatgctacctctaaaactggtgcaaatggcaccgcaaatgtcaactctgcactctcccctgctaccacaaagggatcagagccaaactctccaataactcctttgatcttgaggaagccattgcaaccttatgaccggaagcatnctgatgacgaagataactgg

SEQ ID NO: 14652 - DNA, 395 bp, Gossypium hirsutum
  Clone ID: LIB3145-014-Q1-K1-A2
ccaactcctctgttgaaagatgagctcgacatcgtgattcccacgattaggaacttggactttttggagatgtggagaccctttttccagccttaccatctcatcattgttcaagatggtgatcctaccaagaccatcaaggtccctgaaggcttcgattatgagctttacaataggaacgacatcaacaggattttgggtcctaaggcttcttgtatctctttcaaggattctgcttgtaggtgctttgggtacatggtttccaagaagaaatacatctataccattgatgatgactgctttgttgctaaagatccatctggcaaagacatcaatgcattggaacagcacatacagaacctactgagtccatccactccatttttcttttacac

SEQ ID NO: 14653 - DNA, 333 bp, Gossypium hirsutum
  Clone ID: LIB3145-014-Q1-K1-A5
accacgcgtgcgattgaacaatgtcctgctcagaaagaccatgagacctgtgttgaaggcgatagaagattcttgtttgctgatgagccaaattgatgagatcgctcttgttggtggaagcactataattccaatggttctacaactcctcaaggactactttgatggaaaggagcccaaccagggtagcaacccagatgaagctgttgcttatggtgctgcagtacaaggaggcatcctgagtggagagggaggtgatgaatcgaaagatattcttctcctttatggaggtacacttacccttgacattgagactgttggtggagtaatgac

SEQ ID NO: 14654 - DNA, 122 bp, Gossypium hirsutum
  Clone ID: LIB3145-014-Q1-K1-A6
cagataggaggacttttaatattttttgtaacccaaccaaatctttacaattactgtaaaaaccgtttcattaaaaaaaataatactctttgcacaactcactcatttcaactaaaaaaata

SEQ ID NO: 14655 - DNA, 387 bp, Gossypium hirsutum
  Clone ID: LIB3145-014-Q1-K1-A7
cccacgcgtccgctgaaattccttctgaaagtttctctgtatctgacagtgaaagcaggatccaagacaatttgcttggtgaacatggaggaagcaaggatgctaaagagtctactgaaaagctgtctccatctgaggaccctcagttgtcaaattctatcgattcccagtcattattgtgtgacaagttagatggatctgataaagctgtgccatccttgaattctactactcatgcccagtctagttctttatcgaaggttagtgaaaaaccaagtgcttccggtgatctcgcagaaggtccagcttctagcaaagtgactggtgaaacaccttctgtaaacacccgtggacaacctggtagttctaaaccatcaaattcagatt

SEQ ID NO: 14656 - DNA, 103 bp, Gossypium hirsutum
  Clone ID: LIB3145-014-Q1-K1-A8
cccacgcgtccgattctttgggaatgaaagtaaactcaatttcctggaacctgtgtttgagactttggatatctgtgataattgctccaatgactgatttatc

SEQ ID NO: 14657 - DNA, 439 bp, Gossypium hirsutum
  Clone ID: LIB3145-014-Q1-K1-A9
acgactgacgatagctggtactgtaaattactatgacattacaaagccttgtcaacgagacgggtggggggatttctctgacgtcgaaacatttctgaacctgaaatcagttatagaagcactcggcgtctgatacatccattttgtctcatgcagcagcgtggcgtacgaaactatgcttatggactggatgagaaacttcaaagctggtataccttctctccttgacaattgcatacaggtccttatatatgctggagagtatgaccttatatgtaactggcttgagaattcaaagtgggctcacgcaatgacatggtccgtgcaaaaaggatacggttcatccgctattggtccgattgtgtcgatggtgtagatgccgagatactgaaaacccatggtactatcactgtcctcacggatcatgatgctggtcaca

SEQ ID NO: 14658 - DNA, 439 bp, Gossypium hirsutum
  Clone ID: LIB3145-014-Q1-K1-B1
gttgcccattattcctcagtcctatgttacacatgcgcttagagtggaaggtcttcgaggtataataacagtgccagccaagctggaatcgacaaccctcgtctttgcacatggagttgacctatttttcacgcagcttgcaccttcaaggacatatgattcactcacggaagattttagttatgccttgctactcattacaatcgtggcactcgtagcagccatctttgtaacatggaggttgtccgagaggaaagaactgcaagagaaatggaggtaaaagttcttctcattacgtttgtgtattaacacatttgcttagatgacacacacccttaattatttatttgaattagattagaaaggggtctccttatgactagtaattcttcaaagtttgtagcaatcaatctttaatgtctatttcaatgctatgttt

SEQ ID NO: 14659 - DNA, 142 bp, Gossypium hirsutum
  Clone ID: LIB3145-014-Q1-K1-B10
tcttaccaagtttatttttcttaccaattcttttaaaagcaaatccccatttattctcttttccaaaaggattaaatgattgatatcattggtgtcacaaaaggtaaaagttattaaggtgttgtcactcggtgtggtgtca

SEQ ID NO: 14660 - DNA, 457 bp, Gossypium hirsutum
  unsure (1)..(457): unsure at all n locations; Clone ID: LIB3145-014-Q1-K1-B11
cccacgcgtctcggaagactctnccgaatgaaagtaatagagtttatggaaaaagaagtagctcctataatggcggagtattgggagaaggcagagtttccattccaaattcttccaaagcttgctgatcttggaattgcaggctttaataccgagggttatggatcccctggtctctccatcactactagtgctattgcaaatgcagagattgctagagttgatgcaagtttctctacatttttattggtgcattctgtaggcatgcttactattgcatcatgtgggtcagaggaacagaagcagaagtatttaccttctttggcacagttaaagacgatagcttgttgggctttgactgagcctgaatatggaagtgatgctagtgctgtaaatacaactgcaagaaaggtagagggaggttggataattgacggacaaaaacgctggataggaa

SEQ ID NO: 14661 - DNA, 273 bp, Gossypium hirsutum
  Clone ID: LIB3145-014-Q1-K1-B12
atgcagtcaacgtcaaccaaatcatcatgcaaaaaaagaggataagccaaagggtactggagctgttgttaaagagtcaggaagcaaggcaaacttacattcatttgagacaacatgcagtactgtagtttactagaaaacgaatggaattgatcctgttgttttactttgatgattgtattccattttctccaaaatccaaataactctacctatttattgaatcgaggaaaaaaaaaaaaaaaaaaaaaaaaaaaaaaaaaaggcgaacta

SEQ ID NO: 14662 - DNA, 290 bp, Gossypium hirsutum
  Clone ID: LIB3145-014-Q1-K1-B2
cgcatctcaagctttacttttaacacgtggaagggcatgggcgatttcccttgcacctagaagcaccatcactgaagaaattttgaaattatgcttttctgctgatattgttggaactgatgaaaatcttctttatcggtcctctactcatggaaaaggcttgaacagattctggtcgaatgtcgaaggttatcatggtccattacttgttctcatatctgctaattcagaagatgcctatcaggataataacaaagccaggaaatggatcataggagcacttacacagc

SEQ ID NO: 14663 - DNA, 291 bp, Gossypium hirsutum
  unsure (1)..(291): unsure at all n locations; Clone ID: LIB3145-014-Q1-K1-B3
nccttgcacctggaagcggcatcactgaagaaattttgaaattatgcttttctgctgatattgttggaactgatcaaaatcttctttatcggtcctctactcatggaaaaggcttgaacagattctagtcgaatgtcgaaggtcctcatggtccattacttgctctcatatctgctaattcagaaaatgcctatcaagataataacacagcctggaaatggatcataggagcacttacacagcaaggtttctaaaataaagattcattctattgaagctcggagaacctat

SEQ ID NO: 14664 - DNA, 366 bp, Gossypium hirsutum
  Clone ID: LIB3145-014-Q1-K1-B4
gaaagaatggcgactaaatccctaattagaaacggagctatgctgatgaatcgagtgttagtgaagcaagctctcaactcgaacccgatttctaagaatcgagtcttgaatcaaggcattcaaatcactcctcagctgttcccatctctctcgaagtcaaaacttgaaattccccatttgcctcgaaacgacgtcgattctctctctgaagtctcctctacggggtttctttatccatttggtctcccttctctccgtttcttccttcccgacggagattcatcaagtgagccaatgctattattccccaaaagaacatatcagcctagtaccatcatgcgcaagagaaatcatggatttttcgcc

SEQ ID NO: 14665 - DNA, 417 bp, Gossypium hirsutum
  Clone ID: LIB3145-014-Q1-K1-B5
cacaaagatggcaggcgcagcaaattgggtttccataaccttactgttttcagtatgtttatcggcgtcctatggtaagaggaccggaatctccaccatggctgacggagccgatgggtttcaaccaagcaacggttttccgcatgaagctgatcctgattcttcaacctctatcgatcctgatcctaccggattcggtgctggcataagtataggttatgaaagaagcccttactgtatcgactgcgacgatgtggatatcatgggcggcagcttttgcggcacctgcaattacggatgcccttaccgcaggttcaataatgggtgtggtggtggtatcgcttatatggatgaactcaaacgaacgattaaggaccttaccatgaaacttgatgccaatggtcttttatggaaaaa

SEQ ID NO: 14666 - DNA, 311 bp, Gossypium hirsutum
  unsure (1)..(311): unsure at all n locations; Clone ID: LIB3145-014-Q1-K1-B6
cagacggacaccgtcctatttttcggtcaaaatcatacctccctgaactaagagacttaacaagccagtgttgggctgctgacatgaaccaaagaccttcattcttggatattctcaagaggctggaaaagatcaaggaaaatgtaccttgagatcatccttggaatatattcagcacatgacattggaagattccatgaaactaatacggagggtatacatctcctttcctccgcccacatcccgcttggccattcctgcagatggtattgtgaatgcactcagntagtagctttgtgatgatagatttt

SEQ ID NO: 14667 - DNA, 235 bp, Gossypium hirsutum
  Clone ID: LIB3145-014-Q1-K1-B7
caaactcgcattctttgctgtagtagtagctatatctatagcattcacaaatggataggcagataaacaagcaaggttgctagcagatgtgggtgttgattgctgcctttgtctcccacaatatgttcatcagtaggaccatcactgtgctctgcgatgagaataactactatacaaattctgatcctcatgctggaactcacgcttgaagttcacattgcagaccaccatgttc

SEQ ID NO: 14668 - DNA, 428 bp, Gossypium hirsutum
  Clone ID: LIB3145-014-Q1-K1-B8
ctcaggggcgacaatggcaaagataaaggggaaactggcattatcaaacgcgttattcgctctcagaatcgtgttattgtcgaagggaaaaattggtaaaaaagcacataaagcacggaccaggtcatgaaggtggtatattcactgttgaagctccctttcatgcttcaaattttcaagttcttgatcctgttactggccttgcaagataggagttaaatatcttgaaaacggaactaaggtgagagtgtctagaggtataggagcatctggttccataattccccgccctgagatcttgaagatgaggactacgcccagaccaactgttgctggtcccaaagatactccgatgaatcttgtactggagaagacatacgagcctaagtctgggagggcatgcctgaactataacatattgacgacgt

SEQ ID NO: 14669 - DNA, 184 bp, Gossypium hirsutum
  unsure (1)..(184): unsure at all n locations; Clone ID: LIB3145-014-Q1-K1-B9
gaagaagagtatccaagcacagntggaaaagatgaagaaatatgcaactgttattagggttttggctcacactcagattaggaaaatgaagggtttgaaccaaaaaaaggcccacctgatggaaatccaagtcaatggtggaccaattgctgcaagggtgattttgcttacaaggtctttgaga

SEQ ID NO: 14670 - DNA, 342 bp, Gossypium hirsutum
  Clone ID: LIB3145-014-Q1-K1-C1
aaagattcgatctcttttgctagaaacgggactgaatggcgatccaatcagtgaaagtaggcaacgtttctttgggtgcatctgagcaagatattaaggagttcttttcgttctctggtgacatcgaacatgtcgaaatgcatggcaataacgagcgatcgcaagttgcatatgttactttcaaggatccacagggagcagaaactgctgttcttctttcaggggcgacaattgtagatcaatcagttaccatagagctggctccggattacaagccacctgctactgcctctgcaacacctgcaacacagaacaaagaggccggccaggccgaatctgctg

SEQ ID NO: 14671 - DNA, 436 bp, Gossypium hirsutum
  Clone ID: LIB3145-014-Q1-K1-C10
ctttgggtttgaaaaatggagtccaacaccaaaatgtcagctcttcttttgctttgcatgcttttcatttcttcagtgacaccaattcttgggtgtggttcatgtgggaaagcaccacacaagcatcgaaagcctaagggaaagtcccctaaaggtcccatcactttgcctccccttgtgaaacctccaatcaagttgccaccggttgttcctccaatagttaagccacccattgacctccctccggttacagtccctccaattaacctccctccagggacggttcctccagtaactaagccaccaagtgggaaaccctgcccaacaccaccaaccaaggacacttgccccattgacacactgaaattgggtgcttgtgtggatctgctgggagggttggtgcacattggactaggtgacccggttttgaatcaat

SEQ ID NO: 14672 - DNA, 442 bp, Gossypium hirsutum
  Clone ID: LIB3145-014-Q1-K1-C11
ggggcatcaaaactgttggcaaacattctctattcttaccgaggaatgggactttcggttggagcgcatgattgctggatgggatgaaacgggccctggactatactatgtggacagtgaagggggaaggttaaaaggaatgcgtttctctgttggatctggttcaccatatgcttatggtgtgctggataatggctatcggtatgatatgtctgttgaagaggctgcagagttggccagaagagctatttatcatgccacattccgagatggagccagtggtggtgttgccagcgtttactacgtgggaccaaatgggtggaagaagctatctggtgatgatgttggagaacttcactataaatactatccagtgatgccaagcacagtggaacaggaaatggttgaagtaggtggggcataaatgggatctactcaacct

SEQ ID NO: 14673 - DNA, 257 bp, Gossypium hirsutum
  unsure (1)..(257): unsure at all n locations; Clone ID: LIB3145-014-Q1-K1-C12
atttgattgtggtgacccagtgggtttctttatatatagaactattatagggtgtgatttcttttaagttcatagttgtatctgaattcttaaacctagtacttgattgaaggaatattgtaagtttgattgtattattcacctcanaaaaaaaaaaaaaaaaaaaaaaaaaaaaaaaaaaaaaaaaaaaaaaaaaaaaaaaaaaaaaataaaaaaaaaaaaatantttttatttaaaaaaaaacaaaaatcaatta

SEQ ID NO: 14674 - DNA, 410 bp, Gossypium hirsutum
  Clone ID: LIB3145-014-Q1-K1-C2
cccacgcgtccgcccacgcgtccgcccacgcgtccgctttaagcctttttttttttaaaaaaaaagaaagaaccccttaacctgctctgttagggttagttcagcatgcagccgccaaaccaccatccattcgatggtcgacggagtgaacaacggccagatttcgccaaccgaggccgtgactacggtgatctggtaattttgctcctttttttctttatttaaaaaaaaacctcgaatcttatgatattcttttaaaaaacgaaacaaaacttgaagatttaaacaaaatctcgataccattcgacccttcgccacatctatatatttttgaggatgtcgggctctcatcggcgtcgattcgagtatccacttcatgtattcatccctaaatggtagctgatcacaag

SEQ ID NO: 14675 - DNA, 353 bp, Gossypium hirsutum
  unsure (1)..(353): unsure at all n locations; Clone ID: LIB3145-014-Q1-K1-C4
aaatattgaagagatgggtgcaatgaatgagaaatatcagtcgcctaggattcctgaaatagagatctcaactccacctccaaatgatggaatggacaaggaaccaatgcatagcaggaagaaatggaacaatgaggagagccctcctaaagcagccaaagggtttagaaagcttcttttctttggaagaaaaggcaaaaactatgctactgcttagtgtatgcttgtctntccatattgcttatgcttcgggttttcaattttttcgggtggaacgtaccaataaagcctttgatgttgctgccattcaaggattcatgaacttataaataaaatggtgaaaaaaagagaga

SEQ ID NO: 14676 - DNA, 318 bp, Gossypium hirsutum
  Clone ID: LIB3145-014-Q1-K1-C5
ttatctttaagtacggttggattttacaacgtttattctttttgggttatttataggggctctagtagttgctaagactttatttaatttggttccttagcttattattattctttggtttaggctaataacattaaagtttttttttttttaatgtcattggaactttcttttacctcaataaaaaaaaaacaaaaaaaaataaaaataaataaaaaaaaacaaataaaaaaaaaataaaataaccataaaaataacttcaggttacaagccaatcttggttctgttctatgcaacacccggcacgccagaacaaag

SEQ ID NO: 14677 - DNA, 389 bp, Gossypium hirsutum
  Clone ID: LIB3145-014-Q1-K1-C7
ctggattcagctgtacaattcctcacaaggagaccgcattgaagtgctgtgacgaggtagatccggttgcaaagtccattggagctgttaattgcattataaggagacagagtgacgggaagttgtttggttataacacagattatatcggtgctatttcagccattgaggatggattacaagctagatataacatgagcagtgcagccggatcgccattagccggtaagctgttcgtggttattggtgctggtggtgctgggaaggcactagcttacggtgcaaaacaaaaaggagcgagagtcgtaattgccaatcgaacctatggtacgatgcacttgtttttcttgttgtaacattctaacaagagttattttttgttttataca

SEQ ID NO: 14678 - DNA, 310 bp, Gossypium hirsutum
  Clone ID: LIB3145-014-Q1-K1-C8
cccacgcgtgcggcacttgtgctgctatgactcccaaggttattgtttatggtgacttgtcacaggagacaatcatgaatgaagtgccatctctgcacaaccatgtaatggcagaaggttcagtgctcaaggagtcttttttcccccctttcaatgtgccatcaaaagactcatcagaagcatgttcttcaaatctagctcaaggtgaagacttgcaaccatcatgttgatctgtatgtgagaatcttggcagctctacaacagataattcaactgttactacttgtggcaaagatagtgactgcaatga

SEQ ID NO: 14679 - DNA, 414 bp, Gossypium hirsutum
  Clone ID: LIB3145-014-Q1-K1-C9
cttgctttatgaagaacttgccccaatagctatcattaccagcgcatgctgcttattaggggagcgatgaccgtacattgtcttttcacagtctatatgactatactgaaaattcaggaagaggcaagaattaaactgcatgcctatgtcctgtcaaggtctttggcagttgccaatacgatgactatgaagaggaagacatctatagtgaagtgaaagaagaccacgaaaaatatgaatatgatctacggatgaaggcagatcatgcgagtgagaatatgaaatccattaaccaaatgtaatcttcatacaacagttgtgtgataaaagcctctgctgtataggtttgagaacgttatattgccaactactcttggatgattgctacaaatattgatgttctagactataaca

SEQ ID NO: 14680 - DNA, 354 bp, Gossypium hirsutum
  Clone ID: LIB3145-014-Q1-K1-D1
aggctctcgtcgtaaggcttcttggaaggatccagaaggtcgcgtcatctccaccaccacccgagacgccgctgtctcacagcttaaacttctccgcgacgacatcgtttccaacaaggctaagttcgacgaggttgcctctcgctactccgattgcagctccgctaaacgtggcggtgatctcggtccttttggtcgaggccagatgcaaaagccatttgaggatgcaacatataatcttaacatatgcgagataagtgacattgtggatactgatagcggtgttcacatcataatgagaactggttgatcattagtgatggagcctggatatcgagagcaattagttcagtc

SEQ ID NO: 14681 - DNA, 454 bp, Gossypium hirsutum
  Clone ID: LIB3145-014-Q1-K1-D11
aacggaaaaaaaagaaagcatagagagagagagagagaggcatatgctactgtgatggatgcttgagaggtagcagacttaaagctccttgttgatcagtgcaaatcaaacccttcaattatccacactccctctctttccttcttcaagtcctatctcctaagtctgggagctcaaattccaaccgacccacggacggatagaggtggtgttaaaatggaagagcctgagcaacactctgatgacaagaaaccctatttttcaaatgaagaagatgatgatattattgagtccgatgtcgagttagataataacggtgttgtggaacctgacaacaatcctccacaaaaaatgggagactcttcggttgaagttacggaggaaaagcgggatgctgctcaatcggaaaaattaaaagccatggatgcgatatctggaggtaagctggatgaac

SEQ ID NO: 14682 - DNA, 446 bp, Gossypium hirsutum
  unsure (1)..(446): unsure at all n locations; Clone ID: LIB3145-014-Q1-K1-D12
cccacgcgtccgattaggaaacaagatgatgatagaagagacaaagcgcagtatccatgatgcattgtgtgtggccaggaatctcattcgcaacaattctattgtctatggtggtggctcagctgagatttcttgctcaattgctgtggaggcagctgcagataaatatccaggagttgagcagtatgcaatccgggcatttgctgatgctttagactcagtccccatggccctggctgagaatagcggactccaacccattgagacactatcagcagtgaaatctcagcaaattaaggacaataatccacactatggaatagactgcaatgatgttgggactaatgatatgcgggagcaagacgtctttgaaacactgatcgggaagcagcaacagatcttactggcaacgcaagttgtaaagatgattntgaaaattgatgatg

SEQ ID NO: 14683 - DNA, 307 bp, Gossypium hirsutum
  Clone ID: LIB3145-014-Q1-K1-D2
ggagtatgtcaggagagacatcgcagacaaagaggagaccttgcatggaaacagagaatccagcagcagtcgcagaaagcgagaaagggatgaaattttagacccgcgtaagagagttgagcaacaaagaattagagacacttttgatcatcattcagttcggcacaaagacgagatttggttgcatagagagagggttgagaggcagcgggagagggatgactggaataggctaaaacaatcgcatgatgaaagtttatcaaaacgggagagagaagatagacgaggtccagtgaggagtggacgt

SEQ ID NO: 14684 - DNA, 384 bp, Gossypium hirsutum
  Clone ID: LIB3145-014-Q1-K1-D3
ggatgaacgtaatcctaccagcaaaataattttgccaactgacctgaatgtaccagacgaaaacgatcggaagctagtagatcatagagattctgaggcagtgcaaactgtggattctgatgcgggccgggctgagctgattactgaatgtagtgtggatatgaatattgatagcaaggctgggtcactgcaggttcagaaaagtgttgttgctttggggaacctaaatgcaggaagggatgttactgaacagggtgtttctgttgcagtatcagcatttcttggggcagcagcttatccttgcattcctagtttagattctgtggctgagtccaaacctgctactagtttgtatgaacatgatacaaaatgcagtgcagagac

SEQ ID NO: 14685 - DNA, 362 bp, Gossypium hirsutum
  Clone ID: LIB3145-014-Q1-K1-D4
aatctttgaaccacatctcccttgtgtgtagatcagttgaggaatccatgaacttttatcaggatattcttgggtttgctccaatcaggagacctggatcatttgactttaatggggcatggttgtttggatacggaattggaatacatctcctgcaatcggaggatccagagagtttgcccaagaaaaaggaaatcaatcccaaggataatcacatttctttccaggttatttcaattcttttcattccagcatattattttattcctccttgggctaatccaatatctaagtgtgaagaaacaacatcctgctctctacagattaatatatggcgcatataaattgctactctgtttctc

SEQ ID NO: 14686 - DNA, 421 bp, Gossypium hirsutum
  unsure (1)..(421): unsure at all n locations; Clone ID: LIB3145-014-Q1-K1-D5
gttgcaggagatgcatgtgttgccatggaccagtgggtccagaatcccactgcacatactgcgctagatgacattctgccatgtgtggacaatgcaacggcccaagagaccttgttacaaaccaagaatgtcactcaccaacttgtaactgtcgtgaatggcatcatcaatactggtgccaaccgtaatttcccaccacaattggcacctttatattacaatcaatccggtccattggtgcctgttctctgcaatccattccattcaaatctctcggagcgtatgtgtgcatctggtgaagttagcttgtacaattcttctgaggtttggaagaaatatacctgtaacatatctacacctttcgggatttgtactacacctangcggctgacccctcaattctatagtcagatgtcagctg

SEQ ID NO: 14687 - DNA, 332 bp, Gossypium hirsutum
  Clone ID: LIB3145-014-Q1-K1-D6
gcgaaaacaaattcaacaggttctgaaataaagtggaaaattccaacagaggcgactcctacagaattatatgccagatttatgagtgaactgtacagtctgcttgatggatctgctgataatgctaagtttgaagacgaatgtcgagctataataggaaaccaatcatatgtgttattcacattggacaagttattatataaattggttaagcagcttcaagctgtctcagcagatgatatggatactaagcttctccagttgtttgagtatgaaaaatcccggaaacatgggaagacaatggattctgtttattatgagaatgcacgtgt

SEQ ID NO: 14688 - DNA, 360 bp, Gossypium hirsutum
  Clone ID: LIB3145-014-Q1-K1-D7
cccacgcgttcgatcgattctatcgaaaaccatggaaaaccccgataaaagaggaggggtagtggtgagatggtgttgaattcaagggtttttgagccctgaaagatcaaatctcccatctcccccctgcccttgtgtttcgtggtgatcaacagattagggtttttgttctctttctgaacaacaaaaatggtggggactactgagggagtggattcctctgcctccaacagcaagaagaatcagctgcaagtctccaatacccaaaaaccccttttgttctacgttaacctcgccaagaggtatatgcagctatacaatgaggtggaactctctgctcttggaatggctattgctact

SEQ ID NO: 14689 - DNA, 270 bp, Gossypium hirsutum
  Clone ID: LIB3145-014-Q1-K1-D8
ggattatatttgctgtttttgtttcatctacttaccatcatttcttttgtaagggtgagaattgtgagacgattatatatttatatgtttagtagacctcttgaaatactctacgaagaggttattgaaatgtttgtgtaacgctttgagactgacttgtcatattctgcgttttctggacaaactttaacttgtaggcaacttagggtgtcgttttttgtgcctttgacagctatatgaataagatacttttcttttataccccttttc

SEQ ID NO: 14690 - DNA, 436 bp, Gossypium hirsutum
  Clone ID: LIB3145-014-Q1-K1-D9
aacggaaaaaaaacaatgcgtatcgagagatagatttaggcatatgctactgaaatggatgcttcgagggtagcagacttaaagctccttgctgatcagtgcaaatcaaacccttcaattatccacactccctatgtttccttcttcaaatcctatctcctaagtctggaagctcaaattccaaccgacccacggacggatagaggtggtgttaaaatggaagagcctgagcaacactctgatgacaagaaaccctatttttcacatgaataagatgatgatattattgagtccgatctcgaattagataataacagaccatgtggaacctgacaacaatcctacacaaaaaatgggagactctacagctgaagttacagaggataagcgggatgctgctcaatccgaaaaattaaaagccatggatgcgatatct

SEQ ID NO: 14691 - DNA, 374 bp, Gossypium hirsutum
  unsure (1)..(374): unsure at all n locations; Clone ID: LIB3145-014-Q1-K1-E1
cccgctccttctcgctgcgatttcgtcttcaagatctcagttctcaaatcgtagcgctcttttctatcaagccatggctctgatcttgcatgcaggaaaaacaaacaaaaatgcctttaaggcactcattgctgcagaatatagtggtgtgcaggtcaaaatggttgagaattttgagatgggtgtgtcaaataagactcctgagttcatcaagatgaaccctttggggaaagttcctgtgttggaaacacctgagggtccggtatttgagagcaatgccattgctcgttatgttgctcgctcaaaggttaacaaccctatatgtggntctacattgattgattatggtcatatcgagcaatggattgattttg

SEQ ID NO: 14692 - DNA, 450 bp, Gossypium hirsutum
  Clone ID: LIB3145-014-Q1-K1-E11
cccacgcgtccgctgcactaacgcaattacaaaaaggaaaagagagatgttcctatgatcattgttacttggggtcagttttcatgcccaagcttcgagggaaattttttgctacagaaaatttcttctatacctcaaagttctttaggttgcgccaaagggcctttctttccgatctaattatggcgggaaagcatttctgtgaagaggattggtcaaaattgaagaagaaacaccaatcactcaatgaggaagatctattgcgctattgtttttcttcagcatattttgtggccttgcttcacgatagccttgaaattgctttggatgatgaaaggatcagctttgctaatcaggtcaacgatataccattagattgggccttgggagctttcatattgcaaagcacatccatctcagatgtgcaacaaactgactggataactatta

SEQ ID NO: 14693 - DNA, 444 bp, Gossypium hirsutum
  Clone ID: LIB3145-014-Q1-K1-E12
cccacgcgtccgactccgtccatcgtctgctctcgccaaaagacacccaaagacaccactttgaaacccggaaatgtcggacgaggagcatcatttcgagtccaaggccgacgccggcgcttccaaaacctaccctcagcaggccggcaccatccgcaagaacggttacatcgtcataaaaaatcgcccctgcaaggttgttgaagtttccacctccaagaccgggaagcatggtcatgcgaagtgtcactttgttggaatcgatatcttcactgccaagaagctcgaagatattgctccttcttcccacaattgtgatgttccgcatgtcaatcgtactgactaccagctgattgacatttctgaggatggatttgtgagttcgctgactgagagtggagacactaaggatgatctgaggctgccaactgatgagaacttatt

SEQ ID NO: 14694 - DNA, 284 bp, Gossypium hirsutum
  Clone ID: LIB3145-014-Q1-K1-E2
catatgttcaattactggaattgactgcatgggaggttttcacccttcattggatgccattcttgaaggactcggttatgcagctcctccaatcatggcccttcttttcatattagatgatgaagtagtgaaactttctcctcatgctcgtgcaataagagatgtcgaggatgaggaattaaggagcttcttttatggaatggcaccttggcagttcatacttatggtcgctgcaagctcagttggagaggagcttttctatatggcagctgttcagggagcat

SEQ ID NO: 14695 - DNA, 341 bp, Gossypium hirsutum
  unsure (1)..(341): unsure at all n locations; Clone ID: LIB3145-014-Q1-K1-E3
cccacgcgtccgcccacgcgtccgccgaaaaggtactggtaattaactcttttttccaacttctgttatgactgtcaatcaactcatcaactttagcatcgcgcatagaattaatttctgntgattaatgaaaaaaaaataaaaaaaataaaaaaataaaaaacgtcaaaaatgaaagaaattaaggagcttcttttatggaatagaaaacttggaagtgcatacttatggtctctgaaaactcatttggaaaggagcttttctataaggcaggtgttcatacagcattggctgatatatctcctagaggcactaaattggtttcagaaacaaaacgaatg

SEQ ID NO: 14696 - DNA, 355 bp, Gossypium hirsutum
  Clone ID: LIB3145-014-Q1-K1-E4
ctcaaaagaaaacattattcagttgtggactgctgtcagacagcccaacgtatttcttcccacagtttttattttcttgtggcaggcaacaccacagtcggactctgccatgtttttctttaccacaaataaacttggtttcaccccagaatttctaggacgtgtcaaacttgttacttcagttgcatcgctggctggagttggactgtataatggatttttaaaaaatgttcctttgcggaagatttttcttgccacaacagttactggtacagttcttggaatgactcaagtctttcttgtcacgggattgaaccgacagtttggataagtgatgagtgggttgcaattgggg

SEQ ID NO: 14697 - DNA, 361 bp, Gossypium hirsutum
  Clone ID: LIB3145-014-Q1-K1-E5
cgacaagagaatgttgctggagtgaagcttccaaagtttgagtattttactgaaggtgagaccaaaaatgatttgactggtttggcccgaggtggacaacaggtccaacagtgccgtgctgcttacgtgaaagcaattgaggttctagttgagcttgcttctcttcagacttcattcttaacactcgatgaggcaatcaaaaccacaaatcgtagggttaatgctttagagaatgttgtgaagccaaggttggagaatacgataagttacattaagggagagttggatgagcttgaaagggaggatttcttcaagctaaagaagatccaaggttattagaagagggaaatagagaaacagc

SEQ ID NO: 14698 - DNA, 366 bp, Gossypium hirsutum
  Clone ID: LIB3145-014-Q1-K1-E7
aaaaaaactaaaagaactttggagttctctcctcctctcctctcaaaacttccttcatatgcggcctatagggccgttcgatagtccgacgcaaccgccggtcgacaatggcggtgaccgctgtatacggcggaagagcgcaacccagtttcatcttgcaggtgtcagacgcgtggaaggccggtggttggtgccccaagcagtggtggtggtgcgcgtgatggccaagggcagaggggagtgacagctgaaatcttgatggctaggtttttttgctgctgaaaaatgtttagtttgttgggctaagtgggctttaaggacttagatcatcagggtcattagttttgggtgtgagctattcaatgt

SEQ ID NO: 14699 - DNA, 128 bp, Gossypium hirsutum
  Clone ID: LIB3145-014-Q1-K1-E8
aaaaaaaactaaaagaactttggagttctgtcctactctccaaccaaaacttccggcagaggcggactattttaccggtcgactcaccaacgcaacccccgttcgtcaatggccattaccaatatata

SEQ ID NO: 14700 - DNA, 437 bp, Gossypium hirsutum
  Clone ID: LIB3145-014-Q1-K1-E9
cccacgcgtccgtcgaacttggaaaaacttcttgatcttgttgagaagagttgccaccaagatcggaaagaaaccatggttcacaaagctgctctgaaagtatgaaaacgatgaacattcaccaaactacaggttgtggccaagttgaaatgtgctttttggaggcaagtggcttaatatgatggtgaaaaaaagtatgttgctatgaccttttctataactgaaatttggttactatagggaaaaccaaaagatggtgcctgttttttatagcaggagggaagaaaacaattaggtgtgttatttgaattcttcatcactattgacaatttcgcatctttcacattatttcaccactatttcttcgagcaagttacggaggaaaagcgggatgctgctcaatcggaaaaataaaagccatggatgcgatatctgga

SEQ ID NO: 14701 - DNA, 363 bp, Gossypium hirsutum
  Clone ID: LIB3145-014-Q1-K1-F1
gttggttgacacatatttcctagatccagcaaggaactcttggaagcaaacctgctgctcgaaaaactcagaccatcgtattggttttcagctcacttgcactgcaaattcaccgctcttgttgaacatgaagagggtggtcgagtgacaaaatttcttgcactcgataaatgccttcctgggcgcaagttcttgcaggttgttgatattgatctgatctaggaccttatgaggttcagtacgatgaagaatggctggcaataacacggaaattgaactgtgtctttcctttgaccttccgatgtggagacgttgggtaggagaacaaagctcgacatgcaagattgtcgtcaatgggttaag

SEQ ID NO: 14702 - DNA, 439 bp, Gossypium hirsutum
  Clone ID: LIB3145-014-Q1-K1-F11
ggcaggcagccatggcaaggatcaaggtgcacgagttaaggagcaaatcaaagacagagctgttgactcagctcaaggatttaaaagccgaactttctctccttcgtgttgccaaggtcactggtggtgcccccaataagctctccaagattaaggtggtgaggctatccattgctcaagtattgacggtgatatcccaaaaacagaaggctgctttgagggaagcttatacgaagaagaagtttttgcctcttgatctccgtcccaagaagaccagagctattcgccgccgccttaccaagcaccagctatctttgaaaaccgagcgggagaaaaagaaggagatgtactttccgatgaggaagtatgccattaaggtataagcttgaaatttgacttaagatggatacctttatgttagtttcaaagtgactattcg

SEQ ID NO: 14703 - DNA, 404 bp, Gossypium hirsutum
  Clone ID: LIB3145-014-Q1-K1-F2
cacaatctgccatgagtgctgccatgggattgggcctcataccataacccttcctgatggccgaaagtctactgttagattggagcttcaagatttacactcggctttggaagaagcaaaagcagacatagtgggtctttgggcactgaactttctaataaaaaagcatttacttccgactagtctggaaaagtccatgtatgtttcattccttgcaggatgctttcgctcagttcggtttggcttagaggaagctcatggaaaaggtcaagcattacaatttaactggttattggaaaaggaagcctttgttttccatcccaatgagacattttctgtcaactttgacaaggttgaggaaagcaagtgaagttttgagtaggactatactttaccatacaagc

SEQ ID NO: 14704 - DNA, 358 bp, Gossypium hirsutum
  Clone ID: LIB3145-014-Q1-K1-F3
cgagaacacagttccaactggagaaatcaagccagttaaagggactccttttgacttcactgctgagaagaaggttggtcttcaagtccatgaggtaggtttgggttatgaccataactatgttcttggcggtggggaagaaaaattgggtttgaaacgtgctgccaaattgaaggacccatccagctcgagggtccttaacttatggaccaatgcacctgggatgcaattttacactggtaattacgtgaatggagtagtcgggaaaggaggtgctgtttataataagcatgcagggttatgcttggaaacgcagggatttccaaatgccataaaccaatcaaacttcccatcagtc

SEQ ID NO: 14705 - DNA, 164 bp, Gossypium hirsutum
  Clone ID: LIB3145-014-Q1-K1-F4
tccgaaaaaaaaaaataaaaaaaaaaaaaaaaaaaaaataaaaaaaataaaaaaatagggatgaaaaaagttaaaaaaaatacataaataaactaaaaattgacataactatttctaaaaaagaaaaaaaattgaattaaacatctacaaattaggccctcctc

SEQ ID NO: 14706 - DNA, 319 bp, Gossypium hirsutum
  Clone ID: LIB3145-014-Q1-K1-F5
aaaagttgaattgtatattacaagacaaaaggctgaagaaagctgaaattaggtgtaatacatttcgtccaagaaaaaaatatgaaataactgtcaaaaaaaaaaaaaaaaaaaaaaaaaaaaaaaaaaaaaaaaaaaaaaaaaaaaaaaaaaaaaaaactaaaaaaaaaaaataactgagcacaaaaaaaaaaaaaaaaattaaaaaaaaaaaaaaccaaaaaactaattaaaataaaattggggggggggcttttttaaaaaaccaatttttttgaccggggtggagaaagtaaaacttttttttttgggaccccaa

SEQ ID NO: 14707 - DNA, 392 bp, Gossypium hirsutum
  Clone ID: LIB3145-014-Q1-K1-F6
cccacgcgtccggaaaaaaagagagatggcgtctgtaataaaatctgcaatcttaattctgtcggtgtttttatctgtacgcttcagttcgggtgttaggttgctccaggaacagcccaatgatgaccccaaaaacatggacgctattcctcccattgatgcactcaaccctaccgagttgaatggacccggtgttggcattcacgaagatcatgttgtcccaaaaggtgctgaaattggtactcttggttttggttttgaaggtggtcctgataaatgttgttcttctggatgttccggtaattgtaatcctggtggtttcgttctaccatttcctcaaattccagaaatcccaagaattccagaaatcccacaaatcccacagatcccac

SEQ ID NO: 14708 - DNA, 400 bp, Gossypium hirsutum
  Clone ID: LIB3145-014-Q1-K1-F7
gaatgcctatacaaggattttggccaagaagcatccaaatttctgcatcaactgtgtttgccctggttttgtcaaaacagatataaataacaatgccgggcattcaacccccgaagaaggtgctgcgattccagtcaagttagcactttggccgaacggtggtgccccttccggcctatttttcgttcacggtgaacctgtaccatttgaatgaaactaaaaaaaaaagaaacaatataatcccatcaaagtggtcggcaacttagctcacaattctctcttcatcatcgattacaataacaatgtgtcaacatggttcttcggactatccattcaagcacggtagaacaagtattaggtgcttcacaatttttccaggttcattcctttaaaaagaaat

SEQ ID NO: 14709 - DNA, 88 bp, Gossypium hirsutum
  Clone ID: LIB3145-014-Q1-K1-F8
aaaaaccaggaaagcccccatgatcctgcaatcctgttaccgatttacaaatagaatgtgattgtctcataaataagttagtgttatt

SEQ ID NO: 14710 - DNA, 453 bp, Gossypium hirsutum
  Clone ID: LIB3145-014-Q1-K1-F9
ccaagccagagaataaagactcgttatctatgattatcaacccaagggcagtctattctccctgattcacggtgatacctcctgtgacaaactgagttaagctgcgatttaactcggtgttaactcgggttgcacattaattccttgggtttgccgcaaagcatatgatatattaactagcgttaatatagttgaattataaagcactttctttaatgcatttgcatgtgcaggatcgaaatcaacaagggctaagccactccactggacctcgtgcttgaaaatagcagaggacgttgcacaaggtctcgcctacattcaccaagcatggagactggtccatggcaatctcaagtcctctaacgttctactcggacctgatttcgaggcctgtttaacggactactctctggcagtcctaatcacacccacccacgatgaagaccccgactt

SEQ ID NO: 14711 - DNA, 392 bp, Gossypium hirsutum
  Clone ID: LIB3145-014-Q1-K1-G1
gaagtttagcttccgaggtgtcgatttggatgctctccttgatatgtccactgatgagcttgtcaagctcttccctgctcgagctcgcagaaggttccagaggggtttgaagagaaagcccatggctctaattaagaagcttcgcaaggcgaaaagggaggctccacctggtgagaagccagaaccagttagaacccacctgcgtaacatgatcattgtacccgaaatgattggaagcattatcggtgtgtacaatggcaagacattcaaccaagttgaaatcaagcctgaaatgattagccattaccttgctgagttttctatttcgtacaagccagtcaagcacggtagaccaagtattggtgctacccattcttccaggttcattcctc

SEQ ID NO: 14712 - DNA, 442 bp, Gossypium hirsutum
  unsure (1)..(442): unsure at all n locations; Clone ID: LIB3145-014-Q1-K1-G10
cggacgcgtgggccagatacaaattacttgttcatgggagattatgttgatcgtggttactattcagttgaaactgtaacactcttggtagctctcaaagtgcgttacccccaacggataactattctgaggggaaatcatgagagccgtcagattactcaagtgtatgggttttatgatgagtgcctaaggaagtacggcagtgccaacgtttggaagatcttcactgatctgtttgattattttccactaacagcattggttgaatctgaaattttctgtctccatggtgggttatctccatccattgaaacactggataacatacgtaactttgaccgtgttcaagaagttcctcatgagggtcctatgtgcgatcttttgtggtctgaccctgatgatcggtgtggatggngcatttcacctaggggtgccggatata

SEQ ID NO: 14713 - DNA, 444 bp, Gossypium hirsutum
  Clone ID: LIB3145-014-Q1-K1-G12
acgcccacgcgtgacgggattcaaattacacccagttgactgagctttacaacaaatacaaggacaaagggttggagatcttggcatttccttgcaatcagtttttgaagcaagaaccaggtaccagccaagaggcagaagagtttgcttgcataagatacaatgctgaatatcctattttcaaaaaggtttgttgcaacgggccgaataccgaacctgtcttcaagttcttaaaagcaaagaaatctggtttcttgtgatctacgataaaggggaacttcactaaatttttagttgataaggatggtaacgtactctctcgctatagcccaaccaccacaccactggccatagagggtgacatcaagaaagcattgggagtggatacgtgaaaatataagaggtggagggaaaatggaaactaaaaacaatgtatataggatg

SEQ ID NO: 14714 - DNA, 395 bp, Gossypium hirsutum
  Clone ID: LIB3145-014-Q1-K1-G2
gaagaaagtcaaagtggaaaagaatgttgtgaagggtgagagtggcataacctccagggaaattgtaatagaagatactgggaaagaaccagaaggtgaaggagaccaagagaagcaaaagggtaaagcaaaagaagagaaagataataacaataaatgtgagaagaagagaaaatttgaggggaaggacaaaagcaaagatattagcaagctgaaacagaagttagagaaaattaatagcaaaatatatgccctacttgagaaaaaggcagacatcctaaggcagattaatgaagctgagaacacgaccaatgaagttgctgtgtaattgcatacatggactgactgtggtatagcactatgcactagtgtgttttacacacgcattttttttt

SEQ ID NO: 14715 - DNA, 356 bp, Gossypium hirsutum
  unsure (1)..(356): unsure at all n locations; Clone ID: LIB3145-014-Q1-K1-G3
ttcctttggaggttcttaatctgccttaatcaactaatatgtgctacttgtagttactttattgtactctggacaaggaaaaaatttgcctgacttatgatttagaaattatttaaggcaggcaatcttgcggtgacaatttgggtcnncaaaaaaaaaaaaaaaaaaaaaaaaataaagaaaaaagaaaaaaaaaaacccgttaaaaaactataacaaaaacatagaaacaataaaaaactaaatgtaaaccctacttgaaaaaaaagctaacctaactttagaaaaaaaatgggggggggccgttttaaaggaccaaattttatgtccccgggttggcgagctttaattttttt

SEQ ID NO: 14716 - DNA, 351 bp, Gossypium hirsutum
  Clone ID: LIB3145-014-Q1-K1-G4
cccacgcgtccgctttagggaagtataatggcttctctgactatggttccaagttcagtggacgaatcccatatggagaaaggtttgcacagactgatggaattgctccagttgggagaggaaggggaccttcttggagatctgaaacgtctgatgattgggatttccctgcgtttaatgcatcaaggaatggacaatttcaatcaagaagagctccagctagcagcggcctggatggtagatcacccaaatcagaacacgagagtgatcagattggtggcaggagaggttgggacaagggtcccgggcctgaaagacttggtgaaagaccttcagctagaagtgtctggc

SEQ ID NO: 14717 - DNA, 413 bp, Gossypium hirsutum
  unsure (1)..(413): unsure at all n locations; Clone ID: LIB3145-014-Q1-K1-G5
cccacgcgtccgctctttgaaccttacgtccttgagtaaaaaaaccttgtccaagtgtcacggccaaagtgcaaagcccgtgatcatggcataagatgtgtcccatggaggtctatcgattagatggagaacatttagcccacgagaactggcccgattcaaggaattgttggagaagcctgtcagattgaagcctgattggctcgataatgaagacatggtaacttaggctaattttggtaattaatcttagaagatatagggaatcatatcttgtaaaaattagattagatttgatatggcatatcttataaattcttaaaattaggggatatggttaatctcgtccggcgatgtaaatgtttcttgaccgncggtttttgggagctcaactataaatagagagtctcccc

SEQ ID NO: 14718 - DNA, 316 bp, Gossypium hirsutum
  Clone ID: LIB3145-014-Q1-K1-G6
tttggaatttcacagatgctagctggtgatcagggtggaaagtagatcattgggatattgaaatgatcaaatgacttttatcttcagttctgcttacttgatggttaaccacttgaatgtcaaataatgctcaagaacctattatttgcctatgctttagggaataagaggcatttatttttagtatataagtagtaaaaacctgtcatccttctttaagtcttgaaggatgcctctaggctttatgctgcaagttgggtaagagatattggtcatgatcttagaccaaacgattataagaaggatgatgggactg

SEQ ID NO: 14719 - DNA, 218 bp, Gossypium hirsutum
  Clone ID: LIB3145-014-Q1-K1-G7
ttcaaaaggtcacagaatctaacctctgttctagagggaaagaacactgtggggaggtcgggaccatctaaccacgcttgatctcaatacttttgacttggaccttattcaccgccctgatcaaaattgagcaggaaccttttaatagccttaacttacaagaggagagtgctggcatttttatggtatgaatcctgagaatctctctcattatgtta

SEQ ID NO: 14720 - DNA, 310 bp, Gossypium hirsutum
  Clone ID: LIB3145-014-Q1-K1-G8
cgacggtggttcggcgacccacgcgtcgtttttttaacaatgatggacactgctaaacactttacataggacagggttggagcttgattggttgggatatttgaaaggatttgtaaatgatttagataatgtgaaatgcaaaattagggttgatggatttaagtattaggctgttaaggctagaaattggatgatattgttgagaaaattagtattgtagatactattagggataatgcaaattgtaagatggggattctaaataaaaagattattgtaatggatggaagaatttgctataatgagtttt

SEQ ID NO: 14721 - DNA, 247 bp, Gossypium hirsutum
  Clone ID: LIB3145-014-Q1-K1-G9
ggcaggcagccatggcaaggatcaaggtgcacgagttaaggagcaaatcaaagacagagctgttggctcagctcaaggatttaaaagccgaactttctctccttcgtgttgccaaagtcactggtggtgcccccaataagctctccaagattaaggtggtgaggctatccattgctcaagtattgacggtgatatcccaaaaacagaaggctgctttgagggaagcttatacgaagaagaagttttt

SEQ ID NO: 14722 - DNA, 296 bp, Gossypium hirsutum
  unsure (1)..(296): unsure at all n locations; Clone ID: LIB3145-014-Q1-K1-H1
gtcctcccaccgaccggagcaattatgtcaactatctatgatgaaaaaaaggatgaagacggatttctgtacgttacatacagtggagaaaatacatttggctagcagatcatgcagggaccttatttccatgctatagtttacatttaattgaataaattaataattgtggcattctgcctaatatatgatatgattcctcggaatgcctatacgtgtatagtttcaccgtacataattccatgtcaatctaaaatgtcggaactattgctcaaattcnnnanannnaannnnaa

SEQ ID NO: 14723 - DNA, 441 bp, Gossypium hirsutum
  Clone ID: LIB3145-014-Q1-K1-H10
gggagaaatatcgtggttccaggatatgagcaaggaaattttattggtccgacaattttaactggtgtcacagctgacatggaatgctataaggaggaaatcttcggcccagttcttgtttgcatgaaggctgacagcttggaagacgctttaaacattgttaacagaaacaaatatggtaatggtgcttctatatttactacatccggtgctgtagcgaggaaattccagacagaggttgaggctgggcaggttggcatcaatgtccccataccagttcccttgccgtttttctcatttactggcaataaatcatctttcgcaggcgaccttaacttttatggcaaggctggagttaactttttcacccagattaaaacagttactcaacaatggaaggatttacctagcggcagcggtgttttcctagcgatgccaaca

SEQ ID NO: 14724 - DNA, 444 bp, Gossypium hirsutum
  Clone ID: LIB3145-014-Q1-K1-H11
gtcttctcaaaactcagagcatgatgagatagattttgagttcttgggcaacagaacagggcaaggatacattcttcagaccaatgtgttcactggtggcaaaggagacagagaacaaaggatttacctttggtttgacccaaccaaagaataccactcctactctgtcctctggaacatgtatcagatagtgtgagtgctctttttctttttttaagtatttcaactgaaatgcacttgttatttagtgattctgattaagcttttgaaaaaaaaaataatgggggtgcaggttctttgtggacgacataccaatcagagtgttcaaaaactgcaaagatttgggagtgaggttcccattcaaccaaccaatgaagatatactccagcttatggaacgccgatgactgggccacaaggggtggtctcgaaaagaccgactggt

SEQ ID NO: 14725 - DNA, 442 bp, Gossypium hirsutum
  Clone ID: LIB3145-014-Q1-K1-H12
ttttcttgttaatctgagtttgttgtgtgtaatttttagggttcaagggtaaattgtcttcttgttcttcttcttcttcttttatgtctgcatctttctgaatttattcgagatagagaaaaaaaaagagatgcatattgaggaattgaaagaaggggagcagcaggatcaagatcagagtcaattgtgtgaagatagattggttgtttgggacgcaaaaagggttttggtgggagcgggagcacgcgcccttttttacccaacgttgttgtacaatcttgtaaggaacaagatccagtctgaatttagatggtgggatagagttgatgagtttattttgttaggtgccgtacctttcccagcagatgttccccggttgaaggatcttggtgtctctggagttgtgaccttaaatgaaccatacgagtacttggcccaacat

SEQ ID NO: 14726 - DNA, 127 bp, Gossypium hirsutum
  Clone ID: LIB3145-014-Q1-K1-H2
cccacgcgtccgttttggataaaaaaaaaaaaaatctataaaaaaaaaaaaaaataaaggctggggtgtgtacattacactacaccgttgaaaacacattttgctatcccattatgctttgaactta

SEQ ID NO: 14727 - DNA, 318 bp, Gossypium hirsutum
  unsure (1)..(318): unsure at all n locations; Clone ID: LIB3145-014-Q1-K1-H3
acccacgcgtccgtgcagataatgggtttccctcctaaacttcttactgatccaacccaaaccatagagcaagcaggccttgccaattctgtggtaatccagaagttctaggcccttgactgagtcgaaagtgtcgtatctgcttatctctacaagtgcttattgtaccaagcgaaaaagattccaaatacttgtaacgattatgaaccactactatatactggaagcaggtttttgatggttctttctagctaaataggtatggaatcgtttgaaacanaatagaattttgatcggaaatttacatgtagaacgggc

SEQ ID NO: 14728 - DNA, 393 bp, Gossypium hirsutum
  Clone ID: LIB3145-014-Q1-K1-H4
tgcggttagattctggaattcaaagaaaggagaggtattacgtatttccaaacttttatatatagtgtttactatatacataataataatttcattatgtaggaccgtgagcgagttggaataagcagcaagcaaaaacaaaaattcacgcacacggcaggggttgagaagttttgcttctgtagctgaggccgaggtattataattttattaattctttcaaatattaataactttctaatattaaataatatttttactactatattgtaagaagtcaaatctggacaaaaagttggacgccttcagctttttgagattacacataggaagaaagatggatctcctatgacatctgaagttggagaaattatggagaaactaaaggagaag

SEQ ID NO: 14729 - DNA, 340 bp, Gossypium hirsutum
  Clone ID: LIB3145-014-Q1-K1-H5
gaccaagacaccaggtcctggtgcacagtcagcacttagagcccttgctcgttctggcatgaaaattggacgcatagaggatgttacccccattcccactgacagtacccgtagaaagggaggcagacgtggaagaaggctgtgattcttcgcttcgtatctgttgctcactgttgctgctcctccaatatgcttggagtttcttttttaaacaatttttggtttagattgaagattgttttgccctgttatgttgttgcacattagttccagaatggattttgatcgtaatttacatgtggaactcttggaagtaatctttttattgattttgattttc

SEQ ID NO: 14730 - DNA, 395 bp, Gossypium hirsutum
  Clone ID: LIB3145-014-Q1-K1-H6
cccacgcgtccggaaggacaaaaaaaacactattaatgaagtgatcaatttcccattcttgaaagaaacacacgatcccattgagaacaatttataccctttcgttttcctttcaactgatgacaacctcttcgtttttgccaataattgttcggttcttttgaacacccaaacccacacgattatccacgagtacccagtgctccctggtggtgctcataattatccgtcatcgggatgcgcttctctccttccaatcatgcttaaacctaatgaagataggaaatcaatccctgtcgaggttttggtgtgcggtggaacgccgcatgatgcatatacaaaggccgatttgcaacgccctaaggtgtttttgccaggaaacaccgattgtgctc

SEQ ID NO: 14731 - DNA, 359 bp, Gossypium hirsutum
  Clone ID: LIB3145-014-Q1-K1-H7
cccacgcgtacggaaggacaaaaaaaacactattaatgaagtgatcaatttcccattcttgaaagaaacacaccatcccattgagaactacttataccctttcgttttcctttcaactgatgacaacctcttcattgttgccaataattgttcggttcttttgaacacccaaacccacacgattatccacgagtacccagagctccctggtggagctcataatgatccgtcatggggatgcgctgctctccttgcaatcatgcttaaacccaatgaagataggaaatcaatccctgtcgaggctttggtgtgcggtggaacgccgcatgatgcatatacacaggccgatttgcaactcc

SEQ ID NO: 14732 - DNA, 160 bp, Gossypium hirsutum
  Clone ID: LIB3145-014-Q1-K1-H8
atttcgagccacacccacgcgcgcgtagattctttaatttaaagaaaaaaaagttattacacatttgcaaactctttgtatggtgggtactatatacataataataatttcattatttacgaccgcgatccagttgaaataatcatcatgcaaatacaaa

SEQ ID NO: 14733 - DNA, 428 bp, Gossypium hirsutum
  Clone ID: LIB3145-014-Q1-K1-H9
cccacgcgtacgggcttatcaatatgagatacccgttttagccaaagtgctctctgatggctctgaggaaatactacctagattatctcctcgacttggggcggaacttgtccataagaagatagcagctggttttaaacagtaagagtgctgtaagtctttgttatgtgatggaatggataccgaagttcgtgtacgactacaagggaatatgatttttgataaacatcatgtcattgttagtatgctctgactaggttttatctacccggcatcactgaccctggggctttactacgatgaacaaaagattcttttcatatctttgcgtatcattaattccatggaaacaaacgcaggccaccttaaggtcttgaaactgatgaaatgaaagatagcattaatcatggttctttaatgtcatattc

SEQ ID NO: 14734 - DNA, 115 bp, Gossypium hirsutum
  Clone ID: LIB3145-015-Q1-K1-A1
aaagagagatgctgcttatcatctaattatcgaatactttttcttttattttatataagaatattattctcattttgataaatctaaaaaatattatatatgcggagattttttg

SEQ ID NO: 14735 - DNA, 424 bp, Gossypium hirsutum
  Clone ID: LIB3145-015-Q1-K1-A10
cccacgcgtccgcccacgcgttcgcccacgcgtacggcggaggcatgggaactataacctgagggttagagctgatatcaatgatgtgattgcagctttggccacggaagctggctgggttgttcttgctgatggaaccactttttcatcaagatctcagagttcacctgctgctggcacttctgctggcatgacttcatcctcctctcaaatggtgtcacaacagattccacctccccctgccactttgcaaagagtctcttacggctatcgcaccacagaggagtacaatgcttgacggatgaagagtgttttcatgcctaccccttcaccttatgatctatcctcaactgccccggctcaaagttcacgcgtggatgctgatggtggagaacaaacagaaagactttctcttattgctggc

SEQ ID NO: 14736 - DNA, 383 bp, Gossypium hirsutum
  Clone ID: LIB3145-015-Q1-K1-A11
tatatgttatctctgaatctaaggaagttgctggggatttgattacagagaccgtgctcgaacaggtttttggtgacaaatcttttgagaaatatggaaaagatttcatttggatgcatttttcggatcaacatcccgacaagcacaagaaaatgcttttgtttaagtttgcccttcctgatgccaaccacatggctgacatgactcgcttggtggctcttgtaccatactacatcgatttaatcgggcgttacaagctcagctctcaggctcgatccaaaaccgaagcagcaagagtgaaggcagcacaagaggtatacagagaacttcaaaatgctaggctagaagctttgcagaaaaagaaagccgagaggaaaaagatg

SEQ ID NO: 14737 - DNA, 118 bp, Gossypium hirsutum
  Clone ID: LIB3145-015-Q1-K1-A12
ttttttaaatgcaagaaactggaaactatcaacttgatatttggatgttgccaaataagtttgaaatcatcatctgatattgttcaaaattttaatctacattttgatgctttaattt

SEQ ID NO: 14738 - DNA, 375 bp, Gossypium hirsutum
  Clone ID: LIB3145-015-Q1-K1-A2
tggtcctcctgcaacagctcttgggtttaatcctccagatattgggataatgcacaagccaccacgcagaagtgatgatgctctcattaactcttgggtcctcttccgttacttgataataggttcatatgtgggcatagcaactgttggcatcttcatcttgtggtacactcgggcttcttttatgggtatcaaccttgtgagtgatgggcacacactagttgaactgtctcagcttcataactggggagagtgctccacatggtcaaatttcactgtggctccatatatggttggtggaagccaactgatcactttctcaaacccatgtgactacttcaccgctggtaaagtgaaagcaatgactctggcatt

SEQ ID NO: 14739 - DNA, 395 bp, Gossypium hirsutum
  Clone ID: LIB3145-015-Q1-K1-A3
cccacgcgtccgatcaatttaccgtaacttcctcataatgctactaaacttgcgatcaatcctataaccgctgcaacgcctacccttaaccacactactctagaagaagctgaaggcgtaggctcttcagcgtcatcgtcgtcgtcggaatcgggctcaggaggcgatttcgacctggacttcgccttcgccttcccgggagattcagccggcgattctgatggtgaaggggactccgcttcatcttcatcctcctcttcctccgatggaccaggggaactgggggacttcttgggagcagcggccgggggcttggaagaacccgggggtggaggaagagcaaggatggcatcgccgaagccaggagctacaatgggtgtgctaatgtgaagcac

SEQ ID NO: 14740 - DNA, 400 bp, Gossypium hirsutum
  Clone ID: LIB3145-015-Q1-K1-A4
cggacgcgtggggctctggcacacttgttcatggcaaccaacatgataatagcagtctcagcattggccgtgtaacagccggtgtcgagtttagtcggccactcaggccaaaatggagtggaacagctgggctcttttttcagcgcgcaggtgctcatgatgaaaaaaaaaatccacttattaaagacttctatggcagcccactcacggcaagtggtaagctatatgacgatatgttactggccaaagttgagtgtgtctatcctggttctggtaacaaaggatcctcgatgtttataattaacatggaacaaggacttcctgtcattcctgattggctgtacttcaacagagtgaatgctcgtgtgagtaaaagtgttaaacttggtcctgctcgtct

SEQ ID NO: 14741 - DNA, 415 bp, Gossypium hirsutum
  Clone ID: LIB3145-015-Q1-K1-A5
ggcggtccagatcaatttctgtagaaggcaaggttcgctccagcagtgaaatcgatgacgtgagaaaagatgaattgagacaccgtgattgaaggcgctcgcgatcgcgatcaggatctgctgaaggtaggcattacaccaaagagaggaatgagagaagcagagataagaaatctaagcatcgggatagaaggcggtcgaggtcaagatctgctgatggcaagcatcgggatagaaagaggtcaaggtcaagatcttttgatggcaagcatcacagaggaagcaggaggtcccccagaaattcagatgaaactagattaaaacaccgacggcgctccaggtcaaagtctactgatggaaaacatcgatccattgataaagtagatgaaagatcaaaacgtcatgacaaaaagca

SEQ ID NO: 14742 - DNA, 436 bp, Gossypium hirsutum
  Clone ID: LIB3145-015-Q1-K1-A6
gaatttggttatatttgcagtaatcttaatgtttacaactcgttagtttctaactcagtgttgtgcctgaaccttaactcatatgtttgtttaatatgataaaagtagatgtgtggttgcagatacagagatggtggcggaggcaaggggacctatcatttcgtttagatgccatagaagtgaagactgtggaagtgtctgcgccaaatgccccacctgcacttgcctctttcacctttgtacttgccctaccgaccctccatggccattatcataatctcatttacttctcagcaataaatcactctgatcctttgtctttgcaacaagctttcagatcttataataataacaactcatgggcattggttctggtctttttctttttcttcttttaaattttcttttaccctacatgtttcttattttctggtta

SEQ ID NO: 14743 - DNA, 296 bp, Gossypium hirsutum
  Clone ID: LIB3145-015-Q1-K1-A7
tggtatttcaactctcatcggattcggattaatggttgtttctaattttatactactagactgatagctccaaaaaaaaaaaaaaaaaaaaaaaaaaaaaaaaaaaaaaaaaaaaaaaaaaaaaaaaaaaaaaaaaaaaaaaaaaaaaaaaaaaaaaaaaggaaaaaaaaaaaaaaaaaaaaaaaaaaaaataaaggggaggtaaaatgaaaaaaaaaaaaaaagggggggaaccggtttaaatgggaaaactcctatggctctgccatagaaaaaaaattctctttataaggctc

SEQ ID NO: 14744 - DNA, 412 bp, Gossypium hirsutum
  Clone ID: LIB3145-015-Q1-K1-A8
cccacgcgtccggaaaaaagaaaacagagggtctttaccctctctccctctctctgctcatttcggctagggttcttagaaccttcatcgccgccttcaccgcagcgccaccacaggcggtggttggggtgtaaaccgggctttcaagcccctgtttaaggcgaactcaatagcgaaaacttcctcgaccaaagaagatccaaagaaggaaccccctacgacctcttcgggtcgaatccgacgacggaggagcgatctccgacgacggtcacttcgattcggtcatgggagtgtcagacgcgtggaaagccggtgattggcgccccgagcggtggtggcgcgcgtgaaaaagctggtggctgaaagcatgcggctaaaaaccttgggggccgcttgaatttttttttaacat

SEQ ID NO: 14745 - DNA, 404 bp, Gossypium hirsutum
  Clone ID: LIB3145-015-Q1-K1-A9
ccacttgagaataggtactcattatttatccaatttcccgttttgatcatatttaaagctaatattgaaaggaatcatttaatttaattcatctatattattgcccaagttgaaaaatgaaatatcatttttcccttccaatttaaatgctaatcacagacagcctgcgacagtgagtttttattgcataaccttcattttcaattttttaaaattttttattgcataacctctctctcccccattctcagtttctattaatctttttaattttttttttgtgagttcactcaagaaaggttagtaaaattttgttcagtgttacttgtgttgcaaatgcttacatgttgagacatggattttattgttgtatgttgagtttatatgtaaaaggtactgaatgc

SEQ ID NO: 14746 - DNA, 371 bp, Gossypium hirsutum
  Clone ID: LIB3145-015-Q1-K1-B1
ttgtctacaagaaaactgcatccgtcttgtgcttgaccacggttaagaacgaggataagatggaattcagcaaaatcctcgaggcaatcaaggccaacttcaacgacaagtacgatgagtacaggaagaagtggggaggtggtatcatgggctcgaaatcacaagccagaaccaaggcaaaggagaagcttcttgcgaaggaagccgcacaaaggatgacttaagccaaccattactccctttggttaccaagtcaaatttactcctttgcccgaggattacttatatattttctagtttaactttcaaaacatcgagtagctgctgtttgtgatgtaactttgtgccttttcttaatgaaaattatgccc

SEQ ID NO: 14747 - DNA, 413 bp, Gossypium hirsutum
  Clone ID: LIB3145-015-Q1-K1-B10
cccacgcgtccgcccacgcgtccggtttttaacaatacaaatagataaaaattttagctaaagaattagtttgctctttgatctaatgtataaagattaatttgtctattttctgaatatatgaagcaaaatgcaatacttttacttgcaaaaaacatatgatacgttaggttgaattatatgaattcgtgcaggtttcatggtcctatacttatactagaccagggtacataaaaaaacaacaccagtctgttccgaaagattggtggacggaagatgtatcggatctcgatatagaccttttccgatgcataataacagcagtaagatcgacatatataccaccgccacagctcattggtgaagctttgcatgtgtatgcatgtcgttggctaccggacactacaaagtct

SEQ ID NO: 14748 - DNA, 416 bp, Gossypium hirsutum
  Clone ID: LIB3145-015-Q1-K1-B12
aaaggaaactactgttgaggcagtgaatcgtcatcttgatattttgagaccagctattaggaattatggtgggagtgtggaagtattgtctattgaggaaggggaatgtgttgtgagttatacagggcctgaaactattggatcagggatcaaagctgcaattaaggagaaattcccagatattaccaatgttgtattaactggctagctttttcattttcatatcagaagctgaaagttttggccttttgtttatttttttctttttcactggtaatgcctgtttcttttagataatagatagacaaagtacatggggatggtgattaaatgttgtatctgtatgcaaagattcatccttattttcatggtcatacatgtaaaatcttatacaggtattcaataatttcatatgg

SEQ ID NO: 14749 - DNA, 393 bp, Gossypium hirsutum
  Clone ID: LIB3145-015-Q1-K1-B2
cccacgcgtccgaaaaaaactgaagtttcttgaatcacaagctgaattctgtagggactggtgaaggtttgtgtttgtatacgtttgtatattgaagacaacgggatgtgcacgcttgtttttggaataggagaaccaactcaatccagcgccttcctccttgtcagtctttttgaatctggttgatggggatggttcaaatgaataataacggtcccgtggctggtggatgggttgaactgaatacacatatctgtgatgagaacacgaacataagggatggagtcacgggtgaggggcagggcctctctgacgaagatgagtcacgtattaatgaggatgtggaaaacagaaataatgggaagaaagcggtggttcagcttcgtggtcctt

SEQ ID NO: 14750 - DNA, 444 bp, Gossypium hirsutum
  Clone ID: LIB3145-015-Q1-K1-B3
cccacgcgtccgcccacgcgtccgaagaaagctttctttattatcatggaaaccaacttttgcgcttcttattttttaataggaacccttttttcggtctgcctttttgttgctttcaaaactggataaattctcgttgctaagcgtatctcgcttgatattttagagggcgaactggcgaaacataagtcttacgccgaatatctgcttcaacagctatttcgtgcgaagaatatacatttaagggagggggaaacttttaagggagtagtagaaaatcatttggtttttgaagagcccttaaaagagcaaattgatgggctctatcaaatctgttgtgatctcattctaaatggggccaacagtagctactttctaaaaattgtggaattttatggatccacgcttggtatgtagccaagcccaaaaaaaaggaacgagggg

SEQ ID NO: 14751 - DNA, 395 bp, Gossypium hirsutum
  Clone ID: LIB3145-015-Q1-K1-B5
cggacgcgtgggcggacgcgtggggaagtcccttttcctccacaaatcacaactaccaagccactatctcttttgggtcatggaattaccgacattgagattcactttttgcaaatcaagttcacagcaattggggtttaccttgaaccagaagttgtaggacatttgcaacaatggaaggggaagcctggggacgtgctagctgaagatgatgacttcttcgaggctcttattaatgctccagtggagaagtttctgagagttgtggtgattaaggagatcaaaggttcccaatatggagtgcagctagagagtgctgtgagggaccgattggcagctgacgacaaatacgaagaggaagaggaagaagccttggaaaaagttggtgaattctt

SEQ ID NO: 14752 - DNA, 420 bp, Gossypium hirsutum
  Clone ID: LIB3145-015-Q1-K1-B8
aatggaggtacacaatccgtaaccctgtgttttggcgtacagcctgcttaaaggcttggcagctttctggcctggtggagaattataagatcttgcaatcaaaatatgaaggttcatggaggaaaatgtggcttttaagacctcgggtacgaactgatggtctctacgtaagtcggaatacttatattcgtgctggagttgcagagtggaagatcacaaatccagttcacattgtctgctactttcgttacttgagattttttccttctggcagatttctatacaagaattcctctcaaaaaaataaaggatgcagcaaagttcatgaattttcgtgcatccaaagcagactgtgtttttggtggccattacactttgtccgataacaaggttgaagctgccgtcttgtaccctggcatg

SEQ ID NO: 14753 - DNA, 346 bp, Gossypium hirsutum
  unsure (1)..(346): unsure at all n locations; Clone ID: LIB3145-015-Q1-K1-B9
naatggaggttcacaatccgtttttctgttttttggcctacaacctacttaccgccttggtgtctatctggccgtggctacaattataaaatcttgcaatcaaaatatgaatgttcatggaggaaaatgtggcttttaagacctctgttacgaactgatggtctctacctaagtccgaatacttatattctcgctgcacttgcacattggaacatcacaaatccatctcacattttctgctactctcgttactcgagatttatcccttctggcatatttctatacaacaattcctttcataaaaataaatgatgcatcactagttcatgaattttcttgcatccaa

SEQ ID NO: 14754 - DNA, 301 bp, Gossypium hirsutum
  Clone ID: LIB3145-015-Q1-K1-C1
aaaaaaaaaaaaaaaaataaaaaaaaaatttaaaaaataaaaaaaaaaaaaaaaaaaaaggggaaaagaaaaaaaaaaaaaaaaaaaaaaaaaaaaaaaaaaaaaaaggggggaagaaaaaaaggaaaaaaagattataaaaacatgaatgcaaaaatataaaattattttatagagaaagggggggggctttttttggggttcaatttttattcccgggggttgggaaaaaattggttttttttaaggtgcccaaaattgaaataaatggccctttttttaaaaggcttaatagggaaaa

SEQ ID NO: 14755 - DNA, 420 bp, Gossypium hirsutum
  Clone ID: LIB3145-015-Q1-K1-C10
gtacaatcaaggctgagttgcaatgactttgtggaccatagactagttggaagcttcaccatggctggtattaaggatatgatcaagttggcattgaaatgcatgagttttcccggggaaaggcggccagatatgaacaccgtttcgattgaactcgaacggatccgtgaaaacgagatggaaatgacaacagtaaaaggtgaaggtactgcaaaaatcgcttaggtagtgagctatttgcttcaaaataaggatccatcccaatgtagttttattaaagcttggggccaaagcttaggataaaaaatgaagtgtttataaagtaggggtagtgaagctgctatcataaattaatggaaatgtgtatatttattttatgggattttattgataaatattaatgtatcatacagcttatta

SEQ ID NO: 14756 - DNA, 419 bp, Gossypium hirsutum
  Clone ID: LIB3145-015-Q1-K1-C11
cccacgcgtccgcccacgcgtccgataacacaaaggcgagagaatacattacaagaccgaggaggaaaaaaaaaaaagataaataaataataggagagccaaataaaaagagggatttgatagaattttcgttttcatttttattttataatttctattattatttttctgtttgtttggcgcaaagatttctatttacgcaacagctctcaagttggtcgtcgttttctctcgatctgttcttcacgttcgtcgatttatagctttctctcacgatttcctcgccctcgattattgttttttctcggtagattcttttgtctttttaatctcttctttaattcaaaacattgtttcttttttttttttaattccggggggttcaaaccctagaaaccgtgtggatttcgaatgctttt

SEQ ID NO: 14757 - DNA, 428 bp, Gossypium hirsutum
  Clone ID: LIB3145-015-Q1-K1-C12
gaagattgataagttcatcggaggtgaaacaagcttgcctttacatgggttggaaggtaatggtggtggtagcagtggtggtgctaatgggcggtactatttggggatgttcttgggtggggcttaccaggaatccctcggtggagttcacaacctctttggtggcccaagtgttgttagcgtgtcgcagagtgatggtccatatagctttgcggttacgcgggcggcgcctggtccgtcatgtggggatgtcctccgagtgatgcagcacgagcccgagctaatgtttgagaccctcaagcaccgtgcggaagaattttgtggacaggaccatggcaatgaaggcacccatgctgctttagttagcaccattgctcgttctttccacaacatgccttatcttgtagtggcatcccctttgtttcgtg

SEQ ID NO: 14758 - DNA, 139 bp, Gossypium hirsutum
  Clone ID: LIB3145-015-Q1-K1-C2
aaaaaaaattgaagaaggggattgccaattaaaagaagaaaaaccaaacccaactgtttgtttctcggaaatctgaacgggaaaagaaaagggtttcttttttgtatttggcttagctttggaagccatgaactctcac

SEQ ID NO: 14759 - DNA, 427 bp, Gossypium hirsutum
  Clone ID: LIB3145-015-Q1-K1-C3
accagattgccttggccatcaaggatgaagtggaggatcttgagaaagctggtatcaatgttatccaaatcgatgaggctgctttgagagaagggttgcctcttaggaagtccgagcatgccttctaccaaaaatgggctgtccactccttcagaatcaccaactgtggtgtccaagacactacccagatccacacccacatgtgctactccaacttcaatgatatcatccactcgatcattgacatggatgccgatgtcataaccattgagaactcacgttcagatgagaagctcctgtcagtcttccgtgaaagagtgaagtacggtgctggaattggacccggtgtctatgacatccactctcccagaataccatcaaccgaagagattgctgacagaattaacaagatgcttgccgtgctcga

SEQ ID NO: 14760 - DNA, 381 bp, Gossypium hirsutum
  Clone ID: LIB3145-015-Q1-K1-C4
cccacgcgtacgaccacgcgtgcgcccacgcgtacgcccacgcgtgcggcccaaagaaaattccgcacgtgtcaatatcctcatcatcgggctaatcaggataaccagagagcaaccaacagctcaaaccagtcgctcccatctccaacaaaatccttcgacatccaaaacaggcggagttccgcagcgtccgtacgatttagggctttcctgagaccaacgatcacgatgtaccgtactgcagcctctcgccttcgagctctcaaaggtcgcacgagccatatagcacctgcaaggtttgcaagttcaagcactgttgctacaacatcatcctcttcaggtggcctcttaagttggctgactgggagtcaatccaagtct

SEQ ID NO: 14761 - DNA, 424 bp, Gossypium hirsutum
  Clone ID: LIB3145-015-Q1-K1-C5
aaagaatcatgccaggattgtggtaacgaaaagtttgcatggacttacacctcacaagagtttccgatggctcaggaaaattgtttgcagaatttcaggcttccggaacctgttctttgtattggtggaatattacagattgagctgttgggtagggtccagagacaggaaatggatagcttatactatatatgtgtgtctcatgttcaagttgtggggcggccattatctcctgcatttggtattcagacatttgaacactctgaaaaatttgtgctggaggcactgagttataaacaaccaacttcacctgcacagtccagctccgcacccactttgcagatgcgtgtgagagacttggagcagattttgaatttacttgcgggaaatgttgtcgacgtagtggaatatggatatgaatggg

SEQ ID NO: 14762 - DNA, 395 bp, Gossypium hirsutum
  Clone ID: LIB3145-015-Q1-K1-C6
ggagaagaagaaaaagaaaatggcggaccagcttaccgatgaccagatctctgagttcaaggaggcctttagcctctttgacaaggatggcgatggttgcattactaccaaggaactgggaactgtgatgcggtcactcggacagaaccctactgaggcagaactccaagatatgattaatgaagttgacgccgatggaaatgggaccatcgatttccctgaatttctcaacctgatggcaaggaaaatgaaagatactgattctgaggaggaacttaaagaagctttcagggtgttcgataaggatcagaacggtttcatatctgctgccgagcttcgtcacgttatgacaaatcttggcgagaagcttaccgacgaggaagtcgatgagatga

SEQ ID NO: 14763 - DNA, 387 bp, Gossypium hirsutum
  Clone ID: LIB3145-015-Q1-K1-C7
cccacgcgtccgtgcttatgggagcccaactaaaacacaaaaaattagttttattttagttttagatatgcgttttcttgtctttagttcagtttagtttcttagaaaattactgaatccaacttttataaaaaaaaaaaaaaaaaaaaaaaaaaaaaaaaaaaaaaaaaaaaaaaaaaaaaaaaaaaaaaaaaaaaaaaaaaaaaaaaaaaaaaaaaaaaaaaaaaaaaaaaaaaaaaaaaaaaaaaaaaaaaaaaaaaaaaaaagggggggggcctttttaagggaccaaattttttggccgggggttgggaaggtaaaattttttttttggggcccccaaaataaattaccggggccgggttttaaaaacggggggaggggaaa

SEQ ID NO: 14764 - DNA, 416 bp, Gossypium hirsutum
  Clone ID: LIB3145-015-Q1-K1-C8
cccacgcgtccggcaagctgtcacagtccatgccactaacaactactttgtaactgcttcacttgacacgacgtggtgtttttatgatctttcgtctggtttatgcttgacccaggttgaagacctatcaaattctatgggctatacgtctgcagcttttcatcctgatggccttatccttggaactggcaccactggagctactgttagaatttgggatgtgaagagtcggggaaatgttgccaactttgatggacacactggggctgtaacagccatatctttctcagaaaacggttacttccttgcaactgctgctcatgatggtgttaagttgtgggatctacgcaaattgaagaactttcgatcttttgaattatatgatcaagacacaccaaccaactcagtggattttg

SEQ ID NO: 14765 - DNA, 358 bp, Gossypium hirsutum
  Clone ID: LIB3145-015-Q1-K1-C9
ccgaggaggaggaagaaggatataggaagccaagttatggtagatccgaggaagaaggatatggccgcaagaaacatggcgatgacgacagtgatgatgatgatgaagagaagcgtcaccaccaccgctataagcaccaccaccataagcgccacgatgactatgacgactagtcagactggccattccctctacaaatggaaatctgcagtaatagctattaaataaatgatcgaggcatgccacctttgatcgtttcttctaccatttccgtgtgctttttgtgtgtgtgtcagtgtttgatcgtcaataaaatgcccgaacattagggttagcgcaattgcgcttgttgattatc

SEQ ID NO: 14766 - DNA, 419 bp, Gossypium hirsutum
  Clone ID: LIB3145-015-Q1-K1-D10
ggggagttccaatgttacgacaaaaacatgcttcaccttcttaagcaacatgccgaagcatgcggaaagccaaagtggggactaggtggccctcatgatgcacccgctaacagcgagttgcctacagcaaacaccttcttcaaggatcatggtggatcttgggaaagtccttatggtgatttctttctttcttggtactcaagccagctcatagctcatggagatcgcctactctcacttgcctcttcggttttcagtgatagtgcagtgaacattttcgggaaagtcccgttgatgcactcttggcacggaacccgttcacatccttccgagctcacagctggcttctacaacactgccacgagaaaaagctacgaagaagttgcagagatgtttgcaaggaattcatgcaaaatcat

SEQ ID NO: 14767 - DNA, 321 bp, Gossypium hirsutum
  Clone ID: LIB3145-015-Q1-K1-D11
cccacgcgtccgcccacgcgttcgggaaggtctcggtgatcaacatagttgtgcttatcctactcgtcatcttctatgtcatcggctgtgccgctttcagaaacaataagaggatcgataatgatgaaccttatggcgaggcaaggatgacaaaagcacaacctagcaggattcagttatagaaacctaatggtaatggaggccatcgcttttattcagaagatatgtttgtatgtatgttctaggttttggatccattttatggtcgggttgacatatgaactcgaatttggtcttggtttaaaagtggatgtctgtata

SEQ ID NO: 14768 - DNA, 432 bp, Gossypium hirsutum
  Clone ID: LIB3145-015-Q1-K1-D2
gtcactgttgctaccgtaattggtcacaagaaacaacaagatgcatgtgatggtgttggtctcttgggtattgcatgggctttcggtggcatgatctttatccttgtttactgcactgccggtatctcaggtggacacattaaccctgcggtgacttttgggttgtttttggcccgtaaagtatctctcatcagggctgtggcttacatggtgtcacagtgcttgggtgctatatgtggagttgggttggttaaagctttcatgaagcatccatacaactcccttggcggtggtgcaaacacggtggcttctggctacaacaacggaactgctttgggagctgagattattggaactttcgtacttgtctacactgttttctcagccaccgaccccaagagaagtgctcgtgactcccacgtccctgtattg

SEQ ID NO: 14769 - DNA, 441 bp, Gossypium hirsutum
  Clone ID: LIB3145-015-Q1-K1-D3
cttgaatcttttcgttgaactgaatcatagcctacaatgtaagaatcaggccagtccgaatgaacccatccaaatcagtcatccgtttgggaagcctctctcatctcttctgcaaccaccatgtcccttactgccgacggggaatcctccatccaaaaggtattttccgatctgcaactccccttccttgcaataaagtgtgccacccgattagcttcccttcttacatgtttaaatctaagttgatgaaaaaatcgccccatcgatttgatatctaagatgacagaatccaagtctgctcgaccaaacccttcctggttaattttctcaattaccgttctcgaatctccttcaacctccactgtggtaaaccccgtctctttggcaaaaagaagcccttgaaagcaagcaacagcttctgccatgaatgcatctgagaca

SEQ ID NO: 14770 - DNA, 405 bp, Gossypium hirsutum
  Clone ID: LIB3145-015-Q1-K1-D5
ggagagacattttaaaccaagcgattccagaaacagcacgcaacctgcaacttaacttcccgatcgggttgagaaatgctgaggattccacagcacaatcatctagtagtagtaggagagaaagggatggcggagttgttccagtttggtccccgccatcttcgagttaccccgagcaatttataagtgaggaaagtggtatcggtgcaagctcatcttttcttcaagggcatccacagtcccaccaaatcataaattggaggcgattatctcaaaccgggtaaaacgaatgcacgccaaaggcagggacctagtacttgcagaacgctcagtctagtgggcggattggacgataacatggcatgttatcaacctcatgtattgtccaccaatctaactcgatct

SEQ ID NO: 14771 - DNA, 439 bp, Gossypium hirsutum
  Clone ID: LIB3145-015-Q1-K1-D6
atttaacatttagtcgtcttgaacccggagggaagttggtcatgggtttcagaaaggcttcagctgcttcagcatctgagcaggaaaatgaagccaaaaatagtaatggagtttctacccatggagatgctgaactggcagatcctagctcatggtcaaaagttgataagtccggatacatagcaaaggaagcattaggaaccaaagtagcagttcccagaaagaggaagaatagtgtgctgggttcaaagagtaagcgactgagaattgataatgaagacatgatagagctgaaactaacatgggaagaagctcaagggctgctccgtcccccgcctaatcatgtagccaatgttgtttcgattgaaggttttgagtttgaagaatatgaggatgcgcctgttttatggaagcctacaatatttgcaactgataagtc

SEQ ID NO: 14772 - DNA, 411 bp, Gossypium hirsutum
  Clone ID: LIB3145-015-Q1-K1-D7
aaagctgatgacagcattgttaaacagaaccttgattctgagcatgctggatctgtcaaacactctgataatatcgaacatgctgacaatgaagtggcagttcctgtacaagcgtcaaaggatgctggtaaggatgttcttactaatggctttgatggtacagttcagatgtctgaggatgtaaatgacatcaagcatcatggaaattctaaattagagatggtagaatgtgtttctgattttgtcaagacagtcgttcagtctgaagaagcaaaaattttttactttgtaaagtcgatctttcagtctgaggaagaaaaaaattgccatgctattggcaaagatgcgaccaaccaaacttctccatcaactagccaaggtgctcaacatgctcccaatggtcattacgat

SEQ ID NO: 14773 - DNA, 428 bp, Gossypium hirsutum
  Clone ID: LIB3145-015-Q1-K1-D9
ctcgcaaaaagggcccatagagcgtagcaaaacaatcacatttgcactacgtttggttggatggaattgctattccattccgccctaattccgtgcgctacagtaaatcagttgtttggttcaccatttaggtgattccacggaattgctattacagtctcattccctcagctcaccgtttaggtattcaggggttgggggtctgaatacctattcaacaccacaccgtttaggtttttagaccaaaatagcctgcctctcttcttcccaaaattctctccagatttcttcctccccaaatcaagcatccattcgcccttcatcttcatctccccaaatattgtaaagggctgctggcaagtcggcaccgacaactagaggtatgaagaagcatcaccgatatcgccctggaactgtagctctgcgtg

SEQ ID NO: 14774 - DNA, 198 bp, Gossypium hirsutum
  Clone ID: LIB3145-015-Q1-K1-E1
gttcttagttgggacacaaaagtattttttatttaaaattaaaaaaaaaaaagtgcgactaaaaaaaaaaaaaaaaaaaaaaaaaaaaaaaaaaaaaaaaaaaaaaaaaaaaaaaaaaaaaaaaaaaaaaaagggggcgtttaaggatccaagttactccggcatgcacgaatagtttttataggcacaaataaatta

SEQ ID NO: 14775 - DNA, 388 bp, Gossypium hirsutum
  Clone ID: LIB3145-015-Q1-K1-E10
gattttcctaagccagactaatggaagcacggtccaagcctctcaatccccaaacacttccaatgctcctgttttgagaaaaagccattctactttatctcaagctgaacgagctcagaggaaaaggatgaccgatcaggcatatcgaggaagagttaagttacacaaagagcaaatgaaatcaaatttggagacccttactggagaaaacgaatcactaaagaaagagaatcaatccttaaaagcggctaatgcttccatgaaccaaaccttgactgatcaagcaaaagagattgatcagttgaggagtgatcttttgcagctgaagaaagaccatgagaagcaaaatattcttttggaaacactttcagggcttctatctgatcca

SEQ ID NO: 14776 - DNA, 394 bp, Gossypium hirsutum
  Clone ID: LIB3145-015-Q1-K1-E11
ctaaattgaaagagccatatcctcccaaaatcttcacttctcacctcctctcctctcgccggcccgcctctctctcatggcgttctttggctctcaccagcgctgtcatcaactccactacagattctattttttgggagtctaagaacgcaaattaggtgttcattgctacattgtcaagaatgggtttcggctttcatacgtattggacatagggattaggtgcctgatgttcttttgtggcttttacccggatggtttactgctttgttcacgtgctctttggtgttttgatttatagtgctatattagatttctgttgtttaatttttgagtttgggaattaggtgtagattttggagttatccatgggccttttcttttcatttacttt

SEQ ID NO: 14777 - DNA, 405 bp, Gossypium hirsutum
  Clone ID: LIB3145-015-Q1-K1-E12
gtttcgcccctctgatctctccccgtccaattactgctgtccgatcctctcctatcgttcccactcacgaagatgagggtccgattggtgttcgttatatttcaacccaagtcgttagaaaccggatgaagagtgttaagaatattcagaaaattacaaaggctatgaagatggttgctgcctcaaagttgagagcagttcaaactaaagctgagaattcccgaggcctctggcagccatttactgcacttcttggtgatcttcccagtgttgatgtcaagaagaacgttgttgtaaccatctcttctgacaaaggtctctgtggtggaattaactctacatcagtcaagataagcaaagggatctataagttgaactctggcccttgaaaagaaacaaaatatg

SEQ ID NO: 14778 - DNA, 393 bp, Gossypium hirsutum
  Clone ID: LIB3145-015-Q1-K1-E2
cccacgcgtccgcccacgcgtccgcccacgcgtccgggaagcctagctggcaggttgcagtttgctagtcaagcagctatgaccaggctttcttgcctatggttacgttgccgtgcggaacaaaaggcatctaggaagctattgagcagtctcggtattgacattcgggtttattgattgttggtatccatcaattctagttgttaaattgagtgtctttttgtatcaacgtttcaagttttgtttgtccaaagtgcattgtgtttgcttttgtgttattttcatttttggtcgggttatacagagaatggagtatgtatgtatgtatgatatttgattcctgtttgactcaagttgagacgctcatgtaagagagacagagagcaagtgtag

SEQ ID NO: 14779 - DNA, 408 bp, Gossypium hirsutum
  Clone ID: LIB3145-015-Q1-K1-E4
gaagaacgtagcgaaatgcgatacttggtgtgaattgcagaatcccgtgaaccatcgagtctttgaacgcaagttgcgccccaagccattaggccgagggcacgtctgcctgggcgtcattcgaaaacctcaagggatgcacggagaagtgcagaaactggtcgcttaacatgcttgggaacttgcaaacgtttgactaagaaaaatctgccgattcttggttttcttttgctatgtccatgatattcctctggaggttcttaatctgtcttaataaactaatatgtgctacctgtagttactttattgtactctggacaaggaaaaaaattgcctgacttatgatttggaaattatttaaggcaggcaatcttgcggtgacaatttgggtcaattcccaatagttca

SEQ ID NO: 14780 - DNA, 181 bp, Gossypium hirsutum
  Clone ID: LIB3145-015-Q1-K1-E5
aagtatacctgtttctcttgtaaatgatgttgatgatgaaaagtggccatcaaatttcacatattatcctggtctaaagtactcgaaacctggtaattcaaatggatcttcaactgggtgggggtggcatgggggatggcttacttgaaacttcaactggccttgcattcaaagaaatggg

SEQ ID NO: 14781 - DNA, 367 bp, Gossypium hirsutum
  Clone ID: LIB3145-015-Q1-K1-E6
cggacgcgtgggcggacgcgtgggcggacgcgtggggtggtgcaatttcatctgttcgtatcatcaactcagaaggggcaggaagtgtaacagtagccactgcttcaaaagatcgaactctgagactgtggaagtttgatgcagaggactctactgaccatcctgcaaggataagagcattcaagatattacgtgggcataatgcatctgtacacagcattgcagcaaagacatctggagacatgatttgctcaggttcttgggattgtacgatcaatttatggcggacaaatgacactgatacaaatggggacgcggtatcaatcaagaaaaggaaggttaataataaaattgaggagtctcaatc

SEQ ID NO: 14782 - DNA, 434 bp, Gossypium hirsutum
  Clone ID: LIB3145-015-Q1-K1-E8
cggacgcgtgggttttgtctagcaaagtcttctctcaggatcaagattccggtgagaaatcgaacacttcctccgcctccgatcacctggcggcggcagttaacggccataaaacttccttggatctgaacttagttccgctagataagaagaacaagcctcagccacctgctaaacagcctccacagaagccgttaactattaccgatttgtctcctgctccgaagcacggttctcagttgcgtgtggcttatcaaggagttcccggtgcttactcggaagctgcggcggggaaagcttatccaaattgtgaagctattccttgtgaccagtttgaagttgcgtttcaagcggttgagctttggattgctgatcgagctgttttaccggtggaaaattcactcggaggttcgattcatcggaactatgatctt

SEQ ID NO: 14783 - DNA, 419 bp, Gossypium hirsutum
  Clone ID: LIB3145-015-Q1-K1-E9
cccacgcgtccggctttttgatgatccaaatacggtggagactattgtttcggtttacaggatcaatgatctctctgatcccaagacccgcttcaaagttgatgttaatgcccaagaaaaccggttgactggttgtgctgtgatttccgagggcattactgttatagtagtggaaggtggaagcaaatccattaagaggtatgggaagcttatgcttcggcgaatcaactgggctgaagctgtaaaagatgacaaggacggagatgaagatgaagacgaagagaaaccacctaacaagtgtgtgctggtttggcaaggtagcgttgcgaaatcaagtttcaacaagttctcggttcacgagtgcattaccgaagcagccgcgaaaaaggtatttgctgatgcaagagttgcccattact

SEQ ID NO: 14784 - DNA, 438 bp, Gossypium hirsutum
  Clone ID: LIB3145-015-Q1-K1-F1
cccacgcgtccgtgcctctcgaccagccatggctcgtcgatattcggaactacagggcaagagcgtcggcagcatgcaccgccactgcaacctgctatgtctgccactgcactactgcagaaagctgcacagatgggagcagcagcaagtaatgcatccttgcttcgcggtctcggtattgtttcatcttcagcaccacaagaaaatttacaatggggtcaagcacaagtcgaccccgacaatgcctccattgcagcagggcttggactcgggcttccctgtgacggaagttcaggattaaaggaactgatgatgggaaccccagtgttcggtcctaagcaaactactctcgatttccttgggttgggggtggctgccggtggcaaccccaatgccagcctgtctgctctaattacgtctatcggaggtggatttgat

SEQ ID NO: 14785 - DNA, 377 bp, Gossypium hirsutum
  Clone ID: LIB3145-015-Q1-K1-F10
aagaagacctacacgaagcccaagaagatcaagcacaagaagaagaaggtcaagctcgccgttctccagttttacaaggtggacgagtcgggtaaggttcagaggctgagaaaagagtgtcccaatgccgagtgtggtgctggaaccttcatggctaaccattttgataggcactattgcggtaagtgtaggctcacttatgtttaccagaaggctggtggggattgagtgggataagatagatttttacttgttttcaagtaatcgtattgtcatgttctgatttttgtttgtttttagtatgttataatttttgggtttctattttggaattttggttgctaattgaaatgtttgaatcaaatcttatgaagttc

SEQ ID NO: 14786 - DNA, 399 bp, Gossypium hirsutum
  unsure (1)..(399): unsure at all n locations; Clone ID: LIB3145-015-Q1-K1-F11
cccacgcgtccgatttgaagaagttgaacttcctaggcttaaggaagagaagccgggtcttactcacacccaatacaaggatttgatatggaaactatggaagaaatctccagacaatcctctaaaccagatgtccgagtgatcgatacaaaattttcctcaggtgtgtggggggttatctgataaactttatgtgcagtgtctgctaagtgctgaaaactaaataaaaaattatttgtagaataatactggctatctattattactgttcaagatcctatatatgtgtttagttagtttaacttggtttgttgcccactttcataaaagattgactgatgtacgcacagaggaatagtgcanattactgattaattttctattataatgaaagtttta

SEQ ID NO: 14787 - DNA, 388 bp, Gossypium hirsutum
  unsure (1)..(388): unsure at all n locations; Clone ID: LIB3145-015-Q1-K1-F12
cggaaaannngggaggacccacgcgacccacgcgttcgtccacgcgtccgattttaagtttttggattttctacgctaaaagaaaagaaggggtggtggacttacacccaagacaaggatttgatattggaaactatggaagaaatctccaaacaattctctaaaccagatgtgcgagtgatccatacaaaagtttccttatgtgtgtggcggtgtatctgataaactttatgagcagtgtttgctaaaagctgaaactaaataaaaagttattttgtcaattataccggctatctatgaaaacttgatcgagaacctatatatgtgtttaggttgtaaaacattggtaatgttgccgcactttccctaaaagaaaggtctgattgtt

SEQ ID NO: 14788 - DNA, 363 bp, Gossypium hirsutum
  Clone ID: LIB3145-015-Q1-K1-F2
ctcatttttcccagcttccatttgctcaagaaaaaaagagaaaagctcgaattttggttgaaacatatagaaagcaaagcatgatgattttatgaaagtggtattccaacgtagaaaagcatagaatctctcttttaaaagattcattcactcaccaaaaaaaaaagaaaaaaaaaagaaagttttctcttcggttttctctttactaagataagatagaatgtgaagaagaagaagaagaagaagaagaagcaaagctgtataagttaagggtttttcaaagatttttgttgccataatgtgaacctgatttccatccacctaggattgccaaattaggcaaccttaactacaagctaaatc

SEQ ID NO: 14789 - DNA, 416 bp, Gossypium hirsutum
  Clone ID: LIB3145-015-Q1-K1-F3
tgttgagaagcaaggtatgagtgatactaggttcttggagaatgggaagtactaccatgatgtgagttctgagaacaactactacccgaaccggttcgagaactcgaggggagtcggttcgaggaacgagttcaacgagaaccgttacaataacatgggaaaatataatcagaatcaagaggagttcgaagaagagttcgagccatgaaaccacacgtatatgctaattaattagcaaaaagagagtaaggaagaaagggtttatttattgggttttgtgttttattttgtgatcctttttattttatttgcagggtttgatagtatcctttgcttttgatattgaaatgctaaaagatatgataatggagccttatgctttttacttttcttaaacagtgttatgcaataaaaat

SEQ ID NO: 14790 - DNA, 366 bp, Gossypium hirsutum
  Clone ID: LIB3145-015-Q1-K1-F4
gagaatttaagaggtgcagctggtggtggtgctggaggagggcttggtggtggtttaggaggaggagccgctggtggtgctggaggagggcttggcggaggtgccggtttaggacgtggagctgatggtggtgctggagcagctggaggtcttaaggttagggttcaaagtgggcttgggcctatattgatatgggtttggcttggcattacatggtagataatttaagactctctattactggctggcttgggtgatctctatgttgatcgaggatacaactgatcgtctgcaattattcaaaggtggatgagatatcgtctttttggggagactcttgaagagcgagaatctggctctaccatg

SEQ ID NO: 14791 - DNA, 420 bp, Gossypium hirsutum
  Clone ID: LIB3145-015-Q1-K1-F5
cccacgcgtccgattcgagattgttcataagtgattcgcatttgaaaatcgtcggtaatttaaaatgattggcatttatatttctctttatccttgaagactggcttaatgcaaatatatgcaatttttatagactcacggttgtctatggagaatgacaaactttgttttcaattgtttcttggctaatctagacgcacagaaatgattttgtttttacagtgctaccttgattgccactagtatagcttggactagaagctttactaatactaaaactgcagttagtcttcacagcaacatacgtacgaaaaagtgcctggcaacccaacctatctaaaagtgcagttagtcttcacagcaacatacatacgaaaagtgtctggcaaccaccaccgataggttgggtgaaaattaaca

SEQ ID NO: 14792 - DNA, 396 bp, Gossypium hirsutum
  Clone ID: LIB3145-015-Q1-K1-F6
atcagacgtcattttagtctttcgggacgatgcaaattttgatgataagcacacgccaaattgagcagaacacttactgaagtgattcatgaacaacagtgcgaaaaatctacttactatgacaatgactgaatgttttctgaggggataagatttttaattgatatgtaaaatatacgaagatatgttagaaatttatatttttacattgagtacatttgtcattagtccttcacttgggtgcttatatcaaatacaaaaaagggtctcctttaggagaaacataatagtaacttatgatgttgaattatgttacttctgtgaatcaacttgaactgaagacagctatttctcgaatcttagtgaaaggctgaacttaatatctcactttttata

SEQ ID NO: 14793 - DNA, 398 bp, Gossypium hirsutum
  Clone ID: LIB3145-015-Q1-K1-F7
gttttgcttttcatactcatttagcccctttcattagcatcaaaatcactccagttttctttatcactgaaaaatgtcttgctgtggtggaaactgtggctgcggtactggctgcaagtgtggcagtggctgtggaggatgcaagatgtatccagacctgaacgctgccgagatgaccacaactgagactctggttcttggtgtagcaccccagaaagcacactttgagggagctgagatggaattcggggctgagaacggctgcaagtgtggagacaactgcacctgcaacccttgcaattgtaaatgattagagaccaaagccaaagctccctggaagcagaggcgcctttgtctttaagaaataatatgttttggtggttatgtgtttttaaaat

SEQ ID NO: 14794 - DNA, 104 bp, Gossypium hirsutum
  Clone ID: LIB3145-015-Q1-K1-F8
caatgttaaagtgaagtatgttttggatatgaaaggtgcaagttgcgtcatccactacatgagtgggaaggacaccgataaaatggtgatataattttattagg

SEQ ID NO: 14795 - DNA, 408 bp, Gossypium hirsutum
  Clone ID: LIB3145-015-Q1-K1-F9
cccacgcgtccgatttgacggtgatgggaaagtcattggagtaacttctgaaggcgaaactgctaagtgcaacaaagttgtttgcgatccatcttatttgtctgataaggttaagaaggttgggaaagttgctcgtgctgtatgtgtaatgagccaccctatccctgataccaacgattctcactcagctcaggttattctgcctcagaagcaactcggtcgtaaatcagacatgtacgtcttttgttgctcctatgctcataatgtagctcccaagggaaaatacatcgcttttgtttcagctgaagccgagactgacaaccctgagcaagagttgaagcctggggttgacctactgggatctgtagatgagatattttatgacacttatgacagatatgtgcccac

SEQ ID NO: 14796 - DNA, 408 bp, Gossypium hirsutum
  unsure (1)..(408): unsure at all n locations; Clone ID: LIB3145-015-Q1-K1-G1
cttggatcgtantccgaaaacttgctgataactgtactgggctccaaggcttcttggttttcaatgctgttggtggtggtactggttctggtcttggatctcttctcttggagcgtctctctgttgactatggaaagaagtcgaagcttggtttcactgtctatccttcacctcaggtttctacatcagttgtagagccttacaacagtgtgctgtccactcattcgctccttgagcacactgatgtcgctgttcttctggataacgaagcaatatatgacatctgcaggcgttctttggacattgaacgacccacttataccaatcttaaccgccttgtctctcaagttatctcatctcttaccgcatctttgaggtttgatggagccctgaatgtggatgtgactg

SEQ ID NO: 14797 - DNA, 385 bp, Gossypium hirsutum
  Clone ID: LIB3145-015-Q1-K1-G10
attcagcttcactctcctttacttttaagttcttttctttgcttgatttcattttgtagccaaaaaaaacatggggttctcactgaaacttcagtattgcctagtttctgtcatggtgctattacctgcagtgtgttactctcaggactatttcgtcaagtccagagcaacttactacggcagtcctgactgcttaggcactccaagtacatacatttctcctataattcatatatgcttgtttgttttgtcattaaatatttgcatatatgagctaacaatcacgtgaatctaggtggagcttgcggatttggagaatatggaagaagtgtcaatgatgccaatgtcgccggggtttccaggctctacaagaatggaactggct

SEQ ID NO: 14798 - DNA, 381 bp, Gossypium hirsutum
  unsure (1)..(381): unsure at all n locations; Clone ID: LIB3145-015-Q1-K1-G11
gcgagcggaggaaaagtgtcatttaaagtcactcttacctctgatcctaagctccctttcaaagtgtttagcgtgcctgaagcagccccttttacagccgtcttgaaattcgcagccgaggaattcaaagtccctcctcaaaccagtgctatcatcaccaatgatggtgtgggaatcaatcctcagcaaagtgcaggaaatgtgttcctcaaacatggatcggaacttcgcctgattccccgtgacagggtgggagccttttgaaataacaaaaacttcatttgttatctctgagtgagaagactggttatgacttttgttggntatggatccttttgtttggtatgtatgtttaaacttttacttgagtggagaacatga

SEQ ID NO: 14799 - DNA, 321 bp, Gossypium hirsutum
  Clone ID: LIB3145-015-Q1-K1-G12
ctccctcaaaacaaaaacccatttcccttccctcgttgcctttttggcccagacgtcagattgggctcaacaagaggaggaaaacgacaccaccctaaccattgatgaccaaggaactgaaagtgaaggaggggaatcaacatgggaaaatgaggagagtgatggggctgaagcaagtttgtctgattgggaacctcaaggtgaggttactggtagtggttcagaagaagaggatgcttccgaaccttctgaggaagctaaattgttcgttgggaatctgccttatgatgttgatagtcaaaagcttggctatgctttttg

SEQ ID NO: 14800 - DNA, 271 bp, Gossypium hirsutum
  Clone ID: LIB3145-015-Q1-K1-G2
ccccaagcttattcacttgtggctgattttatgaacttatgcaggagatcgaattcaaattatccacgagtgaggtgttttgatttctacaagctccattcttgggctggagggttgactgaatttgcagatggaaagaatcaagaaagcactagtgaagctgtgaatgcatattacgctgctgcactaatggggttagcctatggagacacccatcttgttgcaactggttcaacacttacagcactggagattcaagcagcacaaacat

SEQ ID NO: 14801 - DNA, 414 bp, Gossypium hirsutum
  Clone ID: LIB3145-015-Q1-K1-G3
cccacgcgttcggggtgatccatttactcaaatctgcatagccaatgtcacaattggaatggcagctaaagcaaagaaggtgccgtggacttgcactgatgttgaggggatcacaagtggagttagtcctcggccatgtgacctattacctgatcaaggacagaagaaaatcgcagcttgcgactttccggccaagcccttgtccattgatagagtggtgctcaaaacttgcacctatagggtcaatcatatgtgattgaatcctttaaagtaaaacctaagtcgattgttacatgtggtaagattctcataattatcttatgacaagttgcatcatattataataacgtaaatgcattctcatacagtgatgggttatatagatcatcccttttacaaaaaaagaagtgtttt

SEQ ID NO: 14802 - DNA, 432 bp, Gossypium hirsutum
  Clone ID: LIB3145-015-Q1-K1-G4
cttggtttaaaacagaggatggggatgggtcttctttgctctggtgcatccatggtagcatccgcaattatagagtctactcgacggagaatcgcgatcgaagaaggactttccgatgaaccggcagcagctgttcatatgtctgcactatggatactgccgctttatatactaagtggcttggctgaggccttcaatggaattggacagattgaattctgctactccgaattaccgaaaaccatgtcgaccattgcggccaatatttacggattcggaaccttcatttcgaacctggtagcgagttttataacaagcacggatgacaatgttactaaaagacgacgtgaaaggttgatttcaagcaacatgaacgaacggcattatgattactattattgccttctttgctggcttgagcatgcttaaatt

SEQ ID NO: 14803 - DNA, 379 bp, Gossypium hirsutum
  Clone ID: LIB3145-015-Q1-K1-G5
cagaaatccttcaatcacaacaggcaacgagtaggcaatcatttcccattcacagctgcttcttctgttcagcatgatgtacatcatgttcaacggccttatgacatgaaaatgtttccggtctcgaaccaatcagttcccgtttcaactaccaacccatttatgaatagtcatttcactactactgctatgaaatcacaattgcttggaggaattccagttacgactccgccgcattcggttcttcccaccctcggttcctttggtggaagcatcgaaccacggaaaagtgtcaggggccttggggactccagatcacctgttcaattgactatcttttatgctggtaccgtgaatgtttatgatgatatcacccccg

SEQ ID NO: 14804 - DNA, 326 bp, Gossypium hirsutum
  Clone ID: LIB3145-015-Q1-K1-G6
gtttacttcatttctaaggtccctaattaattatctcccttcccttcaatcttcaaaactccattaatggctgactctcaacattcctcttctggtaaaacttatgtcaactctcaagaatttagttcagaggaggaaacaagtgaagaatcaaagcttaaattctctgaagatgaggaaacacttataattaggatgtttaatctggttggagagaggtgggctttaattgctggaagaatccctggtagaacagctgaagaaattgaagagtactgggataccaggtattcaacgagtgaatgagaaaaaaaaaacgacatttt

SEQ ID NO: 14805 - DNA, 420 bp, Gossypium hirsutum
  Clone ID: LIB3145-015-Q1-K1-G8
ggcagggattttatcaagtttgctgcttacaattttggtaaagatcatcaagatattgcaaaatggttgccgggaagtcacttgaaaaaagtggtgctctatggttgcgcttcccttgataaaaataatgtcttcgctgctaagagattgcgcaagttctttaaaattcaagaaaacaccgtatgcagtcgatgcatgttaaaggattcatgtgggtatgctaataagagtgtatggggaatcggtaccaacaatttgctcctggttgatgtaatgaaagttatcactttgtatgctttagatttagtgcctgcaaaactcaccgttccggatgaggtaaaagattcaatcaaccaattgttgaagttggttataaaggtaagtcaacccccatgccaagacttctaaaatgtttctaca

SEQ ID NO: 14806 - DNA, 397 bp, Gossypium hirsutum
  Clone ID: LIB3145-015-Q1-K1-G9
ggactcagcggctgaaggaggagtataaggctttgatcgcctacactcagatgaataagtccaacgacaacgattggttccggatatccgcagccaatccggaagggactcgttggaccggcaagtgttggtacgtccataaccttctcaaatacgaattcgatctccagtttgatatccccgttacttatccggccactgctcccgagctcgagttgcccgaactcgatggcaagactcagaagatgtacagaggaggaggaatcaaaggatgacccagttgattccgatgctgaggatgaagatgatgccgatgatactgaagggcacgagtctgattccgataccaaatcagacgatgaggacaaggaagatgcacatgatgagctctaagcac

SEQ ID NO: 14807 - DNA, 362 bp, Gossypium hirsutum
  Clone ID: LIB3145-015-Q1-K1-H1
gttgttgggtgtgtcaaagaaagactatgcattcaaaactcatccaatgaatctacggagtgagaggacccttaagggtgctttttatggcaactataaaccacgcactgatattcctatggttgtcgacaaatatttgaacaaggagctggggctggatatggacaagttcatcacacactctgtgccttttgccgatataaacaaggcattcgactacatgctccagggtataggtctgagatgcatgattcatttggatgcttaagagagtgttgctgctgtatatttgcccaaccaaagatcaaaactctaatgttttgtcctactatgtgttatatttatgtgcccacttaaactac

SEQ ID NO: 14808 - DNA, 313 bp, Gossypium hirsutum
  Clone ID: LIB3145-015-Q1-K1-H10
cagatttattaacaggcagaactgcagctactttggagatgttcccttcttggcctatgagatatcagcaaacccccggaagttcaaaatcaggaggggaaagtacagattcaggctcagctttgaacactatctcaagcaaaactgagaaccagtttgaaccagactcccccatcagtaaaaaggcatcatcttcatatcatcaggctcttgaccagcagaatctacagcaacaacaacaacaacaagagatggcaagtgatccttcaagaacaggaacatcactgaatcaatcagctcccattgtcaaact

SEQ ID NO: 14809 - DNA, 332 bp, Gossypium hirsutum
  Clone ID: LIB3145-015-Q1-K1-H11
caataaaaccgattcagtgctttgtttcactggaaggcaggctcattcaagcctctcattttctggccttactggagagagtagcggagcagattaccaagattgtggggcttcatcaatgcttctcatgggagagcctccttggtgccctccatgtactgagagctccttccaatcatcaactcgaagcaatgctgtaatgcgttacaaggaaaagaagaagacacggaagtaagcatatgccaataacccatataaggaaacgtgtcacctgacatgtctattaggttggtggctttacaaatttctgggacttactgggcttcctttta

SEQ ID NO: 14810 - DNA, 355 bp, Gossypium hirsutum
  Clone ID: LIB3145-015-Q1-K1-H12
ccggccggaatccgggcttttatatggtcagtgaattgaggttgaatttaaatattctacagattgcgcaaagcatgacccggaagtgaccgaggatactgagaagaactctgcagaacttttaatggaggaactgaagctaagagaagctgaagctttggaaagtcagcgacgggccgacatggcattacttgaggctaagaagatagcatcacagtaccaaaaggaagcagacaagtgcaattcaggtatggaaacatgtgaagaagcaagggagaaagccgaagcagcactggtagctcagaagaaattgacagcaatgtgggaaacacgagctcgtaaaaagggtggagag

SEQ ID NO: 14811 - DNA, 350 bp, Gossypium hirsutum
  Clone ID: LIB3145-015-Q1-K1-H2
cccacgcgtccgaccaagtactgcacttatagatcgtggcattgcattacacacaatgattaggctcgttacaatgggactaggtggagaaggatacttgaatttcatgggaaatgaatttggacatcccgagtggattgatttcccaagaggtgaccagcgtcttcctaatggcgtagtaattcctgggaatggttacagttatgataaatgtcgacgtagatttgatcttggggatgccgactatctcaggtatcgtgggatgcaagaatttgatcaggctatgcagcatgttgaagagaaatatggtttcatgacttccgagcacacatatatatcgcggaaggatg

SEQ ID NO: 14812 - DNA, 99 bp, Gossypium hirsutum
  Clone ID: LIB3145-015-Q1-K1-H3
aacaaaactaaaaaaaaaaaaaaattaggaataccaatcgcctactaaaaaaagttttcaagctgttcaaaagaatgcatttagcctccgttcagtttt

SEQ ID NO: 14813 - DNA, 307 bp, Gossypium hirsutum
  Clone ID: LIB3145-015-Q1-K1-H4
cccacgcgtccgctcagagtagatttggagggtatcaaactcttaatgaaagagaaaaatcattcttagcaaggaatcaaactattcactgtggttttgtgaagggtatgtcaagattatcaagccctggatttgaattgagtgaaaatgataaggcatacatgaatacttgtcgagttgcagtgtcttcttgcatttttggaagctctgactttctgagaagaccaactagcagattgattagtgaattttccaagaaaaatgtgtgttttggtattgttcgggatgagcaaacgctgtccaaact

SEQ ID NO: 14814 - DNA, 310 bp, Gossypium hirsutum
  Clone ID: LIB3145-015-Q1-K1-H5
atccgtcagggtacattttcccagtatgattatggagtcctgaaaaacttactgatatggggacaggttaaaccgccagcatttgatcttaacaacataccaaagtcattgccaatatggatgagttatggagggaatgatgccttagcagatgcaacggatgtgcagcgcactcttgaggaattatcgtctaaaccagaattgctttatctcgataattatggtcacatagaccttcttttgagccttaaaaccaatagagacatatattaccctatgattggggtttttaaggccgtgggaaaatcaa

SEQ ID NO: 14815 - DNA, 268 bp, Gossypium hirsutum
  Clone ID: LIB3145-015-Q1-K1-H6
tatctgttcacttagtgcttgccttgttgctgttgtttgttcttcagaacaaccaccgttcagacccctcggaatccctgccggtgatggtgcttcagttattctaaaatccgttctcgaaagagccactcaagtcttaactcatccatccggaaatttcccaatgcctcattacacattctggagagcatcgtttgatgaattcttcactctcctcaccaaatactgtgtcaccaaatacgagtcgataatacaatcgatacacaac

SEQ ID NO: 14816 - DNA, 395 bp, Gossypium hirsutum
  unsure (1)..(395): unsure at all n locations; Clone ID: LIB3145-015-Q1-K1-H7
tgtgaatacatcagccctgacacagtctgagattcgtgacatcatccttggagctgagattactccaccctctcaacagaggcagcagatagcagagattgagaaacaggcgaaggaggcaagccagctaacagctgtgacaactaggactacaaacgtgcatggtgatgagctcattgtcaccaccacaagtccctatgaacaagcagcatttgggtccaagacagattggcgtgttagagcaatatcagctactaatctttatcttcgagtcaatcatatatatgtgaactcagaggacataaaggaaactgggttcacatatatcatgccaaagaacattttaaagaagttcatctgtatagcagatctcaggactcaaatngctggatact

SEQ ID NO: 14817 - DNA, 399 bp, Gossypium hirsutum
  Clone ID: LIB3145-015-Q1-K1-H8
gaaaaaagttctggtttgatcaaacgacttctttctcgtagtatttaactacgccttcacttgtcttgaatcatgacatatgtgaaatatgtgattatatgctgacatatgatcgaaaagatgtgtagaatacttccgttatcaggtgaaatttgtctgcgacatacagggatacaagtctcatttattgacttcacactctgtcattccttctatatttttcttttatccatttccagaataacgtttcgttgatatcattattttccattaatgaaatgtattctgatgacatcttgttggtttaataccagctctccgcacagactcacctgaagaatgagatgcacgtttggtcatggaaagttcgaactggaaaggattttaatttttttttta

SEQ ID NO: 14818 - DNA, 434 bp, Gossypium hirsutum
  Clone ID: LIB3145-015-Q1-K1-H9
aaaaacttttgcctctgaaactatggctccattctctttacgtagccgtcttcaggcttctgcgctaagcaagaggcgtctcaaatccaaagccaagcatgggaggaaagggatgaagaacatggaggaaagcttcaaaagattgaaatctgaaatggaagaaataagcgaggaacaaaagaatatcagggaagggcaaaggcaagttaaagaaaaattcggaatcatcgaatccgagtgcgaggaattgaagagggaaactaggctcataatccagcaaagtgccagaactcaggttaaacttgctcttatgttccgcatactgaaagcaagggaagccggcgagttgaataccgctgccactctcactgaaatgctccgtgaaatagtaggaagagagagggaggaaagcaaagctgacatctgaatgacta

SEQ ID NO: 14819 - DNA, 376 bp, Gossypium hirsutum
  Clone ID: LIB3145-016-Q1-K1-A1
ataataaaaaagacttttcaaaagaacacaactatggctcctcatagagaaggatcagatgcttcagtggaagccatggttgctcaagtcgaaaaacacccaatttcatcgatccttatcatcattgctatgcaaacagaagctttgccggtggtgaataagttccagttgattgaaaaccctcattcttcgtttccaaaaggggtcccttggatccattatcatggtgcatacaaggacatcataatcaatctagtttggcctggaaaagatttaacctttggggttgatagtgttggcacgatttctgcctctcttgtgacctatgcatctatccgagcattgcagccagacctaatcataaatgctggcactg

SEQ ID NO: 14820 - DNA, 520 bp, Gossypium hirsutum
  unsure (1)..(520): unsure at all n locations; Clone ID: LIB3145-016-Q1-K1-A10
ccgtccgattaggggttgggtgtttagaaaaatgggcggnntggcagcgccgcccttcagaatccacntnnctccctnnatctttgcacacggccccttttgagaatcacgatnnntccctgcncnnttctcnnacactccnnccagagctacntnncttcaccgaacctcnttactttgccccgagcctgtcgaggggaaatattctacnnttctctgaagaaagggacgacgaatgttaaggtgccctttggnctttgtttgggtggggatctggaaaccctatgcatactgcacctgtnnaccttgcagccgtaaaaaggaaatggctctggacaagggttgagtctgaacttcttggaccttgttcaggcatcaaaaaacagtcaattgttttctcaattcactaaagacttgtcagtacctgcagagacacgggtcaaagccattaatgagatatgtgggcaagctaaattttcagatcttacaaagaactttttagttatactagctgagaatg

SEQ ID NO: 14821 - DNA, 88 bp, Gossypium hirsutum
  Clone ID: LIB3145-016-Q1-K1-A11
atttttattccgctattttctctctccccaaacacccttttaagccaaaaagaagacaatggccgatcagctcaccgatgatcagatc

SEQ ID NO: 14822 - DNA, 445 bp, Gossypium hirsutum
  unsure (1)..(445): unsure at all n locations; Clone ID: LIB3145-016-Q1-K1-A12
gtttgttacttctggtgaaatacgaaagcgatcagagtttttcgaaccctttattttgggagtaacaaatgcaactgtggaacagttttgcaagtcatccgtagagccaatgggtgaagagagtgatcatgtgcacattactgccctttcagatgctctgggtgtgccaattcgtgttgtgtaccttgatcggagctcttgtgacattggcggtgttagtgtaaaccatcatgatttccttcctacttcgggcgataagtcaaatgctaaaggtggtagcactgttcctgtcaagccttttatttccttgctatatncgccaggccactatgacattctctatccaaagtgatgcatttgcattttctggttgttaacaatgtcctaatcagtggtcctttgggggaaaatttaccttgcaagctgacgtgtgactgtaatgcaa

SEQ ID NO: 14823 - DNA, 303 bp, Gossypium hirsutum
  Clone ID: LIB3145-016-Q1-K1-A2
acgcatccctgcccctgaccaagtatcaacttataagggtaaatgcaaaggagatgaatgagggatgcaagtgggtggaaatgtttgaagatgtgcgatctgtagtcttctgcgtggcccttagtgattatgatcagatatcgatatcaccagagagcagtggcagtggaacgctacttcaaaataagatgttgcagacaaaggagctatttgaaacaatgataaggcatccttgcttaaagataccccattcgtgttgatactaaacaagtatgatctgtttgaggacaaatcaatcgggtg

SEQ ID NO: 14824 - DNA, 332 bp, Gossypium hirsutum
  Clone ID: LIB3145-016-Q1-K1-A3
gaggtttatcccatataactgttgctggttctctcttgcatgggttgaaagaagttgaggtttggcttcaaacatttgcaccaggatcgcgcacgccgatccataggcactcttgtgaagaagtttttgttgttctcaagggcagtggcactctatatctcgcctcgagttctaataagtaccctggaaaaccggaggagcactttatattttcgaatagcacgcttcatatccctgtcaatgatgttcaccacgtctggaatacaaatgaacatgaggatttgcaaatgcttgtgataatatctcggccgcctatcaaagtgttcatatat

SEQ ID NO: 14825 - DNA, 430 bp, Gossypium hirsutum
  Clone ID: LIB3145-016-Q1-K1-A5
agacttttcattttcacttttcattttttctctcctcctctcctttagccgcccctcctccttgttccttcgcctttctatcatttttcttccttttcaccaccttggacaccactttatcctcatttctcctccactccaccaccatacaaggatgttgcaccaccatcgccatcgtatcgtcgcaccgctgccattggccaccacaaaagttccccatttttctttttttctcctttactcggccaaatccccctttttagtcggttcatcatgtgaaattgtgaagcccctatccttttgattttattaaatcctggatccgtaccccactggttggaagagtgtgtttgttagtcaattgagattctagattcgatctcctcctctagagtggaaacggggttgctgctatgggagttgcgaaatc

SEQ ID NO: 14826 - DNA, 412 bp, Gossypium hirsutum
  Clone ID: LIB3145-016-Q1-K1-A6
gttttccaagtattcgtttcgggtactttagaagcttgctatagatttttcactcttgttaaagaatacaggagatgctcattttgctatactgtttgcaggtattcctagaatgtggtttccttatctgttcataatttgcagaatttatgaagttgaacccgaaaaatcggaaacttgcaagaggttgtgaaagatgggagcattcagttcaaaaaatcagcagataagttcttaaaatcgaattttaggtttcatgatgggatcatattgaactgggaaatgtaatcgcttgagcatttgtatcatttgggacagcttctgcacagttttattatggctgaaatttgctattatttggcatcacttcatgtatctgttcttttgtcaagcctaataaaagtttttggtc

SEQ ID NO: 14827 - DNA, 342 bp, Gossypium hirsutum
  Clone ID: LIB3145-016-Q1-K1-A7
cccacgcgtccgggcacaaaacgccgaggaactttctaataagaaagtagtcgatgctatggtccaagttgatgaagcaaatgtttcgaaaatggaaatcttgaagaaagtagaagaggccacggaggaaattaaaacgagtaagaaagccttggaagaagcattaaaccgagtagaagctgcgaacaaaggcaagctggaagtcgaggaagctcttcggaaatggagatctgagcatggtcagaaacgacgttccttacacaaccctaccaagttcaagagttcttacccatctcacaatcgaaaagattctcgtttatttgacgtgaatggattgaatct

SEQ ID NO: 14828 - DNA, 404 bp, Gossypium hirsutum
  Clone ID: LIB3145-016-Q1-K1-A9
cccacgcgtccgctggtgagaccaaggaaggagaagataagaaagaagacaacaatggcagcaacaatgaggatgaatctatgaagaagatgatctactattatcagccgctctacgttattgaacgaatgccaccggctcctcagttgttcagcgatgaaaatcctaatgcttgctgcatttcatagtcaaatgatcatactagttgacagtatatagtgtatatgtatatattttgttgagtccgcgccactggtaatgagaattttagagcaaagcggtggacggatcgcatgatgatcaatcagtgaatgtggggaactcgggataatcacaatacaagtgaggttaataataatatgattattatgtattaaaatgtatcatattggtattataatatg

SEQ ID NO: 14829 - DNA, 388 bp, Gossypium hirsutum
  unsure (1)..(388): unsure at all n locations; Clone ID: LIB3145-016-Q1-K1-B1
gcaatgagtttggaatcaaagttactcttttccatggtcgaggagggagtattggtcgtggtggtggcccaacttacctcgccattcagtcccaaccacctggttctgtaatgggcacacttcggtcaacagagcaaggggagatggtgcaggcaaaatttggtttgccacagattgccactagacagctagaaatatatacaacggcagtgctgcttgcaactctgcggccccctcaaccacctcgagaacagaaatggtgtaatctgatggaggagatctcaaaaatcagttgccagaactaccgaagcacagtttacgagaacccggaattcctggcttattttcaagaggctacaccccangctgaattggggtatcttaacat

SEQ ID NO: 14830 - DNA, 429 bp, Gossypium hirsutum
  unsure (1)..(429): unsure at all n locations; Clone ID: LIB3145-016-Q1-K1-B10
ctttgttctcgttccgtactattataccggaagccgatctaaaccccaggcgttcgtaagctgcatcgaaatgaatggaggtccatccccttttatatatctgttggagattgccagatgaatggagaatgatttctgctaaaccaaatgaaccaaaggctacagcaaaaaagttgaagctgctcttcattacctcgatcaaaaacccagggcacttaataaaaatatgccagctattttcttcagcagaaccgcacctggggcaaagagtgtttatcactaccctctttattttgagattgacaaaggacgggataaaatcccaagaaatcctccaaattgtcatctgaatttttgtagggatatgtaacttccataanttgttgtaaaaagtttttgtctcggtctgtaataataaatcattaggat

SEQ ID NO: 14831 - DNA, 448 bp, Gossypium hirsutum
  Clone ID: LIB3145-016-Q1-K1-B12
atctccttatcaatcaattctacttctttgtcgccttggcaatgttcatatgtttccgggtggtctgagtccgtattcccagaaccatgccctgaacttatgaattcgagtacttcatcatgcggaatcctaatgctcgagctgcaattctataatataattctttgaaaaaaaaagaatctgggatttttcgacctattcagatttttttttgcaattatctctttttggcgaggtggaaaatgcatatatggttgatagcttcaattctttcttcttgaaaatttttgtagtgatggagtttaaacatacaaaaaaaaaaaaaagaaaaagaaaagtattgggtatattttaagggtaaatggttaatggctttttaattaatgttttataaaattacgattgtttggaaacctctttgtaaaaataattataataaattttgggt

SEQ ID NO: 14832 - DNA, 416 bp, Gossypium hirsutum
  Clone ID: LIB3145-016-Q1-K1-B4
gccacgcgtacgcttctattaaaaatttcatccattttcactgttaaaacccggtctctgtgcatgagcatgccgtacacgcagcacaccatgtcattgtttggttattccatcaggcacgccataaatgaattttttacagaatggactaatttgcgcatcttttgagtagagagagcaaaatgcaatcttgtacagggggtctctatgatatttttaccaacttttgcaagttgtgaatgattcttactgacatctttcctccagactttgataaattttgcatacggcggctgcgttattgggattcctcttctcttcttaatggcaatcttgaccgtgatgcactgcgggaagatggtttggaaaaaatttagtgaaagccaaaggcaggttgatttataacaaccacctac

SEQ ID NO: 14833 - DNA, 449 bp, Gossypium hirsutum
  Clone ID: LIB3145-016-Q1-K1-B5
ctgactcacttagatggcagacaacttctcattaaaacccaacctggggaagtcgttaagcctgatcaattcaaagcaataaacgatgaaggaatgccgatttatcagaggccatttatgagaggtaaactgtacattcagttcactgttgacttccctgactcgttgaccccggaccagtgcaaggcactagaggctgtgcttcctcccaaggcatcggttcagctgactgacatggagctggatgagtgcgaggaaacaaccctgcatgatgttaacattgaggaagtgatgcgtaggaaacagactcaagctcaacaagaagcttatgatgaagatgaggacatgcatggtggtgcgcagagagtacaatgcgctcagcaatgataaaaaaaagccgaatgttcgagacacaaacgggtggttttggcgatggaatgtactgtggt

SEQ ID NO: 14834 - DNA, 389 bp, Gossypium hirsutum
  Clone ID: LIB3145-016-Q1-K1-B6
attttctttcttcccaaacaacaaattttaaaaaaaatgccaacagatacaagcaaacccatgaaattagaacgatacaatagctatattcgtaaagtccatagtacgaagttgttgaatgcttcatctaaatttctatttcgtgttacccttcttattgctttagttttgatcttgtttttcaccattaattaccctccactttcggataatacccacagtgcacctcaccatcatcaccgtcatatctttctttcaacttcacttttctccggttcttccctcgttggtggtgcggcgtgggagaaacaagtccgtcactcttcgactccacgtagggttaatgggttttctgttttggtcaccggcgccgctgggttcatcggttc

SEQ ID NO: 14835 - DNA, 450 bp, Gossypium hirsutum
  Clone ID: LIB3145-016-Q1-K1-B7
aaaaaaaaagaaatctccaacccaaacccttcctccgccggcatttgtttgcaaaaaaaaaaaaaaagaagttcaaattgaagaatgcctgtattttcttcaagagctatgttcaggaactacgacaagcatagaaagcaaaaaagtgaccctaaaggcaaattgtccgacgtgttcaggagctatgctgattctaatggggagctaaacaaggaaaagctgaaagacgcttttctacatctggatgctgccatgccgtaccggcaagccgaagaagccctccgtgtcgtcggcaaaagctattacattaacatcaaggatgaaaccgaccttaacacccttgtcgactatgcttacaataagggttacggggattcaatttgattagctaatttataagcttattttctttttcttttcacttttaatcatctaaaatgttttttttaa

SEQ ID NO: 14836 - DNA, 328 bp, Gossypium hirsutum
  Clone ID: LIB3145-016-Q1-K1-B8
ataaaaaattccaataacgaacccaaaatctgatcaattagattgcttttctcgagaaaatttgaaaaaataagaggggagatttcgaggttttattctatggtgataagagatgccgcccaagcaagcctcgaaagcagatttagcgaagaagcagaagatcatagaggacaagaccttcggtcttaagaacaagaataagagcaaaaatgttcaaaaatacgtccaaaatcttaagcaatccgtacaaccgaaacccgatccgagtaaaacttctcaaaagaaaaagaaagaggaagagaaggccaaagagaaggagctgaatgac

SEQ ID NO: 14837 - DNA, 393 bp, Gossypium hirsutum
  Clone ID: LIB3145-016-Q1-K1-B9
gggtgaatcaagttctttaaccatcagtgaccgtagcagcatactaaaatatgggtcgtggtctgggatccaacaccaagtctccggtaatggcacgattgctgttgttgagtatctgcataggaatattggcgaaggcggcatcagctcaagtgaagcccccaaatgcgttggcctcaaaactggggggctattgcggaaagagtacaatgtcctgctccatgaaatgcggttatctcggctgccttgcaggctgtgtgacatctccctcgatcggatgcggcactaagtgctttttcgaaaacaccagttgccaatttggctgcaccccctttgatattcgaagccaaacagccccgtgtaagacctaaaaggatatatatatatgtgtgt

SEQ ID NO: 14838 - DNA, 424 bp, Gossypium hirsutum
  Clone ID: LIB3145-016-Q1-K1-C1
cgacatcatccacttctttagattccaaggcttcttcatcatcaaaaaagtttcctgttttaacctttgatttttgggggaaaccacttgttgtcccagatcagaatggttcaagaaactgcaccaccaaacctgaaaacaaattctcggttcaagctgaaacaaactgtgtgagccgatgtattagatggtggaaaaaaaatcttaaacccaacatggtcaagatccactctgctcaagaacttgtatgttccttacaaaatgctggtgatcgattggtcattatcgacttctattcacccggttgtggtggttgcaaagccctccatcctaaggtatttttgtgtgtattatttttaacaaaaaaaaaagtcttggtttattttccgtgtgtgtaacgtattgtggtggttgggttatgttt

SEQ ID NO: 14839 - DNA, 385 bp, Gossypium hirsutum
  Clone ID: LIB3145-016-Q1-K1-C10
caatttcttgttcccctcttgatcctgggcttggctattgcggtacgtcactataccaagaaagagtagcttattactatacaggactttacctgttacgagggaagaatcagtgtgtctcatctgttagttgaaatagcacagtcatatcttttgtttaatttccttttagcatttgtgtgtcgaactaaatacctgttgatgatatgctccattgtcaaaagacaatatatttgagcatctttgagcccccatttaagttagcagggaaaccagacaatgtttaatattgttggaatttaaaagcaggagcatgtttttatcaaaaaaaaaaacaaagaaaaaaaaaagaaaaaaaaaacaaaaggggctccggctacaaaaa

SEQ ID NO: 14840 - DNA, 307 bp, Gossypium hirsutum
  Clone ID: LIB3145-016-Q1-K1-C11
aaaatgatagggtcccgtgtggcattttaactttgctccagaccgagcatactattggggaggatggtaacaagaaaggctccttctatcaaattatatccagtgtgatagcttggcttttcatctctatgagactactcctcaaaggtaccacccattatctttcatccaaagactgaatgtacctgctgaagtcgccaagtgttatgttactacctttatgatataacggcttacacatgtcaaaccttgaaaccctacaaaatataactcctctgctgacccatgactatccattgcttagctc

SEQ ID NO: 14841 - DNA, 364 bp, Gossypium hirsutum
  Clone ID: LIB3145-016-Q1-K1-C12
cgcaaaagaataatagtatattaacaattagacttgtaaagcttttgcagtttttatgatgtatataagattagggttgtgaaagccccaaggcagtggcagggaattatgaaacagtcgctcgcctctgtgagcttaagccaatcatttttaaaatgttcatttagtgatttcggtttttatcttaaaaaaaaaaaaaaaaaaaaaaaaaaaaaaaaaaaaaaaaaaaaaaaaaaaaaaaaaaaaaaaaaataaaaaaaaaaaaaaaaaaaaaaaaaaaaaaaaaaaaaaaaaaaaaaaaaagggggggccgttttaaaggatccaactttacttccccgggcttgcaaagatataatttttt

SEQ ID NO: 14842 - DNA, 237 bp, Gossypium hirsutum
  Clone ID: LIB3145-016-Q1-K1-C2
cgatcatactgtgttttgaaagtacatagtgttttaccttcaacttacactatctgcagaagataaaagtggtgctggtatcagaattcatgataacaatggaggagaggaatctgcggctgtgcgatttgaaggggaagtgtcactgggagatttaatggggctccgacttcttgggaagacattgcggcctgcagcgggcgatgattagagaattgttagtgagaccaatatacc

SEQ ID NO: 14843 - DNA, 419 bp, Gossypium hirsutum
  Clone ID: LIB3145-016-Q1-K1-C4
tttctttcttattatatcctaaatcaccaccgtattccaacctccactgatcttttcccaaatggatcaccttgatctgatttccatggttctggagggtgcattggaagcgcagaaagaggagacactgcggttggaagagtcacatagggctgcttttgttgcgttagttgaaaaggagagggagcgttccatgcttatcacgaaaaaccgcgacttggtagctaatgaagcgcccaaggcaaaatttcttgaggacttcatggttttcattgaggctattgaaatgaagatctggagactgtccagagtttcgatgagaaagctatgatgaatactattttgtcaatgatgaactgtgacggcggcgacaacggcggacttgaccgcttttacggagacgatgttttcaaaatcgg

SEQ ID NO: 14844 - DNA, 458 bp, Gossypium hirsutum
  Clone ID: LIB3145-016-Q1-K1-C5
catgtctgtagtttgtcgcttgagctcaaggagtccaaaaaggacattgaagaagaaacctcagcatcatgtgtagcagaaacagaagaaacaaacataaaggaaactgaagctcatgctgaagtcgaaaagggaaagaacgaaataaataatgttgttgtcgtcaaagagaacagcttagcaagaagtgaacatgaagagagtggtgtatgcagtgctgaaattgatgtgaaatcaggggactctcacctaacacacgagaaggacatggagaaagaagaagatacaatgcaacaaagggaagacttcaaagttcaagagaagcagttccaaccttgaagaaaatggcgcctcttccgccattctgttgctcgcttgcattgcctgcactccctcttattgatcaacaattacatatatatatatattaattaaaaatatatacatatatattatat

SEQ ID NO: 14845 - DNA, 417 bp, Gossypium hirsutum
  Clone ID: LIB3145-016-Q1-K1-C6
aaggtttcaataattcgaacgcggtgtcgagttacgcaccaagcaatcggctcaacgcgcgtagatctgcgatgacaaactcgctggtgaggattggtggagtcgaaggagatctggttaagagagctttgtcggctttgattaggccttcctctcaccagcagcgtcgccgagcagcgttccagccgaggccgagccggctttccgtgatgtctaaagcggaggatttatgaagattccttttgcggtatgtgtaatcttctaatgctttttggttaagtctccaagattttccggtgataggggatcgagcttcggagtaacgccggatggtagcgttgcagtcagatttcggcgtagaggttggagatctggacgaaggattcgggacggatatgatttttagtgtactccggg

SEQ ID NO: 14846 - DNA, 397 bp, Gossypium hirsutum
  Clone ID: LIB3145-016-Q1-K1-C7
caaagtaccacctctggatgcaagaccctgctctccttcaagccaccggatcagagcccctctccctccaacaggaatacgatatgcagctctcctggaaccaagaccctctcagttcttctctctctcttttacttccttttctgattgtttataccaatttctcaattgggttttcttcttctttaatttaatgattaagcttggttttcaacagagaaaactttcattgttttggataaggagatggtcggggaaaagtttgttcatggaaatcctcatgtggaaggtcacctcatctactacctttgtcttaattgcacagaatttagtgaaaccctttgatttcttcagcgtattggtttggactgatatgggagtgatggtaaacgatgat

SEQ ID NO: 14847 - DNA, 211 bp, Gossypium hirsutum
  Clone ID: LIB3145-016-Q1-K1-C8
caactttgccgtagtttagattcttcgggttgtaaccaccgtcgaatgtgtctttaccaagtatcctacggcgacggttcggttacgtacggtgatttctcgaccgaaacgttgacgtttagaatgaaccgaattggacgcgtggcgctcggctgtggtcacaacaaccaaagcttgttcgtcggtgccgccggtttattaagtctcggtc

SEQ ID NO: 14848 - DNA, 433 bp, Gossypium hirsutum
  Clone ID: LIB3145-016-Q1-K1-C9
aaaaagatagggtccgtgaggcattctaactttgttccagtccgagcatactattggggaccaagggaacaagaaaggcttcttctatcagattatatccagtgtgatagcttggctttgcatctctatgagactactcctcgaaggtaccacccattatctttcagccaaagactgaaagtagctgtggaagttgccaagtgtctgttacaccttcatgatagagggctgccacatggaaacctgaaaccgacaaatatactcctcgctgaccctgattaccatgcttgcctcaccgattattgtctgcaccggctgatgacaccaactggaatcgctgagcagatattgaatctgggagcccttggatatcgtgctcccgaacttgccttcacatccaaaccagtcccatcttttaaagccgatgtgtatg

SEQ ID NO: 14849 - DNA, 119 bp, Gossypium hirsutum
  Clone ID: LIB3145-016-Q1-K1-D1
gaaggttgtttttcatcttcaaaaaaaaaaaaaaaaaaaaaaaaaaaaaaaaaaaaaaaaaaaaaaaaaaaaaaaaaaaaaaaaaaaaaaaaaaaaaaaaaaaaaaaaaaaaaaaacca

SEQ ID NO: 14850 - DNA, 421 bp, Gossypium hirsutum
  Clone ID: LIB3145-016-Q1-K1-D10
acagattcaaaaagaaataaaggtagaagaagcaatggccactcttacagcgcccacgacagttccttcagtgtctgaagattgtgaacaactaataaaagccttttcaggatggggaactaatgagggcttaatcatagatatattgggtcacagaaatgcggagcaacgaaacttgattcgaaaaacctacgctgaaacctatggagaggatctcctcaaggcactagacaaggaactctcgaatgactttgagaggctggttctgctttgggctcttgatcctgctgaacgtgatgcccttttggctaatgaagccaccaaaaggtggacttcaagcaatcaagtccttatggaaatagcctgcacaaggtctgccaaccaactgctttacgcaaggcaggcttatcatgctcgttat

SEQ ID NO: 14851 - DNA, 451 bp, Gossypium hirsutum
  Clone ID: LIB3145-016-Q1-K1-D11
gtttataggcgcttcttactgagaactcctctgaaggttcctctttccacacctgaaaatcagcatgttctgtctcggctaaaggaatctttagaattttttacgctatgtttgattgaaaggaatccaacaatcagtccagacatcaatctcagtccctcattcgaccctctaacacaactcatcctgaataagccctcgcgctgcccagatgctcttccaggtatatgaagtgttaagagctcggaggtcggatttggtcggagacacatcacactgtcaacctcaggatttcggtatataaagaaactttattttggaaatcaatggcatgtataagctaacaaagtaaatgttaacgtgaaatgaatgtaaagttagccattagtatggttaacaaacctggttttagatatgtgatgacgttatcttataaatatgcatgaattta

SEQ ID NO: 14852 - DNA, 486 bp, Gossypium hirsutum
  unsure (1)..(486): unsure at all n locations; Clone ID: LIB3145-016-Q1-K1-D12
cacgacgtcacggttcacggtggtcccttaagttggtttaccatgggattctcatngcgtgtgcatgnnacgatgatgtagtgcgacgccaagtggcagcctaaagctcgcgcattctacgtggctagcgacctgttggtgaacccnatcttganntcctcgtgcctttgtccttacngnntacaaaanncggcggtacccacccgctntgtcttgcattgctgcagttggggtaaaaagcacttcttactggcgaggttcaagactctccctcggactctgctcaaaacgtgtgctaagtgctatcannaatcggcggtgggaacggaattccgtacanctcagcaataacctcaatcttcgcagcccggccttaacctgctaaatggtggtctccaacttcccttttacagcatcagcccctccacttgactgcaacaaanggtgcagtgagggttgatgaatgatgatatgtgaagggagtgg

SEQ ID NO: 14853 - DNA, 436 bp, Gossypium hirsutum
  Clone ID: LIB3145-016-Q1-K1-D2
cccacgcgtccgctcactctcactctcggtctcttttcaaaattttcctgtcattcttttttagctttgggtaaccacaggccaaaaaacacacacgctataataggaagagagttttcgtgagagagaaaccctaagtttttctgccgtttctggtttttgtgatttttgaaatccgctgcttcatcggagactcatttcagataggacttcgagaggactggaataagcactttagtcgctgtgggagtccgagatattagtgcaacttggttctgcaacaggtgtctataaaagccttgtaaagtacttggttggagttctgcaagtttgtctacattgtcttgttgtatgtagctgttgcgatctgataagttgaagagtgattatttgtttggttcataaaatggctattctgcagaagcaggcagataat

SEQ ID NO: 14854 - DNA, 422 bp, Gossypium hirsutum
  Clone ID: LIB3145-016-Q1-K1-D3
attggagaagccctaaatgcatacaccctaagaagattgcctggttttagcaagggtgtgaaccagaatattgatttcgtaaagtatcggtcattggtggagaccattgtgtggctgctgccaactgagaaaggagttgtttcttgtagcttcttgcttagattattaagagcagcaatttttttggattgtggagaaacagagagaaatgagttgatgaggagaattgctcagcagcttccggaggcaacgatgaatgatctattaattcgagctccacctggtgaagcaacagtatttgatgttgacatagttcaaaacttggttgaagggtttgtgactcacagttctcaaactgaacccgtagataatgaattcctcgggagtagaagccccaagtttggacctgatgcttctaaagt

SEQ ID NO: 14855 - DNA, 273 bp, Gossypium hirsutum
  Clone ID: LIB3145-016-Q1-K1-D4
aatgcacaatccatcaatgcatataccctattacgattgccaggttgaatcaaagatgtgaaccagggtagtcacctcaaagagcaatgctcattgcttgaaaccattgtggagctgctgtcaaatgacaaaggaatggtatcttatatcttgtggcttacattattaataacatgcatttgtttgcattgtctataaacaggatagaaataactgagatgatctataattacctactaacttccaaggacaacaaccaatgatctattaatt

SEQ ID NO: 14856 - DNA, 240 bp, Gossypium hirsutum
  Clone ID: LIB3145-016-Q1-K1-D5
aagggggaacccgataaatgttgcacctgtggatgttcatataattgcactcctggcggatgagatgtaccctcttctcgaaattcatgaagctccggaattcccaaaatggaccatatgccacagatacaacgaattctatacatttgactactacatcagatcccactggtatgacagatacgacaagttccaaaaatctatactaatgctcaggatcaccggcatgacatagtggag

SEQ ID NO: 14857 - DNA, 439 bp, Gossypium hirsutum
  Clone ID: LIB3145-016-Q1-K1-D6
attgactcattgctatctctctttccctctctctaatgacgcttagctctggaggatcgagtgtcgtggtgcctcggaatttccgattgctggaggagcttgaacgtggagaaaaaggtatcggagatggtactgtcagctatggaatggatgacggagatgatatttacatgcgctcttggaccggcaccattatcggtcctctcaataccgtacatgaaggtcgaatctatcagctgaagctattctgcgataaagattatccggagaagccaccgagtgtccgttttcattcaaggatcaacatggctcgtgttaaccatgacacagggctggtcgattcaaagaagttcggacttcttgcaaattggcgaaaggagtatactatggaggatatattgacacagctgaagaaagagatggctgcctcacataatcg

SEQ ID NO: 14858 - DNA, 350 bp, Gossypium hirsutum
  Clone ID: LIB3145-016-Q1-K1-D7
ctttttgttgcgcatttcttgattattgtgagggagtctccttctattataaccttcgaccattcctgttccactcctacttggaccgcttttctacgcacgattacttcagctgcaaatgtgaaagttaccccatgatggatctttgagcaagaaagtaagacaaccccttcttcgtttctaacaacaatccctgaggcagattggtggtgattcacatcatatgcaccatcaaaattaatttttacgaactcactagatcgcccaaagtccacaatagaagaggaggctttgataggaagtaagctgatcaaaaatccaggacattcgcgaaaaatatggttaattgt

SEQ ID NO: 14859 - DNA, 389 bp, Gossypium hirsutum
  Clone ID: LIB3145-016-Q1-K1-D8
tctcttcccctatcctaattgatcaaaaatattgcccatggagtaaatgcaagataaatgaagaatcgaaagttaaactaagcaacattagcttcaagaacatccgtggcacatctgcgcttccagaagctgtcaagtttatttgcagcggttcttcgccatgtcaaaatgtggaacttgcagacattgatattaagcacaccggacctgaacccgcaacatcccaatgtttgaatgtcaagcctaaaactagtggcaaattaaacccgactccatgttccagccctgtcccaaaaaccctaagtgccaccgcttaaaccataccaacagattcaatgcaattgtaattaatatatttattcatattacataaaaacagttctttttca

SEQ ID NO: 14860 - DNA, 454 bp, Gossypium hirsutum
  Clone ID: LIB3145-016-Q1-K1-D9
cccacgcgtccgcccacgcgtccggctgaaagtcggtttgttttctaacacagcctatataaagccattgtttccatactacttgcactcattactcatggaatcccactttgattcccatgttgagcaacataacgaagatgagtttcagaaatctttcaaagagatgatttctactctccctaaagggaacagctggggtcttcccgatcatctatatcagtatcaagatttttggttcacctcacctttcctacaaggagtcctgttagctcaacaacagtttgaggctcaacccactgatatcatactttctagtgcccctagaaccggcacagcctggttaaaatctctcactgtcgctactattacaagaacttcatacgatgattctaccacccctttgcttttcaggatgcctcatgatgttgtgcctttcatggagcttgatcat

SEQ ID NO: 14861 - DNA, 353 bp, Gossypium hirsutum
  Clone ID: LIB3145-016-Q1-K1-E1
tgactgatgtgccttttggagttctgttatctggaggacttgattcatcattagttgcttccatcacagctcggtatttggctggtaccaaggctgccaaacaatggggaagccagctccattctttctgtgttggcctagagggttcaccagatttgaaggctgcaagagaggtggcagactatttgggcactgttcatcacgagtttcacttcaccgttcaagatggaattgatgccattgaagatgttatttaccacattgaaacctacgatgtcaccacaatcagagcaagtactcctatgtttctaatgtcacgaaagatcaagtcacttggtgtcaaaatggttatc

SEQ ID NO: 14862 - DNA, 406 bp, Gossypium hirsutum
  Clone ID: LIB3145-016-Q1-K1-E2
cattttctgactatgaaaatattatcatcttcaaaaagggtcgtgagcaatgaggttaaaggggacatagagtgggagcttaggcctggtggaatgcttgttcagaaaaggaacatggcggatgctgcttctgctcctatgattaagatcaaagtttctcatggttcttatcaccgtgatatagctgtgcctgctcaatccacttttggggatttgaaaagggttcttgcacaagaaaccggtttggagccaaaggagcagagactcttgttccaagggaaagagaaggatgatgaagaatgtttgcatatggtaggagtaaaagacatgtcaaaggtggtacttttagaggacccagctagcaaagagaggaagcttgtggagatgaatagcaaccaaagtgtgc

SEQ ID NO: 14863 - DNA, 411 bp, Gossypium hirsutum
  Clone ID: LIB3145-016-Q1-K1-E3
tgaaaactccatactgttttgaagatgactgcaccaaggaagacccactgtcacaggaaaacttccggaagttagcgatgccattgccctactcgaagcagcatcattcaaagcttgtttgctacataaccaaagagttaatggatacagagaacccacctcaagtcctgcctaacggctatgtctacagctctaaggctctcaaagaaatggctgagaaaaacaatggtaaaattacatgtccgagaaccggtctggtctgcaattattctgacctggttaaggcctatatctcataaactacactatcaacactgcaaaggtaaaaaagaaaactcttcctggcctgtttcctcttaatgttagtgctaaattttatgcatcatctgtagatatttctcttttgctttc

SEQ ID NO: 14864 - DNA, 319 bp, Gossypium hirsutum
  unsure (1)..(319): unsure at all n locations; Clone ID: LIB3145-016-Q1-K1-E4
tgcagatggagcatatggttgagcagctttccaaacttgaaagaaaggtatatatgtatatgtacatgtacatgtatatgtatatgtattattaactttgtgttttctagatatcatcatgcttgtattctttgtatacacaggaagagtagagcaggaaattagtgtgttttaaatgtcataaaatttgatacaatagttaaatattatatgattagacatcgatgaanaaaaaaaaaaaaaaaaaaaaaaaataaaaaaaaaaataaataaaaatgataaaaaaaaataatattaaaaaaacttctatcaagaatgg

SEQ ID NO: 14865 - DNA, 424 bp, Gossypium hirsutum
  Clone ID: LIB3145-016-Q1-K1-E5
ctaggaaccctcgaagggttccttcggcaggccgataatctacgccagcagacacttcaacagatgcaccggatcttgacgactcggcaatcaactcgtgcccttcttgcaataaacgactatttctctcggctccgagctctgagttctctatggctggctagacctcgcgagtgagaagcaagataataaaatccatctcctatgaacaaactgattgcccgcaccgcagccgctgccgctgctcttcctcaacatcaagcatcgaaatcttcccgagaaacatggatacattgtgtcttaatgtttttttggtaacaataacatgacatttataaatgttggcaaaaagatggtgtatgttaattacttaaaatgttaaaaacatttagggcaaaaataataatgtgatttagtttgatgc

SEQ ID NO: 14866 - DNA, 396 bp, Gossypium hirsutum
  Clone ID: LIB3145-016-Q1-K1-E6
cccacgcgtccgctttattgaagtacccacagattactggcggctccaaagggcggccttccggtggaaaagcaggtttagctgccggaccagctgttgaaaaaccagaaaaattatcgggcggaaaagattttcgggatagatttggtggagtcgaaggggttcccagaagacacatttcgacaacgagacagaaggctgttgaggatgtcaatttgtcaaagcatgtgcatcatgattcagataaaagacgtagtgcctctcgatacggcagcacttcaagaagagctgtaatagcaagcagggctagttcagccggtgaagccaatgacattccacaaaatcgacggctgtcaactggcagtcgtatccataacccagcagaaagaatccaac

SEQ ID NO: 14867 - DNA, 434 bp, Gossypium hirsutum
  Clone ID: LIB3145-016-Q1-K1-E7
caattttcttgttggatttgaagcagtaatccttttccgaatcgttgaattcctctgtgaaaatttctgatcggtgtttcatcgctccgttgaagaatgccgtcgtcgccacgaaagaattagtaaaacggaaaacaaacggataaaactagaatgcgaaccatttgcgacgtctgcgacagcgccgccgcgatcatattctgcgccgccgacgaggctgctctctgccgttcctgcgacgaaaaggttcacatgtgtaacaagcttgccagcagacatgtcagagttggtttagccgaccccagcaatgtcccacgctgtgatatatgtgaaaatgcacctgctttcttttactgtgaagtggatggtagttccctttgcctgcaatgtgatatgattgtacatgttggaggtaaaagaacccatgggaggta

SEQ ID NO: 14868 - DNA, 453 bp, Gossypium hirsutum
  unsure (1)..(453): unsure at all n locations; Clone ID: LIB3145-016-Q1-K1-E8
caggaagtggagaaaatatgtctgactttacctatgcggagaacgttgctcatgctcatatctgtgcagcagaaactctagagtctcggatagtctctgtggctggaaaggtactccttaagagtgttcttagtatgtaaaactctcttgtactgtattttatattgaattatgtatcacggaggtgttctcaatatgtaggccttttttatcacgaatctcgagcctatgatgttctgggaatttgtgtctctgatacttgaaggcttanggtatcaaaggccattcataaaaattcccacttggattgttgcctatgttctctcacttcttcaacgtatacatgaggaatcacacttcagaattgataaatattcacctcattacattgttcaattagcttcatgtaccacaacttttgactgctcaaaggctcaaaagcatctgggatat

SEQ ID NO: 14869 - DNA, 270 bp, Gossypium hirsutum
  Clone ID: LIB3145-016-Q1-K1-E9
cccacgcgtccgcccacgcgtccgtaaatagatatgaccatccgaatatgcagaaaaagtttaaaagaaatttaactgatgttcattctgttagaataaaaaaaaaaaaaaaaaaaaaaaaaaaaaaaaaggtcggacgatctaaaagatccaaaactaaataacacgagcatgcaaaataatagataataatataaagaaaaataagggcaattgattgagaggatctatgacaacggcgggactgagaaaaccatatagttacccaat

SEQ ID NO: 14870 - DNA, 415 bp, Gossypium hirsutum
  unsure (1)..(415): unsure at all n locations; Clone ID: LIB3145-016-Q1-K1-F1
gatgatttatgcaggatattttctgctttgcctatggtggtcaacaacgggtcagtggagctgatctatcaaggtgtttgccttggcaaatgggtgtgcgttcaaaaaagttaggtggtgatggtgctgtatgcatgtgtaagccctcaatgctactagcaatttctcaaaattcagtagtcctgaaacgttgacaggatagtaggagagaatgtagaaagttgtgcttttgattttgttaacatgtggtttggtacttcctactcttatgctagtcggatcatggtggaactgtttcaagggttgtagctttgtgcaagaaatttattttttgattatgctggctcatcttttgtcatatgaataaataaaggcatctgacatttaaaaagaaanaataaataaatattattta

SEQ ID NO: 14871 - DNA, 361 bp, Gossypium hirsutum
  Clone ID: LIB3145-016-Q1-K1-F10
accacgcgttcgcgcaatactcaacccattcaacttgatgaagcgttcgaattgttttatgaaggtataagttcgtatgggccttattgggaccatgttttggggtactggaaagcaagtttggaacgtccagacaagttaatgttcttgaaatacgaagatttggttgaagatactgtgttgtatcttaagaaaacagcagagtttatgggttatcctttctcgtcagaggaacaacaacaaggggtgcctgaaaacattgtgaagatgtgcagtttcgacaatttaagtggcttggaagtaaataaaaccgggagacatcgtgaagggaaaggaaatatggagacggaaaataacattt

SEQ ID NO: 14872 - DNA, 448 bp, Gossypium hirsutum
  Clone ID: LIB3145-016-Q1-K1-F11
cccacgcgtccgcccacgcgtccgcccacgcgtccggataagtgggagttatctggtgatgagcgatgttgttgtgtgaccactactaaaataaatgcgaagggatccggtggtgcttcagacgggtacacttgggtgagtgtgcagcagaagtggttagaaggatatgaaaagaaggatacatcaatttggcttttctaaggtactccgcaacatcgactctggaatcagcataaaaaattctataggaataaatgtatccaaatttcaatagctttactattttgacatatatttgattaattcataggcaacttaggaaatggctctataattagataaactgagatacataccttggcttatctcttgtgtgattcatcttattttttatgctctcgcagtgtacagcatctgtgtcaaaaatttgcattatcctttggatttc

SEQ ID NO: 14873 - DNA, 231 bp, Gossypium hirsutum
  Clone ID: LIB3145-016-Q1-K1-F12
tgaaggttacctgataaatagcactagtttttcgaccagaagggctcttgagagccccccggtcaggagttttgtagtcaagaacctcatcagcccccaggctcctgactaaatctatgttacgagccccacaagtggctgtaatgtgtgcatttgcaaactttaggaggtgcactagctgagtatgctgtcgctaatgaaggttccacagtttaaaggccatcagaggta

SEQ ID NO: 14874 - DNA, 374 bp, Gossypium hirsutum
  unsure (1)..(374): unsure at all n locations; Clone ID: LIB3145-016-Q1-K1-F2
tgcttctctattgtcttgcttcctcgtttgaatttattttggtttccttgtaaaactgatgtttgagctttaactctttctgattgggatgtttgatagaaacagtgtgcataaactggtttttacggttatctgaaatatagattgtgtgggtgtttgccttgttaaaaaaaaaaaaaaaaaaaaaaaaaaaaaaaaaaaaaaaaaaaaaaaaaaaaaaaaaaaaaaaaaaaaaaaaaaaaaaaaaaaaaaaaaaaaaaaaaaaaaaaaaaaataaaaaaaaaaaaaaaaaaaaataaaataaaaaaaanggggggggccgttttaaaggatcaaattttatgtcccggggtttgcaacggtatatttttttt

SEQ ID NO: 14875 - DNA, 277 bp, Gossypium hirsutum
  Clone ID: LIB3145-016-Q1-K1-F3
caaagatatcagacaggctttttgcattcccttcttgatacacaacctatttctaccctcctaatgaaggggttcgtgaccacctgtttgatattttcaatgtgagaagcgggtgcaattctttcattagtctgtatgtaaacagtctaaaaaggtatatccatatcaatagtttgttccctagtctctactcattaaaaggctgtaaaaataagaacgagattaaaggttaaaaagaaaggaagaaaaaaagaaaagaaaagtgaattcactattt

SEQ ID NO: 14876 - DNA, 373 bp, Gossypium hirsutum
  Clone ID: LIB3145-016-Q1-K1-F4
cccacgcgtccggaaagagtcgtcgtcgacatgacacatgggcgttattgttcatgttgggcgcctgaccctgttacggggtattaccggccggagaactgtggggctgagatcgatgcggcggatctccgggagatgatgttgcatcacagggttagatcacagtagaaacttgccaccgcatgtgatcaccgtagcagagcagagccagaatgttttgcagatgtttgggtgcctttgtattttgttttggttttgagttcaaaatcttttatcttaataatcggtagtatttcttatttaaaaaaaaaaataaaaaaagcggagttggaaaaaaaaaaattttttttggggtaccaaaaattaatttatt

SEQ ID NO: 14877 - DNA, 401 bp, Gossypium hirsutum
  Clone ID: LIB3145-016-Q1-K1-F5
aaggcggagccctatatcaattgcagctgcagttatttatataataacacagctttcggatgataagaagccacttaaagatatttctgttgctacgggagttgcagaagggacaatccgaaattcatacaaggatctttatccccatgtgtccaagataataccaaactggtatgccaaggaagaagatctcaagaacctatgcagtccttgaattacagaacagacaataatggagataccacaaacaaaaccctcaaagtgctgagttctctctctcgggaactcgtggaactctcggtacattccgataatgatcttttttttttttaatcctttttcatttttcttgcataacttcgcccgtgcaagtaaaaacaaaggggggaatggcggaaatg

SEQ ID NO: 14878 - DNA, 400 bp, Gossypium hirsutum
  Clone ID: LIB3145-016-Q1-K1-F6
aggcagactagattctccggtttctcaagttagatcacagttaaaggattcaggaaatggagagaaggcctctgtagcaaaactctttgaacaagtgggattgcaaaagatcttgtcactgcttgaagctgaagatgctgatgtgcggattcatgctgtgaaagtagtagcaaatttagctgctgaggaaactaatcagcagaagattgtagaagctggaggtctaaagtccttgctgatgctgcttggaagctctgaggatgaaaccatacacagagttgcagctggtgcaattgccaatcttgcaatgaatgaaaaaaaccgggaacttataatgtctcaagggggcattagcttattatcaacgactgcaagtcatgctaaggatcctcaaacactt

SEQ ID NO: 14879 - DNA, 367 bp, Gossypium hirsutum
  Clone ID: LIB3145-016-Q1-K1-F8
cgcgttcgtctatcgcttcgcttactaacttcaaaatatttgggaacacttgtggaactgatgatggggctgtaactgtttctgagggtcacgtctgatagaaacagggagcgataagctggtgtgcacggatatctgaaacatatgctgttcctagaatgaaacctgtgtttgatccgacgaaaggcggaaggcctgagttctattttgaagatggagcatattctgagcaagttgactggattggtcagaaaaaccaaataaatgttgctgatgaggctggagtgaaacaaattgtgttggttgggtccatgggtggaacaaaccctaaccatcccttgaacagcttgggcaatgggaacatttt

SEQ ID NO: 14880 - DNA, 351 bp, Gossypium hirsutum
  Clone ID: LIB3145-016-Q1-K1-G1
cccacgcgtccgcaactccgtaaattcatgagaactgggaatataagattgaaccaaagctgaccagcgaaataatggagagcacagattcatcgtcggcgtcggcgtcggcgcaacccgaactcccaccggggtttccaattcaccccacccgacaaaaagctggtggttactacttaaaaaaaaaggccgcttttgttctttgctggtccaaaatagttgaagtgaaccttacaagttgatccaatggaacctgccaagaaaggaaattttcgggaagcaagaatggtatttttttagtcctagagacaggaaatatccgaatggagcgaggcctaatagagctgcaac

SEQ ID NO: 14881 - DNA, 330 bp, Gossypium hirsutum
  Clone ID: LIB3145-016-Q1-K1-G10
ggcctagggtgtcaacgacggtgaaaggatgccattttggtgtaaggccgaaggcaaagtcggcccttgggcatcgtgcataccgagggcacacatggaggggggtacggcgtgagggtgacctaaggttttcattttcctaaacatgagtttaggtcttcggctaacgggcctaatctgtaataggttagtggtttaagttgatgggtttgtaattgggttttgtaaatatgagccaatttaattttgtaactggacatttaatgatcttgagactttatttggttattttttagtttctaatgggccgggcaaaataaggctcttaca

SEQ ID NO: 14882 - DNA, 453 bp, Gossypium hirsutum
  Clone ID: LIB3145-016-Q1-K1-G11
gcaaaatgaatcctgagcgatctggatgtatgttaaatcaccaggattgtactttcagaagcaaggaagttgactttgctgattcaaagagacacaaattgggtggtgagaatttgtggaagaactttgacatgggaaagagacacaaaggaaatggagatcgcatgcaggaaaagtttatggcttttcccaaccaaataaagaccccaagtgattttaatgttgaaaattcagagaagacaaataaacctagtgtttcaaagaggcttaagtatgatcttccccttccattgacttacaagcgaagaaagcctcaagccagaaacacatcagacctcaccaattcactcagaacaggtatcgatataagaactagtagttcaaaagaatcaaaccaacctttaaggaacaaggtaaatgcattcaagtttaaaattcttgggttctatgaac

SEQ ID NO: 14883 - DNA, 448 bp, Gossypium hirsutum
  Clone ID: LIB3145-016-Q1-K1-G12
cacaaagtcggggtctcacccaagaacttatttcattgctacctgtttcaaaatacaagtgcagcttattctcaaggaagaaatcaaggaaagagagatgtgtaatttgccagatggaatataaaagaggtgagagacagattaccctaccttgcaagcatgtctaccatgctgggtgtggcaccagatggcttagcatcaataaggcttgccctatatgttatacggaggtgtttggcaatggatcaaaacattaaggggcaatggatcaaaacattaagggacaatgacgatgaacataaagaaaatattcgtatgctataaatatttttgggttggatttgggtatatccccctaatacgaagatgttctatttcgaccttttacgttgtttaacaaaaaaatagttgattttgacttttgcaataattgaaaggaagtatgata

SEQ ID NO: 14884 - DNA, 333 bp, Gossypium hirsutum
  Clone ID: LIB3145-016-Q1-K1-G2
cggaaagctgttgttgtccatgtcccatatagattgaggaaagctttccgcaaggttcatgttaagcttgtgagggaacttgaaaagaagttcagtggcaaggatgtgattcttattgccacccggaggatattaaggcctccaaagaaaggttctgcagttcagaggccacgcagccgcacattgactgctgtacatgaggcaatgctagaagatgttgtcttacctgctgagattgttgggaagcgcactagatatagaattgatggatcaaagataatgaaggtgtatttggaccccaaggaacgaaataacacagagtacaagcttgag

SEQ ID NO: 14885 - DNA, 421 bp, Gossypium hirsutum
  unsure (1)..(421): unsure at all n locations; Clone ID: LIB3145-016-Q1-K1-G3
agcgaatggaagacgtgttggagcatgcatttgatgggggatgtccctggagacaacaccaacactcaaaattataacaaagctcttgaactcaaaggcattgatctatctaacatgtctcccgcgacaggtgattctaatctaacatgttgccttttggaacatgtaaatgaggttagctgttctggtccagcaaagagaatttaacccttttgcaaatggggccttcttatataggtgtgtgtttacaagtttcccaggagcggaaaatcactgattgccatatgcatttacttccgaagcaaggtatcctattccttctaattcttcttcttcttttgtgttttctttctaaaatatgtataatttgtagccacgcanagtatatttaactctcaattaagaattcaattacgaaatt

SEQ ID NO: 14886 - DNA, 359 bp, Gossypium hirsutum
  Clone ID: LIB3145-016-Q1-K1-G4
cggacgcgtgggcggacgcgtgggcgccctttagtgatcagtgaggtgaagaaaaatgtcttgctgtggtggaaactgcggttgcggctccggttgcaagtgcggcagcggctgcggcggttgcaagatgtaccctgagatgaactttgctgagcaaaccacaaccgggacacttgttcttggcgtggcaccccggaaagtgcactttgatggagctgaaatggaaactggggctgaaaatggctgcaaatgtggagataactgcacttgcaacccttgcaattgtaaatgagaaaaaaaagctaagcatattatggaagctgatctaaataatatatgatgtatgtgggtttttacta

SEQ ID NO: 14887 - DNA, 337 bp, Gossypium hirsutum
  Clone ID: LIB3145-016-Q1-K1-G5
cccacgcgtgcgcgcacgcgtgcgctatctgtgttatttacaaaggcacccaaaatatcaaactggactgatgtcgatatggcatatgaacctgagtggactattggaacctgtaaggctgctactccagttcaagctcatgaagtacattgtgagttgaggaaaaggctacacgctaatgtacatctcgcagttgatgaatcaacccggattatatatggatggtccgcaactgctgaaaactgctaggtactagcacctcagcttgatcttaacgtttaattgggcagtggagcttcactcaagcaggattacattgacattataaaaactgctg

SEQ ID NO: 14888 - DNA, 374 bp, Gossypium hirsutum
  unsure (1)..(374): unsure at all n locations; Clone ID: LIB3145-016-Q1-K1-G6
cgaagatggtccagaggaaatttgtcttaaatcatttgaataactgtgtgttggaagtatttgttaggcgtatcatatgcccctcttttaggccaattgttttcctttttcttttttggttatttaccctctaaatttttgtattttcgggaatatatgaattgccttcaattactttgaaaggcacgaaatttggtagtgtatcttttatgagcctaatgaaaatgtcagtactggctgtggctgtggactgactatattagcttcnnaaaaaaaaaaaaaaaaaaaaaaaaaaaaaaaaaaaaaaaaaaaaaaaaaaaaaaaaaaaaaaaaaaaaaaangggggcggccgttctaaaggatccaagcttacg

SEQ ID NO: 14889 - DNA, 396 bp, Gossypium hirsutum
  Clone ID: LIB3145-016-Q1-K1-G7
attggatttggcattgcatagtaaatttgagttgtcccatacctggaagaatggcagtgtttatttcactgggtattatgttgatacgcctcaaggtagtggttctgagtctgaagaggagcttcttgaacccatagttaatcccataaagcctcatgctacaatatctgatcctaccacgtcaaaacaggttaagattgtggaaccaaaaaaagcagaggatagctgtgatgacgaggatgaagatgatacttctaccgaggatgaaatgtccagtgaggatcaggaacctggcatgttagtaaatggtgagaatgaaagtgacaatgatactgacagtgatgaggatgatagtgaagaagaaagttcagatgaggatcctgaaacacctgaaac

SEQ ID NO: 14890 - DNA, 378 bp, Gossypium hirsutum
  Clone ID: LIB3145-016-Q1-K1-G8
caaaggctctggcaaaggagatggcacctgatacccgagtaaattgtgttgctcctggtttggttcctaccaactttgcagcattcctaacaaaagatgaggtcctgaggaagacggctgaggaaatcacattacttggaaaacttggcaccccgggggatatggctgctgcagcctctttcttggcatccgatgacgctagttatatcaccggagaaactcttgtgatggctgggggagccccctcaagactttagtaagtttctaaaggttaatattacattaacagcaacaatgtaatattccatcaaaattattgcatttgttttgataaaaaacttttcgtaatgcaagatttgtgtcaattttattctttaa

SEQ ID NO: 14891 - DNA, 395 bp, Gossypium hirsutum
  Clone ID: LIB3145-016-Q1-K1-G9
ctgaaaactatacaaactggtcgcatttacttcgctgaccattgagaggataaatcggtggtacagacgggacagtcgacgaaacatttctggactcacttccattgacgccttttgcacgagacaaggtcatatttgacaacgtatatttggatggtggatcgattgcaagaaattgtatgactgaaaagaggtagatttgaatcacgcgacctttttataatgaaatcatgtgggggggtgttgcgtaaggataggctaaatgacaagtgtatggagctgggtgctattttggaacctgaaaggcctgccaaaacagacaagtctgctattttggtggatgcttgtcgaatggtgacccaactacgagatgtagcccataatatgaaagattc

SEQ ID NO: 14892 - DNA, 395 bp, Gossypium hirsutum
  unsure (1)..(395): unsure at all n locations; Clone ID: LIB3145-016-Q1-K1-H1
gaaatgacggagataattggatccatgttcctccaatcaagggttctcttgtgatcaacgtcggagatgcattgcagataatgagcaatggaaagtataagagtgtggaacatcgtgtggttgccaatggaagcaataacagaatttccgtccctattttcgtaaacccaagacctagtgatatgatcggatcattgcctgaattaatcgaaaatggtgagaagccgatttataaacaagttctttattcagattacgtcaaacattttttccgtaaagcacatgacgggaagaaaacagttgcgtttgctgaattataaatattttaatcccatagttgtaaacagtcgtagatttgaaaacaataaattgcaagcataaaagctgnttattaa

SEQ ID NO: 14893 - DNA, 394 bp, Gossypium hirsutum
  Clone ID: LIB3145-016-Q1-K1-H10
ctaaaaccttaagtggggaatttgctgaagggcaacggaaacttttagcaattgcagctgctggagctaactcaaatgctgcaacttcattttcttcccaacttagcaatggacctttaggtggtctgcatgacaaggttgttgtgcccatggatcccacaaaagagctatcaaagttgttatctgaaggcaaatacgaagaagcgttcacaattgcgctgcaaagaagtgacctctctattgtttcttggttatgttcacaggttgatctacgtacgattctgtcaactgcaccttttcctttgagccaaggagtgctgctctccctcttgcagcagttggcatgcgacatcaacaaggacactccacgaaaactcacatggatggtggacgt

SEQ ID NO: 14894 - DNA, 384 bp, Gossypium hirsutum
  unsure (1)..(384): unsure at all n locations; Clone ID: LIB3145-016-Q1-K1-H12
cccacgcgtccgcccacgcgtccgaaaaatttgaaaacaaccgctcgtcttctcgtaaaaaaaccgccttttgcttgtttggaaaagacggcggcttttataatttccggtggtgccttgtcgtcgtcgttgttattgaagtgacagtgtcgtacaagtagaaatgggaacagggaggtggggtacgtgggaggagcctttgttaggcggggcggttctccgtcatggtacccgagattggaacctcgtcgcttcggagctccggaccagaactgttgctcctttcggattcaccccggagatttgtaaggctaagtacgaggatttgcagcaacgttactcangttgcaaagcttggtttgaagagttacgtaaacagcgaat

SEQ ID NO: 14895 - DNA, 239 bp, Gossypium hirsutum
  Clone ID: LIB3145-016-Q1-K1-H2
gttctgtaataagtatggctgtctttagtgtttgagctgagagaatcagaaatggccgtaatgtatgtttttctatttaattttatttgaagtattcatgtccaacacattgagaggaatatgaaggatatttcaaataatttggttgcgaacaaaaaaaagaaaacacaaaacctaaagaaatgatcagatcaaataatagaataaaaaaaaaatagagaaaaagacaataaataaac

SEQ ID NO: 14896 - DNA, 381 bp, Gossypium hirsutum
  Clone ID: LIB3145-016-Q1-K1-H3
ctgagcccagccctagaaggaggattgcttctatcaccagtaggcgaacagagctttcaggcatcgggatcatagtgtaacctatgactaagctccgtgactagctccattgtcatcatctaagttcttcttcatcacaggccaaccaaaccgctcgaccatagggaaatgaggaacccatagcactggactgaagtgcctgcccactcttcatcttccgagtcatgcccggaatgagtactttgcccttgagatctatccaaagcaaaagaaagaagaaaagagttcagctgcttgccgagctgtctaaaatgactaatagaagctcaatcgaacagaccttgcctaataaactggaatggggttagcccagaacacgcg

SEQ ID NO: 14897 - DNA, 405 bp, Gossypium hirsutum
  Clone ID: LIB3145-016-Q1-K1-H4
atgtttgacatttctttatgacggttcgtgagtccccctttaccgtaactgagtgtatacccatggaaagtccaagattaatcgcatgaagacctgcataagcttctgttgcaaaagaagttgaaatatttgaatttaagaccgttttcgtagcaaggattactctcatatgatctagaaccaccaggcctgccatcgatttgaaatcccttcgattaaaggcagcatcaaagtgaatcgtcatcccaaaactcgttttgatttgaatggccctcgtagctgtatacaaggacccatatgccacagcaaatcaatcgaccttgtttgggagtgctcttttggaaaatccaaacaatacagaaagacatgagatatatcttcctccccagatctacatcgaggaca

SEQ ID NO: 14898 - DNA, 402 bp, Gossypium hirsutum
  unsure (1)..(402): unsure at all n locations; Clone ID: LIB3145-016-Q1-K1-H5
aaatccggaggaccgagtgccgtccgcgcccggtcgtactcataaccgcatcaggtctccaaggaccatacatgcctatttctcgtgagaagccttccgttgagctcgtgaaggtcaccgacgacatgaaatcattcaaggcatacaacaagctccgtgttgaacgtacgaacaaacgtcatattggtgctaggttgaagaaggctgccgaggccgagaaggaagacaagaagtaaggttacccttttggggacagtgttttgttatttggcttgctaaaaagaccttaaattttgtattcattttgtcaagtgaactgagacagctttagaaaactttggtattatgacagtaatccattttgttgagcattttattaaattgagaagtttcttgctgnng

SEQ ID NO: 14899 - DNA, 414 bp, Gossypium hirsutum
  Clone ID: LIB3145-016-Q1-K1-H6
atcgttcggttcttttgaacactcagacccacacgattatccacgagttcccaatgctacctggcggtgctcgtaattatccgtcatcgggatgcgcttctctccttccaatcatgcttaaacctaatgaagataggaaatcaatccccgccgaggttttggtgtgcggtggaacgccgcatgatgcatatacaaaggccgatttgcaacgccctaaggtgtttttgccagggaacaccgattgtgctcgcattgacatcaccaaaaggaatggcaagtggaagatccaaaacatgccctcagctcgtttattgggagacatggtggtgcttccgacgggagatgtgttacttgtcaacggtgccaagaccggttcagccggttgggatgacgccagggacccgaaattacacc

SEQ ID NO: 14900 - DNA, 404 bp, Gossypium hirsutum
  Clone ID: LIB3145-016-Q1-K1-H7
cccacgcgtccgagcaaacaggatattctatctttctgtaccacatgaagcacttccggacgttgcttcttctcttgccgataatgcacaaacaaagaagggttggaatcgtataataatcgagaaaccattcggatttgacgctgtatcttctcaactgtttacgaaatcccttctttctaagtttgaggagaagcaaatttacaggatagaccatctccttgggaggaacctcattgaaaacctcactgtattaaggttttcgaatctagtttttgagccattatggagtcgaacatacattcgtaatgtgcaagtgattttatccgaagacttgagcatgccgctaggaaggtattttgatggttatggggtcattcgggacattgttcacagtcacatac

SEQ ID NO: 14901 - DNA, 330 bp, Gossypium hirsutum
  Clone ID: LIB3145-016-Q1-K1-H8
aaaaaccgggccgaccgacacgtacgaccattcattctatcaaacaagatattttatttttccgaaccacaaaaaacacttccggacggttctttttttattgccgaccccccacaaacaaacaatgttttatattattttataattatcaaaccattttgttttgtttctttatattatcaactttttactaaatctcattcttctaaattcttacacaaactaatatactttatataccatctatcttttagtaactttacttataaccttacttttatacaattcttaaacctacatttttactcattatttattcaaacaatacat

SEQ ID NO: 14902 - DNA, 270 bp, Gossypium hirsutum
  Clone ID: LIB3145-016-Q1-K1-H9
aacccttcggattaagcttccaaacacccaagatttccttgtttttgcgagagccaaaaatgcttggaccgccactacaagcttgcgcgacgattgctctccacacactattctattattacaaaaccactccccgtggaggttgggtctaccaattttatacaatatgcacggatgatatgaaccaccacgaccaattgcagaggactttattgctgcaaacaaaccatacaacgagtgatcagcctactctagcaatacaccttgcac

SEQ ID NO: 14903 - DNA, 177 bp, Gossypium hirsutum
  unsure (1)..(177): unsure at all n locations; Clone ID: LIB3145-017-Q1-K1-A1
accggccggaattcggtcgaccacgcgncgtaagattactcagcttatgaacgccgtgactgggcacaggggtggtctcgagagaccgactgtccaaaagcccattcatagccgcatacaagagcttccacatcgacgggtgcgagtcgtcggtggaagccaagttctgcgccacac

SEQ ID NO: 14904 - DNA, 262 bp, Gossypium hirsutum
  Clone ID: LIB3145-017-Q1-K1-A10
ctggttgcctcattgtttacttcactttttgatgattcttcagtgtgagactcaacctgcgataatttggaagctgtacgtgcatacatgactctcgagaagtgaagttcattcatattcttattaagggcttccttgagagccttattttcttcttccatagcacaaaaaaaaaaaaaaaaaaaaaaaaaaaaaaaaaaaaaaaaaaaaaaaaaaaaaaaaaaaaaaaaaaaaaagggggggccgttttagatgaaccaaa

SEQ ID NO: 14905 - DNA, 383 bp, Gossypium hirsutum
  Clone ID: LIB3145-017-Q1-K1-A11
agcaaacttggccgccccgaagaaaatggcggcatgagtattacaactactatgcaagccatcaatgagaagatactctcacttggttatggagaattcactgcagaaataacaactgtagacgcacaagactctcacaatggaggagtacttgttcttgtgactgggtatttaactggaaaggacaaagtgaagaggaaattcactcagagtttctttttggcacctcaagacaagggctatttcgttttaaatgatgtttttagatttgtcgatgatacgaaacatcaacctgggagccaggacccagttaatggttttgaggcttctcttactcctgagcaagaccattctcctgttccagagaatcacattgagcaacc

SEQ ID NO: 14906 - DNA, 391 bp, Gossypium hirsutum
  Clone ID: LIB3145-017-Q1-K1-A12
agcaaatgaagggcccccaaaaatggagagagtgcctgcgtttacccaactgttcaagagaggagaacttatatagattaaccatttgttactgccttattgatcagctcatatttagctctttagcacaaagatagaaggctatgcaatggagtctacctctcaggaaatgaatacgactaaccaacccggtcacaaaccttcgttctcggctttgatcgatgctatcgcattgcaagaacaatgttttgaacagtcgctagctagtcaacagctttgggccaaacagcttgctaatgaacaggaggcaaagataaaagcaactgttcagaaaatcacagtggatgctgctgaagttgatgaaattcttaaagggaaaaacattcttaca

SEQ ID NO: 14907 - DNA, 426 bp, Gossypium hirsutum
  Clone ID: LIB3145-017-Q1-K1-A2
accactcttctttcgctgaaaacttttagaacattagagagagagagagagaaggcaaatggcagcgtcgggagtagcagcaccgacgagaacggaggttttacagctttaccgatcgcttctgcgagtggcgcgtcagttctgcgactacaacataagggagtactcaaaacggcgaaccattgacgcgtttcgagacaacaagaacctaaccgacccttcccagctctccgccgctttctccgacggtaaagctcagctggaagtcgctaaaagacaagctttggtttattcactctatgctccaaaggtcaaaagcataatggatattaagccttcttagaaaatatttatcattccattttgacttgttcccttagagaaataaaaaggagtaaactgcgattcattgagataaatattgaa

SEQ ID NO: 14908 - DNA, 391 bp, Gossypium hirsutum
  Clone ID: LIB3145-017-Q1-K1-A3
cccacgcgtccggtttctcgatcttcacactggcagccatagctatcttcgtgcattttcatctgcgccagtggtgtccttggcagttgagaggggatggagtgagtctggtagtcctaatgtgaggggtccacccgctctcgtattcaacttttctcagctggacgaaaagctgaaggctgggtacaaggccacaacagatggaaaatttaccgaggctcttcggcttttcctcaacattcttcatacaattccattgattgttgtggagtcaaggagggaagttgatgaagtcaaagagttaattatcatcgccaaggagtatgttcttggtctgcagatggagcttaagcgtagagaattgaaagacaatccggtacgccagcaggag

SEQ ID NO: 14909 - DNA, 439 bp, Gossypium hirsutum
  Clone ID: LIB3145-017-Q1-K1-A4
attctggtgaaatctatgattctttatcaaataaatggagtgaaatccagaagctgcctatagactttggggtcgtttgtgctggtgttgtttgtaatgggatgttttatgtttgctctgagaatgacaagttagcgggctatgacatagaaagaggtttctggattggaatccaaacctctgcatttcctccccacgttcatgagtactatccaaaacttgtttcttgtaatggttccttgtttctgctgtctgtctcttggtgcgagggagatgggcaaattggtcggagaaacaaggccgtgagaaaattgtgggagctagatctgatgtatcttacatggaccgaggtctcagtacaccctgatgctccaatggactggaaccctgtttttgttgctgacaggaacttaatatttggtgttgaaatgttaaaata

SEQ ID NO: 14910 - DNA, 429 bp, Gossypium hirsutum
  Clone ID: LIB3145-017-Q1-K1-A5
caccaagtaattcgcagggttgcaacagcagcagctgggagaaaagacgatccaaaacccttcctaaaacgagcaaaaatagtaagagttatattaatggatccgtgtccttttgtacggatcctggtaggtaatttggccctgaggtttccactttctacaaagccctcgctttcaaggatccatccttctacttctccatgttactgcaagatcaaactcaagaacttccctcaccaagtgggttcaatccctttgatccatgcaaacacccaaaacccagaaagctgcaacttctctttgcagaaatcgctcgctgcgtgtttcagtttaagcaagtcccaggtggataggatcatctcgaaagggggttcatcatataaactttccatcgaggtttacgctgaccctgatgacagtacctgcgga

SEQ ID NO: 14911 - DNA, 426 bp, Gossypium hirsutum
  Clone ID: LIB3145-017-Q1-K1-A6
cccacgcgtccgtgagaacatcttaaaagatcgcggagcgagtaaccttgtgaatgttctgattgggatggacattcccgtacgagagaataaccaggcagtcggtgacttcaaccattcagacatcgggattgatgatgaagttccttttgatgatgaatattttgaggttatggattctgaaatatacgaggctccggttcgttgggggatgccagattcggctgatagcagctgggttcatcctatatattttgccaagtgcttgatgaaggctgttcatgtagaacatgacaggaaaatggaccatccctctaatggtgtttcgattgtcggttgccttcgaccagcctttgctgatgaagaatcatatctaagaaggctattccattttgactatgatgaaggatacacctcagattggaa

SEQ ID NO: 14912 - DNA, 417 bp, Gossypium hirsutum
  Clone ID: LIB3145-017-Q1-K1-A7
ctcaagatggaggacgactctgcgctaagatcagcggatgagataacagcagcagttcatcaaatattcagctaaattcaaaattaaaatgaaaaaaaaaaggatttggtcattattcattaggcagctgacttgattcctgaagggaaagtagggtagaaaagagcagaccaggaaaaaaaggtaaaacgagaaaaaaaaatgaaaaaagaggggtccattccaagcaatgctttgttccacaaagacaattgaagacagagcccttgatgtttacatcttaacttaagaaacttcccttgtttatcatttaatgatttaatttgcttacttaatagaaatgataaatctatgtaatttccaagtttcttttcctttattctatgtttatattattctgggactagcttctggagt

SEQ ID NO: 14913 - DNA, 425 bp, Gossypium hirsutum
  Clone ID: LIB3145-017-Q1-K1-A8
cccacgcgtccggagtcctgcagcagttgattctttcatacagcgctgtaatttggatgctgaatcattaataacagtccatcctagagaaatggaaaaccgccatattgacaacaatgtaaatactttggatgtacccattaaattaagaacttttgtggaactgacaatggatgtcacatctgcttctcccaggcgctatttcttcgaggcaagatcttgtgatgagcttctttgccactgctgaacatgagaaagaaagactccagtattttgcttcacctgaaggaagagatgatctttatcagtacaaccagaaggaaagaagaactgttctggaggtaaagtgaagtattggaggatttcccttctgtgcaaatgccatttgagtggtttgtgcaattgggctccaccactgaaaacag

SEQ ID NO: 14914 - DNA, 401 bp, Gossypium hirsutum
  Clone ID: LIB3145-017-Q1-K1-A9
cccacgcgtccgttcaggatcaggcagggctgttattcttcatttcggtgttttgggcattctttccaatgtttactgccattttcacattccctcaagagagagtgatgctagctaaggaaagatctgtaggcatgtataggctcagtgcctatttgttagccagaatgatcagtgatcttcctttggatctcatcttgcctttagtgttccttgtgattgtctatctcatggcaggcttgaagtccacatttacagcattttctctaacaatgcttacagttttcttaagtgttgttgctgcccagggccttggccttactataggagcggcattcatggatgtaaagaaagcctcaactctggcttctgttatcatcatgacttccatgttatctggt

SEQ ID NO: 14915 - DNA, 298 bp, Gossypium hirsutum
  Clone ID: LIB3145-017-Q1-K1-B1
cttagaactgtggctcagcagcagcaaactggtggtgctgccgctgatcaactggcttgattgtgattaagtgacaaccttgtctcctgagttataactgcctgctagagttttctccttgaacaccatcgtagcgtggcctttgtttagatcgaatcagttgcttcgattgaagctggatatgactctatacttctacagagtgtgttggaacttcaataccgcctgacacaagactttcatgcttgataatcaattgctatgtgattgagctatgcatttcatgcatcacacgata

SEQ ID NO: 14916 - DNA, 394 bp, Gossypium hirsutum
  Clone ID: LIB3145-017-Q1-K1-B10
aaattttctcagcctttcttgctctttccctcgctttctcgggaaaaaaaatggcaagggcggcttcaggaatggctgtgcatgatgattgcaagctgaagtttttagaactgaaggctaaaaggacttaccgcttcatagttttcaagattgaagaaaaacaaaagcaagttgttgtggaaaaggttggtgaacctactgatagctatgaggctttcactgctagccttccagccgatgagtgtcgatacgctgtgtatgactttgattttgtgaccgatgagaactgccagaagagcagaatttttttcattgcctggtctcctgatacatcaaaagtaagaagcaagatgatctatgcgagctcaaaggacaggttcaaaaaggaattgga

SEQ ID NO: 14917 - DNA, 400 bp, Gossypium hirsutum
  unsure (1)..(400): unsure at all n locations; Clone ID: LIB3145-017-Q1-K1-B11
ctttttactcatttttaatcccatgctataattgatttatgtatgtgtataacataaagcgtggtgatttggaaaaagaaatgtaacaaacatgcagtgcaagtatattttcttacacctactgcacatgttgattcacgaattctaaaagctattgctatcgagaactctaaggatgtggacgcagctgcggagattgttttgtctgagattctaccttacctatctaaacgaaccggggctggtagttcttcctcacggaatcggagccctcctgggcaagcaaatgaagctgggatgatgaagatgattctgttgccaagatgaaggcagctgaggaagccttggaagcaaaacaaaaagtaacaaatagcttgtctgctacctgttctttnttttt

SEQ ID NO: 14918 - DNA, 320 bp, Gossypium hirsutum
  unsure (1)..(320): unsure at all n locations; Clone ID: LIB3145-017-Q1-K1-B12
cccacccgtcctaattttattaaaactttattcaacccttttattccactncaaaaaaaaaaataacataaaagccgtttttaaaaaaaaataaccctcacaaacccccccttcaactttattaactcacacctacatcacatatccacttactactctctaaaaactattactatccacaaccctacttatctcaacatcatctttaaccctacctccactattattcttcctcacctatccaaaccaaccaatactaactataccccctaaattactatcaaccctccacccccaaacaactcccattagaacaaaaa

SEQ ID NO: 14919 - DNA, 411 bp, Gossypium hirsutum
  Clone ID: LIB3145-017-Q1-K1-B2
gaaaaatgatcacggcaacatacatgatacctcaaacctacgaggcaaagtttccagatagtaacagataattgaatggtgtttagtaaacctaaactgttgaaatcaagagggtctaattcccctttgaaatatatatatatctatgtcatacgcgcgcgcgcgtgctcacatatatatattactgagatacatcagcaggttgggacttgtatggggaaattaaaaaaatatttggaattagatgggtactgtttctactaattttatattcccatgtttggttaatgtactagtggttgccttttgcctttgtttagttggagaagttataaagtatcaatgtattgttattttttttaattgtaataagcacaatacaattaaagtataaatacaagtccgaatttt

SEQ ID NO: 14920 - DNA, 435 bp, Gossypium hirsutum
  Clone ID: LIB3145-017-Q1-K1-B3
cggacgcgtgggcaagcctacccacaaaagcccaccctcggcacctgaacagccaggcgcttgccccagagatgcactgaaactaggcgtttgtgctgatttgttgggctcagtgcgcgttgttgttggaccgtcgaggaccaaatgctgctctctcatttcgggtttggctgatctcgatgctgctgtttgcctttgcactgctattaaagctaatgtgttgggggttaacctaaacgttcctgtttcattgtctttgctcctcaattcctgcgaaaagcaaatgcctgctggttacaaatgtgcttaagctcatttccactgtttcctcagcaatgtttgggtttttcttttacgtgttctttttttttctgggcttgtttaatttggtattttgatatgtcaagggttagataaaatggtaaaggtttcttt

SEQ ID NO: 14921 - DNA, 435 bp, Gossypium hirsutum
  Clone ID: LIB3145-017-Q1-K1-B4
cccacgcgtccgcccacgcgtccggagcgttccgccttagggggaagcacccgcgtgagcgggagtggacgaagcggaagcgagaatgtcggcttgagtaacgcaaacattggtgaacaagtgggatcagctgaggcacatgatgagatctctgagccaatctccaatatcggcaaaacagctttaagcccaaacctgagttttcagggaacttctctgatgcaaagtgatcatttcctcttgcctagttcaatagaatactatgaaggtagagattttgggtctgtgcaagatgaacaaaaggaaagcctaatccgtttgcctcaaccctcgagcattgatgtcaatggggttcttggtcaaatactttttgatgtctgtgtccccaaggatgtcgaaggttgggatatgaagtcatcagattcctcgagccga

SEQ ID NO: 14922 - DNA, 421 bp, Gossypium hirsutum
  Clone ID: LIB3145-017-Q1-K1-B6
cagacatccagatgttctttcccaagttgctcgtggaattgccaactttgcaaaatgtgaatctcgtgcatctactaatggtatacgaagcgggagatcacttcttatcgatgaaggtgcacttccatggattgtgcaaagtgctaacaatgatgctgcacctattaggcgacacattgagctcgcactgtgtcatttggcacagcatgaagcaaatgcaaaggacatgataaatgggggtgccctctgggagctggttcgcataacacgggactgttctcgagaggatattagaagtcttgctcgccgaacactgaattcgagcctgttatttcgatctgaaatgaggcggctaaggatagagttgtgattgaggtgaagttttgggcctttttgtaacctgttctaaaagtggcatgtc

SEQ ID NO: 14923 - DNA, 424 bp, Gossypium hirsutum
  Clone ID: LIB3145-017-Q1-K1-B8
cccacgcgtccgctttcacatcttatggagagactagtgaaagggaaggatcagcccagcagtttgtcttcttcagagaaacttgaattatgggacaggctcaaaattttgagttttacaagaatggtggtgtcaatatgggcagtaacgattcttagcttatatattagagttcaagtcaacattctaggaagacatttatatattgatactgcacgtggtcttggaagctcttatttacttgaggaagctgatctcattgacagggatgaccagcaaaaattcttggcaagtgctgactttcttgccaatcatggcttgccaaaattgatctccagtatgcagacagctgcaacagaagttttgaaggcaaagcagttgagagacttcttcaatactgcaatacttcatgaaactatcatgc

SEQ ID NO: 14924 - DNA, 417 bp, Gossypium hirsutum
  Clone ID: LIB3145-017-Q1-K1-B9
gcgacccacgcagttcgatttcttgttccttaccttcgccgccacatttctcttttgtcacctccgattccaagatggagtcccttttgtctcgcaatatggcatttgtttgttgatttcaatctttatttgagattcaatttttgttttctctttcaatgttagatttcgggacagatcttgtttttattggattgaatctaagataataacgtgatctgaaattatttcgctgcatattttgtttacttatttttcgggatgatactgtttgccttgattaaggtattgtcttctcatcagcttttttattattattcagcataaccttagttgagaccatgactttcttcatctctgacttattaatttgaatcagcgtagctctgactttagagatctgctttctagcagttt

SEQ ID NO: 14925 - DNA, 185 bp, Gossypium hirsutum
  Clone ID: LIB3145-017-Q1-K1-C1
gtctaaaggtttggcccaacaaggggtaaaataaggggccaactaaacctacctttccgggttataaaaatgcctatattaaaactttttttttttaaaaaaaaaaaaaaggggaaaggggtctttatatggaagtttaaaatatatgctgagaggataaattaatttgaaaagcttgctttgtt

SEQ ID NO: 14926 - DNA, 368 bp, Gossypium hirsutum
  Clone ID: LIB3145-017-Q1-K1-C10
gcgggtttgagaaggaggctgctgacatgaacaaaaggtcatttaagtatgcatgggtgcggggcaagcttaaagccgaacgtgaacatggtattaccatcgatattgccctctggaagtttgaaactaccaaatactactgcactgtcattgatgcccctggacaccgtgacttcatcaagaacatgattactggtacctcacaggctgactgtgctgttctcattatcgactcgaccactggtggtttcgaagctggtatctcaaaggatggtcagacacgtgagcatgctttgcttgcgtttacccttggtgtcaaacacatgatttgctgctgcaacaagatggatgcaacaactccaaaatac

SEQ ID NO: 14927 - DNA, 393 bp, Gossypium hirsutum
  Clone ID: LIB3145-017-Q1-K1-C11
cccacgcgtccgagaagacttataatgactgcggatggagcttcattagtacgagctgcagtttccaaagaagcgaaggccttccgattccaactgtgcaaaatcattgctgatatcctataccaacggatggtcaaagctcttgggcaacttgtgccagctagccagtatagttacaagttaaggctggccggtgggcatcagaatacagagctacacccatccgctagattatccacaagttcaaccgtctatgactaccagtcccttttaagcgaccggcgactgaagctaatcttatccaagatcctcaattccgcaagaaaggaaccagcattgatgttacggttttactgggtttcatttgtcacattcatcgctgcttcagccctg

SEQ ID NO: 14928 - DNA, 387 bp, Gossypium hirsutum
  Clone ID: LIB3145-017-Q1-K1-C12
cccacgcgtccgcccacgcgtccgtccctttcatgcacaaacttatttctggagaaccatgttaaccataaggcgtaacaaaaaagtcggctttgatcatcagttcctcccttgaatacccaggacaatctcggaagatatggagactattttctgtccaagaacagcatcggggacatctatcatttgttgcaactcttctatacctaagattagctagattaggaatgaaatcccaggaaattcgccagatagtgattgcaatttttggggatagttttaggctccataattttctgtaaaattccttagtttcagaccccagattagcatcttgtaatagtttataggcgctgcatactgaatatttaccggataattccccct

SEQ ID NO: 14929 - DNA, 427 bp, Gossypium hirsutum
  Clone ID: LIB3145-017-Q1-K1-C2
ctcatttgaagatgatagattcttttatcagttaatatagtttatgtaagcactacatgttcagtatgtttttgcagtttcactgctgttagtcgttgttttgaaatcaaaaagagctacggtgacattgatgttgtagggttgataagttggctttgttttccctagccatcagaattagttctgtttttggttcttcaaacaacttttactcttgcatacggtttttcagtcttgcttccgatggtttgagcaaggtcccgatcaagtggagtgatgttgctcccaagcttataaaggtatgaggcggtgtcatggaacactcctatgagacctgggaacggtccttggctcatgaagggagtgatgtaaggtccgaacttaaaggctgcatgatcgtgaagttgtagtctcggtacatgacaca

SEQ ID NO: 14930 - DNA, 393 bp, Gossypium hirsutum
  Clone ID: LIB3145-017-Q1-K1-C3
gcagctgttccgccattgtcaccccctgcgtggacaatgactaccttcgagcaatgatggagtggctgatttcgatgactctttacaatctcttacttcagacggtttattatatcttttgcttcaaacgcaaggaatcactgacacaagcaaaagagcaggtacgcaatgtcttgtttgttgtgtatagttaatagttctacagatttctgctctgccattgaatgtttgaagtgagaattggtagcaaaatattctgtaattcatgatattgttgttttgactgatactgcagaattacaagtcatttataataatatatataaatagatttcagcttctaaaaaaaaaaaaaataaaaaaaaaaaaaaaaaaaaaaagggggggggatat

SEQ ID NO: 14931 - DNA, 300 bp, Gossypium hirsutum
  Clone ID: LIB3145-017-Q1-K1-C4
ctgtgcagcggaaaattcggcaaagcattgctgaggagtacccagaacttgaccctgggttggaggatttgcttccgaaaaaggcccttttaattgttgtgaattgtcaaaaccatttgattttggattgggttaatagggttcacttttctttaatttttgtgaaggaccattcaatgcccactttaaaactctttcacacagttccaacacttattgaaaaagtttcatgtggctcggggcgagaaaaaattgtgccttgctggtgcaaacataatgtgtcctggtcttacatcccct

SEQ ID NO: 14932 - DNA, 427 bp, Gossypium hirsutum
  Clone ID: LIB3145-017-Q1-K1-C5
cccacgcgtccgggctttattgtgcaagttcaatggttgaaggttctaacgaatgggggagaaactctgatcccaaaatgtcattgagaacagagaaaagagcaagtgttttagcaatggaagtagtggaagacttcatatacttaaattgcagctcatcagctaatagtcttcagatatggttgagaggaacacaacagaaagtggggagaatatcaactggcagcaaaataacaagccttataactgcaaatgacgtcgttctctgcgggacagagtctgggttaatcaaggcatggatccccctttaaaagacctcaaaagcaaagtatataatatacaaacaaaaatggaaacaattgaagatagtttttgaatgcttctaaaataatgcattatgtgtacagttgctatattgtataattat

SEQ ID NO: 14933 - DNA, 406 bp, Gossypium hirsutum
  Clone ID: LIB3145-017-Q1-K1-C6
aagacgatgaaatcgctgctgacctcaaggagcatgtcatcaagcctgtcatccctgggaagtaccttgatgagaagacaatcttccaccttaacccatctggccgctttgtaatcggtggtcctcatggtgatgcaggtctcaccggacgtaagatcattattgacacttatggtggctggggagcccatggtggtggtgctttctccggaaaggacccaaccaaggtggacaggagtggtgcttacattgttaggcaggctgccaagagcattgtagcaaacggacttgcccgcagatgcatcgtacaagtctcctatgctattggtgtgcctgagcccttatctgtctttgtggacagttacggaaccggaaagattcctgacaaggaaatactccaaattgt

SEQ ID NO: 14934 - DNA, 264 bp, Gossypium hirsutum
  Clone ID: LIB3145-017-Q1-K1-C7
cccacgccgtccgccaagctgctgtccgatgtagagacatacttctgaaaacatgagtgcgtggcttcctctaactaccgacatctggggcaccaggcttcatttgtaactcgcttcaatttcagattatctagcgtagggatataattccaggaaattttccagattgtaactttaattttcgaaggaatgtgtaaatcccgtagttttcatgtgaaaaaaaaaaaaaaaaaagaaaaaaaacaaaaaaatactatataataa

SEQ ID NO: 14935 - DNA, 427 bp, Gossypium hirsutum
  Clone ID: LIB3145-017-Q1-K1-C8
cccacgcgtccgcccacgcgtccggcactttaactggagagcacacaaattgttcaatggaagatcttgagcagcattctgaagatagaattgctggattggaaccaatgaattttataacatttgcaacaccgcatcttggttcaaggggacataaacagctcccacttctttgtggtcttccttttcttgagaaaagagcatctgagactgcacactttgttgttggaagatcaggaaagcatctgtttctcactgacaatgatgagggaaaacccccacttctccttagaatggttgatgatggtgatgacttgaaattcatatctgctctacatgcattcaagcgacgtgtggcatatgcaaatgcaaattatgatcatatggttggctggagaacatcatcaatccggcgtcaaaatgaact

SEQ ID NO: 14936 - DNA, 376 bp, Gossypium hirsutum
  Clone ID: LIB3145-017-Q1-K1-C9
cgcgcacgcgtacgctcttaaaacctttagtgttgacacacatatacggcaagacctcatgctccaccgatgggggcggtttggccatgaacaaccctacccccgcggcggtcacgcatgttctccataacacgagagatttcccgtcggttaacggcgtggaggacctgctggttatgtctataggcaacggtccctcatgcggaaggtcacaggtccataacaacggtgaatgttcaacttcttccgtcgtcgacattgcgcttgacagtgtctccgatacggtggaccagatgttggcgaactctttctgttggaaccgcacagactacgttagaattcaggcaaacggagtggacactgaaaatacggtggg

SEQ ID NO: 14937 - DNA, 320 bp, Gossypium hirsutum
  Clone ID: LIB3145-017-Q1-K1-D10
agttttacacatgcatggatacatgcacgcctacactgatgccgcaggaaataccgcacctaaatatctattgcaggaaacgacaggccacggaactcatcaatcgccacaaaacggggactatcattagaagggagattagatatttgatttgacaatgaagcatccttagtcgtagatgtatttaagttacagctttttgcaagagtgaatagaaacaactcttcttggcccttgcacccggagtgctatatgatatacctagacaggttggcctgatactctttcgttaggtgatgctgattagattatgcaccata

SEQ ID NO: 14938 - DNA, 392 bp, Gossypium hirsutum
  Clone ID: LIB3145-017-Q1-K1-D12
cccacgcgtccgcccacgcgtccgctaagcgccaccgtaaggtcctccgcgacaacatggagggcatcacaaagccggcaattcgacgccttgcccgtaggggaggagtgaagcgtatcagcggcttaatctacgaggaaacccgtggagttctcaagatcttcttggagaacgtcattcgcgatgcggtaacatacaccgaacacgccaggagaaagacggtgactgccatggatgtggtttatgcactgaagaggcagggtaggactttgtatggatttggcggttagatgatttagggtctagattttaaaatagaggaaaaattgtaggactcagttaaagttacaaggtgggttttgttgttcgctgttataatttctaattcgcat

SEQ ID NO: 14939 - DNA, 431 bp, Gossypium hirsutum
  Clone ID: LIB3145-017-Q1-K1-D2
cccacgcgtccgtaaacacttaaaaacgaaggcttttataaccaaaatacaaacagtttttagctatttttgctcaacttgcaggtcatgaagatgtggatgcgaacgtggagcagggcgtgcgtgcttgacgggagtgatcgtggctaaaggctatggtgctaatgaagcttttaaggatttaggatttcagttttctgattgtttaggttagagcatgagtattgggcttatgtaaacgggccaaaattatttgggttattttatgcaattgggctggttaaaaaaattaggattgctgttttttgttttattttttgtatatgtatgagctcgggttaaaaattgggtctacatatatcattttgctattcactactttaaagatttttattcatgtttctttactaatttcaataaataaggcaatg

SEQ ID NO: 14940 - DNA, 343 bp, Gossypium hirsutum
  Clone ID: LIB3145-017-Q1-K1-D3
gaaatttggattcgtcttggttacgatggcagtggtcctagcaaccaccctgcctccgatggcaaccgccgctcgcaaagaggcagtggctctcctcgtcgactcaagctcaaccaccgctttggccaacattttcgacgttaaaggaaaacctgatgcgaattgcatccctaagtatgagttttgcttgtttgcgaaaaaggaatgttgtagtaattgcacatgcttcggactatgcatccccgtataatgtaattgtttatattgtataagaaaaaatgatgaagggggtgtctcattaatcaaaaaaaaaaaaaacaccattaaacaaaacaataaacac

SEQ ID NO: 14941 - DNA, 421 bp, Gossypium hirsutum
  Clone ID: LIB3145-017-Q1-K1-D4
ttttgttttcttccgtcaacctgatagatttctagaatcatatgacaaaaagggatacgtttctggggtgcaccttgagaagacaactctaaaaggtattggctctggaaaacagattgccataggtactggacaatttgaaaatctttcttgtgggattgtgctaaagagtattggctataaatcagtgccagtcgatgatttgccatttgataatcagaaaggtgtggttccaaatgttaaaggtcgaattctaagtgacaattctggagatcctacatcaattgagaatggattgtatgtctgcggatggttgaagagaggaccaactggcattatcgctacgaatctttactgtgctgaggaaactgtcgcaagtttatcagaagatcttgaactaggtgtcttagcatcaacaacc

SEQ ID NO: 14942 - DNA, 423 bp, Gossypium hirsutum
  Clone ID: LIB3145-017-Q1-K1-D5
ccttcgccgtgagccacttaagcttgtttatggtggccaatctcagagaacgtttgggtcataaaggatgctattgaagctgttctgttgatgattgaaaacccgggcagggccaatggtcacattttcaatgtgggtaacccaaacaatgaagttacagttaggcaacttgctgaaatgatgactaaggtctataccaaggttagtggagaatctgcactggagactccaacaattgacgtcagctccaaggaattttatggcgagggatacgatgatagtgacaagagaattccagacatgaccataataaataaacaacttggttggaaccccaagacatcgctttgggacttgcttgaatctacactgacctaccaacacaggacttatgctgaagctattaaaaagtcgatggcaaaa

SEQ ID NO: 14943 - DNA, 428 bp, Gossypium hirsutum
  Clone ID: LIB3145-017-Q1-K1-D6
cccacgcgtccgtttttcctcatcaccatcgtctgctattcttcacaaaaaagaaaagggaaattacagtgaaaatggcaacccttaaagttccagctcatgtacctgccccttctgaggatgctgagcaacttcgtaaagcttttgaaggatggggtacaaatgagcaattgattatcgacattttggctcacaggaatgcagctcagcgcaatttgattcgtaaaacttatcgtgaagcttatggggaagatctccttaagtctttggatgaggaactttcaagtgactttgagcgagctgtggtgctgtttactttggaccctgcagagcgtgatgcatttctggctcatgaagctacaaagaggttcacatcaagccattgggttctcatggaaattgcttgcactaggtcttcacatgaactg

SEQ ID NO: 14944 - DNA, 420 bp, Gossypium hirsutum
  Clone ID: LIB3145-017-Q1-K1-D7
gtcgatgtcggattactacgcactcgctccccgttagccgctgtcggtggagtcgttgccggctcttcatttttgcgatcttcctccagaaatggctctccttttgcttgcttaagcctatccacttctcctgggattaaggaggctgtggcaactgacaaagctccagcagcattgggaccatattctcaggccatcaaggccaataatcttctctttgtctccggtgttctcggtcttattccagagactggaaagttcatctcagacagtgtagaggatcaaaccgagcaggtactgaaaaatatgggagaaatactgaaagctagtggtgctgactattcctctgtggttaagacgacaattatgctagctgacttgaaagacttcaagaaagtaaatgagatctatgctaaatac

SEQ ID NO: 14945 - DNA, 423 bp, Gossypium hirsutum
  Clone ID: LIB3145-017-Q1-K1-D8
tgtgatctgatgacacagataaagaagaaaaagaagaagccataagaaggggtctcggggttttcgatttcatcctagatggatgatgttatgagtcgggatttaataagtgacttgcctcaaagcattatagaaagtatcctcacacgtttaccaatacgggatgctgtgaggactagcattttatcaagtaaatggaggtataaatgggcaacacttactcaacttgtatttgatgaaaagtgtgtgattttatcgaatgatcgatgtaaagttgaggatggtcttgtaaatttcatcactcggactctttttcttcaccaaggcccgattcataagttccagctaacgactacgcacttgcagtgctgccccgacattgatcaatggttacttttcctttcaaggaatgacatcaaagag

SEQ ID NO: 14946 - DNA, 335 bp, Gossypium hirsutum
  Clone ID: LIB3145-017-Q1-K1-D9
ccctctttttctttttctttttctttttttctttttgttttttaaaaaaaaaaattttccattaaaatttaaacttcaaaactaaattttaaaattaatgaatttaaatttaatccctaaacctttattcaatttttaatttaatcccaaaaaaaaaaaaaacgggcccccctttttaaagatcccaattttcttcccccttcattccaacttatatttttttttttagttcccctaaattcaatttccttgcccactttttacaacctctttactttaaaaacccttttttttcccaacttaattccctttgagaacatcccccttttcccaac

SEQ ID NO: 14947 - DNA, 415 bp, Gossypium hirsutum
  unsure (1)..(415): unsure at all n locations; Clone ID: LIB3145-017-Q1-K1-E1
gaaaacagtagtgtgggctctaatgattctctgacccacattttaagccaccctggtttaaaacctgtgaaacgtagcaattactctgtctctgtggggcagagtgtgtttcgtcctggtaaggttggccatgcacttaatgatgatgcattagcacaagcattgatggatggcaggtatcagactgaggtattacagaattatgatgagtgggctattgatttaagaaagcttaatatgggtacagcttttgctcaaggtgcttttgggaagttatacagaggtacatataatggtgaggatgttgcgattaagatattggaaaggccagaanatagccctgagaaggcacaagttatggaacagcagtttcagcaggaacttatgatgcttgcaacactaaagcatnctaata

SEQ ID NO: 14948 - DNA, 365 bp, Gossypium hirsutum
  Clone ID: LIB3145-017-Q1-K1-E10
cgggcactgacccacgcatccaatcgaattttccactgtttctacccaaactttcaaacacatatatactatattatagcgcgaactttcaacaacccacacaacctcactaaaaatctaccgacagcagcaacaaaaataatacaacgcctcacctaccaaaaagcgtcacaactacgctacaaaatccaatcagacccgggtcgttaagaccccacatggtaagcttgtgtaccaatacaccaataatatttcttatcggtcccaattaccccaacaccgtgaagaagattcataaaatcccccacttgagacactccgagtacaacaagttcaatttgtctaggaaccacacgacttttaac

SEQ ID NO: 14949 - DNA, 395 bp, Gossypium hirsutum
  Clone ID: LIB3145-017-Q1-K1-E12
cgtacgtaagcttggatcctctatagtcgacccacgctttcgcgcgcatatgtcctctcttcttacgcgtgctttccccaacggacggagcctcactaggggtctaccggcggcggcaacgagatggcgcaacgcctgacctaccgaaagcgtcacagctacgctacaaaatccaatcagacccgggtcgtgaagaccccatgtgggaagcttgtgtaccaatacaccaagaagagggcgagcggtcccaattgccccgtcaccgggtagaagatccaggggatcccccacttgagacctgccgagtacaagaggtccaggttgtctaggaaccacaggactgttaaccgttcttatggtggagtactctctggaattgctgttatggagagaat

SEQ ID NO: 14950 - DNA, 305 bp, Gossypium hirsutum
  Clone ID: LIB3145-017-Q1-K1-E2
gaacccaccaaataattctcctttccaaacctgaaaattttcatgctcaatctctacggggggaatttgaagaattttccgagcaatgtcctcttgaaaggtattattaaccagatccaatgtacattctctattagaagaatcaaaaaaaaaaaaaaaaaaaaaaaaaaaaaaaaaaaaaaaaaaaaaaaaaaaaaaaaaaaaataaaaaaaaaaaaaaaagaaaaaagaaaacaaaaaatgggtacaaatattgctcaaagtgctttttagaaggtatacaaatgtacatataatgttgaaaa

SEQ ID NO: 14951 - DNA, 382 bp, Gossypium hirsutum
  Clone ID: LIB3145-017-Q1-K1-E3
gctcttctcccacaggaataagcaggtatattttgggtcaactctgtttgctttacaacagctatctggtataaatgctgtgttttatttctcttcatctgtatttaaaagtgcgggagtgccttcagatgttgcgaatgcgttcattggagttgctaatttatcaggatctatcatcgcgatgcttttaatggataaacttggaaggaaaatgctccttttgtggagcttctttggcatggctatatcaatgctcgtccaagttgctgctgcaaatacttttgtgtcaggctctgcatctttatatctatcagttggtggcatgttgatgtttgtcttaacatttgcattaggagctggtcctgttccaagtctcttatta

SEQ ID NO: 14952 - DNA, 415 bp, Gossypium hirsutum
  unsure (1)..(415): unsure at all n locations; Clone ID: LIB3145-017-Q1-K1-E4
ctgcccccttgtcgttggcattggcacacgctggtgttgaagacgggaaggtagtatttgttccatgggtggaaacagatttcagaaccggtgacggtccatggtggtcttaaatatctccacaaccattggctcaggctgtttgttgggttatatttgagatttattcagccagtatgttttgtagcgttgctaaacatcctgtgccgtacagttatcctctgtatactgcagtttgtaggttgcaagaccgtatttccaaattagaaatggtactagtattcttgtcatattcatggaggataattatttaatacattagcagtggtcttaaattgtatttaaaaggttaaaaagaaaaaaatatgtgataaaatctcaattntgtggaatgaaaacttttccttnnnnaaaa

SEQ ID NO: 14953 - DNA, 393 bp, Gossypium hirsutum
  Clone ID: LIB3145-017-Q1-K1-E5
tgcttttgtttcttatatactactttcattgatagaaggtgttatcttgctagtgagggctatctatcatacaattctgttctctccgagtataataatggcaccatttgccgactcttgtggcctcaaattcaggaaaatatggcttgaagtcgtgcatcgcacactagaaacggcaggtccatgcattcataaaatggggtcaatgggcagcaactcgaccagatctcttccctaaagatttatgcaccaagctttcagagcttcacaacacggctcctgaacacagctttgctttcacaaagaaaactattgaaagagcatttggccgtaagctttctgaaatatttgacagttacgaagaggaaccggtggcttattgaagtatagctc

SEQ ID NO: 14954 - DNA, 332 bp, Gossypium hirsutum
  Clone ID: LIB3145-017-Q1-K1-E6
tcgcaaatggtgacctcagtgctacctagagtagaaagcttgtcaagcattgggattcattgaatccctaaagaatatatcaagccttaaaaaaaactttccaacatcagtaaccttttttaataagaaaaaaaagaggaagggcctcaggttccgaccatcgatttgacagaaatcgaatcctaggacaaacaggtccgggaaagatgtcagcaggagctgaaaaaggctgccatgtaatggggtgtgatgcaccttgttaaccatggcatcttccaggagctcatggatcgtgttacgaaagttgggcacaaattctttgaactccctgt

SEQ ID NO: 14955 - DNA, 388 bp, Gossypium hirsutum
  Clone ID: LIB3145-017-Q1-K1-E7
cccacacgtccggatcttttctgcttaaccatttttgtttcgtcctcactcaatttcggcgatggggctgaaaatatgagctacgtcacattatgccatgtttactgtgacacttgccgagttgagtttgagaccaaactcagcgaacccatcgctggagcagtaggtgaaactggaatgcaggaatcgtacagacaatcaccttaccttccacagccaagaaatcgtgactgacgaacgttgagactatcacattgtagtggaaggcgattatgaggaatcagactgcgacttcacctttgtgaggagtcccaacccggattgcaaagatcccttctaaatgtggaggatatccagggtggttctcaccacacttgacggcgttagc

SEQ ID NO: 14956 - DNA, 379 bp, Gossypium hirsutum
  Clone ID: LIB3145-017-Q1-K1-E8
atcgccctttatgatgaggagtgtaagaataatttcttgctcaggctgaaactaaagatgctcgctaccattcaattacgccatctgctgcggcattttcaagatttaccctgacatgaacttttctgaccaaaccacaaccgctacacttgttcttgatgctgcaccccctaaagttcactttgatggagctcatatttaaactttggctaaaaatctctgctaatgtggatataactggacttgcaacccttgctactttaaatgagaaaaaaaagcttatcttattatgtaagctgatctaaataatatattatatcttttgggttttacctattaaaataatccctctattgttcattaggtgttttgcttcttt

SEQ ID NO: 14957 - DNA, 398 bp, Gossypium hirsutum
  unsure (1)..(398): unsure at all n locations; Clone ID: LIB3145-017-Q1-K1-F1
cccacgcgtncgcccacgcgtncgaatccattcaactcgttgctgaacatgctgctgcaaagaacaacgttttcatgatgaatctttctgctccattcatctgtgagttctttagggatgtgcaggagaaagctctaccgtacatggattatgtcttcggtaatgagactgaggcccgaacattttcaaaggttcatggttgggagaccgataatgttgaggaggttgctctaaagatttctcaatggcccaaggcttcgggaacacataagagaattactgttatcactcagggagctgaccctgttgtggtcgctgaggatggaaaagtgaaaaaattcccggttatcttgttaccgaaagagaagttggttgataccaatggagcangggatgca

SEQ ID NO: 14958 - DNA, 391 bp, Gossypium hirsutum
  Clone ID: LIB3145-017-Q1-K1-F10
catagatagtatgtttcaaagctctgccactccccgtctctcatctgcttctagcttggccctttaatgtctgccaacaaagcctgacggtgacgttcttctccttctcccctttttctaaaccaaaataaaacccccactaaactctttcaaattcagcacccaaataaacaacaatggctacttcagtatcttcttcaaagctttcccttttcttcttgtttttgttcttgtttacttccactttagctcgtaattccccttcaccaacaacaaaaatcctcgatgtcttagcttctttgaaacaaactcaacatattctttcctttgatcctcaaatttctaatggcttttccaaaagccagccccttttcttcaactcttcttcttc

SEQ ID NO: 14959 - DNA, 380 bp, Gossypium hirsutum
  Clone ID: LIB3145-017-Q1-K1-F12
cggactctttttcggacacttgggccgtctcgtgggttttgttccccttatgaaactggagggctttctgtggtgctgtttactttggaccctgcagagcgtgatgcatttctggctcatgaagctacaaagaggttcacatcaagccattgggttctcatggaaattgcttgcactaggtcttcacatgaactgttcaatgtgaggaaggcgtatcacgatctttacaagaaatcccttgaagaagatgttgcgcaccataccaagggagactaccgcaagcttttggtcccacttgttagtgcattccgataccagtgagaggaggtgaacatgacactggcaaggtcggaggcaaagatactttgtgagaagatatc

SEQ ID NO: 14960 - DNA, 368 bp, Gossypium hirsutum
  Clone ID: LIB3145-017-Q1-K1-F2
accacgcgtgcgcccagcgtccgcccacccctcctaatccattcaactctttgctgaacatactgctgcaaagaacggcgtttttatgatgaatctttctactccattcatctgtgagttctttacggatgtgcacgagaaagctctaccgttcatggattatgtcttcagtaatgagactgatgcccgaacattttcaaaggttcatggttgggagaccgataatgttgaggaggttgctctaaagatttttcaatggcccaaggcttccgtaacacataatagaattactgttatcactcaaggagctgaccctgttgtggtcgctgatgattgaaaagtgaaaaaaatttccgtttatcttttta

SEQ ID NO: 14961 - DNA, 400 bp, Gossypium hirsutum
  Clone ID: LIB3145-017-Q1-K1-F3
atcaagaaagaaaacgactgttcatggagctatggaagtgacaacaacagttgtgatgtgaacttagatgtctcaagaacaccactgatgagcagtagtaaacatctcttcccaccatcagtgagaccaacaagcatgactcaactccttcaaggttcatcaagaccagacctacaatgcgtaaagcttgatcaagtggttcaagaagaaagcttctgcaatatgttcaatggagttgatgaacagcaagggttttggccatggtctgaacagcaaagtttccattgaaaagtattaaaaaacaccaactactgttgtttatgcactttcatcagctttggctaatatgcaagttaaaaaagaagaacaactaggaaattctttttttccctgtcaactt

SEQ ID NO: 14962 - DNA, 383 bp, Gossypium hirsutum
  Clone ID: LIB3145-017-Q1-K1-F4
cgcctctgcatcaggctagggttcaacgaataaccgagaaggcggcatcaagtttccggttatccggtcgccatgagagccaagtggaagaagaagcgcatgagaagactgaagcggaagcgccgaaagatgagacagagatccaagtagacagaaccaccagcccctctgttatacgaggtttctcaatgtcttagctaatatcggtgtacttttagggtccacttagttatctgccatttttatttcagttttaagttttttttttctcttgggtttctattgtctttcaagttggtgctaacccggcagtgggatgatgtatcatcgttgagaacagtgaattgcaaaaaaaaaaaaagcagattttaagattggagttt

SEQ ID NO: 14963 - DNA, 427 bp, Gossypium hirsutum
  Clone ID: LIB3145-017-Q1-K1-F6
acgcgtccgcccacgcgtcctagtgtacagcccgtcactcctactgaagtgaccatggaagaaaaaggctccaatgagaatatattagaaaaagatgctcacccgtcgccattgtcagataaggagcactcggagaaggcaaataggtgtgaatttgtacaagggctattattatccaccatcattgatggtggcttataatcaagacagaaaagagtagacggttggtgacttcaaaatttctagcgcacatgccgttgcccgtcagccatgttcttgcattgaacattctgatacttcaatatagaagctaggatagattcaagaatgtaatgtaatttatttaactggttgatgcttatcaattaggccacaacagagttcagactcttgtatttttcccgtttaaagcatcggttcataaatg

SEQ ID NO: 14964 - DNA, 377 bp, Gossypium hirsutum
  unsure (1)..(377): unsure at all n locations; Clone ID: LIB3145-017-Q1-K1-F7
ggaaaacccggccggacccacgcgtccgcccacgcgtccgagnagaagaaaaaggngttnngggaaggatatgngagggaggaagcgagggggacaagagccccgggggcngnatataggntgtatgctgggttttatcaactcttaccacctttggataagtaccgtttacatactagaaaagaggaggaagagaagaatgccgtgcctttcgtttcagttgttaagggtgttctatttcaacagcttgttcaagcaactgttgctaaattgctctttctgttgacatcaacggcagatgcatctgggaccacaatccagccttcagttcctgttcaacttgcgcaatatattgttgcaatgcttgtcatggattg

SEQ ID NO: 14965 - DNA, 321 bp, Gossypium hirsutum
  Clone ID: LIB3145-017-Q1-K1-F8
ctgtcaaccgcgcctaataaccgctcggatttttctcagacgtgaaaaaggtggggcgttctttcaccaagctattcagccggctatttgccaaaaaggagatgcgtatactgatggttgggcttgatgctgctggtaaaaccaccattctttacaagctgaagttgggagagattgtcactaccattcccaccatcggtttcaatgttgagaccgttgaatacaagaacaatagcttcactgtttgggatgttggtggcagaacaagatccgaccatggtggagacactatttccaaaacatgcaaggacttatttttgt

SEQ ID NO: 14966 - DNA, 389 bp, Gossypium hirsutum
  Clone ID: LIB3145-017-Q1-K1-G10
atcagagatgggttgaaagcagatcccaagaagtatagaaggatgaaggagagattggggggtgtttctgaagaaactacaactggagttaagaggctttatcagatgcaggccaacggtaccttgttgttccctgccattaatgtcaatgactctgttactaagagcaagttcgataacttgtatggatgccgtcactcacttcccgatggtttgatgagagctactgatgtgatgattgccggcaaggtcgccgttgtctgtggttatggtgatgttggaaagggttgtgctgctgccttgaagcaagccggtgctcgtgtcattgttactgagattgatcccatctgtgcccttcaggctcttatggaaggacttcaggttttgac

SEQ ID NO: 14967 - DNA, 393 bp, Gossypium hirsutum
  Clone ID: LIB3145-017-Q1-K1-G11
cgaggaacggaagctaatattggatcgaagggcgtagctaagattagtaacagtggtgggggtggcattggaagctcaggtcaaacaatatctaattccgatatgtcaaagcaagggaaacaagcgtccatgcttcacggtatacctgattttgctgaagtgtatagcttcattgggagtgtctttgatccagacactgatgggcacgtacaaaaactcaaagagatggatcccataaattttgaaactgttttgttactgatgagaaacctcactgttaacttgtgtagtccagattttgagccaattaggaaggtcctatcttcatatgatgttggcacaaacacggtgggagttaccaaaggaattattccccaaaaccaaatgaatgat

SEQ ID NO: 14968 - DNA, 249 bp, Gossypium hirsutum
  unsure (1)..(249): unsure at all n locations; Clone ID: LIB3145-017-Q1-K1-G3
cccacccctccggatttaacactaagaaatggagtacaataagaagcttgctttggtggtggcggtgatggttgtggcagccaccacaacggcaaccgcggctcgcaacgagctgacggaaactctntccatcaaagcaagtttgaactcgagcttgactaacatcatcaagaaaacccttggcaatattttcgaacgtaatgccaaacctgtagtggaatgcacccaaaagaacaaactgctttaaaa

SEQ ID NO: 14969 - DNA, 358 bp, Gossypium hirsutum
  unsure (1)..(358): unsure at all n locations; Clone ID: LIB3145-017-Q1-K1-G5
ctcccgtaaagctacgtacgcgatttcccgcgattacgccgcttccgtacacgttcaaagaatgtgcaagggtggtatttgctggcacggcgtcnccgtccgttcccctgcttctcaagtccgcttcaggatccctcctcaaattccataccgttctttgtaaatattcaattcaaattttgccacaaaaaagaaaaaaaaaaaagatttccagttttgaatctctgtaagataaaaaaggtcatttgtatttgtttttgtcttgaattttgattgagaggaaataatttgtttttaaaaaaaaaaaannnnnaaaaaaaaaaataaataaaaaatttttaatatttaaatattaata

SEQ ID NO: 14970 - DNA, 313 bp, Gossypium hirsutum
  Clone ID: LIB3145-017-Q1-K1-G7
ggagttgtttatccttgggagactttcaaaggtattcgagatcttgggttcggtccatgttcctcatttgtcataacttttgtaattaatgcagcatttagttatcgcactctcccggggtgggtgccaaatccgttacttcccatatacatagagagaatacacagagataagcatgggagtgattcagcaacatatgataccgaaggaaggttcatgccagtgaacctgtagaacatgttcaccaagtatgcactcacaaagccccgacaattatcactcaaggattgtggcaatgactgaggaaaatcgg

SEQ ID NO: 14971 - DNA, 269 bp, Gossypium hirsutum
  Clone ID: LIB3145-017-Q1-K1-G9
catcgcagccatcttattacctctttcccgttgaggacaaaataccaaaccacatgtccaagattcgactatgtttatacctatcctcttgcaaagctctacctcttgtgtgtcactagagccatgaacaacctccattctggcattctcaagaggctatctatgaacaaaaccaatctcccaccaatcttcattactcactcttgtcaatttcattttttgacaggatgaaaacatatccttaattgttttctcaatctctgatcaca

SEQ ID NO: 14972 - DNA, 93 bp, Gossypium hirsutum
  Clone ID: LIB3145-017-Q1-K1-H1
accgcccggattcccggtcgaccacgcttcggttcgagcgatctaaacccttaattaaaatggatttttccggtttaaaaccaccctgaaggt

SEQ ID NO: 14973 - DNA, 391 bp, Gossypium hirsutum
  Clone ID: LIB3145-017-Q1-K1-H11
gatggtggtgatttagctgaaacagatgctttattaaactttgatggtgatgctatttgtaaatcttgctatgagagtgtgaattcacttttgctaaattctcctaatgatgttcatgaagatgatacatcaaagactaaagaacatgagacattagtttcagatatgtgtcctggtactttagaagctgcaacttattcttcaaagttggatgaagttccagaccaacagtcacattctgggcacactgaacagttgtattctgggcatccggaaatcaatgtgccttcatctgcatcggtgtcaaatcctcattctcccgaacttaatgatgaaggttgctgcatgttgaacagtgaggatcctgaaatcccatgcaacgatgatgttc

SEQ ID NO: 14974 - DNA, 273 bp, Gossypium hirsutum
  Clone ID: LIB3145-017-Q1-K1-H12
cgcagctgctcctgcttccgatccgagcttttctcgcccgccggttcttctcgagcaattcttataaagcatcatcatcaccacttgtgatgggtggaagccagtacgatgatgaatgggtgttgcccagtgccgatatcactcttgttcttgttgggaaacttggctatggaatgagtgcaacttgaaatagcattctagcaccgtgagcatcttgataaaaatattcacatcctgttgttactaatactccttagcttggatgcactaccc

SEQ ID NO: 14975 - DNA, 236 bp, Gossypium hirsutum
  unsure (1)..(236): unsure at all n locations; Clone ID: LIB3145-017-Q1-K1-H2
cccacgcgtncgcccacctgcccttttntttgtaataatcgaactcccctctcgtcctgtgtcccgatttgtcttcttcattgccccaccatggcatgtgttagctttgctaaactcaacgcaccgtcattctcttggatcggtgggcagcagtctcttcctcaacgctccggatcatacgctcggctcgccactcgcagagtctcactcccgatccgtgctggcgcttacaccga

SEQ ID NO: 14976 - DNA, 414 bp, Gossypium hirsutum
  Clone ID: LIB3145-017-Q1-K1-H3
cccacgcctgcgatcgccacttacaactattggaagactcggctcagccataacttatgctataagggtatgcagtgatgcatctcaaagctataatgacaggtgccaccaagagtgtatatattcacttcttgatggatcagtacgtaaatgtccattaccagatatgactggcacaagacatacacaaagcacaaatgctgtgaagggagggctggctgtaacaataaccttcaacgcttgtccatataagtgagaatcaggaccagccaagcactatctcaggtgtagaacctccattttactacgatgataacacacatactgagtcctctgacagcaacgaaccagtgcaccgaggaccatgggtgccacctaaatataactttattgacaagtcacctcctataggat

SEQ ID NO: 14977 - DNA, 166 bp, Gossypium hirsutum
  Clone ID: LIB3145-017-Q1-K1-H4
acccacgcgtgcgtcaaaccctaccctctatttgggagccctttgcaatggctccgactatactcctatggcctttgctggggtacactttatagccgttcactctccaaaactcccaggcctacccctggccttcctttcacctttccccacgcaacatcctttt

SEQ ID NO: 14978 - DNA, 422 bp, Gossypium hirsutum
  unsure (1)..(422): unsure at all n locations; Clone ID: LIB3145-017-Q1-K1-H5
ggtggttctcgggtcactgttgtgagaagcgaagaaggtggtaacaagattgccactgtggttctacgaggaagtactgatagtatattggatgatcttgaaagagctgttgatgatggagtgaacacatataaggcaatgtgcagggacagtcgaatggtacctggagctgcagctactgaaattgagttggctaggagattgaaagagttctccttcaaggaaacaggattggatcagtatgccattgccaagtttgctgaaagttttgaaatggtaccaagaaccctagcagagaatgctggtctcaatccaatggatatcatatctaagctgtatgaaaaacatgcatccggaaataccaaagtgggtattgacttgnggggaggtgactccgaggatggtgtttgcaaagatgtgtc

SEQ ID NO: 14979 - DNA, 151 bp, Gossypium hirsutum
  unsure (1)..(151): unsure at all n locations; Clone ID: LIB3145-017-Q1-K1-H6
tcaaaccctancctctatctgggagccctttccaatggcttcncgtcgactgctntcggctttcctccgctccacttctcgcccatctctctccaaatctcccagaacctacccctcgcctcccttcacctttccccacgcgcccgccttt

SEQ ID NO: 14980 - DNA, 281 bp, Gossypium hirsutum
  Clone ID: LIB3145-017-Q1-K1-H8
cgcaaacaggttgttatcgttttgtttagaaggacatagcagtctccattgtcgcggaaagacagaatgaaaagaaaaagggtcaacctaacttcaccacggcaacaattaaggcacgccaacatccaaataatcccaatcatcttccagtcctataacattgacaatgtctagcccgatgattcttaagaacccaaactccctccaacggcggcaaccgctgctgcacagccgttccaacagcgtcgatagctgcatcacctctcgcgggaacaccaatc

SEQ ID NO: 14981 - DNA, 405 bp, Gossypium hirsutum
  unsure (1)..(405): unsure at all n locations; Clone ID: LIB3145-017-Q1-K1-H9
gaanacccggcgcgacccacgcgctgcaagatanaaactctgaattttctccaccttttccaggtacagaaaatacacatgaggagtcagttcaacctatgcgacgcggcggatgccaatgttctgccctgctcatatgatgcttctctgtaatgcccgcgcgaccagaaaatccatgctgccaataagttagctaacaaccaccagcgattccccctctcttcttcttcttcacacatgcctaaatgtgacatttgccaggaagcatctagctttttcttattctttgcaagatcgagctttactctctccaaagtgcaatgctgctatacatacatctaatccttacctctttaatcatcatacatttcttcttactgcaataaaagtttgtcttgaaacaac

SEQ ID NO: 14982 - DNA, 315 bp, Gossypium hirsutum
  Clone ID: LIB3145-018-Q1-K1-A10
gaactttgaaggcctaagaggaggtccaagctctctgctgcttctaagccttctgtttcagcttagataaggtttgatttaccaaaaggggtcttggtgagtacccacttttttgcagtgccatatgctgtcataatttatcgcttagtatccaatgtggtaatgttatttttccatctactatgttaggtcatctttttgacaattatcaataactaaattgcttcatctattggcaaatcaacaaaataaataaattattccaatttcaataaaatttcatcctgtttcattgaattaacagaaaataacatt

SEQ ID NO: 14983 - DNA, 293 bp, Gossypium hirsutum
  Clone ID: LIB3145-018-Q1-K1-A12
gttaaaattcctgaaccgggaccccgggggtggccgcaaccttagggaagccggagacctcggcgggggcctcgggaagagttatcttttctgtttaacgggctgcccaccctggaaacaggtcataccgaggtggggtccacccgccggaagagcaccgcacgtcgcgtggtgttcggtgcgcccccggcggcccttgaaaatacggaggaccgagtgccgtccgcgcccggtcgtactcataaccgcatcaggtgtccaaggtgaacagactctggtcaatggaacaatgt

SEQ ID NO: 14984 - DNA, 410 bp, Gossypium hirsutum
  unsure (1)..(410): unsure at all n locations; Clone ID: LIB3145-018-Q1-K1-A2
cccacgcgtccgcccacgcgtccgcccacgcgtccgggctatgcaattcaatcccatcgcttctcaaactaagaaactcccttcatatgctcttccacccatggcaagtcttagatctcccaaggtttctatggtctccactcttccacctcgctccaaaggggttgaagatctgaaacggcctttcatggctccaaagctggtacaccaggcttcccacaccatgccacctgagaagattgaaatctttaaatctttggatgattgggctagggataacattctgattcatcttaaacaagttgataaatgttggcaacccaaggattttcttcccgatccttcgtccgatggatntgaagatcaagttagagaacttagagaacgggcaaaggagattccggatgagt

SEQ ID NO: 14985 - DNA, 435 bp, Gossypium hirsutum
  Clone ID: LIB3145-018-Q1-K1-A3
cccacgcgtccggaaaaagataaacctatcccgtaaatccaagtattacatgaagaaactcataccagatcgaagtggaataacagctgataaagcatttaaataaagcttacagccgataaaccggatctacggagaagacaatgctacctcattggtccgatttggcttagagaaaccatttacttccaagttaaatgtttagctgggattggatttgattttctatgcatctggtttttgttatgagctgtgattttattattaccacaaaaatagtagtagttgacataattttttaggcgaaatgtaattatgtagcagtgcttcaaaatatggtaaataaattttctttaggagtgctctaatttggtattattattattgaattattaagtaattttcataagctaatgagatcttggtttaatggct

SEQ ID NO: 14986 - DNA, 426 bp, Gossypium hirsutum
  Clone ID: LIB3145-018-Q1-K1-A4
gggtttctctcttcaggtaaattcttggttgtttcgttcgttttaagaacagagattcgaagatgagtaagcttcagagtgatgcccttagagaagctatttcaaccattgtggctaattccaaggagaaaagtcgcaagttcaccgagaccattgaactccagattgggctgaaaaactatgatccccaaaaagacaagcgtttcagtggttccgtgaagctgccacacattcctcgtcccaagatgaagatttgcatgcttggagatgctcaacatgttgaagaggctgagaagattggtttggattatatggatgttgaagcattgaagaagctaaacaagaacaagaagttggtcaagaagcttgctaagaaatatcatgcatttttggcctctgaatctgtcatcaagcaaatcccccgtc

SEQ ID NO: 14987 - DNA, 186 bp, Gossypium hirsutum
  Clone ID: LIB3145-018-Q1-K1-A6
tcggccactctttcttccacacaatcgttcactctttcggtcttttcaataacatcccatcgggtgggatactaatatactgcgttcccctctcttaacacccattgcaccatttagatctaccccagggtttatagtcttcactcttccaactccatccaaatgggtatgggacctaaaaactat

SEQ ID NO: 14988 - DNA, 342 bp, Gossypium hirsutum
  Clone ID: LIB3145-018-Q1-K1-A7
cggacacgttggcggactcgttttctgacaccttttcttgctcgatacttttggtggggccagctcttttctagtctctggaatgactgcacgaacagctgttattttcttctgttttgctgtgattaaaactgtggatgatcattgtgggctattgttgcccggtgatatttttcatatatttttctggaataactctgcttatcatgacatccatcatcaactccaaggcacaaagtattactactctcagccgttcttttcccactgggataagctactttgaactcatattgcttatgatctttttaagcgacccgaggggggttttttagtaaggct

SEQ ID NO: 14989 - DNA, 429 bp, Gossypium hirsutum
  Clone ID: LIB3145-018-Q1-K1-A8
gtcaaaaagttatcttgaatgtgtatgacttgagccaaggacttgctcggcagctttcaatgaccttattagggaagcctattgagggaatatggcacactggagttgtggtttatggcaatgaatactattttggcggaggaatccaacattctcctgctgggacgacaccatatgggacaccaattagagtgatcgatttaggagtcactcatgtgcctaaggatgtgtttgagatgtatttgcaggagattagtccccgctacactgctgagacctatagtttgctcacccacaattgcaacaacttcagtaatgaggttgcgcaatttttagttggttccaacattccggactatattttgcagctacctaatgaagttatgagcagtccgatgggtgcacttttaatgcccatgatacagaatc

SEQ ID NO: 14990 - DNA, 407 bp, Gossypium hirsutum
  Clone ID: LIB3145-018-Q1-K1-B1
cggacgcgtgggcggacgcgtgggcggacgcgtgggcttgctcgatacttttggtggtgccatctctttcctagtctctggaatgactgcacgaacagctgtaattttcttctgttttgctgtgattaaaactgtggatgatcattgtgggctatggttgcctggtaatattttccatatatttttctggaataactctgcttatcatgacatccatcatcaactccaaggcacaaagtataactactctcagccgttcttcgccaactgggataagctacttggaactcatatggcttatgatcttttgaagcgaccggaggggggttttgaggtaaggctaaagaaagactagtcacattctgttgatttgtcttgtgtagttagaggctctcgcttcacactgt

SEQ ID NO: 14991 - DNA, 407 bp, Gossypium hirsutum
  Clone ID: LIB3145-018-Q1-K1-B10
ggagtgaacacatataaggcaatgtgcagggacagtcgaatggtacctggagctgcagctactgaaattgagttggctagaagattgaaagagttctccttcaaggaaacaggattggatcagtatgccattgccaagtttgctgaaagttttgaaatggtaccaagaaccctagcagagaatgctggtctcaatccaatggatatcatatctaagctgtatgaaaaacatgcatccggaaataccaaagtgggtattgacttggggggaggtgactctgaggatggtgtctgcaaagatgtgtcaatcctgaatattagggatctttatgtcaccaagtttttcgctctcaaatatgctgctgatgctgcctgcactgttctacgggttgatcagattataatggc

SEQ ID NO: 14992 - DNA, 353 bp, Gossypium hirsutum
  unsure (1)..(353): unsure at all n locations; Clone ID: LIB3145-018-Q1-K1-B11
cccacgcgtccgcccacgcgtncgcaacttataaactggcatatagcgaatctagagatacaagaccgctcattgtatagtaatgattttgagctattttggcagtcataaagcaccattgttaaaagacatatatagacttacgcattaacaaggttctttcttttactttttactgtttttgtatgtaacttggttaacaacattaacaaggttctttcttttactttttactgtttttgtatgtaacttggttaacaaatccagttcttgacaagtagaaatagaaacagagggttaaaaaaaaaaaaaaattattaaaatatatatttaaaaatttaaataatttataa

SEQ ID NO: 14993 - DNA, 368 bp, Gossypium hirsutum
  Clone ID: LIB3145-018-Q1-K1-B2
ctttctggttccggatctctctgcatttgcttcccagcctacaatgaacgccatctccacctctcctgtcgatttcattcaagagagtaacaatggcaatggcagcgactccgataccagtcacgatgacgcgcctgaatactaccagccgatctcagccgtggatggtgatgatgacgacgacgacgatgaggatcgagaaagtttcgatgatcaagtcaattcagatgaagaacaccaccatcgtaacctaacgagtggttacgtcaatcgagtggagaacgggatctcgtttcttcacgtaggcagcgtcgctacggagcaagaagaaaaggaagagaggaggagagaggcgtctgatacggcga

SEQ ID NO: 14994 - DNA, 437 bp, Gossypium hirsutum
  Clone ID: LIB3145-018-Q1-K1-B3
ccgatacgagtatctgccatcgatgatccagcattggctactttctgtgaaccggttgagaagtcaaattcgagccactctttcactgcaggattagctcacagtgttggccttaggaagcaaccgctgcgtgtatacagcatggtgaaatatgcagcaatagcacgaggcgatgctgaaatattcatgaagtttgcgaggacagggtacaaggaaaagatatgggatcatgcggccggcgtgatcatcatacaagaggctggtggtgtggtaactgatgcgggaggttccccattggatttttccaaaggtatcttcttggaaggtcttgatcgaggtataatcgcttgtggtggagcttaactacatgaaagaatcaccaaatctgttgatgctaggtggaactgttctagtctatagtcatttttataaatttt

SEQ ID NO: 14995 - DNA, 432 bp, Gossypium hirsutum
  Clone ID: LIB3145-018-Q1-K1-B4
cttggctgttatgtgaagtcttgccgcagaagctatcatttcccttgtgcaaaagagattccaaaatgtcgatgggactatgaggactttcttgtgctttgtcctgcccattcttcagtcaagtttccaagtgagaagtctagaaaggcccattctgcagccaagttcccaaatgagaagcctggaaactgtctatctgctgatgatagagtgccaactgaaagtggccagctgaaatccaacactttctggggccagccagagaataagaaagattgggttttctgtggatctgctttgtctcctgaggagaagtttcttctggtcaagtttgcaaaaatgattggtgtaactgtatccaagttttggaggccggatgtcactcatgtgattgcctctacagatgagaatggtgcatgcactaggacactt

SEQ ID NO: 14996 - DNA, 341 bp, Gossypium hirsutum
  Clone ID: LIB3145-018-Q1-K1-B5
gagacgcttggtctgactcttgggcttgctcgatccttttcgagggggcagggtctttcctggagctctggaatgacagcacgaacagctggaattgtcttctgatgcgccgtgagaaaaaccggggacgatcattgggggctatgggtgcctggttatattatccatatattattctggaataactctgcttatcatgacatgcatgatccactgcaaggcaccaagtttaactactctcaaccgaacttcgtcgactgggataaactacttggaactcatattgctcatgatctttcgaatccaccggaagggggttttgaagcatgctaaagaaagac

SEQ ID NO: 14997 - DNA, 229 bp, Gossypium hirsutum
  Clone ID: LIB3145-018-Q1-K1-B6
taaaattataaaaccatcaaggtctagtgttttagagtctctgaacgaatcgctggtcccaatccttttttaagcttgtaaagtgcattgtttcttgaactttcatcgtgtgtgtgttttgtatgttgaaagacccccgacattatctgtaaacccctgactttgattgtattaatcctgtgtgctgctgctttgcgtgttttaaaaaaacaaataaaatcaaaataaa

SEQ ID NO: 14998 - DNA, 421 bp, Gossypium hirsutum
  Clone ID: LIB3145-018-Q1-K1-B7
tgcaaaggtattggtggtggttcacagaaagggattgcctctttggaatgcttgataatgtgaactatacacgcaacgcacatgtttggactcaaatccgtgccctatatcatataaggcacctacagttgagaatgttgatggcttatttacccaacaatgcctcatatgttatagggaaaaggttaaaatctcactaagtacaaatatgagattttcttgccgaatgaccatgcgcattgcgtatatttcactttttcaagcatctgccgaggcatttttattctgtgaatccgtggcttctttgatagagtcgagagatcacttccgaggataatacttactcgtcgaggggtccactagctcctagcttatgataatttgcagacctcgcccgacagagttggcttctcctcaatag

SEQ ID NO: 14999 - DNA, 421 bp, Gossypium hirsutum
  Clone ID: LIB3145-018-Q1-K1-B8
atgaccactctcgtgaccggtgtgtttctcctcctactatccgtcgccggcgtcgtctgcgctgctagatatatcaccggtgatgtcctccggttaccttcggaagcttcaaggttcttccaatggaggagcgatgatgatgaagttggtggcacaagatgggcggtcctgattgctggatctaatggatattggaattacaggcatcaggctgatgtttgtcatgcttatcaactcctaaggaacggtggtttgaaagaggaaaatatcattgtctttatgtacgatgatatcgctttcaatgaagaaaaccctaggcctggtgttatcattaacaatcctcatggcgatgatgtttataagggagtcccaaaggactatactggagaagatgttaatgttcacaacttttttgcggctc

SEQ ID NO: 15000 - DNA, 349 bp, Gossypium hirsutum
  Clone ID: LIB3145-018-Q1-K1-B9
gggcgagccacgcgttcgcgcaataaagctgtttcttgttaagctaactgttgaactctgttgcaagactctgtctgtccggggctccaaatggtttcctcaatcccatcttgtaaactcatcaaggaaacttgtgaaaggaatttttcaatgcactcttactaccgcactactgcaagccccgattttatctctttagacaagacaacttttaggaatattattcaccatccggatctaactgtaatatctgaagaaagagttctcgatgccattttgatgtggtacatgaaatcacaaaaaattgttggatgggaagtggtgaatgagcttaattcaaaattcaact

SEQ ID NO: 15001 - DNA, 413 bp, Gossypium hirsutum
  unsure (1)..(413): unsure at all n locations; Clone ID: LIB3145-018-Q1-K1-C1
ggatattttgttatgatctgcggatatacagagaatggctgctttttcagttccaataattttggggtacggcctcgctgagatcttaaaagttgaatcatggtgccgacattttggctacgcctagcgtctcctcgtagttgctaaactggcaaagacaaactggatgtgcaactcatctaaggtagtcttgtgtggtagtaacagagcatatgaatttgcttctttatatatatatatatatatatgttttactggcaataaaattttaaaaagaaaaaccccnnttaaaaaaaaaaatataaaaaataataaaaaaaaaaaaaaaaaaaaaaaaataaaaaaatataaattttatttaaataaaaaatttaaaaattttttaaaaaaaataaaaaaaaaaaaaagggggg

SEQ ID NO: 15002 - DNA, 467 bp, Gossypium hirsutum
  Clone ID: LIB3145-018-Q1-K1-C10
atctaatactaatagaatactaatctaatactctaatactaatagaatagaaaaaatagaatagggaatactaatataatagaaagaactgtcttttctgtatactttccccggttccgttgctaccgcaggctttacgcaatcgatcggatcatatagatatcccttcaacacaacataggtcgtcgaaaggatctcggagactcaccaaagcacgaaagccaggatctttcagaaaatggattcctattcgaagagtgcataaccgcatggataagctcacactaacccgtcaattttggatccaattcgggattttccttggggggtatcagtaaggaattggaatgtaataatattgattcatataggaggaaaaggttctctattgattcaaatgctgtacctatgggatagggatagagaaagaggaaaaaccgaagatttcacatagtgcttttgatcga

SEQ ID NO: 15003 - DNA, 468 bp, Gossypium hirsutum
  Clone ID: LIB3145-018-Q1-K1-C11
ggatgctgaacgcctcctgcgccgtaccgagaagcgggcatttgctgcatttaagaaagctgcaagtttagcagattcctcacctgcatcctttcctcttcctcttcgagttgaacccaagccaaagagtggaatcagacagcaagatttgctgaaaaaagttgttgaagttaaacccaaacgccccaaaatttcatccccctccagctctgagcctgaagggaatcaatccaatttacaatctcaggggcaggagtccaaccatgagaagaagattggccattgtgtttcggaatcaaatacagcagaaaagcagaataaggtggaaaagtctaccaaatccttactaggcttagcctatgcaagttctgatgatgatgatgatgattgactgatatatacatgcatttgacttgtaatctacatgaacatgactgtttttgttttctccctccataacaaacgctc

SEQ ID NO: 15004 - DNA, 437 bp, Gossypium hirsutum
  Clone ID: LIB3145-018-Q1-K1-C2
gtactgaccaaactagttcatccgaatgcgagggtgattcgagaaaaccacttaattgtagggacccagaagtgttccatttgatgatgaaggaggcgattgagcgttttaaggatatacatttttatcggtttggaaagccagcaccagggcctgaggagaatacttgtgatatggcctggcggtttaggcctaaggaagggaagacagctgctttttataaggattataggcggtttgtgattaatagatctgagaattgtacacttagtgtggtgagcattggggattatcattcaggtgtgaatgcaaggaagaggaagaataagaatcaaaagctgggatttgagaagacatctggtaagcaggagcaagttgttgcggctttgcctgttgttggggaagcagtgaatgattcgcttccagtggtcgagtct

SEQ ID NO: 15005 - DNA, 434 bp, Gossypium hirsutum
  Clone ID: LIB3145-018-Q1-K1-C3
atgaccttgaggccaggcttcgtgaagttaatgaaacacttgagcaagcatcatcccaacagtcaggtctgcagcaagagcttgagcgcacacatcaacaagcaaatgaagcattgaaagcaatggatgcagagaggcagcaattacgaagtgcaaacaataagtataaccactgttgaactacatgattctagcaatgaagttgaacaaaaaaaagtgcttatccctcataatgaatctcattgtgttaacactgattgatatagtggttaacatttgttttccttattatcaaacaaaccatgtgatattttcaggaaaaggaaaaggagagctgggaagctgcctctctggcatttaaaacaaaactggaagttgctgagagtaactgcattcgtgctgaaatagaagctgctaaaatgagaagtataaaa

SEQ ID NO: 15006 - DNA, 319 bp, Gossypium hirsutum
  Clone ID: LIB3145-018-Q1-K1-C4
gtttttgaagacatcctacagatgacctttattgatattactctcaagtcaaacggggggatcttgacagccaccaactctggcgcaatggcgattgcttgtatattgacaacaaattgttcatgttcagttttatcctaattatcatacgctatctgttgagcttaattggtaccaaacaacatagtatgagcgtataatcctaatacaaccatcttatagaaagcttagtagaggaagttctcttaggaagcctcgcacgaacacgcatgtgctgtctgtatgaagtaacatgcatcaattgtgttttgatgaccaa

SEQ ID NO: 15007 - DNA, 376 bp, Gossypium hirsutum
  Clone ID: LIB3145-018-Q1-K1-C5
cccacgcgtccgcccacgcgtacggttgaacctgctggcgaggcttgtctcctcttgtgcgagtcctgtttgcaaatcattcatacagtttgcatgacgtcggccttgaaaaaaaccattcattttaataaacttttttctccaacagaatcgaataggatatccgcacacataaagaagcttaaagaaacaatggccggagtgggaaataaaagttttagcttgattttatatttcctgtgcttgggggtcataatccctagcctcgaagctcacatcgcataatatgatgactattggagggaaagggagttgcaagctaaagaaaacctggagaaggcttacaatcctaacccaaaagaagttacccagcatt

SEQ ID NO: 15008 - DNA, 399 bp, Gossypium hirsutum
  Clone ID: LIB3145-018-Q1-K1-C6
ggagatgacatttacatgcgctcttggactggcaccattattggtcctcataatgctgggcatgaaggtcgaatctatcagctgaagctgttctgtgataaagattatccagagaagccaccaagcgtccgttttcattcaagaatcaacatgacttgtgttaaccacgaaactggagtggtggaaccaaaaaagtttggacttcttgcaaattggcagagggagtataccatggaggatttactgacacagctgaaaaaggagatggcagcaccacataaccgaaagctggttcaacctcccgagggtacctacttctagctctcaagattatcggacatcctggatctaagtgcatttctggtatgcaatatataagttgtaatgcttgttgatctt

SEQ ID NO: 15009 - DNA, 310 bp, Gossypium hirsutum
  Clone ID: LIB3145-018-Q1-K1-C7
tgcaaatctggtcctttttttatgatgctggagagtttgggtattagatttaaattagggggaacggctttcgagttctgggttctccattttggggttacacccaacttagtcaaattgtggacatgacgggtattcacagagtttaccacactcttcttattcatgcccaacctgtacgacgtaagagttcgtgcgatcaagaggaaccctgctccgcacagctgccctggagctttgccttcttaaggacgtagtccttccaatctactcttccttgctggcggtggagatgccttttatagcccca

SEQ ID NO: 15010 - DNA, 376 bp, Gossypium hirsutum
  Clone ID: LIB3145-018-Q1-K1-C8
cttttctctctcttttttcaaccctaaccctacctcaccaaccaggattcaacatgaagggaggaaaatctaagtcagatactaagagtgccaagctatccgtgaaatccaaagctggaaagaaatcggggaaggctgccaaggatccaaacaagccaaagaggcctgctagtgccttcttcgttttcatggaggagttccgtgagcaatacaagaaggatcaccctaaaaacaaatccgttgccgctgtcggcaaagctggtggagataaatggaagagcttgtctgaagctgaaaaagcaccttatgtagccaaggcagaaaagcgaaaggtcgagtatgaaaagaacatgaaggcctacaataagagacaagc

SEQ ID NO: 15011 - DNA, 319 bp, Gossypium hirsutum
  Clone ID: LIB3145-018-Q1-K1-C9
gcgtgcgggtgcttaacgccttctgcgccgtacctagaatccggcatctgctgcatttaaaaaagcttcaggggtaggagattcctcacctgcatcctttccttttcctcttcgagttgaacccaagccaaagagtgggatcagaccgcaagatttgctgaaaaaaggtgttgaagtttaacccaaaccccccaaaatttcattccccttcagcttttaacccgaagggaatcaatccaatttacaatctcaggggcaggagttcaaccatgaaaagaaaatttgccattgggtttcggaatcaaattcaacggaaaag

SEQ ID NO: 15012 - DNA, 439 bp, Gossypium hirsutum
  Clone ID: LIB3145-018-Q1-K1-D1
cccacgcgtccgcccacgcgtccgaagagaagccccttcactcctgctaagagtgatggcactagaagctacctaagtggttactcagaccatccaaattacatgtcttacactgaatcgtcaaaagctaaggtaaggtctttcagtgctccaaaacaaaggcctcattatgaaagatctagttcaacaaagaggtactccattcatggttttggtgaattgaaatcaactacacaaaggtctgccatgcatgcaaacttcgccagcaaagcttaccccggttcgggtaggttggacaggctaggaatgccccttgggtatagatactaaataatggttttaccatttggctaaggaatgttatgtagtttatgtttagatgttaacgatgatgactctcacctaccctaatgtatccatcctttaatgtttagtgcat

SEQ ID NO: 15013 - DNA, 330 bp, Gossypium hirsutum
  Clone ID: LIB3145-018-Q1-K1-D10
ctttttcactcatgggctctgtcactgtaaaaccctcattaaatactttctgtttcattcccgagagccccaaaattcgttgtcattcgcctcacttctcattcctcaaactcagaccttcccctgtttctttcccctttaaatctccttctgatccaataaactcatctcccaaatgtaaaattcgaagctttatggttaaccctttattggttttagtcccagttttgagaagcatcagaggcttggctttttctcattcccaaaaatgggcttcacgtttgcacgattgcattacagaatcggaggaaattttagaccaatacaatg

SEQ ID NO: 15014 - DNA, 334 bp, Gossypium hirsutum
  unsure (1)..(334): unsure at all n locations; Clone ID: LIB3145-018-Q1-K1-D11
cccacgcgtccgcccacgcgttcgcaataatgtaatacaattgttctgctgtcnaaaaaaaaaagggaaaagtgaaaaaaaaaaaaaaaaaaaaaaaaaaaaaaaaaaaaaaataaaaaaaaaatttaaaaaaaaaataaaaaaaaaaaaaaaaatattgttattgggttttgatttaaatatttatttttttgttttggtataataatatttttttttttttgtaacatataaccaaatttttttacgttggtttaaatttttattttttttataatactaaaaaatactcaatttttaattttttttaactaataaaatatttccctttttt

SEQ ID NO: 15015 - DNA, 477 bp, Gossypium hirsutum
  unsure (1)..(477): unsure at all n locations; Clone ID: LIB3145-018-Q1-K1-D12
aactgatcgaaaactctatctctttaacaatgaaaacccatataaaaccatataaggccattcgtttgtcaattttttcgtgatactggggaaagtgatttaacaattttttaaaaaatttgtgtttaggttatctgagcctggcttgtgcaagtcagggagcaaggacagcagaaaggcgaagcaagccctattctttctgaactgctacgtcttgaggaacaggccaaacaacaatatgtgggtcgatggagcaaggtgcctggtgctactgaggcttctatctgggatttaccttcatctgctattagtgaccctaataacttggatgtgatgggtcttctggctacaaataagggtaagccaatggaaggtattatggagcaagttcgtgatggtagtactattcgagtctatctactcccagattntcagttcgtgcaagtgtttgttgttggtatccaatccccttcaatg

SEQ ID NO: 15016 - DNA, 437 bp, Gossypium hirsutum
  unsure (1)..(437): unsure at all n locations; Clone ID: LIB3145-018-Q1-K1-D2
caagtccatagctatgggaccgtggactttgaaagaagacccatggtcaaatggaacgctctatataagaaaatatcgctcatggaaaaccctgaattgggttctgcctctgtgttgaatgagtgggaaaaaggaggtaggaagctcaccaagtgggagctttgtagggttgtcaaggagttaaggaagtacaagcgtttcaagcaagcacttgaggtgtatgagtggatgaacaatagaggagagaggtttagattttctgcaagtgatgctgcaattcagttagaccttatttctaaggtgcgtggagtttcaagtgccgaagatttcttccttcaactccctgatactttgaaggacaagagaatctatggngcccttctgaatgcctatgtgcgggcaagaatgcaagaaaaggcagaatctttaattgacaa

SEQ ID NO: 15017 - DNA, 426 bp, Gossypium hirsutum
  Clone ID: LIB3145-018-Q1-K1-D3
ctttgccagatctactagttttttcatgtattctcttgttcctgtcctcccaaatggcccacggagcgcaatagaaagtcttacactggagtgaagatatctgttcgaaaacccaaggcattcacgaaaaatgtggttcatggtttctgctacttctccacagcgagggcaatgtgtgtcatttgaaagcttacgaagctgcatgttaattcgtgtgggaagataattccacgatattttccaagctgtcatttttatcttagatggtagattgagtagccaaagttttttgtagaattttctgtagtcattttgtagtcagtttatatgcactgcgtaccgcatattctcccgatggcttccccctccaagctagaatgtctcgtggggttctcttattatcggaatacgcaaaatcttcatagt

SEQ ID NO: 15018 - DNA, 404 bp, Gossypium hirsutum
  Clone ID: LIB3145-018-Q1-K1-D4
cttgcagaagaagaaaagaatgttccatcattctagcttcttagctggtggagcaacgctagctgctggtagattggtggtggagaaagggatactaaagtccatctctgcatatagcggacattaccggccaacggatgatagtctcaacagttttctttcctttctgaaggggaacggagtgaaccttgacaaagttgagattcgccgttcaaccgatgattctgatagctacgatgatggaaattccagcagtagtgttagtacttttggattttcagcaagctcagtgccgactgaacccaaaatcaacaaagaagagaagaatctgtcattagaatcatatgatactaaacaaccggagaccacaaatacttacgaaaggactttatctggtggtcttc

SEQ ID NO: 15019 - DNA, 343 bp, Gossypium hirsutum
  Clone ID: LIB3145-018-Q1-K1-D5
gcagcagaggattccatgacaaaagagtggatcatgtctggtggcccatattggcgggggaagcactgccatcggaatactccaacagctatattacatgtcttacacattaatatcccaatcgacatgaaagtcttctgagctcgtcctaacttatgaactaatctaaaatatctctgttgacaaataggtactccattcacagctttggtgattctaaataatctacacaaaggtctgacatgcatgcatactcaatcagcttagattaccccggctcgaactttttggacaaactatgtatgcccctcgggtatagatactaaataatagcttcaccatt

SEQ ID NO: 15020 - DNA, 430 bp, Gossypium hirsutum
  Clone ID: LIB3145-018-Q1-K1-D6
cccacgcgtccgcatcaccatcgtctgctattcttcacaaaaaagaaaagaaaaattacagtgaaaatggcaacccttaaagttccagctcatgtacctgccccttctgaggatgctgagcaacttcgtaaagcttttgaaggatggggtacaaatgagcaattgattatcgacattttggctcacaggaatgcagctcagcgcaatttgattcgtaaaacttatcgtgaagcttatggggaagatctccttaagtctttggatgaggaactttcaagtgactttgagcgagctgtggtgctgtttactttggaccctgcagagcgtgatgcatttctggctcatgaagctacaaagaggttcacatcaagccattgggttctcatggaaattgcttgcactaggtcttcacatgaactgttcaatgtga

SEQ ID NO: 15021 - DNA, 381 bp, Gossypium hirsutum
  Clone ID: LIB3145-018-Q1-K1-D7
cggacgcgtgggcttccgtgaatgcaccatctctggaacaatcgatttcgtattcggcgagtcggcggcggtcttccaaaaatgcaaattccttgtccggaagccacaatcaggacaacaaaacgttgttacggcacaaaaaagattggaccataatcagcccacagcttttgtgatcatggacagtgaaatcatcccagatgctgagcttgcaccagcgaagaacgaattcccagcattccttggtcgtccatggggtaagctatccagagctatcatcatgcaaacttacattgacgatatggtacaccccgaaggttggactagttgggatcccaaaaaaccgacaaatctttgccaatacgccgagttcaataacac

SEQ ID NO: 15022 - DNA, 427 bp, Gossypium hirsutum
  Clone ID: LIB3145-018-Q1-K1-D8
ccgcggacgcgtgggttccactagaattccaaaggtccaacaacttttacaagatttcttcagtgggaaggagctttgcaagagcatcaaccctgatgaggccgttgcatacggtgctgcagtccaagctgctatattgagtggtgaaggtaatgagaaagtgcaagatctcttgctcttggatgtcaccccattgtctctcggtttggaaaccgctggtggtgttatgaccgttttgattccaaggaacaccaccattccaaccaaaaaagaacaagtcttctcaacctactccgacaaccaacctggagtgttgatccaagtctacgaaggtgaaagaacaaggaccagagacaacaacttgctcggtaaatttgagctctctggcatccctcctgctcctagaggtgtcccacagatcactgtc

SEQ ID NO: 15023 - DNA, 428 bp, Gossypium hirsutum
  Clone ID: LIB3145-018-Q1-K1-E1
ggacgcgtgggtaccactttgttggaacctcgacctttagccaatatactgtcgtccatgttggccaggttgccaagatcagtccaaccgcccctcttgataaagtctgtcccattagctgtgggatatgtacaggttttggggccactgtgaatgttgctaaacccaaaaagggtcaaactgttgcagtttttggactgggtgccgttggtcttgccgccgctgaaggtgcaagggtttgtggggcttctcggatcatcgctgttgatgtgaaccccagaagatttgaagaagctaagaggtttgggattacagaatttgtgaatccaaaagactacgataagccagttcaagaggtgattgtggagatgaccggcggaggagtggatcgcagtgtggagtgtacagggagcgtccaagccatgatt

SEQ ID NO: 15024 - DNA, 223 bp, Gossypium hirsutum
  Clone ID: LIB3145-018-Q1-K1-E10
acgcgtccgcttttgtggaaatagatatgataatatgaattttggtcaacaaaaaaaataaccattcatttcagggagggtttaaaatcctaaacattcctttttcctcttctttttaatatcattttacccaaatatttggtaatattccttctgttcttcttatcccaaacctttaaaccttacctctatttagtgttaattcttgcccccccctttttaa

SEQ ID NO: 15025 - DNA, 378 bp, Gossypium hirsutum
  Clone ID: LIB3145-018-Q1-K1-E12
cacgcgtccgcccaccatacaatctttcttcacatccttaacatctcgtattgactgctatcttcctatactgcggaggggcctttgtcggtaaataagctcatcatatccttcatattgtaacctctatttttgttgatacattcatgctccaaagtagcttataaaaattactgcacatggtttgtgaagcataaactctattattttcatcccatctctgttataatttataggcacttcggacctttaatacaccctacatcttaccttcccaaataagaaagtcttcataaggttgccagcgctttatgcattccgacgagtcctgcaacgatttttctattaaggcattactaatcaactcctttttttttt

SEQ ID NO: 15026 - DNA, 360 bp, Gossypium hirsutum
  Clone ID: LIB3145-018-Q1-K1-E2
gtcaaaaaaaaaaaaaaaaaaaaaaaaaaaaaaaaaaaaaaaaaaaaaaaaaaaaaaaaaggaaagaaaaaaaaaaaaaaaaaaaaaaaaaaaaaaaaaaaaaaaaaaaaaaaaaaaaaaaaaaaaaaaaaaaaaaaaaaaaaaaaaaaaaaagggggcgccccttttaaaaaaccaaatttttcttccccttccttccaaattaatattttttttttttggcccccaaatttaattaaactgcccccttttttaaaaccctttaattgaaaaaaccttggttttcccaattttatatcctttgaaaaaaatcccctttttcccagttgggttaataccaaaaaggccccccccattccc

SEQ ID NO: 15027 - DNA, 425 bp, Gossypium hirsutum
  Clone ID: LIB3145-018-Q1-K1-E3
ggaactttcgagctcctctggtcatcagattcgggaaaagagagagaaaaaagaagtccctttgactgttgtctctcaatcaaatgggccttcacatcctcaaaacgacgcctttttcgtcttcctactccaaagctttactcctcgccaccgccgcaaaaccctccgctttagctgctgctgttcttccttgtaatccccgcttgagatttccattttcttcgccaaaggccattacttcatctgggtatgggagtttccttcatctgaggaagcgtgggtttcatgggagtgtcgtcttaaccatggctgcttctggttcggtccacaaatctgaggaagagtggagtgctattctttccccagagcaagttccgaattttgagacaaaagggcaccgagtattcacgcaccggagaatatga

SEQ ID NO: 15028 - DNA, 422 bp, Gossypium hirsutum
  Clone ID: LIB3145-018-Q1-K1-E4
agcgaaagtagctcctccagtatcacggtctattggtggctttggctggggtggagaagaagatggggatgcaagggaagaagatacagagcaagaggaagaggaagaagaagatgagtacgagaagacagtaaaggaggtacatgctagtggagaagttcatgtctcttaaaacttgttagtatatgcttttcaattcgagttctgtgtttagtccttgtgttcatatgatgtcggtttctacctaggacctggtgtcgaataaacaaactgtaaattatggtcttggggcaaagatgtttgtgcagtctttttatgattgtttaggttgtgttgctattgaaagtcggaagttggaagtactgggatttgaagcattacccaattgggatcaacttcataattgtgggttggtaatgtct

SEQ ID NO: 15029 - DNA, 341 bp, Gossypium hirsutum
  Clone ID: LIB3145-018-Q1-K1-E5
gcgtgacgctctcttccaatttactggaacctggacctttaaccaatattctgtcatccagggggtgccatgttgcaggaggagtccaacctcccctattgattaaatatcgtccactatgtgtgggatatggtgcaggctttggggccacatgaggatgtgctcaacccaataatggtgaatactgttgcagattctggactgcgtgcccattgtcttgtctgcgctcaatgtgcatggcattgctgggcttatcggatcatcactgttgatatggacccacaaatactgggagattcttactagtttgggattacaaattttgggaatccaaaaaacta

SEQ ID NO: 15030 - DNA, 307 bp, Gossypium hirsutum
  Clone ID: LIB3145-018-Q1-K1-E6
cccacgcgtacgctggaatatttgcttctatcgcggctttgatgttcaattgcgggaggagagaggatattgactactctccttatgatgaaggcgagtggagggtgaagctctggctcttctttgctcatgttgtatcctttggctcactagctgcttcagttggcctcttgatacaagactcactagagaaatctggtccttcattgtggactggtactgcaagcatcttacagagtgtgtttgtctcaatcagggggctgatatattggacttgtcactcacaataacacatatatatccaacc

SEQ ID NO: 15031 - DNA, 433 bp, Gossypium hirsutum
  Clone ID: LIB3145-018-Q1-K1-E7
gtaatcgccaacctgaacgagccgacactgtgtactacggagaatacaaatgcacgggggaaggcgcgactcctgctacacgagagaaattcgtcaaacaactatcggatgcggaagctaaaccattcttggttcttgactacgttgaaggtaccaaatggttacttcctcctccgacagtacctaaataattcattcattcccaactttttcatgccggcaacatatcctcacagtattgctaattcaagcagactctcgtctacctctttgctgggtggaaataactagccatccattttattttatttattttattttcccttcccatggcttgtattttaacaaatagccaaatgtcaataagaagcagaatttgtcttatttttattaatagttaggatgttgatatttgccattatgtagaaaattt

SEQ ID NO: 15032 - DNA, 303 bp, Gossypium hirsutum
  Clone ID: LIB3145-018-Q1-K1-E8
aaaaaaaaataaacaaaaatacagattaataaaaaaatattaaaaatacaaaatcaagaggggtaaacaatttcggaaaatcattcaaaaaataaaatttgcctcctctctttttcaatccatttttccttatcttggcacccctactctaatttccctttctgttgcctaaactttatttaattgccctcctttttccaatgctaatatttttacatcccttccttttcccacctattttactttcatccaatagcactttcccccaccatgtttatttttcttttttcccaaaaacattta

SEQ ID NO: 15033 - DNA, 440 bp, Gossypium hirsutum
  Clone ID: LIB3145-018-Q1-K1-F1
gcggaaattaaggcattaagaatgtctgaaaggctaagagaaaaggcttgcgaagagctcggtgaccagctctcaaaaatggatgggaagcctatcttcaatcttgttccggtcctaggtgccggaatatctgctgcatgtacaaatgatataatcacctgtgagctgtttgctgggaaatcttgatcctttacttcactttggcaattccatcatttgttttctccaagggatggttcagtcatcaaagaaactcctttctgaaagttaaaacagccacaccaatgtggtttgttcttggatgaagaggtaatgcttttggtcaatttatttgttagatttattgtctttacaatcaagtattctttacatttcaaggaatctaaagaaccttggtaaagtcaaatttaaatgttaattgcaagattttgtgatatatt

SEQ ID NO: 15034 - DNA, 260 bp, Gossypium hirsutum
  Clone ID: LIB3145-018-Q1-K1-F10
gctgttactgcaaaattccaagagataaacgaagcttacaacgtgttaatcgatcctgataagcgctttgggtatgatttaactggaatatatgaaattgataagtatactttgagggaatatcttgccagatttaagggaatgattcttacctgcaatgggcttggttttagtcatacatcaacatggacagaacaactaacagacagaaatgaatttgctgaggaaggttagcttttgtttacaaattacaaagactg

SEQ ID NO: 15035 - DNA, 313 bp, Gossypium hirsutum
  Clone ID: LIB3145-018-Q1-K1-F11
gcgtacgccctgtctaccaattccatgttctttggaaacttctcggaaacttatggtagtgagagattaagggttgcgtgtatttccgggaatgacaaatgaaaaccactctcatattctccattaaaagcaactgatacattatttgctatgttgcctcttaccaatgctggaaagaaccaacagggtggtgtcgatgcacatgatagtgcatccaaaaaacacagcttcacaagggattttgcttatgatgttacatttggagagccatactaatggttcaagtaagcatgtccctttgttaaacctatat

SEQ ID NO: 15036 - DNA, 219 bp, Gossypium hirsutum
  Clone ID: LIB3145-018-Q1-K1-F12
ttacctcgaatgggtgtgtctacctgcacacagtcaaacatcttttcacataataggagattgttaatgacaagtgttacaaactacttgggttgtcacttctactcattagaggctacaatttccaaacgagaattagagttatcagggaaacatggaaagccttcgtggactaaaacggctgctcactctgaagataaaacttggttgtgcctcaaa

SEQ ID NO: 15037 - DNA, 430 bp, Gossypium hirsutum
  Clone ID: LIB3145-018-Q1-K1-F2
cccacgcgtccgatcgacaaaagcaagaaccaaaatcccattttcagctccaagttcttgacttcgatccaatttcagtcttcatcagacccggatttctcctccctctctttctcggttcgttcgacgagaactcagcactcttcaaccacttcacagtgcggttgcatcggcttgccttgtttccaagcttccttccgatgctaatagttgtgctgaaggtcgatttgctaactatatcagtcccatctagtagcaagcgcttgtagaggttgagtttacttctttcagagtggcagtgatgcttacttcattctataattcagaactcagcttttcagggaatcaattggctgaatgtgttttattgacctacatttaattagttggtgggtgtaagtgactcttgtaatcttctcagtttttaatg

SEQ ID NO: 15038 - DNA, 425 bp, Gossypium hirsutum
  Clone ID: LIB3145-018-Q1-K1-F3
cccacgcgttcggtgccccggagtatgcaatgactggtcagttaactgtgaaatccgagggttgtagctttggagttgttcttctagaaatcataaccgggaggaaagccattgataattctaaagctgctggggaacagaatctagttgcatgggcaaggccattattcaaagacagaaaaatgttctctcaaatggctgatccaatgcttcaaggtcaatatcctccaaggggtttattccaagcacttgcagtggcagcaatgtgtgttcaagagcaaccaaatatgagacctctcattgctgatgtagtcacagctttgacttaccttgcttctcaaaaattcaaaccagatacacagccaatacaaggttctcgcttgatgcctggtactcccccttggacaaagagagacatagataag

SEQ ID NO: 15039 - DNA, 362 bp, Gossypium hirsutum
  Clone ID: LIB3145-018-Q1-K1-F4
cagaattcacacggttccaatggttttgaaaagatacccaaggatgacggagccggaacgaaagtatcggaccatctatcggacaaggtagccatagagacagatagtagtacaccgggtctttacagtgacaaggaaaagctaagatcgaagaaattgaagatgaaaacaatggagaataagaagaagaaaaggaggaaaaaggaagagtatagagaaataggggagagtatccgaatactagctgaagtagtattaaaatcagaagaatcaaggatggaaacactaagggaaatagagaaaatgaggattgaagctgagactaaaaagagggaaatggagcttaaaagaacagagatcat

SEQ ID NO: 15040 - DNA, 387 bp, Gossypium hirsutum
  Clone ID: LIB3145-018-Q1-K1-F5
gcgaccacgcgtccgatcactggtgatgagactaattttaaactctgcaaaattaggtctgtccaaacggggcagaagggttttccatacctgaatacctaccattgtcgcacaatactctacccataccctctgatcaaagtcaacgacaccatcaagcttgacttacagagcaacaaatttgtggattaaattaagcctgatgttgagaatgttgacatggtcactggtggaaggaacaggagacgtgttgtagtgaataaaaacagtgagaaacacaaagacagcctcgccacaatccatgttcaatatgctaatagacactaattttcaacacttctatgccatgaattaacattcttacaaagaacaaatcctttgatttca

SEQ ID NO: 15041 - DNA, 424 bp, Gossypium hirsutum
  Clone ID: LIB3145-018-Q1-K1-F6
caaaatcttagagatggatatttgatagatttccctttcatctccttttctctttaaagaaaaattggttttcgattccattttcaatttatatattttggattagattcggttggtcttagggaaaaacaaaggaaagggcaatgtcaaccccagcaaggaagaggctgatgagagacttcaagagactacagcaagatccacctgctggtattagtggggctcctcaagataataatatcatgttttggaacgctgtcatttttgggcctgatgatactccttgggatggcggtacgttcaagctgactttgcagttcatggaggattatccaaataagcctccaaccgttcggtttgtctcacggatgtttcatccaaatatctatgcagatgggagtatttgtctcgatattttacaaaa

SEQ ID NO: 15042 - DNA, 425 bp, Gossypium hirsutum
  Clone ID: LIB3145-018-Q1-K1-F7
gtttacaagagagaaagctagtctctcgatgctgaaatctccgcgggacattaaagagggaaaggtgctggtgagattggaatgtgggattttgatggcggtgttggtgatgcaattgatggtgttagcggtgagctgcacggtccatcactgttgggtgaaggaatatgaggggttagaagctgagagagaggcgactgcgaagaaaaggagcaggaggttagcgagggtgcaagaggaattcatggcgaatgcggccaggattgcggagattaaagccaacgagttgtatgagaagacgaagagcaagtaccgtcagtgggtgaaaactgatttttatggctaaggcatgaggaaaacaacctacttgtgggtttctttgtggggtcactgctgtggtggccattggatttgtctcactttta

SEQ ID NO: 15043 - DNA, 416 bp, Gossypium hirsutum
  Clone ID: LIB3145-018-Q1-K1-F8
gcttgaaattgtcagtggggaaagcaaaggatgcatctccataatatcccattaggtgggccgagtgccatgtttaatgctatctttattgttgtctgtgttctacataattgaattccatgttaaataatattcagctcccaagccaggaaacatgctccttactgggaagaaactgcattcatgtaacatttagaattcaagctcatgtcaactaagaactgcttatgcaatatactttacagattaggctcatgtccaacttgaacttactttgacaacctgggagtagagacattatgcaatcccgctaacacggacatgggggtaatatatcgtattgaatcgattaagataacctcaacaccactcatttttttttaaaatttctggtttatcaaaaaaaaaatacctcc

SEQ ID NO: 15044 - DNA, 434 bp, Gossypium hirsutum
  Clone ID: LIB3145-018-Q1-K1-G1
cgaattcgcagacatgacaaatgatgagttcagagctatgtatttgggttaccaaagcataagatctccatgtgagagcaacagcaaaggcttcgcatatgacaaatatcacaatttgccaaaaagcatagattggagaaagaaaggtgctgtcgctccaatcaagaatcaaggccaatgtgggagttgttgggcattctcagcagtggcagccatagaagggatcaatcaaattaaaacagggaacttgacatctctttcggaacaagagctcatcgattgcgacaccgactctatcgaccaaggctgcaacggtggacacatggtccaagcgtatgaatttattataaagaacggtggaatcaccactgagaaagactatccatacacgggaagagatgacaccttgcagcggacacaagctaaaaaccatg

SEQ ID NO: 15045 - DNA, 440 bp, Gossypium hirsutum
  Clone ID: LIB3145-018-Q1-K1-G10
ggtcgaccacgcgtccggatgaatcaaatgctagagcttacaatactcaagattattcaaaaatgttggataaaattgccagggcaccggcaccagtatcaactccgctgcaaatgccaattcaaacggcgtatttaacctctgctgcttattcgacatctgcgaccgcagcccccgcaaaccaaccagtttacctcatttcgactcctgcagccggagtttatcaacagtctccgacaatacaacaggtaaccgtaccagctggtcaaccttactacggggtacagcgggtggtttaagatgttaaccgagagcagtcggtttacaatgcggtttcatccacgaagtttggggcatatactgagggaatccaagttatgcatccgactggtgggatgcctgaatcaagatatgttcaaggtggtttatgatggggcatg

SEQ ID NO: 15046 - DNA, 428 bp, Gossypium hirsutum
  Clone ID: LIB3145-018-Q1-K1-G11
ggaaagaagataaaaatgaagaagcaagtaatttgttcgactgtctttcctcttctttgcattcttcttctttttcttagtgttgaagctgagacgtgcagccctagtggcaagatcaaagggaaaacccctccacctgggcaatgcaaccaggaaaatgattctgattgttgcaaggatggcaagtggtacacaacatacaaatgttcaccccctctatcaagccaaacgaaagcaacactaacgcttaacagctttgagcgagatggagacggtggtgcaccatctgaatgtgaaccagtaccactccgatgatgaccctgtggtggcactttctacagggtggtataacaatgggaagaggtgtttgaagtatatcaacatccatggcaacggaaaatctgtgagggctaaagttgtggatgaat

SEQ ID NO: 15047 - DNA, 370 bp, Gossypium hirsutum
  Clone ID: LIB3145-018-Q1-K1-G12
ggtaatttatagcacaatggattcctcaagggataatgatattaaatttcatgaagttcgtatagcgttttagcagtttacccctttttcttatgtatctatctttgaaattttcacaaagtaatatctggagcaactttcatgtttgagagtagttttatcatatttgtaaaactgtggctaagtgtccaattggaaagcagtatttgtgagtgtgaaaaaaaaaaaaaaattttattattataattaaaaaaaaataataaaattttttttatttataaataattatattattaacttggtcggccgtttaaagaatccattttttttttttttcttcatgcaacataattttttttttttgggggcc

SEQ ID NO: 15048 - DNA, 423 bp, Gossypium hirsutum
  Clone ID: LIB3145-018-Q1-K1-G2
attctcttgtaatagaatcgaagaaggtggaagtagaagagagaaagcggattttctctcttctcttctacattttttgttttttttttcttttgtttctcatgacggcataattcgtcgtttttattccaagaaattagggtttgggtttggtgaatttctaagatcatgaatgtgatgcgtcgtctcaagagcattgcttcctctcgctcttctatttccgattccggtggtgatagcttcaccaagagggcaaagtttgatcaagaatcagaattcaaggcaacaggggaatcaaatatatctgataggagtacacctgggccagagcatcatatggcttctacttcatcggaaactgtagcaagcacgtccaatgcagcttctagttctagtaatataacagagaaattagatctcgat

SEQ ID NO: 15049 - DNA, 189 bp, Gossypium hirsutum
  Clone ID: LIB3145-018-Q1-K1-G3
attatcttttgataaaacccaccaacgcggaagtagaagacaaaaagcggactatctctggtgggctttacatttaagtgatggttcttcttttggtgcctctggacgccataattacagggttttgtttcaaaaaaaataggtttggggtttgggcaatttttaaaatctgaacctgaatcctttttt

SEQ ID NO: 15050 - DNA, 240 bp, Gossypium hirsutum
  Clone ID: LIB3145-018-Q1-K1-G4
gggtcgcccacgcgtccgcacttttataccttggtaataattaatagatggaatgtgagaggcgcagctgtcgttggggggggagactacctttttttctgtagttactttagtggcttaatggatcatagaacggcagggtggctctaattgaccaaagacttgactggggacacatactgacgttttgatgaggaaatgcaccatttaacagaatctgtgcttataggtcacacatga

SEQ ID NO: 15051 - DNA, 411 bp, Gossypium hirsutum
  Clone ID: LIB3145-018-Q1-K1-G6
cggcccttttggaacttggaaaggtggaagggagaaggctccagctgccttttgcagaaaggctattacttccattgacaagtttgagatgtggggagatggtcttcagactcgatctttcactttcattgatgaatgtgttgaaggtgtacttagattgacaaagtccgatttccgtgagcctgtgaacatcggaagtgatgagatggttagcatgaacgagatggcggagattgtgcttagctttgaagataaaaagcttccgatccaccatatccctggtccagagggtgtccgtggtcgtaattcagacaatacattgatcaaagaaaaacttggttgggcccctacaatgaagttgaaggatgggctgagaattacatatttctggatcaaggaacagattgagaa

SEQ ID NO: 15052 - DNA, 300 bp, Gossypium hirsutum
  Clone ID: LIB3145-018-Q1-K1-G7
cggacgcgtgggcggacgcgtgggtggtggtgggtacggaggtggacgccgtgaaggaggatatggtgacggcggatctcgttactcaaaaggcggcggtgcatctgaaggcagctggaggtcttaagtttaggtttcaaagtgggcttgggcctatattgttatgggtttggtttgggtttagtagttagtaattttaagcttctctattactgtttggtttgggttctctcttttttgatcgatgttgctactgttctcttaaaatcataaaaatggaatgaagtatcttcttttcgt

SEQ ID NO: 15053 - DNA, 422 bp, Gossypium hirsutum
  Clone ID: LIB3145-018-Q1-K1-G8
cccacgcgtccggttctcagagaggtttctagcagtgttttgaaggctgagagtggggtgagggttcatgctttagctcactttccagctgccaaaatcactaccattcttgtgggtgatactattctttgtcaaaatggtaaaggagaagaagacagtttgggttttttactaccatccctcaagaacatttatcactctcttacaaagtggggtctagagaaagacatcaaagtgtcggctgttttttcttccgattgtttgatgcaaaactctgttgtttttactgatgatttgggtaagaaggtggtcaaatctctgttggagttcttccaaaatacaaactccacttactccattgttgcttttccaaatttgtcttcctcttttcatgaaacattggttttactctcctcccacct

SEQ ID NO: 15054 - DNA, 332 bp, Gossypium hirsutum
  unsure (1)..(332): unsure at all n locations; Clone ID: LIB3145-018-Q1-K1-H1
caaagatatgttatcggactaccaatgcctaggaatctacctgatagggtacaatgtctttcactttgatcattaattgattgatatttttttgttgttttttgttttgggggggaggggggttggaggagagtgaacggccattgttatccgtcattcttctcttactatgctccaagttcttttgctcataattgaaccacacaaacaaaaatgtatgataagaagcacgtagatcttcacacattgtatgccattgattcttcatgctgatcangtttaaacattttgaaatttcttggttggatgtatggtttgatgtatgtatgtat

SEQ ID NO: 15055 - DNA, 358 bp, Gossypium hirsutum
  Clone ID: LIB3145-018-Q1-K1-H11
cgcgtgcgcccacgcgttcgtccacgcgttctttaaactctaacactttttccttacattggcacactataaaagttgtggttctatgttttcaacaattctcatcattatattaattgggggacaaaaaagtttctgtcttactatgaaattaagatgttgattcttatcccaaagactttattgcaatttgttaaagatatagattacttcatccgagatttttttattaacattttttagataacaaattatttccaaattcgtttaaaactataaaaggtaggatcctgtttataacaaagctaatcgaaacgatagctctgatcagatctaagtatttctttcctgaaaaact

SEQ ID NO: 15056 - DNA, 326 bp, Gossypium hirsutum
  Clone ID: LIB3145-018-Q1-K1-H12
gggcacgcgtgcgggaacctactgtgatcgatgaagtcaggactggtgacttaccgacaactttttcaccctgaacaagttatttttggctatgaagatgctgccaattactttgccagatgccattatacaattgggaaggaaattgaggatctttgccttgaccgtgttaggtagttagctgataactgcactggtttacaagggtttcttgtgtacaatgcttgtggtggtggaactggttcaggtctgggatctttgttgttagaacgcttgtcggtggattatggtaaaaagtttaagcttggtttaaccatttacccttc

SEQ ID NO: 15057 - DNA, 424 bp, Gossypium hirsutum
  unsure (1)..(424): unsure at all n locations; Clone ID: LIB3145-018-Q1-K1-H2
ccacgcgtccgcccacgcgtccgttcaaaaccaaataaaaacatggcaccacaccttaatattgttccttccatgtttgtgcttttattattattcatttcagcctctaaagttcaatcaggcgctattgatgttgttgccaagtttggcgcaaaagctgacgggaaaacggatctgagtaagccatttttggatgcttggaaagaagcatgtgcctctgtaaccccatcaacagttgtgattcctaaagggacatatttattatcaaaagtaaacttagaaggtccatgcaaggctcctattgagattaatgttcanggcactataaaggctccggctgatcctggtgctttcaaggaccctaattgggttagattctatagtattgaaaatttcaaaatgtccggcggaggaattttcgatg

SEQ ID NO: 15058 - DNA, 358 bp, Gossypium hirsutum
  Clone ID: LIB3145-018-Q1-K1-H3
cccactcttacttccacacctcccttcaaaaccaaataaaaacatgtcaccacaccttaggatggtttcttccatatatgtgcttttattattattcatttcagcctctaaagttcaatcatacgctatttatcttattcccacctttgacgcaaaaactgacggtaaaactcatctaagtaagccatttttgtatgcttgaaaagaaacatcttcctttgtaaccccatctacagatattattcctaaatggacatatttattatcaaaagtacacttagaaagtccattcaaagtatcctatctatattaatgttcaaaacactataaaagcttctcctcatcctcatactattat

SEQ ID NO: 15059 - DNA, 346 bp, Gossypium hirsutum
  Clone ID: LIB3145-018-Q1-K1-H4
agttgaaatgactactggagcaactatccacacaacgcaggggctgaagatgactacaggaagaatgaagcctccgattatccctgaaataaacatggagggattgaagatggaaggaactgcccggattttggaagcagagacccaagttggagagaaaggtgaagtttctcaagctcattcataggtggaatagcttgccacatttagcttcattacacgatgcatatgcatgggggggaagtaatgttgatagacataagcatagggagaaagtcgttaaatattatagcatatgcttcccttcaaaactagccggttaatgcaattaattattttctttttt

SEQ ID NO: 15060 - DNA, 393 bp, Gossypium hirsutum
  Clone ID: LIB3145-018-Q1-K1-H5
ttatattataataactaccaatacctaaaattaataacaaataaaaaacaaaaaaaagacgggttaatcataaaaaaaaaaaaaaattatttataaaaatattaataaaaaaaaaaaaaaaaatataaaaaaaaaaaaacgggcccccccttttaaagattccaattttacttcccctcccttccaacttattattttttttttttttccccctaatttattttctttgcccccctttttacaccccccaactttgaaaaccctttctttcccccaatttatatcctttaaaaaaaaaccccttttttccatttgttttattactaaaaaggccccccccttttccctttcccaacatttcccccccttatttggttttttttcccccccctt

SEQ ID NO: 15061 - DNA, 427 bp, Gossypium hirsutum
  Clone ID: LIB3145-018-Q1-K1-H6
cccacgcgtccgtgcgactccaatgccaccatctattcttagccgtggtattggttggcagggagttgcaattttggtgtcgggattgtttggaactgccaatggttcctcagtttctgtagagaatgctggccttttagccttaacacgagttggcagccgaagggttgtccaaatctcagcagggtttatgattttcttctctattcttgggaaatttggagcagtctttgcttcaattccagcacctattattgctgcattgtactgcctattctttgcatatgttggtgctgggggtcttagttttcttcagttttgcaacctcaacagcttccgtacaaaatttatattaggcttctctgtttttatgggcttatctgtgccacagtacttcaatgagtataccgcaattaatggctatggt

SEQ ID NO: 15062 - DNA, 435 bp, Gossypium hirsutum
  Clone ID: LIB3145-018-Q1-K1-H7
aaatacatgagaagcttagcatcgccaaattcaaacctaaatcgaagaagaaagcaatgtcggaaatgggagagatctgagtcgccggcggcaatcatcttatttttccggctgttatacgatgtctccctcatgcttaccggtgaaggaagaaatggagtactcacgcatccatgagtgcagcagcagtggcagtgagaagagaaggcagagatggagaaatctgctgaggagattggtaaaagatgggaagagtagcatttatggatcctcaaagccattgtcttttcactatgatgctgttagctattcccagaatttcgacgaaggttttcatcatgaacaatcaatatttcaagacgttagatccagataaatttgtgcttatttatgtttcttttttctgggtttggtatcaattttgatgtaattgta

SEQ ID NO: 15063 - DNA, 413 bp, Gossypium hirsutum
  Clone ID: LIB3145-018-Q1-K1-H8
gatttactaggcgatgaatccaaaaggccaggaattgctcatcaagaatatacctgtaggtccaattcgagctgtcaaattgacctgtggaagtgaaatatattcaagcaattagagcatatatatactaattataggaagcaaaatttataagaaaaagatgtttttaatccaggttttctgtacattataaaactatatatatataatatatgggactgcattagctatgggagtcctggtgcccttaatttgtaccaggcatgtagttattgcttaattgacattatgcgaagtacaaataaattagtacgtactttttactgtggccgacagctctttgggactgaatcggcctaatattgaatgtattttcagcttgaaatacatatgatggtttctttattgtgatc

SEQ ID NO: 15064 - DNA, 344 bp, Gossypium hirsutum
  Clone ID: LIB3145-019-Q1-K1-A1
cccacgcgtccgtggaaatggagtccttatctatgggaaaaaagctactaacatctgttgtcgtaggactagtagttgcttcagctataacccaaaccgcgttggctcaaaactgtggctgtgcgccaaacttgtgttgcagtcaacatggttattgcggtcagggtaacgattactgtggcactggatgcaaagaaggcccttgtttctgcaagtctcccactggtgcttcagttgcctccattgatccacctcagttcttcaacggcataatcaaccgagctcgtgcggattgtgcaggcaagaaattctatacacgacaagctttcctgactgcacttgat

SEQ ID NO: 15065 - DNA, 291 bp, Gossypium hirsutum
  Clone ID: LIB3145-019-Q1-K1-A10
ctctacccttggtgtaacaaatatttggcatttggattcaacttatttttggcccttcagagtatgcatcagcagaatttttatatgatttgatgatgagaaacgaattaatgtttagcttcttaaacagaagatcgggatggaaggggttacaccaacagtactattgctactgctggagtcatgcatggatctcctttatctgatgattcatctcaacattctgattctgggattttgaatgatggtattagtaatggagtcattcgtcattcaaagtcaaaaccgggg

SEQ ID NO: 15066 - DNA, 399 bp, Gossypium hirsutum
  Clone ID: LIB3145-019-Q1-K1-A11
ctgaaagtttgctcacaaataggtttgtgttcatttgatggaactcgagatgtaagtatgggaattgaaagtgttgtgaatgagaatgctggaaaagcctctggtaatgtccatgatgcaatgtgttctgtttgtgagatggcagtcatatgggtgcaaagccaacttaaacagaaccagactcaggagcgtatacttgattacgtcaatgagctctgtgaccggttgcctagtccaatgggagaatcagttgttgattgtaacagcctatcttctatgcctagtgtcgccttcacaatcggtggaaagatacttgagcttacccctgagcagtacattctaaaagttggtgacggagagctagctcaatgcattagcggattcggtgctcttgatgta

SEQ ID NO: 15067 - DNA, 346 bp, Gossypium hirsutum
  unsure (1)..(346): unsure at all n locations; Clone ID: LIB3145-019-Q1-K1-A12
cacagatagtggaaattggtaagaccacaaacggattctagaagaggttaaagctgatgagcacggagaaggagtctcagcgacgcagatgtatggtaagcctgatattttcgacgttcccatgatcttttgtgccatggaactgttttaacaaacggtaatttcatgtattaactcttaaaatcaactgtgaagataggaagttttatggtaaataatgttgaattggcattcttgttggtgagatctcattatatatatctaattataatctttattttnaaaaaaaacaacacaatcaaaaaaaaagataacttgaacttacccctgaacactacattctaaa

SEQ ID NO: 15068 - DNA, 192 bp, Gossypium hirsutum
  unsure (1)..(192): unsure at all n locations; Clone ID: LIB3145-019-Q1-K1-A2
aatnaaggcccgacccacgcatacgtccacgcttccttttaaattcaatccttaattataaaaaaaaatctactccataattaagttgtattaatagaaaattcaatcacctatcacccaaaccacctcatttctacactcctgatgagctccaaacttgtacctctgctaacacccttacttttaacaagg

SEQ ID NO: 15069 - DNA, 400 bp, Gossypium hirsutum
  Clone ID: LIB3145-019-Q1-K1-A3
aaaaaactgagatatcaaaatcaagagacacatttctgtagcttaaaatttttccccttgcgcccaaaaatggcggatacagctgttgttgttgatgtgccaaggaaatcaagaaacaatggaagaaaagccttgaaacagaagaactcatcatcatcatcatcaacaacaacaacaacaaatgaagccaatactttggcacaaaagctctcacagcagctttccccaacgcaggctccttctccgatgaaatccgatccgtcgaaagagaaccacgacggactctctcaatctctcaaaggaaaagccgcgggcaaagggaaacagagcaagaaatctttcgagaaagacttgcaagaaatgcaagatatgcttcaaaagctaaggatagagaaagaaa

SEQ ID NO: 15070 - DNA, 427 bp, Gossypium hirsutum
  unsure (1)..(427): unsure at all n locations; Clone ID: LIB3145-019-Q1-K1-A4
ccgtccggcaccaanncattactgnnatgagagagncagcnncttgtattgnaaagctgnnctgaaacngnntgggtggatagcgtttttgaacaggcncccggcattttatcnnttggtgnnngttcaaaannncccaanntttggcttgnnaccttgnnctgtttttngnngtgttctanaggcnnctatccganntatctaacatnnccggtaaagaatatggtggaaccatacccacatatcggtgaataggtatgnnngtcggataggaaatatagctgtgggagaaagtctgcttagaattaagtgagtacagagaacaacttttgggtgcctggaatnagaagtcccagtaccaatcannacccaaattttgtgaagtagagtgtttctgaaaataatacatgcttagaaaagttgaaac

SEQ ID NO: 15071 - DNA, 436 bp, Gossypium hirsutum
  Clone ID: LIB3145-019-Q1-K1-A5
ctgcgatgggttgggcacgttatgctcatacaatgagaatatgggtatacaactctggtttcttctttataagacctacaatcccttcaatcgagcttttggaccgtgtagctgatcggctagctaaacaaccaaactcatgggaccaagccgtttttaatgaggaactctttttcccatcacatccgggctacgagggactacacgccgctaagagaaccatggatttctacatgttcatgaacagcaaggtcctatttaaaacagtaaggaaagatgctaaactcaagaagttaaaacccgtaatcgttcacgtaaattaccacccggataagcttcgaagaatgaaagcagtggtagaattcttcgttaacggcaagcaagatgcattggatccatacccagatggctctgagtgagatagcaacaacaccat

SEQ ID NO: 15072 - DNA, 332 bp, Gossypium hirsutum
  Clone ID: LIB3145-019-Q1-K1-A6
tgctgcttcttcatttctatttttaatcagaaaatatatattaatactaaaattgggatgggaagaggaaaattcaagggcaagcccaccggtcaccgccatttctccactcctgaagagctccgtgctggcacctctgctcgtccccgtacttttaagaaggaagaagctgacgcggatgaggaagaagaagagtctgaataggaagtgcaagaagaacccgagaaacgaaagggtactcaaaggcttattgagattgagaatacaaatttggccaaacaaaagaatgtcaaagctaaagatgttgatatgggaagaacaactgaactatc

SEQ ID NO: 15073 - DNA, 432 bp, Gossypium hirsutum
  Clone ID: LIB3145-019-Q1-K1-A7
ggccaagctaatatttccatctctttttgtttgaaaaggcttcttctttaccctgttatagaagttaattgttcaaataaatccagttcctctaatgaggacgaaattgtgctatgtcttggtatgtgagctgaggagcactttccatttaccgagcagaagcaaaccaggaaaggattgttgaagctggtggtcttacttccttgctgatgcttctaagaagttatgaggatgaaactgctcgcagagtagcagccggtgcaattgctaatcttgcaatgaatgaagccaatcaagaactcataatggttcaagggggaatcagtttattgtctactacagcatctgatgctgaggatcctcagactctacgcatggttgctggagctatagctaacctgtgtcggaatgataaactgcaagcaacactga

SEQ ID NO: 15074 - DNA, 251 bp, Gossypium hirsutum
  Clone ID: LIB3145-019-Q1-K1-A8
tgaaggacagttttgacatgggcgaaccttatacatgcaatcctgctggaagcggcttgccacgtgaggaggcttcggttaagacagcaaagaaaattcataatcacaaattcgctgagctctcaagaaatgacatatttatgtgacatgctcctccaacctctgattacataccactctgtgctgcatatctgctaaagatgaatgccggtcacatatacgctgcatggaatgtagagtcatagaactac

SEQ ID NO: 15075 - DNA, 396 bp, Gossypium hirsutum
  unsure (1)..(396): unsure at all n locations; Clone ID: LIB3145-019-Q1-K1-A9
cccacgcgtccgctaattccttgttgagttcattgccttcgctggctaatataaatggcacaggaagtgggaatatagtttcatcccagataggccctttaattcgtgtaggaaatgacaactcatctgtagttcgggatggaagggtttccaccagcagtcctcttgctactgctggagtcatgcatggatctcctttatctgatgattcatctcaacattctgattctgggattttgaatgatggtattagtaatggagtcattcgtcattcaaggtcaaaacctttggacaatgcaatgtattcacagtgtgtaccggctatgtgtactttagctaaggacccttctncacgcatagcaactctaagcaggcgggttctttccattattggga

SEQ ID NO: 15076 - DNA, 435 bp, Gossypium hirsutum
  unsure (1)..(435): unsure at all n locations; Clone ID: LIB3145-019-Q1-K1-B1
catctctcaaatgctcgagcagtcttgcattttgttttcccttttttttccccacacctttttttaaacccatttgctaaaaatgcactgggttcttccagtgttgcttgccgttatcggagttactgcactgctcgttgtaactccggtaagtgggtaccgtccatggccgtacttaaaacccaacagctccgacttaatgttcggaggctctaagaaatttgagggctcatcggagtttatccatatgagatatcatatgggtccagtccttactgctaatatcaccatccacccaatctggtacggccggtggcagaaatcccagaagaaaatcatccgtgagttcatcaactcgatctccgccgttgattccaaacacccttncgtggctgggtggtngaagaccgtacagctttacaccgaccaaacggg

SEQ ID NO: 15077 - DNA, 363 bp, Gossypium hirsutum
  unsure (1)..(363): unsure at all n locations; Clone ID: LIB3145-019-Q1-K1-B10
cccacgcgtccgcgggccctcgaagaagccttcagtgcgtttggtgaaatcgtcgaatcgaagatcattaatgatcgtgagactggaagatcccgaggctttggattcgttactttccgtgacgagaaagctatgagggacgcgatcgaaggaatgaacggtcaaaatcttgatggaaggaacatcaccgtcaacgaagcccaatcgcgcanaattggaagcggtggcggatgatttggaggaggaaacggtggttacagccgcngtggatgcngcggcggatattgtggtcgccaaggaagatatggtggcggacgccgtgaaggtggatacggaaatggtggagggtatgtggtggtgggt

SEQ ID NO: 15078 - DNA, 366 bp, Gossypium hirsutum
  Clone ID: LIB3145-019-Q1-K1-B11
cggacgcgtgggtcaagttttacaatttgaggtacccccaactggagcaagcgtgattggaagagaatccgagacttgctgtcatataccacaagaccacagcaaatggtcaaagtcctccggcgcttccttgcaaattggacaaacgacatcaacaattaatttcctctgaaacagattacaaaaatgaggcacaaaattattaaacaatctctatatgtgtatttttattttagctggaatgtgcataggccaaaaagatctgcagaaatccttgtaattttctgtattagggaagttgtagattattattttgtaaatgttttgtaactaggacccgatacccacttttcggtgagtacaccc

SEQ ID NO: 15079 - DNA, 410 bp, Gossypium hirsutum
  Clone ID: LIB3145-019-Q1-K1-B12
tacgcacttgcagtgctgccccgacattgatcaatggttacttttcctttcaaggaatgacatcaaagagttggtccttgaattgggtgaaggagagtggtttagggttccttcttgtcttttcaactgcaaaaagttgacccgtttggatcttttccgctgtgaattcgatccgccccctagttttaaaggattcttgtgcttgaagagtcttaatctccaccaggttttggtttctcctgaagcaattgaaagtcttatatctggttgccctcttcttgagagcttagcattgtcctactttgatagtctagcgcttactatccgcgctccaaatctcaagtttttgtgtctggaaagtgaattcaaagacatttgtctggaaaatactccgcttttagttgcaatgt

SEQ ID NO: 15080 - DNA, 382 bp, Gossypium hirsutum
  Clone ID: LIB3145-019-Q1-K1-B2
tacaaagacacaggacagcatgttaacggtgagttctcgatggcggtggttcaagccaacaatttacttgaagatcaaagccagctcgagtccggttgtttgagtacacacgagtcaggtccctatggcactttcgttggcgtatatgacggtcatgggggaccggagacttcacgctacgtcaacgatcatctctttcaacatctcaagcggttcacttatgagcaacagtcaatgtcggttgatgtaatacgaaaagcatatcaagcaacagaagagggtttttcgtctctcgttgctagacaatggcctatgacaccacaactcgcggctgttggatcatgttgcctggtcggtgttgtctggtgcacgaacctttatg

SEQ ID NO: 15081 - DNA, 322 bp, Gossypium hirsutum
  Clone ID: LIB3145-019-Q1-K1-B3
ccgaaaccagatcggaaattccctttcgttttcccccaaaaagtttccaatttctcctggttcaggatcgacgctagactatccatcgccaccgttcatcatcgtctcagccgcctctcttaaaaccagggataagaaaagatgggagctttcatatcgaagttctggttcatgttatttcccgcaaaggaatataagattgtggtggttgggttagataatgctggcaaaacgacgacgctttacaagcttcaccttggtgaggttgttactacccatcctacttgtggcagcaacgttgaagagcttgtttataaaaaca

SEQ ID NO: 15082 - DNA, 423 bp, Gossypium hirsutum
  Clone ID: LIB3145-019-Q1-K1-B4
ctttgaataagaaatggcccgacttctcccccctcagcttttctttctactgaccttggtggtcatcatccatccctcatacggacttaagcatttgaaaggtacagccctcgttgacgaggtttgccgccacacatcccacaatgaatattgcgtcaataccatagtcccaaagccgccattatccggggaaaggatcgccagtaccactttgggttgggcacagataaaagctctggaagccggaaccatcatagctagtctacttaatgattcttcttccatcttaccagtagcaaagaaccctctacaggccaaagagcttctccaaatatgttgggattctaacatgaacaccatggaggacctttggattgctagcagtttgctttacaataagatcatcaatcccatgattgctcg

SEQ ID NO: 15083 - DNA, 288 bp, Gossypium hirsutum
  Clone ID: LIB3145-019-Q1-K1-B5
gctgacttgaacagaggaatgcaaataggttcagttgattcatatgctggagctggaagattcaaccttgccttaaccacatgctcaaatttatcgactcaaagacagaatggtcccataggattttcacatttggaagtgggtcgtccttcttcaactaatgattggcatactgggtatccccgctttacttcaaagcaatctcacttcacaccacatatgacacaaaatcatcccagtccgttggagcaacaaaccctgtcgcgactcaatcatgggagatccact

SEQ ID NO: 15084 - DNA, 430 bp, Gossypium hirsutum
  Clone ID: LIB3145-019-Q1-K1-B6
atcctggtgcacttggaaatggaagatggtacgcaacacaagtaaccttaggcgatggtagattcatggtgttcggcggtcgagatttcccaacatacgaatttgttcctccacaaggccagaaaaacacccttaaggatgtggtcgattttaatttcttggtggaaacacacgatcccgtggaaaataatttgtaccctttcgtttacctttcgactgatggaaatgtcttcatcttcgctaacaatcgttcggttcttttgaaccctaacacccaaacgatcatccacgagttcccagtgctccccaatggtgctcgtaattatcctgcgtcaggaagtgcttgcctccttccgatcatgctcaagcctaatgaagatcgtagagtgatccccgccgaggctttgatatgcggtggtgcatcacatga

SEQ ID NO: 15085 - DNA, 315 bp, Gossypium hirsutum
  Clone ID: LIB3145-019-Q1-K1-B7
gaagaccaagatttccacacacaactagtgaatggatttcaatctctcacagcagagctatctcattacatccctgcaattctatcagagctctgataatgttgtaagcattacttgctccgaaatatctttctggtgcaagctgttcataaagattgtgacacattctttttgtagatctgtgctcaaatgatgattgttgatgtatgtaataaccaatttgcttgcgtgcaatggtggattacttattgtcgaatgatgttaaaaccaccaatcctactgtacgcggcaaccaacaagagctcgtctataaaa

SEQ ID NO: 15086 - DNA, 232 bp, Gossypium hirsutum
  Clone ID: LIB3145-019-Q1-K1-B8
gatgagtagtagttactagcacatcctctgcgagtattgaaagaactgacaatgggggggttttcatataagttgtgaagactataaccgtagccaatgacatcgctactgtgcaaaagccgtcaggtgacatcaaacatgtattacattgcaccaactttagcgagaattgaacacatgtgggactgaacgagcagaagagtcacttggactccgctatcgaccatgggga

SEQ ID NO: 15087 - DNA, 325 bp, Gossypium hirsutum
  Clone ID: LIB3145-019-Q1-K1-B9
aagacatgataactatcttcttcctaagtaccacagtgaggacatatagtatttgtggccactcgtttatgtatgagatttactaggggagggatgtaattctaggaaattcgtcatattgtgattgtaattttttatggtagctgtagattccatagtttcttgtagaagtccttgatttcagcctgtattaagtaattattaggacatcttgtaatagtttataagcacttcgaactgagaattcactagagggttctccttcccacatttggaagtcgtcgtgaattgtttccgctagaggaatctgtaaaattttctgagc

SEQ ID NO: 15088 - DNA, 417 bp, Gossypium hirsutum
  Clone ID: LIB3145-019-Q1-K1-C1
cccacgcgtccgatcacccccaaatgaccatcaagctgatggcaactcacacaatactcacaatgtttgctcttctaatggcagcacaattcaaatcaatatcttcaacgaaccttccaccaaaggatgatcaagatctccgtcttgccatggaagagatgcaaaaagccaattacttcacctttgtaatgttgctcaacatgttgcccctcgacccaaagttccttgctaacgtaacttttttaatgcccaatgatcggatgttgtcaaaaacggtaatcccagagaacgcggtttccagcttcttgcatcgtcattcaatcccttcaccgttgattttcgagcatcttttatatatcccgacgggttcggttcttcccagtttaatgccggagtacttgatgaatgtctcgaatg

SEQ ID NO: 15089 - DNA, 420 bp, Gossypium hirsutum
  Clone ID: LIB3145-019-Q1-K1-C10
gaattttccagtataatggtggtcacagtcgagaaatctaccatacgaagagaatgcaaagggtattctgtgtgaagtatagctgtgatgccagttatgtcatttcgggaagtgatgatactaaccttaggctctggaaagctaaagcatcagaacaattgggagtggtacttccaagggaaagaaagaaacatgagtatcttgaagctgttaagaatcgttacaagcatctgcctgaagttaagcgtattgtgaggcacaagcacttgccaagaccagtttacaaggcagccaaccttaaacgcactatgattgaagcagaaagaaagaaagaacaaagaaggaaagctcacagtgcccctggaagcattgtgactgaaccagttcgtaaaagaagaataattaaagaggttgagtgag

SEQ ID NO: 15090 - DNA, 436 bp, Gossypium hirsutum
  unsure (1)..(436): unsure at all n locations; Clone ID: LIB3145-019-Q1-K1-C11
ttcctatttctctctcactcagtcgaatccaagaaaaacactccaactacgattttgctggcatattcgggcgaccgatgctacgccaccataacaacgatctacatgcccgccgttcgactgcttttcagccttagatcccctctatgcttcgatttcgacaaagcaaaaggaatccacggcatttggtaatgtttttcttttattttcaaatgttttaaaattataatgaaaaagaatagaaggaaatagaatcgaaataaaagcatagaacctagaaaagatgaatctaaaatcaccttttaaaaactgactttggattggtcttatattttctttacaatatgcgtgtatttctctgggaaaaccgaccccctttacaattgattatctggctntttatagccgaataaagagaaataagaaaaaataaaaa

SEQ ID NO: 15091 - DNA, 282 bp, Gossypium hirsutum
  Clone ID: LIB3145-019-Q1-K1-C12
cccacgcgtccgcccacgcgtccgcgctgagtttaagcatatcaataagcggaggaaaagagacttaccaggattcccctagtaacggcgagcgaaccgggaaaagcccagcttgagaatcggtcgccatcggcgtccgaattgtagtctggagaagcgtcctcagcgacggaccgggcccaagtcccctggaaaggggcgccggaaagggtgagagccccgtcgtgcccggaccctgtcgcaccaagaggcgctgtctacgagtcgggttgtttggaatgc

SEQ ID NO: 15092 - DNA, 315 bp, Gossypium hirsutum
  unsure (1)..(315): unsure at all n locations; Clone ID: LIB3145-019-Q1-K1-C2
gcaaatgggaaggtattcaagcacacatccacagcttgtgataagaagatggccaagaaactggcttccaaagaagttttgaagtctctaaagggagccaattttagctagattttgcatttgacctgagctgagatcaaacatctattacattgcagtagctttagcaaagattgaaaacatgggggactcaacttgcagaagagtatttgggttaccttcctcaaccagggggacaaatgatgatatgattggtttcatgggaagagattatggngactntcaaaggaaaaatatgatcctttatgggtgaag

SEQ ID NO: 15093 - DNA, 352 bp, Gossypium hirsutum
  Clone ID: LIB3145-019-Q1-K1-C3
atgcgtccaatcgtacattctttcatcaatcatctaaaatttgttataagctaagtgcctaaagacggggttatatacaagggatggagccaatgaaatgctcgcattttaattaaaatttgcatctctccttgattcataatcaaggatcaaaatcttgtgctataccatacgcggatctaactcacatggcaggtgtatctaaagaaactttgactctgtctacctctctttgcaaaaaaaacattgtaagttcccattcgtaaaatttgggcagactctgtgctctatctgactatatatattaatttatctaagtggcattctttaactttggcaatgagaaatgaca

SEQ ID NO: 15094 - DNA, 394 bp, Gossypium hirsutum
  Clone ID: LIB3145-019-Q1-K1-C4
cgcaggatgaattcgacaaaaccttttcaatgaaccaagctagatctatcagatggaatgtatctgccagtggtgctcgcccgaacccacagggatcgtttagatatggttcgattaatgtgactgaagtttacgtcttgagaaacaaaccaccagagactattgatgggaaaagacgagcgacactcagtgggatatcctttgtcaatcctgctacaccaatccggcttgttgaccagtataagattaaaggagtatataagcttgattttcccaataaaccacttacagagccacctaaaatggaaacatctgttattaatgggacttataggggatttatggaagtcatcctacaaaacaatgacactaagatgcatacttatcacatgag

SEQ ID NO: 15095 - DNA, 426 bp, Gossypium hirsutum
  unsure (1)..(426): unsure at all n locations; Clone ID: LIB3145-019-Q1-K1-C5
ccagtacatggttacatcaattcatgaaaattggttctgtgcgaggtgcctgaacacgtcaaaatctgctggggaaggtgccattgtgatgcaggcatcagtgtttctgttggttgcgctgtatgatgggtcagttggcttagcatctcgtgctatggcatctgtggatcaacttgtttggcagctgaatcgaaagaacctttgagcctggcttccacataaaaaaaaaaaattattgtaagtttcggtgctaaaaggttgggctgcctctgtgctgtatctgactctatctatttatttatctaagnggcattgtttagctttggtaatgagaaatgacaagggccaaatgtcagaaacggactaattgttggaagcaagttgcagagatcgttgtgtcagactccagttgcaacatctgatcgt

SEQ ID NO: 15096 - DNA, 119 bp, Gossypium hirsutum
  Clone ID: LIB3145-019-Q1-K1-C6
cccacgcgtccgattagcactctttagcaagttggagaatgagtggcttcattaatctggctcatcacttggtcagccagtggctatatggaacatgattcagatgattgccacatgct

SEQ ID NO: 15097 - DNA, 313 bp, Gossypium hirsutum
  Clone ID: LIB3145-019-Q1-K1-C7
cccacgcgtccgctccgatagaagaaaaaaaaaagaaaaaaagaaatttgcaaagtcgcggcgaaaactcaaatgctaaacgggaagaagcctttgttctgaaatcaaaattagggtattgcctgtgtacataatgaggaaccaaactttgttcggcaccaagcttgtatttgatacgattgttgggtttctttatcataatcagccgcactggaagtgtctttgtctttaaataaatataacaactaaaaaaaaacaaactactaaacaaactgagcgaactactacagcaagaatcaaatgcgccctaaac

SEQ ID NO: 15098 - DNA, 419 bp, Gossypium hirsutum
  Clone ID: LIB3145-019-Q1-K1-C8
gggaattaattggtcgacccacgcatgcgtggactcagactaagtcgcttaacaaaaaaaatgcaaattcaaaagtacaaagcatgcaaggtgagtggctaccaggtgacataaatacatacatgactaggatttgtgtgcctttaaacgaacaggctgtcaaatggacacatcttgaagcacccttgacacttcatagaaatgcgcatgcaataaattttctcccacttcattatgcttaaattgagttggggaatattggtttttgcagttctgataatgtttgggaaaacaaaatgacaatatctatgaagattgtgtatcatatcttttaaaaaaaaaattgttgcaatcttactcttacactcctgctattgatatgtgggctggtggtgctatattagcggagctttttactt

SEQ ID NO: 15099 - DNA, 383 bp, Gossypium hirsutum
  Clone ID: LIB3145-019-Q1-K1-C9
gaggattttccatcactgagagaatacaatgattacttggaagaagtggaagacatgatttttaaattgattgaaggaatagatgttcaagctattgaggagaaaattaccaattatcagcaagaaaatgctgagcagattatgatcaatcaagctcgtaaggctgaagatttagctgctgcaatggcagcaagcaaggggatcccagtacaggccgatactgatgggaactcacaagcagggtttgtagctggtacccaaggtcaatatgcaccgacagttgctggaggacagccacgaccaacaggcatggcaccacaaccggtaccacttgctggtgggcttgacatgcatggctatgctcttgatgatgaagaaatgat

SEQ ID NO: 15100 - DNA, 359 bp, Gossypium hirsutum
  Clone ID: LIB3145-019-Q1-K1-D1
cgcaaaagcttcctattttcatggctgcctcacttcggctcaatcctacttcaaccccggcgctctgcccaatctccacctacaagagcttgactccggtactctgtggcccacgcgacaaccggggacctgtcgttaaaggccgtatcttaagcaccgaagccatccaggccatccaatctctcaaacgcgcccagcggaactcttcatcgacggaaacggtcaccccactcccttacctgtcccgcctcataaaatacgacctgctcgccgccctgcgcgaactcctactgcaagatcaatgcgccctatgcgtacacgtactctccaccggccgatcagaatacccgcctcctgac

SEQ ID NO: 15101 - DNA, 280 bp, Gossypium hirsutum
  Clone ID: LIB3145-019-Q1-K1-D10
gcaacatggagtttcagaagaaaaggcatatgaagagttaaagaagctaattgattctgcttggaaagatataaaccaggagttgctgtttaagccagctagggctccatttccagttcttacttgcgttctcaatcttgcgagggttatggatttcctttacaaagaaggagatggttatacacacgtcggaaatgttacaaaggctgggattacttcactgttgattgatccggtgccgatttgatgacgaattttggatttgagaaagctgacaaac

SEQ ID NO: 15102 - DNA, 297 bp, Gossypium hirsutum
  Clone ID: LIB3145-019-Q1-K1-D11
gtggatccttacttcataaagctagctgatgccatggttacttggattgaagcttggagagatggtcaattgtcctggagaaaagcctgcaatgacttctttacccaacgccacttctaaaaagtaaaaaagcattttgattgagcagtacctttgttatcattaccatcatttatttgttttttctttgaccttttgagacatttccccccaatatttcatgcgttgggttgttgttcaacagcaattgttttagttttaatacagcaaggtgaatttgaatcacaaaacaatgac

SEQ ID NO: 15103 - DNA, 356 bp, Gossypium hirsutum
  Clone ID: LIB3145-019-Q1-K1-D12
ccccaatgacttggtttttcacccttgtgtagtgcaccatcgcccatgctttggagaagacaaaatatccagattcagatatctattggaagaagcttgaagacaaataccatttctcttgccaatttacagctgatctttttgcaatgaaccatacagatttcatcatcaccagtactttccaggaaattgcaggaagcaaggacactgttggtcaatacgagagccacactgctttcactcttcctggtctctaccgtgttgtacatggtatcgatgtgtttgatcccaaattcaacattgtttcccctggtgctgatatggagatatacttcccttacaccgaaagagaaagc

SEQ ID NO: 15104 - DNA, 304 bp, Gossypium hirsutum
  Clone ID: LIB3145-019-Q1-K1-D2
cggactcggactaagtcgcttaacaaaaaaaatgcaaatccaaaagtagaaagcatgcaatgtaagtggctaccaggtgacataaatacatacatgactaggatttgtgtgcctttaaacgaacaggctgtcaaatggacacatcttgaggcacccttgacacttcatagaaatgcgcatgcaataaattttctcccacttcattttgcttaaattgagttggggaatattggtttttgcagttctgttaatgtttgggaaaacaaaatgacaatatctatgaagattgtgtatcatatctttt

SEQ ID NO: 15105 - DNA, 279 bp, Gossypium hirsutum
  Clone ID: LIB3145-019-Q1-K1-D3
cgcactagcactaagtttctataacaaaagttattcacgtccaaaagtacaaagcttgcagggcgaggtggctaccaggtgacactaatacatacatgacgaggatatggtgcccataaaacaaacaggatctaaatggacacatctttatgaccctcgacactttatagaaatgctcatgcagtaaaaaccctcctactcatttttctaaaatggaaacggagaatctcttctttagctgttctgctaatgatagggaaaacaaactgacaccctgta

SEQ ID NO: 15106 - DNA, 428 bp, Gossypium hirsutum
  Clone ID: LIB3145-019-Q1-K1-D4
caaaggtgttatatttttggctgctacaaatcgtagagatttgttagatcctgcacttctcaggccaggtcgttttgatcgcaagataagaattcgtcctccaaatgctaaggggcgattgcaaattttgaaaattcatgcaagcaaagtgaagatgtcagagtcagttgatttgtcttcttatgcaaataacttgcctggatggactggagcaaaattggctcaactagtccaagaggctgctcttgtagctgtcaggaaaaggcatgaatctattcttcagtcagatatggatgatgcagtagatcgactaactgtaggacctaagcgtgttggtattgatctgggtcatcagggacagtgtcgcagagcaactactgaagttggagttgctataacttctcatctgcttaagcgatatgaaaatg

SEQ ID NO: 15107 - DNA, 351 bp, Gossypium hirsutum
  Clone ID: LIB3145-019-Q1-K1-D5
ggaacagcggtaaagaggaagaaagcttctcacgccgggatgtttgacattgcaaagacagcaaatagaccgatgatacacattggtggctgaggtacttatgtaccttctaatgttttaaggaatctggtagctcggtttcttttttgttggtcttgtttttagttcttgcttgttgaggttgaacgattatagtaccgttttatagtgggataacataggctctcttcttcatatgtattgctccgaatagcataggaagactgttacctgttagaatacagaatggtgttgtaagtcaactaatgtttatacccatatttgattggtacaagatcacagatcctgtta

SEQ ID NO: 15108 - DNA, 407 bp, Gossypium hirsutum
  unsure (1)..(407): unsure at all n locations; Clone ID: LIB3145-019-Q1-K1-D6
ctcacacgtacgcacagtaccaacattaatgctgctcccatctgccaaacactcactgcgagcccgcaaccaagtcgacgatcagacatacgtgactgcgatctcaaatgcctccaaacgatcacgctggcttaaggactcatcttgaggcaccattggcacttaatggaaaggcacatgccatacatgactctaccacaacatcgtgcttaaacagaaatggggaatattggtctttgcaacgccggtcatggttgngaaaacaaaatgacaatatctagaaagattgagtatcatatcttttcaacgacaccgaatcataaatgtcgtgttcatactgaacatggtcggaagaaatcttctgattttggatgctcacaagctacatgccagggtcaaggtacttt

SEQ ID NO: 15109 - DNA, 371 bp, Gossypium hirsutum
  Clone ID: LIB3145-019-Q1-K1-D7
gaggagaagaatgaggaggaagaggaggaaaaatggcgatgccctgtacgtagaccaacagaagccatcagcaaggaaaaaggaaaagtacctgcaacataaccccatgagaatgcttagaaacgatgccatctttttcagctaaatcaaccatctgcacaacacttattgcagcacgatgcacctgacaagctacatgttatgtattggttaccaatatctttgttagcaagcaaaatgctccatggatgacataaaataatgaaaagttatgcagcgcctcataatcaattgaatgctcacagtcaaattgatgttataaataatagacactcatacatatgtttcagtctactagatgaagaaataca

SEQ ID NO: 15110 - DNA, 356 bp, Gossypium hirsutum
  Clone ID: LIB3145-019-Q1-K1-D8
attgcaacgcaccaaacaggccttaacaaccagaagctaagctattgggtgacctgggagccttgtgcaaaattcagatcagccaaaagacttcacggcaaaacgaatgatgccagaatctgaaccgcaactgatgggaacatggcggaacattgggtgtacaactaactttggatgacattagatagggatatagcaaatgaaaagaaaagaaaaactattaattagcgaggaaaacatttgccttggcctctttttatctctatcttatgaatgattcttttttcttttaatgtactcatgtagctgaattggatgttgtgtctgtgactaatttacccttgcaatgtacttat

SEQ ID NO: 15111 - DNA, 433 bp, Gossypium hirsutum
  Clone ID: LIB3145-019-Q1-K1-D9
gtgtccctaacgtggttgtgtttttgaacaaacaagaccaggtagatgatgaagagcttttgcaattagtggaattggaggtgcgtgaattgctctctagttacgaatttcccggtgatgatgtccctattatttctggctccgcacttttagctttagaagctttgatggctaagcccagtattcctagaggtgaaaaccaatgggtggataagatttatgaacttatggatgctgttgatagttacattcctgttcctcaaagacaaacagatttgcctttcttgttagctgttgaggatgtgttttccatcactggtcgtggtactgttgccactggtcgtatcgagagaggtactgttaaggttggagagactgttgacattgttggattgaaggatacaaggaacgtcacagttactggtgtggaaat

SEQ ID NO: 15112 - DNA, 369 bp, Gossypium hirsutum
  Clone ID: LIB3145-019-Q1-K1-E1
gaagaactgtgctccactcatgctccgtctagcgtggcactcagctggaacttttgatgtcaagaccaagaccggaggtccattcggaaccatgaagcaacctgctgagctcgctcatgctgctaacaacggtctcgatattgcagtcaggcttctcgagccgatcaaggagcagttccctatcctttcatacgctgacttctatcagcttgctggtgttgttgctgttgagatcaccggtgggcctgaagttccattccatcctggaagagaggacaagcctcacccaccacctgagggtcgtcttcccaatgctactgagggagctgatcacttgaggcaggtgtttagtcatcaaatgggtcttag

SEQ ID NO: 15113 - DNA, 411 bp, Gossypium hirsutum
  unsure (1)..(411): unsure at all n locations; Clone ID: LIB3145-019-Q1-K1-E10
aaatccttctctctttatatataatttattattattatatatcctttacaaattcatcttcaccttatgcgaccagggtgttcaaaatctttagagaggaaagcaaaagaatcccattctcctccttccagtttgcagtccctggaaagctgtaccctataacgggatggacgtgacagtgctcgacagacaacaagcaacctatccccttgaattatttgcaagatcagtgcctctgtttcagagttatttaggtagtggaccaatagttgagctgaaaaggccagaagcttatttgggtggtgatggttttcacgaatttgtctactttccaatgggtggaggaccaaaatttggtgacagtgaaaagttgaatttggtgcccnctgatgctgctccggttactgtatt

SEQ ID NO: 15114 - DNA, 427 bp, Gossypium hirsutum
  Clone ID: LIB3145-019-Q1-K1-E11
gattcggaaggattggacgtttggttgcgagagttgctctccaaagcaatgatattgagctcgttgctgttaacgatcctttcatcaccactgattatatgacctacatgtttaagtacgacagtgttcacggtcaatggaagcaccatgaacttaaggtgaaggactcaaagaccttgctctttggcgaaaggcctgtcactgtttttggcatcagaaaccctgaggaaatcccatggggtgaaaccggagctgattatgttgttgagtctaccggtgttttcactgacaaggacaaagctgctgctcacttgaaaggtggtgcaaagaaagtggtcatctctgctcccaataaggatgcccccatgttttgtgtgggtgtcaatgaagaggaatacaagtctgacctcaacattgtctccaatgc

SEQ ID NO: 15115 - DNA, 399 bp, Gossypium hirsutum
  Clone ID: LIB3145-019-Q1-K1-E12
ctcgacgagccgtttctcacttcagcgaccagacagtcagagatcctcccaatcaaacagcaatgacaaagagaaccaagaaggctggaattgttggaaaatatggtactcgttatggtgccagtttgaggaagcaaattaagaagatggaggttagtcaacacagcaagtacttctgtgagttctgtggaaagtatgcggtggagagaaaagctgtcggtatctggggatgcaaggattgcgggaaagtcaaagcaggcggtgcttatactttgaacactgctagcgctgtgactgtgaggagtaccatcaggaggctgagggagcaaactgagagctgagccaccactggtgattgatttatattctactttcataggatgtttgtttgcatgtttt

SEQ ID NO: 15116 - DNA, 372 bp, Gossypium hirsutum
  Clone ID: LIB3145-019-Q1-K1-E2
ccggagtgtaaggcaacaaacctgggaaaacggaggggaacaaaatcaaggcatgtgggttcagcttgatggtggtggcgatggcgaggggagtccaaggcaagaggaatgatgccgcagccgcagccgcagctgatgggaacatggtggtacattgtttttacaactaactttggaggacattagatagggataaagcaaaagaaaagaaaagaaaaactattaattagcgaggaaaacatttgccttggcctctttttatctctatcttatgaatgtttcttttttcttttaatgttttcatgttgttgtattgtatgttgtgtctgtgactaagttacccttgcaatgtacttatgttgggcacatgct

SEQ ID NO: 15117 - DNA, 266 bp, Gossypium hirsutum
  Clone ID: LIB3145-019-Q1-K1-E3
acgaacgtaacgcaacacaccctccaaatcgcgtgggaccaaaatcaaagtttgtaggttgagatcgataccggaggccattgcgaagccattacacagcaagatgaactatctcatactcctaacaacagtttatgtgaacatggcggtacattgtttctacaacaaaatctggaggacattcgatcatactactgcttaatataagataataatggcttttaataagcaaagaaaacattatccttgacctccttttctctcta

SEQ ID NO: 15118 - DNA, 409 bp, Gossypium hirsutum
  unsure (1)..(409): unsure at all n locations; Clone ID: LIB3145-019-Q1-K1-E4
aaaattttaagatttaattttaatatgttcattttaatagctagttgatctaataagaacaagagtatagtattcaagtggtggtatgtcggttagattttgtttcaaaaatagtggtccaattaacatgcaagtcctctatgatgctatccatatacaatttggccacttcaacttttacctatcacatttttatggtttctcaactaagtcctttccagtaaaattcccattcggtactcgttttatttgtcttcacatatcccagcttaaataacccaaaaaatgctaatggcttagtagagcaattaggcaatatctgtttttaaatgtattcaatggtatgtccatttgaatcagctgaaaatttcaccaattccctttgcanagtgcttactaaaatactgga

SEQ ID NO: 15119 - DNA, 380 bp, Gossypium hirsutum
  Clone ID: LIB3145-019-Q1-K1-E5
ggggaattctttgcttctgttctttcatggaggaccagtgttttgcttttgttctttcatggaggaccagtgttctttcatggaggaccaaacttttaagggatccttcagatcggctatttggtacctttgggagcaggggtgctaagcagaattcaaagaagaaatctttggatgcattgataaaaagactccgggatgtgagctaatttggcctggaggaggtgtatgtatgtctatgttcttctgcctgttgcctttgttgattgcaattggctatatttcttaccttatggttggtcaattggttcattaaaattaaaagggtggctggcctttttacttggtggattaaaataattaggggccagtgaaaaatt

SEQ ID NO: 15120 - DNA, 325 bp, Gossypium hirsutum
  Clone ID: LIB3145-019-Q1-K1-E6
attgaactgcacctgactaaatgttcattgcggtagctagttcatcgcatgtgagctcgggtttatcgttcatgcgagggcgcgcggattacatttcattagaaaatatgccgctcacgtaaccaccgctgacgtgtatcatgctggtccattccatgtacaactaactatcttggacctctcacagggataaggctactgaacaaaaaacatttactattaattagcgatgaaaacattggcctatgcctctttacatctcctatcctatgaatagccctttaatgcttaaaggttagtatatcgatgaagcgattgctgtgtc

SEQ ID NO: 15121 - DNA, 390 bp, Gossypium hirsutum
  Clone ID: LIB3145-019-Q1-K1-E7
cccacgcgtacgaccacgcgtccgcccacgcgtccgtccacgcgtccgccctggtgaaagtgaaaatggaggtttacagcacaaggctaatggttctggtgtttgcatttgcactagtcagcatagggtacgcgcaagagtcgaactcgaccactcttgttccagcaatactgactattggtgactcagcggttgatgtgggcaataatgattatctccccaccatcttcagggctaattacgctccttatggtaggcacttcagtaaccaaaagcctactgggaagtttagttatagcgagatggccactgacatctctgactgaactcttgagtttactacttatacaccaccatatctaagcccttaagcattaacgagcaaccttc

SEQ ID NO: 15122 - DNA, 286 bp, Gossypium hirsutum
  Clone ID: LIB3145-019-Q1-K1-E8
gggaatgaattgctcgaccgacgcatgcgtactatttgccagtgtgcgtgaaacatggaattgcacaccatacagaagcgcatgaggctgggacggtgcttgacatttgcttagcattctaaattctatggatgacaatatagtgaagacctaaccgagcatgtccagaatattgatgaaattactcgaagtgcactatcagagtcaactcagaaacatatctatttcaaaatagaatatctgattgttactttaattcgaaatcattacaatgtccttatgtctt

SEQ ID NO: 15123 - DNA, 424 bp, Gossypium hirsutum
  Clone ID: LIB3145-019-Q1-K1-E9
tgctcaaattattttgcctggaaacccaattcaaaggcaacggaaaattagggttttactaccaaaattctttatttatttttcttttcaattttcctcaggtgatttctcttttggggttttccccctttctatttttcgtttttcccagattgcttttattgcttattggtatatatatttttctgtgttttgcgtcaatttttaattatgtttgtcgtgaattaggtaacaaacgtttaaattcttgttgttttaactcaatttagaaagttccttctccggccgagaatttgaattagatttgttcattattcttcccccccccccaattttagctacaattcattaaatgctaagataattcaagtttagactttaatttccttgaaggaattgtttgatttctctttaaaactaaaac

SEQ ID NO: 15124 - DNA, 422 bp, Gossypium hirsutum
  Clone ID: LIB3145-019-Q1-K1-F1
ccgaaaaatctggatgaggaagtttcagaaccctcaagtataaggaatcattgggccggcatctagaattctcgttatttgcaacaactaagcgaagcgagacaaaaatggcgacttcagccatgtcggaaaaacgggtcgtcctgctctgcggcgactatgccgaggactatgaggttatggtccctttccaggctctgttggcttatggtatatcagtggacgctgtttgtcccggcaagaaggccggcgaaacttgccgcaccgctattcatcaactttccggccatcagacctataccgagatccgtggtcacaatttcacactaaatgcatcatttgaagatatagaccatactaaatatgatggtttagttatagcccgaggacgagctcctgaatatcttgctatggatgcattt

SEQ ID NO: 15125 - DNA, 357 bp, Gossypium hirsutum
  Clone ID: LIB3145-019-Q1-K1-F10
cccacgcgtccgtgagaggcttcatatgaaagaggttgttacaaagttaaagaagatcaaagtaaagttatcaagggatatgcaacgcgttcgatgaagggaccattgttaaattgactaaaataaacataagctttgctttctagcaatatctttgataaatatttctacagatgctctgttttcctataaagtttattaatagttatttctgcattttgtgcatttttttttaaaaaaagaaacaagttcaaggaattagctacaattaggttaatgggaatctatattaatcattgctcgatgaacatctttttctaacaaagattgagcatgatcagttgggtcttcaaaaag

SEQ ID NO: 15126 - DNA, 381 bp, Gossypium hirsutum
  Clone ID: LIB3145-019-Q1-K1-F11
cccacgcgtccgcccacgcgtccgtccacgcgtccgagcaaataaaactttgaattattcatacaaaacaatgaaaacccacttttttcccctggtttttctcctcatttttttcttagcccaaggtctgaaccccaaatgtgccatccaagaccatggctcaaacctgcaagtgttccatgtttacagtccatgctcacccttcaaaccctcaaaaccactctcatgggaagaagatgtgcttgaaacgctaaccaaagaccaagccatggtgcagtttttgtccagcctggtggctaaaaaatctgtggtgcctatagcttcaggcaagcaaattgtgcaaagcccaacttacattgggaaagccaatattggaacccc

SEQ ID NO: 15127 - DNA, 373 bp, Gossypium hirsutum
  Clone ID: LIB3145-019-Q1-K1-F12
ctggcatcagtctcttcttcagagaacctgcagcagacaaatgtaaatcaccagattcatggaacctctcgccagaatgaatcagcaactgcaggatcccaagcatccttttctgagttacgctccggttccgtccctgtaggtgtttatgcattgcagagagagaatgtattcccggagagacctggcgagcctgagtgccaattttacatgaagactggtgattgtaaatttggtgcagtttgtaagttccatcacccaagagagagagttcttcctgcccctgattgtgtgttgagtcctataggccttcctttacgcccgggtgaacctctatgcatattctattctcgatatggaaattgcaaatttg

SEQ ID NO: 15128 - DNA, 387 bp, Gossypium hirsutum
  Clone ID: LIB3145-019-Q1-K1-F2
gtctatttgcaagtgtgcgtggcgcgtggaggtgcacggcgtacagaggtgctggaggcttgaacggcgctggaggttttcttagcattctaaagtctataaataacaataaaaagaagacctaatggagcatgtagagaagattgaagaaattactcgaagtacactatcagagccaactcagaagcagatctctttcaaaattgaatatctcattttaacttttttcgaagtttatttgaatttctttatgtcttatagtttttctgactttgagatgttttttttttcaaattatgaactaaattccctagatacctagggaaaatgaaacctatgatgaattttattatttgatttctgaattacatgataaatacttgattc

SEQ ID NO: 15129 - DNA, 339 bp, Gossypium hirsutum
  unsure (1)..(339): unsure at all n locations; Clone ID: LIB3145-019-Q1-K1-F3
cggacgcgtgggcggacgcgtgggcggacgcgtgggcggacgcgtgggcggacgcgtgggccgccaatgtgtttcaccaaagatgatgccgattatcttgttgatgctttggattatgcaatgtcagagttgtgagcaaaaggggttatctaacttgtggatcctttggcatcaaagttcagcaaaatcttgtgtttaatagtaataataaaagtacattttatttgcatttgtatttgtcaaaaaggatcatcaaaatcccttttataatgtgaaatatgttccactgtgtttgcatttgttnaaaaaaaaaaaaaaataaaaaaaaaaaaacataaa

SEQ ID NO: 15130 - DNA, 421 bp, Gossypium hirsutum
  Clone ID: LIB3145-019-Q1-K1-F4
cccacctaagggtctgaaaatggcatccactttcatcggaaattcaacttcgattcaggagatgtttaggagggttagtgagcagtttacagctatgttcaggaggaaagctttcttgcactggtacactggtgagggaatggatgagatggagtttaccgaagctgagagcaacatgaatgatttagttgcagagtaccagcaataccaggatgcaactgctgacgacgaggagtatgaggaaggagaggaagaagaagaggaagctgcttgagtgaataacgatatgtatatatgtttgttgggtgatgtttatgttgtcaaatcaagattgacataacataatatgtatggttgctgtgggtttgagggttcttccttgtatctttgatggattgatttcttgtgtctctgcatttgc

SEQ ID NO: 15131 - DNA, 408 bp, Gossypium hirsutum
  Clone ID: LIB3145-019-Q1-K1-F5
gacaatgagaggaacattgacgttgacttggattctgatggtctgcctctcccaagtagcggtgcagagccaatactactcggagagcttaccatatgatcccaggccggttaaggtcactaatctttacttctttttgcatgaaactctccgcggtaagaacccaacagtagtcatggtagcccaagctaacaacacaagcaacgacaactactcatcagtgccatttggcaccctatatgccattgatgatcccctcaagataggtcctggggacaactcacaggtgattgggaatgctctgggacttgggatcttgtccggcaaaaattcaacgactggggtgatgtacttagattttggatttactgccggaaagtttaagggcagctctattagcatattttc

SEQ ID NO: 15132 - DNA, 413 bp, Gossypium hirsutum
  Clone ID: LIB3145-019-Q1-K1-F6
cggacgcgtgggtgtggctgaaaattttgtgaatactattaaggagataagagtgcagtgtgcgggagacacttctagtaattacccggcaattattaatgactatgatattaatgggggggctcctcagtgtgtatattttgtaaatggatgtcgcaacaggggtagtctgtgcatattttctcattcactccaagcaaaaaaaccagcctgcaagctctttttctctctgcatgggtgtaggaatggagatatatgttccttctctcatgagtcgtatcagccaatctcatcatatggctcaaatgtatgtcagccagaagctgatcatgctgatgcctcatcacttgtacgactatttggaacctcgtctgctggatacatccttttgttggatgatgctaatatgcatt

SEQ ID NO: 15133 - DNA, 327 bp, Gossypium hirsutum
  Clone ID: LIB3145-019-Q1-K1-F7
aaaaaaacacctgcgccttgccgacttctctcacttcgactggacagatccttcaaaggcagagagaggagctgacgcaaccaactaagagttagatatccttaatgcatgcatggatccgagtattaaacagcacttaacagaagcagttgagcagaaaaatggtgaatatgcacttattagagatgcggaaatctcctagctgaccatttatgagaaacctattccttgctttggctgatggatacggagggtctctcttctgctaggatcatctatcccatcgatgctgtattatgccaccattctctactttggaaactacta

SEQ ID NO: 15134 - DNA, 406 bp, Gossypium hirsutum
  Clone ID: LIB3145-019-Q1-K1-F8
accgggaatgaattgctcgaccgacgcatgcgttcattctccgataattgaggagcgtgcatgtggggaggctagcgaagcatctacaccgccatgaccacgtaggaaagttcctaagacacccattaaggggcgtgatgctccatctcttgatgatgatttctatttgtaccttgatgattggtcatctcaaaatgtactggctgacgggctgggtacttgtgattatttatggactgcatacattagtgaagtcacaaagtggtgtgatttgtgaccaaatgataatgtctgtgctgttcaatggacccggcaaggttcttacatatcgagtggtgcaaatctcagtcaataacacggttgcgatggaacttattcgaagtaagtccaaagcatgggtggacat

SEQ ID NO: 15135 - DNA, 247 bp, Gossypium hirsutum
  unsure (1)..(247): unsure at all n locations; Clone ID: LIB3145-019-Q1-K1-F9
tttagtgaagagagaaaagcagtccaagggtgaaaggtgctggcatctgacgatgctgcttgcnattgaaactaggactacaagcggctgagagttgtgcgcaaggtttagaatagaaaggcaacgtgaaacactgttagaaggctcaagctacataattgcagattggatttgcggagcttgattcaaaaagctttgacttgccccgatataggaggtgaactcgatacaagcttgaaagaaagat

SEQ ID NO: 15136 - DNA, 320 bp, Gossypium hirsutum
  Clone ID: LIB3145-019-Q1-K1-G1
cccacgcgtccggttgcttcgttgtccatatatgatgaatacagcactgatgtccttgacatgcctgaaggatcttgccttcccaggcctcggtatcgtaggcatagaaatgaatccttctctaaatctgactccttccgtcctcctgctcgcattgattcacttacaaatgcaaggcttgatttgaacccactccagctactcgagggcttatttaaggagtgccatgtccatggtgagaaaatggtgtctgaagggctgataacttctaaggacatcgatgatgccaagtctatcaaaggaagtagagtggtcagcat

SEQ ID NO: 15137 - DNA, 338 bp, Gossypium hirsutum
  unsure (1)..(338): unsure at all n locations; Clone ID: LIB3145-019-Q1-K1-G10
cgtttcaaggctgatgacaagatgggacatgcttatctgaaccttcaaccacttgtctcagctgctagattaagccatgctcttcgagtttcttctggtgagatgacattgaggaaggttgtacccgacactgataattgtcttgttagagagagttctattagtttgataaatggtgaagtagttcaaagtgtctggttaaggctttgcacagttgagtccggggaaatagagctaaaggtcaggttaattgagacacgcgatggaccttcaaggtagttgagctatatccgctgatgagataangtgttgggagctcnaagtcaggtgattcccgc

SEQ ID NO: 15138 - DNA, 123 bp, Gossypium hirsutum
  Clone ID: LIB3145-019-Q1-K1-G11
ggcggacccttagatccacccttgcaggtttcaaaggtgacgacagaatcagacacgcttagtttatcctggaaccactggcctaaggtcttgtattaacccatgcgtcttgcttttattcct

SEQ ID NO: 15139 - DNA, 434 bp, Gossypium hirsutum
  unsure (1)..(434): unsure at all n locations; Clone ID: LIB3145-019-Q1-K1-G12
ggccatgtctaagaagtacttaaaggtgtcaatggctgctactgtaaaagaggcaatgaaatgcatgcatgacaaccatcagaaatttgcgcttgtggtcgatgaagataattttctggaggggattatcacacttggtgatattagatggtgtctgtctaagaagcagcctagtgatatctccaagggtgattcaacagctgatgtgaatccatgtcttgtttcgtctgtttgcacgaaaggaataagctaccgtgggcagaagcgcggacttctaacctgctttgctgatactgacttggcaattgctagggagttgatggaggctagtggagtaaaacaattgccagtggtgaaatcgtgggggagacccccacanaggaatggatacgggagagtcattgctgttcttcattacgaatcaatctggaact

SEQ ID NO: 15140 - DNA, 425 bp, Gossypium hirsutum
  Clone ID: LIB3145-019-Q1-K1-G2
cttattctccttcaattttggggcatgatagtggtttctctagcgaagcatctacacctcctaaaccacctaggaaagtccctaagacaccccataaggttcttgatgctccatcacttcaagatgatttctatttgaaccttgttgattggtcatctcaaaatgtacttgctgttgggttgggtacttgtgtttatttatggactgcatccaatagtaaagtaacaaagttgtgtgatttgggaccaaatgatagtgtttgtgctgttcaatggacccgggaaggttcttacatatcgattggtacaaatctcggtcaagttcaggtttgggatggaactcagtgtaagaaagtccgaaccatgggtggacatcaaacaagaaccggtgtcttggcttggaatttcgcgatactgtcatctgga

SEQ ID NO: 15141 - DNA, 271 bp, Gossypium hirsutum
  Clone ID: LIB3145-019-Q1-K1-G3
cccacgcgtccgcccacgcgtccggtggaggagtcgttcgtggagcatggcacgagtggaagaatcgactagaggctgcagtggctgaaatttctagggtttctgccgaaaaaatccttagtgttttgggctggggctaaaaattgggtattacattactagcatgaagcatttctgccctattagtctttgtacggtgttgtataagactatctctaaaatagtggaagccgacttcaaaaagtattaacataaagatcttagaacgtaa

SEQ ID NO: 15142 - DNA, 409 bp, Gossypium hirsutum
  Clone ID: LIB3145-019-Q1-K1-G4
gcattttctcaacatacagtgttgtcagttttattcttagagcacctgatctctgtccttaatcagactcgtgtcactaaaagtagtgatccaggaaaaggagaaaattctagtcttgtttctgaaactcaattggagaatgaaattctgcaagctgctatttttgctcttacttccttctttaggcatgttgaccaattgcatttattgaaatttatcttatttttatggtcttcataattttatgatgtttcatcttaatttcaaaggtggaggtaaagttggaaagcgagctgttgaacatggttactcttcagttcttgctgcacttgtactgcaacttggcagttgtcatggtctggctacctctggtcgacatgaaccactacgtgcacttttaactgcattt

SEQ ID NO: 15143 - DNA, 163 bp, Gossypium hirsutum
  Clone ID: LIB3145-019-Q1-K1-G5
aggcgtactggaccgagattggctatgcataaacccgacagaactgaaatgtcttgcgggcccaaaccgacgtttacgttccatatcctcctctggcttgcataacaaccaatcatcttcttactatgtaccgatgccttatcttggtctactggatgcattg

SEQ ID NO: 15144 - DNA, 242 bp, Gossypium hirsutum
  Clone ID: LIB3145-019-Q1-K1-G7
cccacgcgtgcgattccaatggcgactacatcttcggatgttcatgctggtgagcgcgtgcagcgtgcatgctccgtgaagcaaccgcaactagttgctccacttgtccagacgcttgcgtactcttaagctgtacctgctgcatgggctcggcttgtatctatggaacggcttcagaaccgtatcaaaggccaacataaatgaatgatcgggtgcttatactcgggtcatgatgctgagcg

SEQ ID NO: 15145 - DNA, 220 bp, Gossypium hirsutum
  Clone ID: LIB3145-019-Q1-K1-G8
tgtagtatacccaaacttacttacccgtgcatgcgatgatactgctcttacatagagtgacgatacatcaattcagatggccgtctatgttcagcgtcgtgactgggatatcccttgcacttccccacgctgttgtgttggctctcactcccttttctacggctggcgtcacaacgcatatgctcgcacctatctcactaatcaacaattcatcagtctg

SEQ ID NO: 15146 - DNA, 282 bp, Gossypium hirsutum
  Clone ID: LIB3145-019-Q1-K1-G9
cccacgcgtccggcttgcccgttccaagccaagagttggaccaaggggcacgagcgtaggcttgtgtttcgtggttcttagagagggggaaaaagcgtgaggctggtttcacagagcagcgaacacctcccgctcctggcagtggaagaataatgtttgggtgatagttaatggggagaaggtttctttatcaaagactgcattgctgaaatactacaaccaagcgtctaaaaatgccaatggtactaacagatcccataatggaagaagttggcaccgtga

SEQ ID NO: 15147 - DNA, 378 bp, Gossypium hirsutum
  unsure (1)..(378): unsure at all n locations; Clone ID: LIB3145-019-Q1-K1-H1
cttggcttcagaggaagtccaagaattctgaggttgatgtacgccttattgatgatgaagttacaatcaaacttgttcaaagaaagaagatcaactgcttgctgtttgtgtccagactcctcgatgagcttcagttggatctccaccatgttgccggtggcaacattggtgactactacagctttctcttcaacaccaagatatatgaaggctcttctgtttatgcaagtgccatagccaacaagctcattaatgtggtggataaacaggatgcagcagctgctccaccaaccagtagcacttgtctctagtttttcagtgaaggaagagtttcatatttatgtctatctatgttntctagggaaataaagtagcttc

SEQ ID NO: 15148 - DNA, 368 bp, Gossypium hirsutum
  Clone ID: LIB3145-019-Q1-K1-H10
gtcaaacctgaagtgcaaaagtcaccaccacctatcgaagttcctgcactatcgttggaagaattgaaagagaaaacggacaattttggatcaaaggctttgattggtgagggttcttatggaagagtttattatgccagcttgaacaatggaaaagctgtggctgtgaaaaagcttgatgtttccactgagtccgagtcgaatgtggagtttttgacccaggtttccatggtttcaagattgaagcatgacaattttgtcgagttgcaaggttactgtgttgaaggaaatctccgtgtgcttgcttacgagtttgcaacaatgggttcacttcatgacatattgcatggaaggaagggagttaaagg

SEQ ID NO: 15149 - DNA, 421 bp, Gossypium hirsutum
  Clone ID: LIB3145-019-Q1-K1-H11
ggagctccatatcatccatgctgcacaacatataagctgacacatttgactgttgcctatggtaaaaacccagggcactgcctaaacacatggttgctatcttcttctacacttcgacaccggagacatgagctatctaaagccactcttcttagtcttaaattctttaaggtacggataaagttccatgaaagactccaaatagtgatggcaattttgaaagaaggcgtagactccataatttcctatagaaattttttggttcgatctgtactaaataagcattaggatctgcagttgcctattgtaatagtttataagcacttctgactgtaaattggacagaatgttctgctcgccaaacttggaagtcgccatgttcttcttcttgcaaaggaatttgcagaatcttttgtggaat

SEQ ID NO: 15150 - DNA, 397 bp, Gossypium hirsutum
  unsure (1)..(397): unsure at all n locations; Clone ID: LIB3145-019-Q1-K1-H12
gaaaatgaaggcatcgaggttaatcaatggtggaatcgccttgccaaacgacaagtccaatatggccgagcgagagcttgaagagagacctctttgtgatcaaaaggtttgcagcaatgaggtctcggatttaaatcttgagtctgaatccaatactcatctaattgaaaacgcgaaaatagtgctccgacttttgcctatatggacgatgcttctagtgtttgcagtaattttccaacagcctgctactttttttacgaaacaagggatgacaatgaaacgaaacattgggaagaacttcaagatcccgnccgctacgctacaaagcgctattacattgtctataatcctttgatgcctttatacaacaaagttttcatcccgatcacaaagatgg

SEQ ID NO: 15151 - DNA, 388 bp, Gossypium hirsutum
  Clone ID: LIB3145-019-Q1-K1-H2
atggtttttaattgtcccaatttgaaagaggtatccttagaattttctcgccaagaaaatgatactaccgatcttacaaccatggttgatgcaatgggtagaagttgcccaaggttgcaaaacatacacattgtatcagttcgactttcacatgctgtagtgctttctcttacagctgctaatttgaggggcttgcggatgctttcgcttgttcttggctcagaaatcacagatgcatctgttgctgctattgcttcaagttattcaaaattagaattgcttgatctcagcgggtctagcatcagtgatagtggcattggaatgatctgcaatgtgttaccaaacacactgtcaagactcctccttgctctttgtcctaacataactt

SEQ ID NO: 15152 - DNA, 409 bp, Gossypium hirsutum
  Clone ID: LIB3145-019-Q1-K1-H3
cttccgtttatttaaccttttaccggttccaaatcaaattccttggaaaccttttggagctctcataaatcatactagatcttcgattctgttctttttagtttaagctttccattctgcaagatcatgtcctaatagggtactagaaaatcggaacattagaagattaatgtatcagcatgttcagagtatccataagctgcaaatctatggaattcatttgtgcatgtacatattggttgagaatcttcctgctggtttatggaaaatgttttttatcctgtaagtttctttattaagggtcttaattgagcataagcagggttctttctctgattgttatctcgagagtgcgaattttgcacctcagctgatgtacgcataggtattttcttatttactttttgcg

SEQ ID NO: 15153 - DNA, 348 bp, Gossypium hirsutum
  Clone ID: LIB3145-019-Q1-K1-H4
aaagaagaaaaacttaatcatggctcggttgacgttggtgtcctccatcatccttctgctatgctccgtcgccgccggatcaactttcgaggactccaaccccatccagatggtatccgatggcctcagcggcttcgaatcctccgttcttcgtgtcatcggtcacactcgtcatgctctctccttcgcccgttttgcatacaagcatgggaagaggtatgaaaacgtggaggagatgaagctatcggttcagattttcaaaggcaacttggatttaatcagatccactaacaagaagggactgccttacactcttgctgtcaatcagtttgctgattggagctggga

SEQ ID NO: 15154 - DNA, 355 bp, Gossypium hirsutum
  Clone ID: LIB3145-019-Q1-K1-H5
cccacgcgtacgcccacgcgtccgggtatctccaaggatggtcagactcgtgagcacgcattgcttgcttttacccttggtgtcaagcaaatgatttgctgttgcaacaagatggatgccactacccctaaatactcgaaggctaggtatgatgaaattgtgaaggaagtctcttcctacttgaagaaggtgggatacaaccctgacaagattccatttgttcccatttctggttttgagggtgacaacatgattgagaggtctaccaacttggactggtacaagggccctactcttcttgaggctcttgaccagatcaatgagcccaagaggccttcagacaagcctcttcgtc

SEQ ID NO: 15155 - DNA, 306 bp, Gossypium hirsutum
  Clone ID: LIB3145-019-Q1-K1-H6
ttcaaagcatgatgtttaccttatgtgcaattattcagttatgcattggtcatgcttatcatgtaatctgtccgaggaacttaattttgctgggcatgtggcacctaccgataaacatcccgcaagttcgttaaaaggttctacacaaactcaaataagcacgctcgcggtcctcgataattttatggttgcaggaagcttcctaggagagcttgcttttaagcacttggacagaaaaggcatggccttctgttctcgggcaacacatgatgattatgcaattgcaactgctatggacagatatga

SEQ ID NO: 15156 - DNA, 319 bp, Gossypium hirsutum
  Clone ID: LIB3145-019-Q1-K1-H7
atcaatcttacaacaactccttcacttattttcacctatactcccactatcctgcagaagtttttctccaattacactgctaacaataaatcgactggtctcatctacagaaaatactcctcctaacacatatactaaatctccacaactctaaaaaaatgaaacttacatcacttcctaattttataatttcacacacatacctaacaaaattcttttttttacactttcacattataactcttacccctttatattcaacaatatcatattatactagctcaaccaccacacttttgatattggccataaccagatc

SEQ ID NO: 15157 - DNA, 402 bp, Gossypium hirsutum
  Clone ID: LIB3145-019-Q1-K1-H8
acgagaaaaacttaatcatggctcggttggcgttggtgttctccatcatccttctgctgtgctccgtcgccggcggatcaactttctaggactccaaccccatccagatggtatccgatggcctcagcggcttcgaatccttcgttcttcgtgtcatcggtcacactcgtcatgctctctccttcgcccgttttgcatacaagcatgggaagaggtatgaaaacgtggaggagatgaagctacggcttcagattttcaaaggcaacttggatttaatcagatccactcacaagaagggactgccttacactcttgcttgtcatcagtttgctgattggagctgggaagagttccagaaacacagattgggggctggttaaaactgttctgctaccacaaagg

SEQ ID NO: 15158 - DNA, 367 bp, Gossypium hirsutum
  unsure (1)..(367): unsure at all n locations; Clone ID: LIB3145-019-Q1-K1-H9
cccacgcgtccgagcgtttcttgtaaggactttgctcggctgatttctaccttttcagtgcgtcatgtaatctgactggtatgtggttgggccatctaaattagatccaaacctgatttaccagcnnnnaaaaaaaaaaaaaaaaaaaaaaaaaaaaaaaaaaaaaaaaaaaaaaaaaaaaattaaaaaaaaaaaaaaaaaaaaaaaaaaaaaaaaaaaaaaaaaannnntatttttttaaaaaaaaaaggggaaaaaaaaacgggtttttaaaaaaatataattttttaaaaaannnggggcggcccccttttaaagaaacacaatttttcccccccgcggttgggaaaaaaattttttttttttt

SEQ ID NO: 15159 - DNA, 318 bp, Gossypium hirsutum
  Clone ID: LIB3145-020-Q1-K1-A1
cacaaatgcgcctgcagtgcatatgttcctcgggggaagatcacggtgagccactcccagaaatcttgatgcgcaaaagttgtgatccaagatagatttaaaagttgccaaacctctatacttgtggaatattgccgaaaaatatgatgacagtcttcattttcatcaccgtaccggggacatctggcatttgtcactaaccttctttgttgtagattgctcaatataggaatgtaattccatgatatgcgtcagattatgattgtgatcttaggtggtaattgtagtttccatagtttactgaaaaattccttagct

SEQ ID NO: 15160 - DNA, 445 bp, Gossypium hirsutum
  unsure (1)..(445): unsure at all n locations; Clone ID: LIB3145-020-Q1-K1-A10
gttctttcactttatgccagtggtcgaacaacaggtattgtcttggactctggtgatggtgtgagccatactgtgccaatttatgaaggctatgccctcccccatgctattcttcgtttggaccttgctggacgtgatcttacagattccttgatgaagatcttgactgagagagggtactctttcacaacaactgcggagcgagaaattgttcgtgatatgaaagaaaaacttgcttacgttgctcttgattttgagcaagaattggagactgccaagagtagctctgccatcgaaaagagttatgaattgcctgatgggcaagtgatcacaataggggcggaaaggttccgttgtccagaagtactctttcagccatctctgattggaatggaagctgctggaaatcatgaaactacttacaactncatcatgaagtgtgatg

SEQ ID NO: 15161 - DNA, 419 bp, Gossypium hirsutum
  Clone ID: LIB3145-020-Q1-K1-A11
cccacgcgtccgcccacgcgtccggtgactacattgaccctaacttcacctggaagaacttcaatctcgaggagcaggccaaagttatcgtagccccgagaagcaacaacaaacttgatgcgaccaaattgaagacagaattccctgagctcctttcgattaaagagtctcttattaagtatgtattcgaaccgaataagaagactggtggagcttgatcagttactttgcctgttaaaaagtttgtcttcaaaggtaaactatgtgagactagttgagcttgagattttaggttatgaattcattgattttcctctctttttttatcatcttttttatgaatttggttcgtgtgggtcgatatggatggtgataacctcgggcgatacgcacgcacgcctcttcccagatgactcgaa

SEQ ID NO: 15162 - DNA, 435 bp, Gossypium hirsutum
  Clone ID: LIB3145-020-Q1-K1-A12
cccacgcgtccgggacaatattcagttaaatccgatgtttacagctttggagtattgggtgtggaaatcattagtggtaaaaaaatcagtagcttctccaaccaagaagtgggcgactctcttctaacccatgcatggagaaactggagagaaggaactcctttggaagtagtagatccaatcctgagggatggctccagaagtgaaataatgagatgtatccatcttgggttgctttgtgttcaagacaatattgattctagaccaaccatggcctctgtcgttctcatgcttagtagctattccatatcactgccattgccatcaagacctgcattgtccatgctttccaccatggagacagaaacgaagtctcagtcatcatcactcttcaatccatctatacgaagaaacatttcaagtgtcagtcaacga

SEQ ID NO: 15163 - DNA, 427 bp, Gossypium hirsutum
  Clone ID: LIB3145-020-Q1-K1-A3
cccacgcgtccggccaaatggccatttcaagaagcattggcagaactatgtgaaaacgtggttcaatcagcctgctaggaaggctagaagaagaattgcaaggcaaaagaaggccgtgaggatcttcccaaggccaactgctggacctctacgccctattgtccatggacagactttgaagtataacatgaatttgagagctggcaagggtttcacccttgaagagcttaaagctgcgggtatttcaaagaaacttgcacccaccatcggtatctcagatgatcaccgtcgtaagaaccgatctctcgaaggtcttcaagccaatgttcagaggcttaagacttacaaggccaaacttgttgtcttccctaaacgtgctcccaagtctaaggccggtgattctactgcttgaagagcttgcaactgc

SEQ ID NO: 15164 - DNA, 312 bp, Gossypium hirsutum
  Clone ID: LIB3145-020-Q1-K1-A4
gctctttgatgttttttgatgatcattctgcacatgatcaagatcatgaacggaatcgggaggtccagtccttaactgaaactctattagcaacatcgtcttttacaagagaacgctcaaactatgttttttgggagcgggaaaaggaacttacgagacatttgataaagggatttgtagctgcgtttctttttttggatcctttggtcatgggacatgaaaaaactgccaatctgatggcgagtaaagacagtctaaatcggagcttcttacccagatctctgacttccttcatgatgattcctccaaacc

SEQ ID NO: 15165 - DNA, 149 bp, Gossypium hirsutum
  Clone ID: LIB3145-020-Q1-K1-A5
gcaaaataaccctgaagtaaaagatggtttcttcaaggttatggttctttgtgtagcgatgttgctgctagtgttgctatgctttcttttccccatactctattcacacgtgatggcctggtataagaaggcgttttttaaacgaactt

SEQ ID NO: 15166 - DNA, 408 bp, Gossypium hirsutum
  Clone ID: LIB3145-020-Q1-K1-A6
cccacgcgtccgcccacgcgtccgcccacgcgtccgcccacgcgtccgaaatcgaactgctcatcttttcattttcttgactctgagaaacagtgactttgagaggaaaaggaagaaactttgttttttgaaagcgagatagggtttttattgtgtatttgataaagggatttgtagctgtgtttctttttttggattttttggtcatgggagatgagaaatcgacgatcgtgatggcgagtagagagagtagagatcgagagcttcttatcccagtctctgacttcgttcatgatgattcctccaaaccgtcttcttcatcttcaccgcgtcatgccggtcacgagaccttttacaaatttgtcaagagttgggcttctaagaagtttatgacaggatgtgtcattt

SEQ ID NO: 15167 - DNA, 420 bp, Gossypium hirsutum
  Clone ID: LIB3145-020-Q1-K1-A8
gaaaaaaaaaactgaacctatcctctcccttttaaggttgccagctgccaatcatggtcgacgccgataaccggcggctactaaggccaaagctcctttactagcggtggtcgaagcgagaaaaggagggctattcaaccccgttctggacctccaccttaaggcccgttactccagaccaaacaagtctaaccatggagagacctttcgtcgccttctcgaaccgataacaacaccgattatggtctccggcgacgggctgtctagaccgctactggtgaattcatccggtattggaagaattaacctagcctttattgttcaaacctgatggtgctttaggcacttaattgcttttcatatgcacgaagagacgctccgttcactaaagcttgctaaaagttgatgcttgattttttt

SEQ ID NO: 15168 - DNA, 384 bp, Gossypium hirsutum
  Clone ID: LIB3145-020-Q1-K1-A9
cttcaaaacacctgtctcacctattaactctctcggcactggaattgctcttgctggagtgttcttgtactcaaaggtgaagcgcataaagcccaaaaccaaggcagcttgaaagtttagccggtaagtttatattggtttaggaaatgttcagtggcattaattgaaggacatgtttgcagtttaggccagaaaagtagtaggcttggtttgatttctatcttttaaaaaaaaatagttttctaatttttggtccatattcgtcattgggatatttcatttttggaatgccacttgattttagcaaagagcaaatgtagctgagaaaaaaaaaatatcattttttggtttaagcttaatgactttcctgatggttcattgttt

SEQ ID NO: 15169 - DNA, 398 bp, Gossypium hirsutum
  Clone ID: LIB3145-020-Q1-K1-B1
cccacgcgtccgcaagattccgtcggcgtcgttttggtggaaaacgacggagaaatacaagtccggttcctccactttggtcgtgggcaaacaaatcctcctcgaaaattacccgctcggtaaaatccttaagaacccacacttgccagcgttggccgggaaattcaacggcgtaggtacggttagcgttatcctcacggccaaagacgtcgccgtcgatgggttctgcatgaggtgcgggactcacgggtcggacccgggtggtcgggttcgaggtacttttatctgggtggggaactcgagactcaatgtctggtcaatgcgcctggcattcaccagctattatggtcccaactccacgtgtggctccatgaacgtgggatgacggatgatcatac

SEQ ID NO: 15170 - DNA, 372 bp, Gossypium hirsutum
  Clone ID: LIB3145-020-Q1-K1-B12
gattactgaatactataagtctcacgtgtctggtcactatgtcgttctcgaggacattaagaaatcttgtattcaggtgagtttccaatattcggaggaaagagtgacttgggcaaatggacatgatgtagatgttgtggctgttgatgctgtttgtatctgtaaatgaatgatcgtaattgcgatgctggttatagcaatatgctgattgcagggacaatctgctaagtacttttaactgatatctataattgaccaaggttaacttgcggtgatggtagaaaaggaaatttgaactgtgaaatgctgcttatgatgtacgtatgatgcaggttcctaaaataaagaaagtattgtcttgatctgaccttt

SEQ ID NO: 15171 - DNA, 424 bp, Gossypium hirsutum
  Clone ID: LIB3145-020-Q1-K1-B2
cccacgcgtccgaaagtggatagtgaagatgcttattcatcgtgcattctggatataaacattgagaaagagactcccgacctactgaaatctaatgatgaaactgttggtaattcaaaaagtgaaggcgtggttacacatttgcagaaggtgttacagagacaagcaagcttaaacgtagaaagcagctgataacaatctcagcaaccagtgtggagctggaaaagaagaaagaaaatttctttgtcacacaatctggatggtgccattacctacaaaaaggtcattgatgcaaaagtttgatacattgacaggagagaaatcatcgaacgagagggttcatgatgcaccaagcaacagatggagaagatacaaaagagctgcatcatttgattcgaagaaaattgtcctccttttctcaatc

SEQ ID NO: 15172 - DNA, 427 bp, Gossypium hirsutum
  Clone ID: LIB3145-020-Q1-K1-B3
cggacgcgtgggaaaaagaaaaaaagagagatggcgtctgtaataaaatctgcaatcttaattctgtcggtgtttttatctgtacgcttcagttcgggtgttaggttgctccaggaacagcccaatgatgaccccaaaaacatggacgctattcctcccattgatgcactcaaccctaccgagttgaatggacccggtgttggcattcacgaagatcatgttgtcccaaaaggtgctgaaattggtactcttggttttggttttgaaggtggtcctgataaatgttgttcttctggatgttccggtaattgtaatcctggtggtttcgttctaccatttcctcaaattccagaaatcccaagaattccagaaatcccacaaatcccacagatcccacaaatcccacaaattccactaatcccacaga

SEQ ID NO: 15173 - DNA, 426 bp, Gossypium hirsutum
  Clone ID: LIB3145-020-Q1-K1-B4
cccgagactaacccttttggaaatggagcaattcgggtttatttgcgtgaagtgagggactgtcaagctaaggccagagggattccatatcgaaagaaaaagaagaagaagactcaaattaaacccaacgtcgacgatcctatgccttcttccaaccagcagccctcttctcagctagctacctagggtctttctttggattcttcacataaacggatgatgagcattcagaaaacatgcatggcagagtggtggggaagggtttataaggcaaggcaaggcaacgagtatatatgaagttaaatttagcactacaactactatacaagtaggcattaagcactggtttctgagtctctggcgcctttccttgcataatatgaagcactacttgcattatgatcaattaatgcccttgtcttactt

SEQ ID NO: 15174 - DNA, 332 bp, Gossypium hirsutum
  Clone ID: LIB3145-020-Q1-K1-B5
ttcttatagttaaccgaagacactatatcacactagcgctctcactgaacccaatcattcagcttgaaatacttcttgggtttctttgctaaaaagctcctcctcctgacgccttaatagagcagaatcctccttctgttccaacattagtggctgtaaagtgggcgagctcattgagaaaatcggcattcattgttgattggcataattgtggatataccttacttggattggctgggggaagaagcagcccatttgtctcaatataccattggtttgagaagcattatgggcaaatggcaaatggttccctatgtgtaacaagggcaatg

SEQ ID NO: 15175 - DNA, 423 bp, Gossypium hirsutum
  Clone ID: LIB3145-020-Q1-K1-B6
ggataattaataaattactgtcgggcgaaaaaaaagggtaagagatggctcgattaatggtaatatcgatgctatttctcttggcaggatcaatgcttatggtccaaggcggagatcccacccttttttttcgaatggaacgtcacctatggcaccattgctcccttgggagtgccagtaaagggtattcttattaacgggcaattcccgggaccaaatcttaactctaccaccaacaacaatatcgtggtcaatgtgttcaataaccttgatgagccattccttgtaacatgggacggcgtgcagcataggaagaactcttggcaagatggtgttctgggaaccaactgtcctatcccccctgggaagaattacacctataaattccaggtgaaggatcagattggcagctacatgtactat

SEQ ID NO: 15176 - DNA, 422 bp, Gossypium hirsutum
  Clone ID: LIB3145-020-Q1-K1-B7
ggatcgatgttattgtccggaccttgcacttttcaacctccgttgatggttcaattcaacggaaaccttttgccgcaaggttcaacgtccacggccgaaaatgcagactggatcacattcataaactttaatggcttgttcataagtggaaaaggtaccatcaatggcctaggcgagaaggaggcatggaaggctgtatgcgatggttgccgtcgaaaggctgctaatttgaagttaatcaagttgaacgacgtgctcattagtggcattacctccgtcaacgctaaagggttccatatgatgatcagcgtttgcaacaacttcgtgatcaccaacgttaatatatcggctccggatgaaagccccaacacggacggcattcacatgagcaaaacaaataaggtcagaataagcaacagtac

SEQ ID NO: 15177 - DNA, 415 bp, Gossypium hirsutum
  Clone ID: LIB3145-020-Q1-K1-B8
cccacgcgtgcagacacgcgtccgcccacgcgtacgcccacgcgttcgcccacgcgtgcggttcagctctttgaactgaatgacatctcaaaacccatggtttaattaccttgtccggcctcttggtgcaaatacttaataatgatctactggcgggattgttggataaccatggcatgcaatagctgctttttgttgttatgatgatgccaactattgtaatatttgtcgacgctgaatcctaaattatgtcacttgttgactggtataaggtgtggcagactcgattgctcctcttaacgtttattgagtgaatggggagatcgagtgactgttctctcattggagctgccttgctaaattttgattgatacttggcatttgatgagtttcatagtttttgttcactggaatg

SEQ ID NO: 15178 - DNA, 119 bp, Gossypium hirsutum
  Clone ID: LIB3145-020-Q1-K1-B9
cccacgcgtaatttctttttgctttatcttcctaccattttacaggtagccttccccatggccgaccatgtgactcatcaggggcttcttctcccccatgcctcgaacggtcatcggtg

SEQ ID NO: 15179 - DNA, 384 bp, Gossypium hirsutum
  Clone ID: LIB3145-020-Q1-K1-C1
aacaccatacttagcgaattacgatggctgggcaatgtgttaggaaccgtgtaaaggagaactccgtgctctcgaactgatccctgctgcgccaataaaggccttttgccctaagatccgactgaacaatgggtgtaatctcaacaggtatagaagtgcgtttcaagatagaatggcggcagacctcatacgcttgatcttcacgcggatcgtaaccaataaagattttgaagggtttccttacatcgccattgttggtcacttgtgaagcattgccattagccgaagtcattgttagcagcagttttcttcaacaaaaaagatcatgaaaaaaaaggaaacgtgaaggttggaagtgggtaaagaaagaaaggggaggagttt

SEQ ID NO: 15180 - DNA, 407 bp, Gossypium hirsutum
  Clone ID: LIB3145-020-Q1-K1-C10
atatcctgcatgtgcctccgccgtaaacggagaggggaaaccggagtgaagaacttacttggatgccaagacttggccccccatatctcttactatcagcctcgacgtagatctagaagactgttggttaaacgccgcatcaaaataaatagccacagttgctctctggtcatcttgtttaggtcccttgtttgcttccaagattatccaaagtctgcaacaaaagagacaacactgcttgacggtcccttgactaaacacccagtctctacttgatcgggagggagcattgaagtatgtcggttttctaatggaaagtgctaactttttctttttgttaaaaggtctgaatgactcaatctgtcaccctctgctctttaggacttctttgttttgcattcaactta

SEQ ID NO: 15181 - DNA, 389 bp, Gossypium hirsutum
  Clone ID: LIB3145-020-Q1-K1-C11
cccacgcgtccgattattatctgttgtagctcttcttgttgaaagtattataaggggaggaccgtcctaaaatgaactgagtgtaaaagatctgctccaattcttcaataaagtcgcgccaaaaatctacaggagaattagaagccacaatgacgaaacgccgaatctctaattctgaatcagaagaaagtggaagtgaagagatgttaagcgaagaagaagaagatgatgataatgaagtaatcctcaaacaagaacagcaaggtatatccgaatacgaaaagcagaagctagcgagaattgcagagaacaagaccagaatggaggctttgggtctgcccaaaattgcctcttctttgatgggttcgtcgccaaatacaagtcgaact

SEQ ID NO: 15182 - DNA, 388 bp, Gossypium hirsutum
  Clone ID: LIB3145-020-Q1-K1-C12
gggccgaccacgcgtccggtgaaataaaaaacctatatcaccggggtctattgcagcagaaccatctctatctatggggctctatctcacagggtttgatgtcattaaccctgtactgcatgatgaaaccaaaagtaattctgatcaaaagaatcaggtaaaattgcaaaacgcaatgcagctcaaaccattgcctccacctcccccccctgcacaatggcgggtttcaaaaccctgcttcaacgaggcagaataaagacaacatgctgtatcagagtcactgagacatgagcttgatctgaaacttcttagttctttcgtctctcagaagcctgagccagctttatttaatcaacagaaaataaatgataaggcaaatgcattgaaa

SEQ ID NO: 15183 - DNA, 424 bp, Gossypium hirsutum
  Clone ID: LIB3145-020-Q1-K1-C2
cggacgcgtgggggaagatattgagtttattaccaagactttgaattgtttgcctattgctaatattgagcactttcgagtggagaagttggggcacgcagatcttgttgaggaggtttcgctcggggatggaaagattgttaaggttactgggatcaaggatatgggaagaacaactactgttttagttaggggttcgaatcagttggtcctcgacgaagctgagaggagtttacacgatgccttatgtgtggtcaggtgtttagtgagtaaaaggtttttgattgcaggtggtggtgctccggagattgaattgtcgaggcagcttggtgcttggtctaaggtgttgcatgggatggaggggtattgtgttaggtcgtttgctgaggcacttgaagttattccttatacgttggctgagaat

SEQ ID NO: 15184 - DNA, 413 bp, Gossypium hirsutum
  Clone ID: LIB3145-020-Q1-K1-C3
aggaagtatccgaatggagcgagaccgaacagggcggctacctcgggttactggaaggcaaccgggacggataagccggtgttgacttcgggagggactcaaaaggttggtgtgaagaatgcactggttttttatggagggaagccccctaaagggatcaaaaccaattggatcatgcatgaatataggcttgctgataataagactaacaacaaaccccctggatgtgacttgggcaacaagaaaaactcactaaggcttgatgattgggtgttatgtcgaatctacaagaaaaacaacgcgaatagacctctggaacatgataaagatgactccatggatgacatgcttggtactgtaccaccttcgatatcaatcggtagccaacataatccagaattccacttcttaac

SEQ ID NO: 15185 - DNA, 383 bp, Gossypium hirsutum
  Clone ID: LIB3145-020-Q1-K1-C4
agaaattcgacgaggagatcgcagctacaccaatgccggaacagtaccaaaacaaaatggtctcgatcctttgcaacgattgcgagacaaaatctctagttcggtttcatgtcctggctcagaaatgcccgaattgcaagtcatacaatactaggcaaacacgaggctgaagtggcttagagtgggatgtagaaaccgacttggatggcatattttccaaatcgatgcatcaagcattgggttctggttaagcttctgcaacgtgtattggtaccagtcgtggcgcatggttccttcgggggttcggtttagtgcttggtattttcaattcttttgtagatgattcaatcaataggccaacaaataagcatttgcttttatgt

SEQ ID NO: 15186 - DNA, 415 bp, Gossypium hirsutum
  Clone ID: LIB3145-020-Q1-K1-C5
ccaacccaacttcctacacagagacgttcaacaggacattcgtagaacaagtgttccctcgattccacaccgttttggcaccaactacagtagcagatcctctcaatctccgatattgtaggttactgaaagcagggaagaaattacgtgaaacacgccaaactgtaatctttattttagagggtagatctaagttccatagctttttgtaaaattgtttgtaatttgtctgtaagtcattctgatcattgtataagagaagtttatgcctactctgcaccgaatattctgcagtcggctcaccccgccaaataacaaagttctcatgctcatacaaagacaaaggaatgcatagaatttgctccacttcctgctccgagaagggatccaagcgtcttcccaaatagagacatgc

SEQ ID NO: 15187 - DNA, 241 bp, Gossypium hirsutum
  Clone ID: LIB3145-020-Q1-K1-C6
gcgtccaagaccatctattcctattttcaccaagttgaaatctgccgcatcggggggattcccaggtgcgccgagcccggccgagctcgctacagccgggtatgtgctggtatccgcagaaattatggcacccgccaacggggttatgatggaaccttactgagctgaggattctattaacactgtacttaagtaatgaaaagatatggaaagttcctatgcttgcaacacaagtataact

SEQ ID NO: 15188 - DNA, 411 bp, Gossypium hirsutum
  Clone ID: LIB3145-020-Q1-K1-C7
aggacgcgtgggcagacgcatgggtagaaactcaaatcctggctgctgaatatgctgggaaaatgaaggcggaatctgaaattgaaaaagcaacgggaaagagaaagagaagccgctcgacttgcactgcaaaagatggaaaaaacagcagagattgaacagaatctggagattctaaaggaactggaaacgttgttaggatgttgtctgtacagtaatcaattttatggtcgaaaaagtggagcatgtgaaagggtaattgaaggaggagcttatgggatgataaaaggtgagaatccactccataaactgggtttattcttcaaagacgagtacttttgaaaacgaggaggatgaggacgctttttttaatgaagacattgtttgtgaagaaagagaaatacttgtatt

SEQ ID NO: 15189 - DNA, 267 bp, Gossypium hirsutum
  Clone ID: LIB3145-020-Q1-K1-C9
gagaagaccatggccgatcaacttacggacgatcagatctctgagttcaaggaggctttgagcctttttgacaaggatggcgatggttgcattactaccaaggagctggggactgtgatgcgatcacttggtcagaaccctactgaggcagaactccaagatatgatcaatgaagttgatgctgatggaaatgggaccattgattttcctgaattccttaacctaatggcaaggaagatgaaggatactgattccgaggaagaactt

SEQ ID NO: 15190 - DNA, 424 bp, Gossypium hirsutum
  Clone ID: LIB3145-020-Q1-K1-D1
cggaggcagcgcgaagaaaaggcaaagattgaagctcaaatccgggctgctgaatatgctgccaaaatgaaggcggaatctgaattgaaaaagcaacgggaaagagaaagagaagccgctcgacttgcactgcaaaagatggaaaaaacagcagagattgaacagaatctggagattctaaaggaactggaaacgttgttaggatgttgtctgtacagtaatcaattttatggtcgaaaaagtggagcatgtgaaagggtaattgaaggaggagcttatgggatgataaaaggtgagaatccactccataaactgggtttattcttcaaagacgagtactttgaagacgaggaggatgaagacgcttttcttaatgaagacattgtttgtgaagaaggagaaatacttgtataaaaaacatgat

SEQ ID NO: 15191 - DNA, 445 bp, Gossypium hirsutum
  unsure (1)..(445): unsure at all n locations; Clone ID: LIB3145-020-Q1-K1-D10
cccacgcgtccgaaaaaaagagagatggcgtctgtaataaaatctgcaatcttaattctgtcggtgtttttatctgtacgcttcagttcgggtgttaggttgctccaggaacagcccaatgatgaccccaaaaacatggacgctattcctcccattgatgcactcaaccctaccgagttgaatggacccggtgttggcattcacgaagatcatgttgtcccaaaaggtgctgaaattggtactcttggttttggttttgaaggtggtcctgataaatgttgttcttctggatgttccggtaattgtaatcctggtggtttcgttctaccatttcctcaaattccagaaatcccaaaaattncagaaaatccacatattccacagattcccacatatccacatattccactaatcccacagatcccacaagtcccacagatcccac

SEQ ID NO: 15192 - DNA, 228 bp, Gossypium hirsutum
  Clone ID: LIB3145-020-Q1-K1-D11
gcgtccgcccactcgtccgaccactcgtgcgatgatttttaaaatagaatttgccatcttaaccgcaggccggtttacaatggggcacgctacaccacccgtcttctaacaactcatttacaagccctttgccacccgtgaaacttggcatctattgttacaaatattcctctcaaacctctctaatacgttaaccatcactgaagaattggcaaatcttttccactt

SEQ ID NO: 15193 - DNA, 246 bp, Gossypium hirsutum
  Clone ID: LIB3145-020-Q1-K1-D12
agcgtatgctctaggatctaagctttgtaatagtttataggcactacgaactgaaaattgacccaaaggttcatcgctccaagcctgaaagtcctcatgaggttcttttgccagtgggataccgaggatcttacctgctgcttcttctgagaagttattgacaattaactccctgttccattcataaaaaaaaaaaaaattaaaaaataaaatatataaaaaaaaaataaaaaaaaaaaatatatt

SEQ ID NO: 15194 - DNA, 363 bp, Gossypium hirsutum
  Clone ID: LIB3145-020-Q1-K1-D2
gtacatgagtatttatgttaccccagatggcccatagcgtgcaacaacatagtttgcagagaggttgagtttggggaacaagggtcttggacaatgacggaaaagatggttcatcgtttctagttcttccccacatcgagggcataatgtactgtttgtcagtttcctacaaagaatgttcactcgagtaggcagataattccatgaaatcttccagatggtgattaaaattttatgtggtagatcgaggctccataattttttataaaattccttgtagttggtttgtaaagcgtatgctctaggatctaagctttgtaatagtttataggcactacgaactgaaaattcacccaaaggttc

SEQ ID NO: 15195 - DNA, 427 bp, Gossypium hirsutum
  Clone ID: LIB3145-020-Q1-K1-D3
gagaacttgagtattaaatcccaaagtttcattattgatttctctggtcacaaatggcaaaacttagagttaccatcaccggggatggctcaagcaaggtggtgaagatgggagatgatgccatgggtggccatagaagaatgaatggaaacaaaagattcttacaagacaaaccctggagaaatgttggtaacagaaggcatcaaatcaatggtgtccagtggagatctaatggctttaaaggacaaggttctcggattgctggaaaagacctccgatttaaactgatgcgcaaacgtggaccttttcagtttcgggatacttttgaagatcatagaaggaacatggaaaaaccgtcaaatcatattcagccaccacaaaatcgtaacaagcatatgtctgaaacaggacctaacagaataaacaa

SEQ ID NO: 15196 - DNA, 211 bp, Gossypium hirsutum
  Clone ID: LIB3145-020-Q1-K1-D4
cggactcgtggtctgacgcgtgggcggacgcgtgggcggacgcgtgggaaaaaaaaaaaaagggtttaataataataacaaaaaatttaataaaataacgaaaaaaaaaaaaataaaaaaaaaaataggggcgcccgttttaaaggatccaagcttacttacccttgcattccaaatcatagtttttttttagtgccacctaaattcaatt

SEQ ID NO: 15197 - DNA, 425 bp, Gossypium hirsutum
  Clone ID: LIB3145-020-Q1-K1-D5
ttcaaaataaaacaaatggggtcacaccaagaagatggatccgtttctgcaatccagagttgagtaacattataacgagctggacaggctcagaagactgggttttaaatactgaaaagttgtctgaacttagaaagtttgcagataacgaggatcttcagatccaatggagggcagcaaaaaggagcaacaagttaaaagttgcatccctcattaaagaaaggacaggctatatagtaagccctgattcaatgttcgacatccaggtgaagcgcatccatgaatacaagcgtcagctgctgaatattttgggtattgtttaccgttacaagaagatgaaagaaatgagtgcttcagaaagaaagaaaaaagttcgtccacgtgtttgtatattggggggaaaagcatttgccacttatgttcaa

SEQ ID NO: 15198 - DNA, 409 bp, Gossypium hirsutum
  Clone ID: LIB3145-020-Q1-K1-D6
ctcaaatttccgattttatcatccaaatcgttcgtctcttaattctggttggatatcggggatgtcaggaagaggaaagggtggcaagggtcttggcaagggaggagctaagcgccaccgtaaggtcctccgcgacaacatccagggcatcacaaagccggcaattcgacgccttgcccgtaggggaggagtgaagcgtatcagcggcttaatctacgaggaaacccgtggagttctcaagatcttcttggagaacgtcattcgcgatgcggtgacatacaccgaacacgccatgagaaagacagcgactgccatggatgtggtttatgcactgaagacgcaaggtacgactttgtatggatttggcggttagatgatttagggtctagaattttaaataaaggaaaaa

SEQ ID NO: 15199 - DNA, 403 bp, Gossypium hirsutum
  Clone ID: LIB3145-020-Q1-K1-D7
atgcgatgatatctaccacaatctgcggtaatgcctaccaaatacttgtggaagctcttgctccggcgcccatctattggtcagccaccctcttagtaactgttgcatgcaatctgccctacatggcccatatatctttccaaagatgtttccacccattggaccatcatatcatccaagagatcaagttctacaagaaagatgtcgaggaccaaggcatgtggtctcgggagcgatccaaggcaagacaagaaaccaagatcggcttcacagcacgtgtagatgcaaagatcacgcaactgaaagggaagttgcaaagaaagcaaccgtctatggaaatacagagtccacatcgtcaatcatagcattgctcatgaatttagtttcttttggaagtttttta

SEQ ID NO: 15200 - DNA, 318 bp, Gossypium hirsutum
  Clone ID: LIB3145-020-Q1-K1-D8
tcgcaagaacttgctgaacaaatgaaagaaatctcctaaaacatggagtctaaaaactaatgatcgtattcgaacgactgctctgaccctatcgtacttttggtcatccataccttatgtatcgctatctgaatacattccatgaaatagaggggtgaaatcagtcacctctcatccactggttatggtactgctgcatgtatatcaacggcgacttatttttttccaactggataatgtaggacaagttatctatttgaatatgctcagatacatatatatatatcccatttataatgaaagatattgacacgctgg

SEQ ID NO: 15201 - DNA, 399 bp, Gossypium hirsutum
  Clone ID: LIB3145-020-Q1-K1-D9
ggaatttgacacagttcttccggttccctttttacttgtggatactgtttcactaagtaatccacggatggatggacatctgtatcttcttttggacctttatttatttccatatggccaagataggttcaatacatctggaatttcgaagattgcatctgcctttagcagtcaggattacaagccgcctgaacagtactttggaccttatgttttcactggtgctgaatatgagtacttttctgatggacctgcacacttaaacaaatcaagtgctggcatcgcaataagaacaacaattggtgcttcaatgctttttatactattaatgggtgcttggatttatgcttaatctcagaagaagaaagcagacatagcaaccaaagataagcacccttt

SEQ ID NO: 15202 - DNA, 420 bp, Gossypium hirsutum
  Clone ID: LIB3145-020-Q1-K1-E1
atgatatctcccacaatctccggtaatgcctaccaaatccttgtggaagctcttgctccggcacccatctattggtcagccaccctcttagtaactgttgcatgcaatctcccctacatggcccatatatctttccaaagatgtttccacccattggaccatcatatcatccaagagatcaagttctacaagaaagatgtcgaggaccaaggcatgtggtctcgggagcgatccaaggcaagacaagaaaccaagatcggcttcacagcacgtgtagatgcaaagatcaggcaactgaaagggaagttgcaaagaaagcaaccgtctatggaaatacagagtccacatcgtcaatcatagcattgctcatgaatttagtttcttttggaagttttttagggtctttcttgccgtttatag

SEQ ID NO: 15203 - DNA, 397 bp, Gossypium hirsutum
  Clone ID: LIB3145-020-Q1-K1-E10
gggatgagcggaatgttttgagacgatcatactcttcagccttctcaaggtataatactgcatcaaatgcaaataaggttcccgttgtcaacattggaagctcgtctgcacttgatagtaatttagaattgacaagaaaaggatcagtatgcaataacgaatctcatttggttaatgaacttcccaatcaaagctcaaatgtcggtagcaataacattgatatgggctccacaactaacaatgcttttgccaaagcagcagttgataagaataagtcagctgcatcatccactgtcagatctttgcacccatcatctattttccagccaatgaaaaatgaccttttaagtgctactcagaaagttgtatttgacaaggctgatgatgtttctactac

SEQ ID NO: 15204 - DNA, 376 bp, Gossypium hirsutum
  Clone ID: LIB3145-020-Q1-K1-E12
gcgtccgatcattatttacttcaaaaaaaaaaagaacaagaaaaagaaaaggaaagttagggttttggtttgaaatcggatgcggtagagattaagcaatggctggagaaagggccttgttcaagttccttaagcctgggcaacgtctacagcccgccgacgttcaagctgccgccatgtggggcgtcgctgccactaccggcgctctttggctcattcagccttttgattggttgaagaagacctttctggagaaaccagagtcggagtagaagcaaatgggacatcttgcaactcattgcggttttgtctatcaagtttgctgatgaacaaatcatggaaagaataaaaataataatgtagtaagtgtaatttt

SEQ ID NO: 15205 - DNA, 431 bp, Gossypium hirsutum
  Clone ID: LIB3145-020-Q1-K1-E2
ctgcaacctctggcacaccgatagcagcatcaactcctggtgcaccagcagcaacaccaagcacatcaataggaacgccacctctttgtgcaccggccacaacaccaagcacgccaataggagcaccacctcccaatgcaccagctgcaacagtaggaaagccaattggagcaccacctcctggtgcacctgctgcagcagcaacaggtgcaccaccacccatatcaggagcaagtgaacctggttcagatgataaatctgctatttcctcatcaggcaatcaacatacgactgcttcagtagaaagtaatccaacaaagtctatcaatgacaaaccagcagatgcaacaccaacagataaaccattggcagatgtaccatctctaacaccagataaccaagaaacaagtgttccaactacagacccaaca

SEQ ID NO: 15206 - DNA, 413 bp, Gossypium hirsutum
  Clone ID: LIB3145-020-Q1-K1-E3
ctgacgcctgggctggtggttttgaagctggtatctctaaagatggtcacactcgtgagcgtgctttgcttgcttttaccctcggtgttaggcagatgatttgctgctgcaacaagatggatgcaacaaccccaaagtactcaaaggcaaggtttgatgaaattgtcaaggaagtctcttcttatcttaagaaagttggttacaaccctgagaagatcccatttgtcccaatctctggctttgaggttgacaacatgatcgagagatctacaaaccttgattggtacaagggtcctactctgcttgaggctcttgaccagatcaccgagcccaagaggccctcggataagccactccgtcttccacttcaagatgtctacaagattggtggtattggaactgtccttgttggt

SEQ ID NO: 15207 - DNA, 427 bp, Gossypium hirsutum
  Clone ID: LIB3145-020-Q1-K1-E4
ccgaaagcaaaacccaagcctactcaaagcaaagaaaaacacagcaatggagagaagcaaagcaatgatgatggcagtggcagctgtcggattggctttagtgttaatggtgccacaggccgatgctacaaggtacattgttggagggggaggcatcggttggactactaatgtcaattacactgtctgggctcgaggaaagcacttctacaatggcgactggcttttttttgtatatgatcggaaccagatgaatgtgctggaggtgaacaagacagactacgagtcatgcaatgctgatcatcctcttcacaactggacaaccggagctggaagggatgtggttccgcttaatgtgactcgccactactatttcattagtggcaaaggattctgctacggcggcatgaagctagcagtgcgtgtt

SEQ ID NO: 15208 - DNA, 413 bp, Gossypium hirsutum
  Clone ID: LIB3145-020-Q1-K1-E6
gcgaaaatccgagaggaagaaatgatcgtgtgcgtcgccgtcgttggccatcagaacggtcctctctacatacagagcttcactgacgccgatgatgctttgaaactccaccatatcgtacattgctccctcgatgtcgtcgacgaacgagtgaacaatccaaaaaaatcaggaccgacattgaatgagacctttctgggattactttatcctactgagaattataaagtttatggttatttgaccaacacaaaggtgaagttcattttagtgactacggatttagacgttagagatgccgatgttagaaattttttcaggaggttccatgctgcatatgttgatgctgtctcgaacccatttcatgttccgggtaaaaagattacattcaggactttcgcagatagagtgag

SEQ ID NO: 15209 - DNA, 273 bp, Gossypium hirsutum
  Clone ID: LIB3145-020-Q1-K1-E7
cccacgcgtccgggcgtttgttaggttaatgatgctggtctttcaaggtcttggggcggagtcatgggtatgcattctaaaaactcaggtgttgatataagacttttagtttgtgctgtttatgcattaacgttagccagatttgtcggaaaaaagtttaattaagccctgctttctttttttttattatcaattggattctgttgcctacttccatgctattttaatcattcgaacatactgggatagtctctaatgatgacctttatcaac

SEQ ID NO: 15210 - DNA, 292 bp, Gossypium hirsutum
  Clone ID: LIB3145-020-Q1-K1-E9
tgaatttagagctgggtttgaagtaaagcttagagttgattgcttgtgcaaacaggggtgaattcatagagaaggatttaagatcctatggaaagaaccaagattgattttatatgaagtggaagagattgagaagaaaatagacttcttggtgaacacgatgaattataaagttggttgcttagttgaagttccggaatatttgggtgctaatttcgacaaacagatccttcctcgatacaatgtcgtggagtatttgaaatcgcaaggagcactagaatttgatgtggga

SEQ ID NO: 15211 - DNA, 161 bp, Gossypium hirsutum
  Clone ID: LIB3145-020-Q1-K1-F1
gcatgatcgagttcctttgcaagaaatgaaagcagattggcatgcttgcttaaaccacagaggtggattcaagaaattccatcttaaatccccttgccaccaaaggggttaattttggccaggtcacgccaccggtttttaaaattttattccaggggaaa

SEQ ID NO: 15212 - DNA, 437 bp, Gossypium hirsutum
  unsure (1)..(437): unsure at all n locations; Clone ID: LIB3145-020-Q1-K1-F12
cgcgtncgtgaaaattcattttctttggactttctctgaaatccgagtcctatgaaagatgcgtgaggtgtcttcatattcaggcagggcattgcggcaaccagatcggtgccaagttttgggaggtggtttgcgccgagcacggcatagattcaacgggacgctatcaaggggacaatgatttgcaactggagcgcgttaacgtttactacaatgaagcgagttgcgggaggttcgttccacgagccgtccttatggacttggagcctggcactatggatagtgttagatccgggccgtacgggcagattttcaggcctgacaactttgttttcggccagtccggtgcaaggaataactgggccaagggtcattacacggaaggggccgagttgatcgactcagtgctagatgtggtgaggaaagaagccgaaaac

SEQ ID NO: 15213 - DNA, 251 bp, Gossypium hirsutum
  unsure (1)..(251): unsure at all n locations; Clone ID: LIB3145-020-Q1-K1-F2
agtggaacttatttcacttttattctcttccgtatattatctttgtcactcgttttatttccccaagctgctacttttggtaaataaactacagccatatgccccttattattgttattattattattattattttgttttggtttgaaaaaaaaaaaaaaaaaaaaaaaaaaaaaaaaaaaaaaaaaaaaaaaaaaaaaaaaaaaaaaaaaaaaaaaaaaaaaaaaaaaaaaaaaaaggacggnagtttt

SEQ ID NO: 15214 - DNA, 410 bp, Gossypium hirsutum
  Clone ID: LIB3145-020-Q1-K1-F3
aatcgatcagatccagaaaaccttggggatcgatttctggaacacccactatgataaagtgcgggagcagttgaagcagctgaaagaggttcacaggaacctgcgcaaagagattaggagaaggatgggcgactgtttgaatgatttgagcattgaagatcttggtgctctggaacaagagatggagagctgtgtcactcttattcgagatagaaagaatcgtgttctctccaaccagatcgatacttccatgaaaaaggtgaggaatgtggaagagatacacaaaaatctcttacatgaactggaatccctgaaagaagatccatattgattagttgataatggaggggattatgataccctgatcgggtatcaaaatggaggtcctcgtatatttgctttacgcctgc

SEQ ID NO: 15215 - DNA, 426 bp, Gossypium hirsutum
  Clone ID: LIB3145-020-Q1-K1-F4
cccacgcgtccgcggacgcgtgggtccatagcagcaacaacaggtttcatacacagtggagcagcttgtagccgtcaatccttacaatcccgacatcttacctgatctcgagaactacgttaatgaacaggtttcatcacaaacgtatagcctggatgctaatctctgccttcttcgcctctaccagtttgagcctgagcgtatgagcacacaaattgttgcacgcattttggttaaggctctcatggcaatgccagctccagatttcagcctctgtctctttttaattcctgagcgagtgcaaatggaggagcagttcaagacactgattgttctttctcactatctggagacaggaagatttcgtcagttctgggatgaagcagctaaaaatcgtcatatagtcgaggctgtaccgggttttga

SEQ ID NO: 15216 - DNA, 419 bp, Gossypium hirsutum
  Clone ID: LIB3145-020-Q1-K1-F5
cccacgcgtccgattgattttactcaattttgaaataaaattaaaatttgacttcaacttcttgtgaaatttatgaaattgaaaagaatgaaagagaaaataggatggatacttcttttaatcatttctctttagactaatttgaaaaacaactaagtgaaaattggtgggttttgtttgctttagtcactacttggggtacaggggacaagttatcgtaacaaaaattattgagttagaatttgttgtgttctacagcaattgagacgacactgtggtcgatcgagtggggcattgctgagctggtgaaccaccctgaaatccaaaagaagctgcggcttgaacttgacactgttctaagacctggtaaccagatcactgaacctgacacccacaaacttccctaccttcaagctgtg

SEQ ID NO: 15217 - DNA, 52 bp, Gossypium hirsutum
  Clone ID: LIB3145-020-Q1-K1-F7
cccacgcgtccggttttcctgtatataaaataaaatgtttgaatttgagaat

SEQ ID NO: 15218 - DNA, 385 bp, Gossypium hirsutum
  Clone ID: LIB3145-020-Q1-K1-F8
cacaattgcaacaacttcagtaatgaggttgcgcaatttttagttggttccaacattcgggagtatattttgcagctacctaatgaagttatgagcagtccgatgggtgcacttttaatgcccatgatacagaatctggagacaactttgagggctggtgctgttcctcaagtaccccaattcaggccttctgtatctgctcagtcatcccagtccacaaccatcagtgtgaacgggtcctccattagtagtcagccaaaagaggtagataataaggtgaaagatggggagcaaccaaaatctgaagaagtcgagacatcagaaaagacagtaccaccttctaaaccaaccggcacaaaggataaatcaaaaagcaatggagctg

SEQ ID NO: 15219 - DNA, 392 bp, Gossypium hirsutum
  Clone ID: LIB3145-020-Q1-K1-F9
cccacgcgtccgggtgccgactgctccgttctttgtagcatagcaaagttttgtgaagcgtggccgtcgggaagaacaagaggatttccaagggaaagaagggaggaaagaagaaggcagcggatccttttgctaagaaggattggtacgatatcaaggctccttcagttttcactaccagaaatgtggggaaaactctcgtcacccgtactcatggtaccaagattgcttctgaaggactcaaacaccgtgtgtttgaggtttccctggctgatcttaaagtggtgatgaggatcatgcttacagaaaagattcgtttggaaagctgaagatgttcaaagaaaaaaagttttgaccaacttttggggaatgaaatttacaactgacaaact

SEQ ID NO: 15220 - DNA, 446 bp, Gossypium hirsutum
  Clone ID: LIB3145-020-Q1-K1-G10
cccacgcgtccggacgtcgttgaacttgttgtgagagaactggaaacagacccgctgttgaactccgggcgtgggtctgctcttacggagaaaggaacagtagaaatggaagccagcattatggacgggcctaaaaggagatgcggtgccgtttctggcttaaccacggttaagaacccaatctccctcgcccgtctcgtcatggagaaatcaccgcattcttatttgaccaccccgggagccgaagagtttgccaagaaacagggcgtggagatggtggacaatgattacttcatcacagaagataacgtggggatgcttaagttggctaaagaagcaaactcaatcctgtttgattaccgtatcccgacagttggcacctgcggtgcatctgtggacagccatttgcagatgaacgggctcccgatcagcgtctacgcaccgga

SEQ ID NO: 15221 - DNA, 325 bp, Gossypium hirsutum
  Clone ID: LIB3145-020-Q1-K1-G11
ctgtacagtgtcctcctccatatcgctgtctacatggtcaagttttagtcggaactgaagtaccatttaagaacggaaattaattttaaagagtcgaaacgttatgttctttttattgtaatcttatgttcttcgctcatttataattgtttttttattaaaacatttttatttatatatatattaaaaaggatcgcttgttttctattgatcttcaatgtcttaaagatctccctttataattcaaaattgtttttctatatatatttacttataattcttactttctttaaattacttttataaaattctatattttttattt

SEQ ID NO: 15222 - DNA, 330 bp, Gossypium hirsutum
  Clone ID: LIB3145-020-Q1-K1-G12
gggcggacccacgcgtccggtttggggtcaccgagtagcacactgatttctgggatctattctttatccgaggaggggaaaagtatatgtcggggtggaattgcttatgttgaaggcgatgcttcaagtgccagttacttccttgcgggtgcagcagtcacgggtgggactgtcacagtagaaggatgtggaacaagtggtttacagggtgatgtaaaatttgccgaggttcttgagatgatgggtgccaaagtcacctgtaccgagaatagcgtaactgtcaccggacccccaataaatttcctcgtggaggaaacacttgcgtgctat

SEQ ID NO: 15223 - DNA, 424 bp, Gossypium hirsutum
  Clone ID: LIB3145-020-Q1-K1-G2
cacaattgcaacaacttcagtaatgaggttgcgcaatttttagttggttccaacattccggactatattttgcagctacctaatgaagttatgagcagtccgatgggtgcacttttaatgcccatgatacagaatctggagacaactttgagggctggtgctgttcctcaagtaccccaattcaggccttctgtatctgctcagtcatcccagtccacaaccatcagtgtgaacgggtcctccattagtagtcagccaaaagaggtagataataaggtgaaagatggggagcaaccaaaatctgaagaagtcgagacatcagaaaagacagtaccaccttctaaaccaaccggcacaaaggaaaaatcaaaaagcaatggagctgcagcagaccctcttggagatgctcgagccaaggtccaag

SEQ ID NO: 15224 - DNA, 384 bp, Gossypium hirsutum
  Clone ID: LIB3145-020-Q1-K1-G3
acaattgcaacaactttagtaatgaggttgcgcaattcttagttggttccaacatttggggctatattttgcagctacctaatgaagttatgagcagttcgatgggtgcacttttaatgcccatgatacagaatctggagacaactttgagggctggtgctgttcctcaagtaccccaattcaagccttctgtatatgctcagtcataccaggacagaaccatcagtgtgaaccgatactccattagtagtgaaccaaaagaggtagataataaggtgaaagatggtgagcaaccaaatatctgaataagtcgagacatcataaaagacagtaccaccttctaaaccaaccggcacaaatgaaaaatcaaaatgtaatggagct

SEQ ID NO: 15225 - DNA, 227 bp, Gossypium hirsutum
  Clone ID: LIB3145-020-Q1-K1-G4
gctttacaaaccaaaatcttatttcctggagaagcgccaattatcaacgaactctctctctatctcacctaatattccccgataatcttaagcttcaaaaaaacccgacatcaacaaacatgaagaacgaagacacagtttaacttattaccactcaagcaatggaattttttattaaacaaaaaagctgcgtatggttgtctcaaacaatccataacatgcttact

SEQ ID NO: 15226 - DNA, 383 bp, Gossypium hirsutum
  Clone ID: LIB3145-020-Q1-K1-G6
acatttacacatgcgtcaggtctgaagagctttccattccaaaatgttatctacagtagaggcggtatttatcaactacctctctattgatctcacctaacaatcgccgctcatctaaatgttcaaaaataacccaactacaaccaacatgaagaacgaagacacattctaacttactaccactgaaggaatggaattctgtatagacatacaagctgatatcgtttattaaacactccttctcatgcttacttctccacgtggatgcgctgaagcggatcatggagaagtgactatcccagacataagagctctgatcctcgagaagatctgtcacaacttttattgctactcttcactatttcaaaggtaaaaagactgtg

SEQ ID NO: 15227 - DNA, 408 bp, Gossypium hirsutum
  Clone ID: LIB3145-020-Q1-K1-G7
gttctaccatggaatctctgcgcatggaccattttttgatcatgtattgggatattggaaggcaagccaagaaaaccccaacaaaatattgtttttgaactttgaagatcttaaggaagatatggattcccatttgaaaattttggccatgttcttaggagttcctttcacagatgatgaagagaaacaaggagttgttgaaaaaatagcgaaaatttgtagctttgagaacttgaaagaattggaagtgaacatgaaggacgtacatacttctggagttccacacacacatttttttaggaaaggagaagtgggagattggagcaattatctcacacccttcatgattgaatgtttggagaagcttattcaagagaaattgaatggctcgggtttaacatttaaact

SEQ ID NO: 15228 - DNA, 341 bp, Gossypium hirsutum
  Clone ID: LIB3145-020-Q1-K1-G9
ctctcctctcttccaaaccaaatttctgacgcaatgagcagatccggccaacctccagagctcaaaaagtacatggacaaacaactccagatcaagctgaatgctaatcggatggttgttggtacacttcgtgggtttgatcagtttatgaatctagtggttgacaacaccgtggaggtgaatggcaatgagaaaactgatataggcatggtggttatcagaggaaatagcgttgttactgttgaagcacttgaacctgtaggcagaatgcagtgattcggttttttctactggaaatttcggatcacttgatggtatctggtgggtgaaaacatagatgc

SEQ ID NO: 15229 - DNA, 422 bp, Gossypium hirsutum
  Clone ID: LIB3145-020-Q1-K1-H1
cccacgcgtccgaaaaatcatggtgaagtctcaaaggccgccatctggccgtacaaatctggcatcatgtattgtagcaaccattttcttgatctttcttgtaatcattgttctcattgtttatttcaccgtttttaaacccaaagaccctaagatttacgttaattccatccagctcccttctttttccgtcggcaacaactccgtcagcttcactttctctcaatacgtcaccgttaaaaaccctaacagagccgctttttcccactacgacagcactattcagctcctttactccggatctcaagtcgggttcatgttcatacccgccgggaagatcgagtcgggtcagactcaatacatggcggccacttttgcagttcagtcatttcccttggcgcaaccgaatcaaagcgcggcgg

SEQ ID NO: 15230 - DNA, 353 bp, Gossypium hirsutum
  Clone ID: LIB3145-020-Q1-K1-H11
cgcgttcgctttactctccaaaaaaaaaaaacagtattatggtttatgactttacgactaaattctagggtctttggtattggtggttgtgtttggcgtaagtgatacagacaagactgttggctgacaaaggaaagaaggcgatactagaagagaagggtgtcgaatagaactctgaacatattgacggcgcactcgtcttttccatctaaaaactttcaagagatccaaaactggcttgagaagatcaatgaggatgcttgtgagaaagtcttggaagtggagcttaaatacaaccacttactcattgccattctatgataagcggcactacataatcaaataaattcctg

SEQ ID NO: 15231 - DNA, 426 bp, Gossypium hirsutum
  Clone ID: LIB3145-020-Q1-K1-H2
cccacgcgtccggtgaccaacaattttacccccaaaaagcagtgcccacacttgcagatcaagtggccaataattacatgcatatcccagttgcatctgcttttggaccagtttttcctccatgtgcaaaacacttgccgcccctccatggcattgagtttcaaccctctgaggtttgtcccaagaactttgttattttcaatcagactgataataggaaccaagtcttgttcaacccgactatcacaaacaagtttcatggtaatgaattaaatgtttttgcaaattacaatgatggcaagtatgagaggaaagatgtttatgatgtgggagaagaaacatcctcttttctgaaagaggattcggatgatattgatgcactgctcagctcggaagaggaagaacaagttgagtacgatgaggaag

SEQ ID NO: 15232 - DNA, 383 bp, Gossypium hirsutum
  Clone ID: LIB3145-020-Q1-K1-H4
tgcttgctacacatgacaatatctgcgttgctgttgtggttcagagccctcccaacaggagagcggactgtaaagaaatactggaggaaaccaccatgaaccaagcggagatcgtcgcactttttgctgccctgaacacacaatacggaacgacggggaccaaagtcttgcttactgtacttagtgtatgttaaacggatctccctctcatcagtttttgatgcgcttactcaccggcgcttcatccgacgatccttttctttttgaggtcaaccctgttttagtcaccgcctttggatccaccgacattgtcgaaggctgtgacaacagccagtcgatctcctgggttcacgcttggactgttcgtgatgggacaatcaccc

SEQ ID NO: 15233 - DNA, 159 bp, Gossypium hirsutum
  Clone ID: LIB3145-020-Q1-K1-H5
catctttagtccttcacgtaaattgttttttatttatgactacaatgcctgattgaggattactaattattactatctaatactaggtaactaaacaaattaatgataatttagattaattatattaaaaaaaaaaaaaaaaaaaataaaaatgggggg

SEQ ID NO: 15234 - DNA, 372 bp, Gossypium hirsutum
  Clone ID: LIB3145-020-Q1-K1-H6
cacataaccagaccaacattgcttcgctattaaggctcggcccgctcttaactggctagcgcacagtaaatacatgcatgtggcaaccacctctaaccaagcgccggttcttgctctatgtgcagcccactacacaccagacgatgacaccgagcaccaaacccttgctgccgatctagagagctgggttcacggtccacccactcaccagatgaagaagcgcttactcaccgccgctttatacgacgatccttatcttttcgaggtcaaccgtgttttagacaccgactttggatccacctgaatcgtcagatgctgtgacaacagacgatcgatctcctgggttcacgcttggactgttcgtgatgggac

SEQ ID NO: 15235 - DNA, 366 bp, Gossypium hirsutum
  Clone ID: LIB3145-020-Q1-K1-H7
atttaactgggcaatatgtcctgtatttaggggcttatagtgcattctacattcgtgaggggatttatagatattggacggagcagcattttacttgatggatagcatgtgtctgttgtattgtactaacagccactcatgcatatttttaatactattatttcgtcagtcggaaaaacaatgctgaactgaagataccactttgagccgagagaagttgtttttcactatatagaaatctaagttatggagcaaaggtagtgttggaacaccactcgtcgcgattgatattttgaaattagaagaggaagatgtagaggaaaattcattacatatatgtgtagatatacagataggtagatatag

SEQ ID NO: 15236 - DNA, 160 bp, Gossypium hirsutum
  Clone ID: LIB3145-020-Q1-K1-H8
cacaaaaccagaaaatctttgctttgctattgtggttcagagcgctcacaactggatggcgcactgtaaaaaaatgctggaggaaaccaacatgaaccaagcggtgggtcttgcccttttgaagccctaaacacacatacggaacaccggtacctaatct

SEQ ID NO: 15237 - DNA, 281 bp, Gossypium hirsutum
  Clone ID: LIB3145-020-Q1-K1-H9
gactcacgcgtccgcccacgcgtccgctgtttcaaagacacaagtggtgggttggccgtcggtgagaggcttggcgaagagaggaaagaggagttgcaaatatgtaaaagtggcggtggacggcgctccatatttaaggaaagttgatctcgagatatacaatagttatcagcagctgttaacctcccttgaagacatgttttcatgtttcaccataagaaactatttgaacgagaagaaaatagagcaagtgaatggaattgagtatttgcctacatatg

SEQ ID NO: 15238 - DNA, 382 bp, Gossypium hirsutum
  Clone ID: LIB3145-021-Q1-K1-A1
atttcgttcgttgtacttagtagacgttgataaggaaacaattggcagagctctgaaattgaattctgtaaggaatggaaatctatggaaagaaattgatgttttgatattcaacacttggcattggtggcaccgtagaggactgaagcaacaatgggattatgtgcaatttgatggaaagattcgtaaggacattgatcgcacggttgcttttcgtacagctttgagaacatgggctaaatgggttgattcagatgtggataccaataggactaaagttatatttcaaggaatttccccttctcactacaatggcagagattggaatgagccaggagtaaggaattgctcaaagcagacaacaccatctaagggatcgagt

SEQ ID NO: 15239 - DNA, 224 bp, Gossypium hirsutum
  Clone ID: LIB3145-021-Q1-K1-A10
tccttttgttcatcacctcattttcctacaactaagcacatgaggggatctctaaccaggggaatttcatataacataacctacccctattcccaccgtcaattacaatcttactccctaatacctattaaattaacttaattcattactctactctccatattttaacttattaataactctgcatattacccttttgatactgctactttctaattaacttt

SEQ ID NO: 15240 - DNA, 420 bp, Gossypium hirsutum
  Clone ID: LIB3145-021-Q1-K1-A11
gctcagcacagcacttctccaagcatttaagcacccccacatcttcccctctttctcctcaatttctttctcccttctcgcttcccttccacccacctcctttgtttcacctctttctttctttttctcctaaaccatcatgaatctcattaataggctcagccccaagcgtctctttcgatctaataaaaaagatagatccatcgtctccaagttcgacccctcctcctatagttccggttccgccgtttcctcctcttcctcctccgaatccgtctcttccaccctcaaaggacatcagtacccttccgcggctaccgctggcttcgtaacgcccaccagtgttttgccccaaacatcaggtgactggtccgattttcccgctaatttttatctagaactttgtcaggcgtttaaaat

SEQ ID NO: 15241 - DNA, 391 bp, Gossypium hirsutum
  Clone ID: LIB3145-021-Q1-K1-A12
tgtttatcttcagcagccaaaagtaaggggtcggccaaattcgcgcttcctcaccgctactgtgcttggtgtacagcaagctaaccgagctgttgaagtgaatgagatgtggcgagttcgacaaaaggagattgaattaaacgataggctaaaaggaagatcaaaaaaagataccagccacatcaggagttatggggacactagcaattcctccagaagaaccagtgggaagcacgagagtgattttagtgcttcatgctcatcaagcaagagaccagatgagagttctcgttcaagggaagatgatgaaggtctaagagacgaagagatcgaggaatttcctcagtcaaaggtgaagcgcggtcgagggtctataggttcaaggatggat

SEQ ID NO: 15242 - DNA, 175 bp, Gossypium hirsutum
  Clone ID: LIB3145-021-Q1-K1-A2
ataaaccctaatgtatttgcttgacctttagcttaatccatccagcctagttaatggccaacagtgttctacgtcggggaatcattgcggagactgagctgttgctcaatgaaccatgtactattgttagcgccgtaccatactaagagcacatgcggatcatgtgcgaggtgat

SEQ ID NO: 15243 - DNA, 335 bp, Gossypium hirsutum
  Clone ID: LIB3145-021-Q1-K1-A3
ccaggcaatctacgcagaattctgttgtgttctgaagctgctgcccaacaacttataaaggggcacctgctaaatgcatctggagaacatgtaacagctaatgagggagcggaagccttacctcctgagactcctaccgactcaaaaatagcaatcgatacgacagaaatcatatatggaggcatgtgagggccggataagagaactgcacatcctgcttctactcaacatagagctgaattgttaaaaattggaagcagtatttctggaccggacatagttaaaaaccaaacaagattgtcttttgagccacacatcatgttgatgtccgcaag

SEQ ID NO: 15244 - DNA, 422 bp, Gossypium hirsutum
  Clone ID: LIB3145-021-Q1-K1-A4
cccacgcgtccggttcagaatattccagaagtacctcatgagctgaaagcaatttacaggactgtttgggaaatcaagcaaaagacattggttgacatggctgttgatcgtggatgcttcatagaccagagccaaagcttaaacatacatatggaccaacctaattttggaaaactaacttccttgcacttctatgcctggtctaagggtctgaagactggtatgtattatctaagatctcgagctgcagctgatgcaatcaaattcacagtcgatacttccatgcttaaggaaaaaccaaaggtagcagatgatgatacaaaaatggcacaaatggtttgttccctgacgaatcgtgaagagtgcatggcttgtgggagctaagcagcaacagcagcactttttgaagcttttggaagtaa

SEQ ID NO: 15245 - DNA, 409 bp, Gossypium hirsutum
  Clone ID: LIB3145-021-Q1-K1-A5
gcgagccttagagaatgaaatgcttctaaggataaagaggcaaggacttgatattactcccagaattcttattgtgaccaggttaatacctgatgcgaagggaactagttgcaatcagcggctggaaagagtcagtgggacagagcatactcatattctgcgagttccttttaggtcagaacatggagttcttcgtaaatggatatcaaggtttgatgtatggccttatctggagacttatgcggaggacgtcgcaagtgaaattgcagcagagttacagggtattccagattttattataggaaactacagtgacggaaacctggttgcatctttgttggcttacaaaatgggcgtcacacagtgtaccattgcccatgctttggagaaaacaaaatatccagattca

SEQ ID NO: 15246 - DNA, 325 bp, Gossypium hirsutum
  Clone ID: LIB3145-021-Q1-K1-A6
tgggcttcttaaactacgacgctgctgttaaatgcctacaggatgttttgcaactccatagcttccactttgtatgataccatttttgtctggcataaacttcagtcaagcatttactctgctgcttggaagcatttgataatgtttactccttcgaaagcctttcaatattctacagaaattcaatatcagtttaactgtagagtttatatattgatatgggatgacagaagaacaaaatataatgaatatgttattctttcgactcatgtagttgtaaacttcacttgctatataatccattcagtaacttgatattacaccg

SEQ ID NO: 15247 - DNA, 418 bp, Gossypium hirsutum
  Clone ID: LIB3145-021-Q1-K1-A7
cccacgcgtccggaaaatttttgtgctgaacttcttttttctctttgtaccaccatgtgtggaggtgctattatctccgatttcataccgccgtcgcggtcgcgacgattgacggccgatttcttgtggcccgatctgaaaaaatccgggttgaagaaggggtcgggtaagagatactcgaagcccgtgatcgacttgggcgatgatttcgagactgactttcaggagttcaaagatgaagaatctgatatagatgattatgatgttgatgatgttttggctgatgtaaagccctttgcttttaacgctacaaagaaacctgcttctgctgtatctcatggttcgaactctgaaaaatccatgcaattcaatggtcaagctgagaaatgtgcgaaaagatagaggaagaaccagtatc

SEQ ID NO: 15248 - DNA, 414 bp, Gossypium hirsutum
  unsure (1)..(414): unsure at all n locations; Clone ID: LIB3145-021-Q1-K1-A8
ntttttttttttttttttttttttttttttttttttttttttttttttttttttttttgttttttttttttttttttttaaaaaaagggggtgaattttcccttttggaattgaaaggggggaacttttgggttttgggggggggggccttccccaatttttcctttttgggggttggggggggtggaaaatttggcaatttccatttgggggggcttttgggaattttacaaggggcggtatttttgggtagggggggtttaaaaatcttttactgggctatttgggggttattcgggaggtcttttaaagggaaatggttttttactgggggggggaccttatttggactggaaaatccccactcttggggaaaataaaaagggggggcgcaccacaaaattttttggcctc

SEQ ID NO: 15249 - DNA, 433 bp, Gossypium hirsutum
  unsure (1)..(433): unsure at all n locations; Clone ID: LIB3145-021-Q1-K1-A9
ggcttttggttttcacctcggttgcctcgaaggaagcagaggaagggattgcttaccaggggaagtacatattagaaaatgaagctggagatccaggggtaaagccaggctcatgcccgaatagaaaagaatcacggccactcaattcaaaaagcgcttctcttttcctcatgaattatttcccaagttacccggttgaaaccgaagcttgcaaagagcattcagcacgactagctgacatgatcggcacctgcttcaaagcagcagggagtatgatgccaaactttttagcagtcaacttctacatgaggagtgatggaggcggtgttttctatgatttggatagcatgaatggccaaagattatgtggatgtaatacanatgctgcttgccaggctggagcaccatttggatcttgcaagaacattacaat

SEQ ID NO: 15250 - DNA, 383 bp, Gossypium hirsutum
  Clone ID: LIB3145-021-Q1-K1-B1
gaaaatagctgcgcatggtcgtgtcttgttttttgcaattttgaattccgcctgaaatttgtgtctgcctcaatatttctctttcaaattcttattaggaatttttttccttttaaattcctataagtataattcttttgaagatctccttaaccctctgagaatctcccaaattttaactcttttgaatttttttgagatttctcaaagaacaaaaacgaactggaattgaaaagctggggtttttggctcctgtgtattctttcggttatgatttatccctgttagccttgagtatcacttctcattatgaacaaccaacctggtgaagatggagatgaagccactgtcatggggtttgaagtgccgagaacacctgattc

SEQ ID NO: 15251 - DNA, 418 bp, Gossypium hirsutum
  unsure (1)..(418): unsure at all n locations; Clone ID: LIB3145-021-Q1-K1-B10
gatccagccatatagaattttggggtcaggaaagagcagaaacagtgatgttgtgttcggtcttttgagtgatttgccagcggaggttttagtggtggtgtattgtactgtaggtcatgcccatgcctatgcctaaagagttagatgggcgagggttttgcttttgcctactttagcagtgaccgatgtttgagtcccttgttataataatgatgtacaaatactggtaagttaattaattaatctgaaatatggagtttaagtaatctacctcaattagaatcacannnnanaaanaaaannaaacaaaaaaaaaaaaaaacatattttaaataagaaataaattaataattttaacatataaaaaaaataaataaaaataaaccccctaaaaaaaaaaaagggggggcctttttaa

SEQ ID NO: 15252 - DNA, 351 bp, Gossypium hirsutum
  unsure (1)..(351): unsure at all n locations; Clone ID: LIB3145-021-Q1-K1-B11
agaaggagaaagttgaaaccgcagtgaaagaggcacttgagtggcttgatgacaaccagagtgccgagaaggaagactacgaggagaagctcaaggaggtagaggcagtatgcaacccaatcatcacagcagtgtaccaaagatctggtggagccccaggtggtggatcaactgaagaagatgatgattctcatgatgaactttaaaaaactggtaatgccattttgattgctgaaacaagcaaagaaaagcaaagggtgagaaggatgagagcatangtaggtgagatgaggatatactgtaattgttctccatggtagaagttaaaaaaaggagaagtatatccccctt

SEQ ID NO: 15253 - DNA, 424 bp, Gossypium hirsutum
  Clone ID: LIB3145-021-Q1-K1-B2
attttacgtcagatcactcagcacaaatgggcacatccctttatgcatccggttgatgttgaaggtcttggtttgcatgactattatgagattgttcagaagcctatggactttggtacaataaaaagcaagatggaagctaaggatggtactgggtacaagaatgtacgcgaaatttattctgatgttaggttggtttttaagaatgccatgaaatacaatgatgaaagacatgatgtccatataatggccaaaactttattggaaaaatttgaggagaagtggctgcaacttttgcctaaagttgctgaagaggagaaaagacagcttgaggaggaagcaaaagcagagctagatgtgaagctggcacaagaggcagttcatgctaacatggccaaagagttgagcaatgaactgtgtgacg

SEQ ID NO: 15254 - DNA, 409 bp, Gossypium hirsutum
  Clone ID: LIB3145-021-Q1-K1-B6
cagggacgtgcagcgaatcctgatctggattcatctgatatggagaagctcttccgtgagcacataaagatgctatttgagagatgtgtgaacgacttcagagctctgttagcaaaagtcataactcaagatgcagctgctcaagagacagaaggtggtaaaacagcccttaattcatggtcaactgccaaacgtcttctgaagcccgatccaaggtataacaagatgccaagaaaagagagggaagcactgtggcgtcgatacgcagaggatatgttgcgaaaacagaagtcggcattagatcaggaggaagagaaacacactgatgtgaaaggcagaagctctggtggtgattttggaagatattcgtcaggtacaaggagaactcatgaacgtagatagttcgttt

SEQ ID NO: 15255 - DNA, 391 bp, Gossypium hirsutum
  Clone ID: LIB3145-021-Q1-K1-B7
agaaggagaaagttgaaaccgcagtgaaagaggcacttgagtggcttgatgacgaccagagtgccgagaaggaagactacgaggagaagctcaaggaggtagaggcagtatgcaacccaatcatcacagcagtgtaccaaagatctggtggagccccaagtggcggatcaactgaagaagatgatgattctcatgatgaactctaaaaaactggtaatgccattctgattgctgaaacaagcaaagaatagcaaagggtgagaaggatgagagcataggtaggtgagatgaggatatactgtaattgtcttccatggtcgaagttaaaaaagggagaagtttttccccctttgttcggatgtaattttgggtgaatgaatacgttttacgg

SEQ ID NO: 15256 - DNA, 422 bp, Gossypium hirsutum
  Clone ID: LIB3145-021-Q1-K1-B8
cttcgtttgcagagtttgtatctgacttcgatgtgccatccagtgattctaaattgaagaaaaaggatacagcagttcttgagattggaagacctttcagccctgtcatgtttgaatccgtacttaaaagttttactccggatgtgccaaatagcatatctggtaggccaaggcaggaagatgctcaggagtttttaagttttatcatggatcaaatgcatgatgaattggttaagcttcaagggcagtccggtagctcaaatggggtcagatcatcactagtttcgtatgcagaagatgatgaatgggagacagttggaccaaaaaacaaatctgcagtcactagaactcaaagcttccttccttcagagttgagtgatatttttggaggacagctaagaagtgtggtgaaggcaatagga

SEQ ID NO: 15257 - DNA, 425 bp, Gossypium hirsutum
  Clone ID: LIB3145-021-Q1-K1-B9
cccacgcgtccggcttcttgctttctctccctcccattttcctgttagcctcccccatggccgaccatgggctcatcgggggcgtctcctcgcccatgcctcgaacggcagtcggtgttgagtgaaacgggcccttttggtcctcttccgaactggttcgaaggcggagccttcatagcccatcgcgacggaagagaaaagggaaaaccccctttttggttcgttgttcccttccacggccattggctgaacccccaggggttcaacgaccttcaaatcggcgagggaacgccggagcacccccaaacagtgaatcggaggtacgtctttacaattgttatctttgtattattatttcatatgtaaaaagaaatgaaaagaaaaaaaaaacaaaacaaagtaaaatacaaagattagaaactgaa

SEQ ID NO: 15258 - DNA, 425 bp, Gossypium hirsutum
  unsure (1)..(425): unsure at all n locations; Clone ID: LIB3145-021-Q1-K1-C1
gtggccgaagctgtaaatgacattgtcaagcaaagaaaaagaggaggattttatggcaatgaaagggtgtaaacctcctcaaagacctagaaagagagccaagatcattcaaaggagcttacttgtaagtaacatcgatgaatttattccaaatttccaataatttaactattgaatcatatgtcgtttttgaatgtgagaattgtcatagccaacaatcgattggatcctttattttggttgaggtacccgtgtctaacccatatttggacataggtacgaggatatgaccctccaaggattctccaaatacatggaaaaactctgaaaatattgaacactcatagtctgagtaacatagagtaaattggttttgggttgtttcttttgcaaattgngtttacttatgtggtgaatggcagttg

SEQ ID NO: 15259 - DNA, 420 bp, Gossypium hirsutum
  Clone ID: LIB3145-021-Q1-K1-C10
cttaaggcccgatgaacgtgttgatgtaatgtttggaaacatcaagcatgccttcttccagccagcagagcgagaaatgatcactctggtgcactttcatttacataatcacatcatggttggtaataagaaaaccaaggatgtgcagttttatatagaggtgatggatatagttcagacattgggcggtgggaagagatctgcctatgaccctgatgagattgaggaagagcaacgcgagcgtgaccgaaagaataaaattaacacggacttccagaactttgtgaatcgggttaatgatttgtggggacagcctcaatttaaagcatttgaccttgaatttgatcagcccatgagagagcttggcttccatggggttccccataaagcctctgctttcattgtgccaacatcaaactg

SEQ ID NO: 15260 - DNA, 431 bp, Gossypium hirsutum
  Clone ID: LIB3145-021-Q1-K1-C11
tgaggttttgggtgcaaatattgtgaagagtggctccaaaacatttgctgtttattccatatctgttacagatgtaaacaacaataatagctggtcaataaagagaagattccgacattttgaggagttgcatcaacgtcttaaacaatttccagagtataaacttcacttgcctccaaagcattttctctcaacaggtttggacgttcatgtaatacgagaacggtgtaaattgcttgacggatatttaaagaatctcctgcagcttcctactatttcaggatcaattgaagtttgggacttcctaagtgttgactcccagacatatgtattctcaaattctttttctatcattgagacattgtcagttgaccttgacagtaatccatctgaaaagagcaacaaggcctcaagtgttttggtgcctctgg

SEQ ID NO: 15261 - DNA, 346 bp, Gossypium hirsutum
  Clone ID: LIB3145-021-Q1-K1-C12
aagccattaggggccgaaatacagctaatgggtagtaacggggggaatttcactttggattctgatgaaaatctcgacaatgggattaaagaagaagatgatttggtgaaagagaagtcagctgttgtggaattggctgttaatggccatgcttcacatgtcagatgtaaacatttagaggtttctttcggatagctgggtgaaaagcattgcaatcttattcttttgtaatgatattagtgaataagtgatgattgactttgcataaactataatataccctgttgtttgctgttttgctcaatgagatttgagctctatttcatgttcaaaacaaaaactttat

SEQ ID NO: 15262 - DNA, 367 bp, Gossypium hirsutum
  unsure (1)..(367): unsure at all n locations; Clone ID: LIB3145-021-Q1-K1-C2
acgggaagcatattgttgcgcgtgtagagaaacttgttgctgctggagagaggagaattgctgctcagtctgtgcacccttcttaaatcggtgtaggaaagagacatgtttgtacagctaacagaatctatgtgaagctttcccttcttccccccatatgtagggtcatggttcttctacctatcttcttagacaggtaagtaagaactgtatgaaaatataagttgttgcttgccttgtaccaggaaaaaaaactgtacattgtgtagcttaagggtttatacatagaaatggagccaaagctgagagtttcagctgttgcntttnaaaataaagaacactcatagtatgagtaacataaaataaa

SEQ ID NO: 15263 - DNA, 408 bp, Gossypium hirsutum
  Clone ID: LIB3145-021-Q1-K1-C3
cgagccgaggatctgctgcatagccttctttcctcgaacaacagcatgacagtcatcagatgatgaacatagagttttgttagtagtaatagaggcttattaaggccctgagcccctgactgctgtgctgggtcatgtcttgcaatgggatggcttttttcccagcaaatttcatgctccaatctcctcatgaagaagatcatcaaccctcaacttctatcaatcaaatgcttccttcttgcccgccccaagacttccatggtgtggcatcatttcttgggaagagatcaatgtcattttcagggatagatgtgtgcgaagaagcaaatggggaggatgatttatcagatgatggctcacaggcaggagaaaagaagagaagacttaacatggagcaggtaaagactc

SEQ ID NO: 15264 - DNA, 428 bp, Gossypium hirsutum
  Clone ID: LIB3145-021-Q1-K1-C4
cttgccgtgagtttattcttgtttcacctaaagtttttctctaggctatttgttaaatgtgtttgattcacttttatccatataaattaggccgctgaaggtgcaagggtttgtggggcttctcggatcatcgctgttgatgtgaaccccagaagatttgaagaagctaagaggtttgggattacagaatttgtgaatccaaaagactacgataagccagttcaagaggtgattgtggagatgaccggcggaggagtggatcgcagtgtggagtgtacagggagcgtccaagccatgatttccgcttttgaatgcgtccatgatggttggggtgtttgtgtgctggtgggtgtgccaaagaaagacgatgcattcaaaactcatccaatgaatctactaagtgagaggacccttaaaggtgcttttta

SEQ ID NO: 15265 - DNA, 418 bp, Gossypium hirsutum
  Clone ID: LIB3145-021-Q1-K1-C5
caaaaaaccgcttcgggcaagcccttcgttgatgttttgaaggaaggtggtgtcctccctggcatcaaagttgacaagggtacggttgagcttaatggaacccatggcgaaactttcacccagggtctagatggccttgcacagcgatgccagaagtactatgaagctggtgcccgctttgctaaatggcgtgctgtccttaagattagtgctaatgaaccaaccgagcttgcaatccaagaaaatgccaacgggctagctatgtatgctgccatctgccagcaatgtggccttgtccccattgttgagcctgaaattcttgttgacggatcacatgacattaaaaagtgtgctgcggtgacagagcgtgttcttgctgcttgctacaaggctttgaatgatcaccatgtcatgcttg

SEQ ID NO: 15266 - DNA, 419 bp, Gossypium hirsutum
  Clone ID: LIB3145-021-Q1-K1-C6
cccacgcgtccgcttttatctttaaaaaaaccctaaaatttttgagatgttctctcaacctccagcctaatgtctaatgtccaggcctccaattgcccgcttgtaaccggcgaagcaaggccctccaacggtgcgggcacgatgcccgtgaaaaaatcgaaggctttatagccaaaagacaagcagtttttgcctatttctttgctcaaatcgcaggtgctgtgaggtcgtggagggggagtgcacgatcgtgggacgtggatgcgcgagctgggggcgtgccgacgtgcgtggtggagtggcgctgaacgtgggggttgcaacgtgggtggctaggagtaacttatggttttttttatttgggccactgtagagttttgggctttagaatttgcgtcaaaaattttatgtaattgggc

SEQ ID NO: 15267 - DNA, 403 bp, Gossypium hirsutum
  Clone ID: LIB3145-021-Q1-K1-C7
tgaagagtgcacctgttcctcattcaaccacacaacaatctagttggagttctgctccttctactggcggtggcagtgatgacgatgagccacacagttcaagctaagacaaagaagcaaccgcatcaatccccttttttcgttcaaggtcataaaccaaaacattatcattattattatttttctttttgaaagtcttcaaaataggaggattcatttctttactatcacagttccgccgttctcttccatatcgaataagtctgtgccgccaaacccataaaaacttcaaccgaaaaaccctacataccttttccgaaaaaccctgcatttacattagggagaaccgagtcaaaaccatcctaattttcggagctcgtaaaaacgaaaacataggaatcat

SEQ ID NO: 15268 - DNA, 368 bp, Gossypium hirsutum
  Clone ID: LIB3145-021-Q1-K1-C8
ggaagctcctgctgccatggcccgggacatgatcatcgaggtcaccaccaatggggggtgtccggatcatctccaccactaccatcctcactctctccaacaacagcagcaaatgatcttgggcgaaagcagcggctatgacccataagtcaaagcccccaagaaacgagccgagatctgggtcctagacgaaacccgtagccttatcggtttccgaaaggaaatggacggccgcttcaatacttttaaatcgaacaagcacctttgggagaagatatcatctatgatgaggaagaaaggattcgatcgatccccaactatgtgttcggacaagtggaggaacttgttgaaggagattaagaaagcta

SEQ ID NO: 15269 - DNA, 425 bp, Gossypium hirsutum
  Clone ID: LIB3145-021-Q1-K1-C9
cccacgcgtccgatcaagctttgctcaatatcgagctcgatttttaattgggttcggtgtgcttaaacctacatcctttgtcccacaacccgtccatacattttgtttcaatttgaatactcttgagttgagcatataatcctaacagacctacctatttgtaatttagtaatgagaatgtacctgccaagggatcgaacaagcaaaaaaagcaaaatatcatgttacgtttctagtaaatatttgatcctttcttaatataaaaccatagatgtcatgacaacctaccaaccatgcatcatctttaaccctttttttttaaatggtgatgatgtatgcactaatcaaagtaattaattaaatgttcagtgtgagagcatgggagcagtggagaagaagctgaaggaaatggaactggaacacgt

SEQ ID NO: 15270 - DNA, 428 bp, Gossypium hirsutum
  Clone ID: LIB3145-021-Q1-K1-D1
cttcaaagaatttttgagggaggttgcaataatgaaacgtctacgtcatccaaacattgttctttttatgggagcggtcacacagcccccaaacttgtctatagtgacagaatacttatcaagaggtagcttgtttaggcttttgcataagcctggtgtgagggaggtgttggatgagaggcggcggttaagtatggcttatgatgtggcaaagggaatgaattatcttcatagacacaatccccctattgttcatagagatttgaagtctcccaatctgttagttgataaaaaatatacagtcaaggtttgtgattttgggctttctcggttgaaggcaaacacatttctgtcatccaagtcagcagctggaactcctgagtggatggctccagaaagtcttcgcgatgagccatcatacgagaagt

SEQ ID NO: 15271 - DNA, 359 bp, Gossypium hirsutum
  unsure (1)..(359): unsure at all n locations; Clone ID: LIB3145-021-Q1-K1-D10
aaaaagagaaaaaagtagtgtgatccacatcagttatggcagtgtctgccaattatagatgtacgtaacttaggatgattattatttctgtcatatacacttgtaactgttagaatctaatttagttctttttctttaggtnaaaaaaaaaaaaaaaaaaaaaaaaaaaaaaaaaaaaaaaaaaaaaaaaaataataaaaaataaaaaaaaaaataattaaaaaataattatttatttttaataaaaaaaaataataaatttattatttaaaattttgggggggtttttttaaggaaaaaaatttttagtttggttgttttggaaaaaaattttttttttttttgggggcccttaatta

SEQ ID NO: 15272 - DNA, 431 bp, Gossypium hirsutum
  Clone ID: LIB3145-021-Q1-K1-D11
cgccggtgtttccgccatgcatttgatattgcttcctaagatcaaccaggctttgatgttcgatgccacagtgtggaaaatctcaaagatgaaattaccaggaccgccatgccgacgcgtcgagggaaccaataaagaagattgctatgttcattcgattctcatggacgttgaaacaggaaagattaggccacttaggttgaactatgacacttggtgctcatcgggtgcccttgatattaatggccgattggtaagtactggcggttataacaatggctctgacactgtgagaatcctcgacttatgcgatacttgtggctgggaagaatatcctggtgcacttggaaatggaagatggtatgcgacacaagtaaccttaggcgatggtagattcatggtgttcggcggtcgagatttcccaacataca

SEQ ID NO: 15273 - DNA, 402 bp, Gossypium hirsutum
  Clone ID: LIB3145-021-Q1-K1-D12
tttagttccagttcgtgaggtgaatttcttaaggttttgcaagcggcatgctgaaggggtttgggcagtggtggatgtgtccatcgacaccctccgagaaacttcaggtgcacccacaacatatgtcaaatgtaggaggcttccttctggttgtgttgtgcaagatatgcctaatggatactccaaggtaacatgggttgaacatgtagaatacgacgagagtcaagttcaccatctctaccgccctttactaagctccggcattggctttggtgctcaacgttgggtcgccaccctccaacgccaatgcgaatgtcttgctatcctcatgtcctccactgttcccactggagaccatactgctataacggcaagtgggaggcgaagcatgttaaagctagc

SEQ ID NO: 15274 - DNA, 424 bp, Gossypium hirsutum
  Clone ID: LIB3145-021-Q1-K1-D2
cttcaaagaatttttgagggaggttgcaataatgaaacgtctacgtcatccaaacattgttctttttatgggagcggtcacacagcccccaaacttgtctatagtgacagaatacttatcaagaggtagcttgtttaggcttttgcataagcctggtgtgagggaggtgttggatgagaggcggcggttaagtatggcttatgatgtggcaaagggaatgaattatcttcatagacacaatccccctattgttcatagagatttgaagtctcccaatctgttagttgataaaaaatatacaggcaaggtttgtgattttgggctttctcggttgaaggcaaacacatttctgtcatccaagtcagcaactggaactcctgagtggatggctccagaagttcttcgcgatgagccatcaaacgag

SEQ ID NO: 15275 - DNA, 422 bp, Gossypium hirsutum
  Clone ID: LIB3145-021-Q1-K1-D3
gttgaagatatattctacaagtatggtcgtattttggatattgaattgaagattccactccgccctccatgtttttgttttgttgagtttgaggatccccgggatgctgaagatgcaatcagaggtcgagatggttataactttgatggttgtcgtttgagggttgagcttgcacatggtggtagaggacaatcctcaagtgatcgtcgaggcgggtatggtggcgctgcggctaagtttggtgtatcacgtcattctgaatatcgagttatcgttcgtgggctcccttcttctgcttcctggcaagatttgaaggatcacatgcgaaaagcaggtgatatgtgttttgtggaaatttcacatgacagtgatgggacatttggtatagttgattttaccaattatgatgacatgaaatatgc

SEQ ID NO: 15276 - DNA, 407 bp, Gossypium hirsutum
  Clone ID: LIB3145-021-Q1-K1-D4
gttgacaaagttgtgggggcaaggaaagatgatttgcagcagaaaataaccttacatatgttgaaagcatgaatcaacttcaattactctttgaattctgtaagctgtttctgaaactagaatttaacttatagatcttatacatatctgtctctcggatactaaaattatgttcttgtatgtcttgttcgataccttcattatgtgcttgtatttccttgtatgaacatcaaactcgaaattgcttgtatattcctactacaccaatctatttatatgttacaaatggctgtctttaaaaaaaaaaaattaaaagtttacattaataaaaaaaaatgaaaaatattttttgaatatttaataataaaatttaatagaacattttataataattattttttcataat

SEQ ID NO: 15277 - DNA, 424 bp, Gossypium hirsutum
  Clone ID: LIB3145-021-Q1-K1-D5
cccacgcgtccggagaactttaccgatacatttgcgacacgaaaggagcctttgtacagcctgcattgtatgaagcctttggattgacagttgtggaggcaatgacttgcggtttgccaacattcgcaacctgcaacggtggaccagccgagattattgtccatgggaaatctggtttcaacattgatccttaccatggtgatcaagctgctgacatactggtcgatttctttgaaaagtgtaagaaagatccatctcactgggataagatctcccaaggaggcttgaaacgtatcgaggagaagtatacatggaagatttactcggagagactattgaccctgaccggagtgtatggattctggaagcatgttttcaaccttgaacgccgtgagagtcgtcgttaccttgagatgttttatgc

SEQ ID NO: 15278 - DNA, 419 bp, Gossypium hirsutum
  Clone ID: LIB3145-021-Q1-K1-D6
tattgctggaggtgctactcaaaattcaatcaaagttgcacagtggatgcttcaaattcctggtgcaactggttacattggctgcattgggaaggacaagtttggggaggaaatgaagaagaactcaaaagctgctggtgttaatgttcaatatcttgaggatgaaactgcaccaacaggaacctgtgctgtttgtgttgttggtggtgaaaggtcactcattgcaaatctatcagctgctaactgctacaagtctgagcatttgaagaagcctgagaattgggcgttggttgagaaggccaagtacttctatattgctggatttttccttactgtatctccggaatccatacagcttgttgctgaacacgctgctgcaaagaacaaggagttctcaatgaatctttctgctccattta

SEQ ID NO: 15279 - DNA, 390 bp, Gossypium hirsutum
  Clone ID: LIB3145-021-Q1-K1-D7
atgggtgccaaagttcttttcttctttgctttgctttccttttcagctgtctcggcatttgcacatgatgaggaagaccaaggtcttgttatgaacttctacaaggattcttgtcctcaggctgaagacattatcaaggagcaagttaagctactgtacaagcgacacaaaaacactgctttttcttggctgagaaacattttccatgactgtgctgtccactcatgtgatgcttcactgctgctggactccacaaaaaggagcttgtctgagaaggagacagacaggagcttttgcctatagaatttcaggtacattgagaccatcaaagaagctgtcgaaagggaatgttctggagttggttcttgtgctgatttccttgttctgtct

SEQ ID NO: 15280 - DNA, 177 bp, Gossypium hirsutum
  Clone ID: LIB3145-021-Q1-K1-D8
ctcataaaaattatgaatgccatggttaatatggcccataatcccatatttagcttatggaagaacaagcctttttctcttgaattagtggtaaactgaaatgcaatacacgctgtaatctgtattttactattattttcatgtaatttcgcaaaaaaaaaaaatatatataaatat

SEQ ID NO: 15281 - DNA, 366 bp, Gossypium hirsutum
  unsure (1)..(366): unsure at all n locations; Clone ID: LIB3145-021-Q1-K1-D9
cgcgtgtggaggtcgttgtggaggtggcttgcggtagtcgaaagttagtgttacccatgttgaaaatttatttattttttgggccattcgggcctaagtttttaatcattttgggcttgtatttgggtaaggtttggtctgtaaaaaacaggccaattgggccgtgtttatttgggttttgtnaaaaaaaaaaaaaaaaaaaaaaaaaaaaaaaaaataaaaaataaaaaaaaaaaaaaaaaaataaaaataaaaaaataaaaattgggcgggcgtttttaaggttccaaagtttctttacgcgggcttgcaacgttaaagttttttttttattgtacctaaattaaattaaatggccgtggtttt

SEQ ID NO: 15282 - DNA, 407 bp, Gossypium hirsutum
  Clone ID: LIB3145-021-Q1-K1-E1
ctttgcagcagttgcttccagagatccctttgtgggtcaaaaatccagattttgaccgtgttgactggcttaacaaatttatcgagaccatgtggccttatctagatacggcgatttgcacaactgctaagaatatagcaaagcccattattggtgagcaaattccaaaatacaaaattcaatcagttgaatttgaaacacttactttgggtaccctgccaccaacttttcaaggaatgaaagtctatgtcactgatgagaaggaaattattatggaaccatcacttaagtgggcaggcaatcctaacatcattatcgcagttaaagctttgggattaaaagccactgttcaggttgtcgatttgcaagtttttgccgttcctcgaattactctgaagcctttgctc

SEQ ID NO: 15283 - DNA, 406 bp, Gossypium hirsutum
  Clone ID: LIB3145-021-Q1-K1-E10
cgacatgccagcggataagttattgggtcattttgcacagtatggggaaattgaagagggtcctttgggcttcgataagcagaccgggaaatcaaagggatttgctctttttgtttataagacggcagaaggggctcagtcggcgttggtggagccggtgaagaatattgatgggagacaattgaattgtaagcttgctattgaagggaaaaaagggaagccaggacaagatgggatgatgcaaagtggagttggggctccaggaaatacagagatgggggttggaggacatggtggaggttacggtggccctgtggggcctggtggaccaggtggcatgggtggttatggtgggtttcccggtgggttgcaagggccgcccggcccaatgggtcatcctcatcac

SEQ ID NO: 15284 - DNA, 331 bp, Gossypium hirsutum
  Clone ID: LIB3145-021-Q1-K1-E11
gggttatcttttatccatctcgagactgcatgcagccatcttaggtctatttatgtacggaaaatttcatgctaacaaacttgtagttctactggaccttctgaagtacaacacatggagaaatggaaaattgttcttgcaacaataataactttgcacataaatgatttcatgtagtagatttataccggttcattggattaggagtgacactttatatcttctaactgaaataggttactttggcttcatttaagtgagaaacttggtttttgtttctatgatgttctaaaataaatttttgtttgcaaaacaaggactgatttaagca

SEQ ID NO: 15285 - DNA, 426 bp, Gossypium hirsutum
  Clone ID: LIB3145-021-Q1-K1-E12
cttgtaccggtgcattaaggaagccctgagacttcaccctccagtgattatgcttctgcgcagctcacacagtgattttagagtaaaaacacgagacgggaaagagtatgacatcccgaagggtcacatagttgcaacatcaccagcatttgcaaacaggcttccttatatttacaaggatccagacacatatgatcctgatagattcagtgttgggagggaagaagacaaggcagcaggggctttctcgtatatttcctttggaggcggcaggcatggttgcctaggtgaaccgtttgcttaccttcagataaaggctatatggagccatttgttgaggaacttcgagtttgagcttgtgtcacctttccctgagattgactggaatgctatggtggttggcgtgaaagggaaggtgatggttcg

SEQ ID NO: 15286 - DNA, 275 bp, Gossypium hirsutum
  Clone ID: LIB3145-021-Q1-K1-E2
gttgggtcagatgctgatgcgagctagggtggtagttcagggagctacagttgctcttatggttggcactgcatactactatggggataatccctggaaatcgagttagaacactcggtttcatggttgcaaccattatattgtttttattttgatatgcaatttctttttatagctatagatgttgaacaaaagcatcataccaagaaagcaaatgccctcagattgatatagcttgggaataaattaaatatgctctatgcatgtcttattct

SEQ ID NO: 15287 - DNA, 422 bp, Gossypium hirsutum
  Clone ID: LIB3145-021-Q1-K1-E3
attgaggtaaaaatattgagaagaaaaatgaagaaagaacataatatatttgcattggcaatgttattttgccttgccatagtgccagtctatggccaatactactcgaaaactgttatgcgagctactcagcgggcgaaaaagatgacccgactccacttcttccttcatgataccgtcagtggtgaaaaccccagtgcagtcgtcatagcccgtcccaacatcacgcaaccatcctcattcgggtttggcacattgtttgcaattaatgacccccttaccgtaaggcctgcactaacatcaacgttgattggaaacgctcaaggactctatgtatcatccagtcgagaccctgctgtgtttactacagttatgtacgctgatttcgcatttacgagtggcaggttcaatgagagcttttt

SEQ ID NO: 15288 - DNA, 408 bp, Gossypium hirsutum
  Clone ID: LIB3145-021-Q1-K1-E4
gaaaactgaaaaacaaaaacgcaaacaaagccctaacaatcttagatcagaaaagaaaagctggccaccatggaaaaggaggtagagtttgagaaaaagaagcacggcctgaagcacatagctttcgtgagggtggctgcgatccgcactctggtttacgtctcgaatctttacgggtatgctaaacagaattctggtccgttatggtccaccgttgggactgtcgaggttgctgtcgccgccatcgttggccccgtctacgagaaatataaggacgttcccgatcatcttcttgtttttcttgattccaaggtagatgaggcttcacagaaatatgacgagcatgtcccaccagcgggtaagcaaatggtgaaccaagccaaatatttggttcacatggcagcacaa

SEQ ID NO: 15289 - DNA, 390 bp, Gossypium hirsutum
  Clone ID: LIB3145-021-Q1-K1-E5
cccacgcgtccgatttacactagcagcataggttgcaccgactattatctttgaggatgaggttgatagtatgttggggcagaggactcgagttggggaacatgaagcaatgaggaaaatcaagaatgagttcatgacacattgggatggcctattgaccaaagccggtgaaagaattctagtccttgctgcaaccaacatgccatttgaccttgatgaagcaataattagacggttcgagcgcagaatcatggttggtcttccatcgattgagagcagggaaatgatattgagaaccctactgtcaaaagaaaaagctgaaaacttggactacaaggaacttgcaaccatgacagatagatacagcggaagtgatctcaaaaacttatg

SEQ ID NO: 15290 - DNA, 400 bp, Gossypium hirsutum
  Clone ID: LIB3145-021-Q1-K1-E6
cacaaaaccgcaccaaaacaaaactcatttgcctctttatctcccaaaccaaacccctatctctcgaggattcaccatgaaaggcagtcaaacaaagtccgattcgatgcatgctggaaacaaactgaaaggcaacggcgcaagcgccgggaaacgtgcgaagaaagccgtcatggatccaaacaagccgaagaggcctgccagtgctttcttcgctttcatggaggagttcaggaaacagtacaaagaggcgaatcctgataacagatccgtgtctgctgttggcaaagctggtggagaaaaatggaaaagcatgacagatgctgagaaagctccttttgtacagaaggcagagaagcgcaaaagtgaatacaataagaagatgcaggcatatagtctg

SEQ ID NO: 15291 - DNA, 365 bp, Gossypium hirsutum
  Clone ID: LIB3145-021-Q1-K1-E7
acgccccccttttatttagggtttttgattccttcatctttatcttcgatcaatcaaccatgactggcaaagccaagccaaagaagcacacagccaaggaaatagcggcgaagatcgacgccgccacaaccaatagaggcggcggcaaggccggatttgctgaccgttcgggtgtggagaaaggtggacatgctaagtacgagtgtcctcattgcaaaataacagctccagatttgaagtcgatgcagattcatcatgatgccaagcaccccaaggttccctttgaagagtcaaagcttgtgaatctacatgctgttcatgtggttgagacttccaagcctcgtcctggtgttaggggcagcctt

SEQ ID NO: 15292 - DNA, 412 bp, Gossypium hirsutum
  Clone ID: LIB3145-021-Q1-K1-E8
gaaaagaaaaaggaggtgtgtggaatcttcaaagaagaccaggaggaagaatccttcccttttttctttttttccccagaaagagcgattcctttcccttcccttctagttcctcgtttactttttcttcttctttcccttctgattataataagatttgggtttcgttatcctctgaaactctcgtctctggtttgaaaggagattgaaaaaatatggctgaagaacatagatgtcaagcaccacagttatgtgccaacaactgtggatttttcggaagcccgacgactcaaaatctctgctctaaatgttatcgcgatcttcaacttaaagaacaacaatcttcctctgccaaacaagcctttaatcacactttcgttccttcgtcgtcttcattgccatcgtcatcatc

SEQ ID NO: 15293 - DNA, 336 bp, Gossypium hirsutum
  unsure (1)..(336): unsure at all n locations; Clone ID: LIB3145-021-Q1-K1-E9
gtaggngctngggagcaatacctnggggagagcatagtggaacactcctaagagggcttatgtaaatcagaaccgtcacacatacgagaaagcagttaaaatatacaactaggagaaagctaatttgatagagagattagcaggtaagttagttgatgtggagatagccttttccttacaaatgatggcattgtagatatcatcattattatgattatggaggaaaccgttgttgcttagagagaatttatccagtagggtttgattattgttttttttgaggataaaaaaatataattattaatatatgatataggtttggtttcttttctcccg

SEQ ID NO: 15294 - DNA, 423 bp, Gossypium hirsutum
  unsure (1)..(423): unsure at all n locations; Clone ID: LIB3145-021-Q1-K1-F1
cccacgcgtccggaaatatggaagagttgatgtctctggtcctaatgagtgtcctgaagagggcaggctacctgctgctggacccccttcgcctgccgatcatctgcgagaggttttctaccgaatgggattgaatgacaaggaaatagttgcattatctggtgcacacacgcttgggaggtccagaccagaacgtagtggttggggtaaaccagaaaccaagtatacgaaagatggaccaggagcaccaggaggacaatcctggacagtgcaatggttgaagtttgacaattcatacttcaaggatatcaaagctaaaagagatgaagatctgcttgtgttgccaactgatgctgttctttttgaagatccctctntcaaggtatatgctgagaaatatgctgaagatcaagagacattctt

SEQ ID NO: 15295 - DNA, 429 bp, Gossypium hirsutum
  Clone ID: LIB3145-021-Q1-K1-F10
gttgccaagcttgaagagcttaagaagcaaggggatcctatagaagaacgttacaaagagtatatggagaggggaactgtcattgatcaacttgcttactgtattaacagttacagggaggcagcaatgtcaaatgatcccaaatttgatcacattgaacttgctgaaaagcaaaaggtcttgaatgagtgtgtagaagccgaggcctggttgagagagaaaaagcagcagcaggatctacttcccaaatatgccactccagttctcttgtcagctgatgtgagaaagaaggctgaagcactagataggttttgcaggccaataatgacgaaacctaaaccaactaaaccagcctcgcctgaaacacgagctaacccaccacctcaaggagagggccagtgccaatgagcggatgccaatgcaagccct

SEQ ID NO: 15296 - DNA, 421 bp, Gossypium hirsutum
  Clone ID: LIB3145-021-Q1-K1-F11
cccacgcgtccgcccacgcgtccgcccacgcgtgcggctaaactggctactaaccgctggaatttatgtcgttcaactccaagaattcgatgctcaagttccagtgcagaagggcctgtaactgctgataaacttgaaaatgattatgccttgactggttctgcttatgattttgaaagaggtaccatatcgattactcgtgagtccttatcttctccaaagaaggtaattcttgtaaggcatggccttagcacttggaatgaagagggtagagttcaaggcagctcatacttatttgtgctaacagaagccggagtgaaacaagctgaaaggtgtaggcatgcccttgcaaatatgcactttgatcagcgttttttaagtccgatatccgtgctaagactactgctgaagtgttatggca

SEQ ID NO: 15297 - DNA, 433 bp, Gossypium hirsutum
  Clone ID: LIB3145-021-Q1-K1-F12
cccacgcgtccggtttttggcaagaattccatgaattttctttgtattgggtattaaattctctttttttagtgctttgctctgcatgctttagtcgttttcttagagttttggagtgcaccccaagtagaaaagatgctgtcaacgaagtcggaatcggatatcacaagccttgctccatcatcaccgtcgaggtctcccaaacgtcccgtatactatgttcagagtccatcacgagactctcatgatggagacaagtcatccaccatgcaaccgagtcccatggagtcgccttcacacccttcctccgttggccgccattccaggaactcttcggctagtcggttttcggggatattccgctcgtcctccggtaggaaaggggggaggaagaggaatgataaagggtggcctgagtgtggggtaattatgg

SEQ ID NO: 15298 - DNA, 412 bp, Gossypium hirsutum
  Clone ID: LIB3145-021-Q1-K1-F2
cccacgcgtccgtgcttttcccccatgtaaaaagtatctctgctagaaggaagatgaaaagtatattcagtccagtttttgcttaagcagttatttctggggcataaaaaaaaaaaaaaaaaaaaaaaaaaaagaatgacaaagaaataattaaattaataaaaagcacacacacttgaaaagtacaaaacaaaaacgtaatgattgaaagtaaaaacaaaaaccaagtatacgaaaagatggaccaagagcaccaaggaggacaatcctggacagtgcaatggttgaaggttgacaattcatacttcaaggatatcaaagctaaaagagatgaagatctgcttgtgttgccaactgatgctgttctttttgaagatccctctttcaaggtatatgctgagaaatatgctga

SEQ ID NO: 15299 - DNA, 412 bp, Gossypium hirsutum
  Clone ID: LIB3145-021-Q1-K1-F3
acaaaacgtacgaccactgtcgcattgtaacacgtgtcaccgatgagtggtgtccaaagtgcccattaattaaaggcagtgtcacgacaccagtcttgtggtgtcacaacatcaagtgaagagatgaaattttaattaaggtattttttgtccacacaaagtaacttaaacagcttttttgggttgtttaataaccttaattaggtctgatcataaactctataaatagatattttaagtctcatttgaggaggcttgaccaattgagtcacttagttattttagggttttactttagtttttattttcttccaatttaatcctttacatactttttgttcttgtttaacttggattcaattgtgatccaatagtttaatatagtagtttttttgttaaaaataaaaatcaa

SEQ ID NO: 15300 - DNA, 386 bp, Gossypium hirsutum
  Clone ID: LIB3145-021-Q1-K1-F4
gtctctgccgaggcgaaagcttgaccttacatatcttctcccatcagctttcaagcacgcataaacctctgctgcagaaggggaggggacatctctgtggataaccgtctttaacaccattaagttttccctaaaatcccaccctaccaaacctggcggtgaactgaaagttctactgtcaaacgctacattaaaataaagtctcgtactcgagcgttgcataaaagtagacattgaccgttgtcgcttctcttgaagacccaaagggcattcgcgataaacatggacactttgttcaaccgacgaatagcatccatgacatctatcattgacagtaaccctcctgtatctaagattcgcataattgagaaataaataccatgaaa

SEQ ID NO: 15301 - DNA, 398 bp, Gossypium hirsutum
  Clone ID: LIB3145-021-Q1-K1-F5
ctcagagtcctttcggaatatcccatcgtcaagcattggcacaggttacagctcaagctgccctagcacaatctcaagttcatccacaaaccgaatatcaagcgttgacggtatcagctccgtcggagtcattgatccgtcatccatccttcactcctgaagaaacttcacagttgatgcctcctttggcctcagaacctcaaagttctgcaatagaatactcggaagcttcccaatctgataggaaaaaccagcttcctattgctgtggataaacctgctgaagatggctacaactggcgtaagtatggacagaagcctattaaaggctgtgagtatccacgaagctactacaagtgtacctatcttaattgccctgtgaaatagatggtggaacga

SEQ ID NO: 15302 - DNA, 233 bp, Gossypium hirsutum
  Clone ID: LIB3145-021-Q1-K1-F6
cccactcgttcttagacgcgtggtcggactcatgttctgactcgtggttgctaggagagcatattctcatgttcatgcaatctctgtggtgattaaggcctattcaaaggatagccagctaaatcttatgggagtggttatgcattcttctacatcattccatcaacatgttcattctttttgtcaacataattcttagaattatgaactgacaagtccttttacttccaaat

SEQ ID NO: 15303 - DNA, 412 bp, Gossypium hirsutum
  Clone ID: LIB3145-021-Q1-K1-F8
tttagttccagttcgtgaggtgaatttcttaaagttttgcaagcagcatgctgaaagggtttgggcagtggtggatgtgtccatcgacaccctccgagaaacttcaggtgcacccacaacatatgtcaaatgtaggaggcttccttctggttgtgttgtgcaagatatgcctaatggatactccaaggtaacatgggttgaacatgtagaatacgacgagagtcaagttcaccatctctaccgccctttactaagctccggcattggctttggtgctcaacgttgggtcgccaccctccaacgccaatgcgaatgtcttgctatcctcatgtcctccactgttcccactggagaccatactgctataacggcaagtgggaggcgaagcatgttaaagctagcgcagcggatg

SEQ ID NO: 15304 - DNA, 406 bp, Gossypium hirsutum
  Clone ID: LIB3145-021-Q1-K1-F9
cggacgcgtgggttgtttttcccttcgattccttcttcttccatgcgaagaaaccacctgtcttatccaaactcccttttctttacatttaatatcaaccgtctattcagatacagagttaatattgtatgtatttatattgactctgtgctgatgatgaaagtaatttgtacaatggctcatcttctccatcgcttagtaattttcaccatcttaataaccatggctgccaccgtcacaccaataacccatcaacattcaaaagaagcctctaaattctataattctccggcttgcctttcaatatctgaaccctatattttatgctcccatcaagcgcttcatttggcaatgaccatcgacaaagcttacatcaggggatccatggccgctattctttccgtac

SEQ ID NO: 15305 - DNA, 387 bp, Gossypium hirsutum
  Clone ID: LIB3145-021-Q1-K1-G1
aaaaaaaactgcaatcccgagtggtgtgatgaagtgagtctttcaatcaaagatgttagtgatccaatcgagtgagtaagtaatatatctgattctgcaatttgtatgcatgtatatacatgaatgaatgtgaataccattcaccactactacttgcatggaattccatttgtgttttgcagacggtgtacgacaaagacacgttgggtgcggatgatcctatgggaactgcagagattgacttaaaaccatacttacaagcatcgaggttaaggaaagagttgcaagaactcccaaatggctgtgcactcaagaaagtacagccaagcgggacaaatgacctctctgatgaaaagccgattctatgggaaaatggcaggatcaccc

SEQ ID NO: 15306 - DNA, 428 bp, Gossypium hirsutum
  Clone ID: LIB3145-021-Q1-K1-G10
catctctgaggggtgctaattgtaatataatatgtactcagccacgtcgcatatctgccatatctgttgcagcgagaatatcctcagaaaggggagagaatgttggtgaaactgttggttatcagattcgcctagagtcaaagcgatcttctcagacacggctgttgttttgcacaactggagtgttactcagacagttggttcaggacccatatttaaatggcgtgagtcatttgctagtggatgaaattcatgaaagaggcatgaatgaggacttcctgttaataattttacttgaccttcttcctcggcgtccagacttgcgtcttattttgatgagtgcaaccatcaatgctgatttgttctctaaatattttggaaatgctccaactattcacataccggggttgacctttccagtggctgag

SEQ ID NO: 15307 - DNA, 158 bp, Gossypium hirsutum
  Clone ID: LIB3145-021-Q1-K1-G11
tcgcatctctgaagtgtactaattgtaatataatatgtactcatccgggtcccatatctggcgtatcttttacaaccaaaatattcctcacaaatttttaaataatgttattataaacttctaccttatcaaatacacctatagtcaaatcaatcttt

SEQ ID NO: 15308 - DNA, 400 bp, Gossypium hirsutum
  Clone ID: LIB3145-021-Q1-K1-G12
cccacgcgtccgcccacgcgtccggctttcaacagctctatatggtgggattcaaaaagatgggcgtgccccttctcaaacccaattcgacagttagacacagtgaaggagggtttccaagaaagcacatatatagagcaagtggtggaagatgaaagtcaaatggaaggtataccacatggttgttcaaggattatgaactggcatctccatttagatacagacaatcttttttatcccaaaggctggttactagagaagaatctagaggttattttgcctattaagtgatggaagctcatctctacagttctttttatgcggagggcttaattggttctgcccatagtttttgctggtgcacagtagttcaaacttatctgaccagatttgccatcat

SEQ ID NO: 15309 - DNA, 363 bp, Gossypium hirsutum
  Clone ID: LIB3145-021-Q1-K1-G2
cttatgattacatattattgtgcttttttttcagatcttgatactgtctacatcaatgtagaagatccgcactgatgaggttgttgtaccatcagctttggtggaatcagttgcccaagcattctttgatccggagaataccaaccaggatcagaaaagtgacctggaggatctctacatttattcaccaatccatatcgatagtgtctaggaagcctgaaagctgttgttatacatgtgcccgaccaatagaggaaagctgctagcatggttgatgttaagctcgcgagggagctagtaaagaagtgcaagaggaaggatgtgactctcattgccacccggaggatattgatgaccccaaag

SEQ ID NO: 15310 - DNA, 340 bp, Gossypium hirsutum
  Clone ID: LIB3145-021-Q1-K1-G3
gaggaagaggaagttgaagaagaggtagaagaggaagtggaagttgaagaagaagaagaagaggacgaggatgaggatgctgagcttgttgatttccagaaaggctctgatgctaatgaggggatggatgattgtgaaacacaggaagaaatgataaagaagcatgcagagcttcttgcacttcctactgatgggtcagagagactaccttggtggcattcctcatgatgcttctgatgaggacttgaggagatcttgcgaatctataggagaagtcatagaagttaggataatgaaggagaaagattcaggggtggccaagggttatgcttttgtgacc

SEQ ID NO: 15311 - DNA, 378 bp, Gossypium hirsutum
  Clone ID: LIB3145-021-Q1-K1-G4
cccacgcgtccgcggacgcgtgggtgcagccacaatttactgagctgctacacggactaatgaggaactggaagataatgttggaatcacacgaaactcaaaaccgaatcatgtttgaagtaaagtctttcaactgtcccacttacggaaagttttgcaacgactctcaccgtcttgccactcttcagctcgtggcagaacttcataattggcgttctagctttgttgcgtatttatgttcacaaaagtcatacattgaagctcttagtggatggctagcgaagttcgttgcacccgaagtagaattatgctccaagaagaggtcttcagcccctacgctaagagtcaatggaccaccgttattggcaactcgtcatg

SEQ ID NO: 15312 - DNA, 407 bp, Gossypium hirsutum
  Clone ID: LIB3145-021-Q1-K1-G5
aaaaaaaactgcaatcccgagtggtgtgatgaagtgagtctttcaatcaaagatcttaatgatccaatcgagttagtaagtaatatatctgattctgcaatttgtatgcatgtatatacatgaatgaatgtgaataccattcaccactactacttgcatggaattccatttgtgttttgcagacggtgtacgacaaagacacgttgggtgcggatgatcctatgggaactgcagagattgacttaaaaccatacttagaagcagcgaggttaaggaaagagttgcaagaactcccaaatggctgtgcactcaagaaagtacagccaagcgggacaaatgacctcgctgatgaaagccgcattctttgggaaaatggcaggatcacccaagacatgcgtctcatactc

SEQ ID NO: 15313 - DNA, 421 bp, Gossypium hirsutum
  Clone ID: LIB3145-021-Q1-K1-G6
cccacgcgtccgaaaaaagatcgagaaaaaagacgaggccaaaagagaaaaatacaaaagagaagagaaaatgaggatagaaatagcagaagcttgggatagtcttttacttgctcaagtaataaggggctccgtgttaataacccaatcaattcttagaaaatatattatattaccttcactgataatagttaaaaacattgcccgtatgttattatttcaatttcctgagtggtctgaggatttaacggattggaatcgagaaatgcatgttaaatgcacttataatggtgttcaattatccgaaaccgaatttccaaaaaactggttaacagacggtattcagataaagatcctatttcctttttgcctgaaaccttggcacagatttaaactacaaccctctcataaagatccaatg

SEQ ID NO: 15314 - DNA, 410 bp, Gossypium hirsutum
  Clone ID: LIB3145-021-Q1-K1-G7
cagatctccagatttctctttgcaaagaagtggtgcagtggactcgtgctgagaagcgaactttccttcgccaacgagttgaggcaaagcttgcggcacttttgatggagaacaaggagtactctgaagcactgaatctcctttctggtctaatcaaggaggtcagaaggttggatgacaagcttcttctagtcgacatagacttgttagagagtaagcttcatttctctcttcgaaacctgccgaaagcaaaggcatctctaacagctgcaaggacagcggcaaatgcaatttatgtgccaccagcacaacaaggtaatatagatttgcaaagcggaatcctccatgcagaggaaaaggattacaaaactggttatagctacttctttgaagcatttgaagcattcaat

SEQ ID NO: 15315 - DNA, 409 bp, Gossypium hirsutum
  Clone ID: LIB3145-021-Q1-K1-G8
gtcgtcgggtccaatgaatcgggtcaattagaattggtttgttggagtgataaattggctgtttcgattcttgaaaagaaggctatggaaggagggtctgggtattccaaagggatgcctttagcatttccagtgaagttttcaaagggatttgagatggataagaaggtgaaaaaatggtgggatgattggcagaaattgccttacgtttcaccatacgagaatgctcttcatctttcaccaaaaactgatgaatctgataaatgggcagctgctgttttgcatgaaattttgaatcttttcgtagctaaaaaggcagaaaaggatgatgtgttgtgtattggggagtatttggggataaggtcaaggttcaagagagttttgctttaccatccacaacatttttact

SEQ ID NO: 15316 - DNA, 428 bp, Gossypium hirsutum
  Clone ID: LIB3145-021-Q1-K1-H1
cccacgcgtccgcccacgcgtccgcagtatttgatcggttcaggaatggatccgggtacggagaatagtccttatctgggattcatctacacaacattccaagaaagggcaacttttatctcacatgggaatacagctaggctagccaaggtgcatggtgacatgaatttggctcaggtatgtggttcaattgcggcggacgaaaagcgccacgagacagcatacactaaaatccttgaaaagctctttgagatcgatcctgatgggtcagtcttggcatttgctgacatgatgaggaagaaaatctccatgccagcccacttgatgtatgatggccgtgacgaaaaccttttcgaccactactcgtctgttgcacaaaagattggggtttacactgccccggactatgctgatatagttgaatatct

SEQ ID NO: 15317 - DNA, 435 bp, Gossypium hirsutum
  Clone ID: LIB3145-021-Q1-K1-H10
aaaaaaactaaaggaacctttaatctctcccctctcttccccatgccgacgatcggtttcttcgtcgcaccaccgcaccaccaccgtatccggtggccggtaatgcgcaaaaaggggcttttagcctgcttcaaacggatccaaagcaaggctctccaaaatccgaagaaaaacgaaagaaaaggcttctccccttcccttttagatccgatctagacgaatgagaagagtctttcgacggtgtgaccgtgggttctccgtttcgtcttgcaggtgtcagacgcgtagaatgccgatggttggtgccccaagcggtggtggtggcgcgcgtgatggccaagggcagaggggggagtggcggctgaactttggtggctaggggtagggtggctgctgaaaaaaagtttaagatagtgggctgacttgggctttagg

SEQ ID NO: 15318 - DNA, 367 bp, Gossypium hirsutum
  Clone ID: LIB3145-021-Q1-K1-H11
cccacgcgtccgactatgtatagggtaactgtcggaggtcctagagttactccgttcagtgattctttgtggagaacttggatccctgatgatgagtatttgaaatcgagtgagggttccaataaggtgtacttcggtggtcggattaagtaccaagatggtggggcgagtcgtgaggttggtcctgataatgtgtacgattcagctcggttgattcgaagcaagaatgcttccatccctaatgtgaacctcacttgggaatttccagtgagtgaggattataagtatcttgttaggatgcatttttgtgatattgctagtatatccctgggattgtggtatttaaatggttatgtcaatgaacatt

SEQ ID NO: 15319 - DNA, 351 bp, Gossypium hirsutum
  Clone ID: LIB3145-021-Q1-K1-H12
ccctgctgcctgtctcagtgcctgcttatccatagtactgaataatattggggcttgggccactttatgagcttcacaacttcccaatttaattctgtgttattccttccaaagtgtccttaagcagctgtcttcaataaccgaccattgccacctcttttgaggtccattttgatggtgatcattccattcctaaactttaaaatctcctctacaataaagagtatatcctttttacgaattttcccatttctctttcacacttttcttatctgtaccccacatgatgagactgtttactactatcaaatccattcttacctcatacttcatttccttataccttttctt

SEQ ID NO: 15320 - DNA, 367 bp, Gossypium hirsutum
  Clone ID: LIB3145-021-Q1-K1-H2
gaaaattaaaggaaatacagaaacatatgttgtaatggtaatgcatatgcatcatacagagaattataaggagctcatggaaggttgtttctgggttttgacccccaaaatagatgatatatagaagattttggagtgaattgtgtgcattttgtttatctatatgcagatatttttccttctttttttttttgtaattgtcccatttctgttgtggatgggaattcgtttgagaaatgaaatgaatcatttgaggatggctttcattctcgttgtatggtcagcaaccattttctgatctacaacaacaagctctgcatgatccacttggcatgagctcccgtagaagcacgggtcttcacatgct

SEQ ID NO: 15321 - DNA, 426 bp, Gossypium hirsutum
  Clone ID: LIB3145-021-Q1-K1-H3
cgtaagcggcatcatcttccaacgatccaccgacctcactgtgtctgtctttacctggggtggagtcatgtgaggtggtgtcaacccacccaatatcggagtcaacttaaaatcgcattgaagaaaggggaagtggggtgatggttttcactagcgtgttttatggcggtgatgcaagagatgataatggtggaggtgaggaattacatgacgcatatgctacaacaggctcagcagccaaactactcatttccgggagagatctgaaatggggatgtgtttaaatggggggttcaagaatgtcatggctgttaaccgagtcgggatgactatgatcgagtgaaaggctaaaaatgagagtaaaagatgagaaaaaactgggctgtgttctttcttgctatgggaattatgcggcgaatatttttg

SEQ ID NO: 15322 - DNA, 343 bp, Gossypium hirsutum
  Clone ID: LIB3145-021-Q1-K1-H4
cccgaaggcaacagtggggttcaaaaactgaatagcatcattgaaaaggatgataagtcctgtagttcggttcttactaatggtgatgaaaccatcaccgtcgaaagaagcgatcaaaataatgtagttgttgcaattgagggattaggaataccttctagtttcgagtatcttggcgatgaggttttaattccggcggaatttttctacaatgaggggttatcgcttgatgagttattagaagtaccacaggcaactaataactctaattggattcaagatcaatctatcaccaacccagatgatgttgagttcttgaattcaagttttgttgacaatgatg

SEQ ID NO: 15323 - DNA, 416 bp, Gossypium hirsutum
  Clone ID: LIB3145-021-Q1-K1-H5
ggataacaaggcatgttacaaaatgcaaacagtagtgagtaaagcgaaaaagaagcaggtgaaggatgagttggaacgtattaaacaagctgagaagaaaaagaggcggttggagaaagcccttgctacatccgcagccatccgttctgagctagaaaaaaagaaacagaaaaagaaggaagaacagcagaggcttgatgaggaaggtgctgcaattgctgaagccgtcgctttgcacgtcctacttggtgaagactctgacgactccgctaacattatgctaaacaaggaagaggggttcaactgctggggttatggtatatatatggatggaggaagggcctatcttccccatcaacttcacccaaactgtcaaggctgggtctcaaatgcatatagaactggggacggtgact

SEQ ID NO: 15324 - DNA, 421 bp, Gossypium hirsutum
  Clone ID: LIB3145-021-Q1-K1-H6
cgtcactactgatcatattcaacagtatctggatgagaacaagtcattgatcttaaagattgttgagagccagaattccgggaaatttagtgaatgtgctgagaatcaagcacggctgcagcgaaacctcatgtacttggctgcaattgcagattctcaaccgcaacctccggccatacatgcccaggctggagggcactacatgcagcaacagcaacaaactcaacagatgacaccgcaatcgctaatggctgcacggtcctccatgttgtatggtcagcaaccattttctgatctccaacaacaagttctgcatgatccacttggcatgagctccggtggaagcacgggtcttcacatgctgcaaagtgaagctagcactacaggtggcaatggagcacttggagctggagttttccct

SEQ ID NO: 15325 - DNA, 379 bp, Gossypium hirsutum
  Clone ID: LIB3145-021-Q1-K1-H7
caagattgttgttcagtgcatagaaagttacgctcatgcggattatttaatggcagaaaaggcgaaagaagatgtgtatgatcctttgattgcgttcttgaataagctaccatgaaatataggttaaacggattgataattttcccaagtttttgaacacctaaaatgttaaggtcgaatctgttgggaaaggcggtgttaatttgggttcttttattaagggttaggttgccattttattagttttgggtgtacttttatttcagttaggtaaaaagattagttgtttaaaaggacgtatggaatgataaattttaagaacctatcataaaaaaaaaaaaaaacacaaaaaattacatactaaaaaaaataatttaaa

SEQ ID NO: 15326 - DNA, 370 bp, Gossypium hirsutum
  Clone ID: LIB3145-021-Q1-K1-H8
cgacggatcataatggtactaattgtaaacaagaaattgaatctaacaaaggggatttttttttcacagaaatggatcggtttatcgatttcgggtacccgaattcatctcaacatcttcatgatgccgccatggatagcgttgttccagttcaaactccaaaaccagtcattccactgatcaacgatggaagctgtttcgatactttcagctatcaaactcaatcatctctcagtcatagcgtttcatcatcgtcgcttgaagtatgaacagttccagatgggaattaccacgcaacacaagtgggtggttcaatcgatcgagaagctagggtttttagggtcatagagaagagaaagacaggaattcg

SEQ ID NO: 15327 - DNA, 432 bp, Gossypium hirsutum
  unsure (1)..(432): unsure at all n locations; Clone ID: LIB3145-021-Q1-K1-H9
caaaaccaaaataccagccgaaacattttctcccttcttggtagaagacgattatttagatgaaagaacagagaaatccaaagttttaagtcctaccatggagattcaaaagaaccgtctccaaaaacaaagcataatacaacaaattttagggcctttgaagctgatccgccctatctttttcaactatcatcaaaaccgagccaagaaccccttcaacccagataccagaaaactgtcttctccttccttccatcgccaaagtgtgggccgctccatttatccagcgaggaacaaacaggcatcggaaacccattcactgagcaaaaagtaaagtcctttcacatgccctaccttcagcacgagcgcgtcaactacgtccgaaaacagattaagttctgctcctactatntctncttcagaatctctagc

SEQ ID NO: 15328 - DNA, 370 bp, Gossypium hirsutum
  Clone ID: LIB3145-022-Q1-K1-A1
ggaccttcaatttttcgtaggagagagcatgcatgatgatggatgcttggtgtttgcttactacaaggatggtgctgttgacccaacatttttgtactttgcatatgcattgaaggaggtcaagtgctgaggtttgaagcaaagaaaaaaaaagtggttgctgaagaatttagtcctttttattattgcttttgtctcttgttttcagtactctgctaaagacataaattatttgtggtttttgatgtttttgatttaattgtttgttgttttatcatggaatggtttctatttatatgggttggctaaacaatacttgaactctttgttctatgactacttgattttattggaaagacttttttgggac

SEQ ID NO: 15329 - DNA, 374 bp, Gossypium hirsutum
  unsure (1)..(374): unsure at all n locations; Clone ID: LIB3145-022-Q1-K1-A10
gacaacttcacagcgtgcatacaagcgctccaagggcgatcctttacgtggctttgaagatgaaaaattttctttcattgctttcagaagaggacaacgacctcgggaccgttggcctctggatggtatgaaatttgagactttgaaagagcagctgtgcagaccggagcatttgcagtagaagttacagtccagtaacctgcatttccacctcgatactcgttaattgacagaagcaacagagtaataatatgatgcaatttcaaagaacttccgtactgtaacaaggaataaacagaaaataccaatcacatgtaccacatcgaaagggaacaagacangatgactaanatcaatgggtaaaaaactcactc

SEQ ID NO: 15330 - DNA, 422 bp, Gossypium hirsutum
  Clone ID: LIB3145-022-Q1-K1-A11
ctcaacacatctctatttctatcgcacttttattcccctattcctctctccctctctcatccgggactctaaccctagccctctatcaggattcaaacatgaaaggaggtaaatccaagtcggatgccaagagcgccaagctctccgtgaataagaaatcaaccacgaaagctggaaagaaatcggggaaggcagctaaggatccaaacaagccaaagaggcctgctagcgccttcttcgttttcatggaggagttccgcgagcaatacaagaaggagcaccctaaaaacaagtccgttgctgctgttggcaaagccggtggagataaatggaagagcctttctgaagctgaaaagcgaccttatgttgataaggccgagaaacgaaaggtcgagtatgaaaagaacatgaaagcctacaat

SEQ ID NO: 15331 - DNA, 260 bp, Gossypium hirsutum
  Clone ID: LIB3145-022-Q1-K1-A12
acggactgattgaagttatccttgaccaaaacatcttctaatgtctggatcactacctcggtgtgggcgattgtattagtattttctgtactttagctatctgaaaaatattgaaacaatttatctacaaggaacacctatctggagtatattataattcaaaccttgtttgactacaaagaagcatacaacttttcaagagctctaatgccgagtttcgatgtttcgcttgcttgctcttacccttgtactaaaatggc

SEQ ID NO: 15332 - DNA, 418 bp, Gossypium hirsutum
  Clone ID: LIB3145-022-Q1-K1-A2
ggtttcttcagctgttccaccacagcagatgagttttgattttgctcaaggagataacgctaaaagaatgggatatgattcaatagtatcctctactttcatgcatatctcaccaccagatgctgctgaacttcagaaatccttcaatcacaacaggcaacgagtaggcaatcatttcccattcacagctgcttcttctgttcagcatgatgtacatcatgttcaacggccttatgacatgaaaatgtttccggtctcgaaccaatcagttcccgtttcaactaccaacccatttatgaatagtcatttcactactactgctatgaaatcacaattgcttggaggaattccagttacgactccgccgcattcggttcttcccaccctcggttccttgggtggaagcatcgaaccacgg

SEQ ID NO: 15333 - DNA, 224 bp, Gossypium hirsutum
  Clone ID: LIB3145-022-Q1-K1-A3
gagcgtcccgtccgcccacgcgttcaaccacacgtgccttcatcgtccgcaaatcccactaattcctggacggttgtgatgtgacagtagcctgtgctttcttatcatttgctgtgggacttgtgctgagtgtggtcagcccttgtgcgcatcatgatattgtctggctacatactgtgtagagcacatggatacaaaaagttattgacagtgcacccactcct

SEQ ID NO: 15334 - DNA, 400 bp, Gossypium hirsutum
  Clone ID: LIB3145-022-Q1-K1-A4
agaatcttgtttaaaatataagaaaaaaaatcatacgcaatgagcactgctggtcaggtgattcgttgcaaagctgcggtggcatgggaggcggcgaagccactatcgatagaagaagtggaagtggcaccaccccaaaagcatgaagtccgtattaagattctcttcactgctttatgtcacactgatgtatactactgggagtgtaagggttacactcctctgtttcctcgtatacttggtcatgaagcctcaaggatcgtggagagtgtgggtgaaggtgtgaatgatttgaaacctggagatcatgtgctccctatcttcaccggagaatgcaaagaatgtcgtcactgtctgtcagaagaaagcaataacatgtgcgaactgcttaggatcaact

SEQ ID NO: 15335 - DNA, 406 bp, Gossypium hirsutum
  unsure (1)..(406): unsure at all n locations; Clone ID: LIB3145-022-Q1-K1-A5
cccacgcgtccgcccacgcgtccgcccacgcgtccgcaaatcccactaatgccaggacagtcgggatgtgagagtggggagtgttgccgtcagggttgcggtgggacttgtgctgagtgtggtcagcccaggtgcgcatcaggatgttgccaggctgaaactgtaaagagcaaagggatagaagaggttatggacagtgaacccagtccaccaaagtagggagatgataccatattaagatgaaataatgaggaagagttggttgtcgtcgtattaattatacaaaataagaagtaatgatgttgcagaagggcttgctataaaatcctgttggataaaaagagtaattatgaagaataaatagctcanaacaatatttgatttacaatatcctaaagtcccttga

SEQ ID NO: 15336 - DNA, 116 bp, Gossypium hirsutum
  Clone ID: LIB3145-022-Q1-K1-A6
ggaaaaagtggccggtccgatgtatttatgggcagagcagttggaagtttaccaaaggatgggctgaatttgtcttggacaataatttagatgaaggggatgtttgtgtatcagct

SEQ ID NO: 15337 - DNA, 337 bp, Gossypium hirsutum
  Clone ID: LIB3145-022-Q1-K1-A7
cccacgcgtacgcttcattttccttgtccaaaacctcccggtccttcaaattttggagcctttccaatgtcgaacagccggtttattttgacgatgaagaagagagaggaggacccagcagtgagtccgttgtggaattcgaagacttggtacaaaacggcgtcgtttacagggagacgctgagattggtggagtgttccatgtttgctgctgttactggacttgtttactttctgagcaattctcttgcagtcgagaactacttcgggtgtttcttttcattgccggtcgtgatctcctctatgcgatggggtgttgcatgtgggaggaaacaagt

SEQ ID NO: 15338 - DNA, 328 bp, Gossypium hirsutum
  Clone ID: LIB3145-022-Q1-K1-A8
ttatttttaaggacagcttgttggattaaataccttaaaagaaccgaaatgtaatgaatggtaatatcaatgtgtattaagttttggatgcccaaaaaaaaaaaaaaaaaaaaaaaaaaaaaaaaaaaaaaaaaaaaaaaaaaaaaaaaaaaaaaaaaaaaaaaaaaaaaaaaaaaaaaaggatgccagatctaaaaaaacccaaataaaaaataccaacaaatacaaaacaaaaacttttttaaaaaaaaaacctaaaggggcgccccttttaaaaattataaaattttaccaccgggaaaaccccggatttctcttatttaattcc

SEQ ID NO: 15339 - DNA, 306 bp, Gossypium hirsutum
  unsure (1)..(306): unsure at all n locations; Clone ID: LIB3145-022-Q1-K1-A9
ctttgatattcctctctcataaactcgttggttcggatatgcaagggctgacacaaaaggccggtggcggcattacaagaccgtcaatggctaaggtatgctttttgaaaaaatgggatatgttgtgggctatggtcgattgaatttcggtcatgcaaaattactcctgtacaaggatatgtaatggttttgaaaacagagcgtactcgataaaaaccttactcttaataaacccatttttgctctcatttatttcngaaacattttggatttgaaaattatttgggttaatgaaaacaacaacct

SEQ ID NO: 15340 - DNA, 393 bp, Gossypium hirsutum
  Clone ID: LIB3145-022-Q1-K1-B10
caaagattcaagaagagagaaaaaaaatcgaaagaaagagatccgagaatcacctttgagaatttttttctttttctttttggattgatttctattcaaatgtatgcgtaaaaaaatccctttacaccgtttttaaccggctttatatagccgaaaataaaaataaaaatttacaaattttgattttttttgctctctttgctactgttattttttgctgtttgttatccttgttgtaatttgctgtcaatctatgttgccgctattctgttttgctactatgtacggcgtggagatggctgttcgtgggagagctgcggatgtggccatgacgcgctggagatccctgctgaggcaactgcggcgctagccttagggttccagtttctggag

SEQ ID NO: 15341 - DNA, 472 bp, Gossypium hirsutum
  unsure (1)..(472): unsure at all n locations; Clone ID: LIB3145-022-Q1-K1-B11
gaaacccagaagaaatgaagagagtccaacaggagctggcggaggtggtggggctcgacagccgtgtggaagaatccgatttcgataaactaacctacatgaagtgcaccctgaaagaaaccctaaggctccaccctccgatccccctcttgctccatgaaacggcggaggacgccgcggtggcggggtaccaaatcccggcgaagtcgcgcgtgatgatcaacgcttgggccattggcagggacagaaactcatgggaggatcctgatagtttcaagccatccagattcttgagggaaggagtcccggacttcaaaggcagcaacttcgagttcatcccgttcgggtcgggccgcaagtcgtgtccgggtatgcaactcgggttatatgctcttgatatggcggnggctcatttgctcactgttttacgtgggaattgcctgatggaatgaaaccgagtgaattggacatg

SEQ ID NO: 15342 - DNA, 400 bp, Gossypium hirsutum
  Clone ID: LIB3145-022-Q1-K1-B12
ctaaatctgtgctcgttggtcttcaaggcgtggtcaataaggctgttggacttggcgggtggcgtgggctgtttcttaccaatggcatataattaaagctacagagaaatgcacttatcgtgattgaatctcctaccggcaatgaagaagatgacgatcttgaattcgaaaacatgcagtggaatggatcagacatggcatctgatgacactcaaaagtcccacatatcgaggcatagaacgcataaatctaccggttcttctcacaagactatgagcaggtctttttcttgtgactcacaatctaaggggtctgtttccacacctcgagggtccacgaaagttgacctcaactaacttgatatggctgatttggggaaatattggcgacacttcaatct

SEQ ID NO: 15343 - DNA, 219 bp, Gossypium hirsutum
  Clone ID: LIB3145-022-Q1-K1-B2
cccacgcgtccggtcgtttggcatttcttaataactgttttagagtctcccatgatttttaccgattgtaaacctagtgagatccctaattttataccctaaacatgcatatgcttctgctgcaaatggggaggagatactgttgtggatggtggactttaaggccatgaggctccccgtcagatcctgaaccaccagacccgttgcagatgtagaact

SEQ ID NO: 15344 - DNA, 322 bp, Gossypium hirsutum
  unsure (1)..(322): unsure at all n locations; Clone ID: LIB3145-022-Q1-K1-B3
cccacgcgtccgcactgctcgtgtatttgcaatccgagatttctgttagttccgagaccctcatgtggtgacttattgtatagttgcttagaagcatgtatacccaaatacttgttttgctgtaatttctctttaagttggacagtaaacatttacaaagaattatcccccaaatgtattgcatctatggccgcccttgncttgtttggtgtgtgtatctgctaaaggtaaagatcatatttattttttaccaaagcgtaacatattgtctactcaaatattaagtcgcaaaatcacatccgtttaaacttccaaaaccatc

SEQ ID NO: 15345 - DNA, 410 bp, Gossypium hirsutum
  Clone ID: LIB3145-022-Q1-K1-B4
tctgatcagacggtgaaaatgggtagccttgaaactgagagaacaaccacaggatgggctgccagagatccttcaggagtattgtctccttacacttacactcttaggaacactggtcctgaggatgttttcgttaaggttatgtgctgtggaatctgccacactgatcttcatcaagccaaaaatgatcttggcatgtcaaactacccaatggttcctgggcatgaagtggttggtgaggtgttggaagttgggtcatatgtaagcaagttcagagttggtgatatctgtggtgttggttgtcttgttggatgttgcataaactgccgaccatgcgactcaaacaatgaacattactgtcttaagaagatctgttcgtacaatgatgtttacactgactgcaaacccac

SEQ ID NO: 15346 - DNA, 369 bp, Gossypium hirsutum
  unsure (1)..(369): unsure at all n locations; Clone ID: LIB3145-022-Q1-K1-B5
aatgctcagaagtcaactgagcagaagcaaccccagaaacctgatttcagcctagtgaaagagcagcccaagtatgatgaatggaatgcttctgatggttggaacatgcctgaaaatcctgattctactgtaccacctgtacctgtttcaagatatcaggggatgacaggcagaggaaagcgacatccattcaagggacagaagggtgggggaaacaactataattctgatcacaagaaaactaataatggggaagctgataaacttaactcacgatcttcagcccctgagatggctcaattagattcacctgctgcatcanaagagaatcgtggtggtggggaccgatcggcatctcattggcaaccc

SEQ ID NO: 15347 - DNA, 414 bp, Gossypium hirsutum
  Clone ID: LIB3145-022-Q1-K1-B6
gtccagttcttaaaatcaaactcaaaccttaaattctgtgtcttccccctccccccctttgccgccatatctaacccttctgctccttggttcgtctttatatggcctgtactaatctttaaccagactattaatattgttagaggaaaaacaattcctagatacgatgttgtatttggttccattttggatagcgtttttagtaggtatattagttggctgggcttggaagccgaagtgggcagaactgttaatacagaaactgagttctgttgtatccaaatcgttggaattatcattgccgtcatcgtcttctatgtcgcctatgttctgtctgaaaaactccggttcttcttcatgtttgaactccttgaatatgcagccagaagcttgggttactgataatggagaaca

SEQ ID NO: 15348 - DNA, 425 bp, Gossypium hirsutum
  Clone ID: LIB3145-022-Q1-K1-B7
ttttgctcctcttcaccttttatggaagatcgttctagaattctcttctttttttaaaaacaaaaattctgtctgatcagtttgtgtgaatcctattttttgcttgatgattgaaaaacttaagacaaaaatcataaacaaatacatgttgaaggagatctagttccgaaggagatcacagaaaaatggtgaaagcagtggctgtccttagcagcagtgaaggtgttagtggaactgttttcttcactcaagagggagatggcccaactacagcgacggggaacatttctggtcttaagcctggcctccatgggttccatgttcatgccctaggggacacaacaaatggttgcatgtcaacaggacctcacttcaatcctgctggaaaagagcatggtgctcctgaagatgtgaatcgccatgct

SEQ ID NO: 15349 - DNA, 153 bp, Gossypium hirsutum
  Clone ID: LIB3145-022-Q1-K1-B8
gataagcgaaagatatcaactgcttttttactgtgtgaatcacctcacattaatgggttgggaaacctacatgagtgtctaagaaccacacttactcaacccagaacacttgttcttacaagaaagagaatttctacaggagctaaggcaaca

SEQ ID NO: 15350 - DNA, 445 bp, Gossypium hirsutum
  unsure (1)..(445): unsure at all n locations; Clone ID: LIB3145-022-Q1-K1-B9
cgcaatagggctgttgcttgtgaagctaactgttgaactttgttgcaggactctgtctgtccgatcctccaagtggtttcctcaatcccatcatgtaaacttatcaaggaaacttgtgaaaggaattttgcaatgcactttgactaccgcactactgcaagccttgatttcatctctttagacgagacaacttttaggaatattattcagcatccggatctaactgtaatatctgaagaaagagttctcgatgcaattttgatgtggtacatgaaatcagagaaattgtgtggatgggaagtggtgaatgagctaattacaaattcaactttagaaagtgtgttcaaggacaggcttcaactggtgaatgacttgcttgcatcagtacggttctctttattgccatacccnctgctaaagaagttagaanataccagtctaagca

SEQ ID NO: 15351 - DNA, 425 bp, Gossypium hirsutum
  Clone ID: LIB3145-022-Q1-K1-C1
agcatgtgcaccggcagggtcgtttggttttctgacactcctggcgctaatggccgggctggggcggttctctttttcggggatcctaaagcgggggttccccttgtatcatcagatgatacagtggattcgaagtgatggacaaaccaacgaccctgagtattgtcatatggtgcgacagagatcactaagtcacacaacagtaggttatacggcacgtttcgaagcaaaatcgaagagctcgaaagagagagctcgggatcattgatgatcgtcctggctgaaacgcggattcattcatagacgggtgagagaatttaaactgcaacttatcgtattacagtggttatttaaatccttttgtttttatactgaaaaattgctgtatattgctcctgctacaagagttccttttaaatgtacat

SEQ ID NO: 15352 - DNA, 205 bp, Gossypium hirsutum
  unsure (1)..(205): unsure at all n locations; Clone ID: LIB3145-022-Q1-K1-C10
cccacgcgtacggtttatataagtaattatgagaaccattaattagntagatcagataagtggtggatttatgtcgtgtattgcacttttttttcatctgtcgtgtaatatacatattatatagattattgtactaaaagttccagtacgaatgtaatactcttatctttaccatgtcctaaaaaagttttttgtacatttttcc

SEQ ID NO: 15353 - DNA, 293 bp, Gossypium hirsutum
  Clone ID: LIB3145-022-Q1-K1-C11
taacgccttctgtcccgtacccaaaatagtgctttttcttcatttaaaaaaacctcaaggttagcagatttctcaacctcatactttcctttttcttttcgagttgaacccaaaccaaagaatggtattataccaccagaatttcttaaaaaaaatgttttattttaacccaaaccccccaaaattttattcccctccaactctgaacctgaatggaatcaattcaaattacaatcttaagggcaggagttccaccatcaaaaaaagaattgcccttttttttttgaattcaa

SEQ ID NO: 15354 - DNA, 461 bp, Gossypium hirsutum
  Clone ID: LIB3145-022-Q1-K1-C12
cacctctctcaaagccccctcctccccctctcctttccctctctctcattggtggcaagggggcgaactcagcatcgggcatggcagtaaacgatgaatgtaaaaccaagttcttggagctaaaagcgaagcgaaactacaggttcatcgtcttcaaaatagaggaaaacctccaacagattgtagtggagaaagtaggtgcacccaaagacagctatgagaaattatgttccagtttgccgtccgatgagtgtcgttacgctgtctacgatttcgatttcaccaccgatgagaattgccaaaagagcaagattttcttcatcgcatggtcaccagacacatcgagggtgaggagcaaaatgttgtacgcaagttccaaagataggttcagaagagaactggatggtgttcaagttgaattgcaagccaccgatcccagtgaaatgagctttgatatcgtc

SEQ ID NO: 15355 - DNA, 423 bp, Gossypium hirsutum
  Clone ID: LIB3145-022-Q1-K1-C2
aaaagataagtgaaagatgtcaactgcttcttcattgtgttcatcaactcagattaatggctttggagggggacttggggttctaagaacccatgtttctcaacccaagacactttcttttacaagaaggagaatttctacggtagtgaaggcaacatctcgagttgataaattctcaaaaagcgatatcattgtttctccatctattctctctgctaatttcgcaaagttgggggagcaggtgaaagcagtagaagttgctggctgtgattggatccatgttgatgtaatggatggccgatttgttccaaacattacaattgggcctcttgtggttgatgctttacgacctgtgacggatcttccgctggatgtgcatttgatgattgtggaacctgagcaacgagttccagatttcatcaa

SEQ ID NO: 15356 - DNA, 220 bp, Gossypium hirsutum
  Clone ID: LIB3145-022-Q1-K1-C3
aacagatacgcgaacgatgtcaactgcttcttcatcgctctccatcaactcatatcaatggcgttgcgaggcttacttgactctctcataacccatctttcttaaccattgacactttctattacacaatggataattagtactggacagaccgccacctctcaagttgataatttctcacaacacgatatcacttggttacacatctattctctatact

SEQ ID NO: 15357 - DNA, 417 bp, Gossypium hirsutum
  Clone ID: LIB3145-022-Q1-K1-C4
caagcttcgagaacgagacctaaagagggacctgaaccgaatattctcctcgggaacaggaaactttcggacccgacaagaaccggttcaagcctgccgggttcaccgacagtcaagcccaaaatcaacccgaaaacacagtccaagttatcccacacggtttcgttaccggtcctagaaggcaaccaacgtgtggggaatccccggaaacatgatcgggtcaattcaaaacagcaccaacggaaaaacaatggggtggtcggaaaattcgactccgccatgggtttgtccattataatggtgactttggtaataatgttagtttggggtcgattatgtgccatcctttgtacctcggcttggttttattttcggtctcgttatcgaaccattaataatgataacgatactgaatct

SEQ ID NO: 15358 - DNA, 369 bp, Gossypium hirsutum
  Clone ID: LIB3145-022-Q1-K1-C5
cacacttgtacaaccacacctaaattgggacctgacccgaatattcttctctggaacaagaaactttctgacccgacaagaaccctttcaagcctgacctcttcacctacagtcaagcctaaaatcaacccgaaaacacaggccaagttatcccacaccgtttcgttaccgatcctagaaggcaaccaacatgtggtgaatcccccctaacatgatcgggtcaattcaaaacagcaccaactgcaaaacaatcgtgtggtcggaaaattcaactacaccattggtttgaccattataatggagactttcggtataatagtagtttggggtcaattatttgccatccttagtacctaaacttggtttatt

SEQ ID NO: 15359 - DNA, 182 bp, Gossypium hirsutum
  Clone ID: LIB3145-022-Q1-K1-C6
acgttcacgcgtccgaccaaagacatagcacggggccgatattttgttaaagactcatgtatgtgtcatggcccactagcagctgctcatgaccgtcggaaagaccgacagccagcctccgtctgaatcagtagacacacactcagtgatgtctcccggttacgttacctaacctgcaaagc

SEQ ID NO: 15360 - DNA, 425 bp, Gossypium hirsutum
  Clone ID: LIB3145-022-Q1-K1-C7
cgccgatggtgcagttgaagatatgaaggagtttctctttggctccctagatatgcctggagtgaacctcgagagaagtctaaaaaattatgagccatctgaagagtcttttgacattaattctgtaccaaaggaggtcaagattcagccacttgctgagaagaaagctcctggtaaaaagccaactggtcttggcggtcctcctcccgcccccccctcaactattgatgcttatgagaagcttctttcatcaattcccgagttcgcaaactttggcaaacttttcaagtcctctgcacctgtggagctgacagaagcagaaacagaatatgcagttaatgttgtcaaacatatttttgatggccatgttgtgtttcagtacaactgcaccaatactattccagagcaattattggagaatgtca

SEQ ID NO: 15361 - DNA, 378 bp, Gossypium hirsutum
  Clone ID: LIB3145-022-Q1-K1-C8
taacgatgcaaggaggatcttctggcatcggctacggcctcaagtatcaggcaagatgcgtttcggatgtcaaagcagacacggatcataccagcttcattacgggaaccctgagtctcatggaagaaaatgcggtgcatctgattcggctctcttctggtggaaccgagctcatttgagacggcttgttttcccaccctaacgagatctgggacctagcttactgtaccttcgatcaacggattatctctaccgttttttcaaccggtgcatcttatggggctgcaatatggcagatacctgaattgtatgggcagttaaattcaccacagttgggaacgaattgcctcccttgtggcacatttttgctaacattaa

SEQ ID NO: 15362 - DNA, 266 bp, Gossypium hirsutum
  unsure (1)..(266): unsure at all n locations; Clone ID: LIB3145-022-Q1-K1-D1
caagaacacactgcaaggctacttttacagtgcatttcaccaaaatgtgaagtcaaggtgttttcagtgtaaaaaactgtgagtatttagcttcaatttattgcttatttatgaatttaaaatgatgaaatcatggtgaaaaatggtatctatggattaaatgatgaaaacccagaatgaacatgtaaatcaccaggtgaataattgtgatgatttgttatcttttgcagcttgaaatatattttgtcctgtgtttttgttcnnna

SEQ ID NO: 15363 - DNA, 361 bp, Gossypium hirsutum
  Clone ID: LIB3145-022-Q1-K1-D10
tatacttcaaaagctcatctgccaccccagagccccttctctccgtcgaatctccttgtgggcccgtaaaaaatgtctctggtggccaacgaagattctcagcacattttgcgtgtgctgaacaccaaccttgatcgaaagcagacaaatatggttgctttgacctccatcaagggaatcgggaggcgttttgtctacactgtttgcgagaaaggcgcaggccacacgaacaaaagggcttgtgaactgactgcacccgaattggacaatctcatgactattggagcgaaccccatgcactataaaataccataatggcttttgtacaagcagaatgattactacgattgaaagtattccc

SEQ ID NO: 15364 - DNA, 244 bp, Gossypium hirsutum
  Clone ID: LIB3145-022-Q1-K1-D11
ccctacatgcgcttgtttttttttatattctaccccccccctaccatctttttatttatcatccacctatatttttttcttaacttctctcattataaatacactttcttgtaaaaaaatcaaaaacaccaaacttttcttctttataaacaaaaacccaaaatttcacttccttcacccacatcacaaaaaaaaacaattctccttcccccccctatataaataaatactaaatctccccccc

SEQ ID NO: 15365 - DNA, 480 bp, Gossypium hirsutum
  Clone ID: LIB3145-022-Q1-K1-D12
aactgatcgaaaactctatctctttaacaatgataacccatataaaaccatataaggccattcgggggtcaattttttcgtgatactggggaaagtgatttaacaattttttaaaaaatttgtgtttaggttatctgagcctggcttgtgcaagtcagggagcaaggacagcagaaaggcgaagcaagccctattctttctgaactgctacgtcttgaggaacaggccaaacaacaatatgtgggtcgatggagcaaggtgcctggtgctactgaggcttctatctgggatttaccttcatctgctattagtgaccctaataacttggatgtgatgggtcttctggctacaaataagggtaagccaatggaaggtattatggagcaagttcgtgatggtagtactattcgagtctatctactcccagattttcagttcgtgcaagtgtttgttggtggtatccagtccccttcaatgggt

SEQ ID NO: 15366 - DNA, 412 bp, Gossypium hirsutum
  Clone ID: LIB3145-022-Q1-K1-D2
cttgattttctcaaactggctgttgatgtatctctcagataaagaggttgagaatttggccgaaaggatgctcaagtggttgaaggttggtgggcatattttcttcagggagtcttgctttcatcaatctggtgattgcaagagaaagaacaacccaactcactatcgcgagcccagattttacactaaggtctttaaagaatgccaagcaactgatgattctggaaattcatttgaactttctcttgttggctgcaagtgcattggagcttatgttaagaacaaaaagaatcagaatcagatttgctggatcttccaaaaagttgtttcagataatgataagggattccagcgcttcttggattctgttcagtacaaatctaatagcattctccgttatgagcgtgtcttt

SEQ ID NO: 15367 - DNA, 409 bp, Gossypium hirsutum
  Clone ID: LIB3145-022-Q1-K1-D3
cccacgcgtccgcccacgcgtgcggccaaaggtcagctgaagatttggcgtactcagttgctcgattcttctccaaaaatggaagcatggtcaactactatatgtactatggtggcaccaattttggcaggacaagtgcctcatttacaacaactcgttactatgacgaagcccctcttgatgaatttggtcttcaaagggaaccaaagtggggtcatcttaaggacgtccacagggccttgagtttgtgcaaaagggctctattttggggggttcctactactctaaagttgggtccagatcaacaggctatagtctggcaacaacctggaacttcagcctgtgcggctttcttggccaacaataacactcgtctggcacaacatgtgaatttcaggggccacgacat

SEQ ID NO: 15368 - DNA, 423 bp, Gossypium hirsutum
  Clone ID: LIB3145-022-Q1-K1-D4
cccacgcgtccggcaacagagaggaagaactaacaaccgtagatcaaggtctttctccagatctcggcttgctgtcgaaggattttagttccccttttcactccccattaaaaaaaaaaaaaaaatcaattcctctcagagctcactagagatcttctctgttaaccatggcggctaacggatttgtaggagatgaacgcaaagttcaaaagaattactggattgaacactcggttgatctgacggtggaggctatgatgctcgactccaaagccgctgatattgacaaagaagaacgtcccgaagtgctctccttactccctccatatgaagggaaaaccattttggaactaggagctggcattggccgatttactggtgacttagctaagaaggctggtcatgttatagcattagacttca

SEQ ID NO: 15369 - DNA, 418 bp, Gossypium hirsutum
  Clone ID: LIB3145-022-Q1-K1-D5
cccacgcgtccggtcgataagagtggaaaataatgttcagaatattagctgtacaggttgctctctttcctttgtgttcctcgtcaattattactcaattaattagatcggagaacaatcaatcaaatggagttaggggaactgtgggcgatcttctgtcccggcgtcgctggcgcagtgttcggtgctggctggtggctttggatcgacgccgtcgtatgcagctccgtcaatgtctctttcatccactatttacctggtacatcgtgtttcaccttttttttcttgcattaatttatcagctgcctttctaatctcttattatcaatgtttatatggctcatcattattattatctatttatttaggaatatttgcttctatcgcggctttgatgttaaattgcgttaggaaagag

SEQ ID NO: 15370 - DNA, 419 bp, Gossypium hirsutum
  Clone ID: LIB3145-022-Q1-K1-D6
aaaagtccagaattagggtttcgataaccctaaccccagcatagcccctacaactccggcgtcatttgggtcccttttgtccttcaattagatcacagcttttcgttcaaaaatatattctcttgttattgttcttaatttcaagcaacaatggcggagcacttggcctcaatctttggtacggagaaggaccgcgtgaattgccccttctatttcaagattggagcatgccggcacggggacaggtgttcacggctccacaaccggccgacgatctctgcgactctcctcctttccaacatgtaccagcgcccggacatgatcactcccagagtggatgcccacggccagcccatctatccccgcaagatccaggagcacttcgaggacttctacgaggacgtcttcgaggagctcat

SEQ ID NO: 15371 - DNA, 391 bp, Gossypium hirsutum
  Clone ID: LIB3145-022-Q1-K1-D7
ctgagttgcttgggaggggaaccgtagggacgacgtacaaggcagtgcttgataatcggacggtggtgacggacaagaggctggatgccgggaaattagcacgccacgacgaaggaaatgttcgagcaacacatggaatcagttggcggattaaggcatcccaatttggtccccctcagggcttatttccaagccaaagaagagaggctgcttatctatgattttcagaccaatggcagccttttctccctcattcactgatcgaaatcaacaatggcaaagccactccactggacgtcctgcttgaagatagccgaggacgtagcgcaaggtctctcctatattcaccaagcatggaggcttgtccacggcaatctcaagtccactaacg

SEQ ID NO: 15372 - DNA, 383 bp, Gossypium hirsutum
  Clone ID: LIB3145-022-Q1-K1-D8
gaggtgggacactcagatggtagaccattaacatggtcccttggttcctgacaaagtgtgggctgctgataagcagtattgtaccgtcctgggaaataccacttcggcacagaaaacagctcacggccactcacttaacccatggcatgaactgagctagccgattatatgaacttgtcttcacttgatgaaccctcagcctcaaaatttttctcatgctgaccgttctgttgtccggaggtggatcacatgattctgcgatctaaagatcaggctgcgttcactacgattaatgtgagaacagatacttattaactattcttccaaggattaatgatgagtgactaaatcctatcttttgttgggctctgcctacttatcta

SEQ ID NO: 15373 - DNA, 382 bp, Gossypium hirsutum
  Clone ID: LIB3145-022-Q1-K1-D9
gcatgagcttgtttcttgacccctacaggacccatatgccacagcaaatcaatcgaccttgttggggagtgctcttttggaaaatccaaacaatacagaaagacatgagatatatcttcctccccagatctacatcgaggacaagcagcagtgtcggctatttgtttagatcgcaaattaactagagtaggcatatagttctatgatgctctccaaactataatagtaatctttgaggggagctgtaaattccagagctttttgtagaaattttttaaatcggcttgtaataatcagtcgttatgattcgagctagtgatttgtaatagtttgttagcacttctgaccgaataaatattttttttttttaatcaattaaata

SEQ ID NO: 15374 - DNA, 422 bp, Gossypium hirsutum
  Clone ID: LIB3145-022-Q1-K1-E1
aagggccccaaagatgatgcttgatctgcaatctagtggaagtcacagtgttgatgggaactggagagcccttggaaaactgcttatctattgttcaggttgtagcggtggtcgcttgttcaatagtgttcagatccctggtcattttgtttacaggaccaggttctctaggacctcagggaagagcttccttttaccacaatgccggactgatattttatatgtgtctgacccttgtgaacatctggaccaaggggacgagggtgatgtgggatttttccgaggagttttcaagtcattcttggtgtccaaggttcggaagatgttgattgacagggcagccaagcttcatccaacagcagtttgcccttattgtaaggcaaagttgtgggacatgctgcaagctaagatgataccgcaaa

SEQ ID NO: 15375 - DNA, 456 bp, Gossypium hirsutum
  Clone ID: LIB3145-022-Q1-K1-E10
agggacgacgccacgcgttcgattcacaaatactatgctgctcttttcctctccagtattgggatgttgattcatttgtggaaggggttagatacaacaacaaaacttcacttcttgttggaatgtctttggcccaaattggggaatttgcttttgttcttctcagccgagcttctaatcttcacctagttgagggtaaactttacctgctacttctgggcacaacggctctcagtttggtgactacaccgttgcttttcaagctcatcccacctgttgttcatcttggcgtgctcttgcgatggttcccccctgatattcacagcgagatgggttttaaaggagatagtctccgctcatacagtgttaagcaaagcaatattcttcgctcagacagcggtaagcaaagtaataattttcgctcatacattgcgaaacgtatcacgttgttggttc

SEQ ID NO: 15376 - DNA, 421 bp, Gossypium hirsutum
  unsure (1)..(421): unsure at all n locations; Clone ID: LIB3145-022-Q1-K1-E2
gtgaaattggatttgatacagcttctgcttcttttaccgagtacactgctgggatcaacttgaacaagccagatttctctgttgctcttttgctgactgataaaggtcaggcattgaaggcatcttatatccattctgtcaaccccttcacttgtgttgccgctgaaatggctcatagattttccacctacgaaaacactttcaccattggaagttctcatgctgtggatccttttaccgtggtaaaaacacggttctctgacaatggaaaggttggaatgctgtgccaacgtgaatggaggcccaagtcacttgtaacattttcggcagagtatgattcanaggccataaatgcatcccctaagatggggcttgcccttgctctcgagccttgacgggaaggtctcattttggattccat

SEQ ID NO: 15377 - DNA, 329 bp, Gossypium hirsutum
  Clone ID: LIB3145-022-Q1-K1-E3
attcaacacttcattcactcggcgacgtcaagcacttaaaggttgtagcttagagaagtgtacttttctacgtgctaaataccaacccgaggtttgaagatggaaattgttccaagggagggtgaaagtgctctgtcagggcccaaggccaatggaatggccaattgtccggattctcttcaagggcccaaccgaaatggaaacaaacgttcgtcaagtcttgaatcaccaataatgttgcttaccggacatcagaattctatatataccgtggagttcaatccacctgggactggtgttgcatctggatcgcatgacaaggaaatttt

SEQ ID NO: 15378 - DNA, 277 bp, Gossypium hirsutum
  Clone ID: LIB3145-022-Q1-K1-E4
aaaagggtaaaactgatcaagctctatctatgcaggctgagcaactagaccctgagaactctgaggcttttcaaggtcagcattcatcatctaaagcacctacttcatcatcgacggactgtgaagagagaggagatgcaaaagtgaatactggagtgaacgctaccgatgatgatacggttgctcgagtaatagagcctcaagatgcaaataagacatagaacaaaaaacaagttgaccggtcctcatgtggctccgacactccttcaagcggtga

SEQ ID NO: 15379 - DNA, 415 bp, Gossypium hirsutum
  Clone ID: LIB3145-022-Q1-K1-E5
cccacacgttcgcgtcaatgaaatcaatttcctgaagaaaaattcctgtccttttacaggcaaacgcatgcgcgtacagacacaataaaaaccatacctctttggcatctgaactaatttctgtaatgcagatctgcttcatgccttgtcttagcagactgcaagcatatctacattacaaaatgaaaattttcactaaattgctttcatggagcatcttttcatcagaaatccaatttcaggttctgattagatgaggtaaaagaaagcttaatattgaatggcatgagacagaccctatatttatagcagattccaccttgtcccctgtcaaaacccacaacttcaagccaacttgtgcaagtttatctatacattagggtaccttgaatgaagaaagtaaaaacaggttgat

SEQ ID NO: 15380 - DNA, 412 bp, Gossypium hirsutum
  Clone ID: LIB3145-022-Q1-K1-E6
cccacgcgtccgtgggagtctcaaacatgaaaacatggataatttgtttgactctaatgggcatagtgctgatggaagaggtgatccaaattgatgcagcaatgacaatccaccatccagaggtctccggtcttgtttcctaccgtcgccttctccaagaagctattaatccttggaatcgtggctgctcaagactcactaggtgtcgaagttaatgtatattttgataatatgtgacggtatctttcttttataaatgtataaacctctgcatattaaggcaacacgattaaaagattttatctctttcttttacctaacttggtttgccttaaccatgatctatgatttagctttgcattgtcatgaacccaaaggttttgtgtctttgctcgatcctagatctagtaac

SEQ ID NO: 15381 - DNA, 416 bp, Gossypium hirsutum
  Clone ID: LIB3145-022-Q1-K1-E7
caattacatgccatgaatctttgtatgatcataaattaccgtattttttaggcactcgaggtggctggtcaagttgcagcaacatcagtctctacatcacctctcccgtacgataccatggctagccaatgtgaagcattcggcacaggtacaaggaagaagctctccaactggttggcccatgaaaatcatcaaaatgaagctgctgataaaactatactgacaaccgctgctgctgatagacacacgatgatgctgaagaagagttcaaacgggaatgcttttaacggtgctgtctcgcagctcgacccatgcttgtcaatgaggttgcctcctgctagcccgttcgacaatttccttaaagcagccagacattaaacaaggatattgtagttgtttttatgttgaaaagttgt

SEQ ID NO: 15382 - DNA, 305 bp, Gossypium hirsutum
  Clone ID: LIB3145-022-Q1-K1-E8
caaagacggtgggctatttaagaagatactgactggaggagagaagtgggagaatcccaaggaccctgatgaagtgttagttaactatgaagctaagcttgaggatggaacagtggttgcaaaagctgatggcaaggagttaactgttatggagggtcatttctgtcctgctttggttaaggctgttaaaacattgaaaaaggggaagaaagtcctttttacagggaagccgcaatatggctttggtgagaaggggaagccagcagctggtgctgaaggtgcagtgcctccaaatgccacactcc

SEQ ID NO: 15383 - DNA, 437 bp, Gossypium hirsutum
  Clone ID: LIB3145-022-Q1-K1-E9
gtcaagagggtgattttatggccaaacctggatcgcctatttttaaatgctctcgaaggatggaggtggtatatagtgacgtatacatgctggatgacgaaatgaagtggaaaacgttacctccgatgccaaaaccagattcacatatcgaatttgcttgggctattgttaacaattctctggttattgctggaggcacaaccgagaaacaccctataacaaaaaagatgattctggttggagaagtgtttcagtttaatctagatacactggagtggtctgtgatcggaaaacttccttaccgagtgaagaccacacttgtcggattctggcaagaatatttgtatttcacgtccgggcaacgagacagaggtccggatgatccatcaccgaggaaagtgatcggagaaatgtggagaacgaagttaaaactgaac

SEQ ID NO: 15384 - DNA, 421 bp, Gossypium hirsutum
  Clone ID: LIB3145-022-Q1-K1-F1
gaacgatttgcatggtcttattagcccagttcctcaaggaactcccgttccacttgttctgctaggaaagtcaaagaatgcactgttgtcaactttcttatttctcgatcaaattgtgtggcttggcagaacaggcatctataagaacaaagaacgtgctgagttgattggacgaatatcccttttctgttggatgggatcatcaatatgtaccacattggttgagcttggggagcttggaaggctatctgcatcaatgaaaaagttggaaaagagacttaaggatagtgacaagtacaagaatgaggagtatcgtgcgaagctccaaaattcaaatgagaggactttggcccttgttaaagcgggaatggatatagtagtagcagttgggcttcttcaattggcaccgaagaaagtcacc

SEQ ID NO: 15385 - DNA, 362 bp, Gossypium hirsutum
  Clone ID: LIB3145-022-Q1-K1-F10
gctgttactgcacaattccaagagataaacgaagcttacaacgtgttaatcgatcctgataagcgcttcgagtctgatttaaccggaatatatgaaatcgataactatactttgagggaataatcttgccagatttaaaggaatgattcttacctgcaatgggcttggtattagtcatacatcaacatggacagaacaactaacagacagaaatgaatttgctgaggaaggttagctcttgtttacaatttacaaagactgccatgcttatttctgagcgactcaagccctgcgagtgacatggccactgtatgaataacgatatggatctttttttctacttgtcaaacctgaaaatggat

SEQ ID NO: 15386 - DNA, 409 bp, Gossypium hirsutum
  Clone ID: LIB3145-022-Q1-K1-F12
cttgaagaggaggctgctgaagagttggcaccgaggttggaagtgattttacagcatgggatgtgcgcttttggcaagtatcagagacggaatatcagaattgtttatgatgctattggaactctagcagatgctgttggagagaaattgaatcagccagtttatcttgaaattctgatgccaccactcattgcgaagtggcagcaggtttcaaattctgacaaagatctctttcgactgctggagtgcttcacgtccatagcacaggcattgggtactggattctctcaatttgatcagcctgtattccagaggtgcataaatatcatccagactcaacaactggccaaggttgatcctatttcagctggagttcattgtgagctcacttgaattgctctctggactt

SEQ ID NO: 15387 - DNA, 392 bp, Gossypium hirsutum
  Clone ID: LIB3145-022-Q1-K1-F2
ggctttcaggttttttgaccggaatcgagttggctacgttagggtcgaagatatgaggttgatgattcatagcttgggaaagtttctatctcatagggatgtcaaagaactagtgcaaagtgcattgttagagagcaacacaggaagggacgatcacattctttacgataacctggttcgtatgtctgacatataaaagcctttggggtccaataagatgctataatctgttttgcatctaatgaggcatgcccattcaaggtgcgattcctaggagctaaacttgagtcactgacgttcaaatagagggttttagcttctattagtgtataagctattggtatatgcaagagattgtttgctcatggcatatatcatgtcaagagattagt

SEQ ID NO: 15388 - DNA, 194 bp, Gossypium hirsutum
  Clone ID: LIB3145-022-Q1-K1-F3
cccacgcgtgcgagccaattgaaggttctctaattcgtttctttgtagcacggttcgtaatcggtaccgatgcccgagttgtttcgtggtgtttgtagaaaacaaggtgtaagtttctcgttttaattcattgtcttgtctgcatttagatgtttacacgaaatacaataacctaattaaaatgtctgacatat

SEQ ID NO: 15389 - DNA, 422 bp, Gossypium hirsutum
  Clone ID: LIB3145-022-Q1-K1-F4
ggacaagtccatgagagtttcgccgtggaatcattaccagttggtagaccaagaacctgatcctgatcctgacctccaactggcttccatcaagaaccggctttcccgcgggtgcgcctcttttgtctgctttggtcgcacttccgccgggcttgacacaccgtcgcctttgaaagttggccctgttcaacagcaggatgtcttgccagggtcctttgcttcagataagagtaatgatcaagcaactcagcttgatgatggcaatagcgatgcaagaaaggttgttttcaaaagtagtttgaagaagcaatcacatactactcaagttcctcttgaggatggtaatgaccgtgaggtatcaggggaaaaggatggtgatatcccgagtcatacagtacgaagaaaggtgcagtggactgatg

SEQ ID NO: 15390 - DNA, 192 bp, Gossypium hirsutum
  Clone ID: LIB3145-022-Q1-K1-F5
gaccaagttgcttagagttccgaccctatttaattaccactcattcgacccaaagccggggcttattcctcaaatgaaataatttctcatgactaaccaaatcatccaatgaagcgtcctctttgtctaaactgccctcactacaaaccaacttcacacattatcgaattaacaagtttttccttcttaaca

SEQ ID NO: 15391 - DNA, 352 bp, Gossypium hirsutum
  Clone ID: LIB3145-022-Q1-K1-F6
gtgttctcaatgaatctttctgctccatttatttgcgagttctttaaggatgcacaggagaaagcactaccgcatatggactttgtctttggcaacgaaactgaagcaagaaccttctcaaaggttcatggctgggagactgatgatgttgcaaaaatagccctgaagatttcgcagtggccaaaagcttctggaacatacaagaggactactgttattactcagggtgcagatccagcaattgatgccgaagatgggaaagtgaagcaattacctgttattttgttacccaaggaaaagcatcgtgatacaaatagtgcaggtgatgcctttgatggaggctttctttcac

SEQ ID NO: 15392 - DNA, 415 bp, Gossypium hirsutum
  Clone ID: LIB3145-022-Q1-K1-F7
cgccccaacctacactccatgcacacaaacattcttccgaactctatatcctattaagatagcacgcaatcgtcccaagctccaatccattcacaccaagcatgctccctacctatctttctcgtcagagcataaaaaaaactactttactgaaggaacattgtaaaaacgatccatgtaccaatcgccttaacattaaccacatccctgtcattgaatttgatgaacaactcataatataccaggcgcatccactgacacaacaaatgttctgacgcaaataccatgttccaaatattctgagaaacttcattctaaaaaagacaggctatccacacatgatgaaatcaaactcctatctcaaattactgactatttacaaagctcttcagactgttcattttgtgtattattc

SEQ ID NO: 15393 - DNA, 248 bp, Gossypium hirsutum
  Clone ID: LIB3145-022-Q1-K1-F8
aatgtatgaaaaccatgcgatgaatattgaaaatattggaaatgaataaaatggagctttgatgaaaaaaaaaaaaaaaaaaaaataaaaaaaaaaaaaaaaacaaaaaaacacaaaaaaaaaaataataaaaaaacaactaacaacaaacttgacacaccgccgtctttaaaaattaacctttttcaacagcaagaagacttgccaggttccttttcttcagataaaaataaattatcaatcaactc

SEQ ID NO: 15394 - DNA, 454 bp, Gossypium hirsutum
  Clone ID: LIB3145-022-Q1-K1-F9
cctgtctctgttttgcttccatttctttcttcaattatcttttctcttcaaagatttcaactctgtgtctcagaatgggaagtactgatgggaccagctatggtgcttacacctatgatgccctggagagggagccttactggccatccgagaaactccgaatttccatcaccggtgctggtggcttcatcgcttcgcacatcgctcgacgtctgaagagtgaaggacattacatcattgcttctgattggaagaagaatgagcacatgacagaagatatgttctgtcacgaattccatcttgttgatcttcgagtgatggaaaattgcttgaaggttaccaatggagtggatcatgttttcaaccttgccgctgatatgggtggcatgggcttcatccagtccaaccactctgtcattatgtacaacaacacaatgatcagtttcaacatgct

SEQ ID NO: 15395 - DNA, 421 bp, Gossypium hirsutum
  Clone ID: LIB3145-022-Q1-K1-G1
cggacgcgtgggcggacgcgtgggttacaaagcactgattcgaggatgaaagccattaaagaaaacaccattctttccttcaattccgctgctaaatttcccattgatttcattgaattcgacgttcagattctaaaaaagaaaataaaaagctatggaggtgataaaaactggccatgagccaatcacaggaaagtaaagaaagccattgtggttttttgtaggtgacgaaagatgactgccctgtcattttccatgacgactttatcttctctgaagaaaatgtaagttacatattttccttcaaaacttgcatcttatttagcgaggttatttaagcttgtcaaaattaaatttttatttcagggtactgtcttcgaaaaaagagtcacagagttatctctggaggaatttctatgct

SEQ ID NO: 15396 - DNA, 360 bp, Gossypium hirsutum
  unsure (1)..(360): unsure at all n locations; Clone ID: LIB3145-022-Q1-K1-G2
gctgattttctcatcagcatttttagtgaattggttgaacggtnnggaaaaaacaaaaggggagacaccataaattgcatataaaacaacaacaaaaatggccattccctctaaaaaaaaccaaacttacaaaccctaacatacaaaaaaaaaaaaaaatggggccgccccttttaaagaatccaactttccttccccttgcttgcaactttatagttttttttttgggccccctaaattcaattccctgcccgccgttttccaccttcgtgactggaaaaaccctgcctttccccaacttattcccctttcagcacatcccctttttcccagttggcttattaccaaaaaggccccccc

SEQ ID NO: 15397 - DNA, 219 bp, Gossypium hirsutum
  unsure (1)..(219): unsure at all n locations; Clone ID: LIB3145-022-Q1-K1-G3
cggacgcgtgggcaaattctttgtactttacattccactatgaactatctctacctcttggttggtctctgtagttcgagtactatgttattcggttttaaaataaatattttgtaaaagacaaaaaaaaaattgtaaaatgaataaacttaaaattgtggnggttaaagggcggccgttttaaaggttcaagatttaataccccgacaatgcaattta

SEQ ID NO: 15398 - DNA, 429 bp, Gossypium hirsutum
  Clone ID: LIB3145-022-Q1-K1-G4
gagaaatccaagtttttgttggaggaagtaggcatgccaagggggcttttgccacttagagacatcgaagaatgtgggtacgtgaaggacacaggtttcgtgtggctcaaacaaaagaagagcatcacccacaggttcgaaaagatagggaagctggtttcctatgcaactgaagtcacggctgtcgttgagaaaggcaagatcaagaagctgactggggtgaagaccaaagagcttttggtttggatcacactgagtgatatccaagtggatgatcctcccactgggaagatcactttcaagactccttcagggctgtttaggactttccctgtatcagcttttgagattgaaggtgaacaagttaagggttctaagggtaaggatgaagagaaacaagtgaatggagctgtcgaagtgaaggaagtc

SEQ ID NO: 15399 - DNA, 414 bp, Gossypium hirsutum
  Clone ID: LIB3145-022-Q1-K1-G5
cccacgcgtccgcggataatttggttgtaaatagaacaatggctttgaatttttcccatcggccggtctttcctgctaatttgactgaagataatctgctgtctcctatgagaatcgcgaatggataccttgttgaaggtgtagcagagaagaatggagatgggtgtatgaaaccttgtcattcggatcatgcaatggaagattgctttgattatggaagggataagggtggtggtgatcgatgtggttctcaagagtctgtttctaatgatattattgatcttttgccgtcggatccttttggaatggatatcactagtactttcaccgcaatttccggttggcttgaggccttggaattcgattatagtcactatgtgagggatgaggtggggactggtgataggagttatc

SEQ ID NO: 15400 - DNA, 423 bp, Gossypium hirsutum
  unsure (1)..(423): unsure at all n locations; Clone ID: LIB3145-022-Q1-K1-G6
cccacgcgtccggattactggaggctcattattgagggaagtgggaagacttggaagcaggatcaaaagatccggcttcaacatgtggacactggtggttacctccatagtcatgataagaaatatgccagaatagctggtggacaacaggaggtttgtggtgttcgagaaaaacgtgttgacaatgtatggttggctgcagaaagtgtgtatctccccgttaccaaaagtaagtagtatatatgtttaacggatcactacttcagaaaagcaggtacatgggttnattggatttgtatgtgggtggtgccttgttatttagtacctataaccatcttatgaaatcaagtagtatatttgcaggacaattctctgctaagtactttataatgcatacttatgtaacttgagagttgagactat

SEQ ID NO: 15401 - DNA, 408 bp, Gossypium hirsutum
  Clone ID: LIB3145-022-Q1-K1-G7
gttcaaagaagggttcaacttgttaagtttgaagaaggaaaactatggtttttctttgtgggaagcaagaagtgaaactatgggttttgactccttcttttttttatttctttaaaatgtctttaactcattgggaaatggaaaaacttaagactaataagggttattacataagcgtaattggtgcacagttcttggctgtacgagaaattagataacagactagcatttcttggtgattttaagttggaagttgtcttacaaacaactacttaaatgccgttggaacaggtattgatcgatgcgtacggaaacaagcatatatgtgtgttgcatgagagcttgatttcacatataagagtttgatctagctttaggttgatttttggagccataaaattcaaattg

SEQ ID NO: 15402 - DNA, 125 bp, Gossypium hirsutum
  Clone ID: LIB3145-022-Q1-K1-G8
tctagaggggcgaagctaacatacgcgatcatgcaaccccatccctcttgtatagtgatacctaaatacaattcactgtcctaagttatacaacgtcattacaggcataaccctgtcttgacaaa

SEQ ID NO: 15403 - DNA, 436 bp, Gossypium hirsutum
  unsure (1)..(436): unsure at all n locations; Clone ID: LIB3145-022-Q1-K1-G9
cggacgcgtgggttcaagacccttggctgccaagctgctcaatgcaagcaggtaccaaaccccacttgcggcggaagcgcgtgcgcattcaacatgacctacggtggctcaaccatagccggtaacctatcacaggacaccataaccttagccaccgacccaatcccaaactacactttcggttgcctccaaaagacagcaggcagctcagtgccaccacaaggtgtattgggcttgggccggggcccattatccctcctttcccaatcccaaaatttgtaccaatcaacattttcatattgcttgcctagcattaggtcacctaacttttctgggtcattgagacttggaccaagtgggcaacccgtgaggatcaaatacaccccgttgcttaagaaccctangaggccctcactttattacgtcaatttgattg

SEQ ID NO: 15404 - DNA, 193 bp, Gossypium hirsutum
  Clone ID: LIB3145-022-Q1-K1-H1
atgaaacccttaacacccaccctgtctcttcctctttatcagtcggtcccggtgccgatgttaatgatggggaaatggagcaaggtggggtgacccatcattcaccgacgcaagtacttagaaatttcaacgagattcgtttcctccggatcgaattacccagcggtgagttagggatcgatgaatgggttct

SEQ ID NO: 15405 - DNA, 334 bp, Gossypium hirsutum
  unsure (1)..(334): unsure at all n locations; Clone ID: LIB3145-022-Q1-K1-H10
ccggggacgcgccaggcgtacggatatgacgagtcacccacaaaactattattatcactatcaattctctgggtttaccagtggcagttaccgttctagcaaggtgcagacgtttaccgactatgatttttaaccgatcagacccgtttcaaccagtcttgatgctgctggagttattaagtatcccaaaccttgtagtttatcgattctaaatctaagaattagcggtctctagattcccttgaacctgcaaaaggcattntttaccatgtaccaagcgccttcgacacattaaatttttgctgaaatcgatcgaaccattaaaaaacatacc

SEQ ID NO: 15406 - DNA, 328 bp, Gossypium hirsutum
  Clone ID: LIB3145-022-Q1-K1-H2
cccacgcgtccggcacattggacgcaatcagagagaggatgaagagtatgcaactagcagctgccggtgggaacatggatgattatggaacccggcccttgatgtctgtcaatgacaacttaaatcttggactctcaactcagactcgtacattagatcctcatcctggtatggagaacccagccttgcgagatcaatggctactacatccccaaaaacaccaggctgagtgtcaatatttgggccattggccgagaccctgacgtgtggggcaacccactggatttcacccctgaaaggtttctgagtgggagatttgccaaaatcg

SEQ ID NO: 15407 - DNA, 256 bp, Gossypium hirsutum
  Clone ID: LIB3145-022-Q1-K1-H3
atcggaaatgaactttagaaaagggaagtatttgtattatgcgcggggaggggactactgcaggggaatgaatcattacttgtggagtttcttgtgtggtttgggggaggctatgtatttgaatagaacatttgtgatggacttgagcgtatgttgatcggcgacttataatccaagcaataaggacgaggagggaaaagatttcctgttttattaagattctgagcatattaacgatgttacatcttttgtcgaa

SEQ ID NO: 15408 - DNA, 307 bp, Gossypium hirsutum
  Clone ID: LIB3145-022-Q1-K1-H4
atcacacctccactcactccaccgcaaatatgtattataagctcggatcttgacctgcagaaggggactcaatcattgatgacaaccaaactctatatctttaatcatttcctatacatctctgaacacaccacagtgaagtcacccctccatatgaaggaacgctcctagattcgtccaacccccactctcaagatctaaagcagatacatttttcaaaccatagtgctcaccttataaacaacattaaaattgccaaagcctttaaaaacttgcaaccttatcggaaccaccacagtaaacctta

SEQ ID NO: 15409 - DNA, 410 bp, Gossypium hirsutum
  Clone ID: LIB3145-022-Q1-K1-H5
ataggattcaagaggatatgggaatgcgaaaggtacatatatatgagtttagtcgattgagcatggtctatacacttctcagcaagcgtaaactactctggtttgtgcaaaacggtaaagtagacggatgggatgatccctgtttcccaactgtccaaggaattgttcgccgaggtctgaaaatagaggccttgatacaattcatcttggaacaaggggcatccaaaaatctcaatcttatggaatgggacaaactttggacccttaataagaagatcattgatcctgtttgtcctaggcatacagcagtgattgaagaacgacgtttgttattgaccttaactaatggtcctgataagccatttgttcgcattatccctaggcataagaaatatgatggtgctggagag

SEQ ID NO: 15410 - DNA, 408 bp, Gossypium hirsutum
  unsure (1)..(408): unsure at all n locations; Clone ID: LIB3145-022-Q1-K1-H6
cccacgcgtccgtgcacgaattatgaatgccatacttgtactgcctgagctggatgcaggctccttttggcatgatgaaagtggtttccaaggtatctatgatgttgagcattttatccagacattgaagtatgatgtacaaattgtggaaagcatacctgaaatccgacaaaatggcaaaaccaagaagataaaagggtatcagcttcgccccccgagggatgctcctatcgagtggtatacaacagtcgctctcaagaaaatgcaagaacatggtgctatttatctgactcccttttcacatcgtcttgctgaagaaattgacaatcccgagtatcaacggttgaggtgtagagttaactatcatgctttgaggttcaagccaaatattatgcagntaagtgagtc

SEQ ID NO: 15411 - DNA, 413 bp, Gossypium hirsutum
  Clone ID: LIB3145-022-Q1-K1-H7
cttcctttcaccatcttccttctccatcttattccttttaactattttccaactgtcttgcgccctagatgatttccactttacttcatgcgctccatttgattgtggaaacctttctaatatttcatatcctttctggaccgatcaatataatcgaccttcatattgcggttacggtaatgaagggtataagctgaagtgcaggcagaatcaaccccctgttatgacgctcagttcccaagaattctatgtgctgcatctcaatcggtctcatgatttgttgacaatcaaacgagtggaattgaacaacacttgtcctcagccgattttgataaacaatgtttttaatcatactgaaacagctgaaaacattactctgttctacgactgccgaagcaggggaggtccgaatc

SEQ ID NO: 15412 - DNA, 342 bp, Gossypium hirsutum
  Clone ID: LIB3145-022-Q1-K1-H8
cccacgcgtccgcccacgcgtccgtggtattcttgctttgtattttccagcttctaaaagacattcagtcattgatgcagggaagctttatatgtttaataattttctattaatatatattagattaaaataaaaaaaaaaaaaaaaaaaaaaaaaaaaaaaaaaaaaaaagaaaaaaaaaagggaggacgctatataaaatccaagctgaaagcaaccgcccagtataagtcttaatttaaaaaaatgggaacctctagtctattaattggccgcatgattacaaaacaatcactgggaaaacataagaggttccccaattaaaaccccttgctgataatc

SEQ ID NO: 15413 - DNA, 229 bp, Gossypium hirsutum
  Clone ID: LIB3145-022-Q1-K1-H9
tcgtccacacttactcccactctttctcaacattgtattcatttatgcttactatataattaagtttagaatacttcttaaccagaaatattaaaattaaaaaaaaaataataatatttttttaaaaaaattattaaaaaaaactatatttttttttttaaaaatttaaaaaaattataaattaatttaaatttataataaattaaataatattgtgtgttcccttttt

SEQ ID NO: 15414 - DNA, 256 bp, Gossypium hirsutum
  Clone ID: LIB3145-023-Q1-K1-A11
gacccactcgggctttactgatcttaaaccgcgttgggataatttctcaaagaatcctcctgtgtttatccaaaggtgtgtcccttgtatagggagagaattgaaaaatttttgggtaagcaaatgaacgctggaatttagaggaaaacaccttgcccaataccctgtgtgtttatataaatttaaacagtagcaaagtgactgttcaaattaccatcgacaccatcaatacactagacgtcaatctcaactttat

SEQ ID NO: 15415 - DNA, 408 bp, Gossypium hirsutum
  Clone ID: LIB3145-023-Q1-K1-A12
ggacgaggctgctcgtgtagtggaggacgtgaggaaaaatcccgaggcagccaccaacggaatcgttttgaggaggagattgcagctgatgatgtacaacaacatgtacagaatcatgttcgacacaagattcgagagtgaggatgatcctttgtttgttaggctcaaggctttgaacggggagaggagccggttggctcagagttttgaatacaattacggggattttattcccatcttaaggcccttcctcagaggatacttgaagatctgtaaggaggttaaggacaggaggttgcagctcttcaaggaccatttcgtcgaagagaggaagaaacttggaagcacaaaaagcatgaacaacgatggattgaaatgtgccatagatcatattttggatgctcaaca

SEQ ID NO: 15416 - DNA, 420 bp, Gossypium hirsutum
  Clone ID: LIB3145-023-Q1-K1-A2
tcgaattgatgttagtatataagccagaatgattccttcaatatgtgctctatatctctgaaaaaaaaaacccgtccctttacaattaaaaatcgagggctttatagccaacatacaagcagcttctgctgtttccttgtccaactcgcacgccatgaagttgtggagaacgaggggcgtggagcacgggcgcgagcatggagcggggcacacggggatcgtgcgtggagtgccgacgtggggattgtggcgtgggtgacctaagtttccctaggttggccgattagatttagattttgggccatgggtattgggcctgtctcatgtaattgggataggctcattaagggatttgggttcgtatctacgctgcacagttttggcccattacatgtcatattcaataaaattgtgatgatt

SEQ ID NO: 15417 - DNA, 386 bp, Gossypium hirsutum
  unsure (1)..(386): unsure at all n locations; Clone ID: LIB3145-023-Q1-K1-A3
gtgagctgggattgaatccaacttctagggatggtgcttatatgcagtggccaagtgctaatatgatgtattcccattcatatgatcagtttatgcatgctgtatttcaggctccgtttgtccaccaacgacctctgagctacgattattcgatgaatggttaaaaaacggtaagatttgtaattctgcaaaaaattatcaaaatctgttagggcttagtgtgggtgaattgctagggtcattgtttaagaaagacatttggttagaccattcattccttggtttctaatttttgatggatcatattggtaggtaaggagactgtaacaatgatgtttgaaaactttaatgttgtttgaaaacttagttatatactttntctttta

SEQ ID NO: 15418 - DNA, 441 bp, Gossypium hirsutum
  Clone ID: LIB3145-023-Q1-K1-A4
cgacccacgcgaccgggagagtataggagagagctatagggttttaaacttcactcattactcaaaccctgctaagagggtcgatatctacaacttctcaatttttcgccaatttcgcaaacaagactaaaacgaaaacgctattacacattacctcttttcttcttcttcttcgtggtcgtgcttcatcttcgtttcaatcccagctcacttcaaaaatgactaaattgccctagctcagcagccaaaatttcatgcccgaaactagctctttccacttaaatttgccgtcatgcttttttttcttttaattataagtttgaagtgtaaaggaaggatttttttttgttgtttgaagatgagagaaggaagccacggaaggggatagggttgctctggcgtgtttgatttcttggatcctttttgcaattttgggtttag

SEQ ID NO: 15419 - DNA, 440 bp, Gossypium hirsutum
  Clone ID: LIB3145-023-Q1-K1-A5
gttttctgtgtttttagtggtagcgcagcattcccagattgagcttaccggaaatttgatgagtacttgcaagcagatggtgatttgtcttattttattgcttgttggaaataattgcattcttcctctgatgaaaagctcctcaagtttcaccgtattgattctggttgctggacttgttgggtgaaagcttttctcttgttggacctgctctcttattgttttttactgtttcagatatccattcatggttttcattttcttggtgtaggactggtgtaccacctgttcagaggagggctaagaatggaggttttgcagcaaagccacgccagcaccagccgcaacggcaacaagaagggaatgtagttacaaagcaaaggcctcatacactggattcgttgtttgccaatatgaaaaaagagcgaatgaatggtcct

SEQ ID NO: 15420 - DNA, 417 bp, Gossypium hirsutum
  Clone ID: LIB3145-023-Q1-K1-A6
atcagattcggagttcttcgggatcatcatcttcatcattactcaaaagctgtcaagatgattgatgatcaagaccttggcttcttcgcgaatttccttgggatcttcattttcgttcttgttatagcctatcattatgtgatggctgacccaaaatttgaaggcaactgaagattttgcactttttgtttgtgtctgcaatggatatttagatgataattttggtagacttgagttgtttcagaaacgaagacgaatcactgttgttaaaaaccttcaacaagttattgatataaatgtcatcttattgctaatgttttgcttgaattatatttatatccatttttcttgtttttgctttacatttaatattgctcaagtgatttaacatatggtgcaccttgaggcagcactctg

SEQ ID NO: 15421 - DNA, 429 bp, Gossypium hirsutum
  Clone ID: LIB3145-023-Q1-K1-A7
cggatcggaatggccggcccacgcgacccgttttgtcaagacacgttctaagctgggtttataatgactattggggtgtgaatgccgcatggagtgaattacacactaggattgctgtttgacgtatagagcttttcattttaaaagtttctagttcttcctcgtgtgcaaacctcaaggcctaagtaactttcacaagtagcaaaggcatccatgttacgttacttgtgctcaatcatgttagatacaagaacatgtactttattgccatgttttcaatcttataaaagattatctgttgcttctatagctacactagtaagagaactatcgaatattcagcttttagttcaaggataatgtaattgttggatctcgaagatagtaactcggatcactttggttcttaaaaactcagtaattagatct

SEQ ID NO: 15422 - DNA, 421 bp, Gossypium hirsutum
  Clone ID: LIB3145-023-Q1-K1-A8
gttttgccgaattctgaatccagaactagctattcagcacattcttccttgtgtcaaggaactatcaacggattcatcccagcatgttcgatctgctttggcctcagttataatgggaatggcacctgttttagggaaggatgcgaccatagagcaattgcttccaatatttctttctcttctgaaagatgaatttccagatgtccgactgaacatcattagcaagcttgatcaagtcaaccaggttattggaattgatctgctgtcccagtccctattaccagccattgtggagcttgcagaggatagacactggagggttcggcttgcgataatagaatacatccctttattggcaagtcagttgggtgttggctttttcgatgacaaacttggtgcactctgcatgcaatggttgaaa

SEQ ID NO: 15423 - DNA, 405 bp, Gossypium hirsutum
  Clone ID: LIB3145-023-Q1-K1-B1
cccacgcgcccgcactgagcttgtttcaaaatgactaaaggggggtgaatgccacaggtggtgaattacaacactgagagggctgataagaaataaaaagctaaatcataaaaaaaagataatagaatattactagcgtgcaagacctaaaaagaccgggggggcgtttcaaggggaacaaggtttacctccgcgggtatgcgaggtcaaagtttttttatggggaaacctagttcaatttcgcggggcgtgggttcaaacacaagtgactgggaaacccctggggctaccctattaagagaacttggggaaaatccccttttcgccaagggggaatattacaaaaaggccccccccatgggcccttccaacaatttggcccccctaaaagtgaaaggggacccc

SEQ ID NO: 15424 - DNA, 408 bp, Gossypium hirsutum
  Clone ID: LIB3145-023-Q1-K1-B10
aagagtgccaaggtcaggcagcaagcagctgatcttatttcaagaattgcagtggttatgaaacaatgtcaagaggaacaattgatgggccatctaggggttgttctatatgagtatctgggtgaggagtaccctgaagttttgggatctattttaggtgccctcaaggcaattgtcaatgtcattggtatgactaaaatgacccctccaatcaaggatttgcttccaaggttgacaccgattctgaaaaatagacatgagaaggtccaggagaactgtattgatcttgttggccgtatcgctgatcgaggtgcagagtttgtaccagctagggagtgtatgaggatttgttttgagcttcttgagatgcttaaagctcacaagaagggtattcgaagagctactgtc

SEQ ID NO: 15425 - DNA, 294 bp, Gossypium hirsutum
  Clone ID: LIB3145-023-Q1-K1-B11
gaaggcgtccccaagcaagattttcacaaccaaacaagcaggaagtatctacaaagaagggggatgaggatgacgaatataactgggacatgccaaatgaagcccttccctattgatcgcattttgccatgccttttatttacttatcttcttcgcctttgagctctggcagttttgtctgtccattgtaagttgaattaagatgaattctgccacttgaattgcgctatgcttttctttttacataaatgaagtcaagattttcattccttagaaaaaaaaaaaaaaaacaaa

SEQ ID NO: 15426 - DNA, 412 bp, Gossypium hirsutum
  Clone ID: LIB3145-023-Q1-K1-B12
gcagccgcagccagcaagcagcagtagcaacagcaggagcggaagaatgtctcacaggaaatttgagcacccaaggcatggttcccttggatttcttccaaggaagcgagcctctcgtcacagaggaaaagtgaaggcattcccaaaggatgaccctaccaaaccttgcaagctcactgcctttctggggtacaaggctggtatgacacacattgtcagagaggtcgaaaaacccggatctaagcttcacaagaaggagacatgtgaagctgttacaatcattgaaacccctcctatggtgattgttggggtggttggatatgtgaagacaccacgtggccttcgctccttgaacaccgtctgggctcagcatctgagtgaggaagtcaagcgccggttctacaagcactgg

SEQ ID NO: 15427 - DNA, 292 bp, Gossypium hirsutum
  unsure (1)..(292): unsure at all n locations; Clone ID: LIB3145-023-Q1-K1-B2
cttcatattatgatgataatctttgtagaagggttnnnnnnnnnnnnnnntnnnnntggtgtgggtgttttgcacggtatttgtattttcttcttatacaaaccaagttcctgcttttttattagtggtagcctgccatggcaaaagagagactttttggggtgcaaagtttcttacaccctatcttaaggcctgtgtccggacctccattacctactcaccaatctactggctcgacagctgtagattgtaatacacgggcttggcccttggacattacgaaaagctgatt

SEQ ID NO: 15428 - DNA, 401 bp, Gossypium hirsutum
  Clone ID: LIB3145-023-Q1-K1-B3
cccacgcgtacgtcggcctatattgttatgggtttggtttgggtttagtagttagtaattttaagtttctctattactgttcggtttgggttctctcttttttgatcgatgttgttactgttctcttaaaatcataaaaatggaatgaagtatcttcttttcaaaaaaaaaaaaccaaatgacaaaaaaaaaagaaaaaaaaaaagcatgagcctctcaaaaaaaagggaaaaaaaccggaaaaagggtgacaattttttcacactcgtttaaaaaaaaaaggtgcaagaaaaactgtttttttattcctaaaaaaaaaaaaaaggggtggccttttaaaaaaaaccaaaatttttgtcccgggggtgaaaagattttttttcttttttaggccccccaaa

SEQ ID NO: 15429 - DNA, 424 bp, Gossypium hirsutum
  Clone ID: LIB3145-023-Q1-K1-B4
aaggcccgacccaacccacccgttccttgactgggtttcaggactattaattgtattattatacaggtgtcactgagatttggcgaggaagcattgacatctcttcctgtgaaaattgggtctcacgatgtcaatgatgtactcacagctatagatcatgtcattgagaaaggacttgtcaacccatctaaaatcactgttctcggtgggtcacatggtggctttctaactacgcacttgattggtcaggtaccgaataagtttgttgcagctgccgcacggaatccagtttgtaatctttcatccatggttgccacaacagatattcctgattggtgttacgtggaatcttacggaagcaaaggaaaaactatctttactgaagcaccttcagctggacacttgactcacttttacagcaagt

SEQ ID NO: 15430 - DNA, 436 bp, Gossypium hirsutum
  Clone ID: LIB3145-023-Q1-K1-B5
ggaaattacaatgagtactttggatatgcaactgatgtagatgctgttgtttatctgatgctggttaatgacatgattcatggactctatcctgaggctgtcaccattggtgaagatgtgagtggaatgcctacattttgccttcctgtgcaagatggtggtgtgggatttgattaccgattgcacatggctgttgctgataaatggattgagcttctcaagaagagggatgaagactggaaaatgggtgacattgtttacacactcgtcaacaggaggtggttggaaaagtgtgttgtttatgctgaaagtcatgaccaagctctagttggtgataaaacaatagcattctggctgatggataaggatatgtatgattttatgtctctggatagaccaagttctccaattatagatcgtggaatagcattacata

SEQ ID NO: 15431 - DNA, 209 bp, Gossypium hirsutum
  Clone ID: LIB3145-023-Q1-K1-B6
aggcatgcctcttgaagtcatcacggaattcttttccgttggatcaaagcaggctataactgctaaaaacacgggttattctaactgctaaaaacaatcgagtttggtgaattatctgttggaaagtttactgtgttttttcttttcttttttaagcattgtgtatacatttaagacataatgtgaaggtcatgatgatctctgagttt

SEQ ID NO: 15432 - DNA, 439 bp, Gossypium hirsutum
  Clone ID: LIB3145-023-Q1-K1-B7
gtagagaatgctgatgaatgcatggttcttgataatgaggcactttatgatatttgcttccgaactctgaagctcactactccaagctttggagatctaaaccacttgatttctgctactatgagcggtgtaacatgctgcctaaggttccccggacagctgaactctgacctccgaaagttggctgtgaacctgatcccgttcccacgtcttcacttctttatggttggttttgcaccacttacatctcgtggttctcagcagtacgtttctctcactgtcccagagctaactcagcagatgtgggatgcgaagaacatgatgtgtgctgctgaccctcgccatggtcgctacctgacagcgtcagccatgttccgaggcaagatgagcaccaaagaggttgatgaacagatgatgaatgtccagaacaagaattcat

SEQ ID NO: 15433 - DNA, 130 bp, Gossypium hirsutum
  Clone ID: LIB3145-023-Q1-K1-B8
accgcatcaatgatgagaagttgtcagccaagcttataagagattactagcaatgtggactctgattggagcatactctcaaaactctctcctcctttaggtgggctagagcttggcaatatttgtctac

SEQ ID NO: 15434 - DNA, 388 bp, Gossypium hirsutum
  unsure (1)..(388): unsure at all n locations; Clone ID: LIB3145-023-Q1-K1-B9
gcaaaggacaagataatgaagctccttgaggaatacgaaagtggaggtgttgtagctgaagcttgccaatgtatccgtgaccttggaatgccattctttaaccacgaagtggttaaaaaagcactagtgatggccatggagaagaaaaacgataggatgctaaatctgttacaggtatgtttcgacgaagggctaattaccattaatcaaatgagcaaaggcttcacccgagtaaaggacggccttgatgatctagctcttgatattccaaatgcaaaagataaattcagtttctatatggagtatgcccagaagaaagggtggcttattacatccttcgggtcatctgcaatggaagctccaccaatcgccacagnctcctgagata

SEQ ID NO: 15435 - DNA, 402 bp, Gossypium hirsutum
  Clone ID: LIB3145-023-Q1-K1-C1
ctttgggatcaaagttggcaaactgcagtggtgatggagaatcctagtttcactcttttacttgtctgtgccttgtgcatgtcctcagtggtacaatgcaaatacaactgccccgaaaagtacgatccccatgatatgcaagaacgataccaacgatgggtggcccgacatggccgaaagtacaagagcaagaacgaatgggcattgcggttcgggatatacaaatccaattctcagttcattgattgtgtcaattcacagaacctatcattcaagttgaccgataacgaattcgcagacatgacaaatgatgagttcagagctatgtatttgggttaccaaagcataagatctccatgtgagagcaacagcaaaggcttcgcatatgacaaatatcacaat

SEQ ID NO: 15436 - DNA, 413 bp, Gossypium hirsutum
  Clone ID: LIB3145-023-Q1-K1-C10
cccacgcgtccgctaaattttaatggagcagtaaaatcagaagccgtagaagaagaaaaggaatcgccgaagttcggcctgacatctgtttgcggaaggcgacgagatatggaagacaccgtttcgattcacccttcgttttgcaaacaaagccggcaagttcaaatgtcgtcggatattcacttttacggcgtcttcgacggccatggctgctctcatgttgctatgaagtgtaaagatcgatttcatgagatattaaaagaagaaatcgaagcgtgcggcggagagaaggcggtggagtggaagcggacgatggagaggagctttgagagaatggacaaggaagttcaaaaatggacggtggacgctaatgagcgttcaagttgccgatgcgaacttcaaactccacagtg

SEQ ID NO: 15437 - DNA, 307 bp, Gossypium hirsutum
  unsure (1)..(307): unsure at all n locations; Clone ID: LIB3145-023-Q1-K1-C11
gtgctcatcatgctttactacttcctatgtcaaatgattgctgctattctcatagatggccttcgtgtgcgattggtaactggtggaagaaaaaaagagggctaattatggcatatggatgcccacacgttattgaacattactggtttgattgttaacactttgacttggtgggtggtccttgtggcctggttgttattgtttatggcatctggtgcttttttctgtgtctgatagtgactgtgacagagaaaaaaatatgctnaattccctagaaaaaagagggtacaagcttatggctacatct

SEQ ID NO: 15438 - DNA, 410 bp, Gossypium hirsutum
  Clone ID: LIB3145-023-Q1-K1-C12
atttaagtgattccaagtctcaacagttggacactggcgaaaaacgtggttactgttgttcatcttgatgacatcgagggcattgtgtgtccaccaccactttcttttgcttgaggttaacaagggaaggaataaaattccaagagattctccaaactgtcaatgtaacttttgaggggatgtataatttccatagcttcttatagaaattttttatttcggtttgtataaagtaattattaggatccatgttagactcctgtaatagtttataggcgcttctgacttagaactcaccggacagttcacctcgccatacttgaaagtcttcgtattctgtttttgccaatggaatctgcatgattttccttgcaatatccatactaaaggtattcataataacagttgtt

SEQ ID NO: 15439 - DNA, 396 bp, Gossypium hirsutum
  Clone ID: LIB3145-023-Q1-K1-C2
tgttgatactaaactcgtgtccgaaatgacccgtttcgccagagagttttttgctttgcctgctgaagagaagcttcgggtcgatatgtctggtggcaagaaaggtggtttcatcgcctccagccaccttcagggagaagcagtgcaagattgtcgggagattgtgacatacttttcatacccattgaagagcagggactattcaaggtggcctgataagccagagggttggattgaagttacaaaggagtacagcgagaagttgatgggcctagcttgcaagcttcttgaggtgttgtcaaaggccatggggttagagaaggaggctttgactaaggcatgtgtggacatggatcagaaagtggtggttaacttctatcctagatgccctcaacc

SEQ ID NO: 15440 - DNA, 389 bp, Gossypium hirsutum
  Clone ID: LIB3145-023-Q1-K1-C3
ctggtttggacactgaaaaggctacagttttttacaaagacgaatcgacctcggcggcttcgatgaccatgaagtctggcataaggaacatacttccaaactctgaaatatgcgattttgagttcgaaccttgcggctattctatgaattcaatcgaaaccgatgctatttcgaccattcatgttacacccgaagacggttttagttatgcaagcttcgaagctgtgggctatgatctgaaagagttgaatctggagcagttggtgcaaagggttttagtttgcttcaaaccaagtaatatctctgttgccgtgcatgtggatgttgattgtcactcatttgaacagacctgtctgcgttatgttaaaagataccgatgccggaagagt

SEQ ID NO: 15441 - DNA, 403 bp, Gossypium hirsutum
  Clone ID: LIB3145-023-Q1-K1-C4
gcccgacccacgcgttcgtttgaacattaattacactttagttcacaaaggcccatgcttatcggggggcttgccggtcacaaatagcctacctcaaacgaatatacactcctgaacttataaaaaacgctgctcacactgtaacattgaagcacatggcccggattttccccattcttggttaagcctctagccgggatgaacaatttattggagttatttgtgccatgatttctatgacattgcgaccattttcatggtttaattgggaaggactttatatatatatatatatatagctgagaacaatctatctttggatagacttggtaagccacaccaaagcatagctttgaatccgtaccattgtatttctatctttacactcatcaggaacccccaa

SEQ ID NO: 15442 - DNA, 438 bp, Gossypium hirsutum
  Clone ID: LIB3145-023-Q1-K1-C5
cccacgcgtccgaaaattccagcccctttggatcaaactaatgtaaagctcggactcaaaccatcaactggtatctcagcctaggtggcggccacgccttctctggtggagggggagttgattctacccttgacacaatgacgacattgccgatcaatcattcattttcacaacgctcgaaaaactatctggtttccattttgaatattaagcaacgacgacgcttttgagtatttacagtggcaaaatgcttgaggccatcatcaagacaatatatgacaagaaatccaaccagcttctccaatcatttgaaatatatttatatgtttgtaaataaactgtctctgtgatccattaataaggtttttgtctctgatgtttagtttataatggcagcatatatatatgtgtgtgtgtgtgtgtgtgtggaagaaaaga

SEQ ID NO: 15443 - DNA, 78 bp, Gossypium hirsutum
  Clone ID: LIB3145-023-Q1-K1-C6
gtttgttttggttgcttaaatttatagataaatgcttaagactgttattgccttttttatatgtaatcgtgttttttc

SEQ ID NO: 15444 - DNA, 437 bp, Gossypium hirsutum
  Clone ID: LIB3145-023-Q1-K1-C7
ttttggcttgtttgccaagtgttatcaatgcaagcctccaacaccaacatcaccagctgctgctatgcaccattaagctcactctcaaccatctcaaacctcaaatttcaactattccccgtttttctccggtcaaatttcgattttggtctctctattatgctcaaatttaaaatttcgtctctataatttgaaataatttgatctctcttttataaattcattagttagcccgaaatagttaatagtatccagttaattatgctaacgtgaaattttcctaaaaacacccattccaacaccagaagaaaacatatcagcatgatgaatgagaagggttgtttttaagaaaaagttcaatgttagctttttaattggaaagatacagatgttaactactttggactagctcatggcattataaaaataaaaggaca

SEQ ID NO: 15445 - DNA, 302 bp, Gossypium hirsutum
  unsure (1)..(302): unsure at all n locations; Clone ID: LIB3145-023-Q1-K1-C8
ggttccccaaattcatctattagggttattaagatgtacaaaaatcccatgttgaatcttgaaactattacagtttgccaattttccatgttttatgaaggattatatacttgtgaaaatatatagcaagaggtacacacannanaaaaaaaaaaaaaaaaaaaaaaaaaaaaaaaaaaaaaaaaaaaaaaaaaaaaaaaaaaaaaaaaaaaaaaaaaaaaaaaaaaaaaaaaaggggnggnngaaaaaaaaagagaaaannnnaaaaaaaggggggggcgccgttaaaaaagatccaattt

SEQ ID NO: 15446 - DNA, 262 bp, Gossypium hirsutum
  Clone ID: LIB3145-023-Q1-K1-C9
cgaaattgccatctgatgtatcatttcggctcaattaatattatcttaaattttgaagagttttacctactaagtatgtatgtatatatagaggtatatacggttgttataccgtataatcatgtaaggagatcgtacatggagtttctcttttgggtgaaattttggaacatgggcaagactaggcggtgtcacacaaagaaaaaaattgttatatataatataatacatgttggtagagaatagatgcaatgttcctttc

SEQ ID NO: 15447 - DNA, 254 bp, Gossypium hirsutum
  Clone ID: LIB3145-023-Q1-K1-D1
gcagcattcaagagattatctcgactggagggcataatcccaatgttggagacgtagtgtgcgctggcatacttagagaaactgtgtccaactttaccaaatggtaccaaatttgtggttaactgcagtggcagaggtgataaggatgttcaaacagcaaataagcatttgcaggtataattagactgatgatgatgatgtttttggccattaatttttcttcattcaccttgaccaatgaagattattgctat

SEQ ID NO: 15448 - DNA, 411 bp, Gossypium hirsutum
  Clone ID: LIB3145-023-Q1-K1-D10
ccagaagataatagagcgtttgtctcagatctcagaagatggcccgtaccaagcaaaccgcccgtaagtcgactggtgggaaggctcctaggaagcaacttgctaccaaggccgcccgtaaatctgccccaaccactggtggtgtgaagaagcctcatcgataccgtcctggaactgttgctcttcgtgaaattcgaaagtaccagaagagtactgagcttcttatcaggaaattgcctttccagaggcttgttcgtgaaattgcccaggatttcaagactgatttgcgtttccagagccatgccgttcttgctcttcaggaagctgcagaagcataccttgtgggtctctttgaagacaccaacctgtgtgcgatccacgccaagcgtgttactataatgcccaaggaca

SEQ ID NO: 15449 - DNA, 258 bp, Gossypium hirsutum
  Clone ID: LIB3145-023-Q1-K1-D11
tcgcacctcgcacctcggctctgtcattcatacctggtgtcgtttgaattagggcgaaaatagaagtgcatttagtcacatcggtcagtggtttaagtgaaatgtgtggcttactgctgaacatggatcacctgtgcatccatgcaagatgcgagaggtatctttacacctttatgaactggtctggaagactcctggctgttgggtctgagtcttatgtgatgagaggtctaccgagtttcactgagcactatacga

SEQ ID NO: 15450 - DNA, 405 bp, Gossypium hirsutum
  Clone ID: LIB3145-023-Q1-K1-D12
aagagcttcgtgacatgaccttagaagaccaggttgaactgctgactcaggttgctggattatcttctactgaaaccaaagatgtggagatggttcttgaaatgatgccttccttgacagttgatatcacgtgtgaaacagaaggtgaagaggggatacaagagggtgacatagtcactatgcatgtttggatcacactcaagcgtgggagtggcctagttgctgctcttccccatgctccttactaccccttcttcaaggaggagaacttttggttactgcttgcggaccctgtctctaatgatgtgtggatctcccaaaaagtgagcttcatggaggaggctgtggccataactgcagcgtccaaagcaattcaagagttgaaggaagtgtcaagggcaagtc

SEQ ID NO: 15451 - DNA, 315 bp, Gossypium hirsutum
  unsure (1)..(315): unsure at all n locations; Clone ID: LIB3145-023-Q1-K1-D2
agcggttaaaagccaagcttgaagaaagtcaggcattgcgtaaagaattagaagcttctcttcttgcacaaatggatgtggaggaaagtatcaagaaagagaaagaagaccttgtccgtataaccgaagaaaaagatgggagaatttcaattgttttaatcagtactttatgggctatcctttttttttttggtgtcctggacatgcaatgagtgttgtgtttgctacctaagttgacaagttagcttatgtttaaattggagtgtttcagtagatattattaaaatgatagaatttttgctgattgattggntg

SEQ ID NO: 15452 - DNA, 227 bp, Gossypium hirsutum
  Clone ID: LIB3145-023-Q1-K1-D3
cggagatgataccctcgaaacctctctagccaatgatggaattggcaatgcaaatatgattgaggctgcaactacgtttaaagggagttgggaattgttccttgagaatggcggtgtttccgccatgcatttgatattgcttcctaagatcaatcaggctttgatgtttgacgccacagtgtggaagatctcgaagataaaattaccgggaccgccatgccgacacg

SEQ ID NO: 15453 - DNA, 409 bp, Gossypium hirsutum
  unsure (1)..(409): unsure at all n locations; Clone ID: LIB3145-023-Q1-K1-D4
gaagccttcagtgcttacggcgagatcgtcgattcgaagatcattaacgatcgtgagactggaagatccagaggctttggcttcgttactttccgtgatgagaaatctatgaaagatgctattgaaggaatgaacggtcggagtctcgatggaaggaatataaccgtcaacgaagcacaatctcgccgaagcggcggcggcggtggtggtggaggatttggaggaaacggtgggtacaaccgtggaggcggtggatatggtggtcgccgtgaaggtggatatggaggtggtggttacggaggtggacgccgtgatggtggtggatacggtgacggtggatctcgttactcaagtggcggcggttcttgcgcttatgttaaggacgtttangatttgagtgagcttcggc

SEQ ID NO: 15454 - DNA, 436 bp, Gossypium hirsutum
  Clone ID: LIB3145-023-Q1-K1-D5
cggagatgataccctcgaaacctctctagccaatgatggaattggcaatgcaaatatgattgaggctgcaactacgtttaaagggagttgggaattgttccttgagaatggcggtgtttccgccatgcatttgatattgcttcctaagatcaatcaagctttgatgtttgacgccacagtgtggaagatctcgaagataaaattaccgggaccgccatgccgacacgttgagggaaccaatgaagaagattgctttgctcattcggttctcatggacattgatacaggaaagcttaggccacttaggttgaaatatgacacttggtgttcatcgggtggtcttgatatcaatggtcgattggtaagcactggcgggtataacaatggctccgacaccgtgagaatcctcgacttatgcgatacttgtgattggaaa

SEQ ID NO: 15455 - DNA, 418 bp, Gossypium hirsutum
  Clone ID: LIB3145-023-Q1-K1-D6
aaaagaaaaagtttgaaacccggaaatgtcggacgaggaacaccattttgaatccaaggccgacgccggtgcctccaaaacctacccacaacaggccggaaccattcgtaagaatggttacatcgtcataaaaaaccgtccctgcaaggttgttgaagtttcgacctccaagactgggaagcatggtcatgctaagtgtcactttgttggaattgacatcttcaccgccaagaagctggaagatattgttccctcttcccacaactgtgatgttccacatgttaatcgtactgactaccagttgatcgacatttctgaggatggatttgtgagtttgctgaccgaaagtggagacactaaggatgatctgaggctcccaactgatgagaacctgttgaaacagatcaaggatggtttt

SEQ ID NO: 15456 - DNA, 421 bp, Gossypium hirsutum
  unsure (1)..(421): unsure at all n locations; Clone ID: LIB3145-023-Q1-K1-D7
gtaaatttttgtctttggtgggagaaatggagtttgaggatcaagaggagcaagaagaagagatgggtttggcaccgagttatgacccgcttgcaaactcatctcgagtcaaaatgtcaggtgtcgaaccgggttcgataactccaacgggtcagcagcagcaacagcagcagaggaaaccaaggtatagagagtgcttgaagaaccacgcggtgggaatcggcggtcacgccgtcgacggttgcggtgagttcatgccagctggaaccgaaggtaccctcgatgctctcaaatgcgcagcttgtaactgccaccggaacttccaccgtaaggaaacggagctgggttccccacactccgtccccatgacggacctctacttncaccacccccaccaccaaccaccgcaattcactcctta

SEQ ID NO: 15457 - DNA, 420 bp, Gossypium hirsutum
  unsure (1)..(420): unsure at all n locations; Clone ID: LIB3145-023-Q1-K1-D8
gacaggcatgaagttcttgtttcagtgtccttgctgttcttgtttctgcttcatgaagcctaagaaagggaaaccaaagatgaaggatgataaggctgagacaaaaaaggaagtgaaggctgaaaaagagaaggaagcgaaggctgagtgaaaatgatgatttacttacaatatattcttcactgctgctcaagtaaattgatcgaattcatttactaaggaatttctatccagcggcattgaagaattcaaacattcattagctattgcaatagaaagataaataataatctgggttgtaataagatcaagagttttcaatgaagtcaacaaatcatccagctatccagagagatgatagtgcaacagagcccttacaagggccatgaagctntccaatggttggtatcgtgacaatga

SEQ ID NO: 15458 - DNA, 289 bp, Gossypium hirsutum
  Clone ID: LIB3145-023-Q1-K1-D9
gttaaactgtttggcctggagcctgggaccacttggagaaacgaggctctgtttcttgccatgatgaaaatactggaaaatacggaatgtgattgtgcaaaaacagtcgagatcctgatgcagtgtgaattaccctacaggtcttatgggtttatgcttttttggacaagaacaacttaagagcagcaactaaaatgtgggacttctattttcagacaattaagaacagacctattaccactgacagcaggtgtgacacggtttttttttttttgtagacatatgtttc

SEQ ID NO: 15459 - DNA, 433 bp, Gossypium hirsutum
  Clone ID: LIB3145-023-Q1-K1-E1
gaggaccctcaagacaggggcagattgataagaaagaaactcctcaagagcggctaaaaaggattatgaacagacagttaaacaagcaaattaagaaagacactgctgcggaaatggctaagaagcgagagcaggagcgccaaagactggaaaaacttgcagaaacaagccgattaagtcgtcaaaggcatcgcagccgcagtaggagttacagtcgctctcctccaagaagatatcgacggagtagaagtccaagtaggagtaggagttctagaagatattattctcggtcacgatcacgatctaggtcccactcttactctcattcacgttcacgctcaaattcccgttcacccagggtaagaagccgttcaaggtactgagaaggtgattgacataaatgttgcaggcaaagctatttgatatattatgt

SEQ ID NO: 15460 - DNA, 295 bp, Gossypium hirsutum
  Clone ID: LIB3145-023-Q1-K1-E10
gcggtggaatccggcgacccactcgtggaaaaacaattataataggcagagattgagccacttatattttggattccttctattcttgcccttgtctgtaaataagtcacgtgcaatgcctaactgctcggtatagaacattggtaacgacttaccctactgtcaatttttacacagtgctgacaaaagcccactatgccatcccctacggaccttaacgcagtaactggcatagtaactgcaagcagattgacctcaagggcgcagcaatgctgagatgagaccatgaactgaa

SEQ ID NO: 15461 - DNA, 386 bp, Gossypium hirsutum
  Clone ID: LIB3145-023-Q1-K1-E11
cccacgcgtccgatcactggtttgtggctgttgtgggtgttgttcaatgtgttgattttgttgtggtttaaccctagtagctaaccttgtctgttgtatgcattgcatgatatgttgtaaccttgtatgtttaacttggacattcttgattaacttcttttgaaaaaaaaaaaaaaaaaaaaaaaaaaaaaaaaaaaaaaaaaaaaaaaaaaaaaaataaaaaaaaaagagtaaaaaataaaaggaaaatgtactcgccctgtttgccttcaattaatctcaaataaatgtaagtggttaccgctacaagacatctttttaattgaaaagcagactaaatatcaataaattttggggaaatttcattttttttgataacaacattt

SEQ ID NO: 15462 - DNA, 216 bp, Gossypium hirsutum
  Clone ID: LIB3145-023-Q1-K1-E12
tcggtttactcttatttgtgcttcacttgttttattggtggttgagaacaccattgaagaaggctgttccatgggttcatgaatccaccggtggctaggctttatggtgttgttcttgtgtttggtttttattttaataagaatttcctaaagcttattgttatcatatgaattgctttgcttttacatttggtttggtccctattcggtttaaaa

SEQ ID NO: 15463 - DNA, 297 bp, Gossypium hirsutum
  Clone ID: LIB3145-023-Q1-K1-E2
aagctcttgtgtccggctcttcatagttgaaaagggtttagttttttgtattggagtcaaagctccatttatgtataactcataattttctgtatacagtttttggaggtggcgatttctgtttttagctagggaatttgcgacttaaaacttgttcaagagctgcaattggttactcgagcttgacagtttgctcgagggtttggatagaattattagggtgcaaaaattaaaccttattaaattagatagaaagaaatgacctggcccttgggtggctttttttgtctgccccca

SEQ ID NO: 15464 - DNA, 431 bp, Gossypium hirsutum
  unsure (1)..(431): unsure at all n locations; Clone ID: LIB3145-023-Q1-K1-E3
cggacgcgtgggtacgttctcttgaactagacatgtctaatacacctgatatggtgttcgaaggaagtgcttctgtcttggaaaaaccaagcaatgatgacgacgtgtgtgttggctattctgctgaatatggatatccccaaacaagaattgtcagataatacttctcaagggttgtaataccacttgagcattttaagataccttttgttgaagatgtcattcttttcaaaagatctgcagcttgacgagtccaccaggtgtaaaaattctagtttgtccgatagaagcacaaaatctgaactaaatgcttccattaagagccatcgttccagaataaaagtcacgtggcaatcatgtgcagacagctgtggagaactgaatatcacagatgctatacgagtagccctttcatcatncatcatggatat

SEQ ID NO: 15465 - DNA, 346 bp, Gossypium hirsutum
  unsure (1)..(346): unsure at all n locations; Clone ID: LIB3145-023-Q1-K1-E4
tttaaaaagaaagaaagacagactggagtatgcaatacataacctgcaactcttaatgcgaggcggtgtttttatctatacngctacactatagggagttaagttgctgcaggaacacaccaatgatgaccccaaaaacatggacgctattacttccattgatgcactcaaccctaccgtgttgaatggacccggtgttggcattaacgaagatcatgtcgtcctaaaaagcgctggaacaggcactattggttatgggactgacggctgtcctgatcaatgatggccttctggatggtgcggtcactgcaatgctagcggtcactttctaccattttatcaaatt

SEQ ID NO: 15466 - DNA, 378 bp, Gossypium hirsutum
  unsure (1)..(378): unsure at all n locations; Clone ID: LIB3145-023-Q1-K1-E5
cccacgcgtccgcccacgcgtccgaaaatagaatagaacttatgcttgtaaaatgtggtattgtgttgggttaatcatctgggaatatcaaaacaattttttgttatccttttaatttgagtttaatatcttcttgcaatgatatggaaatggtaaccaagagcctccattggttactcttgaaggaatgagatgtttagcttaccacttttttttcttgtgtactgtcaaagacacttgtgatgtttggagtacaaattctagaatgttcaattcctttcaagatccttgggcngcaccacgagtaatcaaacactagacttgtgcttcatcagaaccagctgctgcctgcttctgctcccgcaccaaacacaaata

SEQ ID NO: 15467 - DNA, 415 bp, Gossypium hirsutum
  unsure (1)..(415): unsure at all n locations; Clone ID: LIB3145-023-Q1-K1-E6
cagtgcgcggtttgtatggacgagttcgagcaaggggctgaagcgaagcaaatgccctgtaagcatctttatcacaaggactgcatacttccgtggctggaattgcataattcctgccctgtttgtcgtcacgagctgcctaccgatgatcctgattatgagaggagggttcgtggggcgcaggctactggtggaggtaatgacggcgatagtagtggcggtgataatgagcagaggtcgggggataatcggacggcggagaggagttttaggatatcgctgccctggccgtttcgggctcgtgggtcgggttcaggatcaggatcaagtgataatccgcagaccaggcaagaagatttggattgaaaactccttgaagtgctngcaaatatcangcatttctatcatgagacgt

SEQ ID NO: 15468 - DNA, 364 bp, Gossypium hirsutum
  unsure (1)..(364): unsure at all n locations; Clone ID: LIB3145-023-Q1-K1-E7
cccacgcgtccgcccacgcgtccggttgctgttaacgatgagcttatacaggaaagtgacaatgaatgtgaagcaaaagtgacagtcagttcaaggaaaactaccagaaggagaaaaagtcgctcacaatgaggttcacaagtaaccatcctgaattataatattttattatcctggatttgattgttgcttgacaatttttggcaataccattgtattattgtttcataaatctgacatcgagaatggtaattaaggaatttgcttatatgcatgtaaagatccactgtatgctatttaaggaattatttagcaatnacattggatcatttgtatataaatctgacaccgagtatgctatttt

SEQ ID NO: 15469 - DNA, 426 bp, Gossypium hirsutum
  Clone ID: LIB3145-023-Q1-K1-E8
cccacgcgtccggatgattcccaccaagcccatggttgtggagaccttctccgagtacccacccttgggtcgttttgctgtgagggacatgcgtcagaccgtggctgttggtgttatcaagaatgttgagaagaaggacccaaccggtgccaaggtcaccaagtctgctgctaagaagaagtgaaccgtgctggctaaacctaatgaagtttccgcagatggagtattttattatgataataatagtttgatagactttatcatttatgatatagttggtcttttgcttggttttgcatgttatagtgtggtgccattgttgtctggtaactgttctcagtattgggtgcttgacagacggtggcatagctatggcaggtggtctctagcgttatctggttttgtttaatttactactgtatcttg

SEQ ID NO: 15470 - DNA, 296 bp, Gossypium hirsutum
  Clone ID: LIB3145-023-Q1-K1-E9
ggtattgttatgccacattgcattatctactgagcaaaaaaagctggccttttggacccattaccctaaaatgtgtttaaccaatttctggtctgggggcatccatgttgattgacctaatatgagagggcactatcattaaaatctgtcataaaacctacctgtataactgtctgggttttgcaggagttggttaaggtgttgtgccagtgcttatggttaataagcaatgatatggctacagatgaaaatgaagcacaacgagaaaaatagaaaaagcgtgcagaacacattat

SEQ ID NO: 15471 - DNA, 463 bp, Gossypium hirsutum
  Clone ID: LIB3145-023-Q1-K1-F1
ggtgcagtaatgcgtcgcgggtgctatgcggcggcccatgtgcaggctggcttcgctatacaagttatcagggaggtgtatcaagcgctctgggaacaagcttattggcatctcaaattgcactctgtatatgccgagtgtgttccgcataggcggacagctcgaggtgtgttcgggcacattctgaactccagatgtcgactgtatgtgacgtgcagctgcatcaacgtaattcctatgacctgataggtgaagacattcatggtgatgcgctgataatcgctgaacatcagattgcatcgtgtccagctcgttagggtcgaacgggttcttttgggctgggcttactggtatgatatcttctgggtctttgcttccaaatggttgtttcatgagagtgtgatgatagtggtagctcgtggtgatcggagtggagaggatggcataccaatgctactaaaaa

SEQ ID NO: 15472 - DNA, 415 bp, Gossypium hirsutum
  Clone ID: LIB3145-023-Q1-K1-F10
cccacgcgtccgaggagattaaacaatttgacaagtatggcccagagagaagaggttgtccgtaggactgtttatgtgtctgatattgaccaacaggtcaccgaagagcagcttgcaggtttatttgtgagttgcgggcaggtggttgattgccgcatatgtggtgatcctaattccgtgcttcgttttgcctttgttgagttcactgacgaagaaggtgcgcgagctgctctgaatcatgcagggactatgcttggattctacccagttagggtgctaccttcgaaaacagctattgcaccagttaacccaacatttttgccgaggaacgaagatgagcgccagatgtgtgcaagaactatctactgtacaaacattgacaagaaggttactcaagctgatgtaagctcttttt

SEQ ID NO: 15473 - DNA, 189 bp, Gossypium hirsutum
  unsure (1)..(189): unsure at all n locations; Clone ID: LIB3145-023-Q1-K1-F11
tccccacctcgggattgccatatgagtttttgaagccgtcttgagcctggggtcactgggaagggagttcttacattncattgcttaatatctaaagttctgttgggatgctcgaatgccttcggtatggatggacatgtgtctactgaaataaaatgacctttaaaataaaaataaaatgaagctgaa

SEQ ID NO: 15474 - DNA, 94 bp, Gossypium hirsutum
  Clone ID: LIB3145-023-Q1-K1-F2
ggtgagtgagtcccaactccggattggcaatggatccctcagaaatatggaagatatctagggtagttctcaccacacttgacggcgttagcgg

SEQ ID NO: 15475 - DNA, 256 bp, Gossypium hirsutum
  Clone ID: LIB3145-023-Q1-K1-F3
ggctctgctcaactgatgagaaaccccttttcctttgcatccttcaagtgatggtcactgctttcatctaaaagactgagtttcaggcaacaaaagaggcttctctgatgcaaggatggtttctcagaggggaatttcctttctaattcgaaagtagatgtgatgtttacacccaggccttcgcaaacttgggactgaaatctctactatgcttgagaaccttggggttaaccaacagggcctagaggtacgaacc

SEQ ID NO: 15476 - DNA, 420 bp, Gossypium hirsutum
  Clone ID: LIB3145-023-Q1-K1-F4
atgagcatctcattctttcttgctcgggttgagagtctactgggttttattataaaaggaaaggagattattataggtactcggcggagtttaagatgggtgatgagaggaaagaggccgctgatcagtccatgaaagcatatcagtctgcaacaactacagcagaagctgagttgcctcctacgcatccaatccggttgggtttggccttgaacttctctgtcttttattatgaaattatgaactctcctgaaagggcctgtcaccttgctaaacaagcttttgatgaagctatctctgagttagatactttaagcgaggagtcatacaaagatagcacattgattatgcagcttttaaaggacaaccttactttatggacttctgacatcccagaggatggagaagaagccgcaaagc

SEQ ID NO: 15477 - DNA, 428 bp, Gossypium hirsutum
  Clone ID: LIB3145-023-Q1-K1-F6
cggaaattgacaaaacttgtgatgggttatgttgataagtatgtcaaagtataagatgccatcaaacttgttcccatgcatccaccgttaaaaggttttgattaaacacgtaagcttctttccttattttttcccacttgaggttgagggccattgaagcttttagaagtatttctatttgttgtcgtgttttgaaaaaggatctaaaacctagagccggttggtttgtgtagttttgaatggttagggggataaaggaaaagctaagcttatgagaaggtgaacaaggcaagagattatctatacatcttaacaaagttctatggaacatgaatgaacatatatgtagtactttgtttgtatattgtcattccttgtagatatccagtctttgtcattgactaatgctgtatgtgatcattatgatg

SEQ ID NO: 15478 - DNA, 180 bp, Gossypium hirsutum
  Clone ID: LIB3145-023-Q1-K1-F7
ggcgtctgtaataaaatctgcaatcttaattctgtcggtgtttttatctgtaagcttcagttcgggtgttaggttgctccaggaacagcccaatgatgacctcaaaaacatggacgctattcctcccattgatgcactcaaccctaccgagttcaatggacccggtgtttggcattcacg

SEQ ID NO: 15479 - DNA, 421 bp, Gossypium hirsutum
  Clone ID: LIB3145-023-Q1-K1-F8
cccacgcgtccgcccacgcgtccgcggacgcgtgggtggcccgtgcttgtgcggcacaaacaaatgcaacatttctgaagctagcaggtccgcaactggttcagatgttcattggagatggagcgaaacttgttcgtgatgcctttcagcttgcaaaagaaaaatctccatgcatcatttttattgatgaaatcgatgcaatcggtacgaagcgtttcgatagtgaagtgagtggggatagggaggttcaacgaacaatgttggaactgctcaaccagcttgatggctttagcagtgacgaacgtattaaggtaatagcagcaactaaccgagctgatatccttgaccctgctctcatgcgttctggtcgattggatcgtaaaattgaattcccgcatcccactgaagaagcaagagcccg

SEQ ID NO: 15480 - DNA, 304 bp, Gossypium hirsutum
  Clone ID: LIB3145-023-Q1-K1-F9
ggcggaatccgggtcgacccactcgaaaaaaaaaaaaaaaaaaaccccctaatcgaagcttagatctgagtgttgattggcatcggccatcctggggtcaactttttcgcgtttgtttcccggcgaccatttctcaatcaaatggatgcacggatccaccgtgagtgcctgatgcagggggggactgtggctcatgccatccctgggaccagaccagccatttacgcagacggcatactacgcctgggaaaacattccggtccaccggcattatataactgcacctgactagcaatctactacc

SEQ ID NO: 15481 - DNA, 424 bp, Gossypium hirsutum
  Clone ID: LIB3145-023-Q1-K1-G1
ctttgaataagaaatggcccgacttctctcccctcagcttttctttctactgaccttggtggtcatcatccatccctcatacggacttaagcatttgaaaggtacagccctcgttgacgaggtttgccgccacacatcccacaatgaatattgcgtcaataccatagtcccaaagccgccattatccggggaaaggatcgccagtaccactttgggttgggcacagataaaagctctggaagccggaaccatcatagctagtctacttaatgattcttcttccatcttaccagtagcaaagaaccctctacaggccaaagagcttctccaaatatgttgggattctaacatgaacaccatggaggacctttggattgctagcagtttgctttacaataagatcatcaatcccatgattgctcgt

SEQ ID NO: 15482 - DNA, 387 bp, Gossypium hirsutum
  Clone ID: LIB3145-023-Q1-K1-G10
ctttaatttcaggaagccactcgattgttagttgttattcgtgcgtagcagtaatatatattgatttgatcgcctattgctagtaatttcatatggacttcccattactgtatatgaggcttaagcaagttgaatttatagtgtgtacccaaaaaacaattctaatatcaacttgttatggtgttccgtagaagatatgtaaggtagtgttaccctttagcttgtatgttgcttgcttgatttacagttcaaaggtgatgaatggaaccataatataatgtttaaaaaaaaaaaaaaaaaaaaaaaaaaaaaaaaaaatataaaaataaaaaccaaattaaaaatcatattcataattacaattttctcccttttttaaaaacaaaa

SEQ ID NO: 15483 - DNA, 394 bp, Gossypium hirsutum
  Clone ID: LIB3145-023-Q1-K1-G11
ggtttttcttgggaaaaattaaagaagtgagtacaaatgcttggtggtttgtacggagagctaccgccgccgtccgatgaggataaccaaccaagcagtaacgccacggtatggtcaagcagtacaaagatggctcctcccactctccgcaagcctttctccggctttgctccgccgcagactatcctcagatcccaaaacaaacccaaaaaccctattcccaaaacaacaacctcttcttccgtttccatctccgtgtcgccttcccccgtggcggttgcacccgacggaatggtgcaacatcagcctgcacttgtgggcgtcacttccagtgtaatcgaagagtatgacccagccaggcccaatgattacgaggaataccggagggagagga

SEQ ID NO: 15484 - DNA, 249 bp, Gossypium hirsutum
  Clone ID: LIB3145-023-Q1-K1-G12
cccacgcgtccgcccacgcgtccgggtagctgaggaagccttggaagcaaaacaaaaagtaacaaatagcttgtctactacctgttctttttctttttatcatgttttataattttgtgacaaattgttcttggtacactgaagatatttatggaaaattaccctatgattctattgtaaaaaaaaaaaaaaaaccaaaaaaaaaaaaaaaaaaaaataaaaaaaaaaaaaaaaaaaaataaaatataa

SEQ ID NO: 15485 - DNA, 335 bp, Gossypium hirsutum
  Clone ID: LIB3145-023-Q1-K1-G2
gagatagacagtattggatctgctcgaatggaatctggaagtggcaatggtgacagtgaggtgcagaggaccatgttggagcttctcaaccagctggatggatttgaagcatccaacaagatcaaggttctgatggctacaaatcggattgatatcttggatcaagctcttcttaggccaggccgaattgacaggaagattgaatttccaaacccgaacgaggagtctcgtcaggacatcttaaaaatacattctagaagaatgaatttgatgcgggggattgacctaaaagaagattgcttgagaagatgaacggtgcttcttggtgcggagct

SEQ ID NO: 15486 - DNA, 422 bp, Gossypium hirsutum
  Clone ID: LIB3145-023-Q1-K1-G3
cccacgcgtccgtctcgatgtcgtatataatgcctcgaacaatgagcttgttcgcacacagactctggtaaagagtgccattattcaagttgatgcggctccgtttaagcaatggtaccttcagcactacggcattgacattgggaggaagaagaagatggcctctaagaaggaagctactgaggaaccagaaggggctgccgaggaaaccaagaggagtaagcatgtggcaaggaagcttgagaaacgccaaaaagatcgcaaataacttgatcctcacgttgaagaacaatttggtggtggtagattgttggcatgcatatcttccaggcctggtcaatgtggcagagctgatgggtacatattggaagggtaagaattggagttctatatgaagaaaatgtataagaaagagggcaagg

SEQ ID NO: 15487 - DNA, 414 bp, Gossypium hirsutum
  Clone ID: LIB3145-023-Q1-K1-G4
agcgaaggttctgaaactagagcttaatatcatagtgaagtcgggttgtctgtgctggcggcttatcaagtcaaagctttggcaccttacgaacatgttaccacctgtggagctcctgaaaattccgatggtcttagtggggaatgtgaggaagcgagcaaggagggagcagatgttgaatctaaaagtaaaagaaggaaaaatgagaatcaatcaagtgaagtgggcaccttaggggaatgcatacaagaacctcgtgtggtagtgcaaagttgtactgattctgagattatgggggacggatttcgatggagaaaatatgggcagaaggtggtgaagggaaacccatatcccagaagttactacagatgcactaatgtaaaatgccacgtgcggaagcatgtggaaagagca

SEQ ID NO: 15488 - DNA, 430 bp, Gossypium hirsutum
  Clone ID: LIB3145-023-Q1-K1-G5
cttttatctcattcctccgtcgcttttgagaatagaggcagcagtggcttgacgttcccctttgctcccttcttccagaagccaaaagtttgagttaagaacaatggcttttgctgcaatgaagccgacaaaacctggtttggaggagtcccaggagcagattcacaagatcaggatcactctctcctccaagaatgtgaaaaaccttgagaaagtttgtgctgatttggttcgtggtgccaaggataagagactgagggttaaggggccagtgagaatgcccaccaaggttcttcacatcacaacaaggaagtctccctgtggtgaaggaacaaacacatgggatagatttgagctccgtgttcacaagcgagttattgatcttttcagctcccctgatgtggtcaagcagatcacatctatcaccatt

SEQ ID NO: 15489 - DNA, 180 bp, Gossypium hirsutum
  Clone ID: LIB3145-023-Q1-K1-G6
cggacgcgtgggattttattttcccttctcatggcttgtattttaacaaatagccaaatgtcaataagaagcagaatttgtcttatttttattaatagttaggatgttgatatttgccattatgtagaaaatttccatcatatcaagttaaaattatgtaataatatccatcatatatcc

SEQ ID NO: 15490 - DNA, 366 bp, Gossypium hirsutum
  Clone ID: LIB3145-023-Q1-K1-G7
gttgctggatatgacgacaatggtccacatttgtatcaggtggatccatctggctcttgttggtcatggaaagcctcagcgatggggaagaatgtctctaatgcaaaaacatctcttgaaaagagatacactgatgatatggaacttgatgatgctgtgcatactgctattttgactctcaaagagggatttgaaggacacatctcacggaaaaacatttgaatcgggattatcggtactgacagaaaattcagggtgcttaccccagctgacattgatgattatttggctaacatggagtaactggtctttttattccagacttatctacaagtggttattttttatgcaacaattgtttttgag

SEQ ID NO: 15491 - DNA, 306 bp, Gossypium hirsutum
  Clone ID: LIB3145-023-Q1-K1-H1
cccacgcgtccgggttccccatgtgctaaataacatgtaatgggcctatttagctcgggacccaataaaccaaaattgaaaccaaagataatgttaatagcccaaagtccatttacatcaaaagcccgaatagcccaaatcatttaacccattttacaaacaaaacctaaaacccattttttaatggcccgataggcccaatgcctaaaccaagtttcagccaaccgaaaccctagctagccttagcgccgcgtctaccttctgccagccacgtgcgtcctcggtgcaaacatcagctcgagggtc

SEQ ID NO: 15492 - DNA, 407 bp, Gossypium hirsutum
  Clone ID: LIB3145-023-Q1-K1-H11
cttagccatgccactgctggtcttcgtcctgctgccacctatagagctgctcccgagtacctatcaggcattaataatggtggcaggacatcacttgcattcaggctcatgccgcaaggcaatgctatattagattgctctccagttgcagctgctggtcatgtcattccacaaagctatgtaccaatatctgttagccagtttatggatgaactttctgctgaagaagatgtagtgtgcaatcgttctgataatacttgtgtagctcgaaacaatttgaataagcagccttcattgagaagcgttctatcagaccccttgtctggtgcattccttgaagatgctgtggttgtttcttgtggacattcatttggtggtctcatgttgaggagagtccttgatatgtc

SEQ ID NO: 15493 - DNA, 369 bp, Gossypium hirsutum
  Clone ID: LIB3145-023-Q1-K1-H12
gaataattaacaaactctgcccagggacataatgtatcgatgctattggtacaggctggatggtttaatatatcccaatgcttgagttcgactgtcggggttttcctttggcttcagagggttatgcttactctgaaggcctcttgcggatcaatctttaacctttaagcaagccatgagatacatgttacacccttgctccctatattgcatactttgaatctctacctgtgcatgaaaacactgaagaatataggagcaagacagaactctttgtagacgcataccttgtgaatgtgaagcctgtccaacagcatgaacatgaggtcacaactttcataggattatatagatacaaagtgagggaca

SEQ ID NO: 15494 - DNA, 419 bp, Gossypium hirsutum
  Clone ID: LIB3145-023-Q1-K1-H2
gcgtgagcgtggtatcaccattgatattgccttgtggaaatttgagaccaccaaatactactgcactgtgattgatgcacctggacaccgtgactttatcaagaatatgattactggtacgtcacaggctgactgtgctgttttgattattgattccaccactggtggttttgaggctggtatctcaaaggatggtcagactcgtgagcacgcattgcttgcttttacccttggtgtcaagcaaatgatttgctgttgcaacaagatggatgccactacccctaaatactcgaaggctaggtatgatgaaattgtgaaggaagtctcttcctacttgaagaaggtgggatacaaccctgacaagattccatttgttcccatttctggttttgagggtgacaacatgattgagaggtcta

SEQ ID NO: 15495 - DNA, 287 bp, Gossypium hirsutum
  Clone ID: LIB3145-023-Q1-K1-H3
ctgatgtctcaaccatgacatagacgactgtactaaaaatgctatgccctatcgacatcccagtcatggctcagataccgcagatacgactagctgctctatgattacacatacttaacacctaacaaactctacgtgcacttatactgctacttgtgcctgcacattcggactgagtgaggggtctgtgttgactggatgtaccttgtcaatacttgtgctgatcttgatcattccaaggtctctgtaatatgtgaacgctcttttactgaactgagcatatggat

SEQ ID NO: 15496 - DNA, 418 bp, Gossypium hirsutum
  Clone ID: LIB3145-023-Q1-K1-H4
tttccagaggagaaaccagacccttttagggtttcctcgaccctcaaacgccgccgctcagcctcgcgccaaggctccgactgcgacggagatagcgccgactcgacgaatccggcgagagaggttcggtggccgtggagtgcgcccgtacgtggaggcgcaactcgcgcgaatggcggctactgttgcggagggggtagtgcgcaggctcgcggcggctggagagggtttcagcaaattgatttcgctgggctagggtttgagaattggctgttgggcctgttattaggcctgctagtgttggactggttatttttttggttgggtttattatgtgggcctgggcattattgggcttgtacaatatatatatatatgaaattagtggtaagagagaggcaatttcattttctccaac

SEQ ID NO: 15497 - DNA, 415 bp, Gossypium hirsutum
  Clone ID: LIB3145-023-Q1-K1-H5
tgcagcaaaaacagtacaagtctaagaatatagaaagttccatagtttttttcctcatcagccgatagccctatacaaatcagcaaaagctgcaaacaaagggatagggaaaactcacattaaagctgagttcaaggtacattctgtgaacatgaagaatgccttgaacatcagcacaggttttctttgtttatttcatcacatgtttataggtcaaaacaccaggaaaatggactaatttgttagcaaactagtcaaaaacacctacaggtcctggttttcctgtttttgaacccagagtacttggatatgttacagcttttacatttttcattatgtatcacatcccccatgaatgtcttatttttgttaccgtaattgtctgtcattgccatatatataccctgtcaaatat

SEQ ID NO: 15498 - DNA, 256 bp, Gossypium hirsutum
  Clone ID: LIB3145-023-Q1-K1-H6
cgactaatatcaattatacgacggaagggcatttaccaaacgttaaacgcaggacacagggatctgcggtgcgggtaataatccatggataccccatggacatgaataacgagttcaactccatcattgctgccggcgcatcactgagcgccgttatgggcgctaatgcacactgatagttgcgattacgatgaggttctagccgtatcgactctaccgctcgcttactaacagagtgagcggattacagcgtctg

SEQ ID NO: 15499 - DNA, 426 bp, Gossypium hirsutum
  Clone ID: LIB3145-023-Q1-K1-H7
cttttattgatttttgtatataagccagaatgattctttcaaaatgggcttctaattcttaggaataaaaaacccgaccctttacataattaaaatttggcagccttcttctagaaactcaaaaagctttctttgtttctctgtccaaccccagcagcttgtcagtctgtacactgacgcaccggcacactccggcttcggacaaccgatcaaaagaaagctccaagcctcctctatctcttctccagattagagttcacaaacatagcctcgaactccatgaaatcaacacccaagtctcaaactaccttaaactcgatttatgccattggctgttagataggcttggaaattcagttatggcctccctgccttcccactgttggggttctcgaacgaagactcaaaagatttaagaacctgata

SEQ ID NO: 15500 - DNA, 417 bp, Gossypium hirsutum
  unsure (1)..(417): unsure at all n locations; Clone ID: LIB3145-024-Q1-K1-A10
ctcaagggcagagatctttgctatattagagaagctgcaagatgataatatattgatgatagctggtgaaacagtgcatatgatagtatgagatgtaaggaaagacctggatggcttctttcatgcaatcactttacagcattgtgggattggggatggatctattggcatgaaattcttggtttgtacagctccatgatttatcctaaaattgtcttaaaagtgactgttggctgtactctgtagcagatgaaaggtgaactggggatggatcccctcttgctctgcaagtgaagatgcaaaaatttggatgacatatgataattcactaatgctntaattatttacttggaaagtattgttttttttggactttatgttttcaatggttaatatactgtggatctaattctaagc

SEQ ID NO: 15501 - DNA, 462 bp, Gossypium hirsutum
  Clone ID: LIB3145-024-Q1-K1-A11
aaggcattgaaagccattttggagaaagattaaggcttgatcaacatcgtgtagcttggagtcctcagcgtgttctggcttcaccaggtcaaacagatatcagttcttccgcagtcagacctgctccatcttcactcgaaatcccaaagcattctcgagatacatggggctctgatacaaacctaccttctcctactccgaaccaaaatcccactggtgggaataagggacaagcatttgaaagcaaatggtcacctacccctggtcagtcatcaggtcctcttccggtacctaatccattccgaggaggtgctgtagggctgcaaccccctactgttgtttcagagagtgggagcccagctgctcctgtagtgcattcacatccgatggtgtcaagtgaatcacataggagacaggtcaatgttcaggcttcagttaatttaggtgctgatttgaaaaatg

SEQ ID NO: 15502 - DNA, 355 bp, Gossypium hirsutum
  unsure (1)..(355): unsure at all n locations; Clone ID: LIB3145-024-Q1-K1-A12
gggctgnnacctaggcattttaccccaaacttgtaagcccaactacaaaaatccattttttagtttgtttttgatttgcctggcgatcaagcaaaggattgtaaaagcggctacgtaggatcatattacagttacaatcaaagatttcaatgtgttgnattttgggtgctttggcgatgtccaattgtacatacttgaaaagagaagctgactggcaatggcatctgcctctgccttcttaacattatagagagcacttgatttactaatgattgatttggttattttaaatataattcatatctaaaagtattatttttttttttttttttacctaaaatatttttatttttat

SEQ ID NO: 15503 - DNA, 244 bp, Gossypium hirsutum
  Clone ID: LIB3145-024-Q1-K1-A3
gggagtttagggtatactgtattgcacaatagttcttgtcagcatgctgctccaacctttatcaacttgatgaactctgcaattcttaggcttgctactagggacaaaaatatgacgattcgagcacgttatcatcctctttcgatgacaaaaagcctgcgtttacagcatcaagatcttggtgcattctctgctgcaattatagttaacatagcctatttattcatatcctgcttcatttgct

SEQ ID NO: 15504 - DNA, 134 bp, Gossypium hirsutum
  Clone ID: LIB3145-024-Q1-K1-A6
taaaaagcttattaaaggtaaaaaaaacacttttccattgagttacctgaaccgtatttgggtggcgactagcatggcgatggtacaaggtcacggtaaaatccaatgtcaaaactgtaaatcaggcatcaagt

SEQ ID NO: 15505 - DNA, 461 bp, Gossypium hirsutum
  Clone ID: LIB3145-024-Q1-K1-A9
cgggcgaaaggcttatttaaaacaagacctgtctgtcatctgctccatgtcttgcaatggaatggctttcttcccagcagatttcatgctccaaacgcctgatcatgatcacgaagatcatcaacgctccactaattctatcaatcaaatcctcccttcttgcacggcgccccaggagtttcatggtgttgcatcatttctggggaagagatcaatgtcttcatattcaggtatagatcatgtgtgtgaagaagcaaatggagaggatgatatatcggacgatgggtcacaggcaggtgaaaagaagaggaggcttaacatggaacaggtaaagacactagagaagaactttgagttaggcaacaagctggaacccgagcgaaaaatgcagctggctcgagctcttggactgcaaccaagacagattgctatttggtttcaaaacagacgagctagatgga

SEQ ID NO: 15506 - DNA, 134 bp, Gossypium hirsutum
  Clone ID: LIB3145-024-Q1-K1-B1
tcgctgacgcgtttgctgactcatttgttatctttgttttaaaaatattccatgatttgcatggggtggtcatgaattttggtggttcattttgcataataaacgagactgctgttcgttacgtacctttgtcc

SEQ ID NO: 15507 - DNA, 417 bp, Gossypium hirsutum
  Clone ID: LIB3145-024-Q1-K1-B10
aaaaccgggccgaccgacgcgtccgatactctagcgacgcatttggaggatttgttcaagttaatttggttaatgttaattgataggtatggattaggggatgactgagtgaagatgaactacacaacgttagtgcggatgatgaaatatatggcccctccgccaggggagtatgagagaggactctttgctcatactgataaaccagtaagcacactcatttgtgaggatcaaatttcagggctggaaattgaggtcaatgatggtcaatggatcaagctgactaatttatctccttcttcctttgtatttgtggttggagatcctctcaaggcttggagtaatgggagattgaaatcagtgaatcacagagtgatgatgagcggagacaaagatcgatactctatagcaactttt

SEQ ID NO: 15508 - DNA, 452 bp, Gossypium hirsutum
  Clone ID: LIB3145-024-Q1-K1-B11
cccacgcgtccgcccactcgtccgcccacgcgtccgcccacgcgtccgcccacgcgtccgcgcacgcgtccggcttactttaagcggtttcaggttccatacaaaagaaggagagagggaaagactgactaccgggctaggattcgcctaatcaatcaagacaagaataagtacaacactccgaagtaccgattcgttgtccgatttagcaacaaagatgtcaccgcacaaatagtttctgctaatattgctggtgatatggttcttgcttctgcttactcacatgagcttccacgatatgggcttgaagtgggtcttacaaactatgccgcagcttattgcactggtttgctgttggggcgccgtgtgcttaagatgcttgaaatggatgaagagtatcagggcaatgtagaggctactggagaggacttctcagttgagccaactgacac

SEQ ID NO: 15509 - DNA, 240 bp, Gossypium hirsutum
  Clone ID: LIB3145-024-Q1-K1-B2
cattattgtttattcttccttgtaattcattaaattcattcccttaagcttctcattcatgggaacgagttaacaaattgtacgccaggcttacctctgttcttaagacaccccatgattttttcacccttgttcaattttagttgaatagtgaaaatcttggtccactatatttttctgtacataataatttaatttctatttttataactttttttttaaaatatattaaaatttttt

SEQ ID NO: 15510 - DNA, 310 bp, Gossypium hirsutum
  Clone ID: LIB3145-024-Q1-K1-B4
tgtctggattatgtagatgatgagagtaagcttgaaagacgccccaccaaacacatgccatcgccagatcaatggactaatgtatttaatcctgcattctcctactatgcgtattatagctactcatacctctataccttaaacaagcttcgtgaatccaagggcatgacatccatcaaattccgaccacattctggggaggcttgtgatattgaccaccttgctgcaacatttctaactgctcattattttgctcatggaatcaattaaaggatatctactgatctactagatctatatttatttggca

SEQ ID NO: 15511 - DNA, 347 bp, Gossypium hirsutum
  Clone ID: LIB3145-024-Q1-K1-B6
acgcttggttgttaaggtggccattaatgttcatcaaagggtatactctcagtgttaattctattgattcgttgatgtatgataaagctgaggatatatacttgcttactgagaagggttgtatggctggtgaatcttaagaataaaggtggtactattctctattggcttagatataaactgaagttcattatgaatgaaaaacaactttgtcttctttgtcttattttaaaaatatatattatttaattaattttatttttaatatttttttcttaattatttaaattttattataatattttaatatacttattttttattataaattgattctgttttttttt

SEQ ID NO: 15512 - DNA, 276 bp, Gossypium hirsutum
  Clone ID: LIB3145-024-Q1-K1-B7
agaaaatgcatgtatgttgcatcgggtaaactatccaccccgttcgaccatggtgcgggacgtgtggatcctgtttcagcgcttaatccagggcttgtgtatgatttgacagcggaagattatctgggtatcctttgtgccttgaactacacagagttccaaatcagttccttggcgagaagaaactttataagtgattctagcaagtgatacagtgtctctgttcttaactaccctttcattgcagtctattctgattttgttatgtttttgatt

SEQ ID NO: 15513 - DNA, 234 bp, Gossypium hirsutum
  unsure (1)..(234): unsure at all n locations; Clone ID: LIB3145-024-Q1-K1-C1
cccattcgtctcgttcattctaattnttctttgtactcgagctagggctttactacggtgccctgtttctagtggttttacgatcttcaagcaattagcttcgattctgagtcgtttcgcaatgcctcggtattactgtgattattgcgattcttatttgacccatgactctccatcagtttgaaagcaacacaatgcaggttacaagcacatggcgaatgttagaacatacta

SEQ ID NO: 15514 - DNA, 204 bp, Gossypium hirsutum
  Clone ID: LIB3145-024-Q1-K1-C10
tgatctgttaaaatattctatactattgtttttgggatatctattttaaggctgatgttgctttttgatcctggggtgtcgatgaatatgtcttcaaacatactgcctttggaacctagattgtgtctgagtcacaaaaaagactacctacagaagataaaagtggcgctggcctcagatttcatgatcacaaagagggagagg

SEQ ID NO: 15515 - DNA, 330 bp, Gossypium hirsutum
  Clone ID: LIB3145-024-Q1-K1-C11
cccacgcgtccgtttcgtactttcatgggttactgctattagatctttgttttaatatttgaggtttgtctttggacgctatgatgaatcgtcaacttcgatgttcaaatgccttcaacttctgtttggtacgttgaacctctgatatttggatgtcatttttggaattctttcatcttaatcctccaaagcatgtaaagatctacttatatatataaaaatatattgcattaaaaaaaaaaaaaaaaaaaaaaaaaaaaaaaaaaaaaaaaaaaaaaaaaaaaaaaaaaaaaaaaaaaaaaaaaaataaaaaaattgggtcctcgttat

SEQ ID NO: 15516 - DNA, 216 bp, Gossypium hirsutum
  Clone ID: LIB3145-024-Q1-K1-C2
acgctctctcgatctataacttgtggatctcctttgactcctgaagctggtgaaattgtggagagagctaattgattaaatggcgttattcgaatcgattgctttcatgtagagttctgttcatcttgtagacattgataaccaaaataatgctgaaataatatgatcctgaaaggaatggttcagattaataatattaagttttcttatttaaat

SEQ ID NO: 15517 - DNA, 214 bp, Gossypium hirsutum
  Clone ID: LIB3145-024-Q1-K1-C3
ccgataagaaaacatacgatgcagtgccaatagaggccgataaggtggtgtctaagagttctggtagtttgtttgataagagatttggtgtctctgacatggaagaggcagttgtaaagctcgggttggatatggttgatggtgaaaagatggcagctttggaggcgaaatggaggaaattgctaattgagcagttggtgctgtttgttgtgcg

SEQ ID NO: 15518 - DNA, 227 bp, Gossypium hirsutum
  Clone ID: LIB3145-024-Q1-K1-C4
ctctctcccatcggtcgtttccaagtataagatagagaggtctccttacaaccaccgtgatgggtcgtgttattcgagctcaacgtaagggtaccgtttcgttcttaaggtcctaccaacttactatagtatttttacattttgttttcttactttttatattatactttttatatttaattttataatttttttaattttaattttttcatttattttatataatt

SEQ ID NO: 15519 - DNA, 412 bp, Gossypium hirsutum
  unsure (1)..(412): unsure at all n locations; Clone ID: LIB3145-024-Q1-K1-C5
aaaacccgggccgacccacgcgtacggaaacatgcttttatttttatccttcttaatacaatgcganntgaatctagtcaggtggtgtttatagcatacctggtggagtattaaggattggtgctgcataagatttaggtccaaacaattgccaaaaattgcttgtttaacttctttcttgtgtgtctgtattacacctttcaaacagaaagatcttgtgttgaacacattgatacgtggttcatgaatgagaatctatttaaaaaaatatatctattcttatgatgtgtagttacttgtttctgttcattgacttttaatgttataagtaacatattgctgtttgtataaaatgttggacttatgtcatatattagtacattattaaagctcttttttaaattatttttgt

SEQ ID NO: 15520 - DNA, 316 bp, Gossypium hirsutum
  Clone ID: LIB3145-024-Q1-K1-C6
gacccacgcgttcgcgaatcaaaaaatatctcaaatctcctccttctccttggaaatcttagtatcatcaccatgggctgaaatcccaaggtcttctttgacatgactatcggtggtcagcccgctggtcggattgtgatggagcttttcgcagattgcactcctcgcactgctgagaacttccgtgccctctgtaccggcgagaaaggcgtcggccgcagcggttagcccctccactacaaaggctcctctttccatcgtgtgatccctaactttatgtgccaaggtggtgacttcaccgactgaaacggttccg

SEQ ID NO: 15521 - DNA, 141 bp, Gossypium hirsutum
  Clone ID: LIB3145-024-Q1-K1-C7
aataaccgggccgacccacgcgttcgtgtttctctcactgctattgacggaaactttaatccttttgctttaaatttgttcggcagtgttaattttgaagcaaatgagtgacaaagatggtgggtaagcctatttatttat

SEQ ID NO: 15522 - DNA, 435 bp, Gossypium hirsutum
  Clone ID: LIB3145-024-Q1-K1-C9
gtcctgagatggagtcccctcaggtaacttttaagtaaatatcgagagggttgggtccaagaagaagaacctgcaatcaactgcgaaaaacagtggcagtcttgacacagtggttgaagtgttccatgaagctgatactgattaccagttatcaaggccgaaaaggaaaaacttagaacctgatcatgatttcttggtggaaactcaacttacaatggaaactcctgcggatgatcctcctgacatgatgactgagaacatcaagaagcatatgaaaacacattttgaaactccaggagctcctcaagtagaatctttacagaacttagcggccggattgaacaagaaaggagcagctcagctcttctatcggacatgtgtccttgcttctcaaggtttcttgaaagtgcaacaaaaggtggcgtttggagacat

SEQ ID NO: 15523 - DNA, 474 bp, Gossypium hirsutum
  unsure (1)..(474): unsure at all n locations; Clone ID: LIB3145-024-Q1-K1-D1
ggaanataccgggtccgacccaacgcgtctcggcaagtacacaagtactttgatgcaaagtcagtccttattttctctcaagatggcttagagggttgtaagaggacatgttgaagatggctcaatgtcccccaggcatttggatgcttgacaaggcttggtggtagcttttgcacccaagccattcgtttggtccccacaagtccagggaatgcttgccattgatccttattttgcgtaaccgattgatgtttgctctcacctatagagaagtcattgcttttctcatgctgaggcatgttatggttgatgggatggttaggacggtttagacctatccagcttggtttatggttgttgtgtcctttctttaatcatattgttgactttttgatttctttaattccaccaaatggttggttttctttactattgttttatgatggatatttaattcaatgtttaagttttttt

SEQ ID NO: 15524 - DNA, 355 bp, Gossypium hirsutum
  Clone ID: LIB3145-024-Q1-K1-D10
caaatctctaatctcacattgatgaattcttcttcctggaatgttcatcctgtttataggggcaatgttgtcgttcaaggatgaacgatcctcgcaccagtaacttctccgaacaccgatgggatcaacccaggtgagaaaccggacattgaatcgggctatacgcatttgaagcttcttcattggtgttaaaagggttcttgtttttcttcagattcttgcacgaatacccggatcgaggactgctacattgtttctggagacgattgtgtagctgttaagagtggctgggatgagtacggtatcaagtttggtatgccaacgaagcagctagtgatcagacggcttacgtgca

SEQ ID NO: 15525 - DNA, 458 bp, Gossypium hirsutum
  unsure (1)..(458): unsure at all n locations; Clone ID: LIB3145-024-Q1-K1-D11
caaaaatattaaaaaaatacaagttttttctcctttccttcttcactctggttgtctgaaaagccgaacattctatgctctttcttccagcttaagcaccagcagatccgctatcaggttgcatacttttagtgtatggttcgcccacatatggattcagtaccgtcatagctataagagagtgctgtcaatcctcatgcttctgcaactgacacatgaccattcttgaatcctgcctttgggccttggtgtattaaaagattgtaaagattttaagaagattccacaaagtggatgggataaactgtatatatcctttgttcctgctgattctggaaaaacgactgcgaagacaaccaaagcaaatgtgagaaatggaacttgcaaatgggctgatccagtctatgagactacnaagcttctncaagacatcaaaactaagcagttcgatggaaaac

SEQ ID NO: 15526 - DNA, 379 bp, Gossypium hirsutum
  Clone ID: LIB3145-024-Q1-K1-D12
ttttctctctctacactttcactttctctttctagaaaccttctctctaaacagtttattagattttttttccaaatcctttgtaaaatcaccagtaactctctgatttgaaaactgaggggtttttttttttctgcaattttttttggaactgaaggtttactaatggttatggaggataacgaaggaaataagaagagagcccgggaagagtcagaggctaactcggtgcccaatacaaaactcgctcgagttgactcggacaataataagggtcccgactccgactctcccgaggctactcgtgtaaaacctgatcctgatgatggaaaagataatttgcccgaaacaaggcatataccggaggaattgctgaaca

SEQ ID NO: 15527 - DNA, 318 bp, Gossypium hirsutum
  Clone ID: LIB3145-024-Q1-K1-D2
aaaacccgggccagtatccgaaaacctaaagattctctttcccaaaccaatcttttcatttttcagcaagagagagagagagaacttacgtttcttttacttcgatcatcagcttagggtttcttaattcgattcccctatttccctgttccccaattttacagatcaggtctgtgtgttcttgttgttcttctgtttctatccgctaagatttatgtctgatctttgatatttagattcttactgtcttagttccgtttgctgtttcaaatgcttaagacgctatttcttgtgccaatgtatacttttacatttttt

SEQ ID NO: 15528 - DNA, 390 bp, Gossypium hirsutum
  unsure (1)..(390): unsure at all n locations; Clone ID: LIB3145-024-Q1-K1-D6
gaaaaancgggccgacccacgcgtacggggatttgagaactgtcttttcttaaaattatgatgctaatgaacgcgtngncgattgggccacgtctaatttcaatggggttatcgctgtgatggatccgactagaagttgggctgctcgttggctgcgaattggaagatttgtccccggttgttacactcttgctgtttcagaggcgcttccagaagtcttgcagaatttatgcgatgaagtgcatgtgcagtttgtgccacctaaacgggtatgtgacatgagtcctggtaacattgtttgttaccatcgtaaaactttgctttatacgagatgagatcgttttttgatgcttttgtaaaagtttttgctccgttgatctaggcttatca

SEQ ID NO: 15529 - DNA, 345 bp, Gossypium hirsutum
  Clone ID: LIB3145-024-Q1-K1-D8
cccactcgtccgacatgatctactttgagtttcttatagtatatatactattgagtctgtgaatgctttttgtattattacttctagttacaaagagggtaaatcttgctctgttataaataatataaaataaaaataatataataaaataaattaaaaaatattatatttatttttttaaatatattatatattaattttttattatatttattttatttttaatttattattttttaattttttatatatttttatttttttttattatttatttaatttatattttttatactatgattattaaatttatttttactatatttattttatattatattttat

SEQ ID NO: 15530 - DNA, 413 bp, Gossypium hirsutum
  unsure (1)..(413): unsure at all n locations; Clone ID: LIB3145-024-Q1-K1-D9
ctttgaggtttgatggttccctgaatgtggttgtgactgagttccagactaacctggtccgatatcccangatccactttatgctttcttcttatgcccctgtcatttcagctgagaaggcttaccatgagcagctatcggtggctgagataaccaacagtgcttttgaaccctcttcaatgatggccaaatgtgacccacgacacgggaagtacatggcttgctgccttatgtaccgaggagatgttgtgcccaaagatgtgaatgcggctgtggccaccattaagaccaaacgcacaatccaatttgtggattggtgccctactggattcaagtgcggtatcaactaccagccaccaactgttgttccaggaggggaccttgccaaggttcagagagctgtctgcatgatc

SEQ ID NO: 15531 - DNA, 177 bp, Gossypium hirsutum
  Clone ID: LIB3145-024-Q1-K1-E1
aaatttagaatatagttttagtttgaaattttaacatcaggggtctgctttgaaagttgctggtgcttataaagaaaaaacggcagggtttttgctgattaaaagtgcataatctaatggttggtgtcggcgtaagtttgttttgattgtaagacagtaaagcttgtctacaccaaa

SEQ ID NO: 15532 - DNA, 417 bp, Gossypium hirsutum
  Clone ID: LIB3145-024-Q1-K1-E10
cccacgcgtccgcccactcgtccgcccacttttccgcggacgcgtggggtaattttgctgctttttttctttatttaaaaaagaacctcgaatcttatgatattcttttaaaaaacgaaacaaactttgaagatttaaacaaaatctcgataccattcgaccctcgcccacatctatatatttttgagatgttcgggctctcatcggcgtcgattcgagtatccacttcatgtattcatgcctaaattgtaagctaatcacaagaaacgaacaaaaatacaaatttggaaatcaccttccaataactttcgtcttgatttctttagatatccagtgtgcctcccaaaaaaaaaattacaatcgattccccctggctttatagccgaatgttcaaataaaaatacaaattttcttttt

SEQ ID NO: 15533 - DNA, 452 bp, Gossypium hirsutum
  unsure (1)..(452): unsure at all n locations; Clone ID: LIB3145-024-Q1-K1-E11
gttacttatttttttatttttggggttattaatgtacgacttcttcctactggttcctcgtgggaggcaaatcctgaagcggccttcatgtttgatgctgcaaatggtcatgagaatgatggtgatcttttactccatggccacgctacaggtaataaatcaagtttttgcatttattatattggttttcatcttctttatatcttaattctcccatctgattggcaaaggatcatgtcctgctcattcttgattaattttccttgttaatttaggatttcaactttctgaaaatccttcttcagaggcagtttggaaatcttctccataaaactccacagctcaagcagagcattacttggccatttatgtcgtcttatttttatcatattatcgtgattgtgcttcccccaatgtttctattgttgctgcaactttntatgttgaacatg

SEQ ID NO: 15534 - DNA, 372 bp, Gossypium hirsutum
  Clone ID: LIB3145-024-Q1-K1-E12
aatgaagtccctccgattaaggttgaaggtttgattgtagcttgtgaaggagataataatgctgctttgggacactcaattgaattcatatgccttgacttgaaagagcctgctgtatgcaagtattgcggcctacgctacgttcaagagcaccatcactagaaactacttgttatgttcttctcaggctgttgggacaattgttattttgctgtacccatggggcactttcctctgtttcagcttgttggtaacaaatttgatgaacccattttagtgtgatgttttttttttcttttacacataataagtgtttgaagttctcatttgagaagatatttcgaaagtaaatttgaacacctatggtctaaa

SEQ ID NO: 15535 - DNA, 270 bp, Gossypium hirsutum
  Clone ID: LIB3145-024-Q1-K1-E2
atcaatctactcttttgattctcaggaatggcgagtggttttggtgaatcaacaagcatgcgttcagcaagtccatcttgctcgagctgttataatgcttacgatgctggtgattttgaatgcaatatttgctttgaattggctcaagatccaatcgtcacactatgtggtcatctcttctgctggccatgtctctatagatggttgcaccatcactcgcattctcaagaatgtccggtttgcaaggcccagtttcatgaggaaaaactt

SEQ ID NO: 15536 - DNA, 466 bp, Gossypium hirsutum
  Clone ID: LIB3145-024-Q1-K1-E4
tcggttgtcacaacataaatttattatggactatttgatttctttgtcgcatatgcatacataaggtggggatgaatggagccctaaccatgtggacacggtgtggtgttccttcattttatggctttgttttataatatataacatgttatatcctatgcggtcatatttagcttctagctaaatgtggaatctagtttagagttgctgttcttttttttttccttttacttgtttttaatatagctaattgatttttttatctctgatttgatatttatatttttaatttattaatttttttatttatatatttttataaattaattatattatatatttaatatatttacatatattatttttttttattatttatattttattttctatatttaatatatatatatattatatcttattcattaaattttttattttttatattataattttttattatata

SEQ ID NO: 15537 - DNA, 262 bp, Gossypium hirsutum
  Clone ID: LIB3145-024-Q1-K1-E5
tcggttgtgaatgaggcagttgaacaggttgcttatgctgaccgtataatcatgaacaggatagagttggtctctgagggtgacttgtagaaactgactgataaaatcaagcatattaatagcattgctcaaatcaagagagcgaattttggagtcgttgacttggactttgttttgttagtaggtggatatgatcttgacagtattgattcttgcagttaaagtagatgattcttacggtggtaaccattatcttgacaca

SEQ ID NO: 15538 - DNA, 203 bp, Gossypium hirsutum
  Clone ID: LIB3145-024-Q1-K1-E6
aaagcaagtatcatctgtaagatgttattattggcaagatatatttacttctagtgaggaggaagattaagaatatggatctggagatacggtgtatagagtcaacaggatcaggtgcaatttcccatgtagagactgagacactagctaaatatgagttgatggatggtgctccagtcagaggagaatcaaattcaatcagg

SEQ ID NO: 15539 - DNA, 135 bp, Gossypium hirsutum
  Clone ID: LIB3145-024-Q1-K1-E7
ctcatcgacggaccggtttccaagtcctctttaaaggggcgccggtaagggtgtgagccctgtgatgctttttaccttgttctgtccaagaggcacattttacttgtcgaattgtttttaaatgcatacataatt

SEQ ID NO: 15540 - DNA, 201 bp, Gossypium hirsutum
  Clone ID: LIB3145-024-Q1-K1-E8
cccacgcgtccggtgatgtacttggttcaattagccagcacgaaaggctagaagacgaattgcctggcaaaagaaggctgtgaggatctttccaaggccaactgctggaccccttctccctattgtccatggccagactttgaagtataacatgaagttgagagctggaaagggtttctccctcgatttgcttaaggctgt

SEQ ID NO: 15541 - DNA, 456 bp, Gossypium hirsutum
  Clone ID: LIB3145-024-Q1-K1-E9
gatttttatagtacataatcctgggtccttgggttacggagaccatatactcaattatggggaaggatccaaaggaatgggacctgaccaacttttcggtaatcccattcatgttatggagaatgttgcacaaccagctatggattagcctttctcgttatcgaactgccaaaggcactaacaggattgtggacaagggtatcgaatttgaccaagtcgacagggaaaggaactgggatgatcaaatattgttcaatggaatcctgtttttcttggctaacaaatacgttcccggggcttcacacttacccctatggagaacagatggtgtgattataaccatgttgctccatgtcggtcctgtggagttcctttactactggcttcatagagctctgcaccatcattatctttactctcgttaccattctcatcaccattcctccattgtcactg

SEQ ID NO: 15542 - DNA, 274 bp, Gossypium hirsutum
  Clone ID: LIB3145-024-Q1-K1-F1
cgaagagattggtgaggataagagagaagatagcataggcaatcaagatgaaacgaacaagggagaagagcctgcacagattgtactcaaagttgacatgaactgtgaagcttgtgccagaaaggttgcaagagccctcaaaggatttcaaggagtggaggacgttgccacagatagcatggcaaataaagtagtggtgaatggtaagtctgttgaccccatcaaggtttgtgaaaggctacgaaagaagagtggaagaattgtggaattaatt

SEQ ID NO: 15543 - DNA, 455 bp, Gossypium hirsutum
  Clone ID: LIB3145-024-Q1-K1-F10
ccctctcgtcctaaaatttaaaattaaaattttaaaaaacaaaaaaaaaaaaaaaaagaaaaagaaaaatttaaaaaataaaaatgctccccaaccttcctttctcctttcttaacaacccctttcatctttttataattttcccttatttttatttcactctaaccttcatttctccactctcttttctttacaacaaaccttttcttttccccaccctctactttcacctacttttattttccctcttttacctcatcttttcttattatctaaatactcctcttccttttctcctttctcataattccctctccttcattttttcttccatcttcctcttttttaccctctttctcctcctctttattttttcctctcacctttctctttccttttacccctcctattacctgttttcttttcttttttccttttctttttccccttttttt

SEQ ID NO: 15544 - DNA, 440 bp, Gossypium hirsutum
  unsure (1)..(440): unsure at all n locations; Clone ID: LIB3145-024-Q1-K1-F11
ccgggccaggagattgattcttttgaaacggacctagttgccagactggcttatttcatccgctatgattggcaggggagcggtcacactaatacttatgctggagatgatgcttcccactctaatgaatcatcaagtgaacgtagattagcagtaatagggacagtaacattttctggcacaccatgttatggaattgaggaaagtgtggaaccagcaagtgtatctattggattctcaacagtagagagtgtgacggatgtgattgagatgcaagctgtgggtgcgggagctgttgaaagaagagttagatntgcgattgatgatgatgactctgaatctgatgggcaaaccaaaatgtatgttcagttggaaaaagaactgatggacctgatgacagcccaagaagcaaggactgcattcatactatgacacacaca

SEQ ID NO: 15545 - DNA, 235 bp, Gossypium hirsutum
  Clone ID: LIB3145-024-Q1-K1-F2
gtgaccgcaagatctccgtcaagacaaactgtcgaaggcccaagggtattgactctcgtgtgaggaggaagttcaagggatgcactttgatgcccaacatcggttatggctcagacaagaagactcggcactatcttcccaacgggtttaagaaattcgtcgtgcacaatgtccaagagctagtacttctcatgatgcacatcaggacatactgtgctgagtttgcacatgatgt

SEQ ID NO: 15546 - DNA, 186 bp, Gossypium hirsutum
  Clone ID: LIB3145-024-Q1-K1-F3
cccacgcgtccgctcccttttagcatatagacaatatcaaatacagcaatggcttccagtgggcagggtcatgtggatttcgagctcaagtcttctgcagtaaaagtgtggggaactcattgggactccaccatgatttacccttaagcctagccccatgattacatgagcattcatgttctagaa

SEQ ID NO: 15547 - DNA, 228 bp, Gossypium hirsutum
  unsure (1)..(228): unsure at all n locations; Clone ID: LIB3145-024-Q1-K1-F4
gcacttcggacggttcgtttttggctnccatttaactcttngaagcaaacattttagctgggttgtgtgtaattttatcagcttctttagctgaagttttgaatggttaacctgaatttactgttcatattacacataaattgaagcatcatcctggacaaattgaagcagcttctttaatggaacatatacttgttggtagctctattgttaaagctgtttaaaaat

SEQ ID NO: 15548 - DNA, 301 bp, Gossypium hirsutum
  Clone ID: LIB3145-024-Q1-K1-F6
aaaacccgggccgacccacgcgtacgggcgctacattttgtgaactccttttcttatcactccaaacttgaaaatcatcaggaggggcttcattcagcgggatactgagaatcatctaggctacattctacggaaaggtatactctatcaactcctgtatccatgttctactgttagaatcaatatattccgtaactaaactataaaattctttttcaaaaaaaaaaaaaattaaaaaattatatataaattaattactatattataaaataaatatatttaattaattaaaaacttattt

SEQ ID NO: 15549 - DNA, 151 bp, Gossypium hirsutum
  Clone ID: LIB3145-024-Q1-K1-F7
caaccccaagtttgatttaagttagtgagtttcttagtttccctagaagttaagcggtgctgatattaagaggatggagtgccaactcgagatcaagtcctcagctgataagttctttgatgcctacaagtccaaagccctacttatgcca

SEQ ID NO: 15550 - DNA, 264 bp, Gossypium hirsutum
  Clone ID: LIB3145-024-Q1-K1-F8
cccacgcgtccgtccacttcgtccgctcacgtttccggaagaaaataaacaaatttctctttttattaaaaggaaagaaggaggaggaggaaatggatggaaaaagaatcgagggcaatgaagtatatgctctagcaatgtgtgtaagtattctcctctttgctccgattgttgtgttacatccaataccggctgataaatcccaagtggaagctttggtttaatggcattatcaagccggtgaaggataaggggttcaacctt

SEQ ID NO: 15551 - DNA, 458 bp, Gossypium hirsutum
  Clone ID: LIB3145-024-Q1-K1-F9
gaaatactgtaccattttcaggatgtgttctacttgctgccaaacctaaacgtaaatgaccgtaatcaaggcttttgcagtaaaaaccaatgatatgatgttggttatatatctgtcatctctcatccgaagtgtcattgcgctccataatttgatcaataacaagatgttaaacaaagaacatgagaaggctgaagatgctaagccaacaactgtccaggctacgagttgaatccgaacataaagtcctaatcatgtcaaaaacttgagcatagggtgctattaacttccataggatcctctattcttgagattttgtattcttcatagctcaatcagaagatatcagtaggcttaaaaaatttgagagtttttctctttgttttccatacactatagactgtattaatgaagtgcatctccattaagcatcatgttatgctgaattaatcatttga

SEQ ID NO: 15552 - DNA, 402 bp, Gossypium hirsutum
  Clone ID: LIB3145-024-Q1-K1-G12
caaaaactgtgttgtgttaagagaatggttgtggaggcagaaattgatcggttgccaatagacttgttggctcatatactggtgatgatcacttctttcaccgatttagcccaggcaagtggggtttgtaggaaatggaaacaaggggtgaaacaggctctggctagaagacacaccctgagttttgctggttgtaaaatggacgatgactccacttctcgtcttgttcgtcatgcttatagcctcgaagaactcgacatttcaaggagtcgttggggttgccaaataactgacaatggactataccaaatctcattagcaaagtgtgttagcaacttgacatcagtttccctttggggtatgacagggatcactgataaaggtgttgttcaattgataacc

SEQ ID NO: 15553 - DNA, 75 bp, Gossypium hirsutum
  Clone ID: LIB3145-024-Q1-K1-G2
aaccacagacttagtaaacggtatgtcgcacgtggcctatatgagttgaggccggaggtgcagttcggggatttt

SEQ ID NO: 15554 - DNA, 475 bp, Gossypium hirsutum
  Clone ID: LIB3145-024-Q1-K1-G3
ctgtaacaattctgggctttgaactgtaaatggacattaattattgggttttattattattgttgggtttattttggtttcaaaagggccggtcaaattgtcctgtttacaatattaattttatgttgtttggtaaaataataaaatttaaatttatttttttattaatatttatatttattattttattatatatttaattttattaaattttataatttatttattttcttatcttttcttttttaattttatttattttatataattttttatttttattttttatttttattatttaatattttctataatattttatttatatatttattttttttttttttatatattattttattattattctctctttttttatatttataattatttttatttttttaatttaaattctttcattttattatatttttctattattatttattatttttttatatttaatattatt

SEQ ID NO: 15555 - DNA, 187 bp, Gossypium hirsutum
  Clone ID: LIB3145-024-Q1-K1-G4
gcttcttgattacgatttttatgctcgaatttctgatttaggtctagcatgattgatggggtctcgggtttcgaatgacagttcttttatgaatggggatttaggggagtatgtatttgaggctcctgagtattctagttccatggatgcattcttgaaaggggattgttatagttttgttgttttg

SEQ ID NO: 15556 - DNA, 175 bp, Gossypium hirsutum
  Clone ID: LIB3145-024-Q1-K1-G5
atctggtttatcccaatttcttaatcacagtcatggcaagtgggttatcagtgatgtttatcaaggcagtttccccaatggggctgaggtttgttcttttagaccgtcgtcttttttaactgtaagatcctggcatgagttatccaatttgtcaaccatatttttattgagttag

SEQ ID NO: 15557 - DNA, 118 bp, Gossypium hirsutum
  Clone ID: LIB3145-024-Q1-K1-G6
caaaatcagttgcttcacaatggcctctacatccatggctctttcttccccatcattcgccggtaaggcagtgaagttctccccttccacccctgaaatccggggtactgtacgtgtt

SEQ ID NO: 15558 - DNA, 423 bp, Gossypium hirsutum
  Clone ID: LIB3145-024-Q1-K1-G8
ctgaagggcaccaccatgtagtggagcctgctttttaatttgacccaacacggggggctctgggagcttctataagactctttgaacgcgtatatgctcatgtggacgagagtgcatgagttattggtcttcgcgaggtcaaggggcaacgtaaacttattggtatgccactttatattctattggatgcccgtgtgattgatggttgttttttagaagttatgtgatgcatgttcatcctttggtggttaatttttttatgtccaatttcttttttgttatttagttagaatttgattttatttgttttaattttttatttttaatatttaagttttctatacttttatttaattttaaactttttatttttattaatattctattattattattctataatatatttttaatttatcatta

SEQ ID NO: 15559 - DNA, 396 bp, Gossypium hirsutum
  Clone ID: LIB3145-024-Q1-K1-G9
cgggtccgaccgcacgcgtccgcccacgccgtccgagaaatgcagtcttccgaatcttttacgactcgtaaaatagttgaattgggtcatggcttccgccgttgcttccgttgcgaagaataaaactgcattcgacttcccggaagagccaaagaaggtattgcatgaataagtagaggatctagaaacaccctaccttttgtttctgcaaattcaatttgtataattcagttagtctttagggctttacaccttaatgataggagcagagcagataacatatgatgttgtactgttttcatacaacggcccgtatgtatagacacttcttgacttaaatatataaaagtagcagttcatatctcaattattaaaaaaaaaaaaaaattaataaaa

SEQ ID NO: 15560 - DNA, 222 bp, Gossypium hirsutum
  Clone ID: LIB3145-024-Q1-K1-H1
caaataataacaatcacctgcggatccccattcgccagttattaaacgcaggtctcattcagttccggtgcgtttaataatccctttatacgccatggacatgaagaaggtctccaccgccatcattgttgctgccgcctcaatgtgcgccttcaaggcctgagatgcacctgctgcttcccctaccgcaggtggtactagccctagcttctctcccgtatt

SEQ ID NO: 15561 - DNA, 405 bp, Gossypium hirsutum
  Clone ID: LIB3145-024-Q1-K1-H12
cgcttagaaagagggttttagctgtggtttttagaaacagtaaagatggctggggacagaggtgaggatgactatgactatgttttcaaggtggttttgatcggtgattccggtgtcggaaagtcaaatctgctctcgaggttcaccaggaacgagtttagcctcgagtccaagtccactattggtgttgagttcgctacacgtagcttgaatgttgatggaaaggtcatcaaggctcagatttgggacactgctggtcaagaaaggtatcgtgccataacaagtgcctattatcgaggagctgttggtgcacttcttgtgtatgatgttacacgacactccacattcgaaaatgtcgagaggtggttaaaaagttgaggatcacacagatcccacattgtagtc

SEQ ID NO: 15562 - DNA, 173 bp, Gossypium hirsutum
  Clone ID: LIB3145-024-Q1-K1-H2
cccacgcgtccgatttgaaactgctggcgtacctatcatagtctgcaaacatgtgtatgggggtagcgaatttgttaggatcatttgttgcaatgattttgatggatagactggcaaggaaggtacatctcattggtagctctacaggcagggtagtggcactgtatctacag

SEQ ID NO: 15563 - DNA, 247 bp, Gossypium hirsutum
  unsure (1)..(247): unsure at all n locations; Clone ID: LIB3145-024-Q1-K1-H3
ggaattangggccgacccacgcgtacgcccacgcatccttacctactatggtggagatcctgtaccatttgaatgaaactaaaaaaaagtgatgctttaaaatcccatcaaagtggtcggtaacttagttcacaattctctcttcatcatcgattacaataacaatgttacaacatggttcatcggtttgggtatattgtatcccgtttgaaatgtctacatttttttttgtgttgctttatttgtt

SEQ ID NO: 15564 - DNA, 411 bp, Gossypium hirsutum
  Clone ID: LIB3145-024-Q1-K1-H5
tcgcccactcgtccgtaaagatctgttctttttttctgaaactcccaaggagcctgccgggggtgtatcatatgaacttgagccaaaccgaacctctactgatgaaaatagatctctacttttttatgcttattgtctatccttcttttgaaagtaatatagaaaccccttgaattttagtttttgtactacattcaatttattaattttatgtatttagtaattaatattaattatgtatttttataaatattaatttattaaatcatataccattttttaatttattatttttatttaatgataatatttaatatattcattttattaattataactttatatcttttaaattacatttttattattttgtttaatttattaatacattaattataatttattatatat

SEQ ID NO: 15565 - DNA, 382 bp, Gossypium hirsutum
  Clone ID: LIB3145-024-Q1-K1-H6
ataacagttcttgaatctttatttatgtcgcattcatgaaaacccaataggattcctaaccttactgcttgttctcctgcatgtgcttccgccgcaaacggtgaggcaacattttcatgaatgaccgattttgagaccaaaatatccccttgcatgtttctaactagcaaccctgatgcggatttgatgagttgttgatcgaatgccctatttaaagatatgactaccctcgttcgtcgttcttcatgtattagccaatgcctgtagtcaaaattgtctgtacagacttgccgtcttttgtgtccttctgactttaattagttaacttgcctttattatatgaattagtctagtttaaggtaatttttatccagtgtaattt

SEQ ID NO: 15566 - DNA, 149 bp, Gossypium hirsutum
  Clone ID: LIB3145-024-Q1-K1-H8
cgcagaagatgcaatcaatcttgaagactattatggagattactagcaatgctttagcggtgcttaatgggttatccaccatcgtgaaggaacttaacattccaaacgtcggcaacatcgacaccacggtggtcaatcgtatgcttatg

SEQ ID NO: 15567 - DNA, 383 bp, Gossypium hirsutum
  Clone ID: LIB3145-024-Q1-K1-H9
ctcccagatgaccacgtttacagttgagcattccaccatcatgcaccgcaaaattggttctgtcgtaatccccgcaggatctgtctccgcttttctcatcatcagcattctcctcttcacttccctaaatgaaaaacttttcgttcccttggctcgaaaaatcacccataatcctcagggaatcactagcctccagaggattgggattggactagttttttcggtagctgctatggtaggggctgctattattgagaaagaaaggagggaaattgctgtagagaaagaagtcaaaataagtgctttttggctacttgttcagttcttccttgttggtgctggggaagcttttgcttatgttggacaacttgagttctttatta

SEQ ID NO: 15568 - DNA, 155 bp, Gossypium hirsutum
  unsure (1)..(155): unsure at all n locations; Clone ID: LIB3145-025-Q1-K1-A1
cccacgcgtncgccagattttgccatgctttgttgtttttgtatattcagcacatacttccgtattctatctgaggtctttttatttagagggtatatttatattgtttttgaaagcattaatcatctagaagtaaattggactgttttggattt

SEQ ID NO: 15569 - DNA, 362 bp, Gossypium hirsutum
  Clone ID: LIB3145-025-Q1-K1-A10
ctcagatcctgttttcatacttcctcttcactctttcacaactctacaaacagtaccctactgccctgcttttgctgttgttgcagaggaggagtaagaatagaggaacccaaaggcttttgtttgattaaattgaaagcatttccatttttttttctttgcgtgtagttttgagagtgggagggaaaaaaaatggagaggagcactccagttaggaagccacatacttctacagcagatctgctcacttggtctgagactcctcagccggacaccgacacctacgccgctcgcttcgtccgacctcaccagccgtcggatgggatcagaaaagtggtgtttggaggccaagtaactgatga

SEQ ID NO: 15570 - DNA, 425 bp, Gossypium hirsutum
  Clone ID: LIB3145-025-Q1-K1-A11
ctctctcctttggtttctccttttgtctctttctctctttttccaaccctaaccctacctgaccaaccaggattcaacatgaagggaggaaaatccaagtcagatactaagagtgccaagctatccgtgaaatccaaagctggaaagaaatcggggaaggctgccaaggatccaaacaagccaaagaggcctgctagtgccttctttgttttcatggaggagttccgtgagcaatacaagaaggatcaccctaaaaacaaattcgttgcggctgtcggcaaagctggtggagataaatggaagagcttgtctgaagctgaaaaggcaccttatgtagctaaggcagaaaagcggaaggttgagtatgaaaagaacatgaaagcctacaataagagacaggctgagggtcccaaaaacgaagatgt

SEQ ID NO: 15571 - DNA, 355 bp, Gossypium hirsutum
  Clone ID: LIB3145-025-Q1-K1-A12
ttcaaactggctatttaaatgtattttcaaccaaatagccattcgaaatggcgaattctaagacggctaattctactgtgtcattttgaaatctcatatcaaggggtgaagctaagatagtttcttaggggctaaatgaagagctaaatgaaatataatctatatatttatcaatattaaagaattaaatcatatttttataattataaagaggcaatgtgcgatgcttataactagaccctgctcgagacttaaattggcctttgcccaaatcatcatatcagatgactatttggttgacattatggatgaattcaaaaacctattcaaaggcttatattttacttaataattt

SEQ ID NO: 15572 - DNA, 344 bp, Gossypium hirsutum
  Clone ID: LIB3145-025-Q1-K1-A2
cgcacgcgtacgttcatttctacattgcttaggccccgtaactggaaagctacggtaaataggaggttattcttggattcttatgaagtgggggagctctgctatgctgccgaacagctatttatgcaagaacccaccgtacttcaattgaaagctccggtcaaagtatttggtgatcttcatggacagcttggtgatttaatgcggctatttgacgagtatggatttccttcaaccgcaagagatattacgtacatcgattatctgagtctaggagattatggcgatcgaggacagcacagcttggagacaattacattgctccttgctcttaagattgagta

SEQ ID NO: 15573 - DNA, 285 bp, Gossypium hirsutum
  Clone ID: LIB3145-025-Q1-K1-A3
cccacgcgtccgtccatttgtacattgcttatgaattgtatctaggatgcgacgatgattcggaggatctaatacaattctgatgaaaggcgatagctcttttttgctgccagactccttattatgccagaaccgaccttacgtgcgttcaaatctatgagatacttatgggttgactggaatggacaatttcttgctctaaaaccctgatgtctcaacaatagaagcacgtccaccacatgaaaaagaatctacattgatgaacaaaatctaggagatgatgtt

SEQ ID NO: 15574 - DNA, 431 bp, Gossypium hirsutum
  unsure (1)..(431): unsure at all n locations; Clone ID: LIB3145-025-Q1-K1-A4
cggacgcgtgggcgatcctgatcctaccggattcggtgctggcataggtataggttatgaaagaagcccttactgtatcgactgcgacgatgtggatatcatgggcggcagcttttgcggcacctgcaattacggatgcccttaccgcaggttcaataatgggtgtggtggtggtatcgcttatatggatgaactcaaacgaacgattaaggaccttaccatgaaacttgatgccaatggtcttttagggaaaaagaaggccatgaatatacaagctatggcgccagaatcttcatagatntatatatagattatagaaactacggattctatacaaagagaaagaaaataaaggaataaccagccgcttgatatatgatngaantacaatgtgctagctgntttttttatctttaaatatatatgaataa

SEQ ID NO: 15575 - DNA, 353 bp, Gossypium hirsutum
  Clone ID: LIB3145-025-Q1-K1-A5
tgacagaatgaactttgctgaaatcgagaaaggaataaacatccttgctaagaaggcaaatgatgggtctttatcaattgatgagatggctgggggctcattcacaatatccaatggtggagtttatggaagcctcttaagtactccaattattaatccccctcagtcggctattctgggaatgcactccatagttagccgtccaatggttgtcagtggagaagttgttccaaggccaatgatgtacattgcactgacatatgaccatcgactgattgatggaagggaagcagtattcttcttgcgtcgcattaaagatgtcgtggaggatccacggagactgctgcttgatg

SEQ ID NO: 15576 - DNA, 428 bp, Gossypium hirsutum
  unsure (1)..(428): unsure at all n locations; Clone ID: LIB3145-025-Q1-K1-A6
cccacgcgtccggaagaaggtcgaaacgaaggaaatttaatggaaagcctttcatctctctattctgataatcaaaacaagcaatctaaagctaatgcttcaccaatgtccgcaactgcgcttttgcaaaaagcggctcaaatgggttcaactagaagcaatccgtccttctttggcaacagtttcggtgtaatgagctcatcttcctctcacacagcacctactttcatggcatcaagcagtgcatcaatgagtgcaacaagcaacaagcttgataagctcatgttacaaacaggaggcaaaccaagtgagcccagtctattaagcatgcatcacccttgttcaaattcattcgctcaaagcttgacgagggacttncttgngatgagcaatgatcaatcaccacgtncatttttaccccaagaact

SEQ ID NO: 15577 - DNA, 369 bp, Gossypium hirsutum
  Clone ID: LIB3145-025-Q1-K1-A7
attcccactctctctccccatcttgaatccaaacaaattaaaagtaaaacacctctttcattctcatatctttaattgtttgaccagatggctcttctaattaacgaagtcgactcccttactaaccagatcttctccatccttgaaaacaaatttcttttcggtgatcacgagaataatgctgctgcaaaaacccatgaagaagatcacttgaaatctggaaatcagatttccgggaaagtaagaatcctatccattgacagtgggagcttttccgatggtatattggccgcccaatccctccttaccctccagacttttctccgtcaaaagtcggggaatcccaatgctgtcattgcccagtatttc

SEQ ID NO: 15578 - DNA, 397 bp, Gossypium hirsutum
  unsure (1)..(397): unsure at all n locations; Clone ID: LIB3145-025-Q1-K1-A8
gaaacggttggtgttgtcactgcaaagacgagtgaaattggccagaagacttggggcatgatgaaaggagtcatggcaatagcttcacagaaggttgaggaatacactaaagatggcatgaactggaaaaatgatggtaactggcaacgaaacgatagcgagaagaatggatattatcaggagtttaaacaggagaataagggatggaattctacttctggtggacaaacctcctctggtgtaaattataattcttataactcaaattcttgggatgattgggacacaaaagacaataggaaggaacatactacaaaagtgactgcttctcatagcaatgatggttgggcttgttgggatgaccccaaggatgatggatatgatnagttctataatg

SEQ ID NO: 15579 - DNA, 437 bp, Gossypium hirsutum
  Clone ID: LIB3145-025-Q1-K1-A9
agcgtggtaacaggtcgaagggtatgaagaagtacactgctatcgataaatggaacacacaactgaggtccctttatcaaaccgttaacaacagggtttattgagaaagcaaaaatgctatatgatataatccctttggctaaggtactcccctttctttttggggctacaagaatatgcttgctttcttgtgttaggtgactttagataatctagattcgaaagtttatgttttgttttggttagtcaaagttttattcttattcaatgacagaaaaaagaaaacccgatatatttgcctgtttgcaagaattttgattccgggttgacgcttgtatatgaagtgatgatgttgtgtagatctgacatgaaaaaagtgatactagcactataaatatatgatggaatcaaaatctacggtaaaaaaaaaaaaataa

SEQ ID NO: 15580 - DNA, 368 bp, Gossypium hirsutum
  unsure (1)..(368): unsure at all n locations; Clone ID: LIB3145-025-Q1-K1-B1
ttaaaaaaagatggcattggtggtaatttgtgggcagccgtgcagtgggaagtcgacagctgcgaaatgtctagctgaagctctgaatgaatcagagtgcaaacagactgtaaggatcatcgatgagacttcatttcatcttgatcgtaatcagagctatgctaatatgccatcagagaagaatttacggggagtgcttaggtccgaagttgataggtctgtctccaaagataatatcattatagttgattctttgaacagtatcaagggttatcgatacgagttgtggtgtttggctcgtgctgctgggataaggtactgtgtgttgtactgtgatgttggagaatcgcactgtangaaaatggatg

SEQ ID NO: 15581 - DNA, 410 bp, Gossypium hirsutum
  Clone ID: LIB3145-025-Q1-K1-B10
cccacgcgtccgaaaaactaagagtgatggtgaagagatatcgagttcgaacaaagctgtgcaagctctatgtcaacccacaaattataaagagacgtgccaaaaaagcttggcgtcgtcaaattctagcgacgttaaggagctgataaggacaggtttccaagccgggctagttgagataaaaaacgtgttggcccattcagtaacagtccaagagttgattaaggatgagaacaacaaagcggcacttggtgtttgccaagaggtgttggacttagccattgatgactttcaaaagtcattcgacatgctaggggaatacgaaatgagcaagatcggaaaataccttttggaactaaagacctggctaagcggtgcattcacgagtcaacagacatgtatagactcat

SEQ ID NO: 15582 - DNA, 262 bp, Gossypium hirsutum
  Clone ID: LIB3145-025-Q1-K1-B11
cccacgcgtccggtcgaagattcgtgcgatgaatcccgacgcgccttcccttctagatcgcatgcttcggctcctcgcttgccatggtttagttacttgtgtttcgtgaaagctcgatgccggtgcggatgatggaaaagatggtgagagagtgtatgagattactttggctggtaaagcttttgttaatgacgaacataatggatctttggctgtttttactagcgacaaggctaacattgaagtctgataagttgagttc

SEQ ID NO: 15583 - DNA, 336 bp, Gossypium hirsutum
  Clone ID: LIB3145-025-Q1-K1-B12
ctcaaggttgctaaaagaaagttgggaactcacaaaagggcaaagaagaagcgtgaggagatgtctagtgtgctccgcaagatgagggctcaccctggaggtggagaaaagaagaagtgaagctctctggtgacaagtcaccttgatgatttcattagagaactttgtttagcatatgttttaacgtattggtttgagactgaaaactatgcactgaatctcgtttgtttaattttataatgtatgctaaatttttgtgtttagttgcatgtccttgacatgttgggtattgccttgttttcttagccgtatggatttggaagttcatcattgagt

SEQ ID NO: 15584 - DNA, 319 bp, Gossypium hirsutum
  unsure (1)..(319): unsure at all n locations; Clone ID: LIB3145-025-Q1-K1-B2
cccacgcgtccgcccacgcgtccgcccacgcgtccgcccacgcgtccgatcaagatcaaatttccattatttttgttgtcatatgcattgaaggtgaagtaaaaatatcttcagctctcatacaacatgtactctgttggggaactaaatttggtaaaagtgatgttggtatcaatgggttaatgcccttaacattacaggtttgatatttattaattcaatcgatggggaaaattacaccntnnnaaaaaaaataaaaaaaaaaaaaaaaaaaaaaaaaaaaaaaaaaaaaaataaaataaaaatattaaaataaaat

SEQ ID NO: 15585 - DNA, 338 bp, Gossypium hirsutum
  unsure (1)..(338): unsure at all n locations; Clone ID: LIB3145-025-Q1-K1-B3
tgtacatcagaatttgagttctctttaaaggaaatgatgttcatatcagcatccgatggcaaagattacaggttgagcagtttttctgaaaatgttgaggttcactttgcatttaggaagaaaacagaaatcttgggaaaagctagaaattcactccttcaatgtgatttctctcttcctcaagattacacttccaaaggccctttactgaagaacgatggaatggctataaattcttccaaccaagttgttgatttgattttttcatctgagaggtgtgtggtatcaaaagcagccttccaactgatggagctcgtgcatcaaacacttcangatgt

SEQ ID NO: 15586 - DNA, 334 bp, Gossypium hirsutum
  Clone ID: LIB3145-025-Q1-K1-B4
aaatttgatcacctctccccaccctccatccacgttctctttcaaggagtcctctcgcagcccaaatgctcttccagataaatgaaggtttaggaaggagcagcttggatggaagcaatggaggatccaacagctttggagtaagaagacaacagcagcagctgacccagcaagagatggagcaatactatcaacttaagattcaggagatccagttgaaggaaaccatcagaaagaagaaagaggagctcatcctcatggagcaggagttgacaagcgtcagcaacaggatcaagaagatgaatactggacttgacccagtagaagaagcaaa

SEQ ID NO: 15587 - DNA, 363 bp, Gossypium hirsutum
  Clone ID: LIB3145-025-Q1-K1-B5
gtcctcagtgctgttcgaatccaccaacattggattctgcaagtggagctggtcacgttgagaatcttgctggtctcaacacttatgtttctgggtctcttcaatctaagcttgctgtttttcttatctctgatattttcggatatgaggctccaaactttagaaaactcgcggacaaggttgcagcctctgggttctatgtggtggctcctgacttcttttatggagaaccctatgaccctaataaccctgatagacctttatctgtttggataaaggatcatggaccggataaaggttatgaggatgcaaagctcgtaattgacgctttgaaaaagtaaggagtttcatccattggagctg

SEQ ID NO: 15588 - DNA, 379 bp, Gossypium hirsutum
  Clone ID: LIB3145-025-Q1-K1-B6
cccacgcgtccgcccacgcgtccgtgttgaccatcttaacgaggaagtattacatccattacttcaggatcttgttaaaactccattttttcggtatttcaaggttaaattgtggtgtaactgtccattttggcctgatgatggtatgtgccgtttgcgggattgtagtgtttgtgaatgtccagaaaatgaattccctgaattatttaagaagccctaccatcatggccttccatcagatgaccttaagtgccaagaaggaaagccgcaggctgctgttgaccgcacactagatagtaaggcttttagggggtggacagaaacagataacccctggacatatgatgatgagactgataattctgagatgacatatgtg

SEQ ID NO: 15589 - DNA, 370 bp, Gossypium hirsutum
  Clone ID: LIB3145-025-Q1-K1-B7
cctttttcaggtcaaaatggggatgtcaggtctccgaagagacaatgcactgactacaggagtgtattggttgaacggaattcttttacatcaccagcgaaggaccgtctattagctttcagcgaccttcggaaggctcctttgcaatctgtgtttgccagtccaacacgccctaaccctgttggtggaggagaaacatgtgccgaaacaggaattaatatattctttagtaagattaataagttggctgctgtctggattaatggtatggttgagaggctacaactgtctcaagagattagggagagtgtatattttctttttcaacaaatacttagccagcggacttctctgttttttaaccatcata

SEQ ID NO: 15590 - DNA, 354 bp, Gossypium hirsutum
  Clone ID: LIB3145-025-Q1-K1-B8
taaaaagaaaaaaagagagatggcgtctgtaataaaatctgcaatcttaattctgtcggtgtttttatctgtacgcttcagttcgggtgttaggttgctccaggaacagcccaatgatgaccccaaaaacatggacgctattcctcccattgatgcactcaaccctaccgagttgaatggacccggtgttggcattcacgaagatcatgttgtcccaaaaggtgctgaaattggtactcttggttttggttttgaaggtggtcctgataaatgttgttcttctggatgttccggtaattgtaatcctggtggtttcgttctaccatttcctcaaattccagaaatcccaagaat

SEQ ID NO: 15591 - DNA, 428 bp, Gossypium hirsutum
  Clone ID: LIB3145-025-Q1-K1-B9
cccacgcgtccgggtggatatagtgaagatatgatcccaacggtgagtcatcttgtctaagaggatctgtatttgcatcttcacttttttttttcttctttttaaatttgtgaattggtatgatattactttccaaggctttttttttttctgtcatagaagtaaggtaattaaggcctactggcttacattcaggttggattcaacatgaggaaagtgactaaaggaaacgttacaataaagttatgggatcttggaggtcagcctaggtttcgcagtatgtgggaacgatattgccgttcagtttctgcaattgtgtaagaactaagaagcttcttctttattttcagacttgttattttcagtaactcccttctaattgctttaacaattttagggcctgaaaaagtttgccttttatgcaagaa

SEQ ID NO: 15592 - DNA, 364 bp, Gossypium hirsutum
  Clone ID: LIB3145-025-Q1-K1-C10
cccacgcgtccgggaaaaggattttctgtaggaagatactgctataagtcaacttgttggatttgtttaactgattggatgcatctaatgttcaccagttttgaaactcttttgtttggatcaggttcgattagaggcgtcaacaggaagcagaattgaaactgatagaagaagagactgctaagagggtggaagaagcaattcagaagaaggttgaagagagattgaactcagaagaaatcaagcaggaaattcagaagcgactagaggaaggacggagaagacttaatgatgaagttgctgcacaacttgagaaagaaaaagaagctgctattcttgaagccaggcaaaaagaggaggtagc

SEQ ID NO: 15593 - DNA, 262 bp, Gossypium hirsutum
  Clone ID: LIB3145-025-Q1-K1-C11
gactggcaccatcaaaattcgtactgaattaaatcctcaagtttaacgtcgcggtgggggactgttataaagcattccaatcaatactagaacgaaagtgtctaccatgactaaggctgaggacgtcattgcttaacaaacggactgatgctcgaaaaaaagcttttctttgaaaagcagtgaagaacgaccctcgttttggtaacaatttgttaaaagctgagaagtgcttttgggcagacggagaagtaaaaatttttag

SEQ ID NO: 15594 - DNA, 395 bp, Gossypium hirsutum
  Clone ID: LIB3145-025-Q1-K1-C12
aaggaaaggtggtgattgccactgacaatctcataaaactgtcaaccgacggaataacatggaaccctggctccgccggatttgattcacatgggaaccttgcattcatgatctgtgatcctatgaagctagctacctctcctaataccaagtcatctgggacttcttcttcatcctcatcgtcatggaagaaagatacacctatgcagttcggtattcccatacccgtcatttgcgattggttaaaccaacattgggaaggaagtcttgatgaagttaccaaacccaagctaccaattattagattgatgtcttcaagccagaagagtgagcattcttctgcatcctttacaatgcgccaagttttcaaagtaacaagaagacgatatgacata

SEQ ID NO: 15595 - DNA, 357 bp, Gossypium hirsutum
  Clone ID: LIB3145-025-Q1-K1-C2
ggaaaaacccgccgccgacggcgggaaaagagattccgcagagtaaaaaggatagagctaagctagatgggatgtatgagtgtattttgtgtgcttgttgtagcactagctgtcccagctattggtggaatcccgagtcttatctaggtcctgctgctttgctccatgcaaacagatggataagcgacagccgtgatgaatacacaaaggagagattggaggccataaatgatgagtttaagctgtatcgttgccatacaatattgaactgtgctcgtgcttgtccaaaggggctgaacccgggaaagcagatcgcacacatcaagcatcttgagcttactgcttgaagtcttaatc

SEQ ID NO: 15596 - DNA, 347 bp, Gossypium hirsutum
  Clone ID: LIB3145-025-Q1-K1-C3
atataataccctgtcagatcagaagagtacttacattaaagctagaaggtgactgtcttgtcatgctatttctgcttttgcatatgcaaacttattaattgcatttattgtccatatctgatctttaatattaacttctatacatacaaggactacactgcatttagcattttccctctgctttactatctttaaaagttttggagggtgctgaagattggaagcaggttatagcacacattcaacagcttgtttttgatacaatttcggcatgctgtctgactctgttttgaggagttaatggccttggatgctgctgcattgctggttcagatactgggagctac

SEQ ID NO: 15597 - DNA, 350 bp, Gossypium hirsutum
  Clone ID: LIB3145-025-Q1-K1-C4
ggagctccatatcatccatgcagcacaacaaaaaagctgacacagttgactgttgcctatggtaaaaacccatggcactgtctaaacacatggttgctatcttcttctacacttcgacaccggggacatgagctatctaaagccactcttcttagtcttaaattctttagggtagggataaagttccatgaaagactccaaatagtgatggcaattttgaaggaaggcgtagactccataatttcctatagaaattttttgtttcgatctgtactaaataagcattaggatctgtagttgcctattgtaatagtttataggcacttctgactgtaaattggccagaatgt

SEQ ID NO: 15598 - DNA, 328 bp, Gossypium hirsutum
  Clone ID: LIB3145-025-Q1-K1-C5
attcaaatgagtttggtcatacatgtggctttcagaaacatgtggttcatccaatcctcgatcagaatttctttcttgatacaagtcacaaaaggaggctgaaggaggagtatgaaattgagccctggacatttgaacaacatgttggagaagccataataattccagctggctgtccataccagattagaaacgttaagtcctgtgttaatgtggttttggactttgtttcaccggaaaatgtgaccgagtgtatccggttgatcaatgaatttcgtctgcttccagacgatcataaagccaaagcaaaaaagtttgaggttgagaa

SEQ ID NO: 15599 - DNA, 306 bp, Gossypium hirsutum
  unsure (1)..(306): unsure at all n locations; Clone ID: LIB3145-025-Q1-K1-C6
cgagcgaaccgggaaaagcccagcttgagaatcggtcgccatcggcgtccgaattgtagtctggagaagcgtcctcagcgacggaccgggcccaagtcccctggaaaggggcgccggagagggtgagagccccgtcgtgcccggaccctgtcgcaccaagaggcgctgtctacgagtcgggttgtttgggaatgcagccctaatcgggcggtaaattccgtccaaggctaaatacgggcgagagaccgatagcgaacaagtaccgcgagggaaaatggattataagaatcaannnnnaaaannnaa

SEQ ID NO: 15600 - DNA, 395 bp, Gossypium hirsutum
  unsure (1)..(395): unsure at all n locations; Clone ID: LIB3145-025-Q1-K1-C7
ctttagaaagttctgactacattaaggatgattgcctaatcatgaactgcactgttggagtagtcagaactcgccttgagggaccaaaactgtcttctattcctgtaccgccatcagacatgggtcagaatcttagagctttgttagaatccgaagttgggtgtgatataatgtttcaagttggtgatgagacatttaaagcacataagttgatccttgctgcacgttcacctgtttttaaagcacagttttttgggctcgttggggaccctaacttggataaaatagtagtaaaagattttgagccttctatcttcaaggcaatgctcttgtttatttataccgacaagcttnctgatgtacaagaaattgtagactccacatctatgtgtaca

SEQ ID NO: 15601 - DNA, 341 bp, Gossypium hirsutum
  Clone ID: LIB3145-025-Q1-K1-C8
cccacgcgtccgaatggctccttcaactctcacagagcttgcagggaaggaaaccttacaggcaagctttgttcgtgatgaagatgagcgtcctaaggttgcttacaaccaattcagcgatgaaatccctgtgatctctcttgccggtatcaattatgtaggtgaaaagagggcggagatatgccagaaaatcgtcgaggcttgtgaaaattggggtatcttccaggtcgtggatcatggtgtcgacactaaactcatttctgagatgacccgtcttgccagagagttcttcgctttgcccgccgaaaataagcttcggttcgatatgtcttgtggcaaag

SEQ ID NO: 15602 - DNA, 402 bp, Gossypium hirsutum
  unsure (1)..(402): unsure at all n locations; Clone ID: LIB3145-025-Q1-K1-C9
cccacgcgtccgcccaaaaaacacccaattgaccaccatgtttaaattaatcaacatcctaaccatccttgtgctacttacatttagttcggaaattgcagatgccgcacctccgtgccaggaggttatcgtgtcgattaccccttgcttgagcttcataaaaggccaacccgatccggcaccaggatgttgttcgggtgctaaagggcttgctaagcaagctaacaccaaactagataggcaaggaatatgcgagtgccttaaaggtgtattgccaaaaataggaccatatgaccctaaaagattccctctttattgcccaaaaatgtggtatcaatactttaatttcctccatttctgccactactgattgcaccaagtgtgaanaagtgagtgggggga

SEQ ID NO: 15603 - DNA, 336 bp, Gossypium hirsutum
  Clone ID: LIB3145-025-Q1-K1-D1
gtgaaagaaaatcgagagaaaaaaaatggggcttgaagaaaatctcaaatcaatgaacatcaacgaagaagagaacaagaaccctaaccctaacactaaagatgaagaagatggtgaacttgaagaaggggagatcgcaggtgaagaagatgatacgacgtcgtcttcgttaaagaaaggtgtcgtcgaacagcctcaccagttggagcattcatggaccttttggtttgataacgcttctgctaaatcaaaacaagctccttggggtagttctatgcgcgctatttacactttctccaccatcgaacaattctggagtctatacaataacataca

SEQ ID NO: 15604 - DNA, 366 bp, Gossypium hirsutum
  Clone ID: LIB3145-025-Q1-K1-D10
cccacgcgtccggtttttttatattttttatttttactttttttttttttgggggttggttttttttttttttgccaaagaaatggtaatatgatttcccggataaaagtttccaggttttgaaaattaagggaaccaaagggcaataggatccgcggggaaaggaaaaaaagtagtaaaaaaaaaaaaaaatagaggggggggggggtttaaagggggccaggttttgtgcccggggcagctaagctgaaaccttttataagggggctccaaaataaaaaaccagggaggtagtttaaaagggggggatggggaaaacccggggtataccaaaaaaaaaggcttggaaaaaaaatccccttttcc

SEQ ID NO: 15605 - DNA, 371 bp, Gossypium hirsutum
  Clone ID: LIB3145-025-Q1-K1-D11
tccaccccacctatcggttgcaggctaccgagcacctgaagtgcttgaaacccaaaaagttctttcaagtctgatgtgatagctttggagtgttgttgctagagtcaaccggcaaagcacctaatcaagcatcgtaggcgaagaagggattatcttcctcgtgggtccaatccgggttcgggaagaatggacggcaagttttcgacgtggaattgatgagatatcacagcatcgaagaggaaatggtgcaactattacaaatcgcgatgacttgtgtgtcaacggtgccagatcaaagaccctccatgcaagaagtggtacgcatgattgaagaaatgaatagagtggaaacagacgacggattacgacaa

SEQ ID NO: 15606 - DNA, 379 bp, Gossypium hirsutum
  Clone ID: LIB3145-025-Q1-K1-D12
tgcaaatgtcaaaattctccttgtattctgatgatcgtcagaagtctggtctggatgccatttctgatatatattcaatattacgagatgaagctgcaagggctaacaagatggacgtgagctatgcccatgcattgaattggatatctagaaagggatatagcgaagctcagttgaaagaatgtttagaggaatatgctgccttaaacgtgtggcagatacatccccacacttttgatatccgatttatagatgcttgaagttgctataaaatcacttggaagagtaagctgcatccatctgctgccaagttcgaaattaagagatagttgtccgctgtaccattttaagttagtagttagtatttgcagagttgagt

SEQ ID NO: 15607 - DNA, 374 bp, Gossypium hirsutum
  Clone ID: LIB3145-025-Q1-K1-D2
ccaatatatcatctaaacactttcgacattctctggcgttttctcaaaaaaaaaattctgacaaaattttttctttaattttcagctttcttccttttacattcttcgtaattccaatctatcatcacataaacaaagaaaaaaaaattctgggtttcttatcgaatctccaaatctttctctttcattgaagaaaaaaattgaaaaacatgtgtcctatgaggttcttggtggtgtttttctcggcgattttagctgggtatttcgcttggagaacggcggtgggttcatcggttgatgccgatgatggcgtttcttgagtttcaaggacaattgttgccaaaaatggacaagatttcagtttcaaaatgatg

SEQ ID NO: 15608 - DNA, 269 bp, Gossypium hirsutum
  unsure (1)..(269): unsure at all n locations; Clone ID: LIB3145-025-Q1-K1-D4
tcgcccacgcgtncgcccacgcgtncgaagaatccgaacacgagcacagagaagatgaagaagctcctgccgccgaggatgaagacactggagctcaagtcgcccctattgtcaagttagaggaagtcgctgtcagtacaggcgaggaaaatgaagatccgatcctcgatctgaagtcgaagctgtatcgatttgataaagaagggaatcaatggaaagagagaggtgctggtactgtgaagctgttgaagcacaaagagacaggaaaa

SEQ ID NO: 15609 - DNA, 316 bp, Gossypium hirsutum
  Clone ID: LIB3145-025-Q1-K1-D5
cccacgcgtccgatcaaaacaacacattgcaaagagaaagggaatattatcaaaagaacccaaccatggcatttgcaggaacaacccagaaatgtatggcttgtgacaaaactgtgtatttggtcgataaattaacagctgataacagggtttatcacaaggcttgttttaggtgccatcactgcaaaggtactttgaagcttggcaactacaattcctttgaaggagtcttgtattgcaggcctcattttgatcaacttttcaaaagaactggtagtcttgagaaaagttttgaaggtacaccaaagattgcaaa

SEQ ID NO: 15610 - DNA, 382 bp, Gossypium hirsutum
  Clone ID: LIB3145-025-Q1-K1-D6
ctcccttgacatttagcgttggcaacaccatgaaacgtatatcagttatagtctcttccatcatcatcttccacacgcctgtccagccaatcaatgctctaggagctgccatcgctatcctcggaaccttcttgtattctcaggcaaaagcgtgagaaaaaccaggggttcgagaattttgattcatcatacaacatagatgatgaaagacaaaatcggtctccgaaagaatttagcttagatgagttcttatagattactactgtcttttagaattgatgaatgctgggatttggacagataaagtctgtcatagtgtagatattttacaataatgatgattataaacaatgtcatataggaatggtattttttctcttca

SEQ ID NO: 15611 - DNA, 390 bp, Gossypium hirsutum
  Clone ID: LIB3145-025-Q1-K1-D7
cccacgcgtccgaatcgctcaagatttcaagactgatttgaggttccagagtagcgctgttgccgctcttcaagaagctgccgaggcttaccttgttggactgttcgaggataccaatctctgtgccattcacgctaagagggttacgatcatgcccaaggatattcaacttgctaggaggattagaggggagagagcttagagtttgattttcggctgggtaacgtctaaagctggagatctaagcttttcatcatttgtacgttttgctttctcagcaaatgttcatttaaattgatggaaaacagttggaagctttatgatttcgttggttaaaattgccttttgcttttttggtaactctttaatatcctttttttggggtatgtg

SEQ ID NO: 15612 - DNA, 385 bp, Gossypium hirsutum
  Clone ID: LIB3145-025-Q1-K1-D8
cgatggagaccggaccaaccggcggtggcctaggtggtgacgatctatcccaatcgtatcctgcgaccgctatatcgcggtggagcttcgaggtgtcgcggcggtaccagcacgttctggacaagactgtcccgcacattctgtaccgttggatagcatgtctggtgctggtgctgatctacgccgtacgcgtctactttgtgcagggtttctacatcatcacctacggcctcggcatctacttgctgaatctcctgatggggttcctttctcctcaagtggaccccgagatgcaggatggcccctcgctccccacccgcggatccgatgagtttcgccctttcgttcgccgactccccgagttcaaattctggtactctattac

SEQ ID NO: 15613 - DNA, 247 bp, Gossypium hirsutum
  unsure (1)..(247): unsure at all n locations; Clone ID: LIB3145-025-Q1-K1-D9
agtgctgctagtgctgctgaagaataattaccctgaagcatggtatttgccaatgcttgtgcttgtttaagcttcttaacagtgttgaatgttgctggtgggatttatatctattacaccatgttttttttactactcaagacactatatttaatgatttgatgatatttaaacgttnaaaaaaaaaaaacaaataaaaaaaaaaaaaaaaaaaaataataaaaaaaaaaaaaaaaaataaactaaa

SEQ ID NO: 15614 - DNA, 378 bp, Gossypium hirsutum
  unsure (1)..(378): unsure at all n locations; Clone ID: LIB3145-025-Q1-K1-E1
cccacgcgtncgcccacgcgttcggtccgtggagctcgttccgagaggctgttcttcgagccaggcggtgacacgagttccatcctcgaagaagccaaagcagcccgtggtggtggtgatgggttgttcccgttcaaagaaagcgtgattctagctatggaatctgatgatccgtacgtggactttcgtaagtcgatggaagagatggtggagacacatgggatgaaagattgggaatggttagaacaactgttgggatggtatttgaaggtgaatgggaagaacaaccatggatttataatcggagctttcattgatctgcttgtagctatcacttcttcctcttgatccactttcttattctctgctctctcttct

SEQ ID NO: 15615 - DNA, 394 bp, Gossypium hirsutum
  Clone ID: LIB3145-025-Q1-K1-E10
cccacgcgttcgcccacgcgtttgcccgtaattacaaagagtaaaccaagagcgttacaatcgaaatgtgtgttggaaagggaacctgaataccgccatacatcagttgtacacaaaaaagggtggattcaatatcccatttgatttgaacatctctgacacgtttccaaagttgatagaaatatggaaaagaaaccctcaagaaatcttggagtcgaagaaccttagcagaatggagatttataaatgtagcagcttgaactatatttttaccccgtctatgcttttgagcctgaagcaactaagaaggatagaaagtaaagaatgcaatgcaatggaacaagtgatcaaggaaagacgaggagggagcaaccatacataatttgatattttc

SEQ ID NO: 15616 - DNA, 368 bp, Gossypium hirsutum
  Clone ID: LIB3145-025-Q1-K1-E11
attagagatgactacaagaaaaactctacgtgaaatttggagggatggagggatgaagggactgtttgctggacttggtcctcgtgttggtcgcactggtccgtctgtggggattgttgtttcattttatgaagttgtcaagttcgctttacattacagacacgaagatcatgagtgaaagacttggatttgtgccacaactatggttgatttaatgattcaagtatagtcacccgactcaatgatgtaaataaaagaattaacacacttctggtcccccataaaaaattccatcatgtcgcttcaaaccactttggcaaagcttttttcgtggatacccatgctcatgactcaaatgattccaagat

SEQ ID NO: 15617 - DNA, 260 bp, Gossypium hirsutum
  Clone ID: LIB3145-025-Q1-K1-E12
atggttatttagttgataaggttttggacaaaactggcatgaagggtactggtaaatggactgtacagcaagctgctgatttgtccattgcagctccaacaattgcagcttctctggattcaaggttccttagtgggttgaaagaggaaagagttgaagctgctaaagtcttcaaatcaagaagatttggtgatgtcttgaccgaccaagttgtggacaaagcaagattaattgatgatgtaaggcaagcactttatgca

SEQ ID NO: 15618 - DNA, 312 bp, Gossypium hirsutum
  Clone ID: LIB3145-025-Q1-K1-E2
ggacataaacatacccatatctgatattcacttttgaatcctgaacccgggtaacatggactatatttactggcattatactcttagcttgagaagaacttgaacaagagttgatagtgtatagacatttcacactactcaccccctgtatacatgtattggtatattttctgtacaaaggtcaccaacccgttgcctatcgtataccactccatcaaaaccttcggggtcctagaaatgcaagccaataaggctttgatcacttcccctgatagtatacctacaaagtgagatcagtgttaactgattgag

SEQ ID NO: 15619 - DNA, 365 bp, Gossypium hirsutum
  Clone ID: LIB3145-025-Q1-K1-E3
ctaatttcaaacctaaaatcgatttgctgaaacccattccagtgactgccaatccaccattttatttggtggccgacaatgctcgagcagcaacccgatcccaccggcgaacgcgccaagcgaggaaacctggtatgccactttattttcccttttaaaaaaaaacctagatctaatgttgtttaatcaagaaagatgaaaccgaatataagaagaacacttagtatcatccgaccctcgtccctatctcaatatttttgagatattcgggacttcattggtatcgtctccaatatttctttctaaaatcgcaaggtaatgagaagaagaaaaaaaattagatagacttgaaaataaccttttct

SEQ ID NO: 15620 - DNA, 380 bp, Gossypium hirsutum
  Clone ID: LIB3145-025-Q1-K1-E4
cccacgcgttcgcaccattggacaattgttatgattgcagctgggcacctatttttgtcaggcaatcaaacttcaaacttccttcaaacactaaagtgccaattattatgattggccctggtactggattggctcctttcaggggattccttcaggaaagacttgccctaaaagaagctggagctgatctgggtccatctgtattgttctttggctgcaggaaccggaaaatggattacatttacgaagatgagctcaacaactttgtcaacagtggtgcactttctgaacttgtggttgctttttcacgcgagggacctaccaaggaatatgtgcaacataaaatgatggagaaggccttggacatcttgaacatgatt

SEQ ID NO: 15621 - DNA, 292 bp, Gossypium hirsutum
  unsure (1)..(292): unsure at all n locations; Clone ID: LIB3145-025-Q1-K1-E5
cccacgcgtccgatcagaaacaactcttctttgcttcagattaaaaaaagttgggatgtaattccaagctatccttcatattgtaattttaacttttgagggcatctgtaaattccatagctttttgaaaaaacttttagtttcggtctgtataataatagcatttatcgtnaaaaaaaaaaaaaaaaaaaaaaaaaaaaaaaaaaaaaaaaaaaaaaaaaaaaaaaaaaaaagaaaaaaaaaaaaaaaaaaaaaacaaaacaaaaaaaaaaaacaaaagggcgcctcccat

SEQ ID NO: 15622 - DNA, 283 bp, Gossypium hirsutum
  Clone ID: LIB3145-025-Q1-K1-E6
gtgggtgttcctttccagaaggaggctttcctggatgtaaaaacaattggagaagaattgctcccacaatcagtggctgataagattgaaactatgcttctagatctaaaggaatcatcagaatttcacaaaagatcatttgaatgctcagttgactctatccgggctatcgcagctagtcatcttttgcagcttgtggttgtgcgtgctgacttggatggccacttaaaaagctctaaggactattttcttttggccaaaggagacttttttcaatgctttc

SEQ ID NO: 15623 - DNA, 381 bp, Gossypium hirsutum
  Clone ID: LIB3145-025-Q1-K1-E7
cggtttttctcgaattctcttcatattaattcgtcgttctttgttaaaagtacataggaatttgaagctctctctacagcttcatttcctctgttctttcaggcgacgtattttttagcttttcggccaaatttcgtaaatgggctgcttgcaatgtaaagcaaaaagactatgccccaaacgggaaaaccctgtcaaacttgcttcacagactgcttttagtgtcagtgaagttgaagcactctttgagctatttaagatcattagcagttctttgattgatgatgggctgattagcaaggaagagtttcggttagctctggttcacaataataagaagaaaaacatttttacagatcggatctttgatttatttgatgc

SEQ ID NO: 15624 - DNA, 414 bp, Gossypium hirsutum
  Clone ID: LIB3145-025-Q1-K1-E8
cagagagatacaaatccgaagatgaagaacataaaaagaaggtcgaggcaaagaatgcattggaaaactatgcatacaatatgaggaacacagtgaaggacgagaagattggtgctaaactcccagcagctgataaaaagaagattgaagatgctattgaacaagccattcaatggctagacagcaaccaactcgccgaagccgatgaatttgaagacaagatgaaggagttggagagtatttgcaaccccatcattgctaagatgtaccaaggtgccggcggtgacatgggtggtggcatggatgaagatgttccggctggtggaagtggtgctggtcctaagattgaggaaagtgactaaatcattgattttcttcacctgggttctctattggtctcttatgttttttggg

SEQ ID NO: 15625 - DNA, 363 bp, Gossypium hirsutum
  Clone ID: LIB3145-025-Q1-K1-E9
agcaaatcttgtttctccatcatcaacaacagcaagagcaacagttgtatgcaagactggaaactcaagtactacgagagcagcaagggcaacaacaacagcaagagtacccacaaccacccaagaaacgctcttatctgccgtcggcttctacttcaacttttggttccaaatcaacccaacatgcaagaaaaatgggagatagccaccaccaagctgcaacatcgtcaagattggggataaggcactctggaggggagatcgttgaggtccaaggaggtcacattgttcggtcaactggaaggaaagaccgtcacagcaaagtttgtactgccaaaggtcctcgagaccgacgtgttcgtc

SEQ ID NO: 15626 - DNA, 311 bp, Gossypium hirsutum
  unsure (1)..(311): unsure at all n locations; Clone ID: LIB3145-025-Q1-K1-F1
cccacgcgtncgggacactgctgtggaaatagactccgaagtatcactttcggcttcatcttccagaaggagaaatgatagtttcagagtttcagatgttgacagcggtgactctcgagcacatagaaggagacgactgaactaggaccatgtttagttcacaaagaattcagctatagtttggatgtgaatcaaaatgttaccatcatttccttggagaaacaaatttgttgggatctagaaagcaggacccatctttagttttttactctccatgtacantaaacaatgtatgtgataatcttgtttta

SEQ ID NO: 15627 - DNA, 365 bp, Gossypium hirsutum
  Clone ID: LIB3145-025-Q1-K1-F12
ggtgtattcatcatttatgtatataagaggaagaaaaagtaataaatcttaaaaacaaaaacctattttgaatcatatgaaccctaatgaatactttgagcttggttgtagctttgttagttcagagtttcatgattcttgaacttagtaaaatttactttcggctgctgagcagagtgatttgaacttgtagaacgtaaatctatacgatatatatgtacatgaaaagaagaatgtgttataccttattctctggtattgagaagtgaactcaacgagctcctcggccacatgcatcggaaacattcttctgcccctcaacatgagggctccattcattaattgtcattttgtaatacaactat

SEQ ID NO: 15628 - DNA, 269 bp, Gossypium hirsutum
  Clone ID: LIB3145-025-Q1-K1-F2
cccacgcgttcgggacactgatgttgatttagactttttaagcccattttcggcttcatcttccgggaggagtaatgatagtttcagagtttcacatgttgacagcggtgactcttgagcacatagaaggagacgactgaactaggaccatgtttagttcacaaagaattcatctatagcctggatgcgaatcaaaatgttaccatcatttccgtggagaaacaaatttgttgggatctataaagctcgacccatccttagttttttac

SEQ ID NO: 15629 - DNA, 375 bp, Gossypium hirsutum
  Clone ID: LIB3145-025-Q1-K1-F3
taaaatataagaaaaaaaatcatacgcaatgagcactgctggtcaggttattcgttgcaaagctgcggtggcatgggaggcggggaagccactatcgatagaagaagtggaagtggcaccaccccaaaagcatgaagtccgtattaagattctcttcactgctttatgtcacactgatgtatactactgggagtgtaagggttacactcctctgtttcctcgtatacttggtcatgaagcctcagggatcgtggagagtgtgggtgagggtgtgaatgatttgaaacctggagatcatgtgctccctatcttcaccggagaatgcaaagaatgtcgccactgtctgtcagaagaaagcaataacatgtgcgaact

SEQ ID NO: 15630 - DNA, 350 bp, Gossypium hirsutum
  Clone ID: LIB3145-025-Q1-K1-F4
cccacgcgtccgcggacgcgtgggttgcaaaccaaagtgtgtagctagcagtttgaataacatcgtttgggtttcgtagtaaaaaatggaggaaaggaaacctggttcaccatcgagaactcgtatttatctgatggttaactgtcaagtattcatacatgtgtaaaaagttcatagctatttgagctgttgttttaataaactgactttactatcggtttagcataggctgctggtcctagaagaaatgtggctgaatgaaccaactagtctaagtcccgagttggtgggatctaattcgaatcaatttatttacttacagtatgcgatcagttctgtatatatttgac

SEQ ID NO: 15631 - DNA, 292 bp, Gossypium hirsutum
  Clone ID: LIB3145-025-Q1-K1-F6
cctaaattaacttactcgtgaggttgagttgtctgctctctgcctcttcatcactctgctatatttgattctgttttggatcctaccgctatttgaaaccctaggcgaagccattagaatgggcggaaaaagaaagacgaacgaaaacgaagggatggaaggagaggaggatagcaaacacaacattaaaaagatgaagaaggagaagagtgagatacttccttcctccattaaaaacaaggagaagagatctgctgtacacgccaaactcaagcaccaaaagaagctcgac

SEQ ID NO: 15632 - DNA, 390 bp, Gossypium hirsutum
  Clone ID: LIB3145-025-Q1-K1-F7
ttcaaaactgatacctctacttcccttgctttcctcttatgtatttcttcttcatttcctcttcaatctagttcctttctccattcgatctggttttgtttctcagcatattctgggcctttatttctacgtataactcttccttcctttttagcgattctgttgccactgtatcgcgagagcgtttctcgattttggtgtatacttgaatatgacactcctagatctatttagtttctacttaatatcgtgaatatatgttccaatacatgatcgatcttgactctctgacaaacatttctttattattgtgagggaatcaccttctatgatgatctttggccattcttgttctactcctatttggacagcttttcgacatacaattac

SEQ ID NO: 15633 - DNA, 424 bp, Gossypium hirsutum
  Clone ID: LIB3145-025-Q1-K1-F8
cccacgcgtccgcctgaggaaggttactgatgatatgaaggcgaagaaccgtactgatagaacaggcgttgttagcaccagcgaaaagcaaacaagttccacaccctctactactacccctactgtcaaaaaagtcgcaccaccaaaactagagctgcaaatgggtcgtaagtgggctgttgagaaccacataggaaacaagaacttagttattgatgattgtgatgccaaacaatctgtgtatgtttttggatgcaaggattccgttttgcagattcaggggaaagttaacaatataacacttgataaatgcactaagatgggagtgttatttaaggatgttgtggccgcttttgagatagtaaattgcaatggcgttgaggcacaatgtcagggtttcgctccaacaatttcagtggacaac

SEQ ID NO: 15634 - DNA, 332 bp, Gossypium hirsutum
  Clone ID: LIB3145-025-Q1-K1-F9
cagagagaaaataaccaccatttgcaggtttaccctgttgcttaccgtgctagggtcttccatctgcgggcactctcgcgaactagccggctcaccgacgccttctccggaaaattcggggctgattgctgggactagaaggcctggatctttaccagcttctcgtgattcaaagtgcaagcagtgcgagccgaggatgccggtccaagcatcggttcgggcggtggagatcgaacagaatgactgctaccctcagtgtgagcatgcatgtgccaagagaatatatacgcaccttaattattaccaacatatatgatgtaacttgcttatat

SEQ ID NO: 15635 - DNA, 296 bp, Gossypium hirsutum
  Clone ID: LIB3145-025-Q1-K1-G1
ggtattcttcacctcttttccgtgtaaggacagcaaatgctatccaggaacgagtacaggtccacaacaccggtccatcatgggtccctggcttcattgtgatgagtatcgaagatggtaatgaaggcattccagggctatctcagttagatccaatcttttcatacgttgtggttgtcttcaatgcatgttcaacagaggaatcattcactatccctacactgcgaggaaggactcttcaactgcatgccatacaagtaacgtctactgatgaaacagtcaagaagtcatgctat

SEQ ID NO: 15636 - DNA, 369 bp, Gossypium hirsutum
  Clone ID: LIB3145-025-Q1-K1-G10
gcttggagttctttctattccttccctcgcatattttgggttaactgtattctacttgcctgaatcaccaagatggctagtaagtaaagggcgaatgaatgaggcgaaagcagttttgcaaaggctacgtggcagggaagacgttgctggtgagatggctttgttagttgagggactgggtgttggaggtgaaacatcaatagaggagtacataattggcccagcaaatgacgacattgaagacgaagatatatctgctgataaagatagaatcaagttatatggacctgaagcaggtcagtcctgggtggccagaccagtcactggacatggtagcagtataggccttgcgtctcggcatggaagtgt

SEQ ID NO: 15637 - DNA, 332 bp, Gossypium hirsutum
  Clone ID: LIB3145-025-Q1-K1-G11
ggggttttgtttctctctaaatcaggacaaaagggtttttcgatctataccaaaagaccacagggattgatctatggaattcctttttcagcagtgtattttctttttcctttttcagttttattcgatttttttacttattttctttctctctccactgtttcgaagccagcttctcttttgtcgaagccatcggagctcggtatttgttctcagcttcaagtgattcagcttcgttcgaatcgattgatcggtaatgtaacggcggatttctctcggttgtctcatttaaaagagcttgatttgggttctaacacgttaaatggtgaaat

SEQ ID NO: 15638 - DNA, 268 bp, Gossypium hirsutum
  Clone ID: LIB3145-025-Q1-K1-G12
atttacttattcggaatcggagcggtgacggcccctttttggacccagggccctttgccggcgagccggcggatgacattgcaggtggagtgtttggtgggcggacattcgtaaagatgacgcagtgtgctaacatgagctaacagacagaaattctgtggaacaaggggaaagctcgatgattctgattccttacgaaacaaccgtgaagctggctataatacttagacttagattgaactagagaggagaaagtacacaggatact

SEQ ID NO: 15639 - DNA, 346 bp, Gossypium hirsutum
  unsure (1)..(346): unsure at all n locations; Clone ID: LIB3145-025-Q1-K1-G2
tacataccgtatacaataagtcttgtgagcaagtatataatagactgaccttctgataaaaggaaactagattggaatacaatgatgaaaatagctagcacgtgctgcaaacggtatggagtattaggacgacacatgcaagactactggcatatatcgcgatgtaaaatgcttaaatatatcgatcggtgcgggctatcatacaaaactatctgattttgactgggcccaactgcgacctgttggggataagactcatgtctccacaacagtgataagcacttatcgatattggagcacaaaataatcatatgccggtcngcttacattgaaatcggacgtttat

SEQ ID NO: 15640 - DNA, 225 bp, Gossypium hirsutum
  Clone ID: LIB3145-025-Q1-K1-G3
cccacgcgtccgataataaaaaatataatataaaaattaaaaagaaaaaaataaatgtacagacgaggctagagtgccaagacataaatgaacatacatgcaacagaatgcaaagggttttggggttatagaagacaaattcaatgaccgctggtgtacaacgtaatagggggggcttacttttgaaataactgagcttacttgcctggcatggcataccgattt

SEQ ID NO: 15641 - DNA, 389 bp, Gossypium hirsutum
  Clone ID: LIB3145-025-Q1-K1-G4
cccacgcgtccgctaagccagctgcttcatggcttgatgattttcttgtatggttatcacctgaggcatttggttgttgtcggaagtttacaaatggatcttactgtccaccagatgatcaaccaccttgctgttcaccagatggaggttcttgtggcttatgcggagtctgcaaagactgtacaacgtgcttccgccattcagatttggttaatgatcgcccatctacagagcaattcagagagaagcttccttggttccttaatgctctcccatctgctgattgtgccaaaggtggtcatggggcctacactagcagtgtggatttgagtggttatgagagtggtgtaataaaagcatcagagtttcgtacttatcacacaccactt

SEQ ID NO: 15642 - DNA, 257 bp, Gossypium hirsutum
  Clone ID: LIB3145-025-Q1-K1-G5
gccacgcgtccgcgaagcacaaaccattccatccccaacaacacgcataggaagatgcataaagagaccattgtggtattgctttgaatgggcaaagcgagcttcttttgtttgaccaagcttttgaataactgtcaaaaagagtgtgtagttgacacttagggttatcagcatatcattctatcttacaccttagaaaggatataacagacccagcgataatgaacgataaaactatagggacagaatcgacggat

SEQ ID NO: 15643 - DNA, 315 bp, Gossypium hirsutum
  Clone ID: LIB3145-025-Q1-K1-G6
gacgatcgtcctcttcccgcaatggcggatgctcaaactgaaaaacccctttccctttccgagcaatatgcacttcaggagaaagaggaaaaatcagatgtgactacaaaaccagcagaagcaaaagaggttgaaaatcctgtaaatgcagccactggttctggggatgttgtaactgagaaattggaggagacttctgccgatccagttgagggaagcactgaggcccctcctcctgctgctgaagaaagcactgaagcaaatcctgctactgggaacagtggtgaagatgctgcagaggaaaactcgggtgac

SEQ ID NO: 15644 - DNA, 389 bp, Gossypium hirsutum
  Clone ID: LIB3145-025-Q1-K1-G7
caaaagttcacttgcgctgtagtcctggacaatccatctctttcattaaattcgccagttttggaactcctttgggaacttgtggaagttaccagcaaggcccttgccatgctcctgctacatatgccatcgtggagaagaaatgtgtagggaagcaaagatgtgtggtcaccatagccaacagtaacttcgggcaagatccatgcccgaacgtgttgaagcggttgtctgtggaagctgtttgtgctccgatatcttcaacaacagcacagccaaactggggaggctaataagattgaaacactcacaaaggaactctatagcgcttgcatctagtaatttaaccatacagaagcaagcaccaaaagagaaaaataaaaaagaagagt

SEQ ID NO: 15645 - DNA, 389 bp, Gossypium hirsutum
  Clone ID: LIB3145-025-Q1-K1-G8
cccacgcgtccgattgtttcttcgaaaaccataaacggaaccaaatatggccgagaaagcaatcgagtcggttcaatgcttcggccggaagaagacggcggtagccgtaacgcactgcaagaggggccgtggtttgatcaagatcaatggttgtcccattgagcttgtcgagcccgagatcctccgttttaaggccgtcgagccaatccttctcctcggccgtcagcgtttcgccggcgttgacatgaggatccgagtcaaaggtggaggtcacacttctcagatctacgctatccgtcaaagcatcgctaaagcccttgtcgctttttaccagaagttcgttgatgagcagagcaagaaggagattaaggatattttggtcgggtacg

SEQ ID NO: 15646 - DNA, 358 bp, Gossypium hirsutum
  Clone ID: LIB3145-025-Q1-K1-G9
attgtttcttgctgctttgttctttgtcctgtcttcttcttttgctgctgataaacgccaacagtttagggctattggagttccatttccagcttctgtatactatatttacagtgccatataactgttccctggcacagtgttctatggtgttaatgtttgaaggatttcactacacaaccaacttaagggccgatgtctatgtactatagctgatcttttcaagagaagtaagatacattcagtgttgtattggcatcactccaacttacgtcgtgctgcagctacatatgttactaacactacaatattacccacgcttggccatccatcgaatcaacaagcagctgctgaagct

SEQ ID NO: 15647 - DNA, 310 bp, Gossypium hirsutum
  Clone ID: LIB3145-025-Q1-K1-H1
ctttgatctttctttttattgtatattatacggagaaagcatttctcaaacaacccaaggtgtttttaagctgtaaaaaaattgggaaaggaaagagacctggaaagggagggaatcgcttctggaaaagcattgggttaggctttaagacacccagagaggccattgaaggaacatatattgataagaaaagcccatttactggcactgtttctattagaggccgtatccttgccggtacttaccatagtgcaaaaatggtaaggactattatcgtccgaaggaactaccttcactgcatcaagaaata

SEQ ID NO: 15648 - DNA, 228 bp, Gossypium hirsutum
  Clone ID: LIB3145-025-Q1-K1-H10
cccacgcgtccgcccacgcgttcgcgaaaacggaacggcaagactgagccaggaatttgacaagttggataattctgaatcagagaatggtgattccttgatgtctctttctcaggttgaccttacatcagttgctgaactgcctgctgcagtaccctctacattccatcctgcagtatccctgcagggttcaccaggagaaagccctgcatcatggaattcatgcat

SEQ ID NO: 15649 - DNA, 335 bp, Gossypium hirsutum
  Clone ID: LIB3145-025-Q1-K1-H11
ccgagaaggatgaaacagctgaacaactttacatttcgaagaaagctatcgaagatttaacacagaagattacttctgaagggcagagtttacaatctcagatttcttcactaatggaggagaataacttgctcaacgaaacacatcagaacacaaagaaagaacttcaatctgtaatatcacagcttgaagaacaattgaaaaacgaaaaagaaaatgaagaatctctaaaatcagagattaacaatctcaaggctgagattgcggagagttccttactgcaaactcatgtcaaaaaacttgaagaacagttggtgacggttgaagctcaattg

SEQ ID NO: 15650 - DNA, 314 bp, Gossypium hirsutum
  Clone ID: LIB3145-025-Q1-K1-H12
cccacgcgtccgcaaaacatgagggaaatcataagcattcatataggtcaagctggtattcaagtcggtaactcatgttgggagctttactgccttgaacatgaaatccaacccgatggaatgatgcccagtgacacctctgtaggtgtagcaaatgatgctttcaacactttctttagtgaaactggttcagggaaacatgttcctagagctgtgtttgtggatctggaacctactgtgatcgatgaagttaggactgggacttaccgacaacttttccaccctgaacagcttatttctggcaaagaagatgc

SEQ ID NO: 15651 - DNA, 227 bp, Gossypium hirsutum
  Clone ID: LIB3145-025-Q1-K1-H2
cccacgcgttcgcccacgcgttcgaaaaaaaaaaaaaaaaataaaaaaaaaaaaaaaaaagaaaaaaaaaaaaaaaaaaaaaaaaaaaaaaaaaaaaaaaaaaaaaaaaaaaaaagggtggaattattaaaaaaaattgggttggggcggccgttttaaaggatccaagtttccttgcgcgtgcatgcaaagttatattttttttttagggaaacctaaattcaatt

SEQ ID NO: 15652 - DNA, 353 bp, Gossypium hirsutum
  Clone ID: LIB3145-025-Q1-K1-H3
cgttgggacaaaactccttgtgtggttgttacatcaaaatacggatggagtgctaatatggagaaaatcatgcagtctcaaaccctatctgattctagcaagcaagcttacatgcgcggcaagaggatcctagagattaacccaagacacccaatcgtcaaggagcttcgtgagagagttgccaaggactctgaggatgaaggtgtgaagcaaacggctcagcttatttaccagacggctctaatggagagtggttcaatctacccgacccaagatttgcttacgcattacagctcgtgaaatctagcctaaaattagtcccgatgcaacaatgaggatgatgatgatgatgt

SEQ ID NO: 15653 - DNA, 376 bp, Gossypium hirsutum
  Clone ID: LIB3145-025-Q1-K1-H4
gcctgacggttgttttcgaacttttgtttgggctttgcgtagtttttcttctttctacttttaacgagctctggacagttcatcgccatattgcaatcggaaattgttacttacctataaaatttaaaaagaagtttgaaatttggtgagagaaatcataaccaaaaatggattcatcgaaattgggttcagtccctgaagaagagcagcatcgtaaagagagtaacaagccggttgtttctgcctttgcctcgcttcccgatcgccgtccaactaagagttctgagaaatactcacctttagattggtccggcttttttgatcgagaggaagatgtctgcataccagactcaaatgatgtctttcatttatatat

SEQ ID NO: 15654 - DNA, 317 bp, Gossypium hirsutum
  Clone ID: LIB3145-025-Q1-K1-H5
acagaacggtcaaaacgcgatcaacacacagaaaagccccattctgatccacatttgctttaaaatcctctcaaacatcaaaatttgtttgcaaacagaccaaaaaaatccagctatgggcaatacggagaagctgttgaaccagatcatggacctcaaattcacctccaaatcgctgcaacgccaggccaagaagtgcgagaaggaggagaaatctgagaaattgaaagtgaaaaaagcgatcgagaaaggtaacatggacggtgctcggatctacgccgagaacgccatccgtaagcgcactgagcaaatgaact

SEQ ID NO: 15655 - DNA, 339 bp, Gossypium hirsutum
  unsure (1)..(339): unsure at all n locations; Clone ID: LIB3145-025-Q1-K1-H6
cccacgcgtccggcatgtgcgaccaatctttcaggaggtctacaagagagtgcatgaaataagtagctcgccattgcttacaggtgcagaccatgcgagtatccgtgctctcatttatgtcatcaactatgttttaatgacttgtaaatgaagaaaacacatgaggattttgggagtcacagttaagtttgtacaagtttctggttgttttcatgtaaggaccctctcctctgctttgctttgcattatcaggacagttggggagagggggtcctggttttgttatccatagatattttgaaactgtacgaattaatgaagtatttctcagannaaaaa

SEQ ID NO: 15656 - DNA, 277 bp, Gossypium hirsutum
  Clone ID: LIB3145-025-Q1-K1-H7
accacgcgttcggcatgtgctttcaatctttaaagacgcctacaagatagtggatgaattaagaatctcgtcattgcttacaagtgcaaaccatgcagagtatacgtgctctcatttttgtcattaactatattttgatgactcgtataagaagaaaacacatgaggatcttgggagtcacagctaagtttgtacaagttagtgggaggtataaagtaaggaccctatcgtgtgatttgctatggattatgaggacatgtgcggagagcgggtcttg

SEQ ID NO: 15657 - DNA, 347 bp, Gossypium hirsutum
  Clone ID: LIB3145-025-Q1-K1-H8
gactgcttctatatggaccagcaccctttagagaacgattctgacagcaagtccaattgttggatttccaaagatacaatggcgtgcactagatgagataaatgctggagtatgtgatggaatgacttatgaagaaataaagaagaatatgccagaggaatatgaatctcgcaagaaagacaagcttagatatcggtatcctcgtggagaatcttacctggatgttattcaaaggcttgaacctgtaattattgagcttgaacgacaaagagcacccgttgtagtgatatctcaccaggcccggttgagagcattatatgcttattttgctgataggcccctcaaag

SEQ ID NO: 15658 - DNA, 400 bp, Gossypium hirsutum
  Clone ID: LIB3145-025-Q1-K1-H9
aaaagagatcactctttcttttattttcttcctataaacagttctaaagcacttgttcttctttttcttttcgttggagatctcggcggagatggggaaacgacgctgtgttgtggcggcattagcagcgataatgttgatgatggagttagcggcgttgacagtagcagaacacagaagaagtatgttgagtaatggtcttggaatgactcctcccatgggttggaacagctggaatcactttggatgcaatattgatgaaaaaatgatcaaagaaactgctgatgctctagtttcaaccgggctctccaagcttggatatgaatatgttaatatagatgattgctgggctgaaatttcccgtgatgacaaaggtaatctagtgcctaagaagtcaaca

SEQ ID NO: 15659 - DNA, 234 bp, Gossypium hirsutum
  Clone ID: LIB3145-026-Q1-K1-A1
ggggcccgttctgaaaaaatcgcaatcgaaaaaggtttcagtaatagtactcgaagccgcgatcgattaccgatacttcagccgctttcagacttaaggatgataaatccgatatcgaagactatgatgttgatgatgttttggctgatgccaagccctttgcgttctctgccgcaaagaaagcatcttctactgtttctcatgctcaagcttgagagtcttgcaaaagaaaga

SEQ ID NO: 15660 - DNA, 365 bp, Gossypium hirsutum
  Clone ID: LIB3145-026-Q1-K1-A10
aaaaaaatcttgaaaatatttcacaaacccttcttcctctcagtccattcgcaggcttcatcggcgccgaatgcgcctccaccatcaacgcgattttaattagatcctaaaggatctaataacccttggaccggagaagtgaacaatgaataaattgaccccaaatccattattatgtttagctaaccgagaagaagaggctcaagtgataaggaaaagctaagcaggtgtaatcagtactagctttcaggtattttgttgaggttcgaccggattgtacgaagaatgtatacgcatgatattggttttgcaaaagttcaagtggattgtatggagaatatatataaacatgacatttggtttta

SEQ ID NO: 15661 - DNA, 193 bp, Gossypium hirsutum
  Clone ID: LIB3145-026-Q1-K1-A11
cccacccgtccgaccgctgggtttttccttcttcctaagccttacggtttctgttggcggatgaaatttatactccgatgtctttccttccgaggattctgtcctcagatctgctcgcatcggttcaacatatccctcttgatttctgatgttgtactgtgaaaagagtagcgtcgttggatctatggtttta

SEQ ID NO: 15662 - DNA, 353 bp, Gossypium hirsutum
  unsure (1)..(353): unsure at all n locations; Clone ID: LIB3145-026-Q1-K1-A2
gttcgtccatggcgctttttggaagagttggtggaggcatctatacgaaggctgctgatgtgggtgctgatcttgtaggcaaggtggaaaggaacattcctgaggatgaccctagaaacccagctgtgattgctgacaatgtntgggataatgttggtgatatcgctgngatgggatctgatctttttgggtcctatgctgaatcatcttgtgctgcacttgttgtcgcttccatctcttcttttggcatcaatcatgaattgactccgatgttatatcctctcattataagttccgntggtatcattgtttgtttaatcaccaccttatttgctactgatttctttgagatc

SEQ ID NO: 15663 - DNA, 393 bp, Gossypium hirsutum
  unsure (1)..(393): unsure at all n locations; Clone ID: LIB3145-026-Q1-K1-A3
aagtntcttcccaagagagaggggtagcccttattatggtcgtggctctagtcgtagcccttataggaaggagagggggagccctgattatggtcgtggccacggtccaagtctttataagagagatagaggtagccctgagtatggccagatcaccagccgtagtcctcagagaagagagaggaccagctttgaccatgctcgtggctccagccgaagtcctttcaggaaagagagggctagccctgagaatatccaaagctctagccgcagtccttataggaaagagaagcgtagtgctgaaaatgatcgtagccccagtcgcagtccatatagaagagaaaggcccacttctgacaatggtcgtgcacccagccatagcccatatggaag

SEQ ID NO: 15664 - DNA, 402 bp, Gossypium hirsutum
  Clone ID: LIB3145-026-Q1-K1-A4
ctgaaataccctccttctgtcccatctgacaagcttactcatgtctacactgccatattgaagcctgacaatgaggtcagcattctgattgatggtgaggaaaagaagaaggctagcttcctttcagcagaagattttgagcctccacttatcccttccaagacaattcctgatcctgatgataagaagcccgaggactgggatgagagagcgaagattcctgatccagatgccgtgaagccagaggattgggatgaggatgcacccatggaaattgaagatgaggaggctgtgaaacccgaaagttggttagatgatgaacccgaggagattgatgatcctgaggcaaccaagcctgaagatggggatgatgaagaagatggtgagtgggaagccccccaa

SEQ ID NO: 15665 - DNA, 369 bp, Gossypium hirsutum
  Clone ID: LIB3145-026-Q1-K1-A5
aaaacccggcccgacccacgcgtccgttgaatatgttggttttagtggattttgttgataaaactagctgggagtatctgtttaaggtgtactgggatcttttaaaagagaagctagctttaagtttacatgagcttactaacgctacaaatccatggaaggaacttagagaagcttcagctaatatagaaccaaagcatcaaatcgacgttgcatatttaataaatagttacaaaagtttatacccaaaatgggtttttgatctcagaggttcagtgttaagcaaaaggagaaggttgcatcttttaagacttcagttgaggttcttactttctttgaaacacctattacccataaacgcttaaattt

SEQ ID NO: 15666 - DNA, 388 bp, Gossypium hirsutum
  Clone ID: LIB3145-026-Q1-K1-A6
ggagaattaaggtccatttaaacgcattgaagaagtacacttacgggaagcatattgttgcgcgtgtagagaaacttgttgctgctggagagaggagaattgctgctcagtctgtgcacccttcttaaatcggtgtaggaaagagacatgtttgtacagctaacagaatctatgtgaagctttcccttcttccccccatatgtagggtcatggttcttctacctatcttcttagacaggtaagtaagaactgtatgaaaatataagttgttgcttgccttgtaccaggaaaaaaaactgtacattgtgtagcttaagggtttatacatagaaatggagccaaagctgagagtttcagtgttgcaatagaactgatgatgccccccccc

SEQ ID NO: 15667 - DNA, 138 bp, Gossypium hirsutum
  Clone ID: LIB3145-026-Q1-K1-A7
acaaaaaaggaatcgcctctacttctactttttacataatgctcactttcaattgccctcctctgatcaagccgccatgtgtggaggtgctataatctctgattttattgctctcgtgcggtcgcgtctgctgacggc

SEQ ID NO: 15668 - DNA, 397 bp, Gossypium hirsutum
  Clone ID: LIB3145-026-Q1-K1-A8
gcgagtagcccacgggaaagggggagaaagacgcctcttcttagctcgaatccctccaaatccaaatctaaatccaagttcctctcctcaatctaattgcatagcatactgaagttagagtaaccatgtacgttgaacatgccttctcgatatccgacgaggatatcatgatggacactccccacgccattaacaatcggcctccgtacaaggagatcggcctcgctgtcgctcttctcgtctttggcacccttgggatcatcctgggtattttcatggccgtcaacaaagtcggcggtgaccgcgcccatgggcttttctttgcaatactcggatccattttgttcattccaggcttctattatacaaggattgcatattatgcatttaagggata

SEQ ID NO: 15669 - DNA, 430 bp, Gossypium hirsutum
  unsure (1)..(430): unsure at all n locations; Clone ID: LIB3145-026-Q1-K1-A9
atttccccaacttccactttgggttttccttgttctttttttcgatttggtcgagggtttttttttagcaatggctgtttcaggtttcgaagggtttgagaaacgcttagagctccatttctttggggacgataatgatccaacggtcaccacaatgggacttaggctgcttgattttgaatcactggaaaatgtgttacgtgtcgttcaatgcactgtcgtttcggctgtcgggaaccatttcttcgatgcttacgtgttgtctgaatccagtttgtttgtttaccccactaagatcatcatcaaaacatgtgggaccactcagttactcaaatcgattcggccgttgattcacttggccaaaaatctncgccttacgatatgcgggtgtaggtacacccgaggtactttcatcttccctaaatcacag

SEQ ID NO: 15670 - DNA, 405 bp, Gossypium hirsutum
  Clone ID: LIB3145-026-Q1-K1-B1
ttcccaccctcaaaacagacaacaattcccccttccccaaaaataaacaataaaaattatgagcactggcgaaggaaaaaccgtgtgcgtaactggagcctcaggttacatcgcttcatgccttgttaagcaccttctccttcgtggttacactgtcaaagcctctgttcgtgacccaagtgatccaagaaagacacaacacttacttgcacttgagggtgctgaggaaaggctcaagttgtttaaagcaaacttattggaagaaggttcctttgattctggtgttgaaggttgtgatggtgtttttcacacagcatctcccttttatcatgatgtcactgatccacaggcagaattacttgatcctgctgtgaggggaacactgatgttctgaactcatgtgct

SEQ ID NO: 15671 - DNA, 306 bp, Gossypium hirsutum
  Clone ID: LIB3145-026-Q1-K1-B10
agactaggctgtcttagcccatcatgatttatttttttgcccctctagcctgattccagggggggccttttagattgtagagtggttctttacgaacatgcaaaaccagcatcacttgtgacaaacacattggaagctgatcctacatgccttgtgccaaaccgccatcgtccttgtgcaaataactgtagttcttacggttattaggcgactacaaacctacgcgctaaatgtatacaaacctttgttagaaggcacacgaaccatctggcttcactattcgcaaattctttttagccttcttct

SEQ ID NO: 15672 - DNA, 124 bp, Gossypium hirsutum
  Clone ID: LIB3145-026-Q1-K1-B11
cccacgcgtccggtttaattgactggaataaatcagagacccactggtagtggaggaccctgaatgcaagataccattaatttttagatgaatttgattctccgcgttggttgtttaattttat

SEQ ID NO: 15673 - DNA, 378 bp, Gossypium hirsutum
  Clone ID: LIB3145-026-Q1-K1-B2
aaccgtggccattttcagcatactacttttgattcaggtttcatcctgcttgtatagaaatgacagcagaggaggctaaaagacttgaccacttcttttgtgaaacttgttcttcttaaggtaagaaaaagttgcggaattcccatgctgcttgcagaccctcggatacaaaggtggatacaaaacgacgccggaggtgacaaaaaggtacataaaagctagcattttagtcaagatacccaactcgactcgttttctcactgttaaccatggagtaggcttggagcaaacacggagactaatatacgtaccatccaaatctgtaagccttgtaagtttataatccttgagttgacagtaaagtgtttgaaaacttga

SEQ ID NO: 15674 - DNA, 386 bp, Gossypium hirsutum
  Clone ID: LIB3145-026-Q1-K1-B3
gtccttctctttctcaccctattattttgtatttcgctgttcctctagtttgattttatgattcgaattttagattgtagatctgatctttaagaaaattaaaatttaacagatcgagagaaaaaaagaatggcagaggagcatagatgccaagcgccagaaggccatcgtctttgcgtcaataactgcggctttttcggaaattcggcgacgatgaacctttgctccaaatgttacagagatctctgtctcaaggaacaggaagcttcttcgatcaaatccgctctttcctcttccccttcgtcttcgtcaacggttgtcgaatctatttctcaggttcctctttttggctctccctgaagtcaacagagaatcggcggtcccgg

SEQ ID NO: 15675 - DNA, 429 bp, Gossypium hirsutum
  Clone ID: LIB3145-026-Q1-K1-B4
cccacgcgtccgggatctctcagctactttttctctcaaaatttctccaattagctctggtttaggcgatggcttcaaagcggatcttgaaggagctcaaggatctacagaaagatcctcctacctcttgcagtgcaggccctgttgctgaagacatgtttcattggcaagcgactattatgggtccacctgacagtccatatgccggtggagtgtttctagtcaccattcatttccctccggactatccatttaagccacccaaggttgcattcaggacaaaggtctttcaccctaatattaacagcaatggcagcatttgcctcgatattttgaaggagcagtggagccctgccctcaccatatccaaggtattgctctcaatctgctcacttttgacggaccccaaatcccgatgatccccttgtg

SEQ ID NO: 15676 - DNA, 302 bp, Gossypium hirsutum
  Clone ID: LIB3145-026-Q1-K1-B5
tttgcaaaacgagatccacaagacctccattgagagggagacattgaagctcgaaatgatgagtgctcaaactatgatcgacattctacaatcgaaaatagattttcttagcaaggaaaacgaggatctaaagaagagcaactgagtcgcgtggtacaggagcctaggttctttccggttctggttccttgatttcctttccttatttatgcatgtattattgttcaccggcacgattgtaaacttcagatgacattaacattcagtttgttgatgaacaatgttgtagctttcctccttaa

SEQ ID NO: 15677 - DNA, 383 bp, Gossypium hirsutum
  Clone ID: LIB3145-026-Q1-K1-B6
gcgaccggtcaatcgtcgacccacctcgataattaaatggtacatggctatgctacttatttcttcctagcggggaagtgtgtgttttgcgtgttgtgggatctgaggattataacataaaaagaagagaaagtgtgactgtatgattacaatttcaattacatcatttctgaatgcggatggaaactgcatttacactgttacaactgccatatgattgtgctctatctttctggggagcaaagagggggggggggatccagttggctggttgttaatatcttttttcattgagcagtggggttactacgagcatggtacacacaagttactcgattgctgaaaccttgtcagttgctggaaatgctttaaagataaaagtg

SEQ ID NO: 15678 - DNA, 416 bp, Gossypium hirsutum
  Clone ID: LIB3145-026-Q1-K1-B7
gcgaaaagaggaaaagtgaagtctccgacgccggtttcaaaagctaagttcgaggtggaaaatataggggaatgggtttcatgctctgttggggctaattttacgccgcatatcatcacagttaatgccggtgaggatgtcacgatgaagattatttcgttttctcaacaagggcctcgagctatatgcattctttctgcaaacggggtgatctcgagtgtcactcttcgtcaacctgattcttccgggggtacattgacatatgagggtcgtttcgagatactgtccttatccggttctttcatgccaaatgacactggtggaacaagaaagccgatccgaaatggtccctaaacagatcaaaatcgtggatgctaagtcttcggtgaccgtaaaatccgacgtgtatgccggat

SEQ ID NO: 15679 - DNA, 376 bp, Gossypium hirsutum
  Clone ID: LIB3145-026-Q1-K1-B8
tgcaaatgtaatgttgttccagcagcagaaaagtgtacctgttaaaaccgatctcttcagtgacaatgaactcaccggttatgcaaccaaccaggtacctgatagtgatatggttggtgaagatggagcctccgatgatgatgatgatgatgaggttgaaggtagtagctcagatgaagcatagacattttgttttggaaaaagatggaaggctcgatttttggtagttagggcttgctcattgtaactggaatatgtttttcttttcccttcttaatatgataaacatttgaccaagttaaattaaatttatgttttttcgttgtaattcgagaaaagaaaatttcttaatattttattatgagcaatttgtttt

SEQ ID NO: 15680 - DNA, 275 bp, Gossypium hirsutum
  Clone ID: LIB3145-026-Q1-K1-B9
cccacgcgtccgggcttctgcagataatatcaaacccgaatgcagtggagggaagggcttcttccgtgccgtctgcaaccaccacggttcctaacgatttaagagccaaaatccgagctatgctgatggcgaccttgtagtaaacaacactgaacctgttttcttgtttctctttgtatcagctttggtcttttcttttttgaatattagcattatactcttatataatagtggcttaagattcatatatgatcaaattaatcaatttttaattg

SEQ ID NO: 15681 - DNA, 313 bp, Gossypium hirsutum
  Clone ID: LIB3145-026-Q1-K1-C1
gaccaaactgcttattgagtgacctgcactgagcctttcagaggctggaacctaccaagacctcctatttggaaaataaaacacccggaatggatttactcaagatttctctttgcaaaccaccaaaagtgtctgatggtgtttcagtttgggagtggtccggctctgcattagatgaaggtgatgaggcttcaaaatggtttacaaattatctcgggaaacccataggatggttcgttttaatgcagcatcagaaactatgcctgtgaaacctgtgtatgctcaaggtattccataatgttttctgacatgt

SEQ ID NO: 15682 - DNA, 110 bp, Gossypium hirsutum
  Clone ID: LIB3145-026-Q1-K1-C10
gcaaataataactatcaccggcggatccccattttccaccaattaaccccaggtctggttcatttttggggcgtttaataatccttttttcccccatggacatgaaaaag

SEQ ID NO: 15683 - DNA, 97 bp, Gossypium hirsutum
  Clone ID: LIB3145-026-Q1-K1-C11
ttaccaaggtcaaaccttattagggttggccggactgaaacctttttttggtttttttgggtgggggtccttggccgtcctaagttggggaaccaat

SEQ ID NO: 15684 - DNA, 419 bp, Gossypium hirsutum
  Clone ID: LIB3145-026-Q1-K1-C2
gatgcatttggacctgatgcaatgaaatgaacaatatttccatgaaaaaagcttctaaaaactaaatgcccgctgaagttaatttcttgatggttatcagattgagaattttattgcttgatgtacgtctatttcctgccttctgaaattgattgttctgcagctgcattgagagtgctatcatacttgccacttccctactccgctttaagtgcattcttgataattccaactccattgagggatgcagtttatgatttcattgccaagcggcgttatgactggtttgggaagagtgaagactgcctagttttgcaagagagcgagctcttggagcgatttattgatagggaagaaatgatggatcgtaatcgtaatcgatcaaatttgtaacttggattctcttaatacaattagac

SEQ ID NO: 15685 - DNA, 426 bp, Gossypium hirsutum
  Clone ID: LIB3145-026-Q1-K1-C4
cccacgcgtccggaacaataacatataaacatataaagaaaacaaaattaataaattttgttttccatctcgcagaaggtctctcgactctcactaagcctattcttcaataccatggacatgaagaagatctcctgcgccgtcattgtcgctgccgcctctatgagcgcggtcctggctgctggctccgctccagctccagctccagcttcagctccaggtgcagcttcagcttcagcttcagcagctgccccaggcccagactccaacgtcgcaacctcaacaatgcctgttcttgggtccttggttggagccacccttgtttctttcttttcctactatttgcagtaagccagcaaaaatctacgaaaccatgaagtattgaagaatcaaaaaaggtgaatgaataaatgtaaaatattactc

SEQ ID NO: 15686 - DNA, 129 bp, Gossypium hirsutum
  Clone ID: LIB3145-026-Q1-K1-C5
ggtaaaaatagtaaacgttaatttgtttatgttttttcatgtatctagtttatgaaacttcggttatgtttgaattattttttgtattgcactagacttattgaattataatttattttcttttgattc

SEQ ID NO: 15687 - DNA, 428 bp, Gossypium hirsutum
  Clone ID: LIB3145-026-Q1-K1-C6
cccacgcgtccggtgaaagctatggaacttatggtgccccccagattggtgttagtaacagtgcttatggagcttatggaggttattcatcaggacgcagtggtccctctgggttatccagccataactctgtttcccggcgcaaaaactatggttactaaattctttttgattgttggataacagagcctctccgatctccatatttagggttctgatgcacttgttttccctttgttgcctatccattcccattaaaacagctgagatttacgaagcctgaagcccgcctagtgcctactttgatgaagcctgcctaaaccggaagaccagatgaaccagggcccaccttgatgctactacctagaaggaccaaatatatgtggagatattactattctctttgaaatttgccatgttcatgccac

SEQ ID NO: 15688 - DNA, 424 bp, Gossypium hirsutum
  Clone ID: LIB3145-026-Q1-K1-C7
acaaaatgcaatgtttctctttcttttttttgctgctgttgtgttcgtccttttacaggtacggggtatgctggcgcctggcgtggggcgtacgggggttgtgcgctgggggctgctgaggcgtacagaggtagttggtgcgtcgtacggtgcgagggctggggcttggctgcggcacgagggagagggccctagggtttctgaaaccttgacattttgggcttttcgggcctgatcttgcagttgggccacaagtttttgtaattggattgtaaactggattgttatgatttgaattttttggtcttgtatttgggttagattttggttaagtttaatattggacttttatttttttgttttggtttttttttgggtttctaatgggtcgggtaaaaatggcccattacagttggttctaagc

SEQ ID NO: 15689 - DNA, 123 bp, Gossypium hirsutum
  Clone ID: LIB3145-026-Q1-K1-C8
gttgagaggtcttgaatattgatggtagactagactagattgtattcttccttggtgttagatttgtatggtaaggcaaccactgtgtacttagttgtttaaaataaaatgatatttttattg

SEQ ID NO: 15690 - DNA, 431 bp, Gossypium hirsutum
  Clone ID: LIB3145-026-Q1-K1-C9
cgaacctgcaaagaaatatatcagtcactgtccgttctctgcattcagttccatagacaaggggttataccaatggctttcttaagtaaaattggaagtatacttaggcagaccacaagtatgcatgtcaatgctaagttgtctgcatcaggaccaggcctatttcaagtgttgagaagcatgtcaacatcgccaagctcgaaactttttgtgggaggtatttcgttccaaacagacgatcaaagtctgagagaagcttttagcaaatacggtgaagttattgatgcacgaataattatggatcgagaaacaggcaggtcccgaggatttggctttgtcacttacaccagttctgaggatgcttccagtgcactacaggccttggatggtcaggttcttcatggccgtcaagtaagagtaaactatgcaaa

SEQ ID NO: 15691 - DNA, 381 bp, Gossypium hirsutum
  Clone ID: LIB3145-026-Q1-K1-D1
cccacgcgtccgctgcaggggagtggtgatgacggtgaagggggtggtttcatggggaaggttgggaatctggcactacagtttcttaaacaaaagctggatgatgacgaaggatacgggaaaccggcacttgagactgaagtgagtagcaagcaagaggcttatgcaggagctggtaagcactctcttcctgacagtggaattcttatcagcggctgccagaccgaccaaacttcagcggatgccagcccatcagggaatgcaagcaaagcttatggagcacttagcaatgctattcaaaccataattgccgactcagatggctcaattactaataaagagcttgttctgaaggccaggcagatgctcaaaaaacagggc

SEQ ID NO: 15692 - DNA, 272 bp, Gossypium hirsutum
  unsure (1)..(272): unsure at all n locations; Clone ID: LIB3145-026-Q1-K1-D10
ccgattccgtcgccacgcgtcgcacgcgtcgccaccgtcgattgtacatgagcgcagcttggtgtatgggactntggttccaaaaacgtatntacacctgaacttctcttctctaaagaccaggctgcacaataaggcgatctgtatgggatcatagtccatgcagcctntctactgcacagaggaccgacggatctttatcatcaagttcgagtgagagaacttctgacaaataaaagggaagatagttcaagccatgttgggaaacttgc

SEQ ID NO: 15693 - DNA, 416 bp, Gossypium hirsutum
  unsure (1)..(416): unsure at all n locations; Clone ID: LIB3145-026-Q1-K1-D12
cccacgcgtccgccccaagtttgcaaattatttggggggatggtttccttccaatatctatttctcttttttctaaagccggatttcatgcctttggtccaagggggggtatacccctttcaaagaaggtctacccggtcattgccgataaagcctttggatattggacttattacctttaatggatgccctaatggtaaaaataggggctgatgtagtctgatagtacccattgtattttaacttacaatatgatcccttgctatcactctggattttagactttagatggtggtctgaggtgattctttgtctaaagcccanatgtgagccntgtaganttctttgtattataacagagtcaaaatctcagaagcagaaatgcagcagaggccccttttacatgcctaaaagtt

SEQ ID NO: 15694 - DNA, 384 bp, Gossypium hirsutum
  Clone ID: LIB3145-026-Q1-K1-D2
ccggaaacgagtactttttaagtaaaaggaaaagcccgaaacaacaatatgaatgttgatttatagtagttaattgttggtgtgtttaaattgtgaacaggatatcaagaggtgatttaggaaacttgttcatcttgaaaatgatcgacccttcttaccgcgtccctgtctagtgaaatgcagcattagcatcatcgctctgccattgagctttactaccaatggatctactcttacaacagtggtcttgtatttgatacacagcagacagtcattttttatgttttatggctttatatatatttcatgtaaagatttgtatttgatacgcatacattatattacaacacatttttaataaataaatcatattgacttatgatt

SEQ ID NO: 15695 - DNA, 415 bp, Gossypium hirsutum
  unsure (1)..(415): unsure at all n locations; Clone ID: LIB3145-026-Q1-K1-D3
attctcttctttcccaacctttccttctctatcagataaggtaatcccttctcagttccccgccatggcggaagcttctagaatcttccattcaacactctttccaacactctctctacaactcagcaagccatgttacaattctcacgtttacccttcactctctctcaagaaagcaccacgcccagttcaatgctcagtttccacaagcgaaaccaaatcgacgtcgtcgaatgcgacccaggaagtgccttggggctgcgacattgattccttggagaacgcagaggcgcttcagaaatggctttcgaattcagggttgcctccccagaagatggccatagacaaagtggcagtaggggagagaggattggttgctttgaagaacatcangaagggtgagaagcttctcttt

SEQ ID NO: 15696 - DNA, 423 bp, Gossypium hirsutum
  Clone ID: LIB3145-026-Q1-K1-D4
cccacgcgtccgcccacgcgtccgttcaaattcccaataaattgggatgtttgatttcatgctattagctctcaatacttgcaaattatttttgatttgttcaactttacccaatttcaattctatctaaagagcagaaaagaaaattgggttgccgtgagatgaagatcgaggatttggatgacgtggagaatgaagacggcgattacggcgcaaagcagttgcagatagtcagagtggacgacgccaaacgactcctagtcggagccggtgctcgtatcctcttttaccccacccttttgtataatgtcttcagaaacaaaatccaatccgaattcagatggtgggacgaagttgaccagtttcttttgctgggggcagttccatttcccaaggatgttcgacgattgaagcagttgggcg

SEQ ID NO: 15697 - DNA, 431 bp, Gossypium hirsutum
  unsure (1)..(431): unsure at all n locations; Clone ID: LIB3145-026-Q1-K1-D5
cccacgcgtccggtgacaagtggaaagttataagtaatagcttcggctatacttatctgatcaagtgacaaagtgataagtgatagcttcggctacacttatctgatcaagtgacaagtgaaaagtgataagtgatagcttcggctatacttatctgatcaagaaacaaagtgataagtggctacacttatctgatcaagaaacaaagtgataggtggctacacttatctgatcagggacaagtgataagtgatcatacgtaagaccatagttatactatggcaaagtgaaagtgaagtactcaattttccgtgaccgttccctaatttgattaaggatggtaagtgacaaatgggcccaaaagaattaaagtaaatggataagtggtagtgtatttatatcangacgatgttgttattcaaactaaagtg

SEQ ID NO: 15698 - DNA, 430 bp, Gossypium hirsutum
  unsure (1)..(430): unsure at all n locations; Clone ID: LIB3145-026-Q1-K1-D6
tgctttggagccataatttggctccattctacccctccttgtcaagagcaaaagagggtttctcttctaatggcatcagcagtttttgaaggagcttcaattggtcctctaattgacttggccattcaaattgacccaagtgttctggtagctgcattcgtgggaacagcattggcctttgcatgcttttcaggagctgccatgttagcaaggcggagagagtacctctaccttggtggcttgctttcatctggtgtgtccatgcttctctggttgcattttgcttcttctatctttggtggttctacagccctctttaagatggagatctacttagggctcttggtgtttgttggctacatggtagtggacacacaagacataattgagaaggcacactntggtgatctggattattgtaagcatgctt

SEQ ID NO: 15699 - DNA, 215 bp, Gossypium hirsutum
  Clone ID: LIB3145-026-Q1-K1-D7
catgaactctagagtggtattagctgcgaatttgttatttattactttctggcctttccctttttgacagcatgaaactggatccttatttttattatatatatatgtgcgtatatgcaaataagatgtgtattttccctttcaagttttgagtgggaaaaaaacataataagctttgtgtattgaatatcaggtatttatttatgccttttttt

SEQ ID NO: 15700 - DNA, 283 bp, Gossypium hirsutum
  Clone ID: LIB3145-026-Q1-K1-D8
cggacgcgtgggttaaaaaaaaagtttaaaatttacggtccgtttttgttgtgaaagtgaatggaaggagtagacgacttagctatagctagccatgtggtgcaagttgaattttgagttggacagagattcttcattttcacattttcatggacaatggacgaatttgagcccatggaccattgttgaattcgattgtagacattattttagacctttgtttgagttttccagctccctcaggattcggaatcataagaatataaatcagttttctttcttt

SEQ ID NO: 15701 - DNA, 425 bp, Gossypium hirsutum
  Clone ID: LIB3145-026-Q1-K1-D9
cccatctcctcaggtctccacttctgttgttgagccttacaacagtgttctctcaactcactcccttttggagcacactgatgtggctgttctccttgacaatgaagctatctacgacatttgcaggcgttctcttgacattgagcggcccacctacaccaatcttaaccgtcttgtctcccaggtcatttcctccttgactgcctcactgaggtttgatggtgccttgaatgtcgatgtgactgaattccaaaccaacttggttccctacccaagaatccacttcatgctttcctcgtatgccccagtcatctctgctgagaaggcttaccacgagcagctctcagttgctgaaatcaccaatagtgcctttgagccctcatctatgatggctaagtgcgatccacgccatggaaagtacatgg

SEQ ID NO: 15702 - DNA, 91 bp, Gossypium hirsutum
  Clone ID: LIB3145-026-Q1-K1-E1
cggccgaattcccggtcgcccacccgtccggattactggcttgggttaaaccacccttgggcccaaggggatgggttaaaatttaccggcc

SEQ ID NO: 15703 - DNA, 225 bp, Gossypium hirsutum
  Clone ID: LIB3145-026-Q1-K1-E10
ctgacactatgacgattagagctatctgcttatctccttccgcgctctctgctgagacaaagtccaacccgtgactctcaatctcgatagcaatgccagcaactgctgcagaattggatctcactcagtcttgtcacaccgcctcttctatcgtgaagtatacattcgcacatgctggaagcttggaccactgtgcatagtacttgaaccagacgctcgatacct

SEQ ID NO: 15704 - DNA, 194 bp, Gossypium hirsutum
  Clone ID: LIB3145-026-Q1-K1-E11
ctcttctctcctaacctttcctttcgcttggaaagtcggattggaagggttgccaaatggtggtaaaaccgaattcctttccagggggaaggggaaattttattattccaaaacctttgtagggggaaacttgaacttaaaggaaaaaccttggattgtaaaggttgtgggatccagaaggaaaaggaacctta

SEQ ID NO: 15705 - DNA, 92 bp, Gossypium hirsutum
  Clone ID: LIB3145-026-Q1-K1-E12
gacaaatgaacagctgctataatggaacaatactggaggaactctaatgtaaaccgtaaaaattgctgaaaggccgtgcaaaaccgaacaga

SEQ ID NO: 15706 - DNA, 415 bp, Gossypium hirsutum
  unsure (1)..(415): unsure at all n locations; Clone ID: LIB3145-026-Q1-K1-E2
aaagggttctttatggattcaaatgctgtccctatgggatagggatggagaaagaggaaaaaccgaagatttcacatagtgcttttgatcgaaaaatcaatctgatttatttcgtacccctcgctcaatgagaaaatgggtcagattctataggatcaaacctatgggacttagggaatgatggaagggaataaaataaaaaaaaaaaagaaatcaaaaaaagaggggaaaaaaataataaaaataataaataagtnaataaaaatgaagtagaagaacccagattccaaatgaacaaattcaaacttgaaaaggatctttctgattctcgaagaatgaggggcaaagggattgatcgagaaagatctcttgttcttattataagatcgtgtgattggatccgcagatgttttgt

SEQ ID NO: 15707 - DNA, 390 bp, Gossypium hirsutum
  Clone ID: LIB3145-026-Q1-K1-E3
cagtactttgtttttgagctccaaaactgaaaaaactctccattttttatcaaatgttctagacaacgatgggatctgaatctcaagttgtttgtgttactggtgcctctgggttcattggttcatggctggtcatgaggctactcgaacacggttacactgtccgcgccaccgtccgtgatcccgataatcaaaagaaggtaaagcacttgcttgatctaccaaaagccaacacccatttgacattgtggaaagctgatttatctgaagaaggaagctttgatgcagccattaatggctgttgtggtgtcttccatgttgccactccaatggattttgagtccaaggaccctgagaatgaagtgataaagccaacattaaatggagtat

SEQ ID NO: 15708 - DNA, 427 bp, Gossypium hirsutum
  Clone ID: LIB3145-026-Q1-K1-E4
cgatggacccaatgagatccccagctggagcacgaaggatacggtgaagcttgtgtccgccggtgaaaaagtgagcggcgggatgctactcatcgtaccccgaggcaagcacgccgtcagattgggcaacgacgcggagatcagtcaggaagtgacggttgagaaaggatcggcgtacgcggttactttcagtgcggcacgcacttgcgcgcagatggagtcactgaacgtgtccgtaccacctgcatcgcaaacggtggacctgcagacattgtacaacgtgcaagggtgggacccttacacgatttcttttgaggcgcaggaggataaagcccggttgatttttaggaatccgggaatggaagatgacccggaatgtggacccatcatcgatgatatagccatcaagaaactcatcacccctgat

SEQ ID NO: 15709 - DNA, 428 bp, Gossypium hirsutum
  Clone ID: LIB3145-026-Q1-K1-E5
caggattactgtgatgattactacaaatacatgtatccatgtgcccctggagctcaatactacggccgtggtgctttgccaatttactggaactacaactatggagctgctggcgatggtataaaagttgatttgttgcaccaccctgagtatctcgagcagaacgcaactattgccttccaggctgccatctggaggtggatgaccccaatcaagaagaaccaaccttcagcacacgacattttcgtgggtaactggaaaccaaccaagaatgacacagaggaaaaacggggtcctacttttggctccaccatgaacgttctctacggagattacacttgcgggcaaggcgatatcgatcccatgaacatcatcatctcccattaccttcattaccttgacttactaggtgttgggcgagaggaagc

SEQ ID NO: 15710 - DNA, 431 bp, Gossypium hirsutum
  Clone ID: LIB3145-026-Q1-K1-E6
gccaccaggaggaaaaaagcaaaagaaccctaccgacgatgttccggcaagcgtcacgcctcttggctcgaactaccaccccatggaggggaagtcgagcattttcgtcagatgtaccagccacacttgatttggatggatttgaggttgttcatgatgtgatttatttactttcggattgggctaaaggggttattccctttgatactaatactaaggttgatggagatcttggtctttttctcttcaaaattcccctcaaggcaaaagtgtcctgtgaggtgtacatggatagaaataatcagtcaattgttcgtcaagactgctatgctgagtaatgtggtggacagtgctccaatagatgtactagaagtgggaaacagattcggattctgctgtgatttggttcctctttgatgatactgtacatg

SEQ ID NO: 15711 - DNA, 431 bp, Gossypium hirsutum
  Clone ID: LIB3145-026-Q1-K1-E7
gtaggatcttaagggatgtggcttgtatatgggctaaaagtaataagttcatttacacgcaagatccgataaagtctatattcatcactaatttcggtggaagggtaaagtttttacccaatttaaatgcatctgaccaaccaatcgaaggtgatatagatcagttaaaatatttgatgaactacatcgtcaatatgccattcaaatctgttattcaaaattatcagaaattcaatatgccaaatgaactatcatgttttcttacccagctcaattttcgacacttgtaagttatctttcacatttttacttttactttaaagttcgataactcatatggtctacttcattaatttcataatcttttttttacttatttgcctatgtctaaatggataggaaatacatgagtcctacatttctactggatg

SEQ ID NO: 15712 - DNA, 391 bp, Gossypium hirsutum
  Clone ID: LIB3145-026-Q1-K1-E8
gcctgaaccaccgtcttcttctagaagccaagatgattcttcatcttcttccagtttgattgggaagagaacgaagcattctcaggatgatgagctctcttctccggttaaccgtccaactcctgggtcatctggtgcgtcgccagagtctagatatggaaagaattcttcctggggctgttcacttagtttgaccgagtataaggtttgtaagaatgatgggttagctgatgcttcaacacagactgaggaaaacacagacagacctaagtcacgagaaacttgtacaaggggtgtttcgactgatgatgggtctttagaacccgaatgcaatgagaatttccaaaacctggtccctaacgcttgtgtaaaagataatcccgagatatgc

SEQ ID NO: 15713 - DNA, 392 bp, Gossypium hirsutum
  Clone ID: LIB3145-026-Q1-K1-E9
cccacgcgtccgggatatgcccttccacatgccatcctccgtcttgaccttgcaggtcgtgatctaaccgatgccttgatgaagattcttaccgagagaggttacatgttcaccaccactgctgaacgggaaattgtccgtgacatgaaggagaagcttgcttatgttgccctggactatgagcaggaactggagactgcgaagagcagctcatctgttgagaagaactatgagttgcctgacggacaagtcattactattggagctgagagattccgttgcccggaagtcctcttccagccatctttcatcgggatggaagctgctggaatccatgaaactacctacaactctatcatgaagtgtgatgtggatatcaggaaggatctcta

SEQ ID NO: 15714 - DNA, 432 bp, Gossypium hirsutum
  Clone ID: LIB3145-026-Q1-K1-F1
atttatcggaacttaattcggagttccgtagctccagatataaataatttagtgaccgttgctcagaaagacatcttgtagtgaacttgagaatatgttgtaaacattgataaaacaagttaatgagttgcttattgttttcatatgaacttactaagcgaaagcttaccccccctcttctttcccatgttttctagagtttccaggttagctcgggttggaggccgtcagagatattatcacactgtcaagctaacgctattggtgtagtgatttcaagtactttgagcctatgacatgtataggagtttaaatattagattatgtgatatggctttaaccatatgtgttggcctattttgattatggggttgtaaatctattttattatgcatgcatgtgctatggtattatgtgatgagtttataaaaa

SEQ ID NO: 15715 - DNA, 382 bp, Gossypium hirsutum
  unsure (1)..(382): unsure at all n locations; Clone ID: LIB3145-026-Q1-K1-F10
tcttgatgtttacaatcatgtcgatgactttcttccctgacctaaaacaaagcactatttcaaagcaaaaaataagaaacaagaaataaaatccaaaaccagatcaaagtctactgagtgacagtattgttggaatacgtgaacttgggttttcgggctctcgaaatgtttctgatttcatgactttgtgtagaactttcttcgagaaaactctactggttgtgaaagtaattgaatcaactggtctgaaagaataaatccaccttgatatggtatatttctattcttctgcaacttaaagacagtaaatggaataatggaaatgaaagcgggaccttgtaatatttntctgtatgtttagagcttatattttccttttcag

SEQ ID NO: 15716 - DNA, 416 bp, Gossypium hirsutum
  Clone ID: LIB3145-026-Q1-K1-F2
gtcaacaaatggctcgtacaaagcaaactgctaggaaatcaaccggcggcaaggctccccgtaagcagctagccacgaaggctgcccggaagtcagctccggcgaccggaggagtgaagaagcctcaccgtttcaggccaggaactgtagctcttagggaaatcaggaagtaccagaagagcaccgaactcttgatccgaaagcttccgttccagaggcttgtgagagaaattgctcaagatttcaagacggatttgaggttccaaagcagtgccgtcgccgctcttcaagaggctgccgaagcttatctcgtcggactgttcgaggatactaatctgtgtgctattcatgctaagagggttacaatcatgcctaaagatatccagcttgctaggagggatagaggagagagagct

SEQ ID NO: 15717 - DNA, 342 bp, Gossypium hirsutum
  unsure (1)..(342): unsure at all n locations; Clone ID: LIB3145-026-Q1-K1-F3
cttgaagtgctttgtgttctctcttatctcgctccacttcaagatcaagcctatttgaagattgataatcctcttccatgcagaggtgtcacaagggctgttttcactgttcctgctattggtatagcttccattttgcttttaattaatttaaatggttaagctaagggtatgtttgtaggagtgattacagtgattttggaactttggggggaaatgtaggtctgaaatggaaatttctggtatttaggtatattaaaggctttttctccattgactatttaggtatattccttgaattattatcatgaattaactttttaatctaaaacttnttgagct

SEQ ID NO: 15718 - DNA, 307 bp, Gossypium hirsutum
  Clone ID: LIB3145-026-Q1-K1-F4
caaagagtgatgccgaagtgaaagttttgggcacatgggcgagtccattcgtgatgagggtaaggattgccctgaacatcaagtctgtggcctatgaatttcttcaggagaggttatgggaaggcaaaagcgagcttctcctcaaatcaaacccagttcacagaaaggtccctgtcctcattcatggtgatgacaccatctgtgagtctctcattattgtccaatacatcgatgaagtttggccttctgctcccattcttccttctgatccccatgaacgtgccaccgctcgtttttgggctgctta

SEQ ID NO: 15719 - DNA, 326 bp, Gossypium hirsutum
  Clone ID: LIB3145-026-Q1-K1-F5
cggacgcgtgggcggacgcgtgggccataatcgagccaaaatcggtgaaacccccccccccaaaaaaaaaaaaaaaaaaccagtgcagaccagtttgctaaaatttatatttccttggtaggacataaatgtttttattgtcctaaaaaaaaaaaaaaaaaaaaaaaaaaaaaaaaaaaaaaaaaaaaaaaaaaaaaaaaaaaaaaaaaaaaaaaaaaaaaaaaaaaaaaaaaaaaaaaaaaaaaagggggggccgttttaaaggatccaagtttacttccccttgcttgcaacgtaatagtttttttttggggcccccaaaatta

SEQ ID NO: 15720 - DNA, 417 bp, Gossypium hirsutum
  unsure (1)..(417): unsure at all n locations; Clone ID: LIB3145-026-Q1-K1-F7
ggaaaacaacaagttttcgggtatgatccctatccaatacgcattgagagccgctctgcctgcctccggaattgccccgtttgcaagactgttgcttggggggaactacttgttcggaccaattccagggccattgctggtactcaaaccagacactgcaaatgtcagccttgctgacaactgcttgatcaggtgcccatcgcgtttctttttctgccaaggtgctgaccagaaatctttaatggaatgcaagagttttggttctgtaatcccttgaatcatgttatttcagcaatgtttttagttgcaacatccatgtgtctttcttgtctaaaattctttctctattgntcttagtttgggcttgttagttttcagtttgttagtgggaaatctaaaaagaaatcttttgttttc

SEQ ID NO: 15721 - DNA, 150 bp, Gossypium hirsutum
  Clone ID: LIB3145-026-Q1-K1-F8
aaaaaatttgcggaaagatgtgttgttgtgtcaggtggagaaacagtgttagctctttgacatgacttaggatggatggtgtacctgtacctttaaatttgtttgatggtgatcatttagatatgagataatggatttcatccttgttgc

SEQ ID NO: 15722 - DNA, 193 bp, Gossypium hirsutum
  Clone ID: LIB3145-026-Q1-K1-F9
gtagggaggagtgacagaggacgaatttgtagtgtaggaattttcgaatataattgttatggtggatctttggtggtgttttcgacttttgcttattatgtctatggattttgctgccttgagtaaaatccttgtgtgatagttattctatatgtttttgaatatgaaattcttgacaagaatattggatttc

SEQ ID NO: 15723 - DNA, 410 bp, Gossypium hirsutum
  Clone ID: LIB3145-026-Q1-K1-G1
tgcaataattatagtctgaaacaatagaaataatattgtattttactgtgtttttattcatttgtcttttgcccctccatcttcaataaatattgtctaacacattttccttgttagcggacataagcgtgggagatggagtccgagaaatctgccagatagatattaaaaatgtataattctatctgctctttctctttttcctcttttcatctctcaaagatttcaacttgcagtctgaatataatttctaaggaaagataaccacaccttataactccttatccttttctgggttcatttttcatcaaagccacccatgaatttatcgatcatgtattctgaatttgaagttgatgacctcttactatgttatgaatttatgaaaatttcaactacaagtgcataaa

SEQ ID NO: 15724 - DNA, 422 bp, Gossypium hirsutum
  unsure (1)..(422): unsure at all n locations; Clone ID: LIB3145-026-Q1-K1-G2
gattaatatgaaactgggattagcattgcagggaacaattaacaaatagctggttgtattgttgttcagagaaaagcaaagtggatgaggaaatatgttagcaatagcaaggcaaaggatgttggggcaatcatttaagaagattctgcctgcagtgtctgtcttgagaagttactcatctgctgcaaaacaggtaccgaatgctaagtcgaccatatgcttttaattgcatactaagattgaggacatctactgaattcaagcctggccattcttatggtcactttttcccagatccacaatatgaaaatgttcagcacatcatttgttgtgatttttttgcaacatatgcttatgattttgatttcgctaataatgtttgattttacagatattaattactcngtacaatttcgttcttt

SEQ ID NO: 15725 - DNA, 397 bp, Gossypium hirsutum
  Clone ID: LIB3145-026-Q1-K1-G8
atttaaaaagaaaaaaagagagatggcgtctgtaataaaatctgcaatcttaattctgtcggtgtttttatctgtacgcttcagttcgggtgttaggttgctccaggaacagcccaatgatgaccccaaaaacatggacgctattcctcccattgatgcactcaaccctaccgagttgaatggacccggtgttggcattcacgaagatcatgttgtcccaaaaggtgctgaaattggtactcttggttttggttttgaaggtggtcctgataaatgttgttcttctggatgttccggtaattgtaatcctggtggtttcgttctaccatttcctcaaattccagaaatcccaagaattccagaaatcccacaaatcccacagatcccacaaattcca

SEQ ID NO: 15726 - DNA, 417 bp, Gossypium hirsutum
  Clone ID: LIB3145-026-Q1-K1-G9
taaggatccaaaggaatgggacctgaccaacttttcggtaatcccattcatgttatggagaatgttgcacaaccagctatggattagcctttctcgttatcgaactgccaaaggcactaacaggattgtggacaagggtatcgaatttgaccaagtcgacagggaaaggaactgggatgatcaaatattgttcaatggaatcctgtttttcttggctaacaaatacgttcccggggcttcacacttacccctatggagaacagatggtgtgattataaccatgttgctccatgtcggtcctgtggagttcctttactactggcttcatagagctctgcaccatcattatctttactctcggtaccattctcatcaccattccttcattgtcactgaacctatcactttctgtataca

SEQ ID NO: 15727 - DNA, 417 bp, Gossypium hirsutum
  Clone ID: LIB3145-026-Q1-K1-H1
taaggatccaaaggaatgggacctgaccaacttttcggtaatcccattcatgttatggagaatgttgcacaaccagctatggattagcctttctcgttatcgaactgccaaaggcactaacaggattgtggacaagggtatcgaatttgaccaagtcgacagggaaaggaactgggatgatcaaatattgttcaatggaatcctgtttttcttggctaacaaatacgttcccggggcttcacacttacccctatggagaacagatggtgtgattataaccatgttgctccatgtcggtcctgtggagttcctttactactggcttcatagagctctgcaccatcattatctttactctcgttaccattctcatcaccattcctccattgtcactgagcctatcacttctgttataca

SEQ ID NO: 15728 - DNA, 379 bp, Gossypium hirsutum
  Clone ID: LIB3145-026-Q1-K1-H2
cgcttcagttcgggtgttaggttgctccaggaacagcccaatgatgaccccaaaaacatggacgctattcctcccattgatgcactcaaccctaccgagttgaatggacccggtgttggcattcacgaagatcatgttgtcccaaaaggtgctgaaattggtactcttggttttggttttgaaggtggtcctgataaatgttgttcttctggatgttccggtaattgtaatcctggtggtttcgttctaccatttcctcaaattccagaaatcccaagaattccagaaatcccacaaatcccacagatcccacaaatcccacaaattccactaatcccacagatcccacaagtcccacagatcccacaaagtccaaaaa

SEQ ID NO: 15729 - DNA, 366 bp, Gossypium hirsutum
  Clone ID: LIB3145-026-Q1-K1-H3
gtcccgttcaatccaagtatctaacaatgacaacccgtttcaagaagaatcgtaagaagcgcggccacgtgagcgccggtcatggccgtatcggcaagcaccgcaagcacccggggggtcgaggaaacgccggaggtatgcaccaccaccggatcctcttcgacaagtatcaccctgggtatttcgggaaagtgggtatgaggtacttccacaaactctgcaacaagttttactgccccatcgtcaacatcgacaagctttggtctctcgttccacaagacgtgaaggcaaaggccaacaaggattcggcgccgatgatcgacgtgacccagtttgggtactttaaggtcttgggaaaaggtgtgc

SEQ ID NO: 15730 - DNA, 411 bp, Gossypium hirsutum
  Clone ID: LIB3145-026-Q1-K1-H7
cttttggaagaatatgctatagatgaattggtggacccaagattggaggattgctattccgagcatgaagtctattgtatgctccatgccgcatcattatgcataaggcaggatcctcattctaggcctcgcatgtcacaggtgctacgcatattggaaggtgacatgcttatggactcgaattactcattgccaagatacgacattgggaaccgcagtggccgggtttgtgcagaccaaaaatattacagtggatccctggaaaatgaggcattagaagagttcaatgggaagctctaccttgacgggctaaggtcaggaaccaggaggacttcgtgcgcagatcatctgtaaaaagcctacagggggttctttacacgcatggtacgcatatcaatctatcaatctata

SEQ ID NO: 15731 - DNA, 113 bp, Gossypium hirsutum
  Clone ID: LIB3145-027-Q1-K1-A1
ctaggccagacaccaaacgttgcacctttaaaaccaattttactatgcccaaactgtgacggcaaaacgtatccaataaggacgcatgctcaagtaacaacacaaatggatac

SEQ ID NO: 15732 - DNA, 400 bp, Gossypium hirsutum
  Clone ID: LIB3145-027-Q1-K1-B1
tagcccaaggtagtactagcggttttatatctaatggcactattattaccctattacactctcacttattcactaattacgggagctcggttatcaacagaagattatactcacacccttgtattaacaaatgttaatattgcttttatgaattggtttaataataatgcaccttctttctctaccctacattctatggctatcctaaaccctcatctactttattttctacatcatcttacaatattttttctcttcatcacaattaattaatactatctcctataacttattcgcggccacacaccactttatctctttcaataactagcggattaaatacctcacaccaacgtactaccaatactttaattacatctcttacaataccattctcatc

SEQ ID NO: 15733 - DNA, 401 bp, Gossypium hirsutum
  Clone ID: LIB3145-027-Q1-K1-B11
aacccttgataccctttagctaacccaactcttcttatcaccccaatcctttcccagggcgtgctgtttctcatacaattagccagccccacaactactccctacttctcgccttaatcccagtccttactgcagcaatgtttccaccaactcaagcaattgtatcctcaacacctttaccaagccatcttccactttatcctccaatccatccttcaacatcaacctcaaaactgtcaactcactttgcttttttctatccacatatcgcaacaacttacagcaaatttccgccttcaacaaccgactccatgcccctacccttcttcccactgtgttccccactaaaaaaactattttctttattaaaccccttgcctactatctattttaataattta

SEQ ID NO: 15734 - DNA, 347 bp, Gossypium hirsutum
  Clone ID: LIB3145-027-Q1-K1-B5
atctagcccttgcagcacatgtttccaccaatccaacaaagccaattttatcagttcacatctctcactacccactgggggaagcgtggtaacttccttaaaccaccaatcttattatagcactagtatgcactcgctattatattgttcaaataactacaactaatctacctgtcgacttattctctatactgcaggaaattacatattaagcttatccatacccaaatcctttcccgtaaacaacatacccaagttgatctataatccctataataaaacgctctctctatgcagcggactataacgttctatccacgacaacacctagattaccaaacttactt

SEQ ID NO: 15735 - DNA, 53 bp, Gossypium hirsutum
  Clone ID: LIB3145-027-Q1-K1-B7
tattataaccttattacatcaaaattttcaaaatcaatctacaaattcacggt

SEQ ID NO: 15736 - DNA, 268 bp, Gossypium hirsutum
  Clone ID: LIB3145-027-Q1-K1-B9
cgcctacgtaaacttttattctttaaattctacccactccttttataatcacttccttcaacataaaaaccggccgatttaacttcttcacatattcttaaactatttttacttacactttatctaatctaacacaaccccttattttaaacctctttaatttctttcttaccttttttattttttaaaaaaccaaccatacatctttacataaactcacccttcaatttttctttctttcctcataaaaaaatatattataacttct

SEQ ID NO: 15737 - DNA, 197 bp, Gossypium hirsutum
  Clone ID: LIB3145-027-Q1-K1-C1
ccagggagttatccctaccagaattaaattgtacactcctcatccctttctaattcatacctatttaagaaatccttgcgctgtttaatttatcatttgatctttattcttacccttgtaccacttctattttataatcttttaatttaatcccacttaattcacaacgcttttctatatttatcatttcctctatc

SEQ ID NO: 15738 - DNA, 315 bp, Gossypium hirsutum
  Clone ID: LIB3145-027-Q1-K1-C5
gctctacccggatgcactgatcaaagtaccctatgacctcctaaattctttcacaaccattacttactccttgggtgagatataatcacttcctaactatcatatctcttttccagtattccataaaattctttgctaatattatatatcaatctacctactattattcaatatacaatcctttaaattttttatctttataacctaatcttttcccatcaccaacatattttatcttatttcttattcctattataaaaagtttattttataaaccttactatcattttcttatacatctcccttatctatatt

SEQ ID NO: 15739 - DNA, 221 bp, Gossypium hirsutum
  unsure (1)..(221): unsure at all n locations; Clone ID: LIB3145-027-Q1-K1-C9
gtacgtaagctttgatcctctataatttacccactccttttcattacccctatcctataccagggcgcgtattttcttattcatcaacgcacccccacaaccacnccctactgctctcctcaatgccaatcgatgcggcaacagtgttgtcatcagctcacgcaggtggagccgcaacaccagtaccaggccatcttaggctttgtcctccactccatcct

SEQ ID NO: 15740 - DNA, 374 bp, Gossypium hirsutum
  unsure (1)..(374): unsure at all n locations; Clone ID: LIB3145-027-Q1-K1-D10
cgggcgcgtacgtaaacttggatcctttttagtctacccattctttcttccaccaccattccttccccaactgtnncggtctgtatcataacctccctccacaccggacacgcccctatccaaatccaggggcgtaacatggcatcaaaacgtatcctcaaggaattaaaggacctgcaaaaggaccctccaacgtcatgcattgctggtcctgctggtgaggatatgttccactggcaggcaaccatcatgggtcctcctgatagtccatatgctggaggtgttttcttaatgaacattcattttcccccggactaccctttcaagcctccaaaggtatcttttaagacgaatgtctttcatccaaacatcaa

SEQ ID NO: 15741 - DNA, 188 bp, Gossypium hirsutum
  Clone ID: LIB3145-027-Q1-K1-D3
tcgatggacttactatctacactcgcaccatactctatcgccacttttacgctaattcatcttaaaccggttccggctaattcaatcgactaataattccttccacactcctaactttctcatcctatatcaaaaccttatctatctattctatctctcgcctcatgaggggttcggactacagcaaa

SEQ ID NO: 15742 - DNA, 240 bp, Gossypium hirsutum
  Clone ID: LIB3145-027-Q1-K1-D5
ctagcccgggcagcactcattaaaagtacctacctttgctcttaaattgattttccaaactatacatccttaaccggtcagtggggtgtcacatgaatacatattccatgcttttactaactgtattaaataatgctatattgctcaatagtatactcacgatctgcactactattcatacaagggcggatccacttatctgcagtaaaccttatatcaatcttatcgataccctccacc

SEQ ID NO: 15743 - DNA, 219 bp, Gossypium hirsutum
  Clone ID: LIB3145-027-Q1-K1-E1
tacaagagaaatttatccttacccacttttacaaaattttaatggtaagtttatacgctcctctcatggcataaaacgaattttttagaatccacatttgattgatattcttaccagtctaaccatctatactgatcctcatagaagaaaatatttattggtaaactatcaaataataccttcccctcgtatgttttggaggccagaaatttacttttt

SEQ ID NO: 15744 - DNA, 234 bp, Gossypium hirsutum
  Clone ID: LIB3145-027-Q1-K1-E5
gcggccgctctagcccttgtaggcatcatcaaacatacccaacaaattctcttgtttcattttaaatcccccacttcctaatggggggagggtgggaacattttcaaagcaccacatgttcatataggaccagtatttactggttattatattgttcgataaactaatactagtctatttgctcctataataataataagctgataccccggactgaagtaatttcatatcaaa

SEQ ID NO: 15745 - DNA, 333 bp, Gossypium hirsutum
  Clone ID: LIB3145-027-Q1-K1-F2
cccgaccgcacgcgtgtcgcgaagctaacatgactgaccttttatgatacgtgtgagcgcttcatattaccacagcctgaacggaacgtcgggggatatggtactcgaaaactaaatccttgcctaggattcacgtttttattctgtggcggtatatgatccagtgaatctaccgttccgatttttctgtatacacatttaagcaaaggtctggacgagtttatacatctatccttgtcctgctagaacagatagttattgattatttattcctatattaaatggtcttctatgtattgtggaccataatgtttttttcgcgctctgacctac

SEQ ID NO: 15746 - DNA, 171 bp, Gossypium hirsutum
  Clone ID: LIB3145-027-Q1-K1-F3
agggccgacccacgcgttccaaggcatcatttcacctaagggcttccctacccaagtccctcaaacgcctgaactaagcgtggtgtgccaatttagtccatgactagatctttacctagttttcaccatattattttgttcctttagatcatctatttaatatatcttgtc

SEQ ID NO: 15747 - DNA, 430 bp, Gossypium hirsutum
  Clone ID: LIB3145-027-Q1-K1-F5
gctctagcccgggagagcacacattaaaggtactcgatatcgtttctctattctctttatatactagaataacgtattggaggggaggggtttcacaattaaaacgagaaatttatacaaacccattgttagaaaatattgatggtagtttattaggctagactcagggcatataatgaagtattaatattacacatttgatggatatacttaacagtataaccatctatacggatgcttatagaggataatattattgatcatggcatcaaatactggcttctcctgtagggttttcggcgccagaattcacttcttcgctatatggaactatgtgaaatgcatcttcacaacaacgtattgttgctaaactaggtcagagcgtgtatagaacattatcctcctctttatatagaagaccttttaatat

SEQ ID NO: 15748 - DNA, 430 bp, Gossypium hirsutum
  Clone ID: LIB3145-027-Q1-K1-G1
agcccagagatttaacgctagcggtattagatatcgtttctctatttccgaactatgatagtagaacgtatccaattcgagcagttggccaattaacaagagaaatttatacaaacccagtattagaaaattttgatggtagttttcgaggctcggctcagggcatagaaggaagtattaggagtccacatttgatggatatacttaacagtataaccatctatacggatgctcatagaggagaatattattggtcagggcatcaaataatggcttctcctgtagggttttcggggccagaattcacttttccgctatatggaactatgggaaatgcagctccacaacaacgtattgttgctcaactaggtcagggcgtgtatagaacattatccgccactttatatagaagaccttttaatatagggat

SEQ ID NO: 15749 - DNA, 147 bp, Gossypium hirsutum
  Clone ID: LIB3145-027-Q1-K1-G11
ctttttgactcgttgatattatatcccccccccccttttccttaacccttaactctcattcatattcttaacaatcacctctccatctcgttcttctcttaccacccactcctgcacccacaccaacaacagacacctccccccaat

SEQ ID NO: 15750 - DNA, 326 bp, Gossypium hirsutum
  Clone ID: LIB3145-027-Q1-K1-G12
taagctttgattctttataatctacccactccttctctcatatacccctccaaaacacggtttgatggattataaacaatttggcttccaacgtcacaaataaaattttttctctggtcatcacacaccattattgcataaaacaggaaggtggcatttgtgagaatcattgttctgatcctggtgcaaaagaagaaccaacatcttacggaacaaatacacctatatggaatgcaccacatggtcccttttctacagatgagaacttccctgtgaaattaacgaacccaaacactgattaattataaagaaaagtaggtcttcac

SEQ ID NO: 15751 - DNA, 346 bp, Gossypium hirsutum
  Clone ID: LIB3145-027-Q1-K1-G2
attatacatgaagacattatatgcaaacccagacttagaaaagtttgatggtcgtttgcgatgcttggctcaaggcctataaggaactataatcagtccacatttgatggatatacttaacagaataaccatctataccgatgctcatacaggaaaatattattggtcacggcatcacataatggcttatcctgtagggttttacgcgccagaactcacttttgcgttatatggaactatgtgaaatgcacctccccaacaacatattgttggtcaactaggtcatggcgcttatagaacattatcgtgtcactttatatagaagaccttttaatatttgggataa

SEQ ID NO: 15752 - DNA, 408 bp, Gossypium hirsutum
  Clone ID: LIB3145-027-Q1-K1-G4
cgctagcgatattaaatatcgcttctctatttcctaactatgatagtagaacgcatccaattcgtgcagttgggcaattatcatgagaaatttatacaaacccagttttataaaattttgatggtagttttcaaggctcggctcaagtcatataaggaattattatgattccacatttgatggatatacttaacagtataaccatttatacggatgctcatagaggataatattattggtcatgtcatcaaataatggtttcttctgtatggtattaggggccagaattcacttttccgctatttggaactatgggaaatgcagcttcacaacaacttattgttgctcaactaggtcatggcgtgttaagaacattatctgtcactttatataaaagaccttttaata

SEQ ID NO: 15753 - DNA, 156 bp, Gossypium hirsutum
  Clone ID: LIB3145-027-Q1-K1-H5
tctagccccgaagcactcatcaaatgtaccctatataatcacaatattctctttacataccactttcacttactcgataactgggatatcactaccaccccattcattatcaaatcactcatcaatatataccaaattcaatatctcattaataaa

SEQ ID NO: 15754 - DNA, 348 bp, Gossypium hirsutum
  Clone ID: LIB3145-028-Q1-K1-A1
ggttaatccgacaaaactgaggtgggaaatgttagcttacaattgtcagaatgtggaacgggtagctctatgtggtaatgatacagacggtgatgccgagatttgttgaattgctttgaagtgtatatctccaaagaagctttgtatttagagatgccccatatcatatcatgggatggaagccctcgctagtggttgccctgatttggttaaagggaaagtgacagaacgtggaggcgtcactccggaacgggcttattggtctagagtactttatggggtactatccggtaattgggctatgggggtacatttacatgtgacggccgatcatggtgtattacagga

SEQ ID NO: 15755 - DNA, 375 bp, Gossypium hirsutum
  Clone ID: LIB3145-028-Q1-K1-A10
atcccgtgctatttctgggaagaagggaattcattctgcgaaagatcctccggtcatgcacattcaagaccttacaatggcatcagccaagaaagctagggatttcctgccattcctgaatcgtggcaggattccagctattgtggaatatgtcctaagtggtcatcgtttcaagttgctgatcccaaaggaaacttgtagcattgccttttcattttctggtgtcagatgtcctggtcgcgaggagccctactcagatgaagccatagctctgatgagacgaaagatcatgcagagagatgtggcggttgaagttgaaactgttgatagaactggaacatttttgggatctttgtgggaatcaaaaaccaatgt

SEQ ID NO: 15756 - DNA, 413 bp, Gossypium hirsutum
  Clone ID: LIB3145-028-Q1-K1-A12
taaaaagaaaaaaagagagatggcgtctgtaataaaatctgcaatcttaattctgtcggtgtttttatctgtacgcttcagttcgggtgttaggttgctccaggaacagcccaatgatgaccccaaaaacatggacgctattcctcccattgatgcactcaaccctaccgagttgaatggacccggtgttggcattcacgaagatcatgttgtcccaaaaggtgctgaaattggtactcttggttttggttttgaaggtggtcctgataaatgttgttcttctggatgttccggtaattgtaatcctggtggtttcgttctaccatttcctcaaattccagaaatcccaagaattccagaaatcccacaaatcccacagatcccacaaatcccacaaattccactaatcccac

SEQ ID NO: 15757 - DNA, 273 bp, Gossypium hirsutum
  Clone ID: LIB3145-028-Q1-K1-A2
cccacgcgtccgagcatggaagtctccttggtttatcaactcttttgttccaggcccaaggattgatacagaaataacaattgaggacattggatacctgatgagccctccagatagaagctacgatgccatcgggttgatgaaacaattaagtgagcatactgcaactacttatgctgatgctttggaagttttgggaaatgaaactccagaatcaattgtgaagggaagacgctccaacaattccaaaatggacaaagagaaatatcaaat

SEQ ID NO: 15758 - DNA, 325 bp, Gossypium hirsutum
  Clone ID: LIB3145-028-Q1-K1-A3
gtcacgcgtccgaccacgcgtgcggggaagggcataacactgtgagtaaaaactgaaaaggagaagaacgaaaagacaagctctaaaggatgcaaggcaatgaatcaacaaggttagtatgttcaattttaacaatggatcagtcttgtttctcttacaaagcttgtcgtttttgcgaaacacctgtccctgatgacacgcctgccgtatttatctgcaagaatcacagatgcgccggtcgcctgtgcagttctaaacgactatttcgcttactcttttcaaatggaacaaagacaaggggtataaatgttggaacttttgataa

SEQ ID NO: 15759 - DNA, 219 bp, Gossypium hirsutum
  Clone ID: LIB3145-028-Q1-K1-A4
gttcgaggaaaaaggccagctcagacgagggtgagttctccttcacagatctgggatgcgctggccttgcattctttctattagtgtaaagaattatttctaagatattgattataggagaggatgagctcgctaacatgtcacgatagcgagtgaggtgcacgcgccgcttagatacagcggaaactgacgatgctctggcgctttacactgtagatc

SEQ ID NO: 15760 - DNA, 371 bp, Gossypium hirsutum
  Clone ID: LIB3145-028-Q1-K1-A5
cccacgcgtacgctcggtggtgcatgccctgcaggtaattcatctgacttcatgaggctagaacttggtgatatggccattcctgccatgcttctagcattagacctctgttttgatcacctaaagactagggaaacggtaagtcttgtaaatttacattcatcgaatgggcacaaactcatattagttgcccttcctggctatgcttctggattaataactagccttgctgtcggcattttgactcactcggactaaccagctctcttttatctagtacctccaacatctgggacctgtgattttcatctcgtggataaggaaggatctagatgtattatgggaaagaacaatgccaaatctcatcgaca

SEQ ID NO: 15761 - DNA, 328 bp, Gossypium hirsutum
  Clone ID: LIB3145-028-Q1-K1-A6
aaacttttaaagcttaaaactttctcagcttctccacttcccttctcaaccgaaaggctattattctggcctacaaccgccccccaagatctgactgcgacgaatggggcaagacccttcgacagtgtgaacgtgatataactccggtaagtctctcgttctctctatacctcgtatttctgtcgaaatagaaacagaataacagaataaaaaacaaaaaaaatcacctttggaagattcttggctggactttattgattttaagttggctggggtactaaaaaaccgaacttggttttcttggaaagaaaagggaaaaacccccttt

SEQ ID NO: 15762 - DNA, 286 bp, Gossypium hirsutum
  Clone ID: LIB3145-028-Q1-K1-A7
gtctctaacaaggatacattattaaatcagaaaggcttggagtttgacaatcactggggaagagtagattatgatgccgtgattccagccgagaaaattgcagaattgaatcttcaggcgattgtttacgaggaaaacttaggagagatccaaccatgtcatgcgcctttaaaaaaaggtggactttgtcagagaagagacttgaagatttgcccatttcatgggcccattatacctcgtgatgatgcaggaaaccaaatcaatcagagttcttcaacagatgata

SEQ ID NO: 15763 - DNA, 430 bp, Gossypium hirsutum
  Clone ID: LIB3145-028-Q1-K1-A9
ggatgttcctggaggatcaacatacagggaaagcagctttactgaaccagggaaggatattgctgcagtagacagtcctattggacgtttgggattgacgatctgctatgatttgagattcccagaaatttaccagcagttgcggttcaatcatgatgcacaggtcatattggtaccttcagcttttaccccggttactggtcaggcacattgggagattcttcttcgtgctcgcgcaattgagactcagtgttacgtcattgcttccgctcaagctggaaagcacaacgagaaaagagaaagctacggtgacacactaataattgatccatggggcacagtagttggccgattaccagatcgattatcaactggtatcaccgtagctgatatcgatttgtcattgatagattcagtgaggaaaaagatg

SEQ ID NO: 15764 - DNA, 437 bp, Gossypium hirsutum
  unsure (1)..(437): unsure at all n locations; Clone ID: LIB3145-028-Q1-K1-B1
cgcagtaccccattcattacgaaatttagctgctgccactgaaggacgaagcatgctcgtcgtacctgagattcgcaatgtcttggatctcatgcgtaggggtgagaactcgcgtatcgaggatgttgcgagtcctcatcaatcagcattttttggggtagctgatattcatgaccggcataaggatatgcggctcgatgttgattacatgtcattcgaagagttactggctctagaagaacgcattgggaatgtaaacacgggggtgagtgaagaaatgatatcaaaccagttgaaacgaccaaagtactcttgtgtaccaagaactcaattagagacagaaccatgttgtgtttgtcaggaagaatacaaccaccgtgaagatcttggaacactctgatgcggncatgactttcatgctgattgcattaaacaat

SEQ ID NO: 15765 - DNA, 444 bp, Gossypium hirsutum
  unsure (1)..(444): unsure at all n locations; Clone ID: LIB3145-028-Q1-K1-B10
cgataataattaagaatcatagaatatctttagagcatatagtttctttccttcctcctcaggcaccagtgctttttccaatcctcttctcctccaccagccgntgaagctagcatccaagaggtaatattattagcatggtagaagataagaggagccgaaagatcgtagataatgaggtattagtgtagccgaaaccccgaatgccagtagatagctgcattagcaaatagaaccctatgattagggcatagcgagtcaagaggcatcgattagtagtccagattcaacccaggtggatatttgcggtgatcccagccactgtgagagtttcgtgcacatatttgccatagaattcttactatccggaaggaaaagtgagcattgataagtgcttagtgaattttaagtggcacctgctcaaaatcatcccatagtcgatcc

SEQ ID NO: 15766 - DNA, 433 bp, Gossypium hirsutum
  Clone ID: LIB3145-028-Q1-K1-B11
ggagttcaaagaagctgctgataagattgatggtcctttgagacaaatcttcgttgagttcttggagaggtcttgtactgctgagttctctggttttctcctctacaaagaacttggaaggaggctgaagaaaaccaatccagttgtggctgagattttctctcttatgtcaagggatgaagccaggcatgccgggtttctgaacaagggtttatccgatttcaatttggcattagaccttggcttcttgacaaaagccaggaagtacacttttttcaagccaaagttcattttctatgccacttatttatctgagaaaattgggtactggagatacattacaatctacaggcatctcaaagaaaacccagagtaccaatgttatcctattttcaagtattttgagaactggtgccaggatgaaaaccgtcac

SEQ ID NO: 15767 - DNA, 422 bp, Gossypium hirsutum
  Clone ID: LIB3145-028-Q1-K1-B12
cccttttattctctttttaacgtcttttttacttctctctgttaatttccccaaaacagtagttgtgatttaaagaaagttttaattaccattaatgttaccgttgcattattcgtaatctgaacttgcttttatgttatttggacatcatgctttcgatttttttgtttagttgtaaagaattttttatccggtacagatttttaacctgaataacttcttcagtagttgctttttttttgtctggataatagttagatagaattatactttgttcctttcttgttgcccgcaataagacgacattttttggaaattaattaactatccggatttttttttatgtttttaatttttgagttctgtgttttattctgctgtatttttttttgtttcgcagtcacagctcttacattatattt

SEQ ID NO: 15768 - DNA, 289 bp, Gossypium hirsutum
  Clone ID: LIB3145-028-Q1-K1-B2
gcactggcctggttcgtgacttagcgaactcggaaatatccttttatgtgctgtcctccttacatttatcaagtttatataatctgtctatatttacttgggttatttagatcattgaacaatatgttggccctatctatcaacagtatctttcctatgtgaatgctaattgcttgagaagatttttaaccatttgcttatttagtttgactcctttgttagaaacacccgggatatgtttaatcttgtaaactaagacctgttctttattcaagccgtctggcctttc

SEQ ID NO: 15769 - DNA, 409 bp, Gossypium hirsutum
  Clone ID: LIB3145-028-Q1-K1-B3
gttgctagctattttatgttctaaatacgatttatctcaagggtgtctagcagtggcttttctaggtttgatatcatcacgaaagctgccttattaattattttgtaatttgctaatttgttttatgaataaagaattggaacggaaaaaaaaaaaaaaaaaaaaaaaaaaaaaaaaaaaataaaaaaaaaaaaaaaaaaaaaaaaaaaaaaaaaaaaaaaaaaaaaaaagaaaataaaaaaactaaatttaattaaaaaaaaattagaaaaatataaaaaaaaaaagggggggccctttaaaaagcccaaattttttttcccgggtgttgcgaagaaaaattttttttttggggcccccaaaattaaattaatgggccggttttttaaaacttggtgattggaaaaac

SEQ ID NO: 15770 - DNA, 430 bp, Gossypium hirsutum
  Clone ID: LIB3145-028-Q1-K1-B4
cttttgttttccaaggaaaaaacaaaacactctctcccccttttgtctttccaacgatcgggctccttcaccgcccaccgtaccaccaccgttttcagtggccggtgacgcgcaacaataggtatttcaaccccatttttgggaccctttgaaggccgagttttcagccaaacaatgcggaaatgaaagggtctctccctctctaaacgacgcgaccccgacgacggaagaaggatctcccgcgacgaaaccccgagcgattccggggaagccctctacttccttcctttatttatttttgtggccactttatttaatagatttgcaagtaaggataaaaagaaactaaaagagattagcattgaaatgaaaacaaagagaataaattggaaatcacccttttttttatctgttttgctcttgattttta

SEQ ID NO: 15771 - DNA, 77 bp, Gossypium hirsutum
  Clone ID: LIB3145-028-Q1-K1-B5
cgcaagaagaagagggtggaaaaaaagctgtgagtcaaagaaaagacaatgcaggggggggtaacaaaggagctgct

SEQ ID NO: 15772 - DNA, 232 bp, Gossypium hirsutum
  Clone ID: LIB3145-028-Q1-K1-B6
gctgcttaaaaatttattgcatgagttttcagctttcatatcagaatgccgccctgagtttttgcctttcacatttccagaacatttaaaattgtgttagcattgaacttttaatctggatccctgagagatatttattctgtattggaactaagagaatgcttaaagcttgataagactaataaccatttgcttatttagattgactcctttgttggaaacaccccggata

SEQ ID NO: 15773 - DNA, 452 bp, Gossypium hirsutum
  Clone ID: LIB3145-028-Q1-K1-B7
ccggaccggaagggcccgggccgacccacccgtacggctagcgctaactggttgctgcttattacttgatcaaaaagcaaaagagcgcatgggagacttgcatatgcttagctaggtactacatcatgagttgtgcgatcatgccattgatggctgcattggaaatgaagaggatggaatgacttatggggacgagagatatggtttcggttgatcaggaaaatgaagaatttcaggactgtgaggttcgtgctgagggacatgaaagaacccctcatgaagcttttattttggcgcttggctatttgggtgtgcgggatctttttcttattgagaatgtttgcacatctctgtgatctgtagttcacaatgatcctcttttatggagggatattcacataaatccgccactgaatgagaagattactgatgatgttcttttacaaataact

SEQ ID NO: 15774 - DNA, 223 bp, Gossypium hirsutum
  Clone ID: LIB3145-028-Q1-K1-B8
ctcagtttccctacgttcttcattccccttaccaaaccagctcgcctatctatggctactccactaaggagcaacagcaggctgtccactgccatggagaggaccggccagtgggttttctcccaagagattcctactgatgttattgtcgaagttggtgaagccaatttcaatctccacaagttcatgctggtggcaaagagcaattacataaggaagttga

SEQ ID NO: 15775 - DNA, 181 bp, Gossypium hirsutum
  Clone ID: LIB3145-028-Q1-K1-C1
ctaaatatataccgggtgcctgctgtatacaggatgcaagctcacacacacacgcctgctgggttctcaccgccttataacgtcgcctatgagtgaggatattcagccgcgtgttaccacactgggacctggaatgccgtgggccggcccagccgaatacgatggtccgacagccccgttt

SEQ ID NO: 15776 - DNA, 401 bp, Gossypium hirsutum
  Clone ID: LIB3145-028-Q1-K1-C10
cattaatggggatcggtactgcaactgttaaaacacgggcaagagatgctgcgctaaatgctatccagtcacctttgttagatcttggtatagaaagggctaccggaattgtttggaacataactggtggaagtgatttaaccttgtttgaggttaatactgcagctgaggttatatatgatcttgtggatccaactgccaatttaatatttggagcagtgatcgatccgtcaattagtggccaagtaagtataaccctaattgcaacaggatttaaacgtcaagaagaaaccgtaggaaggcaccttcaggcaggtcagctagcacagggagataccggtcttggaatcaatcagcgaccttctttcaacgaaggcagttcatttgacatcccggagttc

SEQ ID NO: 15777 - DNA, 381 bp, Gossypium hirsutum
  Clone ID: LIB3145-028-Q1-K1-C11
tcggcctctcttaccatctttggcaccgactcttgtgcagctgctattgaagctgccaggaagttccacaggttgatacatcctgttattcatcctgctgatacacagtctgtcaccttttctattagctttcctggtaggtcgcatggtgcgactactggagcccttgatgagccctgccatgcacccttccagcctgcattgcccccagttactccctgggtttctggcttcatacatggtagcatacatgctattatgaatgggatgatggctgggatgtttgctgatccatttgaagaaccaggtcaagattacagtgcaacatacaatgcttcagaagatcttgtgtcagctttgcattatgcttgataccattct

SEQ ID NO: 15778 - DNA, 377 bp, Gossypium hirsutum
  Clone ID: LIB3145-028-Q1-K1-C12
aaaaacatgaatcccacaaggcttagcacagctttaacttgcacatattcgtatattcgacggagaaatatggcgactgaaaagagaattggggcggctctacattcctcatctaattgccagagtagcaggaaaacgggctatggaaaacgttatccgcaaagagaatcatcttatccttattaccattcatcccgaaaggaattattagaaaggcgagacgcatctctgggaaagcatcggtccacgcttaaagcctcatgaaaaaggatcgaggtgatccacatgaaaagaaatttgaggctatagatagtatccttcttagctgcataatggtaggaaataagaggctcctctagcttaaaaagtcaaacatc

SEQ ID NO: 15779 - DNA, 332 bp, Gossypium hirsutum
  Clone ID: LIB3145-028-Q1-K1-C2
agcagatgcttgttcaaagtggcagccctgtccctcctgagctggcaaagcatgaagcttctaagtttaaaccaggaacaattcctgatagacctcctaggcgcaatgacactgtttttgctcactgagagtttttattgacatgtgaaaattcaagcccccaatttgcttagctgtagtatggtattgtagttgccaatatattgatcattgctgctcacaagtaattgcactggcattccaattgtaaaatttgaacttggtatttgtcaactttactttaaagtgctgcagcagtacttggtaataggaaagatgttgaacttttttga

SEQ ID NO: 15780 - DNA, 404 bp, Gossypium hirsutum
  Clone ID: LIB3145-028-Q1-K1-C3
cccacgcgtccggattgctgctatatcgccattctcccatcggctagcgtttgacaagttgcctgtggaaatccaacatttacgttgtaaagtaaacttcgaagctttagcttttgttcctcggataagattaattggagagacccttgttaatcgactccgtgatccttctgggaagcttcaagcatcaggcactgaggttctacgagagagaacagatgatacagagaaagagagagctggaaagtttgttgtattacatcttcgctttgacaaagacatggctgctcattcaacttgcgattttggtggaggcaaagctgagaaactggccctagctaaatatcgccaagttttatggcagggaagggttttaaactcttcattcactgatcatgagctga

SEQ ID NO: 15781 - DNA, 436 bp, Gossypium hirsutum
  unsure (1)..(436): unsure at all n locations; Clone ID: LIB3145-028-Q1-K1-C4
accatcatgaactttttccgcattcctctcaacatcttcgtctgcattgtgctatacaatgtcgacgcattccccatcaccgttatgttcggtatgtgctcgatttttctccttgttgcatccatcttgcaaagacggctgatggcaatttcagacaaaccaaagatggaaaattggacagcaatgaaggaaagggaccctgaagctgaagcattaaatgattgaaaaaggcaaccaaggattgaattgaaagcaacagcataattcattggggttatnatttatgtttgattcttacagtagtgaaagtaaatgtgggtaaaacatangttactttgagtatttatgattcgtttatggggctgtctggtaatcagcaccaatagttaacccctttttttttcttcctctgttaaagtagggacactattatgaa

SEQ ID NO: 15782 - DNA, 408 bp, Gossypium hirsutum
  Clone ID: LIB3145-028-Q1-K1-C5
atcttgccctattactgttggcaactttgtgctctctcacaatcaagttttacctggttttactccacctggttcctacaaacttaagatgacattatcaggtgcgggaattaaactgttaacttgcatttccttcgatttcaaaatcagttttggtgcttctgaatcttcagtctctgatagctgatcagcccaccaagtatatatatgaaatatggactgcagtaggatgttatatcttatttattgcgaacagatctcacattctacaatatattgcacttgtattccgtattatcgttcttgtgaagatgtcatgagacaaactacgattacatggaagtcactccaatctgctgaatcatgttaacaatgttaaaaaaaataaacatgaactaaaaaaacaaa

SEQ ID NO: 15783 - DNA, 415 bp, Gossypium hirsutum
  Clone ID: LIB3145-028-Q1-K1-C7
ccgaaacgatgtctggacccatctgctttatcttgtcaaacttatagcgaacttgctccgaaatgccattctccagccctgaggcagatctaaaaaatttttggtcaaaagtcacatcaaagtggatagttacacgcgtcctttgttcatcctgattgcggagtctgccttcttcacagatacgtagtttttcctctaacccttgcagctttaaattataacttgttatctgtcttgaaatatctctgctatttgtgattttattttcataaagtaattggtttctatttgaccagatgagccaaagcccgcaacaaaataagcaacactgctcatttattccttgattaaagacccaagcactgtcgaaaaacgtggatactgtcttattctgtttgtctacatctgggacacc

SEQ ID NO: 15784 - DNA, 363 bp, Gossypium hirsutum
  unsure (1)..(363): unsure at all n locations; Clone ID: LIB3145-028-Q1-K1-C9
cccacgcgtccgtatggctaggctcttcctcaacacttgttgaacatcaatgaaattgaaagcaaacttgattgatactttgaaaacttgatggacaaatgaagggctctcccaaaatttttatttatccacctcctattttgaaaataggttgttgaacttaaaaattcttcattgaataaggaaactcattttagagaaaaaaaaaaaaaaaaaaaaaaaaaaaaaaaaaaaaaaaaaaaaaaaaaaaaaaaaaaaaaaaaaaaaaaaaaaaaaaaaaaaaaaataataaaaattcaaaattaaaaaaanattttattaaaaaaaataaaaggggtgggggttttaattaaaaaaatttaa

SEQ ID NO: 15785 - DNA, 142 bp, Gossypium hirsutum
  Clone ID: LIB3145-028-Q1-K1-D1
cccacgcgtacgggtatcaagtgaggttatctttcgctgtccagtcaaagatacccaagttttagtactggatgcggtctcgctggaagtaacctgctatatcgacggctggttcaatttatacgggtcttgacggagataa

SEQ ID NO: 15786 - DNA, 195 bp, Gossypium hirsutum
  Clone ID: LIB3145-028-Q1-K1-D10
aatgcaactgaaagaagattcagtagttggataggagggattatattggcatctcttaggttcattccaacaaatgtggctctccaagtcacagtatgaagaacatggagcttcatatatacaaagaaaatgcccttaatatgaggatgacaggcttttgcatttatcctcattggtcaagatctttttcagatc

SEQ ID NO: 15787 - DNA, 200 bp, Gossypium hirsutum
  Clone ID: LIB3145-028-Q1-K1-D11
gacaaaaggcaaagtgtgtgccatccgtaatccgtattgtaagtgaaaaaagtgggcccctacctgtatttatagctgaatggtagggtggggatattatgtagacttaattttctgagaaaatgcaatggggtgctgggatcattatgttaaaacataccagtcattggcataattaaaatagtttcttctattacgta

SEQ ID NO: 15788 - DNA, 418 bp, Gossypium hirsutum
  Clone ID: LIB3145-028-Q1-K1-D12
caaaaacaaaaaatctgaaaaaaaatcctaacagcgacaacataaactagtgtttctgtttttctcaaaaagaacattggttttttttcctaacctgttgttcctgtttctaagatctcattaaagttatggtttttgtatagtttgtctttttcttaagagctaaaagattttggacggctaagatggaccgggaaggaggatcccacggcggatcttgttactacactattctcgggattcgcaaggacgcctccttctccgatatccgtactgcttaccgtaagcttgctctgaaatggcacccggacagatacgtcacaaatccggcggtagccggcgaagcgaaactcaagtttcagcaaatccaaaaagcttattccgttctctcaaacgggtccaagagatcaatgtatga

SEQ ID NO: 15789 - DNA, 345 bp, Gossypium hirsutum
  Clone ID: LIB3145-028-Q1-K1-D2
cccacgcgtccgctactttcaattcttcattccttctgtcattttgggttttactccttttttttgtgaaatcagggaaatggatcttgatctttctccaaagctggcaaagaaagtgtacggtgacgatggtggaagctactacgcatggtgccccaatgaactccctatgttgcgtcaaggcaacattggtgcagccagttgctgcaccggttgctaagtctccaacagtgcaatctccgtcatccgtagcagtacgtgtttccctcaaagaattccattattaggagtattggtgtctaatcttcatcactttatgacgataatcatctgcctacacccagt

SEQ ID NO: 15790 - DNA, 355 bp, Gossypium hirsutum
  Clone ID: LIB3145-028-Q1-K1-D3
cgtcaggcgtacattgatggagcatatgaagttttttgtggaacatcctgaagagatcagcaaacttgccaaagtgaaggcccaagtttctgaagtcaatggtgttatgatggaaaatattgacaaggtcacttgaccgaggtgagaagattgagttgctggtggataaaactgagaaccttcgttcacacgttactcttattcaaactgcatttcattggttgcatttcggggaaagtgtttccttaccaaacttgggttcttttttttctttttcaaaatgatttaattttcctcaatgtaaaattccaattatacctcttatgctgatgcactgtatgatgcattttaagtg

SEQ ID NO: 15791 - DNA, 439 bp, Gossypium hirsutum
  Clone ID: LIB3145-028-Q1-K1-D4
ggcttccaatgattgtggggatggatggtagatcctcctcacccttgacaatggagtagagatatccaaacgcaggtctggctctcttcacattttccgtagtcgctgcctgctcagatctgtctcaccccagcaattcatcaccgttgccaatgctatagatggtgccaagcaatgggaccctgacctggtagaagccagatatataaaagacgttgaagataacttgagcattattcgtctcaagtttggagaaaactccaaagctttgttcagaaaaagagaattcataagttacgagcgacgtgaaaacatggaggatggcactgtggttgtagcagtggcgtcactgccaaaggaaatagcagctggattgcttccaaagccaaataatgcaattagagggttattggtgcagtcagggtgggttgtggagaac

SEQ ID NO: 15792 - DNA, 432 bp, Gossypium hirsutum
  Clone ID: LIB3145-028-Q1-K1-D5
gtccaaattgaaggagcatatgaagtattttgtggaacatcctgaagagatcagcaaacttgccaaagtgaaggcccaagtttctgaagtcaagggtgttatgatggaaaatattgagaaggtacttgaccgtggtgagaagattgagttgctggtggataaaactgaaaaccttcgttcacaggttactcttattcaaactgcatttcataggttgcatttcggggaaattgtttccttaccaaacttggtttcttttttttctttttcaaaatgatttaattttcctcaatgtaaaattccaattatacctcttatgctgttgcactgtatgatgcattttaagtggatgtacaatgatgctgcattccagcacaagattttaggcagcagggaactaagataaaaagaaagatgtggattgagaacatg

SEQ ID NO: 15793 - DNA, 301 bp, Gossypium hirsutum
  Clone ID: LIB3145-028-Q1-K1-D6
catgaattaattattaatgttttatcttacctggagtgtttcattattagctcgaaaaaaaaaaaaaaaaaaagaaaaaaaataaaaaaaaaaagaaaaaaaaaaaagaaaaaataaagaaggtacttgaccgaggagagaagattgaggtgcttgcggatgaaactgaaaaccttcgtgcacaggtaactcttataaaaaactgaatttaataggttgaatatatgggaaaaagggggcttaccaaaatagaaaaaatttttgcattgttcaaaaagagaaaattaatctctatgtggaa

SEQ ID NO: 15794 - DNA, 296 bp, Gossypium hirsutum
  Clone ID: LIB3145-028-Q1-K1-D7
ccaatgcaacagggtggaatgatctccattgaagccacaatgacacccttcactctcatagtgagtttccctgctggtgcaagcaaaggaaaagccaaaggaagcctctatctcgacaatgacgaactcccagaaatgaaacttggaaacgggtattcaacttatgtggagttatatgcaaccctgcaccacggaatcgtgaacgttcggtctgaagtttatgaaagcaagtttgcttttaacgaaggctcgatcattgaaaaaggtacttgggtgggggtttgacgaaggaaaaa

SEQ ID NO: 15795 - DNA, 391 bp, Gossypium hirsutum
  unsure (1)..(391): unsure at all n locations; Clone ID: LIB3145-028-Q1-K1-D8
cccttttattctctttttaacgtcttttttacttctctctgttaatttccccaaaacagtagttgtgatttaaagaaggttttaattaccattaatgttaccgttgcattattcgtaatctgaacttgcttttatgttatttggacatcatgctttcgatttttttgtttagttgtaaagaattttttatccggtacagatttttaacctgaataacttcttcagtagttgctttttttttgtctggataatagttagatagaattatactttgttcctttctttgttgcccgcaataggacgacattttttgggaattaattaactattccnatttttttttattgttttaaatttttgaagtctgggtttaattctgtggaattttttt

SEQ ID NO: 15796 - DNA, 411 bp, Gossypium hirsutum
  Clone ID: LIB3145-028-Q1-K1-D9
cccaagcaagcttacttgccgatcagattgtcagtgttaattccaaattgcttcagcaggcattggagaatgttgagatagcttcaaagagatggactataactgaatcactcaccggaactaagctggtgagaaatagattgaggatatcagaaaaacgctttactccatcgacaagtgaagagaagctgggaacaaatttcactttgcaagaaaaggcacttcagcttatttctaaaggcaaagttgcagttgttttagatatgagtgaccataagaaccggggaaaagaatatgacctcattctctcttcctcaacaagcagggagaattctgaaacatcctcccttcagatgttgctttgtgacgacgagaggtttgtgaaggctgaatatagatcatctatgccac

SEQ ID NO: 15797 - DNA, 279 bp, Gossypium hirsutum
  Clone ID: LIB3145-028-Q1-K1-E1
accacgcacacgatgaagaatcttttactttcacaccaggtacatgatgaatggctgatgagtgccctaattctgggcctgctgtgggcgatccaatagcgcccactttacagtaccggtgaacaagcctacccaaaccgtaaatcaaggaggagaaaacactcagagagatgccaacataggtactgccgggatcataacctgctgtgctcttctgtacaccagtgaccatgttattgaaagcacagacacggatgcttctctttcgcaaagcatgtt

SEQ ID NO: 15798 - DNA, 137 bp, Gossypium hirsutum
  Clone ID: LIB3145-028-Q1-K1-E10
gaactctttctggattttagtttgagaacttaattgtatgtttatgaatgtagatgggggagccttttgtagaaatgatcacatataatcatcatattaattatgtatacagtcatgcatttgggtttcagccgttc

SEQ ID NO: 15799 - DNA, 229 bp, Gossypium hirsutum
  Clone ID: LIB3145-028-Q1-K1-E12
tgcttgatgtggcttctcttacgcggtctcttgagacggcccggggggtcaggacggatgcctttggcgtgcctgccttcccttctgtgtgccatatcaatgcattcatcaatctctcgctacagtcttctactgttgactttaagtatctgtttggtgattagattacttcaactgattgtatgtaagcttgggtaatccttgtgggattgaagattttttggatcac

SEQ ID NO: 15800 - DNA, 431 bp, Gossypium hirsutum
  Clone ID: LIB3145-028-Q1-K1-E2
cccacgcgtccgcccacgcgtccgctggtttgaaggtggatggaatggatgcttttgctgtgaagcaagcttgcacgtttgccaaagaacatgctttgaagaatggaccaattattcttgaaatggacacttataggtatcatggtcattccatgtctgatcctggaagcacctatcgaacccgtgatgagattactggtgttagacaggagcgtgatccggttgaaagaattaggaagctgatattgtctcatgacctagctactgagaaagagttgaaggacattgagaaggaaataagaaaagaggtagatgacgcaattgctcaagctaaggaaaatccactgcctgaatcttctgagctcttcacaaatgtgtacgcaaaaggttggggtgttgagtcatttggagcagataggaaagatgtaaga

SEQ ID NO: 15801 - DNA, 432 bp, Gossypium hirsutum
  Clone ID: LIB3145-028-Q1-K1-E4
agaaagcattggagcaactgaaggtgacagaaaacaagacagctgctgttgggcaaaagatggacttggtcttctactcgttgcagataggctttttctatatggattttgatcttatttctaagagtattgatacagcgaaaaacttgttcgagaaaggaggtgactgggagagaaagaaccgtttgaaggtgtatgaaggcttgtattgcatgtccactagaaattttaagaaggctgccaatctatttttggattccatttctaccttcacaacttacgaacttttcccttatgacacattcatatgttacactgtgcttacaagcatcatatcattggatagagtttctctgaaacaaaagggtggtgatgctcctgaaatcttgactgtgattggaaaaattccacatctttccgaaatttttaaat

SEQ ID NO: 15802 - DNA, 353 bp, Gossypium hirsutum
  Clone ID: LIB3145-028-Q1-K1-E5
cccagttcagttttctctttccttttccctttgcctttgcaggggcaggggtcagattaatttcctgttcagatttcaattcatattttttgtttcttggtttctgttcaaagctagttttgggagccaatactgtgatattaccgcgactgacttcatggttacatgaaatgaaataatcccttcatgatgattaccacttcactttttactttccccctccttcacacctctaccttacttattatttccctttgctttcttcttctttctcccggctcttcccttcggcacctgcaatcttcaacctccccttatccgggactcttttttgttgagaaaatcaagcttgg

SEQ ID NO: 15803 - DNA, 145 bp, Gossypium hirsutum
  Clone ID: LIB3145-028-Q1-K1-E6
cccaggcaacatttctcttgtcttttacatttgccttggctggatccggtgtctgagaaatttactgtctccgattgccattcatatttcttgtctctagggaccggttcagagctagttggggacgcctatgctgcaatgttac

SEQ ID NO: 15804 - DNA, 272 bp, Gossypium hirsutum
  Clone ID: LIB3145-028-Q1-K1-E8
cggacgcgtgggcggacgcgtgggcaagtatcaaaacataataatctcactgatttggagattaacactgctaggcctgttgaaacttctcagggtgttgatgaaactgttggagagccatcttctagaagtcaaggtatattaccggctggtgaagggggcaatgctgatcaacaagaagctcctcgtgagttggagaaagtgactgaatcagatggcaatgtttcatctgataccaacttgaaaagtgatcagtccaatcatgaaatgca

SEQ ID NO: 15805 - DNA, 410 bp, Gossypium hirsutum
  Clone ID: LIB3145-028-Q1-K1-E9
tcggaggtcaaaatcaaccatttttgccggttttggatagctttgtaagaatcaaactgggagaggccaaaatgtaccaagcacaaggctgatgatgcaagaagagatgctgtaagcctgaaaagaattgcaatcacaaaggatgaaaagactgaagaagagtacaagagtagaataaaaaaactacacttggtcgaagctgaagaaatacgtaaacaaaagtttgaagagtttcaagcatctaaaagagctctacagggcatgctatgatataaatacaataaaggatgctctttttcaagatcttttgtagaaaatggaagccacaaagcgaaaccttgccatgtgatgtgctaaattgaataggtctttgctttcaattagaattggtattggaaggaatgtcaatt

SEQ ID NO: 15806 - DNA, 327 bp, Gossypium hirsutum
  Clone ID: LIB3145-028-Q1-K1-F10
gagagagtggggggtaatcgaactatactgaggggcaatgatacatgtttttcggaggcaaatagcttttaacctttgatatagtgatcagacggttgtcaatgaatcagagttttaaaaaaaaaataaaaaataaaaaaaaaaaaagaaaaaaaaaaaaaaaaaaataaaaaaaaaaaaaaaaaaataaaagaaataataaaaaaaaaaaaagaaatggaaagaattacacataaaaagatagataaaactaaagggggggcctttatagaatatcaattttaaccatcccgatggctaacatttataacatttttaaggtgtccc

SEQ ID NO: 15807 - DNA, 429 bp, Gossypium hirsutum
  Clone ID: LIB3145-028-Q1-K1-F11
cgagcttgtcacctgagtggggggctcgttgtggagattaacatctgacatcttaaatttctatcaagagtgaaagtattcattctagagtgccttgggcggcacgaaaagtgttatttggtgttacacgaaacgaggatgttgggtttggtgtggtatgctatctggtttgaagtgccttgggtgagactgtggttgaaaatggctatgttggaagtttgaacagctttcagtagttggtggcatttccttttacagggaatcctgcaactttgtctcaaaaattatgatgacagagcaagaagatgcatgcatgcctatagtctgctttagatgcatgcgtgtttggattgcctcctcatcgcctaaatttgatgaattgtaattacttttaatgaactactttgttctatctttttaactgacttg

SEQ ID NO: 15808 - DNA, 337 bp, Gossypium hirsutum
  Clone ID: LIB3145-028-Q1-K1-F12
tcactataacaataaatatgcctttgttttgcctttcaaaaaaaaaaaaaaaaaaggggaaaaaaaaaaaaaaaaaaaaaaaaaaaaaaaaaaaaaaaaaaaaaaaagggaaaaaaaaaaaaaaaaaaaaaaaaaaaaaaaaaaaaaaaaaataaaataaaaaaaaaaaaaaaaaaaaaaaaaaaaaaaaaaaaaaaaaaaaaaaaatgtggggggcccctttaaaagaatcaaagtttatacccccgggggggaaaagttatactttttttttgggcccccctaaataaatttactgggccgctgtttaacaacgttgggtggggaaaaacccggg

SEQ ID NO: 15809 - DNA, 440 bp, Gossypium hirsutum
  Clone ID: LIB3145-028-Q1-K1-F2
cccacgcgtccgctttcgaggacaactaatgatcttgctgatattcgaggttcggtggaatcactaaacaagaaattagagaaggaaaggaattctctcgaaaagactcgagacaggctaagtcagaattctttgaagatatcgtcgctcgaagaagagttaactcaaacaagactgaaactgcaagtagcaaaagaggctgaaatcaaaactggggttgataatcctttggatatatcaagggaacttcaaagactaagttccgaagctgaacaattcaagaaaataggacaagcagcgaaatcggaggtttcaagagcagtatccgagattgaacagactaaaacgagaataaaaacgactgagatgaggatacttgctgctaagaaaatgaaggaagctgcccgagctgctgaatctttggctcttgctgagataaa

SEQ ID NO: 15810 - DNA, 294 bp, Gossypium hirsutum
  Clone ID: LIB3145-028-Q1-K1-F3
tccaagtgtccttctagctgattggatttggaggacttggttatttattataacaagcaatgggttatattttggattatacgcttacacttaaccccataatccaatgtcatattcgcttcttcttttttgtagcaaatcgaaaaaggatgctccatttcctactattgaacagtttgatgagccgaatcataagccctaagataagaacaaagaagaatgtgtttgaaagttgtaagaagggggcaggtgaatctgcattgaaatcctcaacaattcctctaattagaacct

SEQ ID NO: 15811 - DNA, 389 bp, Gossypium hirsutum
  Clone ID: LIB3145-028-Q1-K1-F4
ctacctcaacgctggtgctcagtttagctgggcacaaacgcttgttcaagagaggtggcccagggaattacatggctctaggaaatgctgcatgggttgtaaatccttatgatctaagtgtggaaacaggtattgatgactgtgatgcaacgcgcatggcaaatggtgaggtggcattatcagattcagagccaaactcgaagccttggattgatcctggagccttccctctaacggtgcggatgctttcaacaattcctgtggcactgtatgcaattggtggtggtgatggacccctcgagatttgggtacgattatacatgagttcatatttgaagtaactcgtgttttgaagaaggggcaatggagtatggaccgacctggggggg

SEQ ID NO: 15812 - DNA, 229 bp, Gossypium hirsutum
  Clone ID: LIB3145-028-Q1-K1-F5
cagagctagaatgttttcaagcattacattagcaggagcacttagcagcatcacacagaataaatggtctctgggaggaagtccagaaacagaaggagcttgaacaaaccttacaaagacgctacgggaatctcatgtctgagttggaaaggatgcaaagacttatgaatgtatatagagcacaagcagaaaagcaagaagaggtaggtgaaaaagaatcatgctcttg

SEQ ID NO: 15813 - DNA, 330 bp, Gossypium hirsutum
  Clone ID: LIB3145-028-Q1-K1-F6
tccatttattgggtgtttggactttggattctctgatgtagcatgcaatagcttatgtggatgaagaaaagtactatggagcaaaggcaaccattaacgtttgggaacccaaaatacaacagcctaatgagttcagcttgtcccaaatctggatcttgggtggttcttttggtgaagatctcaatagcattgaagcaggctggcaggttagcccagatttatatggtgacaaccacactagactcttcacttattggactagtgatgcataataagccactggttgctataatctactttgctcaggcttcattcaaaataacaattaaa

SEQ ID NO: 15814 - DNA, 299 bp, Gossypium hirsutum
  unsure (1)..(299): unsure at all n locations; Clone ID: LIB3145-028-Q1-K1-F7
ggctaacaagatcttagaggatgatcatgtttaagccattaaagaggaaaataacaaagttggtgacctttaagaagagctagacatttatggacgggttcatggatagcctagcagaaatggcattgttgagtactgtggtgagcgcttatctcgtnttgctttcactgataacggattggagcactattatgggtctcgatctgtcaagacaccaatcatatactgagatcagagcctccccaaatcaaaaactgttttctggtcctctacttgccaaagcattacttatcccccaa

SEQ ID NO: 15815 - DNA, 348 bp, Gossypium hirsutum
  Clone ID: LIB3145-028-Q1-K1-F8
caaataataacaatcaccggcggatccccattcgccagttattaaacgcaggtctcattcatttccggtgcgtttaataatccctttatacgccatggacatgaagaaggtctccaccgccatcattgttgctgccgcctcaatgagcgccgtcatggccgcagatgcacctgctgcttccccttccgcaggtggttctagccctagctcctctcccgctttcgccccagcagctggcccggattccagcgtcgctgccgccactttgcctgttcttggatcattggttggggcttccattggttcttttgtttcttacattctccagtaagctgataaatgtattaa

SEQ ID NO: 15816 - DNA, 413 bp, Gossypium hirsutum
  Clone ID: LIB3145-028-Q1-K1-F9
catgatataaccaccaaagacagcaaacagtttaatgttaatgttttgggatgcaaaaacattactttcgagcatttcaccgtcactaaccccgagcatagcttaaacaccgatggaattcacatcgggcgatcagatggagtcactattctgcactcggagataaaaacgggggacgattgtgtttctttgggtgatggttctaagaatgtggtcgtcaatggaattagctgcggtcctggtcatggtattagtatcggcagtctcggaaagttccaaggtgaagaaccggttgccggaattaaaatcgcgaactgcaccatcactaatactatgaatggtgttagaatcaaaagttggccagcctcttatcccggcacagcatcggatatgcattttgaagatataacgat

SEQ ID NO: 15817 - DNA, 287 bp, Gossypium hirsutum
  Clone ID: LIB3145-028-Q1-K1-G1
ggctaccacgatcttggacgatgatcatgtttaagccattaaagaggaaaataagaacgttggtgaccttataagaagagctagacatttatggacgggttcatggatagcctagcagaaatgatatggttgagtactgtcgtgagcgctgatctcgatttgcttcacactgataacggactggatgcaatattatggttctcgatctgtcaagacaccaatcatatactgagatcatagcctcaccaaatcaatgactgtaatctggtcatctacttgccaaagca

SEQ ID NO: 15818 - DNA, 381 bp, Gossypium hirsutum
  Clone ID: LIB3145-028-Q1-K1-G10
aaaatattcgggagacccacgcgtccggcttcatcttttttagttgatcttctctctcttcttctgaaattgaaaaacttcagaaatgccttgctaacagatccgctccaatgctgtccaatttgcttggaagcaaggttgacagaatcccatgaaaaggaaattgaagggttatatttcctagtgaggatctgttttgggctatcggtggagagaagctttgtggtcattgtttcatggaagatcaagttggttcatgttccagagaaagttatattatttaacgagcctttcactgttggaatctccattcttcgctcattgtttgtgcttcctttttacttttattcttcagctcttttaatcatttttcaattgaaa

SEQ ID NO: 15819 - DNA, 201 bp, Gossypium hirsutum
  Clone ID: LIB3145-028-Q1-K1-G11
tctcctccactgctacttgatcttcttctgcctatgccctgcctgaagaggctgtgttctgccctgccatcatcacttctgcttcctctcaactttttttatgttcagagcaaatgcgattagaattggaaaagatcatcaagacagaatagagagtgaaagagtaaagtgtcgtgcatccgggagtgggattggaagatg

SEQ ID NO: 15820 - DNA, 302 bp, Gossypium hirsutum
  Clone ID: LIB3145-028-Q1-K1-G12
cccacgcgtccgcccacgcgtccgcaagttttagttttataagctttgtttgacctgtgtttgaacatctgaaatgtcattaattaccatgaagatattgatgattcacaaaaaaaaaaaaaaaaaaaaaaaaaaaaaaaaaaaaaaaaaaaaaaaaaaaaaaaaaaaaaaaaaaaaaaaaaaaaaaataaataaaaaaaaaaaaaaaaatataatatataataaaaaaaataaaaaaatggggggggcctctttaaaagatcaaagtttattttccggtgtatgcaaataaaaattttttt

SEQ ID NO: 15821 - DNA, 398 bp, Gossypium hirsutum
  Clone ID: LIB3145-028-Q1-K1-G2
atcttttcaaagcaaaaaaaaagaaaaagaaacaaaagcaaagagataattaagagaggaattcgaggaagaagaagggttttttttttcaaaaaaaattgctttttttctcttttgtgtgaagaagctggagctatcaaagatgatgcagattgagcagcaacaacagcagccccagcaacaacaaaaccagttaatggttcaaaactctgggagtttaagctttagcagtcacttgtctaaagaagatgaagagatctctaaatcagctctttctacttttagagctaaagaagaagagattgaaaggaagaagatggaagttagagaaaaagttcagcttcagttaggtcgtgttgaagaagaaactaaacgtctggctgtgattcgtgaggagc

SEQ ID NO: 15822 - DNA, 359 bp, Gossypium hirsutum
  Clone ID: LIB3145-028-Q1-K1-G3
caatgaccgtgcaagatatcgacaaccagatagcacagctcaaagcacatcgagccgagctcacgaaactgatagacaagaagaaaagagacaaggatgaattgacatataaccaaaagttggtggcaaactcgataccgaaagtggtgcatgaggttcagctggctaatgctaaaaaaccagaatgggaggtaaagaaggaaaatgcattaaagcgtgaaggtgaaatactagctaaatttgctcctttaaaaggggtttccctttgaaagaaaatatgtggtatcatatcattggctggtgggaatattttgaacaccataaggatgggactagttttaaatttatttaatggtaat

SEQ ID NO: 15823 - DNA, 432 bp, Gossypium hirsutum
  Clone ID: LIB3145-028-Q1-K1-G4
cccacgcgtccggagcacttatgtgtactaaaagaccgcaacaagccgattctgtttaccatggcaaggttggaccgagtgaagaacttaactgggctcgtagagttctatgccaagaacagccggctgagggaactggttaacttggttgtagtaggtggagataggagaaaggaatccaaggacttagaagaaaaggctgaaatgaagaagatgtatgaacttatcgaaaaatacaagttgaatggacaattcagatggatatcgtcccagatgaaccgagtgagaaatggtgaactctatcgttatatttgcgacaccaagggagcattcgttcagcctcctatatacgaggctttttggcttgactgttgttgaggcaatgacctgtggactaccaacatttgcaacatgttaccgggggccctgctg

SEQ ID NO: 15824 - DNA, 350 bp, Gossypium hirsutum
  Clone ID: LIB3145-028-Q1-K1-G6
cccctctatgcttcgatttcgacgcagcaaaagggaatccacagcatttggtaaggtgtacctttaaattttattttcaaatgctttaaaaagggaaatagaatcaaaagaaaagtatggaaccgggaaaagatgaatctaaaatcaccttttttaagaactgactttggattgctctctatttttacaatatgcgtgtgtgcgtttgcctagtatgcgttcgtaggttctttttttttattacaatgaacatagggcttttatatagctgaaaataaaagaaaaatacaaagaatttttttcttggtttttctctttgctgctgttttgctgtgcttgtttttgtcttc

SEQ ID NO: 15825 - DNA, 186 bp, Gossypium hirsutum
  Clone ID: LIB3145-028-Q1-K1-G7
acaggatatgcttggatttctgcgcttctttttggcagccacaacataagggggggagtgcctttcaagttaagaaaccaacgctactgaatgcgagagtttcttgatcgaaaagtccctgctcatgctaacccgaatgttggggcactctttttaagagctgtcactgatcagcgctctagccta

SEQ ID NO: 15826 - DNA, 284 bp, Gossypium hirsutum
  Clone ID: LIB3145-028-Q1-K1-G8
cccacgcgtccgcccacgcgtccggaagttttagttttataagctctgtgtgaccttttttgaacatctgaaatgtgattaattaccatgaagatattgatgattcacagaaaaaaactcaaaacagatatagagattatctaaagccatcagcgatcatgaccttaataaatacagaagcagcactgaaagatcatgaaggtcttcaacaaagggctgaaaaacaacaaaagagatcggggggctgaaggctaaaggttgaaaatgttgcacccttatatgac

SEQ ID NO: 15827 - DNA, 414 bp, Gossypium hirsutum
  Clone ID: LIB3145-028-Q1-K1-G9
cggacgcgtgggttttgtttggtctcatttccgggactgttttcctcttatgtactggtttcttcttccatttatacggatgggaatttctacatgaggcattgctctaccatcttactcgcacggatgcaagacataatttttccatctatttctaccatatctatcttaactatgaacgtgagctttcggttcttgaaaagctcgtctcctttttgcctcagtttatagtgcagctagtcctcattttatgtttcgcaaaggatcttgtattctgcttctttgtacagacagtggcatttgtagcattcaataaggtaatcacagcacagtacttcgtctggatcttttgtgtcttgcctcttattttgccatggagcaatatgaagcttaaatggaaaggcctatgttgca

SEQ ID NO: 15828 - DNA, 339 bp, Gossypium hirsutum
  Clone ID: LIB3145-028-Q1-K1-H1
cttccaaaggatctgtttgaagctttggggttttgctttcgagtctttaaagaaggggggaaatggctagaagtaatgaagtcaacctcaatgaatgcaagagtttcttgatcgcagagtccctgctaatgctaacccagttgatggggtcttctcgttcgatgttctcattgatcgaggtacgagcctactgagtcggatttatacgccaactacagctgaagagcctcaaccgaatattgctgaactcgagaaacctgttacagcggccgtggtccctgttattattttctttcatggtggaagctttgcacattcctcagcttatagtgctatata

SEQ ID NO: 15829 - DNA, 400 bp, Gossypium hirsutum
  Clone ID: LIB3145-028-Q1-K1-H10
gtttcgatatttgtattaagaatcgccctttagtgatcagtgaggtgaagaaaaatgtcttgctgtggtggaaactgcggttgcggctccggttgcaagtgcggcagcggctgcggcggttgcaagatgtaccctgagatgaactttgctgagcaaaccacaaccgggacacttgttcttggcgtggcaccccggaaagtgcactttgatggagctgaaatggaaactggggctgaaaatggctgcaaatgtggagataactgcacttgcaacccttgcaattgtaaatgagaaaaaaaagctaagcatattatggaagctgatctaaataatatatgatgtatttgggtttttactattagaataaagcagctatggttcattaggtgttttgcttctt

SEQ ID NO: 15830 - DNA, 426 bp, Gossypium hirsutum
  Clone ID: LIB3145-028-Q1-K1-H11
ttacctattagtagcgataatctcgaagcttgcttttccgttttagatctcaaaatgcaaaaagctctctttttcatctcatggctgctactattgtctccgtcaaagctaggcagatcttcgacagccgtggaaatcctacggttgaggttgatgtggaaatatcgaacggcataaaggctagggccgcagttcctagcggtgcatccactggaatttacgaggctcttgagttgagagatggaggttccgattacctcggtaaaggtgtatcgaaggctgttgctaatgttaacacaatcatcggccctgcattgattggaaaggacccaaccgagcagactgcaattgacaatttcatggttcaacaactggatggaacccaaaatgagtggggttggtgcaaacaaaagctcggtgcaaatg

SEQ ID NO: 15831 - DNA, 421 bp, Gossypium hirsutum
  Clone ID: LIB3145-028-Q1-K1-H12
agaaaaaggccccaatgagaatatattagaaaaagatgctcaccagtcgccattgggagataaggagcactcggagaaggcaaataggtgtaaatttgtacaaaggctattattatccaccatctttgatgggggcttataatcaagacagaaaagagtagacggttggtgacttccaaatttttagcgcacatgccattatccgtcagtcatgttcttgcattgaacattctgattcttcaatatagaagctaggatagattcaagaatgtaatgtaatttatttaactggttgatgcttatcaattaggccacaacagagttcagactcttgtatttttcatgtttaaagcatcggttcataaatgccaatagcagctttagttaaaccttacatttgctagtgaatgtaaagcttcat

SEQ ID NO: 15832 - DNA, 421 bp, Gossypium hirsutum
  Clone ID: LIB3145-028-Q1-K1-H2
aaaaaaaagagagatggcgtctgtaataaaatctgcaatcttaattctgtcggtgtttttatctgtacgcttcagttcgggtgttaggttgctccaggaacagcccaatgatgaccccaaaaacatggacgctattcctcccattgatgcactcaaccctaccgagttgaatggacccggtgttggcattcacgaagatcatgttgtcccaaaaggtgctgaaattggtactcttggttttggttttgaaagtggtcctgataaatgttgttcttctggatgttccggtaattgtaatcctggtggtttcgttctaccatttcctcaaatccagaaatccaagaatccagaaatccacaattccacagatccacaaatccacaaattcactaatccacagatccacaagtccacagatcca

SEQ ID NO: 15833 - DNA, 225 bp, Gossypium hirsutum
  Clone ID: LIB3145-028-Q1-K1-H3
gagaaatgaggcttgtttttggatcaatatattcaagtggctctgttgcatatgcaccacaggttccatggatcttatctggaacaatacgtggcaatatattgtttggaaagaatctagattcccaaaggtacgcagatgttttagaggcatgtgctctacatgttgatatttcattgatggctggacatgacttggcttatattggagagaaaggaactaatt

SEQ ID NO: 15834 - DNA, 338 bp, Gossypium hirsutum
  Clone ID: LIB3145-028-Q1-K1-H4
ctcaagtgtgagtgacggatacgagtatgtatccgacatggatatgttcagttttatctaaattatatttggaggatcccttcaagttcataactgggaacctggggcggcttttggtgataactgccttatttttggtcgctctaactcacctcatgacatagtgttctccatcacgaagggtctcacgaaggcgagaccggtaaagtttacagggcaatatttcatgatcatcattgaaggaccgtacttataatgaggcctggaatgcatgttttgaactcatgtatcctttccctctgtgcgtaaccaaacttaaatgaatttgcttttttaac

SEQ ID NO: 15835 - DNA, 234 bp, Gossypium hirsutum
  Clone ID: LIB3145-028-Q1-K1-H5
ctttaatagctgcgagattaccgggaagaactgacaacgagatcaagaactactggaacacgcacatcaaaaggaagcttataagcagaggaatcgatccacaaactcatggtccactcaatcaacccaccaacaccaataaatccactgaattggatttcaggaacgtacccaaagcttcaaaatccaactttgctccaaacccatctcgggatttcaatttcaatgaatttc

SEQ ID NO: 15836 - DNA, 358 bp, Gossypium hirsutum
  Clone ID: LIB3145-028-Q1-K1-H6
gcagggttccctggcacgttgaaggtgcaatttcattttcgtatttttcagtgtttagttatgtactgttatattccttttctgacatggagacacatctgaggcatatttcaggtggcaaacttctgttagagctcaaccgagtcctccgacctggtgggtacttcatttggtctgctactccagtttaccagaagcttcctgaagatgttggcatttggcaagagatgtctcgactaacaaaatcgatgtgctgggatctggtgactgtcaaaaaggacagattgaatgcttgtggagctgcaatatatcaaaagccagctttcaacgactgctactacaaaaagtctaaaaatgc

SEQ ID NO: 15837 - DNA, 307 bp, Gossypium hirsutum
  Clone ID: LIB3145-028-Q1-K1-H7
atcttttggtcaccaacccaaagagggttgcgaaggctattgccgaaaaaacttgtaatgcccttcttctcaaggtcaatcaaattggatctgctaccgaaagtatcgaagctgtgaaaatgtccaagcaagctggatggggtagtgatggccacccaccgcagtggtgaaacggaggatacttctattgctgatctttcagtcggattggccacgggccaaattaaaaccggagctccatgcaggtctgagcgtttagccaagtacaatcagcttctgcaaattgaggaggaccttgttgcggaag

SEQ ID NO: 15838 - DNA, 265 bp, Gossypium hirsutum
  Clone ID: LIB3145-028-Q1-K1-H8
ctccaaccccaaccctattccgccagactattcaaccccatataatcaaataggatcatcacaatcctctgtccctcctgcttatgacaacccctacgataattccatgaaattggatcaaagcagtggcagttatttcgacgacaaattcggagcacgttataaccagagcagatacgatatgggacccgatctctatggtaagcgatatgatagctatccacccttcggtgatgatggtggatatggtgatgggggttatgct

SEQ ID NO: 15839 - DNA, 423 bp, Gossypium hirsutum
  Clone ID: LIB3145-028-Q1-K1-H9
tcgagaaaatgcaagatgttgcaacggggaaaccatccaccccgttcgaccatggtgctggacatgtggatcccgtttcagcgcttaatccaaggcttgtgtatgattcgacagcggaagattatctgggtttcctttgtgccttgaactacacagagttccaaatcagatccctggcgagaagaaacttctcatgtgatgctagcaagagatacagagtcactgatctcaactacccttcctttgctgtcaattttgattcggtcataggtgggtcgaatgttgttaaacacacccgtactctcaccaatgtgggctcgccaggaacttacaaggtatcggtatcaccttgaactccatgagttgagatatcagttgaaccacaaactttgagttttagcccagcaaatgagatgaaatcat

SEQ ID NO: 15840 - DNA, 191 bp, Gossypium hirsutum
  Clone ID: LIB3145-029-Q1-K1-A1
ggttgattcgacaaaactgaggctggaaatgttagctcccaattgccagaattgggaacgggtgagctctatgtggtagtgatacaggtggtgatacctagatctgttgtattgctttgggatgtatagctcccaaggactttgtgtttagagttggccatatgagatgatggaaatggaaggccttgcta

SEQ ID NO: 15841 - DNA, 376 bp, Gossypium hirsutum
  unsure (1)..(376): unsure at all n locations; Clone ID: LIB3145-029-Q1-K1-A10
tgaaatattcaatgtgatattgtattgtactgatgaatttcaattgtttcaattccgtagctaatgttgtgccggaaacttcggctaagaaggaaatagaaaaagtcaacgaagagtagctcgaaaattacgattaggtgttaaatttgaacgtcaattcaacatccacaacaatctcgatcttataacgtggtgatgtttatttctttttggtagtggcatgtatctaaaatgttttaattgtcattttgaaaagtgaatgtatataatattataagatgatattggttactcatggtaaatgataatgtatggtatttgaaggctaaactatggcatccttaagtaggtnaaaaaaaaaaaaaaaaactttaaa

SEQ ID NO: 15842 - DNA, 362 bp, Gossypium hirsutum
  Clone ID: LIB3145-029-Q1-K1-A11
aacagccgcacgccagcctagcgtttccataaggaagaaatggcggtccctttgctgtcgaagaagattgtgaagaagcgtgttaagaagttcaagaggccccaaagtgatcgcaagatctccgtcaagacaaactggcgaaggcccaagggtattgactcccgtgttaggaggaagttcaagggatgcactttgatgcccaacatcgggtatgggtcagacaaaaaaacagcccactttcttcccgatggattaaaaaaattcggggggcccaatgtccaaaagctaaagcttttattgatgcacaccaggccttcctgggctgaaatagcccatgatgtttcaccgaaaaaaaggaagga

SEQ ID NO: 15843 - DNA, 236 bp, Gossypium hirsutum
  Clone ID: LIB3145-029-Q1-K1-A12
cccacgcgtccgcccacgcgtccgttctcaaacaacccaaggtgtttttaagctctaaaaaaactgggaatggaaagagacctgtaaagggcgggaatcgcttctggaaaagcattgggttaggctttaagacacccagagaggccattgaaggaacatatattgattagaaatgcccatttactggcactgtttctattaaaggccgtattcttgccggtacttgtcatactgca

SEQ ID NO: 15844 - DNA, 285 bp, Gossypium hirsutum
  Clone ID: LIB3145-029-Q1-K1-A2
agcctcttctccatctatctgtctctctcttttcctctgttctttcacaaatccgactttttcttttgtctgattccaatcttctaaaaccttcaacttcccatggatttaagctttcattctctctagttggggcatttttctttttctcttgtcaacttagtattgttttggagcttgggttttgcagttcttaaaacagagctattcctttttggttgcttcttcttcaagatcttatctaactctgcttataaactaaagctgaagtgttttttttttcat

SEQ ID NO: 15845 - DNA, 346 bp, Gossypium hirsutum
  unsure (1)..(346): unsure at all n locations; Clone ID: LIB3145-029-Q1-K1-A3
aacacgcgtacgcccacgtatcctttacatttcacccatctgatgatgaagttgttgccgcatgttcatgccaagaggattgcattgaagttacagatgcttctatgagagcgcaatttctcatatccctctccctggcaaggccgaatggtcttggtactatgtgctgatgcaaatcaagggatgcactttgattgccagcctttgttatgggtcagacaagagaacacgcctctatcttccctatggatgttagaaattcaaggtgcacaatgtccacgagctacagctattcatgatgcacaacacgacatactgngctgagatagcacatgatgtttcaacg

SEQ ID NO: 15846 - DNA, 163 bp, Gossypium hirsutum
  Clone ID: LIB3145-029-Q1-K1-A4
gccacatcttctggttggaacaagttaaaggatggaggtgaaaatagcggaaaccaagatccatggggtaaggcatcatcaacaagtacttggggacaagggagtggtggtagcaagggaggatggtaatataacctttgcttactgacaaggtttttagtgc

SEQ ID NO: 15847 - DNA, 379 bp, Gossypium hirsutum
  unsure (1)..(379): unsure at all n locations; Clone ID: LIB3145-029-Q1-K1-A5
gctcgattaccggaatgcttcctttgttataccccttcacctgaggctggacctgtatcaccaactcctgctcttgccaatggttttattacatttggcagctttaataatctggccaagataacacccaaggtatgcaagtttgggcaaggtattatgtgctgttccaaattcccgtctcgtggtaaaatgcaagccattttgttgtgacagtgttcggcagaaatttctatcaacattagagcagctcggtttagaatcgcttcgtgtcgatcttctccctctaattcttcttaaccacgaccatatgcaagcttattctcttatggatattaggttggacacatttncgtatgctggaacaacgacaacatgtgaa

SEQ ID NO: 15848 - DNA, 244 bp, Gossypium hirsutum
  Clone ID: LIB3145-029-Q1-K1-A6
ctgaggaatgcagtgagtaagacatacaatcgtatcactgatctaaggaaagagatttcatctattaagaagagtgttgtatctgcagaagaagctgcatctaaggcaaaagcagatttggaggctgtgagtcaaagcttacctagtggaaggtgaacctgttcttggtgataaccctacacagttaaagcatttaaaatctgtggctggaaagaccaatgaagagacagaatccatgcatgac

SEQ ID NO: 15849 - DNA, 356 bp, Gossypium hirsutum
  Clone ID: LIB3145-029-Q1-K1-A7
ggcagaaattctttgaactccctgtggaggagaaagagaagtatgccaacgaccagagctctgggaatgttcagggctatggtagcaagcttgctaataatgctagtgggcagcttgagtgggaggactacttcttcatctaatttttcctgagataagagagacttgtcaatttggcctaaaatccccagcgagtacactgaagttacaagtgagtatgcaaggcaactgcgagccctagcgagcaaaatactttcagcactatcaatttgcttgggattagaagaaggaaggctagagaaggaagttggtggcgtggaagagcttcttcttcaattgaaaatcaattactaccc

SEQ ID NO: 15850 - DNA, 188 bp, Gossypium hirsutum
  Clone ID: LIB3145-029-Q1-K1-A8
gtttccttttccaacacctccgtcaacaggacctgtcacatccccttctccatcttctgctcaaaaaactagcattacggttgatgtacctgcaacaaaagttgaagcagccccggtgattgatcctcacccaagggaaaagtgaaccagaaaaggcggacccaaggaattttgctttggtagatgtt

SEQ ID NO: 15851 - DNA, 238 bp, Gossypium hirsutum
  Clone ID: LIB3145-029-Q1-K1-B1
cgcagaaccccaatcattacgaaatttagctgctgccactgaaggaagaagcatgctccacgtacctgaaattcgcaatgtcttggatctcatgcgtacgggtgagaacttgcgtttcgaggatgttagcgatcctccactatcaacatttttcgcgtagctgatattcatgagcggcatagggatatgctgctcgatgttcattacatgtcatacgaagagttactggctctagaag

SEQ ID NO: 15852 - DNA, 359 bp, Gossypium hirsutum
  Clone ID: LIB3145-029-Q1-K1-B10
cccacgcgtccggtctcatcgctgagaagaactgtgctccactcatgctccgtttagcgtggcactcagctggaacttttgatgttaagaccaagaccggaggtccattcggaaccatgaagcatcctgctgagctcgcacatgctgctaacaacggcctagatatcgccgtcagacttctcgagccgatcaaggagcagttccctaacctcacctacgctgacttctatcagcttgctggtgtcgttgccgttgagattactggtggacctgaaattcccttcatcccggagagaggacagctcaccccctctgagggccgcttctgatgctacaggtctgatcactgagcagtgtta

SEQ ID NO: 15853 - DNA, 408 bp, Gossypium hirsutum
  Clone ID: LIB3145-029-Q1-K1-B11
cccacgcgtccgaaagagaaaaattcctttgagtgttcttgcctttctcatggcttgttaacactcgaattccacaaataaggtaatcacttgctgaaatgagagcagttaagaggatgacttgaatatgtttagatgattttaacataaagacaaggaggaaagccaccatgagaagccgcaaggagcagacgcagatagccccttgcattcaactgtttacttttcatattgtgaaatggtcatggatagcccccctcgctactctttctacccttatctttattgttaaatttttttaatgtcaaaagacaagattgcatctcatctttatattttcagtttaatatgacatgactaattttgtttattaaaaatggatttgaatcttggcttgagttaatgggt

SEQ ID NO: 15854 - DNA, 179 bp, Gossypium hirsutum
  Clone ID: LIB3145-029-Q1-K1-B12
cccacgcgtccgggacggagtgtcttacagctgagtcgataaacaaaagtctcatcttcttgaagagtatatgaagcactcttttttgaaaaaaaaaaaaaaaaaaaaaaaaaaaaaataaaaaaaaaaaaaaaagcaaatattaacaaaaaaaaaaaacatgaaagaaaaaaaaaata

SEQ ID NO: 15855 - DNA, 281 bp, Gossypium hirsutum
  Clone ID: LIB3145-029-Q1-K1-B2
gcaactcctgttactacaaggatgggggcattgatcatcctcataagttaacgaatcatgcatccttggctgaacgtgatgcacaaaataaagaggcaaggcaactaccggttgtgcagctgatgaaaatcttgaccttttggttcagcatcacaatgtcgttctgcacatagccaatacccaaattgtcggaaagtgaaggggctcttccgtcatggaatacaatgcacaaaacgagctcctggtggtagtgtactttgcaagaaaatgtggtatctact

SEQ ID NO: 15856 - DNA, 313 bp, Gossypium hirsutum
  Clone ID: LIB3145-029-Q1-K1-B3
gatggtcacatcatgctcacggattttgacttgtcactcagatgtgatgctaatccagtgctgctcaagtccgcttcacccgttgctgagcctgcagagaagatgtcaagtccatgctctcagtccagctgtatagacctttgtgcctcaatccacctttcaagtaccatgcttcactcctaggcttctatcgcttgcttccagatcaaggaagataaaatctgatctagctactcagattagccccatgccacagcttgtactggagccaaccagtgcccggtcaaactcatatgtcggaactcatgaatac

SEQ ID NO: 15857 - DNA, 291 bp, Gossypium hirsutum
  Clone ID: LIB3145-029-Q1-K1-B4
cattaacgcagatgtgggtgcacaaactgaagcaactgcaaagcaacagcctgttgtaagcattccaaaatgcaagtgtggaatgcctttgtgtatttgtgaaagtccagcaccgaaaacagatgcagttcacttacgatgaagaacctccatcctcagtggcttcgtcaaatccaaaaccaaaaaagactgacactgttcccaagagtagaggctccacttcaaactgtaaatctagttcggttttcaatcctggtctggtgaccaatggtactgctgcagataaatctc

SEQ ID NO: 15858 - DNA, 364 bp, Gossypium hirsutum
  Clone ID: LIB3145-029-Q1-K1-B5
caccatatgaatcttctggtgcaaaagctgagagtcatcaagacttggttggagaacctggtttcaatcaatctactagctttgaaaattattactacccaggttatgatgggtcattcactcaatctgatgatagggttattttcttaccgtggttcacttacaggtgtgcaatcggaaaatgggtccttggtctactatttgcctggctataacccatatgctactggggctctaatgggtgttgatgcgcaatgccttggtcaacaaccatattattcatctggatattttcagcctcctgtttcctatgcatcagaagccatgccttgttactcatgggattcaacatatgcttgagatg

SEQ ID NO: 15859 - DNA, 123 bp, Gossypium hirsutum
  Clone ID: LIB3145-029-Q1-K1-B6
cccacgcgtacggttgtaatacgtgaacgaactagtgtagatactacctatggggcatcggctacaaagaagccagaatttcttgatctaggtgttgaaaaatttgtccttcatggtggggga

SEQ ID NO: 15860 - DNA, 421 bp, Gossypium hirsutum
  Clone ID: LIB3145-029-Q1-K1-B7
ctgccacaatttgttgtggcaaattaagcttttctcaacgcttaataaatttgtattcaagtaatttaatatctttttagttagtttatctttaaattcaataaaaatagacattttcgtgtgccttataacctgtagaccaatatgggctaaggaacgattaatgtgttcgttgagtgttcaaacgatgttttgggctaacgagttagtagactgccctagatgtcaaaaaatttaaggaggatgtcgcgacaaccaacttcgaacttcaaagggagcattctgcaacgatatcgtgacaacaaccctataatatcgcgagattcaacttcaaattaacttagagggggaatatctagctttcaatgtcgtgacaacaactgacttcaaaccaaaaagggagggatattcaatgtttcat

SEQ ID NO: 15861 - DNA, 324 bp, Gossypium hirsutum
  unsure (1)..(324): unsure at all n locations; Clone ID: LIB3145-029-Q1-K1-B8
agcagcaaaacaagttcttaacaccccccccccttttttccctttgctagggttttggcctcaaccttggagcgccgtcgcaccaccatcggacttggtggccaatcacgcgcagaaaggacgtgagagaggtcggaggtctctaggagtcaacgggggcaggtttttgttttggtgcaaggagcgggtggaagccgaccctcgagcggagtgcacgccggggacgcacatggagactgcggcacctatgggtttcttcttcctcttttgctgaattttttttttagaatttgggctacttgggcttangtattgggttaattt

SEQ ID NO: 15862 - DNA, 342 bp, Gossypium hirsutum
  unsure (1)..(342): unsure at all n locations; Clone ID: LIB3145-029-Q1-K1-B9
ggaagatgtagatttgttggcaaatttcaattttgattcttatcggttctcaatttcatggtcaaggatctttccagagggtgttggaagagtaaattgggagggagttattattacaacaggttgatcaattacttggttaagaaaggtattactccgtatgggaacttgtaccattatgatctccctcaagctcttcangagaagtacaatgggttcttgaaccgtcaaattgtggaaaattatgctgattatgcaaagttttgtttcaaaacattgggggataaagtcaaaaactggtttacattcaatgaacccagaatcggggttgtttttggtttt

SEQ ID NO: 15863 - DNA, 132 bp, Gossypium hirsutum
  Clone ID: LIB3145-029-Q1-K1-C1
ctaaatatagaccgggagcggccgttatacaggatccaagagcccttaaacacgcctgctacgtcctaacggttgtatagggtggccgaaggtgaggatattcaccgacttgttacaaccaagggaccggga

SEQ ID NO: 15864 - DNA, 273 bp, Gossypium hirsutum
  Clone ID: LIB3145-029-Q1-K1-C10
tataaacaaaactcctataatggctacatcctcgggttcatcagcaacacaaatcaactcaggctcagaagaagcattaatggacgaaaggaaaaggaaacgaatgatatcgaacagggaatcagcaaggagatcaaggatgaggaaacaaaagcatttagatgatctaatgactcagttgactcagttgcagaaacaaaaccatgagatcatcacatacataaacttcaccacacaacacctcttgaatgttgagtcagagaactcggtgct

SEQ ID NO: 15865 - DNA, 359 bp, Gossypium hirsutum
  unsure (1)..(359): unsure at all n locations; Clone ID: LIB3145-029-Q1-K1-C11
ggagagcatggctaaatctctacaatgggagatccgaatgatttattcgaaagacggtgaaggattgctttgtgttcgcaagaaattctggcgtcccaccgtggaagaacctataaaggctgccattgtttgaacacgatgctaaacagtactcgtgttttccacaattaggcataatattttacatattctttttcgattcacaagcatgttatagtctgtaatccattttggcaagtgtaaaattatataatcgactacgttagactgaatcacaattttggtttcaatggtccttgatggaataaaagtagctagtttcattaccannnaaaaaaaaaaaaaaaagaaaaaaccac

SEQ ID NO: 15866 - DNA, 159 bp, Gossypium hirsutum
  Clone ID: LIB3145-029-Q1-K1-C12
cccacgcgttcgtccactcgttcattcactcgtccgatagagcaattaacgaatcttgctactggctggtgcgtgtgatgcacaaaaagaagaatcaaagggctggatgaatatcatacggaaaatgctcgtccttgggcttgtatgatgaggacaacc

SEQ ID NO: 15867 - DNA, 65 bp, Gossypium hirsutum
  Clone ID: LIB3145-029-Q1-K1-C2
agcagagaggctattttattgcggaaaaaatcagtactgggcctttgctagggttgtggcctcaa

SEQ ID NO: 15868 - DNA, 374 bp, Gossypium hirsutum
  Clone ID: LIB3145-029-Q1-K1-C3
gcctgttgatccttttgttttgatttgtaaagttggtcattccaattccaagtccttttcagcagggttggtaaattgagatgtctgtgcagtaagaactaattgactttggggttaaaaagcagtttgctaatggaatggagggaagaaacccattccaagtcctggagtgtgttcatagaaaattgcagcaatcctcgttgtgttagtaatgaaaactcctgcaaaattaaagctgtttttttctgaacattatttattgtatcatagtgaccaaattgaattgaaagaattgaagattgattgcttctcagctattgaaggggaagattgcacccttgtacattaaccttgtattcgtaatgattgattac

SEQ ID NO: 15869 - DNA, 297 bp, Gossypium hirsutum
  Clone ID: LIB3145-029-Q1-K1-C4
cccacgcgtccgcccacgcgtccggggctttcaaagatgtgatcacagagggtgatggaagaacacaatattgacctcaatgagcatcaaatggtcttttttgggtaatgtatgtaatgaatgagggtgggtttgggggcttagtttctagttatggaacatagtttttctatgcttttaaaaacaaccaattaggttttcagtttggtcttatgcaagtcttgtaggtctttagtctagtaatggtatgtaatgggcgaatctaaacttgtttttggtagaatgatgaatgctttc

SEQ ID NO: 15870 - DNA, 377 bp, Gossypium hirsutum
  Clone ID: LIB3145-029-Q1-K1-C5
acccgtctgttgatccttttgttttgatttgtaaagttggtcattccaattccaagtccttttcagcagggttggtaaattgagatgtctgtgcagtaagaactaattgactttggggttaaaaagcagtttgctaatggaatggagggaagaaacccattccaagtcctggagtgtgttcatagaaaattgcagcaatcctcgttgtgttagtaatgaaaactcctgcaaaattaaagctgtttttttctgacattatttattgcatcatagagaccaaattgaattgaaagaattgaagattgattgcttctcagctattgaaggggaagattgcacccttgtacattaaccgtgtattcgtaatgattgattac

SEQ ID NO: 15871 - DNA, 356 bp, Gossypium hirsutum
  unsure (1)..(356): unsure at all n locations; Clone ID: LIB3145-029-Q1-K1-C6
acgacgaaaacggatttggatcgggaaaaatgaaagtagttgaatagtcgatcgtgtccgttgatatccgaggtaagtttattagctatttaattttattaaatcagtttatattacatgtatgaatatcaatgtatttatgttgattaaaattaaaagtatataaatcgaatgagaagtatgaaaattatgtatatatatgtgttaggttcgaatgagtatgatatacaatatatatacctcatgttttgtaataattangtatggactatggcatgtgatgtatcgacatagttgtttatgtcataagtttattagtatgtaatgttattgttactgatgtcgatgattattta

SEQ ID NO: 15872 - DNA, 171 bp, Gossypium hirsutum
  Clone ID: LIB3145-029-Q1-K1-C7
gaccggaatggaatggtcgacccgacccacccgtccggtgagcctattcacatgataaggaacgtgttcaattcgcaatcccgagaaccctttcatcagggttggtcacaagacatgtctgtgcacaacgagcttattgacgtgggtggtataatagcagcatgctaatgg

SEQ ID NO: 15873 - DNA, 243 bp, Gossypium hirsutum
  Clone ID: LIB3145-029-Q1-K1-C9
tgctgaacgaattataagtcgactccaatctgaacttgccacatcaatggctgtagctgcggctgccgagttgccttgcacggtgaagcttaaagtgtggtcgtatgatataaaaaatccttgtgcactactaaatgttggcaaatgccgcttaaccataccacatgctgtcctttgtagtgaaatgggtgcacatttttcaccttgtgggaaatttttagctgcttgtgttgcttgtgtgct

SEQ ID NO: 15874 - DNA, 120 bp, Gossypium hirsutum
  Clone ID: LIB3145-029-Q1-K1-D1
cccacgcgtacgggtatcaagtgaggttatcatgcgctgacgagtcaaagatatccaagttttagtagtggatggggtcacgctgaaagtaatatgctatatcgacggctggatcaattt

SEQ ID NO: 15875 - DNA, 258 bp, Gossypium hirsutum
  Clone ID: LIB3145-029-Q1-K1-D10
aactgttacacacagcagcagcagcagcagccatggtgaagtactcaagagaaccggacaaccctactaaatcttgcaaagctaggggttctgaccttcgtgttcattttaagaatacacgagaaactgcctttgcaatccgaaagctacctttgacaaaggcaaaaaggtacttggaagatgttattgcccacaagcaagcaattccattcaggcgcttctgtggtggagttgggcgaaccgcacatgctaagaatc

SEQ ID NO: 15876 - DNA, 219 bp, Gossypium hirsutum
  Clone ID: LIB3145-029-Q1-K1-D11
ggagataatacgtatcgctgtgtcttcatcaactaaattatgtatcagctcattattcaaagcaggtgtctcaacttcaatcaatacaaaaaaaaatacaaaaatacattcataaacaaacaactctctcaagttttaagaagaaaaggtaacctcgcttccaagggttttaaagaagggcaaaaaaaaaattcctgtatgcaaacccatttttttttt

SEQ ID NO: 15877 - DNA, 232 bp, Gossypium hirsutum
  Clone ID: LIB3145-029-Q1-K1-D12
cccacgcgtccgcccacgcgtccgctctcttgctctcggtcacttttcaacgttttcctgttattcttttgtagctttgggtatccacgggccaaaaaaacacatgctatagaaggaagagagttttcgtgagagagaaaccctaagttttctctggcgtttctggtttttgtgatttttgaaattcgctgcttcaacggagactcatttcagatttgacaaaatcatcaac

SEQ ID NO: 15878 - DNA, 364 bp, Gossypium hirsutum
  Clone ID: LIB3145-029-Q1-K1-D2
cgctggcatacatagtcagatagtaaaagacgaagtgtttaatgacttttttcagttgtggcctgagaaatttcgaaataaaacaaatggggtcacaccaagaagatggatccgtttctgcaatccagagttgaagaaattataacgagctgacaggctcagaagactgggttttaaatactgaaaagttgtctgaacttagaaagtttgcagataacgaggatcttcagatccaatggagggccgcaaaaaggagcaacaagttaatttgcatccctcattaaagaaaggacaggctatatagtaagccctgattcaatgttcgacatccaggtgaagcgcatccatgaatacaagcgtcagc

SEQ ID NO: 15879 - DNA, 294 bp, Gossypium hirsutum
  Clone ID: LIB3145-029-Q1-K1-D3
ggcggatattagcaatggttccaaagggtttgcagtgaaacaaggagaaccaactagggtccttcctgcagaagagacaaagaagggtctttattacctgggaaaccttgaccaaaacattgcagtcataattcgaacctttacttctttcagtcaagtctaaagggaatgaagatgctgccgaacaagttaaaaatggtttgtcaaagattcttgttcatcattatccacttgctgggcgactaaccatcagctccgaagggaagctcatagtggactgcaccggggaggggg

SEQ ID NO: 15880 - DNA, 304 bp, Gossypium hirsutum
  Clone ID: LIB3145-029-Q1-K1-D4
tccacgcgtccgtgatgatcatgccttttggtcttgggcttactgagttcctgtatttataatctctcttgtttaagtctgttctgtagtagcaattataagtaagcaataaaaacccaatgaatggcattgaatgcaaatgtgttggtgtggtttgtggttcgaaatggttgttttttgtccccttgtgtaatcttagtttgctttggggggattcttacttcttagagttggataagcttcaattccccaggaatgtaattaaataacaacttttctgataaggttcttagaaatgttacac

SEQ ID NO: 15881 - DNA, 367 bp, Gossypium hirsutum
  Clone ID: LIB3145-029-Q1-K1-D5
gtgttttgtccaaacaaacgcaagatttgtagattcatttcacttgtctctcagcctccgtctcaatggctttgccaaaccagcaaactgtacattatccgagcttcaagctcgttatcgtgggcgatggaggaatggaaaaactaccttctgaagaggcatctaactggagagttcgaaaagaaatacgagccaaccattggtgtggaggttcatcccttggacttcttcactaactgtggccaaatacgattctactgctgggatactgctggacaggagaagttcggtggtctcagagatggttactacattcatgggcaatgctccagaattatgtttgatgtaactgcccggttgacataca

SEQ ID NO: 15882 - DNA, 372 bp, Gossypium hirsutum
  Clone ID: LIB3145-029-Q1-K1-D6
cccacgcgtccgcaactgcttactatcgtggagccatgggcatcttgctggtctatgatgtcacggatgaatcctcgttcaacaatattaggaattggattcgcaacattgaacagcatgcatcagataatttaacaagatattggtggaaacaaggcagacatggatgaaagcaaaagggctgtgccaacctcaaagggacaagctcttgcggacgagtatggaatcaaatttttcgaaacaagtgcaaaaactaacctaaatgtggaggaagttttcttttcaatagcaagggacataaagcaaagactcgtcgatactgacttaaaggctgagccttcaacaattaagatcaataaacctgaccaggca

SEQ ID NO: 15883 - DNA, 58 bp, Gossypium hirsutum
  Clone ID: LIB3145-029-Q1-K1-D7
aatatgaagaactattttactctaaaaaaaaaaaaaaaaaaaaaaaaaaaaaaagaaa

SEQ ID NO: 15884 - DNA, 414 bp, Gossypium hirsutum
  Clone ID: LIB3145-029-Q1-K1-D8
gtttggggctgctgatatttggtttttctatttcatcccatgctttggctgacatggtaatgctggcagtatgggaaagaagggaagttggttttctgcaattaaaaaaattttctttccacactccaaggaaagctaaataatgtccatctacatctgatggaactgattccactctttcaaaccccctgtgcgaggagtctgctcaaaattcttcaaaatactctaacagacagaagtttgcttttattttcactttggacattaactgtattgttaatgatgctgacaattctagctggcttttcaattgtcagcatacatccaccacctgcctttggctcatcgcctaatcttgaagcccttgcacttgaagcaaataagtctaaggatcaaaatggagatagttcttta

SEQ ID NO: 15885 - DNA, 233 bp, Gossypium hirsutum
  Clone ID: LIB3145-029-Q1-K1-D9
tgaatgacctccttgatgcgttggacttcaatcaagttgttatctttgtcaaaagtgtgagccgagcagctgagttgaacaagttacttgtggagtgcaattttccttccatatgcatccactctggcatgtctcaagaagaaaggttaactcgctacaagggtttcaaggaggggcataaaagaattcttgtggcaaccgatttggttggaaggggaatcgacattgaacga

SEQ ID NO: 15886 - DNA, 112 bp, Gossypium hirsutum
  Clone ID: LIB3145-029-Q1-K1-E1
atcaggcgtccgatgaagaacaaaaaactttaacaccaggcacatgataactagctccggagagcttgcgctccaggcctggtagaggcaatccaaaacacgcccacctcaa

SEQ ID NO: 15887 - DNA, 235 bp, Gossypium hirsutum
  Clone ID: LIB3145-029-Q1-K1-E11
tagaaatccaaaagcttccagaaggaaaggaaaaagacggtcttcagtggttgtttgtgaagaaaagcagctagagaattatggtgattggcaaggccccccaccatgggatatttccttggggggtgatggatgccctaagtttttgtgtgacgtgatggttgaaggcttggcaaaacatcttcgttgtgttggtgtagatgctgcagttccacattccagaaaaccagaaccc

SEQ ID NO: 15888 - DNA, 177 bp, Gossypium hirsutum
  Clone ID: LIB3145-029-Q1-K1-E12
tccaactgtagctcaacacccaacgactttactcagccagcctcttattttaccaaaagaacaggtgtagtggctcaaagcttacaacacatatcccatgttcgtgtgcatattaatggatatcttgcccgaatgatcgaccatccagaatccacggctttgcttgtgcgctcatta

SEQ ID NO: 15889 - DNA, 420 bp, Gossypium hirsutum
  unsure (1)..(420): unsure at all n locations; Clone ID: LIB3145-029-Q1-K1-E2
ttcctagatcatggcacagctcctgcactctcgatgggctaaacctgttggttcttgggggtgggccgattcaagagtactgcttagtgatactttcctgcttgatctttcaatggaaaaacctgtgtggagaagatacctgtagcatggccccaccttcacgcttgggtcacacactgtcagtatatggtggtaggaaaatattgatgtttgggggtcttgctaagagtggtccactccggttccgttccagtgatgtattcacaatggatttaagtgaagaggaaccatgttggagatgtgtaactgggagtggaatgcctggtgctggaaatccaggtggcatagctccccctccaagacttgatcatgtngccgtgagccttcctggtggaagaatcctcatctttggtgggtctg

SEQ ID NO: 15890 - DNA, 284 bp, Gossypium hirsutum
  Clone ID: LIB3145-029-Q1-K1-E3
cccacgcgtccgctccagaagagaaacgtacaatcaacatggtctcaatagaagaactggaatcacagcttgacaatctcttgtaaggagctaacaaaaggtcaatcaaattctttcaactcgactcggatttcttattaaattttggctaatacacaccctggttcagtctgttcataaggttatactgatagataagtcgaaaaaagtagtcatacaaaattgtgcgctcatcagaattttcatttctcacgctcatatattggctaccattgttgatcata

SEQ ID NO: 15891 - DNA, 288 bp, Gossypium hirsutum
  Clone ID: LIB3145-029-Q1-K1-E4
tccacacatccggtcaaaaatacaaacctttaatatagcactgactcaatagaagaacggggatgaccgctatgacaagtctatctgaaggaggtaacaaaacggcaataacattcaatgaactaaactgggatgtctgaatacattttggctggcacaccctgactcagtgtgtacataatgttatactgatggatgaggaaaaaaaagatgtcttgcagaattgttcaatattgacaattttcatttctgacgttcatatatatgctaacatagttgatcatatat

SEQ ID NO: 15892 - DNA, 388 bp, Gossypium hirsutum
  Clone ID: LIB3145-029-Q1-K1-E5
ttgcccttcttggaccaagtggtggtggaaaaaccacgattgcaaacttaattgagagattttacgatcctttgaagggagaggttttgttaaatggagttcctttagtggaaatatctcatgaatatcttcataaaagttaatataaaaaataaaaaaaacttcacctcatggatatcacccctaattatggtacataaaacttttgacttctgtttcctgcttggataagtttgggagctcaagaaacaggcaaggtaagtatagtcagccagtattaaagggattcctccatggtcaaaccgacaagcagctctttaagaaaaatgttcttatagttacttatgaagatgtcaagcctacatagataggattgtagtggggagac

SEQ ID NO: 15893 - DNA, 384 bp, Gossypium hirsutum
  Clone ID: LIB3145-029-Q1-K1-E6
gaaagaagtcacctctgccatttgattgcttttttgttttctctatgcgtatatttcgtttgtccaaaatacaatgatttttttgaggcctttatagctgaaaagaaagaaaataaaaatacaattttcattctttctatttgctgctcgctgtcgtttttttgtttgtgtttgctgctgtggtttgtccatttcttcgcaggtacaggtgcgttggagctcgggtacggggctgtactggagcgggcgtggctgctggacggtacgaatcgtacggcgttagaggcttggctgcggcgcaagggagataaccctagggttttagggttttaaatttctaggcctatcgggcttgtattttgggtcttgggttaattttgggat

SEQ ID NO: 15894 - DNA, 115 bp, Gossypium hirsutum
  Clone ID: LIB3145-029-Q1-K1-E7
gtgtgcagttaggactaagaggtggtagtttaaccgcgattgctaaccgaattgggagattgtacaaacctcagagtggattgggatgcctaaatggccgtcctgtagtagaaaa

SEQ ID NO: 15895 - DNA, 422 bp, Gossypium hirsutum
  unsure (1)..(422): unsure at all n locations; Clone ID: LIB3145-029-Q1-K1-E8
cccacgcgtccgcccacgcgtccgctctaatgccagtggcaacatttttcatgggtgtaatgtgtggcactgataaaccaaggtgcgatgtgttcttaaacatggtgctggtcagcgttggagttgtcgtttctcacatggggaaattcatttaatatagttggcacagtttatcaggtcacgggcatcctagctgaagctttgaggctggtcttaactcaagtcctactgcaaaagaagggcttgactctaaatccaatcaccagcttatactacatcgcaccctgcagttttgtgtttcttttttgtgcctgggtgtttactggagaaagcctgngatggaagtttcacagatacaattcaatttctggatctttttctccaatgctctttgtgctttagctctgaacttgtctatattc

SEQ ID NO: 15896 - DNA, 351 bp, Gossypium hirsutum
  Clone ID: LIB3145-029-Q1-K1-E9
aaaaaaaaaaaaaaaaaaaaaaaaaaaaaaaaaaaaaaaaaaaaaaaaaaaaaaaaaaaaaagaagggaaaaaaaaaaaaaaaaattggaaaagccaaaaaaaaaaaaaaataagggatccaaataagaagaaattatttaaaaaaaaaaggggggccccttaaaaaaaaaaaaattaaaaaaagtgtggtgcccaaaatatataaagtattaaaaaagaaaattttggtggaaaaaaaaaaaaaaaaaaaaggggggggcctttttaaagatacaattttttttttcgtttgtttggaaagaatttttttttttttggttgaccttaaattaatttaagggggcgttttt

SEQ ID NO: 15897 - DNA, 228 bp, Gossypium hirsutum
  Clone ID: LIB3145-029-Q1-K1-F10
ctgatattgatcctgctcgacctttgacgcaagtcaagaaaaggagtcctttttcatccttctggccagaatcgcctaatcaaaaatcaatcatggctgtgaccatcaagcgagcggccctcatcgttgccagtcttggcgtcttatcttttatctttggagtcattgccgaaaacaagaagcctgccgctggaactccaatttctggaaaaagatgtggttatttgt

SEQ ID NO: 15898 - DNA, 261 bp, Gossypium hirsutum
  Clone ID: LIB3145-029-Q1-K1-F11
cccacgcgtccgcacactttattaagcaataaaaagaaagctataatggcaatcccattgtcctttctactgcttttccctctcttggctcccacatttgttttctcctcaccagttcaggaccccgagcaagtagtccaacaagtcaatgagagcataagaaatgctactatggcgaggaggagcttggggtttctctcatgtggaaccggcaatcccatcgatgattgctggcggtgcgaccatcattgggagaaaaac

SEQ ID NO: 15899 - DNA, 235 bp, Gossypium hirsutum
  Clone ID: LIB3145-029-Q1-K1-F12
cgtatgcggggctgcagtcaatcggtgcatgtgattatagcactaattcagtgctttagacatgtgtgctttgacagcgataagcagaatgagcgcgatatgtatacaagccagagctacaaagctctatcaaggaagtgtagagaggtccggttcgggctaaatattgcgcaagagattcttgcatcctcggttgaaagaccaagttctcattaaatactcttacatgaaccca

SEQ ID NO: 15900 - DNA, 302 bp, Gossypium hirsutum
  Clone ID: LIB3145-029-Q1-K1-F2
gttgtcgatcgtggccttgatgatcatatttatatatactacactgaccatgggggtcctggtgtgcttgggatgcctaccttcccttatctttatgctgatgactcgattgatgttttaaagaaaaagcatgctcggggacttataaaagctggtattctatcttgaagcttgtgagtcaagttgtatctttgagggtcttcttccttaggggttgaatatctatgcaaccacaacatcaaatgcggaagagagtaactggggaacctattgtccccgagagtacccaagtcctcccccat

SEQ ID NO: 15901 - DNA, 308 bp, Gossypium hirsutum
  unsure (1)..(308): unsure at all n locations; Clone ID: LIB3145-029-Q1-K1-F3
aagggccgggccacgccacgcgtnctatactaataaaggttaattaaaatttattttgcactggtttttctatatagagaagggcggtatctttgatgttaggttgacattatacatttatctatatctccaattactgaaatttaatgtcttgtgttttggtacaattgttttctgtactactgatactattaaatngacactaattgctgggtttgagggagagctctttgttgatgcagtaacagattggtttgcaaaggcccgacttaaaaaagactcgcatctttttactattttgggacact

SEQ ID NO: 15902 - DNA, 325 bp, Gossypium hirsutum
  unsure (1)..(325): unsure at all n locations; Clone ID: LIB3145-029-Q1-K1-F4
cccacgcgtccgcttttcaatcttttctttcgtttcaaatcttggaaatcaaaattcctatggcaccaaaggccgagaagaagcctgctgagaaaaaaccagcggaagacaaaaaagccgagaaggcaccaaccgaaaaaagcccagagccgaaagaagctccccaaggaagccggcgacaagaagaagaagcgaccaaagaagagcgtcgaaacctacaagatctacatctttaaggttctgaagcaagtgcaccctgatatcgggatttcgagcaaggccatggggattatgaacaagttcaataaatgacatttntcgagaa

SEQ ID NO: 15903 - DNA, 325 bp, Gossypium hirsutum
  unsure (1)..(325): unsure at all n locations; Clone ID: LIB3145-029-Q1-K1-F5
atactaataaaggataagtaaaatacatgaagcactggtttttttatatagtgaaaagcaatatctttgtttttatgtttacattatacatttttctatatctccaattactgtaattaaatgtcttctgtcttgttacaatttttttctgtactactgatatattaaattgacactattgtatgggtttgagggagagctctttgttgatgcagtaacagattggtttgcaatggccgtacttaacttgtctcgcatcttttactatttggacactcttttagccaacttgcatctatatcttatgctacggntttggggggaa

SEQ ID NO: 15904 - DNA, 304 bp, Gossypium hirsutum
  Clone ID: LIB3145-029-Q1-K1-F7
cccacgcgtccgcccacgcgtccgcccacgcgtccggaattatctgggttacgatgaaagtaatttggatgctgatgttttaaaacaacttgctgaggtagttgataaagcagagatgacaccagctgatatagtgaagttttgatcagaaccggcgttgtaagccaaaagctgtcagtgaattgctagaagccttgaagacaagagcaaacaggaacttgttgcaaaatgggattctgagggagaaaaattcagaagatattatggaagatgaagaacaagagaaagggctttagaagagtct

SEQ ID NO: 15905 - DNA, 301 bp, Gossypium hirsutum
  unsure (1)..(301): unsure at all n locations; Clone ID: LIB3145-029-Q1-K1-F8
gctgatttccatcctcaaggggcaaatgttatttttggacgaatggctcttcttgaccatgattatttcagttcaatatctggggctactgaaactcttaaagctaacacgttccgccttccggttgtttctgggccaagggctgttgccaaaaattgaaggatgctatttgttcaacagttgatgtaatgcacgctatggcatcctcaatactctctgttatataaaaggtggcaaaacanatctctcctctctctgcacttgaaaataacactgcacacgagttttctacactaaacca

SEQ ID NO: 15906 - DNA, 243 bp, Gossypium hirsutum
  Clone ID: LIB3145-029-Q1-K1-F9
aaagaaagttgtagatacttgtacatcaacatgggatgttacagagacaggaaagagcatttccgagtatgtctacttcactactacattgcctctatttatttttttaaagtacagatcaacaactttgggagtgacaatatgccttaaggactggagtaaacatcctctgggttcatttctataatcaagcactaaaagataccttcagtagcatgctaaaagtttccaatcaaacatttt

SEQ ID NO: 15907 - DNA, 194 bp, Gossypium hirsutum
  Clone ID: LIB3145-029-Q1-K1-G1
ggctaacaagagcttagaggatgattatgtttaagccattgaggaggaaattgagaacgtgtggggcctttaagaagagcgttgcatttatggacgtggttcatggatagcctgccagaaatgacaatcgttggtatttggtgagcgctgatcgggtttgctttcactgataacagatgggtgcgatattatgg

SEQ ID NO: 15908 - DNA, 364 bp, Gossypium hirsutum
  Clone ID: LIB3145-029-Q1-K1-G10
accactcttccggatttatggatcataaaactgttaaaaaactaagcataatatattctctaagggtgtcgtaactaaatgcaaggtcacttattgtcttattttatatatagcttgcttctcctatataaatatacactcttttgatatttaatttatgtttgttttttattattttacttgttctttttaattgttttctaatttttatttttatgtttattttatgttaattttcttttcttattatttttttttttatttttaattcttttataatttctttatactttctttttttgtaatattttattttattttagtatatttatttcttttttttttcttgtctatatcttttttt

SEQ ID NO: 15909 - DNA, 219 bp, Gossypium hirsutum
  Clone ID: LIB3145-029-Q1-K1-G12
tgagttttgaatctagggatttgcgggtggagaagacgagagctcatctctctgcttcaaagctcctgtccaggtagaattctcttcttcctttgcgttgtgttctttgttgttcagtcgccatggcttcaaagcggattttgaaggaactcaaggatttgcagaaagatccacccacttcttgcagtgctggtccagtagctgaagacatgtttcatt

SEQ ID NO: 15910 - DNA, 146 bp, Gossypium hirsutum
  Clone ID: LIB3145-029-Q1-K1-G2
aaaaaaaaagggggagttttttatattatgaaaaattattttccccatttgattaaaaaaaaaaaaaaactttttatccaaagacttttatggttttaaatcgcagcggcccccatatattaatcaaacttacgaacccctgcatg

SEQ ID NO: 15911 - DNA, 298 bp, Gossypium hirsutum
  unsure (1)..(298): unsure at all n locations; Clone ID: LIB3145-029-Q1-K1-G3
gtttctttcaaagttgggtgacctgtatcagactcaaatgtttgcaaagattgagaacatagagggattaaaccattttgatgagattcttcaggaagcagatggtatcattctttcccgtggaaatttgggcttggtctcccacctgagaggtgttcttatttcaaaaagctgctctntataagtgtaacatggctggaaagcctgcagttgtcactcgtgttgtggacagtatgaccgacaacttgaagccaactcgtgctgaggcaactgatgttgccaatgctgttcttgatgg

SEQ ID NO: 15912 - DNA, 177 bp, Gossypium hirsutum
  Clone ID: LIB3145-029-Q1-K1-G4
ctagtattaaagtcgtgtggaaccttttccagaaacaataggcttggtgtttgtaatagtgataatgcttgtgatccttttgctttgtttctgtgcttgcttgatggatggtattgtcaagattgtggagtgaggtctttgtctaaattttacatgaattgttctagttgatttggt

SEQ ID NO: 15913 - DNA, 400 bp, Gossypium hirsutum
  Clone ID: LIB3145-029-Q1-K1-G6
ttggaaatttcgaaataaaacaaatggggtcacaccaagaagatggatccgtttctgcaatccagagttgagtaaaattataacgagctggacaggctcagaagactgggttttaaatactgaaaagttgtctaacttagaaagtttgcgataacgaggatcttcagatccaatggagggccgcaaaaaggagcaacaagttaaaagttgcatccctcattaaagaaaggacaggctatatagtaagccctgattcaatgttcgacatccaggtgaagcgcatccatgaatacaagcgtcagctgctaaatattttgggtattggttaccgttacaagaagatgaaagaaatgagtgcttcagaaagaaagaaaaagttcgttccacgtgtttgtatatt

SEQ ID NO: 15914 - DNA, 293 bp, Gossypium hirsutum
  Clone ID: LIB3145-029-Q1-K1-G7
cccacgcgttcgcggacgcgtgggcggacgcgtggggttgtttaacgatcatgggcaaggtggtttatggcactccatatcatccatgcagcacagcaaaaaaggcgacattgatgactgttacctatgtaaaaacccaaggcacttctaaacacatggttgctatgttcttttgcattgcgacaccgggggcatgagctatctgaagccactcttcttagtcttaaattctttagggtaaggataaacgttcatgaaagacgccaaattatgatggcaattttttatgggtg

SEQ ID NO: 15915 - DNA, 258 bp, Gossypium hirsutum
  Clone ID: LIB3145-029-Q1-K1-G8
acgcttagctgctggtacacaacaaatatctatggtggagccacacgggaaaatggtcgaaggagaggttattggtgattaaataacaaccgtgactagacctgatgaagcccagcgagcacgagctgggcgatgagtacttgtaactaaaggttctatggaggttattaagactgagaaacatgggttcatgaaatgctggtcaaggatacacatttgacgaggctaagggtctttcccttatacttatagatctct

SEQ ID NO: 15916 - DNA, 261 bp, Gossypium hirsutum
  Clone ID: LIB3145-029-Q1-K1-G9
cccacgcgtccgcccacgcgtccgttcttttgctaattatttttcttttaataagataatttttagtgctttgattttgtatgtaagagtgcggcatggaattatatatatatacatgttctcccagatagattcatacactgttttgaattagaatttaggtttggtaattatattgattttgttcttttaaattgttttctaagtttcatttcacgtctgattaaaggaaaatgacttattttaatacaattttttttg

SEQ ID NO: 15917 - DNA, 232 bp, Gossypium hirsutum
  Clone ID: LIB3145-029-Q1-K1-H1
ctttcacaggatctgattgaagctttggggtttagcatttgagtcttaaaaaaaggggggaaagggtcttaagtaatgaagtcaacctcaatgaatgcaagagtttcttgatcgcagagtccctgctaatgcctcccagttgatggggtttctcgttatgctgatctcattgatcgaggtacgagcctactgagtcggatttataggccaactacagctgaagagccttaac

SEQ ID NO: 15918 - DNA, 135 bp, Gossypium hirsutum
  Clone ID: LIB3145-029-Q1-K1-H10
gaaaaagaaaagttagttatctttgtgaatatccaagaaaattaagggaaatacaaaaacatatggtgtaatggtaatgcatatgcatcatacatagaattataaggagctaatggaaagttgtttctgggttac

SEQ ID NO: 15919 - DNA, 247 bp, Gossypium hirsutum
  Clone ID: LIB3145-029-Q1-K1-H11
ctatgcccaagagctggtctctgtcggggacaaaacggtatcactgggttacatcattcgtctaactggcgttacccgcgttgggaagggcatggatgctcaagaatggcatgctgcctgtgtcaaatacatacttgtacaatctgatgcagcaactgttgtggaagccatgtcattgtttacggaagatgttgatgctgtggtgcgaacgacttgccactgagatgctactttgatcagctctatt

SEQ ID NO: 15920 - DNA, 214 bp, Gossypium hirsutum
  Clone ID: LIB3145-029-Q1-K1-H12
cccacgcgtccggttgtaggtggtgataggcgaaaggaatctaaagatttggaagagaaggctgggatgaagaaaatgtttgagctgatcgacaagtacaacttgaacggccaattcagatggatatcatctcaaatgaacagaatccgaaatggtgaactttaccgatacatttgcgacacgaaaggtgcctttgtacagcctgcattgtatg

SEQ ID NO: 15921 - DNA, 402 bp, Gossypium hirsutum
  Clone ID: LIB3145-029-Q1-K1-H2
gaaatactgatgcaaatccacaaaaaaatcagcctggggctcctgggaaaatggaggaggtcaattctattgctgctaagccaacaaccatgactagacctgatgaagcccagggagcacgagctgggcaattagtactggagctaaaggtgctaggaaggtcataggacaggaaagataggttctgggaatgctggtcaaggatacacgtttgaggaggtaaaggttcttttccttattcttatggatctctgtaggcgtacctctggtctaccacacccgttaccagtttctcaggtgggaagcagcagcatccaggtgcggttgcattatattgatggaaattatacggtattgcctgaggtggtagaagcatcccttggcccacatatgcagaacatg

SEQ ID NO: 15922 - DNA, 367 bp, Gossypium hirsutum
  Clone ID: LIB3145-029-Q1-K1-H4
tggcgattctgcatctagcacatcattcttttgaaacatataatgtaaaatcatttggggcttgtatgttttggagatggatcatgtttatgcgaccccaagaaaagaaaaataggtaaggaaaagtaaagtaactctgtatgaagttgttgatgttttgtacattaacacccacatattctttctacttgtcgatagcttaaagaagaaaaaaaggaaattcctcgaggttggttgatttttgttctccgattctacttgaatcaagaccattttgaagcatatctctaagttcttatcagcttatgtcagaaattgtatttccgatacattatttgtttgcctgcacattatacaccttatgtta

SEQ ID NO: 15923 - DNA, 122 bp, Gossypium hirsutum
  Clone ID: LIB3145-029-Q1-K1-H5
ctaattggctacttaagcttcagtagttaagtttttttagcaaaaaatgggggaaagaagcattaaatccaccatttttttgttgaattagcagtcaccttcttaaacagtgatattgttga

SEQ ID NO: 15924 - DNA, 428 bp, Gossypium hirsutum
  Clone ID: LIB3145-029-Q1-K1-H6
tttgaagtgtttcttcctcaactccttttgtatcccaatccatcagacccattgaatggtgaagctgctgctcttatgatgcgtgatcgtactgcttatgaagaaaaagtgaaagaatatcgtgagaaatatgcaaacctgaagatgttgcggagcagaagaagtgaagtcaagtgacgaagaactgagtgaagatgaatatgctgcctcggatgatgaggaaatcgccggaaaaccagatctttaggcagatattatgccctgcatactcgctacgaaaatcatcttgtgttgtacatgatgttcagctccaggaaaattcgaacacaacaaaactggggaacatgtggaaaaatttctatttacccctttttgtcattactttccagggatgtttgtgtaaattaatccactgtgcaataattcaa

SEQ ID NO: 15925 - DNA, 201 bp, Gossypium hirsutum
  Clone ID: LIB3145-029-Q1-K1-H7
gaaactgcttcttttggggttttcttaaccctttggccgccgatcagcccatgccccgatttcgtcgaaggggacaccagctcgacgactccggcgaaaggtgatcgtggcgattacagcatgcgttaggtggtcgactcctattgtgcagtgactggagttgctgtgagcgaaatcgagcaaaaaagataagggtgacag

SEQ ID NO: 15926 - DNA, 57 bp, Gossypium hirsutum
  Clone ID: LIB3145-029-Q1-K1-H8
tcgcggcaactagttttgcttttggagttgaaaaaaaaaaaaaaaacatgtttatgc

SEQ ID NO: 15927 - DNA, 318 bp, Gossypium hirsutum
  unsure (1)..(318): unsure at all n locations; Clone ID: LIB3145-029-Q1-K1-H9
atttgaaaanncccaggcagggccaatgggtcactattttcannatgtgggtaacccgaacaatganagttacacgtnntaggcaacttggctgtaaatgatgactaagggtctatannccaaggttagtggagnnaatctgcactggagagctccaacaatntgacgtcagcttccaagggaattttatnggcngagggatancgatgatatgtgacanagagaattgcagacatngacncataatataaataaacaacttggttggaaaccccaagacatcgctttggggacttgctttgaatctacactgaccta

SEQ ID NO: 15928 - DNA, 337 bp, Gossypium hirsutum
  Clone ID: LIB3145-030-Q1-K1-A1
gtcttgacggtctttcatcccgcacagctgcctactaccagcagggtgctcgtttcgccaaatggcgtaccgttgtgagcattccaaatggtccatctgccttggcagttaaagaagcagcttggggacttgctcgctatgccgccatttctcaagacagtggattggtcccgattgtggagccggaaatcttgcttgatggtgaccatggaattgataggactttcgaagtagcgcagaaggtttgggctgaggttttcttctaccttgctgagaacaatgtaatgtttgagggcatccttcttaagcccagcatggtcactcctggtgctgaatg

SEQ ID NO: 15929 - DNA, 423 bp, Gossypium hirsutum
  Clone ID: LIB3145-030-Q1-K1-A11
gttcatttatcgttaatcaaattttattgaacaataaatggcacgacaaatttttgttttagttttggtcttaattgccattgtcaagatggtttccgctgacatcatggcgaccgccgcacccggctatactgatgccattggaaaaaatgttggtgcacccaataatggtgaaggtggtcaggatatcgttgaaggccgtcttgacaatgcggttaatgctatcagtggtgctgcaactggtctgccgcctagcagtagcagtgcaaccataattgggttatccgctatcgccaaagctgttgccattgccggttatttcctcttctaagtttgagatttgcgggtagaatgctagttgaatttgtttatgaataaattaaatgtcacatatttctaatttgcttttaatttgatcatgtc

SEQ ID NO: 15930 - DNA, 407 bp, Gossypium hirsutum
  Clone ID: LIB3145-030-Q1-K1-A12
cccacgcgtccgagacggttgaatgccgtatctgccaggacgaggacaacattaacaatttggagacaccttgttcttgcagtggcagtttgaagtttgctcacaggaaatgtgttcaacgttggtgcaacgagaaaggagacataacgtgtgagatatgtcatcagccttatcaaccaggatatactgtgccaccacctccccctcagccagaggttgctacaattgatatcaggccagtatttacaatcatgcacttacctaaaaatagacatgatgaagatcggtgtcgctcaaactttgcttgctttgtctttcctgtttgtgaggatctatatatgtcggaacctgttcagtgatccgtagggatggattactattgtatgctaatcacctctgacctctta

SEQ ID NO: 15931 - DNA, 361 bp, Gossypium hirsutum
  Clone ID: LIB3145-030-Q1-K1-A2
caatttgaagccttcttcgaatttcctcattcaagatgcaaattttcgtcaagaccctcagcggaaagaccattacattggagggggagaggtcttatactattgacaatgtaaaggcccaggattcaggacagggaaggcttccccccaaaccagcaaaggtggatcttcgctggtaagcaacttgaggatggccgcattggctgattacaacatacagaaggagtgcacactccacttagtgcttcgcctccgcggaggaatgcaaatttttgttaagactttgactgggaagaccattacattggaggtagagagttcagataccattgataatgttaaggcaaaaattcacgacaag

SEQ ID NO: 15932 - DNA, 396 bp, Gossypium hirsutum
  unsure (1)..(396): unsure at all n locations; Clone ID: LIB3145-030-Q1-K1-A4
cccacgcgtccgcccacgcgtccgcggacgcgtgggtttattttctctttatttctcttccatttcataaataaactgaatcatcatcatcatcatcatcatagttttgtagtgaaggggaaaagaatgaagcaagagatgagcaatataagcttctgcgatcgacatgtggcaaatccgtgtaaaacattcggacggcggtgcagccggctggtgaaggagcaaagggcgaggttctacattctccggcggtgtgttaccatgcttgtttgctggcatgaatgcggtgaaacttgaagaagcaaacaaaaagaaaaagaactatgntaagaagaaaagatatatagaggaaatagtagacaaaagttgatgtaatatataatatatgtgtagatg

SEQ ID NO: 15933 - DNA, 353 bp, Gossypium hirsutum
  Clone ID: LIB3145-030-Q1-K1-A5
catttctgttcggaaataattctaaacatgtccggtggataccctcaacaccctcccggctacggttacggttccccaccagctcagccttacacagccgctccatacacagctggagcaccgccgccacctcaaccgtacggtactccatacgccgctgcaccatacggcgcaccttctgctccctactctgcccctccaggcgagaaaccaccaaaggacaagcaccaagcgcatggcgtcggtggtgctcctccagttcacagcggaagctatcctcccgcaggaggctatgcgagcccgttcgcatctctgttgccgtcggcatttccaccggggacagatcctaacgt

SEQ ID NO: 15934 - DNA, 317 bp, Gossypium hirsutum
  Clone ID: LIB3145-030-Q1-K1-A6
gtctttttcaatgcatatgatcatctatctttctgatctcgatcctagagctcatttttcttgattggactttacgatttttttttggggggaccaggggggggggcggggcttggtttcttcatgtacgggagctaaattcatgggtgtgtcgaattcagagatgtttctcactgagaaagatctaaccagtagcatggaaatcagtttcttggttagacgacgccctcctttagtgttacaacaaggagatgaatgtcaaattacgactttccaagacgattatgatgagcctcagcagcaaaaagaagaaagac

SEQ ID NO: 15935 - DNA, 311 bp, Gossypium hirsutum
  Clone ID: LIB3145-030-Q1-K1-A7
attggggtttaccttgaacctgaagttgtttggcatttacaacaatggaagggtaagcgtgggaacgtgctagctgaagatgataacttcttcgaggctcttattaatgctccagtggagaagtttctgagagttgtggtgattaaggagatcaaaggttcccaatatggagtgcagctagagagtgctgtgagggaccgattggcagctgacgacaaatacgaagaggaagaggaagaagccttggaaaaagttgttgaattcttccagtctaaatatttcaagaaggattcagtcatcacttaccattt

SEQ ID NO: 15936 - DNA, 285 bp, Gossypium hirsutum
  Clone ID: LIB3145-030-Q1-K1-B1
ccggggcggaactcacccggtccaccgacgcgtgcgttaggaacaaacaacagcattgggctacaaaacagtaccatccaggccgcctaaaaatacattcaatccaatgatacaaacatggccaatgtgcggagaccaaaataacacaaagataggcctatcataagtgcagtctaaaaatgatacatgagcaaaccagaggaggttggataaaagccacgggccagcggagaaagatataatctaacctgagatggcggaaaaaaagcatacaaaaatggtgcc

SEQ ID NO: 15937 - DNA, 368 bp, Gossypium hirsutum
  Clone ID: LIB3145-030-Q1-K1-B10
agaggctatctttggaactgacattccttcaatgccaccagctcctgcccctgctcccgatatgagcccagctgcagatgctccatcagcagaaaccaagggaaaaggttcttcatccaaggctgaacctgcaacttcatcatcccataggatcatgaactttgggacatggaatcagctgcttttggcattgttccgcgggtgggtcatgttcttctaagttcaaagggactttcatctccagtcttatttatgttcatgttggggagaaaatcatatctgggttgttcaatttacttcagatttttagaaccatcttttcatttatatgctatggagagatttttatgtgttgaaaaaaatgtgag

SEQ ID NO: 15938 - DNA, 85 bp, Gossypium hirsutum
  Clone ID: LIB3145-030-Q1-K1-B11
gtggaattttatggatccacgcttggtatgtagccaagcccaagaaaaaaggaacgaggggaagaatcgacaaggaatccataac

SEQ ID NO: 15939 - DNA, 339 bp, Gossypium hirsutum
  unsure (1)..(339): unsure at all n locations; Clone ID: LIB3145-030-Q1-K1-B12
tgaagacaagaaaggcggtcagatctggtccacatctggtaaccccgatgatcagtgatatattgaaagctaactactaatccccagagctcacaacttgcatttgatggacacttgacacttccactgaggctttctttcattaagctgcccccatacatgtatatcttcactcttttattattactcttaaaacgtattaaaatgtaccacgttttatcttgaaagttatggctaaatatgtcatttgctccaagttatttatgtaaaaaattatctaacttaatgcatataatatgattagaattgttggnagaaagatatataatgacaccacgt

SEQ ID NO: 15940 - DNA, 369 bp, Gossypium hirsutum
  Clone ID: LIB3145-030-Q1-K1-B2
ccagattctcgactctgtctcccctatcgctctttttcatcgatcagatctcttcaaacccatcaattcaaacaaccctccactcattccatccatgacgcttggctcaggaggatccagtgttgtggtgcctcggaacttcagattgctggaggagcttgagcgtggagaaaaaggtattggagatggtactgtcagctatggaatggatgacggagatgacatttacatgcgctcttggactggcaccattattggtcctcataatactgtacatgaaggtcgaatctatcagctgaagctgttctgtgataaagattatccaaagaagccaccaagcgtccggtttcattcaagaatcaacatgac

SEQ ID NO: 15941 - DNA, 299 bp, Gossypium hirsutum
  Clone ID: LIB3145-030-Q1-K1-B5
cttggaacaaactcaaccattgtgcttcaaaactgcaccatctcgggcgcccctgattacattccaatgaaggatacaaacaaggcatacttggggcgtccctggaaacaattcgcttgggctatcattatgcaatctaaaatcgaccacattattcaaccagagggttatgccccaatgacaggtaccataggaatagacacttcttttattggcgagtttggaaataggggacccggtgctgataccaaccgtatggtagcatggaaaggtgttaaaaagatagatattaatgaagc

SEQ ID NO: 15942 - DNA, 255 bp, Gossypium hirsutum
  unsure (1)..(255): unsure at all n locations; Clone ID: LIB3145-030-Q1-K1-B6
cttttattaacatatgaaagaggaaaagagggagttgaacacaaaaaaaagagaaagaggaaaagaggcaaacaaagcttaagtcagttgaaaagttagagatgtgataatttttttggttcttacaattccacataattcaaggaagaaatttcagtnnnnaaaaaaaaaaaaaaaaaaaaaaagaaaaaaaaaaaaaaaaaaaaaagaaaaaaaaaaaaaaaaaaaaaaagaaaaaaaaaaaaagggggggag

SEQ ID NO: 15943 - DNA, 422 bp, Gossypium hirsutum
  Clone ID: LIB3145-030-Q1-K1-B9
cggggatcaccaaaactgaagttgggtattcccaagggttcatgcataatccgagttatgaagacgtgtgttcggggactaccaaccacagtgaagtcgtgagggttcagtatgaccctaatgagtgtagctatgacactttgcttcatgtcttttgggctcgccatgatcctactaccctcaaccgccagggtaatgatgtggggacacagtacagatctgggatttacttttacagcccagagcaggagaaggcagcagtggaatccatggaaaaacagcagaaactcctcaacagaaagattgttactgaaattctgccggccaggaaattctatagagcagaggaatatcaccagcagtaccttgcaaagggaggtcgttttggttgtaaacaatctgctgagaaaagatgcaatgat

SEQ ID NO: 15944 - DNA, 411 bp, Gossypium hirsutum
  unsure (1)..(411): unsure at all n locations; Clone ID: LIB3145-030-Q1-K1-C1
cccacgcgtccgcccacgcgtccgcccacgcgtccggtggttatatagatgggaacatcacagtttctggtttccagaagaaacaagaaacatttgctcgaatatctggatactgtgaacaaaatgatattcactctcctcatgtcaccgtgtatgagtccttgctgtattctgcttggcttcgattatctgctgacgttaaagctgaaactagaaagatgttcatcgaggaagtcatggaactcgtggaattgaatccgttaaggcaagcactggttggtttacctggtgtaaatggtttatcaactgagcaacgaanaaggcttacgattgcagtagagcttgtagcanacccttcgatcattttcatggatgagccaacttcanggcttgatgcgagagctgcagcaa

SEQ ID NO: 15945 - DNA, 414 bp, Gossypium hirsutum
  Clone ID: LIB3145-030-Q1-K1-C10
cgattaaatagatgggaaaggagtgagttgagtgggtgtgttgctagttttaattagtgaatatcggaataagaagtgatcattataatctaactatatatattagagtttatgtttcacgaaaaatctaactataaattaaaatttacttttcacagaaaattgattggacgagacaaggaatttaaattaatgggcgagaagttaacacctttacttatggtgcctcattgtgatgaaacactaatggggtactatatcgatgattcggtcgttaatgctttttttaaattgcttaagaagagatccgacaaatatccaaatgtatacatcaaacattattcgtttgatcctcaaatagctacttgcttaataaaaggatccaaattagaaggtgaagtattagcttggttt

SEQ ID NO: 15946 - DNA, 264 bp, Gossypium hirsutum
  Clone ID: LIB3145-030-Q1-K1-C11
atttatttaatttgtcaagatttaaagtttcagtaaggttcagaatctttaggttgtcggcaactatttgttaccccaatgacctcccggatatgaatgtcgaatatgggtatttttaattttttttaatgtatttggagtatcatatctctatactcatatccaaaaaacatatcgaacccagaatatgaaatgctcttgagaaaaaaaaaaataaagataaaaaaaaaataaaaaaaggatagattattaatatcataaaaa

SEQ ID NO: 15947 - DNA, 414 bp, Gossypium hirsutum
  Clone ID: LIB3145-030-Q1-K1-C12
cccacgcgtccggggagatcagttagcgtaaggagaagaattcgtgaagaaagcagagaaaaagctaaatggttggggcttgtttagttctaaatatgaagacgccgccgatttatttgataaagctgctaattgcttcaagcttgccaaatcatgggacaaagctggatcaacttatgtaaagttggcgaattgccatttgaaatcagacagcaagcatgaaacagctcaagcttatgttgatgctgctcattgttataagaaaacagctacaaaggaggctatatcttgcttgcagcaagcagagaacttgttttgtgatattggaaggctaagcatggctgcaaggtattataaggaaattgctgaattatacgagtctgaacagaacattgagcaggccatggattattt

SEQ ID NO: 15948 - DNA, 393 bp, Gossypium hirsutum
  unsure (1)..(393): unsure at all n locations; Clone ID: LIB3145-030-Q1-K1-C2
tgaaggacaattttgacatgggagaacctgatacatgcaatcctgctggaagtggcttgccaagtgaggaggcttcggttaagacagcaaagaaaattcataatcagaaattcgctgagctctcaggaaatgacatatttaagggtgatgttcctccaggttctgctgagaaaccactcagtgctgcaaaactgcgggagatgagtggcagtaacatcttcgctgatgggaaggtagagtctcgagactactttggtggtgttcgcaaaccccctggcggcgaaagcagcattgctttggtttaacttcttagctttctctaaccctgtcaaattgcttcagctgtgtctggtgtttgtctttagntgggggtgtgattgtattatgaacttt

SEQ ID NO: 15949 - DNA, 403 bp, Gossypium hirsutum
  Clone ID: LIB3145-030-Q1-K1-C3
cccggcaccaagtccacttaggaaaatcatcacggttgcatccattgctgccggcatccagtttgggtgggctctgcagctgtctctcctgacaccctacgtccagacccttggtgtaccccacgcttgggctgctttcatttggctttgcggtcccatttctggccttctggttcaacccatcgtgggatacaacagtgaccgttgcacctctcggttcggccgacgccgaccctttattgtcattggagctctctctgtctccatagctgtcttcctcatcggtttcgccaaagacattggccaccatgcgggagattccttgaagagaacgaccaaaccgagagctgtagccatctttgtcgtcgggttttggatcctcgacgtggctaacaacatgttg

SEQ ID NO: 15950 - DNA, 387 bp, Gossypium hirsutum
  unsure (1)..(387): unsure at all n locations; Clone ID: LIB3145-030-Q1-K1-C4
caacagcctcagttacctacactccacccatgttggctgctgccaccactaaccccaagaagaagaccaacaccaatgtgaattacataacaggcttgaattcttttggtgggttgaaagctcataacaaagtggtctcactaggccaacgtgtatgcaccgagcaatcatttgcaaacgttgttagctcactcaaagctccgacaaagggcaagacaggtaaaagcagcggcggtgcactgtcttcaacctgtaatgctgttggtgagatattcaggattgcagcaatcatgaatggccttgttcttgttggtgttgctgtcngatttgtgctgcttcgaatcgaagcttctgtggaagaggctgagtaagagaatttaaagacat

SEQ ID NO: 15951 - DNA, 291 bp, Gossypium hirsutum
  Clone ID: LIB3145-030-Q1-K1-C5
aatactttggagccatttgatagaatagacaccagagcatcgtattggtcgagtgaagggcaaaacaatcctgccgtctccgagactttactttataagttgatgaccaagatgtgtatcgttacagaaatccatgttcagccattccaagcttattttcagtacggcttcccaatatactcgtctaaggctgtcagatttagaatgggtcataaattgcagagcgaaatgacggatagtttgacttctagtaataaattggcagatgacgagttcatttggacatatact

SEQ ID NO: 15952 - DNA, 339 bp, Gossypium hirsutum
  Clone ID: LIB3145-030-Q1-K1-C6
cccacgcgtccggggttttcttcttatttatcttcttgaattctctcaagaaagccctaaatacctcggatcaggtctcagcttgtggttgttaagcctatttgatcaactaagtttcatgtctgatctcgacgtccagattcctactgcctttgatccctttgctgatgcaaatgctgaggactcaggtgctggtgcaaaggagtatgtgcacattcgtattcagcaacgcaacggtaggaaaagcttgacgactgtccaagggttgaagaaagaattcagctacaacaagatactcaaagacctcaagaaggagttttgctgcaatggtactgtcgt

SEQ ID NO: 15953 - DNA, 322 bp, Gossypium hirsutum
  Clone ID: LIB3145-030-Q1-K1-C7
atccccttgccgtgccagtaaaccttgagtaagagattggagatgggtctgaacagaagccatctgcagtggttcttcaattggctctcgaaaaggaaccgagtacaacagctcaggttgggcgcagtgtgtttgaggttgaatatgtgcctctttggggatctacctctatatgcggaaggagacctgagatggaggatgcctttgctactgtgcctcggtttttaaaggttccaattcagttgttaattggtgatcgggtagttgatggccttagcaaggactttgttcatcagaccgctcatttctttggtgtctatga

SEQ ID NO: 15954 - DNA, 374 bp, Gossypium hirsutum
  Clone ID: LIB3145-030-Q1-K1-C8
gctggaagcaatttggagttctgagaacgaagaccagaaacgcttggaccctctaattatctttcaaacttcttctttagctcgtctgccattgcaatcatcctatgtagaccaggtcattttcttcactaggtcagttgaattcccggttgatgagttgtatgccgaaatctttagagttatgactcctggtgggaaactggtggtttatcgaagttttcagattgagataagtgaagtagagacggcattgtctgctttggagcgcaagttgctattggcaggatttctagaaggggaacgttttcaacttaaaaaaattgctcacactgtagggattaaaggctaaaaaccatcttggaagattgggatct

SEQ ID NO: 15955 - DNA, 375 bp, Gossypium hirsutum
  unsure (1)..(375): unsure at all n locations; Clone ID: LIB3145-030-Q1-K1-C9
aagctggtttcctatgcaactgaagtcacggctgtcgttgagaaaggcaagatcaagaagctgactggggtgaagaccaaagagcttttggtttggatcacactgagtgatatccaagtggatgatcctcccactgggaagatcactttcaagaccccttcagggctgtttaggactttccctgtatcagcttttgagattgaaggtgaacaagttaagggttctaagggtaaggatgaagagaaacaagtgaatggagctgtggaagtgaaggaagtctagagtcctttttcaattcccaacagaagaaagccttaatgtactaaatatcattattagcaatcaataaaaaaaatgattttattttatggtnna

SEQ ID NO: 15956 - DNA, 407 bp, Gossypium hirsutum
  Clone ID: LIB3145-030-Q1-K1-D1
gatgaacttgagccttatgctgaattcagttggattttatcagatttcaaagctaagtatgattccagttgtttgtgtgatggaatggatactacacagcaaacactattcggacaaagtcaagatttctgtccttgtcgtggtggttggtgttggtgtttgtacagtcactgatgtaaaagttaatgctcaaggatttatttgtgcctgtgtcgctgtcctgtctacctccttacagcaaatttcaattggctccctacaaacgaagtactcgataggctcatttgaattgctcagtcaaacagctccaatccaagctctgtctcttttgttgttcggtccctttgttgattactacctcactggcaaattactagcaagttacaagttctcctcaactgcatttt

SEQ ID NO: 15957 - DNA, 361 bp, Gossypium hirsutum
  Clone ID: LIB3145-030-Q1-K1-D10
accggagagatatatgattgacttgaaattccaaagtactttccttgttggtttattacatttatcagtttttatgcaaaaaaaaaaaaaaaaaaaaaaaaaaaaaaaaaaaaaaaaaaaaaaaaaaaaaaaaaaaaaaaaaaaaaaaaaaaaaaaaaaaaaaaaaaaaaaaaaaaaaaaaaaaaaaaaaaaaaaaaaaaaaaaaaaaaaaaaaaaaaaaaaaaaaaaaaagggggtgctcctttttaaaaaaaaaacatttacaaacgaggcctgataactgattgctttttttattggaccccgaatataaaataaggagcgctgattataaaaacgtggtattataaaaaaattggtg

SEQ ID NO: 15958 - DNA, 415 bp, Gossypium hirsutum
  Clone ID: LIB3145-030-Q1-K1-D11
gagaagaccatggccgatcaacttacggacgatcagatctctgagttcaaggaggctttcagcctttttgacaaggatggcgatggttgcattactaccaaggagctggggactgtgatgcgatcacttggtcagaaccctactgaggcagaactccaagatatgatcaatgaagttgatgctgatggaaatgggaccattgattttcctgaattccttaacctaatggcaaggaagatgaaggatactgattccgaggaagaacttaaagaggctttcagggtgtttgacaaggaccagaatggtttcatatctgctgctgagcttcgccatgtcatgacaaatctcggtgagaagcttacagatgaggaagttgatgagatgatccgtgaagctgatgttgatggtgatgggc

SEQ ID NO: 15959 - DNA, 448 bp, Gossypium hirsutum
  Clone ID: LIB3145-030-Q1-K1-D12
cacgcgatgcgtttctgagagcatattggactttactctaattttctatcatcgggcccgggcaaacatcagggtcgattggcaatattcttctacaagaagaccaactctcgtccattatctgttaccgaaactgatgcctcgcctctgactatgagatatcactgtctatacacagattgagcatgtggggaacccaaaaggcagaccacacacccttgcatgtgtggatcacactcattcaaaggtactgcctaattgctggccgatcccaagctgcatactaccccctctccaatgtttagagcgattgttgtcacccatgctacatcggaggctgatatgagaatacctcccaaacataaagctctatgcaggaagctacagcccacactgcactgatctactcggaaagacaataaaaggaattgtccaggtcgaaaattaa

SEQ ID NO: 15960 - DNA, 308 bp, Gossypium hirsutum
  Clone ID: LIB3145-030-Q1-K1-D2
atctgcttgtcattatctagagacttaaatggattatgcaagacctttttatacttctgatattcttgattaatgcatctgcagttttatgtggtacttattggggtccgaatatttgactttgtagaaaaatgtaatgcactgattagatatctctgtacaggctattgtagcaatgatgcgtgctcaggaggccgatcctaccaacctggaagaatgttatgagccttgacataggatctagtcataggtctagacgtgagagaattcttgctctgacttatagttaatgaaagaagcagatttgt

SEQ ID NO: 15961 - DNA, 384 bp, Gossypium hirsutum
  unsure (1)..(384): unsure at all n locations; Clone ID: LIB3145-030-Q1-K1-D3
gtaaaattggggatgaaggccttgctaatttaacaggcctttcactcctcaaaagtctagagttgtctgatactgaagtcggaagcagtggactgcgacacctgtctggattgactcatctggagaccttgaatctgtcattcactttagtgactgatagtggtctaaaaaagttgtctggattgactgctcttaagtcacttaatctggatgctcgccaaattacagatgctgggctgtcggctttgacaagtttgactggactggtgcatctagatctttttggggctaggatttcagacactggaacaaattatttgcgatgctttaagaacctccagtcccttgaaatatgntgaggggggtttgactgatgcntgtgtg

SEQ ID NO: 15962 - DNA, 338 bp, Gossypium hirsutum
  Clone ID: LIB3145-030-Q1-K1-D4
gttcgtcttccctaacaatctgtgaaagatgagcagcgatgacagtttggacaaacttataaaaggaacgtttgttgatccctcgccggaaaatagcctggaacttagagaagaccttcgacagtatgggattccggcaactgaagcacaaattggcgcgaacgtaccgccgttgccgggcgatgataatcaggtcaactcgttgagcttgatgtcgagtagtagaatgaaaagaaacctggaatttgttttcgataatttctcgggagataaaggagaagaaaaaaagaagcagcgccgaggaagcttttatatcggtgaatcatcaaatccgcagc

SEQ ID NO: 15963 - DNA, 325 bp, Gossypium hirsutum
  Clone ID: LIB3145-030-Q1-K1-D5
atcgaagaacagtcacaaagttgcttttctaaaaggagtgaaagcaggaaaaaattcgattaagagatagaaagatggcggtgatgcagaagctgaaaatattcgtggtgcaagagccagttgtcgcagcttcttgcctcatcgctggttttggtctctttctaccagctgttgtaaggcccattctagattccttagaatcatcgaagcaagtccctcagcctgctttaagagatgtggttgctggtgtgactggtaaaaagcagggctgatgtgatttatgagttgggaagaagcagacactcaaatgtagctagtaatcagc

SEQ ID NO: 15964 - DNA, 388 bp, Gossypium hirsutum
  Clone ID: LIB3145-030-Q1-K1-D6
caaaaattcgactacgttgaaggtttcgtgattgtagctgaagggctcatcaacaattggggatcatctttgttttcccctcaaaaccctgttaaaatctccactctttttcccactagtggtgtcttgtattgcttggaaatcgcaaagaactaccatgaatctactgctcaaaccattgaccaggaagtagagtttctgttgaagaaattaaattttatatcgacatcagtgtttacgactgacctgttgtacgtggatttcttggaccgggttcacatggctgagatgaagctccggtccaagggtttgtgggaggtccctcatccatggctaaacctttttatacccagctcaaagattgctgagttcgataagggagtcttca

SEQ ID NO: 15965 - DNA, 404 bp, Gossypium hirsutum
  Clone ID: LIB3145-030-Q1-K1-D7
ttttcttatctatcttttcgctttcttctttgccaacaactgcaattattccaaaggctaatatttccctttcggtaccttcatcacaactagtagaaaatttatgcaatggcaaggcagttcaaaatcgcaggttttgtctgaaagcgctttccactcccgaagttattgcggctatggatacaacccaactaggaaccctcattatgaaattaggagcagcaaatgccaaggcaacgttgaatttatataatgaaataattaagaaaccaggttctccccaggctttgaaagctcttaatatatgcgttgaggcttacaaatatgcaatcttatcatttgaaatggtatcttcagaatttgttgaagatccccaaactgcaaactatgatgtaacctgtata

SEQ ID NO: 15966 - DNA, 298 bp, Gossypium hirsutum
  Clone ID: LIB3145-030-Q1-K1-D8
tgtttttagaattaaaaactgaaagaggacttaaatttttcctgaggcaaggaggtgtatcagctgcatgactgtatattccgagtggggaactagtaagctcaggggtgatctcggagttggttatattttaacataggctttttagttacccttgggtttacagttatgtggtttctgggtcttatagatagtaaacggcaaattctggttgcctcatcatgacaactatggaagacggagagctaccccttgacaaatatctatcaccgaagcatgtaaggatgtagttgatggc

SEQ ID NO: 15967 - DNA, 347 bp, Gossypium hirsutum
  Clone ID: LIB3145-030-Q1-K1-D9
agttggggaaaaaaattaagaacattggctttcttttggcttattttgttatatgcattagtgtcttctattctagaggatatttaatatgaacttctcccctcctctattatcataatataattagaatttcttaaaaaaaaaaaaaaaaaaaaaaaaaaaaaaaaaaaaaaaaaaaaaataaaaaaaaaaaaaaaaaaaaaaaaaaaaaaaaacaaaaaaaaaaacaaacaaaaaaaaaaaaagtaaaaaactaaaaataaaaaaatggggggggccgctttaaagaatcaaattttcagcccccggcattgcaaagaaaaaacttttttttttgggcccccaaa

SEQ ID NO: 15968 - DNA, 343 bp, Gossypium hirsutum
  Clone ID: LIB3145-030-Q1-K1-E1
cctaggccatcacatgattcgggaaaaaatgttatactaagatcaatttattgacaatgattcttactagccaccatgcctagagaagtaatcattatccaatgaaatagcaagagcaacagcaattgctcgctctgatagagtcagtgaacggcttacatccaactcttggatcatgctagcgggaccagtctttaagacgggatcagcctttccaaagtggatgacatactgtctggcatctgtaaatatctgcatgcaaatcattttgcctattagatacccataacaaaaagctaagaattttaattcatgtaataaaatggataaaagcaaaagcaca

SEQ ID NO: 15969 - DNA, 411 bp, Gossypium hirsutum
  Clone ID: LIB3145-030-Q1-K1-E10
gaattccagtcagaaaaccattgaagtcttgatcatagatgtaagcaacatcggagacagtatcctgcgacaggagatcgtaaacgaagttaagattgcatcaggggaatggggtttcttccaagtgataaaccatgggatcccattaagtgttttggatgaaatgattgaaggcatacgtttgtttaatgaacaagatttggagctgaagaaggagatatatagccgtgacagtgcaaagaaagtgaaattcctctctaactttgatctttatacttcaaaagctcttgattggaaggacactttgcaactctctttgcttgattttgatcctgacccctccgaaatgccaccggtctgcagaaaatcaacaatggagtatattaagcatttgaaaaaattaggagaaac

SEQ ID NO: 15970 - DNA, 322 bp, Gossypium hirsutum
  Clone ID: LIB3145-030-Q1-K1-E12
gttggctgtttttgatcatccgaaaaagtatggtgaccgtggaagaagctcgtaagggtgagcgtgcccaaaggcctgccaccgcgttggccatcggcacatcaaccccacctaattgtgttgatcagagcacataccctgactactatttgcatatcacaaatagtgagcacaagaccgagttgaaagagaaattcaagcgcatgtgtgaaaaatcgatgatcaagaagcgattcatgtaccttacagaagagatcttgaaagagaatcccaatgtttgtgaatacatggattcttcactggatgctaggcaagatatggt

SEQ ID NO: 15971 - DNA, 333 bp, Gossypium hirsutum
  Clone ID: LIB3145-030-Q1-K1-E2
gttttggtgactatctgcatgtaaagagcacccactctcctcgttgaaggcagttgaacaagttttttaaaaaagatttagtaagtatctttctcttctccttctttactttctttccaaaatttaaataaaaaacaaaaaatcctattccgtgaaggccctttcatcgcgcagccactaaccttcatcagtttgatggctaatagtgctgatgatgatcggattttatcaacggagatcccaattttagaaatccggtaatatggcttcctttcactcttccttttttttaaaaaaaaacgaattcttatgtttttttttcaaaaaaatgaa

SEQ ID NO: 15972 - DNA, 387 bp, Gossypium hirsutum
  Clone ID: LIB3145-030-Q1-K1-E3
gtttaagggatttttttcattcgtttcttctcacgctcgattaccttacaaaaagagaaaatgaccaagtgttacccaactgtgagcgaggaataccagaagtcagttgaaaaggccaagaggaagctcagaggtctcatcgctgagaagaactgtgctccactcatgctccgtttagcgtggcactcagctggaacttttgatgttaagaccaagaccggaggtccattcggaaccatgaagcatcctgctgagctcgcacatgctgctaacaacggcctagatatcgccgtcagacttctcgagccgatcaaggagcagttccctaacctcacctacgctgacttctatcagcttgctgggtgtcgttgccgtgagattactggt

SEQ ID NO: 15973 - DNA, 357 bp, Gossypium hirsutum
  Clone ID: LIB3145-030-Q1-K1-E4
ctttaagttttgaactcccagtcctggctaggttttggtggtgcctgccatctgggaatccatttaattttgttacatcaatatgtttgctggggcctttcctactagtttctgcttgtttcatttgtggctgcttcttttgcaaattggtggcacctgacattggtttggagaatagttcatttcccttttgtttcttcctccgcaatatctgttcagtactttgttcttccttcagttctgactgttgctttttgccacgaagctctgatttttggagcatttgcacctcttgaaatccatgattactttgcagcttttgttgattgcctaggagaagcttgtagcatgtttgct

SEQ ID NO: 15974 - DNA, 319 bp, Gossypium hirsutum
  Clone ID: LIB3145-030-Q1-K1-E5
agaaaaagtaggtaagctgaagttattttatctgcatattcaaccccacatcttttctgtgaaaaggagacaatatcaacaaacatccctttcgaaggttgaattccggaatcctccatccactgaagaacctcgatatatttccgccaattttcagctgccaacagatttttcaacaagattgagtaggtgttgaaactgactggaacacctgatgctattatcttgtaaaacagcttcatcatggattcagtctttccactcttcccaagcagatgaagaagctgattcaaaagcccaatggaaaccaaagggaacc

SEQ ID NO: 15975 - DNA, 365 bp, Gossypium hirsutum
  Clone ID: LIB3145-030-Q1-K1-E6
gttaaaataacagaagaacaatggaagagctgagatcagctgtggaggagcacatggaattaatggcggatctagttcagaagctatcctcggagcttcgttcgggcctccgacccgcctatgataactttatgggcttcttccatgcaatcgactggaaggagccatggttaatgtgcttactggcattccatgttttcttattgatagtaacaatcttctcgaggaagaacactaacttccagatgtgtttgttccttctggcattgctcggtgtttattttgcggagttactgaatggattccttggtgacaactggaagaaatttgcaaagcagaactattttgatccaggtggatttttt

SEQ ID NO: 15976 - DNA, 394 bp, Gossypium hirsutum
  Clone ID: LIB3145-030-Q1-K1-E7
gcaactttgacaaggtactgggtcaatgggctccgaggacaaagcagacatggccttttgaagcaaggaaatccagagtatgacgccaagaggcaagcattatttgaatactatcatccattagaattctctccagcgattccacttgaagagaaaaccaaactcatggaagagtggtgggggaaaacacatggtcttctcattgaaggaggccttacatatgatgcaataaaaagctctgttgctaactctaatattgcctttagggatggtgtagttgaactctttgagttattggaggagaaagatgtccctgttctcatattttcagcagggcttgcagatattatagaagaagtcctgaggcagaaagttcacagatattttaagaaca

SEQ ID NO: 15977 - DNA, 289 bp, Gossypium hirsutum
  Clone ID: LIB3145-030-Q1-K1-E8
cggacgcgtgggtctcaacaaagcctgccaatctgtactacttatatatcgttcacgctgttcccagctttaacctatcattcttttaacaatgcctcgccgaagctctggaggaaggtcagccccaaggcctgctgctcgtgcgccatcgagcaacgttccttcgaaacccgctagttctgcccctcctccagcacctgtgcaaagaggaaatggacttggtgctgccattgtagatggtattggatggggtgccggaactgctatggctcacagggctgttgatgct

SEQ ID NO: 15978 - DNA, 328 bp, Gossypium hirsutum
  unsure (1)..(328): unsure at all n locations; Clone ID: LIB3145-030-Q1-K1-F1
gggatcctgatgcttttgttgcattttttgaagatatatactttcgcttcattgactcgtaggcaggtcaggttttatgggactgactaagggtcaggattactgctactaaattaagtccagatttagtctctgcactctttctaacataaaccacaacccttgatttgcaacatcaatatcaatgtttgaattagtccctaagctgcagttaagataaatacttggtgcttgaatgtatatgtacatgtaaaaatttgtggtagtgtggtgttgggatgttgcangcggggcggtcaagctatgtgtctgcatcaatacttgcaac

SEQ ID NO: 15979 - DNA, 89 bp, Gossypium hirsutum
  Clone ID: LIB3145-030-Q1-K1-F10
tgacttcaaaaaaaaattaaaaaaaaaattatttaaaaaaaaaagaaaaaaaaaaaaaaggaagaaataaataaaaaaaaaaaaataaa

SEQ ID NO: 15980 - DNA, 424 bp, Gossypium hirsutum
  Clone ID: LIB3145-030-Q1-K1-F12
ctcgtctacccattcctggcacaggagtttttctacctcctccaggctccaattcagcatctcaacagtcgtcaacaactgcaaccgagcccaacattcctgtggagacaacttcccccccgaaggaaaatgagattgagtcagggaaaaccaatcagcatgcagcttctcctgaagtggggttggataaaaaatctccaaagcaggactgcaatggaagtgtagatggaagtgtgagtgggagagctatggtgaaggaagaagtacaatgtgctgagaatagtgtcaagcaaagctgctaatgcagttgtgagagagagaaagagagaaaagcagtttggctgcaaactccaatgagttaaaagcaaatgttaagagcggcaacagtcgagacatttggcatttgatacgagtaggtgggagg

SEQ ID NO: 15981 - DNA, 274 bp, Gossypium hirsutum
  Clone ID: LIB3145-030-Q1-K1-F2
gtgagagggcgtatgtaggaaaatctgcactattaattaggtcggcgtttgcattggaaggcttcaattcgggtgttaacgacgatatatcgacagccgattaagcacgaaaaaaacatgcacggctttaatgccattggtacagtcaactatacgtagtataattgagcctctgatggcgttcactaaaatcatgttgtcacaaaatgtgcttaaattggtaatctaggtattgacttgaatgcggtactgatacatgaagaaaccttagatg

SEQ ID NO: 15982 - DNA, 406 bp, Gossypium hirsutum
  unsure (1)..(406): unsure at all n locations; Clone ID: LIB3145-030-Q1-K1-F3
cccacgcgtccgtgctcaagctttgttgagactttgaactgagcttcgctgaattttcgtgatcgtcgagaaagaaaatgatgggaaggaaattcttcgtcggcggaaattggaaatgcaatggaaccactgaggaagtgaataagattgtgagtactttgaatgctggagaggtgccttctccggatgttgttgaggttgtggttagccctccatttttgttccttcctttggtaaaaacttcactgagacctgagttccaagtcgctgcacaaaattgttgggtcaagaaaggaggtgctttcactggtgaagttagtgcggagatgcttgtcaanttgagcattccttgggttatttatggtcattctgagaggagaacttatttgatggagtcaaatgagtt

SEQ ID NO: 15983 - DNA, 371 bp, Gossypium hirsutum
  Clone ID: LIB3145-030-Q1-K1-F4
cccacgcgtccgtccacacgttcggggacgtctgggcggacgcgtgggctgaaaatacgggctcctcgagaatgatgcaccaaggaaatgaaaatcatccctatgccaagttctgaaatgcaaaggaaccactgaggaagtgaataagaaaagagagtactttgaatgctggagaggtgccttctacggatgttgatgaagttgaggatagccctccatttttgatacttcctttggtaaaaacttcactgagacctgagttccaaagttgctgtacaaaattgttgggttaagaaaggaggtgctttaactgttgaagtttgtgcggaaatgcttggaacatttgagcatttccttggggttatttattg

SEQ ID NO: 15984 - DNA, 361 bp, Gossypium hirsutum
  Clone ID: LIB3145-030-Q1-K1-F5
gaaaataggaattagggttttcattccaaaatcaaaaacacagaacaaattaaaattttctgcaattcttggtgttggactcttttcttttttcggcaatgaagaatcggaatcccaaaggaaatggaaacggcgaaggaagcacaatggatggcccaaagccgatgactatgaagaagaaaaagaacatgaatcgattgggaggaagtggaactggtctttcgcttcaagcatttgccaatgccaaatccactagcaatcactacaatcccgccttaattaagaaaaaaaaagagttctataaaaatgctaagtatgttaacaagtttaagaagtcataaagcacaaaatcaggggaaaa

SEQ ID NO: 15985 - DNA, 388 bp, Gossypium hirsutum
  Clone ID: LIB3145-030-Q1-K1-F6
ggtgatcagcaggtagcaccagctacgaccgaaccgaaaatttcacaggctcaacaagtcaacagtaaggaagagggttctgtttcaggatccgtagtaaccaaacctgcggaacccgaggaggttgtgtgtcaaggaaaagagtcttgcaaggaatacataaagagcttcttagctgctatacctattagggaaatgcaagctgatattaagaagggtttaatggcatcgacaccgttacatcatcggttacaaatcgaattccactataccgagttctggcaaccaaaacctgagacttctgcaactccgatgacaacaacaaaaccgctgttggtcgaagttccgttaactgaagttgctgcatagagaaaacttactgtaaatt

SEQ ID NO: 15986 - DNA, 385 bp, Gossypium hirsutum
  Clone ID: LIB3145-030-Q1-K1-F7
ctacattttagaaattcaaataacacctctattcttttctgtaacagcttaataaaaaatggcggcttcttctagaaggtctagtggtccggttctccgatctcattccccatcttcccggtttacttctttctacgcttcacagtcacactctccatcttcttcttcctcctccgctttcgcctattccagttcaggtttctcttcacgttcaactttcttcaatcaacccagatctacttctccaccacgtattaacctgcacagaaactcttcatcagcgtcatctgtgcggttctcgctcgacaaccgtgcgatctcaccgaaccgttcaatcaccaccgtccggagaaccactgaagcgttgaagaatttacagagcaaa

SEQ ID NO: 15987 - DNA, 403 bp, Gossypium hirsutum
  unsure (1)..(403): unsure at all n locations; Clone ID: LIB3145-030-Q1-K1-F8
gctttttggttacaagatagtaatggatgagcaccagcgtcctaatggaatccctgtgacccattttaccctccaatcaatttatgcacaaaatgatgatgagaagcttgaatttgagtatgaatctggaaataccaatatattggcaaatgattatactgctcagcctgagatatcccatcaggttgatatctttgttcggaagttgaactcaattccagctttcactgctaatctaacagttgaatcttttaacaggcgaaccctttcgtaagataaatctatatccagaaaagatagaatatgccttagcatttatcattgtcaacacatgattacttatgtggattggggatttaataanttctcatgcatggaatgaatgttttgacaatgaaaacaa

SEQ ID NO: 15988 - DNA, 373 bp, Gossypium hirsutum
  Clone ID: LIB3145-030-Q1-K1-F9
ctatcaatgggaatgtctagtgattttgttctagctattgaaatgggcagtacgaatgtcagagttggatcaaccatctttggagcaagggaatatcccaagaaaaaatgaaacaaagcttatgaagtagaggggcttaatccttagatcttcagtgcgttgtttattaaaagagttgtaggcaaacacaatcctcggtctgttattctcgtacgtgaggagaaagaaaaggtgaaaagatactgatctatcttataatccatggaacttgtttattccatcaaaattaatgctaataaaatgtaatgatttgatcttatatttaattcttactgttccattggaaaattattaatataatatttggttcctg

SEQ ID NO: 15989 - DNA, 342 bp, Gossypium hirsutum
  unsure (1)..(342): unsure at all n locations; Clone ID: LIB3145-030-Q1-K1-G1
cccacgcgtccgcccacgcgtccgggaaacctttgagtttagaagagaagaggaagctgggaggaggctataattcctttatgcaaacctccttaccagaggacctgaggggctataatccagcacaagaaactgaacactcctcacatcttgccttcacaacagctttcccaagaggatttgctttggaagttatccaagtctactctggcccgccatcgattgtgtataagttcaggcacttggggtataagggagggtctttcanaggccatgcccctactggggaactngttcaactntatggaatatcaattnttgaggttgacgatgagatgaaaa

SEQ ID NO: 15990 - DNA, 419 bp, Gossypium hirsutum
  Clone ID: LIB3145-030-Q1-K1-G10
cccacgcgtccggttttttcctggtagaattaggatttgaatatgcttacaaaaaaaccctccactatgtcatggacttcattaaaacatcaaagtataaggggttgatcttttttaggacgtccacgccagatcactttgagaatggggaatggcataatggtgggacttgtcctaagacaataccagcttaagaaggagaggttaaaataaaggacttgaatagaattctacgaaatattgaattagaagagtttgagaagacattcgcaaaagtagcccataatgaagtgaatctcaagcttctcgacttcacaaatctcttattatcgaggccagatggacatccaggtccatatcgacagttccaaccgtattcaaagaacaaaacagcagtcggtcaaaacgattgtttacat

SEQ ID NO: 15991 - DNA, 152 bp, Gossypium hirsutum
  Clone ID: LIB3145-030-Q1-K1-G12
ttcctgctctttttctttttatcatgttttataattttgcgacaaatttttctttctacactgaagatatatatggaaaattaccctatgattctattgtaaaaaaaaaataaaaatccaaatgttaaaattaaatacataaataaaatttt

SEQ ID NO: 15992 - DNA, 318 bp, Gossypium hirsutum
  Clone ID: LIB3145-030-Q1-K1-G3
cccacgcgtccggcttataggaagcctgctcggagttatcatccggatgtgaacaaagatccaggggcggagcagaagttcaaggaaattagcaacgcgtacgaggtgttgtctgatgatgagaagcgatctctttatgacaaatatggggaggctggacttaaaggtgctggcatgggaatgggggattttagcaatccttttgatctgtttgagtcactgttcgagggcatgggtggcatgggtggcatgggcatgggtggcagtagttcaaggaatagagcagttgatgggcaggacaaatattacagtctcgtg

SEQ ID NO: 15993 - DNA, 231 bp, Gossypium hirsutum
  Clone ID: LIB3145-030-Q1-K1-G4
gcgagaaagtgcgagaaaatgagcggagcaggaaagaaagtagtggatgtggctttcaaagcaggaaagagcattgattgggaagggatggcgaagcttttggtctccgatgaggctcgcaaagagttcgccactcttcgtcgcactttcgatgaagttaactccactttgcagaccaagttcagtcaggaacctgagcctatcgattgggaatattatagaaaaggaatc

SEQ ID NO: 15994 - DNA, 200 bp, Gossypium hirsutum
  Clone ID: LIB3145-030-Q1-K1-G5
tagcttttggccatatcagttgcagccagttgctgtacaaattaattgttctacgcgaggacttgttatcttgagacaaattgtatcttactataggctttgtattcaaatggaagactatgttcgttggtgattacatgtttcatggccttgagagatgaaaatgtgatatccggtgttatggtatccagttcattgct

SEQ ID NO: 15995 - DNA, 123 bp, Gossypium hirsutum
  Clone ID: LIB3145-030-Q1-K1-G6
tcgcccacgcgtacgaggacatttaacatatgtctttgcaggacaggacttaagtaccagtgggcagcagcaacaactagtaaggcctataaaggcaaatttttggacgtaattcttctcttt

SEQ ID NO: 15996 - DNA, 286 bp, Gossypium hirsutum
  unsure (1)..(286): unsure at all n locations; Clone ID: LIB3145-030-Q1-K1-G7
cccacgcgtncgcccacgcgtccgcccacgcgtccggtttatccgcttctgccttttggggaaccatttgtagctgctgttgtctctcccccgccgcctccatcccgaagccgtccccatcctccgacgacaatggtggccgctaagaagaccaagaagacccatgagagcattaacaacagattggctctcgttatgaagagtggtaaatacactttgggttacaaaactgttcttaaatctctcagaaactccaaaggtaagttgattataattgccaacaact

SEQ ID NO: 15997 - DNA, 239 bp, Gossypium hirsutum
  Clone ID: LIB3145-030-Q1-K1-G8
aaaaaaagttttgggtgtggctttcagaggctgaaagggcattgtttgggaagggattgccaaacttttggtcttcgatgaggcttccaaaaagtttcccccttttttgtgccctttccatgaaattaacttccctttgccaaccaagttcatccaggaacctggcccttttcattgggaatttttttaaaaaggaattgccttcccattgggggatttttccaaaaaggttttttaaa

SEQ ID NO: 15998 - DNA, 342 bp, Gossypium hirsutum
  Clone ID: LIB3145-030-Q1-K1-H1
cccacgcgtccgcccacgcgtccggcaataagcatccccacaacttcaaaaagtttttctttctttcttttcctatctctatttgaaatctgtttcaggggaaagaagaaggaaaattttatgattttttgagggcttgttaataataaatagaaaacaatggcgaacaatgttgctgttattggtatcttttcggtgttattggtgacagcagtggtggcagcagtggtgggtgttacgcatttaaaaaataatggtgattcgaaaagcggtgaaatatcaagttcgacgaaagcggtgcaaacaacaaggagctgataagaatgagtttccaagtagcga

SEQ ID NO: 15999 - DNA, 404 bp, Gossypium hirsutum
  unsure (1)..(404): unsure at all n locations; Clone ID: LIB3145-030-Q1-K1-H10
gatgaagaagagtacaaggttggtggtgtattgatctccatgctgagagatccagtagtgaaagcaatggctgcaaccaaggaatttgatgatcttgaccaaattgaggaagaggaggatgctgagcgagaacttcaagaggccgaaaggaagcgccttgaagaaattgaaaagcttgaaaaagatggcaatcaatgatagctagccatattttgttcttctttcttgcttttggtcactgaagtttccgaaagtttgcttgaggctttaacaatgccggatattacttaattttatgaggaatgcccttcattatactgattgtggccattgcttttttcaaatcaactttcttgtactcaaatgcttcggtgaaacaaataaatcgtacaattgacatnnna

SEQ ID NO: 16000 - DNA, 340 bp, Gossypium hirsutum
  Clone ID: LIB3145-030-Q1-K1-H12
aaaacctcttcctatttaatttccgacttatacttgcgctgaattccatggctactgcagaggttgtatcagctcagactgcaatccatgaggagaaacctgaagaagtggtcaaggttggagaaattgcaacagaagaggtaccggctgttgctcctgcagcagaacctgttgctgaagaaccaaaggaagcagtgcctgaagcagcatccggagaaccccaggctccagaaactgaagccacagttgaaactgaatcaaaggaggtggttaaagagcccaaggctgtgactgaggagccagaagttgagaaaaaagaagaagagactcctaaggaaac

SEQ ID NO: 16001 - DNA, 317 bp, Gossypium hirsutum
  unsure (1)..(317): unsure at all n locations; Clone ID: LIB3145-030-Q1-K1-H3
aagccattaaaaataataaaaacaatgcaaaaaataataaaatcaacatctattatttttgtaaaatatgtcttgcagtaatttacttttaaaaataataaagttacattaacatttgttcgcaaaaaaaaaaaaaaaaaaaaaaaaaaaaaaaaaaaaaaaaaaaaaaaaaaaaaaaaaaaaaaaaaaaaaaaaaaaaaaaagaaaaaaaaaaaaaaaaaaaaanaanaaggaaagaaggaaaaaaaaaaaaannggggtggatgaaaaaaaaaaagtagtangataaaataaagtaaaaaaaatattttgggggg

SEQ ID NO: 16002 - DNA, 108 bp, Gossypium hirsutum
  unsure (1)..(108): unsure at all n locations; Clone ID: LIB3145-030-Q1-K1-H4
gannaaggcnncnnngnnncagcgcnngagaagcngnnaaaaaaacangccggaaaanaggcgaccggagaggaagnnnccanggcagancngnnnctagcaccgcag

SEQ ID NO: 16003 - DNA, 110 bp, Gossypium hirsutum
  Clone ID: LIB3145-030-Q1-K1-H5
aaacctgagatattgagagagaaagaggggttacagttaaacccaaaaagaagcaaaaggaagaatggttggtgatggaaagttgttcactttggctcaagtctctgagc

SEQ ID NO: 16004 - DNA, 374 bp, Gossypium hirsutum
  unsure (1)..(374): unsure at all n locations; Clone ID: LIB3145-030-Q1-K1-H6
cccacgcgtccgcccacgcgtccgancctccttcaagtaactcccttaagcccttgctttgtttctttatttccttccattttgaactttctctaacttttctttgtgatttgcagatattgcttctacttgcagctttccctctaggtatgcttattaagatcaaactttatgccgaaggactgaaagtatacttacaaatcatctataaaatgaaattattgctaatgctagccagggtgttaacaagtacttgaacaactacttggacccacccaagttagcattaagaataaacccttcagcttattggaatacatttaccttcatgggaagttcctttctaatataattcaatgaaaccttttttaacc

SEQ ID NO: 16005 - DNA, 403 bp, Gossypium hirsutum
  unsure (1)..(403): unsure at all n locations; Clone ID: LIB3145-030-Q1-K1-H7
gctgagtttaagcatatcaataagcggaggaaaagaaacttaccaggattgccctagtaacggcgagcgaaccgggaaaagcccagcttgagaatcggtcgccatcggcgtccgaattgtagtctggagaagcgtcctcagcgacggaccgggcccaagtcccctggaaaggggcgccggagagggtgagagccccgtcgtgcccggaccctgtcgcaccaagaggcgctgtctacgagtcgggttgtttgggaatgcagccctaatcgggcggtaaattccgtccaaggctaaatacgggcgagagaccgatagcgaacaagtaccgcgagggaaagatgaaaaggactttgaaaagagagtcaaagagtgcttgaaattgtcnggagggaagcggatgggg

SEQ ID NO: 16006 - DNA, 371 bp, Gossypium hirsutum
  Clone ID: LIB3145-030-Q1-K1-H8
cgggtcgagaaattctcaccacattacttggaccctaacttggccatgttccgacaagagatcattgccgaaaagtccgataacaaattaaagtatggccagaaattcacagtgcagatccgtggaagcggtgtaatcgaccaacaaaagcttcaagtgacgatttactcgccgccgtttgtgacccacgggatctgcatgaatcagagattgattcaattgcgaatcttggaatctaatagagatgtaacgctcagtacaaacaacacttgtctacaagctccgatgaatggcaacattgcgcaacctggttactacatgctcttcgtaaactacaatggggtgccttgccttcgatcgatatggataca

SEQ ID NO: 16007 - DNA, 416 bp, Gossypium hirsutum
  Clone ID: LIB3145-030-Q1-K1-H9
ggccgaccacgcgtccgcccacgcgtccgcccacgcgtccgggttgtcttcaaatatttgaacaaggagctggggctggatatggacaagttcatcacacactctgtgccttttgccgatataaacaaggcattcgactacatgctccagggtataggtctgagatgcatgattcatttggatgcttaagagagagttgctgctgtatatttgcccaaccaaggatcaaaactctaatgttttgtcctactatgtgttatatttatgtgcctacttaagctacctttcccggatatcaagagtgcccatatagaactctctctctctaaaaaaaaaaaagagagttctttatatggagttttatattatgtgatgagagaataaattatctttgtaaagcttgctttgttaatgaa

SEQ ID NO: 16008 - DNA, 408 bp, Gossypium hirsutum
  unsure (1)..(408): unsure at all n locations; Clone ID: LIB3145-031-Q1-K1-A1
aagaacttaaggcaaaaagaacccaccgctttattgttttcaaaatcgaggagaagcagaagcaagttatcgtggagaagcttggtgagccaactgagagctatgaagattttactaaatgtcttcccgctgatgaatgtcgttatgctgtgtacgattttgattttctaacagccgagaacgtcccaaagagcagaatctttttcatcgcatggtctcccgatacatcaaggatcaggagcaaaatgatatatgctagctccaaagacagattcaagcgagaactggatggaatccaagtggaattgcaagcaacagatccaaccgagatgggtcttgatgtcttcaaaagccgtgcaaactgaatacagttcttttaggcttttgcaacggggaagcttncttcct

SEQ ID NO: 16009 - DNA, 362 bp, Gossypium hirsutum
  Clone ID: LIB3145-031-Q1-K1-A10
caagttcaagcatgtggaacttgatctgttttttgtccgtgagagggttgccgctggtactattattgttggtgaagtacctgcctgtgatgaaatagctgatattctcaccaagcctctttcgcatacagtttttactcggtttcgccagttccttcgggtcttaccgattgagacgatggatgcatgttagagtagttagtttggtatgagttggtataagttggtagtctggtgcaaataagtagttacgctaatgagagtggtcaggagtacagtcagtagtgatcttctataaatacttttgtattccttaaagagaggaagcttttgagaattcaatatatgagtttattctttat

SEQ ID NO: 16010 - DNA, 193 bp, Gossypium hirsutum
  Clone ID: LIB3145-031-Q1-K1-A12
agagaagtacaacttgaacggccaattcagatggatatcatctcaaatgaacagaatccgaaatggtgaactttaccgatacatttgcgacacgaaaggtgcctttgtacaccctgcattgtatgaagcctttggattgacagttgtggaggcaatgacttgcggtttgccaacattcgcaacctgcaacggt

SEQ ID NO: 16011 - DNA, 418 bp, Gossypium hirsutum
  Clone ID: LIB3145-031-Q1-K1-A2
cccacgcgtccggtgtggtttctgttgtatggaattggtttgggaaggagaagagagggttgattatgggggtttggacttcacatacatctgttgggaatattattgggtctgttgtggcttctggggttttggagtttggttggggttggtcttttttggtgcccgggattttgattattgtagttgggattttggttttttgtttcttagtggtgagccctgatgatttggggtttgaaatgatgtcgtctggaaaagagattgagatgtgtgtgggggaagaaaatgtggcgaatttagaaaaagtggaatcagaggaagcagggttgctcgagaacaaggattctgattccctggctgccattggattcttggaggcatggaggttgccaggtgtggcaccattttctttctg

SEQ ID NO: 16012 - DNA, 427 bp, Gossypium hirsutum
  Clone ID: LIB3145-031-Q1-K1-A4
cttttctatggctttctgatttcctctgctacttttctctccactcatcccttccaattttcacactcttttccttttttttttcatttttattatataaatatatttcagttgatcaattatatcaagttgaaaccctaaactcttcaaattttctggttgcttatctcctcgttcagcattaatttcctggtggtgacaatgtcaactcctgcaaggaagaggctaatgagagattttaagaggttgcaacaagatccgcctgccggtatcagtggagcacctcaagacaacaatattatgctttggaatgcagttatatttggtccagatgatactccatgggatggaggtacgttcaagttgacacttcaattcactgaagattatccaaacaaacccccaacagtgagatttatctcccgga

SEQ ID NO: 16013 - DNA, 400 bp, Gossypium hirsutum
  Clone ID: LIB3145-031-Q1-K1-A5
cccacgcgtccgcaaacacaaaacttcatggctcggaaattctttgtcggcggcaactggaaatgtaatgggacaactgaggaggttaagaagattgttacaacattgaatgaagctgaagttccttctcatgatgttgtggaggttgttgtgagccctccatttgtgttccttacccttgtcaaaagtctgttgcggtccgattttcatgttgccgctcagaactgctgggttcgcaagggtggtgcttttaccggagaagttagtgcggagatgcttgttaatctaggcattccttgggttattattggtcactcggagagaagggctctcttgaatgagtccaatgagtttgttggagataaagtagcgtatgcgctttctcaggcttgaaagtgat

SEQ ID NO: 16014 - DNA, 423 bp, Gossypium hirsutum
  Clone ID: LIB3145-031-Q1-K1-A6
aaactgtatgaggatggtgcgttgcattgtatatttttgatgaataatattctgtatatagtgcaaaaggtgaaggattctgagctgggtaagcttttgggagacaattgggttcgtaagcggcgtggccaagtacgacagtatgctacaaattatcttcgggcttgttggatgaaagctctgtattgtctgaaggatgaaggaattggtggtagctctaacaatgcctccaaggtgaccttgaaggagagatttaagaacttcaatgcattttttgaagaaatatataggattcagacaggttggaaggtccctgatcctcaacttcgtgaagagcttcgaatttctatatcagagaaagtaattccagcttatagatccttcatggggagatttgggagtcagctagagagtggaaggaat

SEQ ID NO: 16015 - DNA, 400 bp, Gossypium hirsutum
  Clone ID: LIB3145-031-Q1-K1-A7
gcttggaggatacatttttgtttgtaacaatgatacaatgcaggaagatctaaagcggcagctatttggtttaccaccaagatatagggactctgttcgggcaattacacctggcttacctctatttctctataactatactactcatcagttgcatggtatttttgaggcagcaacttttgggggttctaacatcgatccaactgcttgggaagacaaaaaatgcaaaggcgagtcaaggtttcctgctcaggtgagaatccgtattaggaaactctgcaaggcattggaagaggatgcatttaggccagtcttgcaccactatgatggccccaagtttcgtctcgagctttcagttcctgagaacgttgatctattagacctttgtgaacaagcaggc

SEQ ID NO: 16016 - DNA, 423 bp, Gossypium hirsutum
  unsure (1)..(423): unsure at all n locations; Clone ID: LIB3145-031-Q1-K1-A8
aagatatttgcacattaagatgcattcggagtgatatggtaactggtgatcagtttctggaagaaagtgtttgggacacaacagatgccaagtttggcactgtaccatttagcatctgggttgttgctaatgagttggggactttttttgtccgtggtggatccagaaaacccccaaggaggtttgctttaaagctggctgatccatatttacacagtggttcagatgatactgtcattgatgcagaaataacaaccttttctgcagccctttttgatgactatggtggcctgatggtgccattgtttaatatatcattgagtggaattgcattcagtttacggngaagacctgattattcaaattctaatgttagcttctctttagctgcgaggtcatataatgataaatatgaatcatggg

SEQ ID NO: 16017 - DNA, 428 bp, Gossypium hirsutum
  Clone ID: LIB3145-031-Q1-K1-B1
cccacgcgtccggaaaaacataaaacatggtaaaggttcctttagttgtgttctcattggctttggtgctctcaatccaattcgtagtgggacacgacgagaaggctttagatgaggcagcatccccggaagctgaagatgcaggtttaagttcaggggcagctaaacttgttgaaaactttaaaagctctgctggagatgattcccagagtgtggatgggccaacttctgacttagctgatgagattgcagcttctccagaatcagaagttgaagttgatactgaatctgtcgatgggccacattctggcttagctgatgagattgcagtttctccagaatcagaagcagaagttgctactgaatctgtcggcgggaggaagcgtaaaatggcatagtggaccgcgatgatgtttagaaagcaacat

SEQ ID NO: 16018 - DNA, 82 bp, Gossypium hirsutum
  Clone ID: LIB3145-031-Q1-K1-B10
ggcgatgaaaaatttcagcgttttcttctttgctctcctcttcctcgcatctcctttccttcaagttgctaggtgtcaatca

SEQ ID NO: 16019 - DNA, 260 bp, Gossypium hirsutum
  Clone ID: LIB3145-031-Q1-K1-B11
aaacgcggacccaagaggggaaaggacggcttttgtgaagaaatgcatcgatactaaactgggggccatttaatacctgtgagccaactcaatgacttatacctatcatcaaagggcactcctctggaattagctcacagaggcaaggcttctgggcatatctggacaaaaaaaaactctagaaggaattcacgacatacaaaggcaggaacgtcatccagatgaggcaccgtaaaaggacctgccggaaccttcaaaac

SEQ ID NO: 16020 - DNA, 395 bp, Gossypium hirsutum
  unsure (1)..(395): unsure at all n locations; Clone ID: LIB3145-031-Q1-K1-B12
gattaatattttgttgcagatgcgtgcttgatcctggggacaagattgttgactgtcctccaaccttcacaatgtatgaatttgatgctggtgttaacggggcacaagttatcaaagttccaaggaagccagacttcagcttgaacatagaagcaattgctgaggctgttgagcatgaaaagccaaaatgcatatttcttacttctccaaataatcctgatggaagtataattagtgatgaagttctcttgaagatccttgacatgcccattttggtggttctagatgaagcttacattgagttttcaggaaacgaatctangatgcagtgggtgaagaagcatgataatttaattgtctttcgacatttagtaaaagagctgtttaacccggct

SEQ ID NO: 16021 - DNA, 430 bp, Gossypium hirsutum
  Clone ID: LIB3145-031-Q1-K1-B2
gcctgcgcagctgttgctctctctcgtgcatcatctgtgaaggcagaagttttctctgcgcaagctgaagatcaagcgcttcaatcgagatcccaagttcaaggttcctcaaaggctcaaggacagggtgaactagatgctacacctagtgaagtcttggctatgtctactacacagacaaaatcaaaggtacaaatgaggcaaacaacaagtgtgtcatcaggagaagattcagatgatgatgaacttagagatactgaaactactgataacatggatccggctgatgcaaaacgtgcaaggagaatgcggtcaaatcgagaatcagctagacgctcaaggagaagaaagcaagcacatatgaatgaacttgaaacgcaggttggccaactaagagttgaacattctacattactcaagagtctcactg

SEQ ID NO: 16022 - DNA, 446 bp, Gossypium hirsutum
  Clone ID: LIB3145-031-Q1-K1-B3
gacccacgcgtacggcctgcgcagctgttgctctctctcgtttttcatttgtgaaggcagaagttttctctgggcaggctgaatatcaagcgctgcaagcgagatcccaagttcaaggttcctcaaaggctcaaggacagggtgaactagatgctacacctagtgaagtcttggctatgtctactacacagacaaaatcaaaggtacaaatgaggcaaacaacaagtgtgtcatcaggagaagattcagatgatgatgaacttatagatactgaaactactgataacatggatccggctgatgcaaaacgtgcaaggagaatgcggtcaaatctagaatcagctagacgctcaatgagaagaaagcatgcacatatgaatgaacttgaaacgcatgttgtccaactaaaagttgaacattctacattacttaagagtcttactgac

SEQ ID NO: 16023 - DNA, 429 bp, Gossypium hirsutum
  Clone ID: LIB3145-031-Q1-K1-B4
atactttcatcggaatcgacaattataagtcaatcttccgggcgctgcgattccatgggaggatttttttcaaagctctctggctcgacattgtcagtgtatggcagccaatggagaatgtcgtaatggttcgctggaccatccatggcattccacgagtcccatgggagagtcgtggtcgattcgatggcacttctgaatacaaactcgacaagaagggtaaaatatatgagcaccgagtcgacaacatcgcactgaattcaccccctaagtttcaagtgctagctgtggaagatttaatccgatctgtaggttgcccctcaaccccaaggccaacttacttcgagatttcatcagcttcacctccagaaaaaacataataaaaccaccttaagttctttataatttttggtaaataatgtgtttcat

SEQ ID NO: 16024 - DNA, 358 bp, Gossypium hirsutum
  Clone ID: LIB3145-031-Q1-K1-B5
ccccccactagcactttttctgttcttttttttttctctctctttttttgtacatgtagagagggcactttttttttaatggaaacttggttaataaaaaagtaagtgtactttgttgaaaaaaaaaaaaaaaaaaaaaaaaaaaaaaaaaaaaaaaaaaaaaaaaaaaaaaaaaaaaaaaaaaaaaaaaaaaaaaaaaaaaaaaaaaaaaaaaaaaaaaaaaaaattaatataaaaaaataaaaaaattaataaataaaaaaaaaaatattattatatataataaaaaaattttttgggtgtttttttttaataattatatttttttttcattgtatttattatgattttttttttt

SEQ ID NO: 16025 - DNA, 420 bp, Gossypium hirsutum
  unsure (1)..(420): unsure at all n locations; Clone ID: LIB3145-031-Q1-K1-B6
gcaaaggatgctgtttttgttccccatacaaggcttttgataagagagacttagcagaatttgttgcatatatcaatatgggtaattgctggggatctggttcttccgatagagatgctactagtcatgtttacagctccaccaatcttcctactaccccaggtacatcaaataactgcagcaacaacatggaatcttcagtaaccagtagtattagcaacagcaggagtcaattctcggtatcagtaagtgaaatagtggaggaggaagtaccagatgggcaaatcctggaaacatcaaacttgaaagtcttcacttttgcagagctaaaggctgcaactaagagcttcaatacactgttgggcgaagggggatttggtaaagtttacaaaggttggttggatgagagaactntaacac

SEQ ID NO: 16026 - DNA, 398 bp, Gossypium hirsutum
  Clone ID: LIB3145-031-Q1-K1-B8
atcctctcaaaatcctttttctgatgcaaaatttactcctttttagttttgtggagtatgtcaaaagctggggtttttcctggttaactaaggcctatttttgggtgggttgaacttatatcagtactagcagattagaggttctctcaagtttcagacgagatgggaatttgtggggataagggtttcttcagtgctccacttggggaaaaagatgtggcagcctcacaaattgaaccagaggcgacggtggaggatgattatagtgatgaagaaattgatgtggatgaacttgagaggaggatatggaaggacaaaatgcgtctcaaacggcttaaagagcagaataagtgcaaggaggggattgatattgctaaacagcgcctgtcacaagaaca

SEQ ID NO: 16027 - DNA, 351 bp, Gossypium hirsutum
  Clone ID: LIB3145-031-Q1-K1-B9
cggacgcgtgggcccatccaagcccatctacgttgcaatcaatggtcgcatctacgatgtgaccgccggcaaatccttctacggtcctggtggtgcctacgccatgttcgccggcaaagatgccagcagagctcttgcaaagatgagcaagaacgaagaagatgtctgtcccaaccttgacggcctctctgaaaaggagatggatgtccttaacgattgggtcaagaaatttgaagctaagtaccctgttgtcggccgcgttgtctcttgaaaatttgcacctttcctctatgttgggtgtaatttggtttgtttttaagtgtccttagactctggttattacttatctat

SEQ ID NO: 16028 - DNA, 222 bp, Gossypium hirsutum
  Clone ID: LIB3145-031-Q1-K1-C1
ttgtatctttaggtttttcattttcaatgttagtcatatttgggtgagatcctctactttccagcgaatagttttgttggagttgtatgctttttattgtggtttttaccctcatgtccctttgtttttaccctcaacccttgcttcaacggggttttccacgtaaaagatcacatgttttgtttaattggttccttgcgattattgagttttattttgtgc

SEQ ID NO: 16029 - DNA, 339 bp, Gossypium hirsutum
  unsure (1)..(339): unsure at all n locations; Clone ID: LIB3145-031-Q1-K1-C10
cgaatttgtatctgtggatagtccgaaccaagctagcgaatcggatttcccgacggtggttaatggtggtggtttgaaaatgctgctggagccgttatccgacggccgagattctccgggttcgaatcagacgcgcagtggcggttcttctcattccaacgccgccgttaaggtccagaaggtgtataggagttaccggacacggcgtatgttagcagacaccgctgttgtcgctgaagaacttctgtggctggctntaaattatgcaaggcttaatcacagcacaatttcccttttaattatttgaaaccagaaactgctgcttcaaggtggaatcgc

SEQ ID NO: 16030 - DNA, 426 bp, Gossypium hirsutum
  unsure (1)..(426): unsure at all n locations; Clone ID: LIB3145-031-Q1-K1-C11
aattcatatggtttatggcttggaacctgcaatagccacttgggaagttaggctaggtgcggcagcaacagctttccttcataaacttcagaaaggtatacctccctgggttccccttaaagggcacgaggagaaaacttataaacagcttcaagaagaagcgatagagagcaaaagacgtgatttggctgtcctaaaagctaatgatggcatatggcccggagttagaattcctagccatgctctatttctttgggctagcggctctgaaatgacaactcttttggaatctgatcatatgccaaacaaatacatttcaaaagatcttcggcgcaaattggccaaagttatccccggattaaggccgtgggaggttntaagtgttgagcaagcaatggatgatatcacatatagcggagagtggta

SEQ ID NO: 16031 - DNA, 427 bp, Gossypium hirsutum
  Clone ID: LIB3145-031-Q1-K1-C12
caaatagggagatctttggctaacccaggggaacgtcttcccagcagtatcgaacgatcttaaccgcgcaaagcaaagaatcaaatttgtgcattttactctccttgtcatctattgtaaattctcaaattaggttgggtatattgcagcttgtgcatgtaattcaaagtgagaaaactagggttgtttactgtaaaaataaaaatcagggcaaattttgttaatggtagttaaagttccactagcaaaccagctatgttaggcatgaatcttagatatggtaggtaacaatggtgctttcttaggataaatttactgtaaaatgtcttgattaaaaaaattacgaacacagttttttggttagagcattttgcttagtgtcaaactcatccttttcatgtaaagagcatcttgatgatgtaaaaat

SEQ ID NO: 16032 - DNA, 301 bp, Gossypium hirsutum
  Clone ID: LIB3145-031-Q1-K1-C2
acgcccacgcgttcggagaaatggctactttgggtggaattagccaggtcgatggaagcgccaatagtttggagattgaaaacctcgctcgttttgctgttgatgaacacaacaagaaagggaatacgatgctgcagtttaagaaggtgacgaatgtaaaacaacatgtggtgtctgggactatgtattacataacattggaggcgatggatggtgacaagacgaaagtttatgaagccaaagtgtgggacaagccatggatgaatttcaaggagttacaggatttcaaggatattggcga

SEQ ID NO: 16033 - DNA, 415 bp, Gossypium hirsutum
  Clone ID: LIB3145-031-Q1-K1-C3
cccacgcgtccgcccaaagaagaagagtcggagtctgagaagtcagtgtctgaggtgaatgatgaggaggatgaggacgatgaagaaggcagcggagaggaagaagatgatgactaagaaggaaggaagacttgttggaggagatatagcataacgagtataggctggtgcttaattggttatatgttaatgcttttgatgttcccatgttattctctctagatgggcatatgcatgtcatttaaagggaaaaaaaaattgtacctcttaatcctcttagtttctttcgacctttaagaaattaatagcctcaaaattgtacttttgattctaacgttgaagaatggcttgtaaacatatcctttttagatgatgaagttgatgcgttaatatattttatgttttgtgattacgt

SEQ ID NO: 16034 - DNA, 385 bp, Gossypium hirsutum
  Clone ID: LIB3145-031-Q1-K1-C4
cccacgcgtccgttgcttttcatactcatttagcccctttcattagcatcaaaatcactccagttttctttatcactgaaaaatgtcttgctgtggtggaaactgtggctgcggtactggctgcaagtgtggcagtggctgtggaggatgcaagatgtatccagacctgaacgctgccgagatgaccacaactgagactctggttcttggtgtagcaccccagaaagcacactttgagggagctgagatggaattcggggctgagaacggctgcaagtgtggagacaactgcacctgcaacccttgcaattgtaaatgattagagaccaaagccaaagctccctggaagcagaggcgcctttgtctttaagaaaaaatatgtttt

SEQ ID NO: 16035 - DNA, 414 bp, Gossypium hirsutum
  Clone ID: LIB3145-031-Q1-K1-C5
gttttctagtttatatcttttgatggttggccatttcttttttggatctgaataaaaagaattagatctataagatatatgctttgaaataaaaattcaaaaatggacaatgatgagaccaccacttccgcctggtccaccacccgccgcgctggatgattataatcttgcaaaccgaccacccttaccacagaaaccatcatatgttaaatctgctgcatctactgttgttaagcggccactggctcagcaccagccggagcttacggctatggtgcctgcatctgttcgagtaaggagggagattactgccccaaaagcaagaccaaagccttcacacttaatcatgacatcgaccaccaagcctgtagctactaccattgtgaagcctgaatcagctagcacatcatcagc

SEQ ID NO: 16036 - DNA, 311 bp, Gossypium hirsutum
  Clone ID: LIB3145-031-Q1-K1-C6
tttggagttgtttctcagatagttgatagagaagtcacacttgaagactcacaagaaacaaccaatacattcggtattcccgaagcaattgtttccccttggttgcagtttcagactctattagcttttatgtagtacaatattaataccaatgtcaattgtcttaggttttttatttatttacttttgtacattgagttgaatgctgttggtatacatttcgactaaatgttagtgtattttgattgttggattgattttttgtagtgaatattcaacctttattttaattttatatttttagttttatc

SEQ ID NO: 16037 - DNA, 417 bp, Gossypium hirsutum
  Clone ID: LIB3145-031-Q1-K1-C7
cttacatcgaagtggtttggagacgctgaaaagctcaccaaggcccttttctcttttgctagcaagctggcgccagtcattatttttgttgacgaggttgatagtttgctgggtgctcgtggtggtggttttgagcatgaggcaactaggagaatgagaaacgagttcatggcagcttgggatggattaaggtcaaaagatagccaaagaatcctcatccttggtgccacaaataggccctttgatcttgatgatgctgttattcgtcgcttaccaagaaggatatatgttgacttaccagatgctggaaaccgcatgaagatactgaaaatatttcttgcacaagagaatataagctgtaatttttcatttgaagaacttgcaaatgcaactgaggggtattctggcagtgatttg

SEQ ID NO: 16038 - DNA, 374 bp, Gossypium hirsutum
  Clone ID: LIB3145-031-Q1-K1-C8
cccacgcgtccggcgagagcttatgatgctgaggcacggagaattcgtggtaagaaagctaaggtgaacttccctaacgagactccgcgtacctctccaaagcatgcagtcaagacaaattctcagaaaccactttccaagtcaaatttgagccctgttcagccaaatctcaaccagaattacaattacttgaaccagcctgagcaggaatactttgataccatgggtttcgtagaagagaagccatcggtcaatcagttcgcatacgtggaccctgttcctacgtctatagatgctggatttaatcaatcagataatgcccccttgtacttcaattcagaccagggaagtaactcgatcaattgttccgacta

SEQ ID NO: 16039 - DNA, 406 bp, Gossypium hirsutum
  unsure (1)..(406): unsure at all n locations; Clone ID: LIB3145-031-Q1-K1-C9
gagaggccatccgaccaccccatttttgagcctaatcccgacgacggagaaggactctccagtgccatgaccgcgagttcaggttgtgggtggcgttgtggacgtgggcactgatgtggtacgtgggtgcgaacgtggaggagcgggatgtagggcggccgacgaacatgcggcgctggtcaaaggggcgtgctgcttccttattttctgtttcgggttttagtttgggctagggttttgttttgggcctgttgggctactttgtatattttgggttttaagtttggttgtaactgggctttgtaattctagacttgttgttattgggccccgtgctaaaattgngccttacatntatcattgnattaatatttattattttgtaaaataataagttttttttatt

SEQ ID NO: 16040 - DNA, 432 bp, Gossypium hirsutum
  Clone ID: LIB3145-031-Q1-K1-D1
cccacgcgtccggaacaagctgataaagaaatcactaacgaggaggaggcacaatacgccgcgcatcaaattttctcaaatgctgctcgacacgaaagcaaccacaaccacaattacatcgatgaggatgaccttttaaggttcatgatcaaagaggaggtggatcttgtgtttccattgtttgaaggatcaaacaccggaaaaattgaccgaaaaagtttcacaaactgggtgataaaggtttacaaggatcggaaaacactagcacatgctttgagtgacaccaaaacagctgttaagcaattgaataaacttgtaacagtagtccttgttgttgttactgtcatcatatggcttcttttgatggaaattgcaaccacaaaggtgcttttgctcctttcatcacagcttgtagttgcagcttttatgttt

SEQ ID NO: 16041 - DNA, 335 bp, Gossypium hirsutum
  unsure (1)..(335): unsure at all n locations; Clone ID: LIB3145-031-Q1-K1-D10
atggattcaacgtacaactcaccgaagatgaaccgtgaactgttgaatgaccaacagcattgatgtagacagtgtagcgaaccaaagcaaccgtgatatatgttcggatttattatttcgtgttgcagagctatagcctagtcacgtttagaagttggtgtcacatctagctcagtgaagaagcaagttagaggtgtagaatctttggttttggtcattttcatttagagataaaagaactntgttttgcaagcatttcttaatttgttttggttttttttttcttaattntcctaatngattttggggtagtgttaaaatttcaacttgtagaa

SEQ ID NO: 16042 - DNA, 422 bp, Gossypium hirsutum
  Clone ID: LIB3145-031-Q1-K1-D11
tcttgatcctgctcgacctttgacgcaagtcaagaaaaggagtcctttttcatccttctgcccagactatcgcctaatcaaaaatcaatcatggctgtgaccatcaagcgagcggccctcatcgttgccagtcttggcgtcttatcttttatctttggagtcattgccgaaaacaagaagcctgcagctggaactccaatttctggaaaagatgtggttatttgtaagtatccatcggatccttcggtggttctgggctacctatcggttgcatttctgatactatctactctcactggctattggtccctgttttacccctacaaaggaaaatctgttccacagtctgttctcttccgaaacactagtttcttcgtcttcttcaacattgccttgtttacaggtggcttagcagccactct

SEQ ID NO: 16043 - DNA, 271 bp, Gossypium hirsutum
  Clone ID: LIB3145-031-Q1-K1-D12
cccacgcgtccgccagattcttacaggtagacgcgggatactgttgcttccttagcatgtgattggcatagcagtgttttggagcagatgtgtgagcttcaatttgtgtatttggttcggtgttttatagtactttgcaacttttaattgtatttggcacccttattattgtggaaagaagacttgggagatgaaatgaatttgtaactggctgtgattgttggtggattgtgaacgtacgtacaactctaatttatttatctgttttcta

SEQ ID NO: 16044 - DNA, 418 bp, Gossypium hirsutum
  Clone ID: LIB3145-031-Q1-K1-D2
ataaatccggaggatgatggtctctacctaaatgcattcatcaccagtatggcagagctacctgggcttcttctgtcagcaatattggttgatagggttggccgcacgcagtcaatggcaattatgttcggcttagcatttattttcctttcaccactgataatccagcagcctgctgtgttaactactcgcttattatatggagctcgtatgaatgccatgggaacctttacagttgcctccatatattccactgagttatatccacacctcgtgcagacaacaggggcgggagttgcaagtgctataggaagaattggtggtatggtatgtcctcttgttgcagtgggattggtgaatgattgtcatcaaacaagcactgtagcgctatttttggtcgctatagttgtttcgatag

SEQ ID NO: 16045 - DNA, 347 bp, Gossypium hirsutum
  Clone ID: LIB3145-031-Q1-K1-D4
gcgagcctcaattagccccctgagaatggagtcggtttctccagatattattacaagcaagtctgttggaacatctcataatagcaatggtcaagcagttaaagtagagcatcgaggaactgtggatcttgatagcttacgagggcagacttctttagacatagatgattcatcagtagttagaagtgtagagttagctgagcagataggcttaccgtttaggcaggagttgctttctccatgtgaagtttctgattttgaaacaagagaaacatgcaaggcttgcttgaatcaagaaaaaactgcagattcgacatcagctttcatcaatgatccttaaaatggat

SEQ ID NO: 16046 - DNA, 394 bp, Gossypium hirsutum
  Clone ID: LIB3145-031-Q1-K1-D5
gtgctttttaaaaaaaaaaaaaaaaaaaaaaaaaaaaaaaaaaaaaaaaaaaaaaaaaaaaaaaaaaaaaaaaaaaaaaaaaaaaaaaaaaaaaaaaaaaaaaaaaaaaaaaaaaaaaaaaaaaaaaaaaaaaaaaaaaaaggggggggccgttttaggggatcaaagtttacttccccttgcttgcaacgtaatactttttttttggggcccccaaatttaatttcatgggccgggttttaaaaacgtcgggattggaaaacccttggctttcccaaatttaatcgctttgaagaaaatccccttttccccagttggcttaataccaaaaaggcccgaaccaatcgcctttccaaaaatttgcccaccttaattggcaattggaacccccctt

SEQ ID NO: 16047 - DNA, 229 bp, Gossypium hirsutum
  Clone ID: LIB3145-031-Q1-K1-D6
gttggttatagttggatcgatggtctcaaagctcatgctgctgcaaatgtgaccgataagatgatgcttaatgcttcaaacatcttccctcacaacactccgaccacgaaagaagcatactattataggatgatcttcgaaaggttcttccctcagaactcggcacgattgaccgtcccgggaggagcaagtgtagcatgcagcacggccaaagctgtcgaatgggatg

SEQ ID NO: 16048 - DNA, 425 bp, Gossypium hirsutum
  Clone ID: LIB3145-031-Q1-K1-D7
caaaaattctatctgttcttttataattcatcaaaatattgctgttgttaggccccttgtttgtttattactagaagtgtatgattttctttctgggaaacttagttttttgaagtgagtgctttaccatgatttattttgctagttttttgaagtgagtgctttaccatgatttgttttgctatctctaaacaataatgatggtggcagttgtgacactgtgatttgggggtaattgcaatcgctttactgaatttgttatttgctgcattgagtattgtgctttgttggtatttcctttgaaaatatacttgtcaatcagaattataacttgttaagaaccttagcatcatttctctttccagctactgaatcaaatatcaatgccatccctatttccacttacaatttgcacttgtatactt

SEQ ID NO: 16049 - DNA, 427 bp, Gossypium hirsutum
  Clone ID: LIB3145-031-Q1-K1-D8
gaaagatgttcaagagagcttgtgagggaggcactgaaacgcaacacttgtgataatttaacagtaattgtggtttgtttctccactgaccctccgcctcgaatagaaataccacagttccgtgttcggaggagcatatcagcggaagggctgaattttctaaagggtgtgctggatagtaactgatgaaacagtggatagatgaaaagaggttgtacatgaaggcattggagggcaaaattggcaggctgcaggctaacattcaatcctccttcaaggacatgctcatcatgttgattctttatgagtttctaaatcctgtacatctgagataactcatgttgtacggattggcaggagtcgatggtcaaccaagttttccttcttggtcttcttctttttttctttttctttttttctccttcat

SEQ ID NO: 16050 - DNA, 430 bp, Gossypium hirsutum
  Clone ID: LIB3145-031-Q1-K1-D9
cccacgcgtccgggatggcgaagcttttggtctccgatgaggctcgcaaagagttcgccactcttcgtcgcactttcgatgaagttaactccactttacagaccaagttcagccaggaacctgagcctatcgattgggaatattatagaaaaggaatcggctcgcgattggtggatatgtacaaagaggcttatgagagcgtagagatccccaagtttgttgacacagtcactcctcaattcaaaccgaaatttgatgcattgttggttgaattgaaagaagcagaagagaattctttgaaagagtccgagcgtttggagaaagaaattgccgacgttcaggaactgaagcaaaagatcagcaccatgacagcagatgagtactttgagaaacatcccgaactgaaaaagaaatttgatgatgagatccg

SEQ ID NO: 16051 - DNA, 423 bp, Gossypium hirsutum
  Clone ID: LIB3145-031-Q1-K1-E1
gttttctactcacacggacgggagggagacgagaaaaggaagacaacgatggtgtctctgaagttacagaagcggctcgccgctagcgtcctgaagtgtggccgtggcaaggtttggcttgatcctaatgaaatcaatgaaatctccatggccaactccaggcagaatgttaggaaacttgttaaggatggttttatcatccggaagcctaccaagattcactcccgatctcgtgcacgcagaatgaaagaggccaagagaaagggtcgtcattctggctatggtaagaggaagggtaccagggaggcaagattgcctacaaagatcctttggatgaggagaatgcgagtactaaggcgtttgcttcgtaagtacagggaatccaagaagattgacaagcacatgtaccatgacatgtacatg

SEQ ID NO: 16052 - DNA, 168 bp, Gossypium hirsutum
  Clone ID: LIB3145-031-Q1-K1-E10
cccacgcgtccgcccacgcgtccgaagaaatataccagaaaatcaaaaagaagaagaaaagagatccccaagatgtctcttacaatcccaactaatctctcaaaatcaattttgaagccaaagctggagacccaagtgatccccaaggcttcatccagatcattgatt

SEQ ID NO: 16053 - DNA, 422 bp, Gossypium hirsutum
  Clone ID: LIB3145-031-Q1-K1-E11
caagatcataactttcttgtcttctttgctgcaaagagtggcagagtcgaatgatcattgccggttgtttcagtcgcagaagatctcagtttttcatggtcttaccagacctactatttccatcaaaagctatctcgagaggatctttaagtatgcaaattgcagcccatcatgtttcgtggttgcctatgtttatctcgatcgcttcgtgcagatgcaaccgtctttgcctatcaattcttacaatgtgcataggttgctaataaccagtgttttggtttctgccaaattcatggatgacatgtattacaacaatgcctactatgccaaagtgggaggaatcagcacggtagagatgaaccttcttgaagtggattttttatttggcttggggttccaattaaatgtggcacctacaactt

SEQ ID NO: 16054 - DNA, 120 bp, Gossypium hirsutum
  Clone ID: LIB3145-031-Q1-K1-E12
tatctcctctatagtgctacagcaaaagttttgagagctaggatttttcaagatgggaaatgctcttaagctcctatatgggaaatgtttggaagccggcgtcattacgggaggggggtc

SEQ ID NO: 16055 - DNA, 310 bp, Gossypium hirsutum
  unsure (1)..(310): unsure at all n locations; Clone ID: LIB3145-031-Q1-K1-E2
ggaaaacaagaaaagcagagccgcatcactttttgctagctaagctactgtgggagttattgttcttcagaacagcttctgcagtagctaataataacgttatatattatataaattttatacatcctttttaccctacgactccatatataagcaagtaaaaataaatatggctcgctctgtttcttcctttaagttccttggtgcttctgtttttgatgctctttatgtctccatatcaaggagaggttactcangtgcaccgccggcggcagtgacggctagctttggtaggcctggagcgattggg

SEQ ID NO: 16056 - DNA, 350 bp, Gossypium hirsutum
  Clone ID: LIB3145-031-Q1-K1-E3
gaccattttacatgaacccgcaacgtgccaccaccatctggtatgtcccccgcaagaagagtattttcagccagcaagatgacattctaactgctgccgagaactacattgaagagcatggcactcacgaatttgaaaggcttataaccaaggctgagaaagaagaaagaatccgacgcagcaacaactacatgatctttgatgacgattatatatattgacttgttttgtaaactagcaactttctttgttgtaagaaatgctatttaatgatgtatcatcttggcttaattatcacattttcctttttttgttcaaacatttcggagcactatttaaagttaatattt

SEQ ID NO: 16057 - DNA, 377 bp, Gossypium hirsutum
  Clone ID: LIB3145-031-Q1-K1-E4
cccacgcgtccgtttctttcttctctctggttttttaaaagctctattcatgccatgttcatcaagcattcattaagagtgtgggttaatgaattcttaatatgcttgtaactaaaagttgtttaaatgaagaatataagtgtttcactacagaaatttcatctttacaaattgacagagcaaggaggctagctcgaaacttaggatagcctttagccactgagccgaccttgtcttgttgattgtctgcatttaaaagagggtacttggtccactagaaaggaagattgagaacaatgattcatgtgcctagctttatggactgattttttacaactttttgacttcctacgtgtatgctattatgtttctttata

SEQ ID NO: 16058 - DNA, 406 bp, Gossypium hirsutum
  Clone ID: LIB3145-031-Q1-K1-E5
ccccaaaatcggttccctcccccctcccctctccccaaagaaatcctaaaattttgcctaaaatttcttctctttttttccccattttatttttcccaaaccatttctcccctaccctgattccctttatttttctcccaatttccccaaattggcagccctatgcatctccgtcggcagcccgctgctgtatctccgtcgacatatgctgtcaagtatattgaaagaggacccaagatgaacatgcgcagagggagattatgaaccataggtctttgaagcatccaaatattattagattcaaagagtcttttgcagtgactacctgttcaagcttctgctttttagagattctggtgttggaaaatcttgtcttcttttgagatttgctgatgattcatatgta

SEQ ID NO: 16059 - DNA, 419 bp, Gossypium hirsutum
  Clone ID: LIB3145-031-Q1-K1-E6
ctgagagttgcttgtacttgtgtggtgcctaggccaaaggacagaccttctatataccaggtttatgaatcgctgaagatcatgggtgagaaacatggtgccttggaacagtatgatgaatttccgttgatctttgggaaacaacaagatcatgataattatgagcgaacccttgtttggggggaatgagatgcataagcagcagctgaaagaactgaaactgtttatcttctactttgtggttctgagatttgggcaaatatatctgcattggtgaatggtatcttctttttaaaggcattttctgcaattggtatgatttacgcttgaacaggatttcttgtctaaatggtactttgttggagaattctgtatattacatgaagcattatcactcactgtagtgatcactatcttca

SEQ ID NO: 16060 - DNA, 416 bp, Gossypium hirsutum
  Clone ID: LIB3145-031-Q1-K1-E7
gaaacttgggagtcatcacttaattctctcctacctaaccatggccgacaaagaggcccaacaacccgaagagctacctgtagtcttccttcatcgtccaccctcattcatccttccttttggagaccatttacgttctcaattccatgtcctggacccttacgagtcgcctgagccgtacgactcctttctggcccgtcatgctccctccataagagctctcatgactatgggccccaccctagtttccgccgagtttctggaccgtctgcccgttttggagctgatagtggctacaagtgctggccttgatcatatagacctccccgcttgtcgaagccgatgcatcgttgttactaacgctagctttgccttcgcagaggatgtaacggattgtggctgtggttgttgatcat

SEQ ID NO: 16061 - DNA, 217 bp, Gossypium hirsutum
  Clone ID: LIB3145-031-Q1-K1-E8
atctgcatctgctatagaagaaaagttgaaaatttttttactggattatagagatcttatatttcttttttattcatggagtgaaggacttggttattttaataaatccttcaaactcatggaccattgcatttgtgaacattgaatatgccttgaatattttgatatccaatcgaatgcactctacatttaccaagaaaaaaaataaataacaaaa

SEQ ID NO: 16062 - DNA, 427 bp, Gossypium hirsutum
  Clone ID: LIB3145-031-Q1-K1-E9
gccaaattggagaaatcttctcacaaagctcaggatcaatacgcagtaaataaattgaagcaagtttcacagaagtctaattttacaaacaggtaccctgtgccattatctttcgatattatccagtctaggttggagaacaactattatcgaagtttagaagcagtgcagcacgatatccaggtaatgttgttgaatgcggagtcttacttcgggagaaatgcagagctcttatctaaactcagacgcctatccgacttttttatgcggacattgtcgtctttgcagccgccgtagatagatcttatagtgaagacccatctttgtagataaattagaatttttgctttttcatttttaattttcttttccattgtctcttaaatccagtttttgttattgatttatactttgagattctttcgag

SEQ ID NO: 16063 - DNA, 377 bp, Gossypium hirsutum
  Clone ID: LIB3145-031-Q1-K1-F1
gtggaccggaactgaattttgaccccttagatagttttttgtagggattggaatataaaagttgaatatggtaaataagaagtaccaaagatggggctacttgtccggtctggtaagtcgaccttaaaaaaaaaaaaaaaaaaaaaaaaaaaaaaaaaaaaaaaaaaaaaaaaaaaaaaaaaaaaaaaaaaaaaaaaaaaaaaaaaaaaaaaaaaaaaaaaaaaaaaaaaaaaaaaaaaaaaaaaaaaaaaaaaaaaaaaaaaaaaaaaaaaaaaaaaaaaagaataaaaataaatgggggggcctctttaaaagaacaaaattttagtggcccttatgtgaaatttaaaatttttttttatgggacaaaaaattta

SEQ ID NO: 16064 - DNA, 226 bp, Gossypium hirsutum
  unsure (1)..(226): unsure at all n locations; Clone ID: LIB3145-031-Q1-K1-F10
cttgaagaacaatcacatctatgttactctgactctttataggtatgaagatatgaccttctagagatcctcctaatacaagaagaaaatacagaaaattgagcatactcatatgtgaagataaaccagagtcccagtaacatagctatgtaggtattaaaagttatttatttatttattttattttttggtttgttgatgatgctatagtaagtgtttttcctna

SEQ ID NO: 16065 - DNA, 222 bp, Gossypium hirsutum
  Clone ID: LIB3145-031-Q1-K1-F11
acggccccacacactgtcgaccttcttcatccatactatctcatcactgtactcatgctcaacggcctcaaagcagtcactcgttgatcaatgactgacgaagctgcacgtgtacaggccactggagctgcatggcatatatgccatgctgtcatacccatggttgctcgcagagtcatgaaccgtgctcaccaccccgtgatgcttcacaatcgtgagatc

SEQ ID NO: 16066 - DNA, 401 bp, Gossypium hirsutum
  Clone ID: LIB3145-031-Q1-K1-F2
gtcaaaacaaggggagaggggagctcgaaggttctgcgccgttcggccttcatttcatcacggcgacgatgaaagatgacttttggtgacccccccttttgctcctccgtttactccaacacggtgtttatcgatttaagccctgaagtcccatctccgatttcgatttttagcgaaggagatgtggtctccgacagttcattcgcgaaagtaaatcctttcctcttcgctttattcactttcgaggaaaaaaaacaaaaaccgagtacaatcgaaagaaaaaaagaacgcccactagtttgaatcggaaaattaccttcgaatataggggggcttttctttggattagaaatctgaatctttggttttgaggtgcgtaaaaaaaataccaagacttaaaa

SEQ ID NO: 16067 - DNA, 426 bp, Gossypium hirsutum
  unsure (1)..(426): unsure at all n locations; Clone ID: LIB3145-031-Q1-K1-F3
atcatctccctcttcctctagaggggataaacagtataataaattatattggaggcgtggtcggcaaaaaaaagggttaagagatggctcgattaacattagtatcggtgctatttctctgggcaggatcaatgcttatggtccagggcggagatcccacccttttttttcgaatggaacgtcacctatggcaccattgctcccttgggagtgccagtaaagggtattcttattaacgggcaattcccgggaccaaatattaactctaccaccaacaacaatattgtggtcaatgtgttcaataaccttgatgagccattccttgtaacatggaacggcgtgcagcatangaagaactctttgcaagatggtgttctgggaaccaactgtcctatccnccctgggaagaattacacctataaattc

SEQ ID NO: 16068 - DNA, 346 bp, Gossypium hirsutum
  Clone ID: LIB3145-031-Q1-K1-F4
acgcaacgcgtctgtaaataaataccaagtttcttcgaagagtcgttttctgcgatcttcatcttgggcttttttcttttcttatgcaggtgtcatctatttttgacttctttggatcggtcgattgccatatcgatcggtccttgtatctcttcaatatctctttgaaggaatcggagtttcggatgtctaggaaaagaaatggcgagtgggtttggggaatcagcaagccattctccccacaattcatcttgctccaccaataatgctaatggcgatgctggtaattttgagcgcaatatttgctttgacttaactcaagaccctattgtcactttatgtgggc

SEQ ID NO: 16069 - DNA, 400 bp, Gossypium hirsutum
  Clone ID: LIB3145-031-Q1-K1-F5
ggatatctcaagcaactctctcagtggatctatccctccctcaattggaaggctagataagcttgttacattcaatgtgtcaaacaattttctggttgggcctataccatcgcaaggtgtcttcagcaactatacagctagctcttttgttggaaatcgtgatttatgtggaaagcagatcaatgtagcatgcaaagatgacaatgggggagctacaccgtattctgagtcacctacttcagctcaagttggtaaaaggaaatactccggaaagcttctcattagtgcatcagcaactgtaggtgcactgcttttggtggcacttatgtgtttttgggggtgcttcctatacaagaagtttggtaaaaaaagaaacagaactctttgccatgatgtcggt

SEQ ID NO: 16070 - DNA, 425 bp, Gossypium hirsutum
  Clone ID: LIB3145-031-Q1-K1-F6
cccacgcgtccgcccacgcgtccggtgattttctcagcctcatcgttgctgtctggtatactaattgcgactctgcttccggtgacggaatctttagcggtggtgttgtaccatgaaaagttccaagttgaaaaagccatatcccttgttttatcactttggggatctttgaattacttctatggtgagttccatgagattaataagatgaagcagaagcaagatgcaaaaacagatgtagcctaaaaccctttgccttatcttatattggatcatattaaacaaggtggctatatataatatgggggtatacccatattatcttggttcatggtttcccttaaaatatggtaaccagcatgtttaaagggcgcatatatattggtggaattaaggatatatgaaaaggaagctttgatatattt

SEQ ID NO: 16071 - DNA, 279 bp, Gossypium hirsutum
  Clone ID: LIB3145-031-Q1-K1-F7
gcatcagcctacatatgtgatgctggggaagggttactggccctgcaaaagaagcttgctgcaattgaatctcatcaacagttggaaacttcaagttcttctgatgaattaagccttgtataaatagttcatttatatacacactcgtatacatttattgtaacatttatgtaaccaaagctactagaaaaatatagaaaaaaatgactcctatctcatatattggttatctgtgacactgactgcaatgattttagagttgaaattagtttaattttc

SEQ ID NO: 16072 - DNA, 429 bp, Gossypium hirsutum
  Clone ID: LIB3145-031-Q1-K1-F8
ctaaccctaatcttagccttggcctttgcctttgctgcatacaatccacagccgtttaacttctccttttcttcaaccctcgcctccacctggtttctcccatcttcttctcctctctttgaatatcaaggttttgcagattgttccactgttcttttcctaaatgagcggcagaagttatactccatctccgcccagaagctacggccggagaggacggggccctaaccccaaaagcccgtaccggggtcgcgctcgagatcttcctaacagccttttggttcgcaaccttcgccatgactgcaagccaaaagaccttcgcaagccattccaaagatttggccctcttaaagatatatatctgcccaaggattattatactggggaacctcgggggtttggttttgtccaatatgttgatcctgctga

SEQ ID NO: 16073 - DNA, 400 bp, Gossypium hirsutum
  Clone ID: LIB3145-031-Q1-K1-F9
aaaaaggaaacgaaaagaaaaagtgattggccaccatgtttcgctcaatcaactttatagccatgctggtgttccttaattttagtcgggatattacagaaactgcagcagcatcaccattgtgcgatgtggttatcttttacttaagcccctgcgagggcttcataaaaggcggagccgatccggcaccggaatgttgtgttggtgctaaacgtcttattaacgaactaaaggccaaagaagataggatagaactatgcctgtgcttgaaagcaatattgccactacttgggccatttgaccctaatcgagtgcctcttcttggccagaaatgtggtatcaagaatttctttccttccatcacccccgctactgattgttccaagatatgaagagagag

SEQ ID NO: 16074 - DNA, 364 bp, Gossypium hirsutum
  unsure (1)..(364): unsure at all n locations; Clone ID: LIB3145-031-Q1-K1-G1
atatccgcaaccattagcgacactctcacagtacagtgaagctgagctcactatatttatactcaacttcccttagctcttcatgattccaccttgtcggcggttctttggagcttaagaggaagaagcattctttcactcccaaaatgtcagatcttcaagcaccccttcgcccaaagaggaagaagggcttggtggactttttggtccagtttcgttggatttttgttatattttttgtccttcctttttcaactctgtattactttctcatatatcttggagatgtcagatccgagatgaagtcctacaagcagcgtcagaaggaacatgatgaaaatgtnttgaaagtagtgaagcgtct

SEQ ID NO: 16075 - DNA, 367 bp, Gossypium hirsutum
  unsure (1)..(367): unsure at all n locations; Clone ID: LIB3145-031-Q1-K1-G10
ctctctttcaaactatgccaacactgtgcttccatcgttatctaggcttttgagtgatgataaggaagtttcagaaccagctgctgaagctcttgtaaatctgtcccaaaatgcaagactggctgctaagatggttggaatggggttgattaaaatagccatggatatgttgcataagccaagctctagtattactcgattgctggttatgctcctggttaatctaacacagttggatgatggtatttcttccttgcttcagattggagatgataagatgccaggactttatgtaatgaggctngtaagatcattctgtagatccagtgaaaccagtgatgccccttttgatcatgttggtccatac

SEQ ID NO: 16076 - DNA, 417 bp, Gossypium hirsutum
  unsure (1)..(417): unsure at all n locations; Clone ID: LIB3145-031-Q1-K1-G11
cccacgcgtccggctacctgctacaaggctctaaatgaccaccatgtcatgcttgagggtactcttttgaagcctaacatggtgacccctggttcggactccccgaaagttgccccaaatgttattgctgaatatactgtccgtgccttgccgaactggcccttgtggaagtccagctattgtattcttgtctggtgggcaaagtgaggaggaggctaccctaaaccttaatgccatgaacaagctccagaccaagaaaccatggtcactctcattctcattcggacgcgcccttcagcagagcactctcaagacctgngcaggaaaagaggagaatgtgaagaaggcacaagatgctttgctcgttaggtgcaaggctaactcagaagccactttgggtacatacaagggtgatgc

SEQ ID NO: 16077 - DNA, 298 bp, Gossypium hirsutum
  Clone ID: LIB3145-031-Q1-K1-G12
tccatttcgaacactttagacaggctagttggggaaaatcgacgccaatggccatcagagacaccgtgaaaagggcggagcagctggtggagacgtcgatgaaagggaacgacgcctcccatgatgcctcgcacgtgtggagggtcagagaccttgccctctccctcgcacgagaggaaggcctctcctccaaccctgactccatggaaatcgtggagctagctgcacttcttcatgatgtaggtgattacaaatacttgagggatccgtctgaggagaagctagttgagaatttcta

SEQ ID NO: 16078 - DNA, 192 bp, Gossypium hirsutum
  Clone ID: LIB3145-031-Q1-K1-G2
acgcaactcttgaaggctgaggaaattgataccagtcagcctccatatgttttcaaatgccaggtgtacgatctgactggagtacctgctgaaaggcataaaattatggctaaaggtggcttgttgaaggatgatgcagattggtcaacagttgatctgtagcagggtcaaaagatgatgatgatgggaact

SEQ ID NO: 16079 - DNA, 419 bp, Gossypium hirsutum
  Clone ID: LIB3145-031-Q1-K1-G3
cttgatacacgccctcatttattttatttttcaaacaaattttcccttcagttttcgtataatttcctaggaaaagaaaaatgagagagtgcatttcagttcacattggtcaggccggtattcaggtcggaaatgcttgctgggaactttactgtctcgagcatggcattcagcctgatggccaaatgccaagtgataagactgttggtggaggagacgatgctttcaacacctttttcagcgaaactggtgccgggaagcacgtccctcgcgccatctttgttgatctggagcctactgttatcgatgaagtgaggactggtacgtaccgccagttgttccaccctgagcaactcatcagtggcaaagaagatgctgccaacaatttcgctcgtggccattatacaattggcaaagag

SEQ ID NO: 16080 - DNA, 268 bp, Gossypium hirsutum
  Clone ID: LIB3145-031-Q1-K1-G4
acggtatgctattgcttgtgttcttgaaaatgttcctttcatcaatggccgcccacaaaacacctttgttccagggttgattgatttggctattcaaaggaactggctgattggaggagatgacttcaagagtggccagaccaagatgaaatctgtccttgtggatatacttgatggggcttggatcaaaccaacatctattgattgttacaaccatctgcgaaataatgatcgcatgtatgtatccaaagcccaaatcttccggtcc

SEQ ID NO: 16081 - DNA, 425 bp, Gossypium hirsutum
  Clone ID: LIB3145-031-Q1-K1-G5
aaaaaaaagagcagagaatcattatttccttttcttctcgttatacgaatttggttgtaccatgcaaaacctggattcatgagcttctcaattctaaagagattacctttattttctccaccatttgtcaacgtaatggcttcatcatctttctactgtggagttcaatcaaagagattcttagtgttagcccagcagctgcgtcattataagcctccaccttgttcctgggatgacaacgaggaacgaatcatcgaggaagccgccgggaaatttgtttcccaagtgggttttcaagaatccgttacccgagtggctcaaaacccagaaaagtttagatccaaaagagctgctgttttgatctgtctctttgaaggggatgctggggatttgcgtgtcattttgaccaaaaggtcttccagatt

SEQ ID NO: 16082 - DNA, 427 bp, Gossypium hirsutum
  Clone ID: LIB3145-031-Q1-K1-G7
ccaaggcactggtggcaaagattgaccgaccaatgggaatagtctgcttccaggtagcaaaggatagcaatgaaattctcaattcgtgggcttcgaacttggaaaaacttcttgatcttgtcgagaagagttgccaccaaatacacaaagaaaccatggttcacaaagctgctctgaaagtatgaaaacgatgaacattcaccaaactacaggttgtggccaagttgaaatgtgctttttggagacaagtggtctaatagatggtaaaaaaaaagtatgttgctatgaccttttctataactgaagtttggttactatggggaaaaccaaaagatggtgcttgttttttatagcagttgggaggaaaacaattaggtttggtatttttattcttcatcactattcgacaatttcgcatctttcacat

SEQ ID NO: 16083 - DNA, 420 bp, Gossypium hirsutum
  Clone ID: LIB3145-031-Q1-K1-G8
cccacgcgtccgcccacgcgtccggtcagaactcttggattgggaaaggtggggcttttaccggagaaatcagtgtggagcaattgaaagatattggctgcaagtgggtcattctcggacattctgaacgcagacatattattggtgaagatgatcagtttataggaaagaaagctgcttacgctttgaacgagggtctcggagtaatagcttgtattggtgaattactagaagaaagagaagcaagcaaaactttcgatgtatgtttccagcaactgaaagcttttgctgatgttgtacccaattgggacaatataattattgcttatgaacctgtattggccatccggaccggccaaggtgctacaacccaacaagctcaagaagtgcatgtagcttgccgtgattggcttaaaaaga

SEQ ID NO: 16084 - DNA, 151 bp, Gossypium hirsutum
  Clone ID: LIB3145-031-Q1-K1-G9
tcccaaccccatgtcctatatcaaaatcggcatcaatggtgttcggcaggatcgtaatgcttttttccagggtggccctgcacagtgactattcctactcgtcgtctggatctaccccttcatcagcacccacttctttacctacatgttc

SEQ ID NO: 16085 - DNA, 420 bp, Gossypium hirsutum
  Clone ID: LIB3145-031-Q1-K1-H1
cccacgcgtccgctcgctcacttccttgttacttaccacttctttcactggaagaagggaaccccgtttgctgatgatcaaggaatttacaatggcttgacttggtgggagcagatagacaatggaaagcagctaacacgcaacagaaagtttttaaccgttgtacctgttgtgctatacctgatagcttcgcatacaacagactaccaacatcctatgctctttctgaacacgcttgcagtgatcatcctcgtcgttgccaagttcccaaacatgcacaaggtccggatcttcggaatcaatgcagacaagtgagtttatctccccgttcagaacagttgatttcaccagctagaaaagccatacatacagctccttcacctctgttgaaaatgggtatatctctttgtatagaacatt

SEQ ID NO: 16086 - DNA, 216 bp, Gossypium hirsutum
  Clone ID: LIB3145-031-Q1-K1-H10
agaagattataatgcggatgataggacctcgcattcgacaagaggagttcactctagagggtgcgatttgcgtcaagctcgtcactcttgtgtcctactaaaaccctaaccctcgctccagggttactatctattgtaggatccccaataccatttagcgagctggcaaggagagatggcattgagaccacatggtatagatgaattcttatgggc

SEQ ID NO: 16087 - DNA, 303 bp, Gossypium hirsutum
  Clone ID: LIB3145-031-Q1-K1-H11
accacgtcgacacgacgcgcgccgtgagcttgcatcctatagagaggaccgacgcgttcgctcgctagtgacgactgggcgagcgccgggcttcaatgcctcagtccgtccgtgagctcctctcccgcggaacacgccagcgtgcgtagagacggcctatgcgctgacacaggctcaccagatccaatgaaagctgccaactcgacacagggtgtgcaagaaatataaaccatgcactcttcatcgtcagttcaaggcaatatctagtgttaatcttggaggccttcagtaggaagctagaga

SEQ ID NO: 16088 - DNA, 419 bp, Gossypium hirsutum
  Clone ID: LIB3145-031-Q1-K1-H12
cgaagagagagtggcatacgtgagtcctgctgttcatctctatccaagacaagataatccatcgtgcaggctaacgaatgccctaaaatggatagggactggaatacaaaattgattgtgaactggagatctgaaggatcatctggaagcagtagaaaaaattctttcaatttcgtggagatgtcccagctaagctgcaaagcagatccagcattagtatattttagaaatttagttttgggcttgattttgttcgtagttttagttagagaagttatgtttcttagatagttcagacgtgtgtgtttccagcattccattatagtaagacatgcatggtattgctattcttgtgtcccatctgtgatggaaattggaataatggccgtataaagaggtttctttacagttaagctgat

SEQ ID NO: 16089 - DNA, 201 bp, Gossypium hirsutum
  Clone ID: LIB3145-031-Q1-K1-H2
acgcccacgcgtccggagagttgctggcaagccaccacaacctgcagtgcctactggtccacccacattgtcaatgcccagttaccctgtctctagtcagcctgttggtgcctatccatcacgacaatttacaactggaggtcctattcctaatgctgcttctgctagttatgcaagaaatacagttccatggggaccacc

SEQ ID NO: 16090 - DNA, 206 bp, Gossypium hirsutum
  Clone ID: LIB3145-031-Q1-K1-H4
acgtacgcccacgcgtgcggtcatcgattactgtcgtcatttgggtgccaagctttatactcgaggcttagtcttaagcattgaagccatctcgggttcacgcaaatatgccatacgtggatgactcggcctgctcggtggctcattatagcatgcttggctgtggctcatataacaagatatgcagagctagagcgagccatgac

SEQ ID NO: 16091 - DNA, 421 bp, Gossypium hirsutum
  Clone ID: LIB3145-031-Q1-K1-H5
cccatccaaacgacgccctaaaccaaaagtcatggccaccccttccgcacgtgacgaaaacgtttacctggcgaaactcgccgagcaagccgagcgctacgaggagatggtcaagttcatggagaacgtcgtctccgccgtccctgcccccgacgaactcaccgtcgaggaacggaacctcctctctgtcgcctacaagaacgtgatcggcgctcgccgtgcctcttggcggatcgtttcctccatcgagcagaaagaggaaggacgtggcaacgccgaccacgtctctgtcatccgtgagtacagggccaagatcgaggccgaattgtccgagatttgcgccggaattttgaagcttctcgacgagaagctcgttccggccgccgggaccggtgattccaaggtcttttacctgaagatg

SEQ ID NO: 16092 - DNA, 431 bp, Gossypium hirsutum
  Clone ID: LIB3145-031-Q1-K1-H6
acgggtgattcaagggtaggttattctactaagcgatccgctgaggaaacagagatgcaaatgcttgcatcggcaggtgatcccatgttgccataaagttactgaagggaaaacttgttacagtgatatatggatatttctgcttgttttaaagtaggcaatcctacaagatcttcagatcttgtgcagtggctgccatctgatttatggaaccactttgttaagtgtacagaagtatttaaagaaaaatctaaaaacccagttactagttgactggtagaacaagctgagacccttttttttcagccaaataagctgtgtattagaagttagatcagggttctgaaacttgctgatgcactggcactggcttgccaggttggctttagtaaatttgccttctctagtggcagtttctggtcaaaattttt

SEQ ID NO: 16093 - DNA, 386 bp, Gossypium hirsutum
  unsure (1)..(386): unsure at all n locations; Clone ID: LIB3145-031-Q1-K1-H7
caaaaggaaaatggagattgtttggcaaactcctgctcatcctgctcagaaacaagattatgtttttcacaacgggaagcaccccgtattccattcagttggatctttgatagagaagtgaagctctaaaggtcttgaaatgcactcgaggaaaccaacttgaagaagctgaattcaacttgtctttgtattctgatgaaatggtgctggtgtgtgtgtaagaggaatagtgcctggctttagtagttttagatgttttgttgtattagatgtagcgtctgtctgtcatatcatgtacgagtagcatgtgctgtgtcgtntangtnttcttgtagaagcaaacattgttggtatcattgatgataaagatgacataatactgcana

SEQ ID NO: 16094 - DNA, 358 bp, Gossypium hirsutum
  Clone ID: LIB3145-031-Q1-K1-H8
ccagagaagagagaaatatatgatcaatatggtgaagatgctcttaaagagggaatgggaggaggcggttcttctcacaacccatttgacatatttgagtcatttttcggtgggggagccttcggaggcggtggtagctcgagaggaagaaggcagaagcgaggtgaagatgtagtgcatgctcttaaagtttctctggaagaattgtacaatgggacgacaaaaaagctctctctttccaggaacgcaatatgcagtaaatgtaaagggaaaggttcaaagagtggagccttctctagatgctattgttgccaaggcacaggaatgaaaattacaacacggcagattggactgggca

SEQ ID NO: 16095 - DNA, 139 bp, Gossypium hirsutum
  Clone ID: LIB3145-031-Q1-K1-H9
tgtagatacaaaaaaaaaaaagaaaaaaaaaggaataaaaaaaggaactctttttacttttgtaatcaatttgccttaaaaaccactccccaatgttatgtaatagtcattgtaattttcttttactatgctttttttt

SEQ ID NO: 16096 - DNA, 194 bp, Gossypium hirsutum
  unsure (1)..(194): unsure at all n locations; Clone ID: LIB3145-032-Q1-K1-A10
gggccgacccacgcgaacgtctatacctacnttaaacaacacttttattctttatctaacctcaatattcccaccgccggccttatttcacacccccattcattaccaacacctccacatctttgtgattccaaccaaaattactttctgtccttacgtctcaacataattgccaacaatgttcgccctaacct

SEQ ID NO: 16097 - DNA, 85 bp, Gossypium hirsutum
  unsure (1)..(85): unsure at all n locations; Clone ID: LIB3145-032-Q1-K1-A11
cgtacggntttattttatttataattattatatgaataaaagagatttaacgtcaataaaacgcgaggggttaattataagggat

SEQ ID NO: 16098 - DNA, 85 bp, Gossypium hirsutum
  Clone ID: LIB3145-032-Q1-K1-A2
cccacgcgtccgggattttgaacttcgaaccctggtcagatcactccggtcattaatgtactgagaatgaatgtttgtccaatga

SEQ ID NO: 16099 - DNA, 288 bp, Gossypium hirsutum
  Clone ID: LIB3145-032-Q1-K1-A4
ggaatcccgggcgaccacgcgtccgctagattgaaggtcacattatttcaactttacgaataggtgacaaattccccatctcagtgctgtttgctgaaaatagttcctgaaagatcaaggcaacctcatgcaggtgttaagaatatcatatatatgtatcattgatggggatggttataattttactgatggctctgttagttttagctcactttgcatctgaccctttgagatttagcttcagaattcttcaaagcattaataaaaagattggataatttaattttt

SEQ ID NO: 16100 - DNA, 308 bp, Gossypium hirsutum
  Clone ID: LIB3145-032-Q1-K1-A6
gggaaacggaggaattagtgcttcgtactgggagtgttggtgctgggtgctctcgactactctctgacatgcaagctttcaaggctgcaaatcctggctgtgttttagaagattttgttagatggcactctcctcctgattggattgaagatgagccaagcgataaggttccgggtgctagaagtcaactaagtagtagaatgcaaaaaggaagtaatttgtggcgtgaactatgggagacatccaaacccgtaccggctattaaacaaacacccctctatgatgaggattttgcaatggatggaata

SEQ ID NO: 16101 - DNA, 151 bp, Gossypium hirsutum
  Clone ID: LIB3145-032-Q1-K1-A7
gttaaaagccgtccaaaacccaaaccaggataggcaaacgaaaagaaaaaatggctgtgaattttaatgccatcgcctcgaaatctcagaagctcccttgctttgctcttccaccaaaggccacccttagatctcccaagtttccatgatc

SEQ ID NO: 16102 - DNA, 375 bp, Gossypium hirsutum
  Clone ID: LIB3145-032-Q1-K1-A8
acccacgcgtccgcccacgcgtccggaaaatggatatgattcttttgcagctatacacactggtgagtgggtgggtggcgctcaaaatgcctatgaaactggatacggtaagattgatgtagcagatgaggctcaagttgagggttctttcttggataatgaacacaaagacaatatcttcaagggtagcgaagaaagtaaactggattctacatattcagagaaagttgatatggctctgaaaaatgcttcgttaattgacggagaaacttcaatctttctggaagttgatgcagtcaatgaagaaaagatctctcttgcagataatcctactgcatacgaggatgttgctgttgcaaatgacacaaaattttt

SEQ ID NO: 16103 - DNA, 221 bp, Gossypium hirsutum
  Clone ID: LIB3145-032-Q1-K1-B10
gaaagacagtgttggcagagaagatgtaagctatctgagaatgaatagaaattaagggcatgggtaatgtgctttgtattgtatgtttcactttaatttgattccttgagtattttagagaagttattatggtttgtgttagtttcattatctatcattgtaaagttgatgaaacagcctgtagcattgattatagtataccatgttgtaccattacctgt

SEQ ID NO: 16104 - DNA, 374 bp, Gossypium hirsutum
  Clone ID: LIB3145-032-Q1-K1-B11
cttcaccaacaagaacaaaaaaaacaggtgataccccgttttcttttggtctcaaagcgagggaaaagggcaagattcttggttttagggtttgggttttcattgatttttagtgaaaaaattataaaaaaattatgggaagaggtagggttgaacttaagaggattgaaaacaagatcaacaggcaagtcacttttgcaaagagaagaaatggtcttttgaagaaagcttatgagctttccgttctttgtgatgctgaaagtgcttttatcatcttctccaatagaggaaagttgtacgaattttgcagcatctaaagcatgatcaaaacatttggagagggtcccaaaaaatgcaacttttgggacttcctg

SEQ ID NO: 16105 - DNA, 287 bp, Gossypium hirsutum
  Clone ID: LIB3145-032-Q1-K1-B12
cgggggcgaccgacgcgtacggttctttcactttatgccagtggtcttactacaggtattgtcttggactctggtggcggtgtgtgccatactgtgccaatttatgaaggctatgccctcccccatgctattcttcgtttggaccttgctggacgcgatcttacagattccttgatgaagatcttgactgagagagggttctctttcacaacaactgcggagcgagaaaatgttcgtgatatgaaagaaaaacttgcttacgttgcttctgattttgagcaagaatt

SEQ ID NO: 16106 - DNA, 292 bp, Gossypium hirsutum
  Clone ID: LIB3145-032-Q1-K1-B6
cacaattttactgtaaatacacaattaaacatgccaatgtagtctcaatttcacaatcatcagcattgtcatcatgattaaatactacaattagatgctgatattcagatttcatattcatccaggatagctccaatgggcatgatatttattccatgttacaaaggatatagtcataagccagaagaatatgcgtcacctcaggatttagaaaatggggtgaaggtattagcgctaaccttggccaagttgtctttgcgttgatgtgttgttgtatattgtagattttatt

SEQ ID NO: 16107 - DNA, 383 bp, Gossypium hirsutum
  unsure (1)..(383): unsure at all n locations; Clone ID: LIB3145-032-Q1-K1-B7
cagccttgctatcttgaaggctgatctgaaaagccaaagaaagcaagtaagaaatttaaagaaaaagtcactttggtccagaagtttggaagaggtcatggagaaacttgttgatattgtccattacttaatcttggagatccattgtgcctttggtagtaatgaccacaggtaaaaagaaaacaagcactaagcgttagagagatacaaacatgcatgtgcatgtttacatacacatgcatgtgtgagcatgcttgcctgctattgtacgaggataaataagtatgcatgggaaatgtgtcttatcctaatngacttatagaaatggtgcctttttctaatagtttagtaatacaacnaacatcaatttcataaaataatga

SEQ ID NO: 16108 - DNA, 330 bp, Gossypium hirsutum
  Clone ID: LIB3145-032-Q1-K1-B8
cccacgcgtccgttttgggcatggtacttgttaccatgatctttgctgtttttggatttcggtccccttcaaaccgaggtggtctgatgacagctatgcttttactttgggtcttcatgggcaattttgcgggctatgcttctgcccgtctgtacaaaatgtttaaaggagcagaatggaagaaattagcttttaggactgcgtgcatgttcccaggcattgcctttgccatcttttttgtcttaaatgcaattatatggggccagaagtcttctggggccgtgccttttgggacaatgtttgctctggtcctcatgtggttcggaattt

SEQ ID NO: 16109 - DNA, 370 bp, Gossypium hirsutum
  Clone ID: LIB3145-032-Q1-K1-B9
gccgaaaatggtagtaccgatcccgaagatccggctaagtctccacctagctcccccaattcctccactcgcaaggcatgttgttttgttctccagagttggttctcgaagaagttcatgactggatgcgtggtcctttttcctgttgcagttacatttttcattacttggtggtttattcagtttgttgatggtttcttcagtccattatacgagcgacttggcgttgacatatttggactgggatttatcacatccctgctctttgtcttctttgttggtgtttttgtttcatcatggatgggagctgctgttttctcagtgggagaatgggtcataaagcaaatgcccttttgtaggcatatatact

SEQ ID NO: 16110 - DNA, 355 bp, Gossypium hirsutum
  Clone ID: LIB3145-032-Q1-K1-C11
ccgggccgacccacgcgttcgctggctctgaacccaaaactgaaacagagatcgctgatcttgaagccatttcggcgcgcagggaattaactgctctcgaactcaacgagaaaggcaacgagcttgtgaaaaagggtaaaaagcattacccagaagccatccactgttacagtagagccatcgatcaaaaagctctaaatgaccatgacacctccgttttattctcaaacagagctcatgtgaatttactccttgggaaatatcgccgtgcgctctccgattctcaagatgccattaagcttttccctgctaacgttaaagcgtattatcgagctgtcaaagcgtgtttatcatt

SEQ ID NO: 16111 - DNA, 340 bp, Gossypium hirsutum
  unsure (1)..(340): unsure at all n locations; Clone ID: LIB3145-032-Q1-K1-C3
tgcaactccaattttaattggttctcagttggagtttcacatacaccatgcaaaggaggctgcaagagttgcaaggatatcatctttacttgattcaaagactgggaaagttgcgaagaaagcaccccgctgcattcttgctaagcagagtgcagttgttgaggtgattttgcaggaagcgatttgcgtggaagagttttcgaaatgcaaagtccttggaagggtgtttcttaagacattangaagaacggttgctgtgggcatcgtgacccgaatagtggaggagcagtaatagttgccaaagtgtggtcaaagactcatacacacttaanacacatac

SEQ ID NO: 16112 - DNA, 383 bp, Gossypium hirsutum
  unsure (1)..(383): unsure at all n locations; Clone ID: LIB3145-032-Q1-K1-C7
cccacgcgtccgaaaagctcttactttctatattaatgtcattgacaaattgcaacagtgggagaagaaaaattgccagttccggatatctaaagaacatagaaaagctcgctgaagctgaagtttatgatgccaaaaaacttgtcaggaagttgtctaccaacagatttcgtagtattctaagtggattttggcattcttgaatgtaatatttttgtttttgtttttgcttactgtatatctctgcataagcgttatgcaagtctcattaacttgtttttacaaatcttttaatgtcactgtatcctaaatccttctccttcgtaaaaagaaaaagaaaaagaaancgaaaacagcttttgacagcttttgtttacttgaat

SEQ ID NO: 16113 - DNA, 347 bp, Gossypium hirsutum
  Clone ID: LIB3145-032-Q1-K1-C8
ctaaaagtgagtggagtccgattgttttgatctatacatcaggcaccacatcatccggcaggggagtggttcatagtcacagaggaattttcaccatgaccgttgattctttaatcgattgggaggttccaaaacaaccagtttatttatggacactccccatgtttcacgctaatgggtggagtttcacttggggcatggctgccgtcggcggcaccaatgtttgtgttcgcaaattcgatgcctccaccgtatatagtttaattaaaaaacatggtgtcactcacatgtgtggagcgcctgttgtgcttaacattgtatccaattcccctgaaattaaaccactc

SEQ ID NO: 16114 - DNA, 378 bp, Gossypium hirsutum
  Clone ID: LIB3145-032-Q1-K1-C9
caaatctcaataagtagcgtaggttataatctaagttcaagattcgaagatgtcgggaggaggaaagggaggcaagggactgggcaagggaggagcaaagcgccatcgtaaggttctccgtgataatatccagggtatcacaaagccggcaattcggcgtttggctcgtagaggaggcgtcaagcgtatcagcggtctaatctacgaggaaacccgtggggttttgaagatcttcttggagaacgtgattcgtgatgcagtaacctacaccgaacatgcgaggaggaagactgtgactgctatggatgtggtttatgcactgaaaaaggaagggcatgacattgtattgggtttggtggttagatgatttatgggatt

SEQ ID NO: 16115 - DNA, 148 bp, Gossypium hirsutum
  Clone ID: LIB3145-032-Q1-K1-D1
ttcaagccgtccgccaagccttccggaattccttacttaacctttcttcttcaattttaaagcttgccaaaaccgccttcctggttaaacactggtggccggttttggaaggaaaccatcttgtggggatttgccggtttttcctgga

SEQ ID NO: 16116 - DNA, 331 bp, Gossypium hirsutum
  unsure (1)..(331): unsure at all n locations; Clone ID: LIB3145-032-Q1-K1-D10
aattcgtggagaaatcgagcttaggcatgttgattntgcatatccttcacgacctgatggcatagtgtttaaagaccttaaccttcaaatccgggctggtcaaagccaaccactggtgggacctaggggttttgccaaaagttcagtcttggcttggttcgaccgcttttttgatcttccagttggaaaggtattaaccatggaaaaaaaattccgagaatggaccttaagtctcttatgcttaaaattggattggtacaacaagagccagccctttttgctgctagcattttcgataatattgcttatgggaaaagaggagcaactgaag

SEQ ID NO: 16117 - DNA, 360 bp, Gossypium hirsutum
  Clone ID: LIB3145-032-Q1-K1-D2
cccacgcgtccgaggcgaaccaaggagccaaaaaatccgcagttcagcaaccaaggagcactcattcgacaagtccgccatgggtaaggttcatggatctttagctcgtgccggtaaggtaagaggccaaacacctaaagtggctaagcaagacaagaagaagaagccccgtggccgcgcttacaagaggatgcaatacaaccgtcgtttcgtcactgcagtggtgggattcggcaaaaagaggggacctaactcatccgagaagtagagctatgcaattgaaaaaaggtcttgtttgaagctttatgggttagtctgtgtttccccccctttttttgaatgttatgatactattttatc

SEQ ID NO: 16118 - DNA, 280 bp, Gossypium hirsutum
  Clone ID: LIB3145-032-Q1-K1-D7
tttttttccagatttactagccttcttatgcactccagcgttcctgtctccccaaatgacgcataaaacatagcaaaaaagcctacactgagatggcgacctctgcgaaaatacccaggctaggtaaagttgaagtttggtacagcatctgagtcaatcctaacctcagcttaatttctggtgaagaatctatcttttggaaatgtggcatgtattaggttttgttttagtcacttaaatatatttatgttttgggtgtaagtaatttgtaatttttaag

SEQ ID NO: 16119 - DNA, 291 bp, Gossypium hirsutum
  Clone ID: LIB3145-032-Q1-K1-D8
gtggaaactgcggttgcggctccggttgcaagtgcggcagcggctgcggcggttgcgagaggtaccctgagatgaactttgctgagcaaaccacaaccgggacacttgttcttggcgtggcaccccggaaagtgcactttgatggagctgaaatggaaactggggctgaaaatggctgcaaatgtggagataactgcacttgcaacccttgcaattgtaaatgagaaaaaaaagctaagcatattatggaagctgatctaaataatatatgatgtatttgggtttttacta

SEQ ID NO: 16120 - DNA, 136 bp, Gossypium hirsutum
  Clone ID: LIB3145-032-Q1-K1-D9
aaaaaaaaaaaaaaaaaaaaaaaaaaaaaaaaaaaaaaaaaaaaaaaaaaaaaaagggggggggaaaaaaaaaggggagggaaagaaaaaaaaaaaaggaggaaaaaagagaaaaaagggagagggggggggagag

SEQ ID NO: 16121 - DNA, 374 bp, Gossypium hirsutum
  Clone ID: LIB3145-032-Q1-K1-E10
acgcgtaccgatcattgaactcgagtctccaattatcttatgctttaaagaatcgtttacaacggtatggaaacgcgacaggtttgttttagcacaatgcccaactcaaatattatgctttttgttgttacagcataagacttatataatcgatagtataatttcagttattcgactattgcttttaaatttgactaagcaagccaatgcttgctcaaattcactttctttcaaggcaatggtgaagcaacggccaactgataatgatcgatacgttaagaactgtcggaatgggagatctctcaaggagacgagatggtggtttcatgatgataaagtgtaatattttagaactggtatttatctcttataac

SEQ ID NO: 16122 - DNA, 331 bp, Gossypium hirsutum
  Clone ID: LIB3145-032-Q1-K1-E11
aattatggaggttatggatctttatcatctattggctttgagacttttcttaacgggaacggcactattgatctccaatcaactactctgatgtgctacttgaaagtgctttataacgtattttctacatttatcagacactacacgattgtgaaaatgttctgagccagcatgacaaagggcttcaggagtccattccgcctgagactttgaatgtcatcaacaagtttcataatgacttttcgacttccatgtctgatgatctccatactccagttgttttggcaacattatctgacccattgaaaaccatcaatgatctactacatac

SEQ ID NO: 16123 - DNA, 277 bp, Gossypium hirsutum
  Clone ID: LIB3145-032-Q1-K1-E2
atctatagggccctgtagtgggactttcgggtcactcaaaaatgtgaagggcttattttaaagtagcccatttatcattttgggtttttagttttattatggggtaggtgtcctaattaagttacctttttaaaaaaaaaaaaaaaagtttaaaggtcacttttccttctggtgtttgttaaaacaagaagagatggcaaaggtgggacttttaccacccgccagcagtgttaacctaataaggcctttggtttttttttcttcttcgtttgggatg

SEQ ID NO: 16124 - DNA, 135 bp, Gossypium hirsutum
  Clone ID: LIB3145-032-Q1-K1-E6
gcgtccggtgaaatttgaaagaaagaaaaaagcttaattaccacccaatccgaacccatggcgtcgcttcaggtcgcccatgctgatcatcctcctccaggccatgctcttcctcctgggccaggcccccatgcc

SEQ ID NO: 16125 - DNA, 322 bp, Gossypium hirsutum
  Clone ID: LIB3145-032-Q1-K1-E7
cccacgcgtccgcccacgcgtccgaatttctgggaggaattgtatctctctctctctctctctcctctcagctggacgagaaagaggaaatttcggttggtataaaaatgcaggtgtttgatagaatgactattccaattcgcagagtttggaccggtgtcgccacccgcttcggcgttcgtaaaagtgctcatatgaagcttcgaaaagatataagcacttgcgaatacgaggatgtgcgagtgatgtgggaaatgctgagcagaaacgaagcagaaaccattcgatccccaacaacaagtaaagggaagatgcagaaaga

SEQ ID NO: 16126 - DNA, 343 bp, Gossypium hirsutum
  unsure (1)..(343): unsure at all n locations; Clone ID: LIB3145-032-Q1-K1-E8
cccacgcgtccgcaaaactgcaaatgagggtatcattgttattgaagcttacaggacgcttcgagacagaggtccataccctcctgaccaggttgtaagagatatccaagggaagtttgctttcattatctacgacagctcttcaaaagctacgtttatagctgcggatgctgatggaagtgtacctttcttttggggtactgatgctgaaggccatcttgtccttgcagatgacagggagactgtcaagaaaggctgcgggaagtcttttgctccattcccgaaagggtgcttcttcacatcctcgggagggttaaggagctatgagcatncccttaacgag

SEQ ID NO: 16127 - DNA, 318 bp, Gossypium hirsutum
  Clone ID: LIB3145-032-Q1-K1-E9
gtagggttgaacttaagaggattgaaaacatgatcaacaggcaagtcacttttgcagagaggggaaatggtcttttgaagaaagcttatgagctttctgttctttgtgatgctgaagttgctctcatcatcttctccaatagaggaaagttgtacgaattttgcagcagctcaagcatgatcaaaacattggagaggtaccaaaaatgcaactatggagctcctgagccaaatgtgtcatctatggaggctgctttggaattaagcagtcgacaggaatatttgaagcttaaagcacgttacgatgccttacaaaggt

SEQ ID NO: 16128 - DNA, 152 bp, Gossypium hirsutum
  Clone ID: LIB3145-032-Q1-K1-F1
cgtgtacccataggaagcctgaaagtggctgtgacatacgtaagggtgcttcgagtcctctgtaaaaccccaaggcccaagagttcatacttggggagctcgcaaagactggccaaaagaaaaagcttgaagggtttgaaatcataaaagct

SEQ ID NO: 16129 - DNA, 125 bp, Gossypium hirsutum
  Clone ID: LIB3145-032-Q1-K1-F10
atccttatattctctaatttttatatctttctctttatcttttctaacaacataaaattgattactaaaaaaaatccattaaatttaacttcttcattaactaaacacaatttttgtaacgaaat

SEQ ID NO: 16130 - DNA, 225 bp, Gossypium hirsutum
  Clone ID: LIB3145-032-Q1-K1-F11
acgcataagtcttcacagctttaaaagattaactaacatcactcaacccaccattttgggctgggttaattccagcgacagcgtcctaatttatttcaaccttacacactaattaactaattatttcaaccattcttgtagtatacaaacaaaaccaaatcatgttttattttatggattttctggattatatacttcgtcaaatgctaaatgtaccaacacaat

SEQ ID NO: 16131 - DNA, 320 bp, Gossypium hirsutum
  Clone ID: LIB3145-032-Q1-K1-F2
gttgtgatggggaacataggcaaaataaagaggacagcaaaggaattggattttgcaataggaagctgggtaaacgagcatcgcgaacggaggctcgacaaaggcatcgaagggaaccaagatttcattgatgccatgttgtctatcatggatgaaaacaatgtaccaattcaagaggctgatgttaccattaaagctaattgcctgactcttgccttgggtggcatcgatacaaacgtgtccacactttcatgggcgatcttcttgctattgaataaccgccatgttctaaagacgctcaagagaacttgacattcatg

SEQ ID NO: 16132 - DNA, 300 bp, Gossypium hirsutum
  Clone ID: LIB3145-032-Q1-K1-F3
cccacgcgtccgcccacgcgtccgcccacgcgttcggtgccattggccatgttatcacctggtgccccttgctttcccctcgaatatatatatttttgcttgaaccgtgctttgctagcgcttctgctctatagtgagcatagatgaaaaggattttcaagtatttaaagatgttctatgttttttatttacttaaagcttgcccaaagtagttttagtgacattgcagattgcataagccggaaatggaagtcatgactggtttgaatattatattaaatgatttgatgcaagttttag

SEQ ID NO: 16133 - DNA, 275 bp, Gossypium hirsutum
  Clone ID: LIB3145-032-Q1-K1-F4
attttgagtgtggcaaatttgcatgtttatgaaaatatggagaaattgatgtcgaaagcagagctttgcaaagaaatgagcacatcttccaccgtgcagcccagcgattgtggaaacggcgaggctccgatcaattattagctattgttttagtcttcttcccttcgctggctattttcttattctttcccctaaattgtcatctgtattttacccgttccaatgaacatgcaaatatcatatggagaaaggattaggttatgctttttctgatg

SEQ ID NO: 16134 - DNA, 364 bp, Gossypium hirsutum
  Clone ID: LIB3145-032-Q1-K1-F7
cccacgcgtccggatgaccggcggaggagtggatcgcagtgtggagtgtacagggagcgtgcaagccatgatttccgcttttgaatgcgtccatgatggttggggtgtttgtgtgctggtgggtgtgccaaagaaagacgatgcattcaaaactcatccaatgaatctactaagtgagaggacccttaagggtgctttttatggcaactataaaccacgcactgatattcccatggttgtcgacaaatatttgaacaaggagctggggctggatatggacaagttcatcacacactctgtgccttttgccgatattaacaaagcattcgactacatgctctcaggtataggtctgaaatgcatg

SEQ ID NO: 16135 - DNA, 371 bp, Gossypium hirsutum
  Clone ID: LIB3145-032-Q1-K1-F8
cccacgcgtccggattgatctcatggatgattttcttgagatggagcaacttgctgcattacctgataccaagaatgaaaatcaatgtcttgaatcaaaagctactgtcaaacaatccaatgatggtgatagctctttgaaggctgagcttgaagccatgattcatcgaacaacagaacttgaagaaaagttggagaagatagaagccgagaaagctgaactagaaattgctcttgccaaaagtcaagaaagtctagaagcatcggaactagagttgagggacagtgaattaaaattggaggagttgcaaagagagctcatcaagggcaatgaagcatagcaaccatctcgagttttaacttcagtttcat

SEQ ID NO: 16136 - DNA, 331 bp, Gossypium hirsutum
  Clone ID: LIB3145-032-Q1-K1-F9
cccacgcgtccgcagcaatttaagtaggtatagctgtagcaacaaacctcacatgtgaaaggatgtgaggtgggcagccatccgccacattaagatgcaggaaggggtcttggggttgcggcatttcaatcttttgaagaagcttggatgtggagatattgggacggtatatcttgctgagcttattggtacaaactgcttgtttgctataaaagtcatggacaacgaatttttggcaagaaggaagaaattgccaagggcccagacagagaaagatatattacggatgcttgatcacccttttcttcctactttatataccccaattcac

SEQ ID NO: 16137 - DNA, 330 bp, Gossypium hirsutum
  Clone ID: LIB3145-032-Q1-K1-G1
ctcaaatttcaacgaagaaacaaaataaaggaaaaaggaagggaaaacccacatagcccccaaccatcgtcccttttcctctactttcaatactttgttggaaagaggctcatgacttgtcgcctacccttccccgactcgctattactcaagtaaaagggagagtaaaagggagagatgtatatggtgccgccaccccagcgatcggatccgggttccatcggcggcgggtcgggtgatttacgggtttaccaagcttggaaaggcagcaatatatttttatttcaagggaagtttatatttggaccggatgtaagatcattaaggctg

SEQ ID NO: 16138 - DNA, 252 bp, Gossypium hirsutum
  Clone ID: LIB3145-032-Q1-K1-G10
ggggcgacccacgcgttcgaaagaattcccttaatatatcatatcttaatgctgcgttgggtgatttgccatccgcgagggcacttatgggcgggggacattattatcttgattacatatgatgcacttatgtgcaaatcgatcgtgtatcccacttgcattctgatgtgttcaacgggtgaaatttctagtgaaatggaagaaaacttttcatgcatgcgacctttttgtaattgttgtgaaatggacact

SEQ ID NO: 16139 - DNA, 343 bp, Gossypium hirsutum
  Clone ID: LIB3145-032-Q1-K1-G12
aaataatctaccacctataggaagcttatttaaggcgaaggtggttataaataggggtgtgcgcacattccgaatgcggattctcattgctgcggtgaacgttcctctatacatgatgttgttgttcaaagattggattgacaaataatcgtatcaaacatggtgatattttgcaaaactgagtttctcctttatacaggtaggcatattaggctagtagtaaagcttcaatttgaattgcaagttgatcttttgttatttctctaatattctaactaatagctagaagcgagtcctcttttttgcattatgcggtttataatttaaagccttgagaatggtg

SEQ ID NO: 16140 - DNA, 315 bp, Gossypium hirsutum
  Clone ID: LIB3145-032-Q1-K1-G2
tctatatgttgccaatgttggagactcaaggactataatatccaaggctggaaaagcaattgcactatctgaagaccataaaccaaatagaagcgatgaacggaagagaatcgaaagtgctggaggggttgttatgtgggcaggaacttggagggtaggaagtgtgttagctatgtctcgagctttcggtaatcgcatgttgaaacaatttgttgttgcagaaccagagattcaggacagagagataaatgaagagtttgagtttcttgtgcttgctagtgatggattatgggatgtagtgcctaatgaagatgc

SEQ ID NO: 16141 - DNA, 218 bp, Gossypium hirsutum
  unsure (1)..(218): unsure at all n locations; Clone ID: LIB3145-032-Q1-K1-G4
cccacgcgttcgcggacctgcaggcccaaataactctcagtttaactggatcacagctcaatgcaactgcatctggtacaaccacactnctggggaagttcaagccaaggaactgaagcgaccaatcaactttttcggaaaaagaaagatacaagatctagtttcacaggtttgattcgcaaggaaaagctggaaaccaagaagttgaaagatcttac

SEQ ID NO: 16142 - DNA, 253 bp, Gossypium hirsutum
  unsure (1)..(253): unsure at all n locations; Clone ID: LIB3145-032-Q1-K1-G5
cccacgcgtncggcttgtttgggcttcgtaggctacctgggtacgtggcaacttgcacagattctaatttttctttttctgggaataagtagatcgttttacattaatcaattatggttgcccctgggtagttttaccttaatggatttgtttatttgtaagccattgcttgaaatcagtttttgagctagttttcttattttcaagtcagcaacatggatctttgagaaaaaaaaagaaagctaagatcaat

SEQ ID NO: 16143 - DNA, 80 bp, Gossypium hirsutum
  Clone ID: LIB3145-032-Q1-K1-G6
atttctctacgaaaaattactttaaatttcctcattaaatcaaaacaagatttttgtcaaaatcttcgaagatcatcaac

SEQ ID NO: 16144 - DNA, 335 bp, Gossypium hirsutum
  Clone ID: LIB3145-032-Q1-K1-G7
tggagaacggtttcttcttcactgctgcggaattttctttctccttttccacctcagaaacaaaatatccgcagtagcgtttaagaagttttctctttaagcttatattattaaaaaaaaaacaaaaaaaaaagagagaagaaaaatggctcgctgtttctcgaacgtgagggttttctctacattcgttgtcgatggaatctctaacgcaatctcaagacggggatacgctgcaacatcacaaggagtagcgtcgaacggagtaaaggaagcagcaagaaacgctgcggagttgaagaaaacaggggaagacatggcaacagcaactaaagaca

SEQ ID NO: 16145 - DNA, 331 bp, Gossypium hirsutum
  Clone ID: LIB3145-032-Q1-K1-G8
tttttctttttttaaaaacataaacagaggggaaaagggagaagtttgtctgctagggttggcaaccctagccttcatggcgccattgactgccatggaaccaccgcgaacggtgctcggatccggttctcaaaaccaggtgcgatgcgcaaggcatggcgctcgtggaggagcggcgcacgtggaggcgcaaattgctcggagggaggcttctggccccgagtcgtgcggcggttggggttgcttggctacgacgctaggagttgtgctgaaggttctagggttttttagtgttgggctggtttgtttattgtttgggtaattgggcttg

SEQ ID NO: 16146 - DNA, 325 bp, Gossypium hirsutum
  Clone ID: LIB3145-032-Q1-K1-G9
ctcatgtatacacaattagagaattatcgaatcagcatacaaaggctttagaacatggagagcaagccgaatcccgaattgtggaagcagaagcacgtttacatgaagctattgagaaatacaccaagaaagaatcagaagccaatgacctgattgaaaagttgaatgtgcttgaaaaccaaattaaaacttatgaagaacaaactcacgaagcttccgaaattgctgtatctcgagaagttgaggcggaagagactcttgtaaaactaaagcagctggaaagccttgttgaggagctgcaaaccaagtcatctcactttgaaag

SEQ ID NO: 16147 - DNA, 328 bp, Gossypium hirsutum
  unsure (1)..(328): unsure at all n locations; Clone ID: LIB3145-032-Q1-K1-H10
ggggggacccacgcgtccgttntacctgtgctttctttctgctttctctctctttataacctnagtttctggcggatgagccgttgtctttgcagatccacccgaaaaaaatcccaacttctgtgcaacttagttagtaatgttaattaggacaaaatgatgggatgttcttggtttttcccgtctgatctatatttctgagcataagacctcctttgggggattagatgggggagaatattgatttcagacgctcggatgaattgatactcgatgcctttaggatgattttcaagaatctttcgctccaggaaatacttactgttgt

SEQ ID NO: 16148 - DNA, 302 bp, Gossypium hirsutum
  Clone ID: LIB3145-032-Q1-K1-H2
acggatatggctcacattagtggccttgttgctgctcatgaggcaaacaatccttttgagttcggcgacattgtcacaaccaccacccacaagagcttgaggggtcctagggctggtatgattttctaccgcaagggaccaaagccaccaaagaagggccaacctgaagatgcagtgtatgactttgaagacaagatcaactttgcagttttcccttcccttcagggtggtccttacaatcaccaaattggtgcccttgctgttgccttgaaacaatccatgacacctgggttcaaggcata

SEQ ID NO: 16149 - DNA, 389 bp, Gossypium hirsutum
  unsure (1)..(389): unsure at all n locations; Clone ID: LIB3145-032-Q1-K1-H4
ggcgaccacgcgtncgggaccatccatgctcatggtgaggagactgtcaaaataccagttactttgatatatgatgatatgaaaagtacatatgatgacattaagcctggcagcatcattccatataggctgaaagttgatctcattgttgatgttcctgtttttgggaggttaactttacctcttgagaaaactggagagatccctataccttacaagccggatatcgatatggagaagatacactntgagagattctcttggaggaaactatagcagttcttcatttgaaattggagaatatgaatgactttgacttgggactcaatgcccttgactatgaagtctggctatctgaggtcagcattggatctgcagaacttgaaaaa

SEQ ID NO: 16150 - DNA, 347 bp, Gossypium hirsutum
  Clone ID: LIB3145-032-Q1-K1-H5
tccatatgaagccttatatggtcagttgccacctacacacatgctctatctagcaggaacgtcttcagtagcagtggtcgatagaagtttacaaactcgagaggcgacgagaaaacaattgcagttctatctaaagagagttcagacacgcatgaagcttttcgctgacaaatatcgttcggagagaactttccaaataggggatttagttcatttgaggttgcagtagacagttagaagaattcttatcagaaactatcttcaaaattctatgggccttttcctgtgatcaagaaggtgggagaggtggcatacactctttagttacagccgggatctcatattca

SEQ ID NO: 16151 - DNA, 334 bp, Gossypium hirsutum
  Clone ID: LIB3145-032-Q1-K1-H6
ccacgcgttcgcccactctttcgtgaagtaatggggtcaataatttaggtgggcgtggtatggataattcagaacttgtgaacacttaaattgtgttcaaactccaaattgcatccggcagaccgtttttgatgccgtagcacataattaccaaccagttaccgttattgtcgatgccacagctgctgcaacagccgacatacatgatgccaatatctatgacatgagaaatattggagttgcaacaccaacacttgaggagtggtattgaactcaagctttgatgaatcaaatgattgaactggtatgtattctttgggaggccttacttttt

SEQ ID NO: 16152 - DNA, 220 bp, Gossypium hirsutum
  Clone ID: LIB3145-032-Q1-K1-H7
tgccacaacccttttccctatatgatgtgatagtcaaatacggacaaagaaaaatatgttaatattctgttacttggtaagaatcaatgactgaccctacttagttttaggtcggaattgccggtaagatacatgcttttatagaaaaccggtactttgtcgaaaaactcatatatggacctcatcctatatagaattaaagactgatcattgattgttt

SEQ ID NO: 16153 - DNA, 189 bp, Gossypium hirsutum
  unsure (1)..(189): unsure at all n locations; Clone ID: LIB3145-032-Q1-K1-H8
tcggccagtttttagtgttttgttttttttccaaataaaatgggttttagtgactactgggttggagtattagtgataataaatgtttttcttcatttggtatatgtcaatggatgatatgaatatcaatgaattaggtgtttgtaagtnttcataactaaatcataatcttaaaaaatctaaataatt

SEQ ID NO: 16154 - DNA, 310 bp, Gossypium hirsutum
  Clone ID: LIB3145-032-Q1-K1-H9
agaaatgcctctacatcatttcatattttccttcctaacactcgcattctgcgccacttctgcagtggccgccgccgccgcttcaaaggagcaaactttaaacacccaagatgctgaattctttaacccaaagcttcccccacgaaccctttcatcctccaaaaggttcgaaggctcgtcgaatcttgtcgaccttcgttaccatatgggtccggtcctttcttcttcgccgataaacatttacctcatttggtacggtcgttggtccctttcccaaaaactcctcatcaaagactttattacctctata

SEQ ID NO: 16155 - DNA, 415 bp, Gossypium hirsutum
  Clone ID: LIB3145-033-Q1-K1-A1
acccacgcggacgtcgctttggtttagtattaaagtactgattccatggcatcagggaagttagtagttctgatggggatggtcgcattaatggttgaggactcaatgcctatgacctcttgtgacatgaatgacgagggacttgaggcgtgcaagccatcagtcagacatctgaaccctttcgacccatcgcccgagtgtagcaaggctctgaaaggggctgacttgccctgcctgtgttcttataagaattcaacgtggctacgtagtttggggattgatccaaaacttgcgtttgatttgcctcctatgtgctagctccaaattcacatattatgtcatttataacaaaatgccatttgtgacatatactgaaaccttaatgatatcaactcatttgttgcatcaaattttt

SEQ ID NO: 16156 - DNA, 337 bp, Gossypium hirsutum
  Clone ID: LIB3145-033-Q1-K1-A11
tcccggcgtccgcccacgcgttcgatcctcgtccccctcctctccattcaccttagcactctcttatcttggagtcgtgtcggtcttagcatgtgtgaattggtcctcttcccactaccatcttcttctttctagttgatattgtgtatcaacaattatttatttgtatttataaattttattttatttttaaatggtagaattcatagttagagatccaaattacggaaagtgtataaataggtaggtaggtaaggtacctgaaagctaaagtcctcctactttacttatcttatacccatgatcatatgcactttccttttttaagttataaaac

SEQ ID NO: 16157 - DNA, 282 bp, Gossypium hirsutum
  Clone ID: LIB3145-033-Q1-K1-A12
tccactcgttcgtctgcctaatactctgtcttaatctctccctttcatgcgccgctgcaggtttgacagatgcgatcctgcacgcctagccgaatttcatcccgcaatcccttcttcacttggattgggaggaagataggaggatagatccaccggttgcgctcacgggaaggcgcctctgtcaccgtttttttgaaaactaatttgaaaacaaacctcatgaatgacccaaactgggcacttaacgctgcatagaatacttaaaggattccatgaacaaag

SEQ ID NO: 16158 - DNA, 198 bp, Gossypium hirsutum
  Clone ID: LIB3145-033-Q1-K1-A2
cccacgcgtccgcttttatattgccaagctcttctggggttttcctgcttgttcctctcttaatggcgttctatattgaggatgggttgtactaagaaaactctggctttccttttgatgctggcttttgtgggagtctctcttggtgccgttcacataatgggcgattccacccgctggactagtcttgggaatatt

SEQ ID NO: 16159 - DNA, 227 bp, Gossypium hirsutum
  Clone ID: LIB3145-033-Q1-K1-A6
tgaggatttattaattactttgcgtttatatggaaataaaggaggagttgaaaaggagaggtttataattttctctttcatttccccaatcttatataacccccctggccagtgtccgctctcttcttatcacaaaacatataacatgatcagaataagaaaaacgctgcttgcatgtatgtcatcatccgataagccagaattagttgaaagggatgttaatgaca

SEQ ID NO: 16160 - DNA, 401 bp, Gossypium hirsutum
  Clone ID: LIB3145-033-Q1-K1-A8
cccacgcgtccgggaaaggaagttggctgtatatatggctctgtgactgatgatatattgacaggattcaagatgcactgtcatggctggcgatctgtgtactgcatacctaaaagacctgcttttaagggttcagctcctattaacctctcagatcgtctgcaccaagttctacgttgggctcttggatctgttgaaattttcttgagcaggcattgtcccatttggtacggatacgggggtggattgaaatggttggaacggttttcctacataaactcagtcgtatatccatggacctccattcccttgcttgtttactgtacccttccagctttatgacttcttaccgggaagtttattgttcctgagatttacaactatgccagtctagtattcat

SEQ ID NO: 16161 - DNA, 287 bp, Gossypium hirsutum
  unsure (1)..(287): unsure at all n locations; Clone ID: LIB3145-033-Q1-K1-A9
aattnggggggcgacggacgcgttcgttcatatacctttaatcattcaccattcattccatactcacttcaccttctatgggcgtggccattattaactcaaacatatcccattctatcttccctatattggaaacttgattgtagcattcaattatatttgttaaacaatctcatgtagtcattctttcttcttgtttcattaacaccctctacctcataactctaattccaacctcatttcaactatttataactcaaacattctttattatgataatttacctt

SEQ ID NO: 16162 - DNA, 366 bp, Gossypium hirsutum
  Clone ID: LIB3145-033-Q1-K1-B10
gacccaggcgtccgactatttcagcaaatggagaacgtgaaattggagaattgatagcaagagcaatgtataaagttgggaaggaaggggtcattactgtcactgataggaatactttagacaatgagttataagtggtggaaggaatgaaactaggcagaagttatttctctccctattttgttaccgatcaaaagacccagtaatgtgaacttgagaattccttgattctcattcatgacaagaaaatttcaaatattaactcacttgtgaggatatttggagttggctataaataaaaacagaccacttcttttttgttgctgaagattttgaagaagtgattgcgccttaaattacttaatt

SEQ ID NO: 16163 - DNA, 393 bp, Gossypium hirsutum
  Clone ID: LIB3145-033-Q1-K1-B2
atggatcacaaatctcctcttctcgttaaagatgacgttgatgatgagcttgagccaactgatagaagccctgttacagaaaaggactttgagcttgagccagctgatagaagccctgttacataactcgacaaagtaccgctactgagtattcttacaacctatagttgatcagaatgtagaatgtgtgtcgtttgcaatgcttggttgcatgaatgtgtaggataatccaatttgagatgaaactttgaaatatatattttatgtgctattctgatgcttttttacagtatagcaccttagtttggagtaactttctttacagtttgataaggaacaagtgttttaatttaactatataaaaatataaatgatatgatagtctgttgattc

SEQ ID NO: 16164 - DNA, 323 bp, Gossypium hirsutum
  Clone ID: LIB3145-033-Q1-K1-B3
gcgttcgtccacgcttacttccacgcgtccggtcgacgaccacatcggcgttgccatcgcccgtctgggcggtgacggccgcgtcctttctcggtatattagaaacgagtgtattaactacaacttcacgtatgaatcgccacttcctgttggcagacttgtcgtccaacttgccgataaagctcatgtctgcacccaacgctcttggaaacgaccttatggggttggcctgttggtggctggcttggatgaatctggggctcatctttactacaactgtccgagtggaaattactttgagtaccaggcttttgccattgggt

SEQ ID NO: 16165 - DNA, 291 bp, Gossypium hirsutum
  Clone ID: LIB3145-033-Q1-K1-B4
aagaaatgaggcaagaaatggataactgggacgaagataagaaggtcctgaaatcagttgccacgagatcggctgatctcgaaaccgaggttgcgaggcttcaacatgatctgatcacttcgatgagtgatgcagatgaagcgaacaagcagtcgatggagttgaagagagaattggaagagaaagggttggagattaagagattggacaaggaaatcactgaactgaaaaaagagaaagttgagagcgaaaagagagagagggagttggagaagaaattaagggttctag

SEQ ID NO: 16166 - DNA, 378 bp, Gossypium hirsutum
  Clone ID: LIB3145-033-Q1-K1-B6
gcaaataataactatcaccggcggatccccattctccagcaattaaacgcaggtctcgttcatttctggtgcgtttaataatccctttatacgccatggacatgaagaaggtctccaccgccatcattgttgctgctgcctcaatgagcgccgtcatggctgccgatgcacctgctcccttccctttcgccggtggttctattcctagctcctctcccggttccgccccagcatcatgaccagattccatcgtggctgccgcagccttgccggttcttggatcattggtttggtgctttcattgtttctttgttttcttacatgcttcatgtatgaaaaatcaacatgtgaacgaatattatattctaaattttattt

SEQ ID NO: 16167 - DNA, 105 bp, Gossypium hirsutum
  Clone ID: LIB3145-033-Q1-K1-B7
tggtaaacaaatcttgacatatggtgagaggaaacccgtggagcatttcttgaagggcggggataaaattacaccaaaggatttttcttcggtagccgaaaagct

SEQ ID NO: 16168 - DNA, 408 bp, Gossypium hirsutum
  Clone ID: LIB3145-033-Q1-K1-B8
gaaaaacttggaatagcaaatcctgattttgaagacgaaaagaataggctggctgagctgctgaaagaagcgggcaggccacgcatcataaaagcaaaatcactggaaaatctcatcgatccgaactcaaagaggacggcgaagaaagaggggacgaaaaaatggggtttcagaatttgaaaggaggcatttcccaggtcgtatctaatctgtttttccaacttatatccacattctgtatcatggaagatcatgtatagtgttacaagttgtaatttcttgagctttctgtttttggagctttaagatttcatattttttttcccttaaaccttttactattgttatttgtggtattgaatgtctggatgtgctcttgaaattttggaaaaaagaatgttcggttga

SEQ ID NO: 16169 - DNA, 362 bp, Gossypium hirsutum
  Clone ID: LIB3145-033-Q1-K1-C1
gttcagtttgtagactggtgtcctactggtttcaagtgtggtatcaactatcatccaccggcagtggtaccaggaggtgatcttgctcgggtgcaacgagcagtgtgtatgatcagtaacaacacatctgtggccgaggttttctcccgaattgaccacaagtttgatctcatgtatgccaacagagcctttgttcactggtatgtaggtgagggaatggaggaaggtgaattctccgaagcccgggaagatcttgctgctcttgagaaagactacgaggaagttggggcagaaggtggtgaagatgaagaagaaccagaagattactagatccatattacatgaaatcagcagtcgcagtc

SEQ ID NO: 16170 - DNA, 336 bp, Gossypium hirsutum
  Clone ID: LIB3145-033-Q1-K1-C10
taaactcgctcttttggatcgctcacccctgtgtttcagccatattgtaccatgttgaggcgaggctagcccttaaatccgaaaaactcctatccacgaggcacgtgctttcataatatcggaacatgtcaagtgcttgtgcgctggtcatattggatgaaatgaggcaaatatcaatcgtagattgacttggaaccactggtgaagggctcgaagcaggtgtcctgtttgggtttagaccaaagctcactttttagaccgaggtgctttataaatatctactgcttaaacacggatcttaatgtttaatggtggctttccccctggctatcactt

SEQ ID NO: 16171 - DNA, 331 bp, Gossypium hirsutum
  unsure (1)..(331): unsure at all n locations; Clone ID: LIB3145-033-Q1-K1-C11
cccactcgtccgccgaatacgattatctgttcaagctttngctaatcggcgattcctccggcgggaaatcctgtttgctcctcagattctcttatgattcttacctggatagctacatcagtacgatcggtgttgatttcaaaatcagaactgtggagctggatggcaagacaatcaaactgcaaatttgggatactgctggacaggaacgttttctgactattacaagcatttattaccgaggagctcatggaataataattgtctacgatgtttactgagattgaaagcttcaacagtttcaagcaattggttgaatgagattgacaga

SEQ ID NO: 16172 - DNA, 118 bp, Gossypium hirsutum
  Clone ID: LIB3145-033-Q1-K1-C12
gaaaaggattggctctgagggctgggcacggtggtcccagtcccgaacccgtcggctgcgggcgcactgctcgagctgctcccgcggcgagagcaggtctccgcgtgccggccggggg

SEQ ID NO: 16173 - DNA, 378 bp, Gossypium hirsutum
  Clone ID: LIB3145-033-Q1-K1-C2
cccactcgtccgcccacgcgtccggtttacttggttcagagtaaccgaatgccacaggtctcaggttcgagggccgtgagagagagaggagatcgatcaaagcaatggccactggagcagcaccgaccgagatgatgctccggtgcgtcctggacggaagcctagtgatgcgagaaatcgaggtggagcgccgcccctatcatcgcaactgcagctgcgctttacacagcttaaaaggtagcgtcctctgctcatccgcttgttctcgctcaaggaataatatagcttttcctaagaaaaagacctggaatgttgattgttccttatcaatggctgcgaccgatcctcaatcgatctcttctcggtcttttcttctcg

SEQ ID NO: 16174 - DNA, 423 bp, Gossypium hirsutum
  Clone ID: LIB3145-033-Q1-K1-C3
tcgcagcttccccctatgaataatgtcgataaatcagatttgagcaagagtttcagtaaaggacatagggttgcctgataagcctaaagttgaaacaggtttcaaagaaaacatggttcctttgaaggaagaagttcataactggactgcaactgcggagtgtaatccacttttggggagtgaaaacaatgaacccaagccaccaatcaccatataaggtgatcaccctttcaacaacaatgggaatcaagcttcttcaccgatgcttcgatgttgagaggtacactatgcagattctgttcttattatacactctttgagtgctatcttttaagcagctatatggtgttttgagcatcttatgcgcaagtaaaaaacttaattacttgttcttgagaatatatatatatatatatatataaa

SEQ ID NO: 16175 - DNA, 240 bp, Gossypium hirsutum
  Clone ID: LIB3145-033-Q1-K1-C4
tcgtctctctactctccactcaaatggctctatccttaaccatcatcagtggcaccaggggcggtggctatgcatatgggggcccaatccttcccaacatccatcttcccttctgccttcctcatcgccgcaacgtcctcttcccaatctcccccaaaaccttccacttgacctccgctgccaaaaatgtctctttcataacctgacgctttgatagcaagaaccggaagatcaatctca

SEQ ID NO: 16176 - DNA, 302 bp, Gossypium hirsutum
  Clone ID: LIB3145-033-Q1-K1-C7
ggcgaccgcacgcgtccgccatcatgcaattactgtggggaatcgtgttataaccgacactaatattcctgcgggagcggtttctgcgagctccgctgctgttgaactggctttcatgaagcttcctgaatcatcacacactactgctcgaatgttggtcgtcggagctggaaagattggaaagcttgttatcaaacacttcttggcaaaaagttgcaccaagatgggtgttgtttaccgaagttaaaataaaactccagcaagatcttgaagaagttttaaaggaagtcgacatttattta

SEQ ID NO: 16177 - DNA, 327 bp, Gossypium hirsutum
  Clone ID: LIB3145-033-Q1-K1-C8
ctctaatcttaaaacttgtaagttatctttcatatatttattttaaagttcgatgcctggtgtgttctacttcattaattttataatttttttgtttacttatttgcctatgtccaaatggaagttggtttactctttaaatatatttagaaattgtcacaccttatagtttggactttaagttggaaaaagatatgtatattataaaattacgtgatttagaggaagaaaagataattcgagcttatataattcaggtatgataaattctggttagtgagttatatcttgaactttggattatcttaggtgttattagaattgaat

SEQ ID NO: 16178 - DNA, 308 bp, Gossypium hirsutum
  Clone ID: LIB3145-033-Q1-K1-D1
acggcaaaagtccttgtctctctacaaatgtaatcacctaaagtgctgtagattgcaaagacagcaggtctaatggaggtttcttcatacgagggcttggcttttggtttctctgctctgcaaaactgagaagggcctgtcttcgattagtggcacttctgatgtattcctccaaaggtgggagagctggttgttctttgttatttgttgcttgtcctcgaataagctgtgaaaaccatgaatgaatgtaaataatagaacgtggtatttatagatcattttttattttttttttttttaaataattt

SEQ ID NO: 16179 - DNA, 243 bp, Gossypium hirsutum
  Clone ID: LIB3145-033-Q1-K1-D10
gatgactacaagactagttcatcagccccaaaggcaatttctggtactagcgggggtggtgggaagagcattcgtagcaatgctgtatattacgaatatagtgatgatgatagagatttcaaaaggaggccgtcgaggtattcacggtcaccatcagctgagtggatagaaccacggcactccatatgatccaaggaacgcgagcgtagcagctattataagcatagattaaagagtaaataa

SEQ ID NO: 16180 - DNA, 372 bp, Gossypium hirsutum
  Clone ID: LIB3145-033-Q1-K1-D11
cccttatggaatctctgacaaagttgactggacatttagtattgggacctatagtaaagcgagtgaagtctcgtggttgtctgttgggaagaaagaacttgaatatgccgctatggctctaaaaagattcagattgcttgttgagcagctgttgagggtggatccttctcaaatgagttccaatgagaaactggcattttgggttaacttgtataatgcattgattatgcatgcatatttagcatatggagttccaagaaacgatatcaaactattttcctttatgcagaatgctgcgtacaccattggaagactctccgtgagtgcagctgacatagaatgcacccgtctaaagatgaatcctgctactta

SEQ ID NO: 16181 - DNA, 370 bp, Gossypium hirsutum
  Clone ID: LIB3145-033-Q1-K1-D12
tcggcgcatgtgatatagtgggaaggggttttactttcaccggttactatgtttaaagggagtgggtgtgttttttcgccattgcacgattgaattactgccacactggatgtgcatttttgttgtttttagagatttttgaagctgaaaaatcagtgaattaacactcggtatagcctgaataagttgttataagtgaaagttgaaacggcttaagttgataataatcccctgctattgtttcattttctttacagaatttaatgcaccccgaaaagttgataactggtgcaaaattactcaatttaataataatatatatttatatctaattttttttacctataaattattttttatactatatttt

SEQ ID NO: 16182 - DNA, 304 bp, Gossypium hirsutum
  Clone ID: LIB3145-033-Q1-K1-D3
cccacgcgttctcccacgcgttcgcccactcgttcttccactcgttcgtccactcgttcgaggagacatattttaaaatatggcaaaagcttcacagagggccctggtttcaatggcaatctgcttattgtcttccctcgttggcttctcctatgccatcagtctcgtcaacatgttcttcttactcagcaaattttattgcgacacttgccgcgtatagttcgaaaccaaacttatcgaacccattccatgtgccaatgttgaatttggattgcatgaaaatatgtgactaaactgttactta

SEQ ID NO: 16183 - DNA, 212 bp, Gossypium hirsutum
  Clone ID: LIB3145-033-Q1-K1-D4
gcttatgattcatcaatagcagcagtgagcaaaagggaggttagagtttctttatgttggatggatttgtaacttctcctgggacttatccggatttctgctttggcctgagttaaaatgagtttgtataattttgcttttcaagaataaacagtttgattcccccacaaataaaataatatatatataataatatttagtaatatattttt

SEQ ID NO: 16184 - DNA, 189 bp, Gossypium hirsutum
  Clone ID: LIB3145-033-Q1-K1-D5
tgaattccaggcccgacccacgcatactctttctcattctctaatcactaatcttaattctcaatcccatcaactatataaagcagagttgtattttcaacatctattaacatcttccctattttttttttcttccacaaatatacttattaattttcatttcttaatcttaatccttcattttacaac

SEQ ID NO: 16185 - DNA, 152 bp, Gossypium hirsutum
  Clone ID: LIB3145-033-Q1-K1-D6
aattctccacactttctctcataaagaatttccacaatagctattagatcaactttaagcgatagttcatcataatatgactgttgcaccataactcaaacattcttccatttctaatcctcataacaactttcttaaatcattaacttttc

SEQ ID NO: 16186 - DNA, 326 bp, Gossypium hirsutum
  Clone ID: LIB3145-033-Q1-K1-D7
cccactcgtccgtccactcgtccggcatctatgacttgctctcaccatctcagtgggggggggcttaattgtattagacacgtgattgagatgttgaatttattcaaggcttgttattttgtttttactttttaaaaaaaaaaaaataaaaaaaaaaaacatataataatataaaaaaataaaaattataaaatttatattttatttaatatatatctaatatatatttattaatttttttttaatcatattaaataatttggggtggcctttttaaagtttcaatttttacttcctctgacttgcaaagttattaattttttttt

SEQ ID NO: 16187 - DNA, 414 bp, Gossypium hirsutum
  Clone ID: LIB3145-033-Q1-K1-D8
caaaacttggtcgtgaatatgctatccaatactcactccaataccatgcaaatgaacagccatgccaagatgtgggaagaaatgcaacccaagattcatgttgatatttcattacccgcatcatctaataataatgcttcgggtaggtatggatatgggcatggaggagtagtgtttattggtggggatgtagtgttgcttagtaacgggaacaagttttattcttatgacatgaagaagagggcctctaaagatttgggtgaacttgatattgataccaaggcaggaattgttgggtatgtgaatagccttgttgagctctaagaccaggcgctgctgtttgtatggaccggccttgacaagaacaccctacacaatctccctctcttattctcattatcaggcaaaatattt

SEQ ID NO: 16188 - DNA, 242 bp, Gossypium hirsutum
  Clone ID: LIB3145-033-Q1-K1-D9
gtatttttagccaagagtgaattttagtatagctgaggttgtagaggctgatagggtggacttgttataaataatttggtttctcctcattatccatcagagatgcatttgaattggatgtcttttttgttatcttgattgttaatgataaaattgcagtagtgcttgttctattaaaaaattataaatattaaaaataatataaacaaaattattatttttttttattaatattttattaa

SEQ ID NO: 16189 - DNA, 363 bp, Gossypium hirsutum
  unsure (1)..(363): unsure at all n locations; Clone ID: LIB3145-033-Q1-K1-E1
ggtcgcccgcgcgttcgggcaaaccggccgacattttactgtggatgaacaaaaagatctcagcaggagcgcttggggttgcgactgtgatatgggttttgtttgaattgcttgaatatcacctgctcactctagtgtgtcacttgttgatacttgctcttgcattgctcttcttgtggtcaaatgctactcagttcatcaacaagtctacaccgcacatcccggaagttcaaatccctaaggaaccggttttagagtttgccatggcacttatgtttgagattaaccgggcttttgctgtcctgcangatattgcattaggaagaaatcttaaaaatgttcctctttgttattgctggatta

SEQ ID NO: 16190 - DNA, 377 bp, Gossypium hirsutum
  Clone ID: LIB3145-033-Q1-K1-E10
gtcagtcagcaccaattgacacaagaagggctttgtataagaatatagtgttatctggtggatgcgaaccatgttcaaagacttccacaaaaggttgcagcgggatctgaaaaagattgtagatgcccgagttcttgcttctgatgctcggtatggtggggaagtaaaagcacaacctgtggaagttaatgtagtcagtcatcctatccaaggatttgcagtgtggtttggaagttctgtacttgcatcaacacctgaattttatgcggcatttcatacaaaagcagaatatgaggaacacggaacaagcatttgccgcacaaatcctgtgtttaaagggatgtattgaggcaaattttcttttcaagtgattaatg

SEQ ID NO: 16191 - DNA, 280 bp, Gossypium hirsutum
  Clone ID: LIB3145-033-Q1-K1-E11
cgaccacgcgtccgaaaaaaatctgtgcatgatctgatgtctaatcattttctttgaaagatattcctttttgaggtgcggacacaaaaaaattggaatgtatacattacactacacagttcttactctttggttgttttttcctgcatctgtaaccttttcgtttatccgttttgagttatcgctttttgtataggccattattgtataaatatgttatcttgaattcaacacctttttatcccgtattcttctcctttttatgtttttagttacccta

SEQ ID NO: 16192 - DNA, 391 bp, Gossypium hirsutum
  Clone ID: LIB3145-033-Q1-K1-E12
tcgctccttcgccgtgagccacttaagcttgttgatggtggccaatctcagagaacttttgtgtgcggaaaggatgctattgaagctgttctgttgatgattgaaaacccgggcagggccaatggtcacattttcaatgtgggtaacccaaacaatgaagttacagttaggcaacttgctgaaatgatgactaaagtctataccaaggttagtggagaatctgcactggagactccaacaattgacgtcagcttcaaagaattttatggcgagggatacgatgatagtgacaagagaatttcagacattaccatttataataaacaacttggttggaaccccaagacatcgctttgggacttgcttgaatttacactgacctaccaacaca

SEQ ID NO: 16193 - DNA, 173 bp, Gossypium hirsutum
  Clone ID: LIB3145-033-Q1-K1-E2
cttagtagattcttttgctcgaagcgaagaacggacattaatccatcaagtcgataggtgcatgatagtattttgttggactttgaatgtgaatttgtaagtaatgactgtatatggttttcgtgtgacatatatggttttaaagctggttaatatattttgaatattatttt

SEQ ID NO: 16194 - DNA, 393 bp, Gossypium hirsutum
  Clone ID: LIB3145-033-Q1-K1-E3
gtgacaacctcagaacacactccactccagagtccagacaaactaaattcagccatgaaggcaagctaataaaaacactcatcacttcatcaataacccaacactcaaaaagcccatatccatggctacgttttctcctcctcctctacctacatctttctctgtcagaccacacttaacccacaattcaactctttctctccctttcaagagaccctttcttctactatccactattcccaagtctttaccagacaatggagttggggtttcagcttctgttgctgctgtcgaagacccagcatccaaccagattgaaaacgccgtggaggcctctgctgggtctaacggagcggctatgaccatctcggctgcaaatgctgaagttttgag

SEQ ID NO: 16195 - DNA, 391 bp, Gossypium hirsutum
  Clone ID: LIB3145-033-Q1-K1-E7
cccactcgtccgggagctgatagtttctcactcactgggcttttagcctttgctgaactgggaaacaatatagtagaggacatgactagtgttacctcgaggattgatgtagtaaggagttatgcttttgggtttctataggaggatatggggaaattgtcttagtcagctctcttatgatattgactatttgtagaactaatagcctcctgacatcttattgattacaagctgtcagtgtgctgtcatatatattgatattgtagttaagctgctggactggggcgaggatggtatcgccacaactgctgaaactgctgctctacgagcatcatttctgcaagaagttgctgtttggcacaagcttgatcatcctaatgttacaaagtct

SEQ ID NO: 16196 - DNA, 303 bp, Gossypium hirsutum
  Clone ID: LIB3145-033-Q1-K1-E8
cccacgcgtccgtttcttttggtttttagacttgcagggtgaagagagcaagcggggaggggagaatcaatggcatccacttcagctgcttcaatggctctgcccttagctggagctacccaaaacagggtgccaagctctgaggcattctttaagccacttccggtgaagccatggagggcaatgggcggtgttaaaagacccaacggaaggcttcaagtcaaggctggtgtttcttcgttcaatgaaaaggctgtgacagggttgacagctgcaacactgactacatctattattattcca

SEQ ID NO: 16197 - DNA, 230 bp, Gossypium hirsutum
  Clone ID: LIB3145-033-Q1-K1-F1
gaaaaaaggaaaattccccatcgtctctttctggctcatgtacataaactatccaccatgtgcggatatgctctcagctacagttgtgactgttttatacttaattatttgctttagtaacaaatattgttgctaattgcaacttaatcgctgtaattatcgttgctctactttgtatctcttggaagttgaacttcagttttattccaataaaaatatttctagccgtg

SEQ ID NO: 16198 - DNA, 302 bp, Gossypium hirsutum
  Clone ID: LIB3145-033-Q1-K1-F10
acaaaaggccgtgtcattgactgggatgtacctgagcaaccttcttcgcagcaggagatgagagatgaaccacaggttggtgggatctatgtcaggttattccttaaagatcccaaattccctcttagaaatcccaagagattcctggaagggcttctggaccagtacttgtcttctattgctgccacgcattatgagtcacaatctgtggactctgggcttcctttgcttctttctgctgctttggtttcattattgcgagtgcaccctgcacttgcagaccatgttggttatcttgggta

SEQ ID NO: 16199 - DNA, 253 bp, Gossypium hirsutum
  Clone ID: LIB3145-033-Q1-K1-F11
ggaaagaattcttccgtcaagtcaggagccgcttgtcgtatgagcagtttggtgcattggtggcaaatgttaaagaactaaactcccacaaacaaacgagagaagagactttgaggaaagcagaggagatttttggcccggataacagagatctttatgcaatatttgagggtttgattaatcgcaatgtccattaaatcagctgagtagtcatcggcttttccaacttgtgatttatttggtaaattttttg

SEQ ID NO: 16200 - DNA, 333 bp, Gossypium hirsutum
  Clone ID: LIB3145-033-Q1-K1-F12
ggcaaagctgcggtgaatttgatgaagttgacactgtttaggcaatattacattgtggtgatcggctatatttactttactcgagttgtggtctatgctttggtgacgattacatcatataaatatctttggaccagtatgggggccggggaagtggccactctcgcattttatgtgtttactgggtataaattcaaaccagagccacataacccgtattttgttattgatgatgaggaagaagaggctgctgcagaacagttgaagctagaagatgagtttgaactgtgaaagcattcatagagaaacaaaatatatatatatatatatgga

SEQ ID NO: 16201 - DNA, 374 bp, Gossypium hirsutum
  Clone ID: LIB3145-033-Q1-K1-F2
tttggattcccggtcgaccgcgcgtccggtcgttttcccacacttcccacttccttcactctcatcttcaccttcttcttcttcttgggctgagccttcacccagaccccaattttttgcatcctctgcatctcccatggacaattcccccaaaaagttcatggatttcccattcgtcactgccccgcgtaggaacttgatgatcgatctcgtatccacgatggagcaccgtctacagtctcaactcataccatgcactttacccttcgatttacaacattactacaatccaagttaaacctcccatggctcactttttatccgatcaggccatacctcttcttaagttgatttcatgctatggaagttggtta

SEQ ID NO: 16202 - DNA, 348 bp, Gossypium hirsutum
  Clone ID: LIB3145-033-Q1-K1-F3
ctgtttgccatttgccttaatcatcttcctctttctttaaaacctcttcctatttaatgggcgagtaaacttgcgctgaattccatggctactgcagaggttgtatcagctcagactgcaatccatgaggagaaacctgaagaagtggtcaaggttggagaaattgcaacagaagaggtaccggctgttgctcctgcagcataacctgttgctgaagaaccaaaggaagcagtgcctgaagcagcatccggagaaccccaggctccagaaactgaagccacagttgaaactgaatcaaaggaggtggttaaagagcccaatgctgtgactgaggagccagaagttgag

SEQ ID NO: 16203 - DNA, 391 bp, Gossypium hirsutum
  Clone ID: LIB3145-033-Q1-K1-F4
gaagtttcctttctcgattttctatttagccaaacaagatgcagatcttcgttaagactgtaaccggcaagacgatcactctcgaggtcgagagctccgatacgatcgacaacgtgaaggccaaaatccaagataaggaaggcatccctccagaccagcagcgtctgatcttcgccggaaaacagctcgaagacggccggaccttggccgattacaacatccaaaaggagtcaactctccacctcgtcctccgtctgcgcggtgggatgcaaatcttcgtgaaaaccttgactggcaagacaatcactctcgaggtcgagagctccgacacgatcgacaacgttaaagcgaagatccaagacaaggaaggcattcccccagaccagcaacg

SEQ ID NO: 16204 - DNA, 230 bp, Gossypium hirsutum
  Clone ID: LIB3145-033-Q1-K1-F6
aacccttcctaataatttggtttcaagaataattcataccgggtaaaaaaaaaaaaaaaaaataagtaggttaaaaaaaaaaaaaaataaaaaaaaaataaataataataataaaaataaaataataaaatatattttaatatttaattcatttttttttatatatttttattaatatctttttttatctctttttcttttcttaaataataactataatttttaattac

SEQ ID NO: 16205 - DNA, 399 bp, Gossypium hirsutum
  Clone ID: LIB3145-033-Q1-K1-F7
cccacgcgtccgattgattttactcaattttgaaataaaattaaaatttgacttcggctggttgtgaaatttatgaaattgaaaagaatgaaagagaaaataggatggatacttcttttaatcatttttctttagactaatttgaaaaacaactaagtgaaaattggtgggttttgtttgttttagtcactacttggggtacaggggacaagttatcgtaacaaaaattattgagttagaatttgttgtgttctacagcaattgagacgacactgtggtcgatcgagtggggcattgcggagctggtgaaccacccttgaatccaaaaaaagctgcggcatgaacttgacactgttctatgacctggtaaccagatcactgaacctgacacccacaaac

SEQ ID NO: 16206 - DNA, 414 bp, Gossypium hirsutum
  Clone ID: LIB3145-033-Q1-K1-F8
agcgattgctggagatacctctggagactatgagaaaatgctgcttgcgttgattggagcgtggagacgtctgagctgctttcctatgttgtgttgttggtatgaaaatttaatttgcaatttgaggtgtgagttatgtttgtttggttgtgggttgtgtgaacatggcttttgtatgccgctgcttccgtgttagaacgttcaagatgatgtgtttgtagatatatttcccaataatacgagagttaggtattgctgcggtacttgattagtatcagatatgttaatgtcgagttagtcgaactaatttttaaaaaaaagaaaaagaaaaagaaaaagggattaagtgagcacttcaaggaaaaagaaaaagatgtgttatggtaataatttaagatggttgtcaaacgttac

SEQ ID NO: 16207 - DNA, 162 bp, Gossypium hirsutum
  Clone ID: LIB3145-033-Q1-K1-F9
gtaatattttacatcttcaaaaaaaaaaatttaaaaaaaaaaaaaaaaaaaaaaaaggtaagttataataaaataaaaaaaaactaaaaataatataatattttttattatttaaaatatatactttatttctcttcctattttatttattattttctttct

SEQ ID NO: 16208 - DNA, 345 bp, Gossypium hirsutum
  Clone ID: LIB3145-033-Q1-K1-G10
gatataccgaaaaaagctctttcattgaacccttaccctctctcaaaagcagaaaaaacgatagggaaataaataaaaatccaaaaaaccgattaggttcgacgatttgaatcgctccgtctatttccccgtttctagctctacgaatcaatcggaaaaaaccttcgatttggccggtgaatggaagcaatcagaaaacaagccactcggcttcgagaacaagtcgctcgccaacaacaggctgtctttaaacagttcggtgctgggggatatggaagttcaaataacgtaattactgatgaagtagaacttcaagcacatcagaaactcgagatgctttatgtc

SEQ ID NO: 16209 - DNA, 352 bp, Gossypium hirsutum
  Clone ID: LIB3145-033-Q1-K1-G11
cggggcgacccgcgcgtccgctcctttattacatgtatatttgctcttgcttattcaaacctgagattttgatagagaaggaggtgttacatttaaacccaaaaagaatcaaattgtataatggttgttgattgaaagttgttcactttggctcaagtctcttagcacaacacccccaaagattgtttgctcatcatcaactgctaggttttctttttggcaaaaattttttaagaccattcttgtttgccactattttttttttttatctacaaggaattgattccacatattttttttatgatttatttacacaatcatttttgcacttttacattttttgattaaatac

SEQ ID NO: 16210 - DNA, 310 bp, Gossypium hirsutum
  Clone ID: LIB3145-033-Q1-K1-G12
tggaggggcgacccaagcgtccgacgaaaccatatcggaaataccctatcgttctctctcaaatagtctccaatttctcctgggcaggatcgactctagactatccatctccaccgtttcatcatcgtctcatccgcctctcttaaaaccagtgattataaaagatgtgtagctttcatatctaatttctggatcatgttatttcccgcaaatgattataagattgtggtggttggtataaataatgctgtctaaacaaccacgcttttcaaagcttcacctttttaggttgtaactacccatcctactt

SEQ ID NO: 16211 - DNA, 260 bp, Gossypium hirsutum
  Clone ID: LIB3145-033-Q1-K1-H11
cagcttttgtcccatatatgggaactgaggtgaatggaaatggattacagtctaggttaatttctcatgctgaaggaaaattcaatctgtcatctcttcccaacattcgggatgtaactactgattacactctttatgaccaacttcaacaagtaatggcagaagaaacaaactcgtaaagagaagcatttttagaagcaatgaaacgttcaaaagcttagaaaaaagctctttgtgctatacgtatggtgaaagcatca

SEQ ID NO: 16212 - DNA, 435 bp, Gossypium hirsutum
  Clone ID: LIB3145-033-Q1-K1-H4
attcgcttcttcctatcaccattgtaagttacagatagacatacacaccataagggaaagattataaaaggaaaccagagagaaaaaagagattcaacttttttaattatttggcctttaataataatattttttgcaattctgttgttttgatttattgatttacctttttatttaagaaattttgtggttaattttgttttaattttatgtttttaaggattttttctggattttattattttttttttgtaagttaaattatattaattaattttgttttaataattaaattttttatttatttacataatataattgtttgtattcttttattctctaattcttattatggatttatcttttatattattttcatttttgtgtctattgtactttctctttaatataaaattttgtataatttttttttta

SEQ ID NO: 16213 - DNA, 364 bp, Gossypium hirsutum
  Clone ID: LIB3145-033-Q1-K1-H5
cagatctgttacactctgaattatttaagcagcacgtcacaagggatctagagcaaggtgggtgaccttgggttgagtgtagagatgaggaaaatcatgggtgccaaagttcttttcttctttgctttgctttccttttcagctgtctcggcatttgcacaggatgaggaagaccaaggtcttgttatgaacttctacaaggattcttgtcctcaggctgaagacattattaaagagcaagttaagctactgtacaagcgacacaaaaacactgctttttcttggctgagaaacattttccatgactgtgctgtccagtcatgtgatgcttcactgctgctggactccacaagaaagagctttg

SEQ ID NO: 16214 - DNA, 363 bp, Gossypium hirsutum
  Clone ID: LIB3145-033-Q1-K1-H6
ggtaattgtaatcctggtggtttcgttctaccatttcctcaaattccagaaatcccaaggggtccagaaatcccacaaatcccacagatcccacaaatcccacaaattccactaatcccacagatcccacaagtcccacagatcccacaagtcccaaaaatcccactaatgccaggacagtcgggatgtgagagtggagagtgttgccgtcagggttgtggtgggacttgtgctgagtgtggtcagcccaagtgcgcatcaagatggtggcaggctgaaactgtaaagagcaaagggatagaagaggttttgggcagggaacccaagccaccaaagttgagagatggatccatattaagatga

SEQ ID NO: 16215 - DNA, 122 bp, Gossypium hirsutum
  Clone ID: LIB3145-033-Q1-K1-H7
tcggccacgccttcggccacgccgtccgattttttaaggggaaccaacccctccagggttccggggtttttggcccaaataagccttaattttaacctcgaaaagaacctttgattggggtt

SEQ ID NO: 16216 - DNA, 176 bp, Gossypium hirsutum
  Clone ID: LIB3145-033-Q1-K1-H8
acgcggacgcgtgggaaacccagttcactcgttcaccccactcgcctgttatagaatctgcgtgagtagcggaagcccatttcgaggatgttgctttgcctgttgtggatatgagtgataaatagctggtaacccgaatcaaggagtactcataagggaatctagaggcaatcctt

SEQ ID NO: 16217 - DNA, 409 bp, Gossypium hirsutum
  unsure (1)..(409): unsure at all n locations; Clone ID: LIB3145-034-Q1-K1-A1
gagaaaaatggttaagccaaatttgtattttagtaggtgaaagcgttggaaaaaacatgaaatggccggcaagcttcttctcatgcggaacaaactgcagtagctggcctgcgatgggaggaaagcttccagggccagcgtcaggaacggcaccggccaatgcctatacgacggagagtaaccccattgtggtgatcggtgaacagtacattgccccataccctgtggatcttaaaatacaacacacggtatttacggttgctgaaaataacttcgatatcaccgacgttaatgataaccctattttcaaggttaaaaataagttgttcagctttcctgatcgccgcgttttgcttgacgctgctggaaatcctctcgtttccctaaacaaaangtgaagtgtgaggaa

SEQ ID NO: 16218 - DNA, 317 bp, Gossypium hirsutum
  Clone ID: LIB3145-034-Q1-K1-A10
ggaaaacccggcccgaccgacgcatacgcccacaccaccgcccacccctccgttcatttttaaccagcaatatgaaattcacgaggcgtttttttattttaatcggcaccttccattttaccaattttgaaataccataatagtttttataataaaacttttttctctacttttctaaatctcactaaatatcttttcttcataaagaaatatctgaagttaagttcttttccaaatcctcaattctaataaattaataattttatcaaaatttccatattaccatcttccaactataattaactccttttatcatt

SEQ ID NO: 16219 - DNA, 416 bp, Gossypium hirsutum
  Clone ID: LIB3145-034-Q1-K1-A11
ggaaaacccgtcccggcggacgcgaaacgcccacgcctccgcccacgcgtccgcccacttcttccggaagaaaagagtgaaaaattgtgggttttttaaaatcaattgaaaaccactccattcactctttttttcctgccttgctgatctttttggggttcttccacaaaaagaaactaaaaaatttgggtgatctgtgttgaaaaagaaataaaaaatggcgacattccaaggaactcaacaaaaatgcaatgcatgcaacaagactgtttatttggtggataagttgacggctgataatatggtttttcataatgcttgcttccgttgccaccattgcaagggtaccctcaagcttagcaactacaactcattttaaggggtgctatactgcaggccacactatgatcaactct

SEQ ID NO: 16220 - DNA, 275 bp, Gossypium hirsutum
  Clone ID: LIB3145-034-Q1-K1-A12
ggaaaacccgggccgacccacgcgtacgcccacccgtactcaatcacaaactcttctttcacccacccactaacttctcttgtgggggtcttcttaaactccagagccctcatcccaccattctcaacttaaccttcattcctgtaatgctcttccacatcgaccacaagtttcatctcatgtctaccaatctttcctttattcactgatacgtgttttacactttataataaagaaaattctttctatctcaacaacacctatctccactttaa

SEQ ID NO: 16221 - DNA, 410 bp, Gossypium hirsutum
  Clone ID: LIB3145-034-Q1-K1-A2
cccacgcgtccgcccacgcgtccgcttctctcactcagttttgttggttcttccacaacagaagaggacttaattttcagtccattggctcaagaaggtaacttttttcaaaaccgttcaatagttgttgaattaactcttttgtttttgtcagttatgttacatgcatgtttcattcaggttatttttatatacgtgaacatcacgaagatgagtcgcagaaatggtcccaagcttgagttgaagctcaacctatcaccaccaaggtttaacccaagagtggaatcaccaagccgatcggctaccgtgtcaccgacatcgcctccaagctcatgcgtgtcatcggagatggaggatgacactggcagttgtagtgaggcaacaacaacatccatggttctttgtgggtg

SEQ ID NO: 16222 - DNA, 405 bp, Gossypium hirsutum
  Clone ID: LIB3145-034-Q1-K1-A3
cggacgcgtgggtgagagtgaagcttccccatctaattagggcagtgcgtcgtgctgggcaaagggtcacttgggtcagtgaccctatgcatggaaacaccatcaaggctccttgtggtctcaaaactcgccccttcgattccataagggctgaagtgagagctttctttgacgtgcacgagcaagagggaagtcatcctggaggagttcatctagagatgactggacagaatgtgacggaatgcatcgggggatcccggactgttacattcgatgacttgggttcacgctaccatacccactgtgaccctcgtttgaatgcctcgcaatctcttgagctcgccttcattatcgccgagcgcctcagaaagaggaggatcaactcacagcaaccgcaaccactaa

SEQ ID NO: 16223 - DNA, 268 bp, Gossypium hirsutum
  unsure (1)..(268): unsure at all n locations; Clone ID: LIB3145-034-Q1-K1-A4
tctcaagtaatcttcacatgctcncacccctataacaatgaatcccaccatcacctcccgtgagatccatactgccttaagactggtcctccctggggagtccgccaatcacgctgcttccgaatggactaatgctgttactaagttcactaattcttactttccataattttaaaatatcaaaaaatttagtattactataatttattttatttgagaactgcatttagctagtttaagatatatttttcatgccttccttattaat

SEQ ID NO: 16224 - DNA, 405 bp, Gossypium hirsutum
  Clone ID: LIB3145-034-Q1-K1-A5
gcgtccgcccacgcgtccggtttttggcaagaattctatgaattttctttgtattgggtattaaatgctcgttttttagtgctttgctctgcatgctttagtcgttttcttagagttttggagtgcaccccaagtagaaaagatgctgtcaacgaagtcggaatcggatatcacaagccttgctccatcatcaccgtcgaggtctcccaaacgtcccgtatactatgttcagagtccatcacgagactctcatgatggagacaagtcatccaccatgcaaccgagtcccatggagtcgccttcacacccttcctccgttggccgccattccaggaactcttcggctagtcggttttcggggatattccgctcgtcctccggtaggaaaggggggaggaagaggaa

SEQ ID NO: 16225 - DNA, 397 bp, Gossypium hirsutum
  Clone ID: LIB3145-034-Q1-K1-A6
gaccgacgcgtccgcccacgcgtccggttttgatcatctcataccataacttgcatatttttactgctcacggggtcgaattaagtcatctttcatacccagatctctatttttaaggttttggaagggaattggagttggctatggagaacaaccagcaatcattttggcatttcagtgatcaacttaggatccaaaattccaatttggctaatctttcgctcaacgattccatatggagcaacagttatgtctctaaaaggcctgatgaaaggaagaattttgatatcagagtcggtggtgaagttaattctgttaacaacttgaagcccaaagtctctgatttcaattctttcaacaatgatggatggaaaattggagccaccaccaacaacat

SEQ ID NO: 16226 - DNA, 415 bp, Gossypium hirsutum
  Clone ID: LIB3145-034-Q1-K1-A7
cgcacacgcctacccctacgagcttctcactctcaattggtcaaaagaacagaacacaaggaggggtcatgatcagcgtcggccaaacgatcaacatcagccacacctaagcgacaaccaactcggcagcgtgttaaaactcctgccccacccccactggaaaccgaagatagaaatggcggtcttgaactatctttcttagatgatgaaacaacaagagcggaattcgacaactatctcaatgcattggatgacatgctcactcagcctttgcctgaagaaccgtattcccatcccgtgttgtataactactttgctgcagaaagcgaaatggctgaagctcgaatgaaactgtcttcatttcttgacatggatttcccttcgttgatttgcttcaaagacctcgatgaactca

SEQ ID NO: 16227 - DNA, 406 bp, Gossypium hirsutum
  Clone ID: LIB3145-034-Q1-K1-A8
aaaacccgggccgacccacgcgtacgcttcatttgtacgttcataaaaaaaattttatattccatgtgatactttgcaattgaaaagaaaaagttatatattttcaaaaaaaaaaaaaaaaaacaaaaaaacaaaaaaaaaaaaaaaaaaaaaaaaaaaaaaaaaaaaaaaaaaaaaaaaaaaaaaacggcctccgttctaaaggatccaagcttacatacccttgcatgcaacataataacttttttatagtgccacctaaatcaaattcactggccgtaattttacaacgtctaaactggaaaaaccctgtcgttacccaacataaactccttgcagaacatccccctttcaccagctgtcgaaataacaaaaaatcccgcaccaatctccacttcaacagttg

SEQ ID NO: 16228 - DNA, 424 bp, Gossypium hirsutum
  Clone ID: LIB3145-034-Q1-K1-A9
ccgggccggccgcacgcgtccgcccacgcgtccgaaaagaacaatgttttttgtttatccagatccggatcaacccgggccggttgatcacttcgaccgtcttcctcattcggttcttcttttagtcttcaacaagatcggtgacgttaaagctctcggccggtgctgtgttgtttcccgtcgtttccattcccttgttcctcaagtcgaaaacgtcgtcgttcgagtcgattgtgttatctccgatgacgattgttcatcttcttcgtcttcatcggataaatcgcgtgctctcgtcggtcctttttcgaatctctttcgtcttgttttcggggccattgttaaaccgcttcaagctttgggtcaattccttggtcctaaacggtcggttttgaatgaaaccctaaactcccttttctcgtct

SEQ ID NO: 16229 - DNA, 381 bp, Gossypium hirsutum
  unsure (1)..(381): unsure at all n locations; Clone ID: LIB3145-034-Q1-K1-B1
aaactcaaatttttttttttttctacccacgcaaactanaccctgggttgcttttttaaatatccggttatcaaaattaaattcttcctgaaacccataccatttatttaatcaacgctttcttaccccaatgaaaatacctctatgccttaattgtcaattgaatgaacatttgctccaattatcttccttcttctcttaccaccttgcatcagctcgaagatattgtgcgcaaagacaagcttgtggtgtctacctcctgctcgcttctccacactgccgttgatctagtaaacgagactaagctatatgatgaaatcaaatcctggctcgcattcgctgcccagaaagttgtttaagtcaatgcactttccaaagcat

SEQ ID NO: 16230 - DNA, 392 bp, Gossypium hirsutum
  Clone ID: LIB3145-034-Q1-K1-B11
accagatccaaaaacccaacccatatatctctttcttttctttataaacaccataggtcccccccccccaaaaaaaagaaacccataaagttttccccctttttatttggttgttgatgagaagatgtgttgtgggagagtatgcatgctgtgcacttgtttgattctagtcgtggttgcgattgggctgctgttcggctttggggttttcaagaatgggtttcacaagctcaaagatacattccatgaagattattgtgatcctaaattgtcttcttcttgtggaagacctttcttgggttatgcagctcctcctcctttctaatttcattgttgggatatttctctactataattccattcttatttggttgtttatatgattatcttat

SEQ ID NO: 16231 - DNA, 392 bp, Gossypium hirsutum
  unsure (1)..(392): unsure at all n locations; Clone ID: LIB3145-034-Q1-K1-B12
acatcanataactccncttccaatttttttttatacttcaaaacctctcaccacaggtccgcttataccctaagcctaatcccctcaaattctttaaatccatcacttatactcgctctctcctcccttttctcctcaaacacctttccctgccccttcctaataactccctcttctcatttcgctaaggtaatatacccatcacgccagaccaccttcccttcaccttctcacccattactgctctttccatattcctcatcaatgaaaccctattactccacgttccacaacttataccttaaagagaaaaaaaaagtttttcttttaaaaaaaattcaataaattattaactataaaactttttattatgtccaaaataaaataattta

SEQ ID NO: 16232 - DNA, 400 bp, Gossypium hirsutum
  Clone ID: LIB3145-034-Q1-K1-B2
gttttgatcgagacctactttgcttatcttaccactgaggcatacaagacccttgttgggttgaatggtgttaccgcttatggtttggatttggttcgtggaacccagaccattgatttggtcaaggctggcttccccgaaggaaaatacctctttgctggagttgtcgatggaaggaacatttgggccaatgatcttgcttcttctcttagcaccttgcagcagctcgaagatattgtgggcaaagacaagcttgtggtgtctacctcctgctcgcttctccacactgccgttgatctagtaaacgagactaagctagatgatgaaatcaaatcctggctcgcattcgctgcccagaaagttgttgaagtcaatgcacttgccaaggcattggctggtc

SEQ ID NO: 16233 - DNA, 404 bp, Gossypium hirsutum
  unsure (1)..(404): unsure at all n locations; Clone ID: LIB3145-034-Q1-K1-B3
cagcagcagcagcagcagcagcagaagcatggggtttagagacgaaatggcagcgaaaaggaagactcccgtcaagaccagaaacccatatctgatccgtggtgtgggaaagtattccaggtctaagatgtaccacaagcgtggcctttgggcaatcaaggccaaaaatggcggtgctttcccccgccatgatcccaaacctaaggcccccgctgccgctgagaaacctcccaagttttacccggctgaggatgtcaagaagccgtttcttaacaagcgcaaacctaaacccaccaaactcagagcaagcattacaccagggactgtgttgattttgttggctggaaggtttatggagaagagagttgttttcttgaagcaacttacttctnggctcctttttg

SEQ ID NO: 16234 - DNA, 378 bp, Gossypium hirsutum
  unsure (1)..(378): unsure at all n locations; Clone ID: LIB3145-034-Q1-K1-B4
accgacgcgtccggtttcaaattattttgtttgatcattgatttcatattatatagattgttatatatatatgtatgttcctttgtatatttttatatggttgtatttatataattcatttatgataaaactttctaacatgtacattatttgttttaaatttttatatggacatacattattatttttatgtacaaaaaaaaaaaataaaaaaaaaaaaaaaaaaaaaaaaaaaaaaaaaaaaaaaaaaaaaaaaaaataataaaaaaatttnttttaatttnnannnttttaaataaaannntttttaatttttgtattattantttatttttatttttttttattataaaaatatttttttttttttntcctttt

SEQ ID NO: 16235 - DNA, 395 bp, Gossypium hirsutum
  Clone ID: LIB3145-034-Q1-K1-B5
aaagcaaaataaaaacacaataaactttgtttttttcatcacattaggtctctttactctggctgacctttattcttcaataccatggacatgaagaagatctcatgcgccgtcattgtcgccgccgcctctatgagcgcggtcctggctgctggcgcttctccagctccatctccagcttcagctccagctgcagctgcagcttcagcttcagcatctggcccaggcccagattccagcatcgcaatctcaacaatgcctgttattgagtccttggttggagccacacttgtttctttctttgcctactttttacagtaagccacagcaaaaaatggatgaaaccatgaagtattgaagatcaaaaaaagaaatggtggattaataaatgtaaa

SEQ ID NO: 16236 - DNA, 286 bp, Gossypium hirsutum
  unsure (1)..(286): unsure at all n locations; Clone ID: LIB3145-034-Q1-K1-B6
gaagtnntgtaagttacctaattanntttttnnctttgcttttgccattantnncccagcnnccttgcaagggtcaacaaatcgngagnaaatatgaatgangnntattggaaaacannacgtgaatnnntggaagccttaaaagaaaacaaaccgaagcaggccattattaaaaacccaatcctnnngaggaagtnntacccagnnnatgtcaaccaaaccttgtttccaaaggtcgcttgatgaagggctaananntagcacaagaacgaacatnnttgagggc

SEQ ID NO: 16237 - DNA, 328 bp, Gossypium hirsutum
  Clone ID: LIB3145-034-Q1-K1-B7
taccacttacacttcaagctcatatttgctttcatctcacccaaatagactagtcctggcgttggacttcttaattatctactattagatcttaaattcttcctagagggcttgccatcttgctaaacaagcattctatgaggctattgctaagcttgctggccttaatgaacaatcttacaacgatagcaccctaatcatgcaccttcttagggacaacctcaccttgttgacctccgatctgccacaggaacgaagtgatcaatcaaaatcatatgaacctcatgctgagagttcattggatgaaagagtattcttttaaaactgg

SEQ ID NO: 16238 - DNA, 361 bp, Gossypium hirsutum
  Clone ID: LIB3145-034-Q1-K1-B8
gtttatggcgaggtggtggggttgacatcatgttgtttatatggaggagctccgtaccacaccgaagagatgaaaatgaagaaaggagttgatatagttatcgggacacccggccgcataaaggatcacatagagagggggaatattcacttaagttcattgaaatttcgagttcttgatgaagccgatgaaaatgctaaaatgggatttgttgatgacgttgaacttatattaggcaaggtaaaaggatgcaagtaagggttcagacacttctttttagtgccaccttgccagactgggtgaagggtattgcagcaagatttcttaaaacaagtaagaagactgttgatcttgttggtaa

SEQ ID NO: 16239 - DNA, 395 bp, Gossypium hirsutum
  Clone ID: LIB3145-034-Q1-K1-B9
aggaggcattgacacatgaatctgtgcatgagtcctactgttaccagaggcttgaatttgttggtgattctgtgttggatttgctgatcacccagtatctctacaaccatcacactgatatagatccgggtgagttgactgacctgcgctctgcttcggttaataatgaaaattttggtcaagttgccgtgcgccatgaccttcataagcatcttcaacattgttcaactttactatcaaaccaaataagtgaatatgtgcagtccttcactgaatctgataacaccaccagattagatcccagcataaaaggtcccaaggctcttggagacctggttgaaagtattgttggggcaattctgattgatacaaacctgaatcttggaaaagtctgg

SEQ ID NO: 16240 - DNA, 409 bp, Gossypium hirsutum
  Clone ID: LIB3145-034-Q1-K1-C1
gcgtacgcccacgcgtccggccggattatgttaagcttgtcaaggcactttgtgctgatcatggtggtaaagtgctacgtgcccggagcgcaaaatcacttggcgagtgggctggtttgtgtaagatagactctgagggtaaagcacgaaaggtagttggttgttcctgcgtagttgtgaaggattatggtgaacaacatgaggccgtcgaagttgttcagcagcacaaggactaggtgaccggaggatggtttctttggtaaaatcatagctatttttctgggccatttatatttgtttgatagtgaactgtggattaatatgcctcagaatttcgttttctttttccgaagttgttgcaatgctgaactgttcggtgtttcttaaatatgctaggcattttttccct

SEQ ID NO: 16241 - DNA, 368 bp, Gossypium hirsutum
  Clone ID: LIB3145-034-Q1-K1-C10
acgcccacgcgtccgcgcttttatgatgccagatttgaagacgttcatcaaccctattggttgtatgtttgctttctttgcaagaagcctcttgggtgtaaccgtgacatcttcatgtacagaggggacacacctttctgcagtgaagactgcagacaagaacaaatcgagatagatgaagctaaagaaaaggacatgaacctttcttcctcagtgaaagctatgagaaagaagagccaaagggagtctacatctccgaatgaagctcaaggttactctattcgaactagcacagttgcagctgcttaaatcacaccacaaatgaaataaacaaaaacatatctaccatatatatatatgaatagttc

SEQ ID NO: 16242 - DNA, 294 bp, Gossypium hirsutum
  unsure (1)..(294): unsure at all n locations; Clone ID: LIB3145-034-Q1-K1-C11
acaatanatcccaagcgcaacgctactttttttaatgaaatctccnatttcatgcggacgagtttgcaacaatgggtacacttcatgacatatttcatgtaacgaaagtactacaaggtgcacaacctgttccgtttcttgactccatacataggataagaattacaattaatacatcatggtacttggaatattttcacgaaaacattcaaccttctattatccacagatatatctaatctatcaatttccatatatttgaagacttcaaaactaagattgcatattttaacc

SEQ ID NO: 16243 - DNA, 380 bp, Gossypium hirsutum
  unsure (1)..(380): unsure at all n locations; Clone ID: LIB3145-034-Q1-K1-C12
gcgtacgcccacccctccgcccacccctccgcttacacatcagatacatctccggcaccatccatgatctgttaatacgaaaggtcctcnctgtgtggtgaaatctcaagcttgactatggatgatgccgcctcggacattacagtctcatcatctcaatgtgagaatgaatatactgaaattgcaacagcggaatcccatgcatgatcacatggcagagtgaatatggttgcagttaggcagaagaggtcataaactcatacaattagaccctcaaaagaggaattcctccttttctttcttttttgtttgttatcagtcaattgtattctaggtagtattctttagcaataagtacagcataaatctcaatacccact

SEQ ID NO: 16244 - DNA, 479 bp, Gossypium hirsutum
  unsure (1)..(479): unsure at all n locations; Clone ID: LIB3145-034-Q1-K1-C2
cggaatnncccgggntcgagcccgacgccgtccgnngttccaatcgacgccctgctgatacanncttccagtattctaacgaaccgtggattggttcggaatacatggacgatttggtgtgaatcantttaataccataccccgagaggcatantgatgtgtcttcatgcacgatcactctcttctccacgtattcagaacacggtgcacagttggttaccgggtaattgcaagaagtttgatcgaatctctgagggccagaaagggaaagcttgatttgtacgaagaacaaaacnccgaaacgataaagtgcgggtggaagagcattggctataatctctacaatgtggagatccgaatgatttattcgaaagacggtgaaggattgctttgtgttcgcaagaaattctggcgtcccaccgtggaagaacctataaaggctgccattgtttgaacacgatgctaaacagtactcgtgt

SEQ ID NO: 16245 - DNA, 349 bp, Gossypium hirsutum
  Clone ID: LIB3145-034-Q1-K1-C3
cccacgcgtccgaagagatataattgaaagaaaagaaaaatggttctgctagagaaactttggggtgatgtattggccggacctcaaccggaacgtggccttggccggctgaggaagatcacaaccaccccacccttgttcaccaaagatgaggcttcatcaatggcgatgccgacaagtccgactacacctgggacaccgtcgacgccggtgtcggctcgtagggacaacgtgtggaggagcgggttcaatccaggtagcaaccttgcaaccaaatgtattggcgctgaagttttcgacaagccttaacctaactcttctactggttatgactggctttacagctggg

SEQ ID NO: 16246 - DNA, 309 bp, Gossypium hirsutum
  Clone ID: LIB3145-034-Q1-K1-C4
ggggcggaccgacgcgtccgcccacgcgtccggacttccactctaactgcattaaacaatggttaatgctaaagaactggtgcgctatttgtaagacaacaggcttgcttaaatgatagcaaaagctgatgttagagctgggaaatttcgttatcttttgatcgtcattaagatcctataataagggtttaggtgcgcatgaaccatacaaaatttgaagatgctgctgctaattttatgtactgcaggatgagttgtttgtcgaataacttggcataaaagcatcaatgacaatgataacatatttga

SEQ ID NO: 16247 - DNA, 325 bp, Gossypium hirsutum
  Clone ID: LIB3145-034-Q1-K1-C6
ttaaaagatcctctcatttctttcatcggaattgacaattataagtccgtcttttcatcactgcgattccatcccaaaatatttttcaaagctctctggcttgacattgtcagtgtatggcatccaatggataatgtcataatggttcgctggaccatccatggcattccacgagtcccatgttaaagtcgtggtcgatttgatggcacttcttaatacaaactccacaagaaaggaaaaatatattatcaccgattctacaacaccccactgaattcaccccctaagtttcacgttctagctttggaagatctaaatccatcca

SEQ ID NO: 16248 - DNA, 404 bp, Gossypium hirsutum
  Clone ID: LIB3145-034-Q1-K1-C7
cccacgcgtccggccggattatgttaagctggtcaaggcactttgtgctgatcatgatgggaaagtgctacgtgccccgagcgcaaaatcacttggcgagtgggctggtttgtgtaagatagactctgagggtaaagcacgaaaggtagttggttgttcctgcgtagttgtgaaggattatggtgaacaacatgaggccgtcgaagttgttcagcagcacaaggactaggtgaccggaggatggtttctttggtaaaatcatagctatttttctgggccatttatatttgtttgatagtgaactgtggattaatatgcctcagaatttcgttttctttttccgaagttgttgcaatgctgaactgttcggtgtttcttaaatatgctaagcattttttcccttt

SEQ ID NO: 16249 - DNA, 421 bp, Gossypium hirsutum
  Clone ID: LIB3145-034-Q1-K1-C8
cgggcggaccgacgcgtccgcccacgcctccggaactcacagcatactttttggcgggttccgatattggaaagggccgggggatgtccattgatgatgatcgaacactaaacaaaaccgtccattttcaacctccaagtaacctattaaacatgaacgaaatggcttcactatgggagacaaagatcggccgcgtgctgcctagggtaaatatcacagaacaagatctgctccagcgggctcaagagatgcggatcccgcagagtgtggttgctgcgataactcatgacattttcataaatggctgtcaaataaacttcagcttggacaaaactactgatgttgaagtctgctctctctatccgaacacttcttttcggaccattgcggagtgcttcgactattttgccaaaaagatatc

SEQ ID NO: 16250 - DNA, 194 bp, Gossypium hirsutum
  Clone ID: LIB3145-034-Q1-K1-C9
atcacacaccaccctttttttttttttttttttatattttttttttctaaaatttttatttttaaatgattgttttttaataatatatcttttccatcaaaatatataatatattttttatttatttaatatttttatttttatttttttttttttttaaaaaaacaaataaaaaaaaaatctaaattaaaaat

SEQ ID NO: 16251 - DNA, 407 bp, Gossypium hirsutum
  Clone ID: LIB3145-034-Q1-K1-D1
gaccgacgcgtccgctgctgcagaaaatgttctaacaaagcgattcttgtgacacatcgactcttcaaaggatggaagctttacttgcagcgaagcccacacccactacagaataccacaagaccataacaggtgatcagaatcctccagctctgccttacacagtggacaagatacttccatacacaaagtcctacgcgccaaattaccaaagtgaggcaccaaattattcaccggtctccaaatatgtattttaatttttcctggaatgttcaacgaccataaggctttgtaaaaatctttgtaatcctcattaatagaggacatgtatatagtgtcctgtaagtattctctatttaagactcgatacccactcttaactgtgtagtccccaaaaccttcatgtt

SEQ ID NO: 16252 - DNA, 325 bp, Gossypium hirsutum
  Clone ID: LIB3145-034-Q1-K1-D10
acgcccacacctccgctttgccctttcattttttccttgcctgccttaaacctccttcaagcatattcattactactgaaatggtaatggttgatgaagtcccttttcctccacaaatcacaactaccaatccactatctcttttgggtcatggaattaccgacattgatattcactttttgcaaatcaagttcacagcaattggggtttaccttgaaccagaagttgtaggacatttgcaacaatgtaaggggaagcctgggaacgtgctatctgaagatgatgacttcttcgaagctcttattaatgctccattggaaaaatt

SEQ ID NO: 16253 - DNA, 358 bp, Gossypium hirsutum
  Clone ID: LIB3145-034-Q1-K1-D11
gaaccttttctaaatcttttaacacccgagtgccatgctgttcaagtagtacactgggtggcatatgggattaagtatcaaagatgattgtatgtaaatacttgtgtaaaacatgatctgtgatttaatccggattgtattgtattatggcattttgactaagaaaggatttccggcatccgttcctctctttacctataatagcataatgatgcaattggttttattagcagttgttagagagctaaagatgatttcgggggctatgaaaactaggaatgccggacattatttttttaaggggaggagttaaatctcaaagcgtgatattgcttgaaaaaaaaaaaaataaaataaa

SEQ ID NO: 16254 - DNA, 406 bp, Gossypium hirsutum
  unsure (1)..(406): unsure at all n locations; Clone ID: LIB3145-034-Q1-K1-D12
cggcccgacccacgcgaacagttttaatctaangttttatgatttttacttttatgtccaagtgaaactttctgtctgtctcttttatttttgtttaactctcatttcaagacgttctctacattattctgttacaaggttatatgctcttacaaacaatattttatcttgagtgcctttgcatttttgttctctaagctaatttagtacaatcaaactctggttgacaacattgctgaattataaagaagtaaatgtctcttctattgtcaatgaatctaatatcttttattgaaaatgtatcattctatattatgcatgatattgaaagttttttataagattcaatctcttcaatctttaaaaaccaatgtttaacacttcttctaatttaattttatttaat

SEQ ID NO: 16255 - DNA, 402 bp, Gossypium hirsutum
  Clone ID: LIB3145-034-Q1-K1-D2
aaacttgccaataaccccaaatcccacagctgataattgcgaacccaacagatccagatgtccgagattaaccctaaatccacccgtctctgttagctagttcctttcttcggccggtggcccaaatcctctgcgtttcgaatcagagttatactcaaaggacaagccaagcccccgaaacaatgccattcaaaacaatgatagaggttgaaccaccgagtccgttaagatatatcatcggagcagcggtcatgatgatcggagttgtattgcccgtcggatacatgatgttccgtaacaaacgcgtcccttcctcttcttcttattccaaacagacgaacaaagttttaatatagagattttggtggaagagagacttgtctttccgcgaaattggtgatt

SEQ ID NO: 16256 - DNA, 353 bp, Gossypium hirsutum
  Clone ID: LIB3145-034-Q1-K1-D3
agacgcaggacaggaaaatcgatgaaccattactaaggaagcttccattgccctctaagagagagaagatcatgccgcttggtattcaggttaaatgtgaccaagggcctacaatttggttaccaagatgacaagctatcgattcaactatttgagtcaccaaatcattccgagcatggatgaccctgataagtcattttactttcacgagaagattcaaccatatcttacttttccccttgtggggatctctatatacgtgattcagactaaggcctgcagtctatacatttatgatattgttactatatgagctttttatcatccctgtctgaaatgacatgtatagtgct

SEQ ID NO: 16257 - DNA, 394 bp, Gossypium hirsutum
  Clone ID: LIB3145-034-Q1-K1-D5
cgattttcatgcaaagttatccacattacaagcgttttccatttgtgttgcagttctacgtggtacagaaacctctgctgctgctactggggagacagaaggcaaacattcatcacaatacaattccttaaaaatgcttatcgaggaggaagtgaaatcgttaataaaagcggtcacggaggtagagacgaagaataagaagaaaaagaaagtcagcaagaaggtggaagctatcccaccatcctatgtgattaaccctcctttctcaccaatcgctcgtgtctaagcccgaaacaatgccttgttgaatcgaaactggcctattgatccttctccaggcattctgccatgttctgactaagaacagcattgatccacggtaaatacaaaatgt

SEQ ID NO: 16258 - DNA, 409 bp, Gossypium hirsutum
  unsure (1)..(409): unsure at all n locations; Clone ID: LIB3145-034-Q1-K1-D6
ccggncgggcggacgcgtccggaagaagtctgcaataattacttaactcctgagaactcgcttttaagctatgattcctcggcagactcagtgtcgttgcactcgaatcaattgaaaatggagctatgaagtccgaaagaagctcgaaatggttagatttatcaaaaaaaaaaaaaaagttctaatgatagctagtattgtatatatattatatatatcagaaattagcagggaagtagaagagaggcctcaccatatatatatatcatttggtttccatgtgttctatttagccgacttcagatggaaaccttcgatttgtaaggactggagcatgaaatctcagtatgttgttattatatatatatgttatatactaactcggagtcattcaatcaaaatactcggt

SEQ ID NO: 16259 - DNA, 398 bp, Gossypium hirsutum
  Clone ID: LIB3145-034-Q1-K1-D7
gtttcccatcctttctttcatagcttctctactttgccttttggttctctgtttagttggagctataccattcagcgaatgatagcttactgtgatcggaaactcgagagccgtcgctctgtccccgctctcggtttccctcggtttaggtttttccgccaccggcgattgtggtaatcattgtctcactctccaacctaaaaaagcagcgaagagaagttttatttatttatttatttatttaagatttgaatcactgtataatataccacggtcgatcatttcaatccgatgaggaattcaaaaaataaccgtaaggaaccggaaaagaaccggagggtaaggttatctgaaagggcgtcgtcgtttcacgggagaatccagacgatggaaccggt

SEQ ID NO: 16260 - DNA, 306 bp, Gossypium hirsutum
  unsure (1)..(306): unsure at all n locations; Clone ID: LIB3145-034-Q1-K1-D8
ggaaaacccgggcggaccgacgcgtacgcgggattacccgctgagtttaagcatatttataagcggaggaaaagaaacttaccgggagtcccctattaacggcgagcgaaccnttaaaagcccagcttgagaatcggtcgccatcggcgtccgaattgtagtctggagaagcgtcctcagcgacggaccggtcccaagtcccctggaaaggggcgccggagagggtgagagccccgtcgtgcccggaccctgtcgcaccaagaggcgctgtctactagtcgggttgtttgtgaatgcacccctaat

SEQ ID NO: 16261 - DNA, 145 bp, Gossypium hirsutum
  Clone ID: LIB3145-034-Q1-K1-D9
atttgattgtggtgacccagtgggtttctttatatatagaactattatagggtgtgattgcttttaagttcatagttgtatctgaattcttaaacctagtacttgattgaaggaatattgtaagtttgattgtattattcacctc

SEQ ID NO: 16262 - DNA, 400 bp, Gossypium hirsutum
  Clone ID: LIB3145-034-Q1-K1-E1
gaactcttgaaggctgtggaaattgataccagtcagcctccatatgttttcaaatgccagttgtgcgatctgactggagtacctcctgaaaggcagaaaattatggttaaaggtggcttgttgaaggatgatgcagattggtcaacagttggtctgaagcagggtcaaaagttgatgatgatgggaactgctgatgaggttgttaaagccccagaaaagggccctgtttttatggaagatcttccggaagaagaacaagtggtatctttgggtcatagtgctggtctatttaatctgggaaatacctgctacatgaattctacagtacaatgcctccattctgttccagagttgaagtcttctttagtaaaatattcacattcaggaagaaacaatgatg

SEQ ID NO: 16263 - DNA, 403 bp, Gossypium hirsutum
  unsure (1)..(403): unsure at all n locations; Clone ID: LIB3145-034-Q1-K1-E11
gacccacgcgnccgcgatgttctgctctagatgccttgatccatcctttctttgacgagttgcgcgatcgaaaggcccttttgccaaatggccgtttcctgccgccattgtttaacttcaaacctcacgaactgaaaggcgttccggaggagataacggcaaaactgataccggagcatgcaagaaagcaatgtccatcacttggattgtgattttgatgtgtaactcaactagtagcaaaagtggattatcattatggaagcttttatggtgtttgttgttcatctatgccccagttttttgttcttgttgcatgcatgtgttgttgtttgttatgtaaaagcaaattttagacataaaaatcgtccatcccactgtcttctatatatttctttcaagattt

SEQ ID NO: 16264 - DNA, 373 bp, Gossypium hirsutum
  Clone ID: LIB3145-034-Q1-K1-E12
atcctaataacaatatcactttttttccttctgaagaatattaaatattggcgccgttttttaatgtggaagggccatcttttatttctaccacaaagtaatcctttgctttctccttctaaatctatgtatccattgaattataagaacttcaaattcatatcatattgatcattctccatattaaattacttttatagttttaaattaaaataataaaaaaaactgttttgtttattataaatggtacttactttcttgataaatattctttatgttaaaactagcttttattctcttttatcttccttattactatcattaatttctaactataactttcaaattcttaataaaaaccttttttcatctt

SEQ ID NO: 16265 - DNA, 402 bp, Gossypium hirsutum
  unsure (1)..(402): unsure at all n locations; Clone ID: LIB3145-034-Q1-K1-E2
cccacgcgtncggcttgctacaaggctctaaatgaccaccatgtcatgcttgagggtactcttgtgaagcctaaacatggtgacccctggttcggactccccgaaggttgccccagatgttattgctgagtatactgttcgtgccttgcagcgaaccgtccctgctgcagtcccagctattgtattcttgtctggtgggcaaagtgaggaagaagctactcttaaccttaatgccatgaacaagcttcaaaccaagaaaccatggtcactctcattctcatttggacgtgcccttcagcagagcactctcaagacctgggcaagaaaagaggagaatgtgaagaaggcgcaagatgctttgctcgttaggtgcaaggctaactcagaggccactttgggtac

SEQ ID NO: 16266 - DNA, 343 bp, Gossypium hirsutum
  unsure (1)..(343): unsure at all n locations; Clone ID: LIB3145-034-Q1-K1-E3
aaacataatcggagagatatagattctcattcccttatatgaacacagaactacaatgcaagagagagagattacaagcaagcccacattttatgcattcaacaacaacatttatcaatactacaatctatgctctgactatttgatccaaacccaactaatgtgtaagccaaagtttcaccccaaaaaaaaggaaaaagatttaaatcctacaaacattaacctttatttagcactaattatttagaaaatgaacgcgtaagtcgtcatggtgatagttntaattcacaggattgcaggggttgtgttgggcaatgttcgtggagcagggaacgaagggaaa

SEQ ID NO: 16267 - DNA, 389 bp, Gossypium hirsutum
  Clone ID: LIB3145-034-Q1-K1-E4
ttcgctccgcacagtccttaggaaagttagtgatgatggtggttccattgatgccaaccggcaggaatctgctgctgtttctgttggtgaagggacaagcagtagctcctccactttaggtgacaactacgtggctttatttgtacggatgcttgggctagaccatgacgctcttgaccgagaacaggcaatagttgcactatggaaatattcactaggtggaaagaattgcattgatgctattatgcagttccaaggctgcataaacttaactgtgaaccttcttaactctgagtctagtgctacatgtgaagcagctgctggtcttttacgatcagtatcttcaatcaatttgtacaaagatatagtagcagaaagtggagcaatag

SEQ ID NO: 16268 - DNA, 389 bp, Gossypium hirsutum
  Clone ID: LIB3145-034-Q1-K1-E5
gtgaataaaaataaagtatggctattcaatttaattttgtttcatccatgttaatactcggacgtctgtccatatcatccgttgaaggtcaaggaggaggaggtggtggtgttattgatgttgttgcaaagtttggtgcaaaggcagacgagaaaacagatttgagtaagccattgttggatgcttggaaagaagcatgtgcctcgacatctccgtcaaaaattgtgattcctaaagggatatattttttaagtacagataccttagatggtccttgcaaggctcctattgagcttcaagttcaaggcactgtgaaggttccggcagactctggtgctttcaagaagcctaaatggatttctttcaatagaattgaaaatttcaaattg

SEQ ID NO: 16269 - DNA, 377 bp, Gossypium hirsutum
  Clone ID: LIB3145-034-Q1-K1-E6
aaggaatctcttttaatattcataaactttttttttttcccatttcctatttaaactacggtgcattattttatagctttagcatcaatatcctattaaaatatataatacatctcttaacatgataatattatattttctttctaatctttattcacaatacccaaaacctacctattctggcttttatcataagcaccatcaaattttatcttgattaaatttttctttttttactaccatctttttttttcttctttcacaacataatattttacctttataaacgctaaacttatctactacccaaatccttcttcacatctaagacagcttatattgactactaactttcagttctatatattcaccctttt

SEQ ID NO: 16270 - DNA, 396 bp, Gossypium hirsutum
  Clone ID: LIB3145-034-Q1-K1-E7
ctcaaaccaatttgatcaatcgaattttcatctctctctttcttctatcctgcaggcccggtagaaatttcctcaagtgattttacgagaatgtctcgggtctatgttgggaatttggatcctcgggtcactgagagggatctcgaagacgagtttaggattttcggcgttctccgcagtgtatgggtagctcgaaggcctcctggttatgcgtttattgagtttgatgatcgcagggatgctattgatgcaattcgtgaactggatggaaaaaatggttggcgagtggaactttctcataattcaaaaggtggtggaggccgtggtgggcgccgtggtgggggtgaggatttaaagtgttatgagtgtggtgaacctggtcactttgctcgcgaa

SEQ ID NO: 16271 - DNA, 374 bp, Gossypium hirsutum
  unsure (1)..(374): unsure at all n locations; Clone ID: LIB3145-034-Q1-K1-E8
cggacgcgtgggggaatttgcagaattttttgtactatgtccgctcgaaagttccaccggtatcaactcccggtacccaccgatcgctccagatagaaatttagtctctcctaccaacacgccagcataagccatctttcagtaacccttttgctgcccaaatgctcttccaggccaatgaaaaagccccgtagtacgtactatcctagaaagtgaagagatatttggtagactgtcgccgtataacagcctaattttcagtggtgtcgggaatagagatttgagatcactaaatccgacgagtgagtcaaaaatttaataaattaatacctatgagtcaaatgtgaatatagaagtatttttgaaaaanaaaa

SEQ ID NO: 16272 - DNA, 395 bp, Gossypium hirsutum
  Clone ID: LIB3145-034-Q1-K1-E9
aaaaataaaaattaggagtatattgggcttagtaaccggggtggggtgcttggctggcagctctcttcgcgtcaaaaggttcaatatattcctaagtaaaaataaatataaaaattaaaattctattaaaaaaagaaaaaaaaagacatattaataaagtgtgaggactaaaggtagaaacgaatagggtgtcttgataggtttggtaaattacctaattttcatgaaataatccaagttgatcttaatttttgtgtgtgttaattggaatacttttttttcaattttacttaaagcaagctaagggttctctttatttttcacatgcattttgactagtttttataaaactttggagtagtatttctttcatggtagaatttaattttcgcagt

SEQ ID NO: 16273 - DNA, 400 bp, Gossypium hirsutum
  Clone ID: LIB3145-034-Q1-K1-F1
cggacgcgtgggccgaggggtacacgtgtcgactcttccaattacaacccattaatcgggtgggtgcatggagctcaaatggtcgcatttaatatgcagggttatggaagatctttatggttgatgcatggaatgttcaaagccaacgggggatgcggatacttgaaaaaacccgatttcctattgaatcctaacaaagtctttgatccaaatgtcaagttaccggttaaaaaaattttgaaggtaactatgtatatgggcgaagggtggtattatgattttcatcacactcattttgatgcgtattctcctccggacttttatgcaagggtggggattgctggagttccgttcgattcagtgatgaagaaaacaaagacattagaagacaattgggtgc

SEQ ID NO: 16274 - DNA, 393 bp, Gossypium hirsutum
  unsure (1)..(393): unsure at all n locations; Clone ID: LIB3145-034-Q1-K1-F11
gcgtccgcaaaccagggcttaatctgtccctactttccccaaattcgcgaaattttctcggctttggctgcaatcctcatctaggcttcgattaccacgaagcaaacaaggatttcgaagcttcaaaaaaaggataagtctcttccctttactcactttttttttatatttggtttcatacgcagtagcaaagctttaagaaacaggagatgaatcgaaaagaaaataaaatcatcttgtggaaaactgctctcgagatgatttcttattcaaactctttttttttgtatagatttgtatccgtaatttttctgggctcacccccttttacattcgatttcacaggctttctattattttctgtcaatctatacaaaanattcccttagatct

SEQ ID NO: 16275 - DNA, 376 bp, Gossypium hirsutum
  Clone ID: LIB3145-034-Q1-K1-F2
ggaaatgtcttcatcttcgctaacaatcgttcggttcttttgaaccctaacacccaaacgatcgtccacgagttcccagtgctccccaatggtgctcgtaattatcctgcgtcaggaagtgcttgcctccttccgatcatgctcaagcctaatgaagatcgtagagtgatccccgccgaggttttgatatgcggtggtgcatcacatgatgcgtacgccaaggccgatttgcagcgtcctaaagtgtttttgccagggaacaccgactgtgctcgccttgatatcaccaaaaggaacggcaaatggaagatcataaacatgccatcagctcgtctgttgggagacatggccgttttaccaacaggagatgtgctta

SEQ ID NO: 16276 - DNA, 395 bp, Gossypium hirsutum
  unsure (1)..(395): unsure at all n locations; Clone ID: LIB3145-034-Q1-K1-F3
tccgtcatcttctaatcctgttctcaggctgatgggaaagaacttaatggtggttaacaaggaggaagacaaatctgtgccacttggtcaggcccagtcatttgcccagagtgatcatcctactcctaagtttccaactccttctggaatctctcctagcaatatggggaatcaagctgggatgccattccatcacgcaatgtcttaaagttcggtaatctttgatcagcattcaaaagatttggtggggcaatcttttgatgtcaatttacaaatggctatagaaaccatgcaaaattttgaacaccaccacaattttcaactgggatgtttttgatgagcgtgtggaccgtgttttgacaccctnnncatgagtctacanatatgaatgtgac

SEQ ID NO: 16277 - DNA, 373 bp, Gossypium hirsutum
  Clone ID: LIB3145-034-Q1-K1-F5
gcaagaacaaaaatttcatttgaaaccccgttttcttttggtctcgaagcgattcaaaagggcgggattctattttttagggtttgggttttcattgatttttagtgaaaaaattataaaaaaattatgggaagaggtagggttgaacttaagaggattgccaacaagatcaacaggcaagtcacttttgcaaagagaagaaatggtcttttgaagaaagcttatgagctttccgttctttgtgattcttcaaactctcttattatcgttatatatgtattcaggatttttctgggctcacccccttttacattcgataacacattctagatgtacctaacatgcaactatggagctcctgagccaaatgtgt

SEQ ID NO: 16278 - DNA, 391 bp, Gossypium hirsutum
  Clone ID: LIB3145-034-Q1-K1-F6
cccacgcgtccgcaagaacaaaaaaaacaggtgaaaccccgttttcttttggtctggaagcgattcaaaagggcaagattcttggttttagggtttgggttttcattgatttttagtgaaaaaattataaaaaaattatgggaagaggtagggttgaacttaagaggattgaaaacaagatcaacaggcaagtcacttttgcaaagagaagaaatggtcttttgaagaaagcttatgagctttccgttctttgtgatgctgaagttgctctcatcatcttctccaatagaggaaagttgtacgaattttgcagcagctcaagcatgatcaaaacattggagaggtaccaaaaatgcaactatggagctcctgagccaaatgtgtcatcgag

SEQ ID NO: 16279 - DNA, 408 bp, Gossypium hirsutum
  Clone ID: LIB3145-034-Q1-K1-F7
ggaaaacccgggccgaccgcacgcgaccgcaacaattcacaggtctaagatgtccaccactctcctcatctcgtttttctgtggggccgaggcatacccagagagtgggcgcttttgcttctcctataatttcagccgtcgctgtctcaaatgcacagaccaaagataggcttgaactcaagaagatgttcgaggatgcttacgaacgctgtctaactgctcctatggaaggcgtggcttttactgttgaggattttcaaaatgctcttgagaaatatgactttgattctgagcttggaaccaatgttaaaggaacatttttctgcacagatggcaatggggcgtttgttgatattactgccaaatcttctgcatatctaccgggccaagaagccatcattcacaaaa

SEQ ID NO: 16280 - DNA, 323 bp, Gossypium hirsutum
  Clone ID: LIB3145-034-Q1-K1-F9
aggcaatcaatgtcatctcatgctggtatgaagataagactgaatgggggcaaagtgtgggatggatctacggatcagtaactgaagatgttgtcacagggtataggatgcataatcgtgggtggagatctgtttattgcgtaaccaaaagagatgctttccgtggcactgctccaataaatatcactgatatacattaccacgttctacactctgccactgtgtctggcgagatatatttttcacacaacacaatgccctgttaggcagcccgaggcttaagtttctacagaggattgcttatcttaatgttgggatatacc

SEQ ID NO: 16281 - DNA, 306 bp, Gossypium hirsutum
  Clone ID: LIB3145-034-Q1-K1-G1
aagcataagtgtatcattaaagtgggtgggcatattaccttaggagttgcattctggtccatcatgtgttgaggggggttgcactggtgctgacactgcctgcaagcaagcaacatcttttctccggtttgttaattatgcatcttaaatcttactatgttcaattttgggtttaattctcatatgtaactgatatatttgaattacatgatattacaattcatgaaatgtaactcatgctggaactttgatctttctaaaacaaataacacctccccaaattttttaacttgcctgcctttctat

SEQ ID NO: 16282 - DNA, 267 bp, Gossypium hirsutum
  Clone ID: LIB3145-034-Q1-K1-G10
aacaccttcaagggcggatcatatttttcttacaaatgcccatctttcatcaaccgtagggtatctttcttgacgatggttctatcatgagtcttttttatgtgaattctggcattgttggactgctaactttctagtaagtgatgtagtgaatttagattttagttaatgtgacgttttaatttatgaaatctttatttttactttttatatttaagttgttaactttctgttttatttgattataaaatatgattattattatca

SEQ ID NO: 16283 - DNA, 390 bp, Gossypium hirsutum
  Clone ID: LIB3145-034-Q1-K1-G12
cttgggtaaactcacgcttacaactgaactttgtggccaacaacttcacacttaacaggggaagagataagggttttaccaggattagaatgcctacaaagaagcttcccatgctttagaaatgcttcacgatatgcaaacttctcgctcaattgtggtggaccagcaataatagctgatgggatacagtttgaggctgagaatagaacactcggcccagcaaaatttaatgtaaccagtacacagaaatgggcagttagcaatgctggcttgtttgcagacagacaaaatcaacagtttgtggaaaacaatggaggacaagtgagaagtacaaacactccagagctgtatgagacttcaaggctatcccctggatcactcagatactat

SEQ ID NO: 16284 - DNA, 401 bp, Gossypium hirsutum
  Clone ID: LIB3145-034-Q1-K1-G2
gcattatcaagccggtgaaggaaaggggtacaaccttagaccctgaattggttcaagccgggacaggaacctagaatcataaaggtgatgcaaggtgggggtggagaattcgataccataaccaaagccatcgagagcgttccatcagggaacgccaaacgcgtgattatatccatcggacctggatcttacaaagagaaaattagaattgaaagaaataagcctttcattacattgttaggagatcctaaaaacatgccaaatttgacatttgacggcaccgccaagcaatatggaaccgtagatagtgccactcttattactgagagtaattactttgtgggtgctaatctcaatatagtgaactccgctccaaggccagacgggaaaatggtaggagc

SEQ ID NO: 16285 - DNA, 398 bp, Gossypium hirsutum
  Clone ID: LIB3145-034-Q1-K1-G3
cgagttttctctgttggcttccgtcacaactccaaaaccgtacacaaaatgggcaagggtgtgggcgacgagcaagtctcatcaatgaaggaggctttcactctcttcgacaccgacggtgacggcaagatcgctccatcggagctagggatcctaatgaggtctctcggcggtaaccccacccaagcccaactcaaagctattatcgctgaagagaagctcacggcgccctttgacttccctcgctttttagatctcatgtccaagcatatgaaacctgagcccttcgataggcagctacgcgatgctttcaaggttctggataaggacaatactggctttgtctccgttgcagatctgagacatatactgactagcatcggagagaagctggagcc

SEQ ID NO: 16286 - DNA, 390 bp, Gossypium hirsutum
  Clone ID: LIB3145-034-Q1-K1-G4
gaagaatgtcgaaaacgctggtgcaaccgatagggcaaaagcggctgacgaatgtggccggcgtgcgtttgaagaaacacggcatgcgatttgaaatcgcttgctacaaaaacaaagtcctctcatggcgttcccgggtcgagaaagatgtggacgaggttctacagtcccatacggtttactccaatgtttcgaaaggggttcttgctaagaccaaagatttggttgctgcttttgggactgatgatcagactaaaatttgtttggagattttggagaaaggggagctacaagttgctgggaaggaaagggaatcgcaattttcgagtcagtttcgggatatagcgacgattgtcatgcaaaaaaccatcaatcctgaaactgatcgcc

SEQ ID NO: 16287 - DNA, 359 bp, Gossypium hirsutum
  unsure (1)..(359): unsure at all n locations; Clone ID: LIB3145-034-Q1-K1-G7
cgggccgacccacacaaacgcacncaattaccaaccctaaccctattttttcaaccagaattcaacattaattgggggtgttcctttttatatgctaatactaccaatctatcctttaaatccaaagctgtaaataaatcttttaattctgccaattatccaaacaatccaaaaattcctactatttccttctttctttatatattataattccattagcaatacattaatgatcaccctaaaaacaaattctttacttttttcttctaatctttttacattaattaaatatctttatttaaacttaaaaaacactttatttttctaaagcataaaattttaatgatttatattaaaat

SEQ ID NO: 16288 - DNA, 392 bp, Gossypium hirsutum
  Clone ID: LIB3145-034-Q1-K1-G8
ttttgcaggaagtacaggttcggattgctggttttggaccagaggaggatgagtgggtagacattcgcaagcatgtcaggcaacggtccctcccgtgtgaagcttctgagtgtgttgcagttcttcctggggaccttgtactgtgttttcaggaaggtaaagatcaggctctctactttgatgcccatgtcctcgatgcgcaaaggcggaggcatgacatacgaggttgtcgttgtagatttctggtgcgctacgatcatgaccagtctgaggaaattgtacctctgaagaaggtttgccgtcggcctgaaactgattacaggttgcagcaactgcatgccgcaagtaacttatccaatgatcaacacaaaactagcaccgatcaatctact

SEQ ID NO: 16289 - DNA, 359 bp, Gossypium hirsutum
  Clone ID: LIB3145-034-Q1-K1-H10
ctattcttcaaatgactaaaccggtacgtttatttaaacccacacccactacataacaccacaagaccacaacaggtgatcagaatccttcatctctgtcttacacagtggacaagatactttcacactcaaagtcctactctccaaattatcaaagtgaggcaccagattattcaccattctccaaatatttattttaattttccctaaaatgttcaactaccataatactctgtaaaaatctttgtaatcctcatcaataaaggacatgtatatattgtcctgtaaatattttttatttatgacccgatacccactcttaacaatttattccccataacctttatttttccaaacca

SEQ ID NO: 16290 - DNA, 252 bp, Gossypium hirsutum
  Clone ID: LIB3145-034-Q1-K1-H11
ataaacaacaatccgaaaatggtgaagctcctgggtcatatattgttgggggatcagcaggggggtggaactttatcacctttacaggtaacaaatcagtctattatggagtaaccaaggaattatttcgtagtgctcaagcaagtttaggtgagtgacgtgtttctgatatgtattgttggctaaataatgactttaacagtaaatgcttttggagctctaccttaatattaacatcaaatgattgtactg

SEQ ID NO: 16291 - DNA, 291 bp, Gossypium hirsutum
  unsure (1)..(291): unsure at all n locations; Clone ID: LIB3145-034-Q1-K1-H12
cccacgcgtccgcaagctttccagtcctctagtgaaccttaatgtgtctggtactcccacggaacgttccttcctcttagtgtagtgctcttagtccccttttcctttttggtaaaaaatgtaagcatgtccctaatgcaaatatatactcttcaccttataatatatattcaatgaaatttgtcaaattccttgnnnaaaaaaaaaaaaaaaaaaaaaataaaaaatataaaaaattataatataattaaataaataaattttataaaataaaaaaaaaaaatntttttt

SEQ ID NO: 16292 - DNA, 397 bp, Gossypium hirsutum
  unsure (1)..(397): unsure at all n locations; Clone ID: LIB3145-034-Q1-K1-H2
cccacgcgtccgccgacgttgcgtttcgatacggggggtggagaggacggcgtangatacttagggtttggtgtgacgacgtggcgcttactggttcctccggaaagatgaccggcggtttcaaaaaatgcagtgttgattgatttactgagcagatgactaagatgaatgacattcatggttaaaagggaaagaatagagaagaaaagaggcagggaaagaatgaaaaggctacaaatgggaggaattgtttgagtagttttgagggatgttaatctgcccccaacaatctttatttatctttcatcctgtgttaaatataaatgtaaattttatggttctcttttaggtgttctatttatatataattataattatagtttcagccaagaagtta

SEQ ID NO: 16293 - DNA, 397 bp, Gossypium hirsutum
  Clone ID: LIB3145-034-Q1-K1-H3
ctgtcgtccatgttggccaggttgccaagataagtccaaccgcccctcttgataaagtctgtggcattagctgtgggatatgtacaggttttggggccactgtgaatgttgctaaacccaaaaagggtcaaactgttgcagtttttggactgggtgccgttggtcttgccgccgctgaaggtgcaagggtttgtggggcttctcggatcatcgctgttgatgtgaaccccagaagatttgaagaagctaagaggtttgggattacagaatttgtgaatccaaaagactacgataagccagttcaagaggtgattgtggagatgaaccgcggaggagtggatcgcagtgtggagtgtacagggagcgtccaagccatgatttccgcttttgaatgcgt

SEQ ID NO: 16294 - DNA, 392 bp, Gossypium hirsutum
  Clone ID: LIB3145-034-Q1-K1-H5
ggcaaatccaattctaatggcactggtaagtcaaagtctggttcgtcaaaggtgggggagggagaaagcatgaaagagagctcaactgattcaggaaaagttgtgggaagtttgaagcggaaagcaccaagtttgttgaaggcgcagggaagtgattcgaagtctggaaaaaagaggcaaagatgagttgaaagtcgcacctactgcattgtcgtttgccaagggttggttcttctccaatgtggaacttgggtgaattgtagtatttattgtagcatttgggtatttgacgtagatcttaggtttgtggctagcaaatattcgtagttaatgcagtttatagtggttgtactttgtagggttaagataccttttttatatagatatagttt

SEQ ID NO: 16295 - DNA, 414 bp, Gossypium hirsutum
  Clone ID: LIB3145-034-Q1-K1-H6
cccggcccgagcgacgcgtccggcataagccagccaaccggtcctctagtgtccgttatatacagagtttatggagcggttgttactcggtggtttttacaacgagctgttcatcaactagttacactcgagatcaaatcagtattgctttcggtgatgcctatggtaaccagatatatgtgccgaggttggatgatccagcgtctagggcatttgaacaatgttcttcagataagtttgagattaaaggaccatgtgcgtatcagatctgctatgtttatctctaccgaactggaccagatggttggaagccggagcaggtgaagatttatggctataattcaagggctgttacattttactatgacaccttcattccaggttacacttggtatggatttaattattgcaata

SEQ ID NO: 16296 - DNA, 393 bp, Gossypium hirsutum
  Clone ID: LIB3145-034-Q1-K1-H7
cccacgcgtccggcttcctgttttctctttcgctttgttcctctccacttttttcgagtggataaatacgtaaacaaaggcttttctctttacaattttgattccattgttgatataattaccatatacgatattttgtaaaactgctttcatggggtttccagttggttacaccgaagttttcttgccgaaactcttcgttcacacgctttcctttctgggtttcatccggaatctgatctccgcacttttaaatttcatgggactcaccaatttcctcgaaacagacgcagtctggcccgaaaacccgacccgaacgacacccgagcatccgcccgtatcagctctcctgatccgggagatacttcccgtcataaagtacgaggagctcgt

SEQ ID NO: 16297 - DNA, 389 bp, Gossypium hirsutum
  Clone ID: LIB3145-034-Q1-K1-H8
cggacgcgtgggttgctgttgaagtagttttatctatagaagacggagatggagaggcagagaagcaagcaggttcgtttgttgatgtgggttttggttgctgccttgttctcccacaacatggtcattgcagtgacctccactggccttggagagcagaaaaattactatccagttcctgaccctcatgctggaactcccccttcaggttcacatggcacaccaccatcttcaggaggtggaacacctccctctcatggaaccccatcacatggaggtggttaccacccttcaccaacaccatcaacgccttcgggtggaaattgtggaactccaccacatgacccttcaactccatcaacaccatcacacactccttcgcatggtac

SEQ ID NO: 16298 - DNA, 399 bp, Gossypium hirsutum
  Clone ID: LIB3145-035-Q1-K1-A1
aacccacttcagttgcctcctccgttgccatccccaaccatgctgcaccctcatcataagtgttcaattcatacaagtccgtccagtgcaatagttgcatcgatgaataacatggcgttcggaagcggcggtggcggtgggaacgagtcttcaagcgaggatcttaacgtgttccaatctaacgccgacggagtgcccccgcctccgccttatgtgttgtcaaagaagaggttccgcacaaaatttacgcaggagcagaaggataagatgttggagttagccgagaaagtgggttggaggatcaataaacaagacgaagaggaagtacagaaattttgtgctgagtatggggtgaaaaggcaggtattcaaggttttgatgcataataacaagaacgtg

SEQ ID NO: 16299 - DNA, 225 bp, Gossypium hirsutum
  Clone ID: LIB3145-035-Q1-K1-A11
acgcggcggaaaaggtttcgctagtgcatcttcagccgcagctaaaccccgacattgcgaggggggtggcgggtctttatcaatgagccaaattgtcttatacatctcgatctaaaaccaaggaatgtgcttttggtcaactccagagctggtcatttgaaagttgttgacttttgtccgagcataactcttatggtatataattgtcttgtagttatctaatat

SEQ ID NO: 16300 - DNA, 315 bp, Gossypium hirsutum
  Clone ID: LIB3145-035-Q1-K1-A12
ggaagacccacgcgtccgcacagctgcattaaggcaatccctttgaacctgcactttctgctacgactgtacataatcaggcaatgcacatttcaaagtccgaagcacaagaagagagggtttggccaaatgtacctgagcatccatcggaccacaccagaatttggtctgacctctcaggaagtgcagcaaaaagcagttatgagagtgaagaaaggcatagtgaaaggacagcagaacttggatgcttgttatcagagggttttacaaaggattagcatgttgcatattacaaatgatgcaccgttttatgaa

SEQ ID NO: 16301 - DNA, 369 bp, Gossypium hirsutum
  Clone ID: LIB3145-035-Q1-K1-A2
gatccctcttgtagttaagtccttgaagaaccctaggagtgctgtttgtaaaactgcaattgtgacatctgctaatattttcagtgcgtataatgatgatttgattgattctttggatcccctgcttgtacagcttcttcttaaggcttcacaagacaaaagattcgtatgtgaggcagctgagagggccttagaggctatgactacttcagtttcccctatgttgttgttgcccaagttgcaaccctatctgaagaacagaaacccacgaattcgagcaagggcatcaatgtgctttagtcatagtgttccacgtctgggtgttgagggaattaaagaatatggaattgacaaattgatacaagtagc

SEQ ID NO: 16302 - DNA, 440 bp, Gossypium hirsutum
  Clone ID: LIB3145-035-Q1-K1-A3
ataaagggaaacccccctttctctgctagggttccaagattgaaaccccgccgccgctatgcctccgtcgtccgatgatcggagccgtgcgaggacgccccccaacggcgccttgaagtgcgctcataagtcgaggccgcgaacaccgagacgagggggaagagaagagcttcggcccctccttgaacccacatccggcgacgatgaagttccatcggcggtgggcctaagggccgactcaggtagtcttcttcttccctttaatcatattttgattattttttaaatcaatttgtagaaaagaaaaaaaaagaaaaagaaaagtaaataaaatagataaatatgcaaaagaaaaatccagagaaagcaattcaaatccacccttttttttaaatctgggttttctgcttttttaattctaatctctgggggtgtcgtac

SEQ ID NO: 16303 - DNA, 363 bp, Gossypium hirsutum
  Clone ID: LIB3145-035-Q1-K1-A4
tttaactggaacatgtatagggaagtcccttctgtctgactgggatttaagtttgacttgggaagggagctttttcatttgaccaaagatacaaccgactatgcttggtacacaactagccttttgttgggtcggggagatttaccaatgaagaaaaatgtccgaccagctttacgggttgctagtcttggccatggaatccatgcctatgtaaatggtgaatacgctaggtctgcacatgggagcaaagttgataagagctatgatatgcagagagctgtaagcttgaatgaaggggaaaaccatattgctctcttgggctacttagtgggacttcctgatagcggagcctacattgagaaa

SEQ ID NO: 16304 - DNA, 329 bp, Gossypium hirsutum
  Clone ID: LIB3145-035-Q1-K1-A6
tccactcttacgatttctccatcaaaaaagtgcttatctctagacggagaagctgagaggtggcaccatctaaaacgctggaagtgctgctggctgatcaaagaccaaattaacctatatctccacctagaaaaaacgttcgttactatgctgtgaaagctgtatacccagctttatatcacattttcactgagaaagctactgtgtgagctttgttccgctctcggaggcagaatatgatgttctaagatgctagcataggaggtaggagaagtatgtgacctatgatggaaagtgtgaggctctgcgctgagcaaatagatgcacgc

SEQ ID NO: 16305 - DNA, 421 bp, Gossypium hirsutum
  Clone ID: LIB3145-035-Q1-K1-A7
ctcttttttaccttactaactcatactacaatattaaatattattattattccctgtgtataatatgaacgatggagagggcgctcaaagactgctcatttctcatcaccttcttccgattatctgatcccttctttcacttccattcaaaagcttgaaatttttatggttttgaaagagcttctgaagttgacacacacacacacacatatatagagatagagagagagaaaaggatgggattgagttgtaaacaggtttccagtgatgaggttgagtggatccagggccagtctttgttgcaggctccaactatggagcgtccaaaagcttcatcaatgaaaaggcgacatcatcaagaaaaccagctgcagcaatcggaaccgccattgaagtgtccaaggtgtgattctttcaacac

SEQ ID NO: 16306 - DNA, 405 bp, Gossypium hirsutum
  Clone ID: LIB3145-035-Q1-K1-A8
gaaaactttgtttgcaaaagccagcgccctctatttccagctccgtttctccaacagttccgttcccaccgccgcaccgtcgatttccacctcagtttctccgtccatggctgcaacggactctcctctaacgaccaaggtttgtatcattgggagtggccccgccgctcacacggccgctatctacgctgctcgtgctgagctcaagcctattctttttgagggatggatggctaacgatattgcgcctggtggtcagcttaccaccacttccgacgtcgagaacttccctggattcccggatggtatcatgggttcggagcttatggagcggtgccggaaccagtcgcttcggtttggtactactatctttaccgaaactgttgacaaggttgatttttcttc

SEQ ID NO: 16307 - DNA, 434 bp, Gossypium hirsutum
  unsure (1)..(434): unsure at all n locations; Clone ID: LIB3145-035-Q1-K1-A9
gcgtccgcccacgcgtccttccacgcgtcctgtaaacccgcnnttttaaaagatcgagaaaagatgggagctagagccatgttttaaaccatatagtcatttaaaatttcgatggtatttagaatttccatagtttcctgtaaaagattatagtttctgtttataaaaataactcattaggatccaaagtcaactcatgtaatagtttataggcgctcctaactgaaaatactccggtcgactccccttaccaaactagaagatcttcatgttcagactccaacaatgttatcctcaatattatcttcactacagctttatttgaagatcatcacagatagaaatcctatcacctcgacccagtcttcagcatatacctttttcaagcatacctttttcttaccaaacactacaacaagattttttcctcttta

SEQ ID NO: 16308 - DNA, 367 bp, Gossypium hirsutum
  Clone ID: LIB3145-035-Q1-K1-B1
cccacgcgtccgcccacgcgtccgagccaaatctatggcaagacccttgctcaggacctcggaggtgagggaattttaaaagataccgtagaatgcctatgtacccctcaaacatatttcaccagggtattggaagcagctgtgaaggaggacgcagatgaggaatcaaaaagagcactgactcgagtgattgttactcaaaaggagcagctggtgcaggaaggctttgttcctaataaaattcaagacattcttttagggctttacaaggatttcttgcttgcctccattgcaagtggagatatcaaataaacaagaaaccccactcttaaattgttcaataaaattatgaattaccttggattcc

SEQ ID NO: 16309 - DNA, 437 bp, Gossypium hirsutum
  Clone ID: LIB3145-035-Q1-K1-B11
gggaagccacgcggcgaaacaatgtttgcagctacaaactttaacagatgagcttttacactccactttagcttctagatatgtgcgcgcttttgtaccaaggttcaagatgccaaataagtctattccaaaggacgcggcgtatcaagtaatacatgatgagcttatgctggatggataatccgaggttgaacttgactttttatgttacaacatggatggaacctgtgtgttgttagcttatgatggctgcatttaataagaactatgttgacttggatgaattccctgtcaccacttgatcttataaattgatgtgaaaacaatgaattgtaatcatttttttaatacaacaagatcattgttttaatgtagttcaagaaaaattgattttatataatctgatatatatatccttatataatgtataattaatt

SEQ ID NO: 16310 - DNA, 184 bp, Gossypium hirsutum
  Clone ID: LIB3145-035-Q1-K1-B12
gtgttctgtatcaacatagtgtttttaaatgttagcttacaccatatcccgttatctctcgtgcagagctttatttcattcactccagcgaccaccaattttctgcttgtgtcaagtaaggagaaagtactttgtcaggcaaataatagcctttctggttcctaattgcagaagaattttagtt

SEQ ID NO: 16311 - DNA, 245 bp, Gossypium hirsutum
  Clone ID: LIB3145-035-Q1-K1-B2
cccacgcgtccgcccacttgtccgtccactttttctttgacgcgtgggcggacgcatgggcgtacacgtgttttttcatcagggtcagcttaacaaattagtacatgtattatgtatcctaaataatgatagataaaatcctacaaatacatccatataattggatcctgaattcaaaaaagttgttaaaattttaatgtagattgaaatcaattttcaagcattattgagattgattgaattaa

SEQ ID NO: 16312 - DNA, 411 bp, Gossypium hirsutum
  unsure (1)..(411): unsure at all n locations; Clone ID: LIB3145-035-Q1-K1-B3
cgacccacgcgtccggcgatggatcattcaaattcaaatttgaagtatccttattctataacatagctaanaatatgttctggctcttatagatggagtgagctacaactgcanaaatgttagaaattaagggacccaactctttttcctcacttacattcaaataagttaaaatcttttcggctgataatctgtaaacaactcaatgatcccttaatttcttttttcttatagtgtattttcattttgctggctattgaattttttaatctaatttttgtttataatttgaatatcactgtttaaaatcaagnctcataatttaaatatctataatatattaaatttttttactttttatatttatcatcttataatatataataaaagggcggcccctttaaagaacca

SEQ ID NO: 16313 - DNA, 444 bp, Gossypium hirsutum
  Clone ID: LIB3145-035-Q1-K1-B5
cccacgcgtccgaaagcacctgctgtgaggaaagcttctgctcctccccccaagagggttgaggattccagcagtgactcctgtgatgacagtgagtctgaggatgaagagactcctaagaaagaggctaaagttgctaaaaaagcaagcagtagtgaagaggaagaatctgaggaatcagatgatgacgaagaaagtgacgaagaagaagctccaaagaaaaaagacacagatgtggaaatggtcgatgctacaacacctgctaagcaggacttgaagtctgcaaagaaagttccccaaacacctgtaactcctcaaacccaatccacaggatcgaagacactgtttgttggaaacttatcctttcaaattgaagatgctgatgtaaggaatttctttaaaggtgctggtgaagtcgtcgaagttcgttttttcctctgatgc

SEQ ID NO: 16314 - DNA, 437 bp, Gossypium hirsutum
  unsure (1)..(437): unsure at all n locations; Clone ID: LIB3145-035-Q1-K1-B6
atttgaatgaaattgtctagcttgtaggaattgatgctctagctgaaacggataagagcacactagaaactgctaaacttttaagggaagattatcttgctcagaatgcttttactccatatgacaagttctgtccgttctacaagtctgtttggatgatgcgcaatattgttcatttcaatgctttggccaaccaggcagtggagaaagctgccgggatggacggtcagaagataacatacagtcttatcaagcatcgtctaggagatctcttttatcgtttagtgtcacaaaaatttgaagacccagcggaaggagaagaagccctggtggcaaaattcaaaaagcttaacgaggatcttacggctggtttccgtgcattggangatgaaactaggtgaacaaaaaagttaaagattagactttcttcctaccta

SEQ ID NO: 16315 - DNA, 445 bp, Gossypium hirsutum
  unsure (1)..(445): unsure at all n locations; Clone ID: LIB3145-035-Q1-K1-B7
cccacgcgtccggcaagtttgttgcaccaattacccgaaattcaagacgaatgttggggtggaggatgagttcctacctcggcaaagtggtgatcttacaattatgtatgatgtgacgagaacgtacgactcgaactattgggcacaggttactatctcaaaccataacccccttgggcggcttgataattggaaattgagttttgattggatgagggatgaatttatatatacgatgaaaggggcttatccgtatgtcgttgattcatcagactgcatatttggtccgcaaggacaacactatagggatctagactttggcaatgtgttgaactgtgagaggaggccgacgattattgacctgcctctgacaaaggcaaacgatacaaccatgnggatgatcccaaaatgttgccggaatggtactattttgccaccaacaatg

SEQ ID NO: 16316 - DNA, 190 bp, Gossypium hirsutum
  Clone ID: LIB3145-035-Q1-K1-B8
ttcccactctcttttttgctttcagttaacaacaaaatccgtaaatggctaccactgcttcgccaatggcgactcagctgaagagcagctttaggtcgtctgttacaagaggactggtagtccccaggggcatttcgggatccccgtttaaagtatcctttcggaaagaccaggacccccttgcttcact

SEQ ID NO: 16317 - DNA, 329 bp, Gossypium hirsutum
  Clone ID: LIB3145-035-Q1-K1-C1
aaaaaaaaaaaaaaaaaataaaaataaaaaattaaattaaaaaaaaaaaaaaaaaaaaaaagagaaaaatataaataaaaaaaaaaaaaaaacaaaaaaaaaaaaaaaaaaaaaataaaaaaaaaaaaaaatggggcgccccttttaaaaaaccaaattttacttccccttccttccaacttaatactttttttatggggcacccaaaattaaattaattgcccgtggttttaaaacatcttaactggaaaacccttggcgtccccaaatttaattcctttaaaacaaatccccttttcccaaattggattaattcaaaaaaggccccc

SEQ ID NO: 16318 - DNA, 181 bp, Gossypium hirsutum
  Clone ID: LIB3145-035-Q1-K1-C2
cggacgcgtgggtttcgatcctattggggtggccctccggaaccgagtaatgattaacaggggccggccggggccttcctatttcatagacacaggtgaaattcttggatttatgaaagaccaacaactgcgaaagcgtttgccaagttctctatgaaatctgaatctatatcaatcaaaa

SEQ ID NO: 16319 - DNA, 427 bp, Gossypium hirsutum
  Clone ID: LIB3145-035-Q1-K1-C3
gggttgtggtgggacttgtgctgagtgtggtcagcccaggtgcgcatcaggatgttgccaggctgaaactgtaaagagcaaaggtgataaagaaattggcagaggaagttttttctattgttggccgggatccacttattgaggtagctattagtttggagaaggccgcattatctgacgaatattttattaagaggaagctttatccaaatgttgatttctattctgggttaatataccgggccatgggatttccaccagagttcttcactgtgttatttgcaatccctcgaatggctgggtacttggcacactggcgcgagtctctagatgatcctgatacaaagataataagaccccaacaggtttatactggtgtatggctacggcattatatgccactcaaggagcgcatgggcgtgaatga

SEQ ID NO: 16320 - DNA, 376 bp, Gossypium hirsutum
  Clone ID: LIB3145-035-Q1-K1-C4
gcaatgctatgaggatgcaaaattgatgaatctattcccggagattgtgaagtctctctatgaccaggatgtccttgcggaagacacgattctttactggttccgcaaaggattaaacccaaagggcaggcaaaccttcgtgaaagccctggagcccttcgtgaattggctggaggaagccgaagaagaggaataagcgcgtggataataatagtgttatcaacaatcaagaagttatgataattaaccttgttatcttttccttgtctttattgagctatatgtttgccgaactcttttgacatttggtgtgtgcctgttaaaatatttgctgcgctcgtatgctcagcttaatggattattagcttaaataaag

SEQ ID NO: 16321 - DNA, 381 bp, Gossypium hirsutum
  Clone ID: LIB3145-035-Q1-K1-C6
tgtgagagttgggctcttattcctctttgtattgggtgcaagctgggtatgcgatgcgtagacaactagaagccgctccggtagaactctctggtgcatcagttgtgcagacaaaccaagggcaagatgaggaagtagtagaaaacattgttgggaaggacaatgtgtgcacattgtgtgaggaatttgctactgaagcaattgatttcctttcacagaacaagacccagactgagatagttgaggtgcttcacaagagttgctctcgtattcctttctttgagcagcagtgcatcacactgctggactactatgttcctctctttttgtggaaatctcttcggtacaacctgaagttttgtgtaaagaggtcaacctatg

SEQ ID NO: 16322 - DNA, 387 bp, Gossypium hirsutum
  Clone ID: LIB3145-035-Q1-K1-C7
cccacgcgtccgcccactcgtccgattgttttcaaaatcattggaagcaataaactgttgtgcccagcatctgtagacaacttgggagcatcaagtatcccatgtaatgcccatgcttattcgagcttatgatgacgatgatcctcgtatacaagaagaggctttgagaaagtctctattccttgccaaacagcttgatatgcagggatgatgaagatgattctgctgccaagatgaaggcagctgaggaagccttcgaagcaaaacagaaagtaacaaatagcttgtctgctacctgttcttttttttttatcatgtattataattttgtgacaaattgttcttggtactctgaagatatttatgcagaaataccctatgattcta

SEQ ID NO: 16323 - DNA, 414 bp, Gossypium hirsutum
  Clone ID: LIB3145-035-Q1-K1-C8
aaaaacctaatcttcctatctctcatattctgccgaatctgacggttcttcgcccccaactgccatttcaccaccgtggttggcggatggcgtcacacgagggcctaacccgattccctttgaagccacatcctcctaatccccatctaaacttcgatttcaacgaagcaaacaaggattcgaaggccattataaagataagtccctcccctttatttgttttacatgcagtagataaatcaaagaaatagaagcaaaatcgaaagaaaaacgagattccaaaatcacctttctcaaactgatttttaatggttcttgtatttgtatccagtatgcgtaaatgtgaaaaaaggaaaggaaaggaaaaaagagtcccctcttagaatacaatcggtttccttttataaccgaatc

SEQ ID NO: 16324 - DNA, 453 bp, Gossypium hirsutum
  unsure (1)..(453): unsure at all n locations; Clone ID: LIB3145-035-Q1-K1-D1
cggacgcgtggggaaataacttgtggaccaggacatggtataagtatcggtagtcttggagagttccaaaatgaagagccagttgagggaatcaaaatctcaaactgcaccatcactaatacttcgaatggagctcgaatcaaaacttggccaggcgaacatggtggggcagtatcagaaatacattttgaggatattaccatgaataatgtctcttcccctatcctaattgatcaacaatattgcccatggaataaatgcaagaaaaatgaagaatccaaagttaaactaagcaacattagcttcaagaacatccgtggcacatctgcgcttccagaagctatcaagtttatttgcagcggttcttcgccatgtcaaaatgtggaacttgcngacattgatattaagcacaacngagctgaacccgcaacatcccaatgtttgaatgtcaag

SEQ ID NO: 16325 - DNA, 259 bp, Gossypium hirsutum
  unsure (1)..(259): unsure at all n locations; Clone ID: LIB3145-035-Q1-K1-D10
cgcggcgagcataatggttgntaaaagatttttgttttgggatatacagccagtggaaagtcaactgtaaatgaagttttttaaagactggttgagccaacaaaatgttaattttttattgataaaatatatatcttcatgctgtctctaaatgatcttaaatcacgctttagagacatccctcaagaaccagacctttaaaaaaagaactgtattaaagcaacaataaatcctattaatacattttccttaaataaaa

SEQ ID NO: 16326 - DNA, 334 bp, Gossypium hirsutum
  unsure (1)..(334): unsure at all n locations; Clone ID: LIB3145-035-Q1-K1-D11
ggaagnccacgcgggcgatttttttctcatccgaaatggatttccagtaaacatctaacgcagaactcgaaaatctatcaccaggcggcagttgaaaaaggagttcaagcagccattcaagttcacccgtgttcgagttctggatggtccgaaacccgtctttttccgaacccgacctcatctttgtcgattaacttttcgttaatggcgttctccgtcctatccatcacttacccaacatacaacccgatgagatcccacaatttgtctcattttaacccgcattacatcctcctattcccgacctctgccctttttttacatcggttccgga

SEQ ID NO: 16327 - DNA, 213 bp, Gossypium hirsutum
  unsure (1)..(213): unsure at all n locations; Clone ID: LIB3145-035-Q1-K1-D12
acccacgcgtgcgcccacgcgtcctcacaaatacacttctcttatttnatctttaaacagctctacatctttggacatatggcaagttggagtccacaactactctgtgggcacgaccagaccaatcgttaataatgaattctccactgataccataccatgccagattgctattataattattaggaatgttgcaatagcccacaatatgtt

SEQ ID NO: 16328 - DNA, 427 bp, Gossypium hirsutum
  Clone ID: LIB3145-035-Q1-K1-D3
cccacgcgtccgcccacgcgtccgatgaatttcaaaaaggtcatagccatatggccgttgttgtaagacagtgcaacaaggcagaccagccgccttctaacaactcatctaggagccctttgccggaagtgaaggttgacattgatggtgagaaatatcctcaagaaaacgctttaagacgtaaacgatcactgaagaagtggaagatctttcccacttcgaatgattcttttaaaagtggttcccggagccgaaaatggtcaaagggtactgattctgacatcttacatctaaatggcagtccactcccacagctccctgaagaagaggaggctgttggcattataacaatggaagatgtcattgaagagcttttacaggaggagatctttgacgagacggatcatcattacgatgactcatgaca

SEQ ID NO: 16329 - DNA, 354 bp, Gossypium hirsutum
  Clone ID: LIB3145-035-Q1-K1-D4
gcggatctgctcttttgttcctctcttgaaaacccacggcattgacagaaaatataaagacgatttgcaacccaagaacgacaacggggacatctgtcacttgcagaaactcttctgtatctgagattagctagatgagggatgaaatcccaagagattcgccaaataattatagtgatttttgaaggaagctgtaaaccacataattttttatagaaatctgtagtttctgtttgtattaagaaattactagatctggattagccccttgtaatagtttataggcgctgcgaactgaaaattccctggacagttctcctttccagacttgaatatcttcatgacccgtctctg

SEQ ID NO: 16330 - DNA, 296 bp, Gossypium hirsutum
  Clone ID: LIB3145-035-Q1-K1-D5
ggcccacgcgtacgcccattcaaacatcttatttaccattaccttttcaacctcacaaaagcattaccagggagggaaattaagacccagctgtggggcacaaaatcataaactgcactactactaatactacatatggaccttgcatcaaaactttgtcattgctaacataaagagccattatcaataatacacatcgatgatattaccaccaataatatccatttccatatactcatttacaaacaatagaccccatggactaaatccaatagataagaaaaaaactacttaaa

SEQ ID NO: 16331 - DNA, 178 bp, Gossypium hirsutum
  Clone ID: LIB3145-035-Q1-K1-D6
cccacgcgtccgcggacttgtaaaagctttttaattgcaaatgggattctctcttggcgaccatcttttttcttaactttggagcccaacccttcattggttggtcccgtaggcgacccgaccggccaaggttttttttgttaagggggggtttttggtcaaatcttcccggggtttc

SEQ ID NO: 16332 - DNA, 436 bp, Gossypium hirsutum
  Clone ID: LIB3145-035-Q1-K1-D7
cggacgcgtggggaaaatcacctttctttttttgctttctattgcttgtgttcttgtccgggcgtaaaaaaaaggaacctctttacaattgaagatagtaggctttatagccgaaaataaaaaataaaaaaacaattttcattcctttctatttgctgttctgttgtcgttttttgtttgtatttgctgccgtgttcatcctttttacaggtacgagatgtgctggcgcgcgttggccctcgacgtgtggcgtacggaggcgcggacgtggtcgttcggggctgaaggctcatggaagctgggactgctgcggcgtaagcagacggctagagttctgaagtcttttgggccatttgggcctcgtaactttggactattttgtaaatgggctagggtattagttataaggtcatgtaattgggattgggtattgggc

SEQ ID NO: 16333 - DNA, 310 bp, Gossypium hirsutum
  Clone ID: LIB3145-035-Q1-K1-D9
ggaagcccacgcgagcgcccacttcgtcttgctgaattccattaaccttctcctttacatggctccgatagctgtcgtagttctagttccatcaacactcattatgtaggaaaatgtggtgggtataacccttgcccttgcccgagatgatgtcaagatcatattgtttctactattcaattcatcactagcatactttgtgaatttgacctaacttttggtcacgaaacacaccatcgccctaacttttctgtttcttggtaacgcaaatggtgctcgagcttgtagtggtttcgatttttaatttttt

SEQ ID NO: 16334 - DNA, 431 bp, Gossypium hirsutum
  unsure (1)..(431): unsure at all n locations; Clone ID: LIB3145-035-Q1-K1-E1
cggacgcgtggggttctcaactaaacttataacgttcgatcgtttaacgcaaacccatttgtaagtgggggaaaggtttaagttcagagtcataagcaacatcaatggctccttcaactctgacggctcttgcggaagagaaaaccttgcaggcaagcttcgttcgtgatgaagatgagcgtcctaaggttgcttacaaccaattcagtaatgatatccctgtcatctctcttgctggtatcgatgatgttgatggcaagaggggtgagatatgcaagaagattgttgaggcttgtgaggattggggtgtcttccaggttgtggatcatggtgttgatactaaactcgtgtccgaaatgacccgttttgccagagagttttttgctttgcctgctgaagagaaagctcngttcgatatgtctggtggcaag

SEQ ID NO: 16335 - DNA, 158 bp, Gossypium hirsutum
  Clone ID: LIB3145-035-Q1-K1-E10
aaccgaagactctggatacgcatgtgttagttttagcaatcagttggagtttcctaaagattgatcatagtgttgtcagattatagtacagaggagttattgagcttgttatcagatgtgcagctagttttaaaatgtgccatgcaattttacggttt

SEQ ID NO: 16336 - DNA, 138 bp, Gossypium hirsutum
  Clone ID: LIB3145-035-Q1-K1-E11
cgcgggcggctcctgcttatagtatttatccttcccattcccctataaacaccactactattagatcatcaggtcacctgtagatctaagaattgcttttaagctcaagtctagaaccaagcagccaacataggcctt

SEQ ID NO: 16337 - DNA, 235 bp, Gossypium hirsutum
  Clone ID: LIB3145-035-Q1-K1-E12
cccacgcgtgcgtgcagatctcttttctttcacgatttgcagttcactttttattccccctatctctttcacgcgtaacagtcgtctttaaaaaacgtataggccaactaccaattgttcaagaggccaagtttataaagtggttttgtatgcccaaggtaggaacaaggcgtttttacacgccaaattagcatgctacataagaaggagaagcgcctaaattcttccctaatca

SEQ ID NO: 16338 - DNA, 411 bp, Gossypium hirsutum
  unsure (1)..(411): unsure at all n locations; Clone ID: LIB3145-035-Q1-K1-E2
gtggaaagtagttcatgggatggacgatatggcattgttgtttgtactgacagtgcggtctgtgctgaaggacctgcccggcctactggaggagcagctgcaattgctatgctaatagggcctgatgctcctattgcttttgaaagcaaatttagggggagtcacatgtcccatgcctacgacttttacaagcccaaccttgctagtgaatatccggttgttgatggaaaactctctcaaacgtgctatctcatggctcttgatacttgctataaatacttctgtcacaagtacgagaaacaagagggcaagcaattttccctttccgatgctgactactntgtatttcattctccatataataaagctngtgcaaaaaaagctttgctcgtttggtgttcaatgactttg

SEQ ID NO: 16339 - DNA, 335 bp, Gossypium hirsutum
  Clone ID: LIB3145-035-Q1-K1-E3
gacgtgcatgcggattgcttattggtgcagttgttaacatggggcctgatctgtggaaggctgctgccgctggattgccttgagacgatgtcctgactacaatgctcgaccctactatccctcttacaacttcacagtgggaggaatggggtgaccctcgcaagggctagttacactcatatatgaagtcgtattcctctgtagataatgtgaaagctctaaagtatgcgaatatactggttacaagttggttacatgatccgagtggcatggactctacacctgtatagtttgtaactaaactaatggatatcaaaacagactataacatgcta

SEQ ID NO: 16340 - DNA, 342 bp, Gossypium hirsutum
  Clone ID: LIB3145-035-Q1-K1-E4
cccacgcgtccgcccacgcgtccgcccacgcgtccgcagctcttcaaggaccatttcgtcggagagaggaagaaacttggaagcacaaaaagcatgaacaacgatggattgaaatgtgccatagatcatattttggatgctcaacagaagggggaaatcaatgaggacaacgttctctacattgtcgagaatatcaatgttgccgcaattgagacgacactgtggtcgatcgagtggggcattgcggagctggtgaaccaccctgaaatccaaaagaagctgcggcatgaacttgacactgttctaggacctggtaaccagatcactgaacctgacacccac

SEQ ID NO: 16341 - DNA, 306 bp, Gossypium hirsutum
  unsure (1)..(306): unsure at all n locations; Clone ID: LIB3145-035-Q1-K1-E5
gtaatgagaacatttttgtttacttcacaattaggtgcttaagactcaaaagtttggctggggagattcctggtttctatttaaagctatgctcatttcgcattgnaaaaaaaaaaaaaaaaaaaaaaaaaaaaaaaaaaaaaaaaaaaaaaactgacaaaaaaaaaaaaaaaaaacttactaacgctgaaaaacaacaaaaaaaaaataaaaaaaaaaaaaacaaaaaaaaaaaaaaaaaccgggggggcccctttaaaaagaccaagattaacttccccgtttcccaaattaataacctttttt

SEQ ID NO: 16342 - DNA, 360 bp, Gossypium hirsutum
  Clone ID: LIB3145-035-Q1-K1-E6
cccacgcgtccgcccactcgtccgcccacgcgtccgaaattttcgatttgttcatgctcaatctggatgctatttatgcttatggccattggctacatcggaactcggtcgtggcgtgttggcaaacaacaaaaatgttgcggataatggcaatgatatcttcaaagttattgattgggagtcgttggtgattctgcctcggtacgttgctttcaaaggaaacaatgatatgttcctgcgtcttagccatttcgagggtcacccatatttagaattctcgagtacggatgtcggtgctggatctgtgccaatggaggttttttatatgaagaatggagacatccggatcaagccggtttc

SEQ ID NO: 16343 - DNA, 429 bp, Gossypium hirsutum
  Clone ID: LIB3145-035-Q1-K1-E7
gaaacttgctcagaggaagcatttcccttctgtcaactggcttatttcatactcaaagtacgcaggggcactggaatctttctatgacaaatttgatcccgactttattagcattaggactaaggcccgagaagtgcttcagagggaagatgatttgaatgaaattgtccagcttgtaggaaaggatgctctagctgaaaccgataagatcacactagaaactgctaaacttttaagggaagattatcttgctcagaatgcttttactccatatgacaagttctgtccattctacaagtctgtttggatgatgcgcaatattgttcatttcaatgctttggccaaccaggcagtggagaaagctgccgggatggacggtcagaagataacatacagtcttatcaagcatcgtctaggagatctctttta

SEQ ID NO: 16344 - DNA, 388 bp, Gossypium hirsutum
  Clone ID: LIB3145-035-Q1-K1-E8
gcggaggatgttgctttgattgagtatgcgaaattgactggtagaccatttagagtgttcagccttgatactggaagactgaatccagaaacgtatcgattctttaatgaggttgagaaacattatggaatccgtatggaatacatgtttccagatgctgttgaagttcaggcattagtgaggagcaaagggttattttcattttacgaggatgggcaccaagagtgttgccgggttaggaaagtgaggccattgaggagagcactcaaagggttacatgcttggattaccggtcagaggaaagatcaatctccagggactagatcggaggttcctgttgttcaagtggatcctgtttttgaaggattggatggtgggattggtagct

SEQ ID NO: 16345 - DNA, 246 bp, Gossypium hirsutum
  Clone ID: LIB3145-035-Q1-K1-E9
ttctaatctgtctttaggtttcaccttaaacatccattccagctttattgggacatgctctttttgacaaaggcatgtgaacctcatcactcttacctcatatttaaatcatttgctgtagataaaaacgttataaaatttgatggagatcacaactcctccaggccacagttttattatgattcaaacattattttcttcttcaatgtgctatgtcctactcaatattctacagcatgtacaagt

SEQ ID NO: 16346 - DNA, 393 bp, Gossypium hirsutum
  Clone ID: LIB3145-035-Q1-K1-F1
ggaatgttgttaccttacagttgagttctttcgaaagcttcctcaagacgtggataagggtggcagtgctacgcaatcaatatttgaccgatacaatgactcctacctgaggagaattggaagtacagttttgtcttacgtaaatatggtctgcgctactttgcgccactcgattccaaagtccattgtttattgtcaagtccgtgaagctcaaagaagcctgcttgactttttctacacggaattgggtaaactggagcaaaaacgattatcagcgttactgaatgaggatccagcaatcatggaacgccgatccgctcttgcgaagagactggaattatataagagtgcacaagctgaaatcgatacggtcgcttggtccaagtaagagtg

SEQ ID NO: 16347 - DNA, 538 bp, Gossypium hirsutum
  Clone ID: LIB3145-035-Q1-K1-F12
gacccacgcgtccgtccacgcgttcggttttattgtattgttcatttaatttttcatatctgctctataactcaggatatagtttgttactatgtaggagctgtgggatctttgtttgttggatcgtttttaaccttagtttccctatatattgtatcctattctagctgagaagtttattaataaaaaaaaaaaaaaatatttattttatattataaaaaaaataatatttttttttttttttaaaaatatttatttttatttcatttcaaaaaaaatataataatttttttttttttctttctatattaatcaaatatattttttttttttatatttataacataaaatatattttttttatataatatcttttataaaattattttattttattttatctatttttatgtaatattaaaaatttattttaattttttaaacatatatataatatttatttttttttatatactaatttttatatattttattataatttattttaattattttttttatatatatattatttttt

SEQ ID NO: 16348 - DNA, 425 bp, Gossypium hirsutum
  unsure (1)..(425): unsure at all n locations; Clone ID: LIB3145-035-Q1-K1-F2
gctgcttcttcatttctatttttaatcagaaaatatatattaatactaaaattaaaatgggaagaggaaaattcaagggcaagcccaccggtcaccgccatttctccactcctgaagagctccgtgctggtacctctgctcgtccccgtacttttaagaaggaagaagctgaagtggaggaggaagaagaagagtctgaagaggaagtagaagaagaacccgagaaacgaaagggtactcaagggcttattgagattgagaatccaaatttggccaaacaaaagaatgtcaaagctaaagatgttgatatgggaagaacaactgaactatcaaagcgtgaaagagaggaaatagaaaagcaaaaagcacatgaacgatatatgaagctgcangaacaagggaaactgaacaagcaagaaaagatt

SEQ ID NO: 16349 - DNA, 303 bp, Gossypium hirsutum
  unsure (1)..(303): unsure at all n locations; Clone ID: LIB3145-035-Q1-K1-F3
cttttgttaaatgattgtaggattttgtttggtcagctcttggcctgcacaattgttatgaaaaattgatgtttttagttatccttacatatggtatactgatcagaactcagaattatcagttgacaaacaacggttgggttttagttttacaataaaattgttgaattgagatattgtaagcgagtttgatttgaatacaccgacgaaggtgatggtggcatcaaaatgttgccatccagctcttttatcaaaaaaaaaaaaaaaaaaaaaaaaaaaaaaaaaaaaaaaaaaaaaanaaaa

SEQ ID NO: 16350 - DNA, 433 bp, Gossypium hirsutum
  unsure (1)..(433): unsure at all n locations; Clone ID: LIB3145-035-Q1-K1-F4
gttccttccattttcctctcttctaattttcctgcacttttttttgctttctttttctttcggttaataaagtttttcttttcctctctttcgtttttttcttatctataaaattccatcgattgttggaaagagcaagagaggaaaattaaatcaaagataaaatgattattagcaataaaggacaacaatgaagaactgtgaaaaactcgccaatttagctttagcaaaccaaaatggccttccttctttatttgtttcacctgatggattgattacagccatggcctaccgcttgcctcatgttgcttcttttgcaaaacctcaagactctgctgctagagccaacagtggatcacaggcatctaatgctccacaattgngatcccaaaactgttccagaggtttaaattcatcactgaagcttctaatg

SEQ ID NO: 16351 - DNA, 444 bp, Gossypium hirsutum
  Clone ID: LIB3145-035-Q1-K1-F5
cccacgcgtccgggtttttctccttctcattcctcaaataaaggatggagaggaacgtatgcgtggtttccctgttatgcttcattattttcaatgggtgtttggtgttggaggcggatgctgtgaaaagccaacgcagcgaaaagctcaagctgattcacaggcattcacctgagctagggcacaatcctgaaacgacccttggacccccaaaaaattcagaggaacgattaaaacagctggtgcagagcgacaaggctagacttcatgccattaaacggaggctaggcgtagtggggaaggcgaacgatagggtggagttcccattccgatcggcggcagatttgggattcgggcaatactttgtttccttgaggatggggacccctgcccacacctttactctgctggtggatacgggtagctgtcttacatggcttaaat

SEQ ID NO: 16352 - DNA, 422 bp, Gossypium hirsutum
  Clone ID: LIB3145-035-Q1-K1-F6
aaaaaaattatcaacgaaaagaaaggtcaaaagaaaaaaaaaattctggtttccatggaagaggaggctgaatcacgcgaggaagtcaagccaaacgtcgtcgttaaagagacaaatggagatattgtcggcgataacgatgcaggaaaattgggtaccattgaaacccctgattttctttcccagaaaatattccataactgttccctaccaattctggcatctggagtaattaccacaagccctgctcaatcccaactcaccatcttctatggcggaaaagtttctctatttgatgcaatttccgctgaaaagatacaagaaattatgcttattgctgctactgtggctgctgctgatgttggctctgttgacatgaagaatgctgcaaccgattatgccaccatttcacctgctcttac

SEQ ID NO: 16353 - DNA, 371 bp, Gossypium hirsutum
  Clone ID: LIB3145-035-Q1-K1-F7
cgggccgacccacgcgtgcgatctgtctaatcctcgttttcttcttcattttacacaccttcgattttcccaagggggtaggagatgtcttaaggtgaggatggtcagccacttgtttgtgacaatggaactggaatggttaaagctggatttgctggggatgatgctccccgagccgtattccctagcatcgtcggtcggccacgtaacaccggtgtgatggttggcatgggccagaaagatgcatatgttggtgatgaagctcattcaaagagaggtattttgactctgaaataccctattgagcatggtattgcgagcaactgggatgatatggaaaagatttggcatcataccttttataacgagct

SEQ ID NO: 16354 - DNA, 415 bp, Gossypium hirsutum
  Clone ID: LIB3145-035-Q1-K1-F8
cccacgcgtccgatgcggtctcattcagctgcatgctatgcgatatggaacagttgcgatagttgcctctactggtggacttgttgacacagtcaaggaaggattcacagggttccaaatgggagctttcaatgttgaatgtgatgaagtggatccaagtgatgtgattaaggtggtaaaaactgtcaagagagctcttgcaacatatgggactcaagcactgaaagaaatgatccagaattgtatggcacaagatttttcatggaagggaccatcaaggttgtgggagaagatgttgttgagcctcggggtggctggcagtgaacctggcattgaaggagaggaggttgctcctcttgccaaggaaaatgttgccacaccctgagcataatcagaaggcaactatggataaagc

SEQ ID NO: 16355 - DNA, 405 bp, Gossypium hirsutum
  Clone ID: LIB3145-035-Q1-K1-G1
ggagaaatcaatgaagacaatgttctttacattgttgagaatatcaatgttgctgctattgaaacaaccttatggtcaattgaatggggcattgctgagcttgtgaaccatccagagatccagcagaaactccgcaacgaaatcgacaccgtactaggacccggtgtgcaggttaccgaacccgacacccataagcttccatatctgcaggcagtgatcaaggagacactcaggctccgaatggccatccctctactagtcccacacatgaacctccatgatgcaaagcttggtgggtatgacatccctgcagagagtaagatccttgtgaatgcatggtggttagccaacaactccgctcactggaagaacccagaagagttccggcccgaaaggtttttcgag

SEQ ID NO: 16356 - DNA, 198 bp, Gossypium hirsutum
  Clone ID: LIB3145-035-Q1-K1-G11
cccacgcgggcgatatgtgtgtattaagtttagaaatccacctcaaatttagacatgcatatccggccaaggggaaaaagaacagcttaaaagaagtgttagggcatgatttttgcatgtttgagactttaatgtcaaatgtttaaattagaacaaaagagccttgtgttcatcaatcagctgcctaaatgattaaat

SEQ ID NO: 16357 - DNA, 427 bp, Gossypium hirsutum
  unsure (1)..(427): unsure at all n locations; Clone ID: LIB3145-035-Q1-K1-G2
cccacgcgtccggactgttcactcccagattcaagatgaaactggcagaagtgtcaagcctgcttattttaactcgccacctttggacgtttcggtcgcattccctcaggcaactccagcatctacttttcctcctcttgcttccgactattatcaatttaatgatctattgagtcctgaggagcaggctctacgtaagaaagtaagagagtgtatggaaaaagaagtagctcctataatggcagagtactgggagaaggcagagtttccattccaaattgttcccaaacttggtgctcttcatatttctggtggtactatcaagggttatggatgcccaggtctctccctcactggaagtgctattgcaatggcagagggtgctagggttgatgcaagtngctcaacttttatcttggtgcactca

SEQ ID NO: 16358 - DNA, 431 bp, Gossypium hirsutum
  Clone ID: LIB3145-035-Q1-K1-G4
ccgggcgacccacgcgtccgaacaaaatcaactgcttcacaatggcctctacaaccatggctctttcttccccatcattcggcggtggggcagtgaagttctccccttccacccctgaaatccagggaactggccgtgtttccatgaggaaaaccaccaagcctgttccttctggtagcccatggtacggtcctgaccgagttttgtacttgggtccactttccggtgagccaccatcttacttgaccggtgagttccctggtgactatggttgggacactgctggactctcagctgatcccgagacctttgctaggaaccgtgagctcgaagtcattcactgcagatcggccatgttgcgagctcttgtgtgtgttttccctgagctgttggcttggaacggtgtcaagttctgtgaaactttttggttc

SEQ ID NO: 16359 - DNA, 416 bp, Gossypium hirsutum
  Clone ID: LIB3145-035-Q1-K1-G5
cttttcccatcagcatattcctatttgttttcctcactaattcggatgccttttatgaagtgattgctcagattttgtattaatattccttttggtgtttttgcaatgtgcagaactagaatggagacctttctattcacatcagagtctgtaaacgagggacaccccgacaagctttgcgaccaggtctctgatgctgtgctcgatgcctgccttgcccaggaccctgacagcaaggttgcctgtgaaacatgcaccaagactaacatggtcatggtctttggagagattaccaccaaagccaacgtagactatgagaagattgttcgtgatacatgccgctccattggatttgtttctgatgatgttggtcttgatgctgacaattgcaaggtcttggttaacattgagcagca

SEQ ID NO: 16360 - DNA, 369 bp, Gossypium hirsutum
  Clone ID: LIB3145-035-Q1-K1-G8
gggccgacccacgcgtagcaatgaatctttttacttttacattttaattttaatctattgtccctcaacctgtggtgcgggaaacatctaattcgtccgagtacatattaccactatttttaattcaaaatgtgcaattcgaatgaatgcaatacatacacctctcttaacccatccaaaagttctaaattatacttgtctcaaagttctccttgtcggtttcaatttttatttttctcctgaggattaataactttcaattggttttccacagctagatcctataatttaaaacttacatcaggctgaaaaccttctatcttattccttatattcccccttatatatatatcaggcccttacatcaac

SEQ ID NO: 16361 - DNA, 339 bp, Gossypium hirsutum
  unsure (1)..(339): unsure at all n locations; Clone ID: LIB3145-035-Q1-K1-H10
cgcgtgcgtgatgatgctgtttcacctggacttttgcttccacttccaatacctgaattagctngggaagatatgattcatttattttgtggaaggcctgccacgctcgcaagggaagtcaacagtccttgtggtggttgatattctaaccaaatatgaccattttttggaattggttcacccttacactgctctcactgtggttcaagagtaccacactcatgtttattagctccatggcattcatgaatctattgttaccgatcgagacaaaatatttttagtgccaatttaaaaagattattttatatctcatgtgcacttaaaatgaaattaatt

SEQ ID NO: 16362 - DNA, 363 bp, Gossypium hirsutum
  unsure (1)..(363): unsure at all n locations; Clone ID: LIB3145-035-Q1-K1-H2
gtcgccatcgatgcagcagggctcgaatttcaattctatttcggaggtgtgttcactggagagtgtggaaatgaactcaaccatggagttgcaatagttggctatggagaagttcttaataaaaagtactggatagtgaaaaattcatggggtactgaatggggtgaagctggctatgtaaggatggaacgtggagtctctgataaaaggggtctttgtggtattgcaatggatactagttaccctgttaacaagtgaacagctttttcagtgaaattggcctaggaattctgtttgcttattgaaatatttcacttccttttatatgttttataattataatttaagaatacantgttgnng

SEQ ID NO: 16363 - DNA, 408 bp, Gossypium hirsutum
  Clone ID: LIB3145-035-Q1-K1-H3
gagaaagagcctgaaaacaaggagatgactctggaagaatatgagaagattgttgaggagaggagggagagctttgcttgcccttaagactgaagaaaggaaagttgataccaaagagtttgagtccatgcaacaactttcaagtaagaagagcaacgatgacatttttatcaaactgggttctgaaaaggacaagcgcaaggatgctgataaagaagaaagagtaaaaaagtctgttagcatcaatgagtttctgaagccagctgaaggggagaggtactacggacctgggcgtggtcgaggccgtggccgtggtcctagaagtggatatggaggcaatacagctagcagtgtgttagctccctcaatcgaagatcctgggcacttcccttcattgggtggcaagtg

SEQ ID NO: 16364 - DNA, 378 bp, Gossypium hirsutum
  Clone ID: LIB3145-035-Q1-K1-H5
acgcccacgcgtccgagaaagcctctagccatgtctttcaaacgtaggaatggtggccggggcaggcatggccgaggccatgtcaaattcatccgctgttctaactgtggcaaatgctgccccaaggataagtcaattaagaggtttcttgtgaggaacatcgtggaacaagctgctgttagagatgtccaagaagcctgcgtttatgacacttatactttgcctaagctgtatgtgaagatgcaatactgtgtctcgtgtgcgatccactcccacgttgtgagagaccgatcctccaccgataggaagaaacgtgacccacccgcccgcttcatcagacgcagggatgatatgccaaagcctggtcagactggtcaa

SEQ ID NO: 16365 - DNA, 391 bp, Gossypium hirsutum
  Clone ID: LIB3145-035-Q1-K1-H6
cggacgcgtgggctcgaactctcctgaagttacttatgcggaacctgatcctgacgacgagggaattcagtcgccggatgtgaagcgtatccaggaggatttgcttgatatcttggacgattcggatccggttattggacttgatccggagattcagggtctcgacttggttatcaaaagcttcgaagaagagatctcggtccccgctcaggatccggtacaggaattagattccggcgagtcccggcgggagctagggtttggtttagaagcttcttgataccagttggatttacagccggattttgaggagaaacttgcgaccgttgatgtggaggaaggtggagggacaggattagttggattagcggatatgatggggtatgaattt

SEQ ID NO: 16366 - DNA, 302 bp, Gossypium hirsutum
  Clone ID: LIB3145-037-Q1-K1-A1
cccacgcgtccgatggagctttgaataaattaaaaataaaaaaaaaaaaaaaaaaaaaaaggggggggtaaaataaaaaaatggggggggaaaaaacaaaaatataaaaaaataaaaacttatataatataaaaaaaaatataattaaatgataaaatattaaaacaaaaaaaaatttgggcggccctttttaaaaaaccaaattttacatcccgttcttcaaaaatttttattttttttttgggccccctaaatataatttaacggcccgttttttcaaaccttttaatttggaaaaccct

SEQ ID NO: 16367 - DNA, 403 bp, Gossypium hirsutum
  Clone ID: LIB3145-037-Q1-K1-A10
aggaattgaaacgaaatgaaaaaaaaacagataagataaactcgaatatcaaccttgggggtatattttttgattgctggtgggcgttttttttttacaaaatttctcccttcggttttataaccgattacaataacaataaaaaaaagtgcttccattcctctgttgcggctgctgtttttgttgtttgtgtttgcagggtatgggtgtgtcagacgcatggagggagcatatgccggtggtggtgcgcgaggcggccgttggtttgccgagtgtgctgctgaagcttgagggctgctgctgttttctcttctctgcacggggctaagatttgggctttaaggtttgtatttaattgggtttggtcttttagtttgggccgggcataattgggcttgtacat

SEQ ID NO: 16368 - DNA, 405 bp, Gossypium hirsutum
  Clone ID: LIB3145-037-Q1-K1-A11
cccacgcgtccgggcaggattagcctttaattggaagtggcaacaaaagatgaaatgacagggaaaaccgtatgatggggcggacataatcaccggagcgaatgtgcaggtttgttgggagaagtttgcgaggtatttcgaggttgaattgaaggaagtgaagttgaaagagggatactatgtgatggaccctgtgaaagcggttgaaatggttgacgagaataccatatgtgttgcagcaattctcggatccaccctaacaggggagtttgagaatgtgaagctccttaatgaacttctcaccaagaagaataaggaaaccggttgggataccccaatacatgtggatgctgctagtggagggttcattgctccctttgtttacccgaaaatcgaatgggattt

SEQ ID NO: 16369 - DNA, 338 bp, Gossypium hirsutum
  Clone ID: LIB3145-037-Q1-K1-A12
gtgctttaggaactgaccaatggccctcccaaatgggtgatcagtggtcagctgatgtgggtcagccaccaatttcgggtggccctgcaattaactggggtgatcaagttgctgttagcgctgatgtttgggatcctgcaagtgctccaccacaaatccctggccctggaatcgatgtatctgctcctgctcccactggctgggagtgaggttttcttatttttgcaaatgtttttcctattgaaaaaaatttgttattgtgatggtatctgtgattttgacacgggttagtttgtagtttccatagacttgaatgacttgctagagatttttgtttt

SEQ ID NO: 16370 - DNA, 92 bp, Gossypium hirsutum
  Clone ID: LIB3145-037-Q1-K1-A2
acggaaggatatgtgcttaagcacgtgtgttttatgtgaaaggttcgagggttggtattccaggggagggaaaaaaaaaaaggggggggggg

SEQ ID NO: 16371 - DNA, 415 bp, Gossypium hirsutum
  Clone ID: LIB3145-037-Q1-K1-A3
cccacgcgtccgcccacgcgtccgggggggcggcgctggtgccgcagtaagaggcatggagtttgatctgtcggaagagatggtggcggtgataccgacggatccttacgagcaattggatctggcacgtaagataacgtcgatggctatcgcctcgagagtatcgaagatggaaacggagattgggaggatgagagcaaagattttcgaaaaggatcgtatgatttacgaattggaagagaaagtatcaagattgcagcaagcgaatcatgaggccgaatctcgattaaagcttgtttttgacgaaaatatgaagcttgcaaaggagcgtgattcattggcaatgaccgcaaagaaacttagccgtgatttatctaagttggagacttttaagcggcaattgatgcaatcgctg

SEQ ID NO: 16372 - DNA, 416 bp, Gossypium hirsutum
  Clone ID: LIB3145-037-Q1-K1-A4
gatcgatctcctgcaaggacattacattgtttctgtcagccgggatatgatacctccatcacaaaaaggaggccttgaggctgtagctcacttaccaacagctttttgtttggtctcactagggttattcttcacaatattgtcactgagtcaagctcgatacgatcttcgacacttatttttctcagctttgtgggctaccataagcattggtattgctacagttgtgaaggctaatggcaggattttctgcaaccgtcctcgtttgcataaaccacgacgttgattatatacatagcatattctgaaatgctatgacaaataaaaaaacttccatcttgcttgaatcatagttattctttcatacatattttttgtagtccatttaggtttcaatacctcgattatatttttat

SEQ ID NO: 16373 - DNA, 350 bp, Gossypium hirsutum
  Clone ID: LIB3145-037-Q1-K1-A6
cccacgcgtacgcccacgcgtccgaccacgcgtacggccacgcgtccgatgagctctcccgagaggaaaaaatgcaatggagaattgaactcaggaatcccaccttcgatccgataacgccggaacctacgaatcaccctacccactctacgccatggccttatgttccacgcccgccgtcacccatctcaactaccaacgcatcgctctcggcagtttcatcgaggattacactaacagactgcacataatctctttcgaccctgaatcacttaccctcataacccacccatctttgtcgttcgaccaccctgacccacccaccaaacttatgttccaaccccaccgga

SEQ ID NO: 16374 - DNA, 398 bp, Gossypium hirsutum
  unsure (1)..(398): unsure at all n locations; Clone ID: LIB3145-037-Q1-K1-A7
aaagaacttgccccaaagttgatagcaactctagtgaatgtagtggaggaaatctgcggaggagatctaatggaatggaaggaacgatcccncattataaactcatttcacttcaaacgtctagtaaatctcttggaagaggataaggtctccagcaaaattgttttcggaggccaaagggatgagagccaattacaaatagctccaacaatattgttggatgttcccgaggactcgatgatcatgcaagaagaaatatttggaccattacttacaataattactgttgaaaggttggaagatagctttgctatgataaacagaaagccaaaacctcttgctgcatatctcttcagtgatgatgaacagattaaaaggaagtttgtacaaaatattta

SEQ ID NO: 16375 - DNA, 415 bp, Gossypium hirsutum
  Clone ID: LIB3145-037-Q1-K1-A8
aacccacaccatgaatggtggagtgtgaaatctatattgacgatgttctttcttactgcagcgtatatctgttctacttcagagtggcaccaacaaggtggttcattaacagctccaatgacaacctcaacaacatggacgctatttctcccattgatgcactgaaccataccaagttgaaccaaccctgtgataccatttactaaaattttgtagcaccaaaacgtgctgaaatttgtactatagcttaatgttacgactgcagtccagataaatgttgttcttgtggacagtccagtattcgttatcctattggtttcattctaccatttcctcaaattccagacatcccaagaattccagaaatcccacaaatcccacagatcccacaaatcccacaaattccactaatccc

SEQ ID NO: 16376 - DNA, 394 bp, Gossypium hirsutum
  Clone ID: LIB3145-037-Q1-K1-A9
gtcccagaccattcatggtgatttgtgaagctctattgacgagtactttcttaatgcaacgaatcgttttatactggtggggcaccaacatgtttggtctttgcagttaggtgacatgatgaccaacatgtttggtcttttgcaattagttgacatgatcagttgtatcttgaaccaactttgtgagaccaggtgttgcacattagaaccaaaagatcattggttttgatgtaggagagcttaatgttagtattccataaaatttccctggtttcttgtagttaagtctaatatactttgtcttattgatattaaaaaaaaaaaggagtattggtttataataataaataaacttatgcattattgatgtaaaatgaggacttttcttaatcaa

SEQ ID NO: 16377 - DNA, 437 bp, Gossypium hirsutum
  unsure (1)..(437): unsure at all n locations; Clone ID: LIB3145-037-Q1-K1-B1
accgaanaaaaaacccgacccgacccacccgtacgatcacctataaatttcttacacaatttcattagagctcttttcttattatttttcggatcattcttctttcatggggctcgactaaaagcactatatttatcattatataacatgaattagccccttactttatttttacaacctattctaaatcatcctacctataagatctatctttgtcattcaaatcatttcctctctaccacattaactttaattcacttctttacaatcaaatatcctcaatatactcgttaattttacttgggacttctcttgctctccatcattatctaattttttatcacaaaaaaagtaggaaaggaaaaaagctaagtacttatttctcaccttttaaactttttaaggtaaacaatttctttttcaaatgaaaaaccttt

SEQ ID NO: 16378 - DNA, 354 bp, Gossypium hirsutum
  Clone ID: LIB3145-037-Q1-K1-B10
cccacgcgtccgtcccaaggtcttctttgacatgactatcggtggtcaacccgctggtcggattgtgatggagcttttcggagattgcactcctcgcactgctgagaacttccgtgccctctgtaccggcgagaaaggcgtcggccgcagcggtaagcccctccactacaaaggctcctctttccatcgtgtgatccctaactttatgtgccaaggaggtgacttcaccgtcggaaacggtaccggaggtgaatccatctacggatccaagttcgctgacgagaacttcatcaagaagcacactggtcccggtattctctcaatggctaacgctggtcccggaactaacggatc

SEQ ID NO: 16379 - DNA, 374 bp, Gossypium hirsutum
  Clone ID: LIB3145-037-Q1-K1-B11
gcggcgataagcggcaggggtctgcttgtgtggtggtgcccacaagagagggtattgagcgacccttcagtgggagggtttgtgacgcattgcgggtggaattccaccatggaaagtgttagtgaaggggtgccattgatttgttggccattttttgctgagcaacagatgaattgtttctactcgtgcaccaagtggggcattgggatggagattgacagtgatatcaaaagggagaaagttgaaagtcttgtgagggagttgatggaagggatgaaggggcaaggtttaaggcaaaaagccatagattggaagaagagagctgaaatagctacaagccctgatggctcttcttacattaattttaataagat

SEQ ID NO: 16380 - DNA, 292 bp, Gossypium hirsutum
  Clone ID: LIB3145-037-Q1-K1-B2
ttttcaaaagaattataaaaccacacggtgacgaatctttccaaagggagaaggcaatctttgtggtgatcttggtgtgtacctttgtcatgggctttgcctggtcatggggacctcttggttggttaattcctagtgagattttccctttggagaccaaatcggcaagttttgcctttgcaatcagcaccaacatgctcttcactttcatcattggtcaagctttcctctcaatgctatgccagatgcaagctggaatctttttcttctttgctgcctgggttatcataat

SEQ ID NO: 16381 - DNA, 374 bp, Gossypium hirsutum
  Clone ID: LIB3145-037-Q1-K1-B3
cccacgcgtccgaaaaaaaacaccagagtctccgtttcgtgttggattttttaatatttgtgtcagtttttcaggttcgtcgttgggtctcccatcctttcggtttctctccgcctccccaaaaaaaacgaaattcagggaattaaattccctataaaatcgtttctcgtaaaattccttttcgtttttaatcaaacccgatttcctggtttctttttcttcatcgatcgtcgccggcgtaaaaacaagaaaaatcaaaagcaaaaagcttgccgaattagaaaaagaaattatgggttctgaacagaatgaaggaacaagctttccaccatcggagccaaagctttgtgccaacggttgtgggtttttcggga

SEQ ID NO: 16382 - DNA, 394 bp, Gossypium hirsutum
  unsure (1)..(394): unsure at all n locations; Clone ID: LIB3145-037-Q1-K1-B4
ctcattgctacctctctttccctctctctaatgacgcttagctcangaggatctantgtcgtggtgcctcggaacttccgattgctggaggagcttgagcgtggagaaaaaggtatcggagatggtactgtcagctatggaatggatgacggagatgatatttacatgcgctcatggaccggcaccattattggtcctctcaataccatacatgaaggtcgaatctatcagctgaagctgttctgtgataaagattatccggagaagccaccgagcgtccgttttcattcaaggatcaacatgacttgtgttaaccatgaaacggggctggtagaatcaaagaagttcggaattctcgcanattggcggagggagtatactatggaagatatac

SEQ ID NO: 16383 - DNA, 406 bp, Gossypium hirsutum
  unsure (1)..(406): unsure at all n locations; Clone ID: LIB3145-037-Q1-K1-B5
ggtaagggcttttttaggacgttgtatagctttatataccatcttggtacatatttgaagcctgatgtgtctattttaaatggcattactatgggtggtggagctggaatttcgatacctgggacatttcggcttgcgactgatagaaccgtttttgctacccctgaaactcaaattggcttccatcctgatgccggagcatcctttcatctctctcgtctacctggtcacttangagagtacttgggtctgacaggagcaaaactcattggggctgaaatggtttcttgcgggcttgcgacacactactcanacactgataagcttccactgattgaagaagagcttggaaatttggttaccgatgatccttctgtcattgagtcttgtttggagaatatagtga

SEQ ID NO: 16384 - DNA, 361 bp, Gossypium hirsutum
  Clone ID: LIB3145-037-Q1-K1-B6
aaaaaaaaaaaaccctccgaatgttgagttgacatgattgatgatcagccattcccaaccaaatggacccaaaaacaaagttgtgaacacatcgggaacgggcaaccaatccgctggtgtggtgtgctgctatcatctgcaccatcttgaccgtagcagtcatcatcgcaggcattgttaccttcataggatacttagttatacatcccagggtgccttacgtcagtgtcatggatgctcacctagaccatatccagattgattatgcgggtattctggaaattcaggtaaccatactaattcgagcccagaatgggaacgaaaaggcacatgcaagcttctcggattcgagttacagctt

SEQ ID NO: 16385 - DNA, 330 bp, Gossypium hirsutum
  Clone ID: LIB3145-037-Q1-K1-B7
ttcacctctaaattgcttacccaaattccttaggtttcttttcttattctttttccgattgtccttctttccttggggtagacttagtgtcctttgtttctaattgactaacatggattagcccctttgtttctttttacaacctaggctaaattagcctacctagatgttctttctttgtcttgcaactcttttcctctctacagcattgccttcaattggctgcttaacaatcaaatatcctcaatatactccgtttttttacttgagaattctcttcctcgccatcattttcttgttttttataaacgaaaaggtatggagggaaaa

SEQ ID NO: 16386 - DNA, 357 bp, Gossypium hirsutum
  Clone ID: LIB3145-037-Q1-K1-B8
cccacgcgtccgagtttgtacttcttggttcatgtccagttccccacattcagagggaatgtgagggtatagcaaaccaatgccaaaactacgaacacattcggctaatactaaaatatgacgagtctctttctcatgccatttacgcagcatctgacatgttcatcatcccatctatttttgaaccttgtggccttacacagtgcttgtacaagagatttacactatcatgatttgtacaatatacgaagttgatgactgatccaaattcacccattattgatttttatccgaccgattttgaagttgacatgaatggcaagcggtattcttggcagggtcttgcaaaattgcctt

SEQ ID NO: 16387 - DNA, 353 bp, Gossypium hirsutum
  Clone ID: LIB3145-037-Q1-K1-C1
ggaactagctaccatcatacatgatctttttccacacaccgaagattattatttctgaaagagatgacatgatgctggagtgggtaggagatcatcatgtaagcctgtttttgttctactgaaaaaagtcgtatccagtgcgtaaggctactgctataagcaagaactagaaattcccattgtaggcacaaccatttgtcggtgtttgtagcaaataaacctgttagtctacattaagttataaaaccttcctagtcctagcgtttgtgaggaactttaagattctatcagtcatgagtccgaacgagtccctgtttcaaagcatgatctttttagtttgtaaagtgcattgc

SEQ ID NO: 16388 - DNA, 399 bp, Gossypium hirsutum
  Clone ID: LIB3145-037-Q1-K1-C10
cggacgcgtgggcggacgcgtgggtgggcattcaattcttgaaagctactcgagggtgatggagagtttggctttcaacattatggcaaggatagatgatgttctttatgttgatgatgctataaagcaacgtgctgcggcagaaacagtttctcttttcagcaggagcggtttcagtggtcgtccaatccaaaggcgattgtctcctagtcccttctcaattcaacagactccttatgcctctcctttcgcaacacccaccttttgttctccaaccccactcaccggaagtccacgacgagcagcttcctctttgaagagaaatgatattaaggaagaacctgaccggaaatttgaaaaaccgttcgcgagtgaatttgagaaggtgtggtcgtatac

SEQ ID NO: 16389 - DNA, 403 bp, Gossypium hirsutum
  Clone ID: LIB3145-037-Q1-K1-C11
ccggttctcttttgattgcacaaaaccaaatcttctttgctttgctattttggttcgttgggctaagaactggctaacgcggagcaaaaaaccgtggaggaaaccaacaagaaccaagcggtggttcttgccctctatgaagccttaaacacacgagacgtcaacaccgttcaccaaatccttgctcccgacctagagtggtggttccacggtccacccactcaccagtttttgatgcgcttactcaccggcgcttcatccgacgatcctttccgtttcgaggtcgaccctgtctcagtcaccacctttggatccaccgtcatcgttgaaggctgtgataacagccgttcgatctcctgggttcacgcttggactgttcgtgatgggataatcacccaagtga

SEQ ID NO: 16390 - DNA, 384 bp, Gossypium hirsutum
  Clone ID: LIB3145-037-Q1-K1-C12
ctcagagtctggaatttgatctcattgttttatcaccctatcgttcagttgaaggggttgtcaatgacatggagaagcttcacctgtagtacatgaagagacaggtccatcagaggcaaatctcttctcaggcaaatatatactagatccaaatcaagctccgagaaagcaagtaaaaccggtcgctcgacttcagaagattctcaagttcagattgttactcgacgaggatgttcaagtcgaaacaaattcccaaaataattcaattttgtaaactagcaaactcaaaatttgtagttaaatgttgatccttaactttgaaagtaatttaatgaaattttgaaagtaatttaatgaaattcaagcttagttatgctctgaggg

SEQ ID NO: 16391 - DNA, 347 bp, Gossypium hirsutum
  Clone ID: LIB3145-037-Q1-K1-C2
agattatccaaagtccacaacaaaaaatgcgactctgttcgtttgtcccttgactgaatacgccagctatggaatacatggggacagtcatcctcctcctgtttacaccgtggacaacgagcatcagaaacaactcttctttgcttcagattaaaaaaagttgggatgtaattccaagctatccttcatattgtaattttaacttttgagggcatctgtaaattccatagctttttgaaaaaacttttagtttcggtctgtataataatagcatttatagtagcctactgtaatagtttataggcgcttcgaatagaaaaattaccagaaggctctcctttccagaa

SEQ ID NO: 16392 - DNA, 415 bp, Gossypium hirsutum
  unsure (1)..(415): unsure at all n locations; Clone ID: LIB3145-037-Q1-K1-C3
ggaaaagaagccaagaactctcaacacctaatctcccttccccttccccttacccttcccgttcggccatccttgacacctcgatcttctgcttgccgtcaaccaacaatgattctcaacatcagacgccagcgctcatctttaattttcctcatcttcgcctttcgttgtcaaaatggttactccaccaccagtcggcatatagacttggagtcaccctccccatctgcatccatcttttccattacactgaaaattgaaccctagaattttgatttgaatcgctccgagacagccaaggggcagattgatggtcttgagcttatagcctttgagaattttacatcccgtgctgtgatggaggcagtcgggtcatgcgtcacanacaagtattctgaaagactacttggtgcta

SEQ ID NO: 16393 - DNA, 160 bp, Gossypium hirsutum
  Clone ID: LIB3145-037-Q1-K1-C4
ttttaacatttacaaaactatgaagctttgtaaatacattttttgttttttaaattattttggctttttctgtattttttccttaaaattttctaatttatcttttttgaattgttgtaattaaatacaatattataaaattataaaaatctacattaat

SEQ ID NO: 16394 - DNA, 383 bp, Gossypium hirsutum
  unsure (1)..(383): unsure at all n locations; Clone ID: LIB3145-037-Q1-K1-C5
gtttacaggaaaagctatccagggagatgagcttgttataaatgacgatgaaaaaaatgacgatgatgatgatgaggaagaggatgatgaggaaaacgatgaggatgctgacgatgaggatgaggatgatgacgaangaagtaagaccaaaaagaagtcggctcataagaagagtggtaaagcagtaggggatgggcagcaaggtgagaggcctccggaatgcaagcagcagtagaaattaattgctgctgtcggagtgtggtttataagattttgattgggaagaagcgggagaaagggagggtttgcagttttggtggttatttatttctacagttntatgttaattgctatgagtatgattggtttctacagncgtttta

SEQ ID NO: 16395 - DNA, 405 bp, Gossypium hirsutum
  unsure (1)..(405): unsure at all n locations; Clone ID: LIB3145-037-Q1-K1-C6
gaagcagctaactatgttgcagacggacaccgttctatttttcggtcaaaatcatacctcggtgggctaagagacttaacaagccagcgttgggctgctgacatgggccaaagaccttcattcttggatattctcaagaggctggaaaagatcaaggaaaatgtaccttcagatcatacttggaatatattcagcacatgacattggaagattccatgaaactaatacggatggtatacatcccctttcatacgctcacatgcagcttggacattcctgcagatggtattgtgaatacactcactaagtagttttgtgatgatagatttttttcttgaccggatttcgtctatttgttgcggaattcaaccatgaactangtgtgtctttatttcgactattact

SEQ ID NO: 16396 - DNA, 399 bp, Gossypium hirsutum
  Clone ID: LIB3145-037-Q1-K1-C7
ctaccaaagacagcaagcagttccaggctaatgttctaggatgcaaaaacattacgggcggacatttcaccgtgtctggacctgacgaaagcccaaacacagatgggattcacattgggagatcggatggggtcaatgttcttaactcggagataaaaactggtgatgattgtgtttcaattggggacggttccaaaaatttggttatcaatggagtaacttgtggaccaggacatggtatcagtattggtagtctcggattgtttaaaaatgaagaaccagttgatggagttacagtaaaaaattgcaccatgactaatacttccaatggtgttagaatcaaaacttggccaggtgctgaacctggcacttgttcgaacattcactttgaagatatta

SEQ ID NO: 16397 - DNA, 406 bp, Gossypium hirsutum
  Clone ID: LIB3145-037-Q1-K1-C8
cataaaagcctgaagtatttgatgacttaaaatgagttgaatctgaaacaatgatggtggcttgagctattgaaagaggatgatttactaattgattatcaacctgaaaaaagctaatgttggtgtagattcattaagtcaaaaatcattgtttgctttgagagcgttgaatgctcacttgattctgaatcatgattgttctattttagctgaattgaaagctagaccagtgtttcttcaaaggattgaggagtttcaaaatgttgacccgaagttagtagctaaacgagatcagattcagagtgattcatctacagaatttagtgttggtattgatagtatattgtaatttcacaatagattgtgtgttctgaataatttggaattgaaacaaaacattttgact

SEQ ID NO: 16398 - DNA, 363 bp, Gossypium hirsutum
  unsure (1)..(363): unsure at all n locations; Clone ID: LIB3145-037-Q1-K1-C9
tatcatcaccatggcctcaaatcccaaggtcttctttgacatgactatcggtgggcagcccgctggtcggattgtgagggagcttttcacanattgcactcctcgcactgctgagaacttccgtgccctctgtaccggcgagaaaggcgtcggccgcaacggtaagcccctccactacaaaggctcctctttccatcgtgtgatccctaactttatgtgccaaggaggtgacttcacggccggaaacggtaccggaggtgaatccatctacggatccaagttcgctgacgagaacttcatcaagaagcacactggtcccggtattctctcaatggctaacgctggtcccggaactaacggatc

SEQ ID NO: 16399 - DNA, 415 bp, Gossypium hirsutum
  Clone ID: LIB3145-037-Q1-K1-D1
caaataataactatcaccggcggatccccattctccagcaattaaacgcaggtctcgttcatttctggtgcgtttaataatgcctttatacgccatggacatgaagaaggtctccaccgccatcattgttgctgctgcctcaatgagcgccgtcatggctgccgatgcacctgctccctccccttccgccggtggttctattcctagctcctctcccggttccgccccagcatcaggaccagattccagcgtggctgccgcagccttgccggttcttggatcattggttggggcttccattgtttctttgttttcttacatgctacatgtatgaaaaatcaacatgtgaacgaatattatattttaaattttattttttattttttgtaagaaacatgtgatgaataatgaaaaa

SEQ ID NO: 16400 - DNA, 394 bp, Gossypium hirsutum
  unsure (1)..(394): unsure at all n locations; Clone ID: LIB3145-037-Q1-K1-D11
atcggcctgtgattgggatactgagtcattcatacggcgcgtcggggaggctgaacagtgggactaacgcttgctacgatgggtgcgtcntacgtgaagtttgtggaagcggccggggctcgagtcattcctcttatttacaatgagccggaagagattcttttccagaagcttgaattggttaatggcgtgctttttacaggagggtggtctaaatacggcttgtactatgatattgctaaaaagattttcaagaaagttatagagaagaacgataggggagatcatttcccgttatatgccgtttgtttgggttttgaacttttaacaatgattatcagcgaagacaaaaatattcttgaaccattttctgcatcaaatcaggcctctagtc

SEQ ID NO: 16401 - DNA, 320 bp, Gossypium hirsutum
  unsure (1)..(320): unsure at all n locations; Clone ID: LIB3145-037-Q1-K1-D12
agcaagtgcagttccaacagcatgattagattaaaaagaaatcgaacgcgttaactggctggttgaagttagatgtgtgtgtgtgtgtaacatangtatgatgttctcaggacttggcaacttaatagcatagcttgtaaatacactgatgtcatctcttatgtaccgtgtgtatatcatacaaaagtcaacctgttagaggctaccgtgtgtatagggttttgagtgctgcttttctgagttttggttgtatattttttttttcaaaattccttcttggggttttgatactgtaataaagtttgagttttgggtgtcaa

SEQ ID NO: 16402 - DNA, 406 bp, Gossypium hirsutum
  unsure (1)..(406): unsure at all n locations; Clone ID: LIB3145-037-Q1-K1-D2
cggacgcgtgggcggacgcgtgggcggacgcgtgggtttggcattaatcaangaagcttgcgacttcangccgggaatgatgtctatcaatcttgacttgaagagaggaggaaagtttaggtaccaaaagactgctgcttatggtcatttcggccgtgatgatcctgatttcacttgggagattgttaagcctcttaagcccaaggcctaagtactagttactaccatagccataatgtcatgtggtacgtatctgtcaatttgtttcattttacattctttacttttcagggcgtaatttatttccccagccatctattgtttgtcatggatatattcttttaagattttcctgtctacttattcaatccaaaatattttcttttattatagaagtactttcatc

SEQ ID NO: 16403 - DNA, 414 bp, Gossypium hirsutum
  Clone ID: LIB3145-037-Q1-K1-D3
aaggttgtcataaccaacctcgaatctggttctgttttggatcttgatgcaaagaaatgggctgatgctcgaacagatgacggatgtgccttttacaaggtgcccttttcaaatgttgtatatattgagcgctcagatttccgcatgaaagattctaaagattactatgggttggctcctggcaagtcagcactgctaagatatgcattccctataaagtgtacagatgtaatattggcagatgataaagaaactgtgcttgagattcgagctgaatacgatgcttccaaaaaaagcaagccaaagggggttctccactgggttgctgaaccttccccgggttctgatccattgaagattgaagtccgattgtttgacaaactctttaattctgagaatcctgctgaacttgat

SEQ ID NO: 16404 - DNA, 395 bp, Gossypium hirsutum
  Clone ID: LIB3145-037-Q1-K1-D4
cttcactcaccattgttccaagtttgttgttaaccaagctagaaccagcagccaacatggcctcattagcagcctccaccgctgccgcctcccttggcgtctctgaaatgctcggtaaccctctgaatttcagtggtggagctaggtcatcggctccaacaccatccaactcatccattttcaagaccgttgctcttttctccaagaagaaggccgctcctccaaagcccaaggctgctgctgtcgccccggccgatgaagagctggctaagtggtacggtccggacagaaggattttcttgcctgaaggtctgttagacagatcggagatcccagagtacttgaacggagaagttcccggagactatggatacgatccgtttggtctgagcaag

SEQ ID NO: 16405 - DNA, 381 bp, Gossypium hirsutum
  Clone ID: LIB3145-037-Q1-K1-D5
cggacgcgtgggcgagacttggtcaaggttatatggtgtaattcatagggcaggtcgtgctgtgagtaattggatttaccttggaggtgttaaagcttttgccgatggctctctcggttcaaatagtgctctcttccatgagccatattttgatgaccctcacaactatggcttacaagttgtggaattcgaaagtcttttcaacatgacaattgcttcagacttgtccgggcttcaggttgccatccatgctataggtgataaagcgactgacttgatccttgatatgtatgaatccgttgccttaaaaaatggaaagagagatcggagatttaggattgagcatgctcagcatttggcccctggcacagcagatcgatt

SEQ ID NO: 16406 - DNA, 411 bp, Gossypium hirsutum
  unsure (1)..(411): unsure at all n locations; Clone ID: LIB3145-037-Q1-K1-D6
aacgaaataattaaactccaccaccccctcagactctatctggtttttagggcttttctaactttgctgattattttttgatgatgcggagttcaatcttctaaaagaagccctaaaatctttgaatcaggtctgagcttgtggtttgttaggcctctttgatcaaactaagtttcatgtctgatcttgacgttcaaattcctactgccttcgatccctttgctgatgcaaatgctgaggactcangtgcgggtgcaaaggagtatgtgcatattcgtattcagcagaggaatggtcgcaaaagcctgacaactgtccaagggttgaagaaagaattcagctataacaagatacttaaagacctgaagaaggagttttgctgcaatgggaccgtggtccaggaccctgaat

SEQ ID NO: 16407 - DNA, 375 bp, Gossypium hirsutum
  unsure (1)..(375): unsure at all n locations; Clone ID: LIB3145-037-Q1-K1-D8
aaaaaaaacccgggccgacccacacgtccggttaaaacaaaaacttgattatcctttttctttcatacacttttcccaactaaaccgcccgcttacataaaaaagaagggctgtctcaaanaattaaaacttttcccacttcaattttattttcattttcttcataaacaacttatttaccttnaactttttatttttatcaacnacatcaccaaaaaaatcctttttttacacttttccactacttacttaaaacttcatattataaacaaatttattttcaacatccaaaacccatctttctatatacttttcaaattacacaaccatattatttttccccttcactactttcaatccaaatccttcttatat

SEQ ID NO: 16408 - DNA, 410 bp, Gossypium hirsutum
  Clone ID: LIB3145-037-Q1-K1-D9
gttaaaaggagaggttgattatcgtcacacttacatagacttttcccagcttgagggaacacttactaaagtgggaggggggtctgaggtaattaaaacttgtcccgctgcaatgggatttgcatttgctgcgggaacaactgatggacctggagcttttgattttcagcaaggagatgaccagggaaatcctttttggaggcttgtccgcgacgtacttaaaactccagataagaaacaagttgattgtcagcatccaaagcccatcttgctagatactggtgaaatgaagcaaccatatgattgggcgccttcagtacttccaatccagatccttcggatagggcagtttgtcattctcagtgtaccaggagaatttacaacaatgtctgggaggcgtctccggaatg

SEQ ID NO: 16409 - DNA, 356 bp, Gossypium hirsutum
  Clone ID: LIB3145-037-Q1-K1-E10
cttgatattatttggtgatccacttggacctacacttgcaaagttcggtatgactgcacgtcttgcagccggttatggcggggccatgcaaaacattttcagcaaaagcgcaaagtacagtttgtttgatccgtgcaaagaaatggcctatattccgctggacgaggataccaaggttaaagggaaggctgccattgatgttgtctgcaatccgttggggaagtctgggggtgctcttattcagcagtttatgatcttgaccttcggatcgcttgcgagttcaaccccataccttggagggattctactggtgattgttcttgcatggctagcagcggcaaagtccctggatacac

SEQ ID NO: 16410 - DNA, 388 bp, Gossypium hirsutum
  Clone ID: LIB3145-037-Q1-K1-E11
ctcctactagggagttttcaaagcctttatttatgcctatatgtgatgttataaaggcacgttcacaggggcaggtggctgcgtgtggcaagttggaggctggagctgtaagaagcggatcaaaggttttagttatgccatctgcaactatagcaaccgtgcgttccttggagcgtgattcccaagcttgcccaattggaagggctggagataatatagctgtcagcctgaatggaatagacggaaaccatgtgatggctggcggtgtgttatgtcatcctgattttccaattgcatttgcaaaacatttggagttgaaagtgcttgttttggatggtgcaactccaattttaattggttctcagttggagtttcacatacaccatgc

SEQ ID NO: 16411 - DNA, 400 bp, Gossypium hirsutum
  unsure (1)..(400): unsure at all n locations; Clone ID: LIB3145-037-Q1-K1-E12
gtgaagaccattcctcgcccaattccacagtataaatggtatttgaccccctctgtggtgtctttgatgggaggacttctgccatttggcagcatattcattgaaatgtattttatcttcacatccttctggaattacaaggtttattatgtgtatggctttatgctgctggtcttcctgattctcatcattgtaactgtttgtgtgacaattgtggggacatatttcttgctaaatgctgagaattatcactggcagtggacatcgttcttctctgctgcctccacagctgtctatgtgtatttgtactccgtatactattaccacgttaaaaccaagatgtcaggcttctttcaaaccagcttctactttggatacactntgatgttttgtcttggct

SEQ ID NO: 16412 - DNA, 402 bp, Gossypium hirsutum
  unsure (1)..(402): unsure at all n locations; Clone ID: LIB3145-037-Q1-K1-E2
gctaaactctgtgtctcctgaactccagtactcaatgctggtcatcccctgattccagaagctcgtactgagagttcaactgcagtcatatttacatccaaattgctcccccaaggcttcttcactttgtgccttgtttcttgttctacgttgttgaaaatgtcttctttcaggtttacagctcttatgattgctttacttgttaccatgtcagcggttgtatctgaaagccgggttgcgagaaaagacctcggcctggatcttggtggcatangacttggggttggagcaaggataggccttggcttgggaggtggtagtggttcaagatcaagagctggggctggttccggttctggttcaaggggttctagttcaagctcttcatctagttcagcatca

SEQ ID NO: 16413 - DNA, 413 bp, Gossypium hirsutum
  Clone ID: LIB3145-037-Q1-K1-E3
ctcgttactccctcttcttctcatctatgtcgctcgccctaaattccccaaataaaatttggctgctcttcttgtacactgggctgtaacttcatccatctctctttcccttctccattatagacccttcttttgacttttctgtgctttctttcgaggtaaaaacaaggggaaggtaatactgctgtgaagttcagctttgggttttcttttttggtttaggtaatggcgctaaggctcgatggcacagatgtttcggggtttaaattcctcttctcattggcggtcatgtatggtctcatgtatggtttacgtaatgtacaccaagttcatcacgcctttggggatcgatgcgcctctcgatcggttctctgaagccagagctatcgagcatgttcgagtcttagcacatg

SEQ ID NO: 16414 - DNA, 399 bp, Gossypium hirsutum
  unsure (1)..(399): unsure at all n locations; Clone ID: LIB3145-037-Q1-K1-E4
atcacatttttttctctctttaatttttttaaaaaattattgcttaaaagatacagggacggcatttgaaaacaaaaatgacgcgcggacttgttgttcttgctttggttttgattgcccttgctggtctggtttctgtcgacgcttcatccgccagtggcagccctgcaagtgcaccaactgaagcttctatagatggtagtactgctagttcctcccctccttctcaagctaccgctccaagtcgtagcagtggtgtcacttttgaccttgatagatagatcaaaaatagaacgatcaagttaaatataataagtaaataattctatcatttggactggtgagttggttgtttcgctgtanagccatattcataaggttcatccatagaatgattct

SEQ ID NO: 16415 - DNA, 442 bp, Gossypium hirsutum
  unsure (1)..(442): unsure at all n locations; Clone ID: LIB3145-037-Q1-K1-E5
cccacgccgtccggtgtgagtttaacggttttcctttgatttggaaagtgcnttgatgtggtgcgagggacgtcgtanacttcagcgaatgggtgtgtgtgctatanncaaatatatgtgtggtaataagaggaaggcgcctttgtgctgtcttcaatgtantttgcgctctgcaaaacacttacttgcggcgtttaataagctggtgttacattcagggtgaagaattctancttgggagggtgaagccttaacttttaacccatacattggtgcctacaatcatactttgcagggttggagtgacattgaatatagcttgcaaaatatgtgaaacttgcagggtagtaggagcagaattgataatagctggattgtatctggttatcctacgaaaaagtgaagagagcaagtatctgtctgaaaatgaaccaatttattc

SEQ ID NO: 16416 - DNA, 390 bp, Gossypium hirsutum
  unsure (1)..(390): unsure at all n locations; Clone ID: LIB3145-037-Q1-K1-E6
agttcgtgcattttagcctgcaatatttgaaagcagtaatcgatcttcttttctttgtctgactggcaactctaccaaggggtactgctaggctatcttgagaagctttgagttctgatgtctccgccgttgcttggtgtggaggaggaagggcagagtanggtttcttctccatctgttgaatgtatctcccacaatggcttggggataagggagaggaattatcttggattatcagatttttgttcagttgacagctccggtgtcccggatgataatgggaataacctgaatttgaaagccacagagctgaggcttggtcttcctggatcccactcccctgagagagaaactgagcattgctttctaaactcgggaaaacttgatgag

SEQ ID NO: 16417 - DNA, 406 bp, Gossypium hirsutum
  Clone ID: LIB3145-037-Q1-K1-E7
cccacgcgtccgctgccatataatcatataaccaggctccgtcgtggtactcttcggccacgcacaatggcgaaaatcggctggggaacaagccaagaggctgctcagcctgactgcatcaaagcccttgtggtcgagtttatcaccactttcctcttcgtattcgttggagtaggagctgccatggccgccgatgagtcgggggcaaatgcgctggtgggattgtttgctgtggcggtggctcatgcccttgtcgtcggcgttatgatatcggccggacacatatcaggcggccatcttaacccagccgtcacgcttgggttgctattcggtggtcacatcacggtggtccgtgcgatcctctactggatcgatcagttgttggcatcttcagctgcttgtatac

SEQ ID NO: 16418 - DNA, 135 bp, Gossypium hirsutum
  Clone ID: LIB3145-037-Q1-K1-E8
aaaaacccgagccggcccacacatacactcttataaaaatttacctcaacatctttttgtctttcatcaatacaaaactaaaccgcctcttaaacaacaataatcgcccgcgctaaaaccacttacaatcatata

SEQ ID NO: 16419 - DNA, 409 bp, Gossypium hirsutum
  Clone ID: LIB3145-037-Q1-K1-E9
ctcttatagaaggatacgagaacagcttttggacttgcagcaatacaagacttggggagtggggaacagcgatggtgtgggggataaagccacttgcagtcagatatggcctaggcatatcagatcatgatagtgaaggacgggttgtgacagcagagttcgattctttttatttattaagtgtctatgttcctaattctggtgatggcttgagaaggctggcatataggattacagaatgggatccatctcttggtaattacataaaagaactggaaaagtcaaagccagttattttgacaggggatttgaattgtgcgcatgaagagatagacatttataatccggctggaaacagaaggagtgctgggtttacaattgaaaaaaggcagtctgttagcacaaattt

SEQ ID NO: 16420 - DNA, 360 bp, Gossypium hirsutum
  unsure (1)..(360): unsure at all n locations; Clone ID: LIB3145-037-Q1-K1-F1
ggcggcccacccgtccggatatagtccccttggtcatggtttctttgccgttaaagcaaaggaggatacctttaatggtggtctggaagtgttcccaaggtgtcaaggaaaaaacttggagcaaaataggatcctatattcgaaagtagagaagttggctggaaagcatggatgtacaccggcacaacttgcacttgcctgggttcttcatcaaggggatgatgtttctcctatacccggaacaaccaagattaaaaatctagaccgcaacattgaatcagtgaaagtaaagctgacaaaagaagatttgaaagaaattacagatgcgatcccaatccatgaggttgcanggggtactta

SEQ ID NO: 16421 - DNA, 411 bp, Gossypium hirsutum
  Clone ID: LIB3145-037-Q1-K1-F10
cggagataatcaggtggtgccgtggtccattttagcaaatacacctccgccggcgcctggggcttctagtagcgatgattggtctggtggtgaaagagaggtctctagatcaacaaatttgttttcattaaaaaggtcgagagggaatgcttcagatcttcactctgaggacgatccggatcgtttatcttcaaaacggaggtacggctaccatactgttgtggcgacgcggtgcagagcagagggtggaggcgtttcggttgactccaggactatgaggctatcgaaggaccaacagatcaaaccggagggcacggttcagttgcagtccaattcgagaggcgcgacgagtacggagtcattaggcaaaaattagagtttgagaaaatccaagtaaaatatcttaaaatt

SEQ ID NO: 16422 - DNA, 277 bp, Gossypium hirsutum
  unsure (1)..(277): unsure at all n locations; Clone ID: LIB3145-037-Q1-K1-F11
gaaaacaggggggagggacgcgtacgcttactgaaacaaccattggtggagttccttgattttgacatgcaagtattgatatttcggtggcattgatctgtgggttcggttttgataccatgagataaagttgttgaagttgtagatgggctatatattatatatagctaaacatttatttgcccaacctatgtaatcagcacctctcccagtgttttatttactcttttccagattnaaanagnaaaaaaaaaaaaaaaaaaaaaaaaaaaaagaa

SEQ ID NO: 16423 - DNA, 385 bp, Gossypium hirsutum
  Clone ID: LIB3145-037-Q1-K1-F12
cccacgcgtccgcactcacctactctttcttttcattttttttcactcaaagagggaggcggaaaattttagggagcacaacttcccccccccccccagtttcgctgttcagtgacaatggcgattgtgaatatggtgatggctgtggttatcatggcagcgaccctcggagggaaattgggtgcagcacaagtacaccatgtggtcggaggtgaccgtgggtgggacctttcctctgacgtggcatcttggtcctccggtaggagcttcagggttggagacaaaatctggttcgcctacgccgcagcacaggagagcattgctgaggtgaatagcccggaagaatatgagtcgtgcgatgtgagcaaccccataagaatgtaca

SEQ ID NO: 16424 - DNA, 320 bp, Gossypium hirsutum
  Clone ID: LIB3145-037-Q1-K1-F2
ccttcaaaaaaagctcgacattgatgtcctggttcacggaaagcctgaaaaaaacgatatggttgagtatttcggtgagcaggtgtctggttttgctttcactgttaacgggtgggtccaatcttacggatctcgctgtgttaagccaccaatcatctatggtgatgttagccgtcccaagccaatgactgttttctggtcatcaactgctcaaagcatgactcaacgcccaatgaagggaatgcttactggccctgttaccattcttaactggtcctttgttagaaatgatcagcccagattcgagacttgctaccaaa

SEQ ID NO: 16425 - DNA, 413 bp, Gossypium hirsutum
  Clone ID: LIB3145-037-Q1-K1-F3
cccacgcgtccgctcttgcttactttatcagccctgactgtccaagaaatttcagctgcacgttgctgcactgaagttgccatagaattactcccatgcctcagcttcctgtctggcaacggtgctgcagatgttccatcgcgggcatgttgtttgggtgctcaaactattgcttacgaagcacagaccaaagatgaccgacgggctatctgcgagtgccttgttaatgcattagcaaatattggcacatctgactccttcactgcgcggatacctttaattgctacccaatgcggtgttgatgtttctcttccgccaattaccagcgacaaagattattgttccaagctcttcccttgacttcgtttgatataccatcgtgttgtgccacactagggaaagatattaattat

SEQ ID NO: 16426 - DNA, 387 bp, Gossypium hirsutum
  Clone ID: LIB3145-037-Q1-K1-F4
attaatttcatccggtactcaacagctctgtacaactaggcatgccgtttctttaagaatggtcaggtatcggctatgaacagttgttggttcctcttttagtgggacttttattgccttggccatccttattgtgattgtttcataactttttgatagttggtgccactctacgtggtcgcatttgtttcgccagatttgattctctgcatggccatttatgacttttcgaaacgtgggttattgtggacaaggctgcttgaaagctgtttcaacaaggttagccaggttactctgtcaccatccttcggaaacgccttgccaaacgttcaagctcaaaatgctggtcctccaagcgcaggttcagctaatgttggtcgatctgag

SEQ ID NO: 16427 - DNA, 429 bp, Gossypium hirsutum
  unsure (1)..(429): unsure at all n locations; Clone ID: LIB3145-037-Q1-K1-F5
aaaaaaggggggaggacgcgtacgggagataatangtggtgccgtggtccattgtagcaaatacacctccgccggcgcctgcgtcttctagtagcgataattgggctggtggtgaaagagaggtctctagatcaacaaatttgttttcattaaaaaggtcgagagggaatgcttcagatcttcactctgaggacgatccggatcgtttatcttcaaaacggaggtacggctaccatactgttgtggcgacgcggtgcagagcagagggtggaggcgtttcggttgactccaggactatgaggctatcgaaggaccaacagatcaaaccggagggcacggttcagttgcagtccaattcgagaggcgcgacgagtacggagtcattaagcaaaaattagagtttgagaaaatccagtaaaaatatcttaa

SEQ ID NO: 16428 - DNA, 403 bp, Gossypium hirsutum
  Clone ID: LIB3145-037-Q1-K1-F6
ctcatctcctaccaccatccccgtggtttcaacttttgcatctccctttgacacttctggcgctggcaatggctcagactcgggctcaaccaggaagcccatcagcctatggccaggaatgtaccattcaccagtaaccaatgctttatgggaagccaagtcccagatctttgagagactccttgacccaccaaaagatgccccccctcagagcgagttgctcaccaaaaccccttctcaaagcaggaccagcatcctttataatttatcatcagactacattttgagagaacagtacagggatccctggaatgaagttagaattgggaagttgcttgaagaccttgatgctttagctgggactatctctgtcaagcattgttcagatgatgatagcacaaca

SEQ ID NO: 16429 - DNA, 409 bp, Gossypium hirsutum
  Clone ID: LIB3145-037-Q1-K1-F7
ttcgaacctctcaatctgaattgaagcaagaacttagccgtgtgatgaaagaaaaactaggattggagagggtggtggaggaggaaaagaaaaggatggagcatgccaatgctgccaatgctaaactgcttcacgagtgcaatcttctttgggatcggctccaagaatgcagtgttaatttcctcagtgaggaagaggataagttgaatgttgatacttcatctccatctgatgctctggatctcttaacaacttctgataatcgaattggtctccttcttgctgaagcacagctccttgcacaagatgtagaaaattcggtggttagatcggaagagagccataagatgaaagacggtgataaaagaattgatgacgagctgaggaagatgctaacaaatatgtttgt

SEQ ID NO: 16430 - DNA, 402 bp, Gossypium hirsutum
  Clone ID: LIB3145-037-Q1-K1-F8
cggacgcgtgggcggacgcgtgggatgttttcaggctggtgttggatgctctcccagggggggatgtgaaggtggtggggggagttttggtcggaaggatggatgtgatgaatctggatctgatggggagggcttagaggcctgtgaaaagaatgcatcagataaaaattcccacgacattgtaacccataaaaatgctgaggagcatcgagatcttccagtaccatctaatatttccaggctgccgttagcttatagtgggaagttcactggatcttttcctcattctatcaggtcatcttctcagttgtgcaacaccccagaacgttgctcatcagaatcttccttgggtcagtccaagttcaattcaaatcttcaggcaattccagaagatgaaactcc

SEQ ID NO: 16431 - DNA, 409 bp, Gossypium hirsutum
  Clone ID: LIB3145-037-Q1-K1-F9
cccacgcgtgcgcccacgcgtccgcagcgatctgagtcgagagtcactcggctgcgaactggacgagcctttggctgtcaaggtcgcgttcaagctttatcgaatgccggacgagagcgtatcagtggaaaatccgagagacgagcttctccgtcgcgtgaaaagattggcgccgtgcgtggtaacgttagtggaacaagagattaacaccaatacggcgccgtttgcctcaagggtgggagaagcagttggatattacggagctttgtttgagtcgattgagtcgacctttgggagggagaactcagaacgagtgaaagtggaggaaggtctgttgcgcaaaattgccaactccgttgcgtgtgaagggagggaccgcgttgaaagatgcgaggtttttgggaagtgg

SEQ ID NO: 16432 - DNA, 268 bp, Gossypium hirsutum
  Clone ID: LIB3145-037-Q1-K1-G10
aaaaacgggggccgaacgtacggaaaaaacatttattatactttatttttataaaacaaaaaaaaaaatgggcggtaaaacggaagggtgccgcgccaaaacaatcaaaacatttatctttatatccccataatatcttcctccactaatatgctcatcacctctaatcatcattcttctttccacattacatcactacatatccatcaactttttacatacactacaactttctccacttttactctttatgtctttttcctttccc

SEQ ID NO: 16433 - DNA, 347 bp, Gossypium hirsutum
  unsure (1)..(347): unsure at all n locations; Clone ID: LIB3145-037-Q1-K1-G11
aaaaaaccgggccgacccacacgtacgacctttanacatttcaatttcacttttttttttatacacccaaaccaaaaaactgtgcaagataaaataaacattgggctggcccacaaaaaaaccaaaacacataccctattatcaacaaattcaatttctaccttcttttattgcacatctccaaataacatttttctatttcagaaactaatttattactaaaataactttaaaattccacattacactaacatattatttaactcctattcaatttttttttacttttaatcatatattaaatcaatttaataaattttttaataatctaattatttttacttcta

SEQ ID NO: 16434 - DNA, 398 bp, Gossypium hirsutum
  Clone ID: LIB3145-037-Q1-K1-G2
caggacttgcatcttgattggccaacacgctttaatatttgcctatcaaccgcaagagggctagcttatcttcacgaggagtctatgccaaggattgttcatagggatgtcaaggcaagcaatattttgcttgatgcagagctttgcccaaagatatctgattttggattggcaaagctttatgatgacaagaaaacgcacatcaccactcgcgctgctggaacaattggctacctggcaccagagtatgcgatgcgtgggcatcttacagagaaagtagatgtttttggctttggtgttcttgctttggagattataagtggtagaccaaactcatataattccgtagaaaatgacagaatttatcttctttgaatgggcgtggaccctgcatgaaa

SEQ ID NO: 16435 - DNA, 385 bp, Gossypium hirsutum
  Clone ID: LIB3145-037-Q1-K1-G5
tcacaagttcacaagttaaagacccgagttgacaatgtggttaatgaaagtcctcgaaagggcacttccgttaatgtattgagttcagttacaccatgcaacacattaactggttctagaagttactcttctccacctggtagcggagagagaacccctgttacatctcaacgtcgttctgggggtaacatgggagatcttcttatgcctggaagtagtgcagtttctagtcatggagaggttacaccttttcccgatgcgattgatggaaccggtcagcatcttcctgtggtttcttacgacaataccgaggatgatattttgatacacaatcacgctgccaaggaagagttgcgtaattttcaaagtggtttaactcaacaat

SEQ ID NO: 16436 - DNA, 204 bp, Gossypium hirsutum
  Clone ID: LIB3145-037-Q1-K1-G6
ctggactcgacaagcaaagggtgcatcaatttgccgctacagttcgaagttgcaagcctcgagaagtttacaaaggcgaaggtataatgtacactgatgaaattatcaagaaaaaacaaggtggaaaaatcaaaatgatttgttgaagagctggatttttacttgccttctttttaggaggattgcagagactcattttttatt

SEQ ID NO: 16437 - DNA, 392 bp, Gossypium hirsutum
  unsure (1)..(392): unsure at all n locations; Clone ID: LIB3145-037-Q1-K1-G8
gcagcagcagcagcctctctttctcatcttgtgatttgagcttcgtgtttgtgttgggttgggcaattcgccaagatgcagggcgaanagggtcaaaacatggatctttatatccccagaaaatgttcggccactaataggctgatcacctcgaaggatcatgcttctgtccagattaatgttgggcatttggatgagcttggcagatacactggaactttctccacttttgctctttgtggctttgtccgtgcccagggtgatgctgacagtgcacttgacaggctttggcagaagaagaaagctgaagtccgacagcagtagtgggaggtggattgctttttactaattgcttggtctctgaattttggaaggaaaattgtgtttttttt

SEQ ID NO: 16438 - DNA, 366 bp, Gossypium hirsutum
  Clone ID: LIB3145-037-Q1-K1-G9
cccacgcgtccacccacgcgtccgccttcttttccgcccacgcgtccactgaactctgcctggaggaaaaaatccaatggggggttcaactcacgaatcccacctccgatccgataacgccgtaacctacgaatcaccctacccactctacgccatggccttatctttcacgcccgccgtcacccatctcaactaccaacgcatcgctctcggcagtttcatcgaggattacactaacagagtccacataatctctttcgaccctgaatcacttaccctcataacccacccatctttgtcgttcgaccacccttacccacccaccaaacttatgttccaaccccaccggaaaatcccttttctctt

SEQ ID NO: 16439 - DNA, 126 bp, Gossypium hirsutum
  Clone ID: LIB3145-037-Q1-K1-H1
ccccaaaaaaaataatccacaccttcaatcccatacccccctatcctactaatcaccctacccactctaccccattcccttatcttccactcccctcttcacccatctcaactaccaactcatcac

SEQ ID NO: 16440 - DNA, 239 bp, Gossypium hirsutum
  Clone ID: LIB3145-037-Q1-K1-H11
cccacgcatccgctatctttatacttttttttttcgctattacaactaaattcgctggctagcgataaagaagagagtgtttgaccaaacattcaccagaatttaatctcccctattcttattgataatcacctccatatactctgaatctcataataccataacttacctaaaagtttaattcactatattaacgcctttacctctttatacttcccttctaatatccacttcttccc

SEQ ID NO: 16441 - DNA, 406 bp, Gossypium hirsutum
  Clone ID: LIB3145-037-Q1-K1-H12
ggaactgttactcaaacacaaaaaatatggtttagcttccaggcacttggaaacatggctggtgcctattcttatggggtgtgctcattgaaattcacgtatgtaacttcattttgtccaatttatctacctccaataacagtatgatacttgtataggacacacttaaggctccaccatccgaatcaaagacaatgagcaaggcaactttgttaagtgttggagtgacaacacttttctacatgttgtgtggttgcatgggctatgctgctttcggggacttgtcccccgggaaccttctaaccggttttggattctataacccattctggctccttgacattgctaatgctcgccattgaattcaccttgttggtgcataccaagtttactgtcaacccctttt

SEQ ID NO: 16442 - DNA, 404 bp, Gossypium hirsutum
  unsure (1)..(404): unsure at all n locations; Clone ID: LIB3145-037-Q1-K1-H2
ggaataaagacagagaacgaaagagaaggggagttcaaatcaaatctcttattctttaaaagttctgggaggaattggatctgcgctctctctctctctcctctcagctggacgagaaagacgaaatttcggctggtataaaaatgcacgtgtttgatagaatgactattccaattcgcagagtttggaccggtgtcgccacccgcttccgcgttcgtaaaagtgctcatatgaagcttcgaaaagatataagcacttgcgaatacgangatgtgcgagtgatgtgggaaatgctgagcagaaacgaagcagaaaccattcgatccccaacaacaagtgaaggaagatgcagaacgagaccaatgtggcattgctttgaatgggcaaagcgagctccttttctt

SEQ ID NO: 16443 - DNA, 373 bp, Gossypium hirsutum
  Clone ID: LIB3145-037-Q1-K1-H3
gtccgaacgaccaccggtaaccatgttttatgtgttctcaagggagctttggatggtggaggtgatattccgcacagtgaggggagatttgctggatttaacaaggacagtaagcaacttgaccccgaagttcaccggaaatacacttatggtggtcatgttgccgcatacatgaagaatttgatggaagatgagccagagaagtaccagtctcacttcagcgagtacataaagagaggcattgagcctggcagcattgagggaatgtacaaaaaggttcatgctgctattcgtgcagatcctgaagcaaagaaatccaagaaggaacctccaaaggagcataagaggtacaatctgaagaagctgtctcatg

SEQ ID NO: 16444 - DNA, 398 bp, Gossypium hirsutum
  Clone ID: LIB3145-037-Q1-K1-H4
cccacgcgtccggaaaagacatcaatgcattggagcagcacatacagaacctgctgagtcgatccactccatttttcttcagcgctctttatgacccataccgatccggtgctgacttcgttcgtggctaccctttcagcctccgtgaaggtgttcccactgctgtctcacacggtctctggctcaacatcccggattatgatgctcccacacagcttgtcaagccactcgagaggaacaccaggtatgttgacgctataatgacgattccgaagggaaccttgttccccatgtgcggaatgaatctggcatttaaccgagaattgatcggccctgcaatgtactttggactcatgggagatggtcaaccaattggacgatacgatgatatgtgggct

SEQ ID NO: 16445 - DNA, 215 bp, Gossypium hirsutum
  Clone ID: LIB3145-037-Q1-K1-H5
ctcaatctaataccaaatgtcctactgttgttttttaatgcattgcttgggcctttgaaggcgatgagctttgctcttggatgtggggctgctcgcataacatgtgcccatattaactcaactcggacctttcgaatgttactggcaacgaagctggaccttacaagggccacattctacatgatcatgcaatgccttgttgctatctactgagc

SEQ ID NO: 16446 - DNA, 411 bp, Gossypium hirsutum
  Clone ID: LIB3145-037-Q1-K1-H6
cccacgcgtccgctcttgcagtcgcctttatcagaagcaaaaacactaagctttagcttcgacatcggagaaaatggtgaagggacgccaaggagagcgagtgagactctatgtaagaggaaccatcttgggttacaagaggtcaaagtcgaaccagtatccaaacacttcattgatccagattgagggagttaacaccaaggaggaagtagcttggtatgctggcaagcgtatggcttatatctacaaggccaaagtgaagaagaatggctcacactatcgctgcatttggggaaaagttactagacctcatggtaacagtggggttgttcgtgctaagttcaagtctaaccttcccccaaagtctatgggagatagagtcagagtcttcatgtaccccaccaatatatg

SEQ ID NO: 16447 - DNA, 348 bp, Gossypium hirsutum
  Clone ID: LIB3145-037-Q1-K1-H8
caataaacagaccttgatgtaaggactcttttttaattattacttctcatttgatcgggagactcaaatctgtctaaggttggtatagattttattggatcttatctcagaataaagcaactatctacagctttagttccttcacaatgagcaattgcaacatgactagatttcgtgctgttcactgcaaagctattgctccctgctccatgaacaaaaagtggataaatggatgtcaaataaccctttccaacagcactacacatttatctcaaaacacttcacttactgtccatgccccaacatctatagttcttgctttgaaccttaccacatttgatgcaacct

SEQ ID NO: 16448 - DNA, 407 bp, Gossypium hirsutum
  Clone ID: LIB3145-037-Q1-K1-H9
gcggcataagagttttaaggaaaatgcagatcttcgtgaaaaccctaactgggaagaccataaccctagaggttgagggcagcgacactatcgacaatgttaaggctaagatccaggacaaggaaggtatcccgccggaccagcagaggttgatcttcgccggaaagcagcttgaggatggtcgtacacttgccgactacaatatccagaaagaatcaacattgcatctggttctgaggcttcgtggtggcattatcgagccatctttgatggcattggctaggaaatacaaccaggacaagatgatctgccgcaagtgctatgctcgtctacacccacgtgccgtgaactgcaggaaaaagaagtgtgggcatagcaatcagctgaggccaaagaagaagatcaag

SEQ ID NO: 16449 - DNA, 361 bp, Gossypium hirsutum
  Clone ID: LIB3145-038-Q1-K1-A1
ctttgccctttcattgcttccttgcctgccttaaacctccttccagcatagccatgactactgaaatgataatgggtgatgaagtcccttttcctccacaaatcacaactaccaagccactatctcttttgggtcatggaattaccgacattgagattcactttttggcaaatcaagttcacagcaattggggtttaccttgaacctgaagttgtagggcatttacaacaatggaagggtaagcctgggaacgtgctagctgaagatgataacttcttcgaggctcttattaatgctccagtggagaagtttctgagagttgtggtgattaaggagatcaaaggttcccaatatggagtgc

SEQ ID NO: 16450 - DNA, 383 bp, Gossypium hirsutum
  Clone ID: LIB3145-038-Q1-K1-A10
ataccctgaaatgtcaaaatgccccatctctctctccctctctctctttcttggtgccatcaccatgattacagccgcaaaagctttgaatctgaatatctttaattcaaatccccattctccatacatactctcatctagatctagggttcccttcattatctcaaaaacccctatatatctacaaaccttacagaaaaacactccccaaaatcaaaatccctctccaaatgattccccaatggctaagatcaccaagcagggcagcagcaacaaaccccacaaaatcaccctcccatttctctttctcttcattcaaagacattgatgctatcctcaaagaagaagaagaagaacaagtcctctatcctcaatcccctaaa

SEQ ID NO: 16451 - DNA, 406 bp, Gossypium hirsutum
  Clone ID: LIB3145-038-Q1-K1-A11
gcggactatctccactatgctagggattcttccatctgatcacttctccggggcgggttccgtctccactccggctgttcatcgccttctattctcttctatcatcactgggtatacgttgtggaacgcggagtatagggtttcactgatgaggaatctggaaagagcagcaccgggcgaggaggtggcgggggagacagaggaagctattaggaagcggcagggagaggtgtttgaggagaaaagggaggagagagcgagtcaaagtgatggctttcaagaattcgagaagattaggccgagggtttccggggaattgtcgccagaggctttgaagtatattgaaaaactgcaagcggagttatctgatgcggtggaggaactgaatgtggagaaggagaatgtg

SEQ ID NO: 16452 - DNA, 404 bp, Gossypium hirsutum
  Clone ID: LIB3145-038-Q1-K1-A12
atgaaatcgggtggtggtggagattcagatcattccgatctcgaagtttcgggtagtaaagaagcagatgggggaggagttactatttccgcggaacccgaaaagagaccacgaaaacgggggagaaaaccggctaacggaagagaagagcctctgaatcacgtagaagcagagcgtcaaagaagagaaaagcttaaccaaaggttttacgccttacgtgcagtggtaccaaacgtatcgaagatggataaagcatcgcttctgggggatgctatttcgtatattaacgagctaaagataaagctacagaaggtggattcaatgaaagaagagttgcataaacaattagaagaaaccaagaaagaaagtcagcgaggaggcctcaccacgtcccacaaattact

SEQ ID NO: 16453 - DNA, 439 bp, Gossypium hirsutum
  unsure (1)..(439): unsure at all n locations; Clone ID: LIB3145-038-Q1-K1-A2
taccggaactgcattcccgacccaacccacccgttgtttcataagcttttggtggctaaaatggtggttggcttggccaggatagaggcagggctttgtttgtattgaggattattgcttttattttatgaatgagaaccttacttgttctgttttctaaaataaactacaaaaaaaaaaaaaaaaaaaaaaaaaaaaaaaaaacaaagatataaaatgatggnctttccttaaaaaaaaaacaaaaaaaaatattaaataaaaaaaaaaaaaaaaaaaaaaaaaaaaggggggggcccctttaaaagaacaaaattttttttccccccttttcaaagcttaaaatttttttttgggcacacataaattctttttcgggccctggatttaataagggggaacgggaaaaacccgggggttacccattttaatcccgttg

SEQ ID NO: 16454 - DNA, 402 bp, Gossypium hirsutum
  Clone ID: LIB3145-038-Q1-K1-A3
ctggcttacgacaaaaggaccagaccttatgtgaagaaaatggccaagagccaagactatttcttcaaggagttctcaagggccattactctcctctctgagaacaatcctctcactggtagcaagggtgagatcaggaagcaatgcaatcttgcaaacaagcttcactaaaatgcctcgccaaagagaaagccgagagtggcccaattaaaatggttgtttacttgtttcttttccaagagacaagtttgttaatgtgcagtgagtaatggtgcaatggtactagtttgatacgatcgacccattgcatttttttttagcataagccaagttgccttctcttgatgttggtcatgggcgtagtggatgtaaggatggatgtaatgtatgtatgtaaggatg

SEQ ID NO: 16455 - DNA, 409 bp, Gossypium hirsutum
  Clone ID: LIB3145-038-Q1-K1-A4
gaaggtcaaaaaaatttctgaaatgaatttggaccctccaaaagctgtaggaaatggccgtgtggctagttcaagtaattctaatagtcccacactttgtcttgcaaatggaggttcctctggcaatgatttttctttcccaccaggaggcctgccatcattgcgtttgcctgtggtaacaagtcaggaaaccaacctagtagctagatgtcgaagagtatatgcccatgctcatgattatcacatcaattccatttcaaataacagtgacggcgaaacttttatatcagctgatgatctgcgtataaatctttggaacttggaaatcagcaatcaaagtttcaatattgttgatgtaaagcctgcaaacatggaggatctaactgaggttataacatcagcagaattc

SEQ ID NO: 16456 - DNA, 407 bp, Gossypium hirsutum
  Clone ID: LIB3145-038-Q1-K1-A5
gacaaaatctgtgaagtctgctggtagcagcagtgctaggcctggtgagcctacagcttgctcaacgactcctaggtttgctgggttagctcgttcttcttcatggtttgacatgaatggaggtcatctgcctttaacgttcagaactcctcctgttagcccccctcggcaaaattttttgacaggaatgcgtagagtttgctctttagaattcaggcctcatctgatgaattctccggactccggattggctgacccacttctagggtcttcttctggggtttctgagcgcagtttacttccacaatcaactatctataattttagttgtggccacttctcaaagccacttcttactgcatcagatgatagtgaagaactattggctataagagaagagcgggaga

SEQ ID NO: 16457 - DNA, 403 bp, Gossypium hirsutum
  Clone ID: LIB3145-038-Q1-K1-A6
ctcagggatcgtggagagtgtgggtgagggtgtgaatgatttgaaacctggagagcatgtgctccctatcttcaccggagaatgcaaagaatgtcgccactgtctgtcagaagaaagcaataacatgtgcgaactgcttaagatcaactgcgaccgaggtgttatgcttgctgatgggaaaaccagattttccatcaacggcaagcctatctaccactttgttggaacctcgacctttagccaatatactgtcgtccatgttggccaggttgccaagatcagtccaaccgcccctcttgataaagtctgtcccattagctgtgggatatgtacaggttttggggccactgtgaatgttgctaaacccaaaaagggtcaaactgttgcagtttttggactgggt

SEQ ID NO: 16458 - DNA, 219 bp, Gossypium hirsutum
  unsure (1)..(219): unsure at all n locations; Clone ID: LIB3145-038-Q1-K1-A7
cggaannccnnngggggggggggccacgcgtccgggcatccttgtgtttgcttcttgttagtcaacttttttatgaactttttactgaattacctctagttactatgtaagatgtttgtttgatgccattatttttgttcactaaattaatcaagttctgaaacctccagcaactgggtattttggtttgtattaatacaatttcggttggatttgcct

SEQ ID NO: 16459 - DNA, 445 bp, Gossypium hirsutum
  Clone ID: LIB3145-038-Q1-K1-A8
gcccggaccggaccggacatggccgggccgagcgacgcgtgcgcccacgcgtccgggcaaaggcagtggccattcacatcaccacacctattttaattagtttaacaccgtccgttggctgcttcctccgttcttcattagaatattttagatttaaacggactcgatccctaagctagttttgtactaatgggaaccagttagtgttgcaaacaaggatatcaatgttagcttagctgaaaaaaagcctagagttgtttttgttttgggtggccctggcagtgggaaaggtacccaatgcgcaaatatagtcgaacactttcattacaccatctcagtgctggagatcttctccgagcagaaattaagtctggttcggaaaatggaaccatgattcagaacatgatcaaagaaggaaagattgttccttccgaggtcacaatta

SEQ ID NO: 16460 - DNA, 402 bp, Gossypium hirsutum
  Clone ID: LIB3145-038-Q1-K1-A9
ccgcccacgcgtccttgcaaaggctttggtttttcacatcaccacacctattttgggtggtttaacaccggcggggctggttccttcattcttcattataatattttacatttaaacggactcgatccctaagctagttttgtactaatgggaacagttattgttgcaaacaaggatatcaatgttatctttacctgaaaaaaacacctaaaattgtttttgttttgggtggccctggcattgggaaaggtacccaatgcccaaatatagtcgaacactttcattacaccatctcactgctggagatcttctccgaacagaaattaattctggttcggaaaatggaaccatgattcataacatgatcaaagaatgaaatattgtttcttcctatgtcacaat

SEQ ID NO: 16461 - DNA, 402 bp, Gossypium hirsutum
  Clone ID: LIB3145-038-Q1-K1-B1
aagtttttggtgccgtagcttgtctctcatgtcctattagggtcctgtttgcatccgaccagttgtttccaagagctaggctttgatacttaaaataagaaccactatgggtatttctagttataggttctttctgtttttatttggtggcataatcccaaccctagaagctcatatcgctgagtatgacgagtactggacggcacgagaattggaagccattgagaacctggacaagggcctatcactccaacccggaggaggtggtccgccattacaatgaccacttctctaggaccatgctcgagttttatatcaccaaaagggtgttggcagaatcaaaaaagggtccctgtgaggttaccaaccacgttgacagttgctggcgatgtgatcctgact

SEQ ID NO: 16462 - DNA, 389 bp, Gossypium hirsutum
  unsure (1)..(389): unsure at all n locations; Clone ID: LIB3145-038-Q1-K1-B10
caataagcaaaaaaaaaaaaaatggagcaaccattaccaaagagctggagcatgcatacccgacccgagatcaggnggaagtaccagatcctggagcgcgtgggatcaggcgcttactccgacgtctacagggcgcgtcgtctctccgacgacctcatcgtcgccctcaaggaagtccacgactaccaatcggcgttccgcgaaatcgaggccttgcaaatgcttcggaactgcccaaacgtcgtcctcctgcacgagtatttttggcgggaagacgaggacgccgtgcttgtcttggagttcttgaggaccgatttgtcggcggtcatccgagacgcgaaaaaaagggaaggtggggtccgagtcggtgaagttaaaaggtggatgct

SEQ ID NO: 16463 - DNA, 409 bp, Gossypium hirsutum
  Clone ID: LIB3145-038-Q1-K1-B11
cccacgcgtccggcacatgcgcttgatagttcatcggaggacacgggttattggtgggtgcatggcggagttggaggaacagcgaaggacgtatttttgggcagggcctggaagagcagtccgagggttgtttattcttatactgaaatggacgaaatcgtccatcctggtggatggtctagtaatcgccaacctgaacgagccgacactgtgtactacggagaatacaaatgcacggggaaaggcgcgactcctgctacacgagagaaattcgtcaaacaactatcggatgcggaagctaaaccattcttggttcttgactacgttgaaggtaccaaatggttgcttccccctccgacagtacctaaataattcattcattcccaactttttcatgccggcaacatat

SEQ ID NO: 16464 - DNA, 407 bp, Gossypium hirsutum
  Clone ID: LIB3145-038-Q1-K1-B12
cccacgcgtccggattgcgattggtgcggcgagggcgcttttgtatctacatgaggaatgtgatcgagagatggtggatagagatgttaaggcagctaacattcttttagatgattactgcgaagctgttgttggtgacttcggccttgcaaagctccttgatcatactgattcccacgtgaccactgctgtccgtggtactgttgggcatattgcaccggaatacctctcgactggtcagtcttcggagaaaaccgatgtgtttggattcggaattctcttgatagaactcattactggaatgagagctctggagtttggaaaaactgttggtcaaaaaggagcaatgcttgagtgggtgaagaaaattcaacaagaaaagaaagtggaagtactagtggacagag

SEQ ID NO: 16465 - DNA, 80 bp, Gossypium hirsutum
  Clone ID: LIB3145-038-Q1-K1-B2
attttattgctttactgctatatatgattattatcgctatatgaacctccttttcgaatgaaaaaaaaaaagagaggggg

SEQ ID NO: 16466 - DNA, 391 bp, Gossypium hirsutum
  Clone ID: LIB3145-038-Q1-K1-B3
gccaatcccgtcgcacaaagaacctctgtttctgcccttctctaacaacaaacatggcaaagcgattgattccttcagttaatcgcattttggttgagaaaataatccctccttctaaaaccaactctgggatcttgcttcctgagaagacccccaagttgaactctggaaaagtggtagcagttggaccaggagctcgagacagagatgggaagcatatcccagttaatctgaaggaaggagatacagttcttttgcctgaatatggtggcactgaagtcaagcttggtgaaaaagagtatcacctatacagagatgatgacatcttgggaacccttcatgactgaatttttgccggtgggggactggagaatgattctcattcaaatat

SEQ ID NO: 16467 - DNA, 346 bp, Gossypium hirsutum
  Clone ID: LIB3145-038-Q1-K1-B4
gctacacgttcagtagacttttccattggtcagatgacactttatggatgactgggtggatttgcatatgggggcaagaacagataactttcatttattatgaccaggttctgggcaaggcttactcacatatgagctacaaccaccatacctaacatggaaatgaaatacctattgctaaatgcaccactgaaagaactcaatattcaaaaactggtatcaatctgaatgggcctgccacatggatactctgagcatgataatggacccctacaggacccatataccacaatgaatcgatcgaccacaatgatgattgctatgttcgagattacttacagtgcat

SEQ ID NO: 16468 - DNA, 403 bp, Gossypium hirsutum
  Clone ID: LIB3145-038-Q1-K1-B5
aactcgaggacgggcggactttagccgattacaatatccagaaggaatcgactctgcatctggttctacgtcttcgaggtgggatgcagatcttcgtcaagactttgaccggtaagaccattactttagaagtggagagctcggatacgattgataacgtgaaagcgaagattcaggacaaagaaggaattccaccagatcagcaaaggttgatttttgctgggaaacagctggaagatggaaggactttggctgattacaatattcaaaaggagtccactcttcaccttgttcttcgtcttcgtggtgggttctaagccttaaggtcttccttaatgtgggttttctggttttacgtgaaggattgtgccctttgatggccttttaaataatttctagtctt

SEQ ID NO: 16469 - DNA, 399 bp, Gossypium hirsutum
  Clone ID: LIB3145-038-Q1-K1-B6
gcaggaaagaactagctacggatattgtaggcactgaaaaagaacattgctggaactgaatagatgtacaggattgggaatggcatgctaatctggccttcttgtatcctctaaaacagacatctttattctgtaattgtagggattccttgcatgaattcttgtcacctttatatttaccctgtccctggaataaaacttgacaattttatgcgcaaaagacaaaaaaacatgcccaaacgaaaaactactgcacaaatatttttggcaagaaaacaaagacgccgtgcttgtcttggagttcttgaggaccgatttgtcggcggtcatccgagacgcgaaaaaaagggaaggtggggtccgagtcggggaagttaaaaggtggatgcttcagatttt

SEQ ID NO: 16470 - DNA, 400 bp, Gossypium hirsutum
  Clone ID: LIB3145-038-Q1-K1-B7
ttgataaagagctacctggatttatctcgaaggaggcccttcttcacggagttgagactagaactagctggtggatgcagattccacgtgacagtgacacctacgagagcatgtctttaagagggctctacccagttggtgaaggagcaggttatgctggtgggattgtaagtgcggcagttgatggcatgtatagcggtttctccgtggcacaaaaacttggtttggttcaatggtgacataaagtcagttttaggaaaggctcagagtgctggaatggtgaagtactagaacggatttattgcgtttgattttataacgaatggtttcagatgagtacatgctccattatcattgtaaagctctacaaaattgaggaagatgacgaggggacttcaaa

SEQ ID NO: 16471 - DNA, 392 bp, Gossypium hirsutum
  Clone ID: LIB3145-038-Q1-K1-B8
ctcgggcacagcagagcagtcaaaacctcctgttaacgagccaactaaattggcaggagctctacagccgagggaagctcctgctgtggtagctactgagtcgtcgacattagaagatattatcatgttagaagataattcaaaaaaggatgaacaagttgatggtagtggtagtccggaagtcaatgatacacctgggaaggagagttatggcaccttcctctgaaacggaaaaagaagatgagactatgtctttatcctatttatctaccaactttccaacagtgcttcgagtctatgaatcaaaacagaaaagcagttaaagtgaagaaatcaaaagaagatagtggtgttttgcaaataaagccatttgattatgaagcaacccggaa

SEQ ID NO: 16472 - DNA, 372 bp, Gossypium hirsutum
  Clone ID: LIB3145-038-Q1-K1-B9
cccacgcgtccgaaaagtgagaacgaaagaaatggcaaatattcccataatcgctgttttctgcttcaccatgggtggttcgtcctcactcaatttcgtctatggggctgaaaatatgagctacgtcgtcgtaggccatgtttactgtgacacttgccgtgttgagtttgagaccaaactcagcgaacccatcgctggagcagtagtgaaactggaatgcaggaatcgtacagacaatcaccttaccttccagagccaagaaatagtgactgacgaacgtggagactatcacattgtagtggaaggcgattatgaggaatcagactgcgacgtcgccttggggagggagtcccaacccggattgcaatgatc

SEQ ID NO: 16473 - DNA, 401 bp, Gossypium hirsutum
  Clone ID: LIB3145-038-Q1-K1-C1
gtctataccagaaggagcatgagtgaatacgatcctcgtcttgttgctcctacttgcttatatttggcatcaaagggagaagaaagcacggtgcaggctcgacttcttgtattttacattaaaaaattatcttctgatgaaaagtatagatatgaaatcaaagacatacttgaaatggaaatgaagatcttagaagcacttaactattatttagttgtatttcatccttaccgcacattatctccgttgttgcaggatgctggcatgaatgatatgagtatgactcaattatcttggggacttgtaaatgacacatacaagatggaccttattcttacacatccgccatatttgattgccttaacttgcatatacattgctagcgtctacagggagaaaga

SEQ ID NO: 16474 - DNA, 397 bp, Gossypium hirsutum
  Clone ID: LIB3145-038-Q1-K1-C10
gctgaaatcaaggggcatcgtcgaacctatattggtgctatgcctggaaagatggggcagtgcctgaaaaatgtggggacagcaaaccctcttgttctaattgatgagatcgacaagctggggaggggacatgctggcgatcccgcaagtgcgttgcttgaactccttgatcctgagcaaaatgctaactttttggaccactatcttgatgtgccaattgacctatcaaaggttttgtttgtttgtactgctaatgttgtggacaacataccaaaccctctcttggacagaatggaggtcattgctattgctggttacatcgctgatgagaaaatgcacattgctagagattaccttgagaaaactgcacaagaaacatgcggtgtcaaacctgaac

SEQ ID NO: 16475 - DNA, 373 bp, Gossypium hirsutum
  Clone ID: LIB3145-038-Q1-K1-C11
cccacgcgtccgcccacgcgtccgagacctaccgccggccgaggagctcatgttgagtgtcgcttcttctcctccgacgtctttggaactggaacttgttaacctttaacaataaagacgaagagagagatgccaaacttgtctaaggaaatagaaaaacatgacactaactctgggcatcatccgagagaagatagtgaatacgttaggctggttatttctaatgaacctactgcagctggagtggacatcttacaacctcaaccacccacaaggagtgaaacttttagctggtggatcaaagccttcatcttctgcatttttgcaggtatattgattcttgtttttttgaaatggggagttccggttcttt

SEQ ID NO: 16476 - DNA, 414 bp, Gossypium hirsutum
  Clone ID: LIB3145-038-Q1-K1-C12
tcggtaaaaaaaaaagatggcgtctgttataaaatctgcaatcttaattctgtcgggggggttatctgtaagcttcaggtcgggtgttaggttgctccaggaacagcccaatgatgacctcaaaaacatggacgctattcctcccattgatgcactcaaccctaccgagttcaatggacccggtgttggcattcacgaagatcatgttgtcccaaaaggttccgaaattggtactcttggttttggttttgaaggtggtcctgaaaaatgttgttcttctggatgttccggtaattgtaatcctggtggtttcgttctaccatttcctcaaattccagaaatcccaagaattccacagatcccacagatcccacaaatcccacaaattccactaatcccacagatcccacaagt

SEQ ID NO: 16477 - DNA, 329 bp, Gossypium hirsutum
  Clone ID: LIB3145-038-Q1-K1-C2
cccacgcgtccgcatcaacattgaaatttacaaagatcggtgaagagaagaaattggaagtgaggttaagaccgagtagtaaaaaagtggatgcggagggaggtgtagggtatgtatttggggtattgagatggtgtgatgggtatcattacgttggaagtccattggtagtgaaacgtaagtagaaattttttgttgtaatttttaattgggggtttgattttatcgttattattattagcattccattcttttgggggggaaaaatttagaacaaaatgccaaatgtaataacgttgcaaataagaaactacatacaagcatgattc

SEQ ID NO: 16478 - DNA, 399 bp, Gossypium hirsutum
  Clone ID: LIB3145-038-Q1-K1-C3
tgttaacatactgaatattatttttaagttttgattaataaaatttgcattaccattaggtttttacattgtggctgtgttgctgcttgagttaaaactattgaaagttcggttgaactctgtttagatgagttttgtttaattcttactcaaaaagaaggaaaaaatgctcaatgaggtagtggtggaggtatcaaattgtcattgtttttgaatgtatggtctcatttgcaagggcttttttgaagaaattaggattttattaggcttatttaataatggtgtttagataaaaactagtgtatggttgtttagttcttactcaaattgtcattgcattgaaactatgctttcattgtttgaagaattagaattttagtatgtttctttgctaagtgg

SEQ ID NO: 16479 - DNA, 407 bp, Gossypium hirsutum
  Clone ID: LIB3145-038-Q1-K1-C4
cacctgttaacccgacatttttgccaaggaacgaggatgagcgtcaaatttgtgcgagaactatctattgtacaaacattgacaggaaggttactcaagctgatgttaaactctttttcgaaacagtctgtggggaggtttatcgcctaaggctgcttggggactatcagcattcaactcgcattgcttttgtcgagtttgcattggctgaaagtgcgattgctgctctcaactgtagtggtgtggttctgggatcattgcctataaggatcagcccatcaaagaccccagttcggccacgagctcctctccttccctcgtactaaatcattcaccctgaaccaattttagttccaagtttatatatatatttatttaaatacatacacacccatgtaaggatgttt

SEQ ID NO: 16480 - DNA, 202 bp, Gossypium hirsutum
  Clone ID: LIB3145-038-Q1-K1-C5
cccacgcgtccgcccacgcgtccgatttctaccgccggccaacgagctcatattgagcgtcgcttgttgtgctcctgcgcctttggaacttgaacttgttaacctttaacaataaagctggggaggggacatgctaacgatcccacaggtgcgtttcttgaactccctgatcctaagcaaaatgctaactttttggaccact

SEQ ID NO: 16481 - DNA, 400 bp, Gossypium hirsutum
  unsure (1)..(400): unsure at all n locations; Clone ID: LIB3145-038-Q1-K1-C6
aaaccctccacgttttatccaaacattttatttttttatttccattgctttgattggaggcgctattatgggaatgcgggtaagcggcngcacgatcattccaggaggttggggggccgccgccatggctgtcgcggctaagacatgcgacgcatgtaaatcatcggcggcagctatcttttgtcgtactgattgggtctttttatgcttgaattgtgattccaatttccattccggtcacgaaagggtgtctatgtgtgaagtttgcgaacaagctccggcggctgtcacttgtaaagccgacgcggcggctctttgtgtcacttgcgacgccgatatccattcagcaaacccactggctcgccgtcacgaacgtgtacccatctaacctttttaccac

SEQ ID NO: 16482 - DNA, 397 bp, Gossypium hirsutum
  Clone ID: LIB3145-038-Q1-K1-C7
cccacgcgtccgcagagtttcctttaatattttgggctatcctcttcgcccaggggagactgagtgtgcgtatggtgtaagaactggacaatgcaagttcgggagcacttgtaaatttcaccatcctcaaccaactaatatgatggtttcattgcgtggctctcctatttatcaaactgtcccttctccggccactcctggtcagcagtcacatccaggaggaattacaaattggtcaagagcatctttcattcccagccctcgttggcaaggtccttcaagttatgcatccttgattttaccacaagggatggtatcagttccaggctggaatgcttatagtggtcaactggcatcagtctcttcttcagagaacctgcagcagacaaatgtaaat

SEQ ID NO: 16483 - DNA, 396 bp, Gossypium hirsutum
  Clone ID: LIB3145-038-Q1-K1-C8
tgaatttcctgcacggcctggcctacttgagtgtagttacttccttaaaacggggggctgtaaatgtaaatcggggggcaaatatcatcatccaaaaaatagagttgcaaagatggctccatgtgttctcagtgacaagggattgccactcagacctgatcaaaccatctgctcacactatagccgctatggtatttgcaagtttggaccagcctgcaaatttgaccattcaaaacaggaagctccatcaacaatggcaatggccggactggatcagcctccaccattcagccattctgctgctacagaacaaaccggaatcgccagtggtactgatactgcaattcaacaacctttgtaaaaagaatttttaaccaaagcttcctagctttttaa

SEQ ID NO: 16484 - DNA, 231 bp, Gossypium hirsutum
  Clone ID: LIB3145-038-Q1-K1-C9
ttttttttttcctcaattgccattaaatggtaaatttaattagtaaatttgggtggcaaatgagggggattggaaagatatattaaaatatataatttttgcttcttactcttcaaaaaaaaaaaaaaaaaaaaaaaaaaaaaaaaaaaaaaaaaaaaaaaaaaaaaaaaaaaaaaaaaaaaaaaaaaaaaaataccaaaaaaaaaaaaaaaaaaagataccttatacaac

SEQ ID NO: 16485 - DNA, 395 bp, Gossypium hirsutum
  Clone ID: LIB3145-038-Q1-K1-D1
gtaggcaccaagctaccatagtttggctacatggtcttggtgataatggttcgagctggtcccagctcctggagacgctccctcttccaaatattaaatggatatgtccaactgcgcctactcaaccaataagcatatttggtggctttccatcaactgcttggttcaatgtcggcgagctttcagaagatgctcctgatgatatagagggtttggatgctgttgcagcacatgttgcaaacttgctggcagcggagcctgctgacattaaacttggtgttggaggcttcagtatgggtgcagctacctcactatactctgcaacctgttttgctcatggaaaatacggaaatggaaacacatatcctgccaatttgagcgcagttgtaggactt

SEQ ID NO: 16486 - DNA, 224 bp, Gossypium hirsutum
  Clone ID: LIB3145-038-Q1-K1-D10
cttgcaagtgtgtttctgtatcttcttcaaaaaaaaaaaaaaagcaatcaagaatgatatttgtctgtgggcaaaggaaaaaaaaaaaaaaaaaaaaaaaaaaaaaaaaaaaaaaaaaaaaaaaaaaaaaaaaaaaaaaaaaagatggcggtctaaatttatttaatctaaaaaacacatacatgggaatcccaaaattaaaatatattgttactaaaattaaa

SEQ ID NO: 16487 - DNA, 413 bp, Gossypium hirsutum
  Clone ID: LIB3145-038-Q1-K1-D11
gttaaaaaaaaggggaaatctgggttcagaaatggggcattctgcagcagtgggggattatagggcggcgaactgagattacaaaggattggaatggggttgataagattgttcttcggagccctcgaggggcttcagcaagggttagcttacatggaggacaggtcacttcatggaggaatgagcaaggggaagaacttctttttaccagtagtaagccccccaaagctgtgcgaggtggaatccctatttgttttcctcagtttggtaactgcgggtcactcgagcaacatggatttgctaggaacaagatttggacaattgatgagaatcctccgcctctcggtcctaatgattcccatgccaaatccttcattgacctattgcttaaaccatccgaagaagatctcaaa

SEQ ID NO: 16488 - DNA, 411 bp, Gossypium hirsutum
  Clone ID: LIB3145-038-Q1-K1-D12
ctcacttttttccttaaccttttaaataacataaaagatggtaaaggttccgggggttgtgttcttattggcgggggtgctttcaatccaattcgtagtgggacaagatgaggaggctatagatgaggaagtatcccgggaagccgacaatgtacttttgagttcaggggcaactaatctcgttgaaaactttaaaagctctgctggagataattcccaaagtatggatgggccaacttctggcttagctgatgagattgcagcttctccagaatcgaaagtagaagttgctactgaatctgctggtgggatgaagcgtaaaatggcataatagacccccatgatgtttagaaagaaacatcagacctaaagttttttaaagaggtggctaaagcggttaaaaataataaa

SEQ ID NO: 16489 - DNA, 401 bp, Gossypium hirsutum
  unsure (1)..(401): unsure at all n locations; Clone ID: LIB3145-038-Q1-K1-D2
atttcaatatttttattattattataatatatgatgtcgtncaaaaaaaaaaaaggggggaaataaaaaaaaagagagggaaaaaaaaaaaaaaaaaaaaaaaaaaaaaaaaaaaacaaacacaaaaaaaaaaaaaaaataaaaaaattgtgctgacaaaatttataataaaaaacaaaaaaaaacataaaaaaaaaagtggccccccccctccatttttaaattttaataaccccccccccccttttaaaaatccaaaattttcttcccctcccttcccaatatttttttttttttttctcccccctaattttattttcctcccctctttttaacaccttttaacctgaaaaacccctcctttcccccaattaaatccctttaaaaaaaaaccctttttc

SEQ ID NO: 16490 - DNA, 401 bp, Gossypium hirsutum
  Clone ID: LIB3145-038-Q1-K1-D3
tgctagacaaacttcggagtatccaatttctagcaatccagttctagagaaagagcgggccgttggctttctctctgttgcttttgagagtaaagcttacgagaccacccgcaatcttccaccgtttcagtcacttctagacgttgataaaacaaaagcatctgaggttgatgtagaagagatttctttaaaagaggaacgtgaccttgaagttgaattttcagcgcatgctgcagaagcagctgatgcccttcataaggccaaagaattatcatctcaaggagtcaatcaagatggaacaagatggtggattgaaacgggaatcgagcaaagacctgatggtgtgatttgcaggtggacaatgatcaggggtgttagtgctgaccaagctgttgaatggc

SEQ ID NO: 16491 - DNA, 145 bp, Gossypium hirsutum
  Clone ID: LIB3145-038-Q1-K1-D5
gtttgtagtgaaaaaaaaactgtggtttagtcatatgttggggggttaaagtgatggggcaccaatgtgtgtcactggtgttttatgtgtgtgtgaaatctatatcatgtactactagttgttgaagaagtaatttatttaatgg

SEQ ID NO: 16492 - DNA, 414 bp, Gossypium hirsutum
  Clone ID: LIB3145-038-Q1-K1-D6
gggaagcttatacttccattcggagatcaatggtggtttaggtttcttttgggcggggtgatgccacccaaggttggcttgctcaaggctactcaaggtgaatctataagaaactattaccatgagatgcatgtcattcaagacatgcttgttcctctttacaaggttggggatgcccttgagtgggtccaccatgagatggagatctatcccatttggctctgcccgcaccgactgttcaagcttcctgtcaagacaatggtgtatcctgaaccaggctttgagcagcagcacagacaaggcgacacaccatacgctcagatgttcaccgatgttggggtgtattatgctccaggccctgtattgaggggtgaagtatttgatggtgctgaggcagttcgtaaaatggagcaa

SEQ ID NO: 16493 - DNA, 431 bp, Gossypium hirsutum
  unsure (1)..(431): unsure at all n locations; Clone ID: LIB3145-038-Q1-K1-D7
gaccggccggaancccggggcgacnacgcgtccgtgctgccatctgggatgaaggatttgtttatcttgtttcgttggagagtgatgttgttattcctacgtgtgagggagacatggctaaggttgttgaaggccatcgcagatttctggggtacaagcagacaatattattggaccgaaggcttttggttgatctgatagaccagtacaatagtggatccctaagttggaatgagttctcaaatgccgtgaaagaatctcacaaatatcgcaaggggcaaccaacacaaagatcggtgatccccgaccggcctaaagaagaggattacttctatgccaacccagaagaatgcttgaaaccatcatcatatggtcaagtgagtagcatgtgatctttctatctggggattgtgacgattattggtgttttt

SEQ ID NO: 16494 - DNA, 400 bp, Gossypium hirsutum
  Clone ID: LIB3145-038-Q1-K1-D8
ggcgattgcagcgcgcatcagatccactctccctctctttcacaggcttttgagagccgattccctgccttctgacactcccagagctgctcttcaccgaactctactttgtcccgaactgtcgaggaaatattccacttctccgaagaaggacgagaatgttaaggtgcctttggctttgtttggtggatctggaaactatgcatctgcactgtaccttgcagccgtaaaaggaaatgctctggacaaggttgagtctgaacttcttgaccttgttcaggcatcaaaaaacagtcaattcttttctcaattcactaaggacttgtcagtacctgcagagacacgggtcaaagccattaatgagatatgtggccaagctaaattttcagatcttacaaag

SEQ ID NO: 16495 - DNA, 400 bp, Gossypium hirsutum
  Clone ID: LIB3145-038-Q1-K1-E1
cccacgcgtccgcaaaaatttggttatcaatggagtaacttgtggaccaggacatggtatcagtattggtagtctcggattgtttaaaaatgaagaaccagttgatggagttacagtaaaaaattgcaccatgactaatacttccaatggtgttagaatcaaaacttggccaggtgctgaacctggcacttgttcgaacattcactttgaggatattaccgtgaccaatgtcagttctcctattataattgatcagaaatattgcccatggaacaaatgcaaaataaatgaagaatcgaaagttaaactaagcaacattagtttcaaaaacattcacggcacttctgcgcgtccagaagctgtcaagattatttgtagtgctactttgccttgtgaaaat

SEQ ID NO: 16496 - DNA, 406 bp, Gossypium hirsutum
  Clone ID: LIB3145-038-Q1-K1-E10
caacaagattagccaacaatttagagaaccttattctgaaagagggtccagagacgattgctgcatttattggcgagcctgttatgggagcaggaggtgttatacctcctcctgctacttattttgagaagatacaagctgttgtgaaaaagtatgacatactttttatcgccgatgaggttatttgtgcatttggaaggcttgggacgatgtttggatgtgacaagtacaatattaaaccagatcttatttcactagcaaaggctctttcttctgcatatatgcccattggagcagtcatggtgagccctgaagtttcagaagtcatttattctcaaagcaacaaacttggtagtttctctcatggattcacctactctgggcaccctgtatcctgtgctgttgc

SEQ ID NO: 16497 - DNA, 396 bp, Gossypium hirsutum
  unsure (1)..(396): unsure at all n locations; Clone ID: LIB3145-038-Q1-K1-E11
gaactttgaatttgccaccgatactcttgaggaacttctatatgacaaagagaagctgctctagaatggggaccggggggaaactgatatcgcanataatctcanatccgaaagcctttatcgctgatgttgttcctctactttttttcttgctcagttgctgaaaataaaatgatacatgcatgttcttgcaatggcatataccatgtttttagggcattgacactgtgaatctatgatatgaattattttgtttttgctacattttaatgcaatgatggataaatgaatcatgtggaaatcccaagttcaaggaacaaattttcaatttttaaaactttgcccaatgagaaatgacaagatttttcttgttctaaattataaccattttttcct

SEQ ID NO: 16498 - DNA, 411 bp, Gossypium hirsutum
  Clone ID: LIB3145-038-Q1-K1-E12
ttccactttttggtgtcgtagcttgtttttcctaccctatcagggtcttgtgttgatcatacaagggggtggaagagctaggcattgatagttaaaataacaaccactatgggtatttctagttacagttatagtttctttctcttgttatttgttgtcgtaatcccaaacctagaagctcacattgctgaatatgatgagtactggaaggcacgagaattggaagccattgagaacctcgacaaggcctatcaccccaacccggaggaggtggttcgccattacaatgaccatttctctaggaccatgctcgagttttatattaccaaaagggtgttagcggaatcaaaaaatggtccctgtgaggttaccaaccccgttgatagttgctggcgatgtgatcctaattgg

SEQ ID NO: 16499 - DNA, 401 bp, Gossypium hirsutum
  Clone ID: LIB3145-038-Q1-K1-E2
tcagatctcttcaaacccatcaattcaaacaaccctccactcattccatccatgacgcttggctcaagaggatccagtgttgtggtgcctcggaacttcagattgctggaggagcttgagcgtggagaaaaaggtattggagatggtactgtcagctatggaatggatgacggagatgacatttacatgcgctcttggactggcaccattattggtcctcataatactgtacatgaaggtcgaatctatcagctgaagctgttctgtgataaagattatccagagaagccaccaagcgtccgttttcattcaagaatcaacatgacttgtgttaaccacgaaactggagtggtggaaccaaagaagtttggacttcttgcaaattggcagagggagtatac

SEQ ID NO: 16500 - DNA, 159 bp, Gossypium hirsutum
  Clone ID: LIB3145-038-Q1-K1-E3
cgggccaagcctttcgtcccacctcgcgtttggaactctttccacttttctacgataaattcccggtttgaccgggggaaaaaaagggccttggggctctggaaagaatattaaattctttttttgtatggaattatgggttgcttggttacttggtta

SEQ ID NO: 16501 - DNA, 294 bp, Gossypium hirsutum
  Clone ID: LIB3145-038-Q1-K1-E4
gtcttatctccctctgctaaaaatggatcgaaagcattgcgggcttgatgttggggaccgtgcgtgtaatctcgcgctacctactaaagctcgcggcgggtctctgtctgtccgtctgccctgtgcaaacctatacggctcaactgtgccctacatcccacacttctaccacgctgcgctcgaaattgcgggtcagcccattaattgtacgtttttctcggtgtgctcgggtctcactgtcagaccggacttctcaccaatcgctccgtgcacgcactcacagagagtggcttc

SEQ ID NO: 16502 - DNA, 472 bp, Gossypium hirsutum
  unsure (1)..(472): unsure at all n locations; Clone ID: LIB3145-038-Q1-K1-E5
gaattncccgggtgcgagcgccagcgccgtccgnatcctctactcgtcagaaccatttctttctatccttgtgagttggacccttgtagaccccctgatggaatgggaatacctggtggattgtggggtgggtgtcaacaaagtnacagctacttgatatntggatacctttgccatcntgagtaccgactccagagtaaagggctatggaggattgattgagaagccaatctgaggactacaatgatattggtggcttggagaagcagatccaagaactagttgaggccattgtgttgcccatgactcataaagaaaggtttcaaaagttaggcattcgtccacctaagggggtgctcttatatggacctcctggcactggaaaaaccttgatggcccgtgcttgtgcagcacaaacaaatgccacgtttctgaagctagcaggcccacagctggttcagatgtttattgg

SEQ ID NO: 16503 - DNA, 375 bp, Gossypium hirsutum
  Clone ID: LIB3145-038-Q1-K1-E6
ggcgtctgtaataaaatctgcaatcttaattttgtcggagtttttatctgtacgcttcagttcttttgttagggggctgcagtaacaacccaatgatgaccccaaaaacatggacgctattcctcccattgatgcactcaaccctacctagttgaatggaccctgtgttggcattcactaagatcatgttgtcccataaggtgctgaaattggtactcttagttttggttttgaaggtggcccttataaatgttgttcttctggatgttcccgtattttgtaattcttatgggttctttctacctattttcctcaaattccataaatcccaacatatccttaaattccacattttctacatatcccacaaatccc

SEQ ID NO: 16504 - DNA, 302 bp, Gossypium hirsutum
  unsure (1)..(302): unsure at all n locations; Clone ID: LIB3145-038-Q1-K1-E7
acgaaattatcttgtatttttttcataatcccataaaattgtctaanttataggggggtttttaaagaagcagggtgaanctaaaaccaccccttctccaccaccttcattatattttccaaaagcttaatcttattaaaaaactttatctccaccttttcatattacaaaccttaaaaatccaaatctcttcttttatttaataaagctccatatccttaaccaaataaaatcttatgatgatcacatcatataaatattttcctttcataagtttaaaaatcaaaaacgttctcattcat

SEQ ID NO: 16505 - DNA, 401 bp, Gossypium hirsutum
  Clone ID: LIB3145-038-Q1-K1-E8
cccacgcgtccgggactcggacgacacaaccacggaggattttaggtaagttgtgcgcttcatcctcttggtatggggggcccctttttttattaagtagatttataataaaaaataaaaagaaactggaaaacgaaaagaaaacaagtaaagaaaatcaaaatcaatattttcaaacttctgttttgcttttttgaattactagtgtgtgtaaaaaattatagagggatttatttcggcttttatagccgagttacacagatccatttttttcttttgcttgttgtctgctactgtttgcgtgtgggttcttatttgcaagtgtcagagggatcagatacacgtgaaggccggtgatagcgtgagggaaaagccctgctgacgtgcggcgcgcatggggc

SEQ ID NO: 16506 - DNA, 400 bp, Gossypium hirsutum
  Clone ID: LIB3145-038-Q1-K1-E9
cccacgcgtccgcccacgcgtccgtgtaaaatttaacgtttgttaactttggtggcgtggcatacacatggatgatgatgtgagtggcatgtcaacatttaattaatttttaataatttaaaagtattataatttttacacctttttaataatttttatgattttaaaataatttttataatttttaaattaaaaaaattaattaaatgctgatgtgttatccatgtggcaattcatgcaaagttaaaaaatgttaattttttcattcattttgaggtgatttaacaaaaaacacaagtttaaaaattaaaagagatgaaaaattaaaaagaaagttaaaataaattttttataatattggaggaccaactaagtcattatgccaatatcagtaatttcg

SEQ ID NO: 16507 - DNA, 355 bp, Gossypium hirsutum
  Clone ID: LIB3145-038-Q1-K1-F1
attcaacgagtctatagccttggccgtcaggcccgggtaatctttgaaatttcatcgtgatggggagtgctctttgggtttggacctggcctcactgttgagactgttgtgctccatagtgttgctgcttaaagttaaacaaacatgccttttaagtaattggtcgtgctccacttggcttgcagttttatcttcttcttttttccttttttagaatcctatgaatttgtgtgtttattgttaaagactagaagcctttgatggtgtgggcgggaagcttaacgcctattcagttcatgtatcaacttatattaaatttatggcaataataagttactttgcaaactattctacc

SEQ ID NO: 16508 - DNA, 397 bp, Gossypium hirsutum
  Clone ID: LIB3145-038-Q1-K1-F10
cttggattagggaaggcaggaaagctctaacacagcgtgctagtgaattccttcgaaatatggaacaagaacgggatgcattagctacggagtataaatcattgcttgagggtttcttaactcagttgcctgttcagcaacatgtagatttgaaattcctccttttccggttagatttcactgaattttatactcgacagcatgctaccatgtaaagctatcaacacgtatgggtttaaggagttgctgctcatatttgagacataaatgtagttcttcaattcactaatgtcattttcacaatgctcccacttgaatgaacaatctcttgtacacctggtgaacatttagactgaccaatttgtacaacatctcttcgttttagatgtcttttgat

SEQ ID NO: 16509 - DNA, 413 bp, Gossypium hirsutum
  Clone ID: LIB3145-038-Q1-K1-F11
cccacgcgtccgcggagagcagtccttatgaacaattaaaaagaaccgaagggagggacacatattaagacggaggcgtggccagccagctcgtaggaacaaagagagcttgtgtcgtgggtggcagcggattcgttgcctcattgctggtcaagttgttgctcgagaagggttacgccgttaacactacagtcagggaccctgacaaccagaagaagatctctcaccttgtaacactacaagagttgggagacttgaagatctttcaggcggatttaactgatgaagggagctttgatgcccctattgctggttgtgaccttgtcttccatgttgcgacacccgttaactttgcttctgaagatccagagaatgacatgatcaaaccagcgactcaaggagtggtgaacgtt

SEQ ID NO: 16510 - DNA, 388 bp, Gossypium hirsutum
  Clone ID: LIB3145-038-Q1-K1-F12
ccgagagagacggatagatgttttatttttcttattgcaatgcgacggaccgtagggcaagccttgggtgaggggagattcgcggggtcatttggtccactctcttctcgccggcgtagcccacgcgccgtcgtctcctgctctcgctccaacctgacgcctattcaagctgttctgtcgtgtcagcaacaggtcgggtcagatccggtggaatctgaattggagagtttacgctgaccaactcctgttttgacgcttgactcttaatggggggtgggatttactttacgcttttagttggcacgggggctcgggattaacaaaactgccactattgaaaccattgctaatctcttgcaggaggttggaggtaaccatgctcaaaatg

SEQ ID NO: 16511 - DNA, 226 bp, Gossypium hirsutum
  Clone ID: LIB3145-038-Q1-K1-F2
attgagaaccagagaaaacgcttcacatctaccaattgatagaatgaagatgtccgtgaaacgacgtagaaaatcgggcaagaaaaaaaagaaaacacccaaaaacaaacaaaaccctaaaactcgtgccagcggcggcagacagaactgtgctaagatagtagacctatttcttattaattcttaaagcttaaggtttgatattaaaaaaaaaaaaaaaaaataa

SEQ ID NO: 16512 - DNA, 390 bp, Gossypium hirsutum
  Clone ID: LIB3145-038-Q1-K1-F3
gccgccccacccttccgaaaagctaaagcctcccctctgtgttttttccccccctttcttcaaagaaaaacgacacatttttaagctcgctgtgagccatcaccaccacacactctagattctacacaaaatttttatattatattttgggggttaaaattaatacccgccaaaataaaaatttaaagggcactttgattgtggccatcatattttgctgctgtggaaaatgggatctcatttaaatttcaagaacttcggtggtgatgggaacaacaggtcgaagccggttgtgatattcccgtttgttaggcagtcatctatatattcattgacctttgatgagttgcagagcactttttgtggacttgggaaggattttgggtcaat

SEQ ID NO: 16513 - DNA, 416 bp, Gossypium hirsutum
  Clone ID: LIB3145-038-Q1-K1-F4
ggtttaatcagtattatagattgttcatccagagatctaagcttattagcttaagctataaaaatggtgaaaagatcgttgggctttttctttcttctcctcattgtcttagcctcgcaatggggggtgcagccaactgaggcaagggtttgccagtcacagagccataagttccacggtgcatgtttgagtagccacaactgtgcgatggtgtgcaggaacgaaggtttctccggcggcagatgtcgaggattccgtcgccgctgcttctgcactaagctttgctaatgcaagcttgcccttagctcatattttaaggatcatttcatgagtaaaagacctttatgtttttcgtgcatgcatgtcaatgtttcaataaggtatctcctaattacttctgttttgggagatcattt

SEQ ID NO: 16514 - DNA, 387 bp, Gossypium hirsutum
  Clone ID: LIB3145-038-Q1-K1-F5
gctcttgattctgcttccatctgttgtaagtagatacagatatttgagaagaaagggtgcacccttggaattatgcgcttcttggttcaatccgcccacgacaagttttttaaatcccatgtcgagagtgcccttaaatctgctcttcggaagcccaagacgaccactgttaaactaccatttggactttgtggatgtcaggaggagagtactaaagggagagactttggggaaattgaggaagaaccaagtgagcaaactcacagaaatgggattgaaaatccaaataccaggattcagcttccaatgcctctgccctcttcatcgttggtcgtattggttgatgaatggcaaaccattcaatcaggggcagatgagattgggaaa

SEQ ID NO: 16515 - DNA, 414 bp, Gossypium hirsutum
  Clone ID: LIB3145-038-Q1-K1-F6
gagcaacccagattttgttgttgaagttgtgtctcttttctttgatgattcagaggaacgttcttaatgatctcacggatggctttagatcagccaaatgtagatttcaaaaaagttgatgctcatgttcatcaattgaagggtagcagttccagcattggtgcacagagagttaaaaatgcttgcattgcttttcgtagcttctgcgaggagcagaacatcgatgcgacactgagatgtcttcaacaagtgaaacaagagtattaccttgtgaagaacaagcttgaaactatgctcaggttagagcagcaaatcgtggcggctggtgggtcgattcccatgattgaactgggtttttgaagaccataaacatgaaggggggaaaagcatgattttgggggtggtttatacaat

SEQ ID NO: 16516 - DNA, 325 bp, Gossypium hirsutum
  unsure (1)..(325): unsure at all n locations; Clone ID: LIB3145-038-Q1-K1-F7
cacaaattgcgaagacagagagtggtggatggaatgttgtttaaagggaagagaagggatttaaagggtctcgggtgcgacnagaacnangatcacccccctcctaataaagtctccaagactttttctgcagtcgactctgacgattccgacgatgtcttcgtctgcgagatatccaagaataggagagtttcagtgaggaactggaattgcaaaatttgggttgatattcgtgaattttatgtcaaggatagcaaacaattgccttgcaagaaaggcctttctctaattctggaccagtataaacttctacttaatcattcac

SEQ ID NO: 16517 - DNA, 383 bp, Gossypium hirsutum
  Clone ID: LIB3145-038-Q1-K1-F8
cccacgcgtccgctcggagagactattgaccctgacaggagtgtatggattcgggaagcatgtttccaacctggagcgccgtgagagtcgtcgttaccttgagatgttttatgctcttaagtaccgtaagctggctgaatcagttccattggcagaggagtaaattgaagctgttaaataacattgggccggtttttcttggagaataatattctgttttgtaatttcaattggagaagctcctttgtatttcatcttgtcttttccttttccttttttcgccggcattgtttgaacatggggttgtgcgcccgtcaattccagttaaatatggtgacttttgttttttctaaataataatatttattatattaatttttatt

SEQ ID NO: 16518 - DNA, 395 bp, Gossypium hirsutum
  Clone ID: LIB3145-038-Q1-K1-F9
cggacgcgtgggtcctagtcaaattgtggcatttattttgaccaaaatgaaagaggctgctgaggcttggctgggggagggtgtttctaaagcagttatcactgttccagcttatttcaatgatgcccagaggcaagcaactaaggatgctggtagaattgcaggccttgatgttgagagaataatcaatgagcctactgctgctgccctttcatatggaatgaacaacaaggagggtctcattgcagtctttgatcttggtggcggtacatttgatatctcaattttggagatttcaaatggtgtctttgaggtcaaagcaacaaatggtgatactttcttgggaggagaggattttgacaatgcattgctggatttcttggtgagtgaattca

SEQ ID NO: 16519 - DNA, 355 bp, Gossypium hirsutum
  Clone ID: LIB3145-038-Q1-K1-G1
cggacgcgtgggcaggttttgtcaatgaactgcccttcgtttacgcggaatgtttgtgaacgtgactggttaaaaaggtctgccaagatatgggaattggtgaagagctcacctattattgccgagtatagcagaacattactaagctctggtatgtttaggagataatcgttgtcaccatctgtatttggtctgttttagttgctattttcgacaatatttcaccattgtcatgtcaagctttcaaataccatattgcagttagggttgctgaaagatttgatttagtgggatatcaacattattgtcatctggtattcctggttggaagaataaagcatgagtgttgtagttg

SEQ ID NO: 16520 - DNA, 405 bp, Gossypium hirsutum
  Clone ID: LIB3145-038-Q1-K1-G10
aaagaaaaccttctcttgtgtattgatttcgtttttttgatacagtatgcgtgtgcccttgaaacaatacagaaatggggtttttatagccccgaaaatacatacatttcccttctattttttctatttttttcttttctgttgctattttgctatttttctttttctctttctgtttgctgctggtttgttgtgcaggtacgggtatggaggtgcgcgagcgcgcatatacggaggctatgcgtgaagaggcaggcgatcgtggggggagcgtacatgtgtgctggcgtcgatggctgaaggggagttggaaaccctagggttttctgtttcagctaggctaaatgttgggcctccgtaattgggctaaggttatttgggcttatgttttggctaattgggttt

SEQ ID NO: 16521 - DNA, 414 bp, Gossypium hirsutum
  Clone ID: LIB3145-038-Q1-K1-G11
gaagaacttggacatccaaagatacatgggaaagtggtacgagatagcttggttgcgcatctttctgtcagcgggaggaagggggagaacaccagcgctttttacactctgaaggaagatgggacggtgcatgtgcttaatgagacttttgttaatggcaagaaagattccatagaaggcaccgcctacaaggctgatcccaagagtgacgaagccaagctcaaagtcaaattctacgttcctcctttcttgcctatcattcctgttactggggattactgggttttatacattgatgaggattatcaatatgttcttgttggtggtcctaccaagaagtacctttggatattatgcaggcagaaacatatggatgaagaaatctacaacatgttggagcagaaagctaaagac

SEQ ID NO: 16522 - DNA, 404 bp, Gossypium hirsutum
  Clone ID: LIB3145-038-Q1-K1-G2
cccacgcgtccgcccacgcgtccgccctctcgtccgggaagatcataaacatgccgtgagctcgtctgttgggagacatggccgttttaccaacaggagatgtgcttattgttaacggtgccaagactggttcagctggttgggatgacgctagggagccgaatttgaaccctgttttgtacaaatatcaaaccgatggaactggttccaaattcactgtgcttaacccatccaacatcccccgcatgtaccactcctcatttgcactccttcctgacgcaaaaatcctcattgctggaagcaacacgaaccccggttacctcgatgatgcattgttccccactgaagtccgggtcgagaaattctcaccacattacttggacccgaacttggccatgttccga

SEQ ID NO: 16523 - DNA, 406 bp, Gossypium hirsutum
  Clone ID: LIB3145-038-Q1-K1-G3
tttttgttcttctctgggatgataccattttttcactagatggagaaagaagagaggagccaaagaacatgcggaacaagagagccggagttgtttttacagtgggggaatagaaagaggctaagatgtgtgagagttaaagaccctcaaaaaatctctcataaatccaatgctataattcgtagaagaatcacttctcggcttttagataaagaatcctctcctttttctcaattcaatcctcgtctcactaggaattcagaagcatctatactgcgatcggatcaccggaaagcggcttcaccagagaaggaagacaggtactacacaacaagagggtcagcagtgggattggtggatgagaatgggaagattgcagtggatagcaataatggagaggataaca

SEQ ID NO: 16524 - DNA, 415 bp, Gossypium hirsutum
  unsure (1)..(415): unsure at all n locations; Clone ID: LIB3145-038-Q1-K1-G4
cccacgcgtccgcaattgtaggatgggttgctgttcttctcggggttttctcgaggcttccttttgtggtcatggggtttgtgtcnattccaaaattaaagccttcaagatggcttgtggtaaacatgcatcatgtggattggaatttatatttgaacacgctcttttggaatctaaactattgggactctataagtactcttgctggagaggtagagaacccaaaaaaaactctcccaaaagcattgttttacgctttgatcttagtggtggttgggtatttctttccgcttttagttggcacgggggctcttccccttgatcgtgagctgtggactgatggttatttctcggacatagctaaattgctgggtggagtttggttgaaatggtggatccaagcagctgcagcaat

SEQ ID NO: 16525 - DNA, 481 bp, Gossypium hirsutum
  unsure (1)..(481): unsure at all n locations; Clone ID: LIB3145-038-Q1-K1-G5
gcgacgctcacgcgnntccgcattggcgcggatcttggtggttacccattgcttcctgtagtatgcnnatatacactgcgtgtggaacggaggaagagtgacgatatacgagcgtgtcggtgtannttattatnttagagttggtnncacaggcgagactctctcaattgacctcagagttctggagaagaaggggacctagtaaagggtgggtcttgcactcatctctaagaatcagaaaaggaagtggacttcattgttctcgannttccaagcttcnngatcctatgtttcaaaaggaagaatatatttacaaganntcctcaacattgnngcctcctgtgtacctagtcnncactcccaatcannaccgaccatcannatgagaaggggtggttaataatgttgcaaagaaagctggcgctgatagcctgccaaaaacttgctgctaaaaggatggggaattgactccttactacta

SEQ ID NO: 16526 - DNA, 277 bp, Gossypium hirsutum
  Clone ID: LIB3145-038-Q1-K1-G6
gcaaagcaaaggcgtggggggctatcttatcagcaccagatggcagaagaatttgtggctcttagcttagcttaaggttcttctaagcaactaattatatggttcttatagttaagacatgtctaatatcatcatgtgcatgctgtaataatattattagcttgctgatcttagaattactattcacctgatataaaattattactacttactgactagatttggcttttgtagttgatctccattgatataaaaatctatgactaggtcttgcctc

SEQ ID NO: 16527 - DNA, 403 bp, Gossypium hirsutum
  Clone ID: LIB3145-038-Q1-K1-G7
cccacgcgtccgctggtcaaggtattttcttatttgcagcaagcaagccgcaggtgatggctttttgtgactctgagtgggcttcatgtcctatgtcaaggaggttagtcactgggttttgtgttaaacttggggattctcttatttcatggaagtcaaaaaaacaaaccacagtctctcgatcgtcagcagaagctgaatataggagtatggcagtggctgtagcagaagttgtatggttgaatggtctgttgagagaagtgagtcctagtcagtttgataaagctttgattttttcggatagtaaggtagcactgcaaattgcagctaaccttgttttccatgaacggacaaagcatatagagattaattgtcattttgtgcgtgataaaatcaaggatgg

SEQ ID NO: 16528 - DNA, 401 bp, Gossypium hirsutum
  unsure (1)..(401): unsure at all n locations; Clone ID: LIB3145-038-Q1-K1-G8
cccacgcgtccgcccacgcgtccgtctacgcgtccgtaaacataaaaaaaaaaagagaaatagaacgaaggaaaagagaaagaaaaaagaacgtancaaaaccttttgaaacttcagtttttatttctattctgatttgctaatgtgcgtaaccattacaaaaggatttctttcggtttttatagccgagttacaaactatttacttttctatttttgtccttttctatttgtttctacttcttgtcgtttcttttttttgtttttactgcttgcgtgtgattctttctttgcaggtgacagaagcatgcgatggcaagtgacaaacgagccgagcggtattggcaaatgcgagggtggcgcgcgttgggtgagcggcggctaaagagggtaggctgaggg

SEQ ID NO: 16529 - DNA, 397 bp, Gossypium hirsutum
  Clone ID: LIB3145-038-Q1-K1-G9
tcgcctggggctgataacgacttgcctgatgcctcgttgctgaaatctaatgcgtgaagtatggacaatgctgaggtcccagagaataattccagccaaaatcctgcaagcatgcaaagagatatcgaagcttctggccattctgtaagatccaataatgctgaacatcagaaccattcattgttgcatcaagtgcaggctgttagaaacatagaggttgatccaagtaataggagtattaaaagattcaaaggtccacctgcagactctagtttcgattctcagcaggtaagttccccaggtgcggaacaattatcttatggatcaaatagtctgatgagagatggccttggtaataatcctttagttccttctggagactctaaaatgctaagct

SEQ ID NO: 16530 - DNA, 406 bp, Gossypium hirsutum
  Clone ID: LIB3145-038-Q1-K1-H1
cctcacaaggattgcctgtacctagaaatgttttaattcctcgtactaagggttttgggtcggccgtaagtcatatgcgttcatttgttccagctatttatgatatgacagtggctattcctaaaagctcaccttcacctacaatgcttagactgttcaagggacaatcttctgtggtgcatgtgcatgtcaagcggcgtcttatgaaggaacttcctgaaacagatgaggatgttgcacaatggtgtaaagatctttttgtggagaaagacaagttgttggacaagcatatagctgaggacactttcagtgaccaaccattgcaggatatcggtcggcctattaaatctcttctggttgttgcttcttgggcatgtcttgtggcttatggagcttataattttct

SEQ ID NO: 16531 - DNA, 355 bp, Gossypium hirsutum
  unsure (1)..(355): unsure at all n locations; Clone ID: LIB3145-038-Q1-K1-H10
accctcccgtccgaattccccaaaatttgtttcattaatttctgcctcacttatagcttcttcgggtacccttaaacgttcaggcggtgttgaaaaaccntttntaaaaagggttccttcccttgctacgtccccttcttctttcaaggttgaaaccagtggtggcaaaaaaatcaagaccgacaatccttaccgaatcaatagtgatattagcttgacggatggtgttgatgccttttataaatattctcacctttaaaatgtttaccaatatctaaacaaatatattgctaacgtccatgggcacatcactggtttggacaccaacgactggtctcccactagtgatttttat

SEQ ID NO: 16532 - DNA, 245 bp, Gossypium hirsutum
  Clone ID: LIB3145-038-Q1-K1-H12
aatcctctcatctattgtgacccaaatttattttatgatcattataatgacattctacttcacccacccagccaaggaacgcttggcaaatcacgggaagaagaccctttagcttgactctacccgacttgtaaatgactgaaagggtggttaatggagctcttggcaaattgaaatccactctttaacgttttttcttattctgaatcggagcgtgcaggcccctcttttgacccaagccgctt

SEQ ID NO: 16533 - DNA, 403 bp, Gossypium hirsutum
  Clone ID: LIB3145-038-Q1-K1-H2
ctcgatttgggctttttatagccactgtttacaacatattttagtaaggaatcttggattttcttcccattttgttgggtcgctgctgttcttttttccttttttgcaggtattcgcgaggaaatttcggcgtttgatcacgctggtaacgtagatctgtcagtggcggtgatcacggcgtgacttggagcccggaatcgtggctgtgatgagtagctggaacgacaggcattgaggagacacgttgattgcggcgcctcgggtttctgaaaccctaggcttctctgtcttctgtttagcaacttaggccatttgggccccgtttattgttgggttaaaatgtaatggggtaataggttaattggatcttgtacgggttattgggtagttttagctgggttac

SEQ ID NO: 16534 - DNA, 447 bp, Gossypium hirsutum
  unsure (1)..(447): unsure at all n locations; Clone ID: LIB3145-038-Q1-K1-H3
gcgacgccaccgccgtccnngctttgctnngctgttgcttccaagggttgcattgcctatgatatttatttcgnnatatcatcctcacgcgaaggttggcatccatcaaggaggtcatgtaancttgtgcatttggtttattgagaaaacgccaacaggtgcgtattcacaaaggtgtttgttcaacttggatgaagaatgctgtgtcctcggggaaaagcgatgactgcagctgggcacccatttttgtcaggcaatcaaactttaaacttccttcagatgctaaagtgcccatcataatgattggccctggtactggattggctcctttcaggggattccttcaggaaaggcttgcactgaaagaagctggtgctgagttgggtccatctgtattgttctttggctgcagaaaccggaaaatggatttcatatatgaagatgagc

SEQ ID NO: 16535 - DNA, 353 bp, Gossypium hirsutum
  Clone ID: LIB3145-038-Q1-K1-H4
cccacgcgtccgcagaattatggcacttgatcttccccatggtggtcatctctctggtggttatcagacggacacgcggaaagatatctgctgtgtccatattttttgagacaatgccatatcggctgaatgaaaacactggctatatcgactatgatcagttggagaagagtgcaactcttttcaggccgaaattaatagttgctggtgccagtgcttatgcacgtctgtatgattatgcacgcattcgaaaggtttgtgacaagcaaaaagcaataatgttggcagacatggcacacatcagtggtttggttgcagccggtgttatcccttcacctttcgagtatgccgat

SEQ ID NO: 16536 - DNA, 354 bp, Gossypium hirsutum
  Clone ID: LIB3145-038-Q1-K1-H5
cagccatgatcattccagagaagaaccgccgcgagatctccaagtacctctttcaagagggtgtttgctatgcaaagaaagattacaacttggcgaagcacccagaaattgatgttcccaatcttcaagtaataaagctgatgcaaagcttcaagtcaaaagaatacgtgcgtgaaacttttgcatggatgcattattactggtaccttaccaatgatggcattgagttccttaggacatatctgaatcttccttctgagattgttcccgctactttgaagaaacaagctaagcccgctggtcgtcccatgggccctcctggtgaccgcccacgtggtcctcctcgctttggtg

SEQ ID NO: 16537 - DNA, 265 bp, Gossypium hirsutum
  unsure (1)..(265): unsure at all n locations; Clone ID: LIB3145-038-Q1-K1-H6
cccacgcgtccgcggacgcgtccgcccacgcgtccgggaacagccaaagaaggcagagaggctcttcttttgtacaaattgatggcttctcttcagtattactattattattttttaaattaaaatttatttttatgatcattatgatgtaaatatcaaatcaaaaacccatcattaagtcaagtcagtcaaactaataaaccaggtgctaattgtttcagcactggaactctcattcccttataaatgaaatgcgaatcanntt

SEQ ID NO: 16538 - DNA, 405 bp, Gossypium hirsutum
  Clone ID: LIB3145-038-Q1-K1-H7
cccacgcgtccgcccacgcgtccgggatcgtcaaaaaagcggtgggcaactatgcggcgtgcttgataggtagggcgttgacgtgtaattattatagaggagataattacttggagattgacgttgacgttgctagctcggcggttgccaacgcgattttacacctcgcattgggatgcgcgacgagcgtagtaatcgatatgggatttgtagtggaaggacagaccgaggatgagttgccggaaaaattaatcggtgcggttagagttagtaagatggagatgtcgtctgcgaccgtagttgatgcacttacgccatcggttcaaacagcggctgagcgtggaataggagtttgtaaggtaaatgaccataaatctgatgatggcgaatgcgatgatattgaca

SEQ ID NO: 16539 - DNA, 376 bp, Gossypium hirsutum
  unsure (1)..(376): unsure at all n locations; Clone ID: LIB3145-038-Q1-K1-H8
gcgggattacccgctgagtttaagcatatcaataagcggaggaagagaanaaggctgcatacgagaagagaacgagggagcaagtatcttaaaaagatggaaagaaaggagatgaagaggaagtaaagcaggctgagaagccagttgaggaaaggaaagctgaaaaacccaaggaagaaacgccgccgcccccgccgcctacaccgcaagagattatcttgaaggtttacatgcattgtgaagggtgtgctcggaaagttcgccggtgcctcaagggctttcaaggggttgaagatgtaatgactgattgcaagagtaataaggtggtggtgaaaggagagaaagctgatcctttggaagttcttgagagagttca

SEQ ID NO: 16540 - DNA, 406 bp, Gossypium hirsutum
  Clone ID: LIB3145-038-Q1-K1-H9
gcagaatcagagtgtaaaaaaggaaggaaaaaaaggctaaaagaatgtttttgcgaatgatatcgcggccgtgggtggctaaggtgaaggagacaacggggatcgtcggattagacgttgtacctaacgcaagggaagtccttatcggtctctacaacaagactctgaaggagatccaggccgtacctgaagacgagggttaccgtaaggccgttgagagcttcacgcgccaccgtctgaaggtttgccaagaggaagaagattgggaaatgattgagaagcgccttggatgtggccaggtcgaggagctcatcgaggaagcgcgtgacgagctcactcttatcggaaaaatgatcgagtgggatccatggggtgttcctgatgactatgaatgtgaggttatcga

SEQ ID NO: 16541 - DNA, 293 bp, Gossypium hirsutum
  unsure (1)..(293): unsure at all n locations; Clone ID: LIB3145-039-Q1-K1-A1
aaaaaaaaaaaaaaagggaaagggaaaaaaaaagggggggnnnnnnaaatnaaaaaaaattattgggaaagaaaaaaaaaaaanaaaaggaaaaaaaaaatntnnanaagaaaaataaaaaaaaaaaaaaaaaaaaaattannanaaaaaaaaaaaaaaaaaagtttacaggccaaagagcttctccaaatatgttgggattctaacatgaacaccatggaagacctttggattgctagcaatttattttacaataagatcatcaatcccatgattgctcgcctgtatcatgc

SEQ ID NO: 16542 - DNA, 373 bp, Gossypium hirsutum
  unsure (1)..(373): unsure at all n locations; Clone ID: LIB3145-039-Q1-K1-A10
cccacgcgtccgttccatgtgaacggcacttgcacatgggttagtcgatcctaagagacgggggaggcccgtccgacagcgcgtccagcgcgagcttctaaagggaatcgggttaaaattcctgaaccgggacgcggcggctgacggcaacgttagggagtccggagacgtcggcgggggcctcgggaagagttatcttttctgtttaacggcctgcccaccctggaaacggctcagccggaggtagggtccagcggccggaagagcaccgcacgtcgcgtggtgtccggtgcgcccccggcggcccttgaaatccggaggaccgagtgccgtccgcgctcggtcgtactcataaccgcatcangtctccaag

SEQ ID NO: 16543 - DNA, 414 bp, Gossypium hirsutum
  Clone ID: LIB3145-039-Q1-K1-A11
gcaacataagcaaagcaaaaaaagaaaagggcaaaaaatggctgtgcaattcaaggccagggcttctcaaactaagaaactcccttcatatgctcttccacccatggcaagtcttagatctcccaaggtttctatggtctccactcttccacctcgctccaaaggggttgaagatctgaaacggcctttcatggctccaaagctggtacaccagtcttcccacaccatgccacctgagaagattgagatctttaaatctttggatgattgggctagggataacattctgattcatcttaaacaagttgataaatgttggcaacccaaggattttcttcccgatccttcgtccgatggatttgaagatcaagttagaaaacttagagaacgggcaaaggagattccggatgagta

SEQ ID NO: 16544 - DNA, 425 bp, Gossypium hirsutum
  unsure (1)..(425): unsure at all n locations; Clone ID: LIB3145-039-Q1-K1-A12
gataactgcaaggtccttgttaatattgatcagcttagtcctgatattgcccanggtggggatgggcactttacaaagcgtcccgaanagattggagccggtgaccagggccacatgtttggttatgctactaatgagacccctgaacttatgcccctaagccatgtcctcgcaactaagcttggggctcgtcttactgaggttaggaagaatgggacttgcccttggctaaggcctgatggtaaaacccaggttactgttgagtacaacaacgataatggagctatggttccggttcgtgttcacactgtcctcatctccacccagcacgacgagactgttactaacgatgaaattgctgctgacctcaaagagcatgttatcaagcctgtcatccctgaaaagcacctcgatgagaagacaat

SEQ ID NO: 16545 - DNA, 401 bp, Gossypium hirsutum
  Clone ID: LIB3145-039-Q1-K1-A2
aaccatacaagggaattactgactgctttgccaggactattaaggatgaaggtgtcatttgtctttggagaggcaacactgcaaatgttctcagatacttccccacacaggctttgaactttgccttcaaggattatttcaagaggatgttcaacttcaagaaggacagagatggctactggaaatggtttgcagggaacttggcatctggtggtgctgctggtgcttcatcacttcttttcgtttactctctggattatgctcgtacacgtttggctaatgataacaaggctgctaaaaagggtggtcagaggcagtttaatggtttaattgatgtctacaggaagaccatccaatctgatggcattgctggtctttaccgaggattcaatatctcatgt

SEQ ID NO: 16546 - DNA, 99 bp, Gossypium hirsutum
  Clone ID: LIB3145-039-Q1-K1-A3
cacgcggacgctgcgaatggctcaagatgttttgtgctttttttattttaaaaaaaaaaaaaaaaaaaaaggggaggggaaaaaaaaaaagggggaaag

SEQ ID NO: 16547 - DNA, 400 bp, Gossypium hirsutum
  Clone ID: LIB3145-039-Q1-K1-A4
tttaggttgtgaattgtgaatcgacgccgtctacgatgggattaggtttcatggtcggcgtgttgggggtcctattcctcttccacgcagcttattccacaattcagtatagggggctgttgaagattatggaggaggagttttctggtccgcccatgaacgtggttttagagttgcttctagggtttgttttctgtatttcagctgccctaaccgtgcccgggaattttctctccatacatcctgattctgaggagaataggattgtttctttatcagcaaacttggactttatgatcttcaatcacagagcgaaagcacttcctttagaaactgatatgaagctgaagcattaagatcaatgaagcttcatagtcctttgattaacgagattaccact

SEQ ID NO: 16548 - DNA, 365 bp, Gossypium hirsutum
  Clone ID: LIB3145-039-Q1-K1-A5
cactcatacggacttaagcatttgaaaggtatagccctcgtcgacgaggtttgccgccacacatcccacaatgaatattgcgtcgataccataatcccaaagccaccattatccggggaaaggatcgccagtaccactttgggttgggcacagataaaagctctggaagccggaaccatcatagctagtctacttaatgattcttcttccatcttaccagtagcaaagaaccctctacaggccaaagagcttctccaaatatgttgggattctaacatgaacaccatggaggacctttggattgctagcagtttattttacaataagatcatcaatcccatgattgctcgtctgtatcatgctgc

SEQ ID NO: 16549 - DNA, 398 bp, Gossypium hirsutum
  Clone ID: LIB3145-039-Q1-K1-A6
gaaaattcatttattacttaccctttttctagttctatttgcttctttcctttcttcatctaattgctatactttctatgtggactgggttttgcaccctaaagagaagtacaatgagtgggctggtaaaatgaggtttcaagtgaatgacactatcatttttaaatatgaaaaaggatcagactcggttctcttggttcaaaaagatgattatgataagtgtgaaaggaaggaacccttgatggaaatgaacaatggaagctccgagtttaagtatcctcattccggtccattttatttcattagtgggaaagaggggcattgccaaaagggtcagaaaatgatcactgttgttatggctgtgagacatgggactccatccattcatccacccacag

SEQ ID NO: 16550 - DNA, 193 bp, Gossypium hirsutum
  Clone ID: LIB3145-039-Q1-K1-A7
aaattttcctggaaaattgatcatgttttttttattgtcaaaaaaaaaaaaaaaaaaaaggggaaaaataaaaggggtatgggggaaaaaaaaaaaaaaaaaaaaagggaggcccatttaaaaagaaatcaaaaaaacatactttaaagtgcgtggcaactatcttttttatattttaacaaaaaatcaaact

SEQ ID NO: 16551 - DNA, 395 bp, Gossypium hirsutum
  Clone ID: LIB3145-039-Q1-K1-A8
aaacatcttagggtgatcatagagagagaggagagatatggcggctgataggagagttggggttgctgtggatttctctccaagcagcaagaatgcgttgaaatgggctgtggataacattatgcggaaaggggattatcttatccttgttgccgttcaacctgaaggtcattatgaggaaggcgagatgcagctttgggcaatcagcggtggttcaccacttatccctttaagtgagttttctgatcctgctaccatgaagaaatatggagtaaagcctgacccagaaactctggatattgctaacactgctgctaagcaaaaagaagtcatggtggtgatgaagatatactggggtgatccacgtgagaagttatgcgaggccattgatagca

SEQ ID NO: 16552 - DNA, 383 bp, Gossypium hirsutum
  unsure (1)..(383): unsure at all n locations; Clone ID: LIB3145-039-Q1-K1-B10
cccacgcgtccgcccacgcgtccgttcctctgaaagcccttcttgctttaatctgcttcggtggggggttgggttggtttacacagaaaaagatctacagaagaagagttgaagagtgtggtttttatttccaggacttggatctgatggggatttgcttaagtgccagaattaatgagagtccaagcaacacagggctgagttcgaagtatgttagcagtgatgggaaagatacgagtagtacaagcagcaaagcttcatcattttcagcacctttgactccccgaagtgagggtgagatcttacagtcccccaatttgaagtgtttcagtttcgcctatctcanaatggccactaggaattttcgtcctgacagtgtgctc

SEQ ID NO: 16553 - DNA, 332 bp, Gossypium hirsutum
  Clone ID: LIB3145-039-Q1-K1-B11
cttgagaaggaacccaagttcttgaagaattgttatgctggtatgattaagatgattccggccgggcccatggttgtggagaccttttctgagtacccacccttgggccgttttgctgtgagggacatgcgtcagaccgtggcagttggtgttataaagaatgttgagaagaaggacccatccagtgccaaggtcaccaagtctgctgctaagaagaagtgaaccgtgctggttaaatctaatgaagtttccgcagatggagtattttattatcataataatagtttgatagactttatcatttatgatatagttggtcttttgcttggttt

SEQ ID NO: 16554 - DNA, 374 bp, Gossypium hirsutum
  Clone ID: LIB3145-039-Q1-K1-B12
acggttctttacttaacatacgatccaattttatgtttcaaaaactcccatgcctttattggatggggtatcatagccggtgagcctgaacgtgccttctttcattgatacaggtagacgcatgacggtcagatcacatggcaatgcttgaaagagagggggtgctcctcgtgatatttttgtcgtcattgaagtgatcccagaccctgtactgaaactgtatgacacgaacattctctatacatgcaagatttcatacattgatgcaatcttggggacaacagtgaaggtaccaacagttgatggatcggccgatcttaaaatccctgccggtgtccatcctggaacaatcttggtgatgtcaaagaaaggag

SEQ ID NO: 16555 - DNA, 485 bp, Gossypium hirsutum
  unsure (1)..(485): unsure at all n locations; Clone ID: LIB3145-039-Q1-K1-B2
cgnntccgtggaaataatgggtctcttccttgaaagaaagggaaatggttctcgatctggtggtgcggaccaannaataccaagggatcaatngaattgcgattgaatagacggaagaaatggccaannngatagggannaaaaattggttgatccnatatcnngaacacggtgattggtggtgttgaagaaagncctgtagagaacccacgaacaagggcgtttttactattaaggtcgcgcgaattaccagtgcataatgtaagaatgctgaacaattaaagatgggatcgcgtannatatgaaatttcaacgtttgatttcaacgtggtttagaaggttgtcatannttcgatcgagcancgtcatcgaaaagcnttaaagccctagtttgctaggtttttgctcggctatttttgcagcgaaaaatatatagcagtaatgctttgtacatgtaaagtacaaattcctctgcggattttaca

SEQ ID NO: 16556 - DNA, 406 bp, Gossypium hirsutum
  Clone ID: LIB3145-039-Q1-K1-B3
cttatacaggcagaaagaacaattcagtgatggcgttggctatagttggatcgatggtctcaaagctcatgctgttgcacatgtgaccgataagatgatgcttaatgcttcaaacatcttccctcacaacactccgaccacgaaagaagcatactattataggatgatcttcgaaaggttcttccctcagaactcagcacgattgaccgtcccgggaggagcaagtgtagcatgcagcacggccaaagctgtcgaatgggatgccacttggaagaacaaccttgacccgtcgggcagagcagcacttggagtgcatctctcagcttacgacgcggagacacctttcgataacaagccgtccaagattgttgagtcaataccgttgatgatggagattcctggagtt

SEQ ID NO: 16557 - DNA, 332 bp, Gossypium hirsutum
  Clone ID: LIB3145-039-Q1-K1-B4
cccacgcgtccgaaaatagtgtatccatgatctattgatttgcagggattcattcaagttgattaactgcagaataagatggaaaagtcctgcaaaatctgaaacaaagcccttccactttttctctagagggcttcttctgtgattctgttatctagaagtaaaagtttttcttggtttttccatttttctttttcctttctaaattgttttccacttttttagcaagatgaagcatgaatctatttctcgacccttattggcccaaaaaaaaaaaacacttcataaaaaaacctaaaaaacaaaaaaaaaaaaataataaataaaataat

SEQ ID NO: 16558 - DNA, 401 bp, Gossypium hirsutum
  unsure (1)..(401): unsure at all n locations; Clone ID: LIB3145-039-Q1-K1-B5
ctttttcagtgttgtgattgtagcaacttatcttttgcttggttaatgtgtatgaggttcgcaattattctccacctccgtcaatcaacaatagcatcaaaatggaagttggaattgaagattgcctgcacattgagtttgagtataataaaagcaagtaagtttaacatctatggattgtgcttaaacctggcatcataagttggcttaggtttgtgtggatttaagatttaagctggtcagcttaaactattataagtagcaattttcctagtcactttttatcacgtaggttttgattagacattggtggaatccaaattgctcangtatcatctgaaggatgttattattggtaagatatattttcttcttgtgaggatcaagattaagaatatgga

SEQ ID NO: 16559 - DNA, 320 bp, Gossypium hirsutum
  Clone ID: LIB3145-039-Q1-K1-B6
gcgaatatctttcgaagatgattgactgccattccttttcgactcctatttgaacggcttggcaacaggctattgcttcaggtgcaaatgcaaagggtatatcattatggatctctgagcacgataaaagaactttttctttcgcatctctaaccacaatacctcaagacggacgattttgactctctttgtatgcactggcgcaagtgaaaatgttaaattttaataaaatcaccaaattgcgctccagaaaacgcgacattgacaaggggtgaactactcatacacccccctaaaccactgtacgaagactatgtttt

SEQ ID NO: 16560 - DNA, 327 bp, Gossypium hirsutum
  Clone ID: LIB3145-039-Q1-K1-B7
cccacgcgtccgcccacgcgtccgcccacgcgtccggttgaagccttcaccaagagcctgaattgtgattcatagttagtgtttagtaagccagtgaatgtatgaacgaataaaatgcccataaatttatttgtttagtatattttccaaaaaaaaaaaaaaaaaaaaaaaaaaaaaataaaaaaaaaaaaaaaaaaaaaaaaaaaaaaaaaaaaaaaaaaaaaaaaaaaaaaaaaaaaaaagggggggccgttttagaggatccaagtttacgtacgcgtgcttgcaacgtaatagtttttttttaggggcacctaaattaaatta

SEQ ID NO: 16561 - DNA, 391 bp, Gossypium hirsutum
  Clone ID: LIB3145-039-Q1-K1-B8
gctgtttagggttttacgaaggcaatagtatttaaccatgtctccagatgcttcagctgcccttgcagtgaggcagaaagttcaaacctttttgaatgctgcttgtacagggaaccttgatcttctcaagaagattgcctctcaacttgatgaggggaagggactggctaaaacggtggcagatattaaggatgcgaacaaacgaggggcaattcattttgcagcaagagagggcaagactgaggtgtgtaaatacttgttggaagaattgaagcttgatgtgaacacaaaagatgaagatggtgacactcctctccttcatgctgcccggaaaggtcatactctcactgcaaaataccttctagagcatggtgctgatcctgctataccc

SEQ ID NO: 16562 - DNA, 308 bp, Gossypium hirsutum
  unsure (1)..(308): unsure at all n locations; Clone ID: LIB3145-039-Q1-K1-C1
tactgttacacctgtcccccaaaaaaaaaancttaattcttataaacatctttcctcacaacacttcttccactaaaaaacccttctattataagatcatcttcgaaacgttcttccctcaaaactcaacactatttacccttcccagaagaacaaatctaacatacaacaccgacaaagcttcctaattttatgccacttttaaaaacaacctttacccctcctccaaatcaacactttgaatgcatctattaatttactatttcgaaaacactctttccataacattcctaacaatattgtttatt

SEQ ID NO: 16563 - DNA, 425 bp, Gossypium hirsutum
  Clone ID: LIB3145-039-Q1-K1-C11
cgtccgcaaggatggcaacgccatcccaaactacattcattttatggacttagctgatggccatagtgcgtcacttatgaaactttgtaccacagagagtataggttgtgttgcctacaacttgggaactggatgtggtacatctgtcctcgaaatggttgcagctttcgaaaaagcttccggaaagaaaatccccattaaactatgcccaagaagacctggagatgctactgccgtttatgcttctaccgagaaagctcaaagcgaactttgttggaaggcaaaatatggtgtatctgagatgtgtagggatcaatggaagtgggcgaacagcaatccatggggataccagtcaaaaaagccttaaaagctttgcttaaaattttctcatgttacattaacatcaacaacatgtttaaagcaaa

SEQ ID NO: 16564 - DNA, 402 bp, Gossypium hirsutum
  Clone ID: LIB3145-039-Q1-K1-C2
atcgtttttacgccataatcgaagctctatcttcgagtcttcaatcatgagtttcttcaaaagctaattcacgttattcttatttcattcatttatttttcttctatgaatccgctctctgaagagagaaaagagaggggagggaaatgacatcggggttctccgggggtggcacagagttttacggtagaatagcaggcggatccgtctctaacagtggctccatgagcaacaaccaacccaccgcaccgtacgggacacatggaatcttcatggacccaacgtctcagatcgtgaacagagccgcacccagtttcgtcggcaagcgaacacgagctgacttcaataaccacggcctcaataatctttatccccgtccagttaagcccaaaaattaccagc

SEQ ID NO: 16565 - DNA, 163 bp, Gossypium hirsutum
  Clone ID: LIB3145-039-Q1-K1-C3
gtgaagtaaaaatttgacaattaaatgcttagatgactgctggaaactacagcttgaaagctcattattccagtatgtaaatactgatttgaatgtgctgtaatatgtggagcaattggtctgctgcatgtatgaaataaaataaaagaaaacaatagttgtt

SEQ ID NO: 16566 - DNA, 400 bp, Gossypium hirsutum
  Clone ID: LIB3145-039-Q1-K1-C4
cccacgcgtccgattttttctggtctccataatggtgaacattttcttagtgttttttaaagttgtgtgcaatcatttcaccagaccatcgttgtttcttcttttttatatgcttgcagagtcttacaaaccattccttcaaatgaagcaattcatactgttgaggtaagtcttgcctgattttaatattcgttaaaattttgctacatctgtcttttgcactagattgtggccacttcaatatggttagaattcgagtatattttctaatcttgatgtttagatgaacttaattttaatattcctgttcagtgagttatgttgctctggacataacaattggtgcaaaaggaatatgtagggtcgaaagacatttagatttaactctttgtattgtaac

SEQ ID NO: 16567 - DNA, 140 bp, Gossypium hirsutum
  Clone ID: LIB3145-039-Q1-K1-C5
ggaagagttggttgtcgtcgtattaattatacaaaataagaagtaatgatgttgcggaagggcttgctataaaatcctgtgggataaaaagagtaattatgaagaataaatagctcaaaacaatatttgatttacaattt

SEQ ID NO: 16568 - DNA, 397 bp, Gossypium hirsutum
  Clone ID: LIB3145-039-Q1-K1-C6
gtcaaacaaagatatttcgacagtgctggttggcatgaactcggttaaacaggttggggttgatcatttgaactttatgaaatctattttatgcctgataatagaattttgttactaaatcttcatacctgtcaaaacatgtttgcattttttttcacgagcttgctgcttcggctgttaataatgccggggttgtaaataactaggttgaagagaatgttgccgctgcaacagaacttgtactgttcgggaaagatcatgaaactctagctgaggtggaagcaatcctgaagccagtgaagaatcagacatggccgagcggaattcaacaaagctgagcaacaatatcgacccgtatttttattattgtatgcatatgttctcccacatggaatgg

SEQ ID NO: 16569 - DNA, 121 bp, Gossypium hirsutum
  Clone ID: LIB3145-039-Q1-K1-C7
acgaaagtctcgaaacgaaccccagaccgtcctctatggtacccacgaacaatggcgcctgattggctcgatggaagtttggtgggtgattacaggttcgacccgttcgggttagggaaac

SEQ ID NO: 16570 - DNA, 395 bp, Gossypium hirsutum
  Clone ID: LIB3145-039-Q1-K1-C8
ggctactacccatttgctaatattgctacttggagtggtggctctcgccactccgtgtttgggtacctacgagtctgccaactatgggaagccccctgctcctgttcataatcctcctaagctgaaaccgccaccatatgaacataaacctccggtctatgaaccaccaaagaaggagaagcctgaacctaagccaccagtttatacacttccaaagaaagataagcctgaaccgaaaccaccagtatatgaacctccaaagaaggaaaaacctgagcctaaaccaccagtttatacaccaccaaagaaagaaaagcatgaacccaagccaccgatgtgtgaaccaccaaagaaggaaaagcctgagcctaaaccgccagtttatgtacctccaa

SEQ ID NO: 16571 - DNA, 431 bp, Gossypium hirsutum
  Clone ID: LIB3145-039-Q1-K1-C9
attcgccggtaaggcagtgaagttctccccttccacccctgaaatccggggaactggcggggggtccatgaggaaaaccacgcaagcctgttccttctggtagcccatggtacggtcctgaccgagttttgtacttgggtccactttccggtgagccaccatcttacttgaccggtgagttccctggtgactatggttgggacactgctggactctcagctgatcccgagacctttgctaggaaccgtgagctcgaagtcattcactgcagatgggccatgttgggagctcttgggtgtgttttccctgagctgttggctaggaacggtgtcaagttcggtgaagctgtatggttcaaggccgggtctcaaatcttcagtgagggtggacttgactacttgggtaacccaagcttgatccatgctcaaagc

SEQ ID NO: 16572 - DNA, 396 bp, Gossypium hirsutum
  Clone ID: LIB3145-039-Q1-K1-D1
cccacgcgtacgatttcgagactcgattggtaggttaatcccttacccattttagattgcgttacaatctagttagtatgctagcacatatacattctaaaattcgtcatgtcacaccctacatggacaccggtgtatttcttttctagtatggccacatcaatgcaggagggaatggttgaaagcatcgaatatcaacttgaatacacttttatcatgtaaattaaaatgattggcacttgaagttttgggtcaagtaacctggttttgcctttcatttgggaaaaagtatggacctctttctcatcaatgaagctatttgtcaatttagcttttccacattattgaggttgctggactttgattgtttgtttgattgtttgtttgtttgtgtgg

SEQ ID NO: 16573 - DNA, 417 bp, Gossypium hirsutum
  Clone ID: LIB3145-039-Q1-K1-D10
cccacgcgtccgcaggtgttccagaatcaattgctcaagcttctcgaggaagcaaaagaaaatgggttcccgaggaagatgcagcattagtttccagcatggtggacctgcacaatgttggaacatttaatgctgataccgggttcaaagccgggtatttgaacgagtttgaaagaaagctacaaacggttttaccaaatgcaatgttgaaggcgaaacctaatattgaatcaatgattaggttacttaaaagggagtggtcaatcgtctacgacatgcttaatggccaaaacaatatcggttttggttgggacgagcatatgcagctcgttgttgctgaagatgctgtttgggagtcctatttaaagagtcacaaagaagccgcccaatttaaatttcggacttttccttactatg

SEQ ID NO: 16574 - DNA, 215 bp, Gossypium hirsutum
  unsure (1)..(215): unsure at all n locations; Clone ID: LIB3145-039-Q1-K1-D11
tgagatgaaagcgtcnnaatttcactttttatagttgttttttctnnccggagttttccaattccaaagctgtgccactaacttggtcctggcgttaaaaaaacccccaattgtggttaatttttgtgccatataacttttaccaaacccactaccttaaaagcttggtcaccaacttccttattgtaaatcttattaccggtataccatataac

SEQ ID NO: 16575 - DNA, 419 bp, Gossypium hirsutum
  unsure (1)..(419): unsure at all n locations; Clone ID: LIB3145-039-Q1-K1-D12
ggccgacgcgcacgcgtccgactcactcaacattcccatttccaatctttttctctcaacgtgaatatgccnatcanaaacatggcttttatccgacccggagaggcaactcaccccgatgctctcaaggcagctttggctgagttcatctcaacctcgatcttcgttttcgctggatcgggctcaagaatggcttttaacaagttgaccgacaactgagcaacaaccccggccgatctcttagccggcgctctaactcatggcttcagtcttttcgtcgctgtctccgttggcgccaacatctcatgtggccacgtcaaccgcgccgtcaccttccgtgctttcgttggcgggaacatcactctcttgcgcggcattctttactggatcgcccaactcctaggctcaaccgtagcttg

SEQ ID NO: 16576 - DNA, 400 bp, Gossypium hirsutum
  Clone ID: LIB3145-039-Q1-K1-D2
ctttctcgaggcctccatttttgaaccctagctggagaaaaaaaacgtaattttcttggaaaccaaacacttcgattaattgatctccagtcaatcgccaagaaaaaaaatgcagcaccagaggctgaagcaacagcaacaagccttgatgcaacaagctcttcttcaacagcagtctctctatcatcccggcatattagctcctcctcagatagagccaattcccagtggaaatctgcctgctggttttgatccaagcacttgccgcagtgtgtatgtgggaaatatccatacacaagtgactgaaccactacttcaagaggtttttgcaagtactggccctgttgaaggttgcaagcttgtcagaaaggaaaagtcatcgtatggattcgtccactac

SEQ ID NO: 16577 - DNA, 307 bp, Gossypium hirsutum
  Clone ID: LIB3145-039-Q1-K1-D3
cggacgcgtgggtggggctgaaaatggctgtaaatgtggagataactgcacttgcaacccgtgcaattgtaaatgaggggaaaaaaaaaaccgaagcatattatggaagctgatctaaataatatatgatgtatttgggtttttattattagaataaagcagccatggttcattaggtgttttgcttcttgtatccatggttgcttggtatgtatagtgaaatgaaagtattttaactagctttgttgtgttactgccatgttatataactgatgaatgaatgaaggaaagctctatttggcttttg

SEQ ID NO: 16578 - DNA, 402 bp, Gossypium hirsutum
  Clone ID: LIB3145-039-Q1-K1-D4
gctcagtatatgagtgggcagagggagaaatttgtcaggttggatgacttggactctagatgtatcatcatcctctgatacaggattgaaaaaatgtgggtttaacattgatggattaggtcgctctggccatgcaaacaatacaacatcaagatctttcaagagagggatcagaaagggatctgaagggcttaagtcaattggtcgctcacttggatttggggtttcacgagttgtatttccagaggatcttaaagtttcagagaagaagatttttgatcctcaggataaattcctcttgctatgcaacaaattatttttcatatcttgtattctggcagtatcagtggaccctctatttttttatcttccagttattaacgatttgcaaaagtgtctaaa

SEQ ID NO: 16579 - DNA, 393 bp, Gossypium hirsutum
  Clone ID: LIB3145-039-Q1-K1-D5
caggttaggccgcaaactattggtcaagcgagcagagtaggtggggttagtcctgcagacatcactgctcttatgattatacttgaaaccaaacgaagaaaagctcaagaactgagaagacaccagatacgtgcttctgtcatggtagatactgttgaaaacttgtctgatacattaacagaggcagttggtaagtagcagcagaatgtaagcccgtcatctaatttgaacttatgcatgtctcatcatcagtgcaatttatgaagaacaattcacgaacacatatatgcggatgagatcttgagtctttaataattagaaccttgaggaacaagtactttgaagatttttccggaggctgcaatctctcatagcatctggaccaggaatttg

SEQ ID NO: 16580 - DNA, 389 bp, Gossypium hirsutum
  Clone ID: LIB3145-039-Q1-K1-D6
cccacgcgtccgcccacgcgtccgtattgatccaggaactccaagcattccctcacctccattctttcctgctccaactccaccaattggtggtacatgcgatttctggaggagtcaccccacactgatatggggtctgcttggttggtggggcactgtaagcaacgcatttggcgtgaccaacgttcctggacttggaacaagcatgagcttgccccaagcactttcaaacacacgtactgatggacttggggcgctttaccgagaaggaacagcctcatttctcaactccatggtgaataataggttcccattctcgactaagcaagttagggagacttttgttgcagcacttggttcaaacagcgctgcagcagctcaagctcgtc

SEQ ID NO: 16581 - DNA, 264 bp, Gossypium hirsutum
  Clone ID: LIB3145-039-Q1-K1-D8
cggaaccggcgacccacgcgtcggtggataataatttagatgaggtttggaccatatttatgtgctggtgaaagggtaactctgtgatcactgtaaatactgtgatctttaagtgtttctggcttaatgccatgggctatgcggttatacggatttaaaggaagctgtgcgtaaaataagtccgtgagctgcaggaatggtgtcgtgaaacagtaatagaaggtctttttatcgcttcctggactttaagttgacacatgcaaa

SEQ ID NO: 16582 - DNA, 415 bp, Gossypium hirsutum
  unsure (1)..(415): unsure at all n locations; Clone ID: LIB3145-039-Q1-K1-D9
cggacgcgtggntcgtgaaagacccaaaattccttaccaagtggacgagatgaaacaagggttgcgctatttcgatggcgatgatgatgggaaaatctcngctctcgaacttagggcatacttcggctccatcggggagtacatgtcacatgaagatgctcaaatggtgatcaacgaactagattccgacggggatagcatgttggactatgaagatttcttgaagctaatgaaaatagaaaagcgggatgatgatgatgatgatgatgacctgaagaaagcgttcgagatgttctagttggagaaaggttcgggttgcataactcccaaagggttgcaaaagatgttgaatcgccttggggatgcaaagtcttatgatgaatgtgtcgctatgattcacgtttatgatattgat

SEQ ID NO: 16583 - DNA, 354 bp, Gossypium hirsutum
  Clone ID: LIB3145-039-Q1-K1-E1
cccacgcgtccgcccacgcgtccgtgatgattaggtccaagggctgttcaatctatttgagacggacaacgatgggagaattagcagagatgatttcttttactgccttaggaagaacccattggtgatagcaattttctcacccaggttgctgcgtaaaaacttgtcaaaagctggcgataagatgttggatgatattgtttgatggggtggatgagccatgctgatgcagttgacttgataagatttttgtgtactagtatgttgtttaacttgttctgtacgttgcttacatggtcctaatacatgctatcttttaaataaatgcggttggtacttaattgtccttccttt

SEQ ID NO: 16584 - DNA, 416 bp, Gossypium hirsutum
  Clone ID: LIB3145-039-Q1-K1-E10
cacccctgtttgaactgctttccaacatgctattgcttcagcagcaaaagctgaggtaagcccgtgatgaagctctgagcgtgatactaggactcttccttcctgattcctggctactatacgtgatgccgacttgttctgcctctcattgaacgcaccgtcgaagttaatcttgacaaaattatgagcgccccatatggcccaaagcgcgcaacagaaaagatgacatttgcaaggattgaactgctcaaaaacccatggcattctcggaataaatggtcaatagtctcaacccctttcccacatcgaggacaatttgtgcaatttgcaaggtttctgcttcgcatatttgtctttgtaggcagatagttccttgaaaatttccaaactgtaatctttattctctctggtatatg

SEQ ID NO: 16585 - DNA, 341 bp, Gossypium hirsutum
  Clone ID: LIB3145-039-Q1-K1-E12
cccacgcgtacggtcctttctatagcagttttatttttcaatggctggaaagagcaaggggtcggttattagaggcactgggtacattataaagttcattgttcaagccagtgtgaatgagggtcatcccacttttgctttagtaagagagggttcactatcaccacccagttaagggaaatgttattaacactttcaagaacttaagtgttcatctgttgtatggggatctttacgatcatgaaattctggttaatgcaataaagcaagctgatgtggtgatatccacggtacgatctatgcaattagcatatcaagttaagatcattgctgccattaaa

SEQ ID NO: 16586 - DNA, 404 bp, Gossypium hirsutum
  Clone ID: LIB3145-039-Q1-K1-E2
ctcttattttccttaaagaaaaacagagagaaagctctcaaattttctcttaggcctgtgccaccctcatcggagatccggctagccgaggtcgtgagttcgtcggtaagtcccctctctccctctcttgttttttaaaaaaaaaccgtttaaaaaaatttgaaaaggaaacagaacaaacgaaatccaaatcaagagaaaattcgaaaagaaaaaaaactgaaaaatcacctttcaaaacttagttccgattcttgatttactcttgaactttgtattatctccgaaaaaatatatatatcccccaaaatacaatcgattcctctctaaaaatcccccctaaaatacaatccattcttccatcgaaatatcaaaaaatcccccctcaaatactatcgatcccc

SEQ ID NO: 16587 - DNA, 396 bp, Gossypium hirsutum
  Clone ID: LIB3145-039-Q1-K1-E3
cgaggatctgcggtgggattcaaattggatagcctccttaaattatctgatacgcgtgcaggaaacaacaaaatgactttaatgcattatctatgcaagcttctatcggagaaaatgccagagttgctggattttgataaagatcttgttcatttagaagctgcttctaagattcaattgaaaaatcttgctgaagaaatgcaagctgtgagtaagggccttgaaaaggttgagcaagaactctccgcttcagataatgatggtgatatctctttgggctttcagaagctgaagctgaagtgaggtcacttatctccttgtattctgaagtgggtagaagtgcggattcattatcccaatacttcggagaagatcctggacgatgtccttttgaac

SEQ ID NO: 16588 - DNA, 281 bp, Gossypium hirsutum
  Clone ID: LIB3145-039-Q1-K1-E4
atcttccataaaattcaaataggattgcctttttaaattatctgatacgcctgcggcaagcgtcaaagtgactgtggtgcatcatctatacaagcttctatcgaataaaatgccatactttctggatttttataaaaaactcgttcatttaaaatctgcttctaatcttcaattgcaaaatcttgctgaacaaatgctagctgtgaataagggccttgaaaaggttcttcaaaaactattcgcttcacataatgatcgttatatctctttatgctttccga

SEQ ID NO: 16589 - DNA, 398 bp, Gossypium hirsutum
  Clone ID: LIB3145-039-Q1-K1-E6
cccacgcgtccgcccacgcgtccgcccacgcgtccggtgggttcggttggggatgacttgtgtagatttcttcattactaacacataggaatacgtggggtttcatggttaagattattattaataattttctctctagtgtaggacttgaaaataactagcctttcatttttgtttttcttatttaaccacttggaaaacctaaatgacatggatactgtgttacaagagatcaagttgaactgttcgggaaagatcatgaaaactctaactgaggtggaagcaatcctgaagccagtgaagaatcaaacatggccgagcggaattcaacaaagctgagcaacaatttcgacccgcatttttattattggatgcatatgttctcccacatggggggg

SEQ ID NO: 16590 - DNA, 394 bp, Gossypium hirsutum
  Clone ID: LIB3145-039-Q1-K1-E7
cccacgcgtccgtcagaagctgctcctgttgtaccctctcaagtgccacaccctgcaatcagcgtgcaagcacctagtcaaggggagagtgaaaatattgttgagcagtctctacttaaggaacttgaagatatggggttcaagcaggttgatttgaacaaggacattttgaggaggaatgaatatgatctggagaagtctgttgatgatctttgtggggtggctgaatgggatccgatacttgaggagctgcaggaaatgggtttctgtgatgctgaaacgaacaagaagctgctgaagaagaacaacggaagcatcaagggagttgtcatggatctgttaacaggagaaggtgcttaaattattaattatggatgatggctcgtggtttcta

SEQ ID NO: 16591 - DNA, 398 bp, Gossypium hirsutum
  Clone ID: LIB3145-039-Q1-K1-E8
cccacgcgtccggataattgtgacacgaaccgagatcgatatgcagtatataaaagccgggtgcctgaggaaatataaaaagaccttgaacgatgcagttcactcagacacatcgggccactacaggacttttcttctctctcttttgggaccaaacaattagacatcgtaagtgtagttgtgtgtgtaaatatgttataatgatgtttcagtgaatccagttcctttcgtatcggattggtgtattcgtggcagattggtagaatcgaaagtgattgcatagctgattaggtgaaccatgttaaagctctttaaactgcagttgtgtgaatgtgagagagaatgcgagagagaatgcatgtagttgggaggcttttcccctctggtcacaagtaatg

SEQ ID NO: 16592 - DNA, 421 bp, Gossypium hirsutum
  unsure (1)..(421): unsure at all n locations; Clone ID: LIB3145-039-Q1-K1-E9
ctcaaatgcattagctgtggcagtgattgcttctgttgcatggataacttatgagatatgcttgaaagcaactgatccatggaatganangtggcaaantgcttggatcatcacagctttctgggacatactttcgttgccctactttggggtatttgctacctttgggcaccatctcaaagctcccaacgatatgcatactcggaagatgtgggagaggaattcgatgatgaagaagctcaatctctaactagggggcaatcgaacggcgatgtgagtttagtcaagcaggagcaaaagaatggaaatgctgctatctccgatgaggaagatgaatctgaagaggataaaagggagtaaaatccatcgccggaacatggtttctatcaaaccaactttcgagcggatcccacgtgaagat

SEQ ID NO: 16593 - DNA, 401 bp, Gossypium hirsutum
  Clone ID: LIB3145-039-Q1-K1-F1
acggatttcagatcggcatcacgaagaagtgtccctcggaaacttaaggaggttccaattcagggaacttcaggttgcaacacataacttcagcagcaagaatatactaggcaaaggcggtttcgggaatgtgtacaagggagttctgcaagacggaacaatagtagccgttaagaggcttaaagacggtagtgccgctggtggagagattcaattccagactgaagttgagatgatcagccttgcagtgcaccgcaatctgcttcggctttacggattttgcataactcctacagagaaacttcttgtttatccgtacatgtccaacggtagtgttgcatctcgtctcaaaggaaaaccagtgttggattggagcacaaggaagagaattgctctaagag

SEQ ID NO: 16594 - DNA, 423 bp, Gossypium hirsutum
  Clone ID: LIB3145-039-Q1-K1-F10
agaagagagtgtgagaatggggttgaccggtgacagctcaatgggacactactctgatgggggaggcaacaaatacaaaggaagccagaatgggtatgcataggcttacaccgaaagtgaatgttataaccaaatcctcaagcccacccataggatgatcaaaccccagaaagcttatgggatggctgaaacctgggatgaggagaatgctcaatcttacgccacctacaagtcccaaactggacctccaatgttcaaaactcaagttcatggtccttctcggaatggcttctgctcccactccaatactgcaactgcccacatgcaatcctatggctttagtagccccggaaaacgcgaaggtcgtgtttatggatatgggggccccaccgcagccgctagacaccaaaaaagtaatggcgg

SEQ ID NO: 16595 - DNA, 332 bp, Gossypium hirsutum
  unsure (1)..(332): unsure at all n locations; Clone ID: LIB3145-039-Q1-K1-F11
ggccgacgcgacgcgtccgggtaaatgatgacnagatctttcaactttttatttactagttagatttaattcccaaggggccggttaggctcagttcagatcttacagaaagccatgaagcagatggaaaggggctttccaatcctcttaatcgctagtggaatagccaggtcatgtggttattctcattcattttttgtaatatatggttttggttactgctgccttggtagattactagttttcttgctatgtactatcacacatgcatatatatgtgtttgatgctttgaatcacttaataatctatcttggtaccgttgctccaatat

SEQ ID NO: 16596 - DNA, 412 bp, Gossypium hirsutum
  Clone ID: LIB3145-039-Q1-K1-F12
ggccgacgcgacgcgaacggaagcctcacttattgattgacaactcgatgttttaaactgatcctggagacaactagcgcagggttttcacgtatcttgggccaaatatacaaccaccatttttgaattcaaagcaagctgataatgaaatggccggtggggttaaaaagtcggacctaagtggatggatccggagatcctcgggttaactggatttatggaagtcgactcacatttcatatagttgaaatggagaaaaagaggtttttaaagtttttcagttttgatgataaatatatgtaaatggcaagtgtgcattctgctttcctctcccatttcttccgcaacttatattacctgtacatgctacttctcactctacctataatataacatcatacattttcagttc

SEQ ID NO: 16597 - DNA, 354 bp, Gossypium hirsutum
  Clone ID: LIB3145-039-Q1-K1-F2
cccatacttccggagcactgcactcacaatgaggcattttgtttgtcaccgagagctatcagtgtttttatcgctatggtgatggcaatatgcccctctgaattctgaaatgattgggagtttactgggccttaagtgaactttgggtggattaacatctgaacgtaacagacttggtacaagggaaaaatgagaaacgggataccttcctatatggataggatgctcggagacctatttgagctggcatgatacgacgattattattggttgacggacttgttatatggaatctaactaggcaatggtggattggaaacaagaggtattaaaatcggactacaaaggatcggg

SEQ ID NO: 16598 - DNA, 396 bp, Gossypium hirsutum
  Clone ID: LIB3145-039-Q1-K1-F4
tatggaatcaaatttttcgaaacaagtgcataaactaacctaaatgtggaggaagttttcgtttcaatagcaagggacataaagcaaagactcgtcgatactgacttaaaggctgagccttcaacaattaagatcaataaacctgaccaggcagctggggctggtcaagctgcacaaagaccggcttgctgtggttcaacctaagggagctcaaacctggtgggacacgtattggatgttaaaaactacttttcttcaaaaaatggaggggaaagagaaaactaattgtggtgactggatgatgagtgcctgtattttcttattgacattctttataacttgttttaaggtgtgaggatgtaatgtttttctttataattggttgtgtcatgtgaa

SEQ ID NO: 16599 - DNA, 286 bp, Gossypium hirsutum
  unsure (1)..(286): unsure at all n locations; Clone ID: LIB3145-039-Q1-K1-F5
ccgaagcaagcgcaggcgagcaacnacccttaaccagcagaacacaaaggccancagaggcggcacaggancgacgaccgggggnggnncngaancaaaancagaaagccagggaacagagaaancggccaaaaagagacagaagaaaaagaaccngacanggcggncaggggccagagagaaggacagaaccnccnccgaagaggcngcngnngnnaggaaagggacgcaccgngaagggacaaaaaccccacaanggagagaaggacccaagggggcaaagacc

SEQ ID NO: 16600 - DNA, 265 bp, Gossypium hirsutum
  Clone ID: LIB3145-039-Q1-K1-F6
agcaaataaggaagacagttacatatgcattatatattgactctgttatcgaaaaaaaaggggaaaaaaaaaaaaaaagaaagaaaaaaaaaaaaaaaaaaaaaaaaaaagaaaataaaataaaaaaaaaaaaaaatttttttttttttaaatttaaaaagttaaattttttaattaaccaatgaaaaaaaaaaaaaaataactttttaaaaaataatattaattaggggatcctctttttgttataaaaaaaaaatcaatattt

SEQ ID NO: 16601 - DNA, 387 bp, Gossypium hirsutum
  Clone ID: LIB3145-039-Q1-K1-F8
atccttaagcagaggttgaaggtcccaccattattgaaccaggttaccaagactcttgacaggaaccttgctacgagtctattcaagctgcttctcaagtacagaccggagggcaaggcagccaacaaggaacgtctactgaaaaaggctcaagctgaggctaaaggcaaagcccctgagtctaaaaaaccaattgttgtgaaatacggacttaaccatgttacctaccttattgaacagaacaaggcacaattggttgtcatcgcccacgatgtggatcccatagagcttgtagtctggcttgctgctttgtgcagaaagatggaggtcccctactgcattgtcaaggggaaagcacgattgggatcgattgttcacaagaaaact

SEQ ID NO: 16602 - DNA, 401 bp, Gossypium hirsutum
  Clone ID: LIB3145-039-Q1-K1-G1
cttggaactggcaccactggagctactgttagaatttgggatgtgaagagtcggggaaatgttgccaactttgatggacacactggggctgtaacagccatatctttctcagaaaacggttacttccttgcgactgctgctcatgatggtgttaagttgtgggatctacgcaaattgaagaactttcgatcttttgaattatatgatcaagacacaccaaccaactcagtggatttcgaccatagtgggagttaccttgcaattgctggctcagatataagagttttccaagttggcagcgtaaaagctgaatggaattgcatcaaaactttacctgatctgtccggcacaggtaaatcaacttgtgtcaaatttggtccagatgcaaagtacttggcagt

SEQ ID NO: 16603 - DNA, 426 bp, Gossypium hirsutum
  Clone ID: LIB3145-039-Q1-K1-G10
cccacgcgtcctcaatcttcgactccgcttcacccgtattcccaacaagaaaaaaaaagcggaggagagaaggacatttatgacttttttttttattttcttctttatatttctcgtttgaattattgtataatatgacacttgtaatatgccgaattccaaaaataatcctaaggagcaagacaagaaccggaagggtaagttatctgaaaaggcgtcgtcgtttcacgggaaattcccgacggtggctccgtctgatctgaggcggccgaagacgctgcccgacctattctcagagaggactacttccgtcttaccggatgcgaggccgaagttgacgaagctgctgttgaacgtgaccattcaagggagtctcggagctgtacaagtagtgctgtcgccggaaaacactgtccgtgacttaat

SEQ ID NO: 16604 - DNA, 395 bp, Gossypium hirsutum
  Clone ID: LIB3145-039-Q1-K1-G2
atttccttgtattcaattgcagcagatatgcgtgggaaagcagcaattcttggtccactaataacagagcatgcgaaaggagggaagtgtattgttttcactcaaacaaagcgtgattcagatcggttggcatatgccatggcaagaaactttaaatgtgaggctttgcatggtgatatatctcaaagccagagggaaagaactctctcaggattccgagatgggcattttaatattttagttgctactgatgttgctgctcgtggccttgatatacctagtgttgacctggtaatacattatgagcttccaaatacatctgaaacttttgtccatcgaactggccggactggtcgtgcttgaaagaaaagaagtgcaattcttatctatactca

SEQ ID NO: 16605 - DNA, 139 bp, Gossypium hirsutum
  Clone ID: LIB3145-039-Q1-K1-G4
ccccaattgaagcatttttaaccacaaccataggtttatttaaaataaatattaataacgcttgggaaatatttcaagggaccccgtaatcccaccaaatcctgcaaggcaaggggctcttatcttaagggtcatttta

SEQ ID NO: 16606 - DNA, 353 bp, Gossypium hirsutum
  unsure (1)..(353): unsure at all n locations; Clone ID: LIB3145-039-Q1-K1-G5
cggaaaaagatgttgcagatattcagcccatcatacccccatgccatcatcaggaagtacggggtcatgtgttgcaggcagtgcttccgtagcaatgccaaggaaatcggattcatcaagtaccgttgaagaattttgtatggtgtaaagtaggaaggactttgtccctctatgagccttctgtagtatgttattatttttatttttttgaatttgaaagaacaagatgctgttttgttttggtgaattaccaaagtgattgttgaactaagaatactttgtggttcctcaatgaagtaatcatactggtttaatttggtattttcttttttnaaaaaataaatttgatgaat

SEQ ID NO: 16607 - DNA, 402 bp, Gossypium hirsutum
  Clone ID: LIB3145-039-Q1-K1-G6
gttgaaatgaggaaaagaggaaatttcccattcagcagtaaaaaggtcatcacagcaacagcaaggcaaattgagagtctgatacgccttaatgaagccttggctcgtattcgattctcggaaacagttgaaatgcgagatgtaactgaggcattccggcttttggaggttgctatgcagcaatcagcaactgatcactccacaggaactattgatatggatcttatcaccactggagtttctgcaagtgaaaggatgaggagggagagtgtgttatcagcaacacgcaacataataatggataagctacaacttgggggaccatcaatgcgattgctagagttactagatgaaatgaagaagcaaaactctggcagtgaaattcaccttcatgatctaaga

SEQ ID NO: 16608 - DNA, 197 bp, Gossypium hirsutum
  Clone ID: LIB3145-039-Q1-K1-G9
aaagaaagggttgattgattccgttgcaagcaaaagtttgcttgttgtaaaaggtaatgcgattgaggacaagattgagggtcaaaaggaagtaaaggctaaagagcaggaagagaaggacgtgatcgcacaacagaacatgtatgcacagttgctacctcttgccttgcccgcaccgccaatgccaggcatgggag

SEQ ID NO: 16609 - DNA, 403 bp, Gossypium hirsutum
  Clone ID: LIB3145-039-Q1-K1-H1
tgacaaatgagattgagatttgttgtgttttttatggtattattattataatgaaaggagaatttctttttctcttctttgaaagctatggctctgcaagcagaagggactcagcagattcaaagccctccattgatgaatcttgatggcctgttatgtgaagaagaagatttaggagtttatagttttgaagaaaatggaagtgaaattcctgctgaaaaggagaattttgtacctttatttcttaacgaacatgatttgttctgggaagacgatgagttaatctctttaatgtctaaagagaaacaaacccatcagggttacgttgatttttgtccagatgagtctttagttttagctcgtaaagaagctttggattgggttttcaaggttaaggcacact

SEQ ID NO: 16610 - DNA, 363 bp, Gossypium hirsutum
  Clone ID: LIB3145-039-Q1-K1-H12
attttcttatttcatataaacattcaataatatctttcacagtaacaaatgcgtcaggtttcttaagaatggcggctcacaacaaaaacacttacctgtatctacaaacaaagaaagtttttcgattcgtcctctttaaaatcaatgaaaagaaaattgatttattatttgaaaaaactgaaaatccatctcagaactatcatgatctcacttcttcatttcccgagaatgattacctctttgcagattacgacttttattttcagactattaataattgtcacaatatcaagatcttttttattacataactaaaaactcattcaattgtccaataattcaattatttcagcacatttatta

SEQ ID NO: 16611 - DNA, 410 bp, Gossypium hirsutum
  Clone ID: LIB3145-039-Q1-K1-H2
cccacgcgtccggaaaacagaggcaggcattcatggcaaggatcaaggtgcacgagttaaggaacaaatcaaagacagagctgttgagtcagctcaaggatttaaaagccgaactttctctccttcgtgttgccaaggtcactggtggtgcccccaataagctctccaagattaaggtggtgaggctatccattgcacaagtattgacggtgatatcccaaaaacagaaggctgctttgagggaagcttataagaacaagaagtttttgcctcttgatctccgtcccaagaagaccagagctattcgccgccgccttaccaagcaccagcaatctttgaaaaccgagcgggagaaaaagaaggagatgtactttccgatgaggaagtatgccattaacgtataagcttga

SEQ ID NO: 16612 - DNA, 342 bp, Gossypium hirsutum
  Clone ID: LIB3145-039-Q1-K1-H3
acgcggacgcgtggggttttggcgaaccatcttttttgctagaacgatgagtaagccaaacgcgatgaagaattaaatgaagaactaaagtgattatgacttttttataaagtcaaatggtcaaataaattaatattgttagaaactagcagtacccaacttaaatcgacttgaaaaacatacacctttcaacaactgggagtaataacgaaaaaggccgcaaccgatcgaccttaccaacaaattgcgcaaactgaattgggaaatgggacacacccctgtaggggggcatttatcaacggagcccgttgttgttaccccccagggggaccggtacacttt

SEQ ID NO: 16613 - DNA, 390 bp, Gossypium hirsutum
  Clone ID: LIB3145-039-Q1-K1-H4
atagccgagatctcgtcttcctgtctcaagttagctgatctccaaagctctgtattttgctgagtgctctacttcatttgcaatggcggacgaggaacctgttgatcagaaaaaatatcttgaagatggttgcaagcctaaatgtgtgaaacagcttcgttcatatgaggcatgtgttaagagaatccaaggtgatgaaagtgggcacaagcattgcactggtcaatattttgactattggtcttgtgttgataaatgtgttgcaccatcgctattcacaaaactgaaataaccagggccagagttgtacaacggtagcatcatgtcatgctgttgaatgattgtttcagacaatttggctccataaacttgacaagtgtaaaatttttt

SEQ ID NO: 16614 - DNA, 385 bp, Gossypium hirsutum
  Clone ID: LIB3145-039-Q1-K1-H5
attgggcagtaatgtatacatgcaacaaaatcattgtttcagtcctctgatggtttatatgggtagctaaattgttagtgctggaaaaaaaaaaaaaaaaaaaaaaaaaaaaaaaaaaaaaaaaaaaaaaaaaaaaaaaaaaaaaaaaaaaaaaaaaaaaaaaaaaaaaaaaaaaaaaaaaaaaaaaaaaaaaaaaaaaaaaaaaaaaaaaaaaaaaaaagggggggcccttttaaaaaatccaaagtttttaaacggatattggaaacgcaatattttttttttatttaacccaaattaaattgtggttgcccgcatttaaaaacgcttaatttggaaaaaccctagcggccccaaattaaagttttttaaaaaaaattctttt

SEQ ID NO: 16615 - DNA, 401 bp, Gossypium hirsutum
  Clone ID: LIB3145-039-Q1-K1-H6
atgttgcccccctttttgctctctgcttgggtttcgcacccccctcgccgccgccgttcatgtgccatggtttggacgcaaccagtggccggagaactgggttttcaacccccttttggagcagccctgagggtgaggtaagtttcccttctttttcttttttattttaaatgaaaaataaataaaagaatagaaaaactaaaaacgattcaccttcgaaaaatatcttagtctcagtatatttttctctctatatttggatgtcttttacactgaaaaaatccccctcccccttttacactgaatccccacggcttttaaatagccgaaaataacaaaaataagcaaaaaaaaaaatctccccttcaatattagttgcaatttttgctattactctgcta

SEQ ID NO: 16616 - DNA, 73 bp, Gossypium hirsutum
  Clone ID: LIB3145-039-Q1-K1-H7
tctatattatccaagcttacatacccatccgggcgacgtcataggtcttctgtggtgtgacctaaattcaatt

SEQ ID NO: 16617 - DNA, 404 bp, Gossypium hirsutum
  Clone ID: LIB3145-039-Q1-K1-H8
tgcattctggccacacgtgcacagccgcataatagcaagcttattgatctctcaacttctattgatgggcctgctcagtacaaaagaggctgctaattcaactcctctgcttgttatcttaccaatattgacattatccttccataagtattgcaagagccgctttgaacctgcattcagaaagcatccactggaggaagcaatggcaaaggacttattgggtcggacaactgaacctgatataaacttaaaagcattcttagctgacgcttacttgcacccaattttccgatctttcaaggaagacgagttggtagagatcagagttgataaagttagagttgatagacaccaatcttatgccgacaaggcccaaagcagagatgatatcagttccccctccc

SEQ ID NO: 16618 - DNA, 261 bp, Gossypium hirsutum
  Clone ID: LIB3145-039-Q1-K1-H9
taaaacatcatctactaattacacacaccaatcactgatacatctgctcctacttaccatcccataatagatagaggccatctggataaatttttaacacaaatgacaaagccaccccctaactactctaattatttagaacaccaaactagatcatgaattactctaaattcatatcaacactcattcttacttagaatggcatcaaaatcaacactgcctttctgtggaagcccatatcctatccatgaacaaaatata

SEQ ID NO: 16619 - DNA, 340 bp, Gossypium hirsutum
  Clone ID: LIB3145-040-Q1-K1-A10
cttcaactctgagataaaactgtttatttgctttgatatgtctctgcttggtgtggttttcctttcatatattaacttgttacggtttgtctagattaaccacaaccaacagcagaagagccgacattgctcctttgtaccttgactaaacacccaaggcactgtcgaaaaatgtggctgatgttctccccacttggctgacaccttcaacatagatcttcaacagcaactcttttcagcttgagattcaaaaaattgggaataaaatccccaataaaatctttcacattgttaatttttatttttcgatggcaattttcattggtccatagtttttttt

SEQ ID NO: 16620 - DNA, 401 bp, Gossypium hirsutum
  Clone ID: LIB3145-040-Q1-K1-A11
ggatgctgtgggaagttgagggaaagtgggttgtgcaaggagctgtcgatgttgacattggtgccaatccttcagccgaaggtgctgatgaggatgaaggtgttgatgaccaagctgtgaaggttgttgacattgttgacactttcaggcttcaggagcaaccccctttcgacaagaagcagtttgtcgtgttcatcaagaagttcatcaagaacttgacaccaaaactggatgcggaaaagcaagagtccttcaagaaaaacattgagggagcaaccaagtttttgctttcaaaattgaaggaccttcaatttttcgtaggagagagcatgcatgatgatggatgcttggtgtttgcttactacaaggatggtgctgttgacccaacatttttgtacttt

SEQ ID NO: 16621 - DNA, 399 bp, Gossypium hirsutum
  Clone ID: LIB3145-040-Q1-K1-A12
acaattctgaagaagtactcttttactgtggctactatctttaccggcatggcaggtgctactctgtggggccatactttgaccatgaacttcatcctaggaatttcaattgtgttcatctcaatgcaccagttcttttcgccgctttccaaagtcaaagaataacaagagaatggaatgctagaaccggttgattataaggaaaaccacaggtccaaggaatctttcattaatatagcagcaggagcacatgaagaggctagtcatcgtgttggatccgacgagagacaaccacttcttccaacttaaagttttagggaggagggaatttgttttggtagggacccaggtattgttggatagtgacagagataaaccagttttcgctcgagacgttta

SEQ ID NO: 16622 - DNA, 424 bp, Gossypium hirsutum
  Clone ID: LIB3145-040-Q1-K1-A2
cggaggttcgacccaggcgtacgcccacgcgtacgtccacgcgtccgtgatcataaagttccttttggttatgcagaagcacggttacatcggagaatttgagtatgttgatgaccacaggtctggcaaaattgtggttgaacttaacgggaggctaaacaagtgtggggtgattagtcctcgttttgatgtcggagtcaaagagattgagggttggactgctaggctacttccttctagacaatttggatatattgtgctaaccacatctgctggcatcatggaccatgaagaagctagaaggaagaatgttggtgggaaagtacttggctttttctactgagtcaaatttttgatattttcctttgttcttttttaatttcactccatgtagaacttgatactttactgcaattttaatttt

SEQ ID NO: 16623 - DNA, 251 bp, Gossypium hirsutum
  Clone ID: LIB3145-040-Q1-K1-A3
cccacgcgtccgcatatttccagcatgtgaacttcttattcttctaagaaccgatccgaaggaaatgagagattatagcattctcctctatcattgtggattgtacgagcaggctctgaaatttctcaaattgtatcaagacatgaagagttcttccgcacaaaatccgtcaacagatccagttagcaacctagaagaagatactgtgaagaaattgattgttcgtctcaatctcattgcaatggagggag

SEQ ID NO: 16624 - DNA, 403 bp, Gossypium hirsutum
  Clone ID: LIB3145-040-Q1-K1-A4
gtactcgaagaaattgaagctttacatggatgttagtgagcctacagggtatttcctatgtggaacttatctttgtataaaaactggtcgttggtttagtcattttaaaacttcaagatgcagttgtggagaattgatggataatccgactgatatgtgtttaaaagtgggaacagttgcatataaagatgaaagtgagggagaatcaatgtttttcataactgatgatttaagagtaatgcacggtttgccaggtgatctcatgaacatccttctcaatttgggtatcaataatgtttgtcagattgaagaaaaagttgtggacatcagttcaaatgaggtaatataaatccttgaaccaaattctacatatttcctttgcttgattatttcagattttagt

SEQ ID NO: 16625 - DNA, 406 bp, Gossypium hirsutum
  Clone ID: LIB3145-040-Q1-K1-A5
cccacgcgtccgctcaaatctcatctgttccatccgacgacatggggaggagacctgcgaggtgttatcgccaaatcaagaataagccataccccaaatctcgatactgccgaggtgtcccagatcctaagatcagaatttatgacgttgggatgaagaaaaaaggtgttgatgagtttcctttctgtgtccatcttgtgagttgggagaaggagaacgtctcaagtgaggcattggaagctgcccgtattgcctgcaacaagtacatggccaagtttgcagggaaggatgctttccatttgagagtgcgggttcatcccttccatgttctgcgtatcaacaagatgctttcatgtgccggtgctgataggcttcagaccggaatgaggggtgcttttggaaaaac

SEQ ID NO: 16626 - DNA, 404 bp, Gossypium hirsutum
  Clone ID: LIB3145-040-Q1-K1-A6
ccacgatggcttttcatgaagaatgagatagataaagccatagctgtgctttctagaatggatgacattgctcggttagaagatgaagtggatcacctttctgctgcactagaagaagaacagcagagaaagaatactgtcagatatttggatgtttttagaacaaaaaaattagacttgcttttctggctggggcaggactgcaggcttttcagcagttcactggcatcaatacagttatgtactatagtccaacaatcgtccagatggctggcttcaattcgaatcagctagcacttctgctgtctctcattgtcgctgccatgaatgcaagaggaactgttgtcggcatttaccttatcgatcatttcggaaggaaaaagctggctctttcaagcttatct

SEQ ID NO: 16627 - DNA, 357 bp, Gossypium hirsutum
  Clone ID: LIB3145-040-Q1-K1-A7
ctcagctcttttaactcctctttgttatttctttgtctaacgaagaaaagaaaatgacaatatctgcttcatttttgcttgcttttaccttgctgctcactgggtgtgttttgggtcctatatctcttgtttcagccaaacatggtgttccatcttatgctcataagaaaatcgcttctaaaccttttgaagggtatcttgaaaatggcaactttgaagaacagcccaacccgactgccataaagaaaacagtactcataggagcacacgcacttcccaaatggactatcacagggttagtcgagtacatctccggtgggcctcaacctggtgggatgttttaccccgtcgctcatg

SEQ ID NO: 16628 - DNA, 398 bp, Gossypium hirsutum
  Clone ID: LIB3145-040-Q1-K1-A8
aaagaacccatggaagatatcttttattaaggcagagagttgagtttccaggggagaaacctggtaatgtagaggacccaacttcacaacaggtgggtcccaatgacaccataagaggccaaaatcagataactaaaacaacagcaggagagaagcaacaaaatcacaaggattctcctgttgaagagaaggatgctaaagttgatggccatcataatatgggatctgaaatgatagatttgaatatgaagcctcattggtgaagcctcaaaaatcttataatctacccactggaagccattaatgtgttttgtttatgacgccaaaatggacactcctgttgtttgtatggatcccgaatactaattctaagaaagattgctgatcctgcaacggca

SEQ ID NO: 16629 - DNA, 349 bp, Gossypium hirsutum
  unsure (1)..(349): unsure at all n locations; Clone ID: LIB3145-040-Q1-K1-B1
cccacgcgtccgtttagttatgctttatttgtaaaggaagcagggattagatgggggagaatattgatttcagacgctgggatgaattgataccggatgccttanggatgattttcaagaatcttccgctccaggaaatacttactgttgttccgagggtctgcaagtcgtggcggaaagcggttgctggaccgtactgctggcaggacattgacattgaacaatggagccaacaatgccggcctgaaacccttgatcgaatgcttcaaatgctgataactagaagctcaggttcactccgaaagctttgtgttactggtctcgctaatgaccagagctttttactcat

SEQ ID NO: 16630 - DNA, 396 bp, Gossypium hirsutum
  Clone ID: LIB3145-040-Q1-K1-B10
cggacgcgtggggtttaatgtattgttttccatactatttgaaatgaaatattttgttggtggaagtgtgtgtgggaggggtgttttggctatatgcttggttatatgtttgtaaattgttaactattcttgaagttatttgtatttgattattgtgaaatcagcctgttttcggttctagatagctgtttaagatatgttttaaagatggatggttgagttattggtgatatctgattatgcgttgattttggaatgtaaaatgcaggccacctttgagtgtctattgaaaacgtacggcttcttgactcctgatttctggaaggagactcgtttcacaaggtctcctttccaggagtatactgatctgttgggaaagccaacgaagactcttgt

SEQ ID NO: 16631 - DNA, 389 bp, Gossypium hirsutum
  Clone ID: LIB3145-040-Q1-K1-B11
aggagagaagaggggtttggctgggttgcagaacctaggaaatacttgttttatgaatagtgctcttcaatgtttagtgcacacgccgccacttgttgagtattttttgaaagattacagtgatgagatcaacacagaaaatcctttgggaatgcatggggagcttgcacttgcctttggtgagttattacgaaaattatggtcctctgggcaaactgcagttgctccacgtgtatttaagggaaaacttgctcggtttgcaccccagtttagtggttataaccagcatgattctcaagaacttttggccttcttactggatgggttgcatgaagacttgaatcgggtaaaaaaaaaaccttatattgaattgaaagatgcagacggtc

SEQ ID NO: 16632 - DNA, 402 bp, Gossypium hirsutum
  Clone ID: LIB3145-040-Q1-K1-B12
ataattttttatagaagtttcttgttttgggctgtaataaataaatattaggattgaagctagaataatgtaatagtttataggcgcttcttactgagaactcctctgaaggttcctctttccacacctgaaaatcagcatgttctgtctcggctaaaggaatctttagaatattttacgctatgtttgattgaaaggaatccaacaatcagtccagacatcaatctcagtccctcattcgaccctctaacacaactcatcctgaataagccctcgcgctgcccagatgctcttccaggtatatgaagtgttaagagctcggaggtcggatttggtcggagacacatcacactgtcaacctcaggatttcggtatataaagaaactttattttggaaatcaa

SEQ ID NO: 16633 - DNA, 234 bp, Gossypium hirsutum
  Clone ID: LIB3145-040-Q1-K1-B2
tgggatccttgatgctggtgggaggaatgtaaccataagattgctttccaagacaaagcatgacaaagtcactgcagttgttggtcttgcagtttttagccaattttggtattggtatcctctcatttattttgtgagcttgtcattttcacctacggcttttattggactgaactatgaccttgaagttccaaaatttgagttcttatcacatgcaaaaccttcgctttttga

SEQ ID NO: 16634 - DNA, 404 bp, Gossypium hirsutum
  Clone ID: LIB3145-040-Q1-K1-B4
gatggtcttccggatatcaggttgactggacagtgcctggaagctctaaaagaggctggttttgagataatttgggagaaagatcttgctgttggctctccactcccttggtacttgcctttggatacaagccacttctcattgagtagcttccgtctaacatctgttggacgcttcatcaccagaaatatggtaaaggctctagaatttgtgggattagctcccaagggaagtttggtgaaatggactatggaatttgaaaagcaaaatgatgatgtccctgatcctgtcaagtacggcgagtttttaactacctgggctaagaatgtcgatacttaccttcttaatgtctaattaaataattaaggaaactacatatatgaataatttgatcatatgtctcg

SEQ ID NO: 16635 - DNA, 407 bp, Gossypium hirsutum
  Clone ID: LIB3145-040-Q1-K1-B5
cccacgcgtccgcccacgcgtccggcttagggtgaggccggggacgaggcaggggtcgtggaagaggagctcgaaatgtggaaagagatgctcatcgtgaaatagaaccagaaccctgctcaactcttcagcaaaacaacaaaagtcattcaacctcaggaatggtgatagatgatggttccgagttgaaggaaccggtgaaagagaacacagctgctgaagatgccaatcaagctgttcggaattttgatctgaatgccgaggtagatgagaatgtggatacaaaagcctcagcaactgctgctaaagttgctgcacctgcatcctcagtcggcgttgctagtgccgctgctgcaccagcagcgccagctgcagcagctcagccttctacagcagagcctacaaca

SEQ ID NO: 16636 - DNA, 407 bp, Gossypium hirsutum
  Clone ID: LIB3145-040-Q1-K1-B6
aagaaaaggacacaaaagctctacaggtggctttcaggaagaccaggtggcatgaaagtggaaacattcaaccagctgcagcagagaattcctgaaagaattattgagcatgctgttcgtggtatgcttcctaaaggaaggcttggtagagcattgtttaaccacctaaaggtttacaagggtccagaccatccacacgatgcccagaagcctattgagctgccaatacgggacaagagggttcagaagcagagataatcaaaatataaagcagggtctggcttgagagtgcgcaggcaatgcttcacatcctgcttgccatttactcatgtttttggtcctccgagtatgagcttctttctttggctctccatgacagcatgctgcacttgtttatattttgattg

SEQ ID NO: 16637 - DNA, 390 bp, Gossypium hirsutum
  Clone ID: LIB3145-040-Q1-K1-B7
attatattcattaccatattgtttacttcacaaccaactatagtccgatgggcatgtacaccaccagtatcagatgatgtcttgcatcaatggaaaggcttttgcgctctcatagcgaatgcatacttcataagaggaatggcatggcttcctgtgaaaactctccagctcgagcaaatggcagtggccggacgtgcagaagagccttcagttgttgctagccgaatgcggttagtttttagcacacttgaggtagttagtccacagtggccaagagtgtaaccaagtaattcaacgttgttgtgatccgattttctcaggatcatatgttggagcagtggttccttgtatattaataatgtaagaacatacgacactctgtgtctgctt

SEQ ID NO: 16638 - DNA, 267 bp, Gossypium hirsutum
  Clone ID: LIB3145-040-Q1-K1-B8
agccaccacatccttggctcacgttattcccctcaaaatcctcactttcactccctcacaaactgcaaagctgcggcaatagcagcaatggctgcccatattttcacgacaaccccgtcccacctcgctctctcttttccatcctcaactaacccttcaaacccaccggttcttctctcctcatttcgtggggtctctcttaagctccctcgtcaatccctctcccttgctgctactattcccaagaagcccttttctgtgtttgct

SEQ ID NO: 16639 - DNA, 348 bp, Gossypium hirsutum
  unsure (1)..(348): unsure at all n locations; Clone ID: LIB3145-040-Q1-K1-C10
cttgcttgccttaaaatgcaatattcttcaaaaaccacaatgaccacagtcgagtggtccagccaactccgagcaaggctgtggaatttttgccatgtctggacccatgttaacatttaatcctataccctcgtacataatatttttgttattgttgttctcataaggggtctttacatcctttcagaaagattattatgtatgagaagtggatgtctacattcattcactttgaaaacttctaaacttgtcctaccaatatcttaaaacttattgaatttgtttgtattttcagtaaacttttatgtttttatcctggaaaatatcaatcccaaatattttatcnna

SEQ ID NO: 16640 - DNA, 351 bp, Gossypium hirsutum
  Clone ID: LIB3145-040-Q1-K1-C11
cccacgcgtccgcccacgcgttttccttctcgtccggcataaccgcatgggtgagcggacactaacccgtcaattttggatccaattcgggattttccttggggggtatcagtaaggaattggaatgtaataatattgattcatataggaggaaaaggttctctattgattcaaatgctgtacctatgggatagggatagagaaagaggaaaaaccgaagatttcacatagtgcttttgatcgaaaaatcaatctgatttatttcgtacccctcgctcaatgagaaaatgggtcagattctataggatcaaacctatgggacttagggaatgatggaagggaattaaatta

SEQ ID NO: 16641 - DNA, 395 bp, Gossypium hirsutum
  Clone ID: LIB3145-040-Q1-K1-C2
caaagcaaataataacaatcatcggcgtttcctcattcaccggtaattaaacgcaggtccctctcatttccggtgcgtttaataatcactttatacgccatggacatgaagaaggtctccaccgccatcattgttgctgccgcctcaatgagcgccgtcatggctgccggtgcaccatctcctgccccttcagccggtggttctagtcctagctcctctcctggttccgctccagcatcaggaccggattccagcatggctgccgctaccttgcctgttcttggatcattggttggggcttccattgtttctttgttttcttacatgctgcagtaagctacatgtacgaaaaatcaacatgtgaacgatttttttttttttgaaagaaacatgtg

SEQ ID NO: 16642 - DNA, 400 bp, Gossypium hirsutum
  Clone ID: LIB3145-040-Q1-K1-C3
cccacgcgtccgcccacgcgtccgcccacgcgtccgcccacgcgtccgcacaaagataaagctgaattcaaagaagcaaagatgttgagcgtctcaattgcttccccagctaccttaactctccctccaaaacccaaatcctcaattcccaaaacttccttcaccggcgttagaatccagcacttatgtccccaacggttgccttctcaggccaccttctttcggcaaccgtcaccttcgtcctccgtggtcatgatggctaagagagaagaagaaatgaaggaaataagagccaaaaccactgaggaaatcaacgatgaagtggttgagttaaaaggtgagcttttgatgcttcgtctccagaaatcggttcgtaatgagttcaagtctagcgagtttg

SEQ ID NO: 16643 - DNA, 391 bp, Gossypium hirsutum
  Clone ID: LIB3145-040-Q1-K1-C4
aaacactctttctaggctgtctggacatctaatcctgtgagaacctccttccactccaactcttccttctccccacctcttacttcgcatcaacaatcctaaatccttataccttgtgtgttctttccatttcaaatgactgacaagtgatttgctatggaaagaagttcgaaaacaatcttttagttctaatgatctatattacttggacttagatttgattgttggatataggtatgcgtccaaacatgaatatgtttttctcttaagttttctcatgtatttagagaatctttggagggttatatcaacaaccctgtatgggtatttcaagaagaaaaaaaaaagtccgagtaacatatcttatgattatctgataaatttgcttaca

SEQ ID NO: 16644 - DNA, 407 bp, Gossypium hirsutum
  Clone ID: LIB3145-040-Q1-K1-C5
catgagtgtgatccagaggaagcaggttcatgcgactcaggatgcaatggtggtctcatgaatagtgcttttgagtatacactcaaagctggtggactcatgcgtgaggaagactacccctacactggcactgatcgtgggacctgcaaatttgacaagtctaagattgttgctaaggtggccaatttcagtgttgtttcccttgatgaggatcaaattgctgcaaatcttgtgaagaatggtcctcttgcagttgccataaatgcagtgttcatgcaaacatacattgggggagtttcttgcccgtacatttgctctaaacgcctcgaccacggagtattgttggtggggtatggttcagcaagctatgcccccatcaggttgaaggataaaccatattggatcat

SEQ ID NO: 16645 - DNA, 386 bp, Gossypium hirsutum
  unsure (1)..(386): unsure at all n locations; Clone ID: LIB3145-040-Q1-K1-C6
cccacgcgtccgggcgtggagagaaactgttcgtgggtatgctggtgtggaggagtggtggagaacgtgggtgcatggtggtgctgaaaatggttgcgggctaagtctaggaaaattgggctttctgctttaggccgttaggcccaggcagaaattgggtcttacaagcccatcattaattagaatttgattagaactcaattactagagtatctacacctattgacccatactttatttaataattaaatcctaataaaattttaaccaaattagatcacttttaatttgagctatcctattatgatagtaaataataatatgtaattacccttattatatatgtgatgttcatatttttcaacatanannaaaaaaaataaaaa

SEQ ID NO: 16646 - DNA, 383 bp, Gossypium hirsutum
  Clone ID: LIB3145-040-Q1-K1-C7
attgcttaggagaaaagtagaagaaaacaatgtcaggtcctcagtgctgttcgaatccaccaacattggattctgcaagtggggctggtcacgttgagaatcttgctggtctcaacacttatgtttctgggtctcttcaatctaagcttgctgtttttcttatctctgatattttcggatatgaggctccaaactttagaaagctcgcggacaaggttgcagccgctgggttctatgtggtggctcctgacttcttttatggagaaccctatgaccctaataaccctgatagacctctatctgtttggataaaggatcatggaccggataaaggttacgaggatgcaaagctcgtaattgacgctttgaaaagtaaaggggtt

SEQ ID NO: 16647 - DNA, 392 bp, Gossypium hirsutum
  unsure (1)..(392): unsure at all n locations; Clone ID: LIB3145-040-Q1-K1-C8
gacataatgaactcaaaaactattttgttgtttgcagagctgccgaatgttgggccagttacgtctaatgatatagaaactgctttgaggaacaccagaccgtcggcacatttacatgctcatcgctacgagaagttcaatacagactatggcagtcaaatactccgatgatggcatgcttctgcaaatatacttttaagttgttagttataacttccccagattttatattcatcagaattctattcagtttttactttgcattgtgtctgtttatggaaacttgtatatctatgttttttttttcaaaaaaaangaaaaattaaaaattattaataattataatttaaaatttttataaattttattttttatatttttttttgggtttt

SEQ ID NO: 16648 - DNA, 290 bp, Gossypium hirsutum
  Clone ID: LIB3145-040-Q1-K1-C9
cccacgcgtccgcccacgcgtctttttttagtgagatgtaaggttatggatggggtgaagtggtgatggtggtaagacttattttgcttgtacaaatatgagttcactgtaatatgctatgaattgaaggtatcaacattcatatgatggatggatgctaattgcttattagtaaatcagtgtgatggatggatgcctattctatggtactggtatttggttaaaaaaaaataaaataatatatatttatatattatcaattatttatatattactttgtatttttaatt

SEQ ID NO: 16649 - DNA, 396 bp, Gossypium hirsutum
  Clone ID: LIB3145-040-Q1-K1-D1
ggtttttgtccgagatgtaggagtgacaaggagacccttcttcatgcgatgagagactgccccaggactaaggcggtgttggctcttggtgggctgaataccaaagttctcgagggcacctacagtcgatgtgtggattggattgaggacatggctcgcacgctggacaagaaggcgctttctgacttgatcacggtgctctggaacatttggaacagtcagaataatagaattttccgtgacaaggaggaagcggccatggtgatgtggggtagagctgctgccctaagccaggatttccgcatttttaatttcgtggagaagccgttgattccgaaaccagagagcgagaaaggttggagcaaacctgatcaaggagtggtcaaaattaatttt

SEQ ID NO: 16650 - DNA, 403 bp, Gossypium hirsutum
  Clone ID: LIB3145-040-Q1-K1-D10
gtccattgtttttttccttttcgattctttgatttgagaaaagaaacagaaaaaagatgggttctttcttttcatccgattcaacgccagaaaagccatcatcttcatctgagccttcaagcgtcctaacctttcattcatcacccagatggcaacttcacttcaactctgtcaaagaaacctcacagcttatggttatagatttctcagcttcttggtgtgggccatgtaaattcatggaacctgttttgaatggcatggctgctaagtttactgaagttcagtttgtaaaacttgatgttgatgaactgcctgatgtggcgcaagaatttggggttcaaggaatgccaactttcgtgttgctaaagaaagggaaggaagtggatagggtggttggagccca

SEQ ID NO: 16651 - DNA, 405 bp, Gossypium hirsutum
  Clone ID: LIB3145-040-Q1-K1-D11
gttctcctctccatacttgaatttccttttgtactgtctccgccagtgggatctgggaaattttcttcgcaatgaccggttggaagtccagatggaaatttgatcacctctccccaccctccatccacgtcctctttcaaggagtcctctcgcagcccaaatgctctttcagataaatgaaggtttaggaaggagcatcttggatggaagcaatggaggatccaacagctttggagtaagaagacaacagcagctgctgacccagcaagagatggagcaatactatcaacttaagattcaggagatccagttgaaggaaaccatcataaagaagaaagaggatctcattctcatggagcatgagttgacaagctgttagcaactggatcaataatattaatactg

SEQ ID NO: 16652 - DNA, 271 bp, Gossypium hirsutum
  Clone ID: LIB3145-040-Q1-K1-D12
ccacgcgttcggcaagacttgttagcactatgtatctttacatgggagggaaagtgactggggctgtagaaatttgctcggtgaaaatggatcaactgctgagttatttgggtgatcacagcttccaaaaacattcgtgttcttggatgtcaggattgaatgtaattgatctcgtcaggtggagagacctacacatctctgaaacttactggaagttggtgaaagaggccatctttaaagagggatcactttcgcttgctactttgctttc

SEQ ID NO: 16653 - DNA, 393 bp, Gossypium hirsutum
  Clone ID: LIB3145-040-Q1-K1-D3
cccacgcgtccgcccacgcgtccgcacttttttccttctggatcggttgcgctgtggatcctcccttcctttaccaggtatgccccttccctcctctttagtgcttctttcgctaaattaagggcttcaacattctccgctctgtgaataaactggaaactcacctctggaaggctggttcttttgctctgaatatctcgaataattgctccaagaactgatttgtctatttcttgcgattgacatttcttaataactgttttcgagtctcattgtattactactgaggataaacccattgatattactaatttgatagcctctaaccctgcatgagcttctgctacgaacaaagaagagatgttttcatggagagtcgacttttcagctgct

SEQ ID NO: 16654 - DNA, 400 bp, Gossypium hirsutum
  Clone ID: LIB3145-040-Q1-K1-D4
ctccctcccaaaaccaaatcgctgtcttatttcacgatccaaagtttccaaattcctctttgggttttgctcttcaccacttaagtctcaaatggttcgtaggccaaacgacccggaacactcccgtttcgcctctctcgtcctcctcttggtgtctctgttctcctgtcttctggtctatgcggttgtttccacactattgaaccccaccgtaaatcctcaggattccagctttgagtctttggaatcggtggcgggtattgattttggggaaaagaagggcgagtgttgcagaggaattgagaatttggagctgtggggtgcagctgtgaagtgggggtctgacttcaagtttaattcctctgtggaatgttgccaggcttgtaaggctatgtgtagt

SEQ ID NO: 16655 - DNA, 370 bp, Gossypium hirsutum
  Clone ID: LIB3145-040-Q1-K1-D5
agtcaatacacctacactaattgccggtagtccgtagcttggagcttgtcctgactgcttgctccactaattgccggaagaagccggctgtaaaagaaagatcttttacttcaacctggcttcgggtgaccctttttcggtggtagtaagagcagaatcttgggttggtgcttggaagtaagggtcatcaaaaaaacggatcggtttctttttaatttaaccggggattcttttggcaatggaaaccttagatgacaagaaacgcgaggaagaggaggtgattgataaagaaaataaagagggaagtgaaaagttgaatcgttcaagtttcgtatctgcaaatacaccctccaaaatttgtcatactttt

SEQ ID NO: 16656 - DNA, 409 bp, Gossypium hirsutum
  Clone ID: LIB3145-040-Q1-K1-D6
cgggattctcttaatcaagcttcatgtgtttgtttgttggttttcgcccctctcactacattttcaaagtgatgttttaatttctcaagcaatctctttggccaatccgttgtctttggaaacgttaaattctataaatctttcttgttttctggaatcaaaattattctgatagttacaatcgttttgtttttatatatgtcaggataatttatatgtattaagcagttagggtatcgttaaaccagtgggggtttaggtcagggttagtgtttaaaagtcgtttgagagttttgcatactgacataaatggagtgcagcttttttagttcaaagtatatgccaatgtctgagattgcacatcttggaaggacaaattcaagccagttttcgagtttcaggccattgg

SEQ ID NO: 16657 - DNA, 386 bp, Gossypium hirsutum
  Clone ID: LIB3145-040-Q1-K1-D7
gcaaaaacagttgaacgagtcgttttgtcatcatctgccggcgctgtgtctagcagcacactggatgggacagatctcgtcatgacagataaagactggaccgatgtccagttcttatcatcagcaaagccaccaacttggggggaccctgcatccaagacgttggctggagcggcagcttggaaatgtgctgaagacaacaacattgatctcactacaggtatacattctatcatgactggtgcttccgttaccccaaatggccgcagcaccatatgccgtgctacatgtatgatttcaggcactgaatacctcataaatgctacgaaaggaatgcagatgctgtcatgttcgatctttatcacacatgtggaagacgaatgccg

SEQ ID NO: 16658 - DNA, 202 bp, Gossypium hirsutum
  Clone ID: LIB3145-040-Q1-K1-D8
gtcaaaacaaattaattaactattttttgtttagcagacccacctaatgttgggggcgtaccttataatgctaaagacaccacttcaaagaacaacagaacggatgtacatttacatgcatatcgataccaacagtctagtacagaccatggatgcaagatactcacaggatgggctgcttgtaaatatatacaataaaaca

SEQ ID NO: 16659 - DNA, 354 bp, Gossypium hirsutum
  Clone ID: LIB3145-040-Q1-K1-D9
gaaaaacgcaatggctcaaaagatttttatgatggcggttcttgtgatattgggggcgactatggcgaccgttacggttgcaaatccgacttgtttgcagagcttgatgtcttgtgctccttacttcaacaacactgatgtccaactgccagacgattgctgtaaacctcttcaacaagccgtcgctactgaacttatttgcctttgcagcctcttcaacctgccttctttgcttagttcttttgacatcccctacgttggagctcttaggatcgccaatcagtgcggtgtcgttgatataattagctacttcttcaactcttgttctttcccattaactacttctttcacatc

SEQ ID NO: 16660 - DNA, 392 bp, Gossypium hirsutum
  Clone ID: LIB3145-040-Q1-K1-E1
acccacccgtccgcccacgcgtccgggcttgcttttcattttattatgcatcaactccatatttcctgccttattttggatgcccattaatccttagaactcgaaacttgccacctgcaaagaaaaggcaggctttcttatgtagaatagcggtggtattgtcaattggagatttccaattaactgcagaaacatttgatccgttttgcttcgacacactgattttgtgggtgctctgtttgcagtatatggcctgtcaagtgggaagaatcaatttgcaagcaggtttatcaatatcggagaatgatgtctttgcaagttcatgtctgacgcttgcaacttgtgcaatccagaggtggagcaatgagtatagtttaagtggacaatcctcg

SEQ ID NO: 16661 - DNA, 309 bp, Gossypium hirsutum
  Clone ID: LIB3145-040-Q1-K1-E10
cccacgcgtccgctttttacgttttttctctacttcgcaggccttctttctacaggggggagcctcttatgttactagaaacaaagggcgtcgagccagcatccttgttggtgcagtcagcttcttcctaggaggagctatcaatacaggtatccaacatttattgatgcacttagagatttggatgaccctcttacaatggtgcacctgtttgcaatgttaactttgaatctttgaatatttggatttaggatttgtttgaattattcttctaatcagttttcttttcttaatgtgtaaaatatttta

SEQ ID NO: 16662 - DNA, 396 bp, Gossypium hirsutum
  Clone ID: LIB3145-040-Q1-K1-E12
gaaaaacacctgccctgcttgttttattagcgtctctcttttttttaatcagctttgcaaggcagtagtagtttacaacatttcatctttcccatctcaaatgctaacgtattggggtttccgggaggccttaacccagtagagtttcgaaggatctcagaactagtgtctcaatctttatatatgtatatatatacaagagggtttccgagttctaaacgtattggatctcataacactagtgtttcgactgatataaaataacaatctgagctgccaacataaaaccaaattctgtttacctagaacatggattcagattgggcagggttattcagggacctggttgatttgatattagcacgactggttttcgtgtctgattatttgcgattt

SEQ ID NO: 16663 - DNA, 397 bp, Gossypium hirsutum
  Clone ID: LIB3145-040-Q1-K1-E2
ctgagctctcttcttccaaacaataatgattctaatagcttcgcacacctcctttctttttctctgattaacccttttctctttaaccttcaaaaccaaacaaaagctttgaaaaattctccccatatccatgcttttctctttttacacacacagacatatatattgaaaattttttcatgcttctttaactttccctgcatatgtaaaagtaaaaattaaaaccctgcaacatatagcagcagtaaagagggtggtgcagaaagtcttgtgactcagatcccaatacactgtccaatctatattacaccattaacgagaaaaaaatttatttcactctcaagcacaaagagttctttctttctttccttctttctttcccttggggtcgtttata

SEQ ID NO: 16664 - DNA, 331 bp, Gossypium hirsutum
  unsure (1)..(331): unsure at all n locations; Clone ID: LIB3145-040-Q1-K1-E3
gcttctcacacttcaccttgaaaaagttaaatttcccagaaaataaaaaactttccagcaaaatgtcaggaagaggaaaaggaggtaaaggtctcggaaaaggaggagccaagaggcatcgtaaggtcctaagggataacatccaaggtatcactaagccggccatccgtcgtttggctcgtcgtggaggagttaagagaatcagtggcttgatctatgaagaaaccagaggagtgttgaagattttcttggagaacgtcattcgcgatgcagtgacttacactgagcacgctagaaggaagaccgtgacngccatggatgttgtttatgc

SEQ ID NO: 16665 - DNA, 411 bp, Gossypium hirsutum
  Clone ID: LIB3145-040-Q1-K1-E4
gatcagaagaaagaccttttaacaaataagatgaagagctacaaatagaaggcacaatttcgaattacataggaaatacaatgatatgccagtttcagcatgcagcctaaaagtaaaaccaaatactcacacaaaacttgaccttatgccattaaaacaattagaaacagaacaacaaatagaacataattaccttccaccatatagtaaaaacccaagggctgcaaacaatgatacacctgctcatacacgtgtcacgttaaataatttcattcattactgaaaatttttaactaccatgagattaatgtctacaaatcatctaaaattactaaggttccatttgctaaatgcttctctttttttctttttctttttcttctttttttttttcaaaaagtaaatgaatag

SEQ ID NO: 16666 - DNA, 412 bp, Gossypium hirsutum
  Clone ID: LIB3145-040-Q1-K1-E5
tattccccacctcctccggttcactcttcaccaccaccttcacctccaccatgtatagaacgtcctccaccgccaccaccaccatgcgtagagtactcgccaccaccaccatccccatcgccgcctcccccaattcattacaagccacccccatcaccttcaccaccgccacccgttgtaacatattcctcacctccaccaccacctccagttatttaccattcacctccaccaccatcactgtcaccccctccagctcctgtgtatgagggaccattgccaccagtaattggagtgtcatacgcttcacctcctccgccacctttctattgattcttttgagaaatttcctcctctcataaccttcttctcaaaccacaaaaggcaaaaaaaaaaaattgttcgcagaatt

SEQ ID NO: 16667 - DNA, 361 bp, Gossypium hirsutum
  Clone ID: LIB3145-040-Q1-K1-E6
cccacgcgtccgctttttttaccctgttttttctgctttgtatgtcataaataagcgctcgaagaaccgatttatccatttccatcctttggcatttttgaatgactgttttcaaatccccttctatcgttgcttttgttaaccccatttctattactaacttcatggcgtctaatcctgcgagggcttttgctacgaacggggtgggaatatcctcatgtataactgtctttgaggcttttaaatctcccatctggtctcaaacgactatacctgatgcagatctagcattcttctatcaaaggctgcgtcaaactgagctatgatgcccttcgacgccccggtataactgattcccctt

SEQ ID NO: 16668 - DNA, 376 bp, Gossypium hirsutum
  Clone ID: LIB3145-040-Q1-K1-E7
cgtctctctcttcatctctctgaacctaaaagtctttagcttttcgcttcgagagagaccatgttggtttaccaggatctcatctccggtgacgagcttctttctgactcattcccctacaaggaaatcgagaatgggatgctgtgggaagttgagggaaagtgggttgtgcaaggagctattgatgttgacattggtgccaatccttcagccgaagatgctgatgaggatgaaggtgttgatgaccaatctgtgaaggttgttgacattgttgacactttcaggcttcaggagcaaccccctttcgacaagaagcagtttgtcgtgttcatgaagaagttcatcaagaacttgacaccgaaactggatgcggaaa

SEQ ID NO: 16669 - DNA, 357 bp, Gossypium hirsutum
  Clone ID: LIB3145-040-Q1-K1-E8
cccacgcgtccgcggacgcgtgggcttatccctattgttgttgctctggtcccaaatcttccctttgttatccatatttctgtgcttataaatccttaatctacgccaccccttcattccttgtttttatctttcccttctttaaacctctatagatggaagtgctgatgggacctaccttcgccatcgacgttgccgcatcggcagcggcctacactagagaccgttctaaggatacgatttcgtctccttgcttgtttatcaaggacgatgaagcttgtcccggctcggatcccaggtctccggatctatcctccgatagttccttctcgatcggctcccccggagacagcgacg

SEQ ID NO: 16670 - DNA, 392 bp, Gossypium hirsutum
  Clone ID: LIB3145-040-Q1-K1-E9
ggaaaggagcccaacaagggtgtttacttggatgaagcagttgcttatggtgcgtgggtacaaggaggcatcttgagtggagagggtggtgatgaaaccaaagatattcttcttcttgatgtggctcctcttaccctcggtatcgagactgttggtggggtaatgaccaagttgattcctagaaacaccgttatcccaaccaagaagtcgcaagttttcaccacttatcaggatcagcaaaccactgtctccattcaggtctttgaaggtgaaaggagtatgacaaaggattgtaggttgcttgggaagtttgatcttactggaattcctccagctccaaggggaacacctcaaatcgaagttacatttgaggttgatgcaaacggtatctt

SEQ ID NO: 16671 - DNA, 342 bp, Gossypium hirsutum
  Clone ID: LIB3145-040-Q1-K1-F10
gccacgcgtcgcttacctggagatggaatctactggcataggatccggtttggcacaattggacttaggcccgaggtgttaggagtttttttggctggtatgtaggaaaaactctaactaacgtgagaggaaacggagactttgacaaagataattggccaattgtatgcgcctagagagttctccacaccctcgtgattgtaaggcgatatttggtgtggaaacgttaaccgcggataatcaggagtctttttgtatgacttgtaattggtcttactatattaataaaatgcaattaacatgaactttaatggacacattttagatatatgtggtttgttg

SEQ ID NO: 16672 - DNA, 404 bp, Gossypium hirsutum
  Clone ID: LIB3145-040-Q1-K1-F11
gcagcaggttggtgaaatgtttttaatttcacatagatttgacttctttatacgtgttcttgatcttttgcagtaaatttggtgggacacagcactatgcaatgttcaactttgatgagactaatgttagatgagccatcaattttgttttatctttccgtagtgaaattatgttcctagccttcttttatttttgagtggctgtattttttatgcttcacttgtgcatctattggtgtgtgtgtctgtgttatagttgaaccataaaaaagttgttcctttaattttcttaatagtttatataatttgaactctattcatattatgggttttctgacaaaaatgctttcaattatgcatctttttggttgacaaaaatgtgtttgggttgcattctgtaatct

SEQ ID NO: 16673 - DNA, 399 bp, Gossypium hirsutum
  Clone ID: LIB3145-040-Q1-K1-F2
atctatacaaaaacttctccaacgtgttgatggagcgttcgcctgatgcatctagagatggaacattgcaatcattaaaatctgtcaatggagattcaatggctgatgacatcgaagaaccatcaaccatggaggtggatgatgagaatgaaagaccaaagaaaagtcaatcaaatgggggtaaaacgacaaatggttacaatgtaagggaaaaagaacagtggtgtttatcaactctcggctatgtcaaggctttctcacggcaatatgcatctgagatatggcctcacatcgagaagctggatgcagaggtattcactgaagatgcccatcctattttacggaaagctgtatattctggccttcgccggctaagcaatgaactgtaactgcatgact

SEQ ID NO: 16674 - DNA, 382 bp, Gossypium hirsutum
  unsure (1)..(382): unsure at all n locations; Clone ID: LIB3145-040-Q1-K1-F3
ttttgattgaggctgctaatatcaagatggtttatgaaataactgaccaacaaaaggttggcttgggtcttattggcttcggtatctccttcacatttctaggtgtatctctcttctttgacaggggtctgcttgctttaggaaatattttgtggttagcaggggtcgtaacattgatcggttggtattctactttgcagcttttcagaaaaaactacaagggtactgcttgttttattctggggctctttttcttgttcgtgcgttggccaatagttggtataatcttggaaatatatggttgctttgtggttntcagtggcttttggccttcggtcagtgggttcctctgtcacattccgttgttggatggttatacagt

SEQ ID NO: 16675 - DNA, 341 bp, Gossypium hirsutum
  Clone ID: LIB3145-040-Q1-K1-F4
cgacaaataagatgtagcaagctgttgttgccttgttgtatcacattgaaaatggttttagcatagttgcttagctctgttgctagtctgcttgtagcggcctgttgctgcccttcctgtgggggatgtgccggttatggcactagcagcatgtgatatcccacatacggtcacatggcagggtttagccttcaatgtcgctcctttaattgatatgttctacgatattgcgtgactatatgatctaatagtatattacaatccggagacccctattctatattgctttagagatggtaattaaggaatgcagtgagtggtcttctgtgctgaatcctcaa

SEQ ID NO: 16676 - DNA, 414 bp, Gossypium hirsutum
  Clone ID: LIB3145-040-Q1-K1-F5
cttccttttgcacccgctctgtttctatctcggctctgacgagaagccggcgccgacatggttcacgtcagcttctaccgcaattatgggaagacctttaagaagcctaggcgtccatatgaaaaggaacgattggatgcagagttgagacttgtaggagagtatggactccgatgtaagagggagttgtggagagttcagtatgctttgagccgtatccgtaatgctgctagggatcttctcactcttgatgagaagaaccctcggcgtatttttgaaggtgaagcacttcttcgtaggatgaataggtatggacttttggatgagagccaaaacaagcttgattacgtcttggctttgactgtcgagaactttcttgagcgtcgtttgcaaacactagtattcaagactggg

SEQ ID NO: 16677 - DNA, 414 bp, Gossypium hirsutum
  Clone ID: LIB3145-040-Q1-K1-F6
cccacgcgtccgcccacgcgtccggtgtaaataaaaatcagaaacattttctggtaagtgaaggaaaagcagagtgagtgaagaagatggagaccaaacccacagagattgggagttcaaagatgtttggagggtacaacaaaagatacaagcatttcagtcccaccctcggctgttccatgactttccatatctacttccctccttcttcttctccttcccacaagttccctatactttactggctctctgggcttacttgcactgatgagaatttcataatcaagtcaggagcacaacgtgctgcttctgctgagggtgttgctctaattgctcctgatacatctccaagaggcctgaatgtggaaggagaggctgacagctgggattttggtgtaggtgctggattttatc

SEQ ID NO: 16678 - DNA, 395 bp, Gossypium hirsutum
  Clone ID: LIB3145-040-Q1-K1-F7
gaagaacatcgatagatagaagaaggatatggcggtgagaggtagagcagtagaaacgctgccaaagctgatgaggagcctgaggaaggactcggcttcttcaacagtgactcgaactccagccttgccctcccttagacgcgctttctctctctacgatcagatcaatctcatcgacaatgttcccgatgaccagcttcgtttccaacgatatacggaaacaggattcactgtgaacggtatcaactatgaaggcagcttgctttgtgtgggaaatttggtcacttcttggggcccccgtaaattttctgaaattactccccaaagcttatccatctttcaaattatacgacctattccagaaattttgattcttggctgtggaaagtacattg

SEQ ID NO: 16679 - DNA, 315 bp, Gossypium hirsutum
  Clone ID: LIB3145-040-Q1-K1-F8
cccacgcgtccgcgtcgccttctttaagcgaagatactgccaaggctgttcttcgccaggtagagttttacttcagtgatagcaatattccgagagataactttctcaagaaaaaaattaacgaagacgatgatggcagtatcctttgtcttttttaaaactatttcccgctgtttgtgtaatattttatttacttattttatgctgctgcttcttgttgtttgctcttgaccgtgaattaccaaaaaagtggtcagtttggcattgatttgttcgttttcaaagatgagaagccatttgaatttaagggatgtg

SEQ ID NO: 16680 - DNA, 392 bp, Gossypium hirsutum
  Clone ID: LIB3145-040-Q1-K1-F9
cctaggaggaaaaacaggagtcgtttttggaattggaggaataaacaacatgaggatgctcctcccctttatggtgagttattcccatcaggccttgggaatgcactgttgcaagcgagtgagaacataaacaggctattcgacagcctcaatatgacaccatcccagttgattgggcgcgtaaaagagcaagatgactgctacaaactgcattacgacatgccggggttaaccaaagaggatgtaaagatcacaattgatgatggggttctaaacataaaagggcagcataaggaagaagaagaagaaggttccggcgatgagcattggtctgccaggagctatggctactataatacaagccttgtgttgcctgatgatgccaaagtcga

SEQ ID NO: 16681 - DNA, 338 bp, Gossypium hirsutum
  Clone ID: LIB3145-040-Q1-K1-G1
cctactcacactttgctttataaaagtttatttgaccagaatggaaaaaactttccggcggaccgtggggaacaggaaagggaggtgaatgtctatcataaggtcgtgcctgaaggcatcgtacggtcctaacggttctcttccaaggtatcactaagccggccatccgtcgtttggctcgtcgtggaggagttaagagaatcagtggcttgatctatgaagaaaccagaggagtgttgaagattgtcttggagaacgtaattcgcgatgcagtgacttacactgagcacgctaaaatgaagaccgtgacggccatggatgttgtttatgctttgaaa

SEQ ID NO: 16682 - DNA, 368 bp, Gossypium hirsutum
  Clone ID: LIB3145-040-Q1-K1-G10
cccacgcgtccggcatattttttaacttagagcggaggcagcagcgagggaggcggggcagaacaggaaatacaatgaactccatcagcagcttcagtctatgatgactatgttccaccaatttcaaaatccgccatcatagacatgttttcttgtaacttttaacattattttaagaatattttgaatattcatttccaatttatataatatatttttcgtataattttgttttaaaaaaaaaaaaaaaaaaaaaataattatataacattctatataaattatttatatattatataatctatcttataaacaaaaatatttttattaaaatattattttgcttttatttattggtttctattttt

SEQ ID NO: 16683 - DNA, 198 bp, Gossypium hirsutum
  Clone ID: LIB3145-040-Q1-K1-G2
cccacgcgtccggtaatagtgggcctgttggttattgtaactgggtaaggtctcttgtatttgggcctgccgtttaggcttttgtatttgggtaaaggactgttaagagactttatattttgaaattttggattatgccttggctttcaatgggccgggcaaaattgaggtattacaattttcatttgtttaatcaat

SEQ ID NO: 16684 - DNA, 398 bp, Gossypium hirsutum
  Clone ID: LIB3145-040-Q1-K1-G3
agaaaatggaggacggtgaatgcattgtaacagaagcacccaaggcaccggtgactaaggaaagaaagatcggaacggacttggaaaaatatatagcaaagccatatgtggcaagagcactgcaagctgcagatgtgggaaatccagatgggacaaaaggatatccggacaatggaatgactgttcttcaacaacatgttgcctttttcgatcaaaacaacgatggagttgtttatccttgggagactttcaaaggtattcgagatcttgggttcgatccattttcctcttttgtcataacttttgtaattaatgcagcatttagttatcgcactctcccggggtgggtgccaaatccgttacttccgatatacatagagagaatacacagagataag

SEQ ID NO: 16685 - DNA, 414 bp, Gossypium hirsutum
  Clone ID: LIB3145-040-Q1-K1-G4
gagaaatacccaaagggccaatcgaatgtgatatggaaacagctcaagcaaatccttcaagctgaaaattgccagaattactctcctgatgaacccaattatgttaatatcgaatcaccgccttcgatgcaaccgtgcaaaagaatttgtgatataacgggatttgaggcaccgtaccacgatccgaggacgaatctccgctatgcaaatgccgatgttttcaagcttgtgagatctcttcccaatgagtatgtgcaaaggtatctagctctaaggaaagcggcagtggttttgaggtgaagtttgcaaacctggggacagactctggtcttggatcgaacatttagtttacaattagatcagtctttacttatatgaatcatcatagagattctcatgatgtttaatctacaa

SEQ ID NO: 16686 - DNA, 409 bp, Gossypium hirsutum
  Clone ID: LIB3145-040-Q1-K1-G5
gaaaagcaaaataaaaacacaataaattttgtttttttcatcacattaggtctcttgactggcactaacctttattcttcaataccatggacatgaagaagatctcatgcgccgtcattgtcgccgccgcctctatgagcgcggtcctggctgctggcgcttctccagctccatctccagcttcagctccagctgcagctgcagcttcagcttcagcatctggcccaggcccagattccagcatcgcaatctcaacaatgcctgttattgagtccttggttggagccacacttgtttctttctttgcctactttttacagtaagccacagcaaaaaatggatgaaaccatgaagtattgaagaatcaaaaaaagaaatggtggattaataaatgtaaaaatactacttg

SEQ ID NO: 16687 - DNA, 416 bp, Gossypium hirsutum
  Clone ID: LIB3145-040-Q1-K1-G6
gagatagggaacaaagggttaacctttggtttgatccttctgcagatttccatacttacagtattatgtggaatcatcatcatattgtcttctatgttgatgatgtgccaatccgagtttacaagaacaatgaagctagaaatataccattccctaagtttcagccaatgggagtctattcaacactgtgggaagctgatgattgggcgacaaggggaggcctggagaaaattgattggagcaaagctcctttcttagcttcctacaaggacttcgacatcgaaggatgcccagtgccaggcccagcaagctgtgcctcaaacacagggaactggtgggagggaactacttatcaagcccttaatgtcatggaagctagaaggtataggtgggttcgtataaaccacatcatctac

SEQ ID NO: 16688 - DNA, 336 bp, Gossypium hirsutum
  Clone ID: LIB3145-040-Q1-K1-G7
ggaaaatgcaatatcaaattaccttagtttttcattgctttttcctctcttgggggggattttgtaatcccgatttcagtgtttacaacggctttttatagccaaaatacatcaagaatattctggaaaaaataaataaaataaaaaatctttatttttttgttgtattgttgttatctactggttgctgctgtggttgttagttcgttgcaggtacaactgtgcatggagaaactgctcgtgggcgataatgcgaagacttccagaagcttcaccatttgggccctatgagcctgctttgaaatcggctggctggaggctgttgcgaaggccact

SEQ ID NO: 16689 - DNA, 335 bp, Gossypium hirsutum
  Clone ID: LIB3145-040-Q1-K1-G8
tttttttttggtggtttttttttaaattttttttttttataaatttaatttttttataataatttttttaaattattaaaaaatttttaaataattaattataaatattttataataatataaaaataaaaaaaaaaaaatataatttataataaaaatataatattaaaataaaattataaaaaaataaaaatttaaaattttaaaaaaaaaaaaaaaaattaaaaaaatatataaatttttttaaaaaaatattataaaaattgaattgtatattttatttttttttattttaaaaataaaaaaaataattatttaaaaaaaaatattgtatt

SEQ ID NO: 16690 - DNA, 400 bp, Gossypium hirsutum
  Clone ID: LIB3145-040-Q1-K1-H1
atcactgtcacctcagctgatccttgttcttgacctgccattactcaaagatttcttagtgattcaatccgtcgatcaaattagggggaaaaatgggagggggagagcatgggcatggagttcaggatttcagggcgaaggtgtggagcatgtcggggggtccgtactgccggcccaagcactggcgtcgcaacactgccattgccatgttcggcgttttcctcatttgcatccccattgccatgaaatcagccgagctcgagcaacgacctcatcagcctgtccgtccgattccttcacagctttggtgcaagaacttcggaaacaaagattattgaagtctgcctggggctgttgatggagtaccgatggcatatcaaagcagcctatgatctgtatt

SEQ ID NO: 16691 - DNA, 369 bp, Gossypium hirsutum
  unsure (1)..(369): unsure at all n locations; Clone ID: LIB3145-040-Q1-K1-H10
cgcgtncgcttaggttatttgtttggtatcggataagctcctaaaccagggacaaacaactcccaagctgctccagctgaagcaccagctgtctccaaacctggccctgctcctgaaccagtagatatttccaagcaaattcctgctggtattaacagtatttccgcaaacaattacatgcgtgccgatggtcagaatactggcaatttccttacggatcgaccttccaccaaggttcattctgcccctggaggcggatcttctctggactacctatttggtggacctggaggtagtaaatgagattgtgccttaataacatctaataacatctttgataagggagagtattgtttgttgatttggggg

SEQ ID NO: 16692 - DNA, 359 bp, Gossypium hirsutum
  Clone ID: LIB3145-040-Q1-K1-H12
acgccagaatcctgaaaagcaagtggtcgctttcctttaaaaaaacatgtttggcagcaatcccgatcttccgtacccctttcctaggggtgtctctcgttttcatgcttctttatgtctggagtagagagtttccaaatgctcaaatcaacatatacggccttgtaactcttaagtcattctatctaccttgggcaatgcttgctttggatgttatttttggctcaaaactcatcccggatctgctcgggatcattgccggacatctatattacttcctgactgtgttgcatcctcttgcaaccggaaaggtctttcttaaagacgcctatgtgggttaacaaaactgttgcaagata

SEQ ID NO: 16693 - DNA, 400 bp, Gossypium hirsutum
  Clone ID: LIB3145-040-Q1-K1-H3
tttgaatcgtttgtgggagtctaattttactcctcagaagattaggtttaggtccctggggtccaaagattgtacacaagtatacggctactaggtttaattctaaagattcagctgattttgtactggcagaggagcagaataaacttctgacagattatgcataccatatttccgctgccaaagcaagtggagagctgtgcttaaaacatatattctcttttggagcattacctcgggtgcctcttctaaaaaggcttggttacactgcttgatatttattgggtccattgcattggctaatacatgcgtatttatattgatttctgtatagacctttgaaaatactatttctgcaatatcctcacattgacttaaaaacatactctagaatgcaaaa

SEQ ID NO: 16694 - DNA, 262 bp, Gossypium hirsutum
  Clone ID: LIB3145-040-Q1-K1-H4
gaagtcctccctcgacctacgcgtacagggcagcttaacattcggggtgttaaataaacaaaggaagccgcgcactgtgggaggactcactaccaagctagggacagaaggcaaacatgctatccgatactaagcaccaatgaaggctcgcaagagcatggtcattgctagaactctgtacgaggccataaattgaacacgcgttctagatgacacaagaatgccactaatgatccgccacaaggtgtatacacatgctaat

SEQ ID NO: 16695 - DNA, 404 bp, Gossypium hirsutum
  Clone ID: LIB3145-040-Q1-K1-H5
cggacgcgtgggtgaattttgtttgttgatgattatggaagggatagcaagcagatcagagttgcgcaaagagctagagagagaacgccgtcgtgtaagggaccggcaaagaaggcagtctatgagccatgaggagagagagaagcatctcgctagacgccgaagaaactatcaattgcggagacagagagctgaaactgctcggttataccctgctccacctcccgttcaatttgaagatacaagcatttcaacaattcaatcgcccttgagcaattccatttcaaatataagtcctcagttttatgctgccgctcttgtggatcccaatcatggaccaaaaagactaatgccggatacgagaagtgcccagagtttaaaaattccagcttataagttagcga

SEQ ID NO: 16696 - DNA, 337 bp, Gossypium hirsutum
  Clone ID: LIB3145-040-Q1-K1-H6
acgacagaatcctgaaaagcaagtggtcctttcctttaaaaaaacatgttttgttattttaccagcctatctatctttttgtactgaatgtaaagctatttttatcataaaatacttttcaaataatatcttaaaaaaaaaaagaaccttaaatgtcatggcaggctggttttcttttctttgttaccactattaccaaatgtggtatttttattagaccctttcgtatagaattcgtatgtgtatcaactgtaaaccaaagcaaagttgtcatgttgtgcgtgtattaggaaaaggtatgttgaaattgtgaactacattgctttttgcctgtttt

SEQ ID NO: 16697 - DNA, 392 bp, Gossypium hirsutum
  Clone ID: LIB3145-040-Q1-K1-H7
gagcaagcccagagatgataaaatggttgacaaaagcacaaattcttttatatgattggcttgcatgcccctccctaatttagcttgacaatgaaagatgatgccaagatgtagatttttaacatattttgtgagatacattgtctttaaggtaaatggcatagtagtgttttcttatgccctttttttgaagggaaaaattatgtttaaaaggaggaatgattttctgttctattgtagttgtttatcttcatatattacccccttttttcttttttctttttttctcataaattaagaatgttctttttatgtatcagatttacattttcttctttcagaaaccttttcttcttctctgtcatcaactttaactgatggacatatatact

SEQ ID NO: 16698 - DNA, 351 bp, Gossypium hirsutum
  Clone ID: LIB3145-040-Q1-K1-H8
gccacacagacggacactgtcattgtttctggctcgcgagcgctcctgcggcgctttcaaaccctcacatatgtatttatgatctgctctgatctgacaaaaaaatgttcgggagagcaccaaacaaaagcgataatactaaatactatgagatattgggagtgcccaaaaccgattaccaagatgatttgaagaaggcttacagaaaagctgcgattaagaatcatccatatataaggcggagatcctgaaaagtgtaaagagtaggctctaagcttatgaggtgctgacagacccacagaagcgtgagatatatgagcagtatagtgaggacgcccttgacacatgaat

SEQ ID NO: 16699 - DNA, 294 bp, Gossypium hirsutum
  Clone ID: LIB3145-041-Q1-K1-A1
gcgatccccgagattctgatgatgcaaggtatagcttggatggtcgggactttgatggaagccgcattgttgttgagtttgcaaggggggtgccacgaggttctcaggaatatctaggaagaggcccccctcctggatctggtcgctgctttaattgtggtgttgatggccattgggccagagattgtacagctgaggactggaagaacaaatgttatcgttgtggagaaagaggtcacatagaacgaaactgcaggaacagtccccgaaaactgagttctcgttcacctatta

SEQ ID NO: 16700 - DNA, 289 bp, Gossypium hirsutum
  Clone ID: LIB3145-041-Q1-K1-A10
cccacgcgtcctattttattttatattaagaatgctgagtttgcttgctaatggaaaagctacatatgctaataaatattagaactagactttgtcatgcttctctgttgtatttcagcttgatataaaacattttgtggcgattgaataaaatgatctagtcttcttttatttgttaaaaaaaaaaataaaaaaaaactaaaaagaaggaaacataaaaaaatttaaatatctttgtagaggatccttgcccaaaaacgactgcttgctacttagtttgcattttttt

SEQ ID NO: 16701 - DNA, 291 bp, Gossypium hirsutum
  Clone ID: LIB3145-041-Q1-K1-A12
ggactgtattttacatgtgattgaaacaacttaattgataaagaaatggtagccaagtgcggaacgctcttgcattacagcacatctcaagtaaatacaacttgtaatatttaactttcatttctttttgtaattgttatcttgattttgttccacagacaaataaagatagacctctgaattttgttttgattgatggtacatggagcaattctgcagcaatgttcaagcgtgtaaaggagcaagcaaagttggcctggggagaggaagacatcccttgcatatctcttg

SEQ ID NO: 16702 - DNA, 291 bp, Gossypium hirsutum
  Clone ID: LIB3145-041-Q1-K1-A3
gtagatttgcaaggcgatttttaagaaaagattgagccaaaggttgttcgttctgcttctcctgcattgttcagtataggttctgaaaatatggaagactttgtaagctggttaaaaatgcctttcttaagtttctaccgttcatacaacaaagactttctaggaagtgcttcaaagcttgatacattcagtgcatatgatcggttcaatgtttcatcgtttagagagttggaactgcaagatggggctaggctgcttctgccggtgggtattaatgacactgttattcca

SEQ ID NO: 16703 - DNA, 286 bp, Gossypium hirsutum
  Clone ID: LIB3145-041-Q1-K1-A4
cgagatagtgaggttttgttcttacaatttggcatcaagttaaacaatgtcatggacacacagattgcttattctcttttagaggaacatgaaggacagacgtgattgcctgttgacaacatatcatttgtcggactccttgctgatccacgctattgcggaatatcttaccaggagaaggaagaagttcgtctcctccttaggcaggatccctagttttggaaatacagaccattatctgagctcatggtccgtgcagctgcagatgatgtacgctttcttctat

SEQ ID NO: 16704 - DNA, 200 bp, Gossypium hirsutum
  unsure (1)..(200): unsure at all n locations; Clone ID: LIB3145-041-Q1-K1-A5
gcttatggaggtttgaatgaanttgatggacatagatgaaattcgagaggagtctggttgccctttttgttaatagtatttctacatcgttaacttgtgttgccacattgctgatgagcatccagcggaggctaaaaatgaagatcgcacactctatgcaatgaggatgggcgttgatatggttgtgcatataaccctac

SEQ ID NO: 16705 - DNA, 257 bp, Gossypium hirsutum
  Clone ID: LIB3145-041-Q1-K1-A6
gaaaaacgttaatgtttccttccatgccgccttggggtaggcctccaatgggcgactgtaaccccttatgagcttggattgttctttactgaaggtgtttcttaggagaaaaaaccatccatattatcaattcgatataatagtgctattctagtgtttactactaacaggaagtgaaaatgaatttcatcctagccctcattatgatttttcttatttgtggtaacgaacagatgattttattggctgatgatata

SEQ ID NO: 16706 - DNA, 279 bp, Gossypium hirsutum
  Clone ID: LIB3145-041-Q1-K1-A7
cccacactttcgtttttacaaaaaatttgcatgatgactggccacttcccaagataaaagacactataagattcaagaaaacaaatcaaagagaagctgttcaaagccagaatggggagttcattgctaggatttgtaggcaaagtgttagaaagatgaataaaagctgttgtgaatatgatcactttatatctggacgactagcatcctgatcgaccttacattttcatcaaccatcaaaaaacaggtgatttcacaagtaaagtcgctggattagga

SEQ ID NO: 16707 - DNA, 71 bp, Gossypium hirsutum
  unsure (1)..(71): unsure at all n locations; Clone ID: LIB3145-041-Q1-K1-A8
gagagganccaagcnnacgnacgcgagcaagcgacgncanagcncnncnacaggggcaccnaaanncaanc

SEQ ID NO: 16708 - DNA, 281 bp, Gossypium hirsutum
  Clone ID: LIB3145-041-Q1-K1-B1
attttaactttcaaatgcattttttcgcatgctctgcggggaccggtggatgaaacgcggccgtcaagggtttaaacagcccttcatcatatgagctaagctcatatcgaatatgctgcaccggttcctatgaagtcttcaactctttgcatgtttttaaagaaaaccgagttcgaccacaaggctgttgatataacactaccttgcaaggtatcatcataccttggattatatactatatactgcactatacgtaacatagctgccatttggcatgtagg

SEQ ID NO: 16709 - DNA, 293 bp, Gossypium hirsutum
  Clone ID: LIB3145-041-Q1-K1-B10
aggaaaaatcgtatcttcagcaatgggaaatccgaaggggtgcttcgacatgacgattggcggccaaccggctggccggatcgtaatggagctcttcgccgattgcactccacgcacggcggagaacttccgtgccctttgcaccggggagaaaggtgtcggacgcagcgggaaaccactccactacaaatgctcaaccttccaccgcgtgatccctaacttcatgtgccagggaggcgatttcaccgccggatatggcaccggaggtgaatcgatatactgagccaagttcg

SEQ ID NO: 16710 - DNA, 258 bp, Gossypium hirsutum
  Clone ID: LIB3145-041-Q1-K1-B11
caaacccgaagggttcctttcgaagggatcacggctcaagacgtcttagaagggggcagcccccagacccagatcgccgacgcaggaaaggcatattacaagacgatgggccttacccctccaaactccacccgtgtctagcctcgcctctcttcttggttttccatccccgccaccctgacctttgtggtggcgggtgagctgatgatactatactatagcactacttgattataaggagtcagagatggtgggtgt

SEQ ID NO: 16711 - DNA, 293 bp, Gossypium hirsutum
  Clone ID: LIB3145-041-Q1-K1-B12
cccacgcgtccgccttcctccattatcttcttcttggtctttcaacctttcttctgcatatatatatataaaaaaatcccaagaaagagaaaggtaaaagatcaagaaatagataatgggtgcttgtgctactaaaccaaaggttttgaaagatgaaaactcaccggccaccgtccccgcaccagaaccggtcaaggaagaatccgttcagccggttgaaacaaaagacgaaccggtggtcgtgatggaagctgatgaaaccaagccgaattctcttggttcattgcttgata

SEQ ID NO: 16712 - DNA, 285 bp, Gossypium hirsutum
  Clone ID: LIB3145-041-Q1-K1-B2
cccacgcgtccggtttctaacaaaaatttaaacttttctttgctctctctctgcaggtccaagtcctgtcaagtcccggcgagctaccaccgccctccgccgcgtctccgttgccggcgaccgccgtgaggtgcagaggcggtggagtagaggccacttgctgtcgacgtgattagaggcgatgggatagggtttcttagtttaggttttttctttttttaattttgagtttgggctatgggtatttgggctgtaatggacttgggttaatgggtttagtgtggg

SEQ ID NO: 16713 - DNA, 288 bp, Gossypium hirsutum
  Clone ID: LIB3145-041-Q1-K1-B3
agttgctgctatggttgtccttgtgcccaaggttggagaactaatcgggggaagccaaagggaagaacgttatgaggtcattcgggaaagaattttggaggtggggttgcctcttgagccatatgagtggtatcttgacctgcggcgatacggaactgttaaacattgtggattcgggctaggctttgaacgaatgattctctttgccactggcatcgagaacattagagatgttattcccttcccaagatatccgggaagagctgatctctgattggatttttctaa

SEQ ID NO: 16714 - DNA, 269 bp, Gossypium hirsutum
  Clone ID: LIB3145-041-Q1-K1-B4
gtctaacaaatcaccaatctttccaatgcctgagcctcaccacttcagagattatggcttcgacccccaataccactatttacaggttttggaacatgcaaggaagcacaagatagggacgcgagacttcattgattcactacagttcaagctcgaaaaacccatctctaaagacgacccatagtctaaaacgatgaaatattggcggagaaatgctctcttgttcttcaactggaaaaaatggcctgcaaatagcaataatcaacatg

SEQ ID NO: 16715 - DNA, 211 bp, Gossypium hirsutum
  unsure (1)..(211): unsure at all n locations; Clone ID: LIB3145-041-Q1-K1-B6
cggacgcgtgggcgttcgccgggagggacacaggggaagggagcacccgcacaccgggaaagcaacagacagaacggaggncangagccaagggaggaggcccccagagcgggggacaggacaacgagcaaaggaaancccacgccaggaagaggaagaagaagccccgccacgagacnananccagaagccagagagggggaaaaaccgg

SEQ ID NO: 16716 - DNA, 271 bp, Gossypium hirsutum
  Clone ID: LIB3145-041-Q1-K1-B7
cactaattttctttttcttctcagaaatcttaggatcatcactatggcctcaaatcccaaagtcttctttgacatgacgatcggtggtcagcccgctggtcggattgtgatggaccttttcgcagattgcactcctcgcactgcggagaacttccgtgccctctgtactggcgagaaaggcgtcggccacaacggtaagcccctccactacaaaagctcttctttccatcgtgtgatccctaactttatgtgccaaggaggtgacttcacc

SEQ ID NO: 16717 - DNA, 281 bp, Gossypium hirsutum
  Clone ID: LIB3145-041-Q1-K1-B8
ccctcgcgttcggtttggaacaggctctttgagtgataagcagtctgaaactggttcaacggacgatgaaaaatccgaaataactgatgctgctctttctatgggaacagaaactgatggctcagctgaatacgtgcattcccccgaagagcgtatctctggggaagcccaaagtcgtaccaaaggtccgagttttacaaaaacctgcacaagcaacaccaacatcaaaatcagaatctccgagagcttcttcacccgccattaaaaagactctcagctcg

SEQ ID NO: 16718 - DNA, 290 bp, Gossypium hirsutum
  Clone ID: LIB3145-041-Q1-K1-B9
cgaggatctgttgtgggattcaaattggatagcctggttaaattatctgatacgcgtgcaagaaacaacaaaatgactttaatgcattatctatgcaagcttctatcggagaaaatgccagagttgctggattttgataaagatcttgttcatttaaaagctgcttctaagattcaattgaaaaatctagctgaagaaatgcaagctgtgagtaagggccttgaaaaggttgagcaagaactctccgcttcaaataatgatggtgatatctctttgggctttcagaagct

SEQ ID NO: 16719 - DNA, 278 bp, Gossypium hirsutum
  Clone ID: LIB3145-041-Q1-K1-C1
cccacgcgtccggtgtctattttggctgccattagtgcttattggcaatatttgcacttcccaatcccaaaacacaactgtctctcaactcaaccggaatggctggagcccattgaccactgcatcggaagaaagcgagatctatattggtccttttttctttaattttctggggcctacttcttgcaaaatttcttaattactgactgatgtaagtcttgaatgggcattagccttccttggatcttaagttttatggcgatatttatattttgatt

SEQ ID NO: 16720 - DNA, 291 bp, Gossypium hirsutum
  Clone ID: LIB3145-041-Q1-K1-C10
cccacgcgtccgccggattcgcatgggagagaaataagcatcaacaatatggttcttataacgacgtcagccataactaaaggtaatatgcatattctccccgagaaggaacacatgaaattccccgaagaaagagtactcggagccaaaaattggcaaatgcagatcttagttgcttctgttactgatgatgcaagcagaagcaacgacacaggtatcagagtaacgaccataaaagaagcttttagttctacatctgctaataaaagaaagctgatcaacacttccgag

SEQ ID NO: 16721 - DNA, 258 bp, Gossypium hirsutum
  unsure (1)..(258): unsure at all n locations; Clone ID: LIB3145-041-Q1-K1-C11
nccaaagctccggtttttttaccgctaccatctataactaggaggcttctgagccgaagggggaaccatctctaccacacctgggtgctgatctccattccaaggtacgctaaatcaccctaaacttttccattacctgtgttgtttactggaaaaccactcatgtaaatgctgctacgcgcataacgatggactgtttttgcctacacatttaatgtttcatgttctgccccatcattcaatgtttgataccacact

SEQ ID NO: 16722 - DNA, 289 bp, Gossypium hirsutum
  Clone ID: LIB3145-041-Q1-K1-C12
cccacgcgtcctgtttgcgcaacaaggcactgtgagggagtatgttcaggagtttagcgagcttatgctccaaatctcagatatgggggagaaagaggcatttttttcctttatggacggattaaaaccgtgggcgaagcaagagttgcagcgccgaggagttcaagagctcaccaaggctatgtcagtagcagaatcacttgctgaatttggtgggaggaaagacaattccaattcttctaaacccagattaaagggtaatagtgggggagataaagaaaggcccact

SEQ ID NO: 16723 - DNA, 289 bp, Gossypium hirsutum
  Clone ID: LIB3145-041-Q1-K1-C2
cggacgcgtgggcgtgtcgcgtgggcggacgcgtgggcagctctgaaggctgtgatcaagtgcattgaggagcataatattgaggagcaataccctattgatccacttcagaagcgggttctcctattggagaaggttaaagcagacaagaagggatcaactgaagctgcaaagcctcaaacaaagagagctcgtgccaatggtgcaggatatggtccacgagtcactaatgtagctgctgacaaaccattctattctagaaccactgataggtacccgcagtacgttt

SEQ ID NO: 16724 - DNA, 287 bp, Gossypium hirsutum
  Clone ID: LIB3145-041-Q1-K1-C3
gatagaggatgccctagaaattggccttacctgcatccgagcgaagctgatggttgctctggatatggctaataaaaatacgaaatgcttgggggaggacaataagcaacttactttcatagagaatcaacagcaagtgacttatgaaaatgtgagagagcatatggatcaccacggataccatcaagctgatcgagctgacttcaactcgcagatgcctttcgcattccgagtgcagccaatgcagccatacttacaagagaggatgtgatgaacattgtgagggt

SEQ ID NO: 16725 - DNA, 285 bp, Gossypium hirsutum
  Clone ID: LIB3145-041-Q1-K1-C4
cccacgcgtccggttgaactgtagcaatatttcaggccggaatttttgaacagattggacgagatgattgttttcaggcaactcaccaagttagaagtgaaggaaattgccgatataatgctcaaagaagtgtttgacaggcttaaaagcaaagaaattgagctccaagtgaccgaaaggtttagagaaagggtggtggaagaagggtacaacccaagttacggagcaaggcctttaagaagagccataatgagacttctggaagacagcatggctgagaagatg

SEQ ID NO: 16726 - DNA, 235 bp, Gossypium hirsutum
  Clone ID: LIB3145-041-Q1-K1-C5
gctatcattaagttttggataataggcacgccgagccgggaaaaaaaaaaaaaaatgaaaaagaaataaaaaaaaaaaaaagaaaaagaaaaaaaaaaaaaaaaacaaaaaaaagaacaaaaaagaagaaaagcataaatatagaacataaaaagaaaaaaaaaaaaagaggaaacaaaactatggggggggctattattgagaactaaatttagaacggaaacaaatgaaatat

SEQ ID NO: 16727 - DNA, 280 bp, Gossypium hirsutum
  Clone ID: LIB3145-041-Q1-K1-C6
gttatacgttatacttgcaatattctaacaggcaagaaattgttaacaacaaaacgactgcagatgttgccgggaatgtactgttggttacaatcgatagtcaagatgcacggcttgtttccatagatgtatagcacttgggttgtgtagtttttgtcacgctcttttggagaaaagcttatgagttttgacatgagtgtgaatggatcagcaagatcatgtcaagggaataatctccaatggcagcttagtgcatcgtgagaaagagaacatgtatttt

SEQ ID NO: 16728 - DNA, 283 bp, Gossypium hirsutum
  Clone ID: LIB3145-041-Q1-K1-C7
cccacgcgtccgattaagagcttataagaaagctgcaattagagaatcatccagataaaggtggagaccccgagaagtttaaggaactggctcatgcttatgaagttcttagtgacccagagaagagagacatatatgatcaatatggtgaagatgctcttaaagagggaatgggaggaggcggttcttctcacaacccatttgacatatttgagtcattttttggtgggggagcctttggtggcggtggtagctcgagaggaagaaggcagaagcgaggtga

SEQ ID NO: 16729 - DNA, 281 bp, Gossypium hirsutum
  Clone ID: LIB3145-041-Q1-K1-C8
atcatggtttccctttactcccttcaaatcctcgtctcagcaatttttgtttaaagcctagtaaaatggcgtccacatttagcggtgatgaaactgctcctttcttcggcttcctcggagccgctgctgccctcgttttctcctgtatgggtgctgcgtacgggacggcgaagagcggtgtcggggtggcgtcgatgggagtgatgaggccggagttggtgatgaaatcgatcgtgcccgttgttatggccggagttttaggtatttatgggttgattatt

SEQ ID NO: 16730 - DNA, 286 bp, Gossypium hirsutum
  Clone ID: LIB3145-041-Q1-K1-C9
caaaagagaggtggctcggcatccagtaatctggcgaagctgaaagatctgttcggcgatgtaagtgatacaaagggagatgatgagggggtttgaaaggataccaaagagggacaacagagatcaagaggcgattagactaggcggttcttcttggaaatcataaggtgggtgggtgcattgcacaacaccaaatcaaatcaaatcaaatcagacccaaacacaaaccatactttgccaacattatcattctccctttctggacaatgctggatcgctgatcgat

SEQ ID NO: 16731 - DNA, 279 bp, Gossypium hirsutum
  Clone ID: LIB3145-041-Q1-K1-D1
gccacgtcaccgttttcatcttcacagccatctcagtcgtctgacgggcggcgtatgcggctaggacaagggtactgtcatggagagggagaggggcaaaggttcaggggcacggatgggcaacatgcagggcggttgattgatttcatgccgtttaaaaaatgggtgccttggatgattccaggcttaggtttgggtaatattttccttttcatgataacaatgtacattaataattgtcccaataactcgaagaaatgtgtgggaagcttcctgggc

SEQ ID NO: 16732 - DNA, 289 bp, Gossypium hirsutum
  Clone ID: LIB3145-041-Q1-K1-D10
ctctctttcctatattttcacccgtcttttaatccagcgctcacaaaattatgggtttgaaggaggaattcgaggagcatgccgagaaagttaagaccctcccggccgccccttcgaacgatgacatgctcattctctatggactgtacaagcaagccactgttggaccagtgaataccggccgtcctggaatgttcaacatgagggaaaggtacaagtgggatgcatggaaggctgttgaagggaaatcaaaggaggaagcaatgggggattatatcaccaaagtaaa

SEQ ID NO: 16733 - DNA, 295 bp, Gossypium hirsutum
  Clone ID: LIB3145-041-Q1-K1-D11
ggggcgacccacgcgttcggttaaacgtacagtttctcttgataatatctatctataaagtcggttaagacgaccgagcaataaaaataagccaagtggaagtgaagcttagctgtatatacaccgtacgtcgtcgtcgtcgttccggatcgatctcggccggctagctagcaaaacgtgtacgtagtagtatgtaatgcatggagtgtggagctactatctagctggccgttcattcgattataattcttcgctctgctgtggtagcagatgtacctaatcgatcttgtacgac

SEQ ID NO: 16734 - DNA, 300 bp, Gossypium hirsutum
  unsure (1)..(300): unsure at all n locations; Clone ID: LIB3145-041-Q1-K1-D12
agccaatcccggtgtcttttatccaagtttatgagggtagaggaggagctcgaacccagggacaatatatttgttgggtaaaattcgagctctcntggcattccaccagcacccnagaggcgttccccaaattacagtttgcttcgacattgatgctaatggcatcttgaatgtctctgccgaggacaagactactggccagaagaacaagattaccataacaaatgataagggtcggttgtcgaaggaagaaatcgagaagatggttcaagaagccgagaagtacaagtccgaggatga

SEQ ID NO: 16735 - DNA, 68 bp, Gossypium hirsutum
  Clone ID: LIB3145-041-Q1-K1-D2
aatttaaattcatttatttttatatttagttttgaagttgaaattttaatgaaaattttaatttaatt

SEQ ID NO: 16736 - DNA, 286 bp, Gossypium hirsutum
  Clone ID: LIB3145-041-Q1-K1-D3
atgccatcttttctgataacgtactggcaacatctgtggtcgtcaattctacagtgcttcatgcaaatgagcctgagaaacacgttttccatatagtgaccgataaactgaattttgctgcaatgagaatgtggtttatcttgaatgctcctgaaaaggctacagttcaagttgagaacattgatgattttaagtggttgaattcctcttactgttccgttctacgtcagctcgaatctgccagagttaaagaatattatttcaagaatcatccatcctctctctt

SEQ ID NO: 16737 - DNA, 288 bp, Gossypium hirsutum
  Clone ID: LIB3145-041-Q1-K1-D4
ttgcacaccttgtttttgtatttaacctgaggttccgtatgggccctgtggtagaccacaagtgcagagtatgtggaaaactttggtggcaaaagtcaccctgaagttcacatcgaataattaaaggtagtgacatgccaactgctgggattctaccctgctgccatgtgtttcacgctgaatgcttagagcaagttactccgaagtcccagattcatgatcctccatgcccattgagcctcaaaaccattggaccactagaagaatctgcatcagtttcagaaccta

SEQ ID NO: 16738 - DNA, 281 bp, Gossypium hirsutum
  Clone ID: LIB3145-041-Q1-K1-D6
cccacgcgtccggttaatgcaaccgagcttataatagcattatttgcactttacagaaacaaaatacatgttctcaagtactctctaatgggttccattctctcaaatctcctccttgttcttggcacttctctcctttgtggaggcctagccaacctcaaaagagagcaaagatatgataggaagcaagctgatgtgaactctgggctgttgttgttgggattgctttgccatatgttgccattgatgtttaaatatgcagtaaaacctgaaactggggt

SEQ ID NO: 16739 - DNA, 240 bp, Gossypium hirsutum
  Clone ID: LIB3145-041-Q1-K1-D7
cccacgcgtccgcttctattcagcgtatcggaacattttgccgatctgggccctcggagaatatcattgccgggtgttgcaggccccctgagattatcccgccattcataatatggtcagatgacctttttatcattcagaacattttatttttgttaaaaaagaaaacccatttgacatcaatgaaatatgaaggctttttgtgggggcaaaatataaaaataaattttttttatatag

SEQ ID NO: 16740 - DNA, 184 bp, Gossypium hirsutum
  Clone ID: LIB3145-041-Q1-K1-D8
ggaaaaggtaacgttttacatgcgacttcaaagacacaagatgggtgttgacgacttcgaacttttgaccattatagggaggggtgcatttggggaggtaaggctttgtaaagaaaaagctactagcaatgtgtatgccatgaaaaaaagcatcacaatttaaataaataaattcgattttatc

SEQ ID NO: 16741 - DNA, 292 bp, Gossypium hirsutum
  Clone ID: LIB3145-041-Q1-K1-D9
ccctcgcgttcgttttaaaaaaaaaaataaaaaaagggaggtaaataaaaaaaaaaaaaaaacaaaaaaaaccaaaaaaaaataatcaacaaaaaaaccaaagtacactctataaaatctaaactgtatcattaaaacataatcctgtcctaataatcaaaatactatcatggggggtcccctttaaagaaccgaattttctttccctcccattggaactattatgtttttttttggggccccaaaatttaaacccccggccccgtttttcaaaaagtccagacgggaaaac

SEQ ID NO: 16742 - DNA, 149 bp, Gossypium hirsutum
  Clone ID: LIB3145-041-Q1-K1-E1
cccacgcgtccgcccacgcgttcgattatgaagaataaatagctcaaaacaatattcgatttgcaatatcctaaagttccttgaatcttgttttgtagccatatgtaattaatgcatgtgcatgctaatatatatgattttctttgttc

SEQ ID NO: 16743 - DNA, 292 bp, Gossypium hirsutum
  Clone ID: LIB3145-041-Q1-K1-E10
gaaagatcaaatcttccatctcccccctccccttgtgtttcgtggtgatcaacagtttagggtttttgttctctttctgaacaacaaaaatggtggggactactgagggagtggattcctctgcctccaacagcaagaagaatcgtatccaagtctccaatacccagaaaccccttttcttctacgttaacctcgccaagaggtatatgcagcaatacaatgaggtggaactctctgctcttggaatggctattgctactgttgttaccattgctgagatattgaagaacaa

SEQ ID NO: 16744 - DNA, 282 bp, Gossypium hirsutum
  Clone ID: LIB3145-041-Q1-K1-E2
caaaattccaagactaatacttttcgtgtggttgctttagaaaaatatgcaggaaagaaagagacagagaaggttcgatagcagactgatgccttctcatcaggattgctatagaaagaatgaaagtacaaacagtttaagaaccttggtctcagaattgtggtaccatgtgaagctggctaacatggttgtatcaagatcttctcttttccttattttatttcattatatctgattaatttgtttttggcattttgactctgtagaatgagttgaattact

SEQ ID NO: 16745 - DNA, 285 bp, Gossypium hirsutum
  Clone ID: LIB3145-041-Q1-K1-E3
gaaagagcttgcttcttgagctcgggttataatccaatccaaggcaccttgtgataccattgttggtttctcctaagaaagcagcatgttaaaggtaagatcaggccttggatcctttttgacaaatcttgtttaaggtgaaaactactgggttttcaaaattggtttgaatttcaaatgatgttaagttagataaatatcaggaaaactagagaagaaaaaaaaaaagcagaaaagaagagaaaggtagatatcagtcctgatggtagggattaaatttttgga

SEQ ID NO: 16746 - DNA, 285 bp, Gossypium hirsutum
  Clone ID: LIB3145-041-Q1-K1-E4
cggacgcgtgggcttacgcgtgggcggacgcgtgggcagctctgaaggctgtgatcaagtgcattgaggagcataatattgaggagcaataccctattgatccacttcagaagcgggttctcctattggagaaggttaaagcagacaagaagggatcaactgaagctgcaaagcctcaaacaaagagagctcgtgccaatggtgcaggatatggtccacgagtcactaatgtagctgctgacaaaccattctattctagaaccactgataggtacccgcagtacg

SEQ ID NO: 16747 - DNA, 278 bp, Gossypium hirsutum
  Clone ID: LIB3145-041-Q1-K1-E5
aaaaaaagttggcgtttgtaataaaatctgcaatcttaattctgtcggtgtttttatctgtaagcttcacttccggtgtttggttgctccaggaacagcccaatgatgaccccaaaaacatggtcgctattcctcccattgatgcactcaaccctaccgagttcaatggacccggtgttggcattcacgaagatcatgttgtcccaaaaggttccgaaattggtactcttggttttggttttgaaggtggtcctgaaaaatgttgttcttctcgatgt

SEQ ID NO: 16748 - DNA, 191 bp, Gossypium hirsutum
  Clone ID: LIB3145-041-Q1-K1-E6
gcttagcattatgcgttattcgttctccatgatttagtttcatagggccaagtcatatatagagtagcttcatcattgtttagactactgtaatagcaactagctatattataactacatagatcgtttaacgacaaagtctcttattccatatatcatagtgatagcaggcatactctaagcatagatgt

SEQ ID NO: 16749 - DNA, 279 bp, Gossypium hirsutum
  unsure (1)..(279): unsure at all n locations; Clone ID: LIB3145-041-Q1-K1-E7
cnngacgctgggctttttcttcattcgctttgctgtagggccaacaggtactggctttgtgctgccactgagcagagcatcaagatctgggatctggaaagtaagagtattgaggaagacttgaaggttgatctcaaagctgaggctgagaaatctgatgtcaccgacaatgcaaacaagaagaaggtgatatactgcacaagcttgaactggagtgcagatggaagcaccctatttagtggttatacagatggtgtaatcagagtttggggaattggt

SEQ ID NO: 16750 - DNA, 259 bp, Gossypium hirsutum
  unsure (1)..(259): unsure at all n locations; Clone ID: LIB3145-041-Q1-K1-E8
aaacactaggagaatggggagcnnnacaaacaaggcnagggccggagncccnaagnaggncnccaaganccncaaggngagcaagacgangangagcgcacccaaagcagccaaagccgccancacgagcagcgacgaggagaaccacnngancccgagcnngnccnacgnacaaaacggcggnacacccgcngcngcaagcngcagnggggnaaaagcacccnacggcgaggnncagaccnccccggaccgccaaaac

SEQ ID NO: 16751 - DNA, 290 bp, Gossypium hirsutum
  Clone ID: LIB3145-041-Q1-K1-E9
caacaatcaatggagtgctaagcatcatgaaagcttgcgccaaagccaaaactgttagaaggttagtgttcacatcatcagctggaactattgatgttgcagaacaacaaaagccctgttatgatgaaacctgttggagcgaccttgaattcatccaggccaaaaaaatgactggttggatgtattttgtctccaagacaatggcagagcaagcagcctggaaattcgctaaagaaaataacattgattttgtcagcataataccacctttggtggtcggtccatttatt

SEQ ID NO: 16752 - DNA, 288 bp, Gossypium hirsutum
  Clone ID: LIB3145-041-Q1-K1-F1
gtgtaagtaaatattttgactcatactgcagatgttgccttaagtgaggagcagcttactgcaatagaaaaattgaaaatgaaacacaaggcacaggatgcaaaggaaagtttagagagagatagagaagacaagcatccaattaatgaagagcagaaaaggaatcacagatcagaatcggtactcggataataacatagatgagctcagagctagaaattcaggccactcaaagaacacaggtggtgcgctttgggacattttcagaagggaggatgttcctaaact

SEQ ID NO: 16753 - DNA, 293 bp, Gossypium hirsutum
  Clone ID: LIB3145-041-Q1-K1-F10
cgggaatggccacctaggaagacagcgcggtgaaggagcccttggatctgataaggcttagcctcaacgagcgtatttacgtgaagctccgttccgaccgtgagctccgtggcaagctccatgcatatgatcagcatttgaatatgattctgggggatgttgaagagattgtcacaacagctgaaattgatgatgaaacctatgaagagattgtttggactacgaggcgtacagatccattcctatttgttagaggagatggagtcatactggtttatccacctctacgcact

SEQ ID NO: 16754 - DNA, 223 bp, Gossypium hirsutum
  Clone ID: LIB3145-041-Q1-K1-F11
gccgcgcgggggtgcggccgttccaggatctggcgacgcggggccagtgcgcggcgagcggcgggtgccggtggtgccgcagcgaggcgctcgacgacatgtgcttcgaggccatcgaggcgtggcgccttccgcgtcaggtgttctcctgcgacccaccctccggcgccgcccacgcccgcttcaactgaagtaatgccgcggccggccgccggcgaagctc

SEQ ID NO: 16755 - DNA, 259 bp, Gossypium hirsutum
  Clone ID: LIB3145-041-Q1-K1-F2
gataatgtcgaattttttttatcccatgatgatacagatgccagagatgctgttggccgatgtgtggatgtcactaaaggtgtcacatttatggaattaaattctgttcgagcgagcaataacaaagttacctgttgtcatttctcatccgatggaaagttgcttgctagtggtggccatgataaaaaggctgcattatggtatacagacactttgtagccaaagtctacacttgaagaacattcatgtttaattactg

SEQ ID NO: 16756 - DNA, 283 bp, Gossypium hirsutum
  Clone ID: LIB3145-041-Q1-K1-F3
aaaaaattgatggatactaatatgtttcattttcattttcccagtgatctaaggtcattcaaggacatggcggatggtatggcaagggggccaacgagtccagcaggagggagtcatgagagtggagagcagtgcagttctcactcaactgtgagggaacaagaccgttaccttccaattgccaatataagcagaatcatgaagagagcattgcctactaatggcaaaattgctaaggatgctaaagaaactgttcaagaatgtgtttctgagttcatcagct

SEQ ID NO: 16757 - DNA, 283 bp, Gossypium hirsutum
  Clone ID: LIB3145-041-Q1-K1-F4
cagacgcgtgggcttttggtcttacaaactgtcggctcatctacggaataactaccttacggagttcaccattgcttccttggagatattccggcgattccaatggattttcttccgcgttgaaaacgagtggaataaaatcaacttcaggccaaatatgcagctctccatgaatgatccaagcgatgatgaagtcaaattactttcttcttcagctggttacaatgtataaactgttcgaattattttgtcgacagattcatggaggtttaactacttaaat

SEQ ID NO: 16758 - DNA, 232 bp, Gossypium hirsutum
  Clone ID: LIB3145-041-Q1-K1-F5
aaccttctccatgtttcacgccggcctatttcctgaaagggacgtaatctcccaaacctcaatcggcttgcaacgggaactcgggtctgctttaggaagcggggcgctcgaatcggcaaggggatcagcccatacaaactgctggcggagcatgctccgcttaccgaagcgcttttccctatccaaagaacggacgtcctgtggcacgatgggtcggggatccctcgaacca

SEQ ID NO: 16759 - DNA, 275 bp, Gossypium hirsutum
  unsure (1)..(275): unsure at all n locations; Clone ID: LIB3145-041-Q1-K1-F7
nctgaacatggctgtttgctcgctaaagctcaagcgctgggaataagccatcggacactgttccatagtattatcagaagatgaaaataatgtgaaagcaatggtcatacgtggaaaggcccgagccgaactcgggcaaacggatgctgcacgggaagactttctaaaggctcgcaaatatgcacctgaagacaaagcgattgcaagggagttgcgtatgcttgcagaacaagacaaagctttataccagaagcaaaaagagatttataaaggaa

SEQ ID NO: 16760 - DNA, 278 bp, Gossypium hirsutum
  Clone ID: LIB3145-041-Q1-K1-F8
tgggtgattaatgttatccctgaggatggaccaaacacagttaagttgatatatgacagaggcctcattggcactactcataactggtgtgaagccttttccacataccctcgaacgtatgatttactccatgcttggactgtcttttctgatattgagaagaagggctgcagtgctgaagatttgttactcgagatggatcgcattctccgtcccaagggtttcataatcattcgggacaaacaaccagttatagatttcgtaaggaagtatttatc

SEQ ID NO: 16761 - DNA, 262 bp, Gossypium hirsutum
  Clone ID: LIB3145-041-Q1-K1-F9
gcatttttgatgattgcgagggaatctccttcaagagtcggaaactgccatcccttcccggttcctatttggactgctctccagcaggttattgcttcagcagcaaaggccgatgagatattagaatgaatctctgaacatgagaagaggatatttcgttccgaatctctggccacaatacccgaagccgaccgattctggcttttatcgtaggcaccatcaaagttgatgttgatgaaactctcctgtgggtacacccatc

SEQ ID NO: 16762 - DNA, 281 bp, Gossypium hirsutum
  Clone ID: LIB3145-041-Q1-K1-G1
cccacgcgtccggccacgcgtgcgcccacgcgttcgctttattttgtcgcctgtgacgagaagccgacgctaccatggcccacgtcagtttctaccgcaactatgggaagacctttaagaagccacgacgtccgtctgagaaggaacgatcggatgctgagttgaggcttgtaggagagtatgggctccgatgtcagagggagctgtggagggttcagtatgctttgagccgcatccgctatgctgctagggaccttctcactcttgatgagaagaaccct

SEQ ID NO: 16763 - DNA, 310 bp, Gossypium hirsutum
  unsure (1)..(310): unsure at all n locations; Clone ID: LIB3145-041-Q1-K1-G10
gacccaggcctccnatcctttttcccactttcttggttgaagctggaacgcgagactggtttttgaatttgtgtggtcggagtaatgaatcctatctggccagaggttcgaacctgggtgggtgactgggtgttccattacggtgctaccaactgagctatgcttgttctcatgtaataagaacaattcctgttcaaggaggaaaacaaatctgcaatactgctttaagataaaattttcccttttttcacaacaagcaaagataagtgctactgcgtgctaggatacctaatccattatcgatgaggaa

SEQ ID NO: 16764 - DNA, 181 bp, Gossypium hirsutum
  Clone ID: LIB3145-041-Q1-K1-G11
cacactattcactcattcattacacatgctaccattatcactatactatgatttttgtagctactcctcttgtacaataccgagtgcaaaaaaaaatacataatcatcgtatacataccaatacaataccgtacctataagtcttcctattcctgtggaagaacagaacttgaatccttat

SEQ ID NO: 16765 - DNA, 284 bp, Gossypium hirsutum
  Clone ID: LIB3145-041-Q1-K1-G2
ggacaaggctgctgctcacttgaagggtggcgcgaagaaggttatcatttctgctcccagtaaggatgctcccatgtttgttgtgggtgtcaatgagaaggaatataagcctgaccttaacattgtctccaatgctagctgcaccaccaactgtcttgctccattggctaaggtgatcaacgataaatttggcattgttgagggtcttatgaccactgttcattctattactgctacacaaaagactgttgatggtccttccatgaaggactggagaggtggta

SEQ ID NO: 16766 - DNA, 286 bp, Gossypium hirsutum
  Clone ID: LIB3145-041-Q1-K1-G3
cccacgcgtccgcgaccagttgaaatagttgctccattgcaagaaaaaccttctactgctcgagtttcggacatttacttttcaccaaaggaagggttcactttccaggacttgcttgaagccactgacaattttgatgagagctttgttgttggcaggggagcatgtggaactgtatataaagctgtcttacctagtggccatgtcattgctgttaagaagcttgcatccaacagggagggaaataacaatgtcgacaacagcttccgtgccgaaattctaacct

SEQ ID NO: 16767 - DNA, 205 bp, Gossypium hirsutum
  Clone ID: LIB3145-041-Q1-K1-G4
cccacgcgtccgagttgatttaccaataacagacccatggatgtagcgagctctctagattgggtccgctaaaaaaaaacaaaaccaaaagaaagaaaagagaaaggagattgagaaagaaaagcaaaaacaatcagacataatagaaatagaacatgaacggggaggaggcaacacgaggtcataaagaaaactcacagtgggg

SEQ ID NO: 16768 - DNA, 279 bp, Gossypium hirsutum
  Clone ID: LIB3145-041-Q1-K1-G5
accaagcttacctttttccacctacgttgcatataaagggtagcctcttgaagacagcctttaatgccaaagattttgatttggaaatgcaactacttgcgctcgagaatcatgcttgccaattgcaaccgcaacaattgatggatgagatatctattctctcctctccatcttgttggactaaagaatacaacaggcttgaaaattttaagcctaccaaactcgacgatgcttttggatatctggatccatctctgcaatctccgttgaagggactgt

SEQ ID NO: 16769 - DNA, 276 bp, Gossypium hirsutum
  Clone ID: LIB3145-041-Q1-K1-G6
cccacgctttcggtttttaccacgagagaatgtgcaattggccacagaatttgatattgtcaagtcggatcctgcgactgggattgcaataaatggtacctctgaacacgtccgcgcctcggtcgaggctagcctgaagcgccttgatgttgattacattgatctctactaccagcacagggtcgacactaaaacaccaatagaggatactatgggggaactgaagaagctggtagaagaggggaagattaagttcattggtttatctggagctag

SEQ ID NO: 16770 - DNA, 279 bp, Gossypium hirsutum
  Clone ID: LIB3145-041-Q1-K1-G7
caaagattttattttctcaagggagattgttgtgtataatgttgatggccgagaaatcccaattgtccatcgtgtaattaaggtccatgaaaggcaagatactggagaagttgatgtcctcaccaaaggagacaacaattatggggatgacaggcttttatatgctcaaggtcagcaatggcttcatcggcaccatatcatgggcagagctgtgggggtcttgccttatgttggttgggtaaccataatcatgactgaaaaaccaattatcaagtatat

SEQ ID NO: 16771 - DNA, 275 bp, Gossypium hirsutum
  Clone ID: LIB3145-041-Q1-K1-G8
cccacgcttccgtttttctataaaccaaagggggaagcggggaagaagaaccgacgatagtccatcgctgcggctctcctcgatttcaaatggctactcttccatatatagtccatcttagattccaatgcaatcacatctcgttcatcaactttgatgtaactataacgtcattttaattgctttcaaggaaatcccaggctaattgtaagcggcgtgatttgttggataataaatcagaggaatgattcattgtcttgtgaggatttctttct

SEQ ID NO: 16772 - DNA, 281 bp, Gossypium hirsutum
  Clone ID: LIB3145-041-Q1-K1-G9
ccctttcgtcttgctactcgtccggtgcggcagagggggggtcttttgaaacaataacagacactgaatatataggcactgatgctggtgaagctccagaatgggaaattctgaaaagtatcgtgtatggtggattaattgaatcaatcacaagtttaggggttgtgtcttctgcagccggggccggcgccgctacatagaatgttttggcttcgggagcggcaaatctgattgcaggacttatgatcattcgaaataatctgacggaactgaaaaatgac

SEQ ID NO: 16773 - DNA, 286 bp, Gossypium hirsutum
  Clone ID: LIB3145-041-Q1-K1-H1
ggaaactgcgggtggtgtcatgactgtcttgattccaagaaataccacattcccaaccaaaaaggaacaagttttctccacctactctgataaccaacctggagttttgattcaggtttatgagggtgagagaacaagaaccaaggacaacaatttgcttgggaagtttgagctttctggtattcctccagctcctcgtggtgttcctcaaatcaatgtctgctttgacattgatgccaatggtattttgaatgtctctgccgaggataagaccactggacagaag

SEQ ID NO: 16774 - DNA, 293 bp, Gossypium hirsutum
  Clone ID: LIB3145-041-Q1-K1-H10
gttctatctcacgtttttttatcggcaactactgttcaagaaggatacttgaaaaaagatcctcctggatagcacccgctttgcatctactgcctatggaaatgcatcctccatggccagaaggattgttgtctgctcctggaataaggaagaacagtgttggtcctagtatgcgtattagatctgataaatctactccgggcggcctctacacataacccaaggtgatgacgcgtctcaccgataacattaccgatgaaaagcttccctaatagattgatgagatccgtctt

SEQ ID NO: 16775 - DNA, 276 bp, Gossypium hirsutum
  Clone ID: LIB3145-041-Q1-K1-H11
cgcgagtggccgccttttttcaagatatttccctctagaggtttttttatgcccagggggcaccaatcttaatttaattttcacagatacaaaaatgcatcggtcgccatgaacgcaaacatgctgcactagcaatttcatctttcaatggcaaacaactgtatggtcagcctatatatgcaattgggcatctccaagtaccccaagggagggcacatcaagtcattttaatatttttgttggggacctttgccccgaagtaacacatgctacttt

SEQ ID NO: 16776 - DNA, 298 bp, Gossypium hirsutum
  Clone ID: LIB3145-041-Q1-K1-H12
gttcgagcttacgattgattatcgtcaactggttttccttgatgggagaggaaaaaagaaactcatggatggtgcccggatagcatttactgacgatgtagatccatcctctatcgccgggaggattgttgaatgctcctggaataaggaagaacagtgttggtcctgtatgcgtattagatctgataaatctactccaaacgacatcaacacataccggaaggtgatgaggagtatcacagataacattaccgaggaaaagcttctcgaagagattgatgagataagtcttctcccg

SEQ ID NO: 16777 - DNA, 286 bp, Gossypium hirsutum
  Clone ID: LIB3145-041-Q1-K1-H2
ggtgctcgtgctcttgatcttattgaacaagcagaggtagaagtggaacggctggatcagctaaaatcaagcataatgaaagaactggctttcaaaaggcaagtggagcttgaagagatatttgcccatgctcatatagacatagatccagaggctgctagggagaaaattatggctctgattgattccgggaatgttgagcctgctgagttactagctgacatggataatcagatagcaaaagctaaagaagaagcccttagcaggaaagaaatattggataggg

SEQ ID NO: 16778 - DNA, 285 bp, Gossypium hirsutum
  Clone ID: LIB3145-041-Q1-K1-H3
tgggaaaccatggttgcggattgtgagcgtgtcgatgaatatggccttggccctagggaaagcctggctgaagctgttaatgcagtcatcaatcttctaggcatgcaaccttgtgagggcacagaggttgtccctaacaattcaagatcacacacttgtcttctatctggagtatacatcggcaatgtcaaggtgcttgtgcggctgcagtttggacttgacggtccaaaagatgtggcaatgaaactcgctgttagatcagaggatgaagctgttagtgatgcg

SEQ ID NO: 16779 - DNA, 213 bp, Gossypium hirsutum
  Clone ID: LIB3145-041-Q1-K1-H5
aactattttgtgttttttcgaatggagcacaaatgctgggaagtttgaactggattaaaaacttggagctcgatactcaaatggagataaattgaatatcattttttaagctcaagatggggtaaagatattatcgatctacatgagctgaattaaacttggttatagagtcttctactatgaagttggaacccgtagcttgtttaaataaaa

SEQ ID NO: 16780 - DNA, 282 bp, Gossypium hirsutum
  Clone ID: LIB3145-041-Q1-K1-H7
cgtaaacctgggctttttcctgggatcaacactaaaattgcctctttcctagatcctgatggctggaaaactgttctggttgacaatgaggactttctgaaggaactcaagtaggcactaagaaagagtaatgctactatatgaataaatcagtatcttgttgtgtaagcgagcagatatgtctgttaaatatggtgtttgttatgcgacctgaaccgttttccgcttgtatctgctgtggattctagtatgttgcatagctatcagcaggttatgcttatt

SEQ ID NO: 16781 - DNA, 262 bp, Gossypium hirsutum
  Clone ID: LIB3145-041-Q1-K1-H8
ccctaccttagatttatcagctccattaagtttgccttgggtagttaaacaagagcccaatcttgaaagcatacataatcctcttcaggtcgatccctggttcctgaattaatcttggacccaagtatattttctgatgagtcgagattcggagcagtaaaagaccaatttaatcgaatgcaatctcggagtagtaaaaccaccacgattactcagtcatcggattcaacttcaacagtatggcttggctctttctcaacac

SEQ ID NO: 16782 - DNA, 288 bp, Gossypium hirsutum
  Clone ID: LIB3145-041-Q1-K1-H9
ttctcccctttttttcataaacctcacctcgttgagcgggtttatataagagaagcgcccctcatcgcttactccccactaatatatactacctatacacatccatactatatcaccatgctgtttttcgaacacacctttaataagccacaacaaacacggtccaacttccttatgataacatacacctctacaccctacaacatcttcacataccatataaataattggtgtcacaccacacactgtgccctgctaaacacactcgaagttatgcatgaccttacc

SEQ ID NO: 16783 - DNA, 358 bp, Gossypium hirsutum
  Clone ID: LIB3145-042-Q1-K1-A10
aatcgccttcaaaaatgagtgactgccagccgttgtcaatacctattttgactgctgtccagcatgctatggcttcagcagcaaaaggagacgaaacaccatcgtgaatttttgagtaagataaaaggacctttccttccgaatctcgaaccacaatgcctgaagctgaccggttctgggtttctttatatgcactgtcaaagttgatcttgacaaactccctctgtggcccaaagtgtgtagtagaaaatctgaccttgacgagggttgagctgctctaccgcccaagacattcccgaaagacatgattcattttttcagctctttggccacatcggggacaacttgtattggcagc

SEQ ID NO: 16784 - DNA, 424 bp, Gossypium hirsutum
  Clone ID: LIB3145-042-Q1-K1-A11
aaatgactgtattggtgaagaagttgagaaaatggtggctgcattaccagatggcggtgtattgctgcttgagaatgtgaggttctacaaggaggaagagaagaatgatcctgaattcgcaaagaagctagcttctctcgctgatctctatgttaatgatgcatttggcactgcgcacagagcccatgcttccacagagggagtggctaagtacttaaagccttctgttgctggttttcttatgcagaaggaactcgattatcttgttggagctgtggcaaatcccaagaagccatttgctgcaattgtcggtggttctaaggtatcaaccaagattggagtgattgaatcactcttggccaaggttgatattctcatactgggtggaggaatgatgtttaccttctacaaagcccaagatatg

SEQ ID NO: 16785 - DNA, 398 bp, Gossypium hirsutum
  Clone ID: LIB3145-042-Q1-K1-A12
cccacgcgtccgcccgttgacatctatagatggcaagacctcatgctccaccgttgacggtggtttggtcatgaacaaccctaccgccgcggcggtcacgcatgttctccataacaagagagatttcccgtcggttaacggcgtggaggatctgctggttttgtctataggcaacggtccgtcgtgcggaaggtcaaaggtccataacaacggtgaatgttcaacttcttccgtcgtcgacattgcgcttgacagtgtctcggagacggtggaccagatgttggcgaactctttctgttggaaccgtacagactacgttagaattcaggtatgctgcatatacattacatattttcccttttcactcctatcgatgctctgtttggttccttagaaaa

SEQ ID NO: 16786 - DNA, 363 bp, Gossypium hirsutum
  unsure (1)..(363): unsure at all n locations; Clone ID: LIB3145-042-Q1-K1-A2
attttagggtggtttttttatacatgctttgcgaggttcaagaagacatttgcttatgtttttcttgccaatggaaaatgtttagttttccctatagtcattccccaaacagtctttgggtcactatgtagaagagaagtgtagttaaagtttgagggatatataatgaagtatatataggtgctttctcaaaaaatgtaccaaatgtaagtttttaatgtattgttggttcaaatataaaaaagaacatggttgggcatcaatccctatctaaagggtccatttggttttccaaangtncanntnntnattttnntttntntaaaattaatatttatttaaaatggatactatttattcttt

SEQ ID NO: 16787 - DNA, 425 bp, Gossypium hirsutum
  Clone ID: LIB3145-042-Q1-K1-A3
gtagcaccccagaaagcacactttgagggagctgagatggaattcggggctgagaacggctgcaagtgtggagacaactgcacctgcaacccttgcaattgtaaatgattagagaccaaagccaaagctccctggaagcagaggcgcctttgtctttaagaaataatatgttttgttgtttatgtgtttttagaataaagtagccatggcttgtcgtaagttttgcctgttgccgccacggttacttggtgcttgccaatagatagagtgaagtactaatatttacttgtttttctgtccagtgtgagcatctctgctatctcaagatatattgtgactattacataattaatgtaaggaagtgagtcagattcataatgaatgaaaagaagctcctatttcgttttgcaaaaaaaaaaaattta

SEQ ID NO: 16788 - DNA, 424 bp, Gossypium hirsutum
  Clone ID: LIB3145-042-Q1-K1-A4
cccacgcgtccgcccacgcgtccggatatttggtctgtttggaggattttaatcttactgagtgcatctgttgcagttaggtgcagggaaaagagcgatggcggcagttcccggacagttgatttgggaggtagtgaagaagaacaattgctttttggtgaggcagtttggaagaggaactgctagccttcagttcagcaaagaacccaacaatctctacaacctccactcctacaaacactctgggttggcaaacaagaaaacagtcaccattcaaagtgggggcaaagaccagtctgtgctgctagcaaccaccaaagctaaaaagcaaaacaagccttcggcctttgcttacaagttccttatgaaaaaagagtttcccaagatggccaaggcggtcaaaaaccaggtgacagacaactac

SEQ ID NO: 16789 - DNA, 405 bp, Gossypium hirsutum
  Clone ID: LIB3145-042-Q1-K1-A5
cgtcgctcttagcctcttactcttttactttactccttgtaatactcgatctctacaatataaccccccccccaacctttttttttctttaattcaaagccacaaagccaactcaaaacccacaaaagccaaagcctaggtacacacaaactacaaaaagaaattgagaaagaaggtatggaagtaggggtgaagatggggatgaaaggagaaggagatgaagtgggaggtaaggagaaggagaaaatggggtatgaagagacagagctgaggctagggttgcctggtgatggtgaggttgtaaggaagagagacttctcccacactgttgatttgaagcttaacctaatttccacctctccaactgatgacaaggacaaaaatattgtccctttttagcttgat

SEQ ID NO: 16790 - DNA, 423 bp, Gossypium hirsutum
  unsure (1)..(423): unsure at all n locations; Clone ID: LIB3145-042-Q1-K1-A6
gcttctccctcgttcttttttgctacctttctgttgcttctctctacggttcacccaaagcccccaaagttgcaatttggacttagttgattgctgtggagcaactttcagacgtcaagcttaactctcggatccttcaggattcaattgtaaaacaagtaaatcaaaaccccaaggctggatgggaagctgcactgaatcctagattttctaattacaccattggtgagtttaagcaccttcttggagtaaaaccaacacctaagaaagaacttctgggcgttcctattttaagtcatgacaaatccttgaaattgccaacttcttttgatgctagaacagcttggccacaatgtacctcaattggaagaattctcgatcaggtaactcattttcatttctctcaattnttatatctgggtc

SEQ ID NO: 16791 - DNA, 399 bp, Gossypium hirsutum
  Clone ID: LIB3145-042-Q1-K1-A7
cccacgcgtccgagctgccgtagagaagacaccgaatatggtgtagccaaggagaagttattagtttgccagaaaaagctctggtattccgctagcggcagttcaagatgacaatatatgttttgcctggttaagttaaaaaggactatataatataatattattgttcttcccaaccgtaaacgtgggacctgaaaaatggagctggattccggtaccagcctatccctagaaatcaaagagcctttaaaatcatattcgtccattggaagggtagccctcccccaataataggtggttttatagaaatatattctttggaagggatttatctattctatacacagatttttaaatttttttttctttaatttttttgggggccttaatttccttcct

SEQ ID NO: 16792 - DNA, 227 bp, Gossypium hirsutum
  Clone ID: LIB3145-042-Q1-K1-A8
cgttgttaaaacagtcagtctctcacactagtattcagaaactacttttcattgcttcattcttttctttccatgtgcattgctaaaaattgaaaaggagattagttcccgtggtgctcttttgattgccctttatgtccactggcaagccttcagcatgctcaacttatctgatatcctttgctgatggagatgagttgagtcattatcttcctgctttctttttg

SEQ ID NO: 16793 - DNA, 303 bp, Gossypium hirsutum
  Clone ID: LIB3145-042-Q1-K1-A9
cccacgcgtccggtcacgaaccagaaggtggtaaaggactcgcctcatgctgccaatgagacgaggcccaaccataatgcatctgtaaacaataacagtggagcacctgcttccaaggcacaggttgtaggttggcctcctattagatcgtttagaaagaactcattggccacctcttccaagaacactgatgaagtagatggaaaggcagggcctgatgctctttttgttaaggtcagcatggatggtgctccttatctcaggaaagtggacctgaaaaactactctaaatatcaggatcta

SEQ ID NO: 16794 - DNA, 226 bp, Gossypium hirsutum
  Clone ID: LIB3145-042-Q1-K1-B1
cgccgaccaaagcagcggaccatgccgagagcccatgggctatgaaatgggggacattaccacgaactggccgataagagctactaagaagcctataatgacctggggccagaaaacatgactagcattggtactattaaaatgaataatatattgagaaataattgtagaattgtatctaataaggatggattatcgtgagacagcttgacgcgttggggactac

SEQ ID NO: 16795 - DNA, 61 bp, Gossypium hirsutum
  unsure (1)..(61): unsure at all n locations; Clone ID: LIB3145-042-Q1-K1-B10
cccacgcgtccgggccgnccttnntttttttttttttttttttttttttttcaaagaaggg

SEQ ID NO: 16796 - DNA, 68 bp, Gossypium hirsutum
  Clone ID: LIB3145-042-Q1-K1-B11
ggaataccgggcgaccacgcgtccgatggatgcatgtatctatggttataaagctttggttttaagta

SEQ ID NO: 16797 - DNA, 384 bp, Gossypium hirsutum
  Clone ID: LIB3145-042-Q1-K1-B12
atctaactcaaaaaaaccttggaaaaagcttcaggaggttccgaaaatggccccaaagagaggaggaaaggtagttgtgccggccaagaagaaacaagagaaggttgtaaatccactgtttgagaagcgtccaaagcaatttggtattggaggagctttacctccaaagaaggatctgcaccgttttgtgaagtggcctaaggttgttcacattcaaaggaaaaagaggatccttaagcagaggttgaaagtcccaccagcactgaaccagtttacaaagactcttgataaaaaccttgcaacaagtctgttcaagttgctcctcaagtataggccggaggacaaggcggccaagaaggaacgtcttctgaagaaagcccaagc

SEQ ID NO: 16798 - DNA, 372 bp, Gossypium hirsutum
  unsure (1)..(372): unsure at all n locations; Clone ID: LIB3145-042-Q1-K1-B2
gcaaatcctggaggaaggctgtcacagggccctattgttggcaagaggtagacattgaagagtggagcagtcgatgtcagccccaccatcttgatcggatgcttcgaatgctcatcacccgaagctccggatctctccgcaagttatgtgtttcgggcctccacaatgattccattttctccttcatcactgagaagtaagtgtatgataagattataggtgctttgatgttcttgtatgataagattccaaatgagacaattataatattacaagcaacatagtattatactttccctcacctttaagtgatcattgttcaatggacatttttcagtgatacagnatttctttttgtgtttcttgcttttt

SEQ ID NO: 16799 - DNA, 367 bp, Gossypium hirsutum
  Clone ID: LIB3145-042-Q1-K1-B3
gcggaagcacccacaacagggaccgagaagcaaccacataagcttgaaagaaagtggaccttttggtttgatagccaatcaaaggctaaacaaggcgctgcttggggttcctctttacgcaaagtttacacttttgacactgtagaagaattttggtgtttgtatgatcaaatattcaagcctagtaagttgcctggaaatgctgatttccacttgtttaaggctggaattgagcccaaatgggaagatcctgagtgtgctaatggaggaaaatggtctgtcactagcaacagaaaggctaatcttgagaacatgtggcttgaaagtttgatggcattgatcggggagcaatttgatgaagcagatg

SEQ ID NO: 16800 - DNA, 331 bp, Gossypium hirsutum
  Clone ID: LIB3145-042-Q1-K1-B4
actaaaacctgggcatatcaggctttatttttagtcaactatcgtacggagcatgggggggtttctttgaccagctcggtgcttaataaacaaattcacttctccagtgttgtcaagacaactgactctacttcttcttcaacgccaatgtttatgccaatggtcgaacccatgagatcatgtgtcaatctattatggaactttagtggaaacgatccgatattgtggattttactcaacatcttttgaggcggaccttcgccaaatgataaaggtttgtccataaatcatattgttgaaggaaccaatgtgtccttgattacgctttttt

SEQ ID NO: 16801 - DNA, 88 bp, Gossypium hirsutum
  Clone ID: LIB3145-042-Q1-K1-B5
gaaatctttgaatcaattatccctgtctgagttttttggatgagatcttgatatctgatcactaaatattaattatatacgtttttct

SEQ ID NO: 16802 - DNA, 403 bp, Gossypium hirsutum
  Clone ID: LIB3145-042-Q1-K1-B6
cacaacacagccaaagaaagaagaaaatggcgtcgaatgcggcggttccattctggcgtgcagccggcatgacttatataacctactcgaacatatgcgccaacctcgttaggaactgcttaaaggaaccttacaagactgaagcccttagtcgtgagaaagttcatttctccatctccaagtggacggatggaaagcctgaaaagcctactctccgctcagactcacctgaagaatgagatgcaagtttggtcatggaagcttcgaaactggaaggattttattttatttttagtaatttctgttatgtctgaaacataagaacagatttcaggctgagatgatgttgcacatcctaataataatgtactttgtgacttgactgccgttgacccttcacggg

SEQ ID NO: 16803 - DNA, 401 bp, Gossypium hirsutum
  Clone ID: LIB3145-042-Q1-K1-B7
gagaaactgaaaaaggcgaagtttggattgagatatagacaagtttctcttggtgcagcaacaacacaagtccgacttgctgcatcacttggggcatcattggtttggctatccggtggattaagcttggtccagttgttaatccaagaaacattaccgtcttggtttctatcagcccataatccagatcaagatggtggggaacctggaggtctagttgccatgctgagcggctatgcacttgcatactttgtagtgctttgtggtaccttggtgtggggtgtggattcctcctcaccgacatcaaaacggcgaccaaaggtccttggggcgcatttggaatttcttgcgagcgcaatagatggcaaaatatcacttggatgtgagcatgccacttggca

SEQ ID NO: 16804 - DNA, 404 bp, Gossypium hirsutum
  Clone ID: LIB3145-042-Q1-K1-B9
gaaaatatcacaaatcttcttctccttctcagaaatcttagtatcatcactatggcctcaaatcccaaggtcttctttgacatgacgatcggtggtcagcccgctggtcggattgtgatggagcttttcgcagattgcactcctcgcactgcggagaacttccgtgccctctgtactggcgagaaaggcgtcggccgcagcggtaagcccctccactacaaaagctcttctttccatcgtgtgatccctaactttatgtgccaaggaggtgacttcaccgccggaaacggtaccggaggtgaatccatctacggatcaaagttcgctgacgagaacttcatcaagaagcacactggtcccggtattctctcaatggctaacgctggacccggaactaacggatc

SEQ ID NO: 16805 - DNA, 351 bp, Gossypium hirsutum
  Clone ID: LIB3145-042-Q1-K1-C1
gtttgcatatgtgaaaatgaagtttcggaaccttttttgtttgttgagagcattcctggcactttggacattaatgtgaaggttcgcaaaagttggctactcaatgttcttcaaagttagacgaactaaaaaactggaagtggatgttccgatctctgtacaggtaagtgatactaacaacccaggttctctcgtatgaataaggccatattttattttgttaagtccatgtatattatcccatcttttgcttttattgcatcatgagatgacaaacaaatgatctgatgtacctttgttttaactgattgagaaattttatgatgaaataaagatgttataactcgtaag

SEQ ID NO: 16806 - DNA, 408 bp, Gossypium hirsutum
  unsure (1)..(408): unsure at all n locations; Clone ID: LIB3145-042-Q1-K1-C10
gaaaaaaagagagatggcgtctgaaataaaatctgcaatcttaattctgtcggtgtttttatctgtacgcttcagttcgggtgttaggttgctccaggaacagcccaatgatgaccccaaaaacatggacgctattcctcccattgatgcactcaaccctaccgagttgaatggacccggtgttggcattcacgaagatcatgttgtcccaaaaggtgctgaaattggtactcttggttttggttttgaaggtgcgcctgataaatgttgntcttctggatgttccggtaattgtaatcctggtggtttcgttctaccatttccttaaattccagaaatcccaagaattccagaaatcccacaaatcccacagatcccacanattccacaaatttcactaattccaca

SEQ ID NO: 16807 - DNA, 261 bp, Gossypium hirsutum
  unsure (1)..(261): unsure at all n locations; Clone ID: LIB3145-042-Q1-K1-C12
tctngcttctctgaagacaaccattgggggtggagctccannagattttganncatgcaagtattgggatatttcanngtagcagttgaaatctctgggtntnncaattttgatacccgatgagaaataaagtagttgagggttggtagaatgggcttatanntattatatanntagctaaacnnatttatttgctcgcaaccttatgtagatnncagcacctttctcccacgtggttttagtttaacttcttttctcaga

SEQ ID NO: 16808 - DNA, 248 bp, Gossypium hirsutum
  Clone ID: LIB3145-042-Q1-K1-C2
ggtgggagatgttgagcttcacacaggaaccgtctctaattgacactaacaaaagatgctttgtcaaataaacagggggggtctacgaacttaatgacatgggcgtgggatatgaggatgccccaccaccgcctgagattgaagaagggtgcggggaggtagacgacaaccataccctctaacttgttactgttgatctggttgtaactggagaaaatgaagactactatgctaatgacaaaattatt

SEQ ID NO: 16809 - DNA, 422 bp, Gossypium hirsutum
  Clone ID: LIB3145-042-Q1-K1-C3
gttccacttcaccgctactcctctacaggcatccacactacccttatcggcctgccaatcccaccgcgcctgacaaaccctcctcccattcctcacgcctctaaagtcaactgctacttcagttttggtttcatagataaagaatggcaagcgcgtgcttttcgacatcgccctcgtctcttcgattcagttctctcctcttctctccaaactcaagcaccaatgtcgattctaataagttgtctcttcctttccatccccttcgtcccaggaaattgaagaagtttctcagtaatcaaaagaatgcggtgaattatcagccaaaagctgtttacgcaggtgagttttgggctcctccgacaacttctcgacagggaatttggtcaataagggatgatttgcaagttcccgcattaccttac

SEQ ID NO: 16810 - DNA, 388 bp, Gossypium hirsutum
  unsure (1)..(388): unsure at all n locations; Clone ID: LIB3145-042-Q1-K1-C4
acgagaggatgatacnattcactcatggattatagtgcagctccttatcggcgttttcttgctgtttgcgcgatctgccttacaagnctttggtacanaaattggcttagtgaatganttttacttatgtttatgtactatcatatacatatatatagtaacaagttgtgctacatgttttaatataatattttttttctacttaaatgtcacttgaaaaacgtttggagagccttggcttggtgagacaaaatcaaaatcatgtacatgttttctctttgtatctaataacatttgctgaaattattggtttaaacatgtctttggatttttagttgcaaaananaaaaaaataaattattattttttaataatttttataatttat

SEQ ID NO: 16811 - DNA, 294 bp, Gossypium hirsutum
  Clone ID: LIB3145-042-Q1-K1-C5
gcgaccgccggaattcccggcgcccacgcgtcggagccatataagttagtaaataaaaacggtcttatatatggggccttgagaccaatcctgactaaatctctattgcccgtcatgctaagcggtaaaacatttacgagcttgaagggcaggccttaatgcttttcatagctcctcaagtcatgtgtgtgcatatgcgcagatcaattaaaaagaaccacaaatcgattaataaatgagaaaactggaagtgatatattcgaaaagtagccgcagaatagagttattgtgtgc

SEQ ID NO: 16812 - DNA, 366 bp, Gossypium hirsutum
  unsure (1)..(366): unsure at all n locations; Clone ID: LIB3145-042-Q1-K1-C6
cggacgcgtgggaattctcgcaaattggcggagggagtatactatggaagatatactgacccagctgaaaaaggagatggcagcctctcataatcgaaagctggtccaacctcctgagggtacctacttctagctctcgaattcgtatcgatattctggatctaatttcatttgtggttatgcaatatatagtttgtaatgcttgttgatcctttataagaacaaactgtggaattggtcaaaaaacttctcgattacttctccttggcttcatgttcttgttctcaaaccggatgctgtttttctaacagaattttatccatgtttcaaaacccanaananaaaaaaaaaaanaaaaaataaaaa

SEQ ID NO: 16813 - DNA, 368 bp, Gossypium hirsutum
  Clone ID: LIB3145-042-Q1-K1-C7
gcacatcgtggcagtggagttcgcgagctctggtgctccatttggcgcttgcggagcctactttatcgcaaattgcacagcgccagaatccaagcaagtcgatgagaagtattgcgtggggaagcccagctgccaaatccgactagatagcatacctttcaggaaccaaaatgacgcatgtacccacctcaggaagactttggccggccaactcaaatgtgcctaaacaaatgcgtgcttcgacacagcttggattaagcttcacatttgattacttttaatagagctaagacggtgcatggaggagtgctcgttctatctaatttgtatttcttaaatattaaatgaatatgtgcgaattccagaat

SEQ ID NO: 16814 - DNA, 395 bp, Gossypium hirsutum
  unsure (1)..(395): unsure at all n locations; Clone ID: LIB3145-042-Q1-K1-C8
cccacgcgtncggtaagggttacaacatagttggtctctcccagggtaacttgataggacgggctgttgtcgagttttgtgatggtgcaccccaggtgaagaatttcatctctttaggagggcctcatgctggtactgcttctgttcctctttgtggttctggttttccgtgcctgattgcggacaagctaatcaagtcagagatatacagcgactatatccaagctcatctggctccaagtggttatctaaaattaccaaatgatatacctcattatttggaaaaatgtagatttcttccgaagcttaacaacgaactaccccatgaaaggaattccacttataaggagaggttcactcgcttgcaaaacttggtacttatcttggtaagctgg

SEQ ID NO: 16815 - DNA, 402 bp, Gossypium hirsutum
  Clone ID: LIB3145-042-Q1-K1-C9
gaagccttaaacacacgagacgtcaacaccgttcaccaaatccttgctcccgacctagagtggtggttccacggtccacccactcaccagtttttgatgcgcttactcaccggcgcttcatccgacgatcctttccgtttcgaggtcgaccctgtctcagtcaccacctttggatccaccgtcatcgttgaaggctgtgataacagccgttcgatctcctgggttcacgcttggactgttcgtgatgggataatcacccaagtgagggagtatttcaacacttctctcaccgttactcgccttagagactctccaccgtcagcttgcagttcttcgacggcggagattgcgccagtgtattgcccttacgtttgggagagtagtctttccaacccggtgggg

SEQ ID NO: 16816 - DNA, 393 bp, Gossypium hirsutum
  Clone ID: LIB3145-042-Q1-K1-D1
aagaggatcagcggctcgaactataattaaaccagaggagggtagcagattctgttggcgaatgttattgatgatgctgggacttatacctgacacgccttgaataatactgctactgttatggatgaagcatatgccttgaaaaggcagggcttgactgtatatggcaaaggagggtaatgttaggatcattgttacatacgttactgccatggcttcacatcttgagtgtatagctatgtcagtatgtacatggtgggaatctcatgaaagagataattaggattctgaccataatactgacagccttagtatatttgcagagctgtggttggggctctgttctcattcaagccttaaaaaaatttcccattttatctggttgatcaacac

SEQ ID NO: 16817 - DNA, 357 bp, Gossypium hirsutum
  Clone ID: LIB3145-042-Q1-K1-D10
attcagatgatgatgaacttagagatactgaaactactgataacatggatccggctgatgcaaaacgtgcaaggagaatgcggtcaaatcgagaatcagctagacgctcaaggagaagaaagcaagcacatatgaatgaacttgaaacgcaggttggccaactaagagttgaacattctacattactcaagagtctcactgacacgaatcacaagtatgatgaagctgctgtggacaatcgaattctgaaggctgatattgaaacattaagagcaaaggtaaaaatggctgaagaaacagttaagcgggtgacggggattaactttaactctggtcttctatctaagcacaatgtag

SEQ ID NO: 16818 - DNA, 285 bp, Gossypium hirsutum
  Clone ID: LIB3145-042-Q1-K1-D11
agagaattggtgcaacaaaaaaaaaagcaaattaaattaagttagacatgtgatagcaaaggctgagtttttttttggctttcagcttttctatcatttgaccattaaactgatttttgagaagggaagatattacttgtatttgattgcagagacattagctttattgtttttgagaaccgaagatattactaatggatcttcgattttagctcaagtgtttaagctttacgtattaagttttcttatagttatgaacagttgagtaatttcaataaacaaaaa

SEQ ID NO: 16819 - DNA, 435 bp, Gossypium hirsutum
  Clone ID: LIB3145-042-Q1-K1-D12
actgtgtcttctttcaacaacaaacaacatatataaccatattatatacatacatacacaaggtctttccttctaaggaagccatgactggcaaagaaatcctccacaagatgaaggagaaagttcaagaaaaagtaggcttaaacccttctaataatgctgaatctggaaaagggaagagtaagatgtcgaagaatataacacatggttatcatttagtgaaggggaaagcgaatcatccaatggaagactacgttttcgcggagtttaagcaagtcaatggcagtgagctcggtttatttgccatattcgatggccatttgagccatgttattcccgattatttgaaggcgaacttgtttaacaatatcttgaatgagcccgacttttggacggaaccagagaatgcgattaggaaagcgtatcgtttaacgg

SEQ ID NO: 16820 - DNA, 348 bp, Gossypium hirsutum
  Clone ID: LIB3145-042-Q1-K1-D2
cccacgcgtccgtctgcatcagctggacagactggtccatatgctgctggcggtagaaagttgtatgttggtaacctacatttcaacattacagaagatcaactgcgtcaggtttttgaaccttttggttctgtggagctcgttcagttgcctcttgatgaaactggtcattctaaaggttttggttttgtccagtttgcccgtctggaagatgcaaagaatgcattgaatttgaacggacagctggagattgggggtcgagtaatcaaggtatcgactgttactgatcaaggtgtatcgcaagattttggaacaaatgcttctgctgctgatcttgatgatgatgat

SEQ ID NO: 16821 - DNA, 426 bp, Gossypium hirsutum
  Clone ID: LIB3145-042-Q1-K1-D3
cccacgcgtccgcacttctgttttccttgttctcttctacattcagcgaaggggtgctctgagatcacataccaaaatggtgaaggccgttgccgtccttggcagcaatgaaggtgttagcggaactgttttcttctcccaagaaggagatggtccaactaccgtgactgggaacctttctggtcttaagccgggactccatggcttccatgttcatgcccttggggacacaactaacgggtgcatgtcaactggaccccattttaatcctgctggcaaagagcatggtgcttcagaagatgagaaccgccatgccggtgatctagggaatgtcactgttggtgatgatggctgtgcaagctttttcatcaccgacatacagatttctttcacaggcccaaacttcattatcggaagagctgtatt

SEQ ID NO: 16822 - DNA, 354 bp, Gossypium hirsutum
  Clone ID: LIB3145-042-Q1-K1-D4
ctcaaaatctcaaacccagatttgttctctctctctctctctctctatttccaatcaatgaattcctccattggaggagcttagggtttgttggtgttctggtctttgctttgtctgaaaaataaacagaattataaacgaacaccaacgccatgggaagatttgaagagagaggattcgattcagtggtttgccctaagcctatccgaacctttagatggtctaccaacagctgttatcagactgagatggctgattcaaaaactggtgcagagcttcttgatataatcctccccgagggaaggtatggggccgagaatcccaccaaccaaatggcttcatcaccaccgtatt

SEQ ID NO: 16823 - DNA, 385 bp, Gossypium hirsutum
  Clone ID: LIB3145-042-Q1-K1-D5
ctccgtatcaatggctttgccaaaccagcaaactgtagattatccgagcttcaagctcgttatcgtcggcgatggaggaactggaaaaactaccttcgtgaagaggcatctaactggagagtttgaaaagaaatacgagccaaccattggtgtggaggttcatcccttggacttcttcactaactgtggcaaaatccgtttctactgctgggatactgctggacaggagaagttcggtggtctcagagatggttactacatccatgggcaatgcgccgtaattatgtttgatgtaactgcccggttgacatacaagaatgttccaacatggcatcgggatctttgcagagtgtgtgagaatattcctattgttctatgtggaaac

SEQ ID NO: 16824 - DNA, 430 bp, Gossypium hirsutum
  Clone ID: LIB3145-042-Q1-K1-D6
cccacgcgtccgagaagagatctcttttctaacacaaggagaagatccatacgatgatggtgttgtccgtaagttgttccactcgaatttgaaattgcttctagttacagagggcccggatggttgccgttattatactcaggaattcagtgggaaagtgaagggcttgaaagtagaagccgtagacaccactggtgccggggatgcttttgttgctggaacattatcgcaactagcttctgatctttccttgattcaggacgaagaccaattgagaaatgctctcaagttttctaacgtttgcggtgcattgaccgtgacagaaagaggtgcaattcccgctttgccgactagagaagctgttgttaatgctctcgtcaaaaccgtggcctaagttttcttccccaaacaccgtgattagccaactttt

SEQ ID NO: 16825 - DNA, 251 bp, Gossypium hirsutum
  Clone ID: LIB3145-042-Q1-K1-D7
agctcttggttgatgcacctgatatgattgagaaggtccataagagctggacgtgcactttaagggtaacgtatggtctggtgtgattttgaagctttgtttagcattaggttgttaagaatgtagatattgtttttgggaagtgtcaatatggatttttaggatcttgtcattcttcacaagcctcataagtattctatatgttcttttaatcctttttgtggtataagaatgttcaatgacttgattat

SEQ ID NO: 16826 - DNA, 402 bp, Gossypium hirsutum
  unsure (1)..(402): unsure at all n locations; Clone ID: LIB3145-042-Q1-K1-D8
tgacatctcctcctccaaggcttgctgattttggttattcaaatgaaatgtttgaaaaagacatggaaacttggcgccagcgggtagagaattattggaatctcttgagtccaaagattgaggccaacactttgagaaatttgatggacatgaaagcgaacatgggatcttttgcggcttctctaaaagagaggaatgtttgggtgatgaatgtcatccctgaggatggaccaaacacacttaagttgatatatgacagaggcctcattggcactactcataactggtgtgaagccttttccacataccctcgaacctatgatttactccatgcttggactgtcttttctgatattgagaagaagggctgcagtgctgaagatttgntactcgagatggatc

SEQ ID NO: 16827 - DNA, 324 bp, Gossypium hirsutum
  Clone ID: LIB3145-042-Q1-K1-D9
ctcattttaacttttttcgaagtttatttgaatttctttatgtcttatagtttttctgactttgagatgttttttttttcaaattatgaactaaattccctagatacctagggaaaatgaaacctatgatgaattttattatttgatttctgaattacatgataaatacttgattcttgttctcaaaaaaaaaaaaaaaaaaaaaaaaaaaaaaaaaaaaaaaaaaaaaagggcggacgatttaaaggatccaagcttgggggcccgtgcatgcgacgccatacctcttctatagggttaccaaaatttaattctctggtcggg

SEQ ID NO: 16828 - DNA, 420 bp, Gossypium hirsutum
  Clone ID: LIB3145-042-Q1-K1-E1
ttttcttcttcttcttcgattatttttcgccggaactctcttaaaaagcaatgggaaacaatccctcgcagcttcttccgtcagagttgatagataggtgcatagggtccaaaatatgggtgataatgaaaggggacaaggagctcgtgggtactcttagaggcttcgatgtttacgtcaacatggtcctcgaagatgtcactgaatatgagatcaccactgaaggaagacggatcacaaagcttgatcaaattttgcttaatggaaacaacatcgccattttggtcccaggaggctcacctgatcccgaatgaaagtgttagctcctccatgtttcttttaatgttattaattcctggccatattctcagttttagtgagaaatctggcgcagaacttaaatagttaacttggatcact

SEQ ID NO: 16829 - DNA, 415 bp, Gossypium hirsutum
  Clone ID: LIB3145-042-Q1-K1-E10
caagcaccgccacattccgtcttggcaatcccctttcctcttcctcttcctcatccgtttactcctccaagaaattgcctgtcaatttcagaaaatttgcgcttcagacgtcgcctgtgaaaagcttttctgtttcttgtactctaactagaaaaccagtcccagctgctccggtttccatggattcggacccgaacggatggcaacgacccgactcgtttggtcggtttggcaaatttggcggcaaatacgttcccgagaccctaatgtctgccctctctgagctggatgcggcttttcattccctctccaaagatgaaaaattccaggaagaattagctgggattttgaaagactatgttggtagggaaagtccactttattttgcagagcggctgtctgaacattacaagcg

SEQ ID NO: 16830 - DNA, 419 bp, Gossypium hirsutum
  Clone ID: LIB3145-042-Q1-K1-E11
tccggtttttggtgccgtagcttgtctctcatgtcctattagggtcctgtttgcatccaaccagttgtgtccaagagctaggctttgatacttaaaataagaaccactatgggtatttctagttatagtttctttctgtttttatttgttgccataatcccaaccctagaagctcatatcgctgagtatgacgagtactggacggcacgagaattggaagccattgagaacctggacaaggcctatcactccaaccctgaggaggtggtccggcattacaatgaccacttctctaggaccatgctcgagttttatatcaccaaaagggtgttggcagaatcaaaaaagggtccctgggaggttaccaaccacgttgacagttgctggcgatgtgaacctgactgggaaaagaataagaa

SEQ ID NO: 16831 - DNA, 419 bp, Gossypium hirsutum
  Clone ID: LIB3145-042-Q1-K1-E2
aaaaatcaatgggaacctcatgaacttgtacccaaaaaggtgatgaaattaatagaatcctgagtgggtcttctccccattgcaacttatgcagatggttattaaatgtccaagaagaccctttaataactctctccatatccataatgtgaaaaaatttaaaaatacacctctttcccccagatctctaatttgtacccctttgattggatgccataaattagccataatacttttcattgctgggtaatggataatactggcagtaaggaaacacccaactagacttaaatcttcttctttacttaccgattctatttctccttccatttgcaggatttcttcctcttcgtcatcaagggatagagttgtaaagtcagattccatggtcgttatacgtgaagaatagaaagagaaga

SEQ ID NO: 16832 - DNA, 409 bp, Gossypium hirsutum
  Clone ID: LIB3145-042-Q1-K1-E3
attcaatcaaacccctgcctccatggtactttaacagcttagtgtttacaattgtcagggactaaaaaataatatttctatttgcagctgaagaatttggtgttaagggattggtacctgcttatcttgatccaaaaacacagctacaagatctccttactggtgttagttttgcctctggtgctgcaggatatgatcctctcactgcaaaaaccgcgaatgtaataccgatgtcgggtcagttagagctgttcaaggaatgtataaagaagataaaaggaggagtgggtgaagagagagctgcaactataatttcagaagctatatatataagttcaacgcccgctatgctaatcagttcttgcaagacttatatggattaggagcaagaagaatagggttgttgggg

SEQ ID NO: 16833 - DNA, 434 bp, Gossypium hirsutum
  Clone ID: LIB3145-042-Q1-K1-E4
gacaagtacaataaagagaagttattggagttttgtgacgtgcttgacataccagttataaaggctactacaaggaaggaagatatcattataaagctgatggactttttgatggctcctcatgctacaaccactgttctacttgctgaacaagaaaagtcaagtaagggtaaaaagcgcaaaagggctacgaagtctgggaccacagttaaacgatcaacaaagagtcgaagaaagagtgaggatactccaaaatctaggaaaaagaatatgcctgattctgaggatgagtctgaagaagaggaggaggaagaagaagaaaaggaagaagaagagaaggaagaggaacagaatgaagaagagaaaaatgaaaatggagttgcagaaaaatctgaggacgagatgcctgaggattcttgaagtgaagagaaaaa

SEQ ID NO: 16834 - DNA, 360 bp, Gossypium hirsutum
  Clone ID: LIB3145-042-Q1-K1-E5
agccaattaggaccttgtggaacttgtgaatttctgaacctttttaaaatgattttagagaaatcggtgtgataattggcattggcatcaatggtgtgttctgtttttagctcttttaaaaaagacaaaaaggataccgaaaaacttaacgaaaccaaccaaaaaaactttcacaccaaagtctgaatggccttgcacaagcgatgccagaagtactatgaagctggtgctcgctttgctaaatggcgtgctgtccttaagatcagtgctaatgagccgaccccgcttgcaatgcaagaaaattccaaccggctagctatgtatgctgtcatctgtcaggaatgccgccttgttccaatc

SEQ ID NO: 16835 - DNA, 406 bp, Gossypium hirsutum
  Clone ID: LIB3145-042-Q1-K1-E6
cccacgcgtccgcccacgcgtccgataaaagataaaaatatcaaattgaacacgcggatgacaaggaggggtgaatgggaaataatcccatcctccaaaacgcgtagttccattagggattgaaatgtgatgaaaataaaattatcaggcttaattgaaagaaataaaaacaatcagaaggatctaattgaaacaagtgtaaaatgcggaaggacctagagggatattctcccattttaaaagaaaacacgcggatccctgggtgcgggtagcccaaaacggtgcggttttggcgctaaaacccccaggtgaaacgatgttattttatttgtgctataaaagcaaaaatttattcaaaaattttcatttctcccttctttaaaacaaaaaataaaccagaaaaacc

SEQ ID NO: 16836 - DNA, 400 bp, Gossypium hirsutum
  Clone ID: LIB3145-042-Q1-K1-E7
cccacgcgtccgatcttgaagttttttattttagctaaaattttattagctttttatataatttttacaatttcttttttgtataaagtttggtcttctaaaaatctttcctgtctcaaactcaacaggtagtcaataagcactaaaactgatttttcacagttttcttcttctatttcagcattttcaacagctacgtacaatggttttcaacagagcgttggggacttgaaagaagctgatttgaaaggaaagaaagtgtttgttagagtcgatctgaacgttccattggatgataacttcaacataactgatgacacaaggatccgtgctgctgttcccaccaccaaatgatcaatcctgttgcatcaatccttggaattctacaagaaaacatttt

SEQ ID NO: 16837 - DNA, 270 bp, Gossypium hirsutum
  Clone ID: LIB3145-042-Q1-K1-E8
cccacgcgtgcgataaagagggctatagtgagctacaaggtggtacacagtctctctgtgaggcccatcgttggaaccctagctagaatcgccaccgccttaggagtctccgaactaatcctagacggccgccgcgacttcaacgccttctgcagctaccggttcaccttccatcattgatatcgccacttccattctctcaccgacgctcgactattacttagagagattgattgtgatatttgcggagttgacatcacagacgacgct

SEQ ID NO: 16838 - DNA, 384 bp, Gossypium hirsutum
  Clone ID: LIB3145-042-Q1-K1-E9
cgaattcccggtcaccacgcgtccgatgcacctaactatgacgaattcgattgaatggtcgattgattatggcaggaatttagtgatcactactgaatcaaaatcaaactttggggggaaatggagttgtccaagatttttacgatatgttgttctgtattgctcttgtgctcctcgctggcctatggtcaagcaaggagccctcctgctccggtcgcaatgagcccaacttcaacaccagtcccagcaccggcaccgtcatatgtaaacctcacttatttactctaagtggctgatgcatttacactttccttgactaccttgagtccactaaagtgattgacaccttttaaaaccaagccaacaacactgatcaagggatta

SEQ ID NO: 16839 - DNA, 427 bp, Gossypium hirsutum
  Clone ID: LIB3145-042-Q1-K1-F1
ccaggagctcttcagtacctcagtggtgttattctcttcgaggaaaccctttatcaaaaaaccgcttcgggcaagcccttcgttgatgttttgaaggaaggtggtgtcctccctggcatcaaggtcgacaagggtaccgttgagcttaacggaaccaaccgcgagactttcacccagggtctggatggccttgcacagcgatgccagaagtactatgaagctggtgctcgctttgctaaatggcgtgctgtccttaagatcagtgctaatgagccaaccgagcttgcaatccaagaaaatgccaacgggctagctatgtatgctgccatctgccagcaatgtggccttgttccaatcgtcgaacctgaaattcttgttgacggatcacatgacattcaaaagtgtgctgcagtgacagagcgtgttc

SEQ ID NO: 16840 - DNA, 388 bp, Gossypium hirsutum
  Clone ID: LIB3145-042-Q1-K1-F10
tctaggatcatatgcagtattttgtaatagtttataggagctacgtactgtgaactcccccgacgcttcagcactccaaacttgaaagtcttcgtgtggtctctcagccaacgggatgctgagaatcatatctgctacatccatcgggaaggtggtatctgagtgcaactgctcaacccatgccccattcttcaacatctccacaaacttcagatctaaggaccccaccaatagcaggcagtaaatctttcttatcaaattctagggaacacgattcaatttttaaccaaaaaggggatgaattttatatcttggacgaaagagttgtgaatcaagaccctccggtggggtaattgctatcttcaatcgttgtagatggtgagtagat

SEQ ID NO: 16841 - DNA, 329 bp, Gossypium hirsutum
  Clone ID: LIB3145-042-Q1-K1-F11
aaagacaacacgttcgatggtgcgtactctatagaggcgacgtgccacgcgccgaaactggaagaagtgtacgcggaggtgttccgggtgctgaaaccgggatctctatacgtgtcttacgagtgggtgacgactgacaggtacagaggtgataaccctgaacacgtggaggttattcaaggtatcgaaagaggcgatgctttgcccggtctcaggaactacaaggacatatcggaggttgcaaaaaaggtttgcttcgaggttgttaaagagaaggatctagtcaagccaccggccataccctgggggaccaggcttaagaaggggag

SEQ ID NO: 16842 - DNA, 435 bp, Gossypium hirsutum
  Clone ID: LIB3145-042-Q1-K1-F12
gttctcttcctatctggcatggtggccatgatcatgatgagaacattgtacaaagatatcgcaaactataatcagttggaaactcaagacgaggcacaagaagaaacgggatggaaacttgttcacggggatgtctttaggcccccaatcaattatggtttactctgtgtttatgttggcacaggtgtccagattttcgcaatgtcgcttgtgacgatgatatttgcgttgctgggctttttgtctccttccaatcgtggagggcttatgacagctatggttcttttgtgggttttcatgggaatatttgccggttactcttcatcacgtctatataagatgttcaagggcacagagtggaagagaattactttgaaaactgcatttatgtttccgggtatcttattcgccaatctttttgtactgaatgcacta

SEQ ID NO: 16843 - DNA, 323 bp, Gossypium hirsutum
  Clone ID: LIB3145-042-Q1-K1-F2
atttttattttatttcccaatttaagccatatgacggaaacgccgttctcgaagcgccctgaggacgtcgttttaaatatattttcgaagctcgaagaggatctcgctagctgggcaagtcttgcttgtgtctgcaccagattctcttctctgattcgtaatacctgcttgaagcttaaatgttccaaaaccatacccgccgttttcgccgacctttttttctcttcctccgccccacccggcggatgggcttctctttataagctgtctgtcttgctgtcaagcctccttcacgccggtgtccttcttgacaactctgattt

SEQ ID NO: 16844 - DNA, 398 bp, Gossypium hirsutum
  Clone ID: LIB3145-042-Q1-K1-F3
cccacgcgtccggtagaatcatcagtgtttgttaattatagtagaacttttattattgtggcccaaaaaaaaaaaaaaaaaaaaaaaaaaaaaaaaaaaaaaaaaaaaaaaaaaaaaaaaaaaaaaaaaaaaaataaaaaaaaaaaaaaaaaaaaaaaaaaaaaaataattgggtggctttttaaaaaaatcaaattttacatacttttaaatgcaattttatattttttttttagggtaatcaaaattaattacacttgcccttaattttaaaaatgttttaaaattgtaaaaacctttggttttaccaaaataatatctttgtattaaaaatattctctttttttaaattttaattaaataattaaaaaattttaataaaaaaaatttcaattttt

SEQ ID NO: 16845 - DNA, 353 bp, Gossypium hirsutum
  Clone ID: LIB3145-042-Q1-K1-F4
gtttttgctgtatatacatacaaaggtacgtacgtacatacatacatatatacatatgtgtctttaatttgtttttcgcttcttttggtcaaggttggatatggtgaaattgcatagaagtctcgaagatgagggctttgattcccatgtgaagtgaaatgtatatcatattgggtcttggttttatatgcatcattcatgttttttttgtcttttaagaatgtaagaatgtaacttccggtgcccagtatgatcaactgagcaggaaaaacaatgtaactgatgcattaactcctctgtatgtatgtatgtacgtatgtatgttgcattaccttgattatatgctagtgatt

SEQ ID NO: 16846 - DNA, 408 bp, Gossypium hirsutum
  Clone ID: LIB3145-042-Q1-K1-F5
gtcgtggacaagattaaaagaatcgtgtagctacacctttataaaagccgtcaaatcatgtaagagtcgtttctcttagctaccatcaaatatcaattctaaaaaaaaaaaaaatccaaaaaaagattgttttactgaagaagaaaaaaaatgcccgacgaggagactgcaaccccaacggcatcggcaccggcaactccgggaacgccaggtggaccgctgttcaattccatgagggtggattcactgtcatatgatcggaagtcaatgcctcgatgcaaatgctttccggtgactgccccaacgtggggtcaacctcacacatgcttcaccgacttccctgcacctgacgtatcccttacccgaaagctgggggcagaatttgtgggaaccttcatcctaattttt

SEQ ID NO: 16847 - DNA, 430 bp, Gossypium hirsutum
  Clone ID: LIB3145-042-Q1-K1-F6
atttattctccatccggatgctagttacaaaattcttattgataatgttgagaaacgaactggtagcttgtacactgattgggatcttctcccaccgaagagaatcaaggatcccagtgcaaagaagcctgaagattgggatgacaaggaattcatccctgatcctgaagacaagaagccagagggttatgatgacattccaaaagaaattcctgatcctgatgctaagaagccagaagattgggatgatgaagaagatggtgaatggaccccctcaacaattcccaacccagagtacaatggcccatggaagcctaagaaaatcaagaaccccaactacaagggcaagtggaaggctccaaaaattgacaacccagatttcaaggatgatcctgatctttatgttttcccaacttggagcatgttggta

SEQ ID NO: 16848 - DNA, 427 bp, Gossypium hirsutum
  Clone ID: LIB3145-042-Q1-K1-F7
gagaatagatgaacttgtttaatgttgggaacttagttggagaacttgtgaatagctaaacatggtatatttctttgttttggtaaaagaatctaatgccagtaagtgcccattggggtatattcctgttccattttttaacataagttttggcttttctctgctaaagcttgatttatacttaaaacatttaatcaagagccattcttctctctacggcgcttggctcacagccttctgtttgtaaatttgttcccaggtagaatatgatattctcagatgctagcatttgatgttggtgaattatgtgacctttggtggagagtgtgaagctctgcgctgagcaaatagatgtaagcagttggcttttagtagtaatgaagaacatacaagtgtttccctttttttataagtaattatatgtata

SEQ ID NO: 16849 - DNA, 406 bp, Gossypium hirsutum
  unsure (1)..(406): unsure at all n locations; Clone ID: LIB3145-042-Q1-K1-F8
cccacgcgtccggttttgtatttcatactcatttagcccctttcattagcatcgaaatcactccagttttctttatcactgaaaaatgtcttgctgtggtggaaactgtggctgcggttctggctgcaagtgtggcagtggctgtggaggatgcaagatgtacccagacctgaacgttgccgagatgaccacaactgagactctggttcttggtgtagcaccccagaaagcacactttgagggagctgagatggaattcggngctgagaacggctgcaagtgtggagacaactgcacctgcaacccttgcaattgtaaatgattagagaccaaagccaaagctccctggaagcagagacgcctttgtctttaaaaaataatatgttttgttggttatgtgttttta

SEQ ID NO: 16850 - DNA, 353 bp, Gossypium hirsutum
  Clone ID: LIB3145-042-Q1-K1-F9
gtgaagcagtgcaaagctctcttcttaagcaacccttgaacgataccgcttttcttcttggtattaccgagttgtatcgagtggtttatgggaaagaatatgtggcaagccgggtgctggctcaagtatgtagtttttatattattcagtaatagttcaaagtggttaaattttgggtatttagaacttgcagaaaatatggtatcaccatgattctcttttactatcatttgagggaatcatgaattttggacattcactttattaaggttgcagcaatttatatatgtatttatatatacactgaaagccgcaggatgaactgctcaataataaatatgatctgtgtctta

SEQ ID NO: 16851 - DNA, 399 bp, Gossypium hirsutum
  Clone ID: LIB3145-042-Q1-K1-G10
attttatgtcatgcatgaatatataatgctcatgaactttctaaacttgtttgttgaattagaaattggcttctcttctcgataggatttaatttctctcgttttctatgcatgattgttggagttacgggttgctaaaggaaaatcggcaccatcagttgctcctcaagtttctgttagcaagaacctgccccctgcttctgactgggaccatgctccccagcacactgctcagcagcctgttctctcctcaaatgttgtcgagatgtctggggttgatatggttgatgaaatttcacccatagagtatgaaggtgaaataaaatctgtttatgtaaggaacttgctctctactgtttctgagtctgaaattgaagaggaattcaagaaatttggtga

SEQ ID NO: 16852 - DNA, 431 bp, Gossypium hirsutum
  Clone ID: LIB3145-042-Q1-K1-G11
cggacgcgtccgcccacgcgtccggagaccttattttcaataagatacgggcagtatttggttttggaatatgattaattttattccaaaacgaggaattcttttttgggtttgaattattggaacttcatgaagaattggaacttcatgaagacttattctttcaactattttattgtgaaagatttataagactttgcaactctgatcttggtcctactggttcatggttttaaagttgaaacttggaccgagtgtctctgttgtcttgtttgccaatacccaaactatccttttagacttataataatgacaatgatgaaaatgttgccttccagcaacttaaagtctgtcagggcgcagagtgtctccttgaggatgtatatcctttgtgtacatattaatgttatgatgttacttaagggcgaaat

SEQ ID NO: 16853 - DNA, 429 bp, Gossypium hirsutum
  Clone ID: LIB3145-042-Q1-K1-G12
cccacgcgtccgggctataaaaacggcaacctaaatacgagaagtgtacaaaagttgtacagaaatgagattggaaacaacggtggaagtgtcagcggtgacgggaatagcggtgggttcagaattaggatcccaaccggagttagtatagctcagccagggccaagattttatggaaaaatagatcacaagtacggtgcaaacccaaatcctaaccccaatattaacgcgaattctcaccccagtaagggtaattttggtgggtcgggttccggatcggcttatgggactaggattttaagagggtttgaggatctgcccgagaaaacggcagcatcagggaagagggaaagggaaagagatgctgttacagagatggtgtcagctataaaagtgttaagagatgggttcgtaaggatggagcagatg

SEQ ID NO: 16854 - DNA, 178 bp, Gossypium hirsutum
  Clone ID: LIB3145-042-Q1-K1-G3
cagacgcgtgggctcctttactaacattacatcctatctgaaaccctaaattccatggcgagttgttactgatgcgaagaaaaattctacttaaacaaccccccccttcatggctacctctatcaaatgcttgcttctttcaaatacaacgttttcagcagctaccccgcttccaatg

SEQ ID NO: 16855 - DNA, 384 bp, Gossypium hirsutum
  Clone ID: LIB3145-042-Q1-K1-G5
gaaagaagggggaaaaatgccggcagtttacggatccagattgacgactttcgaggattcagaaaaagagagcgaatacggttatgttcgtaaggtgtctggaccagtcgtcgttgctgatggaatggctggtgctgccatgtatgaattagtccgtgttggacatgataatctaattggtgaaattattcggttggaaggagactctgctacaatccaagtttatgaagaaacagctggcctgatggttaatgatccagttctgcggacacacaagcccctgtctgttgagttgggaccaggaatattgggaaacatttttgatggcattcagaagcctttgaaaactattgccaaaagatcgggtgatgtgtatatccctag

SEQ ID NO: 16856 - DNA, 187 bp, Gossypium hirsutum
  Clone ID: LIB3145-042-Q1-K1-G6
aataaaatgtttaaattgcctttttttttttttccagattgactacttacgggggggctgtataagagagcggatcccgctactttcttaaggcgtctttaccaaatgtcttttcttatagaatttctcgtgtctccatgttatttatcaatcttccacgctcttttttatctaattgttgaaattt

SEQ ID NO: 16857 - DNA, 432 bp, Gossypium hirsutum
  Clone ID: LIB3145-042-Q1-K1-G7
ctgtggaagacggtactacatttgcagcagatgctgttatcgttgctgttcctctaggtgtactaaaagccaagacaatcaagttcgaaccaaggcttcctgaatggaaggaagcagcaattgatgaacttggagtgggaattgagaataaaattatattgcactttgacaaggtgttttggcctaatgtggagtttttgggagttgttgctgacacatcttatcattgcagctactttctaaaccttcataaggcgacaggtcattctgtcctcgtttatatgcctgctgggcagctggccagagacattgagaaaatgtctgatgaagctgctgtggagtttgcttttatgcagctcaagaagatccttccagaggcatgggccccgattcagtatcttgtttctcgatggggcacagatgtgaacacac

SEQ ID NO: 16858 - DNA, 383 bp, Gossypium hirsutum
  unsure (1)..(383): unsure at all n locations; Clone ID: LIB3145-042-Q1-K1-G8
atttttaaaatatcaaatccttcgaaaaatcctccccatccaatcaccacccgaaaccatggccactccttccccacgcgaagaaaatgtctacatggccaaactcgccgagcaagccgagcgctacgaggagatggtcaagttcatggagaacgtcgtctccgccgtccccgctcccgacgaactctccgtcgaggaacgtaacctcctctctgtcgcctacaagaacgtcatcggcgcccgccgtgcttcctggaggatcgtctcctccatcgagcanaaagaggaaggccgtggcaacgccgaccacgtcgccgtcatccgtgactacagggccaagatcgaggccgagttgtccgagatttgcgctggaattttgaagc

SEQ ID NO: 16859 - DNA, 412 bp, Gossypium hirsutum
  Clone ID: LIB3145-042-Q1-K1-G9
gcaccacctaaagagtagccgtttaaagttgccacaattagagcaggagcttcagcgggcacggcagcagggtatattcatatcaagctctggagatcaaagccattcgatgggcggaaacggtgccatggcatttgatgtagaatatgcacgatggttggaagagcaaaaccgacaaattaatgagctgagaacggcagtaaattctcatgcaagcgatgcagaacttcgtattattgttgatggtgtaatggctcactatgatgaaattttcaggttgaagagcaatgcagctaaggctgatgttttccatttgttgtcaggcatgtggaaaacacctgctgagaggtgtttcttatggcttggtggtttccgttcatctgagcttctaaagcttctttgtaatcaattg

SEQ ID NO: 16860 - DNA, 389 bp, Gossypium hirsutum
  Clone ID: LIB3145-042-Q1-K1-H1
aaatagaggaaataataggaccaaaagatgaggaagacaatcacaagggaaatggaacgcaagctccaacaaagttcagccttcccaaattaaaggagttagaattgacgtgcttaccagagctgaagagcatatgcagttcaaatagggaaatggtatgcaactctcttaggaaaattaaagtacggaactgtacgaagctaaaaaggatgcctctgtatcttcctctttttcaagacacacaccaatcagctccttctgctcatcctttcgaaagaatccgcatatgtccaaaggagtggtgggaatcagtagagtgggactatccgaatgctaaggaggttctgcgaccttggttgaacttgtattagcgctgctggaagcctttg

SEQ ID NO: 16861 - DNA, 349 bp, Gossypium hirsutum
  unsure (1)..(349): unsure at all n locations; Clone ID: LIB3145-042-Q1-K1-H10
gtttgggttataatatggggactgaagttacgacctcagattgttgatcgaacggattcggttacctccgacggcgtgtcctcgccggagatacggaaacggagctttaatcctagtattatatactacacatacaatggaaatggtagatctaacaggaaacccgtcagaggaagcggatcggatcggagcaggggatttcgaagaaatacagctcgcgatgacttgagacggtgggaacaatgtatggtggagaangtacgatatgagaaaggtgagtcgtggattnaagatncaagatcgaaacngcggtggtggaaggaaagggttggttgtatgggtcggatcg

SEQ ID NO: 16862 - DNA, 420 bp, Gossypium hirsutum
  Clone ID: LIB3145-042-Q1-K1-H11
agatttcaccccttaggtttctctttcctcacagagacagagagagaatcagaggagcttaatcgagatttgatattcctcaccacagatggatcagatattgaacaaggtgggctcctattggctcggccagaaggccaacaaggagatcgattccgtcggcgacgacctcaactcattatccaccagtattgaagggggagccaaatggttggttaataaaatcaaaggaaaaatgcaaaagccgttgccagagctgttaagagagtataacctgccaataggaatcttccctcgtgatgccacaaattatgaattcaatgaagagactgggaagctcactgtttttattccagcaatatgtgaagtgggatacaaggactcatctgttctgcgcttcttcaccactgtgactgggta

SEQ ID NO: 16863 - DNA, 364 bp, Gossypium hirsutum
  Clone ID: LIB3145-042-Q1-K1-H12
caacaacgtctcatattcgccggaaaacagctcgaagatggccgtaccttggctgactacaacatccagaaagaatcaacacttcatcttgttctgaggttgagaggtggaattattgagccttctttgatggctttggctcgcaaatacaaccaagacaagatgatttgccgcaagtgttatgctcgtctgcatccaagagccgtgaactgccgcaagaagaagtgtggtcacagcaatcagttgaggccgaaaaagaagatcaagtagacactgactagtgttatactgtctgctttaaaagaaattgaatgtcagactaagaaaatatttccatttgggtcttttgctattattctatttt

SEQ ID NO: 16864 - DNA, 390 bp, Gossypium hirsutum
  Clone ID: LIB3145-042-Q1-K1-H2
caacaacgtctcatattctccggaaaacatctcgaacaaggccgtgccttggcgggcggaacatacagaaagaatcaacacttcatcttgttctgaagatgagaggacgaattattgaaccttctttgatggctttggctcgcaaatacaacctacacaagatgattagccgcaagagttatgctcatctgtattcaagaaccgtgaactgccgtaagaaaaattgagggcacagcaattaactgaagcccaaaaagaagatcaagtatacactgactagtgttatactttccgctttaaaagaaattgaatgtcagactaagaaaatatttccatttgactcttttgctattatactatatttgttaagatattcatatgcggttcccg

SEQ ID NO: 16865 - DNA, 344 bp, Gossypium hirsutum
  Clone ID: LIB3145-042-Q1-K1-H5
gaagaacttcagccaccagctaaaaagcttaaatgagctcgggtcttttttctcgttcttttattttgccttgctgcgttgtgtagtgggaagttatgtctgtctgtctgtctaaattagagtagaggggattgtgacatttcagcagaacagacttgtttccatatttctgcttccattcttctcattcaaggattacaaagaaaaatttccacttagatgtattgaaatataaataaaattaatgtttagtgattttttaaaaaataaaatattaactgttgtcaattaccatccttgtactgttgcttcccatcttaaatataaaaaccaataactattcc

SEQ ID NO: 16866 - DNA, 363 bp, Gossypium hirsutum
  Clone ID: LIB3145-042-Q1-K1-H6
tgcaaatgccgcaaggcaacaaagttatattgttttgtgcacaaggttccagtgggtggagaatgcatctgttttcctgagcatcaaatatgtgtgattcgtacttactcggaatgggtaatagatggagagtataactggcctcccaagtgttgcaaatgccaagctgtgcttgaggagggtgctggctctgaaactactcggttgggttgcttacatgttatacacacaaattgcttgatttctcatatcaaaggcttttctctgcacactgcacctgctggctatacatgtccttcatgttctacatctatatggccctccaaaaatgtaaaagaattaagcatttcgtcttcattcact

SEQ ID NO: 16867 - DNA, 424 bp, Gossypium hirsutum
  unsure (1)..(424): unsure at all n locations; Clone ID: LIB3145-042-Q1-K1-H7
ccacgtccatcttttcctgtgttaaatcagcaatagaaaattgaaggtatgaaatctctgatgtagtttgtcctggttcagtgttcacgtgcatttggttgactggagaaaatagtgctttactatacccactctggtttcaactttctgaattcccattaaccttctcaatcagttgttgattataaggtatgtgcctactacctgtcgacaattgagtaaaccatctcttgagattgaaaattgagataatattgttgtggggtagttggctcgaggttgagggtgaagttaattgtatactattattatcaggtcggtgagtaataggccagtagaaagctagagtgttggtgagtcgactggacttctcttctgtatgacatttggcattggcagntaagttcttttcttttgcgtgtca

SEQ ID NO: 16868 - DNA, 404 bp, Gossypium hirsutum
  Clone ID: LIB3145-042-Q1-K1-H8
attcaatagttggaattttccttttgcttctcatcccaattacagaatataagttttaaggtttagaaaagagaaacacccattttcaagtttcattacctttcaaacctgacaattgttgggttggtatcatgtttgtgtagtttctcatgtcaagttattttatgattatataacttttggcattttaataatttatgtttatatagatttggcatatttttgtaaaaaaaaaaagaaaattgaaaatatattagttgaaaagtaattggctcgaggttgaaggagaaagaaaattggctaccgttattatcaggtcggtgagaaataagtcagtagaaagctatagtgttggtgagtcgactggacttctcttctggatgacatttggcattgggaagaaa

SEQ ID NO: 16869 - DNA, 275 bp, Gossypium hirsutum
  Clone ID: LIB3145-042-Q1-K1-H9
aaagaattggtgcaccaaaaaaaaaagcaaattaaattaagttagacatgtgatagcaaaggctaagtttttttttggctttcagcttttctatcatttgaccattaaactgatttttgagaagggaagatattacttgtatttgattgcagagacattagctttattgtttttgagaaccgaagatattactaatggatcttcgattttagctcacgtgtttaagctttacgtattaagttttcttatagttatgaacagttgagtaatttcaa

SEQ ID NO: 16870 - DNA, 374 bp, Gossypium hirsutum
  Clone ID: LIB3145-043-Q1-K1-A1
cccaactgttgttcccgacgattccgtgaacccaaggttggctaagatcttggagaaagtagctgttcggaaagagcttatagttgcactcgccaattcgaatgtgaaagagatgttggaggtttggttttctagcatcaagagagtcggtgtacctaattacctagttatagctttagatgaccacattgaagagttctgcaaatcgaatgatgtcccggtgtacaagagggatccagattcgggtattgatgccgttgggagatcaggaagcaatcatgctgtctctggattgaagttccggattttaaaggagtttttgcaactgggttatagcgtgcttctctcggatgttgatataatatacttacaaa

SEQ ID NO: 16871 - DNA, 368 bp, Gossypium hirsutum
  Clone ID: LIB3145-043-Q1-K1-A10
gtttcggctttgaaaagaaaaaaaaaaaaaacctctgcaaaaatgaatttaacaatggacgaagcaaaattaaaggagctaaaggagttcattgatcagtgcaaagctaatccttccattctaagcgatccttcactctccttcttccgtgactatctccaaagtctcggagcaaatcttccatcttcagctagcggccatgaagccggagactccaaatcgaagagttatgtgatggaggagagtgacgaggaagtggcggacgatggagagaaagttaatttagaggaggaggaagaagagattattgaatctgatatcgatctcgaaagcgatgtcgttgaacctgataatgatcctcacagaag

SEQ ID NO: 16872 - DNA, 417 bp, Gossypium hirsutum
  Clone ID: LIB3145-043-Q1-K1-A11
cccacgcgtccgcccacgcgtccgcggtattctctcaatggctaacgctggtcccggaactaacggatctcagttcttcatttgcacggctaagactgagtggctcgacggaaagcacgttgtgtttggacaagttgttgaaggcatggatgtggtgaaagccattgagaaagttgggtctagcagtggaagaacttccaagcccgttgttgttgctgactgcggacagctctcttagagaagaaaaagagaactatgtgttaagttgggatgttgtctaatgtctagaatatttaatgtctgtcatttagactcttttatggtgctgtttttatcgtcactgggtttggtggttttcaggaacttgccttatgtagtttttacgattaactaccattaataagatactctttttcg

SEQ ID NO: 16873 - DNA, 328 bp, Gossypium hirsutum
  Clone ID: LIB3145-043-Q1-K1-A12
cccacgcgtccgaaaaaagtaggtcaaaatccatctccaccaacaaagatgaagccatgagagaattttgggtgattttgggttatctttcgcctacttgttctttcagtttatttatcccttccttcttttgattgaatcctaatcttctcctaagtttggtatctgctacaatggccgttcaagctcaatacccttctaatgttcttcttttaaacagaagtggacaagaggggaatgagtttccattgcagtaacaagcatgaggagtttttctcgatcaatcccattctcatattgttgttcaacaataataataatattccac

SEQ ID NO: 16874 - DNA, 392 bp, Gossypium hirsutum
  Clone ID: LIB3145-043-Q1-K1-A2
ataactgtcaacgaagcccaatcgcgcagaagtggaggcggtggcggaggatttggaggaggaaacggtggttacagccgcggtggaggcggcggcggatatggtggtcgccaaggaggatatggtggcggacgccgtgaaggtggatacggaaacggtggggggtatggtggaggtggatacggaggtggacgccgtgaaggaggatacggtgacggcggatctcgttactcaagaggcggcggtgcatctgaaggcaactggaggtcttaaatttagggtttcaaagtgggcttgggcctatattgttatgggtttggtttgggtttggtagttggtaattctaaagttactctgtttctgtttggtttgggatctctcgtttttgatcg

SEQ ID NO: 16875 - DNA, 373 bp, Gossypium hirsutum
  Clone ID: LIB3145-043-Q1-K1-A3
gtttttgggttaattaatatggggactgaagttttacgacctcaggattgtttgatcgaacggattcggttacctccgacggcgtgtcctcgccggagatacggaaacggtagctttaatcctagttattatcataactacaacaataacaatggaaatggtagatctaacaggaaacccgttcagaggaagcggatcggatcggagcaggggatttcgaagaaatacagctccgccgatgacttgaagacggtgaggaacaatgttatggtggagaaggttacgattatgagacgaggtgagtcgttggattcgaagatcaagatcgacaacggcggtggtggaagggaagggggtttggttggtatgggta

SEQ ID NO: 16876 - DNA, 274 bp, Gossypium hirsutum
  Clone ID: LIB3145-043-Q1-K1-A4
atcaattgaagatttacccttgctgcctgggacctaggttgatattgaagcttttatgtcaagactactactgtactgctgggaaaattataagtggaaatatgattctccgaaattaaataataattattatcataattaatattatttactattttaatatttatattttatatatatatttttttaaagttaacttattctaattttattaagtttatttttaataattatattttaatagggggcgttttttttagagattaaaattttt

SEQ ID NO: 16877 - DNA, 378 bp, Gossypium hirsutum
  Clone ID: LIB3145-043-Q1-K1-A5
cccacgcgtccggttgaatctaaaggaggtcaagtgaaggttgaatctgctgcccctcccatgaggcaaagtctttctgatggttcacttgatacgatggcaagaaaacctgctgatcctgaagaagagcttcgatggatgtcccaagaagtgcgtggttatgttgaagctgttcttaacagccttgctgccaatgttcctaaggctgtcattctttgccaagtggaaaaagcaaaagaagacatgcttattcagttatatagctccgttagtgccataagcaatcccaggattgaagaattgctcatggaggaccaaaatgtaaagcgcaggagggagcgttaccagaaacagtcctctttttttttgaaacttaca

SEQ ID NO: 16878 - DNA, 401 bp, Gossypium hirsutum
  Clone ID: LIB3145-043-Q1-K1-A6
ggcgtctgtaataaaatctgcaatcttaattctgtcggtgtttttatctgtacgcttcagttcgggtgttaggttgctccaggaacagcccaatgatgaccccaaaaacatggacgctattcctcccattgatgcactcaaccctaccgagttgaatggacccggtgttggcattcacgaagatcatgttgtcccaaaaggtgctgaaattggtactcttggttttggttttgaaggtggtcctgataaatgttgttcttctggatgttccggtaattgtaatcctggtggtttcggtctaccatttcctcaaattccagaaaatccaagaattccagaaattccacaaatccacagatcccacaaatcccacaaattcacttattccacaaatcccacaa

SEQ ID NO: 16879 - DNA, 388 bp, Gossypium hirsutum
  Clone ID: LIB3145-043-Q1-K1-A7
gtcagagaacgttgcttatcgttttggtgtgacgaggcaggagcaggatcaggctgcagttgaatctcacaggaaagcagctgctgctacagcttctggtaaattcaaagatgaaatagtccctgtggccaccaagattgttgatccaaagactggtgatgagaaacctgtcacaatctctgttgatgatgggatccgagctaacacatcagtgtcagatctgggaaaattgaagcctgtattcaagaaaaatgggaccactactgctggaaattctagtcaagtgagtgatggtgctggagctgttctgcttatgaaaagaagtgttgcgatgtgcaaaggactaccaattcttggtgttttcaggacttttttgtgctgttggtgt

SEQ ID NO: 16880 - DNA, 219 bp, Gossypium hirsutum
  Clone ID: LIB3145-043-Q1-K1-A8
cccacgcgtccggcagtatatacgagaacacttcccacttcattgtttcttcgtgttggttcattcttttcctaaatcgaaacataaaatttgtttatgatccatatacatgttttttttgggctactctttattggtagaatatgtttgcagtatatacatgtacatcttttctatacaaaataaatattattgctggtctttagttagatttgatta

SEQ ID NO: 16881 - DNA, 205 bp, Gossypium hirsutum
  Clone ID: LIB3145-043-Q1-K1-A9
aaaaaaaagtggttgctgaagaatttagtcctttttattattgcttttgtctgttgtggtcagtactctgctaaagacataaattatttgtggtttttgatgtttttgttttaattgtttgttgttttatcatggaatggattctatttttatgggttggctaaacaataatttaactctttgttctattaataaaaaactaaaa

SEQ ID NO: 16882 - DNA, 317 bp, Gossypium hirsutum
  Clone ID: LIB3145-043-Q1-K1-B1
cccaaagaacatatctaaacccccgatcctgtacttgttcaccgccaaaagaagccacgaggaggaaacgcaccctatacgtatggggagtcggcattctctgtttcgcactgtgagatgatcggcactcctgctattccacagtctcagagagtaccacaattgcgctgatcaacgcgaatactgcggattacccaagacgtgtaacgtgatgatggatctccccttactcagtatatcggagctataggccttgcattgaggatttataagaaacatttcaagctcaagctgcaaggtgaactatggggttggac

SEQ ID NO: 16883 - DNA, 245 bp, Gossypium hirsutum
  Clone ID: LIB3145-043-Q1-K1-B10
cccacgcgtccggtaaaaatggatgagagtattgagcttaggagaaggggatttaactggaatcaaaactcattctggtacttagatttgggttgaagttccttagtgttgatgatattgaatttgtttgtatgtacagaaaactgtgtgaagttgttggtctcaatctgtattaacaatattgtttgtctggtgatgaaaaaaaaaggaagaaaaagcaaatgaaatgactgtaatgtattcat

SEQ ID NO: 16884 - DNA, 324 bp, Gossypium hirsutum
  Clone ID: LIB3145-043-Q1-K1-B11
cgacacgactgctcccgccgattccgcccttaacactttagggcatcgctctcccgattcggatccgactccgaatcccgacgcctcaccgacaccgtctgatcttaatcgcgcggctgaggaaaccgggcacgacgaaagcaatctcgagcagcagttgcaggacctcgatttgaaggaggaggttgcggcggcggtggcggctgctgagacgaaagatgatggggagagaaaaggcgacaatgattacaatgaagctgatgctggcgctgccgaggaaaaagaagatgaggaggagaaaaacgagaacgaaaatgatggtga

SEQ ID NO: 16885 - DNA, 323 bp, Gossypium hirsutum
  Clone ID: LIB3145-043-Q1-K1-B12
ggttgaaggaattacggccgccggagaaggagggtgggttttcattgcaggagttgaatgaaaggttgaaaaagttaagggcaatcgaagagaaggaaaccgatgtgcagatcagtggggttaacttcgcggctataagggatggcttgaccgctttgaagacgtctgacgaagaaaaacagaaaaataaattagcccagaaagttgatatattggacctctttggtagaactccagagtttatgttgcaccctccaaaggaacatttagttgaaaagtattttcatccagataacatgtcttttgctgaaaaaataaaaatc

SEQ ID NO: 16886 - DNA, 364 bp, Gossypium hirsutum
  Clone ID: LIB3145-043-Q1-K1-B2
agaagagagagtaaattgcaaagtaaatatgaataaggatttcatagctgaagaacttgacaatgacatgcaagaagaagaagaagaaggtgttgggggtgatcatggtttcccagatgatgaaaagaagaagaaaggttatggaaggagaggagccgctggtggcggtggtggggtgtcgccgcctgcttgtcaagtggaaaaatgtgggcttgatttatctgatgccaagcgataccacaggcgccataaggtgtgtgagattcatgccaaggcgccatttgtggttgttgctggtctcaagcaacgcttctgtcaacaatgcagcagattccatgagctaccgtagttcgatgaaacaaaa

SEQ ID NO: 16887 - DNA, 362 bp, Gossypium hirsutum
  Clone ID: LIB3145-043-Q1-K1-B3
cccacgcgtacgcccacgcgtccggttttagcttcgcaaagcttcttcttctgtctcatctcgcttataccttggaacactaaagcaaaaaacaagcgaatatggaggctggagatggaggcgctgaccgagtcgttgactcaaaggatttacaacaacaaagcaaagccttcgataaactcactgaccgtgtcgaagatcgacagcttgattcttctcgtgcccaatcggccatggcatcgattgcagcctcggctgaagcagaaaagaatgctatgagattgagagagaaagaattagctgctgttaaaatcaacgcggcttgaagtgacatcattgcaaacgaattagagttggacaaa

SEQ ID NO: 16888 - DNA, 401 bp, Gossypium hirsutum
  unsure (1)..(401): unsure at all n locations; Clone ID: LIB3145-043-Q1-K1-B4
aaaaagggttgcccccttctaactctgaaaggcaatggcttcaatgcttagctcaggaaccgtccttaggccaaccccatttcttggccaaaacagaaatgctaaccctctcagagatgtctccgtgggcactgccaaatacacaatgggaaatgaactgtggtatggaccagacagagtgaagtacttgggacccttttcagctcagattccatcctacttgaacggcgagttccctggtgactacggatgggacactgccggtttgtcagctgaccctgaggcctttgctaggaacagggctcttgaggtaatccatggaagatgggcaattgctggagcactangctgcatcaccccagaagtccttgagaaatggcttagagttgacttcaaggaac

SEQ ID NO: 16889 - DNA, 329 bp, Gossypium hirsutum
  Clone ID: LIB3145-043-Q1-K1-B6
cagggttccatctccgccatcaacgaaagccagtgcgagagaacatcaaatccctggttcacgtacgagcctccacctctcttcttcccctgttttgactgttgtgttcttctaaacaagatccctgaacaacgaatggggaataattgagtactttactactctcttcgttgttcaggatcgtttagaagaactccctatttacaacagcaaaaaaaaaaaaagtacaaagagacgaggttcattttccatattcattattcgaggttgaaacgaaagaaattgcttttgtttcgttgtttttccgtaatttaaatcgaccccttttg

SEQ ID NO: 16890 - DNA, 253 bp, Gossypium hirsutum
  Clone ID: LIB3145-043-Q1-K1-B7
ggaacccggggacccacgcgtccccacctcacttgaaaccactttcactcctagctgtttttcttctaccaatccacacttgtttttggacacattggcctgtggtggactaaagaggagccaatgatgatcagctggttttggactaaaagaacgaggctaccatacatatttgacattcatgaatggaaatttacaggattctgttctacttttggtttatacatgactctggagacgatagaagtcttac

SEQ ID NO: 16891 - DNA, 428 bp, Gossypium hirsutum
  Clone ID: LIB3145-043-Q1-K1-B8
cgaggccgatgacgagaaacgtgagcttatcttcaaagaagatggccaagaatacgcccaagtctcacgcatgttgggtaacggccgctgcgaagctatgtgcatcgacggcaccaagcgcctctgccacatccgggggaagatgcacaagaaggtctggatcgccgccggcgacatcatcctcgtcggccttagggattatcaagatgacaaggctgacgtcatcttgaaatacatgcccgatgaagctaggcttctcaaagcttatggtgagctacccgagaataccaggttgaatgaagggattgctggcggcattgatgaggaagatgatggtgcatgcgatgactacatcgagttcgaggatgaggacatcgataagattaaatttcttttctctttttttcatttttgaattattttaagaa

SEQ ID NO: 16892 - DNA, 290 bp, Gossypium hirsutum
  Clone ID: LIB3145-043-Q1-K1-B9
ggtgaagattaacaccctaccaagtttgttgattatgtcttgaaagctgcaccttggctgaacatggtgcactgcctgttctttgtggatctttggggaccctacatgagaccaagcattgataaccatgaattggcaactcgccctgtactgttctacgatactggaaagatacagtgagacgattttactttccatagagagagagatggtgctacattgggggatgaaacgggtcgtagtctgctacagaagactgaatactgtctggatggatttaccttaagagc

SEQ ID NO: 16893 - DNA, 431 bp, Gossypium hirsutum
  unsure (1)..(431): unsure at all n locations; Clone ID: LIB3145-043-Q1-K1-C1
tctgatgctcgcaaaccacgcagaaagagtagaccaaaaaagagaaaacaacaggtttgtttattgtttgtgacttgcgttggtttttctttttccttgccatgattcttcaactaccgatatccaaaagccacagtttcatagtaatgcagatggtcttaatggttaaagctggttcagttgcagttttccttatcattgttacttttactattccatgtctggttgaactatgctgatgtgtatttgggataatatcttctaaggacctttcgagtaaaaaaaaaaaaaaaaaaaaaaaaaaaaaaaaannttttnntaaaaattaattaaattttttaattaataaatatttattattttttatttatttattttattattttttatattattttttatttttttttattatattatatatttattat

SEQ ID NO: 16894 - DNA, 333 bp, Gossypium hirsutum
  Clone ID: LIB3145-043-Q1-K1-C10
cccacgcgtccgaaacttcaattaacttccacaatttcagaggctttgagaagcctctctttccaaggcttctttctctccatttctttctgctgctgtatgttggagccttggggagttgtggttcattttattttccattaactccaggcaaaaaatgatgataaggaagacatgccctatccctaatctccataaccaagacggcctagaaaccgtcctggaagtgcctattctcgaagaaatgtatacccaattgggcaccgatgcggctttattaccatggctaaacatgcgagccttaatgaatgataatatatcatcaacacccca

SEQ ID NO: 16895 - DNA, 362 bp, Gossypium hirsutum
  Clone ID: LIB3145-043-Q1-K1-C11
cccacgcgtccgcccacgcgtccgcccacgcgtccggacaaactgaagcattcccatgttctattggttggttttaagtattttctactatggacattttgtgcttgatcctcgactattttgtgtatctctacctaaatcttactatttagaagaactagtcttggagagaactattagagtcttgatttatggagtttgggcttttactggtgattattcctttgacttgggtataaagaatgtgggttagtggaaagctatcattctgtaatatgcaatgcttttggttccatttgaaatgaatcatcgctcaaaattggtacaaaagcagaaacttttttttctcggttttccatatg

SEQ ID NO: 16896 - DNA, 208 bp, Gossypium hirsutum
  Clone ID: LIB3145-043-Q1-K1-C12
gcgatgcgcagtcatgtgatgctttactgctgttggacataacatgaaggagcttgtgggataaggagacagacaggatctttgtcctaatgaatttcaggtgcattgacaccatcaaataagctgcttaaagggaatgtcttgcagttgtcacttgcgctgatatcctagaactgtctgctagagaaggcattgtttctgagggagg

SEQ ID NO: 16897 - DNA, 250 bp, Gossypium hirsutum
  Clone ID: LIB3145-043-Q1-K1-C2
gcaggatcatagctttctctcacaaagagttaaccacagtggagtaaccacaatgtaatgtcataagtatttgacgagaaagacatgtgacatatatcttgcctatagttcttcgctgctctatatacaaaaaacacagattgcgagtgcagactcatgcgatttagtgtaatagctattaaaggtgcggtttacttaaaagtagagagtttgatataccatctttgattcttgttttctactagtgtgt

SEQ ID NO: 16898 - DNA, 379 bp, Gossypium hirsutum
  Clone ID: LIB3145-043-Q1-K1-C3
cccacgcgtccgcggacgcgtgggttgaaggctatcataatacttttgataatattaccggcgcggagcttgtggttatgcccagaatggtgagagccaggcccatgatagctagactatccaaactatcatgcctttttgcatcgttgaaagtttccggtgtttctggacctgtgaatgggacgctaagtgaaacacgtgcttgctgagtttgctgctccttcaacagacattgtggatgttgcttgtatagaaaatgcagataagtataggttggaaagggcttataaaaatctcttttccagtaagtgtgtatggaagaaacagaagggaaactatattaacagagaaagctattagagtttctctttaatggtat

SEQ ID NO: 16899 - DNA, 243 bp, Gossypium hirsutum
  Clone ID: LIB3145-043-Q1-K1-C4
gttgagaaacaagacgttaatcatgatagtaatgctactgcttttgataccgagaaagaatcgaagaggaaaaagaagaaaggaaacgacaaactgacagaagttcccgttgctgaggacgatgtcgtcgttgaaaaggaagaaaagaagaaaaaaccgaaagtcgaacgaaaaggagggaaaacaaatggtaaagttctcaacttcaatgcacgaggatggtaccaccgggtgaagagaaac

SEQ ID NO: 16900 - DNA, 352 bp, Gossypium hirsutum
  Clone ID: LIB3145-043-Q1-K1-C5
atcttcttcttcccaaaatctctcattatcgagtttaaccaaggaagggtcttaaaaactcctgcctttgaaatgctttctccacttgcgtcacagcgtcttatcgaggtccgtcaagctttccgtctatctgctcaggtgtatcgatccttctccactgccttgaactatcacattgatggcccagataacaatcccgaccttccatgggaattttcggaggcaaacaaagcaaaggtcaaggggatattgtctcattatccatctaactacaagcaatctgcagtaataccttctgtagatcttgcacatcaacagcatggagggttggtttctgtatcaaccatgaatg

SEQ ID NO: 16901 - DNA, 336 bp, Gossypium hirsutum
  Clone ID: LIB3145-043-Q1-K1-C6
cccacgcgtccgggcactcaaaggcagccaatgtgcattttgatgggctttgctctattaagtccaaggtttatttatcaccgaaactttggtatttgagggtatcagtgattgaagcacaagatgttttgggtgaaaaagggtctactttattgaggtaccctgagctctcagctaaagtacaagtggggaatcaagtttcaaggaccagaatttcaggagttagtcctaacagaagcttatcaaatccattttggaatgaggatttcatgtttgtagttgcagagccatttgaggattacttgttggtgtctgttgaggatcgagttggccctg

SEQ ID NO: 16902 - DNA, 378 bp, Gossypium hirsutum
  Clone ID: LIB3145-043-Q1-K1-C7
gctctctaaaatttggcctcttattcgtgagaatttagtatggtatattagggatggggccaatgtttgctgttggaaagaccattggattccaagtatgggccctttaatattaaaaattccatcttttactaaccttgatttggattgtagtattagggagatggttaattttgatgggagctagaacctagacttgtttcgtgtttgggtttctgaagaagtgattagcagaatcactagtattcctcctccacatccggatttcggttctgatagagtagtatgggctcgttcagtgtcaggagctttcgcagtttgcagtgcttaattggtcattgaaaggagatacgtggaactcttaagaggagcaattga

SEQ ID NO: 16903 - DNA, 288 bp, Gossypium hirsutum
  Clone ID: LIB3145-043-Q1-K1-C8
caaaatccaagtactaaagaaaaagaaaatcgagtctgatccggtttttccagttgatggagatagaatcgtcgttgtaaattgttccgatctaatatatatttttggtaatcatttctgttgtactgatatgtatacctacaccatatctttcatttacttctttcatgagcacattttactctcaaaatttgaattaaagattgttatatttgaacatttcttgattatttgaacaaaaaaaaaaaaaaaaaaaaaaaaaaaaaaataaaataatttaaaaaataa

SEQ ID NO: 16904 - DNA, 399 bp, Gossypium hirsutum
  Clone ID: LIB3145-043-Q1-K1-C9
ggatgaagttgttagcgaaagcgtatcatccatgacagaataaatagagagaaaagcaagaagaagaacaaaagtgttaaagagagagtgtttgggggtattgcaaagataatatttttattggggaaaaaaagaatggggagaggtagggttgagttgaagagaattgagaacaagattaacaggcaagtaacttttgctaagagaaggaatgggcttttgaagaaagcctatgagctttccgttctttgtgatgcagaggttgctctcatcatcttctccaataggggaaaactgtacgagttttgcagtagttcaaggtatcaccaaaactatttcaccttttttcttttttgggaccctctttaaaaacccaaaaccaacaaggttttttttttt

SEQ ID NO: 16905 - DNA, 384 bp, Gossypium hirsutum
  Clone ID: LIB3145-043-Q1-K1-D1
gttgctgttaaggatctcaagcgtgggtatgttgcatccaactccaaggatgatcctgctaaggaggctgcaaacttcacttctcaggtcatcatcatgaaccatcctggacaaattggaaacggatatgccccagtcctcgactgccacacctcacacattgctgttaagtttgctgaacttttgaccaagattgacaggcgatctggtaaggagcttgagaaggaacccaagttcttgaagaatggtgatgctggtatgattaagatgattcccaccaagcccatggttgtggagaccttttctgagtacccacccttgggccgttttgctgtgagggacatgcgtcagaccgtggcagttggtgttataaagaatgttgag

SEQ ID NO: 16906 - DNA, 341 bp, Gossypium hirsutum
  Clone ID: LIB3145-043-Q1-K1-D10
gtgagaaggcatctccaaatgcaagtccgtgcgactaagttaagtgcattcgcgacttgtgtgaagatagctgaggaaggtggtggaatgcatgctctttatgcaggactcattcccagcatattgcaggtgttaccatcagcagccataagttacttggtttacgagtttatgaagatagttctaaaggtggagtcggcatataacattatatccttttattgaaattctaagaggagccttgtcaacttcaaatttaccaaataacatgtggacaatcatgattctcgtttaatgcagttatttcagatgatatgattcttttttataagtgatttatt

SEQ ID NO: 16907 - DNA, 325 bp, Gossypium hirsutum
  Clone ID: LIB3145-043-Q1-K1-D2
atatccggcacatggatggttgccctattagctccaaagccgagcaacaaagggtaatccattgtttagaggcagctatcaaaagacgagcttccgagggcataagattagaactttgcagtgacgaccgagtcggccttctatcggatgtgactcgcatattcagagaaaatggtctttctgtcactcgagcggaggttaaaacaaggggttcccaagccgtaaacatattttacgtgactgatgcatctgggaatccagtaaaaagtgaaacaattgatgcagttcgaaaagaagatggtcttactatactccacgtgaagga

SEQ ID NO: 16908 - DNA, 409 bp, Gossypium hirsutum
  unsure (1)..(409): unsure at all n locations; Clone ID: LIB3145-043-Q1-K1-D4
cagtaaagtaggaatctacaatgttggcactggaaaaggtagatcggtaaaagagtttgtagaggcctgtaagaaagcaacaggggtagatataaaagttgattatcttccccgccgacctggtgattacgccgaagtatttagtgacccaactaagatcaggcgtgaactgaactggacagctcaacataccgatctcgaggagagtttaaagactgcatggagatggcaaaaggcgcaccgtgatggatatggagcctcttagatgagggagcttcatgatgttcacaacattttatagcanacgactagtgcagatctcagatggcgccgactttagcagtggtttttctgttctatccgttgcataaaagaagggaggaaaattttttgggataaaaatggattt

SEQ ID NO: 16909 - DNA, 304 bp, Gossypium hirsutum
  Clone ID: LIB3145-043-Q1-K1-D5
cattgttaatggcagcactagcgggaatggtaaggaaccatctgttgctgctgctttggctgtgcaatgtggaaattttgggtcaaaaattgaatcatccatcgatccatcccatatgaccttcggtgggatgaaaacaaaagagggtcccaacaggtgtaatgcatgccacaagcgtgttggtttgacaggatttagctgcaggtgtggaaacatcttctgtgcagcgcataggtactctgacatacacaactgttctttcgattataggacagccgcccgcgatgctattgctaaagccaat

SEQ ID NO: 16910 - DNA, 230 bp, Gossypium hirsutum
  unsure (1)..(230): unsure at all n locations; Clone ID: LIB3145-043-Q1-K1-D6
ggcattattaacccctcccttttgagtttcttgattcgatgacaatttggatggcattacacttttctttttgatgattgttttgttactgtctaaacctcaccaatacttttgtttatttttaacatttgatgcttgccatgtttgttatacaagagtttacccagttagttaatagtatgacaatttcccactttgctcannnnaaaaaaaaaaaaaattaaataatt

SEQ ID NO: 16911 - DNA, 204 bp, Gossypium hirsutum
  Clone ID: LIB3145-043-Q1-K1-D7
attacaggacaacacagtggcttattatcttacagctttaaaagacatgttcggtggtgggatcaatcgtctgtttcttctttatgagattgggggagcccagggtgcccttcaccgtctagctatacccatgaagaatgttttatactgggaaatatttgcggtgaatataaacatactaaggaggtggtgggagcaaacgaa

SEQ ID NO: 16912 - DNA, 305 bp, Gossypium hirsutum
  Clone ID: LIB3145-043-Q1-K1-D8
cccacgcgtccgcaaaaatttcctatagaaaaaaggctccccctgcaagggccatgtctttaacatctatcatcgatccttgcgagactttcaggggaagagctaaagatggccttggaaaactgttttcaattgagctcagtttgcaccattagagcttgtgtgatgcaaagctaccgccatcaattttcatctgttgagaagattcatttgccgacatttcgagggctcaacaaacccaatctgtcattctcttcgtcttttgctcattcattcaatggcagatgccaaaaaatcaggctcat

SEQ ID NO: 16913 - DNA, 192 bp, Gossypium hirsutum
  Clone ID: LIB3145-043-Q1-K1-D9
gcacgcgtcggagggcactcagagaatgtgggggccgggtatgatccgtgacattttcccttctttggggacccgtgagggggcgcgagtaaaacaaaagggagaggatgttacatcttgaaggcactgagacttacttggatcaaaaaacttttttccgacggaatctcaggctgcagggcaattgactta

SEQ ID NO: 16914 - DNA, 282 bp, Gossypium hirsutum
  Clone ID: LIB3145-043-Q1-K1-E1
cttttggctaatgaagccaccaaaaggtggactttaagcaatcaagtccttatggaaatagcctgcacaaggtctgccaaccaactgcttcacgcaaggcaggcttatcatgctcgttataagaagacgcttgaagaggacgttgctcatcacacgactggggacttccataagctcctcctacctctagtgagttcatacagatatgagggagaggaggtgaacatgactctggctaaaacagaggcgaagttgctttatgtgaaaatttttaacaaagct

SEQ ID NO: 16915 - DNA, 123 bp, Gossypium hirsutum
  Clone ID: LIB3145-043-Q1-K1-E10
gccacgcgtcgtttatttttaacctgcgttagtgactagaacccaccaaaaggagttgtggctagacaggcgacgtgtccctttttcccttatgaagtattatgtatgtattcctttaaaacc

SEQ ID NO: 16916 - DNA, 92 bp, Gossypium hirsutum
  Clone ID: LIB3145-043-Q1-K1-E11
gcgacgcgtgcggaaacagcctactagacagtcagatgtgaggattggaacggaggacggacataccggagctggtgatatttggatacacg

SEQ ID NO: 16917 - DNA, 304 bp, Gossypium hirsutum
  Clone ID: LIB3145-043-Q1-K1-E2
ctaatcactaaatatctcacatctacttctacttctcgcaaataataccatcatcaccgtggcctcacatggtaaggcgggctattacatgactctcggcaggcttatcatgctccttataagaagacacttgaagaggacattgctcatcacaccactggagacttccataagctcctcctacctctaatgagttcatacagatatgagggagaggaggtgaacatgactctggcaaaaacagaggcgaagttgcttcatgagaaaatttcaaacaaagcttacagtgattactatgtcataa

SEQ ID NO: 16918 - DNA, 390 bp, Gossypium hirsutum
  Clone ID: LIB3145-043-Q1-K1-E3
agcatagccatgactactgaaatgataatggttgatgaagtcccttttcctccacaaatcacaactaccaagccactatctcttttgggtcatggaattaccgacattgagattcactttttgcaaatcaagttcacagcaattggggtttaccttgaacctgaagttgtagggcatttacaacaatggaagggtaagcctgggaacgtgctagctgaagatgataacttcttcgaggctcttattaatgctccagtggagaagtttctgagagttgtggtgattaaggagatcaaaggtttccaatatggagtgcaactagagagtgctgtgagggaccgattggcaactgacgacaaatacgaagaggaagaggaagaagccttggaa

SEQ ID NO: 16919 - DNA, 316 bp, Gossypium hirsutum
  Clone ID: LIB3145-043-Q1-K1-E4
cccacgcgtccgcacgaatataactcatttttcggaattgcttttctttgcgctttttagcaggttttttcatggcttcccttactgtacacctgcttccgccattgcttttacaagatagaaagacccttttcgggacttttccaaaactcccagtttcttataccggagggaggcgaaactgtgctgtttttgtgaaggctaccggtgatagctcagagtcttctacctcacttagtattgtcaagtctgtgcgaaatgtttgggataaatctgatgaagatagggtaggtctcattggtctgggatttgcagc

SEQ ID NO: 16920 - DNA, 406 bp, Gossypium hirsutum
  Clone ID: LIB3145-043-Q1-K1-E5
gcaaatcaatgagaccgaacctgggacagagattgcagctgaaacttcagctgcaatggctgcttcttctattgtctttagatatgtcgatcctccttatgcacgtagacttcttaacaaagccaaatcgcttttctactttggtaagaggaacaaaggaactttcgatggagaatgccccttctattgctctttttctggctataatgatgaattgttgtgggctgcatcatggttatacacagccacacatgatcagaagtttaggaagtttataacagaagaagcagtgagtgcagttgtggatgagtttaattgggatctcaaatatgctggaatccaagtcctcctttccgatattttccttcaaagcaatgatgaggctttgaaaatcttcaggaacatg

SEQ ID NO: 16921 - DNA, 347 bp, Gossypium hirsutum
  Clone ID: LIB3145-043-Q1-K1-E6
tgatcggtgcggatggggcatttcacctaggggtgccggatatacctttggccaagacatatctgagcaatttaaccatacaaacagtttgaagctgattgctagggctcatcagctggtcatggaaggatacaattggggtcatgaacaaaaggtcgttactatatttagtgcgccaaattattgctatcgatgtggaaacatggcctccatcttggaagtagatgattgccagggtcatacattcattcagtttgagccggctccaaggagaggagagccagatgtgacccggaggacacccgactacttcctataaaaacaaactggcattgaatcaacgagtc

SEQ ID NO: 16922 - DNA, 386 bp, Gossypium hirsutum
  Clone ID: LIB3145-043-Q1-K1-E7
cccacgcgtccgttttgatcttaaatttttctcttccattatcgtcaaagcaaaaattaatccagcttcatacatttccttggcaaaatcccactgctttgcttcgattatcaatggggacaatggcggtgccgccatggctagagtcattgctaagtacagcctttttcacagtttgcacaacacatggagatgcagctaggggtgaatgtaacatgtattgtttagactgtaaaggggatgcgttttgcttttattgccgctcttctaaacacaaagatcatcaagttattcagataaggagatcttcatatcatgatgtagtgagggtcacagagattcaaaaagtattggatataagtgggggtcaaacatatgtgataaac

SEQ ID NO: 16923 - DNA, 355 bp, Gossypium hirsutum
  Clone ID: LIB3145-043-Q1-K1-E8
aggaccgcaaccctagccacccttccctgatttcattacttctgtactcacaggagatcacctctccaaaaccctagctctttcactcactgccgccaatttcaaccaattatttgcttataagcgtcgaaaacgatgtcggacgacgagcgagaggagaaggagttggatctcacctcccctgaagttgttactaaatacaagagtgctgctgagatcgttaacaaggctttgcagttagttgtaaaagaatgcaaaccaaaaactaagattgttgacatttgcgagaagggtgatgcatttatcagagagcaaacaggcaatatgtataagaatgctaagaggaagattgaga

SEQ ID NO: 16924 - DNA, 148 bp, Gossypium hirsutum
  Clone ID: LIB3145-043-Q1-K1-E9
ccttctcatacggtcttgtcgtcctatctgtttacgacaatggctcagtctttagccctgaggtcctggatctcactgaggaagatctgattgagaaatttgctaccggtgtctccatggtcaccgcattgtctcttgccatctcata

SEQ ID NO: 16925 - DNA, 313 bp, Gossypium hirsutum
  unsure (1)..(313): unsure at all n locations; Clone ID: LIB3145-043-Q1-K1-F1
agaaagaaaaaacatccggatggtttgattgtttcttgttttactgaaatttcatgatggttaggtttttgttttatttttagagttttttttgtgtttgggtgatgggaaagtgcctgggggtgggaaaatgatgtgggatttggtatcttcttgtatgaagatgaccaaatgggtttgaaataaaaatgttagggatgtgtggaagattatatagtatttgccattaatgcagtcttgttttgctgcattgcttttttttaaagncaatttattttatatacttcaataccaacatgggatattcactttt

SEQ ID NO: 16926 - DNA, 257 bp, Gossypium hirsutum
  Clone ID: LIB3145-043-Q1-K1-F10
gtacagtactggagggggaaatattatgaatgggtacttaagggattgaaacccaatcttttgaacaataaggaactcaaaatatggacttggatggcgcgacagttgggaccctttgcttacaccaaggggactagggatagctcgacttttactgagcaaaatttacagcgggacactgctgggagtataggtgatgtactagaccctgtaagacaggaatgaactccagaattgaacttgggtcaggaaaattg

SEQ ID NO: 16927 - DNA, 379 bp, Gossypium hirsutum
  Clone ID: LIB3145-043-Q1-K1-F11
gcgggtcaccgcatatattctgtaacttatttatctttgaatttgtgcaggatcaggaagcattatctgcttttaaagatggccaggttattggcgttcattccaccagcgagctggaaattaagttaaatgctgctacaagaacatcacggctgatgatattgtacttcaccgcaacgtggtgtggtccctgccgcttcatttctcctctctatacgagtttagctgcaaaatatgcaaaagtagtgttcttaaaagtggatatagacaagggtagggatgtggcagcgcgatggaacattagcagtgttcctaccttcttcttataagaaatggaaaggaagttgataaggtagttggggctgataaactacacttg

SEQ ID NO: 16928 - DNA, 375 bp, Gossypium hirsutum
  Clone ID: LIB3145-043-Q1-K1-F12
gacccacgcttccgctaaaagattcctaaacagactgtttatttcatatgatgaaaagaaatatcagggagcggagtttaaagatgggatgaaggatgtggctaccaaacgtatggagcttcagaattctttatctatactatggtcaaagcaagaagctgcacttgtaaaaaccagggaactgaagaaactatgtgatagtactcctttcatcgtatttagaaggaagacccgaatcaatatttggagagatcaatgccttgttaattaccagtatctagctcttgatttgactttacatttaatgatagtgtatttttgaagtcaaattattacttgttccttgcttttaatactaatggaaaataacttcaa

SEQ ID NO: 16929 - DNA, 356 bp, Gossypium hirsutum
  Clone ID: LIB3145-043-Q1-K1-F2
caagagaataactggtgggtaagcaaagttatcaggaaaaaacatgattcctctgtcacaagtgttgcttggcatcctaataatattctacttgctacaacatccacagatggaaaatgccgagtattttctacatttatcaaaggtgttgatacaagggaatcaaaaacaggctcttcttcagatccaaagtttggagagcaaatagttcagcttgatctgtcatcttcatgggcatttggggtgaagtggtcaccaagtggcaatactttggcttatgtaggtcataattctatgatttactttgttgatgatattggtccttcccctttggcccagaatgttgcattccgtaa

SEQ ID NO: 16930 - DNA, 344 bp, Gossypium hirsutum
  Clone ID: LIB3145-043-Q1-K1-F3
cccacgcgtccgcgcttctcacggtagcttttcaaatattggcaaacagtttaccaacggctaaactgaccgtcgaatcggatgaaacggttaataatctgatttcgtgtactgtccaaaagatcaaagctgcccttcaatgcgaaagttgatgactcagtgagatgggtaattatagttattaatataggttgaggatgtggataaagagtgcgactcagtaagttgggacgagtgggggtattgagtcaagaacgaaccgcacgtggagaattattgtatggtgacgatcgaagggacaagggtggtggctcgggtatagactcaggtcgaccctttgagtt

SEQ ID NO: 16931 - DNA, 359 bp, Gossypium hirsutum
  Clone ID: LIB3145-043-Q1-K1-F4
cccacgcgtccgaaagaaaagaaaaattacagtgaaaatggcaacccttaaagttccagctcatgtacctgccccttctgaggatgctgagcaacttcgtaaagcttttgaaggatggggtacaaatgagcaattgattatcgacattttggctcacaggaatgcagctcagcgcaatttgattcgtaaaacttatcgtgaagcttatggggaagatctccttaagtctttggatgaggaactttcaagtgactttgagcgagctgtggtgctgtttactttggaccctgcagaacgtgatgcatttctggctcatgaagctacaaagaggttcacaataagccattgggttctcatgg

SEQ ID NO: 16932 - DNA, 279 bp, Gossypium hirsutum
  Clone ID: LIB3145-043-Q1-K1-F5
tgcatatcatatctaagattgcatatcctcaaaaattatgtttccatatgtgagcccgggctaaaattgggtattacactatccatacttctattgtaacagggcactctcgaaataggtggtccattgtttcagctcttgcttcacatcgggggcagcttgtactagttgatagcttcctgtgttgtaaattcacttttgtaggcaaaaagttccatgatattctccatattgtaatttttatttttgttggtagattcaggccccaaagttttttgt

SEQ ID NO: 16933 - DNA, 345 bp, Gossypium hirsutum
  Clone ID: LIB3145-043-Q1-K1-F6
cccacgcgtccgatttgagcagcctgctaaagcagtatgggctgtcaaagggcaccaatgaagccatgtttatcatcgaagcatatcggaccctccgcgaccgtggtccgtacccggctgaccaggtccttaaggatcttgaaggcagctatggatttgtggtgtatgatagcaaagctggaagtgtatttgctgcactgggtgcagatgaaagggttaaactctattggggtgtagcagctgatggatcagtagttgtttcagataacttgaagcttataaaagaaagctgtgctaaatcatttgcaccatttccacctgggtgtatgttccacagtgagcaag

SEQ ID NO: 16934 - DNA, 389 bp, Gossypium hirsutum
  Clone ID: LIB3145-043-Q1-K1-F9
ctttagctctttttttttttcaatttaaaaaaaaatctcattgactgggaatcgatctcaattctcaggtatttatttttgctgacaacaatggcgggtcagaggaatagctatgggaagcgggctcattctcactctggctattctgagaatggatcaaatacgaggagaaatgcaggtgatgacagggaacactttgttattgattcagacgataccgtatataggtatttgtgccctgcaagacagataggaagcattatcggaaggggaggggagattgttaagcaattaatagcacaaactaaatcaaaaattagaattggtgaaacaattcctggttctgatgagcgcgcggtactatctatagctctagagatgagagaaat

SEQ ID NO: 16935 - DNA, 279 bp, Gossypium hirsutum
  Clone ID: LIB3145-043-Q1-K1-G1
aagatgactgatgaatgggcatgtggagtgactctataagttatgttgggttgggctaacacatttgaagaccaacaggatgcaaagaagcataagaaaactattaggagaatgatgtgagttcaatccaaaaaccgagactagggctatatatagcaagagtgctgacacctactgtctagcatatttgttgctagcctctgcacgaagatcatcatacatgatatgaggagccattcatggctactgaagaactagtgcagggtactgacataggca

SEQ ID NO: 16936 - DNA, 369 bp, Gossypium hirsutum
  Clone ID: LIB3145-043-Q1-K1-G10
tcgcccacgcgttcgaaacgccctcactctttcacttcgtcttctccaatttcctccgaaagtaagatggctgtggatccctcagagcttcggtattatgaggatgatgacactccaacaatgaaaacaatcaagggtgcaactactggttttgttgctggaactatctggggaaccgttgttgctacatggtatgatgtgcctcgtgttgagagaagtgttgccatacctgggcttgtaagaacgctaaagatgatggaaaattatggaatgacatttgctgcaattgggggagtctatattggtgttgagcaactggtgagaattataggatgaagagagactttgtcaatggcgctgttggtggtt

SEQ ID NO: 16937 - DNA, 351 bp, Gossypium hirsutum
  Clone ID: LIB3145-043-Q1-K1-G11
gtgattcttgattatcttgccagcaagacaatatgttctgatgatttggtggtagtctcgccagatgttggtggtgttgctagagcacgtgcttttgcaaaaaaattatctgatgcacctcttgctatcgttgataaaaggcgtcatgggcataatgttgcagaggtcatgaatttgataggtgatgtgaaaggaaaggttgcagttatggtggatgacatgattgacactgctggaacaatcgcaaaaggtgcagctcttttgcatcaagagggggctcgggaagtgtatgcgtgtagtacacatgcttgttttagtccttctgcataaaaagattgtcaagtggtcctt

SEQ ID NO: 16938 - DNA, 317 bp, Gossypium hirsutum
  Clone ID: LIB3145-043-Q1-K1-G2
tgccaatttgattaaaaactaaaaaaagaaaaagcttcaaaaaaaaatggagaagatgatggcattgagatccgtttatagagcagcgtgtttcagatcttcccgttttacccccatcgccgtcacggccgccgtcaatcacaatcgccacttggtttcccggagtttcttctctatctcatcgcttatcgccactaatccgcttagaaacaccccttctgatgggaggtcgtcctttgcgttgagatcgggaagcatgcgctattttagtgaagatgcagcttatttgcctgacataaacgacactgagattcttg

SEQ ID NO: 16939 - DNA, 160 bp, Gossypium hirsutum
  Clone ID: LIB3145-043-Q1-K1-G3
cccacgcgtccgaaaaaaataaaaaaagaaaaagcttcaaaaaaaattggtttaatatgagggcattgatattccgttatagagcaacgtgtttcatatattaaccgatttaccttcatgggcgtcacggtcggctgcccttacaatcgccacctggctt

SEQ ID NO: 16940 - DNA, 326 bp, Gossypium hirsutum
  Clone ID: LIB3145-043-Q1-K1-G4
cccacgcgtccgaaacgccctcactctttcacttcgtcttctccaatttcctccgaaagtaagatggctgtggatccctcagagcttcggtattatgaggatgatgacactccaacaatgaaaacaatcaagggtgcaactactggttttgttgctggaactatctggggaaccgttgttgctacatggtatgatgtgcctcgtgttgagagaagtgttgccatacctgggcttgtaagaacgctaaagatgatggaaaattatggaatgacatttgctgcaattgggggagtctatattggtgttgagcaactggtgcagaatta

SEQ ID NO: 16941 - DNA, 350 bp, Gossypium hirsutum
  Clone ID: LIB3145-043-Q1-K1-G6
gaactatattctctttctaaaaatacaacaaaatattaattaggatatatggcaggtgattcagggaagaaggaagagatgtcaaaggtgaaaatcatcagcacaagtcatgtgaagcctggaaagatgataggaagaaaagaatgtcaattggttacttttgatctcccatatttggcattctattataaccagaagctgttgttttacaagtgtggggagtttgaggcgaaggtggaaaaactcaaggatgggctgagagtggttttggaggagttttatcagctagcaggcaagcttggtaaagatgagaatggggttttcagggtggaatacgacgatgatatgga

SEQ ID NO: 16942 - DNA, 375 bp, Gossypium hirsutum
  Clone ID: LIB3145-043-Q1-K1-H1
gttttctaaggcttaccggtggcccaagatttgccgtagctagcaaccgtcagcttcatttcagacggttgactgtaactggggtcgtatcttctgattccaaagcacccacgactgttaccagcactgtgggttctgaaaaaggaggaatcgacatcgaagtagacacaggaaacggcggaggagataaatttgacgacagaagcggcggcggaggagacggtggggataacagcggcggcggaggcgatagtgagagtaaaggagaaggggagttttcggacgacggtggtaagaaaaagatggctttgtctatgtctcagaaagtgacccttggatatgctgcacttgttggagtgggtggtgttattggct

SEQ ID NO: 16943 - DNA, 217 bp, Gossypium hirsutum
  Clone ID: LIB3145-043-Q1-K1-H10
cgggctacgacgcacgcgtgcgtccacgcgttctgaaattgcactgtaagattgatatcggcgttcaactcttttggtccggtgcgtacttgaagtgacggataccggatcataggtgatgaacggagcctgctgaaggggtggccgtcgtgcataaaagaaaccggtttgtcgttcagagaaagcccgattacagcttaccgtcggtccgaattag

SEQ ID NO: 16944 - DNA, 314 bp, Gossypium hirsutum
  Clone ID: LIB3145-043-Q1-K1-H11
cccacgcgtccgggcggccactttttttacggttctagctctgttatgggctggttacgatgtagcaaagggtctatttgggtcatccgatgatcatatccatcaacggtctacggctttcgaggagcagatggagccgctaccgccaccggttcagctcggcgagattaccgaggaggaacttaagcagtatgatgggtcggattcaaagaaatcactccttatggccatcaagggccagatctatgatgtttctcaaagcagaatgttttatggacctggtggaccttacgcgattgttgctggaaaagatg

SEQ ID NO: 16945 - DNA, 235 bp, Gossypium hirsutum
  Clone ID: LIB3145-043-Q1-K1-H2
gggatttatggcttatcgatggaccaagatttgacggaactagcaaccagcagctataggggagacggggaactgtgactggcgtcggatctactgattgcacaagacccacgactgttgccaacactgacggttatgaaaacagaggaagcgacctcgaagtacacacatgatacggcagaggagataaatctgacgacagacgcggcggtgctggacacggtgttgataacac

SEQ ID NO: 16946 - DNA, 372 bp, Gossypium hirsutum
  unsure (1)..(372): unsure at all n locations; Clone ID: LIB3145-043-Q1-K1-H3
cccacgcgtccggagggaatctccttcaaaaatgagtgcctgccaaccatggtcaactcctacttggactgctttcctacaggcaattgcttcagcagcaaaagcagatggaactccattgtggatttctgagcaggataaaagaatttttccttccgagtctctggtcacaacacctgaggctgaccggttctgaatctgattatatgcaccatcaaaattaatctttatggattcccactgtggtgcacagcaaaagagtcgactttgatttgggtttaactgctctagcgcccagcacagtcacggaataagtgattcatcgtttcagctccttctccacatncgggacacctttgtgtgactgtaatt

SEQ ID NO: 16947 - DNA, 380 bp, Gossypium hirsutum
  unsure (1)..(380): unsure at all n locations; Clone ID: LIB3145-043-Q1-K1-H4
caagatttcaagaccgatttaaggttccaaagcagcgctgtcgccgctcttcaagaagctgccgaggcttatctcgtcggactgtttgaagatactaatctatgtgctattcatgctaagagggttaccatcatgcctaaagatatccagcttgccaggaggatcagaggcgagagagcttaggttagtttgttttagttgactaatgcctagaattagagatatatgcttgtgttcgtttggttgtattatctttctctgcaagtgttggatttaaatcgatcgaattttaatggatgctgtatagtttcatgatgttttcatgaaatttggttaatggaatggcaacagtttcttttnntaatagataattttccggg

SEQ ID NO: 16948 - DNA, 244 bp, Gossypium hirsutum
  unsure (1)..(244): unsure at all n locations; Clone ID: LIB3145-043-Q1-K1-H5
cccacgcgtccgcccacgcgtccgcgagtctatagccttggccgacaggcccgggtaatctttgaaatttcatcgtgatgggggattttatgatgtatgtttttgtgaggagattatatttatagtatataattccatttgcagtctaaaaaaaaaaaaaaaaaaaaaaaaaaaaaaaaaaaaaaaacaaaaaaaaaaaaaaaaaaataacaaaaaanaaaataatttttaataaatttcttat

SEQ ID NO: 16949 - DNA, 195 bp, Gossypium hirsutum
  Clone ID: LIB3145-043-Q1-K1-H6
cccacacgttcgaccaatcatacgtacctatatgtcgctctcaagggaatcatagcctgttgcggcgacgtttatctctatccgtttacatgctgtacaaaagaccacgcagagatggtcactggtgcatccttaacgattgtgaatgattactgcacttggtatatgcaagacaccagtggaaaaagatccctc

SEQ ID NO: 16950 - DNA, 355 bp, Gossypium hirsutum
  Clone ID: LIB3145-043-Q1-K1-H7
acttaatcaaaaaggaagttccttgcgagactgaccaactcactcatgtttatgcattcattctccgtccagatgctacctacagcatccttattgataatgttgagaaacaaactggtagcttatacactgattgggatctcctcccaccaaagaagatcaaggatcctgaggccaagaagcctgaagattgggatgacaaggaatacatccctgatcctgaagacaaatagccagagggttatgatgacattccaaaagagattcctgatcctgatgcttagaagcctgaagattgtgatgatgaagaagacggtgaatggacaccctcaacaattcccaaccccgagtacaa

SEQ ID NO: 16951 - DNA, 317 bp, Gossypium hirsutum
  Clone ID: LIB3145-043-Q1-K1-H9
gatctaataagatcaagtcgatccaaacatgtttctcaccaggactgagtatgaccgtggagtgaacacatattctccggaagggagattgttccaggtggaatatgctattgaggcgatcaagctgggttcaactgcaattgggttgaagacaaaaaaaggtgtcgttctggctgttgagaagcgtattacttcaccacttttggaacctagcagcgttgagaagattatggaaattgatgagcatataggatgtgctatgagtgggttgattgctgatgcccgtacacttgttgaacatgcacgagttgagactt

SEQ ID NO: 16952 - DNA, 254 bp, Gossypium hirsutum
  Clone ID: LIB3145-044-Q1-K1-A1
ggtttttcttcttcattttcccctttcctcgatcaaaatcctcagctctcttaccgccaaaggaggatcatcttttcaggttttacgatggcatcgaagcggatcttgaaggaattgaaggatttacagaaggatcctcctacatcttgcagcgctggtcctgttgctgaagacatgttccattggcaggcaacaatcatgggtccaccagacagtccttatgctgggggtgttttcctggtgaccatccattt

SEQ ID NO: 16953 - DNA, 342 bp, Gossypium hirsutum
  Clone ID: LIB3145-044-Q1-K1-A10
cccacgcgtccggcagtttgtttgagtgcctgtcaatgattctcagttttgtttcagtggggccgtgtttgaatccagaagaagggaaggaacggacttaaatagtactagtctagtttgttttctttagctctatgatggatcgctgtatgtacgaaattagtgggatttgaaatgctgaaagtgattggaatgctttgctgtttgctgggataattgtatgatcaaagactaacttttgttagttgcattgctacagatgtgttagtaagtgtaggatgcatgggaaccttaaccgagcattttaaaatcaataatgacatgaccttctggtagcttaca

SEQ ID NO: 16954 - DNA, 317 bp, Gossypium hirsutum
  unsure (1)..(317): unsure at all n locations; Clone ID: LIB3145-044-Q1-K1-A11
ttttgatattcagattagcaaaagtaggaatgtaattccaagagattcccaatattgtaactttgattttcgggggaatttgtaaattccatattttttttgtaaaaaactttactctcggtttgtaaattaataggattttgagtnaaaaaaaaaaaaaaaaaaaaaaaaaaaaaaaaaaaaaaaaaaaaaaaaaaaaaaaaaaaaaaaaaaaaaaaatttaaaaaaaaaaaaaaaaaaaagggggggcggttttaaagaatcaaatttttcttccccgggcttgcaaagtaataatttttttttgggggccccaa

SEQ ID NO: 16955 - DNA, 368 bp, Gossypium hirsutum
  Clone ID: LIB3145-044-Q1-K1-A12
cagaaaactgtcaatttcctcgagaagagagcaatgcatctcttgaagacagccttgaaggacctactagcagaaaagcattggtgcatagatatcttgagaagaagaaagacagatgaaggtttaagaacaagagaaagttggcaatgtcttcatctccgaccttagacatctacttaaatcaagtgggagatcagttttcaaatgagcagttgaaacaaagtgaaccatattattctccccaagcagaagcacaccgcatgcctcttgagtgcagctccattgaaaatgttgcaaagattccccgccttactactgatggaaaagatgcattcaaaatatgaccatgaatggagcccctaccatgt

SEQ ID NO: 16956 - DNA, 329 bp, Gossypium hirsutum
  Clone ID: LIB3145-044-Q1-K1-A2
gtgatggcgttagcttgttgaagatatggaacatgaataagtacaccggagttctaggtgtttacaactgccaaggtgcagcatggaacagcgcggccaggaagaatactttccaccaaaccaagacagactccttatcaggccacgtaaaaggccatgatgtccatctcatttcagaggcctcattggaccctgaatgggccggtgactctgcagtttactgtcaccagactggtgaacttatcacccttccatacaatgctgccatgccagtgtccctcaaggtccttgagcatgaaattttcacaatagcacctatcaagaatttg

SEQ ID NO: 16957 - DNA, 393 bp, Gossypium hirsutum
  unsure (1)..(393): unsure at all n locations; Clone ID: LIB3145-044-Q1-K1-A3
gttcagtcttgtgtggtgcatttacagaaagtacctttggctcggagatttgcattagttcctcttggacccccattgctagcttacaggagcaattgcaaggcaatgttaagtgctgttgctggtgctgttgaactagtggttgatcgcccatataaggctggggaacctattgttgtctggtgtggaccacagcctaattcgaaactgcttataaactatggttttgttgatgatgataattcttatgatcgcctggttgttgaggcagctttgaatactgaggatcctcaatatcaagacaagagactggttgttcaaagaaatggaaaactatctgtacaagcttttcctgtttatgcanggaagggaaaagaagctgtctcggatatg

SEQ ID NO: 16958 - DNA, 331 bp, Gossypium hirsutum
  Clone ID: LIB3145-044-Q1-K1-A5
gtctccagccaccttcagggagaagcagtgcaagattggcgggagattgtgacatacttttcatacccattgaagagcagggactattcaaggtggcctgataagccagagggttggattgaagttacaaaggagtacagcgagaagttgatgggcctagcttgcaagcttcttgaggtgttgtcagaggccatggggttagagaaggaggctttgactaaggcatgtgtggacatggatcagaaagtggtggttaacttctatcctaaatgccctcaacctgacctcactttaggactcaagcgccacactgacccaggcaccatcacac

SEQ ID NO: 16959 - DNA, 421 bp, Gossypium hirsutum
  unsure (1)..(421): unsure at all n locations; Clone ID: LIB3145-044-Q1-K1-A6
agcatgtgaagggaccttataccccgacctttgcgtctccaccatctctgttctcccagatctcgcttccaaaacactgcctgagctcatccaagcaactctaaaccaaacaatgtacgaggtccgtctctcctctgccaactgcaccggcattgaaaagcggatcaaaagttacagcaaacgggaagaggcagcgataaacgattgccttgagctttttgatgacaccctggaggagctgaaagttgcccttgctgatctcgtcccaaagaaattagcagtctccaggaactaccacgacttgcagacatttctaagcgccgcgatgaccaaccagtatacgtgtcttgatgggttcgcacgtagcanagggaatgtangaacattatcaaaaagggtcttacaacatcactcatcacgt

SEQ ID NO: 16960 - DNA, 366 bp, Gossypium hirsutum
  Clone ID: LIB3145-044-Q1-K1-A7
cccacgcgtccgaccgctggaagaataaaaggcaggtagctgtggactcgaaaattggacgtatcaccaatttcatcaataaagtaaaggttccaatgcaggttttcatagcttgtgggataagcagttctggtggtaaagctgttgatcctttccgcaaaccaaagcctggcatgtggcacattatggagaaacatttcaactctggcattccaattgatatggatcaatctttttatgttggcgatgctgctgggagaccgaatgatcatagtgatgctgatataaaatttgcacaagcggtaggattgaaattttacgttcctgaagactatttcaaatcttaattcggcatattcatggaaa

SEQ ID NO: 16961 - DNA, 355 bp, Gossypium hirsutum
  Clone ID: LIB3145-044-Q1-K1-A8
cccacgcgtccgcccacgcgtccgggaagaagagtggtttcgatcaatattttgcaattccaagaaagaagaggccattcagaatcagtatgaattctttgtgcaacgaatgggagggccccctctttattctcagaggaaaggtcatcctgcattaattgcacgtcatagaccatttccagtcacacatcaagctgcagagagatggttatatcatatggagaaggcattagagagcaccccaaacattgatgctgattcaagagtcaaaatgatgaactttttgaggcacactgcattttttcttgtggctggagatgagttgaagactcaaaacaacaaattccatgcaaca

SEQ ID NO: 16962 - DNA, 391 bp, Gossypium hirsutum
  Clone ID: LIB3145-044-Q1-K1-A9
aaaaaaagagagatggcgtctgtaataaaatctgcaatcttaattctgtcggtgtttttatctgtacgcttcagttcgggtgttaggttgctccaggaacagcccaatgatgaccccaaaaacatggacgctattcctcccattgatgcactcaaccctaccgagttgaatggacccggtgttggcattcacgaagatcatgttgtcccaaaaggtgctgaaattggtactcttggttttggttttgaaggtggtcctgataaatgttgttcttctggatgttccggtaattgtaatcctggtggtttcgttctaccatttcctcaaattccaaaaatcccaagaattccagaaatcccacaaatcccacagatcccacaaatcccacaaa

SEQ ID NO: 16963 - DNA, 351 bp, Gossypium hirsutum
  Clone ID: LIB3145-044-Q1-K1-B1
ctcaaccctaccgagttcaatggacccggtgttggcattcacgaagatcatgttgtcccaaaaggttccgaaattggtactcttggttttggttttgaaggtggtcctgaaaaatgttgttcttctggatgttccggtaattgtaatcctggtggtttcgttctaccatttcctcaaattccagaaatcccaagaattccacagatcccacagatcccacaaatcccacaaattccactaatcccacagatcccacaagtcccacaaatcccactaatgccaggacagtcgggatgtgagagtggggagtgttgccgtcagggttgcggtgggacttgtgctgagtgtggt

SEQ ID NO: 16964 - DNA, 398 bp, Gossypium hirsutum
  unsure (1)..(398): unsure at all n locations; Clone ID: LIB3145-044-Q1-K1-B10
atcggaagagaaaggtgagaatgggggaagcagtagtggcagcgcacaacgtattcgtatatggaagcctattagcagatgatgtggtccgtgtcctgttgaatcgagtccccacttcctccgctgctcttctcaacggcttccatagatttagcattaaaggacgggtttatccggcaattctgccagtccgaaaccgtcatgttagtggcagggtgttaatgggaataacggatcccgaattgcatattttggatgaatttgaggacgttgagtaccaaaggactcgcgtngaggtctcgttgctggaaagttctgacaaattacaagcccacgcttatgtgtggagcaacgctagtgatcctaacttgtacggcgattgggattttgaggaatgg

SEQ ID NO: 16965 - DNA, 356 bp, Gossypium hirsutum
  Clone ID: LIB3145-044-Q1-K1-B11
agacaaccaaagtggggtcacctaagagatgtccataaggctataaagctttgtgaagaagcattgatagccactgatcctaaaatttcctctttgggtccaaacttggaggctgctgtatataaaacaggatcgggaggatgttctgcttttcttgccaatatagacaccaaatctgatgcgactgttaatttcaatggcaattcataccatttgcctgcatggtctgtcagcatcttaccagactgcaagaatgtagttatgaataccgccaaggttaactctatgagtgtgattccaagcttcatgcatgaatcattgaatacaaatgctgattcaactgactcaatcgggtc

SEQ ID NO: 16966 - DNA, 354 bp, Gossypium hirsutum
  Clone ID: LIB3145-044-Q1-K1-B12
gaagaatactggtcaaaagccgtattgaagtgaatgcttacgtttgtccttcggtcatcgtgattatgaagtctgcctgattcacagatacataagaagctagagccaacagcagaaaaggcgacatactcatttgtcccctgagtaaagacccatgacactgtcgaaaaacatggttgctatcttcctctgtttgtttgcatctaggtcacccagcttcagtaatcactctcttcagtttgagattagcaaaagtagggatattgttccaagagatcttccatactgtaattttaatttttgaggggatatgtaaattccataattttctgtagaaatttttggtttcagcat

SEQ ID NO: 16967 - DNA, 287 bp, Gossypium hirsutum
  Clone ID: LIB3145-044-Q1-K1-B2
ctcaaccctaccgagttcaatggaccctgtgttgttattcacgaagatcatgttgtcccgaaagggtccgaaattggtactctcggttttggtttttaaggtggtcctgaaaaatgttggtcttatggatgttccggtaattgtaatcctggcggttacggtctaccattttctcaaattccaaaaatcccaagaattccacagatcccacagattccacaaatcccacaaattccactaatcccacagatcccacaagttcctcaaatcccacttatgcctggaca

SEQ ID NO: 16968 - DNA, 306 bp, Gossypium hirsutum
  Clone ID: LIB3145-044-Q1-K1-B3
gtacagcagcatacccagcagcaatacgactctggagaactctcaagggaacttcagaaggatggaggtccgtttcctggtcggttgcatgcttctttcctggaattgtgtttgttatcctcacagtattgaattttattctgtggggcagcaaaagcactggtgcaattcccatttctctgtattttgtactcttgtctctctggttctgcatttctgtgcctctcactctcgtgggaggattcttagggaccagagctgaagctatacaatatcctgtacgaaccaaccagattccaagggaga

SEQ ID NO: 16969 - DNA, 353 bp, Gossypium hirsutum
  Clone ID: LIB3145-044-Q1-K1-B4
gaactctgaaaaggttttgaagcaccagaagcagtatgagtagaagataaaatatttaacacttgaagataaagtgtcatactaaatctaaattaggttgtgaaactctcggagtgcgaaatttatagttataatcctcactctgatgcagatccctttctggagaaatgatcaatgttagaagggagaaaatcagtgaaagaatgaagtatctgcaagatttagtaccaggatgtaacaaaatcacagacaaagctggtatgctgaatgaaatcatcaattatgttcaatctcttcaacggcaagtagaggtaaaaaataatggagaaagaacatatggatttgtgtttaag

SEQ ID NO: 16970 - DNA, 399 bp, Gossypium hirsutum
  unsure (1)..(399): unsure at all n locations; Clone ID: LIB3145-044-Q1-K1-B5
cccacgcgtccgcccacgcgtccgaggaaacgctcaatacaaagacgctccccactttgccctctccccttctcccactttcaaacttgaaaaaagcagacggacaatccttcatcgcagggtcagcttgcaagcaaggaaaaaatggagaaagaacgagcaagactggcagtgctgatgaattgaataaaggatattttgatgatatgtctgagctaaaacaacacggtggtaaggaatttggtcaaaatttgttgtgaagttgaagtaaaaaccaagctatatgcatgcataagccttgcctgcactgctttcggaggtttttaaatgatacaagctctactggatagactngnntctttgcttcttcagcaactagtgcaagaatacagcaactgg

SEQ ID NO: 16971 - DNA, 120 bp, Gossypium hirsutum
  Clone ID: LIB3145-044-Q1-K1-B6
aagaatttcgagcatcatccctaattttcatgaaaaacgtaaggagctgatggaacttgccgcttcatttaaatcttctcaaggacgacccgttactagacttttgagtgttgcaagaag

SEQ ID NO: 16972 - DNA, 324 bp, Gossypium hirsutum
  Clone ID: LIB3145-044-Q1-K1-B7
aaaaagaccgtagatacttgaaaaaatacgcacctgagctatccatatactctcgcaagacctgaatacgtgtgctaacacctgtggttgctgcttcttaatagagtgagcaccaatcagctgacattctaagatacaccactacgccactaagactggctatgacaccttatataaccacctgcgttgtagctatactcatacaacatcatgggccgtgtgcacacaccatgaatagatgctggcttaaagagtctgcctgcctaagtccactagataggtaacaatctagtgacactatggcatgctacgctatcgtatatg

SEQ ID NO: 16973 - DNA, 377 bp, Gossypium hirsutum
  Clone ID: LIB3145-044-Q1-K1-B8
aaagaacaaaaaaatatcttgaaacccggagatgtcggacgaggagcaccatttcgaatccaaggccgacgccggcgcctctaaaacctatcctcagcaggccggtactatccgcaagaacggctatatcgtcataaaaaaccgcccatgcaaggttgttgaagtttccacctccaagactgggaagcatggtcatgctaagtgtcactttgtcggaatcgacatcttcactggcaagaaactggaagatattgttccatcttcccacaactgtgatgttccacatgtcaatcgtactgattaccagttgattgacatttctgaagacggatttgtgagtttgctgactgacagtggagacaccaaagatgatttga

SEQ ID NO: 16974 - DNA, 375 bp, Gossypium hirsutum
  Clone ID: LIB3145-044-Q1-K1-B9
ctttcttcttggacacttgcaatcaatgggacttgatttcccaaagaacgttagtgtaattgctgtgtgtcctaaaggaatgggtccatctgtaaggagactttatgttcaaggcaaagagatcaacggtgctggaatcaattctagttttggagtccatcaggactttgatggtagagctactgatgttgccttggggtggtcggttgcccttggatcacctttcacctttgttactactttagaacaggagtacaagagtgacatattcggggagcggggcattcttctcggtgctgttcatggaattgtggagtgtttgtttagaagatacaccgaaaacggaatgagcgaggatcttgcttacaaaaacac

SEQ ID NO: 16975 - DNA, 357 bp, Gossypium hirsutum
  Clone ID: LIB3145-044-Q1-K1-C1
gtttgctctgtatattgaaattttctttctcgattttctctttagccaaaaaagatgcagatcttcgtcaagactctaaccggcaagacgatcactctcgaggtcgagagctccgacacgatcgacaacgtgaagaccaaaatccaagataaggaaggcatccctccagaccagcagcgtctgatcttcgccggaaaacagcttgaggacggccggaccttggccgattacaacatccaaaaggagtcaactctccacctcgtcctccgtttgcgcggtgggatgcaaatcttcgtgaaaaccttgaccggcaagacaatcactctcgaggtcgagagctccgacacgatcgacaac

SEQ ID NO: 16976 - DNA, 346 bp, Gossypium hirsutum
  Clone ID: LIB3145-044-Q1-K1-C10
ggcaagtattatatctttcacattcagggaagcagtagttgatgttgactacaaaggatacttaatacccaagggttggaaagtgatgccattattcaggaacattcatcataacccagaattttttcccaatcctcaagaattcgatccatctagatttgaggtagctccaaaagccaacaccttcatgccatttggaaacggcgttcatgcttgccccggcaatgaactggcgaagctggaggctctcattttgatccaccacctagtaacaaattttaggtgcgaggttgtgagttcaaaaagtggtattcaatatgggccattcccagtgcctcaacaagga

SEQ ID NO: 16977 - DNA, 343 bp, Gossypium hirsutum
  Clone ID: LIB3145-044-Q1-K1-C11
cttggacagcccactaaggagatggaggcacaaaccatccacaaggtggcccaagccgtccatccaaaggtaaaatagttcgcaagaccctttcttcagtgacgacaactaccagtggagggggacggcatcttcctcctccaaaaaaaacaaattcatccactcttcttccactactcaagggtcggccacacaagtgagattttcaagggattcccatgatattattagtatgggatgttggggctactccactataaataggacatccatccctcattcatcccatatctggattttcttcccacttcttgagcactacacttgagagaagaaacataag

SEQ ID NO: 16978 - DNA, 360 bp, Gossypium hirsutum
  Clone ID: LIB3145-044-Q1-K1-C12
tgcgaatgtcttcctcttctctcccgaaggaaggaaatcggggaaaaatgaaaatggaaggaatcgaaggcgacgcctcggtgggaggagcagggcgttacattttgaatccgacgcgaataaacagcgaggacataatattttgcgttgatgtggacgcagagtcgcttgttgaaatgaaaacagcaggagtcaccagattggattccataaagcaagctatccttctctttgtcaattccaagctctctatcaaccccgaccaccgcttcgctttcgccactctctccaaaaccgcctcttggcttagaaaagagtttagtagtgatgttgagtctaccattggtgctgttcgagcac

SEQ ID NO: 16979 - DNA, 276 bp, Gossypium hirsutum
  Clone ID: LIB3145-044-Q1-K1-C3
tcgcccacgcgttcgatttgagaccatttctggtgttttagggtttgatcacagtgagaaagaccgatgggaggtggccatggagggagcacaacttacaaaggtgtgaatttgcaccacccaaagagatggcacgtcgccaccggcaagggcttgtgcgctgtcatgtggttttgggtcctgtacagggctaagcaagatggtcccgtagtgttgggttggcgacacccttgggagggccatgatgaccattctcatggccatggagacaagcat

SEQ ID NO: 16980 - DNA, 234 bp, Gossypium hirsutum
  Clone ID: LIB3145-044-Q1-K1-C4
ggagaactggtaggctcagaggacaagctgctgctacagctgccaaagctgacaaggcttaggcttaggcttaggcttaggatattacttgctgtaattttagttcttttggtcttcagattttacattcaagagtgtttaagacctttatgcttgaaaatgtgtttgaattatcagatattggtactgttttgagttgtttgagcaatgattttgtttttgattcggattttt

SEQ ID NO: 16981 - DNA, 358 bp, Gossypium hirsutum
  unsure (1)..(358): unsure at all n locations; Clone ID: LIB3145-044-Q1-K1-C5
cccacgcgtccgagaaaagatcagtagaaggtggaaagcaaggtgcttcaacaaaaaagttgaaaaaggacaaagctgttaatgcgacagcaaaaagtgctcgccctgaggctaaacccacccctgctgcaccacgagtcaagccagagctcactttgcccgtaatgtctacagaggtagaacagtctatactcgaggacttaagaaaccgtgtacagttgagtagcgttgcattgccatctgtcagcttttatacgttcctcaacacgcataatggtttgaactgttcatcaatatcccaggatggatcttttgttgctggagggttctcagactcatcactgaangtttgggatat

SEQ ID NO: 16982 - DNA, 328 bp, Gossypium hirsutum
  Clone ID: LIB3145-044-Q1-K1-C6
gttcttttttaaacaaatatccccgatctcctgcttagagttagtttctcgtatttatggggctacttgaccagttgtgggacgacaccgttgcgggtcctcgacccgataatggtctcggcaagctccgaaagcactccactttcactttccgctctaactcctccaaggaatctgatggcgggagtgtgagatcgtacaatgatgagacgccggaggaaacaacgaaagtgacacgtacgattatgatcgtaaaatcgccgcgttaccagagcggatcgcctccggtttcgccggccgaatcgactcctccggtatctcctttttc

SEQ ID NO: 16983 - DNA, 353 bp, Gossypium hirsutum
  Clone ID: LIB3145-044-Q1-K1-C8
aaatcattcaagtttcttaattttcattcgatatcgaagatgtcaggaagaggaaagggaggcaagggacttggcaagggaggagcgaagcgccaccgtaaggtcctccgtgacaacatccagggcatcacaaagccggcaattcgacgcttggcccgtaggggaggagtaaagcgtatcagtggcttaatctacgaggaaacccgtggagttctcaagatcttcttggagaacgtcattcgcgatgctgtcacctacactgaacatgccaggaggaagacggtgaccgccatggatgtggtttatgctctgaagaggcagggtaggactttgtatggatttggcggttagtc

SEQ ID NO: 16984 - DNA, 335 bp, Gossypium hirsutum
  unsure (1)..(335): unsure at all n locations; Clone ID: LIB3145-044-Q1-K1-D1
tccgtctcgggaaagggaagggttnnttggagaaaggtcgaagtcgatcgatgctcnngcctcatattattgnnaccccaacaacccttactcanngcattcctcgatgttggtgcgtgccaaaatcgtgtttctcgggaatcaaccatgnngcatgatttgcagagcttggcaacgcaaagcgaggtnngtccgttttgttgatgnccatgtaggcattctttgcatatgtaaagattgtgatgtgctaattagtgtttgtcctgtctgcgaggttaagaaaacagctcatgtccaagtttacttatcataaactgtgaaacaaattacagatt

SEQ ID NO: 16985 - DNA, 280 bp, Gossypium hirsutum
  Clone ID: LIB3145-044-Q1-K1-D10
aaaaaaaaaaaaataaaaaaaaaaaaaaaaaaaaaaaaaaaaaaaaaaaaaaaaaaaaaaaaaaaaaaaaaaaaaaaaaaaaaaaaaaaaaaaaaaaaaaaaaaaaaaaaaaaaaaaaaaaaaaaaaaaaaaaaaaaaaaaaaaaaaaaaaaaagggggggggccgttttaagggacaaagttttaagtccgggggcttgcaaggtataactttttttttggggtacctaaaataaaattaatgggcggtggtttaaaaacgggggagggggaaaaacct

SEQ ID NO: 16986 - DNA, 253 bp, Gossypium hirsutum
  Clone ID: LIB3145-044-Q1-K1-D11
atggaaccaagagtgggaagaagaacagcaacaagaaaaacaataacaacaacgacaataacaacgaaaacaaggatgggaaaagtgctgctgataaaaggtttaagacactgccaccatctgaatcattgccgagaaatgaaactgtcggcggctatatttttgtctgcaacaacgataccatggaggagaatctcagaagacagctctttggtttgcctccacgttaccgtgattcagtccgggcaataac

SEQ ID NO: 16987 - DNA, 344 bp, Gossypium hirsutum
  Clone ID: LIB3145-044-Q1-K1-D12
cccacgcgtccgctttgaagtgcagaatcaagggattgtgggtggagaagaagcggtgacggatctaacttggaactccgttttctcttcttaccgctattcccgacctatctctaaccccctcaatttctctcaggctccaatccaggtagatattccttgtgttcaagcgtcttcatggcttcaaagcggattttgaaagaacttaaggatttgcagaaggatccaccaacttcctgtagtgcaggtcctgtagcggaagacatgtttcattggcaagcaacaattatgggcccctccgatagcccttttgcaagaggtgtgtttttggttaatattcattt

SEQ ID NO: 16988 - DNA, 327 bp, Gossypium hirsutum
  Clone ID: LIB3145-044-Q1-K1-D2
cccacgcgtccgaccacgcattcggccacacgaacggagtggcgcaaaaactgggttatctgcaataatatcattgaaccataatgtgttgcgctcttttggtcttgactgcattatacgaatacataccacagtgtgctatggctgctatagtaatctctggtgctataaccatggcggattatgaagaggcgctattcttatggcgtgtatataaaaaagaatctattctttggaccattacaactactacaacactgtgactcagaatcaacattggagttcttgctggcgcatgcgtcacacttgccatcgtgattcacaaat

SEQ ID NO: 16989 - DNA, 400 bp, Gossypium hirsutum
  Clone ID: LIB3145-044-Q1-K1-D3
gtcttcttcacttgcaatttcctcaagctcccttaggctcacccatgtcttcccaactaacggaaatgcaattctatttaacgccatatccagttgcagggtctcctctttgaagccaccgtctttgaacagtatcttcattagaatcccattcgggtcctttaagaaggcctcttttttcacttcctccaggcccttttctcctgtcatggaatggcaggattgcacggcaaagatggaaattgatgtacctgcatcggtcgcttacaaatgttactctgatcgtgaagcaattcccaattggatgccattcatttcatctgttcaggtattggaagacaagcctgatttgtcacggtggtctttgaaatataaacgcattggtcgtgatcttgaatac

SEQ ID NO: 16990 - DNA, 403 bp, Gossypium hirsutum
  Clone ID: LIB3145-044-Q1-K1-D4
ctctggaaaggtgtataatgtaacccaattcttggaggaccatcctggtggagatgaagttttgcttgctgctagtggaaaagatgcgaccaatgatttcgaagacgtaggtcacagtgatgatgcaagagagcagatgcagaagtactatattggtgaggtcgatgccaccaccattcccgcacgaaggatgtacaaagcacagacgtcaaccgcggcaactcaacaagaggagcctggctttctgtttaagattatacagttcctggtacccctcttgatcttaggcttcgcattcggtttacagttcttggggaagaaggaaaaaaccgaaacttagataactttccattacggacctgctagtcgatgtatgctgtaaagctgtgtgtgtgtgtatgtc

SEQ ID NO: 16991 - DNA, 257 bp, Gossypium hirsutum
  Clone ID: LIB3145-044-Q1-K1-D5
gcttaacatctgttgattttatatttggaagatctcttggtttactgctggtttaaaaaattatatttgttctgtaacagctgtgtacttggtagctcaatatgctcgctatgaaatgaggaaaatggaagcggagctagaggagaaaaagaagcacgaagaagaagaaatgaaaaggaagcaagaagaagaggagaaagataaagaggtggaacaaattgcccctgattcagagcttttcgaggtaaaaaggagac

SEQ ID NO: 16992 - DNA, 362 bp, Gossypium hirsutum
  Clone ID: LIB3145-044-Q1-K1-D6
gtttcatctccacattatttggctgagattgtcatttatgttggcttgttgattgctagcggaggagcagacatcaccatttggttactcctagcatttgtggtcacaaatctggggtttgcagcagctgaaacacagaagtggtatattggtaaatttgaagattacccaaaacatcgatatgccatgattcccttcatcttttaatgttttagggcgggagtaattattcgtcccacattgaatgccaagtggtgtttgagaaccttacaataattgatgggcttgtcacttgtgtaatactacaaccctacttttgcctttcttgccatcatttgatcctattaattatgccagcatgc

SEQ ID NO: 16993 - DNA, 381 bp, Gossypium hirsutum
  Clone ID: LIB3145-044-Q1-K1-D8
ctttatctgaggctaataaacaataaagaaaaaaaaattgaaggcctcagtttcaaaatggcttcaatgaggctccttgcaataattgccattctggttcagggcttagttaatggtgattctcacgaattgcctagtttcgatccggaactagccgtagccaaagtttgggaagttgctgaaggcaaggtcggccctgatgttaaagtttttaatgtggtggatttcggtgccaagcccgatggaaccaccattagcactatcaattttattagggcattcaaagcagcttgcaatcacaatggccgtgcaatgctggtgatccctgagggaaatttcttattaggatcgatgttattgtcccgaccttgcacttttcaa

SEQ ID NO: 16994 - DNA, 431 bp, Gossypium hirsutum
  Clone ID: LIB3145-044-Q1-K1-D9
cccacgcgtccgacgacattgataaccgaattattactgaagttttgggtcttggaaggtatggtcgaattcgatttcaaagatcttttgttaacccaacccaatattttggatctagctcgcagcaatacgtgccttcggggaattaggctcaaactaaagttcagaggttaagaaaccagatgactgagatgcaagcgagcacagttgagcaattaagcggaggcagcatcaaaagaagcaaaggctcaaagaaaatatgaagaactccatctacaacttaaagcgaatgcagcagcgagggaagcagatacaagcagaaaatatgataaacttcagttagcttcagaatatgatgaagatgtttcagcagtcacagaaatttgccgtcttagacgtttgttttcttaattgtaagaatattttaacat

SEQ ID NO: 16995 - DNA, 345 bp, Gossypium hirsutum
  Clone ID: LIB3145-044-Q1-K1-E1
ctttcaagtttgactaaatttgggtgcttattatcttcttctttttttttcacatatttttaactgttgtcaaatgatgtttgttgcatttgtatttgatgctgcataaccaataaataaattcgatatttatactttgttgttttatggctgcccttattgttctgccctcgatgtatgctttgccaggttgaaagagtttctcacagagacaatttggagagttttgtgcaaaaatcagagaaccttgagaggcaatgccttgcaaaagctatgagatcatactgtgaactgcgagtgttgccatatgaggaaaacaagactgttgtattttaagagcaaaaa

SEQ ID NO: 16996 - DNA, 361 bp, Gossypium hirsutum
  Clone ID: LIB3145-044-Q1-K1-E10
gccaaaaagcatagattggagaaagaaaggtgctgtcgctccaatcaagaatcaaggccaatgtgggagttgttgggcattctcagcagtggcagccatagcagggatcaatcaaattaaaacagggaacttgacatctctttcggaacaagagctcatcgattgcgacaccgactctatcgaccaaggctgcaacggtggacacatggtccaagcgtatgaatttattataaagaacggtggaatcaccactgagaaagactatccatacacgggaagagatgacacctgcaagcggacacaagctaaaaaccatgcagtaacaattagtgggtataagagattacctaccaacaatgag

SEQ ID NO: 16997 - DNA, 334 bp, Gossypium hirsutum
  Clone ID: LIB3145-044-Q1-K1-E11
cttttggaaattagtgaggaacttactaaagccgccgggtcaggaacagatcgattgtcagaaacctaagcctattttgcttgataccggtgaaatgaaactaccatatgactgggcgccttcgatacttccggtccaaattgtgcggatggggcaacttgtcattctcagcgtacctgcagaattcacaaccatggccggcaggcggctccgagacgctgttaagacggtgcttacttccggacacaataagcaattcgacagcaatgtccatattgtcattgcagggttgacaaatacttattcacaatatgttaccacttttgaggagtac

SEQ ID NO: 16998 - DNA, 388 bp, Gossypium hirsutum
  Clone ID: LIB3145-044-Q1-K1-E12
cccacgcgtccgccgtaagacattttccattctcttctctacactctcatcggctcagcttcaaaattttctttgcagactttctttagaaatgtatgttttctatttccactttcatttctactcattttctgtggcttctcccattccaatccattcttcatttcgattccctcaatccttcccgctccgaccctatacccgaatttcaatccattcttcattctcattgaattatttctgttggtgaattaatgcaatttccaagcttctacgtgatgggtttgtaattttctaaacctcatagcttttatgggtttctttttggtattaatttttagcttttaattggatttctcgatgttcttaaacttttcttccattggat

SEQ ID NO: 16999 - DNA, 385 bp, Gossypium hirsutum
  unsure (1)..(385): unsure at all n locations; Clone ID: LIB3145-044-Q1-K1-E2
tctctctctctattctctttggcttatctatcgctttgatttcgcatccttgctgtgcactcgatggcaaatcgatggttgaggcctgaggtgtatccgctgtttgcggccgtaggtgttgctgtcggaatctgcgggtttcagttggtgcgcaatatctgcatcaaccctgaagtcagggtaaccaaggagaacagggctgctggggttttggacaactttgctgagggagaaaaatattctgaacatttcttgagaaaatatgtccgcaacaagacgccagaaatcatgcccagtatcaacagcttcttcactgacccaaagtgaggcttcactcttgctttatgctgaaactaaaaaataaaaaanaatagaagaactaagt

SEQ ID NO: 17000 - DNA, 386 bp, Gossypium hirsutum
  Clone ID: LIB3145-044-Q1-K1-E3
cccacgcgtccgcccacgcgtccgagcgaacctatttctggtgcaacagtaaaattggaatgtaggaatcgaaccagtgaaaaaattacttttcaaagcccagaaataacaactgatgctgcgggaagctacaaaattgaagtgacaggagattatgaagactcagactgtgatgtcaacttggtgaagagtccccgagcggattgtaatgatcccacagaagcgtggaggaaagccagggtggaactcaccgcattggatggtgttaccggcccaattcgctttgccaacaatcttgggtttaaaaagaaagaagctcttccaagttgtaaaaaagttcttacagacatgggttattatgagcttaaggatgaacttggaaagcg

SEQ ID NO: 17001 - DNA, 216 bp, Gossypium hirsutum
  Clone ID: LIB3145-044-Q1-K1-E4
aaaaaaaggaagggcggggtcccaaggacagggtttaaaggggtaggggtttttaaatccccccccccaaaacgggttttttggggggggcccgactttttacaaaagcttgggattgaaaatgcttgaactgaaaagggatcctgataaaatttttccaaaagttggagggcaaaaaggttcctcccccctaaattttaaacaccccaaattttt

SEQ ID NO: 17002 - DNA, 315 bp, Gossypium hirsutum
  Clone ID: LIB3145-044-Q1-K1-E5
ggaacaaatagctaaacagtaatggacttggacttcattcagaatcgacactgttcagaagtcactatttctattcttttggcaataaaaatagttgtctcactgtgagagagataagagttgtttttcatgcataactgtgatccataaagaatagggtagtttattttaatgcttgtagttgtctgaatcgttgtcatttttttaaatcttagaacattcaacccctcaccccatttctggtctgaaatttcattctttgtccccatgttttagtccagatgggtataaaataaagaaagaaccgcagaactt

SEQ ID NO: 17003 - DNA, 432 bp, Gossypium hirsutum
  unsure (1)..(432): unsure at all n locations; Clone ID: LIB3145-044-Q1-K1-E6
agttcttcctgaacttaatggaaagcttactggaatggcattccgtgttcctacacccaacgtctctgttgtggatttaacttgtcgacttcagaagagtgcctcctatgaggatgtcaaagcagtcatgaagtatgctgcagaggggccacttaaaggcattcttggatacacagatgaagatgttgtctctaatgattttgttggtgattcgaggtcaagcatttttgatgcgaaagccggaatagggttaagtaaatctttcatgaagcttgtttcatggtatgacaatgaatggggttacagtaaccgagtacttgacctaatcgagcacattgcactagtaggagcaactcgcgactgaatattttagagctatgctgntccaattgagtgacacccacattttatcgtagatggttggttcaatga

SEQ ID NO: 17004 - DNA, 390 bp, Gossypium hirsutum
  Clone ID: LIB3145-044-Q1-K1-E7
cccacgcgtccgatttttcaaaggatattgttgccactggaggggttgattcaagtgctgtactctttgatcgaacatctggagagatcttatctacactcagtgggcattctaagaaggttactagtgtaaaatttgtagcccagaatgatgtatttttaagtggttcagcagataagactgttcggatttggcaagggtctgaagatggaaagtatgattgcaggcatattttgaaagatcatacagctgaagtgcaagctgtcacggtccatgccactaacaactactttgtaactgcttcacttgacatgacgtggtgtttgtatgatctttcgtctggtttatgcttgacccaggttgaagacccatcaaattctatgggctata

SEQ ID NO: 17005 - DNA, 336 bp, Gossypium hirsutum
  Clone ID: LIB3145-044-Q1-K1-E8
ctaacacgcacgagtaaacaactgtgattgttgccacggcctgagagaacggcagggctgaaatctgtgatcgaacatgccaatagattttatatagactaaccggtcgttgtaagactgatagtcctgttgcatttgatgaccgtaatggtgcatatatacgtgggtcatgggattacactgttccaattgggtaagggttgctacatgtaacaactgacagcatgcatattccgaaccagcatacctatgaagggcaagctggctcggttcattgcactgacagctacatttgtactgcttcactttacatgacgcggtgtgcttatgattttt

SEQ ID NO: 17006 - DNA, 411 bp, Gossypium hirsutum
  Clone ID: LIB3145-044-Q1-K1-E9
cccacgcgtccgcccacgcgtccgcccacgcgtccgctttaatgaatggaactttgagagatcaagaaaaagagattgaacagttgaggaatgatcttcttcagcttaagcgcgagcatgagaagcaaaatgttcttgtgctaacactttcagggtttttagcattgttatgctgaagggattttatgttgtccaatacgaaaaaattgctaaccagttttccaaaacttgctaataatttgatgcgccacgtcgttgtctacgtgtacccaagagcaatcccaagtatagtcaatgaaagccatgaagtctacttagtgagcatgtggtcaacagcttgctgcataaaaacaggattacttattttatattctggttttattttaaaaagatcatgcagttatttggttt

SEQ ID NO: 17007 - DNA, 260 bp, Gossypium hirsutum
  Clone ID: LIB3145-044-Q1-K1-F1
ggatcttacatcatgctgccaagctccccattcatctacagaagcaggtcatcaattctataaaacccagtatctgctgataaacgtagcttattgcgtcagtcattggcaattgtcatcttgataccattgaacatgtatttcttctcctccttaaaattagatgtaagaaaaattgagataagggagaaagtgtggaaggtgaggatttatttgcttgaagtgatagcagaaaaatgcaccaatgccgagattttgat

SEQ ID NO: 17008 - DNA, 310 bp, Gossypium hirsutum
  unsure (1)..(310): unsure at all n locations; Clone ID: LIB3145-044-Q1-K1-F10
agtgtttttttcccttaaaaaaaaggttgtagacttttgatttgttttgtccacaaaagaatttaaccggattaatagtatatgctcccattggcctttttggctaacgtagcaaattcttgcatcatatcatggattgatgcaaggtaagaaatgtgtaagtttattcatgcaactgctgtttaacagtttagatgttaaaaagttggttttaaacagacaaccacttactgttttcagggatgaattttaactcaaatattcagttttgaatcatcaaggttaccttcgttaatggcttnnnntaaaa

SEQ ID NO: 17009 - DNA, 313 bp, Gossypium hirsutum
  Clone ID: LIB3145-044-Q1-K1-F11
atcttgaaacagaagctggatgcagttcgcctgtctgaggatactgtggaagctgatgatcagtttggtgaactaggtgcccatatgcaaggaggatgatctgcttgtaattaagaactagccattgacatttgtaggtttcagaaaaggcgtgtttacatctaactaactaccttttgtttaaaactcttgagatattttgggtagaacagactacttgttttcctcgatgaaaattgtcagctatatgccatctgttttaaacttaaaagccagcaaagcatggactggcaaatcttacttgttttgaacc

SEQ ID NO: 17010 - DNA, 357 bp, Gossypium hirsutum
  Clone ID: LIB3145-044-Q1-K1-F12
ggcccccagctgagggagaaactcttcaggttttctgaagctgccatcgacaagatcaagtcaaaagtcaactctaccccaccatccgactcctctaaaccattctcaactttccaatctctagcttatcacgtttggcaccacgtaaccctagcacgtgaactcaaacctcaagattacacagttttcactctcttcgctgattttcgtaaaagggttgatccacccatgccggaaagttacttcggaaacctgattcatgccatcttcaccgtcacggcagccgggttattgtcggctaatccaccgcaattcggtgcatcgttggtacaaaaagctatagaagcgcacaacgcg

SEQ ID NO: 17011 - DNA, 425 bp, Gossypium hirsutum
  unsure (1)..(425): unsure at all n locations; Clone ID: LIB3145-044-Q1-K1-F2
ggggacaagagaggtagagaaatagtgtgatggcatccgggtggggaatcaacggtaacaaaggcaggtgctacgatttctgggtcgacttcagcgagtgcatgtcccgttgcagagaacccaaggactgtggtcttctccgtgaagattatctcgagtgcctccaccattctaaagagtttcaacgaaggaatcgaatttataaggaggagcaacgtaaattaagagctgccgcacgaaaagacaaggaaggcgaaaatggtgttcatcatcatgcatagtcataatttgtgatcctttaatttgccaataataataatgcgtggagattgttgtatttatgttggggattggtatttttaactctttgctaaattacccctttggntttccttnttcgtnggaatgaacatttgtngtttttc

SEQ ID NO: 17012 - DNA, 358 bp, Gossypium hirsutum
  Clone ID: LIB3145-044-Q1-K1-F3
cttttacatcattcatttctggttatgtaagtggtggaatgtactcacgcaatgggggtaaaaattggataaaggctatgatccttacagcatctctgttcccatttatgtgctttgggattggtttcatcttgaacacaatcgccatattttatggatctctagcagcaattccttttggtacaatggtggttgtttttgtgatttgggctttcatttcattccccttggcccttcttggtacagttgttggaagaaattggagtggtgctccaaataatccatgccgtgtgaagaccattcctcgcccaattccggaaaagaagtggtatcttacaccctctgtggtctctatgat

SEQ ID NO: 17013 - DNA, 277 bp, Gossypium hirsutum
  Clone ID: LIB3145-044-Q1-K1-F4
caaaagttgatatgtgggcgatgggtgcaatcatggctgagttgttcaccttacatcctctttttcctggcacaagtgaagcagatgaaatttacaaaatttgcagtgtagtaggcactccaactgaagaatcatggccagatgggcttaatcttgcaagaactataaactaccagttcccgcagttcgatgggacacatctgtctgtgttgattccatcagcaagtcatgatgcaataaaccttattacatctctctgttcgttggatccttgcag

SEQ ID NO: 17014 - DNA, 260 bp, Gossypium hirsutum
  Clone ID: LIB3145-044-Q1-K1-F5
accacgcgttcgaatagtttattgttttcgatggcgcttttatttctgagatcttcaccatacatcggggtttggctagcacaagtaaggcagttgaaatttacaaaatccgcagtgtactaggctctccaactgagaaatcattgacaaatgggcttaattatgctagacctatacactatcaaattcccgtgttctattggacacattatgcttagttgatttcatttgcaaggcatgacacaacaaaccttattaca

SEQ ID NO: 17015 - DNA, 365 bp, Gossypium hirsutum
  unsure (1)..(365): unsure at all n locations; Clone ID: LIB3145-044-Q1-K1-F6
cagcgcttgttcttcttcgattcatcgtacacgaccatgacaatctcttcgtcgccgccgaggctgtccactccatcggaatctctgtccttatctataagcttattaaggagaagacttgtgctgggctatcgctcaaatcccaagagctaacagctatctttttagctgttaggctgtattgtagctttgtcatggaatatgatatacataccctacttgatttggccacattggcaacaactttatgggttatttatatgatccgtttcaaactaaagtccagctacatggaagacaaggacaactttgctttatattatgttcttgtnccatgtgctgcacttgccctatttattcacccc

SEQ ID NO: 17016 - DNA, 356 bp, Gossypium hirsutum
  Clone ID: LIB3145-044-Q1-K1-F8
gaatggtgatggggatgcagacacaaagaataggatgggggtaattcaagatgaactgagggagaaggaagaagaactggaagacttggaagatcttaatcaagctcttattatcaaggaacgcaaaagcaatgatgaattacaagatgcccgaaaagagttaatcactgcatttaaagatgtttccaccagagctcatattggtgtcaagaaaatgggagaagtggacattagacccttcttagttgcagccaaaagaaaatactcagctaaagaagctgatgtgaaattagcagagctatgttcactgtggcaagactatcttaaagatcctagctggcattcttttaaaaatc

SEQ ID NO: 17017 - DNA, 372 bp, Gossypium hirsutum
  Clone ID: LIB3145-044-Q1-K1-F9
cccacgcgtccggcagctgcaggagtttgtcagggatattttaccgatagccaccgacatcaatagcaataaaatttacttgagcaagcaaggccttgtttaattagtctaattggatataagagcagatatttgggacggttttgataaattccagtgatggaccacatcaccacatgaatcaaccggtgaaagctattagcctttttagcttagcttactaattttagaaaaaagatgccaaagtttgccgaacagctttctgtttcttgcctgctttggattttagtgaagacagtctcagtttcaattgattggattattgaattcagggctgttagataatggtaactttgagcaagccccgaatgc

SEQ ID NO: 17018 - DNA, 362 bp, Gossypium hirsutum
  Clone ID: LIB3145-044-Q1-K1-G1
gctttctatcgcggtgctgattgttgtgttcttgtatatgatgtcaactcaatgaaatcgtttgacaaccttaacaactggagagaagaattccttattcaggcaagcccttcggatcctgagaatttcccgtttgttgttttggggaacaaaatcgatgttgatggtggaaacagtagagtggtgtctttgaaaaaggcccgagcatggtgtgcctcgaaaggaaatatcccctatttcgagacatctgccaaggaaggagttaacgtggaagaagctttccaatgcatagcaaaggatgctctaaagagtggggaagaggaagacatatacttgcccgacacccatagatgtgggagcag

SEQ ID NO: 17019 - DNA, 175 bp, Gossypium hirsutum
  Clone ID: LIB3145-044-Q1-K1-G10
atgtatctataaatactacactcttcctttgattgcagacaagggacactgggggttcgcgattctttgactggcccctctcatcttgcttgctctccatcctaacatggcggtattgtttacattcttgcacttaacttgtctttacttcaataaacaccctctcttcttagac

SEQ ID NO: 17020 - DNA, 365 bp, Gossypium hirsutum
  Clone ID: LIB3145-044-Q1-K1-G11
atcagcaaacatgttgaagacttttgatgttcttgaagtttcaagaaggtatgggtctttttataagattcaaccctcaccaaaatatatattggggttaaaatataaggcattgtttctacatttggagccttctatgttactagaaacaaaggacgtcgagctaacatccttgttggtgcagacagcttcttcctaggaggagctagcaatgcaggtgcggtgaatatcacaatgttgatcataggacgcattcttcttggtgcaagcatctaaatgtgtttgatattttagttatccaacatttattgatgcacttcagagatttggatgatcctttttacaatgggtgcacctaatttgca

SEQ ID NO: 17021 - DNA, 199 bp, Gossypium hirsutum
  Clone ID: LIB3145-044-Q1-K1-G12
gtttctgggttaaagacacaattgttattatgttctattcctgccaggtctggcgatttgtttaaagatgctgtgggcgtattaaaatgaatgcaacggagtcagctcagttaatgaaataaatcttataatataaaatatattttgaaataaaaaactcataaattatctatacaaaaatactaagaaatatgtttta

SEQ ID NO: 17022 - DNA, 355 bp, Gossypium hirsutum
  unsure (1)..(355): unsure at all n locations; Clone ID: LIB3145-044-Q1-K1-G2
ccttcggctacattcccccagaatacgcatatacaatgcaagtcaccgctcctggaaatgtgtatagctatggtgtggtgttgcttgagatcctcaccacacgatttccagtggatgaggattttggggaaggagtagacttagtaaaatgggttcatggtgctcgagcaagaggggagacccctgagcagatacttgatgcaaggcttagcacggtttcctttgggtggaggagagaaatgcttgcagctttgaaggtagctttactctgcactgacaccacacctgcaaaacgacccaagatgaagaaggtagtggaaatgctccaagaaatagggcanaattgatccacaat

SEQ ID NO: 17023 - DNA, 398 bp, Gossypium hirsutum
  Clone ID: LIB3145-044-Q1-K1-G3
tggaaatctatggaaagaaattgatgttttgatattcaacacttggcattggtggcaccgtagaggactgaagcaacaatgggattatgtgcaatttgatggaaagattcgtaaggacattgatcgcacggttgcttttcgtacagctttgagaacatgggctaaatgggttgattcagatgtggataccaataggactaaagttatatttcaaggaatttccccttctcactacaatggcagagattggaatgagccaggagtaaggaattgttcaaagcagacaacaccatctaagggatcgagttatccaaaccggttgcctctggcagagtacgtagttaaagaggtcataaggaacatcaagaaaccctgtcatttgcttgatattacaatgc

SEQ ID NO: 17024 - DNA, 250 bp, Gossypium hirsutum
  unsure (1)..(250): unsure at all n locations; Clone ID: LIB3145-044-Q1-K1-G4
gtgggttgggtgtaaatgggttaatgggtagttttaggtattctgggttaaaggcaaccgaattttgggcttatacatagactgttaaaaaacaaataaacatttatttatttaaaaaaaaaaaaaaaaaaaaaaaaaaaaaaaaaaaaaaaaaaaaaaaaaaaaaaaaggngggngggataaaagattaaaaagaaanaaagggaggaaggaaaggaaaaaatttttttataaggaaaacaaaaatcaa

SEQ ID NO: 17025 - DNA, 328 bp, Gossypium hirsutum
  Clone ID: LIB3145-044-Q1-K1-G5
agccctgaaagacttgaaagtctgggttatgaatgtagttccaatcgacggtgccgatacacttccagtaatctatgaacgtggattgtttggaatacatcacgattggtgtgaatcatttaatacatacccgagaacgtatgatgttcttcatgcagatcatctcttctccagtattcagaacaggtgcaagttggttgcggtaattgcagaagttgatcgaatcctgaggccagaagggaagctgattgtacgagacaaagccgaaacgataagcgcagtggagagcatggctaaatctctacaatgggagatccgaatgatttat

SEQ ID NO: 17026 - DNA, 340 bp, Gossypium hirsutum
  Clone ID: LIB3145-044-Q1-K1-G6
agccaactcaaaacccacaaaagccaaagcctaggtacacagaaactacaaaaagaaatagagaaagaaggtatggaagtaggggtgaagatggggatgaaaggaggaggagatgaagtgggaggtaaggagaaggagaaaatggggtatgaagagacagagctgaggctagggttgcctggtgatggtgaggttgtaaggaagagagacttctcccacactgttgatttgaagcttaaccttattttcacctctccaactgatgacaaggacaaaaatattgtcccttctcaccttgatcctgctaagcctgcacctgccaaggctcaagttgtgggat

SEQ ID NO: 17027 - DNA, 333 bp, Gossypium hirsutum
  Clone ID: LIB3145-044-Q1-K1-G7
gcataagcatcatcatcttcctagtcttaggtttggatccgtttcaatggcatccaccacctccctcaaaccgatcccttccatcaacttgccttcccaatctcacagagctttagcttccaatttctcttattcaaagccttttcccttccatggcctcaacctctcatcggtcactgaaaccagttccttcacctcatcaagatcctccaaccccttcactaccactgccttcttcttcaacaagttcaagcaggaggccgctccacatactcccaagcccacaaaagttcaagagctacacgtttatgaaatgaacgagagagacagaag

SEQ ID NO: 17028 - DNA, 363 bp, Gossypium hirsutum
  Clone ID: LIB3145-044-Q1-K1-G8
cttttgctgcaaatgctccactctgccccggcttgcagagaaggggcacttcatgttctctatgctttggcaagcacgcctgaacttgcttgggcagctgccaagcatggtggtattgtttacattcttgcacttctcttgcctttacaagaagaaatacccttgcagcaaagagcggcggcagcctctttattgggtaagcttgttgcgcagccaatgcatggacctagagttgccataacattagcaaggttttttccggatggcctagtatcaatcataagggatgggcctggtgaagctgttgtgtctgcccttgagcggaatacagaaacaccagaactcgtatggacacctgcaatg

SEQ ID NO: 17029 - DNA, 221 bp, Gossypium hirsutum
  unsure (1)..(221): unsure at all n locations; Clone ID: LIB3145-044-Q1-K1-G9
ttgtttctttgatttcttacattctccactaaggggataaatggatgaagaaatgcataaccggaggttaaagatgaagaacatggagctttatatttatactgtaaactgattactatatatatatataagttatatttatatatgtaatcactttggggctcaattgagatatgaatatggggacctttttaatttcttgttgncgaacaaacaatgca

SEQ ID NO: 17030 - DNA, 342 bp, Gossypium hirsutum
  Clone ID: LIB3145-044-Q1-K1-H1
cccacgcgtccggcttgccgtattaattttaatctccggtgtccttcctcccatacgccgcgtttcgtgcccctcaaaaaccctacgctccttattcctccttttaaaccccactcccatacccaccccagccatccctttaagctttctatatccacttctcggtggctgcggaggcgacggatgggctttgtgacagtcaattctcatatggccaccgaggaaaagcctatttccgatgatagaatgctggtgtttgtgcctccacatccgttaattaagcactggatttcggttttgagaaatgagcaaactccttgccccattttcaaaaatgccatg

SEQ ID NO: 17031 - DNA, 414 bp, Gossypium hirsutum
  unsure (1)..(414): unsure at all n locations; Clone ID: LIB3145-044-Q1-K1-H10
cagaaatctttgcaaatgcttcacaaacccatcttcctctcagtcaatccgcaagcttcatcggcgccggatgcacctccaccatcgacgcgattttaatcggacccccaaggatctgatgaccctttgaccggagaggcaaaggaggaatgaatcgacaccgaatcagtaagccaatcctttccccaccttttgtattttcatgacaaattcaaaatagagaaagaaaataaagaaaatgaagaagtaacaaccaagattaatgaacgaatcgctttagagtatatttgcttccgtattcaaatgctatttaagcgtaatatatgaaaaaaggagggaaataatcagatcttanatcacctctttgaaaactgttttttttcaaactcttttttgataccgatttttactact

SEQ ID NO: 17032 - DNA, 65 bp, Gossypium hirsutum
  Clone ID: LIB3145-044-Q1-K1-H11
taaattatttataatgatgcgttttttaactatcacttccaaaaaaaaagaagggggtggattat

SEQ ID NO: 17033 - DNA, 400 bp, Gossypium hirsutum
  unsure (1)..(400): unsure at all n locations; Clone ID: LIB3145-044-Q1-K1-H2
gttcggttaggcctgtataaaagaaaaaggatttctctttcctagtcttgtgttgcgctgtggttgaagaaaggtctcataacatttgaagccaagcaaagttcagattaggatttagggttttctgttttcttttctttttgtgaaaggcaaaatggatctggatatgaacgtgaacgcccctcactcaatgggcacaacaatcatcggagtcacctacaatggcggtgtcgtcctcggcgccgactctcgtaccagcaccgggatgtatgttgctaatcgggcatctgacaaaattacacagctcacggataacgtctacgtttgccgttctggatccgctgctgattctcagaatgtttctgactacgtncgntattttcttcatcaacatacgata

SEQ ID NO: 17034 - DNA, 355 bp, Gossypium hirsutum
  Clone ID: LIB3145-044-Q1-K1-H3
tttgacaggttttactgtcaaagcactttattttggagtacaagcatccttgaattggttgagtcagttttgaggcctgacacaggaggaccaccaatccttcctgacaatagtgatgctgttctatctgcccttaacctgtacagatttgtattaatgacagaggcagcaggaaaaaccaactacactggattgcggtccaagaacaatttgcagaaggcatataatgaatggctgctacctctacgaatgcttgtgggaggcattgcagcagcgaataagaatgatattgatcaacatgcagttgacaccgtatgtgctctgaatccaattgagttggttttgtatcggtgta

SEQ ID NO: 17035 - DNA, 345 bp, Gossypium hirsutum
  Clone ID: LIB3145-044-Q1-K1-H4
aattcttaaaactcgtccccaatttctccgcttattagcgttgcctggaagcggtttttttttctttgtagaataaagtagatttttttttaatttgacggggaaaaaaaacaaacaaactatgaccatgggtgctgcagacaagagggaggaagtgattcaagcatggtacatggatgatagtgatgaagatcagaggcttccccatcaccgtgaacctaaggaatatgtatccttggataaactttctgagcttggagtactcagctggcgattggatgctgataactatgaaaatgatgaagagttgaagaaaattcgtgaagaacgaggttactcctacat

SEQ ID NO: 17036 - DNA, 309 bp, Gossypium hirsutum
  Clone ID: LIB3145-044-Q1-K1-H5
aaattatttataatgttatgtcaatttactagcactgccatatcatttcaattgatttgattttcaaaaatttgaaaacaaggttactcaattttaacttcaagtcacatattccatttgttaggaaaagctatatcttttttcagaattttataaaaaaagattttatttgaattttctactgtggtacattaaagttcatatgtagctcaattccatgtgttgctttatttataggtgcttcgagagttcaatcatgttaatccacaaacagatgaggaaggaaaagtatttttagacacaagagac

SEQ ID NO: 17037 - DNA, 334 bp, Gossypium hirsutum
  unsure (1)..(334): unsure at all n locations; Clone ID: LIB3145-044-Q1-K1-H6
cccacgcgtccgcccacgcgtncgtgagaaggaacccaagttcttgaagaatggtgatgctggtatgattaagatgattcccaccaagcccatggttgtggagaccttctccgagtacccacccttgggtcgttttgctgtgagggacatgcgtcagaccgtggctgttggtgttatcaagaatgttgagaagaaggacccaaccggtgccaaggtcaccaagtctgctgctaagaagaagtgaaccgtgctggctaaacctaatgaagtttccgcagatggagtattttattatgataataatagtttgatagactttatcatttatgatata

SEQ ID NO: 17038 - DNA, 330 bp, Gossypium hirsutum
  unsure (1)..(330): unsure at all n locations; Clone ID: LIB3145-044-Q1-K1-H7
ctggattcatttccaatggcaatacagaattctaccagggttagccaggatatggggatagaggcacctatacctatcagctcaaagttgagtgatttcaataacatatttcgaaggatagtaaatgcagctgagcatcctcacttgagcattcctgaaactgaggctgggagaagccggaagcagtaccatcggctcataaaccgatctctcatggttgtttcagttggagctgctgtagccattgttggatttgcagcttaccgcgtatatgctactaggaagaatgcttctagttgagggatgacgattctnctatcttctagacac

SEQ ID NO: 17039 - DNA, 411 bp, Gossypium hirsutum
  unsure (1)..(411): unsure at all n locations; Clone ID: LIB3145-044-Q1-K1-H8
gttcttatcaacttcgagcagcggtggagggaatcgaccaagtggaaggatttctgtctactttgtgcaggaaaaatgccatcgaatgacgatgctttgattaggatagaacgaatctcttggatactaagtccttccttagctgtaacagaccacggcactacaataattccagaagatgaccccaaattgcatgttcttagtatcgatgatcgtgacaactgggatgttcagattttccgctccattgactcgggatcagtgaaaggatttccaagaccaatgagaaaacccgagaaccagaatcttttagtttcaaanaatgtggtcatagaataaagcattcaaacagcttatatacaagcaaataagatccgctcagcattacatatatatccgaaaatagtattt

SEQ ID NO: 17040 - DNA, 228 bp, Gossypium hirsutum
  Clone ID: LIB3145-044-Q1-K1-H9
attaggttcatcaagcaggatttagaggtgaaaagatcgatgttgttgttaaggtaagtgcccttgaaaataattttaaaacctcacatgtctatgtgattttgaccattcaagtttatggcaagtgcaatattctggaatctgggatcttatgatgaccgacatccgttacttacaagcatttgcactatacattcacaagaatgatgtcaaatttgctctgttttt

SEQ ID NO: 17041 - DNA, 438 bp, Gossypium hirsutum
  Clone ID: LIB3145-045-Q1-K1-A1
cccacgcgtccggacaactgctgggactcgctggggtgtggtaatgtcaaggaacgctggattctctgatcaggttgtggagctcgacttcttatatccaagtgaaggaatacaccggcgatgggagagcggttacagaataacatcagtggctgcaactgtggatcaagctgccttcatacttagcattccaaaacgaaaaacaacagatgatactcaggaaacgctccgtacaactgcctttcccagcacccatgtaaaggaaaaatgggcaaaaaacctatacattgcatcgatttgttatggtcggacagttcgctaatcccggtctgtacattctgacttaaaccaaaaaaagaaaaaagaaaatgagttcatggtttgaaagccaccgagtatctttcgtcttcgagttcggttaactcttctatataatct

SEQ ID NO: 17042 - DNA, 430 bp, Gossypium hirsutum
  Clone ID: LIB3145-045-Q1-K1-A10
ctgatagatacagagtacgaaccattggttccaaaagaagagaaatcaaaactgcaaatactgtgtttcaatctaaggtggaaaaggcttttggtactggctacagtttgggtacttttcacggttattcaagtcatcaagaatgatgtggttccctgtaccactttgtattgggtattgtttagcttacagttccccatagcaacactggtttttggatatgaagcaactaaattatacaaagaacataagaagagaatgagcactgggaatgctgaaacagtttgtggagcttcaattcaatggagtccattgaacattgcattttgtgcactttgtggcatcttgggaggcactgttggtggattgcttggttctggtggtggattcattttgggtcctctcctcctttgaaatggtgtgattccac

SEQ ID NO: 17043 - DNA, 333 bp, Gossypium hirsutum
  Clone ID: LIB3145-045-Q1-K1-A11
cccacgcgtccggggaccatgtgaggaggttggagatgaaaataccagactttgtgcatgatcatgatgaagagctggagtaccatcccatgatggactatgggttagagagcgaccaccctagagtttacactgagccgccctccatggatcctatctcgatgtactctatgaggtgcatagcttgagctttaagcccgtgttgaaaggttgaaactgtagatttgcagttgatacgttatgggttttgctttttgatagaggagagttttggtgttcatattgtataaaatgggagtttgtaaatggaaccttaagacttcattggcagag

SEQ ID NO: 17044 - DNA, 394 bp, Gossypium hirsutum
  Clone ID: LIB3145-045-Q1-K1-A12
ctttttcactgtttcttcaactgaaaactcaggtcgattcaacgaacaacgttagggctttttaccatctgaagcttaaccaatagccgacaatggaagccggagatggaggggttgacgtagtcgttgattctaaggatttacagcaacagagtaaagccttcgataaactcaccgatcgtgtcgaagatcgccagctcgattcttctcgtgccaaatcggccatggcatcgattgcggcatcagctgaagcagaaaagaatgcaatgagattgagagagaaagaattagctgcagtaaagatcaacgcggccgatgtggacatcatcgcaaacgaactagagttggacaaaaaggttgcagagagaacacttcgcgagcacaaaggtgatgc

SEQ ID NO: 17045 - DNA, 422 bp, Gossypium hirsutum
  Clone ID: LIB3145-045-Q1-K1-A2
cccacgcgtccgccaaaattcacagccctaaaaatcaatttgtttgggcatatttcagcagccaccgagtacaccacttcatcaggtggtcgatggcactccagcgacgatcgatgatgcctttgggcccttccaacttcgactttcagcgaagaggataaaaatccatggctgatttgcaaggttcgattgtacggaagagaacgctcgtggatgaggctcggagactgcggaattgctcatgcgagcccgatcccctggcgttgttctggcacgttccagaagcttctggcttgtgtaagcttggtaacttaaggtttcatgaatatttttctgttttgggtcaggatttgggctaggggtttattttattgtgggctaaataattggacttgtaacagggacattggacctaattattt

SEQ ID NO: 17046 - DNA, 423 bp, Gossypium hirsutum
  Clone ID: LIB3145-045-Q1-K1-A3
cccacgcgtccgcttgggagatgtttgtcgaatcatgcaaaaggttacgcataatgaaaggaacagaagcaatcggactcgcaccaaaagctgtggagaaatgcaagaagagaagctgaaggaggtaggagttgctaatagagcaacctgctcttttgatcttgtgggtcgcctgctgcatgcatgcacatcatcatcatcatcatcatcatgtgatgaaaaattattgcaaagccagcagatggatgcatggatggatggagcagtttggctttgttattactattagggtgtttttgtgttcttaaatattataaaagttataatgtgagataaaataatagtaattaagtatttgatgactactttgttatggaatatggacaaaacataaaaaaaaaaaaaagggacatgaaatattac

SEQ ID NO: 17047 - DNA, 410 bp, Gossypium hirsutum
  Clone ID: LIB3145-045-Q1-K1-A4
cccacgcgtccgaaaaaactcaacagcccccattttctctcaaacccccctcatattcggtcgtttggactgccgccaacgcactcgtggccgacggccggcctcgtgcgagggcttttccggccaaagcgttgaagcgcgttcaaaggccaaaaccgcagatcggggaaacaaggagagaaaaaacttggccccttcccaaaccgaatccgacgacggtgaaagaccaccgacggcagggctgcgagtctgcttcaaaagcgtggaagaggcgtgtggtggcgcggcggcagcaatggcaggtctagatgcggcggctgaagagggttaggggctaaggtttattttttgctgaatgttaagataagtgggctagggtttttaatttttgggccttggttttatttggt

SEQ ID NO: 17048 - DNA, 315 bp, Gossypium hirsutum
  Clone ID: LIB3145-045-Q1-K1-A5
gcttactacaaggatggtgctgttgacccgacatttttgtactttgcgtatgcattgaaggaggtcaagtgctgaggtttgaagcaaagaaaaaaaaaagtggttgctgaagaatttagtcctttttattattgcttttgtctcttattttcagtactctgctaaagacataaattatttatggtttttgatgtttttgatttaattgtttgttgttttatcatggaatggtttctatttttatgggttgactaaacaagaatttaactctttgttctattactacttaattttattggaaggaggtttttggga

SEQ ID NO: 17049 - DNA, 401 bp, Gossypium hirsutum
  Clone ID: LIB3145-045-Q1-K1-A6
atcctgctgaaactaagaagctattggacaaacttgttgttttaaagcttaatggaggcctggggacaactatgggatgtactggtcctaaatctgtcattgaagttcgcaatggcttcacatttcttgatctaattgttcagcagattgagaatcttaataagaaatatggatgtaacgttccattggttctgatgaactcatttaacacccatgatgacacattgaagattgttgagaagtatgccaattcaaacattcaaattcatacttttaatcagagccaatatcctcgtctggtggctgaagattttactccatttccttgcaaaggccagcctggcaaggatggatggtatcctcctggtcatggtgatgtgttcccagctctaatgaacagt

SEQ ID NO: 17050 - DNA, 420 bp, Gossypium hirsutum
  unsure (1)..(420): unsure at all n locations; Clone ID: LIB3145-045-Q1-K1-A7
aaaaaaacaacaaaagcggtattgttgctgtagaatttgataccttcagagatgccaagcatggtgatttgaatgaaaaccatgtgggcattgatgtgggtagccttgcatcagttaaagctagaaatttatcctctctcaatttggtactaagcaatggagaaaaattacattcgtggattgattatgaagcaagttctaagagactagagattaggttgagtcaatctagtagtaccaggccagatgatcccttgctttcatactcaatcgacttgtcaaaactatggaatgatgaacaagtgtttgtgggcttaagttcttcaaatggcaactcttcgcagacatgctttattcacttatggagttntaagctaaggcaggttcctaattggatgcattcccaaccacttgatcctg

SEQ ID NO: 17051 - DNA, 403 bp, Gossypium hirsutum
  unsure (1)..(403): unsure at all n locations; Clone ID: LIB3145-045-Q1-K1-A8
tacgactacaaggcggcgggtcgcgaagccatcgctagggaaaatcccgtggttaaagcagccaagattatcagagtttagtttttaccaaatggatccaaattaaattaaataaactattcaaaacatttttcgacctgaaaatagcaagttgtggagatctatgctcgatctcaaaaagaaaaagaaaaaagtaaaaaaagactgtttcagagagggagaattagttgtggggttgagtttttaattgtgaaaaaagaaagtttgtaagagatttgcaatcttgtcccttgttgtaaagtaaaaaaagaagaagataaaaactaggggccaaatggagcagattaattttnttgannaaaaananngngggctaaataaagggacttggtaacagggacat

SEQ ID NO: 17052 - DNA, 433 bp, Gossypium hirsutum
  unsure (1)..(433): unsure at all n locations; Clone ID: LIB3145-045-Q1-K1-A9
cacctctccttccaatggtattaagactgtggttttagttggacgtaccggcaatgggaaaagtgcaactggcaatagcattcttggaaaaaaatccttcaaatcaagggctagctcatctggggttactagtacttgtgaattgcagaaaacagtgctcaaagatgggcaaattttaaatgtcattgatactcctgggttgtttgatttctcagctggatctgaattcattggaaaagaaattgtcaaatgtattgatcttgccaaggatggaatccattcagttcttgttgttttctcagttaggacccgcttttcgcaagaagaggaagctgcattgcgtagtttgcagactntatttggtagcaaaattgttaactacatgattttagtgtttactggtggggatgaactggaagaaaatgaggaaaca

SEQ ID NO: 17053 - DNA, 432 bp, Gossypium hirsutum
  Clone ID: LIB3145-045-Q1-K1-B1
cccacgcgtccgatgaaatacaagaataattagaaaatcaatattattcgaaggtgatttattatatttcaatttttttcgttgcttttttgctttcattttcgcatctactataaacaaaaaagaagaggataaaggataagggctcaccagaatcgttggaatatcgtcagagtttctcctccgttaaaactgaatccaaccaaggttgagacgttcttttgattctttgtggttgaaggtgttagattcttaaatgtttttctaaatgaggttagaaagggaagatttactcaccgtcggccactgttagaggcgagggtacggcgtctgagggtagagatttgggattgattgaggaagaatcaaggaaagggggctagggttattttagagatggccgattgttttctttggtcttcgaaggaaatg

SEQ ID NO: 17054 - DNA, 364 bp, Gossypium hirsutum
  Clone ID: LIB3145-045-Q1-K1-B10
aaaaaaaaaaaaaaaaaaaaaaaataaaataaaaaaaaaaaaaaaaaaaaaaaaaaaaaaggaaaaaaaaaaaaaaaaaaaaaaaaaagggaagaaaatataagggaaaaaaaattaaaaaaggggggcatgtttaaagggtggctgtttttttagggggttcttggttgtgggttcccttttttttggttttactaacgtttttttttgtggaatgccggggtttttacaatgtggggggtttttaaaatatttggctttttaaatttttggctttttcgggatttggccttttcggagtggcctttttttaagtggggtggcataaatggaaatttgtaaacgggttgttcttttccatttt

SEQ ID NO: 17055 - DNA, 329 bp, Gossypium hirsutum
  Clone ID: LIB3145-045-Q1-K1-B11
atagattttgagttcttgggcaacagaacaaggcaaccatacattcttcagaccaatgtgtacactggtggcaaaggagacagaaaactaaggatttacctttggcttgacccaaccaaaaaataccactcatactctgtcctctggaacatgtatcagataatgttctttgtggacgacataccaatcaaaatgtgtaaaaactgtatagatttgggagtgaggttcccattcaatctaccaatgaagatatactccaccttatggaacgccgatgactgaaccacaacgggtggtctctataataccgactggtgcaaaccccattc

SEQ ID NO: 17056 - DNA, 435 bp, Gossypium hirsutum
  unsure (1)..(435): unsure at all n locations; Clone ID: LIB3145-045-Q1-K1-B12
tccatcaaaaatgactgactgccatcccctatcaactcttatttacactgctctccaacaagctattgcttcagcagcaaatgcagagcgtagcagaataaacggctttgacaagggttgagttgttctaatacccaggacactttcgaaaaagatggtccattgtttcagctcgtgcttcacatcggggacagcttgtgctattttatagctttttgtgctgcatattcacttttgtaggcaaaaagttccatgatagtctccatattgtaattgttatttttgttggtagattcaggctccaaagttttttgtaaaattttctatagataatttgtaacgcataagcgctagggtttccattcgagctctgtaatagtttataggcacttcggacggtgaattcacccgacaactcacctncccagatgatga

SEQ ID NO: 17057 - DNA, 424 bp, Gossypium hirsutum
  Clone ID: LIB3145-045-Q1-K1-B2
gaaattatggagaaactaaaggataagaaggcggaatatgaagcgactgcttcgactgatagttctgttaatcttgagaacattgataacagaattagcactgaagttttgggtcctgaaaggtacggtcaggttcgatttcaaggatctggtgctaccccgacccaatattttggatcctgctcccagcaatacatgccttccggaagtcaagctaaagctgaagttcagaggttaagagatcagatagctcagatgcaagcaaacacagttgagaaaattgccgaggttcaacgaaaatatgaagaactccagcaacaacttagagcggaggcagcagagagggaagcagagcagagcaaaaagtacgatgacctccagctacagcttcagtagatgatgcatatgtttcagcagtcgcaaa

SEQ ID NO: 17058 - DNA, 403 bp, Gossypium hirsutum
  Clone ID: LIB3145-045-Q1-K1-B3
cccacgcgtccgttcattttaagctttaaattccaagaagacaagccatggatggcacaattaaccatcgtggcttgtttatctttggctaccaaggttgaggaaactcaagtgccacttcttttagacctccaagtatgtgtctaatgcaaacaacattgtagtccaagttgtgtttctgaacttgttatcgacttattaaagttgggttttagtgatttatttatttttctttacgtggaggaagcaaggtatgtgtttgattcaaagaccatacaaagaatggagcttttggtgttgtcaaccctgcaatggaggatgaatcctgtgacaccaatatctttctttgatcatattacaaggaggcttgggctgaggacccatttgcattgggatttccttc

SEQ ID NO: 17059 - DNA, 401 bp, Gossypium hirsutum
  unsure (1)..(401): unsure at all n locations; Clone ID: LIB3145-045-Q1-K1-B4
ctttctgagcttggagtactcagctggcgattggatgctgataactatgaaaatgatgaagagttgaagaaaattcgtgaagaacgaggttactcctacatggacttctgtgaggtttgccctgagaagcttccaaattatgaggagaagataaaaaatttctttgaagaacatcttcatactgatgaggagatccgttactgtgtggcaggaagtggttattttgatgtacgggatcacaatgataaatggattcgcgtgtgggtgaagaaaggaggcatgatagttttacctgctggaatttatcatcgctttactctggatacagacaactatattaaggcaatgcggctctttgttggtgatccaatttggactccgtacaatcgtncgcacgatca

SEQ ID NO: 17060 - DNA, 424 bp, Gossypium hirsutum
  Clone ID: LIB3145-045-Q1-K1-B5
caaggaattcgataccccgtcattgaaggagaggaagacgaagaaagtcggaagcagcgcggaaaagggaatgtagataggtggctccaaatgctgttagagaacagtcaagaagaattggagcctcaaaatgacaatgtagatgcagaggaagtgagtggaactgatgacatcataaaaaagctagacttgaagtatcccctgaaagagaagaaagaagataataatgttaatgtagaaggaaacaaaacaccaaggagaaatagcgatgctgtcgatcgagctaataatctctttttcaaaggaaacagcatatgggaatttatcattgctgatctactagcaaaaggaatgagaaatgctaaaaatgctattctttctggctgttccgctggtggattggcttcgatattgcactgtgaca

SEQ ID NO: 17061 - DNA, 413 bp, Gossypium hirsutum
  Clone ID: LIB3145-045-Q1-K1-B7
ttcttcttcttcttcttcttcttcttactccagccgactttttccggcaaaacggtgtcagatctttgtgatctatagccggaagtttcatttcgagttcgacgatctcatccttcgatctttccactttcttcagcctaccatgaatcccgaatatgactatcttttcaagctacttcttattggagattccggtgttggaaaatcttgccttcttttgagatttgctgatgattcatatgtagaaagttacataagcaccattggggttgattttaaaatacgcactgtggagcaggatgggaagaccattaaacttcaaatttgggacactgctggtcaagaaagatttaggacaattactagcagctactaccgtggggctcatggcataataattggttatgatgtga

SEQ ID NO: 17062 - DNA, 430 bp, Gossypium hirsutum
  Clone ID: LIB3145-045-Q1-K1-B8
cggacgcgtggggggaaatgtagtctctgtaaggtccaatcaaaggacctcttgattaatgaaaccagccatttcttttccattgctccatatgcttcttcatttccattcgagatatggataattccccgagatcactcttctcattttgatgaactggacaataagaaggcagttgatctcggtggcttgctaaaactcattcttaaaaagatggctttgcagttgaataaccccccattcaattttatgatccatacttcaccaatacagattactgactctgagataccttatagtcactggtttttacagataatacctcagttaactggtgtaggaggttttgaactcggatctggatgttacataaaccctgtttttcctggtgatgctgctaaaattttgaaggaacttaatgttcctatat

SEQ ID NO: 17063 - DNA, 419 bp, Gossypium hirsutum
  unsure (1)..(419): unsure at all n locations; Clone ID: LIB3145-045-Q1-K1-C10
cccacgcgtccggtttaaattcatttactaatataaattgtcttttcgtattatgatccgatcatgtaatactgttaaatattagacaaccggtgagctgatatttatttttattttacatgtaaaaatcacgggaagtcaatatacaaagagtactaatgtaattatgaataattttattaaaataatttgttcgaaaaaatataaatgtagatagatgaaaatattaaacttagaatatcagatacaataattctgactttcgttttatgctctattgtttacttcttactttagtttctttctaattgattcttttatggctctcacntttaacttggatttctgggattgttcagaccctcctttatgcagactttttctactattacttcgacagctggaaaaacaacaaaaag

SEQ ID NO: 17064 - DNA, 441 bp, Gossypium hirsutum
  unsure (1)..(441): unsure at all n locations; Clone ID: LIB3145-045-Q1-K1-C11
cttccatctgtagttggagatctacatggagaccttgatcaagcaagatatgcgcttgaaatggctggtgtcttgagttcggatggtcaagacctatggactggagaagatgcggtattctttttctactactaattttgttgataacaatgatgcagaaaactagaatttttcttatgttgtttcttactatcataatggccactacaactatacccaatgtggaaaaattcttgtgtgtatggatttatttctctactcagaaccccatctgatgcctatgtttctgtttgagaaaaaaggtacttgttcagctaggagatgtgcttgatcgangagatgatgaaatagctatcttatccttggtgcgatcattagatatacaagccaaggctaaaggtggagctgttttccaggtcaatggaaatcatgaaactatga

SEQ ID NO: 17065 - DNA, 423 bp, Gossypium hirsutum
  Clone ID: LIB3145-045-Q1-K1-C12
ggaagaatcctttgaacaattttctcctgaagttagaataaaagatccacgcaatagagaagctgcttcttttcttcctcctattaaactttttcatggaacttcagattattcaataccatcagatgccaggttagaatgcctgttgacatagtggtaactaagttctatcggatatagcacctagatgttaaccatttaataccttcgtttacttctatttaattccattactatatttttattctggaattataagatgtattaagtaataacaattgcaattggaatgattctgccagattgtgctttgtagtgaatgtattttgatgaacagacatcatactgctgcaatggatttactgctatttttcacagaaacaggtgtattggttcttgacattgatgtttactgtgcagtat

SEQ ID NO: 17066 - DNA, 444 bp, Gossypium hirsutum
  Clone ID: LIB3145-045-Q1-K1-C2
ccggaagccgggttacggtgcccaactgcgcgctaacctagaacccacaaagggtgttggacgattttgaggacagcagtgacgatgaagagcaagaagtgacgaagccatctgagcaagacatgaacaaggcagatggaaatgctaagcaggcggagcaaggtgcggggactatggaaaagaaggaaaccgatgtaagcacatgatgtgattgttagctgcccgatataacaacaaattctagtaaaaacctataattatcaaaagtgtgctgtttgtatgaactgattgagggcataattcaaggttctatggtgacaatttagaaatgagatattcatttcgtgttgggattattttagtacgatgattataacctaagcagacttggtaattccaatatcggtttcgtgtttgtgaaatttggtgtgtcataatcgtatt

SEQ ID NO: 17067 - DNA, 364 bp, Gossypium hirsutum
  Clone ID: LIB3145-045-Q1-K1-C3
tttctaataaactcaatggcccgccaaattgttgttcttgctttggtcaccatggccctctttgccttggtttccaccgctgctgcggccaccgcccccgcacccggtggcagcccctcaggttcacctggagatgctagctcccctccttctcaggccagtgctcctagtcccagcagcggtgctgctcttgagctctcggctattgttggagttggagcagccgccgttgctggctactttatgttctaaatacgatatgtaggggccgctttcctagttttgatatcatcacaaatgctgtcttattaattatgttgagatttgcataatttctttacgaataaagaaaaggaatggattg

SEQ ID NO: 17068 - DNA, 244 bp, Gossypium hirsutum
  Clone ID: LIB3145-045-Q1-K1-C4
tgaagattgatgatatcgttaatgttaggtaatttcatgctctggagatgatatgtgtttctctagttatcttttgcatctgttggctatttgaattagtagttatgtttcattttagactcgactatggttagaattatgaaatggcaatctactgccaaatatttgctttcatcgaggatattatatggtggctttttcttgaaaaaaaaaaaaaaaaaaaaaaaaaaaataaaaaaataaa

SEQ ID NO: 17069 - DNA, 405 bp, Gossypium hirsutum
  Clone ID: LIB3145-045-Q1-K1-C5
atcgggtgcaacaagaaattttgaaccttggcgtgctgaagatgaggaagcggagaaagagaaacagaaaagggaatctgaagaaatgggggatgcgatgaaatctttggagaacagaacgttggattcaaaaagagagatggatatccttgctgcgcttgatgaaatgaagtctatgaagtccagacatgccacggtgagcgtagattcaatgctggaggccttgcaacgcactgccgcagaaaaggaaaagaaaatagaagaagaagacgaagccctcattaaatcgattttccagaagccaaaggaatttgttcgaaggatttcagatgatgttttcgacgatgatgaggatctgacccgtttattgagtggcaatagtgaaacctcaaatgatggcttaaa

SEQ ID NO: 17070 - DNA, 426 bp, Gossypium hirsutum
  unsure (1)..(426): unsure at all n locations; Clone ID: LIB3145-045-Q1-K1-C7
aaaaaaagaaactctctgaaagagagttggggaggggctctcggagtgtcaccggacctccatccaggggtgcgcacgcgctcacgcacccccatcgtctccatcgcatacggtggccagaggtttaaaaacctcgcctttcaacgccgattaaaggtatccctttcctttttattatttgcaatatatatatgtacatatattttaaaaaatttcacctttgcatatttcgatcgactgtagtactcctttctgtatatgtatgtaaaaataaactttttattgaatctatgtacgtattttgaaaacgtaaaaatcggtcctttacatctttttcgattcgggcttttatagccactgtttacagtatatttggtaagaataatttccttcgattccttcctatnttgtatgctgcttttcttt

SEQ ID NO: 17071 - DNA, 437 bp, Gossypium hirsutum
  Clone ID: LIB3145-045-Q1-K1-C8
acgagttggagagctttccgacatgcgactgcttccgcctcaaaagctgatgatattcggtggtgattctcctcaaatgagagaagaactgtaccctctctatctctggccactatacccactgccgatctattttgtctatcgtcataagctccatcgaagttaatcttaacaatccagtcaggtggcttcctccattttttgacagttatgatttacccctgttcttatgaaccctagcattcctatctccccagatagcccatagtgcgcagcagaagatccggcactgagatgtcgaactcttcgagaaaacccagggcacttacgaaaaagatgatccgtattctcttcacctaaaccacaacgggggcacacagttgtattcgaatagttcttaattaccatattagctcgtgtagctagaaaattccatg

SEQ ID NO: 17072 - DNA, 439 bp, Gossypium hirsutum
  Clone ID: LIB3145-045-Q1-K1-C9
aaccccagcctcagcaccctcggttcaacccaagcttcacttctggtagcaatagtacttaattgatccctgaaatccgaatcgattcatttttgtttatatcctttttaactgtttagttatttggtttttggatttgtatgtaattgtagatgctgctgctttgaggcttcgaagtgggggaaattttgttggaaatcaaaagcagcggagtttgaggccacagcaagagatgagtcatgaagttcgtttaccgctggagtggacttattgactcaaacctgcatgcggtggtggcttactaattgttggttctcttgttttaaacgtttttttttatagtttagaaattttaaggttagaagaaagaaaatgggaagaagtttgatagtttgctatagggaaaatagtaatatagtgggtatataaggtttaagat

SEQ ID NO: 17073 - DNA, 370 bp, Gossypium hirsutum
  Clone ID: LIB3145-045-Q1-K1-D1
cccacgcgtccgtcttcaattcctcatttcaagggagagagtgtatcagtgtttcttcccctcttttacttaatttctctccgccatggctctctccgtcgagaaaaccgccgccggccgtgagtacaaggtcaaagacatgtctcaggctgacttcggtcgtctcgagatcgagttagctgaggttgaaatgcctggtttaatggcttgtagaaccgagttcggccctgcccaacctttcaaaggagccaaaattactggttctcttcacatgaccatccaaaccgccgttcttattgaaacccttaccgccctcggagctgaagtccgttggtgctcttgcaacattttctctacccaagaccacgct

SEQ ID NO: 17074 - DNA, 441 bp, Gossypium hirsutum
  Clone ID: LIB3145-045-Q1-K1-D10
cccacgcgtccgattagaaaaaaaattatgggttctgaacagaatgaaggaacaagctttccaccatcggagccaaagctttgtgccaacggttgtgggtttttcgggacggcagcgaatatgaatttatgttcaaagtgttaccgggacctccgtgttggggaggagcaagcggcgaaggcgaaagctgttatggagaaatctctcagtatcaaaacgaagcatgaacctgtcgttgtggagacttttaagcctcatgtgggttcttcgtctacatcgattgagcaacaacaaccggctgttgttgccgttaatcaacaaccggaaccaaaggcggcgaacaggtgttttatttgtaggaaaaaggttgggttaactgggtttaagtgcaggtgcgagaatacattctgtggggagcatcggtacccagaaaaacacgag

SEQ ID NO: 17075 - DNA, 347 bp, Gossypium hirsutum
  Clone ID: LIB3145-045-Q1-K1-D11
attattttttggggtttttataatttttttttttttttttatacttttttttttttttttttttttttttttttttaatttattgttttggataaaaaaaaaaaaaagggggggggtttttaaaaaaaaaaaaaaaaaaaaatttttaagtttaaaaaaaagggggtaaaataaagaaaggaaaaaaatttttaaaaaaaaaaaataaaaaaaaggggggggggggttttttaaaaaaaaaaaaaaaagggacacgcttttagggaaacaaggggggggggccttttaaaaaaaaattggggggaaaaaagtttggtgtggaaaaaaaaagaggccccccgggaaaa

SEQ ID NO: 17076 - DNA, 75 bp, Gossypium hirsutum
  Clone ID: LIB3145-045-Q1-K1-D2
attttctccaaaatccagagaaaaaaaaaaaaaaaaaaaaaaaaaaaaaaaaggaaaaaaaaaaaaaatgaaata

SEQ ID NO: 17077 - DNA, 185 bp, Gossypium hirsutum
  Clone ID: LIB3145-045-Q1-K1-D3
acgaaaaactgaaaaaggggaaaaaaagcgtcgtcgtttttgcttcatcttcttctttttcttcgtccctctctctctttgtcagaaactcctctttcgttcttttgttcactaagaattgtaaaaaatggccgacggtgaggatattcaacccctcgtctgtgataatggaactggaatggtga

SEQ ID NO: 17078 - DNA, 441 bp, Gossypium hirsutum
  Clone ID: LIB3145-045-Q1-K1-D5
gaaaagacgataatgaagttagttgttgacgcggaaactgataaagtacttggggcatctatgtgtgggccagatgcacctgaaattatgcagggaattgctgttgctctaaagtgtggagcgactaaggcacaatttgacagcaccgtcggcatacatccttccgctgctgaggagtttgtaacaatgcgctctgtttcacggcgtgttactgcccggggaaaagcgaagacaaatctgtagtggatgtacagcaaggtaactgtagtgctggtaaaatgcagttgaatgcaacattcacatggtcgtgtatatatatttcacaggaaatggtattagatgatcgttgaatgcaacatcaaccataaaggaccttctaccgtattttgtcatataatgtcataatgtgacatgccttttacgggaatttatatatttatt

SEQ ID NO: 17079 - DNA, 442 bp, Gossypium hirsutum
  unsure (1)..(442): unsure at all n locations; Clone ID: LIB3145-045-Q1-K1-D6
cccacgcgtccgcccacgcgtncgcccacgcgtncgaggacttgattcatcattagttgcttccatcacagctcggtatttggctggtaccaaggctgccaaacaatggggaagccagctccattctttctgtgttggcctagagggttcaccagatttgaaggctgcaagagaggtggcagactatttgggcactgttcatcacgagtttcacttcaccgttcaagatggaattgatgccattgaagatgttatttaccacattgaaacctacgatgtcaccacaatcagagcaagtactcctatgtttctaatgtcacgaaagatcaagtcacttggtgtcaaaatggttatctccggtgaaggctccgacgagatttttggtggatatttgtatttccacaaagcaccanataanggatgaattccatcaagaaacatg

SEQ ID NO: 17080 - DNA, 338 bp, Gossypium hirsutum
  Clone ID: LIB3145-045-Q1-K1-D7
aacgaagagggcttaaagcgaggcgctaggcgagagcgagagtgagaggcggaaaagggaggaatgggagcctgggctatcgctgttcatggtggcgctggtgtcgaccctaatctccctaaggaaagacaagacgaggctaagagactcctcactcgttgccttgatattggcatctctgctctccgctctaatgtccccgccattgacgtcgttgaacttgttgtgagagaactggaaacagacccgctgttcaactccgggcgtgggtctgctcttacggagaaaggaacagtagaaatggaagccagcattatggacgggcctaaaaggagatg

SEQ ID NO: 17081 - DNA, 339 bp, Gossypium hirsutum
  Clone ID: LIB3145-045-Q1-K1-D8
cccacgcgtccgaaaaaaaaaaacagtttccgaatcttttacagctcgtaaactcgttgaattgactcatggcttccgccgttgcttccgttgctaagaagaaaaccgctggctccaagaagcctaaatcagctccttcacaccctccatttcttgagatgatttcagatgcaatcgtttcgttgaaagagaggacaggatcgagccaatatgcgattgcgaaattcattgaagagaagcataagcaattaccggcgaatttccgcaaagtcttacttgttcagacgaggaagtttgttgcttccggaaagctcgtaaaagtgaaagcctcttttaagc

SEQ ID NO: 17082 - DNA, 411 bp, Gossypium hirsutum
  Clone ID: LIB3145-045-Q1-K1-D9
aaaaactgaaaaaggggaaaaaaagcgtcgtcgtttttgcttcttcttcttctttttcttcttccctctctctctttctcagaagctcctctttcgttcttttgttcactaagtattgtaaaagatggccgacggtgaggatattcaacccctcgtctgtgataatggaactggaatggtgaaggccggttttgctggtgatgatgctccaagggcagtttttcccagtatcgttggtcgtccccgacacactggtgttatggttgggatgggtcagaaggatgcctatgtaggagatgaagcacaatctaaaagaggtatccttactttgaaatatcctattgagcatggtattgtgagcaactgggatgatatggaaaagatctggcatcatacattctacaatgaact

SEQ ID NO: 17083 - DNA, 439 bp, Gossypium hirsutum
  Clone ID: LIB3145-045-Q1-K1-E1
cccacgcgtccggaattcgcagacatgacaaatgatgagttcagagctatgtatttgggttaccaaagcataagatctccatgtgagagcaacagcaaaggcttcgcatatgacaaatatcacaatttgccaaaaagcatagattggagaaagaaaggtgctgtcgctccaatcaagaatcaaggccaatgtgggagttgttgggcattctcagcagtggcagccatagaagggatcaatcaaattaaaacagggaacttgacatctctttcggaacaagagctcatcgattgcgacaccgactctatcgaccaaggctgcaacggtggacacatggtccaagcgtatgaatttattataaagaacggtggaatcaccactgaaaaagactatccatacacgggaagagatgacacctgcaagcggacacaaagctaaa

SEQ ID NO: 17084 - DNA, 435 bp, Gossypium hirsutum
  Clone ID: LIB3145-045-Q1-K1-E10
aaacaatagcgggacgggaggatctctcagggtttaggtgatggcttcaaagcggatattgaaggagctcaaggatctccagaaagatcctcctacctcttgcagcgctggccctgttgctgaagacatgtttcattggcaagcaactattatgggtcctccagatagcccgtatgccggtggggtgtttctagtcaccattcatttccctccggattatccatttaaaccacccaaggttgcattcaggacaaaggtatttcaccctaatattaacagcaacggtagcatttgccttgatattttaaaggaacagtggagccctgccctcaccatatccaaggtgttgctgtcaatctgctcactcctgacggatccaaatcctgatgaccctttggtgccggagattgcccacatgtacaaaacggataggaa

SEQ ID NO: 17085 - DNA, 400 bp, Gossypium hirsutum
  Clone ID: LIB3145-045-Q1-K1-E11
accacgcgtccgtttccttacatttgcagtcttcacaggcagctttgctcagtgcaaagagatcatatatggcaatgcagaggagcaatggcataagaaactatggttctttattgtgggaagaccggcttatggaaagtggttttatatggatggactgccttcattgttcctttcttgctttggcattctgtttgacgatcacaagggccctccaatgtatgtttttgttgaccagaatgacacaaacactgtgcctaggtgggttggaagtggtcaaaatgggattggaagaatgagggcagtcagcttagatgacagccacgaagaaatgaagatcccgttgccgatgaggttcttaggttgtgctagatcttcctatattgttcttgaactttta

SEQ ID NO: 17086 - DNA, 439 bp, Gossypium hirsutum
  Clone ID: LIB3145-045-Q1-K1-E12
gccaactgcttcaatctcttctattaagtctatttgcgctctctccgatcactgctatggaggtgatcatccgcgatacggatctacactggcttcccacaagggcatgggccacctcgttcgcaagggcaccggtggccgatcttccgtcagtggcattattgctactgttttcggcgctactggattccttggtcgttatcttgtgcaacaactggctaaaatgggatctcaggtgttagttcccttcagaggttccgaggataaccctcgtcatctcaagttgatgggagatttaggacagatagtgccaatgaaatacgatccaagggatgaaaattcaatcaaggctgtgatggcaaacgctaatgttgttatcaatctcattggaagagagtatgagaaaggaaactttagctttgacgaagtgaaccattta

SEQ ID NO: 17087 - DNA, 439 bp, Gossypium hirsutum
  Clone ID: LIB3145-045-Q1-K1-E2
cccacgcgtccgcccacgcgtccgtttcatcgcaaccaaaaaaatggcaatcccttcactttctcttctcttccttttcacctctcttcctcttttttcctcttcgccggttaaagatcctgaacttgtagttcaagatcttcacagggccattaatgtgtctaggaggaaccttaagtatctctcttgtgcaactggtaaccccatagatgattgctggagatgtgaccctaactgggagaagaacagacggaggctagccgactgtgcaatcgggtttggcaagaatgccattggtggaagagacggtaaactctacattgtcactgattctagtgatgatgatcccgtgaatccaaaacctggaactttaagacacgctgtgattcaagacgaacccgtgtggatcgtgttcgctcatgatatgaccattcaattg

SEQ ID NO: 17088 - DNA, 403 bp, Gossypium hirsutum
  Clone ID: LIB3145-045-Q1-K1-E3
gctggacgggctttctgttcaggcgtggatttgacggctgcacaagatgttttcaagggtgacgttaaggacccggagacggatccggttgttcagatggagcaatgccccaaaccaatcatcggagctatcaacggccttgctattactgccggcttcgagatcgccctcgcttgtgatatgctggtcgctgctaagggagccgctttcgttgatactcacgccagatttggtatatttccttcatggggtttatcccagaagcttgcacgctttataggaccaaacaaggctcgcgaagtgtcgttggcagccatgcctttgtcagcagaggaagctgagaaattggggtttgtcaattatgttgttgaccaaaatgaagtgctgaataaagctcgacaac

SEQ ID NO: 17089 - DNA, 263 bp, Gossypium hirsutum
  Clone ID: LIB3145-045-Q1-K1-E4
tttgtgaattggctggaagaagcagaagaagaggaataagctggccaataataatagtatggtcagcaatctatagaaatggtgataaaccttgtacttgttccttgtttttattagctatctgtttgtgagacaaccaactcatagttaccagatccttaagactcatggtgtggctattaaaatatgagatgctaaaattgatggagtaattaatgttaatatatgatggttcaataaacaaaaatcttcctttgtacccg

SEQ ID NO: 17090 - DNA, 228 bp, Gossypium hirsutum
  Clone ID: LIB3145-045-Q1-K1-E5
cttacgacgatcggagtccttgctggaggcaagggcttgctgcggctagggttcttctttttttttttatttcaattttgctgtattgggttgctagttactgagtttagagtttgggtctgttaggtggtttgggcctgagtgttataatgtaaagtgggtgttagattggacctgggcacatttgggtttatacaatgtatatatataaaatgaaatttaaaaggt

SEQ ID NO: 17091 - DNA, 374 bp, Gossypium hirsutum
  Clone ID: LIB3145-045-Q1-K1-E6
atgataaccaggtccctcaaaacgaccaccaccgtcgccgctggcgccgtctccgcctccaacaacccttctttgacctctcaagatttcccctcttctaagaaagcatctcccaagaagccgccaccgccaaccgtctccaaactgacccaaaaccgtggcgcttccacccacaaaccacctgttttcgactgcgattgtttcgactgctacacgagctactggtttcgttgggattcttcccctaaccttgagcttatccatcaaattattgaagctttcgaagatcatttaaccaaaggggaatcccagaagctttccaagaaaaacgcccgccccaaacgaagggactgtaacagcagaaccgctacacc

SEQ ID NO: 17092 - DNA, 439 bp, Gossypium hirsutum
  Clone ID: LIB3145-045-Q1-K1-E7
cccacgcgtccgcccacgcgtccggagggctttgttcttatggaacaatgatcatattgagagcctaataagacagaaccggaaagttatacttccaattattttcccatccttggagaagaacgcaagaaaccactggaaccaggcagtgcagagtttgactttaaacgtccgaaagattttctccgccactgaccctgagctctttgaggagtgcttgcacaagtttaaggaagaagaagcacaagagaacgaggttaaatcaaaacgagaagcaacatggaaacgattagaagagattgctgcaatgaaagctgcaagtaatgaaccggtgcttatctcccctaaagcaactacccgtaagccatctggttaggaacaagtgattggcattttagttgcagatgttcgatgtcaagattggtattgcacgccatcg

SEQ ID NO: 17093 - DNA, 285 bp, Gossypium hirsutum
  Clone ID: LIB3145-045-Q1-K1-E8
gctgagaggagcttgcatgatgcttttattattgttagaagagctctgaaaaactctacagtaattgctggaggaggtgcaataaatatggagataagtcgatacttgaggcatcatgcacgcacaataactgggaagtcgcaactttttataaattcttatgctaaagctcttgaagatatcctacggcaactgtgcgacaatgctggattagatgctactgatgtgctgagacaaattaacgcagaagcatgtgctttcatttggcgagggagcttcttacag

SEQ ID NO: 17094 - DNA, 428 bp, Gossypium hirsutum
  Clone ID: LIB3145-045-Q1-K1-E9
gagcttttaatcgaaaaggaaaagattgatgctgttgaaaaaatggccgaagaggcactgcatgaactggaaaggttaaaagctgagagagaggcagagaatatggccttaatgaaggaccgtgctgccattgattcagaaatggaagctctttcaaggttaaggtgtgaagtggaggagcagttggaaagcctgatgaataacaaggtagagatatcatatgagaaggaagcgattaacaaactacgaaaagaaacagaggatgaaagccaggaggttgtcaggttacagcatgagctggaggtggagagaaaagctttatctatggccagggcgtgggctgaggatgaagcaaaaagagcaagagaacaggcaaaagccttagaggaggctagagaacgctgggagaggcaaggtatcaaagtggt

SEQ ID NO: 17095 - DNA, 309 bp, Gossypium hirsutum
  unsure (1)..(309): unsure at all n locations; Clone ID: LIB3145-045-Q1-K1-F1
tcatatgtgatatgtataatgtgtcgtaatctttatttattagtgatgctcctacgttttatacgagtctgtaatgacaatagctttcccttttccatatataggaaggctcatttggaaaaaaaaaaaaaaaaaaaaaaaaaaaaaaaaaaaaaaaaaaaaaaaaaaaaaaaaaaaaaacaaaaaaaaaaaaaaaaaaannnnnnnngggggctagaggaatcaaactaaccatctcgggccccccgagttaaaaacttaatccttgtgtaaacaaaaccaaaaaatgtgaaaaacctgttcgatttt

SEQ ID NO: 17096 - DNA, 362 bp, Gossypium hirsutum
  Clone ID: LIB3145-045-Q1-K1-F10
gttgatatcttcatttccgatccatcatctcttgcggagcagctcgtggacacattctgcgattgtatctccagcaaaggatcatccgtcgtaccggctggcttttgcatgaagctttggcattgacatgaacggactgttgccgagtagtgagctacatgtttccgagtgcaaaaccggattaaagtcggtgttcggcaataattctttagacccacaacattctggatttagttgcttttgtcattgttatgatcatgtcagaattgccagaatcgtctttttatctttttacaaaaacactgttggttcattcacccaggttgttaaagttattttctaatggtatttacatttcatgt

SEQ ID NO: 17097 - DNA, 429 bp, Gossypium hirsutum
  Clone ID: LIB3145-045-Q1-K1-F11
gatggatgttgcaacagaggcacccaaagctccattgacaagtgaaaggaaggttcgaacagaccttgaagaacacatacctaaaccctatttggcaagggcatttgctaatccagatgtggaacatccacatggaacaccaggacgtgacaactatggaatgagtgctcttcagcaacacgcttccttttttgatcaagataaagatggaattgtttatccttgggagacctacagaggtatgagaaatattggtttcaatccaatttcgagccttgttattgcaattaccatcaatgtggcattgagttattggactctccctggatggctaccaaatctatattttcccatatgcatagatagaatacataaatgcaagcatggaagtgactcttcaacatatgacactgaaggaaggtatatgcc

SEQ ID NO: 17098 - DNA, 225 bp, Gossypium hirsutum
  Clone ID: LIB3145-045-Q1-K1-F2
ctagaagatttttttttcctgtcttatttttcttttttcaataaagaaagtaaattttccttcgcgttacctgacccaatcataaattttgtaagtataaattttcttaggcaaccctatttggatataggatgttttttgggtttataatagttcctgccctcgtgaaaattgtacaatgcattgcaaaactattggaataaaaaggaattggattatttattt

SEQ ID NO: 17099 - DNA, 444 bp, Gossypium hirsutum
  Clone ID: LIB3145-045-Q1-K1-F3
tgaggattatacatgcgtgaaatcccacggacctaatcccaaaacaacccatatatatggtaactgcgttgtaaagagcttctgcagtagtgtattggatgagcccaggtgtgcagcagagagtgatttcctcagcttttgtcacacatgcaaaaagaatcttgaacagaaaatcgacatttacatttacagaggtgagaaggctttttgcagtcaagagtgccgctatcaggaaatggtactagatgaagaagagaaataaaaaattttcatttcatcactgctttagatcataaaatcattttcatgtttgataatgattccataaaccaaatctctttgtagtgtttaatttagcttttgtttttaaaaaccctctccactgcagatagtgaaaagagaggatgagatgatgtagagttaatgttaattatttatatgact

SEQ ID NO: 17100 - DNA, 399 bp, Gossypium hirsutum
  Clone ID: LIB3145-045-Q1-K1-F4
cttctatctccaatgttattaacattggacaactcttgcaatcggtaatctcttgtaattttctgcaattacatgccatgaatctttgtatgatcatatgtttgtttaaattaccgtattttttaggcactcgaggtggctggtcaagttgcagcaacatccatctctacatcacctctcccgtatgataccatggctagccaatgtgaagcattcggcacaggtacaaggaagaagctctccaactggttggcccatgaaaatcatcaaaatgaagctgccaataaaactatactgacaaccgatgctgctgacagacacgtgatgatgctgaagaagatttcaaacgggaatgcttttaacggtgctgtcttgcagctcgacccatgcttatcaatg

SEQ ID NO: 17101 - DNA, 374 bp, Gossypium hirsutum
  Clone ID: LIB3145-045-Q1-K1-F5
attttattgttccttccttcgacgtctactgctcttgtgacctcgatttcaagtgaaacagaatgggtaaggaaaagactcacattaacattgtggtcattggccatgtcgattccggaaaatcgaccaccactggccacctgatctacaagcttggcggtattgacaagcgtgtgattgaaaggttagagaaagaagctgctgagatgaacaagaggtcattcaagtatgcttgggtgcttgacaagctcaaggctgaacgtgagcgtggtatcaccattgatattgacttgtggaaatttgagaccaccaaatactactgcactgagattgatgcgcctggacaccgtgactttatcaagaacatgattact

SEQ ID NO: 17102 - DNA, 437 bp, Gossypium hirsutum
  Clone ID: LIB3145-045-Q1-K1-F6
cccacatttcatttcatcttttttctcttatcttttaagcttaaatcttttgtgcagatttccttatctttagttcaactttgtcccttttatatcagtgtctacacatatcatggcaaaagtagatgaaccacagccacatccaccaaaggagcagctgcccaacatttcttactgcattacaagtccacctccatggcccgaggccatccttcttggtttccaacattatcttgtgatgcttggaacgacagtgatcattccaacttcacttgttccccagatgggaggtggaaatgaggagaaagcaaaggttatccagactctactctttgttgctggtttgaacacattattgcagtcactgtttgggtctagattgcctgctgtgatcggagggtcttatacctttgtcccaacaacaatctcaattattc

SEQ ID NO: 17103 - DNA, 434 bp, Gossypium hirsutum
  Clone ID: LIB3145-045-Q1-K1-F8
aaaccactagccctgcagcaccacctcaacagcctgcacaaatggcagctattcctactagtggacctaatgcaaatccattagacctctttccccagggccttccgaacatgggtgcaagtggtgctggggctggctctcttgattttttacggaacagtccacagtttcaagctttgcgagcgatggtgcaagccaacccacaaatattgcagcctatgcttcaagagttggggaaacaaaatcctaatctaatgagacttatccaagagcatcagggtgactttcttcgcctgatcaatgaacctgctgaaggtggagagggaaacattttggggcaattagctgaggcgatgccacaagctgtgcaagtcacacctgaagaacgtgaagccatagaacggcttgaagcaatggggttggatcgtgcaact

SEQ ID NO: 17104 - DNA, 445 bp, Gossypium hirsutum
  unsure (1)..(445): unsure at all n locations; Clone ID: LIB3145-045-Q1-K1-F9
gttgcgtaaccctttacaaagactgaaattctggctttatagtcgaaaaggaaaggaaaaatttacgaaaaataaaaaaaatacaatgtttttctttttttgtttccctttgctgttgttgcttgtttgtctctttgcaggtgtgggtgtgctggcgctcgggtacgggtggtgcgtgaagaccgtacggaggtgcgcagggggccgtacggaggcgcgggcatggctgctggagggtactgagcgtttgacgcaaggaagggggacgacttanggtttctgaaacctgttaaggatatgggtttattgggcctgttcttgtagttgggctatcgtttgggcctctggggtattgggttaagttttaactattagattttaattgggtcttgggttatgttttgggtttgtatatggtacttggggcatcgggcccattgtattt

SEQ ID NO: 17105 - DNA, 404 bp, Gossypium hirsutum
  unsure (1)..(404): unsure at all n locations; Clone ID: LIB3145-045-Q1-K1-G1
aaaaaacacactccttttgaatctttnttttggtggtgcacagaaggattcgaaggcatttctccattgttgttttattcaattacaagctactttttgttttggtagttttgagagtggaattagggaaaaaaatggagaagagcactccaatgaggaaaccacacacttccactgcagatctactcacttggtccgagactcctcaaccggatttcaccgncttcgncgnacgctccacccgccctcaccagccgtcggatgggatcagaaaagtggtgtttggaggtcaagtgaccgatgaagaatttgaaagcttaaacaaaaggaaaccttgttctggatataaaatgaaggagatgactggtagtggtatttttgcagccgatggagaaaatgacgaa

SEQ ID NO: 17106 - DNA, 440 bp, Gossypium hirsutum
  unsure (1)..(440): unsure at all n locations; Clone ID: LIB3145-045-Q1-K1-G12
gcccctaaaaccgccgaaaattttcggcagctatgcactggcgaatacaggaaagctgggttgcctgttggttacaagggttgccaatttcatagggttattaaagattttatgattcaagctggagatttcctcaagggtgatggtagtggatgtacttccatttatgggctcaaatttgacgatgaaaatttcattgccaaacacactggtcctggtttgctgtcaatggcaaacagtggaccaaacaccaatggttgtcagttttttatcacatgtgcaaaatgcgagtggcttgataataagcatgttgtatttgggaaggtgctcggagatagtcttcttgttgttcggaagattgagaatgtggctacaggaccgaacaatangccaaaactaccatgcattatagccgagtgcggggaaatgtaaacgtgttc

SEQ ID NO: 17107 - DNA, 123 bp, Gossypium hirsutum
  Clone ID: LIB3145-045-Q1-K1-G2
ggtcaaatgataaaactactggactcttaattctagtaaaatcatgatcaaattccggaaaacggtgaatattaaaaaacagaaacttgaaaacagaaatggttcttaagccaagaaaggaaa

SEQ ID NO: 17108 - DNA, 386 bp, Gossypium hirsutum
  Clone ID: LIB3145-045-Q1-K1-G3
aagaggcacttcaaaatctgtgtgttaaccaggtggagaaatttatggaattgtggaacaacaatgatgaattctgtaaagagtacatccgatgcaataccagaagcacattaaggaggctgaggacattagatggccgtgcacttggtcctgatgaggagccacctgtaattcctgcaattcctaaagttgtaaacgaacaagtggccaaggatcaaacagtttccagctcaactttggaagagcgaactcaagagaagactgcacctgcaaaagctgaaatagctaaggctaaacctgcagcaaagtccatggaacaaaagaacctgactagtaaatcagaaaagcctgtgaaatctgtccctcctgcaagtggttcaaccact

SEQ ID NO: 17109 - DNA, 383 bp, Gossypium hirsutum
  unsure (1)..(383): unsure at all n locations; Clone ID: LIB3145-045-Q1-K1-G4
cccacgcgtccgattcagcagttttttgaaaaacatgtgccgaaaactggatatggtattggtaattaacctttttcccaatgtaactatcgctggatgatatttgacaggattagcctttttgcctcttgatgatatttatttttcctcctctatctcttgcattataaatttgtctgcttaagctcgaatttgcatccgagcctagcagcaccttgtgaacaacctagtttctgcatcttgttgattgtcttgcaaaaatatactactgttggaagcatttcttaatgtcatgacactaangctacattgtttaatattatattcaacggtgaacatttccacatcgaatctttacatgccttctttctggtacatgtgga

SEQ ID NO: 17110 - DNA, 412 bp, Gossypium hirsutum
  Clone ID: LIB3145-045-Q1-K1-G5
cggatctcttttgattgcacaaaaccaaatcatctttgctttgctattttggttcgttttgctaagaactggctaacgcacagcaaaaaatcgtggaggaaaccaacaagaaccaagcggtggttcttgccctctatgaagccttaaacacacgagacgtcaacaccgttcaccaaatccttgctcccgatctagagtggcggttccacggtccacccactcaccagtttttgatgcgcttactcaccggcgcttcatacgacgatcctttccttttcgaggtcgaccctgttttagtcaccgcctttggatccaccgtcatcgtcgaaggctgtgacaacagccgttcgatctcctgcgttcacgcttggactgttcgtgatgggacaatcacccaagtgagggagtattt

SEQ ID NO: 17111 - DNA, 415 bp, Gossypium hirsutum
  Clone ID: LIB3145-045-Q1-K1-G6
cccacgcgtccgcccacgcgtccgggaaccatgaagcaacctgctgagctcgctcatgctgctaacaacggtctcgatattgcagtcaggcttctcgagccgatcaaggagcagttccctatcctttcatacgctgacttctatcagcttgctggtgttgttgctgttgagatcaccggtgggcctgaagttccattccatcctggaagagaggacaagcctcacccaccacctgagggtcgtcttcccaatgctactgagggagctgatcacttgaagcaggtgtttagtcatcaaatgggtcttagcgaccaggacattgttgctctttctggtggccacaccctgggaaggtgccacaaggagaggtctggatttgagggaccatggactaccaaccctcttatctttgaca

SEQ ID NO: 17112 - DNA, 403 bp, Gossypium hirsutum
  Clone ID: LIB3145-045-Q1-K1-G7
ggaaatgcttctgaaggccaggtgtttgttgcatttaagattttgacttctgatgataaagtgaaagccattttggtgaatatatttggaggaataatgaaatgtgatgtgatagcaagtgggatcgtcaatgctgccaaacaggtggccctaaaagttcctgtggtggtccgtcttgaaggtaccaatgttgaccaaggaaagcggattttgaaggaaagtggaatgacactaattacagcagaagatttggatgatgctgcagagaaagccgttaaggcagccagcaaatgagaaatttaagatacgagtccttttttcttattgtttctcatctttcacagcattgatgagtttttcctttatttttcttttcatcaagcccatagaattttgttatgat

SEQ ID NO: 17113 - DNA, 432 bp, Gossypium hirsutum
  Clone ID: LIB3145-045-Q1-K1-G8
cgctgctctcaatcccttccacttcgccatggcatcagagaagaagctttcgaacccaatgagggagatcaaagtccagaaacttgtcctcaacatctccgttggtgagagcggcgatcgtcttacacgtgcggccaaggtcttggaacagctcagtggtcaaaccccagtcttctccaaggctagatacactgtgagatcttttggaattcggcgtaatgagaagattgcttgttatgtgactgtgaggggggagaaagctatgcagcttcttgagagtggtttgaaggttaaggaatatgagcttttgaggaggaacttcagtgatactggctgctttggatttggtatccaagagcacattgatcttggtatcaagtatgacccttcaactggtatctatggtatggacttctatgttgttctcgaacg

SEQ ID NO: 17114 - DNA, 375 bp, Gossypium hirsutum
  unsure (1)..(375): unsure at all n locations; Clone ID: LIB3145-045-Q1-K1-H1
nncgccacgcgtnncgccacgcgtncgggcacgtacatgagtatttatgttaccccagatggcccatagcgtgcaacaacatagtttgcagagaggttgagtttggggaacaagggtcttggacaatgacggaaaagatggttcatcgnttctagttctttcccacatcgagggcataatgtactgtttgtcagtttcctacaaagaatgttcactcgagtaggcagataattccatgaaatcttccagatggtgattaaaattttatgtggtagatcgaggctccataattttttataaaattccttgtagttggtttgtaaagcgtatgctctatgatctaaactttgtaatagtttataggcactacgaact

SEQ ID NO: 17115 - DNA, 265 bp, Gossypium hirsutum
  Clone ID: LIB3145-045-Q1-K1-H11
tctaaatgtcgagaagggatcgatgttaatatgatggagtcatctggaatgctcagggctcgtttggactcatcaatgcaagagccacaacaagaagaacaagaagttggtgtcaaagatggaaaagataggacggtgggacagtctggcatgtctctcgctaacagttctactgctgaatacatgcctgagcctttgaatgctttaccttgtgggacagctgctgagctaggcttagatttcaaagttagggaggatcttgtgt

SEQ ID NO: 17116 - DNA, 310 bp, Gossypium hirsutum
  Clone ID: LIB3145-045-Q1-K1-H12
gaaaattgttcactagggttggggtactccgtaggggaggagttggcacttaggggaatgattgctatgaattctttaatgtttcacataaacccggtgaagatcctgaaatccaaattgacccgctgttttgttattacatttataatttttcatacctgcctgtcctcttctcagtccaggcacaatgttgtcttacacccattagattggcatgtgaggccgttgaaatgaataatttgttttggaatatgtgtttttgcctgcagcaaaagtactactgcgcggtcaaatacatggacgtgctgtt

SEQ ID NO: 17117 - DNA, 366 bp, Gossypium hirsutum
  Clone ID: LIB3145-045-Q1-K1-H2
cccacgcgtccgcttctcttaatggattcacatctagagggacacttctcatctgaagaggcaactgtggtctttgatcttgcctcacaatgtttgcaatatgaaccaagggagaggccaaataccaaagatcttgtgactacacttgccccattgcaaaataaacctgatgttccatcttatgtgatgttgggaattcccaagcatgaggaggggcctcctactccacagcagccgttgtctccaatgggtgatgcctgttcacggatggatctcacagctatccatcaaattttggtaatgacacattacaaagatgatgaaggaacaaatgagctctcctttcaagagtggactcaacaaatg

SEQ ID NO: 17118 - DNA, 418 bp, Gossypium hirsutum
  Clone ID: LIB3145-045-Q1-K1-H3
tttttccccatttcatatccatgccgattttggttgctttctggcaagcgagcgcctcagccgcgaagactgatgtcacctgttgatagatctccgaacatgatagaagagttttgccttcactatccctggccacaatccccacagtcgcttgattaccctttctatcataggctgcatcaaaattgatcttcacgaactgattgcccataaggcacagcaaaatgtcctacactgtgatactgaattcttcgcaaatacccaggacattcccggaagagatgatccatgttctccgatccagctccacaccgggggcatactgatgtattagttagcttgttctgaagtaagttaactcgtgtagctagaaaattccatgatatcttccatattgtaattttgatttttgagggga

SEQ ID NO: 17119 - DNA, 445 bp, Gossypium hirsutum
  unsure (1)..(445): unsure at all n locations; Clone ID: LIB3145-045-Q1-K1-H4
caaacttcaggatttggcaatgagctcactattgatgtgaaaaaaggggccgtctctcagagaggaaaagcttctccagatggtagcttgacccctgattccacttcctatgctgatgaaaaaactgcgaatctcttcagtgctagtgatcgtgccatcgagagcgagtctgcatatacacacagtgaagatgaatctgccagaagtcctcgtggtagtcctactgatagaaactctctagaaagcccatctaaaccattttctgatgacccttttggaaagagcactgaagcagaggcagaaagacaccaaagttttgatgaatcangatgggggacctttgataatgatgatatggactctgtgtggggttntaattctcttaataccaaggactcggacaaggccagagactttttggatcaagtgattttgatgtacacac

SEQ ID NO: 17120 - DNA, 403 bp, Gossypium hirsutum
  Clone ID: LIB3145-045-Q1-K1-H5
tgatttttctttaatttctcaattctcaattctcttctatggtggtagccaccaaaccaaagcatggctatctctctaagttcagtgttcgggtttaatttaaagtatgtctcgagatcctgtattggaggagcttcagtacttaaggccaaccccagtgtatctccctttcaaatgtatggctcggggggacgtgtacaccaaaaaagaaggggcttatgtctttcagttgaagacagagaccgactagtcgcgaatagcagcataaaggattctggtgatgctgagaagctggtttctgatgatcgagttttggccgtgaatcccccatcattggataatgaatcgcgctcccctacctctgagcctagtaatggttcaatggtttcttcaactccgatgc

SEQ ID NO: 17121 - DNA, 411 bp, Gossypium hirsutum
  Clone ID: LIB3145-045-Q1-K1-H6
cgatgaaagaaaaagccaaggagccgcttctgtcagcaactcaattaagaactttattggacaagctaagtgtgatcgagattcctcttgtagagtctgaagacctcgagccccatagctcaactgaagttaagaaactgttttctattattaatagtttcgctgaattgcagaaccaaataaatttactttcttatgagaaggacgaactacagtctatgctttcacaacagagttttgaaattgagcatcttaaagaagaaattgagagacatgttagaaataagccagaattggaagtgatgaaaatggagctgcctgaggctacatttggcctggaaaagattattgttggattgggaggtaaagagttgattggaagcccaaattctgttggtatgaaagcacttt

SEQ ID NO: 17122 - DNA, 410 bp, Gossypium hirsutum
  Clone ID: LIB3145-045-Q1-K1-H8
ttgggttccttttttcaggtccatccagcctcaatgagccaagggatgtccgaggatgcatacatcttattttacacgaggtcataccctcgccctcaaagagcaatatctgaaaagatcaagcaagttcctgctaggcacctcgcatcgaaaatggagaagcctacacgaccagcacaaagtaaatccagcagccattctgttggccccaagctttacccagataccaggtccggaactgctgcaggctatatcaaccgtgactctaatggcattcttaggcagagtgcaaatagtaacattcaccgagtggtagagatgtatgctgagccatccaacgtggagttctctgatgctacgtcaagtgattggtccctttttacaagctcaaatgaagcttcttttacaac

SEQ ID NO: 17123 - DNA, 440 bp, Gossypium hirsutum
  Clone ID: LIB3145-045-Q1-K1-H9
caattattagggtttcggcatagcaactctctcttatctcattttctttgcagccaaccttttaacaaatatctacagcctaaaatcaacctgttagagcctcattttacagtcgccggacccatcattcaatttgacggtcgacggtgcacgagcagagatccgatcttgcccacaaagatcacccatggaaattaggtaaattaatccttctctttttcttctttttaaaaaaaactcaaatcatacgttaatctctttaaaaaacaaaatagaaattcaaaagaaacaaacattcgaccctcgcccgaatctctatattttcgagatatttgggtattcatcggtgtcgattcacatactaaaaaatcgaaccaaacaaaaagaaaataaatcgaccgaaaagaaaaaaaactgtgaaatcacctttgctattttga

SEQ ID NO: 17124 - DNA, 251 bp, Gossypium hirsutum
  Clone ID: LIB3145-046-Q1-K1-A1
gacacaccttcgtatttttttaagcacattatcataacagctctatcaaacttcttaggggaggggttcatacatgtacgttactccaaaatacacttgcagagaataaataaactgacagtgtaacgaaaagtaccgaccactaatgtagacaaattcactctttacaaataacctagacttaataatcatatataaaattttagaaaatcatacatatctttaactaccatatttataatccttatcat

SEQ ID NO: 17125 - DNA, 428 bp, Gossypium hirsutum
  Clone ID: LIB3145-046-Q1-K1-A10
gaataccgccagcatccgtcaattgttagggtcaaccatcctactcgccctgacaaggcacgccgcttgggttataaggccaaacaaggttatgtggtttaccgtgtccgtgttaggaggggtggtcgcaagaggcctgttcctaagggtatcgtgtatggtaagcccacaaaccagggtgtcacccaattgaagttccagcgcagcaagcggtctgttgctgaggagcgtgctggccgaaagttgggaggtctcagagttgttaactcgtactggatcaatgaggactctacttacaagtactttgaggttatcctggtggatgttgcacacaatgctatccgcaatgacccaagaattaactggatctgcaatccggttacaagcacaggggacttcgaggacttacatttgctggtagaaaaaca

SEQ ID NO: 17126 - DNA, 386 bp, Gossypium hirsutum
  Clone ID: LIB3145-046-Q1-K1-A11
cccacgcgtccgcccacgcgtccgttccacgcgtccgcccacgcgtccggttgatcatcagcgtcgtcgtcatcgtcatcaccactcatctctcctttaactttctcgccactttcatctttctttgatccatccttgacatcatcaaccttgccatttttattatcaccgaaagaggaagctttagtgcatacaattacaggggtagccaagaacgtaggtttctcttcaccggccattatcaccagaatcttctcctcataaactttcacctgcttggttgagtcgccctcattttcaccactttcgacatccctttcgacatcacctccttcactgtttgtgtccaaacgaccataaagccgccagtttgaacaagctaagat

SEQ ID NO: 17127 - DNA, 338 bp, Gossypium hirsutum
  Clone ID: LIB3145-046-Q1-K1-A12
aagaattataactattcaaataatattatttgaatagttatgtttaatcaagagatatgagatgaaaaaaaaaaaaaaaaaaaaaaaaaaaaaaaaaaaaaaaaaaaaaaaaaaaaaaaaaaaaaaaaaaaataaaaaaaaaaaataagaaaataaaattattaccagaattcaaaactcttaaaataaaactcacttaaaaatttgttttaatagaactcaaaattctatttatctttgaaaagtattataaaaaatggattgaagttttaaaaaaaattttaaaaagaatacacaaatattgaaaaaaaaatttagtatatttaatttaatataat

SEQ ID NO: 17128 - DNA, 345 bp, Gossypium hirsutum
  Clone ID: LIB3145-046-Q1-K1-A2
cgtgaaataagttcacgtccaccgtacaccgagtatgtctcaacacgctggtatcgtgcccctgaagtacttcttcaatcatacctatacacttcaaaagttgatatgtgggcgatgggtgcaatcatggctgaattgttcaccttacatcctctttttcctggcacaagtgaagcagatgaaatttacaaaatttgcagtgtggtaggcactccaactgaaaattcatggccagatgggcttaatcttgcaagaactataaactaccagttcccgcagttcgatgggacacatctgtctgtgttgattccatcagcaagtgatgttgcaataaaccttattaca

SEQ ID NO: 17129 - DNA, 218 bp, Gossypium hirsutum
  Clone ID: LIB3145-046-Q1-K1-A3
cccacgcgtacgatatgaaagacgttcatataagtatgacgcgactgacttaagacaaatccttggtatacttgagatattgtgcatatagggttatactggggggaaacgctcgtacttaggctagactgctaggttggatatcctgatcgcatattactcattacagggaaccatgaaagtctttacaaatataggtttacagatgctatgatgag

SEQ ID NO: 17130 - DNA, 443 bp, Gossypium hirsutum
  unsure (1)..(443): unsure at all n locations; Clone ID: LIB3145-046-Q1-K1-A4
ctccttcaagaatcagaaactgccatcccttcccggttcctatttggactgctctccagcaggttattgcttcagcagcaaaggccgatgagatattagaatgaatctctgaacatgagaagaggatatttcgttccgaatctctggccacaatacccgaagccgaccgattctggcttttatcgtaggcaccatcaaagttgatgttgatgaaactctcctgtgggtacgaccatctctggttctctccgcccaaagtgcacaacagaatattcaactttgataaaagctgagctcctctactacccaggtgatccactgtaaaaaatcctcacattgattcatcaaaatgttctggaacgataatgctctccatacctncattgtaacacggcattcgcgaaataaatggttcattgtttcagctncttcttcacatcggg

SEQ ID NO: 17131 - DNA, 440 bp, Gossypium hirsutum
  Clone ID: LIB3145-046-Q1-K1-A5
gtcaaatccaaggttcttttgccaatctatcaagcttacttggatgcaacttctcttataatgacttaacagggcccataccttctttaccgcgcctcgacaacatggccgtcagcagctttattgagaacaatggtctctgtggtggacctctcggtggttgtaatccaactccatcttccctctcgcttcagcccaatgcaaaagataaaggtactgggctaggcaaggttgtggccatagttgcagcagccattggtggagtttcccttgttttaatagtagttattttatatttcatgagacgaccagttgaaatagttgctccattgcaagaaaaaccttctactgctcgagtttcggacatttacttttcaccaaaggaagggttcactttccaggacttgcttgagccactgacaatttgatgagagctttgt

SEQ ID NO: 17132 - DNA, 365 bp, Gossypium hirsutum
  Clone ID: LIB3145-046-Q1-K1-A7
cccacgcgtccggttgtgtccttccgtgagactgtccttgagaggtcttgcaggactgtgatgagcaagtctcctaacaagcacaaccgtctgtacatggaagctcgacccttggaggaaggtcttgctgaggccattgatgaaggtcgtattggtccaagagatgatcccaaggttcgttccaagattttggccgaggagtatggttgggacaaagatcttgctaagaagatttggtgtttcggccctgagacaactggtcctaacatggtggttgatatgtgtaaaggagttcaataccttaatgaaatcaaagactctgtagttgcggggttccagtgggcatcaaaagaaggtgcgatagc

SEQ ID NO: 17133 - DNA, 390 bp, Gossypium hirsutum
  Clone ID: LIB3145-046-Q1-K1-A8
cccacgcgtccgaccaaatatatcaccggcagaggtggtttggctgagatcattctacaatgaaacggagaaagagcagaataagcacgcaattgcggtggcagctgccacggctgctgctgcagatgccgctgtcgccgccgctcaggcagctgtggcggtggtgaggcttacgagtcatggaagaggtaccatgttcggcggtggtggacatggaaagtgggctgccattaagattcaatccgttttcagaggctatctggctaaaaaagcattacgagctttgaaaggattagtgaaaattcaagcacttgttagaggatatttagtgagaaaacaagcttcagctacacttcatggcatgcaagcattgataagagcacaagctac

SEQ ID NO: 17134 - DNA, 382 bp, Gossypium hirsutum
  Clone ID: LIB3145-046-Q1-K1-A9
ggaaaacccggcccgacccacgcgtgcgcccacgcgttcgaccaaatatattatcgttgaggtggtttggctgagatcatggtacagtgaaacggagaaagagcagaataagcacgcaattgcggtggcagctgccacggctgctgctgcagatgccgctgtcgccgtcgctcaggcagctgtggcggtggtgaggcttacgagtcatggaagaggtaccatgttcggcggtggtggacatggaaagtgggctgccattaagattcaatccgtttttaaaggctatcttgctaaaaaagcattacgagctttgaaaggattagttgaaattcaagcacttgttagaggatttttagtgagaaaacatgtttcatctacactt

SEQ ID NO: 17135 - DNA, 269 bp, Gossypium hirsutum
  Clone ID: LIB3145-046-Q1-K1-B1
cccacgcgtccgtttgtttttaagcatattatcacaacagctgtttcaaactttttatagcttttgagcatgcatgtacttcccttctagttgcagttgcagtgttgtctgatactgagagtggaagttggattggggaccatgagtgaagacaaagtcagtgagacttaagcttagactaagatttgtatatatgaggttgcaaaattatatatattatcaataatcataatcataatcataataataaatcactcactgtttattta

SEQ ID NO: 17136 - DNA, 437 bp, Gossypium hirsutum
  Clone ID: LIB3145-046-Q1-K1-B10
atttcggttccagtgatagactgcatgtgttctgttcatgatctccagtgtcgaatggccgtaactggcttcccggaatgatgatgggaaaaaagtggcaattgactcatttgtattgaacaatcagtactggtcaagtaacgttcgagaaaggaaactgaagaggcattatttgaatgggatgaggatgattgcttcttaatgaaaagataatatgaagatatatcatctctggtagtgcttgatgaagtttcattgcaagagatgaaaatgccaacaatgataagaataagaataagaatatatatatatatatcctacaccttgtttggcttctcttgcagtcatctttttgttggcatatatatatatatatcctacaccttgtttgcaagagatgaagtttcattgcttggaaatgcaatatctcgaagtga

SEQ ID NO: 17137 - DNA, 382 bp, Gossypium hirsutum
  unsure (1)..(382): unsure at all n locations; Clone ID: LIB3145-046-Q1-K1-B11
gaagaaaccattatttgatccaccgaaagaaaattactgatgaatattcggccttgcaatgtaggtctgagtgttctagttgttcggctgtttctatcctctaagtttcatgtctgatcttgacatccagattcctactgcctttggtactcatttctccctcgtatttatctcttatctccttgtattaacttgcctttagcatggaaattcaaacttgtcatcaactgtatgctgctagatccgtttgctgatgcaaatgctgaagacgctggtgctggtgccaaagaatacgttcacattcgtattcagcagcggaacggtaggaaaagcctgaccactgttcanggattgaagaaagaatttagctataacaaaattc

SEQ ID NO: 17138 - DNA, 249 bp, Gossypium hirsutum
  Clone ID: LIB3145-046-Q1-K1-B12
cccacgcgtccgaaaaaattgcaccatgactaatacttccaatggtgttagaatcaaaacttggccaggtgctgaacctggcacttgttcgaacattcactttgaggatattactgtgaccaatgtcagttctcctattataattgatcagaaatattgcccatggaacaaatgcaaaataaatgaagaatcgaaagttaaactaagcaacattagtttcaaaaacattcacggcactttttcgcgtcc

SEQ ID NO: 17139 - DNA, 425 bp, Gossypium hirsutum
  Clone ID: LIB3145-046-Q1-K1-B2
cccacgcgtccgaaaactcttacttcggcatctctggccacaatacctgaggctgaacaatactgactctcattatatgctccattgaaatttatctttataaactcacgatgtgggtgctgccatctctttttttctatgatttttgccgattttcttttttcaaagttagctagctcattaatgtaattgctggtgaaatttgcaatctcttttccattactgactttttcttcgtgtattctcctgtttcgatctccccatatggctcacaaagcgtagcacaataaacggctttgacaagggttgagttgttctaatacccaggacactttcgaaaaagatggtccattgtttcagctcgtgcttcacatcgtggacagcttgtgcttatttatagctttttgtgctgcatattcaccttt

SEQ ID NO: 17140 - DNA, 434 bp, Gossypium hirsutum
  unsure (1)..(434): unsure at all n locations; Clone ID: LIB3145-046-Q1-K1-B3
cccacgcgtccggctattcccacatccagaagagatgcaaaggaaattggctgccaaaggtaggcatatggtgacaattgtggatccgcatattaagagggatgagtcatttcacttgcacaaggatgcttcccagagggggtattatgtaaaggatgcaactggcaaggactatgatggttggtgctggccaggctcctcctcctacccagatatgttaaatcccgagattaggtcatggtgggctgagaagttctcctatgataattatgtcggttcaactccttcattgtacatttggaatgacatgaatgagccttctgtgtttaatggacctgaggtgacaatgcccagagatgctttacatgttggtggagtggaacatcgggagttacataatgcctatggatattacttncacatggcaacagctg

SEQ ID NO: 17141 - DNA, 393 bp, Gossypium hirsutum
  Clone ID: LIB3145-046-Q1-K1-B4
cccacgcgtccgaaaaaaaaaaacccttactatggcccctttcttgtcgcttggtcgtcttcgggttgccgtacgaagtaggaaaggtttcaaatccagatccagggctagacatggaaagaaacgtgaaaccaaggagttgcggggaagagtgaagaggttgaagacagagatggagaaaagaagcgaggaacagaaggatatcagggaaagacagagacaagtgaaagacaaagttacagcaattgaagccgaatgcgaggaattaaagagagaaactagattcattgttcagcaaactgccagaacccagatcaaactggggcttatgttccgcatattgaaagcaagggaaactggtcacttggatgaaagccgccttctcactcagat

SEQ ID NO: 17142 - DNA, 383 bp, Gossypium hirsutum
  unsure (1)..(383): unsure at all n locations; Clone ID: LIB3145-046-Q1-K1-B5
gaatttgtcaagaaattagatgcaggcaagatgaaagggattgcattcattaaggatcccgatggttactggatcgaaatctttgatttgaaaaccatcggagatgttattagccgttgttcctgagttaagcacatcttgaagcttgctcaggaaacaaggatggcatgtgaaggttttatctcattgtcttggtttcagagtatggtctatattggtcgtagtcaagacggaaattaggcatatggagttttagaccaaagaaaaaaaaaggcctgtggagtttttgttaaagcatattgtattgttgtgtgtttcttatgatatttcaaacagagtcatgcggattgttatcattgtaatggacattatcnattatctct

SEQ ID NO: 17143 - DNA, 262 bp, Gossypium hirsutum
  Clone ID: LIB3145-046-Q1-K1-B6
gtcgtctctaataaagaacaaacattactattaaaaaaaaaacaaaaaaaaaaaaaaaaaaaaggaaaaaaaaaaaaaaaaaaaaaaaaaaaaaaaaaaaccaaaaaaaaaaaaaaaaaaaaaaaaaaaaaaaaaaaggggggggccgttttaaaggatccaagtttacgtacgggtgcttgggaagtaataattttttttttggggaacctaaattaaatttaatgggcggggttttaaaaaggtgggaatgggaaaaacc

SEQ ID NO: 17144 - DNA, 439 bp, Gossypium hirsutum
  Clone ID: LIB3145-046-Q1-K1-B7
cttgctatggcttctttgcaaaggtcagcgagttcatccgattcggatccgcagtacgcaaacatcgatgagaggaaaaggaagagaatgctatcaaaccgtgaatcggcaaggcgatcaagaatgaggaagcagaagcggctccaagatttggttcaggaagtgaacgcattacagaaagataacagtcagatctctgaaaagatcggcgtcgccacccaatactacatcgagatgcaatcggccaataatgttttaagagctcaggcgatggaattgaccgagagattacggtctctgaattcggtgctgcaagttgtggaagaagccgacgggtatgccattgatatccccgagattccggagccgtggcagctcccctgttcgatacagccaattatggctttggttgatatgttcgagtatgatggatagactc

SEQ ID NO: 17145 - DNA, 406 bp, Gossypium hirsutum
  Clone ID: LIB3145-046-Q1-K1-B8
cgttttaccaacgggagatgtgcttattgttaacggtgccaagaccggttcagcaggttgggatgatgctagggagccgaatttgaaccctgttttgtacaaattccaaactgatggaactggttccaagttcaccgtgcttaacccatccaacatccctcgcatgtaccactcctcatttgcactcctccctgatgcaaaaatcctcattgctggaagcaacacgaaccctggttacctcgatgatgcattgtttcccaccgaagttcgggtcgagaaattctcaccacattacttggacccgaacttggccatgttccgacaagagatcattgtcgagaagtccaataaccaagtgaagtacggccagaaatttacagtacagatccgtggaaatggcgaaatc

SEQ ID NO: 17146 - DNA, 372 bp, Gossypium hirsutum
  Clone ID: LIB3145-046-Q1-K1-B9
gcgggattacccgctgagtttaagcatatcaataagcggaggaaaagaaacttaccaggattcccctagtaacggcgagcgaaccgggaaaagcccagcttgagaatcggtcgccatcggcgtccgaattgtagtctggagaagcgtcctcagcgacggaccgggcccaagtcccctggaaaggggcgccggagagggtgagagccccgtcgtgcccggaccctgtcgcaccaagaggcgctgtctacgagtcgggttgtttgggaatgcagccctaatcgggcggtaaattccgtccaaggctaaatacgggcgagagaccgatagcgaacaagtaccgcgagggaaagatgaaaaggacttgaaaagaga

SEQ ID NO: 17147 - DNA, 433 bp, Gossypium hirsutum
  Clone ID: LIB3145-046-Q1-K1-C1
gcgagtctgatagagatgctgagaatgaaagtgactcaccggttacgccagaacctccagctcctcctttaagaagtgtgaacatgcttcagggatgtagaagtgtagatgaatttgagagattaaataagatagatgaaggtacttatggtgttgtttatagagctagggacaagaagacaggggaaattgtggcattgaagaaggtaaagatggagaaagaaagagaaggttttcctctgacctctttgagggaaataaacattcttctctcatttcatcacccatcggttgtagatgttaaagaagtagttgtagggagtaaccttgatagtatctttatggttatggaatacatggaacatgatctaaaagcgctgatggagacaatgagacaaccattcagccaaagtgagggtaaatgcttgatgct

SEQ ID NO: 17148 - DNA, 420 bp, Gossypium hirsutum
  Clone ID: LIB3145-046-Q1-K1-C10
ggctgtttcattttaccatgtcctcgctttcttcatttcatgcttgattttgtttttttcatgcaaatcaaaagccaaacgacgcttcaatctccctccagggcctcctggttggcctgttgttggtaatcttttccaggttgctcgctctgggaaaccattctttgaatacgttgatgatcttcgtcatcaatatggacccattttcactctcaagatggggactcgaaccatgattatacttggcgacgccaaactctgccatgaagcgtttatcgaaaaaggtgttgttttcgctagccggccgagggaaaaccccactcggaatatctttagctgcaacaagttcaccgtaaacgccgccgtttacggtcctgtgtggaggtctctgaggcgaaacatggttcaaaacatgttgag

SEQ ID NO: 17149 - DNA, 414 bp, Gossypium hirsutum
  Clone ID: LIB3145-046-Q1-K1-C11
ggacaaacgagatggcaagttttgtccacaaccaatggcagtcccccctgttcagcagatgtctcgcattgatcaaccaattcctcctgcagctggctatccaccagcagcatatggacagccttatccagctcaaggttacccgcctgctgcataccctcctcctcagtacccaccatctggttattctaggtaaatatttctctgggttacttgttggttgcaagcactagtttgggttactaaggcatggatagggctttgatttgcaagctgcaaattacatagtgatatatttttatgcgtgatttgcttttcgtgttgctgatttgaacagctaaaggtttaaaaagtagatataccatgaacatgtctgctatcaatagtttatgcaaatttgtaaaggtaagacat

SEQ ID NO: 17150 - DNA, 173 bp, Gossypium hirsutum
  Clone ID: LIB3145-046-Q1-K1-C12
cgcgtccggatttttagtttatggtgtaatatttttttatttgtaaccctaaatatgttttgatgtggcaatttttaaattaaaaataaaaataaaaaaaaaaattttataaataaaaaaaaaaaaaaaagggtggtcaggtttgaggttcttatctatcttacgctactttt

SEQ ID NO: 17151 - DNA, 401 bp, Gossypium hirsutum
  Clone ID: LIB3145-046-Q1-K1-C2
gcgagtctgatagagatgctgagaatgaaagtgactcaccggttacgccagaacctccagctcctcctttaagaagtgtgaacatgcttcagggatgtagaagtgtagatgaatttgagagattaaataagatagatgaaggtacttatggtgttgtttatagagctagggacaagaagacaggggaaattgtggcattgaagaaggtaaagatggagaaagaaagagaaggttttcctctgacctctttgagggaaataaacattcttctctcatttcatcacccatcggttgtagatgttaaagaagtagttgtagggagtaaccttgatagtatctttatggttatggaatacatggaacatgatctaaaagcgctgatggagacaatgagacaacca

SEQ ID NO: 17152 - DNA, 440 bp, Gossypium hirsutum
  Clone ID: LIB3145-046-Q1-K1-C3
cggacgcgtgggcggacgcgtgggcggacgcgtgggcggacgcgtggggaaaaaaaaaaaaaaagggaaagcaagtttttatggctccccaagacaaaaatgcgagcaaaaccttgaagaaagctaacggtactggaagtacgagcagccaagaggtgcatttcaggggagtaaggaagaggccatggggtaggtacgctgccgaaatcagagatcccggcaagaaaagccgtgtttggcttggtactttcgatacggctgaggaagctgccagagcctacgacgcggcggcgcgtgagtttcgtggacctaaggctaagaccaacttccctttaccggatgaaaccaactgttacaagggccagaaccagcagagccctagccaaagcagcacggtggaggaatctggaagcccaacggtggagcgtggagtcaacacc

SEQ ID NO: 17153 - DNA, 377 bp, Gossypium hirsutum
  Clone ID: LIB3145-046-Q1-K1-C4
ctccttcaagaatcagaaactgccatcccttcccggttcctatttggactgctctccagcaggttattgcttcagcagcaaaggccgatgagatattagaatgaatctctgaacatgagaagaggatatttcgttccgaatctctggccacaatacccgaagccgaccgattctggcttttatcgtaggcaccatcaaagttgatgttgatgaaactctcctgtgggtacgaccatctctggttctctccgcccaaagtgcacaacagaatattcaactttgataaaggctgagctcctctactacccaggtgatccactgtaaaaaatcctcacattgattcatcaaaatgttctggaacgataatgctctccata

SEQ ID NO: 17154 - DNA, 362 bp, Gossypium hirsutum
  Clone ID: LIB3145-046-Q1-K1-C5
ggctttgagcaacaatggttgtcattaacattttcgaaggcaatatttcttggcaatggtcttattgccattttgtctgggttgtttgggaacctacttgttggttcattgtcccttggaccagtggctccttttgatgctgctgcatgctttcttgccattgggatggctattattttatcatcatggacagaaaattatggagatgcctcagaaaataaggacctgcttacccagtttaggggttctgctgtagcaatagcttctgatgaaaaaattgctttgctgggtgccatctcttctcctgttgaaggctcaatgtacaccttttgtgttccttttgactccttgctttagcccca

SEQ ID NO: 17155 - DNA, 413 bp, Gossypium hirsutum
  unsure (1)..(413): unsure at all n locations; Clone ID: LIB3145-046-Q1-K1-C6
gacaaatccaagttccggatccttcttagttttgggcagcatggacgggagcttattacatctgaactggcattgcggatcttgtcaatcttaagcgaagagcagtttctacccaaaatggaccgagcttccttaaatggtacccttgaaaatgttgtcataaagatagtgccaatggagaatctgaacggtcgcaagcttgttgaagaaggaaatctttgtgaaagaagaaatgggagaggagttgatctcaataggaactggagtgtagattggggaaagaaggagaaggactatgatccatatgaagagaatcctggaattgctccttttagtgagcctganacccaaatcatgcggaaactngccatatcatttgatcctcacatatgggttaatgtacactctggaat

SEQ ID NO: 17156 - DNA, 426 bp, Gossypium hirsutum
  Clone ID: LIB3145-046-Q1-K1-C7
cccacgcgtccgcccacgcgtccgtgcatttgcttgggagcccaagggtcacaggtttgctgttatacatggggataatccaaggcctgatgttagcttttactcaatgcgaagcactcacaatttgggtcgagttgcaaagctcacaactctgaaaggcaagcaagcaaatgctcttttctggtcacctggtggtcgtttcatagtacttgctggattgaagggtttcaatggtcagttggaattcttcaatgttgatgagcttgaaactatggcgactgctgaacattttatggcaacagatgttgaatgggatcccactggaaggtatgttgcaacttcagtgacttcggttcatgaaatggaaaatggtttcaacatatggtcctttaatggcaagctactttaccggatacttgaagatca

SEQ ID NO: 17157 - DNA, 427 bp, Gossypium hirsutum
  Clone ID: LIB3145-046-Q1-K1-C8
cccacgcgtccggagaaattcaagaaagatgaagtatggggtcatcttggtaacagtagcaaatctcatactaaggataaagaagcagatgccgttgatgaatatggttctcaagatgaagatgatgctgaaatacctaagattcaaacgaagcctgtttacaataaggatgacttttttgatactctctcctgcaatgcacttgataatgactcgcaaaacggaaggccgagattctctgagcaaatgaagttagacacagagacttttggtgatttttcaagacatcgaggtggacgtgggcgtggaactggacgtggacgtggtggtcgttatcgtggtgggtattatggaagagggtatggatatgtggggaggggtcgtgggtaagacatgcatttgcatgccccatagttgtgcttgattt

SEQ ID NO: 17158 - DNA, 439 bp, Gossypium hirsutum
  Clone ID: LIB3145-046-Q1-K1-C9
cagcaacaactagaagcagaacgtcgtgcaaaattcgtatatgagctaatgattgacaatgcaccagctgccattgtgggtcttgttggtcgcaaggagtacgaacaatctgctaaggacctctatttcttcattcagtctagtgtttgtttgaagctgctggcatatgatcttcttgagctcttgctgttgtctgcatttccagagatggagtatgtattcaagcagttccatgtagaaaaacacaagtttggtgagtttaaagcaaactaagtcgcattttcatatagacaagtctggcatcattaaatccttccggatcatctctcatgcccatccggagacaaatacttcaattgtatcttacgcctccaaattctgtctttctttttgtcatggaaattgtaagtaaatcttgaaattatatgaagggatggaa

SEQ ID NO: 17159 - DNA, 379 bp, Gossypium hirsutum
  Clone ID: LIB3145-046-Q1-K1-D1
atggaatgtaaaattgatccaaagcttccatatactgatttatcaactatgattcgacgccagaggcaggcaattgatgaaaagattagagagctctcgaactgtcaaatagtttatccgggacttgattttcagaagaaagaagctggtattcctaaaaaagtcgtcaaagttgaggatatccatggcttgaaggaagctggttggactcctgatcaatggggtcatactcgatttagagccttaattgtttttgcagacaacgcgacatatcataaacatttaactggtttcatgcgctcacttttgaagtcaatgcatgaccatgttgatgctgggccattcaaggaaccagttgatgcccgtgatgtccctgatt

SEQ ID NO: 17160 - DNA, 426 bp, Gossypium hirsutum
  Clone ID: LIB3145-046-Q1-K1-D2
gaaaacttcatcaaacaaggaaaaaacttaacaagtaaaacaattgagagaagatgtcctggcaagcgtatgtagatgatcacttgatgtgtgatattgagggcaaccatctctctgccgccgctatcattggccaagacggcagcgtttgggcccagagctccaatttccctcagttcaagccagaagaaatcactggcatcatgaatgacttttctgaacctggatcgcttgctccgactggattgtaccttggtggcacaaaatacatggtgatccaaggtgaacccggagctgttattcgagggaaaaagggccccggaggtgttactgttaaaaagaccaacctgtccttgatcattgggatctatgacgagccaatgactccaggtcagtgcaacatgattgtggaaggctttgtgatta

SEQ ID NO: 17161 - DNA, 338 bp, Gossypium hirsutum
  Clone ID: LIB3145-046-Q1-K1-D3
cccacgcgtccgggagaaacggtcgtacggaaaaaaccgctcgtgaaagtcgtgcgtgagttcgattgcagcactggtgtgttctagaagcccttaggtttctggcattttcaaacagttgggccttttgggccatttgtgaattgggctacaggactgtgtagtttgggtgtctgtttaattgggtcaaattatatgtagttgggttaaggaactttgggtacttgtttaggctagtatttttgtttgggctaaataaattgtaaatggactttaaatccataaacactttaatttaatatttaattatatttttttaaaaaaaaataatgattaaa

SEQ ID NO: 17162 - DNA, 357 bp, Gossypium hirsutum
  Clone ID: LIB3145-046-Q1-K1-D4
caatactctaaaataatccactaaagatattaggagctgcttaaatccattcaactccaaaaccatatttgatcgcatgattaacatagaaaagtttataacgaaagaataagtgaaaaatccagggcttttcttatttgttttatcaacaacaaaattagaacccccaaaaagaaattaagcatgaacaactccctccaaacatggaaattattaacagaggcaaagatatggttctgtcataactcaggcagtagtgttgttattttggagcttcaaatccttggtaaacctattaatgaagtcctccgcagccttatctacgttgccattaccttcatcaacatctcttaaagg

SEQ ID NO: 17163 - DNA, 435 bp, Gossypium hirsutum
  Clone ID: LIB3145-046-Q1-K1-D5
ggactttctaatacaacagattgtctaactcaatatcaatttgcaaaaccatcgttatggcatttcgccagagaagcttcaaaatactccaaatctgtccagattcttcaagatcttaacaacaagcacagataaaaataacaaggtatatgtctccactgcgcaagcacatggctatcctgtcactgccttccagtggcatccagagaaaaatgcttttgaatggggcttgcctatgattccacactcagatgacgccattgaagtgacacaacatgttgcaaactttttaatcagggaggctaggagatcgctgaataggccagctgctcaaaaagtgcttgacaaccttatttataattacagccccacgttttgtgggaaagctgggaggggtttcgatgaggtctacatctttacacaacgtcaagctcg

SEQ ID NO: 17164 - DNA, 426 bp, Gossypium hirsutum
  Clone ID: LIB3145-046-Q1-K1-D6
taaacccttgcttttctttgtttcctcaatttattttcaatctacggcggtcacaatttgtacaggtttttaacaacagtcctgatgaaactgcatattttcgcgtgttgttaaacaaggaaaatattactaatgcagcagttatggctcaaccatcattaatatcatattcgttcaactcaccaccccagccagcattattagatgtggcttcgatttctgctgatcatattctcttgctggattcatatttcagtattgttgttttccatggtatgacaatagcacagtggcgcaacatgggttaccagaatcaacccgaacatcaggcatttgcacttcttttggaagcaccccaggttgatgcccaaattattattcgggaccgctttcctgtccccagattggttgtatgtgatcagcatg

SEQ ID NO: 17165 - DNA, 323 bp, Gossypium hirsutum
  Clone ID: LIB3145-046-Q1-K1-D7
cccacgcgtccgaacgtcgtcatcgtcgaatgtggatgatatgtcatcgacaccggaagagctgagtgagatagtggagctgccgagtttagggacgagctatgagtcggctgagtcagggaacgagttcgtgtacgtggaccgctttgatgggtggctttttaatccttgtggtatcccttgggattatgaagaaaattgtgggtacttcggggatgaaacttcaatgcaaatacaagatagtctcattacaaatgggtttagtcctttactatgggatcattaatgcataattaataataaatcaaattttgtttggctta

SEQ ID NO: 17166 - DNA, 384 bp, Gossypium hirsutum
  Clone ID: LIB3145-046-Q1-K1-D8
cccacgcgtccggtggactggcagatatcttaatggaagtgcttagtgcattggagcccaagactcccgagtctttgaagcaagatgtgattgttgacctcgttgagcaatgccgttcttacaaaaaacgtgttgttcttctcgtgaatcatacaacaaatgagcaacttttatgtcagggattagcgctaaatgatcaattgcagcatgttctttgccagcatgatgacattctgaaaggaaacaccagtagtgctaccacagcagtagcagaaactcgtgttgtgccgattgttaatgttaaccatgacgatgatgattctgaagatgactttgctcagctggctcacagatcgtcaagggataatgctcaaagacaggtcc

SEQ ID NO: 17167 - DNA, 390 bp, Gossypium hirsutum
  unsure (1)..(390): unsure at all n locations; Clone ID: LIB3145-046-Q1-K1-E1
cccacgcgtccgctcagatcttgaaaaatgagggagccaagtctttattcaagggtgctggagctaatatccttcgtgctattgctggtgctggtgtgcttgccggatatgacaagttgcagctcattgtgttcggaaagaagtacggatctggtggtgcttaatatctctttttcattttttacttgtttatgtttagatggtgatgaaaagctcgactacccagaaatttatttcggccaaaaacttcattaaataattctagtttagtcagagagatgagagagggtgttttaaaccctaactatttatattctcatatggaaattttgattaagaaatactggtggctaatgcccccagcccctgtcggatttttattnnnnaaaa

SEQ ID NO: 17168 - DNA, 382 bp, Gossypium hirsutum
  Clone ID: LIB3145-046-Q1-K1-E10
cgcgtccgcccacgcgtccgggattgcaggtcttcaaggatggccattggatcgacgccaaatatatccccggcgcccttattattcacattggcgaccaaattgagatactaagcagcgggaagtacaaggcagtgctgcatcgaacaacagtagacaaggagaaaacgaggatgtcatggcccgtattcttggagcctccaggggaatttgtcgttggcccacttcctcaactcgttgatccccaacttcctcctaaatataagcctaagaaattcaaggactatagttattgtaaatttcacaaactaccccagtactgaacccaaattgcatgctctattatttttcttttttctttttttttttggtactatgtagt

SEQ ID NO: 17169 - DNA, 426 bp, Gossypium hirsutum
  unsure (1)..(426): unsure at all n locations; Clone ID: LIB3145-046-Q1-K1-E11
caggagagtctgcagagcaaccattctccgttacctagctctcatcaattcgcacatgcacatgattcccctgggaagcaggcagtgcagcactattcatctgatatgagcagtagttcaatcatggagccttcaggaaacaaaaatgagctttatgcattggtgccacatgaagcacctggcaagtttaccaatgttctggatgctcttaaacaagccaggatgtctttacaacagaaaatccatacattgccactaatagagggtgcatctggaggaaaagctattgaaccttctgttcatggaagacaaattggggagagagtagagattcctgttggatgctctggactcttcagggttcctaccgactnttcagcagaggcctctaaagtgaactttcgggttcaggtttgcaggtaagtt

SEQ ID NO: 17170 - DNA, 389 bp, Gossypium hirsutum
  unsure (1)..(389): unsure at all n locations; Clone ID: LIB3145-046-Q1-K1-E12
gaaaaattattttcccctttcaccataaattgaacgttgaactcgtcaaaaatcttcaaagcttcaacttttccaaacatcagcgagccctttcactccaaatttcatcgggcgaataatggcaacgtttgagctttaccggaggtcagcgatcgggatgtgtttgacggagactttagacgagatggtttcaagcagtactttaagccctgagctcgctattcaggttctcgtccagttcgataagtctatgactgaagccctggaaagtcaagtgaagagcaaggtttccattaagggacatctgcacacctatagattctgcgacaatgtttggaccttcatcttacaagatgncttgtttaagaacgaggatacttaggaaaacg

SEQ ID NO: 17171 - DNA, 403 bp, Gossypium hirsutum
  Clone ID: LIB3145-046-Q1-K1-E2
cttcactaaacatagaagaggatgaggaggacttcccgcaagactctccagaggagcgccgagttgatttagttgttcccttaaaaaaatcagtgaagcaaataattcgtgagaccactgttgtaactacaagacggattcttgaaagacttgctgttatctatgtttcacaacgcatggcgtggaaactccttaaagatgtcccaaaatcagctgtcagaaaatcccaaaggggaatgcctgcaacagtgtatttcttcagagttagcagaacaactttcagaggtcaccttcttggagtcacggctgcatggattgtccaaaccggtattgaaatctaccgaagcttttctcgcataacgaactctgatgagagtaatgaggccaatgtaacagttcgagc

SEQ ID NO: 17172 - DNA, 379 bp, Gossypium hirsutum
  Clone ID: LIB3145-046-Q1-K1-E3
gtagaaattggcaattgctgtgtgtgagagagagagtgagagtaatagtagtatcaataatttggcttaggttgcatctctgtgtctgatgcaacagagaggaaggactaacaaccgtagatcaaggtctttctccagatctcggcttgctgtcgaaggattttagttccccttttcactccccattaaaaaataaaaaaaaatatcttaaaaaaaatcaattcctctcagagctcactagagatcttctctgttaaccatggcggctaacggatttgtaggagatgaacgcaaagttcaaaagaattactggattgaacactcggttgatcttacggtggaagctatgatgctcgactccaaagccgctgatattgac

SEQ ID NO: 17173 - DNA, 388 bp, Gossypium hirsutum
  unsure (1)..(388): unsure at all n locations; Clone ID: LIB3145-046-Q1-K1-E4
gtgattgtgaacctgaaagaggaccaaatgttttgagagaaaaaaaatcacatggcaagtgagatgtctcttaggatggagagattgttcatgggagaccagcagatgcttcaagaagacttctctagtgatgagggtgaatctgttaactctcggagttgtttaatttttgagtattttgaacaagacactccttatagccgggaacccttagccaacaagattgcagatctggccttccaattccctgaactgaggacactaacaagctgtgatttgttgtcttccagctggatttctgtggcatggtatccaatttacagaatacctactgggcctacattaaaagatctagatgctngctttctgacttatcattatcttcata

SEQ ID NO: 17174 - DNA, 105 bp, Gossypium hirsutum
  Clone ID: LIB3145-046-Q1-K1-E5
tcttccaatggttcagatgtgaggagtagttcgaaaagccatcgagaaacatagacctgcggggattatctagttgttcatcacacctggaagctatcgggtctg

SEQ ID NO: 17175 - DNA, 161 bp, Gossypium hirsutum
  Clone ID: LIB3145-046-Q1-K1-E6
ggcgaccggattccggtcgccccgcgtcgccacgcgacggaatctcagaaggcccaaaacaaagcagtttctcccacgatttcgatatctggtgagagatcgtgtcaatgagcgacggggaaagacgctgtgcgacgcccggaaatgcggttgcgggagta

SEQ ID NO: 17176 - DNA, 407 bp, Gossypium hirsutum
  Clone ID: LIB3145-046-Q1-K1-E7
aaaaaaaaaaaagagagtaaatttatacagtcaccgttaagtcttttgggtccgctctccaccgtctgttacggacaccatctgcgccgtgaaattcttcatagatcttctcctaccttttgggatctaacaaagtcttgaaaggtaaacgcagataaacccccattttcattttcaatttcgtttttggatcaagagtctatattagaagaaaaaaaagggacccgattttagtttttttgtttagtttcgcattttcaaggataaaaaagtttataatttctttatcaaaaagaacaagccagtttcagtttttattgcagacgtttcgttttggagcataaagatttgatcgttctttctttctttatataagatacataaaaaaattagattagaaaggaaag

SEQ ID NO: 17177 - DNA, 388 bp, Gossypium hirsutum
  Clone ID: LIB3145-046-Q1-K1-E8
aaaaaaaaaaaaaaaaataaaaatataaattaaaaaaaaaaaaaaaaaaaaaaaaaaaaaaaaaaaaaaaaaaaaaaaaaaaaaaaaaaaaaaaaaataaaaaataaaaaaaaataaaaaaattaaaaaaataaaataaaaatataaaaaatttaaaaaaataaaaaaataaggggggttgtggttttaaaaaatcaaacttttttttccgttggtatgaaaattttttaattttttttttggttttttaatttaaatttttttgccctactttataaaatttgataattggaaaaatccttggtttctacctatttttgctctttaaggtatcccttctttcgcgtttgtgttatatagaaaaaagccctccctttttatttttttt

SEQ ID NO: 17178 - DNA, 391 bp, Gossypium hirsutum
  unsure (1)..(391): unsure at all n locations; Clone ID: LIB3145-046-Q1-K1-E9
gtgaagcccactcctgttacccctgaagggaaaccagtggaagcagctccatctcccgtggaactcgaaattcagaaactctctgaggagaggaaggagttgctaaaagggtcttacagggatagacacttcaatgctggatcaatactgctagggtttggggttcttgaggctgttggtggaggtgtcaacacatggtttaggacaggaaagcttttcccaggtccccaattatttgctggagcagccattacagtgttgtgggctgcagccgcgggcctagtacctgctatgcagaaagggagtgagactgccaggagccttcacattgccttgaatgcagntaatgttatactttttatttggcaaatccccacaggtatagatatag

SEQ ID NO: 17179 - DNA, 363 bp, Gossypium hirsutum
  Clone ID: LIB3145-046-Q1-K1-F1
cgaggacaagactgaatggggcaaggagattgggtggatttatggttctgttacagaagatattttgactggttttaagatgcatgctcgtgggtggatatcaatctattgcatgcctcctcgtacagcatttaagggatctgctcctatcaatctttctgatcgtttgaatcaagtgcttcgatgggctttgggttctattgagattttgctgagtaggcattgccccatatggtatggctacaaaggaagattgaggcttctggagagactggcatacattaacaccattgtttacccacttacctctattcctttgcttgcttattgtatgctttctgccttttgccttctgacaggaaa

SEQ ID NO: 17180 - DNA, 414 bp, Gossypium hirsutum
  Clone ID: LIB3145-046-Q1-K1-F10
agggtatgtaataccaacaccagtcatccagcattttatccaagactatgagaagaatgaagcctatactggattccctattttggggattgagtggcaaaaaatggaaaacccagatttgcgtaaagcaatgggcatgaaacctgaacagaaaggtgttcgaatcagaagagttgatcccacagctccagaatctggggttttgaagtcatcagatattgtgctcagctttgatggggttgatattgccaatgatggaacggtatgggaaggattatgaatatgaagctccagtgaagctattggacaaactcttgcattcaatgctgcagtcacccgatgaacagcttgttgtggtgtctcaagttcttgtgtctgatatcaatattggatatgaggacattgttaacactc

SEQ ID NO: 17181 - DNA, 357 bp, Gossypium hirsutum
  Clone ID: LIB3145-046-Q1-K1-F11
ggagatcactaatgttatgttccttggtgatcgcccaactgagaccatcatcaccaactgcgttaattgctgtaaggataatgttaaaacattcaacactgcaactgatggtgtggatggggctggttacatggccaagggcactgagttcgataactcagcaggacccgaatgtcatcaagcagtggcttttatggcatcctgtgataaggtcgtcatgtttaattgtcatttcactgggtaccaagacaccctttacgctcatagagacaaacaattttatagggattgtctcattagcgggacggtggacttcattttcaggaatgcggcgagtgtgtttcaaaactgtcagat

SEQ ID NO: 17182 - DNA, 286 bp, Gossypium hirsutum
  Clone ID: LIB3145-046-Q1-K1-F12
ccacctcgactgccattggatcatggctcgacataatcgatcatgattttattgcctggccacagactttggctcacatttttgatgtggacagctggacttatgggccttaactatacctatggtgaatgctatggagcattttgaaagactgactgttgccaagactagagatggtccacagtagacataaccaacacagagtgatgtctccttaagtagacacatactgcagtgacttgccttacaacaaaggctgtagttgccagttgtatttttttaatgt

SEQ ID NO: 17183 - DNA, 305 bp, Gossypium hirsutum
  Clone ID: LIB3145-046-Q1-K1-F2
gtggcacctactgagaaacatcctggaagtttattggaaggtttttcacaaagccaaatacatacactggcggtcaaagacacttgcatggacgctggtagtcttccaggagagtttacttttgagcactcttacagacaacgggtcgcatattgtacgcgaaccacctatgacaataactctgatacaaatgctattgcaatatacaacagcttgaagggcagaatcaattgtatgattgccactaatgactgcagcatgctctagtatgacacggatagatttccgcttatagaccatctcct

SEQ ID NO: 17184 - DNA, 391 bp, Gossypium hirsutum
  Clone ID: LIB3145-046-Q1-K1-F3
ataaagcgtttgtctcagatctcagaagatggcccgtaccaagcaaaccgcccgtaagtctactggtgggaaggctccaaggaagcaacttgctaccaaggctgcccgtaaatctgccccaaccaccggtggtgtgaagaagcctcatcgataccgtcctggaactgttgctcttcgtgaaattcgtaaataccagaagagtactgagcttcttatcaggaaattgcctttccagaggcttgttcgtgaaattgcccaggacttcaagactgatttgcgtttccagagccatgctgttctagctctccaggaagctgcagaggcataccttgtgggtctttttgaagacaccaacctttgcgcgatccatgccaagcgtgtcacaattatg

SEQ ID NO: 17185 - DNA, 383 bp, Gossypium hirsutum
  Clone ID: LIB3145-046-Q1-K1-F4
gaaaaacaacacatacacacacagcggaattagattaattgagaaaaacgcaatggctcaaaagatgttgatgatggcggttcttgtgatattggggacgacgatggcgaccgttacggttgcaaatccgacttgtttgcagagcttgatgtcttgtgctccttacttcaacaacactgatgtccaactgccagacgattgctgtaaacctctccaacaagccgtcgctactgaacttatttgcctttgcagcctcttcaacctgccttctttgcttagttcttttgacatcccctacgttggagctcttaggatcgccaatcagtgcggtgtcgttgatataatcagcgactgcatcagcgctgctccttccccataagcta

SEQ ID NO: 17186 - DNA, 316 bp, Gossypium hirsutum
  Clone ID: LIB3145-046-Q1-K1-F5
ctactgctttcggtggagagttccaatctgagcatactgctgatgtactgaggcatatgatggagatggcaataggtatggaactggatcagatgatggaacttgcaagttatctgatatcagaaatggccaccagttgcaagtatactatcagcaacacaatgataaggacgttccacttgtgacctcaattgcattctccatatccggaagactactttttgctggatactcaaatggagactgctatgtatagtacacattattggccacggttgtgttgaacttaggatccgaccagaaatcacatgagaac

SEQ ID NO: 17187 - DNA, 360 bp, Gossypium hirsutum
  Clone ID: LIB3145-046-Q1-K1-F6
gggaagttttgatacgagcagtgtctcatagccggaagaaacatatggttcagtaagaactgatttgtctgatacacaacagtcttgtcaacatagtgtttcgatgaatcgtagtgctgctattgttgttccatcaccaatgatgcatcagagaccttcacaattggatgtggggtaagcacaaagggaaacaaagagaaagttacctttttcaccacaagattctcttggtgaatgatctcaaggccctatcgtggtggctgtgatcttgaacccagtacgatctgaacaggtagagaaaaagaacccatcttttgaaggttgaaggtaattaagttagcaagttacttgatggaaaca

SEQ ID NO: 17188 - DNA, 438 bp, Gossypium hirsutum
  unsure (1)..(438): unsure at all n locations; Clone ID: LIB3145-046-Q1-K1-F7
atttcgggcactgctcttacaatgattcccccacattctctatggatgacttcgaagcccttggaagttctactgtgatatcatcaagtcccccagttactggggagaggaaactgttttcaaatgtcacgaggcttggttttgctgctgcacatgattctccttcgttgaaaattgaggaaggaaatggtatgcataacaatgagggggcaaccgattccactggtgcagctggctctagaagttcaggcacacaatcatttgccaatgtgatatctagagcaaaggctcctgaaaatttacagacgcctaagatgaatgagataggaaagaaaggaaagaaaggagggcgggtccttttgtccacagctggtggtcgacgctattgacatttgngcctgtactctactcccaactctgtttagccatcataatcaa

SEQ ID NO: 17189 - DNA, 437 bp, Gossypium hirsutum
  unsure (1)..(437): unsure at all n locations; Clone ID: LIB3145-046-Q1-K1-F8
cccacgcgtccgcggacgcgtgggcttttctctccccaaacacctcattttcctgagaaaaaaaaacaaaaaagaagcgtaagtgaagaaggagaagaagaaaaagaaaatggcggaccagcttaccgatgaccagatctcttagttcaaggaggcctttagcctctttgacaaggatggcgatggttgcattactaccaaggaactgggaactgtgatgcggtcactcggacagaaccctactgaggcagaactccaagatatgattaatgaagttgacgccgatggaaatgggaccatcgatttccctgaatttctcaacctgatggcaaggaaaatgaaagatactgattctgaggaggaacttaaagaagctttcanggtgttcgataaggatcagaacggtttcatatctgctgccgagcttcgtcacgtta

SEQ ID NO: 17190 - DNA, 402 bp, Gossypium hirsutum
  Clone ID: LIB3145-046-Q1-K1-F9
cccacgcgtccgcccacgcgtccgcccacgcgtccgcactatcgggggaaactcactgatggaactgtattcgattcaagttttgaaaggggtgacccaattgaatttgagcttggtagtggtcaagtaatcaaaggatgggaccaaggactactaggaatgtgtgtcggtgagaagcggaagttgaaaatacccgcaaagcttggttatggtgaccatggttcaccacccaaaatcccaggtggagcaacactagtatttgacacggagcttgttgcagtcaatgggaagccatccagcggtggggataatacaagtgaagatgagctataataactgatgataggcacttgtctgagcagctttatccttttactacgtttgttttccttttaaaatgct

SEQ ID NO: 17191 - DNA, 272 bp, Gossypium hirsutum
  Clone ID: LIB3145-046-Q1-K1-G1
aaagcagatgatcagatatgatctactaagggagctgtataagatcaagtctgtagaggcggcagtcaacctatagcacctgaaaacgaagaattccttattcatgcaagccacttcgatactgacaatttcccgtctgtgtgttttggtgaacaaaatcgatgttgatggtggaatcagtaaattggtgtctttgaaaaacgtcctagcatggcgtgccttgaaaggaaatatcccctatttcgagacatctgccaaggaagtgagttacg

SEQ ID NO: 17192 - DNA, 294 bp, Gossypium hirsutum
  Clone ID: LIB3145-046-Q1-K1-G11
agttcatccattccctcgcatatttctagcacccacaaacaatgctagcgatcgggggggatattctacctatgtgcaccaaataacaagagtaaaacggcgtattgtccatttgactatttgggcattaatcagcatactactaactatctatatgacccacatcatcctaaaccaaaagtttcaggctatcagcaagattggtatgctggatttgcttatgcaaaatgaggattgtctattggtcctacaactcattctcctttggatttacaatgtaccttggggattata

SEQ ID NO: 17193 - DNA, 87 bp, Gossypium hirsutum
  Clone ID: LIB3145-046-Q1-K1-G2
aaagcagatgatcagatagatctactaatgtagcttcataagatcaagtctggagaggtggcaggtcatttaagcactttaaaacga

SEQ ID NO: 17194 - DNA, 378 bp, Gossypium hirsutum
  Clone ID: LIB3145-046-Q1-K1-G3
aaaagaaaaaaagagagatggcgtctgtaataaaatctgcaatcttaattctgtcggtgtttttatctgtacgcttcagttcgggtgttaggttgctccaggaacagcccaatgatgaccccaaaaacatggacgctattcctcccattgatgcactcaaccctaccgagttgaatggacccggtgttggcattcacgaagatcatgttgtcccaaaaggtgctgaaattggtactcttggttttggttttgaaggtggtcctgataaatgttgttcttctggatgttccggtaattgtaatcctggtggtttcgttctaccatttcctcaaattccagaaatcccaagaattccagaaatcccacaaatcccacaga

SEQ ID NO: 17195 - DNA, 345 bp, Gossypium hirsutum
  Clone ID: LIB3145-046-Q1-K1-G4
aagaaacttaccaggattcccctagtaacggcgagcgaaccgggaaaagcccagcttgagaatcggtcgccatcggcgtccgaattgtagtctggagaagcgtcctcagcgacggaccgggcccaagtcccctggaaaggggcgccggagagggtgagagccccgtcgtgcccggaccctgtcgcaccaagaggcgctgtctacgagtcggggtactgggggtggtcgtaggggttactccaatggccgtggaggtcgaggcagtggaaggggtggcggagcctaccaaaatggtcgtagccaatattatgatcagccgggcaacaattactattcgaggagcta

SEQ ID NO: 17196 - DNA, 349 bp, Gossypium hirsutum
  Clone ID: LIB3145-046-Q1-K1-G5
ctttgatcatcttcattctagcctccacaatatttgtcagtgcaatatcactaggtggtgttggcatatcaaacatgatcgggaaaatcgagcggcacgagtacatgggattcgagaacctgtgcaagtacgaaagctgatatctcaggttattttatctctcaattgatccacctccttaagtctcctgtaagttaggctagattgcgttttggggaagaaagaagatggtcaataattttccattctttacacaatccccatttttcactttccgttccgttttatatttatgagatacatttattgacaatattcagaaattgtctagatgaatggaattatagct

SEQ ID NO: 17197 - DNA, 452 bp, Gossypium hirsutum
  Clone ID: LIB3145-046-Q1-K1-G6
tcgcccacgcgttcggatggttttttaataaaaaaaaaagatcttctttcatgccaaaaagaagaaggaataaataaaaaaataaaaaaaataatataaagaaaaaaataggggggttgttttataggataaaaagattaagagagtgtgggtgggaggtatttgttttttttttttggtgcttagattttgttaactggccgtttttttttaatgtttttattgggaaaatccttttgtttcttattttaatggtttttttggaaatcttttttttttcagtttgttttgtttttttgaggcttttttcttttgctttttttattatttggccatatttgattggggattggtattttctttttttggggttttttagttgggggtgtgtgttggttttttgaagtgtgtttgttttctttgggtgttgtgtttttctttttttttttttt

SEQ ID NO: 17198 - DNA, 405 bp, Gossypium hirsutum
  Clone ID: LIB3145-046-Q1-K1-G7
cggacgcgtgggcggacgcgtgggctgcaaaggtttggttaaatgggaaattttgatccaaaagagggattggttggcagaagaggtgtacaaagaaatttttggttggaaaagcttggatgataccatggtggatgatcttgtagacaaggacatgagcacaaagtatggaagatggcttgattttgacatggaagcatttgaagagggtgtagaaattgagaagattgtattaacttctttagttgatgaattagtttctgatttattattattgctttaaggtagcctctcttcttcttttttagtattttttgaggttccattgttaaaatcttctttgctcagaaagaagatatatatatacttgctgtataattcaaaattgtgaactttgcattcatg

SEQ ID NO: 17199 - DNA, 386 bp, Gossypium hirsutum
  Clone ID: LIB3145-046-Q1-K1-G8
cccacgcgtccgagaacccttaaacctaccggaaacacaatgatccgaatcgccaaaaaccccaaacctctaacaactctgactcaccaattcctccaacgctgcaccgtcagtggaaccgccaaaggcaaatccaaactcaaagccggccaacctttgaaacgctccaaaatctccactaaaaaaggaaaaggcggcgcttctctcgacgattccctccccaaaggcggcagaatccccgacgagaagcaaaaactctacgaccaatgcctcaatgcacccacaccggtccgtcacctctcaccgaaagagcgagcccgcgaagccgaacgagaaaaattgggattaataagcaaggagcggcaacgggaaatggagattttgaa

SEQ ID NO: 17200 - DNA, 345 bp, Gossypium hirsutum
  Clone ID: LIB3145-046-Q1-K1-G9
cccacgcgtccgggaagtgagaggcctataacatgatcttaaaacgccagggtcttcagcctttggtcttcactcgcctggagtaaagagaagaaaagatggtaaccataatggtacggccgctctcacgtgcactcacaccctagatcatgttcatcatctcgagaggcagccatcactcggtcaagggagagccgcacatcctgatcgagtcgctgccgccactggtgctgcagctgtagcagccatttcagcttgttcaaacgctgagccgtgcaacttcgtcagataccgagagtgtactcaagagccatgccgccagcatccgcaggaatgagttcgatg

SEQ ID NO: 17201 - DNA, 392 bp, Gossypium hirsutum
  Clone ID: LIB3145-046-Q1-K1-H1
cccacccgtccgttctccatcaaaaagtcacagtcttcgcttttcgataaagccgtgaagccaagagatggcgtcgttttggaggatgcctcgtcaattgaagtgatggatatgcctgctgttaacggcgattccatcaggttctttgccgagaaaagaaaactagcggatttgagttcgagggatatcgcggggattctgtccggaataaaggtagcagcgaggaccacagtgccagtgaagggaaaggcgttggtcaatttccggtggggaatgaggatcccgtcagagatgaagagcggcgtatgcggaaatcgtgatccgaagactggagtttctttgacgaagattccatttctggtgatggataagattggtatcgaacatgtgga

SEQ ID NO: 17202 - DNA, 267 bp, Gossypium hirsutum
  Clone ID: LIB3145-046-Q1-K1-H11
aaactatttgcatggaactgcaaatattttcgtagatatcaactgggacaatatgggaggataaaatgcttcagtgtgcaattaaatattggatagaacatggatttattgtcatatatgttgctctacaacataactagtaggatgttcgatctgctagagttggtaagctgtggagatatttggataaatctgatttcataagcaaattgatactgacaagataactattaaatgcttaaatatatgcttacattcaaagaaagc

SEQ ID NO: 17203 - DNA, 359 bp, Gossypium hirsutum
  Clone ID: LIB3145-046-Q1-K1-H12
cttgacttatgtgatacttgtgagtggcttgaatttcccggtgcacttggaaacggaggatggtatgccacacatgtaacattagctgatggtaagttcatggtgtttggcggtcgggatttcccgacatacgaatttgttcctccagaaggacaataaaacactattaatgaagtgatcaatttcccattcttgaaagaaacacacgatcccattgagaacaatctataccctttcgttttcctttcaactgatggcaacctcttcgtttttgccaataattgttcggttcttttgaacacccaaacccacacgattatccacgagtacccagtgcttcctggtggtgcttataatta

SEQ ID NO: 17204 - DNA, 115 bp, Gossypium hirsutum
  Clone ID: LIB3145-046-Q1-K1-H2
atcagaagggtatgcataaagtaaaacaaattggatcacaagatcaactccttaatgctgcaaaagtatctttaggaattttgggcgtcatttccaagttgactttgaagagagg

SEQ ID NO: 17205 - DNA, 423 bp, Gossypium hirsutum
  Clone ID: LIB3145-046-Q1-K1-H3
cccacgcgtccgataaattacctagcgcattaacaccataatttgagggtagtgtttaacttgagagagctttacagcaatggaaacaaaagtgcagagcacagatatgttatattctttaccagttgagaatgtccaagctcttgcatccaagaacctcaacagaatcccatccagatacatcagaccagaggtcgaattcgatgtggtttccatagatgaatcccagcagattcctgtaattgacatgagcaaactagaccatgatgctgaacagaaaaaactccaccaggcttgcaaagactggggtttcttccagttaatcaaccatgggatagcagatgaagtgattgagaaaatgaagaccgatacacaggagttcttcaactttgcctttgaggagaaaatggcttattcaagata

SEQ ID NO: 17206 - DNA, 423 bp, Gossypium hirsutum
  Clone ID: LIB3145-046-Q1-K1-H4
cccacgcgtccgcccacgcgtccgcccacgcgtccggttcttcaaaactgatacctctacttcccttgctttcctcttatgtatttcttcttcatttcctcttcaatctagttcctttctccattcgatctggttttgtttctcagcatattctgggcctttatttctacgtataactcttccttcctttttagcgattctgttgccactgtatcgcgagagcgtttctcgattttggtgtatacttgaatatgacactcctagatctatttagtttctacttaatatcgtgaatatatgttccaatacatgatcgatcttgactctctgacaaacatttctttattattgtgagggaatcaccttctatgatgatcttttgcccatcttgttctactcctatttggacagcttttcgacata

SEQ ID NO: 17207 - DNA, 340 bp, Gossypium hirsutum
  Clone ID: LIB3145-046-Q1-K1-H5
aaaatatctgctcctcttagtttccctttttgtcccttgtttatttgatactcccccctcatggctgccgctgatgtcgagttccggtgcttcgtcggagggctcgcatgggccaccgacgaccgggcccttgaagaagccttcagtgcgtttggtgaaatcgtcgaatcgaagatcattaatgatcgtgagactggaagatcccgaggctttggattcgttactttccgtgacgagaaagctatgagggacgcgatcgaaggaatgaacggtcaaaatcttgatggaaggaacataactgtcaacgaagcccaatcgcgcaaaaatggaggcggtggcg

SEQ ID NO: 17208 - DNA, 343 bp, Gossypium hirsutum
  Clone ID: LIB3145-046-Q1-K1-H6
cccacgcgtccgctgcagttccgcaagtttactacaatgcacagcaaggggtcaagaatgtcgtgactgaaactggtgctggccaatggggtagttcattggcctttgcctgcagcttgttcggtcttggctgtgaagtgtggcaagttcgtgcttcttatgatcagaaaccatatcggaaattgatgatgcaaacatggggtgcaaaggttcatccttctccatctgacattacccacgcaggtcgtaaaatacttcaaatggatccttctagccccggaagtttagggatagctatttcagaagctgtagagattgccgctgcaaatgatgataccaagta

SEQ ID NO: 17209 - DNA, 425 bp, Gossypium hirsutum
  Clone ID: LIB3145-046-Q1-K1-H7
ggtgaaccttacctcgttcagaccaatgtgtacgtcaatggtgtaggcaacagagagcaaaggatgaacctttggtttgaccctaccaaagactttcactcttattccatcctctggaaccagcgccaagttgtatttttagtggatgagaccccaataagagtgcacaccaacatggaacacaaagggattccttttcccaaagaccaagccatgggcgtatatagttcaatatggaatgccgatgactgggccacacagggtggcctagtgaagaccgattggagccatgcaccattcattgcctcctacaaagggtttgaaatcgacgcgtgcgagtgcccggtttcggtagccgccaatgaaattgccgataaatgtaggagcagcggcgagaagaggttctggtgggatgaaccgacaat

SEQ ID NO: 17210 - DNA, 406 bp, Gossypium hirsutum
  Clone ID: LIB3145-046-Q1-K1-H8
cagcagacccaattcttagggtttcaacacagcaaattttggggttttcccatccccctatttgaccattcgactgccccattccgccattgaaattgatggacggtggctccccatggagttgtttcattctcctattctaagcctcacctcgaaaggtaagatttttagcccgaaaacccatctcaagcttcaatttcgacgaagaagagatggtcctcgatggctcgtttgaaggtatgcttccttttttattatattatgcataaaacatatgaaacacgaaaggaagatgaaacagatgcgaaaaaaaaaagaaacacaaggcgttcaaaaaaaaatcaccttctagttctattctgatttctctctattgcggattgcgtaaatgtcttgttttttatgt

SEQ ID NO: 17211 - DNA, 347 bp, Gossypium hirsutum
  unsure (1)..(347): unsure at all n locations; Clone ID: LIB3145-047-Q1-K1-A1
cccacgcgtccggccaaattatcaaagtgttgcaccagattattcaccagtctccaaatgtgtattttaattttccctagaatgttcaacgaccataagactctgtaaaaatctttgtaatcctcatcaatagaggacatgtatatagtgtcctgtaaatattttgtatttaggacccgatacccactcttaacagtgtattccccagaacctttatgttttcaaaccaacctatcctccagaccactttcagatatgggaatagaaaaaattcgatcagctgtacttctcaatnaaaaaaataaaaatttaaaaaattatataatttattttttttttttaattat

SEQ ID NO: 17212 - DNA, 416 bp, Gossypium hirsutum
  Clone ID: LIB3145-047-Q1-K1-A10
cagctctagcagctccagtagttcaagcagcgattcttcgtcttcgagtgattcagattctgggagttcatccggaagtgattccgatgcagacgatgcacggtcttgaaggcatgagctattcgattttggggcaaatccagttggaaaattgggtggtggggatgtagatgagaggtagattttgctaacatctgctaacaaactggaaaaaaaattagggatattagtaagtattaaatgctgaagatatgaacattttttttcctcttttttttggttgatgtacagggtggtggtggtgggttgtttaaatgttgtgtgaaattgtaatggttgctcacttgggaggaaagaaatgtatgaaaatggaaaacgggagggcagcttttggaagagagaatggggatttaaag

SEQ ID NO: 17213 - DNA, 424 bp, Gossypium hirsutum
  Clone ID: LIB3145-047-Q1-K1-A12
ctcggctctcgcatcgatgaagaacgtagcgaaatgcgatacttggtgtgaattgcagaggcccgtgaaccatcgagtctttgaacgcaagttgcgccaaagccaaaactgttagaaggttagtgttcacatcatcagctggaactattgatgttgcagaacaacaaaagccctgttatgatgaaacctgttggagcgaccttgaattcattcaggccaaaaaaatgactggttggatgtattttgtctccaagacaatggcagagcaagcagcctggaaattcgctaaagaaaataacattgattttgtcagcataataccacctttggtggtcggtccatttattatgcaaaaaatggcggccagcctcataacttcacttttttctatcaccggaacagttttttgtttattttacaggtt

SEQ ID NO: 17214 - DNA, 347 bp, Gossypium hirsutum
  Clone ID: LIB3145-047-Q1-K1-A2
cccacgcgtgcgctttgataagagactctcaatacattgttgaagaagtttctgatgcacaagttaaccagattgttagtggggctttagaccgtttacattatgaacgtgatccttgtgtacaattcgatggagaaaggaaattgcgggtttatttacacagagaaagagaagaagaagactttgcggatgatggtacttcatctactaagaaatggaagaggcctaaaaaggatactgctgaacaatctgatcaaggagctgttattgcggcttttcatgcagccggggatcagttgggatttgatgatgataaaaagatggagacagagtgtgaggatagacaa

SEQ ID NO: 17215 - DNA, 389 bp, Gossypium hirsutum
  Clone ID: LIB3145-047-Q1-K1-A3
acgcttttgagcactgctttgctgtctactcgccattctttttgcccgtttcgatgcatgttgtgcttgcagctctaagagaactaagaagatataagcaagaaaaggccaagtacctaacttggaaggctaaagcaaacacggcaacataaagcaaaggccccaactgcaaaagggattattctaagccatgggagatattcaagaaacaatttggcgacagggtccgaaacacaatttttgcaggcttgtaaccctaccaatttacctcatgccttataccatagaaacttatctaaaagtggttgaatttcggactattttttatgagtccaagatttggatatatgcgactgctgtctgatggaaatgcaacgaatgtgttcttt

SEQ ID NO: 17216 - DNA, 342 bp, Gossypium hirsutum
  Clone ID: LIB3145-047-Q1-K1-A4
ggaaaacagaggtaaatagttaagcaagttaagaaatggcaaaagttcaacagatcactcttgtttccttggcgatctgcctttcaaccctcctcggcttcgctgccgccgccaaccctgaagagaagttcatcgttgaaggccgagtttactgcgacacttgccgtgttgaatttgagaccaaaatcagcaaaccaattaagggcgcatcagtgaaattggaatgccggaacattaccaacgagaaaatcgtgtcgcacagccaagacgtagttaccgacgaagccggaggatacaagatcgaggtgaaaggtgatcacgaagatgagatctgtgaagtga

SEQ ID NO: 17217 - DNA, 343 bp, Gossypium hirsutum
  Clone ID: LIB3145-047-Q1-K1-A5
gaaacaacatgtatctctttccaggtattggccttggaactcttctgtctggctctaggatcatttcggatggcatgctacaggctgcagcagaacgtctggctgcctacataacagaagatgaagttctcaagggcatgatattccctccaatatcaaagataagagatataacaaaggaggtagcagcagctgtggtgaaggaagctgtagaagaggatctggcagaaggatatcgtgacattgacgctagagagctccaaaaaatatgtcagaacgaggaggaagttttagaatatgtggagaacagcatgtggagcccagaatatccaactctagttta

SEQ ID NO: 17218 - DNA, 329 bp, Gossypium hirsutum
  Clone ID: LIB3145-047-Q1-K1-A6
aaattctgccgtataagagaataatatttgtttgtagtggtgaaaggcaagtttcagtatatctaatgtaatttttccaatgttctctaggtatttgtctgagaagaaagaggaagcctcatctcagtaaagtacccttttttcctgcttttctttccattttgagattctgctattttcttgtgatccctgtaagaatctattctgagctttactttataaagaaactgatttaattctaccttcatctggccgaagcttaagcacatagtaagccgattactgttaagtggaatcatgatcggccgcctttcttattatgcatgagt

SEQ ID NO: 17219 - DNA, 409 bp, Gossypium hirsutum
  Clone ID: LIB3145-047-Q1-K1-A9
cccacgcgtccgggaaaaagcagggactgaattcaagaaactacgacaaagcttttgcttcaaggcaagaccattgccggatttttataaagaaagaacacctaaagatcagattcaaaaggttccattgacaaaacctgaatcacctggcataggaagaaaatctactccctgcaaaacaagcattgttgaaagcaaaagctctgttcctccccatcggaagtcttcgattaagaacagttgcttcatgcatgtctcagaaaagaaaaaccgaacttcagctcgttctcttgcttcacgaattgcaatgtctgctcatgagaacacatctccaaatatccagcataaagtttgactaaattgtagaatttggcatgtccattgtatgaatcccacaatactactcaat

SEQ ID NO: 17220 - DNA, 423 bp, Gossypium hirsutum
  Clone ID: LIB3145-047-Q1-K1-B1
ctctctttgatttctttgtcgtaattccaccatgtctgtcatttgagaggctgctctttctgcgtttttggagctgttgtctggcaagttggttgactctgtactcaactttgtagccggtcacaggcaagtccaccagcaactcgagcagtggcaatccatattacccgagatcaaagcagtgttgaaccgtacagaggagaagcagatcaagggcgaggacgatggtgtgaagaattggttggacgatctccaagacttagcttacgatgtggatgacatcttggacgagttcgcttaccaacagttacatctcaagctccaaaaacctcaatctcaagccagcactagtaaagtacagaagctcattcctacctgctgtactggtactaatttctccccaaccctttttaagttcaatac

SEQ ID NO: 17221 - DNA, 362 bp, Gossypium hirsutum
  Clone ID: LIB3145-047-Q1-K1-B11
gtagaaatgaactgaattctagtaatgctgataagaaacaatatgaacttgacattgaccgcatcatacgtggggatgacagcagaacaacacttatgattaaaaacatacccaacaagtacacttcaaagatgcttctggcagccattgatgaacattgtcgaggaacttatgattttatttatttgccaattgacttcaagaacaaatgcaatgtgggctatgcgttcatcaacatgattgatccgcaacagatcattcctttccataaggcatttgatggcaaaaaatgggagaagttcaacagtgaaaaggtggcgactcttgcttatgctaggatccaaagaaaggctgctcttatt

SEQ ID NO: 17222 - DNA, 367 bp, Gossypium hirsutum
  unsure (1)..(367): unsure at all n locations; Clone ID: LIB3145-047-Q1-K1-B12
gaggatcgattcgtttggtgtctgcccattcgagccagcagatttacactagggcaaccaacacctagatcctttgttatatttttgcttaaattagttctatgtagtatttgcctttcttgactttctataaatgatttttccttttgctaaagacctccatctaaattgtgtgagctacagtttcttgttgtactggtttaatggataagtttttgttcctcanaaaaaaaaacananttaaaaatataaaaaataaaaataaaaaaaaaaaaattaaaaaaaaaaaaaaaaaccccatttaaaaaaaaaaaaaaaaaaaaaagggggggccgttttaaaggatccaagtttacttccccgggct

SEQ ID NO: 17223 - DNA, 417 bp, Gossypium hirsutum
  unsure (1)..(417): unsure at all n locations; Clone ID: LIB3145-047-Q1-K1-B2
ctntgctacagaaatccaagtgtctgatcaggaaacgacaactaaaccaaaagcaacatctaaagcaacaagggaggagagtaccgcatcatcttatttgacaaatgaagaatcatctccaattcaacaactggaagcattttccggagctaattcaggtggaagtcagcctgacttagatctagggccagtgattggagacttggaacaagagtcaattgcggtggagcattaagtatggcaatggttttaaatggacactagtatataaagttctcgacctcatattgcataaataaggacgactgagactgaattatttgatgatcaaaggcatggaaactggaaacttctacattatgagtgatgatgatgtcgtcttttgtcttctccgatatccagcaacttccgtagggt

SEQ ID NO: 17224 - DNA, 169 bp, Gossypium hirsutum
  Clone ID: LIB3145-047-Q1-K1-B3
ggaacaaaaggctgaaatcattttgttgcaccgaccatatatagctgctgagggcgagataacaagctctgatatacgaactaacacatggtgctgtcgaattcccatacgtccttgactagaataaggaccacgacatccaagcaccccttattggatgacaagaaga

SEQ ID NO: 17225 - DNA, 387 bp, Gossypium hirsutum
  Clone ID: LIB3145-047-Q1-K1-B4
agcggaggagcttttgaggaagatccaagaactggaggcaggacatgagcatctccagcaagaaatgtctagattaaaacaatccggcgccggtcagtcaaagcccgaccacattcgtcaaagatcccactctacttcccctcaacgccgccgcttcccggggaattcggccgcggcggcggctacgacggctgctgctttgaagaaaagttcttgctcgtttcggcattcgtcgccgttgcaaagagagagcagaaggtgtgataccggaaatggcggcggcggaggtgatggagaaagccggaataccggtccggttgccgttaatttcactaacagtcagtatttaaatatattgcagtctatgggacaatctgttcatatatt

SEQ ID NO: 17226 - DNA, 223 bp, Gossypium hirsutum
  Clone ID: LIB3145-047-Q1-K1-B5
cccacgcgtccgatttgtagagcctttaatgaataaccaatatctgttcgcacgacatgagcatctccagcgggaagtgtctaaattaatacaaacccgctccgatcactcaaatctcctaccacattcgactaagataccaatcttcttatctctaacacctcctatttctgtagaattctgtcgcatctataaatacgacatctgcaagctttcaataaaa

SEQ ID NO: 17227 - DNA, 389 bp, Gossypium hirsutum
  Clone ID: LIB3145-047-Q1-K1-B7
gaaaatttcactgcgagattcatatcgggtttcaactcttttcctccaatttgcacttgaagtgatggataccggatcaaaggtgaagaaaggagccggaggaaggaaaggcggcggtccaaagaagaaaccggtttctcgttcagtgaaagccggattacagtttcccgtcggtcgaattggccggtacttgaagaaagggcgatactctcaacgtgtgggaacgggtgctccagtttaccttgctgctgttcttgaatacctagctgctgaggttcttgagttagctggcaatgctgcaagagacaacaagaagaataggatcattccaaggcatgttctattggcagtgaggaacgatgaagaacttgggaagcttttagctggtg

SEQ ID NO: 17228 - DNA, 359 bp, Gossypium hirsutum
  Clone ID: LIB3145-047-Q1-K1-B8
cccacgcgtccgcccacgcgtacggcttattaatgctgtggattactgccatagcaggggtgtttaccatcgagacctcaagcctgagaatttgctgctagatggtaatggagttcttaaagtttcggattttggtttgagtgctttacctcagcaagttcgagaggatggattacttcacacaacatgtggaacaccaaactatgttgctccagaggtgatcgacaataaaggctatgatggagctaaggcagatttgtggtcatgtggtgtgattctctttgtcttaatggctggttacttgccttttgaggactccaatttagtctctctgtataaaaagatatctaaggctgact

SEQ ID NO: 17229 - DNA, 410 bp, Gossypium hirsutum
  Clone ID: LIB3145-047-Q1-K1-B9
agaagccgtaaaacttcgtaagagctctactgagctggtatggctaataaaaggttcaggttaggtgtttgctaggctataacctgaatatgataaagaggtagagtgaatttcgccgtcgcaatcaatgcccctacctcaacatcttcgattatggcttatttcatttgtctagcacaagcttattgacaccccccccccacacacacaattgaaggcaatgaacctcctgcaagtgcaacttaacattgaccaagctttagtcattttatgttttctttttccccactgtaaagttaaagaatgtgttaaatataaatataaatatatatatatctaaacagacttgataaatctgccctatttcgtcaagcccccgtgagatcattgattgctgatgtatcatcatc

SEQ ID NO: 17230 - DNA, 352 bp, Gossypium hirsutum
  Clone ID: LIB3145-047-Q1-K1-C1
cccacgcgttcgcccacgcgttcgaaaaaaagagagatggcgtctgtgataaaatctgcaatcttaattctgtgggcgtttttatctgtacgcttcagttcgggtgttaggttgctccaggaacagcccaatgatgaccccaaaaacatggacgctattcctcccattgatgcactcaaccctaccgagttgaatggacccggtgttggcattcacgaagatcatgttgtcccaaaaggtgctgaaattggtactcttggttttggttttgaaggtggtcctgatgaatgttgttcttctggatgttccggtaattgccatcctggcggcttcgttctaccattttctcaaa

SEQ ID NO: 17231 - DNA, 321 bp, Gossypium hirsutum
  Clone ID: LIB3145-047-Q1-K1-C10
gtctttggaccacctccctccctccgagcagctctgttacgttcattgcaacatctgcgacactgtccttgcggttagtgttccttgcacaagtttattcaagactgtgacggttcgatgtggccactgcaccaatcttttgccagtgaacatgcgtgggttgcttatgccctcggctaatcagtttcatttgcctcacaattttttcactccttcccataatcttctggaagagatctcaaatccttctcccaacattttgctgaatcaaggcaacaccagtgacatcaccttacccactcgtggagtagttgatgagct

SEQ ID NO: 17232 - DNA, 337 bp, Gossypium hirsutum
  Clone ID: LIB3145-047-Q1-K1-C11
ctttcagacaaacaagtccacgagccccttattcactctctctctttctagatataaaaatatttagctttctttttcctttacatctatagatccgtcggttccttacctttcctacgatgccatctcgccgtagaacccttttgaaggtcatcatcctcggcgatagcggggtagggaagacgtctttgatgaatcaatatgttaataagaagtttagcaatcagtataaggcaacaattggggctgattttttgacaaaggaagtgcagtttgaggataggcttttcaccttacagatctgggatactgctggccaggaaagattccagagctt

SEQ ID NO: 17233 - DNA, 331 bp, Gossypium hirsutum
  Clone ID: LIB3145-047-Q1-K1-C12
ctcacgcgtccgcccacgcgtctttctattagaagaagacgaggaagaagaagaggaagaagaatatccttgtagctccgaggtcgagtttcccttacaggaagaacctttacctcaaatacttatcgatgagaaatggtcgaatcgcttgttcaagttcatcgccattggcattccttcagccattttggtcatagttgcaattaaatgggttggaccctttatgttgaaaaaggagattgtccctgttttacaatgggaggcccatgcattcatcacaaccgagagtatacttgtaaatggaacttcattagcttctatttccaacttt

SEQ ID NO: 17234 - DNA, 152 bp, Gossypium hirsutum
  Clone ID: LIB3145-047-Q1-K1-C2
cggacgcgtgggaaagttttgatattagctctgctggttgtgtaagattgccgtttcaaaatacaaagttatctgctatattttagtttattatatattatatatatgtatgtatgactatgtgataatatcaacttattcattcctttttt

SEQ ID NO: 17235 - DNA, 332 bp, Gossypium hirsutum
  Clone ID: LIB3145-047-Q1-K1-C3
cgaagaccttctttacagcaaagttgagaatgaagaacacttatgtgtgctcaatgaccgcaacaagccaattctgttcacaatggcaaggcttgatcgtgtcaagaacttaaccggactctttgagtggtacggcaagaacgcaaagttgcgtgagttggctaacctcgtaattgtaggtggtgataggcgaaaggaatctaaagatttggaagagaaggccgaaatgaataaaatgtttgagctgatcgagaagtacaacttgcacggccaattcagatggatatcatctcatatgaacagaatccgaaatggtgaactataccgataca

SEQ ID NO: 17236 - DNA, 342 bp, Gossypium hirsutum
  Clone ID: LIB3145-047-Q1-K1-C4
gctgagaggagcttgcatgatgcaattatgattgttagaagagctctgaagaactctacagtagttgctggaggtggtgcaatagatatggagataagtcgatacttgaggcagcatgcacgcacaatagctgggaagtcgcaactttttattaattcttatgcaaaagctcttgaggttatcccacggcaactgtgcgacaatgctggatttgatgctactgatgtgctgaacaaattaaggcagaagcatgtgcttccatctggcgagggtgcttcttacggagtggacatcaacactggtggaatagcagactcatttgcaaactttgtctgggagcca

SEQ ID NO: 17237 - DNA, 251 bp, Gossypium hirsutum
  unsure (1)..(251): unsure at all n locations; Clone ID: LIB3145-047-Q1-K1-C5
ctttattgtagggtactcccaaaacaggtgctccctcgactccgctccattctggcatcttcgacaggtcgcagatcccaacattcttcgataatgtagattacaaaaagtaggaacatagttacaaaaaatcctccagtttgtaattttaatttttggatgtaaatcaaggctccacaatctcttgtaaaagagtctgtaatttgattgtatttgattttgttcaccctgtaaaagaagtttgtgcccnc

SEQ ID NO: 17238 - DNA, 382 bp, Gossypium hirsutum
  Clone ID: LIB3145-047-Q1-K1-C6
cttcctcttcctctagaggggataattaataaattactgtcgggcgaaaaaaaagggtaagagatggctcgattaatgttaatatcgatgctatttctcttggcaggatcaatgcttatggtccagggcggagatcccaccctttttttcgaatggaacgtcacctatggcaccattgctcccttgggagtgccagtaaagggtattcttattaacgggcaattcccgggaccaaatcttaactctaccaccaacaacaatatcgtggtcaatgtgttcaataaccttgatgagccattccttgtaacatgggacggcgtgcagcatatgaagaactcttggcagatggtgttctgggaaccaactgtcctatcccccctgg

SEQ ID NO: 17239 - DNA, 369 bp, Gossypium hirsutum
  Clone ID: LIB3145-047-Q1-K1-C7
cccacgcgtccgtaaaaacacctttttgaggttttgcgatggcatcgaagcggatcttgaaggaattgaaggatttgcagaaggaccctcctacatcatgcagtgctggtcctgttgctgaagacatgtttcattggcaggcaacaatcatgggtccaccagacagtccatattctgggggtgttttcctagtgactattcattttcctccagattatccctttaagcctcccaaggtggcatttaggacaaaggtattccaccccaatattaacagcaacggaagcatttgcctagacatcttgaaggagcaatggagtcctgcactaacaatttccaaggtattgctatcaatctgctctttgctta

SEQ ID NO: 17240 - DNA, 412 bp, Gossypium hirsutum
  Clone ID: LIB3145-047-Q1-K1-C8
gttttctcaagccatcgttaccgcaacttgacctcatctggacagacgtatccaaaggagtatgcaaagcgaattcaagaggagtggaaaattctggagagtggcttaccagaaacaatatatgtgagagtttgtgaagcaaatatgggtcttttaagagctgtcattatgggaccttctggtactccataccatgatggccttttcttctttgattgtttcttccctccaaaatatcctaatgagccaccgatggtttattactattccggcggtctccggttaaatccaaatttgtatagctgtggtaaagtatgcctaagccttttgggcacttggcatggtgaagagactgagatgtggggttcaagccaatgaaccatgcttcaagttttgggttccatacaagccc

SEQ ID NO: 17241 - DNA, 241 bp, Gossypium hirsutum
  Clone ID: LIB3145-047-Q1-K1-C9
cccacgcgtccgggttgattgatttcatgtttgactggcaacagcttttgcagtggattatcttaagccttatattctcttatcttctagccaagctaatctccttagtcgtttcttttcaagacgataaccttttctataaccctagcccgaaacttcaatgttcaaggctactagaaaatcgaccatttcggtttttgatcctacccgattggaagtactgagcacttgggactgcaca

SEQ ID NO: 17242 - DNA, 348 bp, Gossypium hirsutum
  Clone ID: LIB3145-047-Q1-K1-D1
aaaattgaagcgatcaaatggtccaatgagcaaagagaaaaagttgttaattactgggaggggaaaaatgcaatatcaaaatcatgatgttattggtttgactggtcatcttccatcagataaacaacaaagtaaagagcaacaactatgttctatgaagaaacgcaaagcactacttatagagcatgataaaagttccaacgttaatgcatcagatccccaaagatcagtgccaagagaccttcctttcacagatgatggaagtgcagaggtggatgccaagtttctcaatcataaaaagaactatgtttgtggaagtgctgaacaacttggtgcagaggaaacaaa

SEQ ID NO: 17243 - DNA, 376 bp, Gossypium hirsutum
  Clone ID: LIB3145-047-Q1-K1-D10
ggctaacgctggaccgggaactaacggatctcagttcttcatttgcacggctaagactgagtggctcgacggaaagcacgttgtgtttggacaagttgttgaaggcatggatgtggtgaaagccattgagaaagttgggtctagcagtggaagaacttccaagcccgttgttgtcgctgactgcggacagctctcttagagaagaaaaagagaactatgtgttaagctgggatgttgtctaatgtctagaatatttaatgtctgtcatttagactcttttatggtgctgtttttatcgtcactgggtttggtggttttcaagaacttgctttatgtagtttttatgattaactaccattaaataagatactctttt

SEQ ID NO: 17244 - DNA, 408 bp, Gossypium hirsutum
  Clone ID: LIB3145-047-Q1-K1-D11
gtcgaaggcggttggccgggcataacgaaaggcgtcggaagagctcagctgaatcatcatcagcagcagaaagttcaagtcgcagagggatgatgatcagtgctcaactgaaagagtctcattacctagctgatgatcaaagagccagagtcaatccaatggcaatccatggcagttcatcttttaagcgttcccaaatcagataaggaagcttaagcgaccaaaacaatacgctccctctcttctgtcatccgatggttcatgtcttgcactatgtactacttactagattttaatggaggattttaataacaatgtcaggcatcaactcgattatcgagatttcacaaagtttgttttcatgcgaacttgccttgctgtataatgatgataatattcctttatcta

SEQ ID NO: 17245 - DNA, 374 bp, Gossypium hirsutum
  Clone ID: LIB3145-047-Q1-K1-D12
cgatgcaatacaaacggatggttcggagtcgagttggtcggagcacgtgccgtcaccggaaatcacgtgggagaaagaagtgaaaagtgaagggagatggaatgagcttgatttcgggttggatttcatagatgaagacccgtttgccagtcaagttgattaccaaatggagcagctgtcaccgttgcaagacatgttcatgtatctacccaagacattttaagccaatgtagaccaaaaatcctacaattgtggggtccaatccaaattaaaaacatttttaatttagattcatgcacacacacattgccaaacgaacaatgggtcaaattcaaattcaataagagggggtgggtgacaaacaattggatcgc

SEQ ID NO: 17246 - DNA, 365 bp, Gossypium hirsutum
  Clone ID: LIB3145-047-Q1-K1-D2
cccacgcgtccggaagagatggtgactggattgtcccaattttagatagttatgatcaaaatgcttttggtagtctaggtgacatcaatgattctaagcagccatttgatggatgtgagagtggaagaaattgaactttttgctttgaggataagtctagttgatttcaagtcattgcacctttatctctgcaatatacagttccattctcttaggtagttagatcctagcttgaatggagatgatcgggtgtttgaaaaccacaatgtgcttcgcgagacaactaataagcttatatcaacgcagtgacagaatgacaggcttgtcggtacagtaataaagaagcttgggtggaacggatgatg

SEQ ID NO: 17247 - DNA, 356 bp, Gossypium hirsutum
  unsure (1)..(356): unsure at all n locations; Clone ID: LIB3145-047-Q1-K1-D3
gaagacatcaactatgaaaaatcagtgtacaagactaaaatgtgcccactctgccttgtttcaactaaggaaatcctgatcgattccttttttggcctccgcttgcttgtttcgagagatgttttgtctgtggatgcagtaaagtaaaaaaaatcccggattcatcagatcatctgcaaataggtatatatagatattaatgcttgtaattctatttgaccacttaaatgatggatgggtactgagaccattcaacacactgtaaattaggcaaaacattcatgattttgcatttataaattcagctaagcttaaagtaacaacaatgttaatagatatgcaacanagattacact

SEQ ID NO: 17248 - DNA, 373 bp, Gossypium hirsutum
  Clone ID: LIB3145-047-Q1-K1-D4
gtttctagttgtcgcagatgaatcagttggcaggagtgtgcctttcgtttttcttgaacgggtgctagatgattttaaacaacgatatggtgcaagtataagaaatgagggtccccatcctttagctgatgatgacgatgatgacgacttatttgaggaccaatttagcattgcatataatcttgacagagaatttggaccaaggcttaaggagcacatgcaatattgtatgaaccatccagaagaaatgagtaagctctcgaagttaaaagctcaaatcactgaggtgaaggggattatgatggataacattgagaaggttttggatcgcggggagaagattgaacttctagtggacaaaactgagaactta

SEQ ID NO: 17249 - DNA, 232 bp, Gossypium hirsutum
  unsure (1)..(232): unsure at all n locations; Clone ID: LIB3145-047-Q1-K1-D5
cccacgcgtccggaatcattgttttcagatttcatatttaatttaatcttttttatggttcagttcagaatgtaaaaattaattaaaacattgtactcaacgtgacactttggccattcttatttcaaaagaaaattcatattgcataatcagctcatttacactttaatgagcctttttctttgnaaaaaaaaaaaaaaaaaaaaaaaaagaaaaaaaaaaaaaaaggagg

SEQ ID NO: 17250 - DNA, 354 bp, Gossypium hirsutum
  Clone ID: LIB3145-047-Q1-K1-D6
gaacaaaggagaagataatcatggaaccaagagtgggaagaagaacagcaacaagaaaaacaataacaacaacgacaataacaacgaaaacaaggatgggaaaagtgctgctgataaaaggtttaagacactgccaccatctgaatcattgccgagaaatgaaactgtcggcggctatatttttgtctgcaacaacgataccatggaggagaatctcagaagacagctctttggtttgcctccacgttaccgtgattcagtccgggcaataactccgggcctgcctctgttcctctacaactactccacccaccaactccatggtgtttttgaggctgcaagctttggtggaac

SEQ ID NO: 17251 - DNA, 382 bp, Gossypium hirsutum
  Clone ID: LIB3145-047-Q1-K1-D8
agcaaatgcaagagaaatttaataagtattgggctgagtattcgttgatattgtcatgtgctgcaattttagatcctcgttacaagttgaattatgtgcagtattgctttactacaatctatggtgaccatgcttcagattttgttgagaccattcttagcaatcttagactcttgtttgatggttaagaaatccaaatccacgtcttcctctttggctgggagttctaatgttttggataaaaatcctattgattctggtttggatgaacacaatgatagtagtgctgaatttgagggatattttgatgagagtgacgattataaacggtttttaaatgaatctagctctagaagtgagaagtcacagttggacctttatt

SEQ ID NO: 17252 - DNA, 362 bp, Gossypium hirsutum
  Clone ID: LIB3145-047-Q1-K1-D9
aattgatccaaaagatttttccaattccttattggtagaattttttatttctcgattcgatttcgtctgtgtttcttggtatggtttattgagactgcagtccttggatggtacattgagaaatcataagcagagcatgagcactcttgagattagggggccttctcttaggggatatcgaaggagaaaggcagtgcttgatctgaatgttccacccagtgaaatcagggagcaggagggtacatctcaacaggctgggtatgaggatcaaacgaatcaatccgtacagactggtccacctgcaaccattgatgttgaggctattgatgatgatgtaattgaatcttctgctagagcttttg

SEQ ID NO: 17253 - DNA, 374 bp, Gossypium hirsutum
  Clone ID: LIB3145-047-Q1-K1-E1
tgctttccttgggaggtattcttccggttccattgatagtgaaggaggtaggaaatggggtaccacccaggaatcaaccctgatcactggcagtattggccaggcaacatctgatgaaactcgggagaacttatatcagaactttgagaccagtccaaatgcagatgttcttctttctaaaactaatgaatcatcttatatggtttattccatgggtcagaacttgggatctcgaaacttggaaagtaattttaacttggaaggtgtatctactccacaactggaaattaatggtctgagtagatccgactcattaggggctattggtggggttgctcataattatgagacttcatcaggtttagatcttaatc

SEQ ID NO: 17254 - DNA, 258 bp, Gossypium hirsutum
  Clone ID: LIB3145-047-Q1-K1-E10
gatgatacaaatgcttattagctgtttttgtcggtccagccatggataaaagcaagacaggctgctgaatcaggatctgctacatacaaataactgcacatggggctggagaaatgcttactctaacactgtttgaacacaccgggttatgactgtacgactcgcattggatattctgaataacatgaaaagacacgtgctgcaacactgtacgagaatgatatcattgctgcagccgctctttttagtaatagaaac

SEQ ID NO: 17255 - DNA, 376 bp, Gossypium hirsutum
  Clone ID: LIB3145-047-Q1-K1-E11
cccacgcgtccgccacggtttcagtcaactcctcaccatctcccatgcaagttgaaacggtgacaacacttacttcaccaggtcaatacgaagcaggccagccatcatcatctgaaaagatgcccaatagagttggaaaagacggtaaaatattgaagaaatcagtcatccttaatcaaatttggaaggatgacttgaattctggacgtacattggtaacgttgttcgaactgtttggtgaaagcattctctccttcattccatctcctgagatgtctttgtttatataacatgttgtagaatagcttatttcttatcgttatcggcgttagaaaaaatgaaactgcgttcatctgaatcattaaaccttttcaaa

SEQ ID NO: 17256 - DNA, 385 bp, Gossypium hirsutum
  Clone ID: LIB3145-047-Q1-K1-E12
ggcatcttgaatgtctctgccgaggacaagactactggccagaagaacaagattaccataacaaatgataagggtcggttgtcgaaggaagaaatcgagaagatggttcaagaagccgagaagtacaagtccgaggatgaggagcacaagaagaaggttgaagccaagaattcattggagaactatgcctacaacatgaggaatactatcaaggatgagaagattggttcaaagcttgacccggctgacaagaagaagattgaagatgccattgatggagcaatccaatggttggatggcaaccagctagccgaggctgatgaattcgaggataagatgaaggagctcgagagcatctgcaatcctatcattgccaagatgtacc

SEQ ID NO: 17257 - DNA, 333 bp, Gossypium hirsutum
  Clone ID: LIB3145-047-Q1-K1-E2
gtcagtgttatgatggctgcttgtgatacattccgatctggtgctgttgagcagttgaggacacatgcacgcagactccagattcctatatttgagaaagggtatgagaaagatcctgcaattgtagcaaaggaagcaattcaggaggccactcgtaatggttcagatgttgttcttgttgatacagctggtcggatgcaggataatgaaccgttgatgagagccctttcgaagcttatatacctcaataatccagaccttgtcttatttgttggagaggcactagttgggaatgatgctgttgatcagttatcaaaattcaatcagaaattg

SEQ ID NO: 17258 - DNA, 369 bp, Gossypium hirsutum
  Clone ID: LIB3145-047-Q1-K1-E3
aacaggttccggtcgatgattcagctacaagggatctcaggcgtttgctacggcttgatctctgatacccgaatatttagatttggatccaaataagcctgcgtctctttttatctccatctctctcttgatacgtttcgtctctatttagatatctccggaattttcaagatccgatgccctccgtgatattttttgaagacggtggacggatttgaaaatctggaaaattttaggggcgattagataatattccctgcttatcagtttatgcgttaaacaagtggggtttctttaaggaaaaaagaaaaatcaagggggttgatatgtaatattaagggaatagtgggcgagggttgagttttaaaa

SEQ ID NO: 17259 - DNA, 336 bp, Gossypium hirsutum
  Clone ID: LIB3145-047-Q1-K1-E5
gaacaaggaagcttcctccaaatcttaagagtattgctgttttcttttctctatgaggtttgtttcagacttgtcaccaagacaactttgttaggagctatgttacgctgcgctgtcaataaatctatcccctgagaaagtttcactatttaaaaaaaaaaaaaaaaaaaaaaaaaaaaaaaaaaaaaaaaaaaaaaaaaaaaaaaaaaaaaaaaaaaaaaaaaaaaaaaaaaaaaaaaaaaaaaaaaaaaaaaaaaaaaaaataaaaaaagggggggggccgttttaagggatccaagttttactcccggggcttgcaaggttatagtttttttt

SEQ ID NO: 17260 - DNA, 373 bp, Gossypium hirsutum
  Clone ID: LIB3145-047-Q1-K1-E7
ggccgcccacgcgaacgtcttgctatgaatgtttcttccaatttttttttgcgaacgagggaggaaaaggggaccattcaagaattaaccatgttcactgacattttaatccatgtaacatctattaaaacttgggagaacttatatcataacattatgactattctaaatgcatattttcatttttctaaaactaaactatcactttatatgatatattacatgggataaaacttgttatctctaaacatttatatgaaatatacacatcttaggtttttttcttttatgacactaaattaaatttatgagttaaatcatcttataaagttcatatatatattatatttattatatatttatctttattata

SEQ ID NO: 17261 - DNA, 347 bp, Gossypium hirsutum
  Clone ID: LIB3145-047-Q1-K1-E9
tagaaatcactttatttcttggtgtcaaaatcaaaacaaaataggatatgtggtataaaaacggggaatctattctcttctttttccaaaaaaatgctcttggagattgtgtaatgcttactcttaaactctttgtttacaccgtagtaatattctttgtttctctcttcatcttcggattcctatctaatgatccgggacgtaatcctggacgcgaagaataaaaaagggagagttccttgcttcatttttagaaatggtattaggatttgatctattccactaccaaaaaccgaaacggaaagagagggattcgaaccctcggtacgaataactcgcacaacgga

SEQ ID NO: 17262 - DNA, 342 bp, Gossypium hirsutum
  Clone ID: LIB3145-047-Q1-K1-F1
gacgatgatgatgaggacgacgacgacgacgaggactaaatcacttaacagccttaaatcatggtagtatgttctcttgctcaagtaagaactggtgtaaagctgtctcctagtcatagctacgtaaggttatagagaagatagccatctttaagatagctttctatgttttataagcaactcttgttattgtaagcatagctatgactcgtttctttttgcccatctcttaacctttttgatctttcctcccgtgtgtttttgtttttctggtttcctcccagagggtgacacgaagtgaaagcttcttacatgatattggaatgcaggcattttatcgat

SEQ ID NO: 17263 - DNA, 345 bp, Gossypium hirsutum
  Clone ID: LIB3145-047-Q1-K1-F10
acgtggacgcgtgggcggacgcgtggttctagctcaatttgattcgtaaaacttatcgtgaagcttatggggaagatctccttaagtctttggatgacgaactttcaagtgactttgagcgagctgtggagctgtttactttggaccctgcagagcgtgatgcatttctggctcatgaagctacaaagaggttcacatcaagccattgggttctcatggaaattgcttgcactatgtcttcacatgaactgttcaatgtgaggaaggcgtatcacgatctttacaagaaattccttgaagaagatgttgcgcaccataccaagggagactaccgtaagctttttg

SEQ ID NO: 17264 - DNA, 409 bp, Gossypium hirsutum
  Clone ID: LIB3145-047-Q1-K1-F11
cccacgcgtccgcccacgcgtccgaaagttttcacagtctcttcctatcaaaatcaaacccaaaatatatgatttttcttcttatttccttcaaagtttcagttagtcagattctttcaagtatcaaattaagtcatgcccaccaacgaaaacttctcaggtgtttcgaattgctatgttttcaagagccaattgcaggagtatgcacaaaaggtgggtcttccaacacctgtatacgagactttcaaggaaggaccgtcccataaaccttctttccgatcaactgtaactgtaaacaatgttaaatacgattcgttaccccgggttttttaatcgcaaggctgcagagcaatcggcagctgaaggggctctcttggagttgttcaaagcggggaagcttatgaaagca

SEQ ID NO: 17265 - DNA, 429 bp, Gossypium hirsutum
  Clone ID: LIB3145-047-Q1-K1-F12
gatgcaatcttgataggagcccagttttgctcagattctttctcttccatttctcatgctggagtcaagaatggtgtttcatattcgctgtatgctaggattgaatctatcacttcactggaaattctggaacaatgtggaggtttgcagaggaagcaaatcactcttgttgacaatgatggagtaaaactaagatttctcttgtggaatgagcaggtaatcctagccaatcttttcagtgttggaagcatgctcgccctggataggccatatattgctattgcagcagagagtgcccttgaaacaagtatgcctatcatccacacaaaatcgaactcaaggatcaaagttgcatgctgcagctgatcctacacaaggtcccaaagtttctcaagtgagcttgccctgtgattccccagggtcaattga

SEQ ID NO: 17266 - DNA, 343 bp, Gossypium hirsutum
  Clone ID: LIB3145-047-Q1-K1-F2
gctaaacgtagattggaagcattggacaagaaggatgcagagcgaagaagaacagcagaggtgaaaaataaccttgaagaatatatatatgctacgaaagagaagcttgaaacatctgaagactttgaaaaagtatcttcaaatgatgaacgccaatctgttatcaaaaagcttgatgaggttcaagaatggttgtatactgatggtgaagatgcgagtgcctcggagtttcaagatcgtctaaattcattaaaagcgacagctgatccaatatttttccgatttaaggagttgactgcacggccagaagcggtagaagttgctcgacaatattttttctgac

SEQ ID NO: 17267 - DNA, 391 bp, Gossypium hirsutum
  Clone ID: LIB3145-047-Q1-K1-F4
gccgtgtcttgcgggtttcacttcacagctagcaaaggatctgcaagatggaaagcatgaatagcttttggcagttaggagatgatctccggggacaatctaaagcctcagaggatcacaaatggttgatggttgcctccaaactggctgaacagacgaggataaagggtgagcgaatgaacaatctcgatctttcaaagggtccagctgaagtaaggacaagggataaatttgggttccatgaagacaacaaattcgagaaccttaacttcaatatgttgaacttggactccaagatcggagatagtgtaagcaaaagtaccttccgaaatggtatttacaacaccgatgctgtttaccagaaaaataacagccacaacattgggaacct

SEQ ID NO: 17268 - DNA, 355 bp, Gossypium hirsutum
  Clone ID: LIB3145-047-Q1-K1-F5
cttattgcgatatcttattctgtacctgatactgatccgaattcagatcatgcattgaaaatcatagatggtgcaaatggcgctgtggctgcaatcgacaaagctgaaaaatatagatctgaactgatttcgatatccgatacgtctcctgatgctcaagtgcctcctgttgtgcttgggaaccatgcaggttaaaggagacaaaattgtaatgggagattttaatacatacagtggctgttaatgatttctagaactgaacttgttgtagtgttgtgtgatttttacacctaatgtggatttgtttcgcttgtgattctccccatatcaatgtaaataaggaaacatacttttg

SEQ ID NO: 17269 - DNA, 400 bp, Gossypium hirsutum
  Clone ID: LIB3145-047-Q1-K1-F6
cccacgcgtccgtataaaccctacggttctcgttttttctcttagctcaatacagatatttggtctgtttggaggattttaatcttactgagtgcatctgttgcagttaggtgcagggaaaagagcgatggcggcagttcccggacagttgatttgggaggtagtgaagaagaacaattgctttttggtgaggcagtttggaagaggaactgctagccttcagttcagcaaagaacccaacaatctctacaacctccactcctacaaacactctgggttggcaaacaagaaaacagtcaccattcaaagtgggggcaaagaccagtctgtgctgctagcaaccaccaaagctaagaagcagaacaagccttcggccttgcttcacaagttcctcatgaaa

SEQ ID NO: 17270 - DNA, 345 bp, Gossypium hirsutum
  Clone ID: LIB3145-047-Q1-K1-F7
ggggacccatcagtataacgttacggcaccgcttgctatgccgtgttgttagagatgctgctaaaaatgagtacgaaacagaagaaccttttcttgttctaaatgaggttacaattgaccgtggaatatcatcatacctcacgaacctggaatgctattgcgacaattcctttgttacatgtgtgcaaggggatggtttaattttatcaactacatctggtagcactgcatattcattggcagctggaggatcaatggtccacccacaggttccctggtatctttgttcacaaccaatctgtcctcattcattattcctttcgacccctgatatttgcctgagca

SEQ ID NO: 17271 - DNA, 422 bp, Gossypium hirsutum
  Clone ID: LIB3145-047-Q1-K1-F9
gagagtttggtagaaattgaagcaaacaaacctgcaaggcagaaaataattgaacccaagacaccgtaccatcccatgattgatgatgatgatggtatgcatagtgtttacccttctacttaagtttagtatttcatgcttagatacttgtgtaagtattcacaaattggtgttgaactagctttatttttaatttattcctgctttgggttagaactttattctgaaagttgaattgcattttcacattgcaatctggctcttgatttgcagggtctttgtctcctgtagggcatggtttcaatgattgtatcggtgatgctatggatgcagaagagttgcgctctgctttgaaggatgtggcttcctcgagcaaaaaaacaattgggcagtctagtggttggacatcttctgatgatgat

SEQ ID NO: 17272 - DNA, 364 bp, Gossypium hirsutum
  Clone ID: LIB3145-047-Q1-K1-G1
gtggatactctaatctcgggtgagattgattgtgctgatttcagagctaagttgcttgctaacaagagcaagccagctataatcaacgttaacataggtctctctctctctctccatatatataacaaaaagtcatgggttttgttaaaatgagagaaataaccagataacattgtttactgtaggaacaactgtcaaaggtgctgtagatgacctggatcttgtgatacaaacccttgaaggatgtggtttttcacgtgataggttctacattcattgtgatggagctttgtttggactcatgatgccttttgtcaaacgggtaagttaatcgcgtgtatagctttgttttaacgtggatttg

SEQ ID NO: 17273 - DNA, 363 bp, Gossypium hirsutum
  Clone ID: LIB3145-047-Q1-K1-G10
gcagaactagatggatgtgctatatatgatcagtgtgccagtttgctgaatgtggggcgggggaaagatttgcgtaagcttgcttcaatgcttgtgaatctgatgaacggtggacaaccactacaaaatgcttctattgatgttctgagcccttcacttattcctgcaacttatgcttttgtttttcagaaagccatggacctttacaagaaacataggctgcagatctgtgcttttacaaatgccattggtgggatgtttggcatctactttattgcccaacgaggagcatagttctgatcttgtattctatgaagcaaaatagccagtttaagatttctgaagctggaatgggtgattcag

SEQ ID NO: 17274 - DNA, 347 bp, Gossypium hirsutum
  Clone ID: LIB3145-047-Q1-K1-G2
cccacgcgtccgcccacgcgtccggcatgttgaaattgacacccccaatcccctcaacacctgtcgtgtgaaagagcaatccatgaagaggtgttccacagtttcctcctcagctcgacaaaccgggcacaatgtgttagcagccagatggcgtatttttaaattgtacatagtgggtaggaagccattggcaattctccacataaagattcgaagtttacttggtaatttaagctctcataggtttgtaaagaaattcgaagcaatttcactatgtattctattacccccctctgtagtaagtcattgatagccactttttactgtataaactcctatgttttcgc

SEQ ID NO: 17275 - DNA, 379 bp, Gossypium hirsutum
  Clone ID: LIB3145-047-Q1-K1-G3
cccacgcgtccgcccacgcgtccggaacaatcagtcagatgctatgttgaacccacttggcatgcaaaacccaaaccagccacggatcccaagttttgctgatccttatcagcagtatatgggtcttcaccagatgcaattacaccctccacagtgtcaagcaacggcccagccgagttccagtaaaccaagtaacagtaagggagctgagaatcttgaaaatcacccatcaggtgatatggcacgatagcactaaaatattggctggctatctgagttctggacgagtgttgctcgtgtattccttttaatctgcaacacacaacattaaagatctgtgcattgcaggttgacaattcaagcgaggatcattcccgaa

SEQ ID NO: 17276 - DNA, 418 bp, Gossypium hirsutum
  Clone ID: LIB3145-047-Q1-K1-G4
caatgccattacaaatgctgttgagatttatgtcactccaagtggtgcagttcactttacggcctcaaataatgactgtggagtcagagattttgatatggagaaatatcagctttccaagcattttcattttctttggcctgtcaatcatacttctctgagccctgatgggaaacttctaataatagttggagacaaccctgatattatgttggtagactctgatacagggaagactgttatgcccttgcgtggacacttggacttttcatttgcgtcagcatggcatcctgatggtgtcacttttgcaactgggaaccaagacaaaacatgccgaatttgggatgttcgaaacttgtcaaagtcaattgctgttctaaagggaaaccttggagcaatacggtccattcgctacaca

SEQ ID NO: 17277 - DNA, 348 bp, Gossypium hirsutum
  unsure (1)..(348): unsure at all n locations; Clone ID: LIB3145-047-Q1-K1-G5
gttcccaatgatgtccctgatgaattggttgaaggctcttctgaagacgacgaagaagaagaacccaagaagtctaatatcaagcccaagaaagctaagatcaactagtacttaggtaaaaaacaatgtatggaattattctagttttcaaccttgtcaccctcctgtgtcattgaagaaacgtgaatcaactatttatagcattatgttgaacaaaaaatgcattgtgaaatanaaaaaataaaaaaaaaaaaaaaaaaaaaaaaaatataattaaataaaatataaaaaatttttaaaatataaatattatttaatttaaaataaataattaaaaaattatattat

SEQ ID NO: 17278 - DNA, 396 bp, Gossypium hirsutum
  Clone ID: LIB3145-047-Q1-K1-G6
aaaaccccaaaatagatttccccaaacacacagccattttggccaaaaccccaaaacaaatttcccccaaaatccctaggcatctgaagctcctcagtcgacccgaccacctactcatcaccgtcctttgtagtctctattgcgtcccgtcgccgtcgctctccgctgccgtaaccaatagattagcgctagtcaattttcttctccattttggttttctctagaagcaaattcattaataaagaagctccttgatcccaatcctaaaacttttcatgaacttttctagatatacaaggtgcttaaagtgtaaagcagagggtccaaagagggttgttacggatgatgttcaaatgaagaaagaggattggaactacccagggaacattggcaccc

SEQ ID NO: 17279 - DNA, 341 bp, Gossypium hirsutum
  Clone ID: LIB3145-047-Q1-K1-G7
gggcaagcaacatccacactcaacttccgtcgtgccagattaccaaaatggggcagcagatcgttaatcagtctctgactataactgcagttgtagcgattttgacatctttttggaaggatgcatcaaagtttaacttgataacatcatctgggggtcttcacagatccttcaccataattttaatgggaggacggagattctcttggtttaggcagatctctagttcataccctcgaataaaccctaaaaattcttgcataaaaaatttgacccctttgtggattagcttatttctgcgatgccaaagtccccaaactgacaaaggaatgattcatctc

SEQ ID NO: 17280 - DNA, 408 bp, Gossypium hirsutum
  Clone ID: LIB3145-047-Q1-K1-G9
gtttgttaacaagaatgcaagagatgtcattggattaccatttcacagtggaacaggaagttggatcagcaacacatgctttctttggttttaatgggacggctggtatatggagaattgcggccattaatgaggcaggtgggtggaaggatcggaccaccgtggaggacatggacctggcggtccgagcgagtctccggggatggaaattcgtttacctgggtgaccttcaggtgaaaagtgaacttcctagtactttcaaggcatttcgattccagcagcatcgatggtcttgtggccctgctaatctcttcaggaaaattgtgtgggaaatcattcaaaacaagaaagtgaaattctggaagaaagtatatgtaatttacagcttcttcttcgtccggaagatca

SEQ ID NO: 17281 - DNA, 336 bp, Gossypium hirsutum
  Clone ID: LIB3145-047-Q1-K1-H1
cccacgcgtccgcccacgcgtgcgcccacgcgtccgcctcacaactacggattcatccctcgtactctttgtgaagacaatgatcccatggatgtcttgatcattatgcaggaaccagttattccaggatgctttcttcgcgctaaagctataggtctgatgcctatgattgatcagggtgagaaagatgacaagattattgctgtctgtgctgatgatcctgagtatcgtcactacaatgatatcaaggaactcccacctcaccgcctggctgaaatccgtcgcttctttgaagactataagaagaatgagaacaaagaagttgctgttaatgac

SEQ ID NO: 17282 - DNA, 352 bp, Gossypium hirsutum
  Clone ID: LIB3145-047-Q1-K1-H11
ggtcgagcacgcgccacgcagaattctaaaaattgctaaagaattattataaaaaaagacagaattgaacaaccgggcaggcgttgttagtgcattggatacggctttacaatggaattctcttttttctttcatcgaaaaaagaaaaagagaaaatgtagagagcgtctattagacccagatcactaaataatccaattaccacccttcttttttttttcggaaaagttcaaaaatactatgatggctccggtgctttatatatttatttcgtctgtgattcaacattcccaaagtttatttttttttcaaaaaaaagaacgaaaaaaaatagtcgcggttttttcgaccc

SEQ ID NO: 17283 - DNA, 404 bp, Gossypium hirsutum
  Clone ID: LIB3145-047-Q1-K1-H2
agctttctcaagaatctattcatgttattgttctcggtttctcgtctgccatcataacagctgaaaacattcgtggagaatttaaatatagaaccaaagacaaagaggaactatttgccagcaaatctcacaagcgacatgtcataaaggttggaaccatgatccgatttttagtcaagagttttgatgaggaaatacttcatatcattggatctctgatatcagctcacacaggaagcattcgttggttggatagacatttggaggaagattcagaatttgataggagttctatgaagagtagagatagagaatggcttggggataaagctgttgatgagggagcaactcccatgagctacgataatcatattaaaatgtccaaaaagcgtagaatcacagaa

SEQ ID NO: 17284 - DNA, 318 bp, Gossypium hirsutum
  unsure (1)..(318): unsure at all n locations; Clone ID: LIB3145-047-Q1-K1-H3
cccacgcgtccggcgggaattaaactgttaacttgcatttccttcgatttcaaaatcagttttggtgcttctgaatcttcagtctctgatagctgatcagcccaccaagtatatatatgaaatatggactgcagtaggatgttatatcttatttattgcgaacagatctcacattctacaatatattgtacttgtattccgtattatcgttcttgtgaagatgtcatgagacaaactacgattacatggaagtcactccaatctgctgaatcatgttaacaatgttaatttcccttaatatcaaatcattntacatgc

SEQ ID NO: 17285 - DNA, 396 bp, Gossypium hirsutum
  Clone ID: LIB3145-047-Q1-K1-H4
tgctaataagaagcctgtcactgatcagcagtatcagaaagctgcttacccgaatactcaaggaaattctggagagaacgatccgaataataccacaatttttgttggtggtttggatcctagtgtttctgaagaccaactaaaacaaatatttagccagcttggtgaggtagttcatgtaaaaattccggctaacaagcattgtggttttgttcaatatgctaacagggccagtgcggaacaatctttatctgttttgaatggtactgttttaggaagaagaaatgttaggctttcatggggacgtagtccttcagcaaacaggttcaacctgaacaggcccaatggaatactggatattatggatatgctcaaagatatgaagcatatggatat

SEQ ID NO: 17286 - DNA, 383 bp, Gossypium hirsutum
  Clone ID: LIB3145-047-Q1-K1-H5
gaagaatagctaaaaatagctaaagaataataagaaaaaaagatagaattgaacaaccgtacaggcattttttgtgcattgcatacggctttacaatggaattctcttttttctttcatcgaaaaaagaaaaagagaaaatatagagagcgtctattagacccagatcactaaataatccaattaccacccttcttttttttttcggaaaagttcaaaaatactatgatggctccgttgctttatatatttatttcgtctgtgattcagcaatcccaaagtttctttttttttcaaaaaaaagaaagaaaaaaatagtctttttttttcgtactcttttattttataacataaatattgttataaatattgttaatagcctct

SEQ ID NO: 17287 - DNA, 350 bp, Gossypium hirsutum
  unsure (1)..(350): unsure at all n locations; Clone ID: LIB3145-047-Q1-K1-H6
ctatatgctatttctagcgcttatctgatattgtgaaatttcatttttaaatgtacaatatcttctcttttttattttttcccttgaaatctatgacatgtttgtgaagctttggttttccattttcatacattgtatctttacttgggattttctttatttatttttacttgttagccttctctcagttcttttttcttctgaatcttatactctttaatgcattaactagtgatggtgttatgttttgtattttaatcagtcagtttctgccttctcaaaggtccagtaacttagcattagttntggcacgttagagagttcaacatgccgaaggtgagaagagatcg

SEQ ID NO: 17288 - DNA, 376 bp, Gossypium hirsutum
  unsure (1)..(376): unsure at all n locations; Clone ID: LIB3145-047-Q1-K1-H7
atttaatcagtcgattgtttaagcaaagtaatgatgaagcttaatttgctctttggtcttacattggccatcctcatctcaggggctcaaatggcgaccttcaccgtaaaaaacaactgtcagtaccctatctggccggcaacccttgtcggtgatcctaatttgccacaattgcccaagactgggttccagttagaccctcaagcacaagattcccttaacgttcctagcccatggaaaggcaggctctgggctcgaacacaatgctcaacctcaggcggaaggttcacttgtgccactgctgactgtgggtccgaccagatagcttgcaatgganaaggtggagccccttcggcaaccctggccgagttcacta

SEQ ID NO: 17289 - DNA, 310 bp, Gossypium hirsutum
  unsure (1)..(310): unsure at all n locations; Clone ID: LIB3145-047-Q1-K1-H8
gtttccttgttttatacatgaacaagatcaatttttcctttgaaaacatgaacaatatatatatttgagaatattatatattcatttgtacaaaagacttcccacatacttttgggactcctttcaagggccgttgggcttattgtaatcttttaatccaaaatagtttgcttcanaaaaaaaaaaaaaaaactaaatataaaaaaaaataatatgtcaaaaaatacaaaaagggcgggcttgcttggatagacaatcgttaagaatactcgcatcttaaaagggcgctcttttttaaggagagatcgat

SEQ ID NO: 17290 - DNA, 280 bp, Gossypium hirsutum
  Clone ID: LIB3145-047-Q1-K1-H9
cccacgcgtccgatcgattaatgtttatgtgtaagctgcaaaatttggactgcaaagtgcatgatttctgtgccctcgatatttttgggcttaatgggccaaaatttgaatgatgggccaacgggcccaattcgctgagtcttggaaaaaaaaaagaggagaaagggagttttctctctggggaagcccagaaatcggtcaggaaagccaccgcacgccgtcgcagcttcaccgcgtcggccaccgtacacggtggccgaaaatcgccttaaggtatgga

SEQ ID NO: 17291 - DNA, 250 bp, Gossypium hirsutum
  Clone ID: LIB3145-048-Q1-K1-A10
gatatgagcagtgacagtgaagttgataaccctctcgtgtaggatgatgggtctcatgtgaatgccgagatgaacggggacgacaaaaaggaaattaatttgatcatagtttgttgaaaggaacataaatctaaagagcagatcatatttaaagcactaagcttggattactgttgctgttaggaaaaaaaatttggcttgcaaaatagttttctaaagtatggttttttaatagatattaattcattgc

SEQ ID NO: 17292 - DNA, 385 bp, Gossypium hirsutum
  Clone ID: LIB3145-048-Q1-K1-A11
cttttattcactccgtaagagccttggaattgctgaagaatggatatatgtaattaagagagatcgagatggaaaaatttcttggcatgcctttgatcctgtataccagctctggcagccacttcctcctgtccctaaggagtattctgaagcctttggctttggatgtgctgtactcagtggttgccacctttatctattcggtggtaaggatccattaaaaggatcaatgcgacgagttatattttatagtgctaggacaaacaaatggcaccgtgccccagatatgcttcgtcgaagacatttctttggttcgtgtgttataaacaattgcttgtatgttgctggtggagagaatgaaggggtacatcgatcattgaggtct

SEQ ID NO: 17293 - DNA, 387 bp, Gossypium hirsutum
  Clone ID: LIB3145-048-Q1-K1-A12
cccacgcgtccgcggacgcgtgggatcttctgagaaggatttagtgagagcagaagaatattgtgggagagcaatcttggcaaatccaaatgatgggaatcttctctccatgtacgctgatttaatctggcaaactcataaagatggtcctagagctgaaacttactttgatcaagccgttaaatctgcccctgacgactgttttgtactagcatcatatgcacgatttctttgggatgctgttgaggaagacgatgaagaggaaaaggctggcgaaaaatttagtaatggatcagatcaaagttttttccatggagctcctcctttggctgctgcttcttaagcctcgtggtgtgaaataacttgtatttaagcttttttggactt

SEQ ID NO: 17294 - DNA, 422 bp, Gossypium hirsutum
  Clone ID: LIB3145-048-Q1-K1-A2
ggaccggtactgactggccgggccgacgcacgcggggttttcggtgttcttgcaatgtcaaggtccatcggtgatagatatttgaaaccatggattatcccggaaccggaagttatgtttattcctcgagctagagaagatgaatgtttgattttagccagtgatgggttgtgggatgtgatatcgaatgaggaagcttgcgaggtggctcgacggcgaatcctgctctggcacaaaaagaatggggttccatctctggtggaaagaggcaaaggaattgacccagcggcgcaagcggcagctgaatacctttcgatgctggccatccaaaaaggtagcagagacaacatctctgtaattgttgtagacttgaaagctcaaaggaagttcaagagcaaaacataatcagagtctcaaccccc

SEQ ID NO: 17295 - DNA, 384 bp, Gossypium hirsutum
  Clone ID: LIB3145-048-Q1-K1-A4
agacatcctaaaacatatatttgcatatatcattgttgtctttgtcattgtttttccaagaaagcacaatgaatgtagacgaggaggtggagagactcaaggaagaaatccaaagactaggccagatccaatcagatggttcttacaaggtcacattcggggtgctatttaatgatgatcgctgtgcaaacatctttgaagcactagttgggacactaagagcagcaaagaaacgaaaagttgttgcatatgatggtgaactactgctgcaaggagttcatgacaatgtggaaatcattctcaaagctacaacaccagcagcagcccagagtagcaactaatgcagttctaaacaaataattgcaattatagttttgcagcaaa

SEQ ID NO: 17296 - DNA, 372 bp, Gossypium hirsutum
  Clone ID: LIB3145-048-Q1-K1-A5
ttttggggtcctttttcttattttcccgtactttctctagtgtttcattcttttaatgtttgagttacctcctttaggatttgggatctgggtagttctcagctttagtagtttacatttgctgattctcagaagttgtgttttttttttggggggtatagagaaatagatcatggcaaaagtagatgaaccacagccacatccaccaaaggagcagctgcccaacatttcttactgcattacaagtccacctccatggcccgaggccatccttcttggtttccaacattatcttgtgatgcttggaacgacagtgatcattccaacttcacttgttccccagatgggaggtggaaatgaggagaaagcaaa

SEQ ID NO: 17297 - DNA, 387 bp, Gossypium hirsutum
  Clone ID: LIB3145-048-Q1-K1-A6
ggaaaaactgattccttgagcttcatatgagctacaatgcacagcaaaacatcctgcactgttccttggtacctcttgcaaaaaaccagataagccattcatcagtattttgcaccagataggtataccccaagagagtttaaggcttgaccatatttctgactgtaggacactgtcgaaaaacatgatagctgtgctcttctccaacaccacaacgggggcacatggtattgttagccaccctcttgcaacatagattaaccattatagagatgaaattccagtagatccgccaaaccagtattgtaattttgttggtagttgtatgtcccatagttttttaaagaaagctttagtttcggtttgtaataagtaactagtaggatc

SEQ ID NO: 17298 - DNA, 362 bp, Gossypium hirsutum
  Clone ID: LIB3145-048-Q1-K1-A7
gcgcttttattcactccgtaagagccttggaattgctgaagaatggatatatgtaattaagagagatcgagatggaaaaatttcttggcatgcctttgatcctgtataccagctctggcagccacttcctcctgtccctaaggagtattctgaagcctttggctttggatgtgctgtactcagtggttgccacctttatctattcggtggtaaggatccattaaaaggatcaatgcgacgagttatattttatagtgctaggacaaacaaatggcaccgtgccccagatatgcttcgtcgaagacatttctttggttcgtgtgttataaacaattgcttgtatgttgctggtggagagaatg

SEQ ID NO: 17299 - DNA, 384 bp, Gossypium hirsutum
  Clone ID: LIB3145-048-Q1-K1-A8
caagccttggtgtggttgaactcactgtggctcttcattatgtcttcaatgcccctagagacaagatattgtgggatgttggtcatcagtcttaccctcacaaaatcttgactgggagaagacataagatgcataccatgaggcaaactaatggattggccggattcacgaaacggtcggagagtgaatacgattgcttcgggactggtcacagttcaaccacaatctctgcaggcttggggatggctgtgggaagggatctgaaaggtgaaaggaatcatgttgttgctgtcataggtgatggtgctatgactgcaggacaagcttacgaagcaatgaacaatgccggatatcttgattctgatatgattggtattcttaatg

SEQ ID NO: 17300 - DNA, 363 bp, Gossypium hirsutum
  Clone ID: LIB3145-048-Q1-K1-A9
atctttgggatcaaagttggcaaactgctattgtgatggagaatcctagtttcactggggggcttgtctgtgccttgtgcatgtcctcaatggtacaatgcaaatacaactgccccgtatagtacgatccccatgatatgcaagaacgataccaacgatgggtggcccgtcatggccgaaagtacaagagcaagaacgaatgggcattgcggttctggatatacaaatccaattcttagttcattgattgtgtcaattcacagaacctatcattcaatgtgaccgataacgaattcgcatacatgacaaatgatgagttcagagctatgtattttggttaccaaagcattagatctccatgtg

SEQ ID NO: 17301 - DNA, 378 bp, Gossypium hirsutum
  Clone ID: LIB3145-048-Q1-K1-B1
ataaatttcatggcaaggggcctggcaaaatgaagcaagaaaagcgaatgaagcaatatcaggaagagttgaagctgaagcaaatgaaaaattcagatacaccttcactttcagtggagaggatgagggaagctcaagctcagctgaaaacaccctaccttgtccttagtggtcacgtcaaaccagggcaaactagtgatcctgcaagtggctttgctactgttgagaaggattttccgggaggcttgacgcctatgcttggtgatagaaaggttgagcatttcttgggaatcaagcgcaaggctgaggcagggaattcaagcacaccaaagaagcctaaaacttgaaaattgtaagatgtatggtttgggtatgatg

SEQ ID NO: 17302 - DNA, 283 bp, Gossypium hirsutum
  Clone ID: LIB3145-048-Q1-K1-B11
cccacgcgttcggtcgggattacccgctgtgtttaagcatatcaataagcggaggaaaagaaacttaccaggattcccctagttacggcgagcgaaccgggaaaagcccagcttgagaatcggtcgccatcggcgtccgaattgtagtctggagaagcgttctcagcgacggaccgggcccaagtcccctggaaaggggcgccggagagggtgagagccccgtcgtgccctgaccctgtcgcaccaagaggcgctgtctacgagtcgggctgtttgggaatgc

SEQ ID NO: 17303 - DNA, 387 bp, Gossypium hirsutum
  Clone ID: LIB3145-048-Q1-K1-B12
cccacgcgtccggtgaagccaccttcaccgggaacaccgtgtcctccaccaccacctccggcacaacaaacatgccccatagacactctcaagctaggtgcatgtgtggacgtgttgggtggcttagtacacatcggcataggtagcagcgccaaagacacttgctgccctgtactacaagggctgttggatttagacgctgccatttgtctctgtactacgatcaaagccaaccttttgaatatcaatattataatccccatagctcttcaggtcctcatcgactgtggcaaaactccacctccagggttccaatgtccagcacaatgatgaaaaacataaaaaccccatgtttttttttctttcgaaagaacaaatattttcatg

SEQ ID NO: 17304 - DNA, 384 bp, Gossypium hirsutum
  Clone ID: LIB3145-048-Q1-K1-B2
cccacgcgtccggccaacaataagttctataataaagttccaaatggatcgttcctctcattcagtctcagttgctttctttcttctgctgattcttttaaccacagagatggggcctatgtcagcggaggctaaaacatgcgagactaaaagcggtaaattcaaggggatgtgcatgagttctaccaactgtgctagtgtttgcaaatcagagcctggttttgatggtggacattgccgaggttttcgtcgtcagtgcgtttgcactaagccttgttaaaccactaagctttgttagatcagtaatctattatatttcattgtcacgaagatttccccttttttttttgcttatcatgcattttgtgcttgagagttgagaga

SEQ ID NO: 17305 - DNA, 380 bp, Gossypium hirsutum
  Clone ID: LIB3145-048-Q1-K1-B3
cttggttatgggtagccctttacaattccatatctgattttaatccttatactttatttttcatgttcatttcgtcagtttcttgcttatattaagtttctgccgacaaaatataagataaaaagggggtttattggcattgctacctattgctatttttttaccacttcaataatatatgggctgaggtgcacatttcatgggaggtgtagaggatgatgaaccagcctcaaaacgcatgaaactatcctctgaagaattgatacatctttcaaacggttcaactgttaaagagtctatagttgggtcttcaagagacttgatggctcggcccctgcagtctgatgggggcgaagaagttgttggttcaaaaggagtta

SEQ ID NO: 17306 - DNA, 386 bp, Gossypium hirsutum
  Clone ID: LIB3145-048-Q1-K1-B4
caaggatgattcactttgtacttttaattagtcgacaagggaaagttaggttgacaaaatggtattctccttattctcagaaggaaagaacaaaggttatccgtgagctcggtggggtgattctcaatagagggccaaaactttgtaattttgtggattggagaggatttaaatttgtttataaaagatatgctagtctttacttctgcatgtgcattgatcaggatgacaacgaattagaggttctagaaatcattcatcactatgttgagatacttgatcgatactttggcagtgtctgtgaattggatttaatcttcaacttccataaggcctattatatattggatgaactcttacttgctggtgaacttcaagagtcgagc

SEQ ID NO: 17307 - DNA, 92 bp, Gossypium hirsutum
  Clone ID: LIB3145-048-Q1-K1-B5
tatggattattcactttgtactttaaattttttcacaagggatatctaagttgtcaaaagggggtgctccttattctcagaaggaaaaaaca

SEQ ID NO: 17308 - DNA, 356 bp, Gossypium hirsutum
  Clone ID: LIB3145-048-Q1-K1-B7
gcagtctcgtatgcagcctccattgctttactttcagaattcttcaaataggagaggagtgcagactcatttccccacttctgctagagtttcaaggttaaggaatcgaatattgaatcaacctcggatggcaccatctaggacaaggaattttcaatttcctttagacatggacttagatatgagacttgatatactggaagccatggatgctgcaattggagattcttatgacatgggaatggctagtcacattttccaaattcagcgtgattttaatgaaattgattacgaaatgctgttggcccttgatgattactatcatcagcattggtgtgcatttattaatcaaatta

SEQ ID NO: 17309 - DNA, 376 bp, Gossypium hirsutum
  Clone ID: LIB3145-048-Q1-K1-B8
cccacgcgtccgaaaaggccaacccgatccggcaccaggatgttgttcgggtgctaaagggcttgctaagcaagctaacaccaaactagataggcaaggaatatgcgagtgccttaaaggtgtattgccaaaaataggaccatatgaccctaaaagattccctcttattgcccagaaatgtggtatcaatactttaattcctccaatttctgccactactgattgcaccaaggtgtgaagagtgaagtggggggaatgtgaaaatgaagagcatgccaaatgaataaaaaaatgggcagaacttttcataaattgatctgtaatcaaccccttgtattgcacttaagttatgattaattaaataataattacaatt

SEQ ID NO: 17310 - DNA, 297 bp, Gossypium hirsutum
  Clone ID: LIB3145-048-Q1-K1-B9
agctgtcggtgcttaagggaaaccactgactgtacggcaagaagtttttggtgctctgcgtccaactgctctgaggggtacatacacagactatgctattcttactgaggactaactttcttctaaaccagcttcattgactcatgcggtaacaaatgccattccatttgctacattgactgcatggagtgccttaaaaagtcctgcaaggacaactgtaggtgaaacgctgttagaagtatgcagcggaggtacagtaagtttttctagcattcaaatcgcagttgctgcagggtg

SEQ ID NO: 17311 - DNA, 68 bp, Gossypium hirsutum
  Clone ID: LIB3145-048-Q1-K1-C10
aaatttgtagctattttgttaagtgaattttttgcttcttttttttattattaactttaattttgatt

SEQ ID NO: 17312 - DNA, 375 bp, Gossypium hirsutum
  Clone ID: LIB3145-048-Q1-K1-C11
cccttggattctcaggtggtcagcattgcgaaattccaagggggtggtgcattcaatgtcattccggattctgtcaccattggtggcactttcagggcattttcaaaagaaagctttcttcaactcagacaaaggattgaggaggttatatcgaaacaagcaagcgtacaaagatgcaatgcaacggtgatcttcgacgaaaggtccatgtaccctgtgaactcaaacaacaaagagttgcatgagcatttcagaaaggttgcaggggagattttgggctctgagaacattatagaaatgcagccgcagatgggaggagaggattttgcattcttttcaaagtcgatccctggactttttttctttcttggaatg

SEQ ID NO: 17313 - DNA, 375 bp, Gossypium hirsutum
  Clone ID: LIB3145-048-Q1-K1-C12
gaagaagcatccctttataccccactttaagttactcaaaatttccgtacttttattttttgcatggcagtaagtctattgtcacatgagttgtctgacctgtgtcttgggaagccagcactaaggtcactttccatcacatccaccattgctgaagctcttgaggtcttgaaaacctctgatgacaactttgttagtatctggaattgtgatgatgttgagtgttgtagtagatgtgtaggcaaagtttgcattgtggatgtgatttgttatctttgcaaagatgaaaatttggtatcaccttcaattgctttgaaacaaccagtttctgtacttttacctaagatccctggtcttattatccatgtggaacca

SEQ ID NO: 17314 - DNA, 381 bp, Gossypium hirsutum
  Clone ID: LIB3145-048-Q1-K1-C2
cccacgcgtccgaaaaaagggattttcgtcgtttgtggatcactcgaataaatgcagtaattcgtggagtgggggtatcctatagttatagtcgattaatacacaatctgtacaagaaacagttgcttctgaatcgtaaaatacttgcacaaatagctatcttaaataggaattgtctttatatgatttccaacgagattagaaaataaggagatcggaaggaatccaacgaaatgctttaaatgaaatggggttccctcgagaatgaactcggggaaagtagagtagaaattaatatgataaaaaattctgattctgataaggtcatcaaaacaagatgagcgaaaacgctcaataaaaaaaagattttttttctttccc

SEQ ID NO: 17315 - DNA, 390 bp, Gossypium hirsutum
  Clone ID: LIB3145-048-Q1-K1-C3
ttcgatcgttggatccatatttttccttccattcaacccaggactatatttggtgacaacgatgtctcctgcatccaagtcgaagtccaaagataaaaaatccagcaaggactctcagaaggcttttgcaaggccttctggacctgctaatgcagctagtggtgttccagctagtgcttacaatccacttttgggaacattccataccattgaaacagcaccatcatcatctgcttcacctcttcagagcaatggtcgtttccgaaacatagacgacacagatgagcatttgggaggctcacttggagctggggttgactttgattcaatatctaataatggtagctggtcaggtgaatcagaagagcacaaagagaaaacttcaaatct

SEQ ID NO: 17316 - DNA, 388 bp, Gossypium hirsutum
  Clone ID: LIB3145-048-Q1-K1-C4
ggatgctgacactcttggattgactggccatgagcgctacacaattgatcttccaagctgtgtgagcgaaattcgacctggccaagacgtcacagtggctacagacagtggcaggtcattcacctgcactgtacgatttgatacagaggtggaactggcatatttcaaccacggaggcattctgcagtatgtcatcaggaacttgatcggctcaaaacagtgattacgctgtgtaatttatggttgcggagtttgacgaaatatttcataaccgtggttgctgcatatttaaatcgggtttgtgaactgaaactattaagtttgcagcaaaagttagttgaataaaaaattggagacagaggtgggttgggattcaaggcaaggcaat

SEQ ID NO: 17317 - DNA, 392 bp, Gossypium hirsutum
  Clone ID: LIB3145-048-Q1-K1-C5
cgctcatcgaacttccgatttgctttttgaaacgcaagaaagaagagaaatctcaatggcgccgaaagccgagaagaagcccgctgagaagaagcctgccgagaagccaacggaggagaaaaagtccaccgtcggcgagaaagccccagcggagaagaagccaaaggccggcaagaagcttcccaaggaaggtccaggggccggagataagaagaagaaagaaagccaagaagagtgttgagacctacaagatctacatcttcaaggtcctgaagcaagtccatccagatatcggtatctcaagcaaagctatgggaatcatgaacaagttcatcaacgacatcttcgagaagctggctcaagaatcttcaagactggcaaggtataacaag

SEQ ID NO: 17318 - DNA, 376 bp, Gossypium hirsutum
  Clone ID: LIB3145-048-Q1-K1-C6
cccacgcgtccggagaaggtgggatggaatcttcatcaatgtactatttaaaggctcgtttccactttaacaagaatcagtttgctgatttgatgctaattggtggaattgtagcaaccatttcacagttgtttatcatgcccttactagtatctcccataggagatggaaggttgctttcaataggactctttgcctcctgtgtatatgccattctttacagtatagcctggtcagcttgggtcccatatgcagccgctgcagtgtctactgtgatggtctttgcaccaccatcattacgcagtattgcatcaaaacaagctggccccagagaacaggggaaggctcaaggatgcatctccggaataatttcttt

SEQ ID NO: 17319 - DNA, 151 bp, Gossypium hirsutum
  Clone ID: LIB3145-048-Q1-K1-C7
aacaaatcaaactccagccttgctttgctttaagtgccacattaaatttagaaaggcatgtaaaacccaaaaaaaaaaaaaataaaaaaaaaaaaaaaaaaaaaaaaaaaaaaaaaaaaaaaaaaaaaaaaaaaaaaaataaattaataaa

SEQ ID NO: 17320 - DNA, 391 bp, Gossypium hirsutum
  Clone ID: LIB3145-048-Q1-K1-C8
cgaaaatagacagttgtctcccagtgatgatattgacgctgagggataagagcggcaacaagatatgggctgactacatttgacaatggtttttgtgtatgagaaagagtaatctgtaaattcatttccattgttggagatgtacaaagttcatgtcaagctgattctgttctttaaaagatgtgcaattcagtcaacagttgcatcttctgaatttcatattcctgcattgtataaatctgaaaattgtcacatgtggtcaaaacatagacgacacaaattatccttttgggaggtttactgggggccggtgttgaattttaaatcaaacgttatctgtgcgttgggtggtttttttgaatcataagagcacaaagagaaaacttcaaat

SEQ ID NO: 17321 - DNA, 384 bp, Gossypium hirsutum
  Clone ID: LIB3145-048-Q1-K1-C9
gtcttgaccttgcaggtcgtgatctaaccgatgccttgatgaagattcttaccgagagaggttacatgttcaccaccactgctgaacgggaaattgtccgtgacatgaaagagaagcttgcttatgttgccctggactatgagcaggaactggagactgccaagagcagctcatctgttgagaagaactatgagttgcctgacggacaagtcattactattggagctgagagattccgttgcccggaagtcctcttccagccatctttcattgggatggaagctgctggaatccatgaaactacctacaactctatcatgaagtgcgatgtggatatcaggaaggatctctatggtaacattgtgctcagtgggggttcaacta

SEQ ID NO: 17322 - DNA, 391 bp, Gossypium hirsutum
  Clone ID: LIB3145-048-Q1-K1-D1
gaagggcatctgagctatacatgcagtgtgacagaccacagcctgcatctgattcacttgccaaggctgcccgtgctttggaggatgctttgcctgatgatgctgttcaactatataccgatgcttgtgttattctcgaagatgatggaaaggaacagatggcctttgatctgtatcgagctgctgctagtatttatgtaaaacttgagaagttcactgatgctgctactttcctattgaggttgggcttagcagctgacaagtgcaatgctagaaatagtcagtgcaaggcgtatcttagtgcaattattgtgtatctttatgctcatgacttaaagcaagcagagaagtgctacaatgattgttcacaaatcgatgctttcttaagaag

SEQ ID NO: 17323 - DNA, 386 bp, Gossypium hirsutum
  Clone ID: LIB3145-048-Q1-K1-D10
cccacgcgtccggtttttcttttattttcaaatgttttaaaattataatgaaaaagaatagaaggaaatagaatcgaaataaaagcatagaacctagaaaagatgaatctaaaatcaccttttaaaaactgactttggattggtcttatattttctttacaatatgcgtgtatttctctgggaaaaccgaccccctttacaattgattatctggctttttatagccgaataaagagaaataagaaaaaataaaaaaataaaagaaaatacaatggccttggattttctgttatgcctttgctgtcaattgctagatatctgctgtgttgtttgctagtccgttttgcaggttcaaaggtcgtggtgttgctgatgcggtggagctg

SEQ ID NO: 17324 - DNA, 357 bp, Gossypium hirsutum
  Clone ID: LIB3145-048-Q1-K1-D12
aaaagattctccttttctgtgtttcaatcccaactgccgaagactggttcttgaaccgaatttctgttaacattaaaaaagaaacccagaaatggtggagacattgccggttgggcggtttcagttgcaacaacaaaggctggaacttaagagatggattccggcgtttctttcttcgcataaaacgctctttgttctcctctggatcgcagctttcggttcggtttttttctggcaatggaatatcggtgggagtgggttttcgatattcgccaaagttggaccgggtcggcctatgcccaaaatgcgtcctttcgcgtttaatttgactgatttcggtggggtcggtgatggggt

SEQ ID NO: 17325 - DNA, 388 bp, Gossypium hirsutum
  unsure (1)..(388): unsure at all n locations; Clone ID: LIB3145-048-Q1-K1-D2
ctcaaagttgctggaatcaagcaactacattacgagacgacaagctatcaagttgttgggagatattttgttggaccgctcaaatgcagctgtcatgaccagatatgtgagctcaaaggataacttaaggattcttatgaatcttctaagggaatcaagcaagagcattcaaatagaagcttttcatgttttcaagttgtttgctgcaaagcagaataagcctccagacattgttagcatactcgttgccaataaaagcaagcttctacgattgtttgcggatttcaagactaataaagaggatgaacagtttgaggcggacaaggctcangttgtgagagaaatcgctgcccttgagcttagagacggcccatagtgaactctagtg

SEQ ID NO: 17326 - DNA, 390 bp, Gossypium hirsutum
  Clone ID: LIB3145-048-Q1-K1-D3
attttacagttggggggaggaatcaggaggcaggcttgggcatggtgtggaagcagatgttcccaaacctaagcacatagatactctcaatggcacgaaatttgaatcagtagcatgtggggagtatcactcttgcgctgttacagtctctggggatctttttacatggggtgatggaacacacaactcaggtcttcttgggcatggaactgaagtcagtcactggatccccaaaagggttagcaacatggaaggtaaacatgtcttatatgtatcctgtggaccgtgtcatacagctctggtgacatgtggcagccagttgttcacatttggagatggatcttttggtgccctaggccatggggatcacagtagctcaaacattccccg

SEQ ID NO: 17327 - DNA, 384 bp, Gossypium hirsutum
  Clone ID: LIB3145-048-Q1-K1-D4
cactttcgaaattgataagaattcaattactccgtgttttttagagagacagaatttgctaaggctagagaggtgtttttaccaaattggtgtatgaaactaaattagtcatacatggtgatactgttaatgcatttcaaaggggtgggtgccaaatccgttacttccgatatacatagagagaatacacagagataagcatgggagtgattcagcaacatatgatactgaaggaaggttcatgccagtgaacctggagaacatgttcaccaagtatgcactcacaaagcccgacaatttatcactcaaggagttgtggcagatgactgaaggaaatcgggccgctttcgactatcttggatggttggcatccaagttggaatg

SEQ ID NO: 17328 - DNA, 385 bp, Gossypium hirsutum
  Clone ID: LIB3145-048-Q1-K1-D5
gtcgatatcaaataaaaaactttatgtttcttctccaccattatcttccatgctcacagtttggttatgtccctaagtaacatcttcatttatcattctttttgttttcttctcatcctttccctctatataaacccattctcaacctctctccattcccataactttttctctcttcttatcacatcaacaaaatcatgaggagcatttgtgttgtgcttgttatctctttgcctttccttctcggcattgcccagggtttcgatttccacgacaatgatttaacgtccgaggatagtttgtgggatctatacgagcgctggcggagccaccacacggtttccaggagtcttgacgagaaacatcggaggttcaatgtgttcaa

SEQ ID NO: 17329 - DNA, 383 bp, Gossypium hirsutum
  Clone ID: LIB3145-048-Q1-K1-D6
ggagggtaatataatcggcaaaggaggtgccgggattgtttacaagggaattatgcctaatggtaatcaggttgcagttaaaaggttaccagcaatgagcctagggtcttctcatgatcatggattcaatgctgagatacaaacgttgggcaagattaggcacaggcacattgtgagattgttgggtttttgctcaaatcatgagacaaatcttttggtttatgagtatatgcccaatggtagtttgggagaggttcttcatgggaagaaagggggtcacttgcactgggataccagatataagattgcagttgaagctgctaaggggctttgctaccttcatcatgattgttcccctttgatagtccatcgagatgtgaaat

SEQ ID NO: 17330 - DNA, 367 bp, Gossypium hirsutum
  Clone ID: LIB3145-048-Q1-K1-D7
cggacgcgtgggtatagccaaataatcaaaagaaaaaaacaacaatttttgttctcctattggctgctactccgctgctgttttcttattttcttttgcaggtacggagcgtgtgctggcactaggcgtgagggtggcgtacagcctgttgatgtggaggcacgagcggcgttggggctgtacggcggctgaaggctgcgggccaagggagagaaaccctagggtttctatttctaaagtcttttaggctatttgggccttgtaactttgggtctgggtttatttgtaaatgggctatgggccattgcaatagttttggactttggactgttataaggtttggattttatatttattttttgtttat

SEQ ID NO: 17331 - DNA, 79 bp, Gossypium hirsutum
  Clone ID: LIB3145-048-Q1-K1-D8
tcatgcgttcgtttactcatatgctgactcttggtaaaaaacaataaaaaaaatgggagggttaaataaaaaaaatata

SEQ ID NO: 17332 - DNA, 384 bp, Gossypium hirsutum
  Clone ID: LIB3145-048-Q1-K1-D9
aaacacctgtaactcctcaaacccaatccacaggatcgaagacactgtttgttggaaacttatcctttcaaattgaagatgctgatgtaaggaatttctttaaaggtgctggtgaagtcgtcgaagttcgtttttcctctgatgctgaggggaactttaagggctatggacatgttgaatttgccactgcagaggctgcacagaaagccctggagttgaatggggaatatttgatgaaccgtgctgttagacttgatttggctcgtgaaaggggtgcatatacaccatacagtggcaatgggaacaattcattccagaaaggtggaaaaggtcaatctcgaacaatattcgtcaaaggacttgatgcatcactcgatgaggata

SEQ ID NO: 17333 - DNA, 377 bp, Gossypium hirsutum
  Clone ID: LIB3145-048-Q1-K1-E1
gtgatgtccctggaataaaaaggttacttccatccgggtggagggaatcagaattttttaataatatttatgaactagtgggagtgccggttgttaccgtgcaactccgatacaatggctgggtcacagagttgcgggatctacaacgggcaaggcaactgaggcaagctataggccttgataatcttctgtatactccagatgcggatttctcctgttttgcggacctagctctcacttctcccgaagattactacatcgagggacaaggttcattgctccaatgtgtattgacaccaggagatccgtacatgccgttgccaaacgacgaaatcattaagagagtatcaaagcaggttttgactctatttccatca

SEQ ID NO: 17334 - DNA, 385 bp, Gossypium hirsutum
  Clone ID: LIB3145-048-Q1-K1-E10
cccacgcgtccgcaaatgccttatctatcgaaatccctaattattagtcagagccagagagatcactggtttgttgatttcttacccccaattcctcgattgctttttttacttacaaggaaaaggttcagtgtttaggtttcttgcaaacttacataacccacacagagaagacgaaaaaggtggcattcgattctggtttttggtgaattcgacttttaagacccgttgaatgaagtgaaatcgtcttcacataacccacacagagaagaccaagaaggtggcatttggtttcttgttttactactggcggtattcaagggtcaatttcttttattttgcggatttaatctttgggttttctttgtttttccatccccaattt

SEQ ID NO: 17335 - DNA, 281 bp, Gossypium hirsutum
  Clone ID: LIB3145-048-Q1-K1-E11
cccacgcgtccgcccacgcgtccgagatcatccaactcaaatggtagttttctttagtttaccttctgatatacggttggaatgggtcagaagatttcttactgaccattaaaatttatggttttgttgatgacattttcgtaactttttctgtttgtaatatttgggatggtatgtcatatacaatgttctaactttttgatgtggcaaaactgtataacatatgggttgtgacatagaatttcatgaatctcataaaaaaaaaaaaactattaaaataa

SEQ ID NO: 17336 - DNA, 298 bp, Gossypium hirsutum
  Clone ID: LIB3145-048-Q1-K1-E12
cttttcaaaatgaagatcaagccttacattccagatttcaagctagcttttgaacatttctgcattcacgctggaggaagagctgttttggatgaactggagaagaatttgcagctctccgaatggcatatggaaccatcaagaatgactctcttccgatttggcaacacctcaagcagttctctgtggtatgaattggcatattcggaagctaagggtaggattaggaaaggggacagaacatggcaaatagcatttggttctggattcaaatgcaacagtgctgtatggaaagctt

SEQ ID NO: 17337 - DNA, 391 bp, Gossypium hirsutum
  Clone ID: LIB3145-048-Q1-K1-E2
aacacacttgctaatattgctacttggagtggtggctctcgccactccctcttttggtacctatgagtctcccaactatgggaagccccctactcctgtttataaacctcctaaggtgaaacccccaccttatgaacatcctgtttataaacctcctaaggtgaaacccccaccttatgaacataagccccctgtctatgaaccaccaaagaaggaaaagcctgagcctaagccaccagtttatacacctccaaagaaagagaagcctgaacccaaaccaccagtatatgaacctccaaagaaggaaaagcctgagcctaagccaccagtttatacaccaccaaagaaagagaagcctgagcccaaaccaccagtttatgaacccccaaag

SEQ ID NO: 17338 - DNA, 382 bp, Gossypium hirsutum
  Clone ID: LIB3145-048-Q1-K1-E3
ttggatcatctttctgcaagacaacatttgaggatgttttccctgctgaagcaacaagcattgaggagtatctgcagcaggaagattggcaaaaggaaaaacgggtcttcttatagagtttgagcagaatttcaacattacctaagacaaacatgattgataaaagtagtggtggtattcgttcaggtcaaatggttcccatggcttctagttctcatgtttcttctggtccttctgccaatgggcttctacctttagccgacaagccagttgttgagaaaaaagtgtcggtatatgcggaagttgttagaaatctgaacaatgcaagacaacaaggcttgccatttaaagcctgtgccatcagcgcttgtggtaattttgc

SEQ ID NO: 17339 - DNA, 382 bp, Gossypium hirsutum
  Clone ID: LIB3145-048-Q1-K1-E5
cccacgcgtccgcccacgcgtccgatcattatgcactttcttttcggctggatcaacactctactcttgtttgaaaataccttacaataaagaaagttttactgccttacaatgttttcgagtataactggaattagtcaaaaacactagaagcataaaaagtagtttatctggaattcgtgcatcaaatgtgactagatgcaaaagaaggttctttgcctgctcaaaagctagtagctgtatagcgaaaggagaggcctaagaagcaactaataagcacgacaacatgcagcaacaagtatgcaggcagagtataaacctttttaaatctttcagagccatacatatgctacagatgtgaagtgtattacataattaaaag

SEQ ID NO: 17340 - DNA, 387 bp, Gossypium hirsutum
  Clone ID: LIB3145-048-Q1-K1-E7
ctcaagcgagcttgtatctcacggcaatcgtctcctctctcttgtctcgtccatttttggtgatactgaagtcaatgtttatgggaaagtcccattgatgcactcgtggtacaaaacccgggcacacccttctgaactgactgccggcttctataacacggcctcaagaaatggctatgaagcagttgcagagatgtttgcaaggaattcatgcaaaatcatcttgcctggaatggacctgtcagatgagcaccagccacacgatgctctctctagccccgaatcattacttgcacaaattcgaacaacttgcaacaagcacagggttgaggttgccgggcagaacctggcctctggagctcctggtggtttagagcagattaagaa

SEQ ID NO: 17341 - DNA, 371 bp, Gossypium hirsutum
  Clone ID: LIB3145-048-Q1-K1-E8
gaaaaacttgcaaaagaaatacaagatcgtctgatgaagattgttaagaaaagagaagacgaagctgtgaatggagaagtccatagcttcggcaatgattttcttggattacttctaaatgtctatcatgattcggatgagaaaaacaggatttcattggaagacttggtagctgaatgcaaaacattctattttgctggacaagaaactgttaattccttacttgcatggatagtcttgcattggcaatccatggagattggcaagaaaaagcgagaagagaggtggttgacatatttggtaaccaaaatccacattttgaaagcatcgccaaactcaaaataatgaccatgatcatcaatgaaactcta

SEQ ID NO: 17342 - DNA, 382 bp, Gossypium hirsutum
  Clone ID: LIB3145-048-Q1-K1-E9
cggacaagatcgccaacatctcaaacacgttccttccacaacaccccttactttgggtgaacaccatgaaccaaattcccaaatggaactagttggtcactcgattgtcttgacatcatatccttattcagatcctcagtattgtggaattctgacttcatatgggccacaaatgatggtgtcaccacatctatatggaatgcatcatgctagaatgcctttgcctcttaaaatggaagaggagcctgtttatgtaaatgcaaagcaatatcatggcattttgaggcgaagacagatacgtgctaaagctgaacttgaaaagaaaagccattaagttagaaaggtaaaaatggtattcttttagggggctttcccccccatt

SEQ ID NO: 17343 - DNA, 218 bp, Gossypium hirsutum
  Clone ID: LIB3145-048-Q1-K1-F1
ttcatttttggtcgggttatacagagaatggagtatgtatgtatgtatgatatttgattcctgtttgactcaagttgagacgctcatgtaagagagacagagagcaagtgtagttttccaatctttcttgaggcatagagattgaggaaaaaaaaaaaaaaaaaaaaaaaaaaaacattaaatataaaaaaaaaaaaaaagaaataaaaaaaaataaa

SEQ ID NO: 17344 - DNA, 328 bp, Gossypium hirsutum
  Clone ID: LIB3145-048-Q1-K1-F10
cactaattgactaatacccagaggccagatattgtttatcggggtcgtctgattctatgagcaggctatgggaacttggtcagcaacgctgtgtgcattcatatgctgtgcatacggattctgtttgggcacttgcaagcaccccaacctttagtcatgtttatagtggtggtagagatctttctttatatttgacagacttgacaactagagagtcttttgctttgcacaaaggagcatacgattttgcagctggcattgcatgatgatagtatatgggttgcaacgacagattctttggttcatagatggtcttgttgaggaaaaa

SEQ ID NO: 17345 - DNA, 364 bp, Gossypium hirsutum
  unsure (1)..(364): unsure at all n locations; Clone ID: LIB3145-048-Q1-K1-F11
tcgtttaccccctcataaatgaanttgttccgatccatccataacacccatatagcgcgggcagtcattctatagaaagccatgggtctactctcaatggaggacatgccttgaaaatatgctcccttgtttcagctcctgttagacaccttctacacatgggggaagccatcattctgagaaatttaagattactaaaactaggcatatagttacaaagtttctccattttgtaattttgattttcgagggtggattcattttccataatttcttgaatatttgcttgtgatctgaattgtatttgatccccgaccttctttgtgtaatataaaactttttcttttttattttataatggtat

SEQ ID NO: 17346 - DNA, 301 bp, Gossypium hirsutum
  Clone ID: LIB3145-048-Q1-K1-F12
catagttctaccgtcatggagagattacctgctatgcgttattctctgatttatgggggagcttacccatagtctcttttttgtcgttgttttcctgatcccaagattatggatttatgatgtgggaatgaaaaagaagggtgtggatgatttccctttttgtgtcacttggtcttctggtgagaaggaaaatgtctcttgtgaatctttggaagcatgctcgtattgctttcaacaagtattttttcaagtatgctgtgaatgattccttactcctgcttgttcgtgttcacccattcca

SEQ ID NO: 17347 - DNA, 388 bp, Gossypium hirsutum
  Clone ID: LIB3145-048-Q1-K1-F3
gaaaaaaaaaagatggcgtctgtaataaaatctgcaatcttaattctgtcggtgtttttatctgtaagcttcagttcgggtgttaggttgctccaggaacagcccaatgatgacctcaaaaacatggacgctattcctcccattgatgcactcaaccctaccgagttcaatggacccggtgttggcattcacgaagatcatgttgtcccaaaaggttccgaaattggtactcttggttttggttttgaaggtggtcctgaaaaatgttgttcttctggatgttccggtaattgtaatcctggtggtttcgttctaccatttcctcaaattccagaaatcccaagaattccacagatcccacagatcccacaaatcccacaaattccac

SEQ ID NO: 17348 - DNA, 373 bp, Gossypium hirsutum
  Clone ID: LIB3145-048-Q1-K1-F4
gccagggatgagcttcatcgtatgctaaatgaggacgagctgagggatgctgtgcttcttgtgtttgcaaacaagcaagatctgccgaatgctatgaatgctgctgagattactgataagcttggccttcactcccttcgtcagcgccactggtatatccagagtacttgtgccacctctggcgaagggctgtatgagggactggactggctttccaacaacattgctaacaagggttgagggttggttgaattccagtcatatcttcaggcagctatccttattattttctggttccttttttaagttttacaggaaatgtatcagattgtgttatataattaatatatattcgccgtactactgaaattag

SEQ ID NO: 17349 - DNA, 298 bp, Gossypium hirsutum
  Clone ID: LIB3145-048-Q1-K1-F5
gccacgcatgaggtaacttgtatcctgcctgacgaccaccggtagaatgcgtgtctacaggaggtggcgacgaccaaaatccgacacatgctatgcacgccgttgtaacgactgctatgctcgtccttgggtgcctatgtcagtgtctctgacctattctgagaggtggcggcacctatggcgaaagaatacttgaaggaacggacgtgggtttcaacatcaactctgacaataactggggtgggatgatgccaaccatatttgcaggcatctatacttaatatatacaggcacctct

SEQ ID NO: 17350 - DNA, 374 bp, Gossypium hirsutum
  unsure (1)..(374): unsure at all n locations; Clone ID: LIB3145-048-Q1-K1-F6
gattaccgcagttggttgagtggaatgcctgatttgttgctctggcggttccatggggactacaaaggtgaagccaaactcgtcgaggttaagggccctagagatcaactctccgaacaacaaagagcatggctgctgcttctaatggattgtggattcaatgcggaggtttgtaaagtgagccctacagtattatccccttgaggttagttaccctactaaaaacctgtattactcggacgtatttgaaagtgttgtatagttatgtataccatgtgagtatattcaattatttcaagtttttgttttacgtgtatttggactgtcaaattcttatatactntgatctaaatatgcaatcgatacatgttatt

SEQ ID NO: 17351 - DNA, 345 bp, Gossypium hirsutum
  Clone ID: LIB3145-048-Q1-K1-F7
caatcaataccctctaattttaaagctaagagatttaagttaacgaagcatttggtcggtgcgaagtaatggaaactaccggaaaagtaaagaagggagccggaggaaggaaaggtggtggcccgaagaagaagcccgtttcaaggtctgtcaaagccggtctccagttcccagttggtaggatcggccgttacttgaagaaaggaaggtattcacagcgggtcgggaccggagccccggtttacttggctgcagttcttgagtacttggccgctgaggttctggaattggctgggaacgctgcacgtgacaacaagaaaaacaggatcattccaaggcacgtgc

SEQ ID NO: 17352 - DNA, 72 bp, Gossypium hirsutum
  Clone ID: LIB3145-048-Q1-K1-F8
agtgtcttatgcctaacatgtcctgacagatattgcttcccataaatttgctcatcctgaatggcgaatggg

SEQ ID NO: 17353 - DNA, 370 bp, Gossypium hirsutum
  Clone ID: LIB3145-048-Q1-K1-F9
gtacccttcttcaacaccaatctcctctctctctctctctctctctattttgtttgatagaatacccagaaaaccccttcagtcttctagctctcaatttctttttattttataccttcttatttcatagatccagggtgctcttcttcttagcagttcacattggcatagataaaggaccgtacggtcagatctaagccgtattctagcgatgtctgttaccggttctcagcagaaatgcaaggcttgtcagaagaccgtttatcctgtcgaacttttgtcggctgatgggatcccttaccataagtcttgcttcaaatgcagtcattgcaaagggacactaaaattgggtaattactccttgatggaa

SEQ ID NO: 17354 - DNA, 390 bp, Gossypium hirsutum
  Clone ID: LIB3145-048-Q1-K1-G1
cagcttttgaagacggggacttgaagctcttcgagtcaagagcagtcacccattacattgctcatgaatacagcgacaaggggacccaactcttaattcctggctctaacaaggatatggctgtcttacaattatggaaggaagtggaagcccaccagttcgattctccatgttcaaaaatagcctgggaggcgttttacaagccattaatgggcatggttaccgactccgcggtcgtggaagaaaatgaaggtaagcttgccaaagttcttgacgtgtacgaggctcgattgacacggtcaaaatacttggcaagtgactgcttcaccttggccgacctgcatcaccttcccaccattcaatacttgttggctacaccttcgaagaagc

SEQ ID NO: 17355 - DNA, 323 bp, Gossypium hirsutum
  Clone ID: LIB3145-048-Q1-K1-G10
atcaaaacaacacattgcaaagagaaagggaatattatcaaaagaacccaaccatggcattggcaggaacaacccagaaatgtatggcttgtgacaaaactgtgtatttggtcgataaattaacagctgataacagggtttatcacaaggcttgttttaggtgccatcactgcaaaggtactttgaagcttggcaactacaattcctttgaaggagtcttgtattgcaggcctcattttgatcaacttttcaaaagaactggtagtcttgagaaaagttttgaaggtacaccaaagattgcaaagccagaaaaaacaattgat

SEQ ID NO: 17356 - DNA, 308 bp, Gossypium hirsutum
  Clone ID: LIB3145-048-Q1-K1-G11
ggatgagaaggaagaaagttttgagaagctgcaacagcaagagcgtgagaaggtcaagcagtctaaccccaatccttgaaatgcagaggaatacaggcgcagggcggatgaaattgcaaaattcataaagttctaggatgaagagatgcaagcttttgtgacagagagggataagctgatcaaagcacacgaaaagaagatggttggcatgagagagaggcattggcaggaagaagttgagcttgaaaaggagtttgatgctgaattgagccaactaatggggcaggtcactctaaatggctcaaaag

SEQ ID NO: 17357 - DNA, 377 bp, Gossypium hirsutum
  Clone ID: LIB3145-048-Q1-K1-G3
cccacgcgtccgcccacgcgtccggtgaggttgcatcttgtttctctgtcatgctaaattgtcactacttatataatttgatctttgcacttattgaatagtatccaaaggagtatgcaaagcgaattcaagaggagtggaaaattctggagagtggcttaccagaaacaatatatgtgagagtttgtgaagcaaatatgggtcttttaagagctgtcattatgggaccttctggtactccataccatgatggccttttcttctttgattgtttcttccctccaaaatatcctaatgagccaccgatggtttatttctattccggcggtctccggttaaatccaaatttgatagctgtggtaaagatgcctaacctt

SEQ ID NO: 17358 - DNA, 380 bp, Gossypium hirsutum
  Clone ID: LIB3145-048-Q1-K1-G4
gcatcagcagctacatatgaagatcttaagagaaaactcgaattctttcaatcaaaagtgaagcatgcagttgaagtactaaagcctcagtgcatcaacaacggaacaggcgcaggcgcgatccaagagttagaaggacttgcagaaatggacattaacgcaccatttcacgagcaagctcagccgtcgcagcaggtgccaacacagccaccgatactacagaacgaaggacaagggccttgatgttttttagttggtgtaggaaatgttttgacttaggcacacaaccatgatatatgtctgtaaagggaaacagggaagttgcagatcaattttttttttctttttgttgttgctgagggtgtctgaaacattttttc

SEQ ID NO: 17359 - DNA, 323 bp, Gossypium hirsutum
  Clone ID: LIB3145-048-Q1-K1-G5
cccacgcgtccggccgaactctttcaggaccctctccaaaaccctcacccgctcattctccaccaaatcatcccaccagaaccaccaccagaaaacccacaaatatttagatcccaactccttgttgggcagctggaagacccccaacaaccccaaagaggccgagaagaaactcgccctgttgcgacgagactacgccaagcaagtaaaaaatgtacgcaaggagtacatccacgagatggagttgttgcgtcttgagaagctcagaaaagaagaggctaggaaagaggctatacgagttgctaatgaggagcgtaaaaggc

SEQ ID NO: 17360 - DNA, 332 bp, Gossypium hirsutum
  Clone ID: LIB3145-048-Q1-K1-G6
cggacgcgtgggcttgtttcaagtacccagatatgagtcgtcacccggaagttctttgggctcagcgctctgataaggtatatcttacgatttctttgcctgatgcgaaagacatttctgttaaatgtgaccctcaggggctgtttagcttctctgccatgggagtgcaaggagaatccttcgatttcagtttggagctttttgggaaaatagttcctgagggttgcaaaactaatgttgggttaaggaatataatatgctcaatcatgaaagaagaaacagggtggtggaaaagattgttaaagtcagaagagaaacccgcgccttacatc

SEQ ID NO: 17361 - DNA, 265 bp, Gossypium hirsutum
  Clone ID: LIB3145-048-Q1-K1-G7
accatatccatggcagtatcttaagctggatctcagttgcttgccattgcttggatctcagttgactttgttgtatttattgacaccatattgtaatataattacaatctttctcgcttaaaaaaaaaaaaaaaaaaaaaaaaaaaaaaaaaaaaaaaaaaaaaaaaaaaaaaaaaaaaaaggaagggcggtctatttaaaaaaaccaaacttaccctcgcctgcaaggcaataaatttttttttttttgaggtaacttaaatta

SEQ ID NO: 17362 - DNA, 349 bp, Gossypium hirsutum
  unsure (1)..(349): unsure at all n locations; Clone ID: LIB3145-048-Q1-K1-G8
cccacgcgtccgctatttttggccttctcttggccactgtgtcttcttttaacaacaatcaacatatataaccatattatatacatacatacacaagttctttccttctaaggaagccatgactggcaaagaaatcctccacaagatgaaggagaaagttcaagaaaaagttggcttaaacccttctagtaatgctgaatctggaaaagggaagagtaagatgtcgaagaatataacgcatggttatcatttagtgaaggggaaagcgaatcatccaatggaagactatgttttcgcggagtntaagcaagtcaatggcagtgagctcggtttatttgccatatttgat

SEQ ID NO: 17363 - DNA, 149 bp, Gossypium hirsutum
  unsure (1)..(149): unsure at all n locations; Clone ID: LIB3145-048-Q1-K1-G9
caagaaaaataccaggtattggagtttcaacagaggaaatgctgtgtcatattcgatctctcgtgtaatcttgcaaggttgttggagttntgtacccatgagattcctcaagcattcctctcagggcctgatacaaaccttcgaagact

SEQ ID NO: 17364 - DNA, 384 bp, Gossypium hirsutum
  Clone ID: LIB3145-048-Q1-K1-H1
cccacgcgtccgcacacatatgttgagactgagaatgttcgatatgtttatcaaccaatagaagctctttatttgctacttgtaaccaacaaacagagcaatattcttgaagatttggagactctgagactgctttccaagctggtacctgaatattgttactctttagatgaggagggaatttgcaagactgcttttgaattgatctttgcttttgatgaagtcatttgtcttgggcacaaggaaaacgttacagttgcacaagttaagcaatactgtgagatggagagtcatgaagagaaattgcacaagctggtattgcagagcaagattaatgaaactaaggatgtcatgaagcgtaaagctagtgagattgataagagc

SEQ ID NO: 17365 - DNA, 224 bp, Gossypium hirsutum
  unsure (1)..(224): unsure at all n locations; Clone ID: LIB3145-048-Q1-K1-H10
ntcacatggacttcactcaaccttcatgaagcatggctcgaaaactgatttttgtctgcaactttaaaactcctgctgtatattactccaatttgcattgaaagaagggtattggataatgaaacagtatgtacaatgagatgagagttgatagttgctgctatagaaaaggattttatgtgagaccagatgaagcaaactaatttcatatcaagagatatttt

SEQ ID NO: 17366 - DNA, 389 bp, Gossypium hirsutum
  Clone ID: LIB3145-048-Q1-K1-H2
ttctgggcgaactgttctttttccatataattttgattagaaagggcatcacaacatatgaatatgttgttgcaatgagaacacaaagtgaaccacctggacagtctgcagatggtggagatcagcagagtatgccatcatcacctaccagttcagctgtgactgccataagtggaagaagctctcttggaaagagcttgcaatacaaaggtgcttggtgtaccccaccaagaatcttcatggagcaccaggatgaaattgtcccacatttggacccgggccgcttaccatccacagtagatccagatgctgtacagccaccagacaagggtaaaagattaccccaacgtcctgtccgaattagtgcatggaaacttgcaaaattggat

SEQ ID NO: 17367 - DNA, 376 bp, Gossypium hirsutum
  Clone ID: LIB3145-048-Q1-K1-H3
agacaacatgtgtaagagaccttcatctttttcacctccacaagtgcgaaagtccaactctattggctggtaatgtggatgtacgaaactattattgacaattgagctactttaaccatggttgttagtataaagggtttttttttgtacttcagtttaagatatgcttgtccgggacttaatctcgttggcttatgcagttatctttaagaagtagcatccagcaagtacgaagttcggattccatcgttccttctttctttcgaagaaaaaaaatacatatattagtttctgaagactggaatctatatagcctttccactattgcttcatagattacaaatatttagatagatagatgatgaaattgaatgat

SEQ ID NO: 17368 - DNA, 217 bp, Gossypium hirsutum
  Clone ID: LIB3145-048-Q1-K1-H4
ctctagccaagcaatgaatgatgtaggtgatttctgttatcgggtgggcctacgggggctgaagaaaagagttcatttttgcttccttaggaagaaaccaacttcattgaaattgtgcatctattcaatggagtaaatgcagaatttagagacggtcttctctatattattaaatctttaaataaatttattgcgatttcatatgcaattatcttta

SEQ ID NO: 17369 - DNA, 217 bp, Gossypium hirsutum
  Clone ID: LIB3145-048-Q1-K1-H5
cccacgcgtccgagcagttggagtttggcgaggagcagttgaggcttcatagagagtggattaatgggtcttggacgccaccattggcgggagatgagcaagttaaggagtctgacagagcagtgaccgaagcaaagatgaaatttagcaaagttgtcacccaagagaagttaaagcgtgataatgcagcaagcaaaaaaaagtcaaagtctggttt

SEQ ID NO: 17370 - DNA, 232 bp, Gossypium hirsutum
  Clone ID: LIB3145-048-Q1-K1-H6
gcaccatcaagcttgccaacactgcacaaagagttgatggcaagctccgatatgctcttaatggagtctcctatgtcgaaccaaccactccactaaaacttgcagaatactatggcgtagccgacaaggttttcaagtatgataccattcccgatgagcctcccagtgacaacacttaagtaactttggcacctattgttctcaacatgacacatagaaactttgtgggaat

SEQ ID NO: 17371 - DNA, 388 bp, Gossypium hirsutum
  Clone ID: LIB3145-048-Q1-K1-H7
cgcaaaaccctccttgcagacgtcttctgcttcttcctccaaacaatctccaaggaaacgaaaatggctgcctcttccgcttttctttctacttttatttctccccaaacggtctccttctcacccaaatcctcctcttctcttcgcctccttcctccaactagcgtgcgcatggtacgaactgtgaccctagccaccgcttcacagcccgccaccagcccccggacgccacgcggcatcatgaagccgcgtcgtgtaacgcctgagatgcaggatgtcgtcggagtccctgaaattccccgaactcaagcccttaagcagatttgggcttacattaaagagcacaatcttcaggaccctgaaaacaagaagattataaactgtgatg

SEQ ID NO: 17372 - DNA, 386 bp, Gossypium hirsutum
  Clone ID: LIB3145-048-Q1-K1-H8
agaattgttatgtctacagagcacggttggaagaaactgaacaatactggagaggctggtatgaaggcctttcagaaaaatttctatcttctcctgttccaaagctcttacttttagctggcactgatagactggacagagcgctcacaataggtcaaatgcaaggcaagtttcaaatggtggttgttagacatacagggcatgctatacaggaggatgtacccgatgaatttgctatcttgataatcaattttatatctcgtaaccgcattgggcctcatggagttgagatcccaggacttgctcggccgaagccagcacaagcccaaggccaatcacccgcacaaacaaaatcatgaaacagtcgcaatgatgaacattattag

SEQ ID NO: 17373 - DNA, 386 bp, Gossypium hirsutum
  Clone ID: LIB3145-048-Q1-K1-H9
cagaagataaataagcgtttgtctcagatttttgaagatggcccgtaccaagcagacagcccgtaagtcgactggtgggaaggctccaaggaagcaacttgctaccaaggctgcccgttaatctgccccaaccaccggtggtgtgaagaagcctcatcgctaccgtcctggaactgttgctcttcgtgaaattcgaaagtaccaaaagagtactgagcttcttatcaggaaattgcctttccagaggcttgttcgtgaaattgcccaggacttcaagactgatttgcgtttccagagccatgctgttctagctctccaggaagctgcagaggcataccttgtgggtctttttgaagacaccaacctttgtgcgatccacgccaagc

SEQ ID NO: 17374 - DNA, 358 bp, Gossypium hirsutum
  Clone ID: LIB3145-049-Q1-K1-A1
atcaagctggcggtatcggcagagaagtctgttttggttctgtgaataccgatcaacaggtggctggtcgattggcagcaccagctgccccacagccattctcttctgttgggggtaacccgtttggctaagcatcctttcgctgcctgtaaaattgatggaaagttttggttttagttggaatcatccaagcgctgctataagattttcactcttgttcatttcagggttcaaggaattgatgtccgtattggcaatttatagttagtttgaaactcataacggaaaagcgaggtgcaaagcttatatgtagcgatggtactgcatgtaaatttttggggatctattttactttttt

SEQ ID NO: 17375 - DNA, 320 bp, Gossypium hirsutum
  Clone ID: LIB3145-049-Q1-K1-A10
caacttctgaatccagtgtcaacatctcggtgtagctttgtgtaaattacgattagagagaaaagctgggaaagaaaatggcttcttgggcatttgcgatgtagctgtataactgatttttaggtttccgttaaaaattataattataaccttatctttcttggccatgtctttctctctaggttgttgtatatggaactctttccatgtagtttggcttgacattttgcagagcatcattgccaactgatcaatcctttgttattccagcgcttcaagttgatcttaaaaaaaaaaaataaaatcatcaaaaaataatt

SEQ ID NO: 17376 - DNA, 351 bp, Gossypium hirsutum
  unsure (1)..(351): unsure at all n locations; Clone ID: LIB3145-049-Q1-K1-A11
cggacgcgtgggaggaaattaaagtctagtttttaggtatgaagtatgaaaatgttagttaaaagaaatgagacctaaaccttctttaatcattggctccgccaaagccctgggtattcgagatttactatgtgcaattttatgcatggtttccgaatcctctcgtgtagttgtcatgagtggtttttaatccagttagtttagttaatttgttggctttagtttagattgtattaatttttagtttgtttgtaatgtataatggtttgattctattactcaaactcctcgtttataataatttgatacttgtggttatttgntaaaaaaaaatattaactaaaataaaat

SEQ ID NO: 17377 - DNA, 232 bp, Gossypium hirsutum
  Clone ID: LIB3145-049-Q1-K1-A12
gaaaacaatcaacttttgaaacatgctgcattcttcattaggctttttcaaatgtccgaacacagaaaaatcatttcaattttgaggtctctgtgttattagatcaaactattgttctatttgcataagccttgtaatgtactttttatttgcagtacgtatcttattgtatatagttatgaattgggtgctgccgttgtacaacattttatgaatttacattacttgcgca

SEQ ID NO: 17378 - DNA, 240 bp, Gossypium hirsutum
  Clone ID: LIB3145-049-Q1-K1-A2
caagaacaaaaaaaacaggtggaaaccccgttttcttttggtctcaaaacgattcaaaagggcaagattcttggttttagggtttgggttttcattgatttttagtgaaaaaattataaaaaaattatgggaagaggtagggttgaacttaagaggattgaaaacaagatcaacaggcaagtcacttttgcaaagagaagaaatggtcttttgaagaaagcttatgacctttccgttctt

SEQ ID NO: 17379 - DNA, 405 bp, Gossypium hirsutum
  unsure (1)..(405): unsure at all n locations; Clone ID: LIB3145-049-Q1-K1-A3
cggcatgattggaaaggtaagcccaaggggagagtgatnttgtgttgtacnaagaagggggcgcnnagtttgcganngtaggttgacttggattaaagaagaatgcaaaagttcaaaanagaatgaccacaaacaacgaacatgatcttctggcctaaaacatgttgtagacgaggccaagcagcatcataatgtgaagaatgtgtatgtgtggcatgctttggctggctattggggtggagtcaaacctgcagctgctggtatggaacattatgatacagcattggcatatcctgttcagtccccaggtgtgatgggcaaccagccggatatagttatggacagccttgctgttcatggccttggtttggtgcatccgaagaaggttttcaacttctacaatga

SEQ ID NO: 17380 - DNA, 141 bp, Gossypium hirsutum
  Clone ID: LIB3145-049-Q1-K1-A4
cccacgcgtccggccacgcgtacgggaaaacacacgccatccgtctcaccactaaaccccaactattgtttatcatggcttgctcaactttctcccctgcagctccttcgcagctatgctccggcaagagtggcatgttct

SEQ ID NO: 17381 - DNA, 393 bp, Gossypium hirsutum
  unsure (1)..(393): unsure at all n locations; Clone ID: LIB3145-049-Q1-K1-A6
atttagagtctcttcttaactattcatttcaagacccttcttttttagtggaagcactaacacatggttcttacatgcttgctgaaattccaggatgttataagcggctggaatttctaggagactccgttttagattatctcatcactcggcatttatataataattatcctgggatctcaccaggattattaacggatctgaggtcagcatctgttaacaacaattgctatgcattatcagctgttaaggctggattgcataagcacattctccaaagttcacagaagctntacaagcatataaaagaaactgttgaaagttttcaggaattatcgttggattgcactttcggttgggaatctgaaaaatctttccccaaagtactgggtg

SEQ ID NO: 17382 - DNA, 302 bp, Gossypium hirsutum
  Clone ID: LIB3145-049-Q1-K1-A8
gacaaaatgaagaatcgttaaaactaaagctacatcatactgaacaagtggctcttcgcatggaagaggcagcagaagttgtttggggacggtttctagaggctgagaatgttgctgaggtgctcatgggaatttcaaaggaactattaggtcgacttcagattgttcagtttaacatgaatggttcgattcaacgagaagctgagctcaaatctaaacttgaaggttgcattgaagagttgaatgccaaatgtttagctttaggaaaagcttgatatcaacaatgtggaacatgctgaaaa

SEQ ID NO: 17383 - DNA, 384 bp, Gossypium hirsutum
  Clone ID: LIB3145-049-Q1-K1-A9
gagaaatcggattcaggtgggaatgacgagcactcggattcaaatacaacccctacttcaactgagaatggggatggagctaatggaggttctacaagtaattcggattccggtgaatcaaatggacagactgaaaaatcgaatgccggatcagacagcaattcaaatgctgttcagagtgaagaatcaaacaataattctggaggagaggggacacacacaaatgaaaattcaaatgctgaccagaacagtggaacatcgtcgaacactaatgataatgctggtgcaggtcagaatgagaatgatagtagcaattcgaacaatgacgggaatgcgaatgggaatggtggcagcacaggcaatcagagcaacaccaatgacaat

SEQ ID NO: 17384 - DNA, 397 bp, Gossypium hirsutum
  Clone ID: LIB3145-049-Q1-K1-B1
cccacgcgtccggactaaagaaaggagtaccatcagttgattccaaccatgtgaggaatgagaatgctgttttcaagaagcaagcagcagtctctaaaaatgctgctgatgatcattcgcagctgttaggaatgcagaagcaacaaccgaatggcatttcttttggtgtggccggtagtctctcaaatgtaaaaatattgagcaaatctaaaggccctagagaaattaatggagccaattttgagagaacaagtattgaaagcaaggcctctggtcatggaaggtctaattcgaattttgttggaaaacaggacagggcaactggggcagcattaacttctagaagatagcttgtgcatttacctcaattgatacagcgaatctcaatgttgagtcg

SEQ ID NO: 17385 - DNA, 390 bp, Gossypium hirsutum
  Clone ID: LIB3145-049-Q1-K1-B10
atttattatcaaaagtaaacttagaaggtccatgcaaggctcctattgagattaatgttcagggcactataaaggctccggctgatcctggtgctttcaaggaccctaattgggttagattctatagtattgaaaatttcaaaatgtccggcggaggaattttcgatggtcagggaagcattgcttatgagaagaataaagatccccacaatcgtgcatttcgtgtcaaactccccgttaatataaggtttgactttgtgaccaacgcattgatacaagatataactagcaaagacagtaaactattccacgttaatgtttttgcatgcaaaaacattaccctcgaacgtttcacggtagaggcaccggcagatagcccaaacacagatg

SEQ ID NO: 17386 - DNA, 219 bp, Gossypium hirsutum
  Clone ID: LIB3145-049-Q1-K1-B11
tccgaattcccgtcgacccacctcggctgatccgaggaggctaccgaaagttcggtgggagaggtgctgggcggttcagaagtccgtgaaaaatttcacggttgtttaaaattggtttttgtaccttttttttcaagattgttggattgatgttggttgattaattaactgtctgtgaaatttaatgttggttgattatctaattaactcgattgatta

SEQ ID NO: 17387 - DNA, 352 bp, Gossypium hirsutum
  Clone ID: LIB3145-049-Q1-K1-B12
cccacacggacgtagaaatggatgttgttgactctgccattgtctatggcgaggagagaggtgccgccataggcaccaccaaagacactagcaaaaatgctggtttgtattggcggtcgttccatctgacataccatgaactgtttgacgctcgtgtggaccctgcggaggaactgtccaaagagcgcttcgaagagtgcatcaaagatatggtgacaagaatagggactagtgttggtcaatctgttatcacttacgtgaactctgacatggctttgttatggactctcttgtctgaatcatagccttattaaaaccctgatgaaatatctgatctcaagtatgatatcaa

SEQ ID NO: 17388 - DNA, 395 bp, Gossypium hirsutum
  Clone ID: LIB3145-049-Q1-K1-B3
cccacgcgtccgatgctcttggcaatgtgtttggggtggaattgagcaaaggcttcagaactgtgatttcgagttgagttatgcattggctttctcaaacgttctcgccagcaaaaggaaattacaagggaacaagcagttcaagatctaaaggaagttctcttcctcggggaacttgaggaagtacttgaagcaacacagtctgtggagttccaacgatgtatggttccgcttttcagacagattgcacgttgcctcaatagcttacatttccagcgtataactattcctgaaattctacaagatgaatggttcaagggtacaagccaccaaaatttgagcaagatgaggatgtaaatcttgatgataatattttatattttacatggttatga

SEQ ID NO: 17389 - DNA, 389 bp, Gossypium hirsutum
  Clone ID: LIB3145-049-Q1-K1-B4
gaaaaaattcggattctgctctcttttttctctatatctgtattgtattctcccctttacattaaaaaatttaaaggctttatagccaaatacaagcggtttctgcccattttcttgttcaagttgcaggatatgaagacatgagagtgaagcgcacggacgtggggcgggccatgcgcccacgtccgtgcgcgagtctggggtcgtgtgatgtgccgacgtgtgtggtagagggatgccgaacgtggggctgcattgcaagtagagggaaaccctagggttttcaaaaattccaaccacttgggcttatcaagcctaatttaatttgggtccatattttggtctattttgggccaaattttgatttcgggcaacaactttaaaatttg

SEQ ID NO: 17390 - DNA, 392 bp, Gossypium hirsutum
  Clone ID: LIB3145-049-Q1-K1-B5
cgaagttgctttgtaagcaaagtttttagctatgttgaatccaaaagctggttggaggttgagactcaaaggggaaagccttcatggcagatgaatgctgctatgctatgttgaaatttggatgaataaaattctcattttactttttttttttttgaaacaaagttatttagttttcaataaatcgtatcggggagtcatgaaaatgtaaacccaaccatttatagatttatattttcttgaacatttatatagttattataatttgttatgtcaatgtattattatacagttatataaattttaacgtattagtaattcatgtaatataagttttgatacagaaaaagatgaaaatttcactttcaacaaacaatcagtgatgtgtattc

SEQ ID NO: 17391 - DNA, 388 bp, Gossypium hirsutum
  Clone ID: LIB3145-049-Q1-K1-B6
gttttcaggtcgggtcggtcgggtcacaagaacttatatataatggatgcaatcgaaggggagacgagttggattgaaagactaacagatggtccgtggacggatacaatgtgtaattggtcaccagatggtgattggattgcattttcttcggatcgacatgatccagggtcaggtagtttcgagttatatatgattcacccgaacggtaccgggttaagaaggttgcttaggagcggttcatccggacgggtcaaccacccgtcatttcgtccggatgggaagttattggtattcactacggattacggtggaatatcagcagagccaatctcaaacccacatcactaccaaccatatggtgagatattcacgatgaaattggacg

SEQ ID NO: 17392 - DNA, 273 bp, Gossypium hirsutum
  Clone ID: LIB3145-049-Q1-K1-B7
gccaatttccctagattggcgaaactctctcacttcgattctttcacgatacacaacgaatccgaatattttcttctctttggttcaggctcacctaactgaagtgaaacataaatatcattttctgacccctttcttaatgccgaaagacttttagactccgggttctccccttggtaattatcatgaactgaagacttcccattgaaacttggaataaattggtgttccacattaactgctgcttcatccctacacttggtacccatgatt

SEQ ID NO: 17393 - DNA, 391 bp, Gossypium hirsutum
  Clone ID: LIB3145-049-Q1-K1-B8
cggacgcgtgggtgtggagttttatcactcgattatgcggagggattcaaagagagatgccggcgggtgtaacgtgccgtaagctttaccggcaacggcgaatgcgagggatatgattggggagatcgaaaatcggtcagcttatttgctagcgataaaaacagatgtagaaacacaaggagatttcataaggttttcgataaaagaagttgagaatgtttcgtttaccgatatcgaaaatgctgtcccttttgttaaatggctagacgatgagctctcctacttggtcgacgaaagagccgtgctaaaacatttcgaatggccggagcacaaggctgatgccttacgcgaggcagcattctgctactgtgatctcaagaaactagaatcc

SEQ ID NO: 17394 - DNA, 393 bp, Gossypium hirsutum
  Clone ID: LIB3145-049-Q1-K1-C1
ttcattttcttgttccttccttcgccgtctattgcttttagttgcctcgatttcaagtgaatcagaatgggtaaggaaaagactcacattaacattgtggtcatcggccacgtcgattctgggaaatcaaccaccactggccacctgatttacaagcttggtggtattgacaagcgtgtgattgaaaggttcgagaaagaagctgctgagatgaacaagaggtcattcaagtatgcttgggtgcttgacaagctcaaggctgagcgtgagcgtggtatcaccattgatattgccttgtggaaatttgagaccaccaaatactactgcactgtgattgatgcacctggacaccgtgactttatcaagaatatgattactggtacgtcacaggct

SEQ ID NO: 17395 - DNA, 381 bp, Gossypium hirsutum
  Clone ID: LIB3145-049-Q1-K1-C10
caatgctctactgtcacccaaccaaaatattttcctcatgcttgaagtagcttttttgacaatcgttttcacatgcagacccccaccctaaaatctgctacttttttctagatctaagcctgaaaattctttttcttttcttcaataatcagataaagtttccatttttttctgaaaaagtacagtatttgcatgcagatcctaacgcagaatctttccgaggcgagactagatcatttcttagaggaatcgacgtgaacagattgccatctacggtcgattgcgaagaagcagctggagtttcatctccgaacagcacgatatcgagtgtgagtgggaaaaggagcgaaagggaaagcactaatggagatgagcttgata

SEQ ID NO: 17396 - DNA, 326 bp, Gossypium hirsutum
  Clone ID: LIB3145-049-Q1-K1-C11
ggcacttccggcgctactgtggcagaggagaatcggcggcgaggagaggggggataaagaagcggaagtgagaaagcaaagcggaggaacgcatagttggaggcacgcgtggcgcatcttaacgtggaggcgcaggtttggcatgcgaaagccagggcactggaggctacagcggctccattacaagcgcagctacaacaggctataatgagcggaggggctgacgtcttcatgcacgacagtaagagaggggaggagggggtgatgtgcggtgaatggcaagcggtggacgcctagtttgtttacgtggaccccgaccgggtggt

SEQ ID NO: 17397 - DNA, 336 bp, Gossypium hirsutum
  Clone ID: LIB3145-049-Q1-K1-C2
atcagcaggtaaactggcgtcgatgtactcgccttttataggatttgggttcctagccatactgcgagggctgctttcggaatcccccaacgcttccaaaaccatggccaacggaccaacgtcggctttgaaaaagaaagcctgaagttgacacatgaattataaaacatcatcttcttccttgaaatgcgatatccatgttacaacaataaggatcaaaattcaaagtacaaaaaattacaaatactactagcaatctaatagtacttgtagttgtttctttgtcatgtttagaaagtttttattttaaaaggtgtgattatgagtaataatttt

SEQ ID NO: 17398 - DNA, 389 bp, Gossypium hirsutum
  Clone ID: LIB3145-049-Q1-K1-C3
gctgataactgtaccggtcttcaaggtttccttgttttcaacgctgttggtggaggcactggatctggtcttggttccctccttttggagcgtttgtctgttgattatggcaagaaatccaagttgggtttcactgtctacccatcaccccaggtctccacatctgttgttgagccctacaacagtgtcctctcaactcactcccttttggagcacactgatgtggctgttcttcttgacaatgaggctatctatgacatttgcaggcgctctcttgacattgagcgacccacttacaccaatcttaaccgtcttgtctcccaggtgatctcctctttgactgcttcacttaggttcgatggtgccttgaacgtggatgtaacagaatt

SEQ ID NO: 17399 - DNA, 392 bp, Gossypium hirsutum
  Clone ID: LIB3145-049-Q1-K1-C4
gttttattagacatgaggagtctctaccaagagaactgaggcggcatctaaattctctggaagagaggcttttggagagcatggtgtgggataaaggttcctcaatgtacaattctttgatagttgcaaaacctgccctatctgctgaaataaatcgtcttggcttattggctgaaccaatgccacctttggatgcaattgcgacacatgtgaacttttctggaagtacacctccagtgccttctttgcagaaacacgaaacatcaacgggtaatgctggtagctcaatcttaggacaaaatggggatgtcaggtctcccatgagaccttgcactgagttgaggagtgtgttggttgaacggaatgcttttacatcgccagtgaaggatcgc

SEQ ID NO: 17400 - DNA, 394 bp, Gossypium hirsutum
  Clone ID: LIB3145-049-Q1-K1-C5
agcctggaacttaaagaagaccttcgacagtatgggattccggcaactgaagcacaaattggcgcgaacgtaccgccgttgccgggcgatgataatcaggtcaactcgttgagcttgatgtcgagtagtagaatgaaaagaaacctggaatttgttttcgataatttctcgggagataaaggagaagaaaaaaagaagcagcgccgaggaggcttttatatcggtgaatcatcaaatccgcagcaacaacgaggaacggaaagtaaagaagaggatttatctaagctggaaatggtgaaagctttcaaggatcgtattaacagccagataaagatggacgacatggcatatatggaatctgttatcttgattttccatcagatgatagagatga

SEQ ID NO: 17401 - DNA, 229 bp, Gossypium hirsutum
  Clone ID: LIB3145-049-Q1-K1-C6
ggggttaataagattgactaaactccatattgtgaaaaaaaaaaacccaaaaaagaatggtcttttatttaaaaaaaaaaaaaaaaaaaaaaataataaagaaaactaaataaaaataaaaataaagtagtagaactgaaaaaaaaacctggaatttgttttcgataattactcgggagataaaggacaagataaaaaaaatcaacgcctttgaggattttatatatat

SEQ ID NO: 17402 - DNA, 385 bp, Gossypium hirsutum
  Clone ID: LIB3145-049-Q1-K1-C7
gaaattttggtgaaaaagttacaaaatatggtaaaagccgactcttcagcagtctgtaactctggaggtgatgatggcaatgagatatctgttctgaatagtgattcaactagagctacatgtacaaaaacattcgaaaaagaggtcccctctgccacaagtgtacaggtggatgagccatcaaaagatgtatctcttcttaggacagcagctaggccttccagaaccataattgacggtggcactagtgctattccgagcaagcatgttgaggaaaaaagaaagacaggcaactttaaactgttatgtatgtttatagcaattctggttgcaatattttctgcattagctgtatattttttgagtgagaaacaagtcatgtttg

SEQ ID NO: 17403 - DNA, 360 bp, Gossypium hirsutum
  Clone ID: LIB3145-049-Q1-K1-D1
gaagaacataatgagaattttcaaaaaattttaaatgcttgatgaaaattttcaaaaatttgggagccaatgtcccctggctcccattactatccgaccctacggtcgggtttgagtaacttagaatgcaaacagaataataagttggtgatacatgtttcaggttaggcatatactgaatgatcgaaagaagctacgtaaagtgattgatccagagatggctcagagttcatacaccattgaatctatagctatgttcgcgaacctggcatcacgttgcgtccgtgttgagagcggaaagcggccgtcgatgccggaatgtgtgagagaactccaacttattttcagcacaaatgcaaa

SEQ ID NO: 17404 - DNA, 386 bp, Gossypium hirsutum
  Clone ID: LIB3145-049-Q1-K1-D10
cggacgcgtggggtcagagtcttgttcttgccctactatttgccctcttgtttgggtcaatcgagataatcttcctatcgtcgtcttttataagaatctctaaaggcggatgggttcctcttattctctctgtgatcttcatgctcatcatgttcgtctggcattatggttctaggaaaaagtatttatatgatttgcacaacaaagtacccatgaaacaaatcctgacactgggtcctagtctcggaattgtccgagtcccagggataggccttattttcaccgcgttggttagcggagttccggccacatttacccgttttttaaccaatctaccgacattttatcaagtggctgtctttgtctgtgagaagactgttcttgta

SEQ ID NO: 17405 - DNA, 380 bp, Gossypium hirsutum
  Clone ID: LIB3145-049-Q1-K1-D11
ggatttgcatgtaaatatatatatcgttctttttaaaagtttttcaatgggtcaattaagtagtagtagtagtaagtaagatgtttaaaagagtaagcggcagcgcatggtggtcgatgaccttatgtcattcaagattccggccgtgagcggcggcagctgctgctatattaaattattatttaataaagggaaggggttttgtacgaatgatgttgcgttagtatgtgatttgaaacatcaattaataattaattttggggttcttaaaaaaaaataaaatcttattttttattacttagttttactttctataattttatattattatctataactttttgggccgtccttttttgtggggcccccgttttatttaa

SEQ ID NO: 17406 - DNA, 259 bp, Gossypium hirsutum
  unsure (1)..(259): unsure at all n locations; Clone ID: LIB3145-049-Q1-K1-D12
cttcaacaagaatttccaatcgtctgcnnaggctgctgtgaagttaactcccgagctgtcgagatcaccaagcaaagctgccagcatgttttctgggacagtcgaaaaatgtgctacttgtggcaaaactgcatatccacttgagaaggtgacagttgaaggacagtcttaccacaaatcatgtttcaagagctataatagtggctgggctttaagtccatcaaattatgcagnacttgaaggcattttgtactgcaaa

SEQ ID NO: 17407 - DNA, 394 bp, Gossypium hirsutum
  Clone ID: LIB3145-049-Q1-K1-D2
cagaactcgctctcggtgtcgaagctcacaccgatttaagtgcactcactttcattctccacaacatggttcctggcctccaactcttttaccagggcaagtgggtgaccgctaaatgtgttcctaactccatcatcatgcacattggagacaccatcgagatcctcagcaatggaaagttcaagagcattctccacaggggtctggttaataaggagaaggttaggatctcgtgggcagttttctgtgagccaccaaaggataagatcatccttaagccactcccggagactgtctccgagaccgaacctccactgttccctcctcgtacctttgctcagcatatcgagcataagctgttcaggaagacccaggataatctgtccaactgaaa

SEQ ID NO: 17408 - DNA, 392 bp, Gossypium hirsutum
  Clone ID: LIB3145-049-Q1-K1-D3
gctctcacagccgacccaacgctacagttgtcaagagcaagcagcattgtcatgttgattgcatacgtatcatacatagtcttccaactattcactcacaggcagttgtttgaagctccagaggaagcagaaggcgacgatgatggaatatcagaagaagagccagtaattggattttggagtgggtttatatggctagttggaatgactgttgtcatttctctcctctctgaatatgttgtagaaactattgaggatgcctcggatacttggggaatttctgtaagtttcatcagcattattctgctacccattgttggaaatgcagcagaacatgcaggagctatcatttttgcttttaaaaataagctggatatttctttaggtgttgc

SEQ ID NO: 17409 - DNA, 393 bp, Gossypium hirsutum
  Clone ID: LIB3145-049-Q1-K1-D4
ctcaattctttcatcccttgttttccttcaacccaaacaaaacctaatctttttgaaaaaatggcaccaaaagctgaaaaaaagccagccgagaagaagccagccgaggagaagaaagccgtagctgagaaagccccggcagagaagaagcctaaggctggtaaaaagcttcccaaggaaggcggagcggctgccggagacaagaagaagaagagagttaagaagagcgtcgagacctacaagatctacatcttcaaggtcctgaagcaagttcaccctgacatcgggatctctagcaaagctatggggatcatgaacagtttcatcaacgatatcttcgagaagcttgctcaggaagcctctaggctcgcgaggtacaacaagaaacccacc

SEQ ID NO: 17410 - DNA, 390 bp, Gossypium hirsutum
  Clone ID: LIB3145-049-Q1-K1-D5
cttttctgttgctattttgttattttccttttctctttctgtttgctgcttgtttgttgcgtctgttgcaggtacagctggagtggacgcacgtgcagagacatcgttgatgcgtgcagagaacccctggtttcagccacaatgcaaacagttccagaaaccgcctccaatattgggctagggttggctggtttgaattttagtgggttattttgggtattgagtttattcgggtttttctaggctgtttaggtatttcgggttttgtaatcgggtttgggtttacggtctgtttcgggtttgggtataattagattttggaccttaattgtttgggttaatttttggactggtattaagttagtgggttttgggttgaggcttaatgta

SEQ ID NO: 17411 - DNA, 391 bp, Gossypium hirsutum
  Clone ID: LIB3145-049-Q1-K1-D6
cccacgcgtccgctaaggcgttacatcaatgagtatgtcatttgccttggatgcaaaagtccagatacaattctttcaaaggagaatcgtcttttctttctcagatgtgagaagtgcgggtctggccgatcagttgctccgattaaagctggttttgttgctcgtgttggccgcagaaatgctggtacttagggtttttgattccagccaaaatgatattccagaagtgagaaatttaggaacacctgttgttagtatctatgagtaaaacgttgatgagattttttttttcttttattgataataatgctgatgagattttgaatggtactaaaattgaaggaatgtgtgtgtttgagacatgttatttttccccatgcgatcaactttt

SEQ ID NO: 17412 - DNA, 387 bp, Gossypium hirsutum
  Clone ID: LIB3145-049-Q1-K1-D7
gttacatcctgcctccttataggctgataggtattcgaaattaaattatatatttttataatttaataatttatatttttataaaatttaaagaattaaattaaaattttattattttttaaagaaaatataattttattattaatttaaaattgtataaactataaacttacggaagtaaaaaaaattatattttagaggtcgcggtatttgcgactgctcccccagttctcgacgtcgtttttacatatcattctgttctgtgctgttagaaaattgttgccctacttgagttcttgtacactcgcagtcttggaatgtgacgagtgaagactcgttaaatcactacacaaagtgtaaattattgaagtttttttttttttgaaa

SEQ ID NO: 17413 - DNA, 388 bp, Gossypium hirsutum
  Clone ID: LIB3145-049-Q1-K1-D8
cccacgcgtccgggaccaaatgatcctcgttggttcggtggacttggtggagatcacggtttccctggcgcacaaccgggtgttcctcctggtgctcgttttgatccatatggtccacctggtgttcctggttttgagcctaatcgatttatcagaaatccgccacggaggcctggtggtggtactcatccggacctagagcattttgggggtggggattttatatagattagaatttagggtccttttggtttgtccatggatttgatatcttttactattctgttaaatataagtgaaggatctaaagattatacttaaaataatatattaagcatgttaatagtgctttttctttgataacaaatatacagcaaattgaatagta

SEQ ID NO: 17414 - DNA, 373 bp, Gossypium hirsutum
  Clone ID: LIB3145-049-Q1-K1-D9
gggttcatctttctctcttttgttgttgggttgaagaaaaatgacagcacaagtgagcagttcattggtaagggtattgagtggtcacatggaagagcagcatgctgggaagtctgatatcttgattacaaaagatttgctgggaaatttgtcaaatgctaaaccaacaacacccaaagctatagatcttgaatttaaggtgaaaaattttagatttatcttcttcttttttagctttgtttctgcaacaaatcccaagaattcatttatgtcgatttaactctctgtactatagttttcagttcacaattagtttgcttctccatttatattgaatttaaaagaaacagagtatttattacagttttttaat

SEQ ID NO: 17415 - DNA, 398 bp, Gossypium hirsutum
  Clone ID: LIB3145-049-Q1-K1-E1
gtattttgtgagatttttggcctggtttggatagcttaatcatgaaaacctgagattccttgaactttttctttttaaattattattttcaaaaaaaaaaaaaaaaaaaaaaaaaaaaaaaaaaaaaaaaaaaaaaaaaaaaaaaaaaaaaaaaaaaaaaaaaaaaaaaaaaaaaaaaaaaaaaaaaaaaaatataaaaaataaataataaaaaaaaaaaaaaatggggggggccgtttaaaaaaaaaaaattttactacccggtggttagaaaaataaaaattttttaatggggaaacaaaaaaaaataaaaatggccggtttttaaaaaactggaaatggaaaaaaccctgtgttaaccaaaattaaatcgtttaaaaaaaatcccctttttaaaa

SEQ ID NO: 17416 - DNA, 170 bp, Gossypium hirsutum
  Clone ID: LIB3145-049-Q1-K1-E10
agtcgaactcttggtggagaaaggaaccgcttccatcacctcagatgactagacatgggccattaacaagagcctattacacacccggctggaaaggccaaacgaatacaacaaccacatgattatatgaaactgtataacaagcagaactaaaaggggctaacgaactg

SEQ ID NO: 17417 - DNA, 265 bp, Gossypium hirsutum
  Clone ID: LIB3145-049-Q1-K1-E12
gaacatcctattaggggaaggcagaaagaagaaacaaagatgagcagcgggggtactggctacgatctcttcgtcaccactttctctcccgacggccgcgttttccagatcgagtacgccgtcaaagccgttgataacagcggaactgttggtggaattaaatgcaaagatgggatcgttatgggagtggagaagctgatagcatctaatatgatgttgcctggttctaatcgaagaatccattcagtccaatcgtcattccggc

SEQ ID NO: 17418 - DNA, 318 bp, Gossypium hirsutum
  Clone ID: LIB3145-049-Q1-K1-E3
gccggtccctggtattccatattatctcacagagtacagcaccctagcgctctctgttgcctacttccatgtcaacctacccaggatttattgattaatgcagcaataatatataggctcgccgagaggcgaatgccatatcatgcgacccgtgtgaagctaggcggccaggatagaccatctctgcatgagggacctgttacatgaactgtgctacgttagtctgcaaggtcccactctccggcgtaaatgtatgtggacacataccttcgaatgccaacatctgtgatacgggagatgcagttataagagtgcatg

SEQ ID NO: 17419 - DNA, 410 bp, Gossypium hirsutum
  Clone ID: LIB3145-049-Q1-K1-E4
gtggaccaagccgtccggaggaaaccctttggtggaagcggtccatttttgaaggaaaagaagttttagaaggaaaagaagggaggtttggatggctaaaatgtaggttaagaaggtcccaaggatgaaaccggccctgactctggcatggttcctatatggggagatggaggtcaacatagtggcaaagctagacaggtatctaaacaatcgattattccagcagtcgaagttgagcctccgggatgttcatacaatcccacatttgatagtcatcaggattcgttggctcaagcggttgctgaagaaatgcaaaaggcctacaagatcgagttgggacctcagccagttccattaactgttatgggagaagtggttgatgaagatgataaatactttattgaagcaga

SEQ ID NO: 17420 - DNA, 346 bp, Gossypium hirsutum
  Clone ID: LIB3145-049-Q1-K1-E6
cccacgcgtccgggtgtttttaccataataaaataataaaaaaataaataaaagggataaaaataaaataaaataaaacatataaataaataaaataaaatataataaaaaataaaaaattaatataataaataaaaatttaaaataaataatataataaaaaaaaaattataaatttgggtgtgccctttttaaaaaacaaaaattttatcaccccttatttaaaattatatttttttttttaatgctaccaaaaataatttaatggccgctatttaaaaaactttacattgaaaaaaccttttttttaccaaatatacatttttttaaaaaaaacctctttttc

SEQ ID NO: 17421 - DNA, 389 bp, Gossypium hirsutum
  Clone ID: LIB3145-049-Q1-K1-E7
cccacgcgtccggtgatggtggtttcaactatgcatcaactgacctggctgctcttcggtatcgcctcaatgaagagaaagctgagtggattatatatgttactgatgtaggccaacaacagcattttgatatggtgttcaaagctgccaaacgtgcagggtggcttcctcaaggtgataattatcccaaagctagccatgttggttttggacttgttcttggagaagatggcaagcgttttcgaacccgtaacactgaagtagttcgtttagttgatctacttgatgaagccaagaaccgaagtaaagcagcacttatcgagcgtggtaagggtgaagaatggaccgaggaggagattgagagtactgcagatgcagttggttatggt

SEQ ID NO: 17422 - DNA, 406 bp, Gossypium hirsutum
  Clone ID: LIB3145-049-Q1-K1-E9
ggatcttgctgctccagttgaatcctttgttgataagcccgcggcagccgagacctcggcagctgctcctggagctggaaagggagcctatgttccaccaagcatgagagccggtgcagagagaacaaccggatcggatatgagacgtaggaacgatgaaaactctgtgagggtaacaaacttatctgaggacactcgggaggctgacttgcatgaacttttccgaccatttggtgctgtgacgcgtgtgtatgtcgctatggatcagaagacaggcacaagtagagggttcggttttgtcaactttgtgaacagagaggatgctcaaagagctattaacaagctgaacggatatgggtacgacaatctcatcctgcgagtcgaatgggccacaccaagaacaaac

SEQ ID NO: 17423 - DNA, 298 bp, Gossypium hirsutum
  Clone ID: LIB3145-049-Q1-K1-F1
gtgatgcgaagctatctcgtaacatccctgctcgctctgggaagactgatggatttgggcgtcctgttgctgtgcagatggagtggacgcacgtgctcagacatcttttgtgcgtgcagtgtagcattgtattcatgcacaatgcaaacaggtacagaaaccgactccaatatagagctgatggcggctgattgagctcatagcatggtgattgtgaggatagcacatattcggcttacaatgagctgatgacgtatgaggatgccctcaataatggtcttacctgcggccgtgccaa

SEQ ID NO: 17424 - DNA, 388 bp, Gossypium hirsutum
  Clone ID: LIB3145-049-Q1-K1-F10
atgataagaaactcccagctctgtggtgaggccatgattgcttatctgcaacagaaggggttccctgaagtggctctccattttgtcaaagatgagaaaacacgctttaatttggctttagagagtgggaacattcaaattgctgtcgcatcagctaaggagattgatgacaaagatcattggtataggttgggtgtggaggcccttcgccaaggcaatgctgctattgtggaatatgcctaccagaggactaagaactttgagagattgtcttttctttatctcgtaaatggtaacctggaaaagctatccaagatgctgaaaattgcagaagttaagaatgatgttatgggtcagtttcacaatgctttgtaccttggtgatatac

SEQ ID NO: 17425 - DNA, 390 bp, Gossypium hirsutum
  Clone ID: LIB3145-049-Q1-K1-F11
cccacgcgtccgcccacgcgtccgcgaagatttagtctcaactgacttcatcggagacaacaggtcaagcatttttgatgccaaggctggaattgctttgaatgacaactttgttaagcttgtgacttggtatgacaacgaatggggttacagttcccgtgttatcgacttgatccgacacatgtctaaggcttaagtgagtgagtgattgtgcttggtgtatccaagctttagcaattttaatttagaagagatgttatgagagaataaacgaattgtacggagcatatttttgtgtgaagaagggttgtttcagttttattacccaagtacttgaatgtttcaagtttcattgcagttgattttctactttaatgcatacgtggcgat

SEQ ID NO: 17426 - DNA, 374 bp, Gossypium hirsutum
  Clone ID: LIB3145-049-Q1-K1-F12
ccaaggctgtggatttgcttccaaaaggaagtatttgttgggacgtgtcagcatgaagatcaagcttatacctggtgactccgccggaacagtcaccgctttttatatgaactctgatacagatacggtaagagatgagctagacttcgagttcttgggaaatcgtagcggccagccttatactgtccaaaccaatatctatgctcatggaaaaggagatagggaacaaagggttaacctttggtttgatccttctgcagatttccatacttacactattatgtggaatcatcatcatattgtcttctatgttgatgatgtgccaatccgagtttacaagaacaatgaagctagaaatataccattccctaagt

SEQ ID NO: 17427 - DNA, 297 bp, Gossypium hirsutum
  Clone ID: LIB3145-049-Q1-K1-F2
agaaggtctccaccgccatcattgttgctgccgcctcaatgagcgccgtcatggccgccggtgtcccagctcctgccccttccgaaggtggttctggccctagctcctctcctgcttctgctgcagcaccgggagcggattccagcgtcgctgccgccaccttgcctgttcttggatccttggttggggcttcccttgtttctttcgtttcttactttctgtaatcatctaaatgtatgaaaaccatgcgatgaatattgaaaatattggaaatgaataaaatggagctttgatgaa

SEQ ID NO: 17428 - DNA, 389 bp, Gossypium hirsutum
  Clone ID: LIB3145-049-Q1-K1-F3
caacaccaaccctgtagcaaaaacttctgttgatagtgggttatcagacaaggggaaaaaacagactctgaaatctgctttggaattgaaggctatgggggcctgtgaaaggaattgctggatttggccttctattactcaaagagcttaccaggctgctgagatcattgcagctgttaatggtgtcagtcgtagttatatagttccagagtacagcttcctggatgctcgtggactgggagcatatgaaggcaaggaactggaagccatttcacaagtttatgaatcggatagcatatcttctacaatcaagccacctcctatagatgatggaacaccaaatgaaagtgtggcagatgtatttgtgcgtgtgacacaactcatgtcta

SEQ ID NO: 17429 - DNA, 395 bp, Gossypium hirsutum
  Clone ID: LIB3145-049-Q1-K1-F5
ctttttgtgtaagatcaacaccagttgaataaaccctttcatgcccaacctgatttctcgcgtactaaagcaaccaaaaagcatagaaagaatatctgcactgttcatctgttccttgttcgaagaccatggatatttcctaaaaatgtgataacaatcttcttccccaaaaccacattgaggaagcaacattcatcactattcttctctatctaagatttgctaaagtagggatgtaattccaggcaatgcgccagatgataattgtaatcttagatggtagttgttgattccatagcttttcaaaaagtttcttattttcggtctataataaataattgctaggatccaggttagcaatttgtaatagtttataagcactatggactgagtat

SEQ ID NO: 17430 - DNA, 390 bp, Gossypium hirsutum
  Clone ID: LIB3145-049-Q1-K1-F7
caaaaggacaatggagaagggaaaaggagtaatgggtgccggccgaagatgggccgtcgatttctctgataattccaccgctccttcatcgcgtgacatccccgatccccccggcttcactcgtgcttccgtcgatcaggacgattcggctgtgagtcgccaaaagaaggatgctgaagccaattggaaagctcagaaagcatgggaagttgcacaagcacctttcaagaatttgctaatgatgggcttcatgatgtggatggctggcagtacagtgcatctcttcagcattggtatcactttttcagcactttggcaacctattagtgctcttcaaggggttgggaaggtttttgaaccgtataaagacaataaagtagatcttcttgg

SEQ ID NO: 17431 - DNA, 363 bp, Gossypium hirsutum
  Clone ID: LIB3145-049-Q1-K1-F9
cggacgcgtgggcggacgcgtgggtttgccctttcattgcttccttgcctgccttaaacctccttcaagcatagccatgactactgaaatggtaatggttgatgaagtcccttttcctccacaaatcacaactaccaagccactatctcttttgggtcatggaattaccgacattgagattcactttttgcaaatcaagttcacagcaattggggtttaccttgaaccagaagttgtaggacatttgcaacaatggaaggggaagcctgggaacgtgctagctgaagatgatgacttcttcgaggctcttattaatgctccagtggagaagtttctgagagttgtggtgattaaggagatcaa

SEQ ID NO: 17432 - DNA, 393 bp, Gossypium hirsutum
  Clone ID: LIB3145-049-Q1-K1-G1
aaacaaggaaaaaacttaacaagtaaaacaattgagagaagatgtcctggcaagcgtatgtagatgatcacttgatgtgtgatattgagggcaaccatctctctgccgccgctatcattggccaagacggcagcgtttgggcccagagctccaatttccctcagttcaagccagaagaaatcactggcatcatgaatgacttttctgaacctggatcgcttgctccgactggattgtaccttggtggcacaaaatacatggtgatccaaggtgaacccggagctgttattcgagggaaaaagggccccggaggtgttactgttaaaaagaccaacctgtccttgatcattgggatctatgacgagccaatgactccaagtcagtgcaacatga

SEQ ID NO: 17433 - DNA, 392 bp, Gossypium hirsutum
  Clone ID: LIB3145-049-Q1-K1-G3
cccacgcgtccgcccacgcgtccgcccctttaccgtaactgagtgtatacccatggaaagtccaagattaatcgagtgaagacctgcataagcttctgctgcaaaagaagttgaaacatttgaatttaagaccgtcttcgtagcaagaattactcccatctgatcccgaaccaccaggcttgccatcgatttgaaatcccttcggttaaaagcagcatcaaagtgaatcgtcatcccagaactcgtatcgctctgaatggccctcgtagctgtaaataaggacccatatgccacagcaaagcaatcgaccttgtttgggagtgctcttttggaacatccaagacaataccgaaagacatgagataaatcttcctccccagatctacatcgag

SEQ ID NO: 17434 - DNA, 165 bp, Gossypium hirsutum
  Clone ID: LIB3145-049-Q1-K1-G4
cgatcctattgtgttggccttcgggatcggagtaatgattaacaaggacacgccggggccttcctatttcattttcagaggggaaaatcttgggtttttttaaaaccaacaaccgccaaagcctttgcccagggtgtttttatttatcaaaaaccaaaattgggg

SEQ ID NO: 17435 - DNA, 390 bp, Gossypium hirsutum
  Clone ID: LIB3145-049-Q1-K1-G5
aaaaaaattctccttacatcgttttaattcgggctttttatagccactatacatagtattttacatatttaatgttatttcctgccatatatgtgttgcctctgtcgttcttctttccccttttgcaggtaccaacgaggagatttagcagtgaacgaatgctgacaacggtacaccggcgttgattcgggcgtcgaccacggcatgatttgaagcctggaatcatggcctggaaccacggcactgatagtgggtaactggaacgacgcgagatgaacagacgcgttgattgaaatgtttgcggcgcttagggtttctgaaaccctaggcctctctgtcttccattagtaaattgggccacttgggccctgtgtattttgggtagcatac

SEQ ID NO: 17436 - DNA, 288 bp, Gossypium hirsutum
  Clone ID: LIB3145-049-Q1-K1-G6
ctacaccctattttgtaatcgtttacttgcatatttgcatctacttaataataatctcgtgtcaactaatttaaaaaaaaaaaaaaaaaaaaaaaaaaaaaaaaaaaaaaaaaaaataaaaaaataaaaaaaaaaaaaaaggagataacgttaaagaaaaaatgctgacaacggcacagatgaaaaaaaatttaacttttaccacgggatgattaaaatgtatggaatggtggaatgtaaacaaagcactgtttgtgaacaaccggaacgaccccagattaaccgtct

SEQ ID NO: 17437 - DNA, 392 bp, Gossypium hirsutum
  Clone ID: LIB3145-049-Q1-K1-H1
tgacaagaatgcaaaagatgatgatttgaagaaagcttataggaagcttgccatgaagtggcaccctgataagaacccaaataacaaaaaggaagctgaggccaaattcaagcaaatctctgaagcttatgaggttttgagtgacccacaaaagagagctatctatgaccagtatggtgaagaagggctaaaaggccaagtaccacctcaagatgctggcggacctggtggagcaacatttttccaaaccggagacagtccaaatgtgttcagattcaaccccagaaatgctaatgacatctttgccgagttctttgggtattctagcccctttgggggaatgggcggcagtgggatgagaggtagctcaaggtcatttggtggcatgtttg

SEQ ID NO: 17438 - DNA, 394 bp, Gossypium hirsutum
  Clone ID: LIB3145-049-Q1-K1-H2
gacctattattattgatcaatacacttgccctcttcatcaacattgcaagaattatactacagctgtggagattagcaatatcttatataatgatttaagagggacaacaaacggtgaaattgcggtggaactttcatgcagtaagtcagttccatgcaaaaatatccgcatgaaagacatacagttggattacggaataaatggtaaaatgtatgatgggcaccccaaatctcattgtttgaatgttgttcaaagttgggacgaaagatatgtttatccaaatgttccttgtttaacaaaaaaattaagttactaaactttattattttggatgtaataattaggttgtatcaaaaggttgcatatataaaataaataaatgcatctttttta

SEQ ID NO: 17439 - DNA, 384 bp, Gossypium hirsutum
  Clone ID: LIB3145-049-Q1-K1-H3
ccgggtttcaaaagaacgcggtgaaccaaatattgaaccccattgatcgttgtgaagctaattacaaatcattcaatgaattacaaggtctaacatgggaggaagttctgaataagggaacaaggcatttcagtgaggagttcagcaagttttgtgacaggaaaatgaatgaaattgtggctatgttgggttggaaccgagcttggcctgaaccattgctacaagcctttttcggtgcctcaaagagtgtgtggttggttcaccttttggccaactcggtgcatcctggtttaccaatcttcagggtggataaaggggtaaggtttgattcagtatacatggaggacatggatggagaaagagccaagaaattggttccaagca

SEQ ID NO: 17440 - DNA, 394 bp, Gossypium hirsutum
  Clone ID: LIB3145-049-Q1-K1-H4
atgaattagcatctctttgttcatcgatcttcttatcttgatctaacccgactattaaaaacttcaaatctctaattgccattcaatttgttaattccaatttaaatactcttcccggatataaaaaaacttttcttctatggctgctgtgcaaaggccagcgagttcttctgattccgacgagaggaaaaggaagagaatgctgtcgaaccgtgaatccgcgaggcggtcgcgtattatgaagcagaagcagctcgaggatttggttaatgaagtgagcgcattgcagaaagataacagccagctctccgaaaagatcaacgtcacaactcagcgctacgccgagatggaatgtgccaacaacgtgttgagagctcatgcaatggaattgacc

SEQ ID NO: 17441 - DNA, 331 bp, Gossypium hirsutum
  Clone ID: LIB3145-049-Q1-K1-H5
cccacgcgtccggaaaaaaagagagatggcgtctgtaataaaatctgcaatcttaattctgtcggtgtttttatctgtacgcttcagttcgggtgttaggttgctccaggaacagcccaatgatgaccccaaaaacatggacgctattcctcccattgatgcactcaaccctaccgagttgaatggacccggtgttggcattcacgaagatcatgttgtcccaaaaggtgctgaaattggtactcttggttttggttttgaaggtggtcctgataaatgttgttcttctggatgttccggtaattgtaatcctggtgggttcgttctacca

SEQ ID NO: 17442 - DNA, 224 bp, Gossypium hirsutum
  Clone ID: LIB3145-049-Q1-K1-H6
aaataagggatgtttcaacagaaatattgcatttctaagaaaaagaagaggagctcaagcaatgagcctttttagtctctctttttctaaatcaaatctttttgtttcccactcaaaaaaaaaaaaaaaaaaaaaaaaaaaaaaaaaaaaaaaaaaaaaaaaaaaaaaaaaaataaaaaaaaaaaaaaaaccggaagtggcgttcaagcaaatcaatgatttcc

SEQ ID NO: 17443 - DNA, 390 bp, Gossypium hirsutum
  Clone ID: LIB3145-049-Q1-K1-H7
ggagaagattcaagttagtggtctaaaagagtttttatattcagaaggaaagctgatctctgtcagtttaggcgcagcaccaactgtacagttgatgttcagttcacctatgaccaaatctaaggcggagaaatttagggggcatattttacaagcattcgagactgttcttggttcatccgtgacagttgaaattagatgtgaagcaaagaaagatggccgagctggggtcggtccatctcagatggtcatggatctagagtctaattctagaaataggatgcatgctggggtcggctcccaagctcagcaatcagggaatgaaattgttgaaataccagcttctccaagagaagccaaggataacgaacatgctgataactttgaatc

SEQ ID NO: 17444 - DNA, 379 bp, Gossypium hirsutum
  Clone ID: LIB3145-049-Q1-K1-H8
cccacgcgtccggtcgaattaagtaaaaagcggaagatggctgcaagcttagcttccagatgctccagggtgggacgttcattgatggatggccttcgaaacaacttctctaatttaccaatcacatcaagagagacaacatttggcagtttcctgtatcagcaacaaaggactttcatacagatgagaactgttctcaaagtagtggacaactcaggggcaaaaaaaggtaatgtgtatacaagcattgaaggggaagaaaggggcaagattgggagacaccataattgcatctgtaaaggaagccatgcctaatggaaaggtgaagaaaggaaaggtggtatatggtgtggttgcgcgtgctgccatgcaccggggt

SEQ ID NO: 17445 - DNA, 394 bp, Gossypium hirsutum
  Clone ID: LIB3145-049-Q1-K1-H9
tccacgcgtccgaccgtagacaaatccaaggagtctgtgctaaatgagtgaaaaccaggacatcccttgcccaattggggttgtttcggactctgagagtgatccacctgaaaatgaaccggatgatacccagacgcatatgtcgatgtcgactggaagcaagaaaagaagctgggaaatcgataattaagtggaagctaaaggaaaagccccccagaaatggatatcgggaaaagaagcttcaacctcccagcaacagccaaaaccgaaaagtgaaaagaactgtggggaagctgtgcaaaacagattgaaaaaatttccaccatcaagttgacagacgaagaaagacggtaaatggtcctaattgaactattgaaaaatttccaccatcaag

SEQ ID NO: 17446 - DNA, 366 bp, Gossypium hirsutum
  unsure (1)..(366): unsure at all n locations; Clone ID: LIB3145-050-Q1-K1-A1
ccacccgtccgtttcctccagagtccaggtccttagttttagcgccatctttcgtcccaaaatctcgtggctttgtgctagggtttgaagttaacaattcttcagaaagaaaaatataaagcagggtttgaagttaacaaatttttcaaaaagaaaaatataaagcagcaatgaatccggttcacttncaacccgcgccgncttcaccttggttcccaatgttacttccggaacctncgaattcgagtacattnttggagaccagaaatgtgcgtgatcccttagagaatngcaagataccctcaatcttgccaacgccgtgcaaaaggagttggaaatactgatgatgataaaagatgggtcgat

SEQ ID NO: 17447 - DNA, 371 bp, Gossypium hirsutum
  unsure (1)..(371): unsure at all n locations; Clone ID: LIB3145-050-Q1-K1-A10
cgctttacagcggtcgaggaatggggaaaaatccggttggtttggtttacagcaaaggtaacagctccggtagtaatttatgtttgaccggttcgctcgatccggctttggtacgtgggaaggtagtgctttgcgatagaagaacaaccgcccgagttgaaaaaggagccgtcgtgcgcgacgcangcggcgtcgggatgatattagcgaacaccgaagctagcggtgaggagctggtggctgacagtcacttgttaccagccgtggcggttgggaggaaagtcggtgatttgatcagagaatacgcacggtctgaacccaatccaacagccgcgcttgtcttcggtggtacggttttggatatcaaacca

SEQ ID NO: 17448 - DNA, 405 bp, Gossypium hirsutum
  Clone ID: LIB3145-050-Q1-K1-A11
cccacgcgttcgggaggatggaatcgaataagaagaggagaatgaagaggactatgacgattatgagagtgaatacagcgaagaggaggaagaggagaaggatacgaaaaagaagggccctgctgctaatggtgcagtgcataataaaggctcaagctctgaaggttcaggctcagatgaggaatgaaaaataaatgccaaatttcatttagaagaataaaaccctactttatttttctcttccagaatatctctataactttttttttaaatagtgattaaattaaggaggataagcttcagagattcaaagtaactatgatactacagggattagacactagcgtactatttattaaaaaaattacatggatgtatcggattcgggttattttagagtttaaa

SEQ ID NO: 17449 - DNA, 99 bp, Gossypium hirsutum
  Clone ID: LIB3145-050-Q1-K1-A12
ccatgggtctgggcggggtctttgttggatctacaagttgaggtcaattttttagggtttttttacataatgatcaaatcttttaaaatggttaaataa

SEQ ID NO: 17450 - DNA, 393 bp, Gossypium hirsutum
  unsure (1)..(393): unsure at all n locations; Clone ID: LIB3145-050-Q1-K1-A2
ccttttgttttccaaggaaaaaacaaaacaccctctcccccttttgtctttccaacgatcgggctccctcaccgtccaccgtaccaccaccgttttcgtggccggtgacgcgcaatataggtttttaaccccgtttttgggaccttttgaaggcgagttttcagccaaacatgcggaattgaaagggtctctcctttctaaatgacgcgaccctgacgaccgangagggatcttcggtgatgaagccccgaccgatttccgtgtcagacgtgtggaaggccgatggttggtgccccaagcggtggtggtggcgcgcgtgatggccaatgtcaaagggaggagtggcggctgtactttggtggctagggttacggtcgctggtttaagatagtg

SEQ ID NO: 17451 - DNA, 396 bp, Gossypium hirsutum
  unsure (1)..(396): unsure at all n locations; Clone ID: LIB3145-050-Q1-K1-A3
cccacgcgtccggcgcaatcaaatgacgagcgtaggttctgggtagcgaataaccagcttagtatatccagtataaatagctgtagccgtggccttagcagtgactgaatgaaaaactttttgtaatggccatttcttgggttcctaatcttagcagggtattgtaactttaatctaaacgtagtctatgtaaatgctttgataaagttttaaaatatattactggtgatattcctgagtgctgactatgtaaaaagtgtattatattcgnnaaagaaagaannacnggaaaaacnaaagagcccaaaggattacaactacatgaatctggtgacacaacgaatgggtgcatgtctacaggagcacatttcaattctaacaatatgacacatgggt

SEQ ID NO: 17452 - DNA, 266 bp, Gossypium hirsutum
  Clone ID: LIB3145-050-Q1-K1-A4
cccttgcgcggttagtcatggacaagactcctcatatttatctggcatttgatggtgctgaggccttcgcaagggaacaagtaggtgacatgcaatctttgatttgctaatgctctttaacatccatgtcactgaaaggtctatcgggtctgttcttaaattttgtaaaaatctgaaccttttattctttagcttttagttccttgttgcttgcctttagtattatttgttctactttattcctacttaaacattcaaggtttttc

SEQ ID NO: 17453 - DNA, 405 bp, Gossypium hirsutum
  Clone ID: LIB3145-050-Q1-K1-A5
cccaaaagttccaaaccaaaagaaatggccgaaactgaatctaccaccactgctcaagactcagccaccgcagaaacggagccccaccagacccaggctcaatcgcaaatagatgaaaccgccgccaagctcaataaccttactctccgaatttggccccccactcaacgaacccgcgatgccgttatcaaccgtcttgtcgagacgctctcttcccaatctgtactttccaaacgctacggcaccatccctgaggacgaggcctcctccctggccaaatctatcgagggggaagctttctcagtcgccggtgcggccttctcccccgacgatgatggcatcgagatccttcagatgtattccaaggagatcagcaagcgtatgctcgatactgtcaaatctcgc

SEQ ID NO: 17454 - DNA, 99 bp, Gossypium hirsutum
  Clone ID: LIB3145-050-Q1-K1-A6
gtgggatgcgatgtttgtgataattaggtaggtcaaaagtacaaagtctcctcgtaagacgcttatgtatgaaggtgatcgcttcaagtgcatagttac

SEQ ID NO: 17455 - DNA, 391 bp, Gossypium hirsutum
  unsure (1)..(391): unsure at all n locations; Clone ID: LIB3145-050-Q1-K1-A7
atcacaattggagcaatgcttgaagaaattcagggcctgtatcaacaacaccaccagccttgcttcctttatctctctagtgaagttataaagatatttggctctgatccttcttgtgcaagctacctcaaaaatatgatcgaggcgcttttcaagcacacaacatgtcttctcacaagtattaaggagttcaccagaagaccagacattggagatgattgttttctgttggcatcaaggtgcattcgttattgtcctcaattattcattccttcttccatatttccagctttagtagattgcgcgatgattgggatcacagtgcagcacagagaggcctncaattccatcttgaccttcttgtctgatatctttgatcttgcaaagtcta

SEQ ID NO: 17456 - DNA, 375 bp, Gossypium hirsutum
  Clone ID: LIB3145-050-Q1-K1-A8
cccacgcgtccgcggacgcgtgggctggaaatgcaattcctttaactgcaggttttgtggggcaagcagaggcaagagaagctgctggtcttgtagtggacatgataaggcagaagaagatggctggccgtgctcttctgttggctgggcctcctggtactggaaaaacagcgttggcacttggaatttcccaagagcttgggagcaaggttccgttctgtccaatggttggatctgaagtatactcatcagaagtaaagaaaaccgaggttttgatggaaaacttccgacgggctattggtctacgtataaaggaaaataaagaggtctatgaaggagaggttactgaactctctcttgaagaacagagagcgt

SEQ ID NO: 17457 - DNA, 293 bp, Gossypium hirsutum
  Clone ID: LIB3145-050-Q1-K1-A9
gctggccatattttcacgacaaccccgtcccacctcgctctgtcttttacatcctcaactaacccttcaaacccaccggttcttctctcctcatttcgtggggtctctcttaagctccctcgtcaatccctctcccttgctgctactattcccaagaagcccttttctgtgtttgctgttaccaagaaagctatccctgtttttaaacagaattcggaagttgaaggcgttgtcacagttacccacgaaaatgatggtcctacaactgagaatgttcgaattactggtcttac

SEQ ID NO: 17458 - DNA, 123 bp, Gossypium hirsutum
  Clone ID: LIB3145-050-Q1-K1-B1
actgtatgtttatggggttgaagaaattgatggagaagatgaaataagagaggagtttcgatgccctttttgttcagagtatttcgacatcgatggcttgtgttgtcacattgatgatgagca

SEQ ID NO: 17459 - DNA, 380 bp, Gossypium hirsutum
  Clone ID: LIB3145-050-Q1-K1-B10
cttaccgtcagcttttccaccctgagcaactcatcagcggcaaggaagacgctgccaacaacttcgcccgtggccactacactattggcaaagagatcgttgacttgtgcttggaccgtatcaggaagcttgctgataactgtaccggtcttcaaggtttccttgttttcaacgctgttggtggaggcactggatctggtcttggttccctccttttggagcgtttgtctgttgattatggcaagaaatccaagttgggtttcactgtctacccatcaccccaggtctccacatctgttgttgagccctacaacagtggtcttttaaactcacttcccttttggagcacactgatgtggctgttcttttttgacaatgag

SEQ ID NO: 17460 - DNA, 375 bp, Gossypium hirsutum
  Clone ID: LIB3145-050-Q1-K1-B11
atcaactcggtgctgtaatctctgtttctcagctcactgaatctaatggctttcactcattatttgtttgcagttccaatggacacttcaattcaccccaaaatttcaattcccccttcgttttgttccactgaatccccatcttccttacctttcccttctttttcttccccttttcctccattgtctaaagctcgaaatctctctattttccccagaatcaacagagtgggacacaaagcaaaagctgagcctcgagaatctgaagtgaatatagaagctgatgcgttttctcatttcaagcatttgcttcttccaataactgatagaaatccttatctttctgaaggaactagacaggctgctgcaactact

SEQ ID NO: 17461 - DNA, 304 bp, Gossypium hirsutum
  Clone ID: LIB3145-050-Q1-K1-B12
cccacgcgtccgagaatgtggtgtcattgtcgaatggtgtatctgccaatgtcgtttttgtatgggaagaagtttgtgggtcctatcacacccacaattctatcttagagcatagctgattgcatgcatatggttatgtatttgttgaatgcatacatatatacatatttatgtctgtaaatgtgtgcattgggataaattttataggagatagctttgtgttacactgtagattggttggctaaggaattggttatacttgagagtggctgaaatttgataatgatgctatctgtgttgtttg

SEQ ID NO: 17462 - DNA, 399 bp, Gossypium hirsutum
  Clone ID: LIB3145-050-Q1-K1-B2
caaaaaacacccaattgaccaccatgtttaaattaatcaacatcctaaccatccttgtgctacttacatttagttcggaaattgcagatgccgcacctccgtgccaggaggttatcgtgtcgattaccccttgcttgagcttcataaaaggccaacccgatccggcaccaggatgttgttcgggtgctaaagggcttgctaagcaagctaacaccaaactagataggcaaggaatatgcgagtgccttaaaggtgtattgccaaaaataggaccatatgaccctaaaagattccctcttattgcccagaaatgtggtatcaatactttaattcctccaatttctgccactactgattgcaccaaagtgtgaagagtgaagtggggggaatgtgaaaatg

SEQ ID NO: 17463 - DNA, 213 bp, Gossypium hirsutum
  unsure (1)..(213): unsure at all n locations; Clone ID: LIB3145-050-Q1-K1-B4
cccacgcgtncgnccacgcgtncgtgaaaaatgggggagggaaatctcgatggtcacactcccttctccttcaacggctggatacggtgaaattttaccatcaaacttattccatatccacttcgaagcgtaagtgctttccctaacccaaactcgtttccatacatattgaaccttggcgagctttcaataatcacacttcggggatataaa

SEQ ID NO: 17464 - DNA, 397 bp, Gossypium hirsutum
  Clone ID: LIB3145-050-Q1-K1-B5
aggattggagcgtgcacacatgggtatctttactgagttgggagtcctgtatgccaaatatcgtgcagagaaacttatggagcacattaaattgttctctacgcgtctcaacattcccaaactgataagagcttgtgatgagcagcagcattggaaggaacttacctatttgtatatccaatatgacgagtttgataatgctgcaactactgtcatgaaccactctcctgaagcatgggatcatatgcagttcaaagatattattgtcaaagttgctagtgttgagctctattacaaggctgtccacttctacttgcaagaacatacagatctcatcaatgatatgctgaacgtgcttgcactttgtgtggatcacactcatgttgttgacattatg

SEQ ID NO: 17465 - DNA, 394 bp, Gossypium hirsutum
  Clone ID: LIB3145-050-Q1-K1-B8
cacttctccaactaccctattatgtcttattttcactcccctccatgaaagccatagctccaaaatagcttcaatccctcccccaaaaatggccattctcaaactgatcttcatcaccctcactctaccccttcttttccttcattcttatgttgctgtctcaattttagagctccaaaatgcactgaaaactagtgaaattgatgccacggtgagaagggcttgttccaaaaagcttgaagattgtttagaaagtgaagatatggaatcagagacccaaaggaggttgcttttgatgcaaagaaggtacattagttatgaaacattgaggagggacatggttccttgtcaaaaaccaggttcttcttattatgattgtggtgctgctcaagct

SEQ ID NO: 17466 - DNA, 320 bp, Gossypium hirsutum
  Clone ID: LIB3145-050-Q1-K1-B9
tacttaaatggctgctgttttggcttttattttcattgttttcaaagacaacaaagggggctataaaaagctagtccgtggtgcccaaacactctttaagaaagttagggatcaaagacgcacatatactgctggtggttctgaccctgacctgttttataattacttaaagcactgggatgaattggattggggtgaaacctggttatactataccactgtgaattcatactattttgagttagctactcatgctaaactagccaagcatgctcgtgcttgctggggtggcccatattatggtggtcttagctggaata

SEQ ID NO: 17467 - DNA, 386 bp, Gossypium hirsutum
  Clone ID: LIB3145-050-Q1-K1-C1
cccacccgtccgcccacgcgtccgcccacccgtccgaacatattcacacttttaataatatttaaaatggaaaaatcttcccgttcaatgtcatctttagtccttcttatgtgggttcttctagcaacagagatgggatctatgacagggggaggtagaacatgtgagaccaaaagtagtgaatacaaggggatatgcttatttgatgctaattgtgatagtatttgcaaagtagagccaggtttcgatggtgggcattgccatggcttctttcgcagatgctattgcactaaaccttgttagatgagcaatctattaagatttcattatacttaaaagattgcctcatttccgcttgttatgtgtgtgcttgaggagtgagagaa

SEQ ID NO: 17468 - DNA, 398 bp, Gossypium hirsutum
  Clone ID: LIB3145-050-Q1-K1-C10
attccaagccaaggtcattaatgtgattacattactgagctccaaccctggggggagtcatgatgagcggcacctaaacagcaaatgctgcgaatttcagttcatactttcataatcccagatgatcgctgcagacatcatataatatcaaaacccccagaatgccatttggtttgaattcttaaagcgccggcaccacaatatgtgatctaaaatcaacgtaaacggacctttttccagtcattgccggctatctagttgtaagtttatgggaaaacgtttagtcatgtattagtttatagttgagaaaactcgaaattcagaaactgggtattgttggggggtctgaagcaaattgtgacaaaatacgatgatgtttttattactctattttaaac

SEQ ID NO: 17469 - DNA, 398 bp, Gossypium hirsutum
  Clone ID: LIB3145-050-Q1-K1-C11
cttgcattgggttacaagtcttgcattattcctatttttgctattgctatcatatttttgttagttttagctttgctgctatgtatggcattgctgttgctgcccttggaatgctgagtaccatagctactggattggctatcgatgcttatggtcccatcagtgataatgccggaggcattgctgaaatggctggcatgagccatagaatacgagagagaactgatgctcttgatgctgcggggaacaccactgctgctattggaaagggtttcgccattggttcagcagccctggtgtcccttgccctctttggtgcttttgtgagccgtgctgcaatttcaacagttgatgtattgacccctaaagtttttattggtttgcttgtcggggcaatg

SEQ ID NO: 17470 - DNA, 200 bp, Gossypium hirsutum
  Clone ID: LIB3145-050-Q1-K1-C2
ggttgatccggtaatcggaaaaatcaagggtccttgttacgcctagtatgaaagagcaggccaaagaaatcgcggagacatggaaaaagagccttgaagagagaggagggattgaaaatgtgaaaacccctgatgttcatacttttttgcagcatttggttacgtttgggattgttaaaaaagaggatctggagttttat

SEQ ID NO: 17471 - DNA, 113 bp, Gossypium hirsutum
  Clone ID: LIB3145-050-Q1-K1-C5
tttatatcgcgggcggtcgctcatgaggatccaatcttacggccgcgtgcatccgacgtcatagttcttttgtccggtcagctaaacacatttcactgaccactgttggacag

SEQ ID NO: 17472 - DNA, 423 bp, Gossypium hirsutum
  Clone ID: LIB3145-050-Q1-K1-C6
accgggaaagacgggccgggccgacccgtccggtggaatgcaaggccgttaataaagctgtaaatatgatcatggatgccataaagcaagtggggggaatatatgttgtgaccgctgaccatggaaatgctgaggacatggtgaaaaggaataagtccggccaacctctttatgacaagagtggcaagctccaaatcctcacttccaacacttgtcagcctgtgcctattgcaatcggaggtccaggattggcagcaggcgttagattcaggaatgatgttccggatggcggacttgcgaatgtggctgcaactgtcatgaacctccatggttatgtagctccaaatgactatgagccaacactcattgaagtagtgagcaattagaggcatatgttgcggtcgctgaatgggctaaacgagt

SEQ ID NO: 17473 - DNA, 223 bp, Gossypium hirsutum
  Clone ID: LIB3145-050-Q1-K1-C7
ggataaaatccccaaagacgtccttcatgcaactggtacgatcaacaaggatgacaaaaagtcatctggtttaagaaaattacgagttgttttcaagggaatagatggggttgcagatatggatatggctggtggtgcatgatcctcgcaatataaaatcatactgatattgttagacaaaattttcaatcatctctgcagtatttatggaagaatatatgtt

SEQ ID NO: 17474 - DNA, 329 bp, Gossypium hirsutum
  Clone ID: LIB3145-050-Q1-K1-C8
gctaacctcgtagttgtaggtggtgataggcgaaaggaatctaaagatttggaagagaaggccgaaatgaagaaaatgtttgagctgatcgagaagtacaacttgaacggccaattcagatggatatcatctcaaatgaacagaatccgaaatggtgaactttaccgatacatttgcgacacgaaaggtgcctttgtacagcctgcattgtatgaagcctttggattgacagttgtggaggcaatgacttgcggtttgccaacattcgcaacctgcaacggtggaccagccgagattattgtccatgggaaatctggtttcaacattga

SEQ ID NO: 17475 - DNA, 402 bp, Gossypium hirsutum
  Clone ID: LIB3145-050-Q1-K1-C9
cccacgcgtccgcccacgcgtccgggctaaaaggacttaccgcttcatagttttcaagattgaagaaaaacaaaagcaagttgttgtggaaaaggttggtgaacctactgatagctatgaggctttcactgctagccttccagccgatgagtgtcgatacgctgtgtatgactttgattttgtgaccgatgagaactgccagaagagcagaatttttttcattgcctggtctcctgatacatcaaaagtaagaagcaagatgatctatgcgagctcaaaggacaggttcaaaagggaattggatggcatccaggtagagttgcaagctaccgatccttccgagatggatctcgatgtcataaggagccgtgccaattgaaatgtatgtaccatttcttcatt

SEQ ID NO: 17476 - DNA, 111 bp, Gossypium hirsutum
  Clone ID: LIB3145-050-Q1-K1-D1
gggaaattggcgccggttccagaccagttgttttggggggagtggaaaaaaaccattggtttttgggggaaccagttcggagaaggacctgttgcctttaagttaacaaaa

SEQ ID NO: 17477 - DNA, 392 bp, Gossypium hirsutum
  unsure (1)..(392): unsure at all n locations; Clone ID: LIB3145-050-Q1-K1-D10
cccacgcgtccgcccacgcgtccgctcgagagtgagttcttttcaacggaacctcttccctgtgatcctttaagcttgccaaagtatcctccaagcaaagagttagatgcaaaattaagggatgaggaagctagaagacgagtggctggaaccaaaggcctgagacctgatcttgacaggagagcaactagagaatctcgagctgttccagcacctgatgcgaatgctgaattagtcatgtcaatgcagaaaagacaatcaaattcaaagagccggagtgagaagtttaatcctcatcccgaagaagttgcctcaggctttcctatagacccgcctagaccatcacaagcgatagaatcaaatgcggattcacagggaaatcatnccaagag

SEQ ID NO: 17478 - DNA, 406 bp, Gossypium hirsutum
  Clone ID: LIB3145-050-Q1-K1-D11
cgggaagaaaacagcctctcttgcaagccaagctggtcctatatcagcttcaggggtttatgaggctttgcccagtttccgggatgtccctagctcagaaaagcagaatcttttccttaagaagctgagtctgtgttatgtggttttcgattttagtgatccctctaagaaccttagggaaaaggagataaaaagcagacgttgttggagcttgttgattatatatcgtctgtttcatccaagttcaatgaggtcgcaatgcaagaggttacgagaatggtggctgctaatctatttcgaacattcccatctccgaatcatgatagcaagattttagaaatgtatgatatggaagatgaagaaccggccatggatcctgcttggccgcatcttcagattgtctatg

SEQ ID NO: 17479 - DNA, 367 bp, Gossypium hirsutum
  Clone ID: LIB3145-050-Q1-K1-D2
tgcaaaacagcgccacacctctgcacgacattcaaagccgcgtttcatttcctttgtattgttgtatctgaataaagtttagttctctttgcgcgtgtcccgttctcttctccaatcctccaaaacttgaacttaaaaccccattttagttgatcccaaagttgaccccttttttgtttcagtatagtaatataccaagcctttgcttaaatggaggttaagctatggaacgacaagcgcgagagagaaatgtatgagaattttgcggagctgtatgccattatcaaagcaacagagaaacttgaaaaagcttatgtgagggatattatatcatcatctgaatatgagactgaatgccaaaagctta

SEQ ID NO: 17480 - DNA, 158 bp, Gossypium hirsutum
  Clone ID: LIB3145-050-Q1-K1-D4
ttggatcttttaaaaaaagtttgctgggaaggattggtgggttcttcttaacaaaaaaattaaggccaaagccttgggccttggtgggcacccctgggccagtcaatttcctatttacttttaaaccctattttcagggaaggggtttccttggggga

SEQ ID NO: 17481 - DNA, 404 bp, Gossypium hirsutum
  unsure (1)..(404): unsure at all n locations; Clone ID: LIB3145-050-Q1-K1-D5
gaagaaatggcactggattgtgtaaaccatgtaagtgccctggatgaatcgttgccagaattcgaggaaaaaaggctgtccatcctgaatcagcttaaggcattggaagataagttactaactatgggggatgatcaattcatggaggacttgaaatcaattcagaattccctttgatggtcttgatgagaagaatgacctgcgcagcanagaaggtaatgaattttcaaaagaaacaagttgtggcaaaacaatggcttccatggcaaagagtctccttcctttcctggatgcagctgataacgggactgaagaaggaactatgtatggaaaacaaggagaatctgattctgaaccggtagtaatgcagacatatcctggtccagaactggagttggacccca

SEQ ID NO: 17482 - DNA, 172 bp, Gossypium hirsutum
  Clone ID: LIB3145-050-Q1-K1-D6
cttccgccaacccttccaaaagattattttgttcttaagctgggaacctgaacttagccttcattaagggtgggattggagaggggaaaaatttttttaagggtaccggggtcaaaggttattaatggttattcttttaaactatgttttagagcgacttaataccttcttg

SEQ ID NO: 17483 - DNA, 401 bp, Gossypium hirsutum
  Clone ID: LIB3145-050-Q1-K1-D7
cccacgcgtccgcggacgcgtgggcgccttcgattccaatagagatagagagagagaggaggagatcttcgcttctctccgtcgttctgctccatttgataaccgcttgcagttctctcagacgtgaaaaatggggttgtctttcacaaagctattcagccggcttttcgccaagaaggagatgcgtatactgatggttgggcttgatgctgctggtaaaaccaccattctttacaagcttaagttgggagagattgtcactaccattcctaccatcggtttcaatgttgagaccgtggaatacaagaacatcagcttcacggtttgggatgttggtggccaggacaagatccgaccattgtggagacattacttccaaaacacacaaggacttatttttg

SEQ ID NO: 17484 - DNA, 388 bp, Gossypium hirsutum
  Clone ID: LIB3145-050-Q1-K1-D8
atcggagttggatatgctcttatgattgctcctgtttacacagctgaagtctctccggcttcctcccgtggtttcctcacctcattccccgaggtgttcattaatggtggtatattactggggtacgtatccaactatgcattttcgaagttaccaactgacttagggtggcggtttatgctcggcatcggagcaatcccgtcggttttgttggctgtgggtgttttagctatgcccgagtcaccgcgttggctggttatgcaaggccgactcggtgaagccaagaaagttctggacaaaacttcggaatccattgaagaagctcaacttagactaagtgaaatcaaagaagcagccggaatcccacaagaatgcaccgacgacgtcg

SEQ ID NO: 17485 - DNA, 392 bp, Gossypium hirsutum
  Clone ID: LIB3145-050-Q1-K1-D9
ctttcattagcatcgaaatcactccagttttctttatcactgaaaaatgtcttgctttggtggaaactgtggctgcggttctggctgcaagtgtggcagtggctgtggaggatgcaagatgtacccagacctgaacgttgccgagatgaccacaactgagactctggttcttggtgtagcaccccagaaagcacactttgagggagctgagatggaattcggggctgagaacggctgcaagtgtggagacaactgcacctgcaacccttgcaattgtaaatgattagagaccaaagccaaagctccctggaagcagagacgcctttgtctttaagaaataatatgttttgttggttatgtgtttttagaataaagtagccatggcttgtcgt

SEQ ID NO: 17486 - DNA, 394 bp, Gossypium hirsutum
  Clone ID: LIB3145-050-Q1-K1-E1
attttcttcttcaaatcgggaaaaaatggttttctaattaaaaagaccttttgggtaagtcttttttttctcaattttctaccttaaatattgatgaaaatcattcatcttacattcttttctatttagatacattcatatattttaaatgaatttgggtctccctggtattttaagcgatagtttattcttaatagaaacttggatatgtggtaaatatttttgctttgggagtaaattttggtacagaaattgcatattagtccgacatcatctatgtattcaattgaatagttccgggttgtttggttcttgaatccgggaccgatagtggctcattaacaacatcgtttgcaagggctgtggcgccaacgggacatgtgtatacctttga

SEQ ID NO: 17487 - DNA, 408 bp, Gossypium hirsutum
  Clone ID: LIB3145-050-Q1-K1-E10
cccacgcgtccggtggcttggaagtaaataaaaccgggagacatcgtgaagggaaaggaaatatggagacggaaaataacattttcttccggaaagggaaggttggagactggaagaattatttgaccactaaaatggctcaacgtttagaccaacgaacactgcaaaagttgagcggttcaggtttaagtctctaattgaagatctataatctatttatcatccattgttgcttaaacctgatcggagttcgtaatcatctcttttaataatattacttttaaataaagtcatcttagccgggttttgtaatcaatgttaatagtctcgtatattgtaatcaatattaatagtcttgtataaatttattgtactatttcttgaattttgaagctcgtaatagaactt

SEQ ID NO: 17488 - DNA, 264 bp, Gossypium hirsutum
  Clone ID: LIB3145-050-Q1-K1-E11
accacgcgttcgtctatacatgcaaaaacttgctaatttttctatggttaagctgaaacagttttcttatgaaaagcggccactgaccccggatgaaatatcgaccacatacctccgttttgttccccaaatatatgttctctccgctgggttcctaaaagtgcttctccctacgatggtgatattgccgctttatacgcatataaagctttatcatttgcggcttgcaaacgctctcttatctgctctttgttactctaccta

SEQ ID NO: 17489 - DNA, 113 bp, Gossypium hirsutum
  Clone ID: LIB3145-050-Q1-K1-E2
actgtcgggcgaaaaaaaaagggtagagatggctcgattaatgttaatatcgatgctatttctcttggcaggatcaatgcttatgggccaaggcggggatcccaccctttttt

SEQ ID NO: 17490 - DNA, 384 bp, Gossypium hirsutum
  unsure (1)..(384): unsure at all n locations; Clone ID: LIB3145-050-Q1-K1-E3
cggccccgtgggaaaaaaaatttaaggcctaccctctttttaattcggccgacctttaagtcttttcgcctgccgtccaaccttattcctggatcgacggtaataatacaaaaggcctaatccgcttccgttcgaccgtaagtccaaaggttcttttgaaagtctctgaatccccccccaaaaaaactccgattgcgacgaagtgagcgagggatcgaggggaaccaagaacggaggtacgagacgtgctgggcgttcggtacgatagctggcgtacgggtgcgcgcatgactactgaaacgcntgagcgtactgaggcgtggaggctgaatggttgcggcgccatggagagagccttanggtttcatttggccgatcctagat

SEQ ID NO: 17491 - DNA, 186 bp, Gossypium hirsutum
  Clone ID: LIB3145-050-Q1-K1-E4
aaaaaaaaaaaaaaaaaaaaaaaaaaaaaaaaaaaaaaaaaaaaaaaaaaaaaaaaaaaaaaaaaaaaaaaaaaaaaaaaaaaaaaaaaaaaaaaaaaaaaaaaaaaaaaaaaaaaaggggggggcccctttaaaaaaaccaaatttaattacccctgcatgcaaaagaaaaacttttttataggg

SEQ ID NO: 17492 - DNA, 248 bp, Gossypium hirsutum
  Clone ID: LIB3145-050-Q1-K1-E5
gttgttgcggaagagtaaaatcttgaagagtcacagctgaggcacggaagaagatgccttgcctaaacctttcaaccaacgtgaatctcgacggcgtagacaccttcgacatccttttcgaaggcacctcttccgtcgctaaactcatcagacaacctgaggcctatgtgatgattgtgctgaagggttcaatacccacgtcatttcgggggaccgagcagtcaaatgtctatggagaactggtatca

SEQ ID NO: 17493 - DNA, 399 bp, Gossypium hirsutum
  Clone ID: LIB3145-050-Q1-K1-E6
ggaaatcacctttccttgtatcagaaaggaaaggttgtggtggaaatgggcattcaagcaataaagttccacttgacgcaaactctaatggaagttctacagtcacttgtcacaaatgtggagaacaattcagcaaatgggaagctgctgaaactcaccatctatctaagcatgctgttactgaacttgtggaaggcgactcatctaggaagattgttgaaatcatatgccgaacaagttggttaaagtctgagaaccattgtggccggattgaaagggttttgaaggtccacaacatgcaaaagactctggctcgattcgaagattatagagaaattgtgaagattaaagcaagcaaacttcccaagaaacattctcggtgcattgctgatggaaatg

SEQ ID NO: 17494 - DNA, 350 bp, Gossypium hirsutum
  Clone ID: LIB3145-050-Q1-K1-E7
gaacggaagggccgggccgacccacgcgttcggtaaattacctttccttgtatcagaatgtttatgtagtggtgcaaatgggcattcagggggtatttttacacttgacgcggactctaatataaaatcaacaatcactcattacttatctatttaacaacacaccaaatgggaaactgatgaaactcaccatttatctaaacatgcatggactgaacttgattaaagcgactcattttggaagataattttaattatatgccgaacaagttggttaaaaactgaaaaccattgtggccggattgaaagggttttgaaggttcacaacatgcagaatacttttgttttat

SEQ ID NO: 17495 - DNA, 374 bp, Gossypium hirsutum
  Clone ID: LIB3145-050-Q1-K1-E8
cccacgcgtccggaagaattggatgcttcctcaagtaaggataatggagtcatagctacccgcctgaaccagatcaaacgttggttgttatcccattcccaacacatgaacttcttcaccattttagtgcttgcctcggtcccgaatcctttatttgaccttgctggcatcatgtgtggacaatttgggattccgttttggaagttctttcttgcaactttggttgggaaggcaattattaaaactcacatacagacggtttttattatctctgtctgtaataatcaacttctggactggatagagaatgaactgatctgggttctcagtagcctcattcctggatttgattcttacttgcccacactcacaga

SEQ ID NO: 17496 - DNA, 319 bp, Gossypium hirsutum
  Clone ID: LIB3145-050-Q1-K1-E9
gaaagcccgggccgacccacgcgtacgggaaagcacctatacttgtatcacaattgttatgttgggggggaaaagaacattcagggggttgttttccacttgacgcggactctaatggaagttttacagtaacttgtgacaaatgtggagaacaattcagcaaatgtgaagctgctgaaactcaccatctatttaagcatgctgatactgaacttgtggaaggcgactcatctaggaagattgttgaaatcatatgccgaacaagttggttaaagtctgagaaccattgtagtcggattgaaagggtattgaacgtcca

SEQ ID NO: 17497 - DNA, 404 bp, Gossypium hirsutum
  Clone ID: LIB3145-050-Q1-K1-F10
gccattggacactgttccatcgtgttatcagaagatgaaaataatgtgaaagcaatgttcagacgtggaaaggcccgagccgaactcgggcaaacggatgctgcgcgggaagactttctaaaggctcgcaaatatgcacctgaagacaaagcgattgcaagggagttacgtatgcttgcagaacaagacaaagctatataccagaagcaaaaagagatttataaaggaatttttggaccaagacctgaacctaaacccaagagaggtaattggctaatccgattatggcactggcttgtgtcactattctattacatgtttaggcgtgaaagagtgaaagctgattagtttaagctccgaaagattttcccaaaaaaataatttaatcaaagctttaaatcatt

SEQ ID NO: 17498 - DNA, 77 bp, Gossypium hirsutum
  Clone ID: LIB3145-050-Q1-K1-F11
cggacgcgtgggttgtcatctggattttttgtcttctttgctattgatacaacagggcggtgaaaaaggaagacttt

SEQ ID NO: 17499 - DNA, 340 bp, Gossypium hirsutum
  unsure (1)..(340): unsure at all n locations; Clone ID: LIB3145-050-Q1-K1-F12
cccacgcgtccgcccacgcgtccggtctttgctgtgctgttcttgtcctttgtttgtcttcttttgcaggtacggaggagaacgtggagcacgtacagaggctatgcgctggcgtacggaggtagctggcgatcgggggctgctggtggctcagctgctgcggcgcaaggcgaaccttagggttcctgaggattgcttgacctttgggccaatcgggctgtatttttgggtctaggttaatgggccattgtatttggttttgggcctaaacaatgggtttgggctattggattttaattgggtcttgggttatgctngctggtttgggggttgttaatat

SEQ ID NO: 17500 - DNA, 406 bp, Gossypium hirsutum
  Clone ID: LIB3145-050-Q1-K1-F2
cccacgcgtccgtttcaggagagtttcctgattcgtatgtcgattgcaaatcactggaaaggttgaggatcaataagaatcatctttctgggaaaattcttgatggagtttgggcacttccacatgcaaccatgattgattttggtgataatgactttgagggagagatatcccccatgattgtattttccattagcttaaatcagttggttttgaagaacaataggttttcaggtaatgtcccatcagtacttggcaagttggcaaacctagagaggcttcttttgaataataatagcttttctggcaatctacctgctgaaattggtgctttgaagcagttatcttccttgcatcttgagcaaaattcactgactggattgataccgggggaaataagcgactg

SEQ ID NO: 17501 - DNA, 406 bp, Gossypium hirsutum
  unsure (1)..(406): unsure at all n locations; Clone ID: LIB3145-050-Q1-K1-F3
cccacgcgtncgcttttatcttcttagatcatataatctgtcattcatggcggaaaaaggggaagcgttgccaaagtttggggagtgggacttgaaggatccagcaacggcagatggatttacggtgatattcaacaaagctagaaatgagaagaaaaccagagctactgctcctcctcctcctagtattgtccctcaaaaagttgatattggcaataaacctcccccttctcctcctaagaccaaatgcttttgcttttttagagtttaaaaggtagcatttagggggagatcggaaatggagaattgaatgatttggctagtgatgagcaacttgcctttcccctatatatgtatatataatattacactattcataattggctgcaatggaatgggaccacct

SEQ ID NO: 17502 - DNA, 276 bp, Gossypium hirsutum
  Clone ID: LIB3145-050-Q1-K1-F4
caaaacttacatggacagccatgtttaggaagcaacataagaaggacattgctcaagaggccgttaagaagaggagacgtgccacaaagaagccatactccagatccatcgtcggtgccaccttagaggttatccaaaagaagaggagcgagaaacctgaagttcgtgacgctgctcgggaagctgcactccgagaaatcaaggaaaggatcaagaaaaccaaggatgaaaagaaagcaaagaaagccgaagtagcggcgaagcaacaaaagacgc

SEQ ID NO: 17503 - DNA, 350 bp, Gossypium hirsutum
  Clone ID: LIB3145-050-Q1-K1-F5
atgtgacagcaatgttcagacatggaaaggcccgagcccaactatccctaaccgatgctgcgcgggaagactttctaaaggctcgcaaatatgcacctgaagacaaagcgattgcaagggagttacgtatgcttgcagaacaagacaaagctatataccagaagcaaaaagagatttataaaggaatttttggaccaagacctgaacctaaacccaagagaggtaattggctaatccgattatggcactggcttgtgtcactattctattacatgtttaggcgtgaaagagtgaaagctgattagtttaagctccgaaagattttcccaaaaaaataagttaatcaaagc

SEQ ID NO: 17504 - DNA, 396 bp, Gossypium hirsutum
  unsure (1)..(396): unsure at all n locations; Clone ID: LIB3145-050-Q1-K1-F6
caaacttgttgaaaactctcatctttcttatttctcccttccgttctttcctcactctttctcttatttcaccaccatctcctttccttgatccttctcataacacctaaggatcctgagttttttttttaacctttctttttgttcttttatcagattttaggttcaaccttaataaaattgtctttctctctctgttttcctcggnttctgcgctgtcccgactaccaccttttctttctcctttctcaggagcatagataaagggataaatgcaaagctaaaccattggtcactgattgaagcattgccaaatggtgagcttacgcagacgcaagctcctgggactctgctcttggacgagttccttttttactccactttctagatttttcg

SEQ ID NO: 17505 - DNA, 385 bp, Gossypium hirsutum
  Clone ID: LIB3145-050-Q1-K1-F7
aaatttttaaaaatggccaactctctgtggtctttcaagaggtgacaccgcctgagccagtatgaagcgtaaggcagtgatgaggacgcccttagtgctgcaatctgtgaggtccctattcttttgggggataactgctgcaattgaattgtaaggggtcttcttttcccttgagggccttcccaaagggtcatagcagtctcatttctcttggcggccattgcatagataagagcaacctttgactcggggtcagtactctccagtagcatgtcttccttttcaaccctcagctgccaagactaataaggtccagggaattagttggccgtaaaagctgagaggagcattgatgaaaagaggtgtgagcaacatgcaaacatgt

SEQ ID NO: 17506 - DNA, 153 bp, Gossypium hirsutum
  Clone ID: LIB3145-050-Q1-K1-F8
aaattttgtaaaaaactctaatcttttttgtctttcacgaggggacaccgcttaagggggggttaattttaacgcaaggtggatgactcgatccttgttataacacctaaggatcctaatcttttgtgggaaccctgctgttagtgaattgat

SEQ ID NO: 17507 - DNA, 404 bp, Gossypium hirsutum
  Clone ID: LIB3145-050-Q1-K1-F9
cttttctttcattcaaatcgaaggcccctctcgcaaatggagatcgaaacagcgcaatctccgaagacgaaaatggagtccctgagatccatctgcgacagagaggttcgggtccatcaacagaacctagattcttttacggccttgtttcccacttctcttcatttcatcaaggccctggcgcaggatgctgctcaagctcatgttgaactcgcaaaattgaaagctaatttaagagaagccgaagatgagcttgtcaaagttttagcagcgaagacccgtaaagaggcaaagcagatggctacgagggactcaatatctgctataaaagctagagtagaagaatttaaaagaaccgtccaagtacaaaaagctaggagggatgagttagaatcaattatatc

SEQ ID NO: 17508 - DNA, 358 bp, Gossypium hirsutum
  Clone ID: LIB3145-050-Q1-K1-G1
gccaaatttctgtcactgattttgtccggttaacaggtactgaatgtggctaggatcttcaacatctatccaagaaaaggagcaattcttgttggatccgatgcagatatcattatatttaaccctaattcgagcttcgaaataaatccaagatctcatcattcgagaaccaatacgaatgtatacgaaagtagaaaaagaaagggaaaagttgaggtaacaatttctagaggaagaattgtttggaaagatgatgaattgaaagttgcacctggttccgggaagtatataccaatgccttctttcggttttcttttcgacggaatcgaaaaaatcgatgctaagcttgtttctttct

SEQ ID NO: 17509 - DNA, 63 bp, Gossypium hirsutum
  Clone ID: LIB3145-050-Q1-K1-G10
aatagaaaaaccgacccaagcgacccgtgacccttcgcctgggaaaaataaaaaattttattt

SEQ ID NO: 17510 - DNA, 204 bp, Gossypium hirsutum
  unsure (1)..(204): unsure at all n locations; Clone ID: LIB3145-050-Q1-K1-G2
nnaaaaaaaaaaaaaaaaaaaaaaaaaaatttattttaaaaaaannaaaaaaaaaaaaaaaaaaaaaaaaaaaaaaaaaaaaaaaaaaaaaaaaaaaaaaaaattagatttttattttggggcgcccgttctataggttccaagcttacgtccccgtgcttcccacgttatagctctttttttgggtcccctaaattcaattcc

SEQ ID NO: 17511 - DNA, 407 bp, Gossypium hirsutum
  Clone ID: LIB3145-050-Q1-K1-G3
cccacgcgtccgctgtcattgatgcttacttggacggccttgaggcttctgggttgagtgatctctccagggttactagtgtagcttccttctttgtcagtagggtagacaccctcattgacaaaatgcttgaaatgattggaacaccagaagcccttgatctccgaggaaaggctgctgtagcacaagcagctctggcatataggctctaccagaagaaattctccggtccaagatgggaggctttggtgaaaaagggtgccaagaaacagaggttgctctgggcttcaactagtgtcaagaaccctgcctaccctgacaccctatatgttgctcctctcattggacctgacacggtctcaaccatgcctgaccaagcactccaagccttcatagaccatggcaca

SEQ ID NO: 17512 - DNA, 368 bp, Gossypium hirsutum
  Clone ID: LIB3145-050-Q1-K1-G5
cccacgcgtccgcccacgcgtccgaagaaaagtttccaaaaactccgatcgacgatgtccggtatggaacgattgcacaggatgttcgccggcgctggtggtgcgttgggtcacccgccgccggattcgccgactctcgattcgtcggagcaggtctacatctcctctttggccctcctcaaaatgctcaagcacggaagagctggagttcccatggaagttatgggtttgatgttgggagagtttgtcgatgagtacaccgtacgtgttgtggatgtctttgcgatgccacagagtggtactggtgtcagtgttgaagctgtggatcatgttttccaaacaaatatgcttgatatgctcaaacaaac

SEQ ID NO: 17513 - DNA, 398 bp, Gossypium hirsutum
  Clone ID: LIB3145-050-Q1-K1-G7
gttcgagaagacggccatattatgctcacggattttgatctttcacttagatgctcggttaatccaactcttctaaaatcctcatcgaatttggatcctgcaaggatgtctggttcgtgtggaggatcgggttgcgctgaacccttttgcattgaaccatcgtgtcaaatccgttgcttcagtcctaggttatcgcctgctcctacaaaaacaaagacggtaagaccaagccatgcttcccaagttagatcattgccacaactcgtggccgagcctactgatgcaagatccaattccttcgttggaacacatgagtacttggctcccgagatcattaaaggagaaagtcatggagccgccgttgattggtggacttacggtgtctttctttacgagct

SEQ ID NO: 17514 - DNA, 399 bp, Gossypium hirsutum
  Clone ID: LIB3145-050-Q1-K1-G8
cttaacctttttgaaaaacataaaacatggtaaaggttcctttagttgtgttctcattggctttggtgctctcaatccaattcgtagtgggacacgacgagaaggctttagatgaggcagcatccccggaagctgaagatgcaggtttaagttcaggggcagctaaacttgttgaaaactttaaaagctctgctggagatgattcccagagtgtggatgggccaacttctgacttagctgatgagattgcagcttctccagaatcagaagttgaagttgatactgaatctgtcgatgggccacattctggcttagctgatgagattgcagtttctccagaatcagaagcagaagttgctactgaatctgtcggcgggaggaagcgtaaaatggcatagt

SEQ ID NO: 17515 - DNA, 281 bp, Gossypium hirsutum
  Clone ID: LIB3145-050-Q1-K1-G9
gaatgaaggaccggccgcgcgtcccgctatttgttacttggccggtctatatcttctacttcacagaggcagctaagtgagttggggcggggatgattcgtggggcggcggccggaccccacgggaagaagaaaggggcctcctttaccatccactgttctaagccggttgaagataagatcatggacatagcctctctagaaaagttccttcaggaaaggatcaaggtcggtggcaaagccggtgctctcggcgattccgtcactgtcacccgcgacaag

SEQ ID NO: 17516 - DNA, 96 bp, Gossypium hirsutum
  Clone ID: LIB3145-050-Q1-K1-H1
ttggaacttggccggtctatatctttcacaacacaaaggccgcttaatgagttggtgccaaaattaatcgtggggcaacaacgggacccccagggg

SEQ ID NO: 17517 - DNA, 210 bp, Gossypium hirsutum
  unsure (1)..(210): unsure at all n locations; Clone ID: LIB3145-050-Q1-K1-H10
tttgatttaattttttaaaaaaaaaaaaattaaaaaaaaaaaaaaaaaaaaaaaaagaaggggaaaaataaaaaaaaaaaaaaaaaaaaaaaaaaaaaaaaaaaaaaagggaggangatttgggcggccgtttttgtggttcccagttttcgtccccgtgcttgcgacgttttagttttttttttgtgccccctattttcatttctttgc

SEQ ID NO: 17518 - DNA, 246 bp, Gossypium hirsutum
  unsure (1)..(246): unsure at all n locations; Clone ID: LIB3145-050-Q1-K1-H11
gggttttgtcatcaatttcattttatcctctcttcctcgctgatggcggaggaaggctacatcctccaggtatgtttcttctcccgtttttaaggcttctgttgcannnnnnnnnannnagcacaccatattatttctttttaaataaaaaaaggctttcttgaaaaaaaagtttctttctttggatatattggatgaccgcccctataactgacttgtttgttggtgttgaaatgcattttttta

SEQ ID NO: 17519 - DNA, 399 bp, Gossypium hirsutum
  unsure (1)..(399): unsure at all n locations; Clone ID: LIB3145-050-Q1-K1-H2
cccacgcgttcgaaaattctcccgtctaaaaaaaaaaaaaaaaaaaaaaaaaaaaaaaaaaggaaaaaaaaaaaaaaaaaaagagaaaaaaaaaaaaaaaaaaaaaaaaaaaaaaaaaaaaaaaaaannaaaaaaaaaaannaaaaaaaaaaaaaaaannnggggggggggggattaaaaagaaaaaaattaaaaaannggggggggggcgtttttaaggattaaaatttttttccccgggtttgggaagttttattttttttttaggggcccaaaaattaaaatcatggggccgggttttaaaaacggggggtgggaaaaaccctgggtttccccaattttaatggtttggaaaaaaacccctttttcccatttgggaaaattaaaaaaagggccccc

SEQ ID NO: 17520 - DNA, 357 bp, Gossypium hirsutum
  unsure (1)..(357): unsure at all n locations; Clone ID: LIB3145-050-Q1-K1-H3
cccacgcgtncgctgggttttggttttgaaggtggtcctgataaatgttgttcttctggatgttccggtaattgtaatcctggtggtttcgttctaccatttcctcaaattccagaaatcccaagaattccagaaatcccacaaatcccacagatcccacaaatcccacaaattccactaatcccacagatcccacaagtcccacagatcccacaagttccaaaaatcccactaatgccaggacagtcgggatgtgagagtggagagtgttgccgtcagggttgtggtgggacttgtgctgagtgtggtcagcccaggtgcgcatcangatgttgccaggctgaaacttgtaagagc

SEQ ID NO: 17521 - DNA, 377 bp, Gossypium hirsutum
  unsure (1)..(377): unsure at all n locations; Clone ID: LIB3145-050-Q1-K1-H4
ctaaaggacttcagagtctgcaagtgctttcgttatcatgtagcgtgcaagtaaggcatcaactccatattgaataactcggtgcattatcgactaattccctaacaataaccagttatcaatttatatgttatcgtataatgtgacattgacgtacaggcagaagttttatgattagcatgcggatgttactggagaaaagataaatagaaccaccgactatttgctgaggcttcttgttcttttgccctgtcttctattttttttatttctcgggtcttccagtaatgtagttcttacagtttaccttgttgggtttctgcaagatacattttaactgattacaagcggatatctcaatacagaacttangagat

SEQ ID NO: 17522 - DNA, 381 bp, Gossypium hirsutum
  unsure (1)..(381): unsure at all n locations; Clone ID: LIB3145-050-Q1-K1-H5
ctctagatttccttcagtccgggtttctcaaccatctttcctctcttcctcgctgatggcaaatgaaggctacatcctccaggtatgtttcttctcccgtttttaaggcttctgttgcaagttcatgagcttgacgattctctgatttgtgaataaactggaaatggctttcttgaaaaaattgtttctttctttggatatattggatgaccgcccctatcactgacttgtctgttgctgttgagttgcatttttttataactgtttttgaatctcctattatggtaattgattgaaaacccagtgagatccctaactntactgctngtaatcctgcatatgccttcgctatgaacggggacgatatngtggagtggagta

SEQ ID NO: 17523 - DNA, 404 bp, Gossypium hirsutum
  Clone ID: LIB3145-050-Q1-K1-H7
gctgatttcgtccgtggatatccattcagtctccgtgagggtgtcccaactgctggggcgcatggcctgtggctaaacatcccagattatgatgcaccaacccaacttgtgaagcctcttgagaggaacactaggtttgttgatgcggttctcaccatcccaaagggcaccttgttccccatgtgtggtatgaatctggctttcgaccgtgacttgatcggccctgccatgtactttggactcatgggagatggccagccaattggtcgctacgatgatatgtgggctggctggtgcatcaaggtgatatgtgaccatttgggattgggggtgaaaacgggtctaccatacatctatcacagcaaagccagcaacccctttgtgaatctgacgaaagaatacaa

SEQ ID NO: 17524 - DNA, 391 bp, Gossypium hirsutum
  Clone ID: LIB3145-050-Q1-K1-H8
cccacgcgttcgaccactcttccgtttattttgtcggtaccatcttccaaaaacaagccggcttccaaaatcaaaaccggtcgatgctcattcctctctccaaagcctacctcttcctcttctgtcaatctggttccctcctcctcccccataatctatcattgatgaccatctgaacatttccaattaggtaactctctcttccattctttaagcaatccgcggctaaactatgtgctaggatattagcagatctgggtatgtctttgagctggatactatgaaaactccttttcaattgttgtatgtcccaaataatagcccctattactgatttatctcgaatgtccgactgactttttttaataatggtttttgccatcttcttcta

SEQ ID NO: 17525 - DNA, 370 bp, Gossypium hirsutum
  unsure (1)..(370): unsure at all n locations; Clone ID: LIB3145-051-Q1-K1-A1
gtcaagaggctctcctctcgccgctggctacgatctgtcaagtgcaacggatacaaaggtgccagccagaggaaaagcgttgattcccactgatctaagcattgctatccctgaaggaacatatggtcgcgttgcgccaaggtctggtttggcttggaagcattccatcgacgtangtgctggagtgatagatgctgattacaggggacccctgggggtgattttgttcaaccattctgatgttgattttgaagtgaaagtgggtgacaggattgcccagttgatcattgagaagatcatgacacctgatgttttggaaagtgatgatctggattctactactagaggtgctggggggatttggatctac

SEQ ID NO: 17526 - DNA, 304 bp, Gossypium hirsutum
  Clone ID: LIB3145-051-Q1-K1-A10
cccacgcgtccgctttagaaatgtctaatagctgttctgtgtcacattcccaagatatagagggtgctgatgaaaacaagtggcaccatgttcgaaagggcaccaaaataattgtgcaagttgtgaaagaaggattgggtacaaaaggtcccactctgactccttatccaaaattaagaagcagattctggatattactcgcttgttgcgacagaattggagtctcaaaaaagataactggtgttgagcgtacacgcctgaaagtcatagcaaaaactttgcagccgcaggggtttggtctaac

SEQ ID NO: 17527 - DNA, 303 bp, Gossypium hirsutum
  Clone ID: LIB3145-051-Q1-K1-A11
tcgtcgcatggcgttcgctatacaaatgtttgtttgcagtactggggaacatttccgaggagtagggggtgctgatgagaacaagtggcaccagtgtcagaatagggcaccaagacatttgtgctcgttgtgaaagaaggattgggtacaaaaggtcccactctgactccttatccaaaattaagaagcagattctggatattactcgcttgttgcgacagaattggagtctcaaaaaagataactggtgttgagcgtacacgcctgaaagttattgcaaaaactttgcagtcgcaggggttt

SEQ ID NO: 17528 - DNA, 330 bp, Gossypium hirsutum
  Clone ID: LIB3145-051-Q1-K1-A12
gtcggagtggctcgccgcataggatccatggattgtttgagagggcactagctatcgataaatttcataattcagttatactctggcgattgtatgtcgcatatgagattaacgttgttcacaatccatctgcagcgaggcgaatattttttcgtgctattcatgcctgtccatggtcaaaaaagctttggcttgatggttttctcaaattgaactccatcttaaccgcaaaagagctgtcagatcttcaagaagtaatgagggaaaaggagttgaatttaaggacagatatttatgaaattcttttacaagatgagatactgtcatgat

SEQ ID NO: 17529 - DNA, 330 bp, Gossypium hirsutum
  Clone ID: LIB3145-051-Q1-K1-A2
aaaaaagaaaagaaaaaatacagtgaaaatggcaacccttaaggttccagctcatgtacctgccccttctgaggatgctgagcaacttcgtaaagcttttgaaggatggggtacaaatgagcaattgattatcgacatattggctcacaggaatgcagctcagcgcaatttgattcgtaaaacttatcgtgaagcttatggggaagatctccttaagtctttggatgaggaactttcaagtgactttgagcgagctgtggtgctgtttactttggaccctgcagagcgtgatgcatttctggctcatgaagctacaaagaggttcacatc

SEQ ID NO: 17530 - DNA, 331 bp, Gossypium hirsutum
  Clone ID: LIB3145-051-Q1-K1-A4
gcctagttacattccgggttatcccggatacgggcacccagcttacgcgtatggaaacccgtatccgcacccacacgggcatggttaccccgggtatgtgccaggttacccggtgtatgttaatccacctcaccagatgtttaacgatgagaacaccaatgcttgtgctatcatgtaaggaggaatggggtttacggtataggtttaggtcaaggaaaatggaaaaaaaaatagtggtaataggaaatagacaagaaagtttacttggagaagaaaattttcttatatatgttgggatccaggggtttgatctttgtatttttgtgtaaaa

SEQ ID NO: 17531 - DNA, 387 bp, Gossypium hirsutum
  Clone ID: LIB3145-051-Q1-K1-A5
cactcatgtcagtaattgttctgatcaaggcagtgacatacattacttctttagaagaactgagagggacattaaatcgaaaggggaacatcaaagtgaaacaaatatcacaatgacatgcataccacatacctcgaggacacgcaaggtattatagattgcaggggaattgaggctgcgcagatgaggatccaccttatacgaatcaatgacgacaaagtgcgggtcgctaggtgttatcgcggtaccggcaaaactaaatattcctgcaggaaccatttcatatatgtgagcaattgcaggcacaaaaccagaaatgcagtggacaaaatgctagaaatggatattaggggttggctgcagaacaaatccgcagatacatttaca

SEQ ID NO: 17532 - DNA, 196 bp, Gossypium hirsutum
  unsure (1)..(196): unsure at all n locations; Clone ID: LIB3145-051-Q1-K1-A6
gttttgttgatggtattttcgtaactttttttgtttgtaatatttgggatggtatgtcattacaatgttctaactttttgatgttctaaaactgtaaaatatatggattatgacatagaatttcattaaaaaaaaaaaaaaaaaaaaaaaaaaaaaaaaaaaaaaaaaaaaaaaaaaaaaaggnanccaaactaaa

SEQ ID NO: 17533 - DNA, 311 bp, Gossypium hirsutum
  Clone ID: LIB3145-051-Q1-K1-A7
gatgatattgcctacaatgaagaaaaccctagacctggaatcatcattaacaatccccatggtgatgatgtttataagggtgttccaaaggattacactggagaaaatgttactgttaacaacttttttgctgctatccttggaaacaaatctgctcttacagggggtagtggcaaagttgttaatagtggccccagtgatcatatcttcatatattactctgaccatggaggtcctggtgtacttggcatgcctaccttaccttatctttatgctgatgatttgattgatgttttaaaagaaaaacatgc

SEQ ID NO: 17534 - DNA, 218 bp, Gossypium hirsutum
  Clone ID: LIB3145-051-Q1-K1-A8
aaaaaaaaaaaaacaaaataccttttaattctgaccgctatacataaaaaaacggggccattgcaaaggaacttgggcaaataaaaaaaaaaaataaaaccatgaagaaccttaaatctgggcggcctttttaaaagaaccatatttacatacgcgttaatggaaagtctattcttttatttaaatgcccctaattctaatgacatggcccttatttt

SEQ ID NO: 17535 - DNA, 254 bp, Gossypium hirsutum
  Clone ID: LIB3145-051-Q1-K1-A9
ccatttatttggacgaccgacggttcttatgtgatggactgacctgcggcacgctcgcagaggaaacgggcgctgccttgttatttttctaagataatcctgtttaacaaaactctaaatccacgttgataaatgactcaagaggagtgagagaagtataaactatcgaactatacacatagaccaatacttttaacgtacttctacttattgagggaatcggacgcgggatacgggccctttttttggtacca

SEQ ID NO: 17536 - DNA, 302 bp, Gossypium hirsutum
  unsure (1)..(302): unsure at all n locations; Clone ID: LIB3145-051-Q1-K1-B1
ntttttttttttttttttttttttttatttttttttatatttttatttttttttttttggtttttttttttttttttttttttttttttttttttttttttttttttttggggggggggaaaaaaaaaggggggaaaaaaaaaaaattttttccccggaaaaaaaaaaaaaactttgggggggggaaggggggtttttttttgaccgcgatgtaaaaaaaaataaccaaatttttgggggaagcttacttttttttttttgaaccccgtctcttttttttgggggtttgggaaactcttggg

SEQ ID NO: 17537 - DNA, 171 bp, Gossypium hirsutum
  Clone ID: LIB3145-051-Q1-K1-B11
aaaaaaaaagcaaatggcccgtttttttccaaaaaaaaaagggccccagtccttttttgtcgaaattttgggtaaaaaatagttttttaataaaattttttttttttgggaggcccggttttccccccccgagattgtcaaatgaaaccaaacgggttttttgccggggaa

SEQ ID NO: 17538 - DNA, 83 bp, Gossypium hirsutum
  Clone ID: LIB3145-051-Q1-K1-B12
aaaaaaaaaaaaaaaaaaaaaaaacaaaaaaaaaaaaaaaaaaaaaaaaaaaaaaagaaaaaaaaaaaaaaaaaaaaaaaaaa

SEQ ID NO: 17539 - DNA, 354 bp, Gossypium hirsutum
  unsure (1)..(354): unsure at all n locations; Clone ID: LIB3145-051-Q1-K1-B2
gctatgctttcagatgcgcatgccatataacggagaaatgtgcctctgaagacggtcggttccttttgaccttgtgataattaatgcgcgtagatgggataatctgcttctatatgtactttttgatttaaagttgaatggcttagataaatccttttgtgaaaaaaaaaaaaaaaaaaaaaacaaaaaaaaataaagatacaaacaaacaaaacacaagcatgcaacatcatagnncttctatagtgnaacctaaattaaatagaggggccgccctttaagaaaccaatgtttgtgaaagccgtggggggggcaaacttttttttttttaacccgggggggcttttttggggg

SEQ ID NO: 17540 - DNA, 301 bp, Gossypium hirsutum
  Clone ID: LIB3145-051-Q1-K1-B3
cccacgcgtccgcaaatgaaagcatggtgaaaaaagaacctcctcaagaaaccagcaagctcaatggaattatgccggagggtgctctaagtaatgatggatataacctggaatctagcacaaggagtgctcaagcatctgattctgctggaattcaaactgaaatgagcagtccttcctctctggcaagtcagcagaacatcaagaaaacagagccacttgtgcggaggactcctccagatgacgttggaagttggcatcaaaggagtaatgctgatagagttcatcgagaaaacaaatt

SEQ ID NO: 17541 - DNA, 324 bp, Gossypium hirsutum
  unsure (1)..(324): unsure at all n locations; Clone ID: LIB3145-051-Q1-K1-B4
attgaagcttgtattgtgtggaaaaggtctctcttcaaaatcttcaagacgttgatgttggcaagccttcttccatcttccatctgaccatggttgatcacggattttccgcactcaatggcacacatccatcagttcatgagacatgcattcagctcagcctcagcacatatttggtgtgaatttttttcatctttatgcaaccattaatgatgtcgatccttctcccacttgcagtctgaccatggttgattgcggatttgatttccctgagcacatatccatcatttcatggtacatgcattcagcanagcctcagcacat

SEQ ID NO: 17542 - DNA, 305 bp, Gossypium hirsutum
  Clone ID: LIB3145-051-Q1-K1-B7
ctgaaattaagccactcccaaatcctgttcaaatccttaccgccggagctccaccgccggcggcagtgctgtctaggaccgagtcactcggattcgtcgtgagtcacggttacgggttaaccgaaacgggagggcttgtggaatcttgcgcttggaaaagggaatggaacaagttaccggcgacggagcgagcaaggttgaaagcgaggcaaggagtgagaaccatcggaatgacggaagcggacgtggtggaccctgagtcaggactcagtgtaaaacgagacgggtcaactcttggggagatc

SEQ ID NO: 17543 - DNA, 363 bp, Gossypium hirsutum
  Clone ID: LIB3145-051-Q1-K1-B8
cccacgcgtccgagaagaaccacctcttgggcctgctgctaatttaggtctttttacaaccaatgatgaatttgacatacctttgtggtcattacctacgggaacacaagatggctcagggtttcaactatttaatacagatcccgatgttgcagataccttagttgatctgcagcgtagttctctcaattgcccttcgactatgaatggttatccattggctcctgagacaactatgggatctacaaatctagtacctacttcttccattggtcaggtggatacaaatctaaatgacagcttggttgacagtaccttctttggtggagaagatccctcacttcagatatttcttccaacgca

SEQ ID NO: 17544 - DNA, 363 bp, Gossypium hirsutum
  Clone ID: LIB3145-051-Q1-K1-B9
cggacgcgtgggcggacgcgtgggcgggaatgaagttttcttcaggatcaaaagaagcacacaattgaagaagctcatgaatgcatattgcgaccgacaatctgtggatttcaactcgattgccttcttgttcgatggtcgccgcctgcgaggtgagcaaactccggacgagcttgagatggaggatggtgatgagatcgatgctatgcttcaccaaaccggtggtactgtgtgaagcgagtactactttgccgcatttagtatttgatgagttagttatggtctgattatgtaagatgtttccaatgtttttatatacgaccttattgccatgttatgaagacttgtggacctttgtttgat

SEQ ID NO: 17545 - DNA, 329 bp, Gossypium hirsutum
  Clone ID: LIB3145-051-Q1-K1-C1
aaaaaaagagagatggcgtctgtaataaaatctgcaatcttaattctgtcggtgtttttatctgtacgcttcagttcgggtgttaggttgctccaggaacagcccaatgatgaccccaaaaacatggacgctattcctcccattgatgcactcaaccctaccgagttgaatggacccggtgttggcattcacgaagatcatgttgtcccaaaaggtgctgaaattggtactcttggttttggttttgaaggtggtcctgataaatgttgttcttctggatgttccggtaattgtaatcctggtggtttcgttctaccatttcctcaaat

SEQ ID NO: 17546 - DNA, 420 bp, Gossypium hirsutum
  unsure (1)..(420): unsure at all n locations; Clone ID: LIB3145-051-Q1-K1-C10
cccacgcgtccgcccacgcgtccgaaaggctacaaaactcgcagcggatcccactacctcaaaaaccatcacttttcccctaaatatttgcattgatggttacaaagccattctcaaaaacaaacaagcaatccttgatgctatctctaaacgtgacgctgatgacctaaacatggagttaagctctaatgtggatcatataagccagtgcgaagatgcgttcgaagaagccaaaattaactccccaataccagaactgcattcgttacttggcaagattattttcaacagtataaacattggtgttgatatggttgattttgagaacaagaattaattttaaataatctataaatgacattaagtctataattatatatnnatttgaaaataatttattttaaatttgatgccctttac

SEQ ID NO: 17547 - DNA, 273 bp, Gossypium hirsutum
  unsure (1)..(273): unsure at all n locations; Clone ID: LIB3145-051-Q1-K1-C11
gtcgttatggggcattttaaatcgcaagcttagttaacacaacctttatatgtttttttatctatacacagtgcaaatatatctcaattataatatgatttaaaataacaaaatctcgtatcatcaagtacgaatctgagcttgcgtggctcatctctatctcccgagggtcttcagttgccgatgatgtcccccgctttaggtgagagttttgcagcagctacgagtggtggatggatggatggtggcgcccaaaagcctncagatgccagc

SEQ ID NO: 17548 - DNA, 346 bp, Gossypium hirsutum
  Clone ID: LIB3145-051-Q1-K1-C12
agtttataaaagtcgtaaagatcattaacaaggttggtggcgttggttgtggcggcgacaacggctgcggtagtggtggtggccgtgtgctccaggcttgcaaaagtttgtttaccatagttttaaaatttaataaataaaaatgatgtatctttttatcaaaaaaaaaaaaaaaaaaaaaaaaaaaaaaaaaaaaaaaaaaaaaaaaaaaaaaaaaaaaaaaaaaaaaaaaaaaaaaaaaaaaaaaaaaaaaaaaaaaaaaaaaaaaaagggggggccgttttaaaggatccaagtttacgtacccgtgcttgcaaacgaataactttttttttggggcccctaa

SEQ ID NO: 17549 - DNA, 351 bp, Gossypium hirsutum
  unsure (1)..(351): unsure at all n locations; Clone ID: LIB3145-051-Q1-K1-C2
agaactactactggtaaccgtgtttttggtgttctcaagggggctctggatgggggaattgatattcctcacagtgacaagaggtttgctggatttaacaaggacagtaagcaacttgatcctgaagttcaccgcaaatacatttacggtggccatgttgctgcatacatgaggaatttaatggaagatgagccagagaagtaccagtctcacttcagtgagtacattaagagaagcattgagcctgacaccatagagggaatgtacaagaaggtccatgccgccattcgtgcaagtccagaagcaaagaaatccgagaaggcttctccagggacacaagngtacacctga

SEQ ID NO: 17550 - DNA, 341 bp, Gossypium hirsutum
  Clone ID: LIB3145-051-Q1-K1-C3
gtagaccataaacaacttcacttcctccaaaaatattagcaatttctccctttccaatatgaaaactaatcgaaagctcaagaaatcagatccagcgtcatccaaggagttctatgcctaatagattctgggctgtcattaagaaattcggttgatttaaaggttgaaaaaggatttgcactatctgcatccagcaagttaattgcttgtgcttgtagtaacggacaataacggacaagtacagctcttcaatggtgaggatcttggatatgtgggaagcctattgtactctaaggccaaatcatgccatggagaaaatgatcttttttgccctaaaagct

SEQ ID NO: 17551 - DNA, 238 bp, Gossypium hirsutum
  unsure (1)..(238): unsure at all n locations; Clone ID: LIB3145-051-Q1-K1-C4
cctgcatatgcctccgccatgaacggngacgatattgcggagtggagtactgattttaaggcaagaaactcattcatcttcccccttaccataataccccaaagccggattttgattattggtggtcaaaggctgcgtcaacataaatagtggctgccgaacttctggtgttctgcctctgacgtatgttatcacctaagtgggttcctggagctccatataatccatgcagcacaac

SEQ ID NO: 17552 - DNA, 166 bp, Gossypium hirsutum
  Clone ID: LIB3145-051-Q1-K1-C5
ctgctactggattctgtaatggctgtttcatttcttctcgcaggttcaactgatgtggaagtgtacagaagtgccatcgaggctgttgatggttgctacggcgcatgagaaccctagggttctttagagtgttttaatttttgggctatttgggccttgtatcttt

SEQ ID NO: 17553 - DNA, 293 bp, Gossypium hirsutum
  unsure (1)..(293): unsure at all n locations; Clone ID: LIB3145-051-Q1-K1-C6
cccacgcgtccgctgagatgcatgattcatttggatgcttaaggaaatgttgctgctgtatatttgcccatccaaggatcaaaactctaatgttttgtcctactatgtgttatattatgtgcctacttaagctacctttcccggttatcaagagtgcctatatagaactctctctctctcaaaaaaaaaaaaaagagaaaagagttctttatatggagttttatattatatgctgagagaataaattatcttgtaaaagctcgctttgttaatganaataaattctattaaaa

SEQ ID NO: 17554 - DNA, 373 bp, Gossypium hirsutum
  unsure (1)..(373): unsure at all n locations; Clone ID: LIB3145-051-Q1-K1-C7
ctaaaataaccctagccccctttgcttgattcttcctcaatcagtcccaaagctgtaccctcagacgccgtaccctcgcctctaacagtggccgacggcgagtaaatcttccctttctaacctcatttagaaaaacatttaagaatctaacaccttcaaccacaaagaatcaaaagaacgtctcaaccttggttggattcagttttaacggaggagaaactctgacgatattccaacgattctggtgagcccttatcctttatcctcttctttgttgtttatagtngatgcgaaaatgaaagcaaaaaagcaacgaacaaaattgagatataataaatcaccttcgcataatattgattctctaattattctt

SEQ ID NO: 17555 - DNA, 321 bp, Gossypium hirsutum
  unsure (1)..(321): unsure at all n locations; Clone ID: LIB3145-051-Q1-K1-C8
cccacgcgtccgttcaaagaaacttgcacccaccataggtattgctgttgatcaccgccgtaaaaatagatctcttgaaggtcttcaagccaatgttcagaggcttaagacctacaaggccaaacttgttgtcttcccaagatgtgctcgcaaatttaaggctggtgattctactgtcgaagagcttgcaactgcaacccaagtacaaggatcatatatgcctatttctcgtgagaagccttcagttgatcttgtgaaggtcacagaggagatgaagtcattcaaggcttataacangctccgtgtggaacgaatgaatga

SEQ ID NO: 17556 - DNA, 376 bp, Gossypium hirsutum
  unsure (1)..(376): unsure at all n locations; Clone ID: LIB3145-051-Q1-K1-C9
atgccaccgataagcacctttgcaagtctattcttcattgccttgtttctttcaatctttgcaactggtattctcgagctaaggtggagtggagtaagcattgaagaatggtggaggaatgagcaattttgggtcatcggtggcatttcggcacatttgttcgctgttatccaaggcttgttgaaagttctagctggtattgacactaatttcactgtcacatccaaggcaactgatgacgaggagttcggggaattgtatactttcaaatggacaacccttctaattcctcctactaccgtcttaatcatcaatttagtcggtgtcgttgcaggcatctcggatgccatanacaatggataccaanntcatggga

SEQ ID NO: 17557 - DNA, 348 bp, Gossypium hirsutum
  Clone ID: LIB3145-051-Q1-K1-D10
cttagcttgatttcgactccatgtaatcatgccgttaacttgtctacaatggttgaagagagatcaaaccttgacagcagtcagcaaaagggtgaagcttcaacaataaaggttcaagatgaacaaaatctaaataggaaaataccgagctgcttaacctcaaagttaaaccatgtcaaagaatcctcatttgagaaggagactcggaagaaacttgatttcgaagaagttgcaagttctgtatccagagaaagaaaagggaataaatctatcatctctccggattctctgaatttcaaacggtcaaaatcaagtagagtccttttaccttcaatggaattttggcgc

SEQ ID NO: 17558 - DNA, 319 bp, Gossypium hirsutum
  Clone ID: LIB3145-051-Q1-K1-D11
gccgcatcttcttcttagccttttaaatggcgaagtcaaagaaccacactggcgacaaccaatcttacaaggctcacaagaatggcatcaagaaacccaagaggcaccgccacacttgcaccaaagggatggatcccaagttcttgaggaaccagaggtatgcaaggaagcacatcaagaagagcgctgagtctgccactgaagaagagtaaatttttaatggcaaaagatctagctttgattagtgctatataattgatgcttttcccccaatggaattgagggttcggtgactataatcaccttagatgaaatgtta

SEQ ID NO: 17559 - DNA, 319 bp, Gossypium hirsutum
  Clone ID: LIB3145-051-Q1-K1-D12
cccacgcgtccggtcaattgaagtctagattgggccagttggatcctagctcagaatccttttctctaaggcggttcaagtggcttatggagttctctatggaccatgaatggtgtgctgtagtgaagaaacttctaaatattcttcttgatggaacagtgggctctggggagcaccactctatctaccttgcattaacagagatgagtcttcttcacagagctgttaggaaaaattgtagacctctagtggagctccttttaagatttattccggagaacgcttcagataaattaggatttgagaatgggacagtcgc

SEQ ID NO: 17560 - DNA, 377 bp, Gossypium hirsutum
  unsure (1)..(377): unsure at all n locations; Clone ID: LIB3145-051-Q1-K1-D2
ctaggaatgaactctcgaaggcggtcgtttttacaacattacttctaggattccatttgcccctaagcatggttagttggttctaattatatcatctaaatgaagatttttttgtgttctggtgctagggactatgttactcgaactcgagggtttcgggggtcagtttgcttgctgcaactccatttgcccgaaagcattgtttgttggtactaattacatcatctactagttgttattttgcagttgccagggattagcaaccattgttttactggaaattccagattcaagacatccaacttcttgtattctggatataagttaatgaacaccacctgtgactngattcctagtctattagggttgattttaat

SEQ ID NO: 17561 - DNA, 389 bp, Gossypium hirsutum
  Clone ID: LIB3145-051-Q1-K1-D3
gaacctttcattctctttgggttcattaagtagccacccaaaccaccatcaatttgatggctgacggtgcacgaatggagatcggatcttgctgaagaaagcctcacccacgaagatccggtaagagtactcctttccccttttttttttaaaaaaaaaactttaaaatcctgtactattctgtcaaaaacaaggcaagatccgacgaaaaagaagagaaaaccaaccctagcccgaatcaccatattcctgagacgtgagggctttcatcggtggtggttcaagcatcctttttcatcttctatgttaaaataatgcaagcaaatcaacaagaaagaggggaaaatttgaaatcacctttagatcactcttttgaattctttctacta

SEQ ID NO: 17562 - DNA, 237 bp, Gossypium hirsutum
  Clone ID: LIB3145-051-Q1-K1-D4
gaagaaatagaggtaccaaaaccaatattgatgccaatttcaggaaaggagcaaaagtgtgttgggaatatatttagttgcagttttaatgcaagagagaagaaactgatatgtgtgaccagtggcaactcttacttgggttctttcattgtcaaagagctattggctcatggttaccttgttcgagtaaccattcaacacccagctgaatttgaagatgtgaaagacctgctaggg

SEQ ID NO: 17563 - DNA, 329 bp, Gossypium hirsutum
  Clone ID: LIB3145-051-Q1-K1-D5
cccacgcgtccggtttcagaaggctcaacggcttgcagctgaaagagaaacttcatattccccttttgttccccagtcagctcttcctgcaagctacactgcaggtgagatggatgcaggttctaataaaagtgctgaacagcgagcccttcttgttgaaagaagacaagaggtcgtgctgttggataatgagattgcatttaatgaggctatcattgatgaaagagaacaaggaattcaagaaattcagcagcaaattggtgaggtgaacgagatcttcaaagatcttgctgtgctagttcatgagcagggaactatgattgatgaca

SEQ ID NO: 17564 - DNA, 52 bp, Gossypium hirsutum
  unsure (1)..(52): unsure at all n locations; Clone ID: LIB3145-051-Q1-K1-D6
tgcatgttcatgatgaatcaatgtcacgtgagtagttaaaagagtcgnnnna

SEQ ID NO: 17565 - DNA, 149 bp, Gossypium hirsutum
  Clone ID: LIB3145-051-Q1-K1-D7
tgcatgttcatgatgaatcaatgtttcgtgagtcgctaatagagtcgaaactggaaatgggcattgaataaacggatctagcatattacatcaaaatacacaataaattagtatgatgcagctggggcctctgttactgaagatccaag

SEQ ID NO: 17566 - DNA, 366 bp, Gossypium hirsutum
  unsure (1)..(366): unsure at all n locations; Clone ID: LIB3145-051-Q1-K1-D8
cccacgcgtccgctctttcacaatgagcagatccggccagcctccagatctcaaaaagtacatggacaagaagctccagattaagctgaatgcaaatcggttggttgttggaacacttcgcggatttgatcagtttatgaacctagtagttgacaacaccgttgaggtgaatggcaatgagaaaactgacataggcatggtggtgatcagaggaaatagcgttgttactgttgaagcacttgagcccgtaggccggatgcagtaatttaggtttttcgttccaaaacttggatttcactttctgtatctctttcactctttgngtctagcctgctagcttcgggcttcatatgttacatgatcgag

SEQ ID NO: 17567 - DNA, 242 bp, Gossypium hirsutum
  Clone ID: LIB3145-051-Q1-K1-D9
tgcgttgttgccctcacctggtttagactctggtgagtaaattagaccctttttatcagaaaaaacaaaaaaaaaaaaaaaaaaaaaaaaaaaaaaacaaaaaaaaaaaaaaaaaaaaaaaaaaactaaaataaaaatattttggggcggcccttttaaaggttccaaccttacttccccttccttcccacgtcttagttttttttttgtgtcccctaatttcatttccctgcccgtcgttt

SEQ ID NO: 17568 - DNA, 375 bp, Gossypium hirsutum
  unsure (1)..(375): unsure at all n locations; Clone ID: LIB3145-051-Q1-K1-E1
gaaactaacaaggcgacgctctttatactttgagaagaagcctatcggatccggataacgtgctgcagagctgggatcccacccttgttaacccttgtacttggttccacatcacttgcaatcaagataatcgagtcactagagtggatttaggtaattcaaacctatctggacatttggtaccagagctcgggaagcttgagcatttgcagtatctggagctttacaaaaataacattcaaggaaccatccctaccgagcttggcaacttgaagagccttatcagtttggacttatataacaacaacatctncgggcaccattctcttcacttgngaaacttaagtctcttgtatcttgcggcttaatgacaac

SEQ ID NO: 17569 - DNA, 268 bp, Gossypium hirsutum
  Clone ID: LIB3145-051-Q1-K1-E10
gttttgttgttgccacaaacatagctgaaacttctttgacagttgatggtgttgtgtatgttattgattctggttacgtgaagcaacggcaatataacccagcaactggaatgtattcccttgatgttgttcaaattagcaaggtacaagctaatcaacgtgctggacgagccggaagaacacgtcccgggaagtgttaccgtttatacccatccagggtttaccatgatgatttccttgatgtaacagttcctgaaatacagcgatc

SEQ ID NO: 17570 - DNA, 286 bp, Gossypium hirsutum
  Clone ID: LIB3145-051-Q1-K1-E11
gaggaattgagtggtgggccattggctacacttgggaattaccaacaacaaggttttgaagtggtttatgatttggagaaaaggaacgttggatttgcaagaagaaaatgttcttctttgtgggatagtttgaaaaattaagttctgattttgggcaaaaagcgaaacttttcgagttttgcgagttgttccttttaacaatatcgtacatttcgctttttagtatgtgcacttcaattcttactttatgggacagagcattgttaatactttcatgtaaaagttt

SEQ ID NO: 17571 - DNA, 369 bp, Gossypium hirsutum
  Clone ID: LIB3145-051-Q1-K1-E12
gagggaattgtcattacctgaaattcgtaacatgctgatggataaggccctgcgtgtcattcgtaaaaagcttaaagacttgagctctgtaactgaagctaaaaatggtgacaaagttaaagggaaggccagagagaaagaaaataggaaacaaaggagcatggcaaatggagatggatgtgataccaataaagatcatcagggcaagcagcctgtgcctgcctcttctcctgatgaatctggtagagggactgcaccattgtctataaatgttcctgatcccgattttcataattttgacttggatcgaagtgaaagttcttttgaagatgaccaagtctgggctgcttatgatgctgatgatgggat

SEQ ID NO: 17572 - DNA, 301 bp, Gossypium hirsutum
  Clone ID: LIB3145-051-Q1-K1-E2
cttggaggtcgagagttcggataccattgacaatgtgaaagccaagattcaggacaaagaaggaatcccaccagaccaacaaagattgatttttgctggaaaacaacttgaagatggaagaactcttgccgattataatatccagaaggagtctactctccatttggttctccgccttcggggtggtatgcagatctttgtaaagactcttaccggaaagaccatcactttggaggttgaaagttccgataccattgacaatgtgaaggcaaagatccaagacaaggagggtatcccccca

SEQ ID NO: 17573 - DNA, 331 bp, Gossypium hirsutum
  Clone ID: LIB3145-051-Q1-K1-E3
aaacaatggagtccaacaccaaaatgtcagctcttcttttgatttgcatgcttttcatttcttcagtgacaccaattcttgggtgtggttcatgtgggaaagcacacaagcatcgaaagcctaagggaaagtcccctaaaggtcccatcactttgcctccccttgtgaaacctccaatcaagttgccaccggttgttcctccaatagttaagccacccattgacctccctccggttacggtccctccaattaaccttcccccagggacggttcctccagtaactaagccaccaagtgggaaaccctgcccaacaccaccaaccaaggacac

SEQ ID NO: 17574 - DNA, 208 bp, Gossypium hirsutum
  Clone ID: LIB3145-051-Q1-K1-E4
gggaaaaaaaagaaaaaatttttttttttttaaaaagggccccacaaaaaaaaaattttttgggggggaaaaaaaaaaaaaaaaaaaacccccgggggggtaaaaaaaaaacaaatttttgataacggcggccgtgaaaaaggggaaaaaatatgggggggggaggaaacccccaaaacggattttttaaaaaggggtggttcccccc

SEQ ID NO: 17575 - DNA, 342 bp, Gossypium hirsutum
  unsure (1)..(342): unsure at all n locations; Clone ID: LIB3145-051-Q1-K1-E5
cccacgcgtncggattatgcaattatgctttcccattttgataatgtggatcttcctcctggggtagaggcttcaattccttggctgaaagactctgctccacttggaaatctacctcctgccctgggtgtctcactctcaacaaccccatgtctggctgaaagcaagaaagcgacaacatcaaatttggctgatagcgaactgaagtcggnttctatcaatacttcaatggtcttaagagagtcagggtctgatcggaaagaaggaaatgaagaaaatggagttgtgcaaaattctctcagnttcaaacattttgatattggggatgatttctcagatcat

SEQ ID NO: 17576 - DNA, 317 bp, Gossypium hirsutum
  Clone ID: LIB3145-051-Q1-K1-E8
cacaaaggcaatctcctcgagggacgcatcaggttaggtcatcgatttctgattcagaccctttgcatcatcgatccattactgatcgtagtagtcctaagcttggagatcgtcgttcaccaagaggtgctccacaatctgatccattgaaccaaaagaagcttggcactcgtattgcggatttagaatctcaactggggcaagcacaaggagagctgaagaatctcaaagaccagttggcttcagcagaagctgcaaagaaagaagcgcaacaagagctggaaaataagaccaagaagcctaaagctcgggaagct

SEQ ID NO: 17577 - DNA, 344 bp, Gossypium hirsutum
  Clone ID: LIB3145-051-Q1-K1-E9
gccgccgcctgcgtctctctcttcatctctctgaacctaaaagtctttagcttttcgcttcgagagagaccatgttggtttaccaggatctcatctccggtgacgagcttctttctgactcattcccctacaaggaaatcgagaatgggatgctgtgggaagttgagggaaagtgggttgtgcaaggagctattgatgttgacattggtgccaatccttcagccgaagatgctgatgaggatgaaggtgttgatgaccaatctgtgaaggttgttgacattgttgacactttcaggcttcaggagcaaccccctttcgacaggaagcagtttgtcgtgttcatg

SEQ ID NO: 17578 - DNA, 415 bp, Gossypium hirsutum
  unsure (1)..(415): unsure at all n locations; Clone ID: LIB3145-051-Q1-K1-F1
gccatgttagatctccttctacatgtataatttctggcttgaaatttctatgcagggaggtgctattcggcaagaactttattaccttctcaaagacgagaaagatgtacactttgcattcggcacaattcaagggaatggagtcaaccaggctgggcatgggatggcgtcatccaaattctgcctcaacattgccggtgatacaccgtcttcgaaccgtctctttgatgctattgtcagccattgtgttcctgtgattgtaagtgatgagatagagctaccatttgaagatgtcatcgactactcngcaaattgcattttcgttcgtgcatcagatgttgtgaagaagggatatctactgaaccttctcagaggaatatcgagagaccagtggaccaagatgtgggaaaaattg

SEQ ID NO: 17579 - DNA, 318 bp, Gossypium hirsutum
  Clone ID: LIB3145-051-Q1-K1-F10
ctcaagttctgatgacgatgagaagaagtcaaagaagaagaaaaccaagaagaagaaaaggcggaattattctgggtcaagttcttctggtggtgcagagtttgataagcataagaggcagagaataaacaagcattcttattcatcagaagactctgactctggcaggcaatacaggactaaagaaagccgagaaaagcgttcatatacatctgaaggttccaaatctaatccagaaccctgtggtaaaaagaacaggtcaaagcattcttattcatctgcagatgactttgataggcattataggaagggcaaata

SEQ ID NO: 17580 - DNA, 275 bp, Gossypium hirsutum
  Clone ID: LIB3145-051-Q1-K1-F11
cggacgcgtgggcggacgcgtgggattttctcggctttgacgaggagccgacgctgccatggataacgtcagtatctaccgctactatgggaagacctttaagaagccacgacgtgcgtatgagaaggaacgattggatgctgagtcgaggcttgtaggagagtatggtcttcgatgcaagatggagctgactaggggtcagtatgcgttgaggcgcattcgtcatgctgatatggaccttctcactcttgatgagaagaactctcgtggtattt

SEQ ID NO: 17581 - DNA, 342 bp, Gossypium hirsutum
  Clone ID: LIB3145-051-Q1-K1-F12
gcctaatccgtgttttccccttttctgctattccattttttgccctcgtcctcaaccttctgattctacgacgcctccttgcacaggttgttgttcatcgaactcttccccgatttccctggttacacaggttagttttcctccccaagtaaaactcatctgcgatttgtgaagagaaacttgaggggacaaatctgctctcccttgctattcctacttaactgctttcgatcttttgtttttgttctttggcatgctaatgagctttatgattggttaactgttggttggcatatttaatcatgctcaaacttcaaacaaatattatttgggggaatttta

SEQ ID NO: 17582 - DNA, 319 bp, Gossypium hirsutum
  unsure (1)..(319): unsure at all n locations; Clone ID: LIB3145-051-Q1-K1-F2
cccacgcgtccgcccacgcgtccggtcattggaaggcaaggagagtcttgtgattcagtttgcaagtcaaatggacaatcatgcgtactaaataagcttttgatacttaaccagtgtgatattatccagaaatatatgagctgcaaaggagcatgcttggcaagcgttggacccgatcaacctgctgaagttgtagatgatgctcccaaaaatttgaatccaggagcatgcttgtatactcgaacacaatcaatgctatcttgtgatggttctcatcggcataccangaagacttgtccctgtgcatagtgcatcatca

SEQ ID NO: 17583 - DNA, 305 bp, Gossypium hirsutum
  Clone ID: LIB3145-051-Q1-K1-F3
atttcattgctttttaaatatcatccatggcatataagcttcttaagtcattggaggtggtggcgatttcagtgctgtttgtaatattgcaaaactcggcaaatgcaaagccccaagtgccatgctatttcatttttggggactccttatccgataatggcaacaacaataaccttaacaccttggccaaagtcaactattcaccctatggcattgattttcccaaaggaccaacaggaaggttcagcaatggcaaaaacatgcaggattatattgctgagtatttggggttcacacgttctatg

SEQ ID NO: 17584 - DNA, 336 bp, Gossypium hirsutum
  Clone ID: LIB3145-051-Q1-K1-F4
ggaagtcaatggcgaaggtaaacagcatgccacagaggaaagctcctgtactccggtagacgaagatgtaaaaggaagcagcattatgagtctcagagcaaatgctccattggatcaacctacagcagaaggcgtagtaactcttgatttttcaatcataaagcctggtattgccgcagacctgaaatttgggggatctggttcttttccaaatttaccatgggtttcaaccacaggtactggcccacacggtagaacaatttctggcgtcacttacagattcagcgcaaaccagataaagattggttgtgcttgccatggtacccacatgttccc

SEQ ID NO: 17585 - DNA, 350 bp, Gossypium hirsutum
  Clone ID: LIB3145-051-Q1-K1-F5
ccctaatctagacccagaaagctcttcccagaaaaaaatgggaagaggcaaaatcgagattaagcggatcgagaacaccactaatcgacaagttaccttctgcaagcgccgcaatggactgctcaaaaaggcctatgaattatctgttctttgtgatgctgaggtggctctcatagtcttctccagccgtggccgtctctatgaatatgctaacaacagtgtgagagcaacaattgagagatacaagaaagcatgctcagatgcaacaactccaaggtctgtggctgaagccaacattcagttctaccagcaagaagcaaaccaaactccgacgacaaaattcgtgatgt

SEQ ID NO: 17586 - DNA, 342 bp, Gossypium hirsutum
  unsure (1)..(342): unsure at all n locations; Clone ID: LIB3145-051-Q1-K1-F6
cccacgcgttcgcccacgcgtncgcaaggatccgtgctgctgttcccaccatcaagtatttgatgggtcatggctctaaagtcatcctctctagtcatttggtaatttgttatgggatacttttggttttgatggctgttgggaactttataaacacaatacagacactcgtgacaaaatcaatgtttaaagcaaagatgaaaagatctaagagcaagccggagttggattaaaatgtccttgattgttaggactgagcaatgctttctttacaggtaaataaaccattagttatattcattgatgaaactgatgctttagcaactagacgtcaggggattt

SEQ ID NO: 17587 - DNA, 407 bp, Gossypium hirsutum
  unsure (1)..(407): unsure at all n locations; Clone ID: LIB3145-051-Q1-K1-F7
tgcctacaacgctgccaccttttttagtccaaatttccatgaggaacaacatgattgaaggcacaatccctccaagtcttaaatatttgaaccttctgcaagtattagacctgagtcacaacaaactcaccggctcagtcccttatttcctctttaaccacccatctcttcaacaactcactctcgcattcaactcctttgattctttacaagctccctctaatctaggcacccaaagtgagcttattgctgttgacttgagcaataacgagctacaaggctggttacctcctttcttgccattaatgccaaacctgtcagctttatccatggaaaacaaacaagtttcggtatgatccctatcaatacgcattgagagccgctctngctgcctccggaatgccccg

SEQ ID NO: 17588 - DNA, 325 bp, Gossypium hirsutum
  Clone ID: LIB3145-051-Q1-K1-F8
actagaccgaaagaataggacattacaaactccactgaataaagaaaaaaacataacttcccattattgccctttaccactctccctcacaaaacacatcaggccaccataccttaagccctgtcttatcgttcttgttcggttattctcatcccgcaacaatcatcgacatatatctcgacattgtaaaaagcttctaaaaagcttctctaaatttgatacgagtaaagttattatttccatcaatctcactttcattgttgctcatctcaataacatgggatttcaatttcagtattggaagattggttaatgcaagtatgtc

SEQ ID NO: 17589 - DNA, 221 bp, Gossypium hirsutum
  Clone ID: LIB3145-051-Q1-K1-F9
tcaattatacctaaaaactatcccttttctttcttcaccccaagacaatgaaagcggaggcgattatattgctgtttgtcatattccataactcagcaaatgcaaacccccaaccgccatgctatttcaattgcgctgactccttaattcttaatcgcaaccacaatatccttaacaccttggccaaagacaactcttcaccctatctcatctattttccc

SEQ ID NO: 17590 - DNA, 313 bp, Gossypium hirsutum
  unsure (1)..(313): unsure at all n locations; Clone ID: LIB3145-051-Q1-K1-G1
gtcgtctagaaattctagggttttttttcctaatctaagaaacaagaggaagaatcaagcttggttttctctcatgtattcttttctttttcctcttatgaatccgatattgaaatgtgttttaattcaattttgagtaattgatttttttttagttttattatctttgaatctgctgatttgatttactagaaatgattttcctaattttgggtaattagaattggatttgatctatggtatttgtggattgtgaaggtattgattcaagaacaaagcaatcaacctagnctcttttctttttttctttttg

SEQ ID NO: 17591 - DNA, 165 bp, Gossypium hirsutum
  Clone ID: LIB3145-051-Q1-K1-G10
tcgtttaaagttatcaaaaaagaaatttgtgagagggagggttcagttgaagaggggggagaacaagatcaacaggcgagttactttctccaaaaggagagctgggttgttgaaaaaagctcatgagatctccatcttgggtgaccgctgaggtcccttttgatt

SEQ ID NO: 17592 - DNA, 201 bp, Gossypium hirsutum
  Clone ID: LIB3145-051-Q1-K1-G12
tttctttttccgtggggggttaatttggaggggggtggggatcctagaatctgggtatttctgaaaatggggaaataccaagcctacaactctatgcaaaagagccagacttggctcttactctggtggccctgaagagattgaggatggcatgggggatgggtctttttatttaccaaaatggcatgctgcttcgttggc

SEQ ID NO: 17593 - DNA, 355 bp, Gossypium hirsutum
  unsure (1)..(355): unsure at all n locations; Clone ID: LIB3145-051-Q1-K1-G2
caaattttaacccttactcgatttactccttgtaccttaataactcctaatttcacgaaatctactattccaaaaactaattagctactaagctagcctcataaatatttttattaaatatttacgagttcggtttatgaaaatggagtcccagaaatatgttttctgacacccctgactatcaggtcgttacatatcaaatgttggttagacccttatatacctaatgttggcccgttagtcgataaaatctcgctccatggaaaccttgagatggattgtctttttaaagatatggttactaaagatggtaagtggaattttgatatttcccaactctaactatncgatgaca

SEQ ID NO: 17594 - DNA, 317 bp, Gossypium hirsutum
  Clone ID: LIB3145-051-Q1-K1-G3
ggtattcttataacgggcaattcccgggaccaaatcttaactctaccaccaacaacaatatcgtggtcaatgtgttcaataaccttgatgagccattccttgtaacatgggacggcgtgcagcatatgaagaactcttggcaagatggtgttctgggaaccaactgtcctatcccccctgggaagaattacacctataaattccaggtgaaggatcagattggcagctacatgtactatccggtgacggctatgcacaaggcggttggtggttcggtggcctcgtgttacagccgctactcatcctgtccctacctg

SEQ ID NO: 17595 - DNA, 327 bp, Gossypium hirsutum
  Clone ID: LIB3145-051-Q1-K1-G6
cccacgcgtccgccttaatttcttaaatccagaaaacaatttctctctttcctttttctttttttttttaatttcgatttttctggggatttttgaatctgggtatttctgaaaatggggaaaaaccaagcctacaagtctatgcaaagagccaggcttggctcttcctctgctggccctgaagagatcgaggatggcatggtggatggttcttttcattcaccagagtggcatgctgctcgtttggccagtcttaaaacttctcatacagttacgtgggaagagttccaaaagaaacaaaaagaagatgcattggaaaaggggaat

SEQ ID NO: 17596 - DNA, 347 bp, Gossypium hirsutum
  Clone ID: LIB3145-051-Q1-K1-G9
ctttatgttgaccatgtaatactcaaatgtgttggttattttcttttccatgagcatgtgaactttggatataatacaggaggtttgattcaattaaaccatggaaggcctcagccactgcaatacgtagtcaatgcagccttcttagccgccctatatagtgattatcttgatgctgctgatacacctggatggtattgtggtcccaatttctattcaactgatgtcctgcgtgaatatgccaaaacccacattgattatatccttggcaaaaatcctcgaaaaatgagctatgttgtgggctttggtaaccattatccaaagcatgttcaccatagaggtgcatc

SEQ ID NO: 17597 - DNA, 292 bp, Gossypium hirsutum
  unsure (1)..(292): unsure at all n locations; Clone ID: LIB3145-051-Q1-K1-H10
cccacgcgtncgcccacgcgtccgcccacgcgtccgaattttttaaagttttttaatttttaaaataaaaatgggccgggccggccgggcccgggcttatgattttttttttccaggccgggcttgggcaaaattttacgcccatgagtacctctagtcaggccttgagacgaggcgcgggcggtgcgttcgaggaagagcggcgtacatgggagctagggtttttgcttctgctgaaactgtttaatcatttgagcttgtaatttttgggctagattttttatttatttat

SEQ ID NO: 17598 - DNA, 242 bp, Gossypium hirsutum
  Clone ID: LIB3145-051-Q1-K1-H12
acgcccacgcgtccgggggaagtgtcactgggagatttaatatggctcaaactccttggggaaacatggtggcctgcagtggtatgcctattgctgtggttgtttgatctagcaactagttctctttttcggccttttaaagattaattagcatttggagcagacttatgtagttctgtggattttatttgtcgatattgtttcaggttgtattattaattgtgttattaatttattatttt

SEQ ID NO: 17599 - DNA, 331 bp, Gossypium hirsutum
  Clone ID: LIB3145-051-Q1-K1-H2
ctctgtgttgtctctcccaccaactcgcgagataacccagttgaactcacaaaggagaaaggggaagggaaaatgagtctggaaccgtttatttacagcttcgtggctcgaggaacaatgatcttggccgagtacactgagttcactgggaatttcccagccatcgcaactcagtgtttgcaaaaactcccttcttctaataacaagtttacttacaactgtgatcaccatacctttaattttcttgttgaagatggttacgcttattgtgttgttgccaaagattccgttggaaagcaaatctctattgcatttttggaacgtatgaaaa

SEQ ID NO: 17600 - DNA, 235 bp, Gossypium hirsutum
  Clone ID: LIB3145-051-Q1-K1-H3
cgaagaggagtcccgttctgaatccgacaatgccttcaaatcctctcctataccagacgctgacgtccctaataaagatagctctatatacgacgctgcacccagcgatatcgcaccagaaccaaggactttcggcgccgctattgacaaagactcagacggcgatggtggtgtagccgatgtcgcctgatgcttgctcttttaagcttccacaaatgatatgcgcctacatgga

SEQ ID NO: 17601 - DNA, 225 bp, Gossypium hirsutum
  Clone ID: LIB3145-051-Q1-K1-H4
ctaagaggagtccctttcaaaatcccattatgcatttcaatccccttctataccaaaaggggagggggctaataaagattgctctctatactacactccatccagcgatatcgaacaataaccacggacttgggcaatattttaagcccatgactacctctagtcaggccttgaaaccagcgtcgaccgatgctttctattataagctttaataaatgatatgac

SEQ ID NO: 17602 - DNA, 210 bp, Gossypium hirsutum
  Clone ID: LIB3145-051-Q1-K1-H5
tcggaatagtggccactatatagcggtagcagtgtcgtccgaaactactactactgaaaatagcaatgtgaagcagagtgacattgatagcggtggatcgcggctgcaatttaatgggtaatggccaattgcagcaataacgggccactattcccgttatttttcgttacagtaaattaaaaaaaaatcaattgtgatcctctttcttag

SEQ ID NO: 17603 - DNA, 121 bp, Gossypium hirsutum
  Clone ID: LIB3145-051-Q1-K1-H6
gggggggagctatagaggatccaaggtgactgccacgtgcatgcgacgttatagtgtttctatagaggaacctaatggcacttcactgaccgcggttttacatgggaaaacactgggaaaa

SEQ ID NO: 17604 - DNA, 356 bp, Gossypium hirsutum
  Clone ID: LIB3145-051-Q1-K1-H7
caagaaccaaaaaggggaagaactgagaataatggagaaaagtgaaaagggtaatggtgttgctcctgctacaaggtctccaatggctttaatggggtcatctagaaatgaaaaccaagaagtgaataccagcatgagaactgtcgagaccatgctgcggttggtgcctatggctttaggggttgctgcacttgttgtcatgctcaaaaactcacagtccaatgactttggctccgtttcatactcagatcttggtgctttcaggtacttggtgcatgctaatggtatttgtgcaggctattcccttctttcagctattatagcagctgtgcctcgtccttctactatgcctagag

SEQ ID NO: 17605 - DNA, 352 bp, Gossypium hirsutum
  unsure (1)..(352): unsure at all n locations; Clone ID: LIB3145-051-Q1-K1-H8
cttgtctttctctctgctatgtgtcatctgtgttctttgggctccttctcagaattctacacggtaaatatcaaacttattgagccctaagcttctctttctgcctttccttttctgctacggttgtttatgaactgttttatggacattcaaaatgaaagaagaaaaaacttcatactcacaccctcaattgtttaatatatttcctgatcgttaataaaggtaaaacttggcaactatttcctgatcgttaataaaggtaaaacttggcaacttgagatgtctgtgtaggcttgattacttgtttaatntgtagctagttcctctngtgtacagaatttaaagatgtatg

SEQ ID NO: 17606 - DNA, 351 bp, Gossypium hirsutum
  unsure (1)..(351): unsure at all n locations; Clone ID: LIB3145-051-Q1-K1-H9
gcagtatgcattttgtcagccaacggggctgtctctactgtaactcttcttcagccatcatcttcgggtggcactgttacatatgaggggcgattcgagatattatgtctatcaggctcttacctgctgatcagcaacaatggctcttgcagccgaagtggtgctcttagtgtttcccttgccactcctgatggccgcgtcattggtggaggtgtcggagggatgcttattgcagcaagcccggttcaggtgattgtcggaagtttcaatggggtggtccaaaggcaaagaacaagataccggaaagtcaagaatgtctaaatganctcgacaatcagagtgtcgacaatc

SEQ ID NO: 17607 - DNA, 66 bp, Gossypium hirsutum
  unsure (1)..(66): unsure at all n locations; Clone ID: LIB3145-052-Q1-K1-A1
naaaaaaaaaaaaaannnaaaaaaaaaattaaaaaaaaaaaaaaaaaaannnnnnnnnnagggggg

SEQ ID NO: 17608 - DNA, 338 bp, Gossypium hirsutum
  Clone ID: LIB3145-052-Q1-K1-A10
cccacgcgtccgattattaaccttgctttctaagcttctcttttataacaaaaattgttcaccattttcaaaaaatggcaatgttttatcgtatgcaaatgctactgcctgcctacgctttacttctcatcttattcactttggcctcatcaactactataacatcttcatccaaagaacaaataaaacgcgatacttgtacgcctgttccctctgcaacgacaccacccatcgtggtaactgagtgcccaccacctacttatccggcttttcctcctacagcatcaccttcaccaccaccaaatccagcttcgccaccaccagcatgcccttcatgt

SEQ ID NO: 17609 - DNA, 389 bp, Gossypium hirsutum
  Clone ID: LIB3145-052-Q1-K1-A11
cccacgcgtccgaaacctatgaattgtttcctatgtcgcatgttatggcaaccagtgtgggagctctcctcactgaggttcgcaagaacggaacttgcacgttgctgacgccctacggcaagactcaaatcatagtcacattattacaacgataagggtgccatggtgcctgttcgtgaccacatcgcgctcatctcctgtacacatgaccagaccgtgactaaccatgagatagctgctgatgtgaaggaacatgttatttagccggctatacccgctaagtaccttgatgagaaaaccatttttcaccttaacccgtcaggccgtgtcgttattggaggtccccatggtgatgctggtctcactggccgcgcgattattattgatac

SEQ ID NO: 17610 - DNA, 330 bp, Gossypium hirsutum
  Clone ID: LIB3145-052-Q1-K1-A12
caggtattctttgcaggcatgttcttcgtgttctatccagtaataactgtttccatattccagacccatacctgcccagccgttggcgtttgaatagttcgtcttccataaacccattaagcaatgcaacgagagagcactccgaaaagattcagttgctagagtccttgacttcagcactcatagcagagtcaatcgaaacaaaggaacgcctcgatgttgcttgcgagcaaaccgccatggttctttgccacatgaaggaccttcctaggacgacacaaagtgcaaatgatatcgtatacaattgtccatcggatttgatcttaccag

SEQ ID NO: 17611 - DNA, 388 bp, Gossypium hirsutum
  Clone ID: LIB3145-052-Q1-K1-A2
gaagaatttacgtagtgaccgatccttcagatgatgattttttaaatcctaaacctggaaccctacctcatgctgtgatccagaaggaacctctttggatcatctttgcacgagctatgatcatcaggctaaaagaggagctcattatgtcgggtaacaaaacaatcgacgctaggggagccaatgtgcatgtggcttatggggctggtattactatccagtatgtgaggaacgttattatccatggcctccatattcaccacattgttcccggcaatggcggcatgatcagggattccgtaaaccactatgggttcaggacaaaaagcgatggtgatgggatttctctttttggagcaacgaacgtttggcttgatcacctttcaat

SEQ ID NO: 17612 - DNA, 437 bp, Gossypium hirsutum
  Clone ID: LIB3145-052-Q1-K1-A3
gaaaaaaagagagatggcgtctgtaataaaatctgcaatcttaattctgtcggtgtttttatctgtacgcttcagttcgggtgttaggttgctccaggaacagcccaatgatgaccccaaaaacatggacgctattcctcccattgatgcactcaaccctaccgagttgaatggacccggtgttggcattcacgaagatcatgttgtcccaaaaggtgctgaaattggtactcttggttttggttttgaaggtggtcctgataaatgttgctcttctggatgttccggtaattgtaatcctggtggtttcgttctaccatttcctcaaattccagaaatcccaagaattccagaaatcccacaaatcccacagatcccacaaattccacaaattccactaatcccacagatcccacaagtcccacagattccacaag

SEQ ID NO: 17613 - DNA, 170 bp, Gossypium hirsutum
  Clone ID: LIB3145-052-Q1-K1-A4
gctgaagctatacaatatcctgtacgaaccaaccagattccaagggagattcctgctcgcaaatatccatcttggcttcttgttcttggtgcagggacccttccatttggaaccctgttcattgaactcttcttcatcctttctagcatctggcttggcaggttctatta

SEQ ID NO: 17614 - DNA, 322 bp, Gossypium hirsutum
  Clone ID: LIB3145-052-Q1-K1-A6
aagaacactgtcggcggcaatggcaacttacgatctaaccccgcgtatcggcccgaacctagacaggcacttagtgtttccattgctggagttcttgcaagagcgacaactatacccagatgaacagatcttgaaagcaaagatcgagcttttgaacaagacaaatatggtcgattacgctatggatatccataagagcctttaccgcaccgatgatgtccctcaggacatggtcgataggagagtcgaggttgtcgctcgtctcaaagctttggaagatgccgccgctcctcttgtcactttcttgcaaaaccctaacgct

SEQ ID NO: 17615 - DNA, 413 bp, Gossypium hirsutum
  Clone ID: LIB3145-052-Q1-K1-A7
gctttaatcctcgcttttctccgccatcaaccacttcctcgttttctcaaggttgtagaagatggcagagggcgaggatatccaaccccttgtttgcgacaatggaacaggaatggttaaggctggatttgctggggatgatgcaccacgagctgtgtttcctagcatcgtcggtcggcctcggcacaccggtgtaatggttggtatgggccaaaaagatgcatatgttggtgatgaagctcaatcaaaaagaggtattttgacgttgaaataccctattgaacatggtattgttaacaactgggatgatatggaaaagatttggcatcatactttttacaacgagcttcgtgttgctccggaagaacaccccattttacttaccgaagcccctcttaaccctaaagcaaatc

SEQ ID NO: 17616 - DNA, 286 bp, Gossypium hirsutum
  Clone ID: LIB3145-052-Q1-K1-A8
attttattttccaacatacaggattcttacccattttgtaacattaagaaataggaaggtaagatgtgcaaactttttagaaattcaattgtcttttttagatcataacaaggagctgagacagaatatgtgtaccatattattctgaactagggtagggttcaatttttttggattaccaactctctcaggtcatatatatacctttttttttttttgcttttataaagaggaaaatattccaaatctcaaccccctttagaaaaataaataccctattgaacgg

SEQ ID NO: 17617 - DNA, 365 bp, Gossypium hirsutum
  Clone ID: LIB3145-052-Q1-K1-A9
cccacgcgtccgaaacccctgaattgatgcctttgacgcatgttttggcaaccaggcttggtgctcgcctcactgaagttcgcaagaacggaacttgcccttggctcaggcctgatggcaagactcaagtcaccgtcgagtattacaacgataagggtgccatggtgcctgttcgtgtccacaccgtgctcatctccactcaacatgacgagaccgtgactaacgatgagatagctgctgatttgaaggagcatgtcatcaagccggttatacccgagaagtaccttgatgagaaaaccattttccaccttaacccgtcaggccgtttcgtcattggaggtccccatggtgatgctggtctcact

SEQ ID NO: 17618 - DNA, 413 bp, Gossypium hirsutum
  Clone ID: LIB3145-052-Q1-K1-B1
ctgtagtattatgagccatcaagggactagctttacctaaaggcctcttaatccttaataattttcttttcaaagatatcttcaaaatactcttttttcccggtaaaggaaaaaaggagtattggatttgctttacgtggtatgaaatactaagattaagtatctggaggtaatactcttaaaataaattgcatatgtggaggcaatatagttgcttcttccttttgcaaatcaatgacaatactttttctggtgatttacttataggtatggcaatgctaatgtttggaagatctttacagacctttttgactattttccattaactgctttggtggaatcagaaatattttgtctgcatggtggattgtccccttcaattgaaaccctggataatataagaaactttgatc

SEQ ID NO: 17619 - DNA, 424 bp, Gossypium hirsutum
  Clone ID: LIB3145-052-Q1-K1-B10
atcgatggtgatcaacgtggaatacaatcagcttgatcctttgcttagagccactggacatccagatggagatgttaattgtgagactggttattctccttttccaggaaatataaaccagttgattttggagcttgatccatacattaaggagcttaccaaaacaggaggtgctgttaaggaattcgttaaccccaagtataaagatgctagtaaaacatcatttaagtcctcaactcgactagagtgtatgatgcaagattatcctaaaacattgcctccatcagcaagagtcggatttacggtaattgatacatggcttgcttatgcaccagtgaaaaataatcctgaggctgctaacataccaaaacagaacccatatcatagtgcaacttctggagaaatggctatatatcgtgcgaac

SEQ ID NO: 17620 - DNA, 426 bp, Gossypium hirsutum
  Clone ID: LIB3145-052-Q1-K1-B11
gggaagaacttcgaaaattgcttggccattcggaaaggagttgattttttgcttagaacccaaagagaagatggtggttggggagagagttacctttcttgtcccaaaaaggtatatacacccattgaggaaaaagaatcgaatttagtaagtactgcacaagcaatgatgagtctaattgttagtggccaggctgagagggatcctacacctctacatcgagctgcaaaattgttgataaattctcagttgccaaacggaggttttcctcagcagggactggctggtgtcttcatgaggaactgtatgttacactatgcaatatatagaaatgtttttccactgtgggcgcttgctgagtatcgggaccatgtttggccttcaaaatatatatgcttttgaattataagaatggatcagagaatt

SEQ ID NO: 17621 - DNA, 425 bp, Gossypium hirsutum
  unsure (1)..(425): unsure at all n locations; Clone ID: LIB3145-052-Q1-K1-B12
cagtgctcacctggagtggaacctcgatggtctcctggataagatatgggagtatcttaatttaactcgcatatacacaaaaccaaaagggatgaacccagactatgaagatcctgttatcctgtcatcgaagagaaggacagttgaggacttctgcactcgaattcataaagacatgcttaaacaatttaagtatgcacttgtatggggatcaagcgtaaaacacaagcctcaaagagttggcaaggatcatgaacttgaggatgaagatgttgttcagattatcaagaaagtgtgatttgaggatattggaatttatgccttcatgttttaggaatcccatgaatcatattgctcaacattgtaagctgctgccatttaggttgtggagcttgaaattangtgaaaaacgtgacagcttgaat

SEQ ID NO: 17622 - DNA, 356 bp, Gossypium hirsutum
  Clone ID: LIB3145-052-Q1-K1-B2
atgggttaacattgcttcctactatttagttggcattccaattgggttgttctcggatacgtattcaaaatggaagtcaagggtgtttggtttggcatgttgctggaacacttcttcaaactgttacacttattattatcacctggaaactgattgggataagcaggttctcttggctcattcacgagttaacaagtggtttgtaccagaatcccgggaaacaaacagcaaccaagaaaatggtgcttgaaggggtcaatcttgttatttttcctaatggacttatatttttttggtgctatatgtcatttcttgaaacgatcgacgcatctgcgttaagattttgatttcccatg

SEQ ID NO: 17623 - DNA, 351 bp, Gossypium hirsutum
  Clone ID: LIB3145-052-Q1-K1-B3
cccacgcgtccgcccacgcgtccgatcattgagttggcagttctgcgcgaatgcacagctacaatcgattcaagtgtatcagttctgaatgctaatcctgattctgaaaatcgtgatggtgatattgggtggcctggagttatgactgtgagggtttatgaacttgatggtatgtctgatcatcctgatcttccaatggctggagatgcatggcagctgctggaaatagcatgccactcaaagcttgctgctagacgctaccagaagcctaaaaagggttcaaaacctgatggctctgatgataatggtgatttgcctacagtagatatgcgttcgagtgtagactcccca

SEQ ID NO: 17624 - DNA, 210 bp, Gossypium hirsutum
  unsure (1)..(210): unsure at all n locations; Clone ID: LIB3145-052-Q1-K1-B4
cccacgcgtccggttggtcatacgaggtacatgtctactgtgtaacaagttcctttacatagtgaaaatttttagcggactacggaactactgttagttattgaagttggtcatacgaggtacntnnnangaaaaaaaagtataaaatgatataatttatgaaattaaaggtgtgacagatcatnaagatcttacaatgaataggggggg

SEQ ID NO: 17625 - DNA, 383 bp, Gossypium hirsutum
  Clone ID: LIB3145-052-Q1-K1-B5
atttgcccaaagacgtgtgcgcgttttcaatagcctcatcggggaaaaggtgtgtgttggaaacggcggcggacaaaggcggcgacgtcgagcatcaatgccggacatcggaggtcgtggtggagaggatggcggattatatagagagtgatgaatgtgttgctgcctgcggcgtcaatagaaactccatcggcatatcatcggattcacttctcgatcaacaattcacggccaagctttgtgcaccagcttgttaccaaaactgtcccaacgttatcgacctttacttcaatttggccgccggtgaaggtgtgttttttcctgatctttgtaacgctcaatggtcgaacccacggcggagcatggtggaccttatatcgagc

SEQ ID NO: 17626 - DNA, 415 bp, Gossypium hirsutum
  Clone ID: LIB3145-052-Q1-K1-B6
ggtttccataaccttactgttttcagtatgtttatcggcgtcctatggtaagaggaccggaatctccaccatggctgacggagccgatgggtttcaaccaagcaacggttttccgcatgaagctgatcctgattcttcaacctctatcgatcctgatcctaccggattcggtgctggcataggtataggttatgaaagaagcccttactgtatcgactgcgacgatgtggatatcatgggcggcagcttttgcggcacctgcaattacggatgcccttaccgcaggttcaataatgggtgtggtggtggtatcgcttatatggatgaactcaaacgaacgattaaggaccttaccatgaaacttgatgccaatggtcttttagggaaaaagaaggccatgaatatacaagctatg

SEQ ID NO: 17627 - DNA, 408 bp, Gossypium hirsutum
  Clone ID: LIB3145-052-Q1-K1-B7
ggcacaggcatattgtgagactgttgggtttttgctcaaatcatgaaaccaatctcttggtttatgaatatatgcctaatgggagtttaggagaggttcttcatgggaagaaagggggtcatttgcactgggataccagatacaagatcgcggtcgaggcggctaagggactatgctaccttcatcatgattgttcccctttgatagtccaccgggatgtgaaatcgaacaatatcctcctcgactcggagtttgaagctcatgttgctgattttggccttgctaaattcttgcaagattctggcacttccgaatgcatgtccgccgtagctggttcatacggttacatagctccagaatacgcctacacactgaaggtagacgagaagagtgacgtgtatagctttg

SEQ ID NO: 17628 - DNA, 401 bp, Gossypium hirsutum
  Clone ID: LIB3145-052-Q1-K1-B8
gttttgttccattgaatccccatcttccttacccttcccatctttttcttccccttttcctacattgtctaaagctcgaaccagaatcaacagagtgggacacaaagcaaaagctgagcctcgagaatctgaagtgaatatagaagctgatgcgttttctcatttcaagcatttgctgcttccaataactgatagaaatccttatctttctgaaggaactagacaggctgctgcaactactgctgctttggcaaagaagaatggagctgacattactgttgtggttatcgatgaaaagcagaaagagtcattaccggagcatgaaactcaattggcaagtgttcgctggcatctctctgaaagtggatttaaggaattcaagttggtggagcgactcgggg

SEQ ID NO: 17629 - DNA, 365 bp, Gossypium hirsutum
  Clone ID: LIB3145-052-Q1-K1-B9
cccacgcgtccgcggacgcgtgggtaaatgcaagatacgaactccttctcgaggtatggtccgtgtgagtgtttatgttagatcgttgtgtatatctctcatgttttttagccatggaaaagtgagggtgaaggtgaaaaaactcacggtgaaaagtttagatgatcaaaattacaggaaattctcaaacatcgtttattggcttgattgtacaggtggaagaacttgctttctttttgctgaatgctgagaggcttgaaatcaactgcaattatgtcttcgatatatagaataaattcttactgttttttttaacggacaatgaacttcattggcaaagtgttcgctggcatctctttgaaagt

SEQ ID NO: 17630 - DNA, 250 bp, Gossypium hirsutum
  unsure (1)..(250): unsure at all n locations; Clone ID: LIB3145-052-Q1-K1-C1
cccacgcgtccgtccagtgccaatgttgttcccttcaagtagcacaattttttttatcttcttttcataagaagtttcccttgtgagctagttttcgtttgatacttatatgttgtggggtctancttagtatctaactttacaagtaggtctattttgactatgatntatatttcgtccaaatttaatgatgtgagacaatcttaaagtgttatgtcaataaaattttatatatttcaagttcnnanna

SEQ ID NO: 17631 - DNA, 317 bp, Gossypium hirsutum
  Clone ID: LIB3145-052-Q1-K1-C10
cccacgcgtccgccatcttcccttccttataactatcctcctcctctccaccctggacccattaagcgcccccttccttttccttttccttaattgggggggagggaccgtttttttgttggggaaagaaagttttgagaagccaaaagagaggggaaaaaatgtcaatggacttgacatctgaacgtgtttggtatgttcacttgaacttctgcaacaccattttagcggttagtgttccatgcaacagtgcgttcaacatcgtgactgttagatgtgggcattgtgccaatctgctgtctgttaatattggaact

SEQ ID NO: 17632 - DNA, 426 bp, Gossypium hirsutum
  Clone ID: LIB3145-052-Q1-K1-C11
ttaccatgttaataacgcatgatgcctgaactacggggcccaccattcgtctagctaaaacactgactgatctttttatgtaaaaaagccgtagaagcaagtattggtttgttctttgaagatcaggagcaaaaccttcctgagccctgtaaatactctgcatctctgggtatattgatgatacaagcattggattagatatcaatgatgtgcagttaattatccaggaaaatgattggcaaaagcagaacattaaaaggtgtacgattctcttctaggggttcttcgacaggttcaaacaccttgggaagtgctgctactgatagtcaaagcacgggagatgaaactctaactcaatcagcagaagaagtacctggaagtccagctgaggctactaagggtactaagagaaagcgagagcctaca

SEQ ID NO: 17633 - DNA, 408 bp, Gossypium hirsutum
  Clone ID: LIB3145-052-Q1-K1-C12
cagttacttggatataatttccccttgtcaaaccgaccctctgtaagcaatccgccatggacacattagcagctcgattcaagctcattgttttgccctttctatccatttctttgcttttcttaccttttctccaggccactgatttcgattactgcgataataaaggtaattacgttgtaaaagtcgatggagtcgacatatcacctaatcctgtgattagcgggaaaccggccaccttcacgatctcagcttctactggtcaagctatcactggtggcaaagcggtgattgacgtttacttcttcgggtttcatatccatcaagaaactcatgacctttgtgaggaaacatcttgccctattactggtggcaactttgtgctctctcacaatcaagttttaccct

SEQ ID NO: 17634 - DNA, 434 bp, Gossypium hirsutum
  Clone ID: LIB3145-052-Q1-K1-C2
gaagaatttacgtagtgaccgatccttcagatgatgattttttaaatcctaaacctggaaccctacgtcatgctgtgatccagaaggaacctctttggatcatctttgcacgagctatgatcatcaggctaaaagaggagctcattatgtcgggtaacaaaacaatcgacgctaggggagccaatgtgcatgtggcttatggggctggtattactatccagtatgtgaggaacgttattatccatggcctccatattcaccacattgttcccggcaatggcggcatgatcagggattccgtaaaccactatgggttcaggacaaagagcgatggtgatgggatttctctttttggagcaacgaacgtttggcttgatcacctttcaatgtataagtgtagggatggtctcattgatgcccattcagggtcaact

SEQ ID NO: 17635 - DNA, 416 bp, Gossypium hirsutum
  Clone ID: LIB3145-052-Q1-K1-C3
cttactctcatcttctcaagaaacaaacaagtcatcacttaaacccactcaaacgcaaatggcacgtaccaagcaaaccgctagaaaatcaacgggaggcaaggcgccgaggaagcagttagccacaaaagcggcgcgaaaatcagctccggcaaccggtggagtcaagaagccgcataggttcaggccaggaactgtggcgttacgtgaaatccggaagtatcagaagagcacggaacttttgatcaggaaactcccatttcagaggttggtaagagaaatcgcccaggatttcaaaacagatctgaggttccaaagcagcgctgttgctgctctccaggaggccgccgaagcttacttggttggactttttgaagacaccaatctttgtgctattcacgctaaaagggttacta

SEQ ID NO: 17636 - DNA, 422 bp, Gossypium hirsutum
  Clone ID: LIB3145-052-Q1-K1-C4
ggagtgtcgcagtgacattcataggctaaatgcacctttacttgctatttacgagtcacttattccgcctaaagaggaaaaaactaagcaacaacagttattggcgttactcgagaaactagtttggaaagaatggcctcaagcaaagttatttccttatggttcatgtgttaatgattttggggtttcgagaagtgatattgatatctgtcttgcacttaatgaggatattaacaacaaatctgaaatcttgttaaagttggcggatattttgcagttggataatcttcagaatgtgcaggcactgactcgtgctagagtccccatagtaaagcttatggatccggtgactggaatttcctgtgatatatgcataaacaatgtattggctgtagtaaatacaaagcttctaaggattatgc

SEQ ID NO: 17637 - DNA, 66 bp, Gossypium hirsutum
  Clone ID: LIB3145-052-Q1-K1-C5
aaaagctgctggtctttttttttttcccattgtttcacccggcttttaatccatcgcttacaaaat

SEQ ID NO: 17638 - DNA, 395 bp, Gossypium hirsutum
  Clone ID: LIB3145-052-Q1-K1-C6
ctcttcttgtacacaaagatttagtgacaaatggtgcacttaatgagctaattgttgatcttcgtatacaaggtgttactttatatggtggaccaagggcaagtttattgttgaatatcccacaagcacgctcttttcatcatgaatacaattcaatggaatgcactgttgaaatagtggacgacgtggctgcagccatcgatcacatccatcaccatggcagtgcacacacagattgtatcatcaccgaagaccaagaaactgcagaaatcttcttgcatcaagttgacagcgctgctgttttccacaatgcaagcacaagattttgtgatggtgctcgattcggtctaggcgctgaggttgggataagtacaagtaggattcacgctcggggt

SEQ ID NO: 17639 - DNA, 407 bp, Gossypium hirsutum
  Clone ID: LIB3145-052-Q1-K1-C7
gttaaaccctagacattgttaagagtgaaattaaacgtgtgtttgtttgggtgaagaataatgagtgaaaggcaagagcttcaacccgatccacagattcaatcgccccagggttcatcaagagatgacatgatttcctgggtggtggcgttagagacggctttgctcccctgcttgccagccagagagcttcaagctatcgaccgttctccgcacccttctcatcagattgatgtggagagacatgctagagatttcatggaagctgccaagaagcttcagctatatttccttggcttgcaacgcgaggatcatccaaccaaggctggaatgctcagaaaagagattgcaacaatggaagaagagttgaaaacgaagacggagatgatgaagaatcaggagagact

SEQ ID NO: 17640 - DNA, 409 bp, Gossypium hirsutum
  Clone ID: LIB3145-052-Q1-K1-C8
aaagagcttagggttttaggagctgaaaacttaggaagagacagcgatgatggctacatcaagactgtttggaaggtgcggcggattgttagaagcggcgaaggctttctctgcttccttcgcttattcgtcttcttcttcttccagtggaaatggaagggggcttatgcgggtgatacctgtctctccacagctgggcaagttccttggagcctccgaagcttctcgcaccgacgccattaaaaggatttgggactacatcaagctccacaatctccagaaccctgcaaacaagaaggagattatttgtgatgagaagttgaagacgatattcgccgggaaggagtctgtcggaatgttagagatcagcaaatatctctccccacattttctgaaatccaaataatct

SEQ ID NO: 17641 - DNA, 431 bp, Gossypium hirsutum
  Clone ID: LIB3145-052-Q1-K1-C9
ggcttcttcttcggttctcagcaagcttcttttgccccttttcctcactcatattgccgtctcgatctcgaaaaccgaagctcaagttgaagacacaaggtcgaagctggtgagagatgctttcgaatggccactttcaatgtcgtttcagggtgacttacacgacaatgaagaaggcgatgaggaggtagatgatgaagttgaaaatgggtatagtggtagatctttgttgtggtggaagagaatgaggtattacatttcgtatggggcgctttcggctaacagaatcccatgtccaccaagggcaggcaggtcttattatactcacaactgtttcaaggctcgtggccctgttcatccttataccaggggatgttccaggatcactcgctgcaggagatgaggttttaaatttagccctttttagaatc

SEQ ID NO: 17642 - DNA, 418 bp, Gossypium hirsutum
  Clone ID: LIB3145-052-Q1-K1-D10
aaagctatgagatttttgtagctttttgttcttgaagagtggcggcagggagagagggaggattttggacggctgagatggatcgggaaggaggatcccacggcggatcttgttattactacgttcttggaattcgtaaggatgcctctttctctgatatccgcactgcttatcggaagctcgctatgaaatggcatccagacagatacgccagaaacccaggaatcgccggagaagccaaacgccggtttcagcaaatacaagaagcttattctgtcctctccgacgagagcaagcgatcaatgtatgacgccggcctttacgatcccttggaagaagaagaccaagacttctgtgattttatgcaagagatgatgttcatgatgaataatgtgaaagacgagggtgatagttttga

SEQ ID NO: 17643 - DNA, 365 bp, Gossypium hirsutum
  Clone ID: LIB3145-052-Q1-K1-D11
ccaaggtctcggagctgggaaagccgccgatttgacctactgggagagcgccgctcgtatgatcgctgatgtagcgaaatcgaacaagatcgtggtcgaaaaatcgacggtgcccgttaaaacagccgaggcgatcgagaagattttgacccacaatagcaaagggatcaacttttcgatactttcgaaccctgaattcctcgctgaaggcactgcgattagtgatttacttaaccctgatcgtgttcttatcggtggcagggaaactccggaaggtaaaaaggctattgaagcattgagggatgtgtacgcacattgggtccccgtggatcgtatcttatgcaccaatctgtggtctgctgagc

SEQ ID NO: 17644 - DNA, 406 bp, Gossypium hirsutum
  unsure (1)..(406): unsure at all n locations; Clone ID: LIB3145-052-Q1-K1-D12
gaagttctgagaaattggcctcagaaggatattcaagtcattgttgtcactgatggggaaagaattttgggtctaggagacctcggatgtcagggaatgggaatacctatagggaagctttctttatatacggcactaggaggggtctgtccgtctgcttgcttgcctgtaaccattgatgtgggcacaaacaatgagcagttgttgaatgacgagttctatataggacttaggcgaaggagagctaccggactggaatatgccgaacttatggatgaattcatgactgcagtcaagcagaactatggggagaaagttctcattcagtttgaagattttgcanatcacaatgcatttgatttgcttgctaaatatggcacaactcatctggttttcaatgacgata

SEQ ID NO: 17645 - DNA, 436 bp, Gossypium hirsutum
  Clone ID: LIB3145-052-Q1-K1-D2
ctaaaataaccctagccccctttccttgattcttcctcaatcaatcccaaatctctaccctcagacgccgtaccctcgcctctaacagtggccgacggtgagtaaatcttccctttctaacctcatttagaaaaacatttaagaatctaacaccttcaaccacaaagaatcaaaagaacgtctcaaccttggttggattcagttttaacggaggagaaactctgacgatattccaacgattctggtgagcccttatcctttatcctcttcttttttgtttatagtagatgcgaaaatgaaagcaaaaaagcaacgaaaaaaattgaaatataataaatcaccttcgaataatattgattttctaattattcttgtatttcatttagtatccgtattgtatttctgtaaaaaaaaagatccctttacacttgacttc

SEQ ID NO: 17646 - DNA, 427 bp, Gossypium hirsutum
  Clone ID: LIB3145-052-Q1-K1-D5
gccgattccatggacagagtagagcatatgcagagagcagcacagaccaacaaatgcttatgcttttaaatactccatacgccctctcactttctcgctcattagcttcttcctctttcccttctcctcccacgcgccgccttcttttcctttcttccacttttacccttcctccccctcgattcccccattcctccctcgtttcctcgagggtatccccgtcttttcgcacccaagcttcagccgccaccgcgaccatgggtgacgctccccacgttggtatggacgctgtccaaagacgcctcatgtttgaggatgaatgtattttagtggacgagagtgataatgttgttggccatgaatcgaagtacaactgtcatttgtgggaaaagattctaactggaaagatgctgcataaagcattcag

SEQ ID NO: 17647 - DNA, 404 bp, Gossypium hirsutum
  Clone ID: LIB3145-052-Q1-K1-D6
gaataagcagggcttccatattgttggatatggctgcacaacttgtattggaaattcaggagaattggatgaatcagttgcctctgctatttcagaaaacgacattgtagcgtctgctgtactttctgggaaccggaattttgagggtcgtgttcatgccttaacaagagccaactaccttgcttcacctcctttagtggttgcatatgcccttgctggcacggttgatattgactttgacaaggagccaattggaactgggaaggatggtaagagtgtctatttcaaggacatctggccttctactgaagaaattgcagaggctgtccaatccagtgtcttgccagagatgttcaaaagtacttacgaggctattacaaagggcaatcccatgtggaatcagc

SEQ ID NO: 17648 - DNA, 433 bp, Gossypium hirsutum
  Clone ID: LIB3145-052-Q1-K1-D8
cagtgcttggcaaatgcctcagggtgggattgatgacaatgaagatccaaaagttgcagccctcagagaattaaaggaagaaacaggtgttagctcagctgaagttctcgcagaggtaccttattggctgacatacgacttccctccagaagtcagggaaaaactgaaacatcagtggggatcagactggaagggtcaagctcaaaagtggtttctccttaaattcacggggaaagaagaagaaatcaatcttctgggtgatgggagtgagaaacctgagtttggtgaatggtcttggatgacaccagagcaaatagttgagcatgcagtggatttcaagaaacctgtttacaataaggttttggaagttttcactccctacctccattgatatttgcaaacatcaccatttctaatgtgttgagatcatagt

SEQ ID NO: 17649 - DNA, 298 bp, Gossypium hirsutum
  Clone ID: LIB3145-052-Q1-K1-D9
aggatttctaaattagactgcagaaggaatcatgtgcatttatgaatggaagggaccatccgtgatatatgcttcttataccgcagaagaagtttctcatgggattgatggatctgctcctactggcatggatacaggatcatctagtggtattggtgaagagacaactatcgttctcgaattgagcggagtgcacatacttatggcggtatggaatgcagatgcccgtcagaatgtcaaagaatcaatactatgagaaatccctagtgctaacactgatgttatggaactggatctg

SEQ ID NO: 17650 - DNA, 371 bp, Gossypium hirsutum
  Clone ID: LIB3145-052-Q1-K1-E12
cccacgcgtccgcttgaccacgggaaggctgccggagttattaagtcacatgaccgagtcgtagtttgccagaaggtcggagatgcttctgttgtgaagattatcgagctcgaagattaaacttatgttagtttctctcctttccgaatctgatttttgaaagcgatgaatgactttatgtagcacctgtgaggtattggctccaggttttggtggatttgaatttgtgttaagaatgcatacactattttaagtctcataaaagggaaatatggcccataatcccataattagctaatgggaaaaggcaaaagaacaaccccattttttccttgattcagtggtaaataaagatattggatcagttagag

SEQ ID NO: 17651 - DNA, 428 bp, Gossypium hirsutum
  Clone ID: LIB3145-052-Q1-K1-E3
cccacgcgtccgagtaaatggcaaatggttactggaatcggcgacaaccaaatcctccgatgctctcttctggtgggatgcttaaacgaccacgtactgattacgatgctccgccttctggaccacgttcagctcttgagatgcctagttatttggcaagagatgatgatcatggtgggcatctgtctgtgagggatacaaaatctattggatcagcatatgatcgttatctccagagtgcaaaactttcttcttttacttctggagaagctagtgcatttggtgggtcaggaagggctgttggtggtgcaatgcctgttcatccaatagctgatcctcccctgatgggtcgtcttggatctgctgctccagatctgtcatcaaatggtcataatatcggttatagtggtcaacatccagtggatgca

SEQ ID NO: 17652 - DNA, 269 bp, Gossypium hirsutum
  unsure (1)..(269): unsure at all n locations; Clone ID: LIB3145-052-Q1-K1-E4
ggattcaggggtgaccatattgcgagtgtgattcanaggatggaggagagtgggcaggcggtggattttaatgccgtgctggataggctgaatgtgcaatcctctgggggtactcagagaaggggaatggaaatgccactgcttgggtgaatcgaccttgaatggtacttgaataaaaaggtgggttnttctatgtatatgtgggaggaatgagatttgatgtacctctgctaaaatgatgtgacctgtgatctagactcggggatgct

SEQ ID NO: 17653 - DNA, 139 bp, Gossypium hirsutum
  Clone ID: LIB3145-052-Q1-K1-E5
ggagaggttaaaatgttacctattttgtaagatgttcatcaatgttatccggattcgagatgattaacatttatgtatgcaactaattgtatccataccatctattatgcttaatcatatataaatattcaatccaatc

SEQ ID NO: 17654 - DNA, 431 bp, Gossypium hirsutum
  Clone ID: LIB3145-052-Q1-K1-E6
cccacgcgtccgaaaaaaaaatctttccagtttctattttctaaaaacaaaactgaaaatgtcttgctgcggaggaaactgtggctgcagctctggttgcaagtgtggcaatggctgtggaggatgcaagatgttccctgacataatagagaagactacaactgagactattgttcttggtgtgacaactcagaaaatgcactttgagggatctgagatgggagttggggttgagaatggatgcaagtgtggagacaactgcacttgcaacccttgcaattgtaaataagagggggggaaaatgaacaacaaagagaagcagagaggcctttgtctttttaactaaataaattctattactttagtatgtatcagcaaatcttcatgaggatttggttcttaattatgtgtaatgtgggcttttctgctat

SEQ ID NO: 17655 - DNA, 246 bp, Gossypium hirsutum
  Clone ID: LIB3145-052-Q1-K1-E7
cccacgcgtccgtggacattttatttattttatatattattattatttttttaaaaaaaaaaaaaaaaaaaaaaaaaaaaaaaaaaaaaaaaaaaaaaaaaaaaaaaaaaaaaaaaaaaaaaaaaaaaaaaaaaaaaaaaaaaaaaaaaaaaaaaaaaagggggggccgttttaaaggatccaagttaacttccccggacttgcaaaataatagcttttttataggtgaacctaaatgaaattcat

SEQ ID NO: 17656 - DNA, 368 bp, Gossypium hirsutum
  Clone ID: LIB3145-052-Q1-K1-E8
tgcactcattagcctgtctctcatggaatcccatattgagaaacaaaatagagatgtgcttcaaaaatctttcaaagagatgatatctactctccctaaagagaattgttggggtattcctgaagctctatatcaatatcagggtttttggctcacccccccttttctacaaggagcattgtcggctcaacaacaattccaggctcaacccactgatatcatcctttgtagctctccaagaacaggtgcagcctggttaaaatccctcactttcgccactattacaagaacttcatacaatgattccaccacccctttactttccaagatgcctcatgatgttgtgcctttcatggagttcgatcatg

SEQ ID NO: 17657 - DNA, 407 bp, Gossypium hirsutum
  Clone ID: LIB3145-052-Q1-K1-E9
ctcaaacccagatttgttctctctctctctctctctctccaatcaattaattcctccattggaggagcttagggtttgttggtgttctgatctttgctctgtctgaaaaataaacagaattataaaccaacaccaacgccatgggaagatttgaagagggaggattcgattcagtggtttgccctaagcctatacgaacctttagatggtctaccaacagctgttatcagactgagatggctgattcaaaagctggtgcagagcttcttgatataatcctctccgagggagggtatggggccgagaaccccaccgaccaaatggcttcatcaccaccgtatttctgtggatcaccgccgagcagggcgtcgaatccggtaatccaagatgcccgattcacgacgagc

SEQ ID NO: 17658 - DNA, 408 bp, Gossypium hirsutum
  Clone ID: LIB3145-052-Q1-K1-F1
ctcaaacccagatttgttctctctctctctctctctctccaatcaattaattcctccattggaggagcttagggtttgttggtgttctgatctttgctctgtctgaaaaataaacagaattataaaccaacaccaacgccatgggaagatttgaagagggaggattcgattcagtggtttgccctaagcctatacgaacctttagatggtctaccaacagctgttatcagactgagatggctgattcaaaagctggtgcagagcttcttgatataatcctctccgagggaaggtatggggccgagaaccccaccgaccaaatggcttcatcaccaccgtatttctgtggatcaccgccgagcagggcgtcgaatcccgtaatccaagatgcccgattcaacgacgagc

SEQ ID NO: 17659 - DNA, 400 bp, Gossypium hirsutum
  unsure (1)..(400): unsure at all n locations; Clone ID: LIB3145-052-Q1-K1-F10
ggggcttgagttttagccaaagaaaactccatggctaaacttgttgctactttcttcttggctctcattgccatctccatgggtcaaactttggttatggcatcacatggacatggtggtcaccattatgataacaaacgttatggacctggaagtctcaagccttaccaatgtccatctcagtgcacaaggaggtgtagccagacacagtaccataaaccatgcatgttcttctgtcagaaatgttgcaggacatgcctttgtgttcctccagggtattatgggaacaaacaagtttgcccttgctacaacaactggaaaaccaaggaaggaggccccaaatgcccttaaattactcanaagaagacccttttttttcttttttacattattatcccta

SEQ ID NO: 17660 - DNA, 395 bp, Gossypium hirsutum
  Clone ID: LIB3145-052-Q1-K1-F11
ggggcttgagttttagccaaacaatactccatggctaaacttgctgctactttcttcttggctctcattgccatctccatggtttaaactttggttatggcatcacatggacatggtggtcaccattatgataacatacgttatggacctggaagtctcaagccttaccaatgtacatctcagtgcacaaggacgtgtagccagacacagtaccataaaccatgcatgttcttctgtcagaaatgttgcaggacatgcctttgtgttcctccacggtattatgggaacaaacaactttgcccttgctacaacaactggaaaaccaaagaaggaggccccaaatgcccttaaattactcaaaaggagaccctgtttttttttttttacattattat

SEQ ID NO: 17661 - DNA, 222 bp, Gossypium hirsutum
  Clone ID: LIB3145-052-Q1-K1-F12
caggcttgtattttacccaacttttttttattgctaaacctggtgcaacttagggcggggttctcagtggcaacggcgtggtctaaacttaaggtatggcatcacatggacatgttggtcaccattattataacatacgttatggacctgtaagtcttaatccttaccaatgtccatcttaatgcacaaggaggtgttttcatacacaattccataaaccat

SEQ ID NO: 17662 - DNA, 434 bp, Gossypium hirsutum
  Clone ID: LIB3145-052-Q1-K1-F2
ccttcacaaaagataatcagagagttcaagaagaatgaacttcaaaaacatgttgctcagcaaactggtccaactacaacgaaagctagtgtcacagaatggcaggtcttgtatactacacaagtaactcaaaaggccaagaagtaccatgatggtttcttaaaactcgtaaattctgcagcgctgcagagacagattatgttatatgatggaagcaagaaactaataaatagcagattcctcaataaagatgaagtaatacaatctggtgaatcaataacgtttgatgctcatttggtaaatattggagaagctgaaggaaaccatccaggcctcatggactctgatgcccatgtaagcaattataatgctgctggtaaaacagagatgatccacagagtgcagaatcgtcttaaaacccacaaatcgttttt

SEQ ID NO: 17663 - DNA, 249 bp, Gossypium hirsutum
  Clone ID: LIB3145-052-Q1-K1-F5
attttgtcctgctacatatgtatttgtttgggattctggtaatagttgagtaaatgaacactagaaactcttcattttaaaaaaaaaaaaaaaaaaaaaaaaaaaaaaaaaaaaaaaaaaaaaaaaaaaaaagggggaaaaaaaaaaggagacaaggaaaaaagcccgcggaaagaaagaacaaaccaaaaaaaaaaaaaaaaacaaaaagaaagaaacaaaaaagaaaaaaaaaaaaagggggggggg

SEQ ID NO: 17664 - DNA, 406 bp, Gossypium hirsutum
  Clone ID: LIB3145-052-Q1-K1-F6
ccttaatgcatcttccaactccccagaattgacatcagtgattgactgaaaggaatcgataagttttgttcactatagaaaacagatttaagaagattgcaattggcaagcaggcaaaaaaaggaataaatttaccttggtgtaatcatgtccatagatgtgtttatagcaagaaaatgtcagcttaagatgtggaatgcttcttttagtgaaaatctcaagcacagtaccttcatcaattgcgcctggacttccttcccctgtctcataaagcctcctcgcatcacatttcgctgtatgttggttgatatctgcctggtgtgccttgtgtgatgtggataatgcaaccagaatctattaaaaacaacaaagatgatgtcctattatcgtatgcatattctgatat

SEQ ID NO: 17665 - DNA, 419 bp, Gossypium hirsutum
  Clone ID: LIB3145-052-Q1-K1-F7
aaagagagcaagctgaaagaaatagattagcggaatctcttgatgcggatgtcaagaggtggtcgagtgggaaagaagggaaccttcgtgcattgctttcaactttgcaatacgtatgtactattatccaaattctctccaatcaagcttttataatcatttcctttgtttactgggtcgtttaattgacttaatgcttaatcttccatcattcggaataatatcaaaatttctcattgctaatgtactttgatatccttacaacaagttaaaacccgagctttcttcatttgacggatccttggcccagagagtggttggcagccaattccgttaaccgaagttataacttcagctgccgttaagaaagcatacagaaaagccactctttgcgtccatcccgacaaattacagcaacg

SEQ ID NO: 17666 - DNA, 427 bp, Gossypium hirsutum
  Clone ID: LIB3145-052-Q1-K1-F8
caaggtgcagccacatatttacacttggatcaacagatatgggaggaattatctttattggaacggtattcgacctgaactggttatttcagagcctgaactattcaaagaggttctcaaaaatagtgaaaatacatttccgaaaaagaagccttcgatcttttttagcaagctactggggaacggacttgtgcttcttgagggtgaaaaatgggtgaagcatcggaagctagccaatcatgttgtccatggggaaagattaaagaacatgacaccagcagtaattgccagcgttgaaacaatgttagagaagtggaaaggccaagaaagaaaagaaattgaagtgtttcaagaatttagattgctgacttcataagtgatatccagaacagcttttggtagcaactacttggaaggggagaagatt

SEQ ID NO: 17667 - DNA, 373 bp, Gossypium hirsutum
  Clone ID: LIB3145-052-Q1-K1-F9
cccacgcgtccggggagcagctaagtctctttgtaccccattcgaacagcctgaactcccagaaggtgagacaccgtttaaggaaagatcatgggattgagggtggaattcgtgttgttttctctttagagaaacctaaagctcaactgcttccttttagaggaccaagtggtgaggaagacaacccttcagattatcaagtgaggatgcttgcttcttacttttgcagttttaaagtactctgtttgatcacctaacatcatgcagtggggaaattcatccaatatattgaagcagaattttgaatgagaatttgaagtacatttggatggagctaaagttgtgtttcttttagcgatatatttgaacttgc

SEQ ID NO: 17668 - DNA, 407 bp, Gossypium hirsutum
  unsure (1)..(407): unsure at all n locations; Clone ID: LIB3145-052-Q1-K1-G1
gggatttgaggccagaacaccttggaagtttgatacaaaccctatccaaccgggtgggccccataaaccatttacctgtcttaattccagaaggaaataaatgggcttgttacattaatggagtgggcaaaaaaacatcaaaggggggttgaagataggggggaagaagtaaaaaagtctgtatctgtcaaggctganagtgagttccgagggctcgaagatatctactctgaacctggtggagtgatggactatgaagaggaccgaagccgaccaaagaggagacgacatccaagatcatgaagatagagaatgcaaccgatggacccaatgtttagctgagcagccagattttgttgacaacctttcagcgacagatgattctgcttttgagacagtgataatgc

SEQ ID NO: 17669 - DNA, 240 bp, Gossypium hirsutum
  Clone ID: LIB3145-052-Q1-K1-G11
gctttgaacaatatagattgtccattattatttttaaatgacttagctgctttgacgctgactaatcatgtggtgttattacatgttggaaattaggggaatttgcataagatgtagttccaaacttagaactctgaacttaacagagaatggatgtgattctttatgatgctatgagcaattttctcataataaaaaaaaaaaaataacactataaataaataattttataataaaaat

SEQ ID NO: 17670 - DNA, 424 bp, Gossypium hirsutum
  Clone ID: LIB3145-052-Q1-K1-G2
gccgagatctcgtcttcctgtctcaagttagctgatctccaaagctctgtattttgctgagttctctacttcatttgcaatggcggacgaggaacctgttgatcagaaaaaatatcttgaagatggttgcaagcctaaatgtgtgaaacagcttcgttcatatgaggcatgtgttaagagaatccaaggtgatgaaagtgggcacaagcattgcactggtcaatattttgactattggtcttgtgttgataaatgtgttgcaccatcgctattcacaaaactgaaataaccagggccagagttgtacaacggtagcatcatgtcatgctgttgaatgattgtttcagacaatttggctccataaacttgacaagtgttaaaatttttttgtgttactttggaagcatttaaataaaattggatc

SEQ ID NO: 17671 - DNA, 399 bp, Gossypium hirsutum
  unsure (1)..(399): unsure at all n locations; Clone ID: LIB3145-052-Q1-K1-G3
cccacgcgtncgctagatcgtatggctaactgggtcggcaccagcatggcatctgcatttttcgcatcattggagcgctgctcctgtattaatctcagcaccaccgattttgatgacgaagaggaagcctatgaccgccctcttgtactcaccaagcccctcatccacgacgaacctgaaactgaaccacaaccccgtccagccgcttagacccttttcactgtcaatttgctcgaccttcgtcacttcgtattctagggttcgttccttatatttatgtacttttctttttagttttatacgtgccgaggatattgtgaatcaattctcgcacaggttggtttataatttgaaagaattntggttcttttcttatttattttaatggaactcccttgg

SEQ ID NO: 17672 - DNA, 312 bp, Gossypium hirsutum
  Clone ID: LIB3145-052-Q1-K1-G4
ctcgtaatacttgtctccttcttcgtttttctgtaatatttgtcacaacaatcaactttaatcttatcgatcacaatttttttgataaatggtgatattgatgaagaagatagtgaacaagtttcataaataattacaatcaccggtaaccaaaaaaaaaaagttacaatcaacaaatgaagtttatttagcagattttcatgcaaatgttataaaatataggggagaaaaagaaaaagaaattggtgtcttttagtcatcaaggagtattgcaaataaacaattaagtagatttgcaaataaatttctttt

SEQ ID NO: 17673 - DNA, 419 bp, Gossypium hirsutum
  Clone ID: LIB3145-052-Q1-K1-G5
ctccgtcaaaaattgtgattcctaaagggatatattttttaagtacagctaccttagatggtccttgcaaggctcctattgagcttcaagttcaaggcactgtgaaggctccggtagaccctggtgctttcaaggagcctaaatggattgctttcaatagaattgaaaatttcaaattgtctggcggaggagttttcgacggccagggaaccactgcttataaaagggaaggttgcaaaggtcatgattattgtggttcacttcctattaacctaaggtttgattttttaaccaacgcaatgatacaagatataactaccaaagacagcaagcagttccaggctaatgttctaggatgcaaaaacattactttcgaacatttcaccgtatctgcacctgacgaaagcccaaacacagat

SEQ ID NO: 17674 - DNA, 399 bp, Gossypium hirsutum
  Clone ID: LIB3145-052-Q1-K1-G6
cccacgcgtccgtgttcagtcagggcagatacacttttacaatacaaggacccatacgagaacatcaaaggatccaaggagaagccctgaacccccaagccccgttcacatgagcttagaccttgagctaaacctaccatgcgattcatcagtaaggaaagttgatgcaacagatcaccaattattcaacaagcacaactccatcggccccacgagggccggttcagttgataagaagatcaactcatcgggaggattaactcgcaacctttcgtggttggcagtggaggagaatgatcagcaagagcaagagatggtagcaacagtgtgcatgagatgccacatgttggtgatgctttgcaagtcatcacctgcatgccctaactgcaaattcatgca

SEQ ID NO: 17675 - DNA, 397 bp, Gossypium hirsutum
  Clone ID: LIB3145-052-Q1-K1-G7
gacgtggtttaaagtgaatgttattcaaatgattttttactgtttgccttttgattctagaactttgtttgttggtcctacaccaaacaaagttatatataatttttttagtgtttaatttaagttttaagattgatttttagtgtatcgaataagaaagatgatgcaacagatcaccaattaattaacaaagcacaactccatcggacccacgagggtcggttcagttgataagaagatcaactcattgggaggattaactcgcaacctttcgtggttggcagtggaggagaatgatcagtaagagcaagagatggtagcaacagtgtgcatgagatgccacatgttggtgatgctttgcaagtcattacctgcatgctctaactgctaatttatg

SEQ ID NO: 17676 - DNA, 377 bp, Gossypium hirsutum
  Clone ID: LIB3145-052-Q1-K1-G8
cccacgcgtccgtatttttccttctctttctcattctttcttcaattaataaccaatcaaagtgctctctttgcttttccctgttttataagtcatcgaactgttgtttttcttgatctctccatcattcccgtttctgggtttttttgttttttttttttttgagtttttagtaggtagccatgaatgctcttgctgcaaccaaccgcaatttccgactggcgtctcgtttacttgggttagactctaagcttgaaaagagtcttctgatcccttttagagaaatcaaggtggagtgcacgattcccaaggacgatggaaccttggcgacttacgttggatttaggatccaacatgataatgctcgtggcccgatg

SEQ ID NO: 17677 - DNA, 281 bp, Gossypium hirsutum
  Clone ID: LIB3145-052-Q1-K1-G9
aaacaaagaggtgagtgtgtgtatattttttcatatacccttggtcaagcctaatcgtggatgttaacaggcttagaagtcaagacagtaaatgtcttttacatgtattatgccaagctgaccaaactcaataaggccatgcttggtaggattgttagtggtgtcttatgttatttggtacagatgtaatttaacaagttacgtgactgacttttataaatgagttgtgggatattaaatattctaatggaaaagattatacttcttccttactttgtact

SEQ ID NO: 17678 - DNA, 282 bp, Gossypium hirsutum
  Clone ID: LIB3145-052-Q1-K1-H10
ctctcttctttgttttccaatagtgcgtaacaatgtcgggctcacttcaagctgcagctaccctgatgcaaccaatcaaggttgctgcaccatcaaagaccaaagtgctgctcaggtcctcccagagcgtttctaaggccttcggtttggagcctgttggtgctaggctcacctgctctttgcaaactgacctcaaggacttggctcaaacgtgtgttgatgctaccaagctcgctcggttcgctcttgctacatctgctcttgttgtctcgggagcaagcg

SEQ ID NO: 17679 - DNA, 329 bp, Gossypium hirsutum
  Clone ID: LIB3145-052-Q1-K1-H11
atctctactttgtttaccatccgttttttacaatggcggacgaacttcatgctggggggaatctaaggcaaccactgcaggtttctgcaccatcaaggaccaatgtgcctgctacattcttacaaatcctcaataaggccatcggattcgaaatcctgttgtagcttgctacaccaaatcgtttgcaaacggcacctcaaatgacttggctcagacgtttgcagatgccaccaatcctcatggtttcgtgcttactacataagcggttgttgtctcgtcagcaagcactaaatgaatttcattgtggttatcctcacaataaagtccaa

SEQ ID NO: 17680 - DNA, 415 bp, Gossypium hirsutum
  Clone ID: LIB3145-052-Q1-K1-H12
gaacatcgaggctgtagttgaacattctaacgagaaattaatggttgacggtgatcaagtaggtgtcaaagcaaacctggtcgaagagagtgtaaatgccagtgatatcaaggattgtttattggttaagaaaagcacaactcagcctacagctgaagagagttgcaggaatcatagcatgactgagatgacggctaaagctggctctttaagtgatggatgcgcgaagaatcttgaagttttgagcacagcagaaactggccgagctacatagcgagacatggcatcttgtttatactaatacaatttatccattaaggttttttatcctgccattttagaaaatatatattgtagatttatttggaaaatgaatctcgtgaaaatgaaagaaaattgcattcgacaccagtgt

SEQ ID NO: 17681 - DNA, 257 bp, Gossypium hirsutum
  Clone ID: LIB3145-052-Q1-K1-H2
atacaatacaaaatgtggactattggatttatttaaaaaaaaaaaagaaaaaaaaagatacaaagaaactgatgctagatgaataaaaaaaaacatataaacaacaatataattaatagacagaatatggaacacaaaaaaattaaagggggggcccgttttaagggaccaaggttacctcccccgtctttgcaaggtattagtttttttttggggcccccaaattcaattccctggcccgccttttaaaaccgtgg

SEQ ID NO: 17682 - DNA, 380 bp, Gossypium hirsutum
  Clone ID: LIB3145-052-Q1-K1-H3
cccacgcgtccgcccacgcgtccgaatggcggtctctacaccatccgcagtctcttaccttacaagaatcgagcacaccaatctgtttccttccaaaaaactccaatttaaccccttttctcccgccaaaaagccattaacagtcgtctccatggctcccaaaaagaaggtaaacaaatacgactcagaatgggaaaaacaatggttcggagctgggattttttacgaaggaagtgaagaaattgaagtggatgtgttcaagaaacttgagaagagaaaagttctaagcaacgttgaaaaagctgggcttttatcgaaggctgaggagcttggtttcaccctttcatcgatagagaaactcggtgttttctctaaagcag

SEQ ID NO: 17683 - DNA, 337 bp, Gossypium hirsutum
  Clone ID: LIB3145-052-Q1-K1-H4
cccacccgtccgaatattttctccctgcaaacatatttttcgttacattttcgagaattcagcagcttttatggcccaatatcgggggtggtggaacctttatgacgtcttccacttttgatggcatacatgtcgttaacagaaagctgcttacaatggcagcattaggatttcattttcgtggaagctagaaaataaagtcagaccgtgccgcagagcaacttgcagtgcagaccagccagtttcagagcagacatgaatagttgcaggggcaggtgcttcatcactttcagaggtcgtcgaaattgtcactttaagacagaacatgaatattcat

SEQ ID NO: 17684 - DNA, 386 bp, Gossypium hirsutum
  Clone ID: LIB3145-052-Q1-K1-H5
gttctcacttaacccgtttgcctccggcatcttcccactcatggcttcggagaaagaagctgcccttgctgctgctccctctgattctcctaccatatttgacaaaatcatcaacaaggaaatcccagctaccgtggtgtatgaagatgataaggtcttagctttcagggacatagctccccaggctcctacgcacattttaattattccaaaatcaaaggatggcctaacgggtttgtctaaggctgaggagaggcactgtgaaatccttggctgccttctttatactgcaaagcttggtgcaaaacaggaagggctggaagatggattcaggattgtgatcaatgatggccctaaaggatgccaatctgtgtatcacattcatg

SEQ ID NO: 17685 - DNA, 373 bp, Gossypium hirsutum
  unsure (1)..(373): unsure at all n locations; Clone ID: LIB3145-052-Q1-K1-H6
cccacgcgtccgctcaaagtactcgtatccaaatacatgaaaaaaggtgcaaaaattcaattaatattaggatcagttcatcctggttcactcaccatcaatcttggatcttcgggtgtgatggcttattctcgcgaaaaacagaacccccttctgcccgggctgtctgcggtagtcgacgaaattttctgcgtgttattgggacatattgagaacgttggtgtgcttaaacatctatgtggctggcacataacagcatacgangggattatcgttactgaagcttactgaaccgttagaggctgacgcccttacccttcttaccaggttgtgagatatatacaggggaaggtcattttcatgctcttcgata

SEQ ID NO: 17686 - DNA, 397 bp, Gossypium hirsutum
  Clone ID: LIB3145-052-Q1-K1-H7
aactagagcagcaagaatattttgatccaaagatagctgatgaggagcgtgagaaagggaatgaatgtttcaaacagcagaagtatccagaggctgtgaagcattataccgagtcattgagacgaaaccccaaagatccaaaggcatacagcaatagagcagcatgctacacgaaattgggtgctttgcccgagggattgaaagacgctgagaagtgcattgagcttgatccaacattttcaaagggttacacaagaaagggagctgttcagttcttcatgaaggagtatgacaaagctttagaaacataccaggaagggttgaagcatgatccgaataaccaggagttgcttgatggtgttagaaggtgtgtagaacagattaacagagctagtcg

SEQ ID NO: 17687 - DNA, 290 bp, Gossypium hirsutum
  Clone ID: LIB3145-052-Q1-K1-H8
aaaaaaaaacttaaaattctctctgtaatgagaggagagagagagagagcttggctccggtctccgtcgagccgagcctcggtcctcggcttcacgcgcccatgcgccgtcaccgactcctccccgttcggtggccgaagacccgaaacctcgatttttctacgcaaataaagggttcgacctttttcttttcattatttacagtatataagtacatatatgtaaaatattttacctttgtgtatctcaattaactgtagcatcctactttgtgtacgtatgtaaaaata

SEQ ID NO: 17688 - DNA, 408 bp, Gossypium hirsutum
  Clone ID: LIB3145-052-Q1-K1-H9
aactagcgcacgatgaatattttgattcaaagatagctgatgaggagcgtgagaaggggaatgaatgtttcaaacagcataagtattcacaggctgttaagcattataccgagtcattgagacgaaaccccaatgatccaaaggcatacagcaatagagcagcatgctacacgaaattgggtgctttgcccgagggattgaaagacgctgagaagtgcattgagcttgatccaacattttcaaagggttacacaagaaagggagctgttcagttcttcatgaaggagtatgacaaagctttagaaacataccaagaatggttgaatcatgatccgaataaccaggatttgctagctggtgttagaatgtgtgtcgaacagattaacatagctagtctaggtgatttca

SEQ ID NO: 17689 - DNA, 408 bp, Gossypium hirsutum
  Clone ID: LIB3145-053-Q1-K1-A10
cggagcaccaaactaaccagttagaagttttgttatatatatataaattaccttttgagtaaaagttattaggtggatttatattgcatgttgagcaactgaacatgtcaggctatgtactctcgatattttagtgttatgtcttcttcataggtcagttagggcatgttagaacatatgctttagtaaagttgtggattgagttgtaggtatcataaggagcttgttcatgtgctgaggctggagttttcatgtgcaagcttattgttcttcgatcttgatatgacgaacttagctgtctttccgagaaaattctaaaaccaagaacgaaactatgaaacttgaagggccatatggtactttcagatcccggtctctaacatgtgttcttatagcagctgtcatgcg

SEQ ID NO: 17690 - DNA, 405 bp, Gossypium hirsutum
  Clone ID: LIB3145-053-Q1-K1-A11
aaaagaaaaaaaaaagatggcgtctgtaataaaatctgcaatcttaattctgtcggtgtttttatctgtaagcttcagttcgggtgttaggttgctccaggaacagcccaatgatgacctcaaaaacatggacgctattcctcccattgatgcactcaaccctaccgagttcaatggacccggtgttggcattcacgaagatcatgttgtcccaaaaggttccgaaattggtactcttggttttggttttgaaggtggtcctgaaaaatgttgttcttctggatgttccggtaattgtaatcctggtggtttcgttctaccatttcctcaaattccagaaatcccaagaattccacagatcccacagatcccacaaatcccacaaattccactaatcccacagat

SEQ ID NO: 17691 - DNA, 407 bp, Gossypium hirsutum
  Clone ID: LIB3145-053-Q1-K1-A12
tgattggcctttccctatgtgtggtaacatcaactgggctaagcgtatgaaatgcaatatttgcaacactaataaacctggtcacaatgagggtggtgtgagaggtggacgtgctggtggttacaaagaacttgatgaagaagagatagaggaaacaaggcgacgtcgacgtgaggcagaagaagtcaaaatacatctctgttatcattacttgaagcttagttcattgaatatcttaatttgatggtaattatttatgtgttaatctcaggataatggtgaggtgtatgatgagtttggcaatctcaagaaaaagttccgagcaaaaacacaacaagctgaagctgctcgagtgctaccaggttcatgtcgtgctggctgggaggttgatgaactacgtgtaattg

SEQ ID NO: 17692 - DNA, 123 bp, Gossypium hirsutum
  Clone ID: LIB3145-053-Q1-K1-A2
gtagagaaaaatgggtatgctgcagaaactatgagatgatgagagggacgtacctgactctaaacgcggtctagagcgcttgaggtagatcacaaccaccccatacttggacaccacagatga

SEQ ID NO: 17693 - DNA, 414 bp, Gossypium hirsutum
  Clone ID: LIB3145-053-Q1-K1-A3
cagtaatgttgcagaatgctactcaaaagagtcaaaaggtttttgttcatgttccatctgaaattgctgctcacgaagttgaggagattggtatgccatttgatgaaatttggtgtcatcttttcaggatattacccttgtggttaagataacccctttttcacttgcaaacagcagtgaaacacttgcttagggatgtaaaggatacaacaattagtacacttgcaactgaggtcacagggaaactcacagctttgaagggtttggatgcgaggttacgggagatacgcggttaccttgatcttgttattgatgagaagcttcctttgaatcatgaaatactttaccatttacagttaaactaagttgagtgaaagctgaaaatgaagctaaagatattttacaattatgaac

SEQ ID NO: 17694 - DNA, 413 bp, Gossypium hirsutum
  unsure (1)..(413): unsure at all n locations; Clone ID: LIB3145-053-Q1-K1-A4
cccacgcgtncggaaacaatggagtccaacaccaaaatgtcagctcttcttttgatttgcatgcttttcatttcttcagtgacaccaattcttgggtgtggttcatgtgggaaagcacacaagcatcgaaagcctaagggaaagtcccctaaaggtcccatcactttgcctccccttgtgaaacctccaatcaagttgccaccggttgttcctccaatagttaagccacccattgacctccctccggttacggtccctccaattaaccttcccccagggacggttcctccagtaactaagccaccaagtgggaaaccctgcccaacaccaccaaccaaggacacttgccccattgacacactgaaattgggtgcttgtgtggatctgctgggagggttggtgcacattggact

SEQ ID NO: 17695 - DNA, 380 bp, Gossypium hirsutum
  Clone ID: LIB3145-053-Q1-K1-A5
aaatttttcccggaagatttggggaagtacaaaaaattattgacctgtgggactttgctgggggtttaaccaggcaattgaatgggtctgtaataccttcaaaacgtccaaatcatatgatgttggagatgtggaatccccttggaattgttggtgtaattacggcatttaatttcccatgtgctgttcttggatggaatgcctgcattgcactggtgtgtggaaactgtgttgtttggaaaggtgctccaaccactcctctggttacaatagcaacaacaaaattagtggctgaagttttggaaaagaataacttacctggtgcaattttcacatcattttgtggcggtgctgaaattggggaagcaattgcaaaagat

SEQ ID NO: 17696 - DNA, 412 bp, Gossypium hirsutum
  Clone ID: LIB3145-053-Q1-K1-A6
cccacgcgtccgtggcaaactgtctcaagatgatgaggcccttgctattgctaccacaatgccgaagctcaagcaactcgaggtagcatacttgcttattagcacagaaggtgtgggtaagatacttgaaaactgccctgcgcttgaattattggacgtgagaggatgttggaacgtgaagctggatgaaaatcttgtcaagaaattctcacggctgaaggtggtcggacctctcggtgcggattattttgggatgaagggctgggatgattgttcaaactattcatgttcctcaggttacttggcctgagactttgttgctggagatgtcggtattgattacgatgatgagatatcagatgtggattgggaagacgaccaaagtatagaagatgtgggaatgaggttctac

SEQ ID NO: 17697 - DNA, 418 bp, Gossypium hirsutum
  Clone ID: LIB3145-053-Q1-K1-A7
attactagtaagcgcgagtcatcagctcgcgttgactacgtccctgccctttattatatatcaaaagcttttacaactgctgcatcaaagttggagaagattggatatgttgatactgaaaatgaaagtgaagcttcggaaccaaagggtggtaaagaggcaattgacttcaaggaagttaagcgtgtggatcatattcttgcctctttacagcgaaagttaccaccagcccctccaccaccttcgtttccagatggctttgttccgcctacaacagaagcagataaagagccagaaaaccagcaaacagcagaacctcagcctcctgctgttgatcccatcatagatcaaggtccagctaagagaatgaaattttgaactcattgtttttcctcccatttcaatggagcattagaac

SEQ ID NO: 17698 - DNA, 407 bp, Gossypium hirsutum
  Clone ID: LIB3145-053-Q1-K1-A8
tgaacacggccggacaatgcctgattatgatattcataaggagtctactctgcatctagctcttggccttaccggcgttttttaagcaaggatcgttggccgttagcggcggccaccttttggctctaaataaggtgtgatgaaccttatttgggattattattagctatgaggctttcgaactttcacgggatactgctactacattttatgcttaatattacaaacagggttttgagacactattatgaaacgactacttgcctggtcaaatgcctgatagaacgtattgaggcatggcgttgacgggtactcaacagctgttggaccctaaactgatactttgacatgattgctgtgaatgattgatcattttgcaagagggcggccgataaaaaaaaactgag

SEQ ID NO: 17699 - DNA, 91 bp, Gossypium hirsutum
  Clone ID: LIB3145-053-Q1-K1-A9
ggcctatattaatgctatgctgtaaatttcaatttgaaatttcacgtttagatttcatttgctatgtaaaatgtgaaaatgtaattcatat

SEQ ID NO: 17700 - DNA, 297 bp, Gossypium hirsutum
  Clone ID: LIB3145-053-Q1-K1-B1
tgagatcgaagaccctagctttagcagcagtctcttctctttgatagtggctgaagatgatgtgtgcttagagagccggatgcttgacagattactggaaattactgacactgatgcccatgttggcagaatggaagccgataatgtagccgtggacgttattgatgaagcaggctggcttcttcatagaagtcacatgaagactatattgggacagcttgattctaactcagaattctatgctctaatgcggttcaagtgggttaaggaatttattatagaccatgaatggtgtgc

SEQ ID NO: 17701 - DNA, 304 bp, Gossypium hirsutum
  Clone ID: LIB3145-053-Q1-K1-B10
acatttctttatttgttgctcgcatatttacagggcacagggtgttttatttatggccactctagttgcatcaggatagcgctttgtttacaaatgctgctttacagctttatatttaacaacttggggggtattgcaactagctatatggtgatcatctatgacttttttgataattgataagatattaacgatgacatctttttttccttatgaagctatgtcgtatcaaggtggtgctgattggtatttaaattatgtgctagagataaaatctactttaacaaatattgagggccattta

SEQ ID NO: 17702 - DNA, 376 bp, Gossypium hirsutum
  unsure (1)..(376): unsure at all n locations; Clone ID: LIB3145-053-Q1-K1-B11
caccaggcggccaacagcggttggattcttgagaagggtcatggcaggggtcaactaatagtcctacctcgaaacgaatttaaccatcctgagctgaagaaaatcgctgctgatagtgttccattggagcacatcacccgcattttccccattcttggttaagcctctagctgggatgaacacttttttggagttatttgtgccatgttttcgttgacattgcgaccattctctttgtttttttgtcttggatatatatatataactgagaacaagctattttaggatagacttgtcaagctaccccaaagattagctttgaatcggntcctttttatatctattttttcacttatcagaatttcagaatatattt

SEQ ID NO: 17703 - DNA, 403 bp, Gossypium hirsutum
  Clone ID: LIB3145-053-Q1-K1-B12
atttactttttggcctgacatctggcggaccatataactacaatgggactcagaagtggcttcggagttttgatcaacgtttacgtgagagtatcgactatgctatttgcttaaatagtattggttcttgggataatgaattgtggattcatgtgtccaagcctccagagaatgcctacatcaagcaaatttttgagggtttatctaatgtagcagaggagttggacctcaaagttggcctaaagcacaagaaaataaacatttccaatccccgacatgggagcatgaacagttctcaaggctgagagtcactgctgccactctttctgaactttctgtcacaccagaactcctagaaagcactggtggtctgtttgataccagacaatacgtaaatgaaact

SEQ ID NO: 17704 - DNA, 423 bp, Gossypium hirsutum
  unsure (1)..(423): unsure at all n locations; Clone ID: LIB3145-053-Q1-K1-B2
cccacgcgtccgcccacgcgtncggaagcaatcagtaggaaacccaagtgtctattgcaaacttactcttggcaacactccacctcggcagaccaagattgtatcaactggtcctaatccagagtgggatgaaagttttgcatggacttttgagagtcctccaaaaggccagaagctgcacatatcttgcaagaacaagagcaaaatggggaagagttcctttggaaaagttacaatccaaattgatcgagttgtaatgcttggatcggtagctggtgagtacacgttattgccaaagtaaaagtgggccatcacggaatttggaaatcgaattccagtggtctaacaagtgaagaaggtgagagagataattatcattattattattattactattattatttttcccggaaatttgatgat

SEQ ID NO: 17705 - DNA, 430 bp, Gossypium hirsutum
  Clone ID: LIB3145-053-Q1-K1-B3
atgaatctgtctctagcatccctcaaaagtcgctctacctcaatgagcaatacttgaatgtgaaaaaggctttggtcgatgctttctttggtcctcctgaacggggtgtatatagtgcatctgttcaaagcactcttttgcagatggcaaaggctgtacttggcaggttcagtgacatatcatcagttaaactaaaaatgccgaatatccatttcttacctgttaatatatcaagcaaggatcacggcagcattgtaaagttcgatgatgatgtatatcttccgacagatgaacctcacggatcgatcgaagctagcttgagccggttctggtcaaagatgtaggtacaagacaaacgtactgtatggtggaagaaaggtataataaatttctgcttcatgctttgctcattatctaataacgataatca

SEQ ID NO: 17706 - DNA, 408 bp, Gossypium hirsutum
  Clone ID: LIB3145-053-Q1-K1-B4
ctcgtttgaaaatctgcgatttcggttactctaagtcatctctgttgcattcaagacccaaatcaacagttggaactccagcatatatagcaccggaagttctggcgcggcgagagtatgatggaaagttggcagatgtatggtcctgtggagttaccctttatgttatgttggtgggagcttacccttttgaagaccaagctgaccctaggaattttcggaaaacaattcagagaataatggccgttcagtacaaaattccagactacgttcatatatctcaagattgcaagaacctactctctcggatatttgttgccaatccttccaggaggatcacacttaaggaaataaaaaatcatccttggtttctgaagaacttgcccagagagctaacagacacagcac

SEQ ID NO: 17707 - DNA, 296 bp, Gossypium hirsutum
  Clone ID: LIB3145-053-Q1-K1-B6
cccacacgtccatggacacgcgggcgagggaggcactcacgatcattagtctgatcgcgggtaagcctatacttatacgccagcgtgctgttcatcagctcctgctccatcatcagacgaaggctatactactgcggccactggatatgatgcctattctactacgacgactagggaggactgccacagttaccaaggctatcttgctggaggctgcggagggctgctacagcactaaggggagagctgtatgggatactcgcttaaaacactgtgcctattggccttgaatcttt

SEQ ID NO: 17708 - DNA, 76 bp, Gossypium hirsutum
  Clone ID: LIB3145-053-Q1-K1-B7
gactggccgcggaataaaaagagccgatgtgatataatgacgaggttatatcctcgtttgctgcgagagcatacta

SEQ ID NO: 17709 - DNA, 408 bp, Gossypium hirsutum
  Clone ID: LIB3145-053-Q1-K1-B8
cggacgcgtgggcggacgcgtgggcggacgcgtgggttcagatcttcctaaaacagaagaaattgttgatgttttagacacattcaatgtcttagtagagctcccagcagataacttcggagcgtacatcattttaatggcaactgcaccttctgatgtttttgctgttgagctcttgcaacgtgaatgccatgtgaagcaaccattaagagttgttccactatttgagaagcttgcagatttggaggctgcacctgctcctttggctcggctcttctcagtagattggtacagaaatcagatcaatgtaaagcaagaagttatgattgggtatttagattcaggtaaagatgttgggcgtctctctgctgcctggaaattatacaaagctcatgaggagcttataaa

SEQ ID NO: 17710 - DNA, 336 bp, Gossypium hirsutum
  Clone ID: LIB3145-053-Q1-K1-B9
tattttgagggttagaacaagatatttcgagatttggtgcttgaaaatttactgaaatcatcctgtttcgtttatggcgactcaagtggagtggtgattgtgctttgtttccaaatgctgcttttcggctttatatttaacaacttggggggtattgcaacttgctatttggtgttcatctatttttttttttttaatttttaagatattagtgatgacatttttttttccttagtaagctttctcgtatcaaggttgtgctgattggttttttaaaaaaaaaaaaaaaacaaaaaaaaaaacaaagaaaaacaaaaaaaatataattacaaaaat

SEQ ID NO: 17711 - DNA, 197 bp, Gossypium hirsutum
  Clone ID: LIB3145-053-Q1-K1-C1
ggtttgaggacctttaaatggacaaagaagttgctttcttttttttgggtgtggcctgtaatggaattatcctttctgtttctgtaatttcttgccaattttcctggttacacgtacctaaaaggcttgagaaagagtttcctttgtttttaaatcgtttttttggtaaatggaatacataaaaaggctttccaccc

SEQ ID NO: 17712 - DNA, 367 bp, Gossypium hirsutum
  Clone ID: LIB3145-053-Q1-K1-C10
acttactacacgacgagattttgtttttggcatttgttgtgggtcgaaaatttattttagcgggctggtgagtgagtgattggggattgtgtatagaaaatatagactggtagagacctaatgttgtttttcatttaatctcctaaatttgtgaactggtttttgcataggatgttgtcacttgttaatggggaccctcgtcccagcttttgtgtaatagaatgaatcatatcaccataaactacccagcagaaaaaaaaaaaaaaaaaaaaaaaaaaaaaaaaaaaaaagaaaaaaaaaaaataaaaaaaaaaaaaaaaaaaaaatataaacaaaaaaaaaaaaaaggggggggccgttttagagg

SEQ ID NO: 17713 - DNA, 406 bp, Gossypium hirsutum
  Clone ID: LIB3145-053-Q1-K1-C11
cccacgcgtacggccgcgaactcgctgcaaaaagtaacgagccaacttcgagtggctcggagcacgttgggttcgttctcgagaaccttctcttcagatgcattggttgaggttaaaccaggcgaagttggaatggtttccggaatccctgaagaacatcttcgtaggagggttgtgatttactcgcctgcaagaactgcaactcagcaaggatctgggaaagttggaaagtggaagatcaatttcgtgtcgacacaaaagtgggagaacccattgatgggttggacatcaactggtgacccttatgctaatgttggtgattccgcactcggttttgatagtgaagaagctgcaaagtcttttgccgagagacatgggtgggattatgtggttaaaaagcaccaga

SEQ ID NO: 17714 - DNA, 386 bp, Gossypium hirsutum
  Clone ID: LIB3145-053-Q1-K1-C12
cccacgcgtccgctgcttctcttcttctgtatcccaaaatggttgcttttaggtttcatcaataccaagtggtgggcagaggccttcctacagaagcagatgagcatcccaagatttaccgtatgaagctttgggccactaacgaagtccgtgccaaatccaagttttggtattttttgaggaagctgaagaaggtgaagaaaagcaatggacaagttttggctatcaatgagatctttgagaaaagccctaccaagatcaagaactatggcatttggctgcgatatcaaagtcgaactggttatcacaatatgtacaaggaataccgagacacaaccctcaatggtgctgtagaacagatgtacaccgagatggcgtctcgtcat

SEQ ID NO: 17715 - DNA, 294 bp, Gossypium hirsutum
  unsure (1)..(294): unsure at all n locations; Clone ID: LIB3145-053-Q1-K1-C2
accacgcgtccgtgcatcatgatttctttgacttgcgctatcaactcggcagtcatgactgttctgctttgatatgtaccgaaatgtgaccactcatgatgttcaactgagactatgagggaagtggtacggtcttatttttatgcaactttggtccacttctggatgtcttacaatcaaaattgagacgatttgatggtttttcgggttgggttagagttgactatcttgttgtttgtgcaacagatgcagaagtattttggtggatgctaaaaaanagttattagaccgctt

SEQ ID NO: 17716 - DNA, 416 bp, Gossypium hirsutum
  Clone ID: LIB3145-053-Q1-K1-C3
cccacgcgtccgcccacgcgtccggtgtaggtgggtgcatccattcttatattgaaatgcacctcttaatcttttaccggttggttttaggttgggcgcttaacagttttcaaatgttgattaaaatcagttgtgtagccgctgcattcattattttgtgaaatggtggtgttttgccggatatggcatgttaagcgtcaaaactaaaaaccaattggtagtaagtataggggcagcttgaatataataccgagtgaaataaattgcaaaatgatagcacattaagcatataactcaagcagccttcacaattgcccctctattctattaacaattcagtggaaggttgttcggtactagttttgagacctgacataaccttattttatgtttcatcattatcatttttattacat

SEQ ID NO: 17717 - DNA, 410 bp, Gossypium hirsutum
  Clone ID: LIB3145-053-Q1-K1-C4
ctgctcttggaagccagcttcatgctttagggattaaagattccccaaaaatagacctcgatgatcctttggcagatgaattaatgagtctctatgagagaatgggcgacacacttgcgcatcaatatggtggctctgcagctcacaataagatattttctcagagaaggggtcaatggagagcagcgacccagtcccaagaattttttaggactcttcaacgttattatagcaatgcatacatagatgcggagaaacaaaatgcaattaatatattcctcgggcatttccagcctcagcctggtaaacctgcactttgggagttgggttcctaccagcattataggggaagaaatggggaaacaataatggacgaagatggaaggtcacttttcaaaagatccttttct

SEQ ID NO: 17718 - DNA, 411 bp, Gossypium hirsutum
  Clone ID: LIB3145-053-Q1-K1-C6
gcaacacgtccggtggctatctctaaatgcattgaagagaggcagatgaatctttctgtaaattccaagaggcttctgcttttccatttgcagaagcttgtggctgctgcgaaattggccacgggtaacaatgcgcctctacttacttccgctcaggcttcaaagccgggtataactggttgtgctcgcgctaagagaaaaccggctgttgacaccatacctgtttcaaagcccactgagggaaaacgcgctccaacaacttatatatccgctgctgacacaaaggctaaagcggcgctcaatccaaaggcttgttctaaggctacatccaccccaccgtaaacggaggctgtgaatgctgggacaccgaaagcgactgcatctgcttagccaagaaccgttgcataatca

SEQ ID NO: 17719 - DNA, 409 bp, Gossypium hirsutum
  Clone ID: LIB3145-053-Q1-K1-C7
tttttctggagctcctcctcactctctttctctcagtttctctcccatgttcttgcgtttttgaatgcgatattgactctgaatcagctaaaccaagtcgtggttattgctactggatataattcctgtgactatgtctttgattcgtcttcagatttgaaccggagttttgagaatgggagaatgcctgttatgtgctccagtttgttgcagaagttggaagaatttcttattaaagatgagcagttgagcaaggaggaacctgaaggaaagattaagtcttcccttttctcggggtcattgtcaatggctctttgttatatacagagagtgtttcgttcaggagccctccatccacatcctcgaatcttatgcttgcagggatcaccagatggacctgaacaatatg

SEQ ID NO: 17720 - DNA, 416 bp, Gossypium hirsutum
  Clone ID: LIB3145-053-Q1-K1-C8
ccaaaatcgaaatttggaaaatagagagaaattcttttgctcccaggcttcagatcttggtattcagatgtcgagggagagcagtgcgatatccagggatgcttacgttgttgatgaatctcagcaagtggatggtgttggtgcatcagggtcacatgtgaagcctaatattgctgaggaagaaattgatgattccagaaaggatctttctggaaagggtttggaatcagccataccttctacatatcaacaatcaccaacatcaggtgcaaaatggaagaaacataaagggaaaggttctcaggcatctgctcacacttccccttcttcaagtgctttcaattctgcagattctaccactgaaccaggagcaaattctaatctcccctcagctgctgctgcatttcctcaaattg

SEQ ID NO: 17721 - DNA, 405 bp, Gossypium hirsutum
  Clone ID: LIB3145-053-Q1-K1-C9
cagctttgggatcaaagttggcaaattgcagtgatgatggagaatcctagtttcactcttttacttgtctgtgtcttatgcatgtcctcagtggtacaatgcaaatacaactgccccgaaaagtacgatccccatgttatgcaagaacgataccaacgatgggtggcccgacacggccgaaagtacaagagcaagaacgaatggacattgcggttcgggatatacaaatccaattctcagttcattgattgtgtcaattcacagaacctatcattcaagttgaccgataacgaattcgcagacatgacaaatgatgagttcagggctatgtacttgggttaccaaagcataagatctccatgtgagagcaacagcaaaggcttcgcatatgacaaatatcacaat

SEQ ID NO: 17722 - DNA, 120 bp, Gossypium hirsutum
  Clone ID: LIB3145-053-Q1-K1-D1
tttttgtagaaatctgtagtttcggtttgtattaagaaattactaggatccggattagcccattgtaatagtttataggcgctgcaaactgaaaattcctcggatggttctcctttctag

SEQ ID NO: 17723 - DNA, 403 bp, Gossypium hirsutum
  Clone ID: LIB3145-053-Q1-K1-D10
cccacgcgtccgcaaggctggttttgctggtgatgatgcccctagggcagtcttccctagtattgtcggtcgtccacgccacacaggtgtcatggttgggatgggtcaaaaggatgcttatgtaggtgatgaagcccagtcaaagagaggtatcctcactttaaagtaccctatcgaacatggcattgtcagcaattgggatgacatggagaagatttggcaccatactttctacaatgagcttcgtgttgcccctgaagagcatccagtacttcttacagaagcaccactcaaccctaaggcgaatagggagaagatgacccagattatgtttgaaacattcaattctccggctatgtatgttgctattcaggcagttctttcactttatgccagtggacga

SEQ ID NO: 17724 - DNA, 403 bp, Gossypium hirsutum
  Clone ID: LIB3145-053-Q1-K1-D11
cccacgcgtccgcccacgcgtccgctttctattcttctggtgctgctggaggtagtggtggttctggctcagatttgggccttgcttctttgtctaaaagttcaaaatcggcatctattaattcttcttctatgggggaggtaaaaatgaccaaatttacttcggaagcctttgaagctatcccagatgatattagcaaccagaacgaagctttcagggctgagctggctggtacttccccaacacttgaggcttcagttggctctggtgagccattgctcagtttaaagcttggtaaacagacatactttgaggatgtttctggaggaagcaatactaagaatttgtcttattcttccacttctggacaatctcctgcccaagcaaagagatctaaacccaa

SEQ ID NO: 17725 - DNA, 405 bp, Gossypium hirsutum
  Clone ID: LIB3145-053-Q1-K1-D12
aaacagcccccccaaatctctttgctcagtttcctccaacccccgcatggcatttgcatcacaggcaatgatatcaaccaacagctgtgccttcacttccccaaacttgttgtttttgaagaaatgttccaaaattaacaacaagaccaggcaattccatttcttcactgttagagcttcttctgatgaacccgatgactgtaatgaagaggaatgtgcaccagataaagaggttgggaaggtgagtgtgcaatggttagctggggataagacaaaagtggtcgggacatttccgcctcgccgacggggctggactggctatgtcgaaaaggacaccgcggggcagaccaacatttattcaatagagcctgcagtttacgtagctgaaagtgcgataagctcggg

SEQ ID NO: 17726 - DNA, 265 bp, Gossypium hirsutum
  unsure (1)..(265): unsure at all n locations; Clone ID: LIB3145-053-Q1-K1-D2
acggagcattggcgtggaactttggtggaagctggtgtgtgcagtagggtggttgatgggatttgtcggcagagggtatggtggtggcagtaatcggttgatgagatggtgactatgtgagggaccgaaatgcataatttgtgaaagtcaaagggctttttatatatacataccattgggttaaagcccaaaacttttaaaacatgactcaatttaaattaatgcaataaaaattcttctaatctaaataattagtagattggnt

SEQ ID NO: 17727 - DNA, 408 bp, Gossypium hirsutum
  unsure (1)..(408): unsure at all n locations; Clone ID: LIB3145-053-Q1-K1-D3
gngaaaagaacaggaaaaagttggctgattgcgcacttggatttggccgtggtactaccggtggaaaggatggacccatttacgttgtcactgatcctaccgatgatgttcttaacccaagtcgcggaactttgcgtcatgctgtgatccagaaccgcccactttggatcactttcgctagggggatgattattaggttgaaagaggagctccttatgaccagcaacaaaaccatcgatggtaggggagccaacgtgcatattgcttatggggctggtattaccatccagtttgccaagaacgtcatcattcataacatccatatccataacatcttccctagcaaaggtggcaagatcaaggatggcgagaaccaccttgggttgaggacaaggagcgatggtgatg

SEQ ID NO: 17728 - DNA, 405 bp, Gossypium hirsutum
  Clone ID: LIB3145-053-Q1-K1-D4
ccaacgccgtccgcccacgcggtccgccattgtacgacaaaagctttaaaattgcaaatggagattctctctcaacgaccatcttctttctcaactttgaatcccaacgctccattgtttgttccgttagcgtaccggacggtcgaggatttctctgatgagtggtggtctctcgtccaatcctccccgtgtttccgcgactactggcttcaagaacgtttccacgatccccaaaacgacgacgccgatcttcttttccccgacgatcttgatgccgtctttgacgattacgacgactttttcgttgaccctacccgtgaagggaaggaagaagatactcaaaaggaattattacccgttggagcattcaaatggcggaaggggcgagttgtgagtgagtcacct

SEQ ID NO: 17729 - DNA, 333 bp, Gossypium hirsutum
  Clone ID: LIB3145-053-Q1-K1-D5
acgaccatctcgtctctcaagtttcaatcccagcactgcataaaatgatgcttaagcatgccatgcagcccaggcaaagagaggtgtacgcactttaaaacaccctatcgaacatgggattgctagactacgggatgaaagaacgtttccacgatccccaaaacgacgacgccgatcttcttttccccgacgatcttgatgccgtctttgacgattacgacgactttttcgttgaccctacccgtgaagggaatgaagaagatactcaataggaattattacccgttggagcattcaaatggccgaaggggcgagttgtgagtgagccaccta

SEQ ID NO: 17730 - DNA, 410 bp, Gossypium hirsutum
  Clone ID: LIB3145-053-Q1-K1-D7
cccacgcgtccgcgttgaactcccactactccctcttcctcttcatcttcctcttcctcttcttcacttcatttctgctctgcttctcagtgggaaaaaaaaaattcatagagcagagcaatggtgcccattttcgcttctttctctcttttactcatttctgctctcttcattgttgcagactgtggttctattggagtaaactacggaagaatcgccaacaaccttccttcagctaccaaagtagtggaactacttatatcccatggtttaaaccgtgtcaaagtctacgacactgacccggctgttctccatgcattatctggatccggaatcaaggtcaccgtcgacctcccaaacgagcaactcttcgccgctgctaaaagcacttcctttgctaactcttgggt

SEQ ID NO: 17731 - DNA, 411 bp, Gossypium hirsutum
  Clone ID: LIB3145-053-Q1-K1-D8
cccacgcgtccggaagaatctggaattaaaaagcgatagggtttggttcgttgttaaaaagataggcagaggcatttaaaaagttttagaaattacttaggggaagcctaatcagagagatccatggagtttttagctaaagaatacgggtacgtagcgttagtggtggtggcttactgctttctcagcatatggatgggtatccaagtagggatggctcgcaagaagtataaggtttattaccccaccctttacgctcttgaatccgagaacaaagatgcaaagctcttcaactgtgttcagagagggcatcaaaactcgctggagatgatgcctatgttctttgtactgatgattttgggagggatggctcatccttgcatctccgctgcgcttggacttttttacacc

SEQ ID NO: 17732 - DNA, 408 bp, Gossypium hirsutum
  Clone ID: LIB3145-053-Q1-K1-D9
agttagcatagaagtttaaaggcattcttacaccctacttctcttctgtctttctcttcttcagctaaatcccacttgttgaatagtagaacatggaagggaagatgagctggacggtggcggatgcggtggactacaagggtttccctgctgacaggtcgaaaaccggaggttgggttccggctgcactcattctagggattgagatctgtgagaggctttcaacaatgggaattgcagttaaccttgtgacatacttggttggtgtaatgcatttgccaagttcaacttcagccaatgttgtgacagatttcatggggacatctttcctcttgtgtttgcttggaggcttccttgctgattcattccttggcagatacaagacgattgccatctttgccgctatac

SEQ ID NO: 17733 - DNA, 395 bp, Gossypium hirsutum
  unsure (1)..(395): unsure at all n locations; Clone ID: LIB3145-053-Q1-K1-E1
ccgtccgnnggcgggatnntacccgctgnnagtttaagcatnnatcaataagcggagggaaaaggannaacttaccaggatgtcccctagtaacccggcgagcgannaccgggaaaagggcccagcttggagaanntcggtcgccanntcggcgtnnccgaattgggtagtctggggagaagacgtcctctagcgacggggaccgggcctcaagtctcccttggaaaagggnngcgccggagaagggtgaagagccnnccgtcgtgccccgggaccctgtcgcaccaaagaagggcgctgtctacgagtcgggtttgtttgggaatggcagccctaatcgggcgggtaaattccgtccgtatatgataataaaaatacataaaaaggtttaantt

SEQ ID NO: 17734 - DNA, 212 bp, Gossypium hirsutum
  Clone ID: LIB3145-053-Q1-K1-E10
gaaaggaaacctaccttaaatgatgcaagctagtcgacgaagatgccgacgtagatgacgcgcttggtgaccgacagcatatacattaacgttggattgcaacaattgatacactatgatagcatttcataagggatatcagatgacttcgaatccggcgtactatattactatatttgacggactatttctatatgtacacaagaacagat

SEQ ID NO: 17735 - DNA, 396 bp, Gossypium hirsutum
  Clone ID: LIB3145-053-Q1-K1-E11
ctctcgtctgaccttagaactccccctttagcgccgatctacgtctatcagcagagacgaacagccccgggcttcaaaggatgaccattttagtcgcgcgatcccttgtaaaccccgatttcgacgaaatgaaggggatacgacggccaactcgcaaggtaaacctctcttttgctttctttttttgtttttgagatagatttcaaaataaaaagaaaatagaggcgtaaaaatgaaaacagggaacaacctttgcagaatattcaacttctttgtatttgattcctcttttttttgtgtaatctgttcgtagtcgtattacaatcgaaaatcaaaggcttcatagccgaataactaaagaaaacaacaatttttgtcctctgcttttgtattggc

SEQ ID NO: 17736 - DNA, 386 bp, Gossypium hirsutum
  Clone ID: LIB3145-053-Q1-K1-E12
cggagttgtggcaattcctactagtgtattttacttgaacccggacgatggaaagaatttgggcaggtttaccttctgcaaggatgaagaaactttgaggtctgcaattgagaggatgaaagaaaagctgacgaaaaagtgattaaatgtatcgcaactacgtttatcggccaaggtatgtgactagatttggctatgataacttgtaatccttgaaagatcaaactggacgttgagtgatgactcaaaccaaacctataaattttattcgaataatagaattcatcgtaagagtgacttcatgctgaattgctgcatctcaagaagttgaggcggaagagactattgtaaaactaaagcatctggaaagccttgtttaggagctg

SEQ ID NO: 17737 - DNA, 517 bp, Gossypium hirsutum
  unsure (1)..(517): unsure at all n locations; Clone ID: LIB3145-053-Q1-K1-E2
ccgtccgtatttaggtcggccccagcttaggcttaacttttttttaatttataaaaaaacaatgaaagagaatctttcttctttatttgggttttgtgccgccgcgtgacatcttagtngnngtggtgtnntgttttcaaggtgccagaaggcagtagtcgcnccagcgccaaaatggtgatannaccccttagaagtatttagctcatggctcnnngaacgcgtnnataagaagcncacnctcncatttcagcncggttgggttggccagaaagaatganaggggaacaacgnncaccatgctttattgcnngagtacccatgaagaaaatagaagatatttcaaacccgtgtttttgaccagaagttgagaatnntgcgaaaatggcttaaattgggtgtggagtttcatttattctttcacgctgcnttagaatcccgtttgggtttcaatttgactatttctctggttgggataaacctggcatctcaataaaagaaaattttattagaaaac

SEQ ID NO: 17738 - DNA, 407 bp, Gossypium hirsutum
  Clone ID: LIB3145-053-Q1-K1-E3
catttccaagcttctctagttgtcaagtgtttttgcagagcagaaatgaaggtctttgaaatcaatggcaacactctctcgcttgccctcttcgctgatgtcaccaactccaaggaactcctagactctatgcaagccggaacgcttgatcctgaagttgcgtttcttaatgcatcacttattgcggatgtttttccagttctagcagcagtgcataagacacttatttccaagtcacgtgagtcgttgactacacgaacactccattccgaacttgtttacaattactctgggtctaagcatatcaccgaatccctgaaacgatgtggtatttctgaaagttcaaggtatgtccttgccgctcgatttaacgcttctcccgatgagatgaaagctgtggagaagct

SEQ ID NO: 17739 - DNA, 406 bp, Gossypium hirsutum
  Clone ID: LIB3145-053-Q1-K1-E4
gagcaattgcttttgatttcaggggctacggactctccgaccacccaccggagcccgaaaaagctagtttcaaggaccttgtcgacgatgttgttgccccttcttgatttgttgggaatcaataaggtttttcttgttgggaaggattttggagcagtgcctgcatttatggtagctgttatccaccctgaaagggtgttaggtgtcataacactaggcattcctttccttatacctggtcctgttggtatccaatttgatctcctccccaaaggcttctacatattaagatgggcagaaccaggaagagctgaagcggatttcggccgatttgatgttaagaccgttgtaagaaacatttacattctcttctgcagaagtgagctacaagtagctggtgaaaacg

SEQ ID NO: 17740 - DNA, 328 bp, Gossypium hirsutum
  Clone ID: LIB3145-053-Q1-K1-E5
gaaaggattacgcccgggaaggagaccttcaagaatggtttaatgccgccgttgcggagaaggaagtacctgctcaacaaatagcttctcatgtgtacacaattagagaattatcgaatcagcatacaaaggctgtagaacatcgagatcaagccgaatcccgaattgtggaagcagaagcacgtttacatgaagctattgagaaatacaccaagaaagaatcagaagccaatgacctgattgaaaagttgaatgtgcttgaaaaccaaattaaaacttattgagaacaaactcgcgaagcttccgaaaatgctgtatctcgagaaga

SEQ ID NO: 17741 - DNA, 383 bp, Gossypium hirsutum
  unsure (1)..(383): unsure at all n locations; Clone ID: LIB3145-053-Q1-K1-E7
cccacgcgtccgcccacgcgtccgcccacgcgtncgaaaaaaataaaaaaaataacacaaaacaagagaataatcacaaaaagaaagcccggagatttagatcggaaaatcatcttcagatattggttgtctttttgtattgcctattgtgcatccaaaaaaatacaatgatcgaatgcttttgctttatagctgaaaatgaaaaaaaaaataaataaaaatacaaaattctttctttgctttcacattgggtatatgctgctgttgcttgtttatttttttttgcaggtacgggtgcaaggcgctcgggtacgggactgtgttggcgcgggcgtggctgctggacagtacggagcgcacgacgctggcatcgtacggaggct

SEQ ID NO: 17742 - DNA, 407 bp, Gossypium hirsutum
  Clone ID: LIB3145-053-Q1-K1-E8
cccacgcgtccgcccacgcgtccgaaattacaccaaaggatatttcttcggtagccgaaaagcttctatcttctaatctcacaatggcatcttatgggaatgtcattaacgtaccaagatacgattccattagcagcaagttcaagggaaaatgaaaactgctttgttctgtcgaactcgggtatttcatctgtctttcaacggtattattatgcatctgcatatcttaaagagttgtttttcaaaaaaaatgatgcggttgaaaatatgaagttttaagctcttctattttgaacaaaataaattatttgtccctagctagtgagcaaaacatattagttaaaaataatagcttctgcaaacaatgggcttcgcatgtttctgctgaattccatgattttggtcat

SEQ ID NO: 17743 - DNA, 403 bp, Gossypium hirsutum
  unsure (1)..(403): unsure at all n locations; Clone ID: LIB3145-053-Q1-K1-E9
gatgaagagtgggagttaaaggaagaaggaaaggagattacacagcaatgggaagatgactgggatgatgatgatgtcactgacgatttctctttacaactgaggagggaacttgagaataacactgagaacaacaactaagctggacttatgcattcctctgcactgaacttgtctgaatcggggttattttttttgtttgattttcttttccatgcaaagcgaatgaaggaatcagctgtaactctttatgcttgggtgtactggtagaaacttaaaatgcagaaactggtttgatggttctctaaaatatagacatttgatttaaaaaaaaaaaaanaaaaaaaaaaaaaaataaaaaaaaaaaaataaaaaagaaaataataaaaaaaaaaaagggcgg

SEQ ID NO: 17744 - DNA, 405 bp, Gossypium hirsutum
  Clone ID: LIB3145-053-Q1-K1-F10
caagaaccacaaagagactcattaaaccagggaattcagctaacagctcgtaacaacaacacttttcggcaatttaatctcccaatggggttgggaaatgctgaggattccacagcagattcatctactagcagtagtaggagagaaagggatggcggagttgttccagtttggtctcctccagcttctagttattcagagcagttcataggtgatgaaaacgatattggtacgagctcatcttatttaccaaggcatccacagtcccaccaaatagtaaactggaggcgtttatctcaaactggataaacacttacgaacaccggaatcttgtagtcagagaatgccagaatggccaatcttgtgggctgatggggtataacatggcttcaatctaccacactc

SEQ ID NO: 17745 - DNA, 410 bp, Gossypium hirsutum
  Clone ID: LIB3145-053-Q1-K1-F11
ctacgcgtgagccaagcagtttcatttgctgccctgcagattcgtgtaacatttgtcaatgaatttggagtggaggaacctggtatcgatggcggtggaattttcaaagattttatggagaatattactcgagctgcatttgacgtgcagtatgggttatttaaggttgttaatttatgctactgctatctccttttcatcttttcatgtaaacaagtaatttctcgataagctggttgggcatatccacaagatacttttattttttatttcacttacggtaaagatgtcacttggggcttccttacctttctgatttaagatggcatgcttcttttggatcaaataggttgagagagcatattaatattcaattcttgctgaatgagggaaagataaaagaggcaaag

SEQ ID NO: 17746 - DNA, 405 bp, Gossypium hirsutum
  Clone ID: LIB3145-053-Q1-K1-F12
acgcttgtttaaaatataagaaaaaaaatcatacgcaatgagcactgctggtcaggttattcgttgcaaagctgcggtggcatgggaggcggggaagccactatcgatagaagaagtggaagtggcaccaccccaaaagcatgaagtccgtattaagattctcttcactgctttatgtcacactgatgtatactactgggagtgtaagggttacactcctctgtttcctcgtatacttggtcatgaagcctcagggatcgtggagagtgtgggtgagggtgtgaatgatttgaaacctggagatcatgtgctccctatcttcaccggagaatgcaaagaatgtcgccactgtctgtcagaagaaagcaataacatgtgcgaactgcttaggatcaactgcgaccg

SEQ ID NO: 17747 - DNA, 408 bp, Gossypium hirsutum
  Clone ID: LIB3145-053-Q1-K1-F2
attttattgaggctaaagaaactaaaaagagtcggaaaaagtctgccaaagcaaagggcgtgggagcaaaagtttcaggtattccaaatattgctgatgctgttcttgttagtgcaagtactgttgagaaaggcaaaagttctcgtccagcacaggctgagaaggaattattgccttcaattccatcaggtccttctttgggagattttgtaccttggaaagaggaacaagtaaacccttcccctgctccagcttggtctgctgattctaagaaactccctaaacctacatcattgcgagacatccaaaaggagcagaagaggaattcctctgtccagccaacaaatccaataatgactcctcataaatcccaatcaagtcagtcaacccctgctggtgtttcatcat

SEQ ID NO: 17748 - DNA, 411 bp, Gossypium hirsutum
  Clone ID: LIB3145-053-Q1-K1-F3
atcaaaaccagctagctaaatcaaccgcatttcaccaggatggctagaggattgaagaaacacttgaagaggctcaatgcccctaggcattggatgcttgacaagcttggtggtgcttttgcacccaagccatcatctggaccccacaaatccagggaatgcttgccattaattctcattctgcgaaacagattgaagtatgctctcacgtacagagaagttattgctattctcatgcagaggcatgtcatggttgatgggaaggttcggaccgataagacttatcctgctggtttcatggatgttgtgtccattcctaaaacaaatgaggacttccgtctcctttatgacaccaaagggcgtttccgtctccatgccatcacgggtgatgaaaccaagtttaagctttgc

SEQ ID NO: 17749 - DNA, 405 bp, Gossypium hirsutum
  Clone ID: LIB3145-053-Q1-K1-F4
tacagattggactgagggtgagacatttgttttactagatgcgtggggtgaccggtttttacaacgcaagaggaagagtctccgagccgaagaatggcaagaagttgcagagaaagtttctgaagtctcaaagattgaaaggaccgacactcaatgtcgcaaccgattggatacactgaaaaaaaagtacaagaaagagaaggctatggtagctgagaccggcactagcactagcaatagcaaatgggtttatttcaagaagatggacatgttaatgtcaagttctccacaacagggtgttatccacaaggctatttcaggtgaaatgcgggatagtccaacaatctcagaatcaaccgatagtgaggaggatgtctcagaaggattgccaccgaaaaagagaag

SEQ ID NO: 17750 - DNA, 399 bp, Gossypium hirsutum
  Clone ID: LIB3145-053-Q1-K1-F5
cccacgcgtccggaaaaggtttcatcttggcacatgaaggtgttggtagatgctatcacgaattcagggctttcaacgatctccaatacgttagacgaaagtgtttacaaagaaggtggtgaacaagcagataaagagatcactaatgaggaggaggcacagtatgttgctcatcaaattttctcgaacgtggtctgtcatgagagtaatcaaaatcgccgttacattgatgaagacgatctcttaaggttcatgatcaaggaggaggtggaactcgtgtttccattgtttgaagtatcaagcactggaaaaattgacagaaaaagtttcactaactgggtgataaaagtttaccaggaccggaaaacgctagcacatgctttgagcgacaccaaaaca

SEQ ID NO: 17751 - DNA, 403 bp, Gossypium hirsutum
  Clone ID: LIB3145-053-Q1-K1-F6
cgatcttttggttctgatgtgacagatattggcttgggtctcctaaaagagtgctcgagtctccaagccttaacttttaaccactgtgaaaatatttcagaaattggactgaagcatattagtggtctaacgaacttgacatccttgagttttaaaaagagtgctgcaattacagctgaaggaatgtgtgccttttccagcttaataaacttggaaaagttggacctggagaggcgcacagggattcatggtggatttgtacatattaaaggtttggccaaacttgaatctcttaatatcagatgctgtaaatgtatcacagacttggacttgaaggctatttcagggcttaataatttgaaggagttgcaaatatcaaatagtaacattacagattttgggc

SEQ ID NO: 17752 - DNA, 381 bp, Gossypium hirsutum
  Clone ID: LIB3145-053-Q1-K1-F7
cccacgcgtccgatgcgatagggctgcaaatttgaagcgaacgaaagttagagatgacgaggtagacagtgaagcctggatagagagagaactggagatgggaatagaactggaatctgccacttcccggaagcgagggagggtgcactgaggttttgaagttgggagaagtagttcgttgataccctctaatcacatatcttctttctacttaatgcatcaaagcgacccttccatggtctcatttatggcatttcaagaaagactgaattctatttctctcttagaacaactataattattgccttgttgtagactgtatacaagtgtagaataattgtaacattttttttcgagagatattttatttgtattttggat

SEQ ID NO: 17753 - DNA, 407 bp, Gossypium hirsutum
  Clone ID: LIB3145-053-Q1-K1-F8
cggaagttatcaaagcgtgtagctttttatacagttgactgtagaggctcttgtggtgaaatttttgtcgatttaaaggactataaatattcgaagaaaaaacttgaggaaaccgttgaatgccaactagaattcccaagctttgaggatactatttcagtaccttggaaagcacttccgaagagagtgtcaaagctttactttgctatgagagtgatagagcaatttgaagatgctgaaggtcgtaatcccggggaaacctcaattgctgatcttcctggtgttctgaagctcagaaaggaactttgtgaaacgaattcagtgaacgagtctcaaatacccgatgcactcctagaaagactgctaatggatacaagtgagtaccctccagtttgtgccatcattgg

SEQ ID NO: 17754 - DNA, 385 bp, Gossypium hirsutum
  Clone ID: LIB3145-053-Q1-K1-F9
gggtaataagtaaacttgaaaggaaaacggttgcttatcatgaatcaggtcatgctgtttctggctggttcttggaacatgctgaacccctcttgaaagtaacaattgttcctcgtggtacagcagcacttggatttgctcagtatgttccgaatgaaaaccttctcatgacaaaagagcagctttttgatatgacatgcatgacccttggtggtcgagcagctgaacaggttttgttgggaaagatatcaacaggtgcgcaaaatgacctggaaaaggtgactaagatgacgtatgcccaggtggcagtttatggctttagtgacaaggtaggtctcctctcttttcctctgagagaagatggatttgagatgtcgaagcccta

SEQ ID NO: 17755 - DNA, 406 bp, Gossypium hirsutum
  Clone ID: LIB3145-053-Q1-K1-G1
gttcaacgtgaaagggtctaatctgtatttctggatagcagtccttcccattacccttgttcttcttgtgggcgcaaagctacaacatgtcatcgcaaccttggcactagagactgccgacatgactggttatgttactggagcaaagctgaggcctcgagatgaacttttctggttcaagaagccggaatggttgttgtcccttatacatttcattctattccagaatgcattcgagctggcttcatttttttggttctggtggcaattcggctacgattcatgcttcatccgtaaccatacgcttgtttacataagacttattttggggtttgctgggcaatttatttgtagctacatcactcttccactctatgctttggccactcagatgggaacgaactac

SEQ ID NO: 17756 - DNA, 389 bp, Gossypium hirsutum
  Clone ID: LIB3145-053-Q1-K1-G10
ccgaattctgcgtccagaaggtgcggttatattccgtgatgaagttgatgttctaattaaagtgaagaagataacagcaggaatgaggtgggacactaagatggtagaccatgaagacggtcccttggttcctgagaaagtattggttgctgttaagcaatattggaccgttgggggaaacacgacatctgcacagtaaacagcagacggcgacaagcttaaaccgtggcatgaactgagtttgtggattatattcaattgatgaatttccagcctgaaaatttttgccagcaggattgttttggtgggtcacaggattaggtgaactaaggatcagtctgtattcatttgtattaatttatgaacagatagctataaactatgcttcc

SEQ ID NO: 17757 - DNA, 387 bp, Gossypium hirsutum
  Clone ID: LIB3145-053-Q1-K1-G11
ggaccctgatgtgcatcaccgacatctttcacacttgtatgggctttttcctggacacacagtgacaattgaaagcatgccagacctttgcaaagctgcagagaatacacttcataaacgaggagaggaaggaccaggatggtcgaccatgtggaaagctgctttgagggcacgtgtacatgacagtgagcactcatatcggatggtgaaacatttaatatactttgtggatccagaacatgagaaagctttcaaaggtggaatatacagtaacttatttgcagcacaccctcctttccagatagatgccaactttggttttactgcatcagatgcagaaatgctagttcaaagtaccttggaagacctatacttgcttcctgctct

SEQ ID NO: 17758 - DNA, 336 bp, Gossypium hirsutum
  Clone ID: LIB3145-053-Q1-K1-G12
cggacgcgtgggctgcaagatagtttttttgctagctttgctcttggttggctcatcacaaatggtgctggtcttgcatcgtacccaattgaacacttggcgtagaaaaatgataaaaacctttggtgaaacaggaaagtccaagactcactcgatgcattctctcagatcttgaaaaatgagggagccaagtttttattcaagggtgctggagctaacatccttcgtgccattgctggcgctggtgtgcttgccggatatgacaagttttaacctataagctgtcgctgctgggatggggatatgaaccaccaaataaggactttttaacattct

SEQ ID NO: 17759 - DNA, 408 bp, Gossypium hirsutum
  Clone ID: LIB3145-053-Q1-K1-G2
catctggtgatgatgacgagaaaaagggacaatacaccaagttctggaatgaatttggaaaatccattaaactcggtatcattgaggatgcaaccaatagaaatcgcttggcaaaactccttcgatttgagagcaccaagtcggatggtaaattgacatcacttgatcagtacatctcaaggatgaaatccggacagaaagatatattctacattacaggaaccagcaaggaacaactagaaaaatctccattcttggagaggcttaagaagaaaaattacgaggttattttcttcactgatcctgttgatgagtacctgatgcaataccttatggattatgagggaaagcagttccaaaatgtatccaaggagggcctgaaaatcgggaaagaaaagaacaaagaac

SEQ ID NO: 17760 - DNA, 306 bp, Gossypium hirsutum
  Clone ID: LIB3145-053-Q1-K1-G3
cacacgcgtccgaagtccataaatgggggcgagttccttacatttcctgcgatgctagaaatgctggaacgctgtgcacctgtgagtgaccacttctggatgacagttgtggctgttggctgatcggttgattcacaataccgcccgacggtggaccactgttggtcaacgcacgatgaagattacgtcccggcggtggcttattatattggaacagagatgagtatcgttgagattgtgcaacactggcctctggaagatcttggcagcgataatcactatgaggatcacatggctgagccttgt

SEQ ID NO: 17761 - DNA, 409 bp, Gossypium hirsutum
  Clone ID: LIB3145-053-Q1-K1-G4
cccacgcgtccggggaaaccatggaacagtgtcaactttatatgtgcacatgatggttttactttggctgatctagttacctataacaacaaacacaacttagcaaatggggaagacaacaatgatggagaaagtcataactatagctggaactgtggacacgtatatgaaattggcacggaggatagaatttgtccagcttgatggcttgaattggaaacactaccattgtcagtatccattagatacatgttatgatttacaaaccactcccccccccccccgccccccagggctgcggaaatggaacaaaaaaaaagaaatataatgcaaatgtctgtttcagtaccttttcatttcaagttttagctgaccaaattcagaatttaaagaagtgcccatttgcttt

SEQ ID NO: 17762 - DNA, 407 bp, Gossypium hirsutum
  Clone ID: LIB3145-053-Q1-K1-G5
cccacgcgtccgaaagaagcaaaccactgacactgctgatcattctgatgacatttcagctgaggttgaaacttccatcactgaaacagatgccattgtagctaaccacctgaaacctggagctccagtgaatgctggaatgaacaataatgttggtcaatcaagtaattcaagtctcaaagaatccaacaaaattaggggcctgcaatcgatacttcagattacaaacagtgttgagaagaccaaagtaataagcaatttgagccgtgtagattcaaggatagaacgtattgaggcatggcgttgaggggtactcaacagctgttggaccctaaactgatactttgacatgattgctgtgaatgtttgttcattttgcaagttgtgaaggagaaaaaaaaattgag

SEQ ID NO: 17763 - DNA, 403 bp, Gossypium hirsutum
  Clone ID: LIB3145-053-Q1-K1-G6
cccacgcgtccgcccacgcgtccgcccacgcgttcgtgattattaggttgaaagaggagctccttatgaccagcaacaaaaccatcgatggtaggggagccaatgtgcatattgcttatggggctggtattaccatccagtttgccaagaacgtcatcattcataacatccatatccataacatcttccctagcaaaggtggcaagatcaaggatggcgagaaccaccttgggttgaggacaacgagcgatggtgatggcatctcccttttcggagcaaccaacgtttggcttgaccatctttccgtttacaagtgctccgatggtatcatcgatgctattcagggttccaccgccattaccatttccaactgccacttcactgaccacaacgatgtgatgct

SEQ ID NO: 17764 - DNA, 402 bp, Gossypium hirsutum
  Clone ID: LIB3145-053-Q1-K1-G7
aactttcaactggaatccataatttttttctttttccttttcttcccggggattctaaaaattctgaaatggtgtatacctgtatctcaccacttctgtagttcagcggtggctctttgctcattgtttcattcttatttttatgcaactctggtccacttctggatgtcttacaatcaaaattgagacgatttgatggtttttcgggttgggttagagatgacatatcttgttgtttgcgcaacagatgcagaagtattttggcggatgctgaacaaccaacaattggcttgaccatctttccgttgacaagtgctccgatggtatcatctatgctgttcatgggtccaccgccctctccatttccaactgccacttcactgaccacaacgatgtgatgct

SEQ ID NO: 17765 - DNA, 365 bp, Gossypium hirsutum
  Clone ID: LIB3145-053-Q1-K1-G8
aaaaagacgaggaagaagaagcggaattcaaagctcaaacaaaggagcttgtaaatgccccgcaagatttacctccgcaacttctttttgttcatcagggacaaaaggacttgaaagaacttcattggcatgctcagattcctggaatgattgtgtcaactgccgcggatggtttcaacatcttaatgccttcaaatatacagagcactctcccctccaatggctcttgaaaagaatagtgtctttttggctccttgctggtaacaaatgaatcaacagctaatgcaaagctcataggaattcatgcatggaatatggaggttttttttttccttaaattattatttttgcatggtgatgtcaat

SEQ ID NO: 17766 - DNA, 361 bp, Gossypium hirsutum
  Clone ID: LIB3145-053-Q1-K1-G9
aaaaaaaaaaaaaaaagaacttgttaatctctgttgtatgagataattagaccgaagtaaatgtgtacctttgtcctaaaaaaaaaaaaaaaaaaaaaaaaaaaaaaaaaaaaaaaaaaaaaaaaaaaaaaaaataagaaaggggggaatgatcgagacaactgcagcttatggtcccaacaatgttaatgtcttaaaatatactgaggtctattcaattcaatggctcttgaaaagaatactaacggttaagctcttaaatgcttacaaataaataattaaatggtgcaaagctcatattaatttatgcatggaaatatgaagtttttacgttccttccattattactattgcaaagtga

SEQ ID NO: 17767 - DNA, 353 bp, Gossypium hirsutum
  Clone ID: LIB3145-053-Q1-K1-H10
ggccgtccacgcgtacgagagcagcctacgagatcaaccaaggctgaatatcctttttggccatttggcagcaggcccatggttgttctctaagatcatgccatccacagaagataataacgatgatgatttagcaatcacgtctcctgggttgtcgatatggaagaaatgggttcctagcttatgtggtaccgatctaacttggtgtttgtctgttgtgaaaaatgaaaatcgcgataaactggatgaggtcgtctccggagcagacgcagtattatttcttgtatctcagaacattccatggaagctcctaaaggccgaactttatagtctttttaatataaagggttgtg

SEQ ID NO: 17768 - DNA, 234 bp, Gossypium hirsutum
  Clone ID: LIB3145-053-Q1-K1-H11
aaaagagacacggaaaatctggaatgattctgatgttaaagacactgctacatgcatacgagtccctgtgacgcgtgcacatgcttaaagtgataatcttcacttcaagaagccacttgattaggacacagcaagagaaaatttggtatggatcaccggggacatagttattgatgatctgatttctaatcacttccctacgccattggaggtatcaaacaaagatgatgtagc

SEQ ID NO: 17769 - DNA, 401 bp, Gossypium hirsutum
  Clone ID: LIB3145-053-Q1-K1-H12
cccacgcgtccgctgattttattatgtatagagagtacataatgtagcctttgaaattgatatgtattgactggaccggttagttggacccgttggattgagaactggctggggtactggtctgagaagatgtattagattggttgacctgggaactcgtacggactggttgaattggaattttttaatgatttatttaatagaactggttaaaccagcaaaccagtggcctgacaagtttgagcaccagaccgattttgaaaactttgggcaaaagcttactagttcaaacagttgcattaggttctctaaactgattcgttgttcgatttgtatctgaaaatatgcttattttttacaatgtcttataacttatagttgataaatcttttgttttcata

SEQ ID NO: 17770 - DNA, 348 bp, Gossypium hirsutum
  Clone ID: LIB3145-053-Q1-K1-H2
ggacaccatcgaatccattgccaactaacgatcaacttagcacccctggtggacgggcagttgctcctgctgtggctggtagggctccgccctccaaaccttcagctgctgcccatacccacctaccatcttcttccctgcagttttgttatataaatttgcttccgctgcttgtcctttggcatcttctcgtttcatcatttcccatagatacgggcaccaccactcacggttgagccattctcacacttaacctcacttgtatgtatatcatcttttttttcttctttctatttttcctaatatttggattattatatatctttttaccttctgtattatgtatga

SEQ ID NO: 17771 - DNA, 338 bp, Gossypium hirsutum
  unsure (1)..(338): unsure at all n locations; Clone ID: LIB3145-053-Q1-K1-H3
gacattttggaagggacgaccccgacttcacctgggaagttgtgaagcccctcaaatgggaaaagcctcaatcttgaagtccccccgtccgtactgccccgtgcttttctcatccgcggtgctgaataatcccgatgtttcgtagctcctaccggaaatatctaatctcatacttataatgccctttttcattttcattttctatttcttcttttatcgatgcttgttttgatttatgtgtctttttatcagcgtcggtgttgcaaaactgagtgagaattttgcttatattgatggcattggaattnaaaaaaaaaaaaaaaaaaaaaaaanccccc

SEQ ID NO: 17772 - DNA, 243 bp, Gossypium hirsutum
  Clone ID: LIB3145-053-Q1-K1-H4
ggccctaccacaacaataggcatccttccgaggtcattccacccttggatcattttgaaaacttttgggaagggcggggtaaaacttaatttggtggcaggccccgttttaggaaaattacccttgaaaccggtggttgactttaggaccttgaccaagtcagttaattttaggcctgcctgcaatttttataacatgaacaagcttgcagtttgtgggaaagggaaattccgcgaacacttc

SEQ ID NO: 17773 - DNA, 270 bp, Gossypium hirsutum
  unsure (1)..(270): unsure at all n locations; Clone ID: LIB3145-053-Q1-K1-H5
gccgcaacatggtgcttggtttaccacgtaagaatcacgttataatgtctgaatgggtatcggaccaaaatgtatggaaaccaatgtgcttcaagaaataatgggacgaatcccctatanaatgaattttttaaccttttacanttttgatgctaatgggtgtgtaaattatcntggatanntgtttcttctcccctctnttttcagcaaaatagagggtgttgaagtgaatggagatgtnggcgagttcgacaaaagggagatggaact

SEQ ID NO: 17774 - DNA, 374 bp, Gossypium hirsutum
  Clone ID: LIB3145-053-Q1-K1-H6
cccacgcgtccgcccacgcgttcgatgggcaccattgatgggaaaacagctttgttcggctggagatgattcgagggctctaatatgggaggtggtgggctccaattatcgagcagaaaatggagttgcagtgatggaaccagagatgtggtatggatcagcggctgagatcaatcatgctcgatggtctccaattgagttggattggattgctatagtttttctcaacaaattgcagctgttgaaagtttaagaaaatttttgacttctaataacaatagtttcaagttagccagccatgttaattaaaagtcctatatatgtttcattactaaaaataatttcttatatatgagattggaaaatgatacacc

SEQ ID NO: 17775 - DNA, 410 bp, Gossypium hirsutum
  Clone ID: LIB3145-053-Q1-K1-H7
atcaactccccttttaaaaagatgtcctctacgagaagtaaagataaatcatcgggctggactgcctttgatcttaagcagaggcagaaacaagttctggtaccagaaactgaaaatgaccctttccctcctgtagcaatggcggctcttcatccctgcacaagccagacaaattgcaacgacctttcagcaaggtctttctcatctgtgctaaagccttctagcgattttccaactttgaaacagaataagaattccataaaatcaataaatgtgggcaagcctattggaaatgaagataagatagctggggtaaacaataatgatttagcccttaaaaagcttaaagagatacattgctgggctgagaatagtttgattgaggacatcttgttggctaccaataatga

SEQ ID NO: 17776 - DNA, 410 bp, Gossypium hirsutum
  Clone ID: LIB3145-053-Q1-K1-H9
cccacgcgtccgagaaaatgatcacgacactggatcatcaaactctgagcatatctctcctcaaaacacaacagacacaaccgagctcattgtccaagcaagcaataactctacggaagagagtaaagaaaccaacaacaaggctgcaaaagaaattccaggttcactgcaaaacgggacttctgctttagatacaacaggaggtggtagggttattgaagaaatatataaagaaaaagccaatgagaccgtagtagatgcaagcaagatcgagaacgtagtaaatgtaacaaccgaaggtaaaggttttgaatcttccacgactaaggagactactgataatgagaaacaaggtgacaatgaatcaaatggaaaagatgaaaacgaagacacttcttcctctaatgaga

SEQ ID NO: 17777 - DNA, 379 bp, Gossypium hirsutum
  unsure (1)..(379): unsure at all n locations; Clone ID: LIB3145-054-Q1-K1-A1
tcgcccacgcgtccgcgccctttttttttttttttttttttttttttttttttttttttttttttttttttttttttttttttttttttttttttttttttttttttttttttttttttttttttttttttttttnnaaaaaaaaaaaaaaaagaaaagggggggggtaatttaaaggggaaaaaaaaaagggggggggtttttttttttgaaaaaaaaaaaagcctgggtttgggtttttaaaagtaaatttgttttaaaaaaaaaaaattttgcccaaaaaaaaagtttttgtttttttaaaaaaaaaaaaaaaaaaaggggggtttattttaaaaaaattaattttcggtgggggggaaggaaatatttttttttt

SEQ ID NO: 17778 - DNA, 406 bp, Gossypium hirsutum
  Clone ID: LIB3145-054-Q1-K1-A10
cttgtatggatagagagaggatggctgtgctggaccaagcagagcctatcaacggatactaattgataaggtggaattttggtgaccactttgcttgtatggatagagagatatgcaacactttttctgcccccctactttcttagctttccttgtttaatgcctctgtagttgaagtataatctgtgaggtttcaaattcttaatataagcctccaagtttttctgttctatataatgcgtttcggaggctggttctctataagtctaagaagatggggttcatttctctattttactgttaatgtttatggcaatctgggttttgtccagtggtggtaatgtacgtcattatggtattatttgtaaatatttatgtaagataagaaaaaaatggaggcttttgt

SEQ ID NO: 17779 - DNA, 407 bp, Gossypium hirsutum
  Clone ID: LIB3145-054-Q1-K1-A11
gtgatgttgcaattgcgtcatccatatcaaaagtgcttgcctctattatgacttacccacatgaggtaattcgatcaaggcttcaagagcaagggcaggcgaggcacaccgaggtccaatatgcaggggtggttgattgcattagaaaggtattccggaaggaaggtgtttctggcttttaccgtgggtgtgcaaccaatctcctgagaacaacaccatcagctgtcattacatttaccagttacgagatgatacaccgatttctgcaccaggtattacctcctgaaaggaagaaatcagaggctgggcctaggtctgatggccatgtgaacaagtcatggccaaataagagagccagtgcggaagaaagtaaaatatcgcaaactcactcaaataagattacacct

SEQ ID NO: 17780 - DNA, 404 bp, Gossypium hirsutum
  Clone ID: LIB3145-054-Q1-K1-A12
atttcccctcagatcccgtcctacaaggccagacgctgaactgaaagtttgctgtcgtacgctgcatcaaagtggatcctgactctcgaagcatatccaccataacgcgtaacagaatagtagacattggcccttgtcgctcctcttgaagacccaggacattctcggaagacgtggaggctaccttcaaccgcagaactgcatcgaggacatatgtcatttgaaacaactctcctgattctgaggttaacatagtttggtaaaaaatcccaagagatccgccagattgtaaatgcaattttggatggcatctgtaggatccacagtttctcagaaaatgcttttatttcgggttgtaataaataagaactaggatccgagttagcaacttgtaatagattata

SEQ ID NO: 17781 - DNA, 408 bp, Gossypium hirsutum
  Clone ID: LIB3145-054-Q1-K1-A2
cccacgcgtccgagcacacagcattgttgtagcagaaagaatagctctcaactttatgcagcggatgagtggtatagctacactaactaaggcaatggctgatgctgcataccctgcatacatcttagagacaagaaaaacagctccgggcttacgtttggtggacaagtgggcagtactaattggtggaggaagaaatcatagactgggtttgtttgatatggtgttgataaaggataatcatatatcaatagctgggggaatcagcaatgcccttagatctgttgaccagtatttagagcggggaaatcttcaaatggaagttgaggttgagacccggacgcttgcggaagtaaaggaagtattgcagtacgcatcacaaatgaagacttcattgacccggataat

SEQ ID NO: 17782 - DNA, 408 bp, Gossypium hirsutum
  Clone ID: LIB3145-054-Q1-K1-A3
ggaatttgcaccttcaatccctgcaaagaacattacctgtttgacaaggttggatcataacagggcactaggtcaaatctcagagaaactaaatgtccaagtttctgatgttaagaatgtgattatttggggtaatcattcatcaactcaatatcctgatgtcaatcacgcaactgttatgactccatctggagaaaagccggttcgcgagcttgttaaggatgatgcatggttgaatggagaattcataaccactgtccaacaacgtggtgctgcaatcatcaaagctaggaaactctcaagtgcactatctgctgctagtgctgcttgtgatcacattcgtgattgggtccttggaactcccgagggcacatgggtttccatgggggtttactctgatggttcata

SEQ ID NO: 17783 - DNA, 71 bp, Gossypium hirsutum
  Clone ID: LIB3145-054-Q1-K1-A6
aaaaaaaaaaaaaaaaaaaaaaaaaaaaaaaaaaaaaaaaaaaaaaaaaaaaaaattaaaaaaaaaaaaaa

SEQ ID NO: 17784 - DNA, 392 bp, Gossypium hirsutum
  Clone ID: LIB3145-054-Q1-K1-A7
tgggagcggattttcaggtgcttttctgaccgggggtgaacataatgatgagttctatactgatgaacatggaagaataaggacatgaacacatcgctccggtgggatacagggtggaatatgcaatggggaaattatcaacatgagagtagctttcaagccaacacctgctattagtaggaagcagcacacagtgactcgcgagaaaaaagagatagaactactagtccacggtcgtcatgatccttgtgttgcccctcgagcggtgcctgttgttgaggccatggtagccttggtgcttgtggaccaattaatggcacaatatgcacaatgtgacctttttgctatcaatgcggagttacaagaacacgtgagcttatgtttccccaact

SEQ ID NO: 17785 - DNA, 170 bp, Gossypium hirsutum
  Clone ID: LIB3145-054-Q1-K1-A8
gaaaaaaagagagatggcgtctgtaataaaatctgcaatcttaattctgtcggtgtttttatctgtacgcttcaattcgggtggtaaggttgctccaggaacagcccaatgatgaccccaaaaacatggacgctattcctcccattgatgcactcaaccctaccgagttg

SEQ ID NO: 17786 - DNA, 395 bp, Gossypium hirsutum
  Clone ID: LIB3145-054-Q1-K1-A9
aaaagtgtgctgcagtgacagagcgtgttcttgctgcttgctacaaggctctaaatgaccaccatgtcatgcttgagggtactcttttgaagcctaacatggtgacccctggttcggactccccgaaggttgccccagatgttattgctgagtatactgttcgtgccttgcagcgaaccgtccctgctgcagtcccagctattgtattcttgtctggtgggcaaagtgaggaggaggctactcttaaccttaatgccatgaacaagctccagaccaagaaaccatggtcactctcattctcatttggacgtgcccttcagcagagcactctcaagacctgggcaggaaaagaggagaatgtgaagaaggcgcaagatgctttgctcgttaggtgc

SEQ ID NO: 17787 - DNA, 361 bp, Gossypium hirsutum
  Clone ID: LIB3145-054-Q1-K1-B1
cccacgcgtgcgcggagactgaatctcaagggacagaccttcacgggatataccggacgaatctgatgctagcattgcaattactagaacagatgggaaagctggcagtggttaaaggaactctaactgatgatgaaggtgtaaaaatgtctgtgtaattattgatcgaataggctctcagaggcaaggcagcatatagcctattgaccatcataactttaatcagcagcaggctgtcagcgacctgatatgcgttgaacaaccaaacctgacggtatttgtactcaacaattccatggtgctacaatggagccatcattgggatcattgttttcctctttctgaatatgtgctataagaa

SEQ ID NO: 17788 - DNA, 407 bp, Gossypium hirsutum
  Clone ID: LIB3145-054-Q1-K1-B10
cccacgcgtccgcccacgcgtccggggatttgcttcaacagacaacccccccccaaaaaaaaccttgaactttttccgcagtcaaaatgggtatttctcgtgattcgatgcacaagaggcgtgccactggaggtaaaaagaaggcttggaggaagaagagaaagtatgagcttggaaggcaaccagcaaacacaaagctttcaagcaacaagacagttagaaggattagggttcgtggtggaaatgtcaagtggcgtgctctcaggctcgacactggaaactactcgtggggaagtgaggctatgactcgtaagacccgaattttggatgtggtgtacaatgcatccaacaatgagttggttcgtactcaaactctggttaagagtgctattgttcaagttgatgct

SEQ ID NO: 17789 - DNA, 409 bp, Gossypium hirsutum
  Clone ID: LIB3145-054-Q1-K1-B11
cccacgcgtccgggagttgcttgtttacttcattgagcagggcaagaaggaatgttttgcggcatgcctctttgtctgttatgacttaattcgaccagatgttgctcttgaaatggcctgggttaacaatatgatagacttcacattcccgttcctgttgcagtttatccgtgaatataccggcaaagttgatgaacttatcaaggataagatcgaggctcaaaaggacgtaaaggctaaagagcaagaagagaaggaggtcattgcacaacagaacatgtatgcgcagttgctacctcttgccttgccagcacctccgatgccaggaatgggaggaggttttgctcctccaccacctatggggggaggaatgggaatgcctccgatgccaccatacggtatgccacaa

SEQ ID NO: 17790 - DNA, 350 bp, Gossypium hirsutum
  Clone ID: LIB3145-054-Q1-K1-B12
atcgcctccgtgggttctttggactactgaatgaaattcatcgggttatgatactgtttttctcctgtaatattattgtgtcttgcaaccctttttatagtaggtggaaagagctgcctaactctagcttgaagtttatatttataaaaaagctaatagtaatactgtaattataaaagatctttgtcgcctatgttattgaaatatccacactccatatgtattaggatatatcaatatttatgaagcaaacttagctttttccaaacaataaaatatgcataagccagaaataaattttggtttttgctaaaatttatgttttctacgatataattaatattttatta

SEQ ID NO: 17791 - DNA, 367 bp, Gossypium hirsutum
  Clone ID: LIB3145-054-Q1-K1-B2
cggacgcgtgggcaaattttgacaaaaaaaaaaaaaaaaaaaaaaaaaaaaaaaaaaaaaaaaaaaaaaaaaaaaaaaaaaaaaaaaaaaaaaaaaaaaaaaaaaaaaaaaaaaaaaaaaaaaaaaaaaaaaaaaaaaaaaaaaaaaaaaaatatatataaaaaaaaaaaaaaaaaaaaaatataaaaaataaaaaagggggggggcctttttgaaaatcaaaattttaatccccggggttgggataaaaaattttttttttgttggaacacaatttattatcactggggggggtttaaaaaaacctggattggaaaaaacttgggttttaccattttaattcctttgtaaaaaaaccccttttaaa

SEQ ID NO: 17792 - DNA, 411 bp, Gossypium hirsutum
  Clone ID: LIB3145-054-Q1-K1-B3
cggaatttccgggctgacgaacacggacatgcactcgcctgttcagtggaccaaaatggcagtatagcatcacatgccttcatggaaactttgagggagcggatgttcaagccatccttgtctagtatcattgctgaatattcatatgatgcatgtggttaactatggcaccctatctgtgttgctgcaaaaaagatgagggacttgcgggttaattcagttgttacagttacagggaacactaatcatgggatgctaacttcttacgatatccttatgtgagtctgtgcaccaaacctgtctcctgaacttactccggtggaaaaggtgatgacacccaaccctgaatgtgtgacagtataaacaacaattcttgacgcactgcatttaatgcatgatggaaagaaattt

SEQ ID NO: 17793 - DNA, 409 bp, Gossypium hirsutum
  Clone ID: LIB3145-054-Q1-K1-B4
acagaaatggcatgtttactctgcttctgctgaatctgttaacaccaaagcccctacttacactttagagatgtgcatgactggtttggacactgaaaaggctacagttttttacaaagacgaatcgacctcggcagcttcgatgaccatgaagtctggcataaggaacatacttccaaactctgaaatatgcgattttgagttcgaaccttgcggctattctatgaattcaatcgaaaccgatgctatttcgaccattcatgttacacccgaagacggttttagttatgcaagcttcgaagcttggggctatgatctgaaagagttgaatcttgagcaagtggtgcaaagggttttagtttgcttcaaaccaagtaatttctcttgtgccgtgcatgtggatgttgat

SEQ ID NO: 17794 - DNA, 226 bp, Gossypium hirsutum
  Clone ID: LIB3145-054-Q1-K1-B5
aaagcctacagttgtttacaaagtcgaatggacctcagtagtttcgatgaccatgaagcctggcataaggaacatactctcaaacttttgaaatattgcgattttgagttcgaaccttgcggctattctatgaatacaatcgaaaccgatgctatttcgaccattcttgttacacccgaaaacgtgtttatgtatgcaagcttataaactgtgggctatgagcacc

SEQ ID NO: 17795 - DNA, 357 bp, Gossypium hirsutum
  Clone ID: LIB3145-054-Q1-K1-B6
cccacgcgtccggtgacaggacattcccgaaagacatgattcattgtttcagctctttgaccacattgaggacaacttgtattggctgctagtttcctgtgttgtaaatttacctttgtaggcagatagttccatgacagtctccatatagtagcatttactttagatggtagatttagactccaaagttgtttgtaaaattttgtatagatggtttgtaaagcataagctctaggattttcatccattctctatcttacatgttaaactctaatacattttttaaataattaaaattataattatgtgtattattatattaatgggcggccgttttaaaagatccaagctttcgta

SEQ ID NO: 17796 - DNA, 402 bp, Gossypium hirsutum
  Clone ID: LIB3145-054-Q1-K1-B7
ggcaggcaaaacgtacaagtacaggatttgcaatacgggtatcaagacatctctgaacgtcaggttccagggccacaccatgaaattggttgagatggagggttcccacacaatgcagaatgactatgactcccttgatgtgcatgttggacagtgcttcagtgtgcttgttactgccaaccaggaaccaagggattactatgtggtggcctctacccgttttaccagacgtgaggttacagcaaccggcatcatcctttacaagaatggcaagggagctgcctcatccgagttgccacccccacctgttggttgggcttggtcactcaatcaattccgtaccttccgttggaacttgacttctaacgctgctaggcctaaccctcagggctcctacaaata

SEQ ID NO: 17797 - DNA, 401 bp, Gossypium hirsutum
  Clone ID: LIB3145-054-Q1-K1-B8
gttaggtctaaatcaataggtttgggtttagtttaatttaggcccgaaattttgtaaatggacattggactcataaataatttggtttattatttatttctgtttaattttattattttatttttgggtttttggttttttatggatccggacaaatttggcctattacaagctgaatagctaaaattcctggtaccagattgtcttaacaatgttttaaaaatgatgataaacgattcttctggtgttgtcatcaaagatttggaagtttgcttcgggggaagagaaggtgggggcgaatcttcaattatgggtctctttcctaattgtttggagtcatgctgagaagattcttcctcctgaatcttctttgtttcagcttctttcttttctttctccat

SEQ ID NO: 17798 - DNA, 384 bp, Gossypium hirsutum
  Clone ID: LIB3145-054-Q1-K1-B9
aagaaagttaagctttgaatacccagaaacagagtggagaagatgtggttagcggggttggtgaagaacaacataaagggagggaatggcggcgttgggagtctactggttcgatacatgtcgagaactagggcagtaaatgtgagaaagatcaatccaaaagtacccattccggaagctaaatccatcgccagttccctatatgacctcatcaagcaacgtggtcctctcaccgttcccaacacttggactctcgcccaggaagctggaattggtggattaaacagcaaaacacacatgaagataatgctcaaatggatgaggggaagaaaattgttaaagttgttctgcaaccaagttgggtccaacaagaaatttttgcac

SEQ ID NO: 17799 - DNA, 234 bp, Gossypium hirsutum
  Clone ID: LIB3145-054-Q1-K1-C1
cccacgcgtccgcccacgcgttcggacgaaggcacacgcgaccgcccttacggccattgtttggttgccgggttaaaaaataccccgaccaaatcattccgcagggcctgggccaaaaaaccgggaaaaaatcgcgcgggaaatggttcgtcaagcttgtgaattaccaacaccttattgccacgcgcttcacccttgaagtggattttaaagacatggtcaacgcccatgctt

SEQ ID NO: 17800 - DNA, 309 bp, Gossypium hirsutum
  Clone ID: LIB3145-054-Q1-K1-C10
gttcggatcgcggcgacgtgggcggttcgctgcccgcgacgtcgcgagaagtccactgaaccttatcatttagaggaaacggagtgcttgcatcaaagttctgtacaatatgggcattccatattttaccctcaaattagaatcttagtatccattgcacgttaaactgttcaattgaagctatgtttgctattttgttttatattctcaaacatttaatctaaagggtgatgaaatagttagttcgatccattgttaattgaactataattaactaaaccgttagttaaattgagctttttttctgtt

SEQ ID NO: 17801 - DNA, 402 bp, Gossypium hirsutum
  Clone ID: LIB3145-054-Q1-K1-C11
ctttgatgccactgagactaaagctttcaaactccgtttagttggtgatgttacaggagataaggtggatgctgttgttctttgccatatggatacttcaggttggagctctgatcatgtcgcttttcgcatgcttggtattaagcaaggaaacactgtttgccatgtattttctcaaggtaattttgtttggattaatcagccatcggatatcgctgccggtgccatataagtgttgaactgttcgatggagcactcatttgccactacgtatggagactctgatcccgatataagtatttaaaagctagtcttatgttcactaggtttcatggtgtttcgttaatggtgtgactttctatctgtattaagtatcaagtaattaagcaataaaaagtatgt

SEQ ID NO: 17802 - DNA, 232 bp, Gossypium hirsutum
  Clone ID: LIB3145-054-Q1-K1-C12
cagaaaaggaatgctgtggtaattgcacatgctacggagtgtgcatcccgacgtaattacttaaatgaaggaggggagctaaataatgatctttattgtgtttcatggctggtttaataatttaattacttgtttcaataaacgtaaatgttaaatgccttttgtctttttagtatactctaaacttattttactggcatttgtaatttttcttttcaatgatatgattttt

SEQ ID NO: 17803 - DNA, 71 bp, Gossypium hirsutum
  Clone ID: LIB3145-054-Q1-K1-C3
tggaggacccaatcttacatccacgtgcatgcacactgatagctattctatagcgtcacctaaattgaatc

SEQ ID NO: 17804 - DNA, 414 bp, Gossypium hirsutum
  Clone ID: LIB3145-054-Q1-K1-C4
gtttatccctttctctaaattttcttccgatagaaattaattttgttttcccctttttcttcggggtaaaaagaacctttttctcatataaatcattgattagctcgaatttcgatccattatggctgcgaagattcttgccaacttaattgtaatgggctcaggtatattggctcgggccgttgttcaggcataccgtcaagcactttcaaatgccgccaaatctggtgttacccatgagacactacaaaacgcagtccgtagaggtggcaaagtcatgaccgagcaagaggccaggctgattcttggtgtaagcgaggagactgcttgggaggagatattaaagaagtatgaaattttatttgagaagaatgccaagaatgggagcttctaccttcagtcaaaggttcatag

SEQ ID NO: 17805 - DNA, 406 bp, Gossypium hirsutum
  unsure (1)..(406): unsure at all n locations; Clone ID: LIB3145-054-Q1-K1-C5
cccacgcgtncgatttttatttgtgaatccgcatttctatccccgatttcaacggagaagccaagggatctcatcaatgcatttagcaaaggctcggttgtacagtggagcggagagacgtgcgaaggaggccatgtgaggagtcactcgtgggagccctaactctctggcttattctggcacgttccagaagcttccagtgctgctgagatatttttgggtgtattgggcctggggtaatgggttatttgggctattttataaaagaacttggactttgatttaattttgggctatttattttctcttatttttttatatttattatttttaggttataatgggccgggcgaattgggcctattacaaaactcttaaaaaaaaataacggctacctacaagcttt

SEQ ID NO: 17806 - DNA, 228 bp, Gossypium hirsutum
  Clone ID: LIB3145-054-Q1-K1-C6
ggaaataataaattgccttttttttaggtgtaagttttatacaaaaaaaacactcaaaaaaaaatggtataataaaaatagaaaaaataaaaaaaaaacaataaaaaaaaaaaaaaaaaaaaataaaaataaaaaaaaatagggggcgccccctttaaaggatccaaccttacttccccttgcttgcaacgtattattttttttttagggccccctaatttcatttcc

SEQ ID NO: 17807 - DNA, 404 bp, Gossypium hirsutum
  Clone ID: LIB3145-054-Q1-K1-C7
cccacgcgtccggtgaggagacctagtgactataatccgtcgcttgctgcaacacttggtccaagccagcccaatccgaatctaaatctagctgctgtgggtctaactccaggttctgctggcgggcttgagggccccgaccgcatatttgttggtgggcttccatattacttcacagaagcacagattagggagttattggagtcttttgggcctcttcgaggttttgatctagtaaaagatagagaaaccgggaactctaaaggctatgcattttgtgtttatcaagacctgtcagttacagatattgcttgtgctgctctaaatggaattaaaatgggtgataaaacgctcactgttaggcgagcaataccaggtgctacccagcctaaacccgagcaaga

SEQ ID NO: 17808 - DNA, 225 bp, Gossypium hirsutum
  Clone ID: LIB3145-054-Q1-K1-C8
cccacgcgtccggtgcgcttgtcttccaattgcgattgcgttcaagaatatgacgtgtgaaagaaaactgaatatatcatggagtccccagcttttgtgttgtcttggtatgaataaattggaaatgaaaggaagtatggctgtaagccatctgacttgcatgaagggcccttgaaacatccattgaaagtttcaaccattataacaatctttaaatcaaggtca

SEQ ID NO: 17809 - DNA, 344 bp, Gossypium hirsutum
  Clone ID: LIB3145-054-Q1-K1-C9
aatgggaatacctatagggaagctttatttatatacggcactatgatgggtctgcccgtgtgcttgcttgcctgtaaccatggaagtgggcacgaacaatgagcagctgttgaatgacgagttctatatacgacttaagcgaacgatatctaccggactggaatatgcggaacttatggacgaattcatgactgccgtcaagcagaactatggggagaaagctctcattcagattgaacattttgcaaatcacaatgcatttgatttgcttgctaaatatggcacaactgatctgggtttcaatgacgatattcagggaacagcatgtgtggttcttgcatggc

SEQ ID NO: 17810 - DNA, 396 bp, Gossypium hirsutum
  Clone ID: LIB3145-054-Q1-K1-D1
cgagtagcaaaggcatgtgaggcctttgttgaactggcagatgcttgtggctatccgattggcgtgatgccatcagcaaaaggattagtgccagaacaccactctcgattcattggaacttactggggcgctgtgagcacttctttctgcgctgaaattgtggaatctgctgatgcttacttatttgttgggccaatcttcaacgactatagctcggttgggtactcactccttcttaaaaaggagaaggccattgttgtgcagcctgatcgtgtagtcattgctaatggaccggcttttgggtgtgtcctaatgaaggactttctccaagcacttgcaaaaaaggttaaccgcaacccaactgcttttgaaaactaccagcgtatattcattcca

SEQ ID NO: 17811 - DNA, 392 bp, Gossypium hirsutum
  Clone ID: LIB3145-054-Q1-K1-D10
cacaaatgatggataagattagaaggttaaagaagaaattcgaaaacaatgctggtaagggtaaaaagggcgaggatcgaactttctctaaagcccatgagcagaatgcttttgagttgtcgaaaatgatttggggcaaagaagggattagtggaaaagttgagtcttcagctgctaagtcgaatgggaaagccaaggggaataacaaggcagtggttgcattgaaagcagagttttcttcacccgataagaaaacatacgatgcattgtcaacatacgccgatgaagtggtgtctaaaacttctcgtagtttgtttgattagagatttggtgtctctgacatggaagaggcagttgtaaagctccggttggatatggttgatggtgaaaag

SEQ ID NO: 17812 - DNA, 401 bp, Gossypium hirsutum
  Clone ID: LIB3145-054-Q1-K1-D11
cccacgcgttcggtctgattatctggatatggcggatgatttaacaggtgatgtagagttcatgaatgctgatggcaatgggtcagttaaaaaagaggatcttagtaatgatcagagtaatggcgaattgatggcctgtaacatgagtaataatttcttagaggaggaggatgccgatgaaaatgttgtaagtctcgagatttcagacggtgaaccaaacaaaggatcggctaatgatctgggattaggctcgactcacgtcacaaccaccgtgtggtcctgcatagaatccattgatgcgtccacttcaacaactccggaatggcccagctctgagccttgtactgattctatcactcatgtgatttctgccgaagaacacattttaataaacatggtgc

SEQ ID NO: 17813 - DNA, 385 bp, Gossypium hirsutum
  Clone ID: LIB3145-054-Q1-K1-D2
aattgatgttattatcagcatctgccactttttgggttgcccccatttgatgtcttatgagtgaaaggaaaaagaaagggaaaagagaaggatgcaaatgccttccacgtacggttttaagcgtcttcatttactggtcaatttgatatgatctttgtcaagattttgctgttctgtctttataagagtttgcataaaacgtatgcactaatcttatgtattcttttttgttgctagaaaagattgagggtggggtgggggggataaaggagagaaattcatggcgtttgatttaacatcccaaactctggaaaataaaaagaagaaaaggtattcaccttctgcgtatttgagctgctggtcaagagatgagaggcatgggcca

SEQ ID NO: 17814 - DNA, 412 bp, Gossypium hirsutum
  unsure (1)..(412): unsure at all n locations; Clone ID: LIB3145-054-Q1-K1-D3
cccacgcgtccgcccacgcgtncgtataaatctttttttttctgtaattgaaatcaaacagtccaaaacatatcgacgagatttcgccttccaatgtagggaaatcaaaatatttttaatttaatgttatccggaactcaatcaaacgtttaataattaaagaaaaaaaaaacatacaaggaagaatttcccgtaaaagaaaaagacgaatgtgagtcttggaggtggggtccacagtgacaaccaataaggagaagcgttgtgtccagcacctgcggaaagagaaggcacacgtggatgctatctcgataagcgagtttccttttttctccttattcttactgttgagttgaaaaagagaaagaaaagaaactttaaagggagaggattcgagaaagtgcatacgtggtct

SEQ ID NO: 17815 - DNA, 392 bp, Gossypium hirsutum
  Clone ID: LIB3145-054-Q1-K1-D4
ctgccttgaacatggaatccagcctgatggccagatgccaagtgacaagactgtcggaggaggtgatgatgcttttaacacctttttcagtgaaactggtgctggaaagcacgtccctcgtgctgtctttgtggatcttgagcctactgttattgatgaagtgaggactggtacttaccgtcagcttttccaccctgagcaactcatcagcggcaaggaagacgctgccaacaacttcgctcgtggccactacactattggcaaagagatcgttgacttgtgcttggaccgtatcaggaagcttgctgataactgtaccggccttcaaggtttccttgttttcaacgctgttggtggaggcactggatctggtcttggctccctccttttgg

SEQ ID NO: 17816 - DNA, 351 bp, Gossypium hirsutum
  Clone ID: LIB3145-054-Q1-K1-D6
gtcttaataaaatcagatgttagccttgttggcttggtgtcggccttgttgaattcttctaaattgcagttgaagaaggtgttctcttcattcaaggatgtcaaagtcattcagttctcttcaatgcaggatgcttttcttggtttcactgacaagacaagagaagagaaattcaagaaacgtgtaaagcagtatgtaggtatatggtgctgtgttgagaaccacattcctggacacatatattatgacatgtattgggacgagaaaccgggttggaaacctgttccacctaaaaccccagaggacgatcatccacctttctgaagccctctcttcaccctcttatcaaaa

SEQ ID NO: 17817 - DNA, 397 bp, Gossypium hirsutum
  Clone ID: LIB3145-054-Q1-K1-D7
gttattcatgttcttcatctccatgcaaattctatgacctacccaccatttccgcaaatgcaaatggaatcccatcggtgattcctagacccaaacctcccattccaacctttttatgtcattctaatatttcatctacctttcatatatgcctactctttgtttcctcttgggaagaccagctgagatggatgatgataaatttaagagaaggatgaagaagatgaaacgcaggtattccaaccctacgcctgcagtgttgcgtataacaggctctgttgttaccatggtgttgctcttattaaccatctgctgcggtttccaattgaccattgaacctgggcgataccgcgccatcggtgctcgggctttccatgttggcatctccaccataatc

SEQ ID NO: 17818 - DNA, 385 bp, Gossypium hirsutum
  Clone ID: LIB3145-054-Q1-K1-D8
ctacacacggatgtgcctctcacctactatactggacttcttggtatggctggtatgactgcttatgctggattttatgaaatctgcaccccgaagaaaggggaatatgtctatgtatcggctgcatccggagcagttggtcagcttgtcgggcaatttgcgaaactgtcaggctgctatgttgtcggaagtgccggaagcaaagagaaaattgatctgctgaagaacaagttcggcctcgatgaggcgtccaactacacagaagatccggacttggatgctgacttaaaaaggtactttacagaacgcatcgatatttacttcgtatacgtactgggaaagatgctcaaagcagagctgctcaccatgaaaggccatggtcgta

SEQ ID NO: 17819 - DNA, 420 bp, Gossypium hirsutum
  Clone ID: LIB3145-054-Q1-K1-D9
gaaaagctctttctttggcagtgaaaattgaaaatcgacggcgaaaatgttgaggctggcgtcgaaacggttgcttgggctaacgtcaagggagatcccgtcacggcccgttcagattctgccacgtctttaccacgaaaaggtcatcgaccactacaacaatccccgtaacgtcggttccttcgataagaacgatccgaacgtcggcaccggtttggtcggagctcctgcttgtggcgatgttatgaagcttcaaatcaaaatcgacgaggaatcggggaagattgttgatgcttgctttaaaacattcggttgtggatcggcgattgcgtcttcttctgttgctactgaatgggtgaaagggaaaagcatggacgaggttcttaccattaaaaacacggagattgcgaaacatctatc

SEQ ID NO: 17820 - DNA, 398 bp, Gossypium hirsutum
  Clone ID: LIB3145-054-Q1-K1-E10
cttggctttaagccccttcctgctgaagttgttaaagctgttgacccacagctggaaacagtaaataaaaatcttgaagcatattatgatgcatgggacaagttcattaaggcatggattgttatcaaaattcaggacccaagttgtgtctaccggtggcgtctgcaggctgaggttgccatgagggaggctgggaaacctggaatgtctgatgaagaggtggaagattttgtgtcacgttatttgcctgcttacaaagcttaccttccaaccctgtactcggaaggaccaaatggatcagatccaaaccatctcctcgtaattgaaattgatgaagggaggaatcccatcttattttagtatttgatccttaacatgtttagtgcgtctacctgtac

SEQ ID NO: 17821 - DNA, 377 bp, Gossypium hirsutum
  Clone ID: LIB3145-054-Q1-K1-E11
cagaaccacttgatcggagatggcatgtgttaggtttaggttacgatcttaacatcgacaaccgcctgatcgagagtgcagcagtcattcacttcaatggaaacatgaagccatggctaaaactggccatcggaaggtataagcctctatgggaaaggtacataaatcttagccacccatatctccacgaatgtgtcacaagttagacaaatgtgctctgtgctctatttttggttccaattgctcgacctccaatgatataaacccatgaaaaggccgatcgcaaaaattcttttttgacattgttaggagatttgacatatcttttttggtagtttttttttttttggttcatcataagatcttgaaaaggaaaa

SEQ ID NO: 17822 - DNA, 410 bp, Gossypium hirsutum
  Clone ID: LIB3145-054-Q1-K1-E12
cccacgcgtccgcccacgcgtccgataccacccaaacatcgtcgtcttctacactcttctctggtaagttcatcgaaagatcaaatcaagatccctgccaaaatgaacgacgctgatgtatccaagcagatccagcagatggtgagattcatccgccaggaagcggaggaaaaggctaacgagatctctgtttccgctgaagaggagttcaacatcgaaaagcttcaattggtggaagcggagaagaagaagattaggcaggagtacgagaagaaggagaagcaagttgaaatccgaaagaaaattgagtattcgatgcagcttaatgcatctaggatcaaggtccttcaagctcaagatgatgtggttaatgctatgaaagaatcagcatccaaggaccttctcaatgt

SEQ ID NO: 17823 - DNA, 229 bp, Gossypium hirsutum
  Clone ID: LIB3145-054-Q1-K1-E2
gttttgagagtagccactataggcaatcttgagagcttttaagcttggcagtcacgacaagaagaaaagaacaatggaggagcaaagtgagctgtgccacagagatccactagaaacgacttaataattctctttcccttcaatcttttttttttcaattcaggaaatatgattgcaactaagttttctgcttttaatataatcatgagtgcttaattttgttggtttt

SEQ ID NO: 17824 - DNA, 400 bp, Gossypium hirsutum
  Clone ID: LIB3145-054-Q1-K1-E3
atcgctgtaattttttttctcttcttcctttttcttttttaaaagtatcagcaaaattcccaatctaaaaaaatggagtctcctcaaccccaacaacagcaacaacaaggtcctaagaagagaggtcgaaaaccaaagccaaaggaagagaaagaacagcagcaacaacaaagtgctagtaaaatgaaagagggaaagaaagctcaccaacctagcgttgatgagaagtacactcagtggaagtctttggttcctgttctttatgactggcttgctaatcacaatctcgtttggccttctctttcttgccgctggggaccacagcttgagcaagctacttacaagaatcggcagcgtctctacctctctgaacagactgatggtagtgttccgaatactc

SEQ ID NO: 17825 - DNA, 411 bp, Gossypium hirsutum
  Clone ID: LIB3145-054-Q1-K1-E4
atcgctgtaatttctttttctcttcttcctttatcttttttaaaagtatcagcaaaattgcgaatcgtaaaaaaatggaggctcctcaaccccaacaacagcaacaacaaggtcctaagaagagaggtcgaaaaccaaagccaaaggaagagaaagaacagcagcaacaacaaagtgctagtaaaatgaatgagggaaagaaagctcaccaacctagcgttgatgagaagtacactcagtggaagtctttggttcctgttctttatgactggatcgctaatcacaatctcgtttgggcttctctttcttgccgctggtgaccacagcttgagcaagcatcttacaagaatcggaagcgtctctacctctctgaacaaactgatagtagtgtccccgaatactcttgggatt

SEQ ID NO: 17826 - DNA, 189 bp, Gossypium hirsutum
  Clone ID: LIB3145-054-Q1-K1-E5
ttttaattctctatagagtaatacgaacatcattgggaatttttagactctaaatttttggaaaataacttctagttagatcttggtctgctgtaattttgtttctcagcattttcaaatcttctaagacatacattttgtaatcgctttttatcgtgtattctcctgacttgtcaaattattaaatat

SEQ ID NO: 17827 - DNA, 104 bp, Gossypium hirsutum
  Clone ID: LIB3145-054-Q1-K1-E7
ggtgttcattaacttatatccagaatacaagaagttggataaaaaaaaaaaaaaaaaaaaaaaaaaaaaaggaaaaaaaaaaaaaaaaaaaaaaaaaagggcgg

SEQ ID NO: 17828 - DNA, 390 bp, Gossypium hirsutum
  unsure (1)..(390): unsure at all n locations; Clone ID: LIB3145-054-Q1-K1-E8
cccacgcgtccgcggacgcgtgggtaaatgccatttcaatattgttcaagggagattgctctctgggccagtcttgaatcctcaatggtgaaggtattgtactctagatgtttgttcttgattatcttcaagttttatcttctgaaattcgagaagaaacaaaagagattcacaaagtttagaaagtgtctagccaccaaggaaatgtttaacatttagccaccaaagccaaatgctaaatatttccttggtggggagatgctcctaagttctgtgaacttttggggttcgcttcggactacaagagacaaaaacccggggataatcgataatagactntctgagtataatacctccaccgttgaggtctgaaaccggcctaaagagcaa

SEQ ID NO: 17829 - DNA, 401 bp, Gossypium hirsutum
  Clone ID: LIB3145-054-Q1-K1-E9
ctcaatctgggagcctactccatcttccatcggaacgcacataaaggcggtgtagtgcctctccttccaggtgtgtttcttctcccttcttagtgcttcttctgcaattttgtgagccgagatgttctcggctctattaataaattggaacatgatttcttgaaaaaactccgactttttttgaatatcactgatgatttctcctataactaacttatcttgcatcgatgtttgacatttctttatgacggttcgtgaatccccctttaccgtaattgagtgtatacccagggaaagtctaagattaatcgcatgaagacctgcataagcttctgctgtaaaagaagttgaaacatttgaatttaagaccgtcttcgtaacaagaattactcccatctgat

SEQ ID NO: 17830 - DNA, 378 bp, Gossypium hirsutum
  Clone ID: LIB3145-054-Q1-K1-F1
cccccacctctttatatatatagcaccaccattatagtctccaaaaaccagtaagaatcaaccacttcgataatggccatgcataacctagttcaagctcttgtttttgttgctgtttttttcaacacattggcacccacagtcgcaaatgttgaaggggatgctttgtatgcattgaggagaagtgttaaagaccctaaaaatgtgctcaagagttgggatccaaccttggtggatccttgtacttggtttcatgttacctgtgatgctgataatcgtgttactcgtctagatcttggaaatgcaaaattgaagggcagattggtacctcagttgggaaagcttgaacgtcttcaatatttagagctgtatatgaac

SEQ ID NO: 17831 - DNA, 406 bp, Gossypium hirsutum
  Clone ID: LIB3145-054-Q1-K1-F10
cttgaaacttcaagccagaatgcaaaatcagttagtgtgcatcctattcccttagattccatcaaccatgtgcatgggaaaagcattcctatggttagctgtggatccccaaatgtttctggctctggatcatcaaaagagcatcataatcaaccttttccagggcaactgatcaaacggagaaagcggcaccgaaggaagcatgttcaaaaccaagaaccttgtctgatgaggggtgtatacttcaaaaatatgaaatggcaagctgcaataaaagtcgacaagaaacagattcacttatgcactgttggttcacaagaagaagctgcccgcttatatgacagagctgctttcatgtgtggaagggagcctaacttcgagctttcagaggaggaaaaacaagagc

SEQ ID NO: 17832 - DNA, 373 bp, Gossypium hirsutum
  Clone ID: LIB3145-054-Q1-K1-F11
tcgatacactctggattctctcatttttctttgtatggagaagtttttgagttttgaaagaagtttggcaaacaatggcggagaagcaacaagcgggaagagcgctggattctctcgcgtcgcccttaatgaaagaatcctttcttcgatgactcgaagatcgattgctgctcatccttggcatgatttgaagattggacctggtgctccagcagtttttaactgtgtggttaaaattggaaaaggtagcaaggtcaagtacgagctctacaataccagtggtcttataaaatgcgagatggatgacaagatttttgctgtatgtgctgatgatccctagtttcgtcattacacagacatcaaaacagttcct

SEQ ID NO: 17833 - DNA, 390 bp, Gossypium hirsutum
  Clone ID: LIB3145-054-Q1-K1-F2
cgaaagacgagaggtctggcgatggcgacgacggtggtgaagagcgcgttgcaggcgatccgtgagaggggtctccgcactttcttaagggagctcaaggatgatggcttcacgaaatgcttcttcgatggaaaccttctgcaaaccaaaatccacaacataggggcaacagttgtgggtgttgataaatttggcaataagtattatgagaaactcggagacacacaagctggaagacacaggtgggttgaatatgcgaaaaaggatcgttatgatgcttctcaggtaccaccagaatggcatggttggcttcacttcataactgaccataccggtgatgagcttttgatgcttaaacccaagaggtacggggtggagcacaaggagaac

SEQ ID NO: 17834 - DNA, 406 bp, Gossypium hirsutum
  Clone ID: LIB3145-054-Q1-K1-F3
tttttccatttttctcaagtatatgatgagattacaaaatttatatacgaccattggtgaaactatgatttaatcttggttggagcagtgaccgaatacattctctattttctaaatttgtctacaatatgaagatttactaacaagttgttatcctcttctgcagtccaagaaaaaaaaaaagaatagtagcaacgctgattggtaagatgcaaagttggaacatttttgtgttttgcttcttagccatatagcctgacttggattgacattgtttgctgtttctgtaaaagttactccattctagttttctccatgagccgtatgtgaaagccatctggaaactgtaaacctggagatcgaaatatatttccacctttgattggttcccacctgaaagattcat

SEQ ID NO: 17835 - DNA, 355 bp, Gossypium hirsutum
  unsure (1)..(355): unsure at all n locations; Clone ID: LIB3145-054-Q1-K1-F4
acanaatgttcatccttggtgaccagatgttgcagagtgatcctagggtgccaatattgcctattgagagaaagtggaaatccaacgttgaaactgctcccaattgtccacgttgtgcctctgccaacaccaaattctgttattacaacaactatagtttgtcacagcctatgtacttttgcaaaggctgtagaaggtattggactaaaggtggttcccttaggaacgtgcctgtcggtggtggctgtcggaagagtcgaagaggcaagtctagaagggaaagggtcgagaaaagagatcaaatttccatgactgatagtaagaattcaactagttcttctgatggggattcggg

SEQ ID NO: 17836 - DNA, 415 bp, Gossypium hirsutum
  Clone ID: LIB3145-054-Q1-K1-F6
ggatgtcaaaatttgttgaagatactcagtgtggagcaagcttgacaactaagaaagaagattcctcttcaatcagtgagggatccaatcatcaattccagacttgcagtccggtttcggttcttgaaagtagcagctcgtgttcaggaatgaaaccattgcctcgcagtcctgaaacgtctgcccctgggaaacgcggacgtccacgaagcaaacgtcctcgtctggccactttcaatcatcttccaggagttcagatgacctccccagcttcatctgtcaatgagaacgacattccccagccatttgctgtcccgaaggtgctgtcggattctgagaactatgctgagtcacggcttctgatcaaattaccgaaacaagtcaatccagaacataagaagaagaagttatcggt

SEQ ID NO: 17837 - DNA, 391 bp, Gossypium hirsutum
  Clone ID: LIB3145-054-Q1-K1-F8
cccacgcgtccgcggacgcgtggggttttattgcagccggaacccgagtttcgacctcccatgtctgaggtcgtgcaagcgttagtgaggttagtacaaagggcaagtgttgtgaaacggcgaccaagcgatgaatcgggattcgggtataagactccagatcatgaggcaggggacttttcattctaaggtctgggaaaaccatcaatcccgtaaatcgaaagagaaatcaagtttatgtaattatatgtctcatacattgacactttttttaaaaagtttattatagtgtttacagtgcaaatatataggtgtattattggacaacctgatgcacattcatgttttttgcatcatagtaataaaataataattttctgtagtttcaagc

SEQ ID NO: 17838 - DNA, 403 bp, Gossypium hirsutum
  Clone ID: LIB3145-054-Q1-K1-F9
cccacgcgtccgcccacgcgtccgggaaaagatggcgatgcagcagggatgttatccccgatcaaaaatattgtgcacgacacatgcacagaggtgctagaaaacagactgaggtttctcagcctgttgcagttcccagtgttggtgattgccgtccacctagtagattaacaacagcatacaaagcagcatgtccagccctgagcaccagtctgtctatttcgattccaaggtcgcagcacattgcagaagatgaaaagagtacgagcagcagcagtgagacgaccatcagtgacaccaacggttactgtcttcgagaatagtaacttagatgtgatatttggaaagttgtgatgattgaggtgtttgttcctaatgacaaactaagatataggtatcagtg

SEQ ID NO: 17839 - DNA, 407 bp, Gossypium hirsutum
  Clone ID: LIB3145-054-Q1-K1-G1
gtgaatttgatctggagaatattgttacagctgcaaaagttcctggcaggaaggttaatgtgttgcttcggatcaacccggatgtggatccacaggtccatccatatgtcgctactgggaacaagaactctaaattttgtattaggaatgagaagctgcagtggtttctggatgccgtaaaggcacaccctaatgagctaaagcttgttggggcccattgtcatcttggttcaaccattaccaaggtggatatattcagggacgctgctgttctcatggtcaactacattgatgaaatccgtgcccaaggtttcgaggtagattatttaaacattggaggtggtttggggatagattactaccatagtggtgccgtccttcccacaccgagagatctcattgacact

SEQ ID NO: 17840 - DNA, 284 bp, Gossypium hirsutum
  Clone ID: LIB3145-054-Q1-K1-G10
acgctaatgggttgcccacaaccataaataaattatcagccctctggttatggtgacactggaataaaattttgaaaactccaacaacttggtctgaaataatattgccaaattgagcactcaattaatcaatgtatatggggagtggtgggttgcagatttcttgacaaggcatacattgaggctgtaaaacataatgtgaaagctgcaaatatatggagactaatcagggcggaccttctggaggaaccaaaattctttactccgaattgcaacaatatggg

SEQ ID NO: 17841 - DNA, 78 bp, Gossypium hirsutum
  Clone ID: LIB3145-054-Q1-K1-G2
cccacgcgtccgcttttgttctcgttaaggaaattgtatgttctaagcagaatgtaagcctaatatatgtttatattt

SEQ ID NO: 17842 - DNA, 362 bp, Gossypium hirsutum
  unsure (1)..(362): unsure at all n locations; Clone ID: LIB3145-054-Q1-K1-G3
gcaactgttttacacgtttgtaggtacatgattgagcacgtcactgacgtggcgtggtggagcagcgcacgttgcggagaagtggcattcggcgctcgagggaggtgtgagcagccgacctaggtgcggcgcacctaaggttttctgcttttttgatggttgtcggttagtgctaagtgggctggggttttgggcctaggttttttagtttttgtgttgggtgttttgggctgtaatttagactttgtttttatttgtttttttggtttatgggccccgagctaaattgggctctacacttgaaatttgtggtcgaaccaattgattctattttcaaaaacataaaaaattccatggnnaat

SEQ ID NO: 17843 - DNA, 222 bp, Gossypium hirsutum
  Clone ID: LIB3145-054-Q1-K1-G7
ataaaaaaaatactcactataattctactttgatcacataaaaataattttaaggagcgggcggcctgtctaaaggacacaagcttaaccacgcttacattcaaaaaatatttccttttatattgtgcccccattattcatattctctggcgggtgtttcacaaccgggagactaagaaaaccccgcgcgaacccaacttaataggccttgagaagatcccc

SEQ ID NO: 17844 - DNA, 360 bp, Gossypium hirsutum
  Clone ID: LIB3145-054-Q1-K1-G9
ttagctccttgaacactttccaagttcaggaattgcatccatgttgatatcataggacaaattgtcggtcaagcgccaagtgattatcaagttgccttgttaaattcgagatgcctctcattcgccctgtgtacgtaggtgtggaaggatgtttcatttggcagttaggcatgtttaatgtgttcgtacttattttccctgttatgagattcttcaggtgaaatggcagcttggaaataagaaataaaaaaaggacaaatattaaatttatatatgaattttgatttaatgtgtaatttgatacatgaattttgatttggtgtatttgtacacattaaacttgaattgtagttgatatgt

SEQ ID NO: 17845 - DNA, 402 bp, Gossypium hirsutum
  Clone ID: LIB3145-054-Q1-K1-H1
cgatatgttaccatcctggctccgaccgactcgccgaacaccgatgggatcgatccagattcaagctccaatgtttgcatagaagactcgttcatttcaaccggagatgatcttgttgctgtaaaaagtggatgggacgaatacgggattgcttacggacgtcccagctctcacatcaccatccgacgtgtaacagggtcatccccatttgccggtatcgcagtgggaagcgaaacctccggcggagtggagcacgtcttggccgagaacatagttatttacaactccggtatcggtgttaacatcaagaccaacattggcaggggagggttcataaagaacatcacagtatctcaagtgttcatggagaacgtaagaaccggtatcaaaatcactggcgac

SEQ ID NO: 17846 - DNA, 392 bp, Gossypium hirsutum
  Clone ID: LIB3145-054-Q1-K1-H10
gggggatccgtcgggaatggcgttcgtatcttgcatggtagaagacaagaatgcaaatgggccatcgtatgtggagtttcttgtacatattcatcggcaaatccaaatgaaaatgtcttgataagtttcaagcttcctcaacaacaggtattcaattttgatttgggattttgcatgaagaagaaagaatccgagtggcctcctgttcggagtttcttgtacatatactgtgcggcgactggagtgaaagttttacagaatgttttatgctttttacagttggcttcacaagtagtgatggcacttggagatcaaaagctgcacacaaacattgtaatttcatatcttatatcaattatttatttcctggaaccccaattttgagctaaaca

SEQ ID NO: 17847 - DNA, 379 bp, Gossypium hirsutum
  Clone ID: LIB3145-054-Q1-K1-H11
cccacgcgtccgcttttataagaatctctaaaggcggatgggttcctcttattctctctgtgatcttcatgctcatcatgttcgtctggcattatggttctaggaaaaagtatttatatgatttgcacaacaaagtacccatgaaacaaatcctgacactgggtcctagtctcggaattgtccgagtcccagggataggccttattttcaccgcgttggttagcggagttccggccacatttacccgttttttaaccaatctaccgacattttatcaagtggctgtctttgtctgtgagaagactgttcttgtaccatatgtccctcaaaaagaacggtacctcataggtcgtattggtcccaaatctttccgaatgta

SEQ ID NO: 17848 - DNA, 353 bp, Gossypium hirsutum
  Clone ID: LIB3145-054-Q1-K1-H12
cccacgcgtccgcccacgcgtccgcagcttccaattatcttaaagcctgccatataatcatataaccaggctccgtcgtggtactcttcggccaccacaatgccgaaaatcgccttgggaacaagccaagaggctgctcagcctgactgcatcaaagcccttgtggtcgagtttatcaccactttcctcttcgtattcgttggagtaggagctgccatggccgccgatgagtcgggggcaaatgcgctggtgggattgtttgctgtggcggtggctcatgcccttgtcgtcggcgttatgatatcggccggacacatattaagcgggcattttaaaccaacccgtcacgcttg

SEQ ID NO: 17849 - DNA, 324 bp, Gossypium hirsutum
  Clone ID: LIB3145-054-Q1-K1-H2
ttttaaaaaaaaaaaattaataaaaaatttttaaattaaaaaaataaaaaaaaaaaaaaaaaaaagataaaatgtgtgggtacaaataatagaaaattaaaattattaggggcggccgttttaaagaaaccagatttacgaccgcgtccatgcaacataataacttttttttatggccaccaaaattaaattgattggccgtgtttttacaaatttaggaatggaaaaaccttgggttatccaaacttaattgctttgaagaaaatcccccttttaaaaggttttgaaaaaaaaaaaaggccctaacatatcgaccttcaaaaa

SEQ ID NO: 17850 - DNA, 402 bp, Gossypium hirsutum
  Clone ID: LIB3145-054-Q1-K1-H3
cccacgcgtccgcaggggtaaaggagctagttcggccagaaaactaaaaaacagggaagctagaaaatcgagtaaaatgaacgaaaactcgttttgatgaagaattagcgatggatcatagatctgttgaaccaattcggctaggaaacaagaaggtgacaagtgacaactctacttggggtgttgaaaactaaattcgaaggcagattcatgcaaatatacactctcttttgtcagtctttatcaactagaaagaataatacatatgctgtacatgctttggcattgccattaatgaccattgatattttatggaacacttgtatgttttatgccattactgttagaaaagggttaaggggtttttgtaaggaattaggcacttgttctttgtaacctcat

SEQ ID NO: 17851 - DNA, 315 bp, Gossypium hirsutum
  Clone ID: LIB3145-054-Q1-K1-H5
acgcaattatactgaatactggattctatattttttatgtatggaagcccgcatgggactgggtctggctaataatgcactcatacgcatctcccaagtctaattaaaaaggcttgctgagattcatgttttctctgcatcaagtattgaacattgattggacatacctcgtgactaaaacagatatcaactggcctacagttaaaagttacctggacatatactgggcagtgactggaatgcaaattttacaaagacgttggggaaactacatatggccttttctttatatgaagcaactctttgctttttgaa

SEQ ID NO: 17852 - DNA, 406 bp, Gossypium hirsutum
  Clone ID: LIB3145-054-Q1-K1-H7
gtctgtctcacctgaagagaatattgatgtcacagaaacaatcggtcctgctatgatatttctgccttccgaaacaaccagtgaggatttggatagtatcgtggcttgtaccaaacatggagttgctttgactggggctgcagcaaccggaacaatgggaccgatcgtagggttagtggacatcggtgtattagaggattcatactattttcgtgtctcccttcctggagtatcaccggataaaaaagacttcagctgtgacatcgagtctgatggaaaagtgctaatcagagggataacaacaaccggtgagaaagttgtagtcaagaactttcaagtctttcatatgctcacacaaaatctatgcccatctggacacttcactgtttcattcgagctaccgggc

SEQ ID NO: 17853 - DNA, 106 bp, Gossypium hirsutum
  Clone ID: LIB3145-054-Q1-K1-H8
cccacgcgtgcgaccacgcgttctgttcttttgggacgatatggaaatgattgggcatgatacattttacaacgagcttcgctttgccccagaatagcacccggtt

SEQ ID NO: 17854 - DNA, 429 bp, Gossypium hirsutum
  Clone ID: LIB3145-055-Q1-K1-A11
cccacgcgtccgatatatatatacatatacatgcgtgtaatggaaatcgaaatggagaaagaaaagttgtgcatattcaactcaaagtttagcttatttatgcaagtttacaaagtttgaaaaaggaaaggaaattgtagaaaataatgatatgatttaggtgctaaatcagcagcaataaaagaattagtggctaaacaaagtagtaagagagaagatgaaactctagaaaacttagggtttaaaaaaaacctctagtttctatatattaattcaaaaaaaaaaaaaagaatcataatatgactgtgaagcctacaacttatttatataggctttcttcttgcaagttcagttactaggctttcttacaaataaagttttattctagccctaggtttaaaccctaaagataactaataacctccggca

SEQ ID NO: 17855 - DNA, 429 bp, Gossypium hirsutum
  Clone ID: LIB3145-055-Q1-K1-A12
cccacgcgtccggaaaagcaaaatgaaacaaaatagtaagaccagactcaagaatcttcgtccaaacccttcagttaccagagaaaccaaaaacgcccaaatcccttccttgttcagacaatcgaagaagcagacatgggagggggattgaggtttgctttcagacacaaatgtagtagaatcctcaagccagagacaataatatagtcaagaagagctacgatggttgctggaaatgatggtcggaatctgctaactcactaactctcgacagtgcatctttaacccatatgtggttttccaaacttctcatcgccattgcatgcgcagctgagtttcctcctctggcaacaaactcgaatcgacaagctaagaagttccttgctagaaccctcacatcccaggtaatcgatctaatattcgagtaat

SEQ ID NO: 17856 - DNA, 269 bp, Gossypium hirsutum
  Clone ID: LIB3145-055-Q1-K1-A2
ctttagacttaatgaacaagcacatatatgaatcatacgttgtttaaagtagttgtgtgatgaaatcaaaatttccataccagatcattactaacaacgccttttaatgtttttggtggatgctttttcatattgttagtctggccatgaacaaaatctgacataccaaatgaagtaagcataatatgagcctgcacaccttttgctggacagaaattatttcttatattccttccatttaatctattgtttggataactatcaaatac

SEQ ID NO: 17857 - DNA, 393 bp, Gossypium hirsutum
  unsure (1)..(393): unsure at all n locations; Clone ID: LIB3145-055-Q1-K1-A3
tttttgtggcgaggttctttgtcctgatgaggtatatttcttttcatggcgataagttggattcctagaagtgaccacaagcaacccatataagtattaacaaaagaatatctgcactggttcatactgataccttnggttcgaaaaccgcggacatnttcctgaaaatgtgatggcaatcttcttcccaataaccacaacgaggacaaacggcgtccgtcactattcttctatatcttagattggctagagtagagatgtaattccatgcaatacgccagattatgactgtaatcttagatggtagttgtagattctatagctttccaaaaaaacttcttattttcggtctgtaataaataattgctaggctccncnnnnaaaaaanncaat

SEQ ID NO: 17858 - DNA, 285 bp, Gossypium hirsutum
  unsure (1)..(285): unsure at all n locations; Clone ID: LIB3145-055-Q1-K1-A4
gtgcttgccggatatgacaagttgcagctcattgtgttcggaaagaagtacggatctgggggagcttaatatctctttttcattttttacttgtttatgttaagatggtgatgaaaagctcgactacccagaaatttatttcggtcaacaacttcattaaataattctagtttagtcagagagatgagagaggagtgtntaaaccctaactatttatattctcatatggaaattttgattaagaaatactggtggctaatggccccagcccctgtcggattttta

SEQ ID NO: 17859 - DNA, 427 bp, Gossypium hirsutum
  Clone ID: LIB3145-055-Q1-K1-A5
cccacgcgtccgcccacgcgtccgcccacgcgttcggacaattcaaacgattgcttttcttgcacatttgaaaggaaatgggatggatgggccttatttgattattgctcctttgtcgactctttctaattggatgaatgagattgcaaggtttacgccctcaattaatgccattatttatcatggaactcagaaagaaagggatgagattcgtaggaatcacatgcctaaagtaattggccccagttttccaatagttgttacttcttatgagatggcaatgagtgatgcaaagaaatttttgaggcattatgagtggaaatatgttgtggttgatgaggggcacagattgaaaaacttccaatgcaaattagtgaaagaattgaaacacttacgtgctggggcataagctctcttaactggaaca

SEQ ID NO: 17860 - DNA, 320 bp, Gossypium hirsutum
  unsure (1)..(320): unsure at all n locations; Clone ID: LIB3145-055-Q1-K1-A6
agaggttggaccaggagatgctcccacgttctctaaagcaaaatatgaagggaggtggctggatgttggtgacaccactcgggaccagctgcttgctatcaaaagggtgtctcttccgaggaaagcgaaggtgacacttgaatatgctgctcccactgctgctacggagaaggcatacactntgtatttcatgtgtgattcttacctaagttgtgatcaggagtatagcttcactgtcgatgtgaaagaagccgctggccctggtgaagacagtggctcanagtaagctcatgtgctgctcatgtttttttaaattcctg

SEQ ID NO: 17861 - DNA, 348 bp, Gossypium hirsutum
  unsure (1)..(348): unsure at all n locations; Clone ID: LIB3145-055-Q1-K1-A7
acgggaacggacagccagcactcctctatctcgttccttgtacactaggagttacagttgtattagctgcaataagaggagatttgaaagcgctctggggttacagcagcaagtcatctgccatgataaatcccactgcagaagtttgaaacctgtaattttcttcaaagcggcaatcttgatcatccaaaactacctaatggtttaaaagatggtttcggtgctatctatacaaggagtacagggtcgatgaaaagtcacggctcaagttttttaagcaaaaatgtggggcagacagatgttacatatataacttccactttaagggaatgngcccactttttatat

SEQ ID NO: 17862 - DNA, 406 bp, Gossypium hirsutum
  Clone ID: LIB3145-055-Q1-K1-A8
cccacgcgtccgcccacgcgtccgcaattcgtgaattagatggcaagaatggctggagagttgagctttctcataattctagaggaagaggcggacgtggaggtggtcagggacgctctggtggttctgatttgaagtgttatgagtgtggtgagcctggtcattttgctcgagaatgtcgcatgcgtggtggttcaggaagacgccgcagccgcagccctagatatcgtagtagcccaagctatggacgaagaagttatagtcctcgtgcccgatctccaagacgtcgcagtccctctcctcgtgggcgtgggcacagcaagtcaccaccatatcgtggtcgtgaggaattgccatatgctaatggaaatggtgcaagggaacaccgacaaagcaggagctaagt

SEQ ID NO: 17863 - DNA, 286 bp, Gossypium hirsutum
  Clone ID: LIB3145-055-Q1-K1-A9
atctcagtcgaatcgggaaaacccaccatttacacacctttttgctgtccatttctcttccaccaaaccaataaccagacccagagaaaagatggccagcaaatccgagggtaaggaacctgtgaacgaacaagtggttgcgaatatgtacggagctatgagatccgaactaaatcaaatttattctaagatcactgagttggagatggaagtgagcgagcattcgctagttataaatgccattcagccacttgaccagtcgaggcggtgctaccggatgattgga

SEQ ID NO: 17864 - DNA, 418 bp, Gossypium hirsutum
  unsure (1)..(418): unsure at all n locations; Clone ID: LIB3145-055-Q1-K1-B1
agcgcatcttattacccgtgcatggatatactgtatgagtgctatgaagatgtagccagcggaagtgaaatccgcagtgttgtattggctgggcaacggttttatgagaaggatggtctccctgctttttcaatgggaaaaattgatcagacacgcatgtggaaagttggtgagcgagtccaaaaggcacgcccatctggtgatttatggccattgtattcttttactgccggngtctatgtggccttgatgatggctcagatcgagatattgaggaagaaaggacactcgtactctgagatcatcaacgagagtgtgatagaggcagnggattccttaaatccatttatgcatgctcgtggaggttccttcatggttgataactgctctaccacagcacgattgggatccacgaaat

SEQ ID NO: 17865 - DNA, 430 bp, Gossypium hirsutum
  Clone ID: LIB3145-055-Q1-K1-B10
ggcatctattgtagatgatacatatgactcatatgcaacatatgaagagctcattccatatacaaatgcaattgagaggtgggatatcaaatgcatagatgaacttcctgaatacatgaagccgagctacaaggcactattagatgtttacgaagaaatggaacaactggtgcctgagcatggaagacaatatcgtgtcgaatatgcaaaaaatgcgatgatacgacttgctcaatcttaccttgtggaggccagatggactcttcaaaactacaaaccatcattcgaggagtttaaggctaatgcattgccaacttgtggctatgccatgcttgctattacatctttcgtcggcatgggagatatcgtaacaccagagacctttaaatgggcagccaatgaccctaagatcattcaagcttccacaatt

SEQ ID NO: 17866 - DNA, 279 bp, Gossypium hirsutum
  Clone ID: LIB3145-055-Q1-K1-B11
cggacgcgtgggtttgtaggctttaaatatatcaattccattaaagttgccaaaaatgtgagcatcccaccagatgctcctgggtgcaattgtagaggatagtgcacatatccaaggtcatgttcttgtgctcaacttaatgggggtgacttttcatatgtttctcgtgatgggtgcaaggcctgagtgcgttaaccgttcatctcagcaggggcctaaaaataccagacttggggtctatcgcactaaaaaaaaaaggatgggcaggttagatctttt

SEQ ID NO: 17867 - DNA, 380 bp, Gossypium hirsutum
  Clone ID: LIB3145-055-Q1-K1-B12
gggatgcgtgggtaagtaggcttattatatatcaatcacataaaagttgccaaaaatgtgtgcataccaccagatgctgctgggtgcaatactcgaggatagagcacatatgcacggttatgttcttgagctaaaattaatggtggtgaattatcatatgtttcacctgatggaggcacgtctgattgcttatgccgtccatcttacatagtactaaaataccagattggcgcttatcaagctagggaaagagaatgggaaattacaactttaagactctattgctctaggtgcaccacgttgatagcatgtcacgcatcataaagaacaatggtgcattataagatgtttgagaaaatgactactattatgcgattgat

SEQ ID NO: 17868 - DNA, 427 bp, Gossypium hirsutum
  unsure (1)..(427): unsure at all n locations; Clone ID: LIB3145-055-Q1-K1-B3
ttccgaaaaaaagaatggcgttggtattaaaatcggcaaccttaattctgccggggtttttatctgtaagcttcagttcgggtgttaggttgctccaggaacagcccaatgatgacctcaaaaacatggacgctattcctcccattgatgcactcaaccctaccgagttcaatggacccggtgttggcattcacgaagatcatgttgtcccaaaaggttccgaaattggtactcttggttttggttttgaaggtggtcctgaaaaatgttgttcttctggatgttccggtaattgtaatcctggtggtttcgttctaccatttcctcaaattccagaaatcccaagaattccacagatcccacagatcccacanatcccacaaattccactaatcccacagatcccacaagtcccacaaatcccact

SEQ ID NO: 17869 - DNA, 401 bp, Gossypium hirsutum
  unsure (1)..(401): unsure at all n locations; Clone ID: LIB3145-055-Q1-K1-B4
ggatatggttggaagcagcacttcccctcggaatcatagctggaatgctctgcgttatgggcaatgctcagtatttcatccacaaagcttatcacggccggcccaagcacatcgggaacgatatgtgggacgtcgccatggaaagaagggataagaagctcttcgagaacctctcttcctccgattgatccctttttagttttcttctggaaacttggtcgatgttgtgagagaagaaataaaaagtgctctatgatattctgtaatgctgaagaagactaaagagcagatgaactcgagtattttctttttcatggtaatttaagcatgaacttctgaaatgttgcacttttgacacactntctaatgtttacgctggtggtgtattggagatttgttgc

SEQ ID NO: 17870 - DNA, 432 bp, Gossypium hirsutum
  Clone ID: LIB3145-055-Q1-K1-B5
gagaaaaccaaggcaaaggagctagtttaaaaccccccggcctcaatcttttggtctaaaattggcttttagtttccgttatccgtcttcttctctctttcacaaagtgtatatttttatataaaataataatttgaagtaattcccaattccccaaatctcaatcccaccaaaccctacaatgaaaaccctaattcattttaccctttaatttctgatttgctgctctcaaaattctattctaaagttttgtccacgtattattctcctttttgtttttctttaatatttcaatatttgcatatatatagatagagattaaggatttttgggttaggggggggaaatctttgaaggggaatttgagagaaacaaatggaagggataccacacccgataccgagaacggtagaagaggtcttcaacgacttt

SEQ ID NO: 17871 - DNA, 153 bp, Gossypium hirsutum
  Clone ID: LIB3145-055-Q1-K1-B6
gggttagtttgggtttgggccattaggtctaaattttgggtttttcttgggttaggtctaaataaataggtttaggtttagtttaatttaggcccaaaaatttgtaactggacattggattcataaataatttggtttactttatttctgttt

SEQ ID NO: 17872 - DNA, 181 bp, Gossypium hirsutum
  Clone ID: LIB3145-055-Q1-K1-B7
cccacgcgtccggattttgccctctttacttttattttgctcaataatggtggttgggattgtgagggaggatcttagctaagcaactcacttcatgtctcctgttgtactgtgttttccctataaatagatgaaatggatagtgtagttgtaatggtttataaaactttatgaaggtaat

SEQ ID NO: 17873 - DNA, 382 bp, Gossypium hirsutum
  Clone ID: LIB3145-055-Q1-K1-B8
gtggcccctggagcaaaactggtggacttggtgatgtcctcggtggacttcctcccgcaatggctgccaaaggacaccgtgttatgacagtgtgtcctcgctatgatcagtacaaggatgcatgggatacaagtgtgttagttgatctaaaagtcggagacaaagttgtaactgttcggttcttccactgctacaaacgtggagttgatcgtgtctttgtcgatcaccccatgttccttgagaaggtatggggcaaaacagcatccaaaatctatggccccagagcaggtttggactacgaagacaatcaactgcggttcagcttgttatgccaggctgctttggaggcacctagagttctaaatttaaatagcagtaaaaa

SEQ ID NO: 17874 - DNA, 397 bp, Gossypium hirsutum
  Clone ID: LIB3145-055-Q1-K1-B9
gcataacttacatactgagctgcattaccaaacattctcctcagtacaaggttttaatgctaggacgagtcttgggtggcattgcaacttcccttcttttctcagccttcgaatcttggcttgttgctgaacacaacaagcgaggttttgatcaacagtggctttctataacattcgcaaaggcaatatttcttggaaatggattgatggcaattttatctgggttgtttggtaatgtactagtggatagtttgaaattaggtcctgttgctccatttgatgctgcatcttgcttcctttcaattggcatgataattatactgtccacatggactgaaaattatggtgacccttcggaaaataaggatttgcttactcaattcaagggtgccgctgc

SEQ ID NO: 17875 - DNA, 432 bp, Gossypium hirsutum
  Clone ID: LIB3145-055-Q1-K1-C1
cccacgcgtccgcttgcatcttacccaattgacactgttcgtagaagaatgatgatgacttctggtgaagctgtcaaatacaagagctcgctcgatgccttctctcagatcttgaaaaacgaaggtgccaagtctctattcaagggtgctggagctaacatccttcgtgccattgccggtgctggtgtgctcgctggatacgacaagttgcagctcattgttttcggaaagaagtacggatctggtggtgcttaaatttagggtggtactatctcccttcttttgttatgttttaggttttaaagatggcgatgaaaagctcgacacattgagaaatttatttcggcaaaaaaattcattaataattcagatttagggggggaaattactccctaaacgatttatacatttgggatgtgaaattttgattta

SEQ ID NO: 17876 - DNA, 428 bp, Gossypium hirsutum
  Clone ID: LIB3145-055-Q1-K1-C11
gctaaaaggcttgagctttcagccaaaatgggtatttctcgtgattcgatgcacaagaggcgtgccacaggtggcaaaaagaaggcttggaggaagaagagaaagtatgagcttggaaggcaaccagcaaacaaaagttgtcaagcaacaagacagtcaggaggattagggttcgtggtggaaatgtgaagtggcgcgctctgaggctcgacactggaaactactcatggggaagtgaagctgtgactcgtaaaaccagaatattggatgtggtctacaatgcatctaacaatgagcttgttcgtactcaaactttggtgaagagtgctattgttcaagttgatgctgctccattcaagcaatggtatctccagcactatggtgtcgaccttggtcgcaagaagaaaacacttgcagcagctaccaag

SEQ ID NO: 17877 - DNA, 427 bp, Gossypium hirsutum
  Clone ID: LIB3145-055-Q1-K1-C12
cccacgcgtccgcccacgcgtccgggagtgataaacaaaagaagtgtttccagaagtttcagatcattcacttttgaaggagtttgtacgttcaattcgtgcccgcaggcggtattgggccaggagctatgctggatggaggcagtttactgcagcacaacctggtgctgcacatgttgctttagcatctctagagcaagctggccgaataaattttatgataacacagaatgttgacaggctgcatcatcgtgctgggagcaacccacttgaattgcatgggactgtttatagtgtgatttgcttagattgtggtttttcattttgtcgaaatttatttcaagatgaagtgaaggcccttaatccaaagtgggcagcagcaatagaaagcttggactatggtaatgctggatcagataagagcttt

SEQ ID NO: 17878 - DNA, 436 bp, Gossypium hirsutum
  Clone ID: LIB3145-055-Q1-K1-C2
gagttgagcaaattacgcagtgaattgaatggaaaaatggtagaaataagacgtttgcaaatggagttgaatagacaggaggatgaaagtgcagatgatacacaggataatttgaaaagagctatttccaccttggagaaagagaacactcgtctaaagatggagaagaatgaacttgaagctgccctggaaagtagcaggaaatctttaactggcaagatcgatcccaatgcttcagagactctgaagttagattcatcaggaagttcttcccggatgaaagaaatggaactatcactgcagcaaatggaaaaggatctgaaagaaacctgccgtgaaagggataaggctttacaagaattaaatcgtcttaagcaacatttgttagaaaaggaatctgaagaatcagaaaaaatggatgaagacagcaaaatta

SEQ ID NO: 17879 - DNA, 457 bp, Gossypium hirsutum
  Clone ID: LIB3145-055-Q1-K1-C3
cggattcccggtcgaccacgcctccgtttcggccaccactgttgcgataaccgttagatcgacgagatctcctgttccaaccgcagtcaaatcatgtccaaatctcgcgtttatgctgacgtcaatgtccttcgtcctaaggagtactgggattacgagtccctcattgttcaatggggtgatcaagatgattatgaggttgttcggaaagttggaaggggaaaatacagtgaggttttcgaaggcataaatgttaataacaatgaacgctgtataatcaagatcctcaagcctgttaagaaaaagaagatcaagagagagataaaaatccttcagaatttgtgtggtggaccgaatattgttaagcttcttgatgttgtaagagatcatcactccaaaactcctagcttgattttcgagcacgtcaacagtacagatttcaaagttctttacccta

SEQ ID NO: 17880 - DNA, 198 bp, Gossypium hirsutum
  Clone ID: LIB3145-055-Q1-K1-C6
gttagaaatgtgacttattttctttccatttatattcttcgggattaaaccgaattatttatcactcttttgacctttggaaaggcggttttggttgatccgtaattaaccttggatggaaatgggaccggaatttaatttccgtcaaaggcaatggcatggcattcctaattggaatccgtggttaatttggggggt

SEQ ID NO: 17881 - DNA, 408 bp, Gossypium hirsutum
  Clone ID: LIB3145-055-Q1-K1-C7
gaggtgaatatgatgaagatacaagatatcccgagaccaaaacattaactatcagacaattcaagttgggattgtgccatgccatggccatcagacagagatcttgctctctttttctgaagctgctaaaggatgcacgaaggatctacagttttatgcatttgtaacttgtgattcatgcggtaagtagcgcctaaaatttgttggaatcatgttgtgttcaagaaccatacaagcacaaatgtaatccactaaatgcataattccaagtggagagaaaggtaacctgcaagacctgcattctacaaatatgttgccttcatgttcatcttgaatgcactagaactgtttgctttacctagagcttctttctaaagatcaatataccgatattgctgtgggaacata

SEQ ID NO: 17882 - DNA, 430 bp, Gossypium hirsutum
  unsure (1)..(430): unsure at all n locations; Clone ID: LIB3145-055-Q1-K1-C8
ctcctttgttttcccttttgtctctctctctctttttccaaccctaaccctacctcaccaaccaggattcaacatgaagggaggaaaatccaagtcagatactaagagtgccaagctatccgtgaaatccaaagctggaaagaaatcggggaaggctgccaaggatccaaacaagccaaagaggcctgctagtgccttctttgttttcatggaggagttccgtgagcaatacaagaaggatcaccctaaaaacaaatccgttgcggctgtcggcaaagctggtggagataaatggaagagcttgtctgaagctgaaaaggcaccttatgtagctaaggcagaaaagcggaaggttgagtatgaaaagaacatgaaggcctacaataagagacaggctgagggtcccatagacgaagatngtgagtctgac

SEQ ID NO: 17883 - DNA, 430 bp, Gossypium hirsutum
  Clone ID: LIB3145-055-Q1-K1-C9
ctgagagaactatccgggaaggccctaggaacgactggactcgccaacagatcgactccatctaccattctccccttcttgatctccttttccatggagctcaagttcacagatatgctcataacttcagagaggtgcagcagtgtactctcctctcaatcaagactggtggatgtagtgaggattgttcctattgccctcaatcctctaggtaccatactggcctaaagccccagaagctcatgacgaaggatgccgttatgcaggcagctaaacaggctaaagaggctggtagtacacgcttttgcatgggtgcagcatggagagacacagtccgaaggaaaactaacttcaaccaaattcttgaatatgtaaaagaaattaaggatatggggatggaggtgtgttgcactttgggcatgctggagaa

SEQ ID NO: 17884 - DNA, 85 bp, Gossypium hirsutum
  Clone ID: LIB3145-055-Q1-K1-D1
gctcttttttcagacttataatttacctgagaagctttcatgcctggagtcggttgtgaggcgaacccggggaggctgaatgcta

SEQ ID NO: 17885 - DNA, 404 bp, Gossypium hirsutum
  unsure (1)..(404): unsure at all n locations; Clone ID: LIB3145-055-Q1-K1-D10
caggagttgggatcggttccgatgtgtagactggatagtagttgttctcactacaggcacacctgaaggaagctattcgccagctactggtgcagctagtgtggcttacaagattggtataatttatcacgttttattcctcgtgatggcggatttttacttgttataagcaccaagcttctggttacagcattgttattcatttgcagaggataagaaattgaccatactctattacttgatcatatagagaaactatatatatcaccacaatatacgcactttcattagatncgnncccgnnccgacttacaaaataatcgtttcgcctcccattctttaatcctctacggtcaagccaagatgctaaaccgcgccgtgacggtctttgacgaattctataa

SEQ ID NO: 17886 - DNA, 422 bp, Gossypium hirsutum
  Clone ID: LIB3145-055-Q1-K1-D11
aattatacgggatttggctaatggatctctttaacaccagaaattatattagttgatctcatccctgagcaatttagagggtgatttcaacgagttaaagaaagtcaagtgtgcagtttgggaaagacttgccagattctctgaagatttgctgctagctagtaatgttcgagttcatgtcttagagcttatgcaatttatcgctggtaaaagtgagaagggtttatcttctgagctgcagctaaatgttcatccatgggtagggtgggatgagtcactatgtgcttataacaagagccaaattacttcaaatgatgggttgcccgagcaaatagatactttcagcaggtttacaagtactatagttgccctgagatcatctcaacttatggcaaccatttcttctggctttggaatcaccc

SEQ ID NO: 17887 - DNA, 428 bp, Gossypium hirsutum
  Clone ID: LIB3145-055-Q1-K1-D12
aggagttcccggtgcttactcgggaagctgcggggggaaaaggcttatcccgaatgggaagctttttcttgggaccaggttgaagttgcgtttcaagcggttgagctttggattgctgatcgagctgttttaccggtggaaaattcactcggcggttcgattcatcggaactatgatcttcttcttcgtcaccgacttcatattgtcggtgaagttcaattacctgtccatcactgtcttttagctctcccgggagttaggaaagagtatttgacgcgcgtcatttctcatccacaagctctgtcacagtgtgaaaacactgtcaccaaactcggcctcaacgtcacgcgcgaagcagtcgatgatacagccggagccgccgaatatatcgcgacaaacaacctccgtgacacagcagccatagcgag

SEQ ID NO: 17888 - DNA, 418 bp, Gossypium hirsutum
  Clone ID: LIB3145-055-Q1-K1-D2
gtcaggatgatagatctggtccacaaggtcatggctcgcattcagaggatgaattgaactcaaagagtttgccaccaaaggtgatagaacaaggtggagagcctgacaattttgttcctgagaaacaggatttaggtgtgaaacctgaattccttggccagggtggatttcctgaagtaaaattttcatcaacatctagcccttgggaggatccagttggaatgccccccgagtggacaccacctaatgttagtgtacctttgctgaatctagttgataaggtgtttcagctgaagagaagaggctggctaagaagacaggtcttttggatatctaagcaaatattacagctggtgatggaggatgccattgatgactggcttttgaggcagatttattggcttcggagggaagacac

SEQ ID NO: 17889 - DNA, 457 bp, Gossypium hirsutum
  unsure (1)..(457): unsure at all n locations; Clone ID: LIB3145-055-Q1-K1-D3
cggaatccggtcgaccacgcctccgccaagccgtccgccagccttccgtggaatttggttttattggcagtaatcttaatgtttacaactcatgcaaaaatggtggcggaggcaaggggacctatcatttcatttaaatgccataaaagtgaagactgtggaagtgtctgcgccaaatgccccacctgcacttgcctctttcacctttgtccttgccctaccgaccctccatggccattatcataatctcatttacttctcagcaataaatgatcactctgatcctttctcattgcaacaagctttcagatctaataataataactcatgggtattggttcttttcttctggtattattattatttttttaaattttccttttaccctacatatttcttattttctgtttaatcagntgttgagaatggcagacagcatggaggtcatgaaacaatt

SEQ ID NO: 17890 - DNA, 340 bp, Gossypium hirsutum
  Clone ID: LIB3145-055-Q1-K1-D4
cccacgcgtccggtgtggataaacaagaatcaaatgatgcataaagcaactgaaatggctgacaaggggtttaatgggtatgggtgcccacattatcgaaaaaagtgccggattagagctccctgttgtggtgagatatttgattgtcgtcactgtcataatgaggcaaagaacaatatcaatgttgaccagaagctcagacatgatctcccacgccgtcaaatcagtaaggttatttgttctctatgtggcacagaacaagaggctcaacaagtttgcatcaactgtggtgtttgtatggggaagtatttctgcaactcctgcaaacttttttgatgat

SEQ ID NO: 17891 - DNA, 257 bp, Gossypium hirsutum
  unsure (1)..(257): unsure at all n locations; Clone ID: LIB3145-055-Q1-K1-D5
cccacgcgtccgcgaagagtgggtctccttctctttntgcanactcctcccaagcaccacctacagtccccgccaaacatgtcgagaacgtagatgattcgctggaggatcttaaggttatgatgggtgccaacttgctcttgcttggctcccaagctgggtttgtcaacctctatttcagagactattacatgtccaagttttttcaagaaatctttttcagagttttgaacccctgatanntgctactaagtctt

SEQ ID NO: 17892 - DNA, 429 bp, Gossypium hirsutum
  unsure (1)..(429): unsure at all n locations; Clone ID: LIB3145-055-Q1-K1-D6
agaattccagaaatcccacaaatcccacagatcccacaaatcccacaaattccactaatcccacagatcccacaagtcccacagatcccacaagtcccaaaaatcccactaatgccaggacagtcgggatgtgagagtggagagtgttgccgtcagggttgtggtgggacttgtgctgagtgtggtcagcccaggtgcgcatcaggatgttgccaggctgaaactgtaaagagcaaagggatagaagaggttatggacagtgaacccagtccaccaaagtagagagatgataccatattaagatgaaataacgaggaagagttggttgtcgtcttattaattatacaaaataagaagtaatgatgttgcagaaggggttgctataaaatcctctttnacaaaaagagtaattatgaagaataaatagct

SEQ ID NO: 17893 - DNA, 373 bp, Gossypium hirsutum
  Clone ID: LIB3145-055-Q1-K1-D7
agaattccagaaatcccatagatcctacagtttattacagatcccacaaattccactaatcctgacagatcccacaggggccacagatcccacaagtcccaaaaatcccactaatgccaggacagtcgggatgtgagagtggagagtgttgccgccagggttgtggtgggacttgtgctgagtgtggtcagcccaggcgcgcatcaggatgatgccaggctgaaactgtaaagagcaaagggatagaagaggttatggacagtgaacccagaccaccaaagttgagagaagataccatattaagatgaaataaccaggaagagttggttgtcgtcttatttattatacaaaataagaagtgatgatgttgcag

SEQ ID NO: 17894 - DNA, 378 bp, Gossypium hirsutum
  Clone ID: LIB3145-055-Q1-K1-D8
ggcaggatgatagatctggttcacaaggtcatttgcttgtattcagaggatgaattgaactcagagagtttgccaccaaaggtgatagaacaaggtggagagcctgacaattttgttcctgagaaacaagatttaggtgtgaaacctgaattccttggccagggtggatttcctgaagtaaaattttcatcaacatctagcccttgggaggatccagttggaatgccccccgagtggacaccacctaatgttagtgtacctttgctgaatctagttgataaggtgtttcagctgaagagaagaggctggctaagaagacaggtcttttggatatctaagcaaatattacagctggtgatggaggatgccattgatgac

SEQ ID NO: 17895 - DNA, 449 bp, Gossypium hirsutum
  unsure (1)..(449): unsure at all n locations; Clone ID: LIB3145-055-Q1-K1-D9
cgtnnccgaaaannaaatggcctnntattctcccgcattccgtacctaccggccaccacanngctttccgcttgccgccacttttcaanccgtcgtccccaaaccctcctccacctctctcaccacccacaaaaaatcacgcgccgccctctcccgcctaaaatccgagcaagaccctgattgcatcctcgaaatctgccgcgccgcccgcctcaccccatcctcccatatcggccgaatcgctttatccgtcgccatctccaaactctgcgaaggcaatcatttccaatccatcgacactttcctccaagaactccgttcccgtcccgacttacaaaataatcgtttcgcctcccattctttaatcctctacggtcaagccaagatgctaaaccgcgccgtgacggtctttgacgaattctataacgaggggttttgccgttcgacga

SEQ ID NO: 17896 - DNA, 313 bp, Gossypium hirsutum
  unsure (1)..(313): unsure at all n locations; Clone ID: LIB3145-055-Q1-K1-E1
gatgagtgtatggcaaagggaatgtcaagtaagtccaagacttttcataataagcatagtaaggtgactattttataactagattgtcaataagtttgttaatgttttaatagacattgcttgttgtaattgaatgctatgttcttatttgatgtcttcattgcttgctcnnnnnaaaaaaaaaaaaaaaaaaaaaaaaaaaaaaaaaaaaaaaaaaaaaaaaaaaaaaaaaaaataaaaaaaaaaaaaaaaaaaaaaaaaaaaaaaaaaaaaaaaaaaaaaaataaaaaaaaaaaaaaaaaaaaaaaaataa

SEQ ID NO: 17897 - DNA, 411 bp, Gossypium hirsutum
  Clone ID: LIB3145-055-Q1-K1-E10
cgcataatgtagcatgaggctcatattgagaaagatagacatacccatactgccaaggctgtacttcctctgtaatacatatccaaataggctttgaatggcactccactacagaaccaaattgaaaaaccgctctttttaactcgattctagcaaatacgtgcatactacgattactactgcaaagattgtgactgccaaactcttgattatacgtcataaacacactgcccacactgcccccataatagtgtgacgcattcttgacattggaataaatacatcgctactccaatacaacaatctcgacatgaacagatctgtaaaagagctctgatattgctaagacacatagattctaataacatctacctataacataccaaaaaacgcaggccagctgatcttgat

SEQ ID NO: 17898 - DNA, 384 bp, Gossypium hirsutum
  Clone ID: LIB3145-055-Q1-K1-E11
cggacgcgtggggttggagttcgattgagctttggtcaaagaaattttgcaaaaatgtgtgtaggaaaatgtagtatgttgttcctatatacaggtagtgttgctagacttgaaatcttggggaattgacgggtatgtttggtttgcgaatagcaaatagatccatactcctattacttgtgcaaagattgtgactgcaaaactcttgattatagttcatcaacacaatgcccacactgcccccataattctgtgaggcatttttgttggtggaataagtacgtggctactccagtgcggcgttctggaaatggtcagatcggtaaacgagctctgatagtgctaaaacacattgttttgaagaacattttcctaagacggccc

SEQ ID NO: 17899 - DNA, 417 bp, Gossypium hirsutum
  Clone ID: LIB3145-055-Q1-K1-E12
tcctctctcaaaatctcaaacccatatttgttctctctctctctctctctctccaatcaattaattcctccattggaggagcttagggtttgttggtgttctgatctttgctctgtctgaaaaataaacagaattataaaccaacaccaacgccatgggaagatttgaagagggaggattcgattcagtggtttgccctaagcctatacgaacctttagatggtctaccaacagctgttatcagactgagatggctgattcaaaagctggtgcagagcttcttgatataatcctctccgagggagggtatggggccgagaaccccaccgaccaaatggcttcatcaccaccgtatttctgtggatcaccgccgagcagggcgtcgaatccggtaatccaagatgcccgattcaacga

SEQ ID NO: 17900 - DNA, 436 bp, Gossypium hirsutum
  Clone ID: LIB3145-055-Q1-K1-E2
aaaagatggcaattgagattcctagagtgaaacttggaactcaaggatttgaggtttcaaagctgggatttgggtgcatgagtcttacaggtcacgatcattcagtgtcagatgaagatggcatagccatcattaagcatgcagtcgaaagaggagtcactcacatcgatacagccgacctctatggacccaaaactaacgaaattctggtcggaaaggcattgaagcatctgccacgagagaaggtacagttggctacaaaattcggtgttgaaagcatgggtccagatggtccggttatcaatggcactcctgaatttgttcgttcttcacttgaggctagccttcaacgcctcgatgtggattatattgatctttactatataatcagagttgaccgcaagactcctatagaagatactatgtgagaactgaa

SEQ ID NO: 17901 - DNA, 429 bp, Gossypium hirsutum
  Clone ID: LIB3145-055-Q1-K1-E6
cccacgcgtccgcccacgcgtccgcccacgcgttcgcccacgcgtccgcccacgcgttcggccaaaatggatcccactaacgctgagaagggaaatctagggattcctcagttgcctggtcaagggtgttcctttcatagcttccgtactaatacttacaagcttagtttcatggaaactccgtcggggattaagttcattttggtaactaatcctaggactggtgatcttcgtgaaacactcaagtatatttataacctgtatgttgagtatgttgccaagaacccactctatactcctgggactcttatcaggtgtgagttgtttaatacagcacttgaccaatacgtgaggagcatcgcatagtatctaaaattaatgccttctgtctagtctctggtacctacttttatatgcaatttcatgtga

SEQ ID NO: 17902 - DNA, 426 bp, Gossypium hirsutum
  unsure (1)..(426): unsure at all n locations; Clone ID: LIB3145-055-Q1-K1-E7
cacactttcgagggccaaaactatgcccaggccttggccttctggccctcttcttcttcctcttcttctcagttcattcccaagaagacactcccatagctcgattccttcgttaccttcaattcaacaccgctcatcccaatccaaactacgctgaccccatctctttcctcatatcccaagccaacgccattggactccaagcccgaactcttgaattcaccctttctaaaccacttctccttctaacatggcctggctccaaccccttctcttccctcagttctcttcaattcccacctcgattccgttccagctgaaccttccaaatggatctaccctnctttcttcgccactctcgcccctgacggtaaaatctacgcgcgcggtgctcaagatgacaagtgcatcgctatgcaatacttg

SEQ ID NO: 17903 - DNA, 407 bp, Gossypium hirsutum
  Clone ID: LIB3145-055-Q1-K1-E8
aaagaaaaccttctcttgtgtattgatttcgtttttttgatacagtatgcgtgtccccttgaaacaatacagaaatggggtttttatagccccgaaaatacatacatttcccttctattttttctatttttttcttttctgttgctattttgctatttttctttttctctttctgtttgctgctggtttgttgtgcaggtacgggtatggaggtgcgcgagcgcgcatatacagaggctatgcgtgaagaggcaggcgatcgtggggggagcgtacatgtgtgctggcgtctatggctgaaggggagttggaaaccctatggttttctgtttcagctaggctaagtgttgggcctccgtaattgggctaaggttatttgggcttaggttttggctaattgggtttag

SEQ ID NO: 17904 - DNA, 396 bp, Gossypium hirsutum
  Clone ID: LIB3145-055-Q1-K1-F1
aagacggagcagcttcaggatttggatgatcccttgcctccagcacatcgctactttttccatgctgatccaaggatccaaaacttagtccgtagtcggttacccttcttctcccccttgagcatggttgacaatggaggacatcaacaacctactgtctcaattatggattttaagaatcaattcaacaaaggagaatcatctaaacagagaggatctcggaaaggcagtggcaagaattgctcaataagtagaagcagcaaatcaaagaagccaaatgctgaaaatggtgctttcgaaggatgggtaaatccaaaaaccagtggagctgttccgaagaatgctgggaagagaagagttcatgctagcggtcaacctgctggccactggtataca

SEQ ID NO: 17905 - DNA, 387 bp, Gossypium hirsutum
  unsure (1)..(387): unsure at all n locations; Clone ID: LIB3145-055-Q1-K1-F10
cttgtaaaattatttgttgggctgttatattttatttgtttatgggcccgggcaatattgggcttgtacatgaagtaaaaggtttaactgagcatgagcgctatctcgcattgagcaaaattccaaatcatccaacgcaaatgctcattttctttagtttacctttttctgtgcgattggaatggatcagaagatttcttgctgaccattaaaaatcatggttgtgttgatgatattttcgtaaccttttgtgtttgtaatttttggatgctataatgacatgatagaatgtcattacaatgttgtaattttttgaagttgtaaaattttataatatatagattatgatatataaactaataaaatcatgtaactttttgttnttna

SEQ ID NO: 17906 - DNA, 426 bp, Gossypium hirsutum
  Clone ID: LIB3145-055-Q1-K1-F11
caaacactacattacaactatcatcaatgggtctgatgtggagcctactttctcagctggtgccgtgtgcagaacttcgcacggaggatacagcgtgctcgctgttaaatgatgtgcgggatcaagttgaacgaaccacggatgctaatgttgtttaccgtactgctactggtctgagtgcacgggttcactcgatggctactggaaaatctagtgttgtcggtgctggtgccacttttcgaccggcttctagcagcactaatgttggcatgaaaggtgctcagaatgatggtcatgctgatgtaagaagccgctcatctctaactacatggtcttgcattggtcctcgtcgacagaatgtagttttgggatcgaatgctgaaggcgatgatatgaccgaaccttcattaaaatctaaaacaagtt

SEQ ID NO: 17907 - DNA, 299 bp, Gossypium hirsutum
  Clone ID: LIB3145-055-Q1-K1-F12
cccacgcgtccgattatcattgagatggatgttgttgttgttggcctgtcatgcttatttaggataattttacttcggtataaataaaaataatgaatagtgtgcgaaaaataaaaaaaataaaaaaaaaaaaaaacaacagatgttaattttatttaaaaaaccatataaatgtgcgaatgaactggatcatcaagatggcttgctgaccatataaaataatctatgttgtcatcattttccaataaaattttttaattggcaaatcttgtattcaatggtgactctgaaagaatgtc

SEQ ID NO: 17908 - DNA, 362 bp, Gossypium hirsutum
  Clone ID: LIB3145-055-Q1-K1-F2
cccacgcgtccggttagaaggtagcatttgggcgtgaaatgtcaatggggaccgataccacttgggttgggaagaagcctttgaggcgcatcggaggaatgtccgatgctctctccattgccgccgatcttggtttctctgttccccctcctccttctcaggaagaagtgcaaaacttatcatctgctacaggagaaaagggtgatgacttgataaaggtattaagagagctaaccactgtacaaagaaagatagccgatttgcaagttgaactacagggccgaaaggatgacaaaaatgttgcacaccttacacacgtgagtgaaatggaaaaagaagtgtgagacattggcgaggattac

SEQ ID NO: 17909 - DNA, 273 bp, Gossypium hirsutum
  unsure (1)..(273): unsure at all n locations; Clone ID: LIB3145-055-Q1-K1-F5
gcgacagcttgatagtgccataaagcgagattttttatctttcaactttgagacaacnacggagggattgggttctagttttcaggcacagagatgattcttctactgattcagtgcttccatggataccccaaatcactccagctgtagctttaaggcttttggagcttgattcatccatcatgtatgtaaagcaggataaagttgaacctccatagaacagggaagctagagcatcatatataaagcttccttcaagaaccactcttttca

SEQ ID NO: 17910 - DNA, 357 bp, Gossypium hirsutum
  unsure (1)..(357): unsure at all n locations; Clone ID: LIB3145-055-Q1-K1-F6
cccacgcgtccgttttttttctcagcaaccaaacaagctaagaaatctgaaaagaaagtgaaaaagatataaccttgaattgaaactagtgtttggcttttgagtcaaagcagtcaaatgaaattactcaaattcaccctgnggcacgtcatataacacccattactctgttttttaccttcaacctagatctcgcatgtgtttttcccttggggttagccgctttgctcatttaagtagtgtttaattgttaacaaagacctccatggcagcaacaaagaagctttcatctcttttccctttgttgtctctcatttgcttcatctctttctttcttcttctctctatttccagaaa

SEQ ID NO: 17911 - DNA, 424 bp, Gossypium hirsutum
  Clone ID: LIB3145-055-Q1-K1-F7
ttctcattttcaagtctgcaaaacccctagccagccacttccccgccgcctctccgaaccatgggccgagtccgaaacataacggcgaagaagttatctcttcttgtgatcgagaggtactactctcgcatgacgcttgatttccacaccaacaagaagatcatcgaagaagtggctatcatcccttccaagcgtctccgcaacaagatcgccggcttttccacccatctcatgaagcggatccagaagggtcccgttcgtggcatctctttgaagctccaagaagaagagcgtgaacgtcgcatggatttcgtccccgacgaatccgccatcaaggttgatcaaatcgaagtcgataaggaaactctcgatatgctttcggttctcgggatggctgatattcccggccttgttaaggtcgatc

SEQ ID NO: 17912 - DNA, 428 bp, Gossypium hirsutum
  Clone ID: LIB3145-055-Q1-K1-F9
cggacgcgtccgcccacgcgtccggatcattaactccgatgaggtacaatcagtggtgaagcctattaagaaggagatcaaaagggcacctttgaagaagaatccaatgaagaacttgaatgctatgctgaagttgaacccttatgctaagactgctaggaggatgtctcttttggctgaggcacaacgcgttaaggctaagaaggagaagcttgacaagaagaggaagcccatttctaaggaggaggcaaccgcaatcaagtcggcaggcaaagcatggtatcaaactatgatctcagacagtgattacaccgagttcgagaacttctcaaaatggttgggcgtatctcagtaatttagttcttccttaagaaattatggcagacaatcatttttatcagttttgttttaatgtttttgacatgtta

SEQ ID NO: 17913 - DNA, 129 bp, Gossypium hirsutum
  Clone ID: LIB3145-055-Q1-K1-G1
ccggattcccggtgcgaagggtttttcacatttattttttcctaagccaccaaatttaccccttattttccgaaaaaaaaaaaaaaaggaaagaaaaaaaaaaaaaaaagaagggggggccgatttaaa

SEQ ID NO: 17914 - DNA, 421 bp, Gossypium hirsutum
  Clone ID: LIB3145-055-Q1-K1-G10
cccacgcgtccgggctgatagaggatcttgttggatgtcaagccaaccagataagtcaacactaacacagcttcaaggaccctcagcattggttcccagtcagatgggttctggaaatcagccccctcggcctgcatcgttgactcctgagatggagaaggcactacttcagcaggtaatgagcctcactccagaacaaattaatcttttgcctccagagcaaaggaatcaagtacttcagctccagcagattcttcgccaatgagaaggtctaatagcagaaaagattaatctctcttccccccgcccccccccgggcacattgcatgcgaggaattgatgatcgagattgaaagaattgtttaacatttgctgacaaacttatgcgagccctagatatttatttgaaggtttatagata

SEQ ID NO: 17915 - DNA, 438 bp, Gossypium hirsutum
  Clone ID: LIB3145-055-Q1-K1-G2
gataaatgttgttcttctggatgttccggtaattgtaatcctggtggtttcgttctaccatttgctcaaattccagaaatcccaagaattccagaaatcccacaaatcccacagatcccacaaatcccacaaattccactaatcccacagatcccacaagtcccacagatcccacaagtcccaaaaatcccactaatgccaggacagtcgggatgtgagagtggagagtgttgccgtcagggttggggtgggacttgtgctgagtgtggtcagcccaggtgcgcatcaggatgttgccaggctgaaactgtaaagagcaaagggatagaagaggttatggacagtgaatccagtccaccaaagtagagagatgataccatattaagatgaaataacgaggaagagttggttgtcgtcttattaattatacaaaataag

SEQ ID NO: 17916 - DNA, 224 bp, Gossypium hirsutum
  Clone ID: LIB3145-055-Q1-K1-G4
gcggataaatgttgttcttcttgatgttccgtgtttttgtcttcctggtggaaacgttctaccatggtctgaggttccagaaatggggtgaagtgcagatatccctcaaattctacatatcccacaaatcccacaaattccactattcccacagatcccacaagtcccacagaatcccacatgttccaaatattccacttatgcctggacagtcgtggatgtga

SEQ ID NO: 17917 - DNA, 384 bp, Gossypium hirsutum
  Clone ID: LIB3145-055-Q1-K1-G6
cccacgcgtccggcttcaccatttttgtttcgtcctcactcaatttcgtctatggggctgaaaatatgagctacgtcgtcgtaggccatgtttactgtgacacttgccgtgttgagtttgagaccaaactcagcgaacccatcgctggagcagtagtgaaactggaatgcaggaatcgtacagacaatcaccttaccttccagagccaagaaatagtgactgacgaacgtggagactatcacattgtagtggaaggcgattatgaggaatcagactgcgacgtcgccttggtgaggagtcccaacccggattgcaatgatccctccgaaatgtggaggatatccagggtggttctcaccacacttgacggcgtcagcggtgaac

SEQ ID NO: 17918 - DNA, 411 bp, Gossypium hirsutum
  Clone ID: LIB3145-055-Q1-K1-G7
ggcatttttatactacattgtattgtagtgctgaattttgaaaaattgtgatttgagtgtgtcttgttatgttgtaggttttagggtaatgagagggggagaaggaataattgagctgtggaacaaagagtctttttgttatttgtctgatggagatttgcatacggtttctatcaaatgtaggatctgctttctgctttatgtgctaaaaaaaaaaaaatgacaaacgtagagactatcacattgtaatggaaggcgattatgaggaatcagactgcgacgtcgccttggtgaggagtcccaacccggattgcaatgatccctccgaattgtggaggatatccaaggtggttcttaccacacttgacggcgtcagcgatgaacttgggtttgccaacaatcttgggttta

SEQ ID NO: 17919 - DNA, 372 bp, Gossypium hirsutum
  Clone ID: LIB3145-055-Q1-K1-G8
cccacgcgtccgggctgatagaggatcttcttggatgtcaagccaaccagataattgaacactaacacagcttcaaggaccctcagcattggttcccagtcagatgggttctggaaatcagccccctcggcctgcatcgttgactcctgagatggagaaggcactacttcagcaggtaatgagcctcactccagaacaaattaatctcttgcctccagagcaaaggaatcaagtacttcagctccagcagattcttcgccaatgagaaggtctaatagcaaagaagattaatctctgtccctcccgcccgcccccgggcacattgcatgcgaggaattgatgatcgagattgaaggaattgtttagcatttg

SEQ ID NO: 17920 - DNA, 375 bp, Gossypium hirsutum
  Clone ID: LIB3145-055-Q1-K1-G9
accattcgtccgttctgatagaggtttttattttatgccaagccaaccagattatggagcgcgtacacagcttcaaggaccctgagcattggttcccagacaaatgggttcttgaaatcagcccccatggtctgcatcgttgactcctgagatggaaaaagcactacttcagcatgtaatgagccttactccataacaaattaatctcttgcctccagagcaaaggaatcaagttctttagctccagcagattcttcgccaatgataaggtctaatagcagaaaagattaatttttctcccccccgcccccctccggtcacattgcatgcgaagaattgatgatcgatattgaaggaattgtttagcatttgctg

SEQ ID NO: 17921 - DNA, 338 bp, Gossypium hirsutum
  Clone ID: LIB3145-055-Q1-K1-H10
ctcacgcgtacaccaccatagcatttacatggggccactcactatggttccgctgcggatctatcgaaggcagggtgcatactcgctgatatatatgctggctagcctatcatgccaggacgaactgaggaggagcatttgcataaaatttgcaagactatgtggctggccttatgaagactattggagtaaattaaagatgcttaatgcacacattttgacacctactcgtccttgtaaacgctgagcctgtgaaacattgatggaattctctgaccagctctagctacaatggagaccttactttgcatggaccctgctgtgcgaggatctgcagc

SEQ ID NO: 17922 - DNA, 431 bp, Gossypium hirsutum
  Clone ID: LIB3145-055-Q1-K1-H11
gtggaactgagggggataaagggaagaaagaaatgaacaaagagaatgaaaagaaaaaaatttacaacagagatgaactagaagatgtaagcattgatgggtcagctttgaattatgattcagatgagttcactgagaataacaaagttgaggaagctcttaaaaatggtgggaacacctcaaatgcaaacagtacagttactggaggagatcaaaagggtaaaaggaaaggtcttcctgctaaaaacttaatggccgagaggcgccgtcgaaagaaactcaatgataggctttacatgttgcggtcagttgttccaaagattagcaaaatggatagagcatctattcttggggatgccattgagtacctgaaggaactactgcaaaggatcaatgatctccataacgaattggagtcgaaccctggtagc

SEQ ID NO: 17923 - DNA, 405 bp, Gossypium hirsutum
  unsure (1)..(405): unsure at all n locations; Clone ID: LIB3145-055-Q1-K1-H12
gnggaactgagggggataaagggtataaagatttgaacaaagagaatgaaaagaagaaaatttacaacagagatgaactagaagatgtaagcattgatgggtcagctttgaattatgattcagatgagttcactgagaataacaaagttgaggaagctcttaaaaatggtgggaacacctcaaatgcaaacagtacagttactggaggagatcaaaagggtaaaaggaaaggtcttcctgctaaaaacttaatggccgagaggcgccgtctaaagaaactcaatgataggctttacatgttgcggtcagttgttccaaagattagcaaaatggatagaagcattattcttggggaagccattgagtaccttgaggaactactgcaaaggatcaatgatcttcata

SEQ ID NO: 17924 - DNA, 375 bp, Gossypium hirsutum
  Clone ID: LIB3145-055-Q1-K1-H2
ttttggcaagtgtgtagttgttgcagaagagtaaaatagtaaagagtcacagctgagacacggaagaagatgccttgcctaaacctttcaaccaacgtcaatctcgacggcgtcgacacctccgccatcctttccgaagccacctcttccgtcgctaaactcatcggcaaacctgaggcctatgtgatgattgtgttgaagggttcagtacccatgtcatttggtggtactgagcagccagctgcctatggagaactggtatcaattgggggccttagtccagatgtgaacaagaaactgagtgctgcaattgctgcaattcttgaaaccaagctacaagtgccaaagtcacggtttttcctcaaattctatgac

SEQ ID NO: 17925 - DNA, 402 bp, Gossypium hirsutum
  unsure (1)..(402): unsure at all n locations; Clone ID: LIB3145-055-Q1-K1-H4
cccacgcgtccgcccacgcgtncgagaaacaattttatagggattgtctcatcagcgggacagtggatttcattttcggggatgcggcgagtgtgttccaaaattgtctgatcattgcgaggaagccaggtgaaaaccagaacaacatgattacggcccacggaaggaaattcccatacactcactcagctattgtgcttcaaaattgtaccatctcaggcgcccctgactacctcccggtgaaggacaagagcaagacgtatcttggtcgtccttggaaagctttggcgaggaccatcataatgcaaagcaatattgatgacatcattacaccagagggttactcccccatggaaagaaccgtangactagacaccggttactttgtagagttccaaaata

SEQ ID NO: 17926 - DNA, 289 bp, Gossypium hirsutum
  Clone ID: LIB3145-055-Q1-K1-H5
gttatgtgtgtgtgcaattagccttaatcattttcctttttctttaaaactcattcgtatataatatctgactaaacgtgcgctgaataccatggctactgcacaggtattggattcttattaagttctcgatttgagcttgctttgattcatcaatctctgtgtgttgattacttgatgttagcattgcacctagcttataccatttggcatgcgatctttggtttatagatggagctgattataacagtgaagatgatgatcatatctatctgtcataatctgcaca

SEQ ID NO: 17927 - DNA, 333 bp, Gossypium hirsutum
  Clone ID: LIB3145-055-Q1-K1-H6
ctttgatgatggctcagatgaccgaactgtcttgtcctgaacttggacactttttgataatcgttttcgaatctcccattattggtaaatctttaagccccatagatctttctaactctaaggcttgcaaccctgcatgtgcttctaccgcgaatggagctgtgatgttggtatggattactgactgtgagaccaaaatctccctaccctgtcctcaaacaataagacccgaagcagatcttgcattctgctgatcaaaggccgcattaaagtcgactgagattctcgtgcatctctcaacagttcgcaggacaccatgtcctgccaaatgat

SEQ ID NO: 17928 - DNA, 370 bp, Gossypium hirsutum
  Clone ID: LIB3145-055-Q1-K1-H7
tcgacaaaatcagttgcttcacaatggcctctacaaccatggctctttcttacccatcattcgccggtaaggcagtgaagttcttcccttccacccctgaaatccggggaactggccgtgtttacatgaggaaaaccaccaagcctgttccttctggtagcccatggtacggtcctgaccgagttttgtacttgggtccacttttcggtgagccaccatcttacttgaccggtgagttccctggtgactatggttgggacactggtggactctcagctgatcccgagacctttgctaggaaccgagagctcgaagtcattcactgcagatgggccatgttgggagctctcgggtgtgtcatccctgagct

SEQ ID NO: 17929 - DNA, 409 bp, Gossypium hirsutum
  unsure (1)..(409): unsure at all n locations; Clone ID: LIB3145-055-Q1-K1-H8
cccacgcgtccgtgcagatctgatcaagaacttgtttatcccaacaatctcacttttagttcaccagaggagcaggagaactatatacgtaactggcttgaagaaaggactggatttaaagctgattttaaaatctccttttatccaggaaagttttcaaaagaaaggcgaagcataatacctgctggagatacttctcagtttatcccatcaaaagatgctgatatttgtattttggaagaaccagaacatctgaactggtatcatcatggtaaacgctggaccgacaaattcaaccatgttgttggtatcgtccacacaaattacttggaatatattaagagggagaagaatggtgctctacaagctnttcttgtgaaacacatcaacaattgggtcaccagagcgt

SEQ ID NO: 17930 - DNA, 428 bp, Gossypium hirsutum
  Clone ID: LIB3145-055-Q1-K1-H9
cccacgcgtccgagacaatgagaggaacattgacgttgactcggattctgatggtctgcctctcccaagtagcggggcagagccaatactactcggagagcttaccatatgatcccaggccgggtaaggacactaatctttacttctttttgcatgaaactctacgcggtaagaacccaacaggatgcatggcagcccaagctaacaacacaagcaacgacaactactcatcagtgccatatgccaccctatatgccattgatgatcctctcaagatacgtcctggggacaactcagaggtgattgggaatgctctgggacttgagatcttgtccggcaaaaattcaacgactggggcgatgcactcagattttggatatactgtcggcaagtttaagggcagatctattagcatattttgaaggaat

SEQ ID NO: 17931 - DNA, 437 bp, Gossypium hirsutum
  unsure (1)..(437): unsure at all n locations; Clone ID: LIB3145-056-Q1-K1-A1
gcagatgttaatgctttttttgcttcgtttgtttggaagatccctgcaactttggaacctcctgccaaagtgacaccagtagcggttggaatcgaggatgctaaaaaagaaagtaatttggaggatgctaaaattgaaagtaacaaaaagactccccgtagcagccagaggaagaggaatcccccgcctaagcctctcactcccagaaatggtcaaaagaagcagaagacaagtagaggatcaggatcagcgtcagccaaaggatcagcatcagccacacctaagcgacaaccaactcggcagcgtgttaaaactcctgccccacccccactggaaaccgaagatagaaatggcggtcttgaactatctttcttagatgatgaaacaacaagagcggnattcgacaactatctcaatgcattggatgacatgctcac

SEQ ID NO: 17932 - DNA, 144 bp, Gossypium hirsutum
  Clone ID: LIB3145-056-Q1-K1-A10
acttttgtaatttagttgcttctgggtttgttaggttccaatttttgtgtaaattttggtgtcttaaagaacttgattgaaataaaataagaacccaccttcttgttttctatacagaaatggtatgaaatatttattagtccc

SEQ ID NO: 17933 - DNA, 450 bp, Gossypium hirsutum
  Clone ID: LIB3145-056-Q1-K1-A11
agggtatgtaataccaacaccagtcatccagcattttatccaagactatgagaagaatgaagcctatactggattccctattttggggattgagtggcaaaaaatggaaaacccagatttgcgtaaagcaatgggcatgaaacctgaacagaaaggtgttcgaatcagaagagttgatcccacagctccagaatctggggttttgaagtcatcagatattgtgctcagctttgatggggttgatattgccaatgatggaacggtatgggaaggattatgaatatgaagctccagtgaagctattggacaaactcttgcattcaatgctgcagtcacccgatgaacagcttgttgtggtgtctcaggttcttgtgtctgatatcaatattggatatgaggacattgttaacactcaggtccttgctcttaatggtaagccagtgaagaatt

SEQ ID NO: 17934 - DNA, 403 bp, Gossypium hirsutum
  Clone ID: LIB3145-056-Q1-K1-A12
ggtgattctgcacgagaattttggtttcaaacacctcctaagatcggtccagatgttccttacaaatttggaatcattggtgatttgggtcagacatataattcactgtccacccttgagcattacatgcagagtggagcacaaactgtcttgtttgtaggagatctttcttatgctgatagatatcagtataatgatgttggtataagatgggattcatggggtcgctttgttgagaaaagtactgcatatcatccttggatctggtctgctgggaatcatgaaatagaatacatgccttacatggatgaagttgtcccttttaagtcctatctccaacggtaccctacacctcatttgtcttgtaaaagcagcaacccaatgtggtatgctattagacgtg

SEQ ID NO: 17935 - DNA, 369 bp, Gossypium hirsutum
  Clone ID: LIB3145-056-Q1-K1-A2
gcgcccacgcgtccgcccacgcgttcgcccacgcgttcgaacaaatccctaaccccattttgattttctctcaaccaaacccaaagaccaaaccttagccgtcacttttgggctactcatgggtatcatcggcgttcacgcctccacctctgccgtggttcacgacccaagtcgcgtaaaaacaagaggagacccctttacccccttttggttagatatccaagccggaggatggcctccgacaatcgaaaccgcaggcttgcgaggagtcaacgaattcaggggttttccactttggtgcaagcttgcagtcctcgggcgttagacgtgctgacaccatgtgaggagtggcgatgcacaaagtagatg

SEQ ID NO: 17936 - DNA, 408 bp, Gossypium hirsutum
  Clone ID: LIB3145-056-Q1-K1-A4
attgctttgggtgttgatgaggttgaggaccgggagaagcttgaagaagaagagaaacaactcactgccgtactcaaaggcccgaatcgtgcatttggtgaccttattgcagcatccggtatcacagatgcgatgcttgacagtttgatagctctaaaggatctggaaggggttgaggggttgccacctttaagtgttatagaagacatgcgttatgaaaagaatacgaggaaatccacaagagctgaaatggaacgccagaagctggaggagatggccaaagaaagggtaagacaagtagatgataaaggaagggcttatgggactgggagaaggaaatgtagtacagctcgtgtttgggttgaacctggtgatgggaagttcattatcaatgacaaagaatttgat

SEQ ID NO: 17937 - DNA, 381 bp, Gossypium hirsutum
  Clone ID: LIB3145-056-Q1-K1-A5
ctttgggtgttgatgatttagaggacttttttgaagcttttagaagaagagaaacaacggactgtcgggctcaaaggcccgaatcgtgcatttattgaccttattgcatcatccggtatcacagatgcgatgcttgacagtttgatcgctctcaaggatctggaaggggttgaggggttgccacctttaagtgttatagaagacatgcgttatgaaaagaatacgatgaaatccacatgagctgaaatggaacgccagaagctggaggagaagggctaagaaagggtaagacaagttaatgataaaggaagggcttatgggactgggaagaaagaaatgtaacccaagttcgtgtttggtgtttaaaccttgttgattggg

SEQ ID NO: 17938 - DNA, 455 bp, Gossypium hirsutum
  Clone ID: LIB3145-056-Q1-K1-A6
cggacgcgtgggcggacgcgtgggttgtgtttgttctggcagcaacaaacctcccctgggaattggatgctgccatgctccgtcgtcttgagaagcgaatccttgttcctctcccagagccagaagcaagaaaagcgatgtttgaagagcttctgccccaacagcatggtgaggaggctcttccttatgatatattagtggaaagatcagaaggttactcaggttcagatattcgattactttgcaaagaagcagccatgcagcctttgagacgcctaatggctgtccttgaggataaccaggaagtagtgcctgaggatgagctgccgaatgttgggccagttacgtctgatgatatagaaactgctttgaggaacaccagaccatcggcacatttacatgctcatcgctacgagaagtcaatgcagactatggcagtcaaatactccgatgat

SEQ ID NO: 17939 - DNA, 320 bp, Gossypium hirsutum
  Clone ID: LIB3145-056-Q1-K1-A7
tcgctggaacgggtctgacgtggcgtaacttctggtactgctcctgcggcgctgaggttccaaggaaaccctagggtttcctgctggtgttttaagtcattgggccttttggtcccgagtgacttgggtctgtaatagatgggtctgtttgtaagggttattgggtttgtacttttaacgggcttttaaaataaataattattcatttattcgttaaaaaaaaccactaggacgctcttcaaagaaggaaaaatcttaacttgctaaaattactagagatagcgcaaatataactgtggtgcaaagttcatggtttaatg

SEQ ID NO: 17940 - DNA, 441 bp, Gossypium hirsutum
  Clone ID: LIB3145-056-Q1-K1-A8
ctttgaaaggcttttaccttttagaagcaccatatgtggatcgaaagaaagattcaaatctactgggtcttaggcgaacctgtattatgttgatggaatgtcttagctttttgttaaggaatatggatatggtttctgtttctgctttaatctcagaagatgttagggggcaggcaaagttaattgctgaggaatggaaaccaaagttggatgctcttgacatggatgctagtaatggtaattcattggaagctcatgcattcctgcaacttcttgccacttttggtattgcttctaacttcaatgaggaagaactctcaaggctgataccaatggtctctcgtcgtcgtcaaacagctgatctcttgccgtcccttggtttgtctgaaaaaatgccaggtgtaattgaggttctggtgaataatggaaggcagattgatg

SEQ ID NO: 17941 - DNA, 448 bp, Gossypium hirsutum
  unsure (1)..(448): unsure at all n locations; Clone ID: LIB3145-056-Q1-K1-A9
gacccacgcgtatcgtgcatctatgtgtgtgaacaagattgatcagattacactcgaagagctggaaatattggataaacttcctcattactgcccaatcagtgctcacctggagtggaacctggatggtctcctggataagatatgggagtatcttgatttaactcgcatatacacaaaaccaaaagggatgaacccagactatgaagatcctgttatcctgtcatcgaagagaaggacagttgaggacttctgcactcgaattcataaagacatgcttaaacaatttaagtatgcacttgtatggggatcaagcgtaaaacacaagcctcaaagagttggcaaggatcatgaacttgaggatgaagatgttgtgcagattatcaagaaagtgtgatttgaggatattggaanttatgccttcatgttttaggaatcccatgaatca

SEQ ID NO: 17942 - DNA, 393 bp, Gossypium hirsutum
  Clone ID: LIB3145-056-Q1-K1-B1
atttgatatctcatttatcatcaactattttcatttgatttgcaaactagagttgcctatgcaagctattcggtttaccttgcttgcacaaacctatttatatttaaggaatgagttagggagaatataatagcatgttgttagcatccactatttcaggctgtggggattttctgtttggtttcatcaagttcgaagttttttctcctggcttcgacaaatgtggtatggatctccaacagcgcttttgaactctgattatcttcttgggagcgtcctcagcctgcttgctagcctgcattaagcatcgataaacatcaactcaaccattttgtaacaggtattggactgttagctaccgatttgctccagacataaatcgttggcaagctg

SEQ ID NO: 17943 - DNA, 176 bp, Gossypium hirsutum
  Clone ID: LIB3145-056-Q1-K1-B10
ataatcccgttggaatacttatgagtttacgaagatgggaacgtgtaggcgattttcgtagagtggttagggctacgcgtcagattcatgcaaaggagggcctaccttcctttcctatgggaaaaattgatcagacacagatgtagaaagttggagcacgtgtcctgtcaacttta

SEQ ID NO: 17944 - DNA, 413 bp, Gossypium hirsutum
  unsure (1)..(413): unsure at all n locations; Clone ID: LIB3145-056-Q1-K1-B11
gatggagttacagtaaaaaattgcaccatgactaatacttccaatggtgttagaatcaaaacttggccaggaagaatcgaaagttaaactaagcaacattagtttcaaaaacattcacggcacttctgcgcgtccagaagctgtcaagattatttgtagtgctactttgccttgtgaaaatgtagaacttgcagacattgaaattacgcatagtggaccgactggacctgcagtatcacaatgttcgaatgtgaagcctaaagttagtggcaaacaaaatccagctgcatgttctgcccctatcccagcaaaacctaccctgaccgcttaatcaatagcagaggtataattntttttgatgacgttgtaactcttataattatatttattttgcaaataaattttgttttttt

SEQ ID NO: 17945 - DNA, 428 bp, Gossypium hirsutum
  Clone ID: LIB3145-056-Q1-K1-B12
caaagctggtggagataaatggaagagcttgtctgaagctgaaaaagcaccttatgtagccaaggcagaaaagcgaaaggtcgagtatgaaaagaacatgaaggcctacaataagagacaggctgagggtcctaaagacgaagatgttgagtctgacaaatcagtgtctgaggtgaatgatgaggatgatgatgaagaaggcagcggagacgaagaagatgatgagtaggaaggtccgtggtggatagcataatcaatgtaggctgtgatagtgtttgatcaaaaccatatgttaatgctttcgatgtttccatgttattcttttagatgcgcatgccatctaagggagaaatgtacctctgaatcctgttggttccttttgaccttctgaaattaatagttgtagatgggataatctgcttctatat

SEQ ID NO: 17946 - DNA, 360 bp, Gossypium hirsutum
  unsure (1)..(360): unsure at all n locations; Clone ID: LIB3145-056-Q1-K1-B2
gaaatggtgacaagtaaaggtcttgaagttgcttaatctgagatcactgacatgctttgggaaagcactttcttcttgcgtcagttgcctgaatcaaacctttatgaaattcctgatcttgaagatgattacaggaaggtgatgaagcaatttgcagtggagttaaagaagctggctgagaaacttttggacatactgtgtgagaatcttgggttggaacaaggttacctgaaaaaagtgttatatggttccaaatggccaaaattttggtaccaaagtcaacaactaccctncatgccctataccagacctaatcaaagggctaagggctcacactgatgctggtggatcatattactc

SEQ ID NO: 17947 - DNA, 361 bp, Gossypium hirsutum
  Clone ID: LIB3145-056-Q1-K1-B3
cacgcgtccgtgctttttcttagttttcctttttgtcccttgtttatttgatatttccccctcatggccgccgctgatgtcgagttccggtgcttcgtcagagggctcgcatgggccaccgacgaccgggccctcgaagaagccttcagtgcgtttggtgaaatcgtcgaatcgaaggtccgtttgttgcaggtatcggactccagatctgacttgatccgacccgatctgggcgcccctgtcatatgatctgtgatccttgttctgttcttttgtgttacttgttacttgatactactctcttgttactattctcttttaaaactctcaccgatcattaatgatcgtgagactggaagat

SEQ ID NO: 17948 - DNA, 409 bp, Gossypium hirsutum
  unsure (1)..(409): unsure at all n locations; Clone ID: LIB3145-056-Q1-K1-B4
gtgataaacaataagaagccccacaacttcaaataaggttttcttctttcttgctttcttttcttttcttcagggggaaagaaagagagaagaagatcctttttttgaaacanataanaagttgtttaaaaatggcgaataatgctattattggtatttgtgcggtgttcttggtggccttggtggtagccgtggtggtgggtgttacgcacataaaaaataagagcgatggtgaagagatatcgagttcgaacaaagccgtgcaagccctatgtcaacccacgaattataaagagacgtgccagaaaagcttggcgtcgtcaaattctagcgacgttaaggagctgataaggacaggtttccaatccgggctagtcgagataaagaacgtgttagcccattcagtgac

SEQ ID NO: 17949 - DNA, 393 bp, Gossypium hirsutum
  Clone ID: LIB3145-056-Q1-K1-B5
cccacgcgtccggggacgcctgggcggcggaggagacggtggggataacagcggcggcggaggcgatagtgagagtaaaggagaaggggagttttcggacgacggtggtaagaaaaagatggctttgtctatgtctcagaagttgacccttggatatgctgcacttgttggagtgggtggtgttatgggctatgtgaagagtggcagccagaaatcgcttgcggcaggaggattgtcagctgcggtgctctattatgtttatactcagcttcccacaaatccagtttttgcctcatacgttgggcttggtatatctgctgcacttttgggagtgatgggttcccgtttcaagaggtcgggaaaagtctttcccgggggggttgtatcactcgt

SEQ ID NO: 17950 - DNA, 377 bp, Gossypium hirsutum
  unsure (1)..(377): unsure at all n locations; Clone ID: LIB3145-056-Q1-K1-B6
cccacgcgtccgagaagaggatctaaaagctgaggatttctatttattaaaagacaaaacagaaacgcagaaaatcaactgccaaccaataaaataaaagcctttaaaaaatcgaagaaaaaacaagaatggaagaaattcaaaaaaataaaaaaataaaaatctttgcttggatttagagataatggagatcgganaaaaaaaaaaaaaaaaaaaaaaaaaaaaaaaaaaaaaaaaaaaaaaaaaaaaaaaaaaaaaaaaaaaaaaaaaaaaaaaaaaaaaaaaaaaaaaaaaaaaaaaaaaaaaangggggggggccgttttaaaggatccaagtttacgtacgcgtgcttgcaacgtaataacttttttatagg

SEQ ID NO: 17951 - DNA, 414 bp, Gossypium hirsutum
  Clone ID: LIB3145-056-Q1-K1-B7
ctcgccttcaatggcttctaatgaccgtggctttagtgggatgtcaagtaataggaaagttggctataatggtgagaataatgtgggttctgctatggaattatggcaagcttttttcgccaatcctactgaatggtgggataataggaaaaataagaggaacccaagatatccagattttaagcacaaggatactggagaagctctatggattgaaggtaggaatactccccattgggtgagatcccagttggagatactagattctagaatgagctctctgcaagatgaggatgaaaggatgttttcttcgatggccagtgacaatctcctgcctttttaatggtttaaaccagtgtgtttatgatgttactataaagtgattgcacttggccaggtccctgcattttgtat

SEQ ID NO: 17952 - DNA, 304 bp, Gossypium hirsutum
  Clone ID: LIB3145-056-Q1-K1-B8
agattctacgatgaaataaaatcaaccggaattatgcctagtgagaccatattggagaatttactggaggggttttgtagacgccggagattcaatcaagttaaagagttcatcaaatcttgtctagaagtttggcaggaaattagtgtcaagatggctgaggaggttgtaggtttatatttggaacatggaaaagtagaagaaatggaggagctactttcaactgtagtggagtcaggtcaggctgtcacacttttctcacaggtgaactccgggatcataaggatgtatgccgcgttaaatc

SEQ ID NO: 17953 - DNA, 412 bp, Gossypium hirsutum
  unsure (1)..(412): unsure at all n locations; Clone ID: LIB3145-056-Q1-K1-B9
attatccttgcatggaaatcctatatgagtgttacgaagatgttgcaagtggaagcgagattcgcagtgttgttttggctgggcgtcggttttatgaaaaggagggcctacctgccttccctatgggtaaaattgatcagacacggatgtggaaagttggtgagcgtgtccgagcaactagagcgaaagatgatttaggtccactgtgccctttcacttctggggtttttgtggcgctaatgatggcacagatcgaggtcttgagaaagaagggccactcgtactcagaaatcatcaatgagagtttgattgaagctgttgattccttgaaccccttcatgcatgctcgaggagtttctttcatggttgataactgntccacaaccgcacgattgggatcaagaaaatgggc

SEQ ID NO: 17954 - DNA, 247 bp, Gossypium hirsutum
  Clone ID: LIB3145-056-Q1-K1-C1
cagatacttgacgagggctaacgttgcctgatctaatgttctaaaaagtccttaaacggcaagatccaaaggttggcaggaatcgttatctatttgaagatatatatcttcctaacgatggtgaaagatttgatctcgccagaggtcgagggtctttttcttgatcttaagatctatcggagtagaacaagcgatgttctcagacaagcgtgctggatcgaaaggaggattatgtttggaaggatgt

SEQ ID NO: 17955 - DNA, 446 bp, Gossypium hirsutum
  Clone ID: LIB3145-056-Q1-K1-C10
tatgcctgatcttagtcaaatattggaaatggtcccagaaagcattgttgatattcctactgaaatggggaatgatggattgattgatcccgatacattggctgtaaatggtttgttatccatagaacttgatgagattggttctgatcctgacatagatgccttactggttaactctcctttttttcatgacctttttccaagtccagtatgtgaggaaattgagtcaacctcaatggagggtaaaagcaaggaaaatgaatggcaggcgatggacgatggatgggacaaatatcagcatatggataagctcacagaacagatgggtcttcttagatcagaaaacaaggggatctaatcttttatttccatttatttgaggtgaacctgaaagttgtattttttgactttattttggtcattggaaaacgagtaatgtcttcata

SEQ ID NO: 17956 - DNA, 413 bp, Gossypium hirsutum
  Clone ID: LIB3145-056-Q1-K1-C11
cccacgcgttcgaccattctatttagattattgtaaattcgagtacaaagcgctaaccaagatgagagccaagtggaagaagaagcgtatgaggaggctgaaaaggaagcgccgaaagatgagacagagatccaagtagatgcgccttggactgaaatagttttgccctgacaatcccttgtcttcataattatcctgcatatgttgcttgaagttgtgaagattgaagggtattttcaggaaaccttatctgttgtcttctaaatctaggttaaagttttaagactatttgagctgtttgtctagtactattagatattatggtggggtttttgggattgatctgtggaaacaggtattttaacatcctaaatgtttgaaattgaaacttttggtcttcttatatgggctat

SEQ ID NO: 17957 - DNA, 437 bp, Gossypium hirsutum
  Clone ID: LIB3145-056-Q1-K1-C12
gatggaggagacgggcttggaaatggggaaagcagacttcttaacagtgaccaataaagtcttcctggacaaatccaaacactgccattacgtcatcgtctttctccgtgcagtgctggcggaccctaatcaagttccacaaaacccggagccagacaagtgcgacggctgggattggtatgactgggataatctgccccaacctctgttttcgacgcttgacgaaatggtacgaagtggcttcaacccctttccctccacttgacagctgctgaatgaatacgttttcttttcttatatattgcttgcgtataattgatccatgggttactttaatttcatcatgatgtattcagtgaccaatgttgtttgtaatatgaatcttagatggtgaacttttatggtttatattatgtagctaagtgatttcaagagtc

SEQ ID NO: 17958 - DNA, 343 bp, Gossypium hirsutum
  Clone ID: LIB3145-056-Q1-K1-C2
cgtcactttcatgctcttggggctggggtgatagaggaggttcgggtccagcgtgataaaggctttggctttgtgagatacagtactcatgctgaggcagctttggctattcagatggggaacgctcagtcatatctatgtggcaagcaaataaagtgttcttggggcagcaagcctacaccaccagggacaagctccaatccacttccccctcctgcagcaccattacccggtttttcagccactgaccttttagcttacgaacgacaacttgccatgagcaagatgggtggattcatgctctatgcacccacaggacagcatctctgagcagcagcatggg

SEQ ID NO: 17959 - DNA, 438 bp, Gossypium hirsutum
  Clone ID: LIB3145-056-Q1-K1-C3
gaagaatatcccagaagtgaagccgtgagggtaacattggctccgagggccggaactttgtcgcttccacagttgtacgaagcggaaatcatcatgaactcacagttgccatggtctaaacagttggtccacaattggaagtggaccttgtctgtatggacatcgctctatgtatacatgttcttcctcatacttctcgtcggttgctttagacagctattctttccattcacagcatcagcaggtgtcgaaagagatgcaagcgtagaggaattgagagagccagtaatgggcggcagaagaaatgatcgggttgaggtttccgatctaatgagcaaatggcagcatagcagacggaagcggaaggcgatctttctgaacaaggagtctcagagatagcggggtcatcagcatcaagcatgagcctaactaggggaa

SEQ ID NO: 17960 - DNA, 451 bp, Gossypium hirsutum
  Clone ID: LIB3145-056-Q1-K1-C4
gtgaagttagcttgtacaattcttctgaggtttggaagaaatatacctgtaacatatctacaccttccgggatttgtactacacctgggcggctgacccctcaattctatagtcagatgtcagctgcggtgaatattagttatggtctatatcgctacggtccattcctggttaatttgcaagactgcactttcgtgcgcgatacattcacagatatcagtcatgatcattgcccaggtctgcgccgctatagtcaatggatctacatcggattagtaattgtatctgcagctgtgatgctgtcattgatgttttgggtgatttatgcaagagagagaaggcatcgcgtttatactaaacagcacgatgctagagtggaaggcgtaaacaagtcactagaacgttacaaaccgcacttgtttatttccgagtaactttcgttgcattactt

SEQ ID NO: 17961 - DNA, 332 bp, Gossypium hirsutum
  unsure (1)..(332): unsure at all n locations; Clone ID: LIB3145-056-Q1-K1-C5
ataaaatcccaagagaaacgccatattgtaaatgcaatctttgacggcaactgtagattccatagtttcttgtaaaaatctttagtttcggtctgtaataaatagcttctaggatctagattaannnaaaaaaaaaaaaaaaaaaaaaaaaaaaaaaaaaaaaaaaaaaaaaaaaaaaaaaaaaaaaaaaaaaaaaaaaaaaaaaaaaaataaaaaaaaaaaaaaaaaaaaatataaaaaaaaaaaaaaaaaaataaaaaaaatgggggcggcccttttaaaggaacaaattttacttccccgggtttgcaaattataagtttttttttagg

SEQ ID NO: 17962 - DNA, 414 bp, Gossypium hirsutum
  unsure (1)..(414): unsure at all n locations; Clone ID: LIB3145-056-Q1-K1-C6
gttctcatgttgcgcagttcattgcgcttgacggacagctcgatggaagactcaagtggcgaccaattgtcttgccagacaactatatcgagcatgcatcaccgaaagaacagcttgctcttgctgggctgactggacatcacattgctgcaaccacattgagtctcctcggacgtacccgtgaagcgttacttttaatttgctagaatgctgtatagttttccttactggattgatgatgtacctgaagagcgtgagaaggctaagcaaagaatgaacagtggaatagaatattgtagcattttgatgatccctgtaatttgtatagatgttgaagtgtgaattgtgaagttgacagagtagtggtgaagaaccagaattgaagtgaatgaaatntataagaaattctacctc

SEQ ID NO: 17963 - DNA, 328 bp, Gossypium hirsutum
  Clone ID: LIB3145-056-Q1-K1-C7
gtgaccagcaaaatcaagtcggcgtagaggactatatgggatgcgcttccgctcatggcatcgcgccgtccatcgcgatattcgacaccatacgagatgggcgactggattgcatttgcgtttatccttcgccgttgcattcaagggaacaaatgcaggagctggttgataatatgaagtgcatacttgtggatgcagggaagaatgttgctgatgaaactgagagttaaggggccagtctggtctttgtctgttggctcttcggcttataagtagtgtggtgtggcccaattctccctagcttcctttaagtcgagagctaccattg

SEQ ID NO: 17964 - DNA, 391 bp, Gossypium hirsutum
  Clone ID: LIB3145-056-Q1-K1-C8
cccacgcgtccgcaagcgttgaaatttaccgtgtttcatgtgggaatcaattggttcgtttccctttccgtctcagcaaccaacccgatcgttgtggctatccccggttcaatctctcatgcaaggaccaagcccaaactgtcctttcgcttccattttccggagaattcaatgtcgtacacatcgactatttgttccaaaatatatggctcaacgaccctgatcattgcacccccaaacgtctccttcatggacttaacctatccagtactccttttgatttgctatatcctcgaagcttcacgtttttcaattcctccgccgctgcatcaacacaacttcatcaagcaaagtatatatcttgtctcagcggcacaaacttttatgtcgt

SEQ ID NO: 17965 - DNA, 415 bp, Gossypium hirsutum
  Clone ID: LIB3145-056-Q1-K1-C9
ggaagcgatagcgaagtagagaagacgcagcagaaggagaaggagaggaagaagatgttagctatagctcctatcgcaaaaccccttgctggcaaaaagctctccaagaaaacccttaagctcgtccgaaaagcatctgagcacaaatgcttgaagagaggagtaaaggaagtggttaaaagtattcggcgtggtcataaaggattatgtgttatagctggaaacatatctcctattgatgtcataactcatgttccgatcctatgtgaagaggctgaaattccatatgtctatgtttcttcaaaagaagatcttgcaacagcaggagctactaagagaccaacatgctgtgttttggtgctaaccaagcccaccaaaggtgaactcgccatcgaggaacaagaaaagatgaaag

SEQ ID NO: 17966 - DNA, 329 bp, Gossypium hirsutum
  Clone ID: LIB3145-056-Q1-K1-D1
agaccccatgccttagctacacaccgttttacaggaaccaagtggcttcaaacccagttttcaaagagttctactacgtaactctacgtaaaattctggtgggcgataagcacgtcaaagttccgtacagttatttggtcccaggatcagacggtaacggtggcaccatagtggactcgggatcaacattcacttttatggagagaccagtgttcgaggtagtctcgaaagagttcgagaaacaaatgggaaattatagaagagtgcgtgaaatagaaaacagatcgggtttagccccatgcttcaacacttcgggctatacttcaata

SEQ ID NO: 17967 - DNA, 235 bp, Gossypium hirsutum
  Clone ID: LIB3145-056-Q1-K1-D10
ttaagctgcttgaaaagaatatggtattttgaaggaaaacataccgacaggcagtatgcatggtccagtcacgggaataaatgtgacgccccataggaggccgtgcaaattatgagatgcttacatggtctgtgaaaacttcggccatattagaagaacgacgaacatccggagatcatggcgtgacataccacgagtgttgactgcaatcctcttgctcaaagttacattttat

SEQ ID NO: 17968 - DNA, 176 bp, Gossypium hirsutum
  Clone ID: LIB3145-056-Q1-K1-D11
aaaacaaatgtgcaatgtttgaaggacaaacaaaccgacggggcagggggcaaggacacagggacggggcgacaaaatgaaccccccacaaagaaagccatgccagatagagaacaaactgacatgggccgtgaaaactacggaaagaaaagacgaacgacgaacagccggagaac

SEQ ID NO: 17969 - DNA, 416 bp, Gossypium hirsutum
  Clone ID: LIB3145-056-Q1-K1-D12
cgtgtttttaatatgtttcacgtaaacgtaagatccaagctagaattcaatgtccaagttgacacttaggctaatagaaggatttgattaaaactgacttgttgagaactcaattggaatgttttgcaagattgggattcgttagaatataggtcgaagtttggtgaagtttggtggagtttggtgcaagtaacactaattgataatgcaactgtggaattggaaatgctagaactagatgttctttgggtgttttctcggattatgttctttatggctgcctgtcatcattattcagcatttctagttcagttatcgataatcgatgaactaacttgattttgcagaatgaaaaccggaccttgtggaaattaggaacttttgcctcccgtttaatcacattttattccacgacg

SEQ ID NO: 17970 - DNA, 409 bp, Gossypium hirsutum
  Clone ID: LIB3145-056-Q1-K1-D2
ggttgcttgtggatggcggcataccatatcagtctctgttactggtggattatacacttatggctggagcaagtatggtcaactaggacatggggacttcgaggatcatcttgttccttacaaggtggaagctttagccgacagttctattaaacagatatcaggtggatggagacatacaatggcactcacatctgatggaaaactctacggctggggatggaacaagtttggacaggttggggttggtgacaataccgacatttgctctccagtgcaagttaaatttccaaatgatcagaaagtagttcaagtttcgtgtggatggaggcatacacttgctattaccgaagagcaaaacatcttctcctggggtaggggtacaaatggacagcttggacatggagaa

SEQ ID NO: 17971 - DNA, 412 bp, Gossypium hirsutum
  Clone ID: LIB3145-056-Q1-K1-D3
cccacgcgtccggtctttaccttccttatttcttgcatcattttctgctattaaaaacccccaaatcctaaacagaaagatcactactttcaaatctgtctgtcattgaactcgttataatcccaaaaggagtcatttttataccttttttttttgggagggggagtgtgtacccttatgaagaaggatctgcgttcacattggagtttaaggaagatggtgactagaaatgggatgttatacccaattcttggatttgcatcatgtgtggcttttctttacatgtcttttggtgacttgaagcttagtgctaatttcaccaagggaccgaggtttagttttgtggaaaggaatgggactcaattctttttgaatggtaaacccatatacattaatggatggaattcttact

SEQ ID NO: 17972 - DNA, 370 bp, Gossypium hirsutum
  unsure (1)..(370): unsure at all n locations; Clone ID: LIB3145-056-Q1-K1-D4
gaaagatcaaatctcccccctccccttgtgtttcgtggtgatcaacagtttaaggtttttgttctctttctgaacaacaaaaatggtggggactactgagggagtggattcatctgcctccaacaacaagaagaaccgtatccaagtctccaatacccagaaaccccttttcttctacgttaacctcgccaagaggtatatgcagcaatacaacgaggtggaactctctgctcttggaatggctattgctactgttgttaccattgctgagatattgaagaacaacgggctggctgtcgagaaaaaaatcatgacttctaccattgacatgagagaggaatcagggggacgaccagtncaaaaagcaaaa

SEQ ID NO: 17973 - DNA, 204 bp, Gossypium hirsutum
  Clone ID: LIB3145-056-Q1-K1-D5
cggacgcgtgggtttttaagctgcatccatcagttccgattctttattcataaaaaaacaaaaaacaaattatcaaattacaatataattaataaggcagcttctttttcttttcccctcatgtaaaaaaacaataaaagcccgttccatccttaaaaaaaaccattatattttaaaaaaaaaaaatgaacaagaggtatatac

SEQ ID NO: 17974 - DNA, 359 bp, Gossypium hirsutum
  Clone ID: LIB3145-056-Q1-K1-D6
cccacgcgtccgcccacgcgtccgcccacgcgttcgcccacgcgtccgcaaaatgttggtggtgagaaaccaaattaaagaaacaagaaaattagaagaagggtgatctattctcttgttgttgatcagcttttatcatccattctttgattgcttcattcattcattctttctttcttatcttcttcaaacttgattgctttcccttcacaatcacattgctgtaatggccgttcaagctcagtatccttccaatgtcctcctcttaaacagaagtggacaagaagggcatgagttttcgttgcaacaacaagggggaggggtttatgttgatcaatcccatatgttctttaacagca

SEQ ID NO: 17975 - DNA, 397 bp, Gossypium hirsutum
  Clone ID: LIB3145-056-Q1-K1-D7
agtactggttcactacctacgttctaaccgctgtagaacttggcaaagcacatggggagatcagaagtctgtaagaagaattgccgagaaatcgaagtgaactcgaatccgaaagttctttaattgatgaattaaatgcaagggtgagttctttagtggttgaaagagataattctatgcgggagttcgtttctcttcaagaggagtacaacgattcgaaactgttgtctgaaaataaagcagtggctgatgctgagcttttgggggaaagagaaaatgaaatccggctgctaaaggaaaaactcgagcttgctctgaacgatgcgagtgaaaataaaacaattgctgctgatttgaacaaggaaaaggaaagcctggagcgagcactggagatgga

SEQ ID NO: 17976 - DNA, 423 bp, Gossypium hirsutum
  Clone ID: LIB3145-056-Q1-K1-D8
taggaaccagcaggatgcccaaagtgcaataaatgacttaaatgggaagtggctcggaagtagacaaatccgatgtaactgggctgcaaaaggtgctacttccaatgatgacaatgccaaaagtatcgtagacttgaatggaccttctgaagaaggtcaagaaaaatctaatgacgattctccggagaacaatcctatgtataccactgtttatgtgggcaacctcgctccagaggttacatcagctgatctccacagtcatttccatgccctcggagcaggaactatcgaagatgtccgtgtccaacgagacaaaggtttcggttttgtgaggtacagttcacacgatgaagctgctctcgccattcagatgggaaatgctcgaattctttgcagtaaaccaatcaagtgctcatggggtag

SEQ ID NO: 17977 - DNA, 245 bp, Gossypium hirsutum
  Clone ID: LIB3145-056-Q1-K1-D9
ctaatgagtgccttgaaagaaatggtggttgttggcaggataaacatgccaacataacagcatgcaaggacacattcaggggaagagtatgtgaatgccccattgtgaagggcgtgcagtatagaggagatggttacatatcttgtgaagccttcgggcctgcgagatgtacgattaacaacggaggttgctggtctgacacaaaagatggattaactttctcggcttgctcaaaaaagcaatta

SEQ ID NO: 17978 - DNA, 354 bp, Gossypium hirsutum
  Clone ID: LIB3145-056-Q1-K1-E1
cgatatttgtattaagaatcgccctttagtgatcagtgaggtgaagaaaaatgtcttgctgtggtggaaactgcggttgcggctccggttgcaagtgcggcagcggctgcggcggttgcaagatgtaccctgagatgaactttgctgagcaaaccacaaccgggacacttgttcttggcgtggcaccccggaaagtgcactttgatggagctgaaatggaaactggggctgaaaatggctgcaaatgtggagataactgcacttgcaacccttgcaattgtaaatgagaaaaaaaagctaagcatattatggaagctgatctaaataatatatgatgtatttgggtttttacta

SEQ ID NO: 17979 - DNA, 354 bp, Gossypium hirsutum
  Clone ID: LIB3145-056-Q1-K1-E10
gattgaccataatccacaacaaattagatgacattattctatatttcctcgactgaatgctcagtaccggaagatttggttactgtcttcttcggagttgtgacatctgggacaaagagctgctattaccattttttattcttgagattagttaaagtagtaatataattccaagaaattctccaaattgttaatttaatttttgaagggagatgtatattccataatttcctacggacataaatgacacatataaatcaaggagcaatggaagagaagaggttattcctagtgcagcacaacatcggggctccgatgtgctattgccaccggggatgaatcctcggtttgagt

SEQ ID NO: 17980 - DNA, 449 bp, Gossypium hirsutum
  Clone ID: LIB3145-056-Q1-K1-E11
cccacgcgtccgggaaactgcatgctctttggtattcctctcataagtgcttctagcgcatcagagcctgcagtctctcatattagtgctttcgccaagcctgtaggacatatgcaagctgcattgcaccaggttcatgcacttgaatctgataaaaggtctgaaaattcaaacgcctcccagatggcagaggatgtttctgcttttaatgagcaggagaaaatagtgaagctgggtcagccccatgcacgggagtttcaaagcaaactgtctactgcttcaactaggagttgtactaaggttctcatgcaggggactgctcttggaaagtctgtggaccttaccaagttcaacaactatgatgagttgatcgctgaattggatcaattatttgagtttggaggtgaattaatggcccctcaaaagaactgggctgttgttatactgat

SEQ ID NO: 17981 - DNA, 409 bp, Gossypium hirsutum
  Clone ID: LIB3145-056-Q1-K1-E12
cccacgcgtccgtccacgcgtcttgtccaatacttttccttatgcagggtttcgaggcatatgttggagtactactgctcaagacagcatttttttgggttgttcctgaatggcagataatttttgtggcatacttttggttgttatggctgttgggaactttataaacacggtacagacactcgttgccaagtcaaggtttaaggcaaagatgaaaaaaacaaatggcaagcaagagttgtagagggggtgtttgtaattgttagctcaatcctaacatagcgtttatgatctcattttgtttctaatgttttgcggtgtcttgaacatgtttgtttaaatgaggcaatggccagttcacctttgtaaatggaaacgggcaatgcctagaactctcacttaaatttgc

SEQ ID NO: 17982 - DNA, 402 bp, Gossypium hirsutum
  Clone ID: LIB3145-056-Q1-K1-E2
ctaaattaataaaaagtaagaaataattaaacaaaattaagataattgaaaaaatatattaaaaaattgaggttgcgttagaaaaggagcaaagtcagtaaattttttaaaagggggaatagtggcgtgaactgtgaagaagtcctttttgttaaaaaattaaaatgacagagccaaagacttttttttttctttcatcgtcttcatcccttcagtctttaccaccagaacactcatttcaccattttggattgctggcgatccttgattgggatcgaacgatccaaaatggaaattgcacgagagttggggatttaggtaacttatgactggtcatggtgatataatgctccaagtagtacattatataatttggaaaaaattgaacatacctaatttgag

SEQ ID NO: 17983 - DNA, 336 bp, Gossypium hirsutum
  Clone ID: LIB3145-056-Q1-K1-E3
cccacgcgtccgaaaaaaaaaaaaaaaaaaattttaaaaatttaaaaaaaaaaaaaaaaaaggaaaaggcaaccaaaattgagagcaaagcgttagagagagaacaaaacaggaaaggagagcgatattttttctttggctaaaaaaaaaaaaggatccgagaatggcgagcgggtgggtcaaatctttgcaatgcaaatcgagagcatatgaagatgtttatcaccccagccctaagtatttgatccctagtaccagttgtacacgaagttctcaaagcatcaaggatgtcatccaaacggccaagaaaaaacccaagaaatcgggcaccaaacc

SEQ ID NO: 17984 - DNA, 353 bp, Gossypium hirsutum
  unsure (1)..(353): unsure at all n locations; Clone ID: LIB3145-056-Q1-K1-E4
cccacggtttgggagttgctaatgttgcaattttggaatcgtgctctatagagggtggagatttccagaaacttgcaaacttgcattcagtccatgatcatctagttaaaaggatggaaaagagaacaaagggggagactgatctggttgtcctatgccatggaggctttcagtctctgaaagagcttgaccaaccattcccagagagtgagattttgactgaagtcatgagttctgtggagcaatctggggcaaaatatgcagccctttatgtttctgacccttttaagtccatccactatcccggttatagagagctngaaaggtttcttgctgatgatactgcaaagaat

SEQ ID NO: 17985 - DNA, 96 bp, Gossypium hirsutum
  Clone ID: LIB3145-056-Q1-K1-E6
atttagaaacatgcttggaaatgctctcttttgttccggtaatgatttgttgaattaggaataaaatttcttataaaaaaccatgatttatggttt

SEQ ID NO: 17986 - DNA, 311 bp, Gossypium hirsutum
  Clone ID: LIB3145-056-Q1-K1-E7
gccacacgaccgcagtatagtttttgcatgtttgaacgctgattatgaatcagggaactcagttaagttcaatgagattctaacaatcttagcagccaaaattggcgcaaaagctgacggcaaaacggattcgagcaagccattaatggatgctgggaaagaaacatgtgcctctgaaactccatcaacagttgtgattgctaaaaggacatatttattatcaaaagtcatcttcgaaggtccatgcatggctgctattgagatttatgcttagagcactatacaagcttcggctgatcctagtgctttca

SEQ ID NO: 17987 - DNA, 433 bp, Gossypium hirsutum
  Clone ID: LIB3145-056-Q1-K1-E8
ggctgattggcatgcatgtcttgtattacaatgttggattcaagggttttgctgtgccaaaggaagagcagaataaagtttctaagttcacattccatggcctgcctgccgaacttagacatggaagtgttgtaattgcggctatcaccagctgtacaaacacatcaaaccctattgtcatgctcggggctggtcttgttgctaagaaggcttatgaattaggtttggaggtcaagccatggattaaaacaagtcttgctcctggatctggagttgttacaaagtattcgcttcaaagtgggctgcaaaaatacttgaatcaacaaggttttaacattgttggttatggctgcacaacttgtatcggaaattctggagatcttgatgaatcagttgcttcagcaatttcggaaaatgatatcattgctgcagc

SEQ ID NO: 17988 - DNA, 379 bp, Gossypium hirsutum
  unsure (1)..(379): unsure at all n locations; Clone ID: LIB3145-056-Q1-K1-F10
aataactatgcggtggtggtgagcactgagatggtgggttataattggtaccctggacgggacaggtccatgcttgtcccgaattgttttttcaggatgggatgctccgctgtgcttttgtctaaccgccgtcgtgactaccgncgtgctaagtatcggcttgaacaccttgtacggacgcataaaggtgccgatgaccggagtttcaggtcaatctaccaggaagaagatgaacaaggtttcaaaggtcttaaagtcagcaaagacctaatggaaatcggcggcgacgccctcaaaaccaacatcacaacattgggtccgctcgtcctcccattctccgaacaactcttcttcttcgccaccctaatttggcgccatt

SEQ ID NO: 17989 - DNA, 359 bp, Gossypium hirsutum
  Clone ID: LIB3145-056-Q1-K1-F11
aataactattctgaggtggtgttttctgaatttttggggtataaacgccaccggggacgggacaggtccatgctggtgccgaattgctttttcaagatggaatgctccactgtgcttttgtcttaaccgccgtcgtgactaccgccgttctaagtatttgcttgaacaccttgtacagacccataaatagtccgatgtccggagatgcatgtcaatctaccataaaaaaaattaacaatgtttcaaatgtcttaaaatcaacaaagacctaatggaaatcggcggcatcgtccgtaaaacctacattacaacatttggggcgctctctctctcattcttctaacaactattttattttt

SEQ ID NO: 17990 - DNA, 401 bp, Gossypium hirsutum
  Clone ID: LIB3145-056-Q1-K1-F2
gtgtttctctccgccaccacgtcttcatcatcatcgttccctacttttgctactttaagctcctcttcttcttaaccaccgtctttgtttttctctcgtttatccggtcggtgtatttttcaggaaaatccaaattttcccaaaagatttcccgaaagattcagccatggaagccgatgatgttgacacaccgggatcttcgacgaaggagtcatcacttccaacaacaagctcgttgatgccgaattcttcaacaactttgaagacgattttgatgactctgatatccactaaaaaaacaaagaagaatcgtttcaagtactcatctatattttttttccttcttactttcactttttagggtctgaaatttctaaaactttgttcaatttagttgaatc

SEQ ID NO: 17991 - DNA, 366 bp, Gossypium hirsutum
  Clone ID: LIB3145-056-Q1-K1-F3
tgtgttaaggcccttgcacatgacaagtggtccaaagggaaggatggttttcttatcactgatatttggggtgtggatgctggtagatcagatgtaaccactccaatagtttggctacagcatacggaggagaggatgtatctatgtgcttatcagtacaaaagccttacgttgatccttcttatccctctttcttctatccttaatggggagcaaggtgtttcaactgtgaaacagcaacttcttgaaaatgcctcactgaagattttgaaagttgaagaaaagttgtcaaagggatggggtggagagaatgcctatcatgtcagtgggtatcgctacttgatagtggatggtaacagagacata

SEQ ID NO: 17992 - DNA, 188 bp, Gossypium hirsutum
  unsure (1)..(188): unsure at all n locations; Clone ID: LIB3145-056-Q1-K1-F4
gctttcgataactatgcttgcagcatgtttttggtattttgggaataattgntacccaggactggacatgtccatgctgtgttgctggtatatcatatgtaaccactccaatagtttggcttcagcataccgaggagaggaactaccgacgtgctaattatcgcataaaacacactgtacggacgcat

SEQ ID NO: 17993 - DNA, 375 bp, Gossypium hirsutum
  unsure (1)..(375): unsure at all n locations; Clone ID: LIB3145-056-Q1-K1-F5
tgcagatcttcgtcaagactctaaccggcaagacgatcactctcgaggtcgagagctccgacacgatcgacaacgtgaagaccaaaatccaagataaggaaggcatccctccagaccagcagcgtctgatcttcgccggaaaacagcttgaggacggccggaccttggccgattacaacatccaaaaggagtcaactctccacctcgtcctccgtttgcgcggtgggatgcaaatcttcgtgaaaaccttgaccggcaagacaatcactctcgaggtcgagagctccgacacgatcgacaacgttaaggcgaagatccaagacaagggaggcntccccccagaccagcaacgtctcatcttcgccggaaaacaac

SEQ ID NO: 17994 - DNA, 172 bp, Gossypium hirsutum
  Clone ID: LIB3145-056-Q1-K1-F7
gccgaaagagaatggaaaaaggtttctgggatctggtgaagaccagaaaaagcgagagaactgacaatcaaccaattatccaattaccgcataccaattccttggttggtagcgcccaaagggatgcatttccttcagctaaaaaagctgaggctcctagaaggcgtgctga

SEQ ID NO: 17995 - DNA, 247 bp, Gossypium hirsutum
  unsure (1)..(247): unsure at all n locations; Clone ID: LIB3145-056-Q1-K1-F8
tcgnccacacgatctgatngaagtgtttcatgagtttaggggcagaaagaaaaacgggagtattcgaaatgatatgcgacccccgcatcctcaaagcaagcataggataataatcgacaacaaaaagatgctatcaaagcattaatgctctctatcaaagctggaggtgtcagaattaacctaaacagctgcaagcacaggtatgtctgaagagtagcaacggacgccacgtgacctgattcaagca

SEQ ID NO: 17996 - DNA, 332 bp, Gossypium hirsutum
  Clone ID: LIB3145-056-Q1-K1-G2
attcaggacatagaccctacactgacgggtacgtactggctgtatttagatctagactaatcattatttatgtcgagctcgtgattctgtgatgtactaaaagtgttaaacctgatgaagctacctttgaagcttccgcttggagtactgattgtagcattgccatgtacagaccgattatgttcttgatacataaccgcaatgtatataaaaccaatgtggtgcatgtaacagatctggcacataaagctcaagatatcggatcaaagagaggaaagttatcggttgaggattttctgtttctaattcgcaaggacttgccgaaactaaat

SEQ ID NO: 17997 - DNA, 290 bp, Gossypium hirsutum
  unsure (1)..(290): unsure at all n locations; Clone ID: LIB3145-056-Q1-K1-G4
cgttgatattgtcacctacaagagaactggcgtctcaaacagagaaagtgataaggacaattggcgatttcatgaatatacaagcacacgcgtgtattggaggcaaaagtgtgggtgaagatataagaaagctagaaaacggagttcatgtagtgtcgggaactcctggtagagtctgtgatatgatcaagaggagaaccctacgtacaagagctattaaactatngattctcgatgaatctgatgagatngtaagcagagggttcaaagatcaanattacgatgtttac

SEQ ID NO: 17998 - DNA, 348 bp, Gossypium hirsutum
  Clone ID: LIB3145-056-Q1-K1-G5
cgttgatattgtcacctacgatagaactggcgtcttaaacatagaaggcgagtaggacaatgggcgacttgatgaatatacacgcacacgcgtgtatcggaagcaaaagtgcgcgtgaagatataacaaagctagaaaacggagtgcatgtaatgtcggcaactcctggtcgagtctgtgatatgatcaagaggagaaccctacttgcaagagctcttaaactattgattctagatgaatctgatgagatgttaagcagagggttcaaagatcatattgacgatgttgacagacatcttacacccgagcttcatgtttgtgtgatatctgctacacttactcatgaaa

SEQ ID NO: 17999 - DNA, 238 bp, Gossypium hirsutum
  Clone ID: LIB3145-056-Q1-K1-G6
aaggacaaggggcgatttgatgaatatacaagcacacgcgtgtattggaggcaaaagtgtgggtgaagatataagaaagctagaaaacggagttcatgtagtgtcgggaactcctggtagagtctgtgatatgatcaagaggagaaccctacgtacaagagctattaaactattgattctcgatgaatctgatgagatgttaagcagaaggttcaaagatcaaattaacgatgtttac

SEQ ID NO: 18000 - DNA, 430 bp, Gossypium hirsutum
  Clone ID: LIB3145-056-Q1-K1-G7
cccacgcgtccgctagacttataaatttaagctaaaaaggcccctccatattggcacctaagaagcacctgcaggaaaaatggcatccatcaccatgacaacatcattccttagcaccactaacctcacaaagggttctccaagaattacccagcggagactagtggttgccaatgctgctaagggagctcaagtggagagtgtccagatgagcggtgagaggaaaacagagggcaacaatggcaggagggagatgatgtttgcagctgcagctgctgctatttgctcggttgcgggggttgcaacggcggagcctaaacgtggtagcgcagaggccaagaaagcgtatgctcctgtttgtgttactatgccaactgctaggatctgtcgcaactgaggcagtgccactgcacattgctcgagtgccatg

SEQ ID NO: 18001 - DNA, 444 bp, Gossypium hirsutum
  Clone ID: LIB3145-056-Q1-K1-G8
ctgaaccagagaagaaacgccaagtatcatttcaaggtgtaggaagaactcttggtagcagcagtacttcggcagctcctgaaccaactaccggttccagtcctctcaacacagctctgaacccttcacctggcttggttgtagatgaaagtttaccatcgacctcaattcaacttaggctggctgatgggactcgcatgataacccgcttcaatctccaccacacagttgatgacatccgttccttcatcaattcatctagacctgggggtgcaacaaactatcagttgcagataatgggtttccctcctaaacttcttactgatccaacccaaaccatagagcatgcaggccttgccaattctgtggtaatccagaagttctaagctccgactgtgtcgaaagtgtcgtatctgcttatctctacaagtgcttattgtacct

SEQ ID NO: 18002 - DNA, 413 bp, Gossypium hirsutum
  Clone ID: LIB3145-056-Q1-K1-G9
ggctagggctgacactaggaaacgtgtgaaaggcagatttgtgaaagcaggcgaagaatatgattatgatcctctcgttgcacggaacttctaaggcgaattatggaatcatgcccctgatcatgaaggtaagagatttaataagatgataattagtccatctaaaaatgtttgtaaataatgttattcataatggcatgataagcattgaaccgagactctagcctattttcagtaaagaaagaaaaggtctacaatggatcaattgataaaataaagagcttattgtagaatactagattgaagaaattaagaaatcagtaacattagagcgaagaaaatataaagaaacactgaaaatttagtcatcttcagattagcctacttttttttggtttatagggaaagtccaa

SEQ ID NO: 18003 - DNA, 445 bp, Gossypium hirsutum
  Clone ID: LIB3145-056-Q1-K1-H1
gattcttcctcacgtcgataactttgcacatatcggtggcttcttgaccggctttctccttgggtttgttttactgcttcgtccccaattcgggtgggttcaatgtcagcatgttcctgctggtgcacctgttaaatctaagcacaaggcataccagtatgttttctaggtgattgcagtggtcttggtcataattggattcacaatgggattggtgatgctgtttagaggagaaaatggaaatgaccattgcagctggtgccattacctgagctgcgttcctatatcaagttggcactgtggaaaataataatgaaaccattaccattactactataaaccccagtcttcatcttgtcacactccattctttcacaatttttattcggttattaatttcttccgcttgatatttgcctatgtatatgctttaagattatatttg

SEQ ID NO: 18004 - DNA, 408 bp, Gossypium hirsutum
  Clone ID: LIB3145-056-Q1-K1-H10
ccgacccacacgtgcgggcaaaagaaggagaaatggggtgggcaattgctgttcatggaggagctggagacatccccctttctttgcccccagaaaaacgtctccctcgtgaagctggcctccgccgctgccttgacgttgggatcgccgctctcaaagcccataaccaccccttggacgttgttgaacttgtggttcgtgaactggaaaacaatccgcatttcaatgcaggaaaggggtctgtcctcaccacctcaggtacagttgagatggaagcatgcatcatggatggcaagacaatgaaatgtggagctgtttcaggtgtcagcactgttgtgaatgccatatcccttgcgccgttagtcatggacaagacttctcatatttatctggcatttgatggtgctg

SEQ ID NO: 18005 - DNA, 260 bp, Gossypium hirsutum
  Clone ID: LIB3145-056-Q1-K1-H12
cccacgcgtccggtccaatgaagtttgtaatagagaggataaacgaacaatagcacctgagcatgtactcaaggctttagaggttcttgggttcggaaagtacattgaagaggtctatgctgcatatgagcagcacaagattgaaacactgcaggactctttgaaaggtgggaaatggagcaatggggccgagatgaccgaggaagaagcagtagctgagcagcaaagaatgtttgccgaggcacgagcaagaatgaatg

SEQ ID NO: 18006 - DNA, 358 bp, Gossypium hirsutum
  unsure (1)..(358): unsure at all n locations; Clone ID: LIB3145-056-Q1-K1-H2
gacattataccagcagtcatcattcgccctaccatcgtaactagcacttacaaagaacccttccctggttgggtcgaaggaatcagaaccattgatagcctatcagttggttatgcaaaaagcaaattaacattcttcctgngagatctggaggcaatagttgatgtgataccagcagacatggtggtgaacgccataattgtagcaatgatagctgaggcaagacatcaacaaccccaaaccatttaccaagtaggttcctcaatcagaaaccccctaaggtattctaatcttcaagactatggcttccgctacttcaccaagaatccatggatcaacaaagatggaaaacctgtga

SEQ ID NO: 18007 - DNA, 357 bp, Gossypium hirsutum
  Clone ID: LIB3145-056-Q1-K1-H3
gtaaagagtcacaaagaagccgctcaattcagacaccgtactttcccttactacgaccagctgactccatatacgtaagagatcgagcgactgggaaagatgctcaaacagctgctgatgttcaataaataaatgctgacgatatacctactacagatatgaatgaagagagaaacacattctatgactgcgaagctgacgtctctttggacgacagggatgtttttggtccggagcggcgaggagatagagaccaaaggggttcctcatcttcgaacaagagaaagaagaaatctgatgctcgtgataatatgtattcttcatttgatgaagctgccactttattggccgaaaaca

SEQ ID NO: 18008 - DNA, 242 bp, Gossypium hirsutum
  Clone ID: LIB3145-056-Q1-K1-H4
cccacgcgtccggaaaaaaactgaaaggtgttgtatagcattagaagatatccaagcccaatcaatgttttcagatggccaaacatttacaagttacaataatctaccatttgcagtgaaatgtttacagcttataataacctcatcatttgcagtgagtgctggtacataagcactcgccatcatccctttcatattgcctgcagtgctaacatcaactattactctggtacacccccccc

SEQ ID NO: 18009 - DNA, 434 bp, Gossypium hirsutum
  Clone ID: LIB3145-056-Q1-K1-H5
caaactcgcccctcccttcctctctgcttttactttgctaagtccaagccttcgacaatggccgaaccctctaccatttcaccagctcccctcttgaaagatgagctcgacatagtcattccaaccattcggaacttggactttttggagatgtggaggccctttttccagccttaccatctcatcattgttcaagatggtgatccttccaagaccatcaaggttccggagggcttcgactatgagctttacaataggaacgatatcaacaggattttgggtcctaagtcttcttgtatctctttcaaggattctgcttgtcgctgctttggttacatggtttccaagaagaagtacatttataccattgatgatgattgctttgttgcgaaagatccgtccggcaaagacattaacgcactggagcagcacat

SEQ ID NO: 18010 - DNA, 172 bp, Gossypium hirsutum
  Clone ID: LIB3145-056-Q1-K1-H6
gaaaacattgaaccaaggaaccgcaaggggttctgctattggatttaagttggacagtcttctaaagctcacagatacacgtgcttcaacaagcaagatgacgctgatgcattatctttgcaaggtcctagctgccaaggcaccagcacttctagattttcacctggaattt

SEQ ID NO: 18011 - DNA, 415 bp, Gossypium hirsutum
  Clone ID: LIB3145-056-Q1-K1-H7
aagaagtagaaagagagaaatcaaagatggggagaggcaagattgagatcaagaggattgagaactcaagtaacaggcaggtcacttactcaaagagaaggaatggaatcatgaagaaagctaaagagattaccgttctttgtgatgctaaagtttctcttatcatctttgctagttctgggaagatgcatgaatattgcagcccttctactaagttgattgatattttggaccaatatcagaaaacttctgggaaaaagttatgggatgctaaacatgagaatctcagcaatgaaatagatagaatcaagaaagagaatgatagcatgcagattgagctcaggcatttgaaaggggaggatatcacatctttgccttacaaggagctgatggctttagaggatgccctcgagaa

SEQ ID NO: 18012 - DNA, 419 bp, Gossypium hirsutum
  Clone ID: LIB3145-056-Q1-K1-H8
acccacgcgttcgaagagtataaagagagaaatctttttggtgataggcttgattgagatcaagaggttcgataactgaagtaacaggcacgacacttactcaaagagaaggaatggaatcatgaagaaagctaaagagattaccgttgtttgtgatgctaaagtatctcttatcatctttgctagttctgggaagatgcatgaatattgcagcccttataataaagtgattgatattttggaccaatatcagaaaacttctgggaaaaagttatgggatgctaaacatgagaatctcaccagtgaaatagatggaatcaagaaagagaatgatagcatgcatattgagctcacgcattttaaacgggaggatatcacatgctttccttacaaagagctgcatggtttacaagatgccc

SEQ ID NO: 18013 - DNA, 338 bp, Gossypium hirsutum
  Clone ID: LIB3145-056-Q1-K1-H9
cccacgcgtacggttataattttttttgcatcttacctctgctctccatccacttgtaggttgactctggatcggggtactttagatcctaatgacagagtaactgaacttaaatttgagcagcgagatggattaaaacatagcatgcggaagaggaaatgatgcattcttttgggtacagataaaatgcgttgctaacgattgccgtgactattctagcgctaatgtgcgccatcacatctgtatcggacaacttaaacactccctcttgctctgcatagatcaagattatgaacattaattggttccagaagcaagcacaggggcatgatgagggc

SEQ ID NO: 18014 - DNA, 378 bp, Gossypium hirsutum
  Clone ID: LIB3145-057-Q1-K1-A1
gtggttggtgaggtgttggaagttgggtcagatgtaagcaagttcagagttggtgatattgttggcgttggttgtattgttgggtgttgcagaaactgccgaccatgcgactcagacaatgaacaatactgtcttaagaagatctggtcgtacaatgatgtttacactgacggaaaacccacccaaggtggctttgctggttccatggtcgttgatcaaaagtttgtggtgaatatcccagaaggaatggcaccagaacaggtggccccgctgttatgtgcaggggtgacagtttacagcccattgaatcactttggtttaatggggagtgggttaaggggaggaatattgggacttggaggtgtaaggcacatgggg

SEQ ID NO: 18015 - DNA, 407 bp, Gossypium hirsutum
  Clone ID: LIB3145-057-Q1-K1-A10
cccacgcgtccgagcatatcaataagcggaggaaaagaaacttaccaggattcccctagtaacggcgagcgaaccgggaaaagcccagcttgagaatcggtcgccatcggcgtccgaattgtagtctggagaagcgtcctcagcgacggaccgggcccaagtcccctggaaaggggcgccggagagggtgagagccccgtcgtgcccggaccctgtcgcaccaagaggcgctgtctacgagtcgggttgtttgggaatgcagccctaatcgggcggtaaattccgtccaaggctaaatacgggcgagagaccgatagcgaacaagtaccgcgagggagaatcagaagaggccaagaaaggaatgttcgtaaagggatatgtctactaagctgctgcaaacaaagctt

SEQ ID NO: 18016 - DNA, 396 bp, Gossypium hirsutum
  Clone ID: LIB3145-057-Q1-K1-A11
cccacgcgtccgcaaaagttttgctagagggatggatcgctagggatggtatccattgtggttgttgtagtaaaatcctcacagtttcaaaatttgagattcatgctggaagcaaattgcgccagccatttcagaatatatacttggactctggtgtttctctccttcagtgccaagtagatgcctggaacagacaagaggagtctgagcagattggtttccattctgttgacgttgatggtgatgaccccaatgatgatacttgtggcatttgtggagatggtggggatctaatctgttgcgacagttgcccctcaacatttcatcagagctgcttaaatatagagtttttaccagcgggtgattggcactgtccaaattgcacatgcaaatttt

SEQ ID NO: 18017 - DNA, 411 bp, Gossypium hirsutum
  Clone ID: LIB3145-057-Q1-K1-A12
gcatgaccatgttgatgcttggccattcaaggaaccagttgatgcccgtgatgtccctgattattatgacattatcaaagaccccatggatctgaagacgatgtcaaaaagagttgaatcagagcaatattatgtaacacttgagatgttcgtagctgatgtcaagaggatgtttgccaatgcacgcacgtataattctcctgataccatatactataaatgtgcaaccagattggaagcacatttccagagcaaagttcaatcaggtcttcaatctaacaccaaaattcagtagggtcttcaatcaggtcttatgatccctgaagatcagatttcagcgattccagctgtcccatttcaacaatatgtaacagtagtcttcatatactgtctataatttgcagatttttc

SEQ ID NO: 18018 - DNA, 180 bp, Gossypium hirsutum
  Clone ID: LIB3145-057-Q1-K1-A2
atttgaagtgattgttggtatcttgataggggagtgtatattaagagaaaaagagttggaattgttgcttttgatgcataagaatttgattttggatcatttatgaaggggatgtgtgaattatgataaaaattttatgggtttgctgtgattgtggaagaacaaaggatagtttatgtt

SEQ ID NO: 18019 - DNA, 223 bp, Gossypium hirsutum
  unsure (1)..(223): unsure at all n locations; Clone ID: LIB3145-057-Q1-K1-A3
tgatgggtgggatacttgatacattttgtttgtcataaacagaaaaagagatcatagttggcgctttttatgcatgaggaatgtggctttaagctcatccaccaacgccttganacgaagcatcataccatggtcatgctatatttgcgatcaatgatgaacacactgtcggataacccacccaaagcgtctgtaatgatagcatggaatttgatcattagac

SEQ ID NO: 18020 - DNA, 137 bp, Gossypium hirsutum
  Clone ID: LIB3145-057-Q1-K1-A4
atgggtagtgatgggtgggatcttgagacatatgtttttatatacagaaaaagagatattattggcgctttttatgcagaggaatgtggcccaaactcactaacaatcgacttatacaaataacaataatagtcttt

SEQ ID NO: 18021 - DNA, 372 bp, Gossypium hirsutum
  unsure (1)..(372): unsure at all n locations; Clone ID: LIB3145-057-Q1-K1-A9
ttcttcttcggtggccaagaagctttatggtggtcatagtctcttcgattaccatgttggagaaaatgctaaatgctacactgctctaaacatgaacaaaacagccatgaaatggaacttcaattcagggtcttgctatatttgaactttgtccttcacggttggtctaaaagaaaagcaccattgcttaatattaaagagtagaaatggtttcttgggagggattgtgtacataatttgtactatatcagtttaaaaacaacaaaagaaaaatatatgttgaaagggagtatattcttttgtaacatctgcctatttttaatacaaggatgatctattcataccccnnaaaaaaaaaaaaaaaaaaacccc

SEQ ID NO: 18022 - DNA, 284 bp, Gossypium hirsutum
  Clone ID: LIB3145-057-Q1-K1-B1
agccgtcggcccacgcgtccgggttggtgcatttgaaaccgtcatctccctccaagacggcaaaccttcatcaaacaccgtcacttgagttgtgaagaacatctctaataacagtacgtttcagggaagaggggtggagaaaaacctaactttgagagttactcgaatacacactttgagttgaagagatttcatgttgactcaactctagcttgatcacggaattcgggtctgactgcatcttaatacagctgcaagggtctttttttttcgagttctacaat

SEQ ID NO: 18023 - DNA, 399 bp, Gossypium hirsutum
  Clone ID: LIB3145-057-Q1-K1-B10
cccacgcgtccgcccacgcgtccgattcatttcattgtgttatctaagatgacagacttaaccaagaagaaattaaccggaaaagtagccatagtcaccggcggagcaagcggtatcggcgaagccacagcgcgtttgttcgccgagcacggcgcccgtatgatcatcatcgccgatatccaagaccaactcggccaacaagtagctacttcaatcggttcccacaattgtacttacattcgctgcgacgttaccgatgaaaaccaagtgaaagcattggtcgaatcaagtattcaaaagtatggtcaacttgatataatgtttagcaatgctgggattataagtaagtccgatcagagcattcttgatcttgatttccaacagtttgatcggttgatg

SEQ ID NO: 18024 - DNA, 409 bp, Gossypium hirsutum
  Clone ID: LIB3145-057-Q1-K1-B11
cccacgcgtccggaataatcattcttcagtgttggagagtgtttctttcatatttggaatcaagaatgagggtgttaggggaattccctgatttaaatattttagaaccaaaaggtggtgttgtaaacgcagtaaataacaatcagatgcagaatggaggttcgaatgaggctagccgcagagctggtggtctctctggaaatttacatgaacccgaccttgagatgcatggaaacatcccattgcctcaggaggaaatacaaccaggctcagttggggattcagcttgtgaggccaatcctacatcggctaccaatgtggtaacgaaggccgaatctcacttggctcagcagccgatagctaaattatcaaaagatgccgagtccactaaataggatttgcctcatgc

SEQ ID NO: 18025 - DNA, 411 bp, Gossypium hirsutum
  Clone ID: LIB3145-057-Q1-K1-B12
gcatgaccatgttgatgcttggccattctaggaaccagttgatgcccgggatgtccctgattatgatgacattatcaaagaccccatggatctgaagacgatgtcaaaaagagttgaatcagagcaatattatgtcacactcgagatgttcgtagctgatgtcaagaggatgtttgccaatgcacgcacgtataattctactgataccatatactataaatgtgcaaccagattggaagcacatttgcagagcaaagttcaatcaagtcttcaatctaacaccaaaattcagtagggtcttcaatcaggtcttatgatccctgaagatcagatttcagcgattccagctgtcccatttcaacaatatgtaacaagagtcttcatatactgtctataatttgcagatttttc

SEQ ID NO: 18026 - DNA, 411 bp, Gossypium hirsutum
  Clone ID: LIB3145-057-Q1-K1-B2
aacctatgtacgtaataaatgaaaaataaatttcctctccctccaagacggcaaaaccttcatcaaacaccgtcacttgagttgtgaagaacatctctaataacagtaggtttacagggaagagggggtaggagaataaacctaagcttttgagaggttactccgagattacacagctattgaagtttgaaagtagattttcactgttttgacttcgaaactcctaggtcttgattcgatcgtgagattccgtgtgtactgatcttgacatacttcacatacagtcttgccaagggtgtgcttcttctttttttccgaagttatactacgaatgattttctatcatgtgaataaagcaatatactcatgacttccatttactgttaggagataatgcggacgcctgataac

SEQ ID NO: 18027 - DNA, 301 bp, Gossypium hirsutum
  Clone ID: LIB3145-057-Q1-K1-B3
ggaagatactctaagagaagagttttcacatacattggctgataaggaagaggaaataaaggagaagtcagcaaagattgaacatgctgagcagtccttgacaactctgaagttggagttgaaggctgctgaggcaaagattaagagttatgacacagaagtatcctcactaaaggttgaaatcagggagttaattgacaaggtagaaaatactaatgccaaggccctgtcatttgaaagagaagcgaagatattggaacaggagaagacacatttggagcagaagtactcatccgagttt

SEQ ID NO: 18028 - DNA, 415 bp, Gossypium hirsutum
  Clone ID: LIB3145-057-Q1-K1-B4
cccacgcgtccgcccacgcgtccgcccacgcgttcgtccacgcgtgcgtgatactcaaaattttgaaaagtttgacgagtccgacgatcagtgtcctatgccatcaaaatctggtccatggagaaaaatgctttcatccaaggacgtaaattttgtgggatacacatacaaaaactttgaaattgtcaatgattttcacgtgcctggaatggccgagttgaagaagaagagctccaaatcaagtacgccgtcagttaagacactttttgacagtggggcagaggcatctgatgcttcagactcaacacctggtgcacagcctgttcaagggagctttttgaatctcttgcctccagaactggaagccactgtaaagcagtgtggatcccagtaactcaccccatctcttagaact

SEQ ID NO: 18029 - DNA, 310 bp, Gossypium hirsutum
  Clone ID: LIB3145-057-Q1-K1-B5
ttaagattcacgcccaacataagcattacaccataccatgcaaatgttaaggagtctcgctttaatgttgatttctataaagagtttgatgttgttctgaatggacttgataacttagatgcaaggcgccatgtaaaccgtctttgcttggcagctgatgtcccactggttgaaagtgggaccacagggttcttgggacaggttactgtacatttgaaggggaatagaaatttagcattgtctacgacgaaaattaaaacactttttgacaattgggcaaaagacatctgatgcttaaaactaaacacct

SEQ ID NO: 18030 - DNA, 328 bp, Gossypium hirsutum
  Clone ID: LIB3145-057-Q1-K1-B6
acccgtccaaagttcattcgatttcattgatgggtataacaagcccgtcaagggaaggaaaattaattggatgaaggctggaatattggaatcacatagagtcttgactgtaagcccatactatgcccaagagcttgtattggtgaagacaaaaggtgaactgatacatattcgtaaatggctaccggcttggaatgtgatgtaagatggatctgcttgcaaacataggtaattatcacactgtatgagcaagcatgtaagaactttaactgaggggatgcttgcacgaatgtcttatcgattatggggctaaaacaaaggtcaatat

SEQ ID NO: 18031 - DNA, 368 bp, Gossypium hirsutum
  Clone ID: LIB3145-057-Q1-K1-B7
gaacggtctgagtcttgatggaaggaattttttcgtcaacgaagcacaatctcaccgaagcggtgacggctgtggtggtggaggattttgaggaaacggctggtacaaccgtctatgccgtggatattgtgttcgccgtaaacgtggatatggaagtggttgttaccgatgtggacaccgggatggtcgtggatacggataccgtggatcttcttactcaggttgcggccgctcttgggctcatgttaacgcagtttatgatttgagtgagcttcaggtcttattttatggtttaaggggtttgtttgctagtgtggggtttctatccaaatgatatgttgcatcattcggagtcttaaaacatctaa

SEQ ID NO: 18032 - DNA, 265 bp, Gossypium hirsutum
  unsure (1)..(265): unsure at all n locations; Clone ID: LIB3145-057-Q1-K1-B8
aaaaaaaaaaaaaaaaaaaaaaaaaaattttttttaaaaaaaaaaaaaaaaaaaaaaaaaaaagggaaaataaaaaaggagggagggggattaaaaaaannngggggggacgattttaaaagatacaaaatttttttttctttcttttannnggggggggttttttttggggggcccttttttaaattcaattgtcgccacttttcaatgccgtgattgggaattttattggggttccctaacttaatttttttgccgcgctttt

SEQ ID NO: 18033 - DNA, 395 bp, Gossypium hirsutum
  unsure (1)..(395): unsure at all n locations; Clone ID: LIB3145-057-Q1-K1-B9
gccttatcctaatcctctctgcaattcaaagaagaagaaaaatggcttcttcagctctctcaacactttctctccgcttacccacttcctctaatcctacgaacccttcccatttcaaagccccttccctccaattccctctccgttccctcactcctcctaacctcacccaccgttccaccgccctccgcgccacggncgcccccgaaaaaatcgaaaaacttggcaccgaaatctccaacttaaccctcgaggaagcccgcacccttgttgactaccttcaagagaaactcggcgtctctgccgctgccttcgctcccgcagccgtttcagttgccgcccccggtggtgccgatgccgaagcggctgttgtcgaaaagaaaaccgagttcgat

SEQ ID NO: 18034 - DNA, 352 bp, Gossypium hirsutum
  unsure (1)..(352): unsure at all n locations; Clone ID: LIB3145-057-Q1-K1-C1
cttcggttgggaaaaaaaatcggagttggcatgggccaaagatcctgtgatacaagcagcgtttgaaaaatttaatgggaggttaatggagcttgaaaggattattgatgagaggaatgcaaacaaggatntgaggaacagaaatggtgctgggattgtgccatatgagtttttgaagccgctctctgagcctggggtcactgggaagggagttccatatagcatctccatctgagcttaatatctcaaattgttctgttatgggatgctcgaatgccttcggggtatggtatggacatgtgtctacttgaaataaaattgacctctttaaaataaaaataaaattgagagc

SEQ ID NO: 18035 - DNA, 377 bp, Gossypium hirsutum
  Clone ID: LIB3145-057-Q1-K1-C10
acactattcactctcgcccaaacaggttttttttcaatgaatggccgtctaaaataaagctggggatctgcatcactatgagaggaatgaaagatatctccctactccaaataacataccctaaactcagaaaccacgtttacttacttcgcctatattgctccttttaacaccctaatatatatggcttatatggcgaaacgggtatgaataactgatgcgatgtcttttttgctagaacataaaccctatctgtaacgcgacctctacaacaccatattcagcttttacttttgagactacggtcacatagcaggggcatggaccttacttgacttaccacgactcgtatctacctattactagtggatctggca

SEQ ID NO: 18036 - DNA, 277 bp, Gossypium hirsutum
  Clone ID: LIB3145-057-Q1-K1-C12
ggtgtgcaggttaccgaacccgacacctattatcttccatatctgcaggcagtgatcaaggagacactcaagctccgaatggccatccctctactaatcccacacatgaacctccatgatgcaaagcttggtgggtatgacatccctgcagagagtaagatccttgtgaatgcatggaggttagccaacaacccggctcactggaagaacccagaaaaagttccgccccaaaaggtttttcaggagggattgaagggtgaaaccaatgggaatgact

SEQ ID NO: 18037 - DNA, 305 bp, Gossypium hirsutum
  Clone ID: LIB3145-057-Q1-K1-C2
cggacgcgtgggattatttgttgcttttttctgtaaaagagaattttaatctctcatcatgtgtaagaaatttgtaatacgtatcttcctaatatcaaaggcaatatttattatgtgcaaaaaaaaaaaaaacaaaaaaaaaaaaaaaaaaaaaaaaaaaaaaaaaaaaaaaaaaaaaaaataaacacgggcggcactgctaaaaagagccccatatacgcgcccccgtctgcgcctaaaaatctcctattgttgctgtaccgagatgctctaaagcgtccggggttttacatcgacaagtctgg

SEQ ID NO: 18038 - DNA, 403 bp, Gossypium hirsutum
  unsure (1)..(403): unsure at all n locations; Clone ID: LIB3145-057-Q1-K1-C3
tttccgagtcttataaacatgcttaatgcctttgcttttcaacattggaacagtaacctctctaaccgcgttcctaattgtactagnttttgacatgctattgtattgaggtctgcctgtgtgattattgcttttgtgacaggttgattggctaactgagaagatgcgtagcaataacttcacagtatcatcaatgcatggagatatgcctcagaaggaaagagatgcgattatggctgagtttcgtgatggtgcaacccgtgttcttatcacaacagatgtttgggccagggggctcgatgttcaacaggcaagtctcgggagattattatgtctgccatttttttcatgtattttgctagttaaatgctttctagttgagtaaatgttaattttctttttc

SEQ ID NO: 18039 - DNA, 406 bp, Gossypium hirsutum
  Clone ID: LIB3145-057-Q1-K1-C4
cccacgcgtccgcccacgcgtccggagacagtccaatataccttcctggattacctagctgcgggttttgaacttaactttatggttgctattgatttcactgcttcaaacggaaatccccggctccctgattccttgcattacattgatccatcaggacggctgaatgcataccagaaagcaatctatgaggtaggagaggtattgcagttttatgatgcagacaagcgctttccagcttggggattcggagcacggcccattgatggtccagtttctcactgtttcaacttgaatggaagcagtaactactgtgaggttgaaagaattcgaggaattatgatggcctacaccagtgccctttttaacgtgtctcttgcagggccaacactgtttgggcatgtga

SEQ ID NO: 18040 - DNA, 401 bp, Gossypium hirsutum
  Clone ID: LIB3145-057-Q1-K1-C5
cccacgcgtccggaaatactgcttagtatgtttacattagtcactcattgttgtctgttccatcctatggcaagttgcttttgaatttatgcttgtatatctctgctgctgataggaatttacgacatggtgaatgcatttctttcatttggctgttgcactacatcacaaaaggaaagaaagttcatcatgttcatttctaaagtgcacaataataatgcaaacaaaccctatacagcttggagattcgaagcacggaccattgatggtatcacaatctcactgtttgaacatagaatggaaacgataaactaactgagaggttgaaagaaatatggggggggccctttttaagaaaccaattttctttccccgcgcgtggcaagaaaaatctttttttt

SEQ ID NO: 18041 - DNA, 223 bp, Gossypium hirsutum
  unsure (1)..(223): unsure at all n locations; Clone ID: LIB3145-057-Q1-K1-C6
cccacgcgtccggaaatgctgcttaagacgttttctttaaccactcagggcagnctgttccagcctgtggcacgtaactgttgaagtgatgctgacatatctgtggtgctgataggaatttacgacatggagaatgcgtcactatcatttggctgatgaactacatgacaaaaggaaagaacgatcattatgtccattcatgaagtggagctttataaaacaa

SEQ ID NO: 18042 - DNA, 388 bp, Gossypium hirsutum
  Clone ID: LIB3145-057-Q1-K1-C7
agcttgcctctgttcccagcggtggtggtgttgctgtggcggcatctgcacccggagccgccgccgccgccgctcctgctgcagctgagactaagaaggaagagaaagttgaggagaaagaggaatccgatgatgatatgggcttcagtctcttcgactaaaactaccacgcaccgccagcaacctatcaatgaaatacggatggtttttggtttctacggaggatttcttttgaatttaaggctgccctaggtttttaaagttagttatccagtgccatgtagttctttctttttggattcatatatttgttttgctgaacccttttgttgcaatggaattttcttccgacttaattttaatcatcttctcgagtttcattcccccg

SEQ ID NO: 18043 - DNA, 379 bp, Gossypium hirsutum
  Clone ID: LIB3145-057-Q1-K1-C8
acacaattcactaaagcaaaaacagctagaataagaaggaatggccgcctcggataaagttcaagaactgcatgtatatgagatgaatgaaagagatcgtggtagtccagcttaccttcgtttaagtcagaaacctgttaactcacttggtgatattgtcccttttagcaacaaaatatataggggagatatggagaaacggataggaataactgcagggatgtgtatattgatagagcataaacccgaactgaaaggtgaccgctacgaagccatcttcagcttttacttcggagactacggtcacatagcggtgcagggaccttacttgacttaccaagactcgtatctcgctattactggtggatctggcattttt

SEQ ID NO: 18044 - DNA, 373 bp, Gossypium hirsutum
  Clone ID: LIB3145-057-Q1-K1-C9
gttattttctctctcgacaaacaatggaagcattctttgaatcgcgatcgagaagcaactggagttacgatacactcaagaatttccgtcagatttctcccgtcgttcaatctcatctcaaaagggtttatttgaccttatgttgtgccctggttgcctctgcttttggggcttatcttcatatcttatggaacattgggggttacctcacatcattcgcatgcttcggaaccatgatttggctcctctctatccctccttatcaggaacaaaagagagtttctcttcttttggcatccgcagtgttcgaaggggcttcagttggtcctctgattgacttggccattcagattgatccaagtgttttggtagc

SEQ ID NO: 18045 - DNA, 379 bp, Gossypium hirsutum
  Clone ID: LIB3145-057-Q1-K1-D1
ttatttaggaaggggggttttttttcctttggaaagttggttccttgtaattctctataaattcttggcagggccaatggatttagcccttcattttcttttcttccaggtacttgaggttggagaggtgaggatcattaaaagaaagaaacatctctgtctctctcttttgacaaacatattgttgtcagctttcagtggctcaatatttagtattgtttggaaattagggcctctccaaattaagagaccaaaaacagcaaacctgcttgaaacttgagccctccatcaccaacacaaaaaacagagttcctttaatcacctaaatcatgaagcagctcacttgctcaggttccctggatgctttgaatcccatctt

SEQ ID NO: 18046 - DNA, 323 bp, Gossypium hirsutum
  Clone ID: LIB3145-057-Q1-K1-D10
tcattctatcgagtttctagtgcagatttttctgtgagaggcgaaagatggtgtccacatctgtattgtacacgtatacactgtccagctacaccttcggttccaaacagccaaggatggaaaatgactcgtgcgatgcctaccgccttgcttgcatgaaaactaattgtctgaaagagggcttgtgaacgagcgttgcagcgatgatactggtccatgaacataattatcctcacattcttcttctgcatattgggaacaaattctgtatacttgctggtggacgcccgaagcctgtataaaatgagattgatggtctgaag

SEQ ID NO: 18047 - DNA, 415 bp, Gossypium hirsutum
  Clone ID: LIB3145-057-Q1-K1-D11
gaaagaggcactttgcttaagaagttcaatgctccagactctccttattttatgtttctattaagcactcgtgctggaggtcttgggctgaacttgcagacagcagacactgtaattatttttgatagtgactggaacccccaaatggatcagcaggcggaggatagagcccatcgtataggacagaagaaggaagtcagggtttttgtgctggttagtgttggatcaattgaagaggttattttagagcgtgcaaagcagaagatgggtattgatgctaaggtcatccaggctggattgtttaatacaacttccacagctcaggacagaaaagaaatgctggaagaaatcatgcggagaggaacaagctcacttggaacagatgttccaagtgagagggaaatcaatcgacttg

SEQ ID NO: 18048 - DNA, 391 bp, Gossypium hirsutum
  unsure (1)..(391): unsure at all n locations; Clone ID: LIB3145-057-Q1-K1-D12
ccgtccgcaacatacgttctggtttgcatcggagtgcctcttactaatgctcgttcttctatctctagttcattcccatagacataggtgctcgtcgtccgatacctatgtgtggannactaagcttcagatacctcgaacctgggccttgaccaagtacanagaagtgtcccacactaaagcggnntcaggtaaaagggatgtgactagtgcgtggaaccctgcaagaggatnatatttaaatgccacaaaagaagaaattgctatgcagcgatgactagcagctctttgttggtactttttataggacattaaagggaaacaacatgaaaagcangaccaattctcatgtgtctcagcnncacgtgaaagcggatccctacttcattga

SEQ ID NO: 18049 - DNA, 410 bp, Gossypium hirsutum
  Clone ID: LIB3145-057-Q1-K1-D3
cccacgcgtccgttttttataacgaaaatctttacatggaaaatgaatacaataacaatgtggtcgacaacttgatgagaagctcatcgtacaactatggattcagtcggcgtgccacttctccagaaatcataagcttggaaccccattcttttcgaagtgtcaaaatatcagctgatgattttgagttcaattccccttcatctcctgcctcttcactttgtcatgaaccagtcagtgtcccaagtgattcaatgcaccaaaaagaagatgatgaagatgaagatgaagacgaggaagaagttatgagttcttatgtcattgagatcaactctgatgttagagagagtaatggtgaagcagtttcaattgatgaagcgattgcttgggcaaaggaaagatacaattca

SEQ ID NO: 18050 - DNA, 411 bp, Gossypium hirsutum
  Clone ID: LIB3145-057-Q1-K1-D4
gttaaaacaagagcaagatgatgatgatggtgatcatgatgatgatgatgatgatcatgatcatgagcacgaatctacgacatgtggagatggcatggctcacgaagtacatgaaacaagcttccacaacgcaccagaaagcatgacaaggctggttacccatcttattatggaggcagagactgaacaaaactgctacggtgatggagaagccagctcttatatggttacgcagaagctggaatcatggaaagaggtggaatcaaacaccatatacatgatggcgggacaagatttgagaagatcagatgttgatgaggtggacagaattgtattgcagattcaagagaccgcattagaactcgaagacgctatcttcggactactgatggaagaaatgtcggaagaact

SEQ ID NO: 18051 - DNA, 409 bp, Gossypium hirsutum
  Clone ID: LIB3145-057-Q1-K1-D5
gaagaagcaggacaccttaaggctgaagtgattcttaaagtacgagcagagttcccctcaaacattactgcaaacacagttgttttagagatgccacttcctaaatatactaccagagctagttttgagttggaacctggagttactgggcaaagaacagatttcaaaggagcaaacaagaaacttgaatgggatttagaaaagtttgttggtggagttgaacatacactgcgtgcgaagctgactttttctcaggaattgcatgcaaacatcataaaggaagcttgaccagttagcatgactttcacaataccgatgtataatgtttcaaggcttcaggtgaaatacttgcagatagcaaagaaatctagttcctataatccatatcgatggatgagatatgttactc

SEQ ID NO: 18052 - DNA, 408 bp, Gossypium hirsutum
  Clone ID: LIB3145-057-Q1-K1-D6
ctagctttggagatttgaaccatttgatttctgcttcaatgagtggcgtaacatgctgcttgaggtttcctggacagctgaactccgacctccgaaagtttgccgttaatatgatcccattcccacgtcttcacttttttatggctggattcgcaccgctcacataccgtggttaccagcattacatttgcctcaccgtcccagagctgacacaacaaatgtgggatgccaagaacatgatgtgcgctgccgatcctcggcacggccgctacttgacagactcagctatgtttcgaggcaaaatgagcaccccagaagttgatgaacaaatgatcaatgtgcaaaacaagaattcatcatacttcgtggagtggattcccaacaatgtgaagaccagagtctgtgata

SEQ ID NO: 18053 - DNA, 235 bp, Gossypium hirsutum
  Clone ID: LIB3145-057-Q1-K1-D8
attagcctatattaaaaattgaatcattattattctactaaaaaaaaaaaaaaaaaaaaaagggaaaaaaaaaaaaaaaggggggaaaaaaaaaaaaaaaggggggacggtatggggggaccgggcttacgttcccgtgtttgcgccctcctatctcttgtttggggggccttattttttctttattggcccttgttttgcaccgtcgtgtctgggatttaccctggggttaccc

SEQ ID NO: 18054 - DNA, 389 bp, Gossypium hirsutum
  unsure (1)..(389): unsure at all n locations; Clone ID: LIB3145-057-Q1-K1-D9
cccacgcgtccgtaattattgtgcagccattagagtggcatcctcagttgcaagtccacatccacatcctgggtccagagaccgtaatgtgaagcttcggattaaatccttcaaggttccagaacttcttgttgagattcctacaaccgccactgttggttcactgaaagtcatttcaagaaataatgtatgaccatatcagagatgaagcggcttcttattcttcaatttcatagatatgaagtcaagcatattggttcctatctgtatattgctgataattaatgtccagtggttattatagaggtcagtcatggaagcagtgactactgtacttggagatggcttacatgtcggcatccttcttaaggaaaagaagntagagatga

SEQ ID NO: 18055 - DNA, 404 bp, Gossypium hirsutum
  unsure (1)..(404): unsure at all n locations; Clone ID: LIB3145-057-Q1-K1-E1
tcggtggaaaggttccaacctttaggggaatggaagtcgtcaaggaacatgtttgttgatgagtaagtgacaatgtttttacatatcatttctcatcannccttaaaaatcgagttatcaagcatcattttaataggtccggggaaaccgctagcagattatttcacaatgttttaaacgctgtcatacgcttgcaagatgtgttatttaaaaaggcagagccaattacaactaattctacagatccaaggtggaaatggttcaagaattgcttangtgctttagatggaactcgcatcaagattagggttcgaacagttgataaacctagatatcgaacgcgaaaatgtgacatagcaacaaatatgttagggtgttgtacacctgatatgcgttttggttat

SEQ ID NO: 18056 - DNA, 415 bp, Gossypium hirsutum
  Clone ID: LIB3145-057-Q1-K1-E10
gattcctaaacgaaaccctattttcctatctgtaatctttgtttcgctcctcgccatcgcctccgctaaagtattcttcgaagaacgttttgatgagggatgggaaagtcggtgggtaaaatctgactggaaaaaggatgagaacatggctggggagtggaattacacttctggaaaatggaatggagatcctaacgacaaaggtattcaaactagtgaagactacaggttctatgctatttcagctgagttcccagaagtcaacaacaaagataagactctagtcttccaattttctgtcaagcatgagcaaaagcttgattgtggtggtggctacatgaagttgctcagcggtgacattgaccagaagaaatttggtggtgaaaccccatacagcatcatgtttgggcctgat

SEQ ID NO: 18057 - DNA, 400 bp, Gossypium hirsutum
  Clone ID: LIB3145-057-Q1-K1-E11
aagaaatctgatgcagtaacttcatcttagagtaataacagtaatacaaaggaacgtggaaaaaatgctactcaaacacttgaatatggcggtgttagttatcacatggttaactgtggcttaatattgctgaaaatgctgtcagagtacattgacatgaatcatcttctgccagcactatccttggaggtggttcatcgtgttgtggagattctaaaatttttcaacacgagaacatgccaacttgttttaggtgctggagccatgcaggtttctggtttgaagtccattacttctaaacacttggccttggcaagtcaagtcattagtttcatatatgctatcattcctgaattgaggcaaatcctgttcctcaaagttcctgaacctcggaagtcac

SEQ ID NO: 18058 - DNA, 412 bp, Gossypium hirsutum
  Clone ID: LIB3145-057-Q1-K1-E12
ctccgaaatcaaaatcccctctcggtcactgttcgagaggcttctgtgtcttcttcttcttccctttcttctctcgctttgcccttgctatggcttctgatttggagaccaaagccaaagaagccttcatcgatgatcactttgaactcgcgctcgatctttactctcaagccattcaacttaaccctaaaaatgctgaactctacgctgaccgcgctcaagccaacatcaaactcaataatctcactgaggctgtcgcggatgcaaacaaagcaattgagttggatccttccatgtctaaagcttacttgcgtaaagctacggcatgtatgaagcttgaggagtatcaaactgctaaggctgcgttggagactggtgccactttggcaccgggagagttgagattttctaa

SEQ ID NO: 18059 - DNA, 383 bp, Gossypium hirsutum
  Clone ID: LIB3145-057-Q1-K1-E2
accccttactgtcatcccgttggatgaatgggtattcaacacggaagcacaccctttacggatcgttaaccgtaacgatgatattgctggttcggaaaggcaacataaaccaactgttggattacaaggcaggaagacaggtcggtttggaggtaattaggactcatttgcagttcatttatttatttacttttgtcggacaacaagaaatcgttgtcattcagtggttaggatatctggcttctatttattgttttcggctgaaggaactcgtacgatttgaggcctcaaacatatgacaggcttaggattcttgtagtttctggaaatagatagaagagtttctctggtttccgtcggagaaacgttggtctcgaactata

SEQ ID NO: 18060 - DNA, 404 bp, Gossypium hirsutum
  unsure (1)..(404): unsure at all n locations; Clone ID: LIB3145-057-Q1-K1-E3
acgccgtccgcccacgcgtccggaacttttgggtattttcgtagttgagaggtgaatatcttcttctttgagatcaaatttctgataataatacagctctgtgatcaactgcacgtattctgtagaatcaaatcaaccaatcaacagatttagagaagagtgtnaatttcctgccttagcctcttaaaaatcgaagcactaaatgttgtacgattcatatatactgaaagcttgaaagtactgtctttgtcgtaaagaaataaagagtcgaagagcttgcgttcttggtttgaagcctcaaacatatgacaggcttaagattcttgtaggttctggatatagatcgaagaggttctctggcttccgtcggagaaacggtggtctcgaactatatcctgaaagaa

SEQ ID NO: 18061 - DNA, 349 bp, Gossypium hirsutum
  Clone ID: LIB3145-057-Q1-K1-E4
gcagcctccgtagaagaacactacacgagtggttttgaactgcaaaaggagatcgatttcgaagccttttcaccatgagagctaagtggaagaagaagcgtatgaggaggttgaagaggaagagaagaaagatgaggcaaagatctaagtagtttaattttatcttaaagcaagcaatttgttctatgtttctttagattttctgttgtttgatggatactttactttaaaaggatttaagttatctttatcgaaaccttttgaatattctggaaacttgttattttctattaacaacttatggctttggatgttaattttctaatatttttggctcaaagttgcactt

SEQ ID NO: 18062 - DNA, 385 bp, Gossypium hirsutum
  unsure (1)..(385): unsure at all n locations; Clone ID: LIB3145-057-Q1-K1-E5
ctgtcttttttgtgggagccatattgatcagtttagctgtttatgatcgttttattattccactttgtaaaaaatggagaggtgaaccagggtttacaaatctgcaactgataggcataggtctgttcctgtcagccatgggaatggcagctgcagcagtggtagaggtgaaacggctatcggtggcaaagaaatacaatgaaacaaccacactaccgataaccgttttctacctgattccgcaattcttcttggtgggtgctggagaaggatttatatacactggtcaactggatttcttcatcactcaatccccaaaaggaatgaaaacaatgagcactggcctcttcctcaccactctttcactcggnttcttctttagtag

SEQ ID NO: 18063 - DNA, 228 bp, Gossypium hirsutum
  Clone ID: LIB3145-057-Q1-K1-E6
cccacgcgttcggaagaagtttatggaacatgatttttgggagaacacttcacaaatatctactgttgacttttatcaagcacagaccgtctctacagggttaggtttgtcacttgactatgacaataattatcaaacgggcttttcgggtgattcggctatgttgaccctcattggtgatgacatagataatgagctgcgacgaaacgacgctgacattgatcggtt

SEQ ID NO: 18064 - DNA, 406 bp, Gossypium hirsutum
  Clone ID: LIB3145-057-Q1-K1-E7
gaacgttgtgtaaccatctcttctgacaaaggtctctgtggtggaattaactctacatcagtcaagataagcaaagggatctataagttgaactctggccctgaaaaagaaacaaaatatgtaattctgggagagaaggcaaaggctcaattggttcgtgactcaaagaaggacattgagttgatcataactgagctgcagaagaatcctttgagctacactcaggtctctgttcttgctgatgagatcttaaagaatgtggagtatgattccttgaggattgtcttcaacaagtttcactcagtagtttcatttgtgccgacagtctcaactgtattatcacctgaaattgttgaaagggaatctgaatctgggggaaagcttggtgaactagactcctatgaaa

SEQ ID NO: 18065 - DNA, 405 bp, Gossypium hirsutum
  Clone ID: LIB3145-057-Q1-K1-E8
gggttgacgaatttcgtattaacagtagtaggtgttagcgctgtggttcttttactgagaagcgacgttaaacaatcggctgccagttttaggcgcaacgttaagcatataaagaattggcttgaagaagagtcttctgctgcttccaaggcagctgagaaggtaaagcccaaggaactggactccaaggtccctcctaaggagaaagactagtgtctttatagggtatttgactttgattttctgttatcatttttgaatatctgggttgtgctttaggattcatcagtcttgattaatgtctgggtatttctgcacttcggaacttagttccgttgccttgcctctttcggtttgttaatacactgacatgtatctacttagatgttaatactatttgagaaa

SEQ ID NO: 18066 - DNA, 389 bp, Gossypium hirsutum
  Clone ID: LIB3145-057-Q1-K1-E9
gccctgcaccatgtgaagggtcttgtgtgcttggtattattgagaatcctgtgtccatcaaaagcattgaatgtgctatcatagacaagggatttgaggaagggtggatggtgccacgacctcctctcaagagaacagggaaaagcattgctgttattggaagtggaccatctgggttggctgctgctgatcaactaaatagaatgggtcactctgtgactgtgtatgagcgtgctgatagaattggagggcttatgatgtatggagtccctaacatgaagactgacaaggtagatgtagttcagcgacgtgttaaccttatggctgaagaaggagttaaatttgtcgtcaatgcaaatattggaaaagacccgtcctactcccttgac

SEQ ID NO: 18067 - DNA, 314 bp, Gossypium hirsutum
  Clone ID: LIB3145-057-Q1-K1-F10
ggcttgtcgaggaaaatgggaaaggatggattagtagacctgaaagagatggctaaagcagttcaatatgataaaagcaatggtaacacagaaaagaagaattagtgagggaatgatgcaacaaattaccttatacatgtaaactaatcgcaaccagcaaccttacgccatgtaattgaacaaaaaaaaaaaacattatgcaatgtatggatgtctatatttataaaggctaccaatttttctcaacgtacgccaaaacaaaacaatttgttaaacaagaaattcaataaacaacaacaaattggattatgtgt

SEQ ID NO: 18068 - DNA, 408 bp, Gossypium hirsutum
  Clone ID: LIB3145-057-Q1-K1-F11
gaataatttcagagagaattccaaggctcaaaaggttctaaatgaagcttctatctcccatttgtaatctcaccaaagaaagtcacaaaagagaattgaaagttgcaagattctaggtaagcagctgtttacttgctcatgaagctcggagttcatcgtttctgaagatcagaaggttcatccgtagctttcccatctctttctagatttgtggagttatgcttcgcattttcgaccaaacgttgtccgtgacttcgcaacgagaagaaagcccttgtcctaatgacgcatgacgacgtgcacttcaaagaatttcagcttataaataggccttagttactttaggtttaacataacagaaatatttagattgagcgatgtgcacttcaaggaatttcagcttataat

SEQ ID NO: 18069 - DNA, 253 bp, Gossypium hirsutum
  Clone ID: LIB3145-057-Q1-K1-F12
ccggaacggaaggcccgggccgaccgacccgtcacgccttcgataccaatgtatagaaggctttattatggtgcatgtcatagataaaatatgcattgctgtggggtcatttatagctgcctcaggaaacttgatgtatggaggaagaaaatctttcatgctccgaccacttcctaacgaatcgaaacgaagaacgaaaaaccttcacgagggcggatctggtaccgccctttgtttgaactgcttgctttat

SEQ ID NO: 18070 - DNA, 155 bp, Gossypium hirsutum
  Clone ID: LIB3145-057-Q1-K1-F2
ttacgtgcgcgagcatgcaacaacatagctcttctataatgccacatgaacacaaatgacagagcggcaaccaacaacgatccgactgggaaaaccgtagcggtacccaacacaatggtgttgctacacaaaagcacagcggcaagtgatgatat

SEQ ID NO: 18071 - DNA, 400 bp, Gossypium hirsutum
  unsure (1)..(400): unsure at all n locations; Clone ID: LIB3145-057-Q1-K1-F3
accaaaattggggtttctgtaaagtaaaaaattaaattgaaatcaaaatcgttttgaaatcttaaggaatgcggccgaattgttgtcatgtttcgtttgcttttgttctgaagttcttgaattttctccaagctttccttggagtgtcgattntactctactcgttttggatgttggatcaatggaatcatcacgtccccatttctcctccgccgtcagttccgtggccggattcttctctctcggctctcttcaattcgagaccggaggttgggggagctcgaggagccaaggttttcgatgatttagctgccggtttggtctccgggttggataatggagtcgggtttgaattgagttcggtgaagctacctgctccatggttcatctactctttttt

SEQ ID NO: 18072 - DNA, 419 bp, Gossypium hirsutum
  Clone ID: LIB3145-057-Q1-K1-F4
gcaatttgcagatacccaatataagttcttctcaactagatatggacaacaagtgattgacattttggagttcccaatcaaagtagtgctctctccgttcactcttgcctttgacattgctgggtccgctcctcgtgggtttggcatccccgagtttatctccaagctttctcatacttctatctttgctattgctgctttgggaacctatgatattgctttagagctaggaaagaaggtgatatgtcaaaggaactgtcgtacttgcaatggatggcaagctttgcggtgtaccatgtgcaaaggatcagggaaagtgcactatcaagtcaaaactcattccttgagaagtggggagaaggcaaccgcagaatgtgttgcagatgctattgctgataatcgagcagagttagtgcacc

SEQ ID NO: 18073 - DNA, 355 bp, Gossypium hirsutum
  Clone ID: LIB3145-057-Q1-K1-F5
tgattctgaggttgcattccttaagtcacgatgaggatttgttcgtatagccatggaaatggggtgtccactggtcccagttttcgcctttggtcaggtaagtagtgcttgttttctttatcattttaattctcggaatccccttttcccactctttttgcagcttcagatgcagaaaagtgaagctaatttccttgctgttttcttacttgtgctgcagtcacatgcgtacaagtggtggaaaccaggtggcaagctcattctttaactttcaagagctatcaaattcggtcctatgctattttggggagcttttgggtatgcactaaattattctacttaccttttatgctca

SEQ ID NO: 18074 - DNA, 356 bp, Gossypium hirsutum
  Clone ID: LIB3145-057-Q1-K1-F6
ggattctgcagatgccttctttaagtcacttttaggtatgagatcgactacccatgaaagcggggtgggcactgcccccagaagtcgccttctgtcaggtcactagtgcctgtgacattgatcattccaattctcggaatcccctcatcccactctttatgcacctgctgatgcataaaagtgaagctaatttccttgctgtgtgaacacatgagctggattcacatgcatgcaagagggggataccaggtgggaagctcattcttcaactttgaagagctatcatactcggtactatgctctaatgaggagctttagggcatgcactaaatcatactacttacctgtgatgctca

SEQ ID NO: 18075 - DNA, 408 bp, Gossypium hirsutum
  Clone ID: LIB3145-057-Q1-K1-F7
cccacgcgtccggaaacagaggagagtgtgtgtgagggtgtgaatgatttgaaacctggagatcatgtgctcgctatcttcaccggagaatgcaaagaatgtcgccactgtctgtcagaagaaagcaataacatgtgcgaactgcttaggatcaactgcgaccgaggtgttatgcttgctgatgggaaaaccagattttccatcaacggcaagcctatctaccactttgttggaacctcgacctttagccaatatactgtcgtccatgttggccaggttgccaagatcagtccaaccgcccctcttgataaagtctgtcccattagctgtgggatatgtacaggttttggggccactgtgaatgttgctaaacccaaaaagggtcaaactgttgcaggttttggactg

SEQ ID NO: 18076 - DNA, 403 bp, Gossypium hirsutum
  Clone ID: LIB3145-057-Q1-K1-F8
tgtctattgaattctttccttcactttcttgataaaaaaaaaaatgtcttcaggttgcaattgcggatctagctgcagctgcggatctggctgcaattgcggtgagaactgctcaatgaaccttaaccttggatactcggagaagacaaccagcactcagaccatcatctccggagttgcgccagtgaagatgacctttgagggaccagagatgggcactactgaatcaggacatggatgcagctgtggatcaagctgcaaatgtaatccatgcacctgttgaaaagcttgatgaaagccatagattatgaaaaaagaaagcagcaaaataacaggcctctgtaatgatttattttcaaggatggatgcctgcaaggtctataattatgtctctctctgtctt

SEQ ID NO: 18077 - DNA, 406 bp, Gossypium hirsutum
  Clone ID: LIB3145-057-Q1-K1-F9
cttgccaacaataagttctataataaagttccaaatggatcgttcctctcattcagtctcagttgctttctttcttctgctgattcttttaaccacagagatggggcctatgtcagcggaggctaaaacatgcgagactaaaagcggtaaattcaaggggatgtgcatgagttctaccaactgtgctagtgtttgcaaatcagagcctggttttgatggtggacattgccgaggttttcgtcgtcagtgcgtttgcactaagccttgttaaaccactaagctttgttagatcagtaatctattatatttcattgtcacgaagatttccccttttttttttgcttatcatgcattttgtgcttgagagttgagagaaataacacatctccaacatatattgtatacc

SEQ ID NO: 18078 - DNA, 393 bp, Gossypium hirsutum
  unsure (1)..(393): unsure at all n locations; Clone ID: LIB3145-057-Q1-K1-G1
cccacccgtccgtggcgatgtctccgattgtgtcaaacagtttttcacattcgacaagacacttagttactcaggccacttcaagcccttagctgcagttcaagtaaccgagttggccgacggggtctntattgggtgtatagtgaaccacgctgtgaccgatgggacttcattctggcactttttcaacaccttcgctgagatcaccaaaggggctntaaaaatatcgaaatctcccgattttggtcggaacaccgtgtttaattcccaagccgtgcttaaattccctcccggaggacccactgttactttcgccggcgacgagccgttgagggaaaggattcttcatttcagcagagaagcgattttaaaacttaaatacagagctaatta

SEQ ID NO: 18079 - DNA, 162 bp, Gossypium hirsutum
  Clone ID: LIB3145-057-Q1-K1-G10
gcacttagtgtttcactaatgggaacttcctatgattcaagctcggacatctcagatcgtttggctgagaaaaaaaccaaaggtgcgttttgatttatgtggtccgggtgaggacaaatgtcccccctgcgacaaaattgttcaagattttggttacactca

SEQ ID NO: 18080 - DNA, 424 bp, Gossypium hirsutum
  unsure (1)..(424): unsure at all n locations; Clone ID: LIB3145-057-Q1-K1-G11
gaanngacgggccgacccgagcgacccgtgtgtgattgaagaatgaagtatctcattttcatttcttgtttacttcataataaaattggcgggggtttaacctatgaggtgcatctctgacttcaaacaaaaaaagagtaaggaatcattgcctccctcccatactcaaaaagtgtaatagaaatcaatttcagaaagctttacagagctgttttaggacttgggattttgtctgttgcaggtttaaacatgttcaccttttctttccatgaaagaaacaaatatgctgtcagtttctgtatttaagcataggttaattaaaatttcttaccttttggatttaaaatttcaagttaaataatttatattgttaatatttttcatcccccccacacaaacctctactaaaattcactcaaaactt

SEQ ID NO: 18081 - DNA, 75 bp, Gossypium hirsutum
  Clone ID: LIB3145-057-Q1-K1-G12
acgtccatgcgtacgtctacgcgtgcggggttctttgcatgacggtgcaacacctcatgatatatacaagcgccc

SEQ ID NO: 18082 - DNA, 321 bp, Gossypium hirsutum
  Clone ID: LIB3145-057-Q1-K1-G2
gttactttttctgatatgttaaaagttgtccgggaaagttttgaaaccatggcctgaaaaggaaaatgagatgagaaagtttttttgtttttttaataatttttggttgatcatctctgtcgatgctaacaatgctgagagaactcacttgaggctggtaggagaagaataaaaaaatgaaaaagatttgtgtgaatattggaatttttttgttttgtttgttactgtcatgtgagaattgagatgatttggagtttggtatttcatttctgataggatatttatatatatttgtgagcttatctcaacttacaacagcga

SEQ ID NO: 18083 - DNA, 406 bp, Gossypium hirsutum
  Clone ID: LIB3145-057-Q1-K1-G3
gaaaaataatacatcttaatttttcattttctttgcgcgttccttctgttctgtcttcattttccttttgttctgctggctttcttctttttgtgtgtttgcaggtctatggaggaggtcaacggggcagaggcttcctttttggtgcaaaggacgggtagagccgtccctcgagcgatgtttgcactgagaacgcacatggctggcagaaggaaggcgcggcgctagggtttcggttggctgaacttggtttaagcatcggtcctatcgggcttaggtctttcttttaattgtgggcctattaggttgtaattttggcttgagttaattgggtttgatgtttgggttgatgtaatgggtttggattggccctttaatgggcttattatttgggttatttatggct

SEQ ID NO: 18084 - DNA, 279 bp, Gossypium hirsutum
  Clone ID: LIB3145-057-Q1-K1-G4
cccacgcgtccgatacctctggatagatgacaacagtgtggtggatttcattggaaaaatatttattgctgtggtgtcatttatagctgcattaggattcttgttgtatggaggaagattatttttcatgctaagacgattccctattgaatcgaaaggaagaaggaagaagcttcacgaggttggatctgttacggccatttgtttcacctgcttccttattaggtgctttgtggtggttttatctgcctttgatgcagatgcgtcactgggatgttt

SEQ ID NO: 18085 - DNA, 355 bp, Gossypium hirsutum
  Clone ID: LIB3145-057-Q1-K1-G5
gcgtgtgattgaggaatgaggtatctcatttccatcacttgtttacttcataataaaatttgcttaagtttaacctctgagttgcatctctgacttcaaacaaaaaaagtgtaaggaatcattgcctccctcccatactcaaaaagtgtaatagaaatcaatttcagaaagctttacagagctgttttaggacttgggattttgtctgttgcaggtttaaacatgttcaccttttctttccatgaaggttccaaatatgctgtcagtttctgtatttaagcataggttaattaaaatttcttaccttttggatttaaaatttcaagttaaataatttatattgttaatatttttc

SEQ ID NO: 18086 - DNA, 318 bp, Gossypium hirsutum
  Clone ID: LIB3145-057-Q1-K1-G6
gcgtgtgattgaggaatgaggtatctcattttcattacttgtttacttcataataaaatttgcttaagtttaacctctgagttgcatctctgacttcaaacaaaaaaagtgtaaggaatcattgcctccctcccatactcaaaaagtgtgatagaaatcaatttcagaaagctctacagagctgttttaggacttgggattttgtctgctgcaggtttaaacatgttcaccttttctttccatgaaggttccaaatatgctgtcagtttctggatttaagcatacgttaattaaaatttcttaccttttggatttaaa

SEQ ID NO: 18087 - DNA, 410 bp, Gossypium hirsutum
  Clone ID: LIB3145-057-Q1-K1-G7
cgaggctacttttggtcggatctttcaggcgtttaagaactcagagcaccaaaagcaagccaaaccaacgctgttcgtccggcacagtcgaaccctggtttcgcttctgctgccctccggactttaatcctcttacatcgaaacagaaatcccaagcgataaataagacagaaaagaagaagaagaagagataggaagagagggagataaaggaaggcatgggagatctattcatatggcttatttctttcttcatcctcattgcccttcttgttctcattgtttatcagctcatgtgcttggctgatttagagtttgattacatcaatccttacgactcttcatcacggataaacaaagtggtcctgccggaatttatcctccaaggaattttatgtgtattctatcta

SEQ ID NO: 18088 - DNA, 410 bp, Gossypium hirsutum
  Clone ID: LIB3145-057-Q1-K1-G8
cgaggctacttttggtcggatctttcatttgtttaagaactcagagcaccaaaagcaagccgggccaacgctgttcgtgcggcacagtcgaaccctggtttcgcttctgctgccctccggactttaatcctcttacatcgaaacagaaatcccaagcgataaataagacagaaaagaagaagaagaagagataggaagagagggagataaaggaaggcatgggagatctattcatatggcttatttctttcttcatcctcattgcccttcttgttctcattgtttatcaactcatgtgcttggctgatttaaagtttgattacatcaatccttaccactcttcatcacggataaacaaagtggtcctgccggaatttatccttccaggaattttatgtgtattctatcta

SEQ ID NO: 18089 - DNA, 400 bp, Gossypium hirsutum
  Clone ID: LIB3145-057-Q1-K1-G9
cccacgcgttcgaagcaacccttgttttacttataaagatccctatccaacaatggctgctaatcccaaggtcttcttcgacatgaccgtcagtggccaaccagctggtcggatcgtgatggagctctttgccgattgcactccccggactgctgagaacttccgtgctctctgcaccggcgagaaaggggtaggccgtagcggcaaacctctccactacaaaggctcatccttccaccgggtgatccccaatatcatgtgtgaaggaggcgactttaccgccggaaacggtaccggatgtgaatacatctatggagccaagttcgctgactagaactttatctagaagcacaccggacctggcatgctcttcatggcgaacgctggacccggaacaaac

SEQ ID NO: 18090 - DNA, 262 bp, Gossypium hirsutum
  Clone ID: LIB3145-057-Q1-K1-H10
ctcacatgctgcaataggtattccggggtggttgcgctgaatcgctattcaacaccaaaggtaaaaaaaatttccccaaaataacctgctttcttctcctttgctccagatttcttccaatgtttttccccaaatcaacagcacattcacccttcattttcatctccggtactctgtcatgttgttccatccttagtgaaagttaagaaagaagggttggattgtcacgaaaagattaaaaattatatgtgtgtcgagtttt

SEQ ID NO: 18091 - DNA, 331 bp, Gossypium hirsutum
  Clone ID: LIB3145-057-Q1-K1-H11
gaattccgggtcgcccaccccgtcggttaccaagacttttgacaagaacctcgcttcttgtttgttcaagttgctcctcaagtacaggccagaagacaaagcggtcaagaaggtacgtttcttgaaaaagaccaggccgaggctgaaggaaaagcccccgagtgttaaataccaattgtgtgtgaaatacgcggttaaccatgttactgtaccttatctagcacaacaagggtcaattggttgttattgctcatgatgtggatcccataaagatggttgtgtggcgtctcgctttgtgcctgaaaatggacggaccatatttgattgttaa

SEQ ID NO: 18092 - DNA, 296 bp, Gossypium hirsutum
  Clone ID: LIB3145-057-Q1-K1-H12
gcaaagctgcctattgtgttttcagtgactcagctgagaaaataaagttggaatgttcttcaattttaaggttaccagtttgcctgttgggaaataattaatatgcatgtatgtatccaatatacatatagatgtgctcccccttttttaataactattagattagattagattagattagattagatttgagaatcttttagttaacttcatttggaaaggggtataatgtaagatgtaaattacatcttttacatcttatgattgatctcggagttagattgtatttttttatt

SEQ ID NO: 18093 - DNA, 164 bp, Gossypium hirsutum
  Clone ID: LIB3145-057-Q1-K1-H2
cggacgcgtggggttccaagagattctccatactgttattttaatttttaaggggatgtataaattccatagtttcttgtaaaagtttttagtttcggcatgtataatataactactaggatccaagttagacttctgtaatagtttataggcgcttctgactg

SEQ ID NO: 18094 - DNA, 418 bp, Gossypium hirsutum
  Clone ID: LIB3145-057-Q1-K1-H4
ctcacatgctgcaataggtattccggggtgggggcgctgaatcgctattcaacaccaaaggtaaaaaaaatttccccaaaataacctgctttcttctcctttgctccagatttcttccaatgtttttccccaaatcaacagcacattcacccttcattttcatctccggtactctgtcatgttgttccatccttagtgaagttgaggaaggaggggttggatggtcacgagaagattaagagttatatgtgtgtcgagtttttcatctcaagcagtgagaagagcccttgctacatgtatagttcttgataataataattggacgcttacaaagcatgttattttttctttctattgcaaatggtggatttcacttggctttgcaatagtagaagcttgtataagtgcttattattct

SEQ ID NO: 18095 - DNA, 243 bp, Gossypium hirsutum
  Clone ID: LIB3145-057-Q1-K1-H5
gttcaacaaaaatttttgacaagaacctcgcttcaggtttgttcaagttgttcttaagtaccgggcaaaagacaaaacgggcaagaaggaacgttttttgaaaaaagcccaagccgaggctgaaggaaaagccccccaattttaaaaaaccattggtgggaaataccggcttaaccatggtacttaccttattgaacaaaacaagggttaattgggtggtattggtcatgaaggggatcccat

SEQ ID NO: 18096 - DNA, 409 bp, Gossypium hirsutum
  Clone ID: LIB3145-057-Q1-K1-H6
cggacgcgtgggctgtttcacaggcttttaagtctggttacgaatcttctaagatagcttcgttactggagtgtttggctatcatcacttttgttgggggaatcgaaccagaggaaacagaaaaatcaatgcaaattatgtggcagttggttcaccctaaactaggctctaatgttattactgtcaaaccttctgctgttgtaataacagcggttgggtctgcctggtcatttcttttgacaactatggatagatggagtctcagtcccaaactttggctagacaaaccttgtgagattttgatgcttccacgatataatgagctaagagacccgtcaatcttgagaaattatgcagatccatcacatatttgtctagtttgctagataaagatgaccgatctgttcgc

SEQ ID NO: 18097 - DNA, 237 bp, Gossypium hirsutum
  Clone ID: LIB3145-057-Q1-K1-H7
cggacgcgtgggctattacacaagccttgatgcttgtatacgaatcttctaacataacgggcgggtcttaattgttggggtaggatcacttttcttcggggaatctaaccatactaaacacaaaaatcaatgccaattatgttggatttggctcaccctccactaagctctaatgttattactgacaaaccctctgctgttgtaataacactagttgggtctgcctcgtcatttctt

SEQ ID NO: 18098 - DNA, 57 bp, Gossypium hirsutum
  unsure (1)..(57): unsure at all n locations; Clone ID: LIB3145-057-Q1-K1-H8
cggacgcgtggggntccaagagaaactttatactgggattggaatttttaaggggat

SEQ ID NO: 18099 - DNA, 366 bp, Gossypium hirsutum
  Clone ID: LIB3145-058-Q1-K1-A1
cccacgcgtccgaaacaacgtcgtttcaagttcagatggaatcaacggcgaagccagcgggtggtagaaagggaggagtgaagaagaaggcagtatctaagtcggtaaaagcggggctccaatttcccgtgggtcgtatagctcggttcctcaagaaaggtcgttatgcgcagcgttacggcggtggcgctcccgtttatcttgccgccgtccttgagtatcttgccgctgaggttttggaactggcggggaatgcggcacgtgacaacaaaaagaacaggatcaacccgaggcacgtgctactagcagtgaggaacgacgaagagttgggtaagcttcttcaaggagtgaccattgctagtgggg

SEQ ID NO: 18100 - DNA, 410 bp, Gossypium hirsutum
  Clone ID: LIB3145-058-Q1-K1-A10
cccacgcgtccgcccacgcgtccgttccattttccctttatttcctttgccgcccctagggtttaattacattccgcacatggcttctgcagatgtcgagtaccagtgctttgtcggaggtctcgcatggaccatcaacgaccgtgctctcgaagaagccttcagtgcttacggcgagatcgtcgattcgaaggtccgtttgtcgcagtgatcggactccagatctgactcgaatccaacccgacctgggcctccatgtctatgatctgtgatccttgatctgttattttgtgttactactcgataatctcttgttactattctaaactggtttctaaagtctcgctggtacgttccatcttcataccctctgggccgaagatcgatcgattctaacaatttttagtttt

SEQ ID NO: 18101 - DNA, 402 bp, Gossypium hirsutum
  Clone ID: LIB3145-058-Q1-K1-A11
cccacgcgtccgaatatttatttgttcaagccaagatgtgaaaaagctgaagacaggaagcaaacttcccttggcttctatcgaaggtgaagggacggtaataagttcagactcatctgaaaactaaaaaaataggaacccatttatctttcattacctgctgtttatttttcactgaagttgatgaaaccctaatcagtagctcattttttttggagctgtgagacttaaaaacgacatcttctgggttttgaagaaccaagaatttgttaatgaattagttcggaataagaggctaagactaggaaaaatgtgaatacttataatctttgttgtgggttggggtgctttaattgtggtgtttcctgtgcttgtaaatataaaatgtggtctggcagtata

SEQ ID NO: 18102 - DNA, 403 bp, Gossypium hirsutum
  Clone ID: LIB3145-058-Q1-K1-A12
ggatctgcaatgttggagtgaatgactgcctgtgatgcaagaatctctctattctcgttccgtactattatacctgaagccgatctgaactccagacgatcgtaagctgcatcaaaatgaatgaaggtccatccccttttgtgtatctattggagattgtcagatgaatggagaatgatttctactaaaccagatgaactaaaggctacaacagaaaagttgaagctgctcttcattacctcgatcaaaaacccagggtactgaataaaaatatgccagctattttcttcggcacaaccgcacctgggacaaagagtgttcatcactaccctctttattttaaggttgacaaaggaagggataaaatcccaagaaatcctccaaattgtcatctgaatctttg

SEQ ID NO: 18103 - DNA, 258 bp, Gossypium hirsutum
  Clone ID: LIB3145-058-Q1-K1-A2
taacttctaggacaatggaaatggcaaaagaatactgtcaggttgtagaacaggatgaaaagcatagaaatctttcatcaactttggaagagctttatgaatgggaaaagaaattatataaagaagtcaaggatgaagaaaggctacgggttatttatgagaagaagtgtaagagacttattatgttagataaccaaggagcagagtccagcaagattgatgcaacccgggcttcaataagaaagttgttgacaaaaa

SEQ ID NO: 18104 - DNA, 380 bp, Gossypium hirsutum
  Clone ID: LIB3145-058-Q1-K1-A3
aaagaggtccgggaaagatgtcagcaggagctgaaaaaggctgccatggaatggggtgtgatgcaccttgttaaccatggcatctccgaggagctcatggatcgtgttaggaaagttgggcagaaattctttgaactccctgtggaggagaaagagaagtatgccaacgaccagagctctgggaatgttcagggctatggtagcaagcttgctaacaatgctagtgggcagcttgagtgggaggactacttcttccatcttatttttcctgaggataagagagacttgtcaatttggcctaaaatccccagcgaatacactgaagttacaagtgagtatgcaaggcaactgcgaggcctaacgagcaaaatactttcagc

SEQ ID NO: 18105 - DNA, 218 bp, Gossypium hirsutum
  Clone ID: LIB3145-058-Q1-K1-A4
ggtggtaattacacaaatatacatgtggtctagatttagttttaagcctgaaatatcagttcttaatggtaataatacgacatttatttaaaaatcttccttctatttgtaatttaaaaaaaaaaaaaaaaaaaaaaaaaaaaaaaaaaaaaaaacaaaaaaaaataaaaaaaataaaaaaaaataaataaaacaaactaaataacaatataaagaca

SEQ ID NO: 18106 - DNA, 329 bp, Gossypium hirsutum
  Clone ID: LIB3145-058-Q1-K1-A6
ctttggtgtgcactgtaaacagtattatgcattggacatcacttatttcaagtcctcacttgattgtcacctcctggatctgttatggaataagtactgggtaaacaccctttcttcttcacctctcttgggtaatggagattatgttgcaggacaaatttcagatttagctgaaaagctggagcaagcagagaaccaactggctcactctcgcattggcccactaggaccccctcgaaagaaggaagaatctcagcttgctaagattactagagatagtgcaaagataactgtggagcaagtccatgggtttaatgtcacaggtcatc

SEQ ID NO: 18107 - DNA, 246 bp, Gossypium hirsutum
  unsure (1)..(246): unsure at all n locations; Clone ID: LIB3145-058-Q1-K1-A7
gttttattttaggggttgttccaaaagtagtatagtttgttttattagtatgtgacctgaaaaatttaagtgtctatattctctatgttataaatgcaaatccatatgccatattccttggatttaaaatattgcaagagtatgcctgttggtttttcaaaaaaaaaaaaaaaaaaaaaaaaaaaaaaaaaaaaaaaaaaaaaaaaaaaaaaaannnaaaaaaaaaaaaaaaaaaaaaaataaaaa

SEQ ID NO: 18108 - DNA, 397 bp, Gossypium hirsutum
  Clone ID: LIB3145-058-Q1-K1-A8
aacagactcagcactcgatctcgatgaacagatctcacagctaatgcaatgtaagccactttcgaagcagcaggtcagagcattatgcgacaaggcaaaggaaatattaatggaagaaagcaatgttcaggactggactggtttgaactttcaagaagtaatggatgaagcagaaaaaattcgagtaacggtatgtggcatattttatgttgcattcttcctaaatgagccattgtctggtcgtacactttacagccccatctccatgagtatgcttacaggtgcatactttggctttctattccagtattttggattctctggcggttgaattgaaagcatcgaaggacttctctaagttatatgcaagcattgcaatactctggcttcatctaag

SEQ ID NO: 18109 - DNA, 406 bp, Gossypium hirsutum
  unsure (1)..(406): unsure at all n locations; Clone ID: LIB3145-058-Q1-K1-A9
cccacgcgtccggccaaactcattggacttgctggggagatcaatattcagggtgaggagcaaaagaaactggatgtgctttcaaatgaagtctttatcaaggctttagtgagcagtggcagaacttgcatccttgtctcggaagaagatgaagatgcaattattgtggagccctcaaagtgtggaaggtactgtgtagttttcgatccactcgacggttcctccaacattgattgtggtgtttctattggaacaatttttgggatttacatggtgaaagatgaccatgaaccaacactagctgatgtgctgcaacctgngaagcaaatggtagctgctggctattgcatgtatggaagttcttgcacgcttgtgttgagcactgggaaaagagttaatggattca

SEQ ID NO: 18110 - DNA, 209 bp, Gossypium hirsutum
  Clone ID: LIB3145-058-Q1-K1-B1
gtgaggaaaaaaaaagcttcaatctttggttgttaagtgggtgaaacaaaaaaaaaatggagggcaaagaggaggatgtttaactaggagccaacaagttctctgagagacaacctattgggacatctgctcaaacagacaaggacttcaaggagccaccaccagcaccattgtttgagcctggtgagctcaagtcatggtctttctac

SEQ ID NO: 18111 - DNA, 402 bp, Gossypium hirsutum
  Clone ID: LIB3145-058-Q1-K1-B10
gggaccgacagatctgtccggttctggaaggaaaatctctgagcacacggaataatcttggaacttaattgacccgacttggtaaaagctatgtgcattatgagcgcctctggttctgcgtctggcttgaaactcgtatgcagatttggagtttatattgaggcacatcgttggagtgaatgtacaaattgtgaatcatcgccgagcccccgtatttccgtagtcgtttattcacctaatggagagaaacacacgcacaaaaattgcactttgtttaatttccatttggttgaagttattaatgtttgattagtgttttagttattttggtttgtgtagaaggaaataagtgaaatgaaatgtaagtaaccatatttacagtttgattaatttcatatgctc

SEQ ID NO: 18112 - DNA, 376 bp, Gossypium hirsutum
  Clone ID: LIB3145-058-Q1-K1-B11
gtttttctccttctcagccttcaaataaaggatggagaggaacatatccctggtttccctgttatgcttcattcttttcaatgggtgtttggtgtttgaggcggatgctgtgaaaagccaacgcagcgaaaagctcaagctgattcacaggcattcacctgagctaggacacaatcctggaacgacccttggacccccaaaaaattcagaggaacgattaaaacagctggtgcagagcgacaaggctagacttcatgccattaaacggaggctaggcgtagtggggaaggcgaacgattgggtggagttcccattccgatcggcggcagatatggggatcgggcaatactttgtttccttgaggatggggacccct

SEQ ID NO: 18113 - DNA, 202 bp, Gossypium hirsutum
  Clone ID: LIB3145-058-Q1-K1-B12
gtgattttccttctcagccttttcttaaaggatggagaggaacctatccgtggtttccctgctatgcatcattctgtctaaagcaaacatattgttctatgcagctgctgtggtaagccaacgcatctgaaagcgtaatcagaatcacaggcattcacctgagctggaacacaatcctgaaacgacccttggacccccaaaa

SEQ ID NO: 18114 - DNA, 332 bp, Gossypium hirsutum
  Clone ID: LIB3145-058-Q1-K1-B2
cttcaaccccccctccccccccccaaaaaaaaacctgttttttctctttctgtctctgcaataaactggaaggagcagacacagagacagggagagacagagagagagagagaggtgtaggggagacagtatggctaagttaatctaaggataagatttgatccatctctcttatgttttcttttttctttgtatgaagttcagaagaagcagattcaaggatattgagaagaagtttctaaagattttttcaagctagctatgggaactcttgcaatcgataccgagtgtgtggattctgacatataccgtgctttgggattcaaagaatt

SEQ ID NO: 18115 - DNA, 55 bp, Gossypium hirsutum
  Clone ID: LIB3145-058-Q1-K1-B3
gtccaatgggaaccaagggggtcccactcaaaggcttcagctttagctgccttat

SEQ ID NO: 18116 - DNA, 299 bp, Gossypium hirsutum
  Clone ID: LIB3145-058-Q1-K1-B4
ttgctttccatcttcagcatgcccttctcatgggtactgcatctggcattgccttcatccttggtgcctggcgaccactgcaactactattgtcttccaaaatgggattcttaccacttatgttgctactaactgtaggagctgcatttgtccatgtttcaagctcttctatgttgttgcttgtttgtaacaaaagaagttcttccaataaccttccaacagtgacaagatttccggtgagtgttctcactctccagtcatttttagcgtgtggagctgtggcttttcatgctctcgct

SEQ ID NO: 18117 - DNA, 273 bp, Gossypium hirsutum
  Clone ID: LIB3145-058-Q1-K1-B5
cccacgcgtccgagcttgtaaagtgcattgtttcttgaactctcatcgtgtgtgtgttttgtatgttgaaagaccgccgacattatctgtaaacccctgactttgattgtattaatcctgtgtgctgctgctttgcgtgttctaaaaaaaaaaataaaaaaaaataaaatataaaaaaaaataaaaaaaaaaaaaaaaaattattaaaaatacaattcaaacataaacaaataataaaagtaagtaatttaaattaaaggggcggccgtttta

SEQ ID NO: 18118 - DNA, 334 bp, Gossypium hirsutum
  Clone ID: LIB3145-058-Q1-K1-B6
agaacctccaaatcttaataatcgaaatggtaacctgaaagaagaaatgtctgagaattctgctttccaagaagagcatttttatgtcagaaacagtcatatggatcaagctgatggtgtaacaaggcgagacatgatggatgataaagataaatctattacacctagtggtttgaaagagattgatagagatgtgcagaacgttgaaacaagcgggtcagatacaagttccacaaagggtaaaaatgcagttgataaattagcagagtgtcacagagaaaatgcagatgttcgagaagatgaaaaagttgaaaccgttcaaactgaagaaaag

SEQ ID NO: 18119 - DNA, 360 bp, Gossypium hirsutum
  Clone ID: LIB3145-058-Q1-K1-B7
ggagggttcccacacaatgcagaatgactatgactcccttgatgtgcatgttggacagtgcttcagtgtgcttgttactgccaaccaggaaccaagggattactatgtggtggcctctacccgttttaccagacgtgaggttacagcaaccggcatcatccgttacaagaatggcaagggagctgcctcatccgagttgccaccaccacctgttggttgggcttggtcactcaatcaattccgtaccttccgttggaacttgacttctaacgctgctaggcctaacccttcaggctcctacaaatatggttccattaacattacccgcaccatcaagcttgccaacactgcacaaagagt

SEQ ID NO: 18120 - DNA, 290 bp, Gossypium hirsutum
  Clone ID: LIB3145-058-Q1-K1-B8
gtcctaaaggttgacccataagcttactatattattgacacgttttgagagaggccttatgaaggatgcaatcaaacattcattgtggaaattgaccggaattactttattcacaaggttaccaatggtagctaatgctgtggttgttattgaaccggttgatcaacaggtcattgggaaggagggttgtgttcaaggggctgtattaaccaagcctgagaaatcaatcaagactgaggacagtgaggaggttgtttgccagggtaataagtcctgcaaggaatacataa

SEQ ID NO: 18121 - DNA, 76 bp, Gossypium hirsutum
  Clone ID: LIB3145-058-Q1-K1-B9
ctgctatttttgagttgtaagacttattaagatatgggaaatgcaacaagctattaagcactaaacctctataatt

SEQ ID NO: 18122 - DNA, 337 bp, Gossypium hirsutum
  Clone ID: LIB3145-058-Q1-K1-C1
gaagggaggccatctttgtttactccaccagctatgccatctgttccacctattagaagagatgagtccagcaatgctgccgctgtcgctgctcgtgcatggatgtctataggagctggagcctttaaggaagcaaatgaaaactttggcacttcgaaaggaaaaatatccgcagattcgttatacaacccggctagggaacttcatccacaagctccacaagttcgagggcaattccctctttctgcggggatgcattttcaacctcagccagagaagaataattttcccctccatggtttcccaccgcaacatgttcgcatgatgaatgaagctc

SEQ ID NO: 18123 - DNA, 396 bp, Gossypium hirsutum
  Clone ID: LIB3145-058-Q1-K1-C10
gcagaaaatatctcaaatctcctcctcctcctcagaaatcttagtatcatcaccatggcctcaaatcccaaggtcttctttgacatgactatcggtggtcagcccgctggtcggattgtgatggagcttttcgcagattgcactcctcgcactgctgagaacttccgtgccctctgtaccggcgagaaaggcgtcggccgcagcggtaagcccctccactacaaaagctcctctttccatcgtgtgatccctaactttatgtgccaaggaagtgacttcacggccggaaacggtaccggaggtgaatccatctacggatccaagttcgcttgacgagaacttcatcaagaagcacactggtcccggtattctctaatggctaacgctggtcccgga

SEQ ID NO: 18124 - DNA, 334 bp, Gossypium hirsutum
  Clone ID: LIB3145-058-Q1-K1-C11
gtgcttccatgattgaagctccagtgctttgggctggtcggctttgtatttattatgctcttttgaagtctgggttagctggatctcaggctaacccacttgtttcagggttggaggagaatggtgatagtgttggcgaatctggtgatttgggtttctctaagtggttggacaatatacgagggaaaccagctccactccactctggactttaagcaacgaacattctcggaaaggatgaacttaatagttgacaaggaagcagctgacaaaagaaagctggtcagcaaatggcatccgaccacgaaaggtacacttaaaaagaactacaggg

SEQ ID NO: 18125 - DNA, 406 bp, Gossypium hirsutum
  unsure (1)..(406): unsure at all n locations; Clone ID: LIB3145-058-Q1-K1-C12
ccaagacgaagtgacgactcactaatcactgcttggatcttgttccgctacctggtgattgggctctatgtggggatagccactgtcggggtcttcatcatatggtacacccaccatagcttcctgggcattgatctgagtggagatgggcatagtcttgttacctactcccaacttgctaactggggtaaatgcgattcttgggaaggtttttctgtgtcaccattcacagcaggttcccaagtgttcaaattcgattacgacccatgcgactactttcattcagggaaaatcaaagcctcgactctttccctctctgtcttggtagccattgaaatgttcaactcccttaatgccctatctgaagatggaagctngttaacgatgcctccttgggtgaacccat

SEQ ID NO: 18126 - DNA, 374 bp, Gossypium hirsutum
  Clone ID: LIB3145-058-Q1-K1-C2
gaagggaggccatctttgtttactccaccagttattccatctgttccacctattagaagagatgagtccagcaatgctgccgctgtcgctgctcgtgcatggatgtctataggagctggagcctttaaggaagcaaatgaaaactttggcacttcgaaaggaaaaatattcgcagattcgttatacaacccatctagggaacttcatccacaagctccacaagttcgagggcaattcccctcttctgcggggatgcattttcaacctcagccagataagaattagttttccgctccatggtttcccacctcaacatgttctcatgatgaaatgaagctcaatttccaaaaaccgaacccatgggttttccctca

SEQ ID NO: 18127 - DNA, 357 bp, Gossypium hirsutum
  Clone ID: LIB3145-058-Q1-K1-C3
atatacttcccttacaccgaagagaagcggaggttgaagcatttccatcctgagatcgaagaccttctttacagcaaagttgagaatgaagaacacttatgtgtgctcaatgaccgcaacaagccaattctgttcacaatggcaaggcttgatcgtgtcaagaacttaaccggactcgtcgagtggtacggcaagaacgcaaagttgcgtgagttggctaacctcgtagttgtaggtggtgataggcgaaaggaatctaaagatttggaagagaaggctgaaatgaagaaaatgtttgagctgatcgacaagtacaacttgaacggccaattcagatggatatcatctcaaatgaac

SEQ ID NO: 18128 - DNA, 301 bp, Gossypium hirsutum
  Clone ID: LIB3145-058-Q1-K1-C4
cacatggttgctatcttcttctgcatttcgacaccgagggcaggagatatctgaagccactctttttagtattaaattttttaaagtaggaataaagttccatgatagacgccaaatagtgatggcaatttttgatgggagatgtaaattccatagttttctatataaattttttgtttcggtctgtattaaataagcactaggacccatatttgcctcttgtaatagtttataggcacttctgactgaaaattcgctagaatgttctcctcagcagacttgaaaatcattatgttctttc

SEQ ID NO: 18129 - DNA, 125 bp, Gossypium hirsutum
  Clone ID: LIB3145-058-Q1-K1-C5
aaaaaaaaaaaaataaaaaataaaaaaaaaaaatctgaaaacaattagaaataaaaaaaacaatataaaaaaaaaaaaaaagggggggccgatttataaaatccaagcttacatacccgtgcatg

SEQ ID NO: 18130 - DNA, 385 bp, Gossypium hirsutum
  Clone ID: LIB3145-058-Q1-K1-C6
gagaattggtacttacttttataagggagtattgtatggaacggttggatttgcatgtggtattattggccaagggatcgcgaatttgataatgactgccaagaggagcatgaaaaaatcggaagaggacatacctgtgccacctcttataaagagtgcagctctctggggtgtttttcttgcggtttcatctaatactcgataccaaatcatcaacggattggaacggttggtggaggcatctcctttggccaaacaagttccacccgttgcaatggcgttcaccgtcggcgtgcggtttgccaataacatatacggcgggatgcaattcgtagattgtgctagattgagtggcgtgcaatatactgcaaacatgggtttcatg

SEQ ID NO: 18131 - DNA, 338 bp, Gossypium hirsutum
  Clone ID: LIB3145-058-Q1-K1-C8
aaagcaaacccgagcggaaactttgaggaaggcagaagagatttttgggacagataacaaagatctgttcctatcatttcagggattgctaaatcgcaacattcactagatcttaattatctcttcttgagataattgtccattactggttgcttggatctagttgatggatttgtccaaacatcaaaagagctgccataatgtaatattagatgaaagacgaaagcatcagcttctttttctttttcaagcaaattaatgtggttttgggctttgagactatatagctccccccattcaagcagggatttttgtgtaaataaattactctgcttttg

SEQ ID NO: 18132 - DNA, 404 bp, Gossypium hirsutum
  Clone ID: LIB3145-058-Q1-K1-C9
tgcttgcaaccaaggtgttgagaagatagttgacctggcaacactaaccggggcttgtgttgttgctcttggaccctcaattgcaggcgtcttcacacccgatgatgatctagcaaaggagttatttcaagcttcagaggctagtggtgagaaactttggaggatgccattagaggaaagctattgggaatcaatgaaatcaggagttgctgatatggtaaataccggcggtcgtcaaggcggtgctatcaatgcagctctgttcttgaaacaatttgttgatgaaaaagtaaagtggatgcacattgacatggctgggcctgtcttgaatgataagaagcatgtggcaactggatttggcatctcaactttggtggaatgggttctgaagaactcttcttctt

SEQ ID NO: 18133 - DNA, 369 bp, Gossypium hirsutum
  Clone ID: LIB3145-058-Q1-K1-D1
aaagaagtagaaagagaaaaatcaaaaatggggagaggcaagattgagatcaagaggattgagaactcaagtaacaggcaggtcacttactcaaagagaaggaatggaatcatgaagaaagctaaagagattactgttctttgtgatgctaaagtttctcttatcatctttgctagttctgggaagatgcatgaatattgcagcccttctactaagttgattgatattttggaccaatatcagaaaacttctgggaaaaagttatgggatgctaaacatgagaatctcagcaatgaaatagatagaatcaagaaagagaatgatagcatgcagattgagctcaggcatttgaaaggggaggatatcaca

SEQ ID NO: 18134 - DNA, 391 bp, Gossypium hirsutum
  Clone ID: LIB3145-058-Q1-K1-D10
cccacgcgtccgcaaaaattcaatttcttgtgccactattactactactactactactcccttcccagggttcgataaggaaaaaaagggtagaaattggtgtaaaatgttggctttaagcgtgaattcaaaaaggcaaaggcgaccgaacgttaggttaggggaaattggatatgtgtctgctgcttttgcatgtgggttttctcagaaaactaaagaaaatctggttcacaaaacatggaaacctgattctctctactctcaacacaatgaacttgatactgttattgagttttcttctaagggaatttctccagatttcttcatatcggctgattcccaacacaacacagagaacaagaacccgaattcttcgaaaccaggtttcgat

SEQ ID NO: 18135 - DNA, 303 bp, Gossypium hirsutum
  Clone ID: LIB3145-058-Q1-K1-D11
gcctccgctgccagcaagctttttttcctgctgcaggagcggtagaacgtcttacacgaaatttgagcacccaaggcatggatcccttggattacttccaaggaagcgagcctcttgtcacagaggaaaagtgatggcattgccacatgatgaccctaccaaacattgcaagctcactgcctttctggtgtacaaggctggtatgacacacattgacagagaggtcgaaaaacccggatctaagctttacaagtatgtgacgtgtacaagctgttactattatctgaaacccctgctatggtg

SEQ ID NO: 18136 - DNA, 291 bp, Gossypium hirsutum
  Clone ID: LIB3145-058-Q1-K1-D12
gccgccgctgacagcaagctgttgttactgcatcaggagcggaagaatatctaacaggaaatatgagcgcccagggcatggttcccttggatttcttccaaggaaacgagcctctcgactcagaagtaaagtgatggcactgccaaaggatgaccctaccaaaccttgcaagctcactgcctttctggggtacaaggctggtatgacacacattgtcagaaaggccgataaacccgcatctaaacttcacatgaaggaaacgtgtcaagctgttacaatcatttgaacccc

SEQ ID NO: 18137 - DNA, 318 bp, Gossypium hirsutum
  Clone ID: LIB3145-058-Q1-K1-D2
attgtaaggagcctgcatcatcaaaagatgaaaaggatggggatgcaagtgattgtaagaagcctcccccatcagaaaatggaaaaaatgctgatgctgatgatgccagtaccattcatgataaactaaatggtatggatggtaatgatgaaatcaacaataatgatgatgacgaggaaggcaaaatagaggcggaagatggcaaggagcagaactctaaaagtacggaactcatggaagcagcaacctataatgcttctggcgcaacagattcttttgtaatggggatgttggtactaatgttaactaacatgattt

SEQ ID NO: 18138 - DNA, 388 bp, Gossypium hirsutum
  Clone ID: LIB3145-058-Q1-K1-D3
cccacgcgtccgattcgatcaaatgattgaatcaggattagaaccagataatgcgacatatatgactcttatatctggctattgtaaaagaggatatttagcaagggctttaaatctttttgaggaaatgtataggaggggcatacagccagatatgcgtaccatttcaactgttgaccattgtatcttgaatgccaagagagttgtgagaaagtagccatactccacacaagacggtttatcttatcatgcattgaagtatcctgctaatatgtagcaggctgaggaaagctttctctctatgagtagaagctttatgtgcacttatgattcaatatgatgaattctcttgcatttactatgtagaatagccggaggatgtcaaaat

SEQ ID NO: 18139 - DNA, 372 bp, Gossypium hirsutum
  Clone ID: LIB3145-058-Q1-K1-D4
cccacgcgtccgcggaagcagtcttatggtgtctccagtgcttgagcaggggaaaacatcagtcaaagcactcttcccacccggttcttggtacaatctctttgatatgacacaaaccatagtgtcaaagggacagtacttcatgctcgatgcgccgttgcatgtggtcaatgtacatttgtatcaaaacaccatactaccaatgcagcaaggagggaatgatctccaaggaagctagaatgacaccatttactcttatagtaaccttccctgccggggctagcgaagcagaagccaaaggaaacctttatctcgacaatgacgagcttccagaaatgaaactcggaaacgggtattcaacatatgttgact

SEQ ID NO: 18140 - DNA, 410 bp, Gossypium hirsutum
  unsure (1)..(410): unsure at all n locations; Clone ID: LIB3145-058-Q1-K1-D5
cccacgcgtccgcagaattggtgatgaaatcgattgtacccgttgttatggctggtgtcttgggtatttacgggttgattattgctgtcattattagtaccgggatcaatcctaaggcaaaatcgtattaccttttcgatggttacgcccatctttcatctggtcttgcttgtggccttgccggtctttctgctggaatggctattggaattgttggtgatgctggtgtcagagctaatgcacaacaaccaaaactttttgttggaatgatacttatcctcatctttgccgaagctttggctctttacggccttattgtcggcatcatcttgtcttcccgggctggccaatctagagcagaataagataccggnggaattggggtagattcttttatttgcttatattgg

SEQ ID NO: 18141 - DNA, 368 bp, Gossypium hirsutum
  Clone ID: LIB3145-058-Q1-K1-D6
gctaaggttacccctccaaagtctggtaagctcgaaaatggatcaaatgttacaaataataaaatgtctcatcaacgcggatcacaaactgtagtccgtgctccaaatgatcggaaaaagggagtgaacaagatgaaaacggctaaaataactaatgagagattagaacacaaaggagatggtattgtttcggaaggaaagaagattgatcctatatcggaaagcgatacagttttcgaaagatatagcattgaaactgatattatggttgaagaatgtcgtgataacagcgaggattctgtttgtgacattaccctggtgactaccgattatcaaaacaaccgaaaatgtatcggtccaaatgaaac

SEQ ID NO: 18142 - DNA, 402 bp, Gossypium hirsutum
  Clone ID: LIB3145-058-Q1-K1-D7
tgcagattttatgtggcagaagtgctccttgctttggagtatcttcacatgcttgggatcatttacagagaccttaagcccgaaaacgttttggtgagagaagacggtcacataatgctctccgattttgacctctcccttagatgtgccgtctctccgacgcttgtaaaatcttcgaactcaaccctggaatcaaaaaattcggcatactgtgcccagcctgcgtgcattgaaccaacttgtgtaatgcagcctgattgtatccaacctgcatgttttggaccccgatttttttcaagcaagcagaagaaagacaagaagagcaaagtaaagaatgaaacaaatcatcaagtgagtcctctccccgagctcatcgctgaaccgaccaatgctcgatcaatg

SEQ ID NO: 18143 - DNA, 380 bp, Gossypium hirsutum
  Clone ID: LIB3145-058-Q1-K1-D8
gcagccgcagccagcaagcagcagtagcaacagcaggagcggaagaatgtctcacaggaaatttgagcacccaaggcatggttcccttggatttcttccaaggaagcgagcctctcgtcacagaggaaaagtgaaggcattcccaaaggatgaccctaccaaaccttgcaagctcactgcctttctggggtacaaggctggtatgacacacattgtcagagaggtcgaaaaacccggatctaagcttcacaagaaggagacatgtgaagctgttacaatcattgaaacccctcctatggtgattgttggggtggttggatatgtgaagacaccacgtggccttcgctccttgaacaccgtctgggctcagcatctgagtg

SEQ ID NO: 18144 - DNA, 369 bp, Gossypium hirsutum
  Clone ID: LIB3145-058-Q1-K1-D9
acttgagccaaggacttgctcgtcagctttcaatgaccttattagggaagcctattgagggaatatggcacactggagttgtggtttatggcaatgaatactattctggcggatgaatacaacattctcctgctgggacgacaccatgtgggacaccaattagagtgattgatttaggagtcacccatgtgcctaatgatgtgtctgagatgtatttgcaggagattagtccccgctacactgctgagacctatagtttgctcacccacaattgcaacatcttcagtaatgatgttgcccaatttttagttggttccaacattccagactatattttgcagctacctaatgacactatgagcagtccga

SEQ ID NO: 18145 - DNA, 312 bp, Gossypium hirsutum
  Clone ID: LIB3145-058-Q1-K1-E1
cccacgcgttcgcccacgcgttcgcccacgcgttcgcccacgcgttcgcttaaacattttcattttcaaacccccctccccccatggctggtctcaagcttatttgtggcctagtactgttgtgcatgttggtggtggaacccatggccacaactgctctcacatgtggacaagtggcaagcgaaacggctggttgtataaggtatttgcagcgtggagggaaccctccagctgcttgctgcaacggagtaaggaacctaaacaggcaagctagaaccacccgtgaccgtcaaactgcatgcagatgcttgc

SEQ ID NO: 18146 - DNA, 326 bp, Gossypium hirsutum
  Clone ID: LIB3145-058-Q1-K1-E10
gtcgcggctgtttgtatataaagagaatgaaagccggcttacttcggaatatcgacaagaaatttgcaaaccaaaaaaaaaaaaaaaaaaaaaaaaaaaaaaaaaaaaaaaaaaaaaaaaaaaaagaaagaaaaaaaaaaaaaaaaaaaaaaaaagaacaagtgcaaaaaagagaacaaaattttaaataacggaacctaaaattcaggggggcgcccttaaaaagaaaaacagtttaaccgcgaaaaatcggatgaaaaccaatttaatatggcgcgcaataaataaatctatggggagctggttaaaaatcaaagaagtggaaa

SEQ ID NO: 18147 - DNA, 108 bp, Gossypium hirsutum
  Clone ID: LIB3145-058-Q1-K1-E11
gccaaggatgattgtatatatatagaatgaatgccgggttacttctgaatatgtgcaagaaagggggccaccataaaaaacagaaaataacacaaaggtgaaaaacgg

SEQ ID NO: 18148 - DNA, 305 bp, Gossypium hirsutum
  Clone ID: LIB3145-058-Q1-K1-E12
accgatgagggggctaaatatttctattggattccgacaaacgcagcaaaatggtgccgatagctgcatgcccatgtagcagataagagctctcagagaggccgcgagagcacagataaatagacgcagttgaaatctacttttgacgtggatacacagtacataattaaatgcggctatactatcatatactcccttggatcataacatcttataccatgcaaagcaacacaagctattcagaagtgttcaaacattgtattatccaatattctatatctttgcaattcaatagcattcatgta

SEQ ID NO: 18149 - DNA, 404 bp, Gossypium hirsutum
  Clone ID: LIB3145-058-Q1-K1-E2
gcagcaacaatttcgtagcctaagctctagggagcttggctctggctcggctgccattgttggttccccggttaattcatggtcaaaatggggatcctccaatgggaagccagactgggctgtcaatgccgatgggttggacaagcatcgcaggtcttcctcatttgagcttggtaatggggatgaacccgatttatcatgggttcagtcccttgtaaaagaatctcccactgagatcaaagagaaaatagcagcaccagtctcgggtgagggttctagcatgaatgcagatccggtcgataatgcagtgttgggtgcttggctggagcaaatgcagctcgatcaactcgtggctcagcaaaactgaaacccgtttcgctgagccatcctgaggtagagataag

SEQ ID NO: 18150 - DNA, 333 bp, Gossypium hirsutum
  Clone ID: LIB3145-058-Q1-K1-E4
cccacgcgtccgctttaaaccacaccactttttgtagctctctcatggaagctattaaatgacaaagctctcatcattctccaccatgtttagcagccaacactacctttcgagatcgagacattggcttattctgtagcttaaaactttatatagcatcaatgtgcgggggctttagttgatatggttgaggagttgaggtgtgagtaaagctaattatatatatagcttaaacatctgcatcagctatgaatagaggggttggtgttattgtagattatacagaacttgaagatgtatcctactctttaatatcaagtttactgttttaac

SEQ ID NO: 18151 - DNA, 404 bp, Gossypium hirsutum
  unsure (1)..(404): unsure at all n locations; Clone ID: LIB3145-058-Q1-K1-E5
cccacgcgtccgctgatcatcatgctgctgcaaacaaggctgatgttgaagttgaaacctcggttcaggttgacgcagttcagacaaacgaccagcctaaggatccaaaggatgcagcaggcagccgggaacttcaggaaactgaagcaactaaggcagttgagaaggtggtggtggacaccacaaacctagccaattttgttgggaaaccagttttccatgcagagcgcatctacgatcggactccagttggtgttgtgatgggtctagcatggactgccatgggtggttccaccttgtacatcgaaacaactcaggttgaacaaggtgaggggaaaggagcccttcatctcactggtcaactnggagatgtcatgaaagaaagtgcacaaattgctcacaca

SEQ ID NO: 18152 - DNA, 382 bp, Gossypium hirsutum
  Clone ID: LIB3145-058-Q1-K1-E6
ggcaccacaccttaatattgttccttccatgtttgtacttttattattattcatttcagcctctaaagttcaatcagatgcttttgatgttgttgccaagtttggcgcaaaagctgacgggaaaacggatttgagcaagccatttttggatgcttggaaagaagcatgtgcctctgtaactccatcaacagttgtgattcctaaagggacatatttattatcaaaagtaaacttagaaggtccatgcaaggctcctattgagattaatgttcagggcactatacaggctccggctgatcctagtgctttcaaagaccctaattgggttagattctatagtgttgaaaatttcaaaatgtttggcggagggaatttcgatggt

SEQ ID NO: 18153 - DNA, 403 bp, Gossypium hirsutum
  Clone ID: LIB3145-058-Q1-K1-E7
cccacgcgtccggttttgctgttggataatgtgatcgcatttaatgaggctgtcattgaagaaagagaacaaggaattcaagaaattcagcagcaaattggtgaggtgaatgagatcttcaaagatctcgcagtgctagtacatgagcaaggaactatgattgatgacattgggactcatatcgagaattcacgggctgccactatacaggctaaatcccaacttgcaaaagctgcaaagactcatagatcaaattcttccctgacctgcttgcttatggtgatattcggaatcgtgattctgattgtggtcatactactagtggtctaatcccaaactaaagatcatctcatcagcgagacgctgatctcttcgcctatgtatttgattatgttgttctatg

SEQ ID NO: 18154 - DNA, 407 bp, Gossypium hirsutum
  Clone ID: LIB3145-058-Q1-K1-E8
gcaaaagagtccttcagcttcttccttgggtccaggtggtctagacctggctcaagccttcttcaagcccatcctaaacaccgatccaccttcctccaccaagcgccataccaagatctccgtcatcggagttgggaacgtcggtatggctatcgcccaaactatcctcacccaggacttagccgatgaactcgccctcgtcgacgccaagtctgacaagctccgcggcgaaatgctcgatctccaacacgccgcggcgttcctcccacgcactaaaatcaacgcgtccgttgattactccgtcaccgctggatctgatctgtgtattgtcactgctggcgcccgtcaaaaccctggcgagtctaggctgaatctgctgcagaggaacgttgctctgttttcgaata

SEQ ID NO: 18155 - DNA, 394 bp, Gossypium hirsutum
  Clone ID: LIB3145-058-Q1-K1-F10
caagatttaagaaaacccttaaacctctttgcctttttcttttcgtttcattttcgacgaaataacaatgagggaaatccttcacgtgcaaggaggccaatgcgggaaccaaatcggatccaagttttgggaagtgatctgcgacgagcacggtgttgatcctaccggaaagtacagtggagatggatcatccgatattcaattggagcggatcgatgtgtattacaacgaggcttccggtggaaggtacgtccctcgtgcggtactcatggatcttgaacccggtaccatggatagtatcagatccggtcccattggccagatctttagacctgataatttcgtgtttggacaatccggtgccggaaacaactgggccaaaagtcattacact

SEQ ID NO: 18156 - DNA, 386 bp, Gossypium hirsutum
  Clone ID: LIB3145-058-Q1-K1-F12
cttaattattacatccaatattttattgttttttttattgtgaaggataaaatagtaattttatttttagtagcctacaaggagataagaaaatttgaacatcatctacccatattgccttagcacacatgaatgaagtaaaccttcacatatatgtatgtatgagaaaaaaaaagtaggtttgccatttcatgcacgaatgttcagtgggtatatctattgtttctgctgtatatacatacaaaggtacgtacgtacatacatacatatatacatatgtgtctttaatttgtttttcgcttcttttggtcaagttggatatagtgaaatcgcatataaatctcgaaaatgaaggcttttgattcccatgtgaagtgaaatgtata

SEQ ID NO: 18157 - DNA, 355 bp, Gossypium hirsutum
  Clone ID: LIB3145-058-Q1-K1-F2
caacagctggaggctgttatagaagcagaaaagcaagctgctagagacttgattcgtgaaaagaggaaggatagagctttgttagctttgaagaagaagaaagctcaagaagaactattgaagcaagttgatacctggcttattaatgttgagcaacaattggcagatattgaactagcaagcaagcaaaaagcagtttttgatagtttgaaagcaggtaacaatgcaattaaggcaatacaaagtgagatcaacattgatgatgtgcagaagttaatggatgacaccgaagaggctaaggcttatcaagatgaaattaatgcgatctttggggagaagttatcagcagaagatg

SEQ ID NO: 18158 - DNA, 300 bp, Gossypium hirsutum
  Clone ID: LIB3145-058-Q1-K1-F3
cccacgcgtccggaaaaaaaaaatgggaaggagtccttgttgttcgaaggaaggccttaacagaggagcttggactgctcttgaagacaaatttcttacagattatatcaaagtacacggtgaaggtcgttggagaaatctccccaaaagagctgggcttaagagatgtgggaaaagttgtaggcttcggtggttgaattatttgagacctgatattaaaagaggtaacatatctcctgacgaggaagagcttatcatcaaactccacaaactcttgggaaacagatggtctttgatagc

SEQ ID NO: 18159 - DNA, 296 bp, Gossypium hirsutum
  Clone ID: LIB3145-058-Q1-K1-F4
gtcagaaaattacatttgagggacaagctgatgaggctccagatacaataactggagacattgtttttgtattggaacaaaagaaacaccccaaatttgataggagatttggggacgaactttatgttgaccacaaactcagtttgacagaggctctatgtgggtttcagtttgccctaactcaccttgatggcaggcagctcttaattaaatcaaaccctggcgaggtcgttaagcctggtcaatacaaggctatcaatgatgagggtatgccccaccatcagagacctttcatg

SEQ ID NO: 18160 - DNA, 318 bp, Gossypium hirsutum
  Clone ID: LIB3145-058-Q1-K1-F5
cttgttcgatggtcgccgcctgcgaggtgagcaaactcctgacgagcttgagatggaggatggtgatgagatcgatgctatgcttcaccaaaccggtggtactgtgtgaagcgagtactactttgccacatttagtatttgatgagttagttatggtctgattatgtagatgtttccaatgtttttatatacgatcttattgccatgttatgaagacttgtggaccttgttttgagtcatcttgctcttatagaagagcttgagtttctagtgtttacaaagtgagatggaactcgggactttgttccgatatgcact

SEQ ID NO: 18161 - DNA, 331 bp, Gossypium hirsutum
  Clone ID: LIB3145-058-Q1-K1-F6
cccacgcgtccggattgaagcaatacatcagtttcttcttaaaaagaaagtaggttgtattcgaattgatggtactacccccgcatcctcaaggcaagctttggttaatgattttcaagagaaagatgctatcaaggcagcagtgctttctatcaaagctggaggtgtcggattaactttaacagctgcaagtacggttatctttgcagagttgtcatggactccaggtgacctgattcaagcagaagatcgtgctcataggattggacaggtctcttctgtgaatatatactatctgctggcaaatgacacggttgatgacatcatatgg

SEQ ID NO: 18162 - DNA, 398 bp, Gossypium hirsutum
  Clone ID: LIB3145-058-Q1-K1-F7
gatgagatttggggcattcaatttggaagttattcaagcagctataagaattgccaaacaacagggtgtctctgtttcgttggatttggcaagttttgagatggtgcggaattttagagtacctcttcgacagttactggagtcaggggatattgatctctgctttgccaatgaggatgaggcaacagaattgctaaggggtgaagggaatgcacatcccgaagctgcagttgaatatctgtccaaatattgcaggtgggctgtggttacattagggtccaatggatactagttaccctgttaagaagtgaacagctttttcagtgaaattggcctaggaattctgtttgcttattgaaatatttaacttccttttatatgttttataattataattt

SEQ ID NO: 18163 - DNA, 384 bp, Gossypium hirsutum
  Clone ID: LIB3145-058-Q1-K1-F8
gttttaatggaactgctggtatatggagaatagcagccattaatgaggcaggtggatggaaagatagaaccaccgtggaggacatggaccttgcggtccgagctagtcttaggggatggaaatttctttaccttggtgaccttcaggtaaaaagtgaacttccaagtactttcaaggcctttcgtttccagcaacatagatggtcatgtggccctgcaaatttgttcagaaaaatggtgggggagatcatcacaaacaagaaagtgagattctggaagaaactatacgtaatttacagcttcttcttcgtcagaaaaatcattgctcacatggtcactttctttttttactgtgtggtcctccctttaaccattctagtccctg

SEQ ID NO: 18164 - DNA, 387 bp, Gossypium hirsutum
  Clone ID: LIB3145-058-Q1-K1-F9
gatttaatgtaactgctggtttatggagaattttagccattaatgaggcatggggatggaaggagggaaccacggtggaggacatggaccttgcggtccgagctagtcttaggggatagaaatttctttaccttggcgaccttcaggtaaaaagtgaacttgcaagtactttcaaggcctttcgttaccagcaacatagatggtcatgtggccctgcacatttgttcagaaaaatggtggtggagatcatcacaaacaagatagtgagattttggaagaaactatacgttatttacagctgtttcttcgtcaaaaaaatcattagctaacatgggccacttttatttattttcctgtggagggcacttcttttaacccatttctaat

SEQ ID NO: 18165 - DNA, 343 bp, Gossypium hirsutum
  Clone ID: LIB3145-058-Q1-K1-G1
ggtgtcttggctcttaaggctttgaagctatctgattcttttatggaactttaccgagctaatagctttactggagaaaagctgagggagaaaaacttgtcatggatggacattctcgaggaaattactatcaaagtctcaaattctgcccttatcagtgcctttatgactgagctggaatctgacacaccagttacacagtgtgattatgaccgtctgcaattgtcaagcaatccatatatggagaggaatatggaatttttgattgaatgcatggatgatttgtcagtggaacagcagaagttgcaattttactacatgagcctgtcacgtcaacaagccc

SEQ ID NO: 18166 - DNA, 383 bp, Gossypium hirsutum
  unsure (1)..(383): unsure at all n locations; Clone ID: LIB3145-058-Q1-K1-G10
atactcttttgctcttatttaaagagtcatcatgatgctgatcctgatcatgatgctgatcctgatcatgatgctgatcctgtaagttttggcgtgtatatattttttaaattcaatttgcttagatttgggtcagatctgattgtcttctggatataggttgctctgtatatgaatttgaaagactatggtggtggttttgagttctgtaatctgtcagatgacaagatatacgatgatttaggtgaaggcaccagtggtgctagaacaaatctacacaatatggaactgtcacaagagaacacctttgccgttgatcctgttcttctgtctctgccgngttctctgatatggaaaactttgggattttggacttgtgatct

SEQ ID NO: 18167 - DNA, 94 bp, Gossypium hirsutum
  Clone ID: LIB3145-058-Q1-K1-G12
gtactagatcgctagcggattttttataagatccaagcttacattcacctgcgggctatttcatagcatttattgtagtcgcacctaaattcaa

SEQ ID NO: 18168 - DNA, 323 bp, Gossypium hirsutum
  unsure (1)..(323): unsure at all n locations; Clone ID: LIB3145-058-Q1-K1-G2
cccacgcgtccgcccacgcgtccggggagtctcaaatatgaaaatatggttaatttgtttggctttaatcgacatagtggtgatggaagaggtgatccaaattgatgctgctatgacaactcaccacccagaggtccctggtcttgtttcttaccgtcgccttctccaagaagatgttaatccctggcaacgtggttgcttaaaactcactaggtgtcgaagttaaagaatattttgataatatgtgacggtatatttcttatataaatataaaaacctcttcatattaatgcaacatgattaatactaaaaaaaacacanna

SEQ ID NO: 18169 - DNA, 280 bp, Gossypium hirsutum
  Clone ID: LIB3145-058-Q1-K1-G3
agaaaatatcacaaatcttcttctccttctcagaaatcttagtatcatcactatggcctcaaatcccaaggtcttctttgacatgacgatcggtggtcagcccgctggtcggattgtgatggagcttttcgcagattgcactcctcgcactgcggagaacttccgtgccctctgtactggcgagaaaggcgtcggccgcagcggtaagcccctccactacaaaagctcttctttccatcgtgtgatccctaactttatgtgccaaggaggtgacttcacc

SEQ ID NO: 18170 - DNA, 281 bp, Gossypium hirsutum
  Clone ID: LIB3145-058-Q1-K1-G4
agaaaatatcacaaatacttcttctccttgtcataaatcttagtatcatcactatggcctcaggtcccatggtcttatttgacatgacgatcggtggccagcccgctggtccgattgtgatggagcttttcgcagattgcactcctcgcactgaggagaactttcgtgccctgtgttctggcgagaaaggcgttggccgcagcggtaagcccctccactacaaatgctcttctttccatcgtgtgatcactaactttttgtgccaaggaggttacttcacc

SEQ ID NO: 18171 - DNA, 93 bp, Gossypium hirsutum
  Clone ID: LIB3145-058-Q1-K1-G5
agaaaacgtgacacaacgccttcgccgagtcttaaatcttattaatcagcactatggcctcagatcccaatgacttatttgacatgacgaacg

SEQ ID NO: 18172 - DNA, 100 bp, Gossypium hirsutum
  Clone ID: LIB3145-058-Q1-K1-G6
cccacgcgtccgaatttgtacagagatgaagtgtgaatatgtaactaaattatttgcccacatcaaaaagttttgacggaaaaaaaaagtagattttttt

SEQ ID NO: 18173 - DNA, 386 bp, Gossypium hirsutum
  Clone ID: LIB3145-058-Q1-K1-G7
ttcaaattgttatctctgagggtgtcttaataaacgccttcgatttactttcggtttccatttacttctttatttctacgtttttgaatttttagtaagcgaaaatgagagagtgcatttcagttcacatcggtcaggctggtatccaagtcggaaatgcctgctgggagctttactgccttgaacatggaatccagcctgatggccagatgccaagtgacaagactgtcggaggaggtgatgatgcttttaacacctttttcagtgaaactggtgctggaaagcacgtccctcgtgctgtctttgtggatcttgagcctactgttattgatgaagtgaggactggtacttaccgtcagcttttccaccctgagcaactcatcagc

SEQ ID NO: 18174 - DNA, 352 bp, Gossypium hirsutum
  Clone ID: LIB3145-058-Q1-K1-G9
gtgaaagaaggcaagcgtgctgtgaatgtgattctagctaaacacatctggcatgcgacgatttacggtgatggcaaaacaaagactttaatttccggcggccacaactttgctgatggaactcccacatttgctacagctactttcgctgtgtcaggaaaaggatccattgcatatggcctagggttcattaacacaactggtgcactaaagcaccacgcactgtctatgcggcctggttataatcgcttcgtattctacctctgtgcatttgatgcctaccaggacactctttattcccattccaatcgaccgttttaccgcgaatgtgacattttgggcacaattgact

SEQ ID NO: 18175 - DNA, 316 bp, Gossypium hirsutum
  Clone ID: LIB3145-058-Q1-K1-H1
cccacgcgtccgatcatcaatggccaaggcgagaagaaggcatggaactctgtatgcgatggttgccgtcgacagtctgctagtttgaagttaatcaagttgaacgacgtgctcattagtggcattacctccgtcaactctaaagggttccatatgatgatcagcgtttgcagcaacttcgtgatcaccaacgttaatatatcggctccggatgaaagccccaacacggacggcattcacatgagcaaaacaaataaggtcagaataagcgacagtatcatcggcactggcgacgattgtgtctcaatgatccatg

SEQ ID NO: 18176 - DNA, 330 bp, Gossypium hirsutum
  Clone ID: LIB3145-058-Q1-K1-H10
ggatttgaatgtggagttcagtaacgaagtggaagagccggtaccaaggaggagtgaggggaaccatgctggatacggtgaagaggataacatggaagggaacggattttttgagggtcttgatgagtttttaagtagcttgcctatactctcagctgttggggatgataaagttaaggctacttagtgaagtaagatccttgtttccttttttgcagcagttgtagttctaatcgtatgcttgtagtatttaactatgtggaggtactcggttgaatttgactggatactttgtagcatcctatgttattatttttatagttccgagct

SEQ ID NO: 18177 - DNA, 406 bp, Gossypium hirsutum
  Clone ID: LIB3145-058-Q1-K1-H11
aaagatgaatgtctcaacttatctctccggccattacaagtttcagatgtggatgatttcatggtctgggccagtgatgaaaaagtgacacgtttttgtacttgggaaccttacaccaacaaagaagatggcttgaattacataaagaacactgttgtgcctcacccttggtttagagcaatatgtgttgacgatcgaccggttggtgctatttcggtgagtgcaaattcaggcaatgataaatgtaggggtgaacttgggtatgttttggcatccaagtattggggtaaagggattgtaacgagagctgtgaaaatggtggttgataccatatttgttgaatggccacatttggagagacttgaggctttggttgatgttgaaaatgtggggtctcaaagggtgc

SEQ ID NO: 18178 - DNA, 371 bp, Gossypium hirsutum
  Clone ID: LIB3145-058-Q1-K1-H12
gtgggatcaacaagatttttgttttgactcagttcaactcggcttcccttaatcgtcaccttgctcgtacatattatggcaatggtatcaattttggagatggttttgtcgaggttctggcagcgactcaaacatcgggagaagcagggaagaaatggttccaaggaaccgctgatgctgtgagacaattcatttggttatttgaggatgcaaagaatagggatatcgagaatatacttatcttgtgcggtgatcatctttatcgaatggattatatggagtttctacagagtcacgtcgacaataatgctgatattacaatctcgtgtgtgccagtggacaacagccgtgcatcggattatggactggtg

SEQ ID NO: 18179 - DNA, 323 bp, Gossypium hirsutum
  Clone ID: LIB3145-058-Q1-K1-H2
cccacgcgtccgatcatcaatggccaaggcgtttagaaggcatggaactctgtatgcgatggttgccgtcgacagtctgctagtgtgaagctaatcaagttgaacgacgtgctcattagtggcattacctccgtcaactctaaagggttccatatgatgatcagcgtttgcagcaacttcgtgatcaccaacgttaatatatcggctccggatgaaagccccaacacggacggcattcacatgagcaaaacaaataatgtcagaattagcgacagtttcatcggcactggcgacgattgtgttttaatgattcatggaaccac

SEQ ID NO: 18180 - DNA, 157 bp, Gossypium hirsutum
  Clone ID: LIB3145-058-Q1-K1-H3
cccacgcgtccgtgcagttctgaattactagaaaaccaagtcaagctcttatttttggtggccataaatttgtacagtgctcatattttcggggttgatcccctgagctaacttctggaagagggtgacaagcaaaagaaatggctgttttttcttc

SEQ ID NO: 18181 - DNA, 189 bp, Gossypium hirsutum
  Clone ID: LIB3145-058-Q1-K1-H4
cccacgcgtccgtgcatttctgaattactagaaaaccaagtcaagctcttatttttggtgggcataaatttgcacagtgctcatattttcggggttgatcccctgagctaacttatggatgagggtgactagcaaaagaaatggctgttttttcttcaaaaaaactgttggagtaacatcatgatcacc

SEQ ID NO: 18182 - DNA, 386 bp, Gossypium hirsutum
  Clone ID: LIB3145-058-Q1-K1-H5
agcaaataaaactttgaattattcatacaaaacaatgaaaacccacttttttcccctggtttttctcctcatttttttcttagcccaaggtctgaaccccaaatgtgccatccaagaccatggctcaaacctgcaagtgttccatgtttacagtccatgctcacccttcaaaccctcaaaaccactctcatgggaagaggatgtgctgcaaacgctagccaaggaccaagccagggtgcagtttttgtccagcctggtggctaagaaatctgtggtgcctatagcttcaggcaggcagattgtgcaaagcccaacttacattgtgaaggccaatattggaaccccacctcagcccatgcttatggccatggatacaagcagtgatg

SEQ ID NO: 18183 - DNA, 313 bp, Gossypium hirsutum
  Clone ID: LIB3145-058-Q1-K1-H6
cggacgcgtggggcagcagctcaagcatgatcaaaacattggagaggtaccaaaaatgcaactatggagctcctgagccaaatgtgtcatctagggaggctgctttggaattaagcagtcgacaggaatatttgaagcttaaagcacgttacgatgccttacaaaggtcccaaaggaatttactaggagaagatttgggacctttgagcagcaaggagctcgagtcacttgagaaacaacttgattcatcattgaagctaatcagatcaacacggacccaatacatgcttgatcagctcaatgatctccaaag

SEQ ID NO: 18184 - DNA, 396 bp, Gossypium hirsutum
  Clone ID: LIB3145-058-Q1-K1-H7
gccaatcccgtcgcacaaagaacctctgtttctgcccttctctaacaacaaacatggcaaagcgattgattccttcatttaatcgcattttggttgagaaaataatccctccttctaaaaccaactctgggatcttgcttcctgagaagacccccaagttgaactctggaaaagtggtagcagttggaccaggagctcgagacagagatgggaagcatatcccagttaatctgaaggaaggagatacagttcttttgcctgaatatggtggcactgaagtcaagcttggtgaaaaagagtatcacctatacagagatgatgacatcttgggaacccttcatgactgaattttgcggctgtgggactggagaatgattctcattcaaatatgtctct

SEQ ID NO: 18185 - DNA, 410 bp, Gossypium hirsutum
  Clone ID: LIB3145-058-Q1-K1-H8
ctttgcaattgcttttcttttgaagttgggacttctctcgaactggtttaagatctcatctcagtgaacaatggctagtctttacagaggggcatcaaggaaagacaagcagaagggaagacaccatggattaagccaacagaagaggcaagagattaaggaagcatttgaactgtttgacactgatggctcaggtaccatcgatgccaaagagctgaatgttgccatgagggctcttggtttcgaaatgacagaagagcaaatcaatcaaatgattgcggatgttgacaaggatggcagtggtgccattgactttgatgaatttgttcacatgatgactgccaagatcggggagagggacactaaagaagagcttatgaaagcattccaaatcattgatcaagataaca

SEQ ID NO: 18186 - DNA, 328 bp, Gossypium hirsutum
  Clone ID: LIB3145-058-Q1-K1-H9
cggacgcgtgggcggagctgtgggaacgttcatgagtgtgtactacaaatccaagaaaggaaggaagaccgaaaaagaggtccaagaagcggaacaagcccaccttgaaactgcgtatgcagaggctgattagtaagcatgggggagtttggtagaagttatgtgaatctttgcattgtctttgttgtctctttaattcaatatttgctttcaacgatggtattatgtggggtcggaactgatgttatgggataggtataagcagtggttgttgtggaatgatttatggctttagtttagctattatggatagacttatgataacgag

SEQ ID NO: 18187 - DNA, 633 bp, Gossypium hirsutum
  Clone ID: LIB3145-029-C10_FLI
taaacaaaactcctataatggctacatcctcgggttcatcagcaacacaaatcaactcaggctcagaagaagcattaatggacgaaaggaaaaggaaacgaatgatatcgaacagggaatcagcaaggagatcaaggatgaggaaacaaaagcatttagatgatctaatgactcagttgactcagttgcagaaacaaaaccatgagatcatcacaaacataaacttcaccacacaacacctcttgaatgttgagtcagagaactcggtgcttagagctcaactcaatgaactcactcataggttacagtccttgaatgaaatcatcagcttcttgaatgatgatcatggcgatgacgacgacgatgatgataaaacaagcattgacttcactcagcctgctgtagctgatactgccttccttaatcctttccatttggctttcttgaatcaacctatcatggcctctgctgataacacgtttcagtattaattttctataatgccataattttaatgggatttttaatctcagtttatatatatatatatatatatagttgtacaagcagtagtatgaaataaaatatgtgaaaatcataaagctatggtatggttaatggtagatttttttc

SEQ ID NO: 18188 - DNA, 324 bp, Gossypium hirsutum
  Clone ID: LIB3146-050-Q1-K1-A11
agacgaatgaaagccaaaatcgtgatgcatcattcgaggaatgcgtgagctcggattgtttaagttcaatggaatgcatgcaagaagctgcagtcgagcctaattttctggatttcactggaatggattttgattctgtttacggaatgaggagagcatttagtgaaggcgatataaagacacttggcaacggtgatgtgagcgtcatccattcttccgtcaagtggccattaattgtcagaagctgttcttctgaagatcgaagggaaaagctttctagatacaggaacaagaagactaagaggaattttggtcggaaaatca

SEQ ID NO: 18189 - DNA, 322 bp, Gossypium hirsutum
  Clone ID: LIB3146-050-Q1-K1-C9
ctctacctttcggtacccttttcatcgagcttttcttcatcatgtcaagcatatggatgggacgcgtgtactacgtcttcggctttcttctcatcgttatggtcctccttgttgtggtttgtgccgaagtatcattggtgttaacttacatgcatctctgcgtagaagactggaaatggtggtggaaatccttcttcgcttctggttcagtcgccatctacatcttcttatactccgtaaactacctcatattcgatctcaagagtttgagtggaccggtctctgcaactctctacttggggtattctctcttcatggtcct

SEQ ID NO: 18190 - DNA, 325 bp, Gossypium hirsutum
  Clone ID: LIB3146-050-Q1-K1-F10
aagagatcccacgtatcaagatctaatgaagaggctttttttgtcgaggcaaagaaaattgttcaagaagaataaatttgacgttgacaggttgaaggagttacaaaacaagtgcaaaacatctctggatgcctctgcatctatccggaatcgtgtaggattggaagtagaactagatgatgccttacacaaggagtaggctttatccccaccttcactttggttgctttcttgttcttattattaattgtcttgataaccatttctaacctaaatcaaagcttaaaacttttcctcatttatccatttctttatttctttcttc

SEQ ID NO: 18191 - DNA, 324 bp, Gossypium hirsutum
  Clone ID: LIB3146-050-Q1-K1-G12
gaaaaaacctacggggctagtcgatacggcgtcgtggtactgttccgtaaccttattggccttaatattgatagggtcaatcagggcaaactccgtatcagatgaaccagtgagaggtagccagctccggaaccgaccctgcgatgaaatctatgtcgttggcgaaggtgaaacccttcactccatcagcgacaagtgtggcgatccgtttatcgtcgagcggaacccgcatatccatgaccctgacgatgttttccccggccttgttatcaagatcatcgcttcaactgataggaaattatagaggtagctgctttacacatt

SEQ ID NO: 18192 - DNA, 324 bp, Gossypium hirsutum
  Clone ID: LIB3146-054-Q1-K1-F10
tgatccatttgcataatctggaactcccctatccaggtaaaactcttctcctcttctcaatgattctgttgctatgatatgagcaagaccatttgcggatctaggtatatactgaaatctgatgttttcaagtccatagatttcctgttgaatgtcaaaaatgtatactcccaccatagatctatcttgactcttcgatttacattttttgactattgtgagggagtctccttcaaggatcaaatgtcgccatcccctcctgattcccatttgaacgcctttccggcaggcaattgcttcagcagcaaaggctgatggaatacc

SEQ ID NO: 18193 - DNA, 302 bp, Gossypium hirsutum
  Clone ID: LIB3146-001-P1-K2-A1
attgttcacaaactgactgttcgaagctgttttaaaccacccattgactcaaggcgtgttcgacatacatatgagatcagctgggattgggctttcacgttatcgcgtactcagcttggaagaaatggaatatgcatccaacaactttaacccatcatagtttatgggggaaggatctaacggtcagctctataaaggttggcttgtagattggtcagtgatggtaggaaaacgttagcaactacatcagaagcatgcacctcaaaatctgatgcaacacgatgtagttttgtccaagctaa

SEQ ID NO: 18194 - DNA, 453 bp, Gossypium hirsutum
  Clone ID: LIB3146-001-P1-K2-A10
gaggaatcggacaatgacgaaaatggaggtggaggagaagaagaaccaggattttggaggggatttatttggcttgttggaatgactgctgccatctctttgctctctgaatatgttgtgcaaacgattgaggatgcttcagattcttggggaatatctgttagcttcatcagcattattttgctacctattgttggaaatgcagctgaacatgcaggagctatcatttttgcttttaaaaacaagctgaatatttctttaggtgtggcattaggatctgcaactcagacttccatgtttgtggtcccactttatgttattacggcttggattatgggtattaagatggatcttaatttcaatctcctcgaaactggctctcttgccctatcaatcatcgtcgtggccttcactttacatgacggcacttctcactacatggaaagactggtt

SEQ ID NO: 18195 - DNA, 390 bp, Gossypium hirsutum
  Clone ID: LIB3146-001-P1-K2-A11
caatgctcttgaagctaacggatggccgttaatgctgccagcctacagcatgtcaaaggtggtcctaaatgcttacacaagaattctagccagaaaatatccaaatatgtgcataaattgtgttcatcctggttatgttaacactgacttgaattggcacacgcgggtgatcacgacagaagagggggctagaggccccgttaaatgtgctctcatccccgacgtaggccctactggttgctattttgatcagaccgaagttgcagagttttgagatgcaccctcttttttgtttgattggaactattgctgaggttagagattatacattcgaatgcaatttgtgctttgctacattctatttatgttacctacactttacattttctg

SEQ ID NO: 18196 - DNA, 185 bp, Gossypium hirsutum
  Clone ID: LIB3146-001-P1-K2-A2
gaatagtaaaggaactaaaaatgatcaaattatagtaaaaggattaaatccaccaaaagcacgatggcacaaggactttcttgcaatagatgccttgtgcttaatgcctgctcggtatacatatatgatatgtacatatcatcagcatctttgtgttttttgttcccgattgttttggtccaatt

SEQ ID NO: 18197 - DNA, 262 bp, Gossypium hirsutum
  Clone ID: LIB3146-001-P1-K2-A3
ctgatgttgattttgaagtgaaagtgggtgtctagaattgcccagttgatcattgagaagatgatgacacctgatgttttggaagttgatgatttggattctactagtagaggtgctgggggatttggatccactggcgtttaaatctctgggtttttttccctaatgttataatggattagcgttaggtttaggattaggggttgttttagaaggttaagtttgggggactactgcctactggtgaaacaaagctttgctt

SEQ ID NO: 18198 - DNA, 222 bp, Gossypium hirsutum
  Clone ID: LIB3146-001-P1-K2-A5
cccacgcgtccgatcatgcctaaggatatccatcttgctaggaggattagaggtgagagagcctaggtttgcttttaggtgattgatgtctgaggcctaagctttttttcattttgatgtattagatttctctgcaagtgtttgatgtaaatcgatgcgattctaaaggatgccatataatttcatgatttttgattaatgagaaaaaaataaaaaagataa

SEQ ID NO: 18199 - DNA, 434 bp, Gossypium hirsutum
  Clone ID: LIB3146-001-P1-K2-A7
cccacgcgtccgcccacgcgttcggtgatgaatgaagcccacaagagagacgtagcccatcggcaagggatcgcagacatgccaatggttcggattacagtgggagtcccagggggaggagcagaactccagatcgtgaagctgatgctggagacggggattataagagctccgcaaaggaaaatgggaacagccgcagtcctagcccgctccccaaggatgatcggagccctatttatgaagaagaagatgatgacaatcatgcatcttcgagacgcagcgaatcaaattaagctgcagtggtttgaatgggtaggtgttggtttgttagaaacttttgagttaatatatatttgatggataaatttgtgttttgaatattaaaggcatttggttttaatggaagtctatttatataaaattggctttttttt

SEQ ID NO: 18200 - DNA, 304 bp, Gossypium hirsutum
  Clone ID: LIB3146-001-P1-K2-A8
gtataaatggactgtggaacaatttgaaggtttcaataacatgggcaatggtggcttgattgtcatgcaaaaaggttatggcggaagatacagcttatctatgcatcataatgaagaagagctaagagagtttgggttgacagatgaaatgttgattgaccaataatggcaaaagattgcgagaataggagaactgaattatgattgccctatggtgaattccttctttcctcactttgaagatgagggctgcataacatgaaacaaggtgctgaaaagtttaattaataaatcatgattctac

SEQ ID NO: 18201 - DNA, 345 bp, Gossypium hirsutum
  Clone ID: LIB3146-001-P1-K2-B1
ggcaccggctacagattctagtgacgactcattttgagatgactcagaggctgacgatgctgaaacgaaggctgagatattagcttgtgctaagaagatgctcaggataaagcaatgggatcaaatgcttgatgatgctcataataaatatatgtttgatgatgacggtttaccgaaatggttcttagaggaggaaacgaggcatagccaaccaattaagcccgttacaaaagatgagatagctagaatgcgtgcacaattcacagagatcaatgctcgagcagctaagaaagttgcagaggcataagcccgaaagaagcggattgcaatgaaaaagcttgaaaa

SEQ ID NO: 18202 - DNA, 448 bp, Gossypium hirsutum
  unsure (1)..(448): unsure at all n locations; Clone ID: LIB3146-001-P1-K2-B10
gcttctaatctttattctgaatcaaacccattaaactatgccaattgctaccttatctgtcattctttaggctattgctgccaaaagtctctcctttctccctaaatcttcttttctctcaaaacccacaaaaacccagttttcttttgccttcaaaactaccgagaagaggcctttttncatatagtctcaatgagcatggaagcaggcattggagtaatgggcacaaagcttggaatgatgagtttctttgaaactgatggcacagttgttccagtgactgtagttggttttagagaaggaaatatagtgacccaagttaagacatcggctactgatggctatgatgctgttcaagttgggtatcggagagttagggataagaagttgacaaagcctgagttgggtcatttggggaaagctgcttgtattcctatgaggcatttgc

SEQ ID NO: 18203 - DNA, 444 bp, Gossypium hirsutum
  Clone ID: LIB3146-001-P1-K2-B11
aattttgcaacctctttcttttatttcctggtctttatttatttattggtgggtgcatgccagtcagttggttaaccattactgtatttttaagagggtagaaaggttcttgtttcctatttcaggtgttgctttctatctgctccctcttgacggacccaaacccagatgaccctctggttccggaaatcgctcacatgtacaagacagacagagctaagtatgagtcaactgctaggatctggacccagaaatatgcaatgggctagtctaataaattggtaagaaaaagtttaggatattgtttcctcattactcactgtgtataaagcaactgtgcatttgtggcgattgctcctgtagtatactaaatagacaaagtgaagactagatggaaagctggctgatgttgtatatggaactgctgtatgatcattagataat

SEQ ID NO: 18204 - DNA, 438 bp, Gossypium hirsutum
  Clone ID: LIB3146-001-P1-K2-B12
gaaaatgtatgtaccttgcgagttaggatgcctatttcatcggatttagccaatccccgaaacttcatcacaaaaatcactcggtatgataaagtggttaacattcctaactcgatgaccatcctcgatgagcttcttccgatttccatcgagatgggaaagaggaacttgactggaatttggaactttacaaacccgggagtggtcagtcacaatgagatattagaaatgtaccgtgactacattgaccctaacttcacctggaagaacttcaatctcgaggagcaggccaaagttatcgtagccccgagaagcaacaacgaactcgatgccaccaaattgaagacagaattccctgagctcctttcgattaaagagtctcttgttaagtatgtattcgaaccgaataagaagactggtggagcttgagcagttact

SEQ ID NO: 18205 - DNA, 450 bp, Gossypium hirsutum
  unsure (1)..(450): unsure at all n locations; Clone ID: LIB3146-001-P1-K2-B2
ggccaatggaagaagatacaccaaagaatgatgaagaggaatttaacactggaccgctgtgcgttttgatgatgagtgttaaaaataacactcaggttcttatcaactgtcgcaacaacaaaaagcttctcggccgagtgagagcattcgatcgccactgcaacatggttctggaaaatgtcagggaaatgtggactgaggtaccgaagaccgggaaaggcaagaagaaggcactaccagttaacaaggacagattcatcagtaagatgttccttatgggagattctgntataattgttctaagaaatcccaagtaaatttggtgctcttatgttatgaaacttttgtagtgtttatgtattcaactatggaaatgctatttaaaccaccaacggcactgcattggatttgctcaaagaactgtatctatattgagtagtagtttgggtt

SEQ ID NO: 18206 - DNA, 60 bp, Gossypium hirsutum
  Clone ID: LIB3146-001-P1-K2-B3
gtttaaatgctgtaaattgaagtgcttaatttctgtaaatttatgtgctcaaatgatgta

SEQ ID NO: 18207 - DNA, 203 bp, Gossypium hirsutum
  Clone ID: LIB3146-001-P1-K2-B5
cccacgcgtacgaccactctttcggtgcagtttgaagcccgcagcagaaacggggccctatggtcaagtgcaaccgagacttgcgcgagtggtccctattacggtagtgaatactagacagacgagcagaacttcagatccataatctgatacttgacactgaaattatgagagctccgcattgtaaatttgtaacagccgca

SEQ ID NO: 18208 - DNA, 294 bp, Gossypium hirsutum
  Clone ID: LIB3146-001-P1-K2-B6
cccacgcgtccgcttggcggtaaatgcgagatcggtaaatttgtgcttcttgtgcatgttggggcctggttcaagtttgtaagtccggtttgtaggacgattaaaattatattttcgattaattgattcaaaactttacatggaaccgtgagatcatattagaaaaaaacttattttacatttgtgaaaaaaaaaataaaaaaatatttaagaatataatatagaacttttaattattaaaaataaatttaatttggttaaatttatttagaaaaattttttctttatgttttt

SEQ ID NO: 18209 - DNA, 115 bp, Gossypium hirsutum
  Clone ID: LIB3146-001-P1-K2-B7
cccacgcgtccggttggattagcagaaatggtgggtccggttgattttaataggactgtagagtattggcagcaagacaagtggactggttgcttccctgtgaagtggcacatcg

SEQ ID NO: 18210 - DNA, 392 bp, Gossypium hirsutum
  Clone ID: LIB3146-001-P1-K2-B8
gacccacgcgtccgcccacgcgtccgccctgttggagctatcattctggctttgtacacaatacggacatggtcgatgacagtattagagaacgtgaactcattggttggaagatcagcagctccagaatatcttcagaaactgacctatctgtgttggaaccaccataaggccataaagaacatcgatacggtccgagcttacaccttcgggtctcactactttgtcgaagttgatattgtacttccggcaaacatggcattacaagaagctcatgacattggagaatccttgcaagagaaactggagttactgcccgacattgagcgagcgtttgttcatttggattatgaattcagtcacaaacctgaacatgcacaggcacatgctct

SEQ ID NO: 18211 - DNA, 409 bp, Gossypium hirsutum
  Clone ID: LIB3146-001-P1-K2-B9
gttaatgcattcctcgtcatgatcacatactttcaacacactcaccctgcattaccacactacgactcatccgaatgggattggttacgtggagccctcgcgacggtcgaccgagattatgggatattaaacaaggttttccataacataactgatactcatatcgctcatcatttgttttcgacaatgccgcattaccacgcaatggaagcaacaaaggcaataaagccaatattgggcgagtattattcatttgatggtacaccagtttataaagcgatatttagagaggcaaaggagtgtatttacgttgaaccagacgaaggtgagcagagcagcaaaggtgtattttggtttagaaataagatctaattttgccgatagcgttgcggttgccgatgatgatgcg

SEQ ID NO: 18212 - DNA, 397 bp, Gossypium hirsutum
  Clone ID: LIB3146-001-P1-K2-C1
caatgaagattaggatgatctagaagatgattcagaacggtttaatgaaaaccggtcctcaggaatgtgaataatattttctatcaaccaagaggttttttagtgaaaaagattgatggcaatatcttgctatactatgaggctttacttgtttgtgaagttggctacttggtttaatggcccacacttttccaactttcatcagtacgaggagagcacctatacaagtttcatcagtagaggagagcacctatacaagtttctttccttctttctatctaaaataatgtataaacatcaaatattatatcaatagctattatcacagtcattcattatatgagcttgaatttggaatctcaaattttttggcgcttttctaattgagttgatgtta

SEQ ID NO: 18213 - DNA, 453 bp, Gossypium hirsutum
  Clone ID: LIB3146-001-P1-K2-C11
gggtactggaggatctgagacggaggttacttgggaggatcaacagaatattaacaagtttggaagattaaacaatcgatttcatgagcttgaagatgaaatcaaggttgccaaggaagcaattgataacctggaggatgctagtaatgagttgattttaactgacgaggaagtagtacggttccaaatcggagaagtctttgctcatgtccccaaggaggaagtggaaaccaggatagaagagatgaaggaattgaatagcaagaacttggaaaaactcgaggaggagaaagagtcggtagtggcacaaatggctgagttgaagaagattttgtatgggaagttcaaggactccatcaatcttgaagaggattaatccccttggtttgcttttctttaccttttaagttggattactacttgcttgtgattgatatcaaagctttggtcatc

SEQ ID NO: 18214 - DNA, 407 bp, Gossypium hirsutum
  Clone ID: LIB3146-001-P1-K2-C12
cccacgcgttcttccactctttcgctcgttttttcttacacttaaagaatttcaacatatgggtatgttatttgcgaaagatgccctcaaactcagctttatctgaagagcaaaccagtgcgtaacattttccatcgttcatcccaagtcaaaggaaaagcttcaaaagaatcaattgagctgactattgtagaatttaaatctgctctttccgaagttgatactcagttgaagaatctgtccgcgactgcacaagtttcaaatcaacaaggtgcttatttcgctaagttcttcaatcgaatggaagagtgtgaaattaatcctgaaggtcccactaggatcaatggaacacgtcgccattgttttcttccctttaagtacaagcacttggtacaattttgctcctt

SEQ ID NO: 18215 - DNA, 367 bp, Gossypium hirsutum
  Clone ID: LIB3146-001-P1-K2-C2
cgctcatcgaacttccgatttgctttttgaatcgcaagatagaagagaaatctcaatggcgcggaaagccgagaagaagcccgctgagaagaagcctgccgagaagccaacggaggagaaaaagtccaccgtcggcgagaaagccccagcggagaagaagccaaaggccggcaagaagcttcccaaggaaggtccaggggccggagatcagaagaagaagaaagccaagaagagtgttgagacctacaagatctacatcttcaaggtcctgaagcaagtccatccagatatcggtatctcaagcaaagctatgggaatcatgaacagtttcatcaacgacatcttcgagaagctggctcaagaatct

SEQ ID NO: 18216 - DNA, 445 bp, Gossypium hirsutum
  unsure (1)..(445): unsure at all n locations; Clone ID: LIB3146-001-P1-K2-C3
ccaaagctgaacaatgtgcggtttcagcttgtcgtaaactcaacaagctccctctcttccctcaagttgcctcggtcgttgtcccaacagctgcttattgcagcgacaagtataacgagacagtggttagcagtgcagagaaagggtacaaggttgcctcctatttgcctttggttcctactgagaagatcgctaaggtgtttggtgaacagacgactgaaatggagccattggtatctgagagttgatctgctttgaatcttgtttacgttggctatgactcgtgaatataatctggacctgttttatgtttttacttgtgactgtctcttgtgatggatggaacaatgggttttagttttcatgtttggttttgttgtattttagttttattgaaataaatttggttttgatgggattgttaaaanaaaaaanaaaagggcgg

SEQ ID NO: 18217 - DNA, 285 bp, Gossypium hirsutum
  Clone ID: LIB3146-001-P1-K2-C4
caacattccacacccaaagtcaaaaagtcggcttctaatcatacttggatggaatctaaaagggatttccagtccctattgaaacaaacatacccctgttaaagggtctctgttcatttaacatcactctaagacggcaaaactcaccccgtgtttcacatctatatgccttaggttactactgaaaggatcgctaaggtccttggtgaacagactactgatatgcatccatagtgatgtgacagatagatactcgatatgaatcatgtttacgttgactatgac

SEQ ID NO: 18218 - DNA, 387 bp, Gossypium hirsutum
  Clone ID: LIB3146-001-P1-K2-C5
cccacgcgtccgcccacgcgttcgcccacgctttcgcccacgcgttcgaccacgcgtccgcgcacgcgttcgctttcagtctccgtgagggtgttaccactgccgtctcacacggtctctggctcaacatcccggattatgatgctcccacacagcttgtcaagccactcgagaggaacaccacgtatgtcgacgctataatgacgattccgaagggaaccttgttccccatgtgcggaatgaatctggcatttaaccgagaattgatcggccctgcaatgtactttggactcatgggagatggtcaaccaattggacgatacgatgatatgtgggctggctggtgcaccaaggttatttgtgatcaccttggatggtgagtgaaga

SEQ ID NO: 18219 - DNA, 429 bp, Gossypium hirsutum
  Clone ID: LIB3146-001-P1-K2-C6
gaacgaagttacaaaagttttggatgttcttgtattgcagccaccttggtcttataacgaggttttgctgcaattaaaggagaaagcattgacgagagccgggttggtggaggatgatgtgattcgtctaattaacgagcgagctgaagtgaggagaaacaaagacttcttgaaaagtgatcagatgagagctcatttgcaagcaaagggcattgcactcatggatgtaggcacggaaacaatttggagaccttgtgttcctgttcaacaagactcggaaatagtgccatcagagggccagaaggtccctcccaagcctgaaagtgcataagaatgcagatcttgattcaagttcaccaaaagaaaaaacatattgaatttgcttcgtatggcggtttctattgttaaaacaacttagtgggatcaaga

SEQ ID NO: 18220 - DNA, 354 bp, Gossypium hirsutum
  Clone ID: LIB3146-001-P1-K2-C8
cccacgcgtccggctcgttgtgttgctacgcttctgcatgaaatgaagcgtcgtggcaaaggctgccgattcggagtggtttcgatgtgcataggcacaggaatgggggcggcagcggtcttcgaaaggggtgattgtgttgatgagctgtgcaatgcccgaaaagttgaaactcacaatctcttatctaaggatgcccgataggatacctagttttcttgttaaaaatatcctaaatcgagttggaaaatttaataaagcaatgtaataagtcaccgatcatgttaccccagaaaagagtagtattcagacgttctggctattatctttcataaaattatatctcagctatat

SEQ ID NO: 18221 - DNA, 448 bp, Gossypium hirsutum
  Clone ID: LIB3146-001-P1-K2-C9
cccacgcgtccgcaaatgtgcaagccttgatgcacaaggtaaagctggctgaagatatgctggctggaggctccttcacatgtggtttgaatcaacttgttcagagtcacttgacttcacagcaaccgattgctactaataatcacaatcttgggcgggtggtaaatgtctcccccactattaccgttcaaggagattcttcttcctatgctggattcacagacatggggaactcaccaaatcttggcctgccaactcttgatttcaccaattccaatcagaataatattggaattggtggtgatgctatgagctggccctaaagattaatttatttttatatgtatcaactgcgtccctgctttgctttgtcgattagatttagatccagttaatgtactagtgatatttagatccagctttgctgactgctgaaattgccttagtc

SEQ ID NO: 18222 - DNA, 267 bp, Gossypium hirsutum
  Clone ID: LIB3146-001-P1-K2-D1
aaggaatcgaaaggccatcgatgggcgatgttttgtggggacttgagttcgcactacaactgcaagaaagtggtgaggccaagcttaaatctgttaatggtggggctgccactgaagcagacattgatgaggaagcgccctttaaaagccaaagccttgaattggaagatgacagtggggacgttttcagtagccctcgcgatcatgttcttaacttcaagagcactagcactttcagtttgacgacaagtgatgatcaaagttttg

SEQ ID NO: 18223 - DNA, 444 bp, Gossypium hirsutum
  Clone ID: LIB3146-001-P1-K2-D10
gttgggtttggtggcaaagctgctccagctgtttctgctaaagctgaggctgcagatgatgaggacgacttggatctattcggtgatgagacagaggaggataagaaggctgcagaggagagggaagctgcaaagaagtcagctaagaagaaagaaagtggaaagtcctctgttctcatggatgttaaaccatgggatgatgagactgatatgaagaagttggaagaagctgttcgatccgttgagatgcctggacttttgtggggagcatcaaagctggttgctgttggttatggcatcaagaagctacagatcatgcttaccatagtggatgatcttgtttcagttgatacccttatagaggagtgcctcacgacagagccacgcaatgaatacattcaaagctgtgacattgttgcattcaacaagatttagaggacacag

SEQ ID NO: 18224 - DNA, 427 bp, Gossypium hirsutum
  Clone ID: LIB3146-001-P1-K2-D11
cccacgcgtccggtccctagctatattgaagggaagaatgggagcaataagaggagtgaagggcacatcggatggtcggttcctggccatagctgagcctgcagatttcgttcacatctttgatacgaagttggggtatgttaattgccaagaaattgatattttcggtgaaatagctggagtatcgtttagcccggatacagaaacgctctttgttggggttgctgatcgcacttacggcagcttgttagcgtataaccgcagacgatataaccaatatctggactccatgttgtagaatgcagtgcctctgataatttatatgagaggtaaggtaagctagtgtgaatattttaaggggttgtatcagaattgccttggataattgtgtttcagtgtataacttcctggggaggaacagcagcag

SEQ ID NO: 18225 - DNA, 451 bp, Gossypium hirsutum
  Clone ID: LIB3146-001-P1-K2-D12
cccacgcgtccgcaaaagctgagaagaagccttctgagaagaagccagctgaggagaagaagagggtagctgagaaagcccccgccgagaataagccaaaggcaggcaaaaagcttcccaaggaaggcggagctgcggccggagacaagaagaagaagagggccaagaagagtactgagacctacaagatctacatcttcaaggtcttgaagcaagttcaccctgatatcggtatctcaagcaaagctatgggaatcatgaacagcttcatcaatgatatctttgaaaagcttgcccaagaagcgtctaggctcgcaaggtacaacaagaagcctaccatcacttccagggaaatccagaccgctgttaggcttgtacttcccggtgagcttgcgaaacacgccgtttctgaagggaccaaggccgtcaccaagtttacttcttcttgaaa

SEQ ID NO: 18226 - DNA, 460 bp, Gossypium hirsutum
  unsure (1)..(460): unsure at all n locations; Clone ID: LIB3146-001-P1-K2-D2
cccacgcgtccggaagcacggaggattttgaggatttatttatctccaaataaagctttgtgactttgtttggctttccctttttgtgttctttttcccctttaaacctttaagatttatgtttagcataaataatctaccatttccaaatgcaatagaaatgttcattgcatcattagattggaccccccaagtcatagacattgccatcgtaagttattaagtggaagccacctcttgttgccccacttccccaacttaaaaaaaaaaaaacaagtgngggggggggggttcagagtctatccttctttaggagattcactgtgataggtatatgcttatttccctgtttcttcccttatgtcaaggactttggtggtccatctgttcccttgaatagaccattggttacttttggggcaatattgctctaatgaattacaggaccctttatttcctt

SEQ ID NO: 18227 - DNA, 269 bp, Gossypium hirsutum
  Clone ID: LIB3146-001-P1-K2-D3
aagccacataagccactctagatatgttgttttgtaccctcttttttctttttcttctcctgttgattgaactggctatactattatgaagtctgttttgttggaaggactagttgggcagttgaattggaagccattagttgctttttgcatttggaagtgttgaaactgtaaatcttttaacactgaatttgtgcatgcatagttggagtaagcgttcaacgaggatggtggttggtagtgttgttttgcttagtttatttcacaat

SEQ ID NO: 18228 - DNA, 465 bp, Gossypium hirsutum
  unsure (1)..(465): unsure at all n locations; Clone ID: LIB3146-001-P1-K2-D4
actcggtatgttctttagtattaagtaaaaactgagcatgatggcatgatcaaggcttcgggttcttgagggcttcatgttcttccggtccttatatctttgcattgctaccgtttttctccggtttttcttcaagtaaacctattcattctagatgttaacaaataggtttccatacttcaggtatacgaagatgaaccagtgcttcaggcctttaagctaatgaggaaaaagagaatcggaggcatacccgtcattgaatgcggagggaaaaaagctatcggtaacataagccttcgagatgtacagttccttttaaccgcaccagatatataccgtgactacagatcaatcacagccaagaacttcctaatagcggttcgaaactacttggagaaacacgagatgaggtcgccaatgttgagtggcatgataacttgcangagggatgaaacagtcaaagag

SEQ ID NO: 18229 - DNA, 165 bp, Gossypium hirsutum
  Clone ID: LIB3146-001-P1-K2-D5
cccacgcgtccggaattctcctctcaaccccttaaccaaatcatccatttcatggatattaagccaccaaaagaatgatccattcagttcaaagacaccatgacatctacacctactcaagaaaacactcaagtagaaagatcccacgaacccacagtataagca

SEQ ID NO: 18230 - DNA, 355 bp, Gossypium hirsutum
  Clone ID: LIB3146-001-P1-K2-D6
cggacgcgtgggcggacgcgtgggtgcaggttgagcaggtaaggacggatgtgaccgtggcggtgcaagtggcggtggcagaggagttgatgagcggcagagggtaggtgcggcgctagggttaggtgcaatagaggctagggttttttgaaaatgttttagttttgggcttgttgggcctttagtttttttgggctgtaatttattattttgagttaggtctgttttagggtattgggtttgatttaaggtttgggtagctgggtttttgggccccgggcaaatttgggcttgtacagtgtgtatatatatacaccatactaatttaaaattatagttattgaatgtgatatca

SEQ ID NO: 18231 - DNA, 412 bp, Gossypium hirsutum
  Clone ID: LIB3146-001-P1-K2-D8
cccacgcgtccgaaggaaaatcaaaacaacgttgagtctaattgaatttcacagaccctcaagatggctaacctcatgatcatggcggttctcctggttgcggtgtcgacggcggcaaccgttacggacgcgcaaggcacttgtggcggaaaagctagtggcctggtcttcgtaccatcctaaccacaaccatcaaacctcaggatgactgttgtaacccgttcaaggaagaggtacccaacgatctttcctgccttggtaacctatacaaagaccttaaagttttggcttctttgaacatttacaccgcgcaggctttaaatgtcactcgtgaatgcggcgtcacttactgatctaaccgtttgcaacagcaacagctcttatacaagctgtgctacatccccaccaggag

SEQ ID NO: 18232 - DNA, 426 bp, Gossypium hirsutum
  Clone ID: LIB3146-001-P1-K2-D9
cccacgcgtccgaaatcatggtaagtctcaaatcacttgtatctctcagttcccgatccgctggcgtagcactacttgttttggtggtttcagtggcagtgcagacccatactacaaatgcacaaagctgcccgaccgagctgacgagcctgaacgtgtgcgcacctttcgtggtgcccggtgcagctgtggctaaccctagcattgactgctgtaacgcactccaatcggtgcaccatgattgcctttgcagcactctaaggatcgcttctcgactcccttctcaatgcaatctcccaccactcacttgtgcttgaaagaaaagcagtggtgctgcatgcttaattgggtaggaaaatctaataacgccatggaatatggataccgccctgtttttttctttcttttttaatgggaaaaagcaat

SEQ ID NO: 18233 - DNA, 447 bp, Gossypium hirsutum
  Clone ID: LIB3146-001-P1-K2-E10
gaagaagcaatccgatgttatgaggttcttgctgagagtgaggtgttgggagtaccgtcaacgacccttccattgtgcgagttaaccacccaactcgtcctgacaaggctcgtcgcttgggatacaaagccaagcagggttatgttgtctatcgtgtccgtgtgagacgaggtggaaggaagagaccagtacctaagggtattgtgtatgggaaacccacaaaccagggtgtcactcagctgaaatttcagcgcagcaagcgatcagttgcagaggaacgagctggtcgaaagcttggaggccttagggttgtaaactcatattggatcaacgaggattcaacatacaaatacttcgaggtcatcttggttgatactgcccacaatgctatccgcaatgacccacgaatcaactggatctgtaatccagtgcacaagcacagggaac

SEQ ID NO: 18234 - DNA, 449 bp, Gossypium hirsutum
  Clone ID: LIB3146-001-P1-K2-E11
ttttatttttttttctctcaaagaagcaagcttaaattttagggagcacaactccccccggggaagtttcgctgttcagtgacaatggcgattgtgaagatggtgatggctgtggttatcatggcagcgtccctcggagggaaattgggtgcagcacaagtgcaccatgtggtcggaggtgaccgtgggtgggacgtttcctctgacgtggcatcttggtcctccggtaggagcttcagggttggagacaaaatttggtttgcctacgccgcagcacaggagagcattgctgaggtgaatagcccggaagaatatgagtcgtgcgatgtgagcaaccccataagaatgtacacggacggcatagatggcatcccactggatggggaagggatccgttatttcgtaagcggcaaggaagagagctgcaagaacggtctaaagctacacgt

SEQ ID NO: 18235 - DNA, 433 bp, Gossypium hirsutum
  Clone ID: LIB3146-001-P1-K2-E12
caaggaccaatttcgaggactatttttatattcctcgaaggaaatatcatattgttaatgagcaagagtaaatctaaagttttgtttaaggtttttccattttctttagcaaaaaatttatcaatcaaaggcttataaaatattatatttagaagaaaactgatgaaaacaaaacgaaaaggaaataaagtttcaagataaactcattggtattaggaattgactcggaaaacagctcattagttgagagaagttttttttttttgggttttacaaatttataaatgtggaaagcctctgtcttaaaatttgaaagttttgattaagaagtttaaggatcaaattgatagaatttttaaataaaaaagagttaaacttattgaattatttagatttatgaacacatttatagaatatgtaaatattgatgact

SEQ ID NO: 18236 - DNA, 423 bp, Gossypium hirsutum
  Clone ID: LIB3146-001-P1-K2-E2
gttctaaggaaacaaaacaggaacccggaaatcaggctaaacaggagcagcctgaaaagaaggaagatcccaagttccagccattcaccgggagaaagtactcgctagagggttgattaaatcaatcctcaatttcttatgtgtttgtttttttgtggctcttggaaagtgacagaattattatatattcatcttggatgttctgttaacaaaatactcacctgagggttctcatgtcaaaatgaaattcgactctgttgtgaaagctggagagttttcccttcaaagaaacgacctgctctttaaaatgtgttagatctttggctaatactctagggaagtaggatgatattggaatttgattccacaacgattacgttgaatttatctctttattatggaacagccatgtaatttccctgc

SEQ ID NO: 18237 - DNA, 355 bp, Gossypium hirsutum
  Clone ID: LIB3146-001-P1-K2-E5
ggcggcagaagaaatgatcgggttgaggttttcgatctaatgagcaaatggcggcgatagcagacggaagcggaaggcgatctttctgaacaaaggagtctcagagatagcggggtcatcagcatcaagcatgagcctaactagggaagataagagtgcggtaattgaagaggatgtgggagactcagaatcagtatgtttaggtggttgagtttaaaattttcgatgtttatgtttcacctacatatttatgctttgttttcttttggcaaaccttctttcttttccctagtaaataaatagtttactatgcttcagatgagaagtagggcgaaatgttgaattcattgacatc

SEQ ID NO: 18238 - DNA, 448 bp, Gossypium hirsutum
  Clone ID: LIB3146-001-P1-K2-E6
ggagaaacctgaagaagtggtcaaggttgattaaattgcaacagaagaggtagtggctgttgctcctgcaacagaacctgttgctgaagaaccaaaggaagcagtgcctgaagcagcatccgaagaaccccaggcttcagaaactgaagccacagttgaaactgaatcaaaggaggtggttgaagagcccaaggctgtgactgaggagccagaagttgagaaaaaagaagaagagactcctgaggaaacagtagcagagccagttgcggaggagtccaaggagactactgagccaaccgttgaagaaaccaaagaaagcacagagtctacagaagcagcagtagctgcagcagcagaagaagaagtaaaagcagaagccgaagccgaagccgccccagtggaagcacccaaagaggaagctgcaaaggaagaagaagaaccagcttaa

SEQ ID NO: 18239 - DNA, 299 bp, Gossypium hirsutum
  Clone ID: LIB3146-001-P1-K2-E7
cccacgcgttcgcccacgcgtcctcccacgcgtccgcttagatttaagaatccggattttagaattttttaaaagaagattaatggtttaaagtcaaaaaaaaaaaaaaaaaaaaaaaaaaaaaaaaaacaaaaacaaaaaaaactgaacccacaattgaaactatccaaaatgacgttcgcaaataagccaaaggatgtcactgaggttccagaacttaatatcaaagaacaagagactcctgaagaaacagtagcctagccagatgcggaagagtccaaggtgactactttaccaac

SEQ ID NO: 18240 - DNA, 362 bp, Gossypium hirsutum
  unsure (1)..(362): unsure at all n locations; Clone ID: LIB3146-001-P1-K2-E8
cccaaatcttacgatcttatttatttatttatttacaaaaaggggagggatattcaattatggttgttcaaggaaaaatcataccccgtaagttaggggcacaatttattgaatcttcaaaataaagaagatcacattagntttaatttcttctaatgagttgtgtaaaatagaatgcatcacatgatatgatatacaattgagcataatgcgggaatgaataaatatatctaaccataatggttagaataataacataggacccaaacattattaaattaaaataactccttaaaaaaataattaaaccatggataaaattggaattgactatcgtaaattattaatttaggacaaattat

SEQ ID NO: 18241 - DNA, 439 bp, Gossypium hirsutum
  Clone ID: LIB3146-001-P1-K2-E9
gtgcataggtgtcagcttcctagtggatgtataacgtaaaaaggagtccactttctcaatatgagataaaattcattgataaatttttttttaaaaatattccaaataattcaaggcctctcaatcattccttttctttttctttttcatttgcttaaaacgatcgagccacagttttaagcttagcggagagagagagagagagagatgggtagctgcagcggcatggcatcggctgcctcggggttcttgttaatgcccaatctcaccggcactgctgcttctaagactaataacatcagcatgctcttttccccttccagaaacaactactacaatagctcaaggctcgtcgtaagggcggctgaagaggaggcttcgccaccagcaccaacaccagcaaccaccactgcgccaccagaaggtggtgaagctccta

SEQ ID NO: 18242 - DNA, 269 bp, Gossypium hirsutum
  Clone ID: LIB3146-001-P1-K2-F1
gttctcttcttttctctagtcagtgcttgcttttcttgcccttcccccaacccaaaaccaagggctactggttccccatccccctcaggcaaatgcccccaagatacccttaagttaggcgtctgtgctgaggtgcttggcttagtcaatgtaactgttggttcgcccccagtgcaaccatgctgctcccttcttcaaggccttgctgatcttgaagctgttgtttgcctttgcacagcactcaaagctaacgttttgggcatcaacct

SEQ ID NO: 18243 - DNA, 431 bp, Gossypium hirsutum
  unsure (1)..(431): unsure at all n locations; Clone ID: LIB3146-001-P1-K2-F10
accaactttcccttaacatcttttggggccctttcctcatttgtggcattgcttgcgggctgactcttaccatattctgctggggagtctttacacagtaccgcagattcagccccgaagatgaggaaagtgagattgagacgatcgaaccgtcgaggtcaagtcgactgtccatccgctcaacaagcttcaagcagattattgactttgtagataagaaagaagaagagattaaggagatgttgaagagaaagaacagtaatagtaataaacaacagactagcatccatagtttctcagatggtcaagcaagttcaccttcctaagagagacaaaaatccaaacacatttttgtatggatcatttggaacctcaaatatttcctttttatccgnttatattatagaatctgaattaatacaaaaatcata

SEQ ID NO: 18244 - DNA, 451 bp, Gossypium hirsutum
  Clone ID: LIB3146-001-P1-K2-F12
cccacgcgtccgcccacgcgtccgataggatttcgttttaggaggaaatatttgttactgtggcctgttatcatcttttccctacttgtttttctttcacaagttgcatatcttgttagatgggctgttggaggctataaacaaagtgtaggagatgcttggtggctcaagctaattggttttatgataatccagtcttagagatctcccactgtgatctattttttggttacacaacttctagtgctagtagttgcattgcttgatatacatgggaatagattcggtcttgttccgtagcggtatacttgttggggtcatttcttaacagttgttgaacaattaggtttaaaatacgcatggtcgagaaagtgatgatgatgacaacgacgatgatgatggtgatgatgacggtgaatcaaacaattcaagtggttttgaaatggaatta

SEQ ID NO: 18245 - DNA, 445 bp, Gossypium hirsutum
  Clone ID: LIB3146-001-P1-K2-F2
cccacgcgtccgcgcctttctctttagtttacgaaatggaagcagttttgccaatcgaagtggagatccgatcccttcaagtgttgtcagagttaaagttggacgaagaagaatagatcaagtctcgatacgaccaatttaacttgattgaggaaaagaggctaagagctatccgtcatggtcagatgtaccaaaaacgaatgatgcggtcttatgacaaaaatgttcgccctagagaattccacgagggagacctggttttgaaaaagattcttcccatacagaaagattttcgaggaaaatggatgcctaattgagaggggccttacgtggtgaagaaagctttttccggaggagcattaattctagccgaaatagatggtaaaaacctgccctatcccgtaaattcggataccgtcaggaagtattttacctaaaaaaggaa

SEQ ID NO: 18246 - DNA, 323 bp, Gossypium hirsutum
  Clone ID: LIB3146-001-P1-K2-F3
gcttttcatctccagcattcgttttaaagatcttgggtagcaacccaaagcgataataagggaaccactgataaaagatacccagagagacttgtcatatttttacttatatcaacccttcttcttctttaatctctctattttttttctgggttttttaattcaagggtcgaaatttggaagaaaaaaaaagggatatcagcatggggaggggtagggttcagttgaagagaattgaaaacaagatcaacaggcaagtcactttctcaaagagaaggtctggcttattgaagaaagcccatgaaatctctgtgctttgtgat

SEQ ID NO: 18247 - DNA, 461 bp, Gossypium hirsutum
  Clone ID: LIB3146-001-P1-K2-F4
cggacgcgtgggtaagaatcgccctttagtgatcagtgaggtgaagaaaaatgtcttgctgtggtggaaactgcggttgcggctccggttgcaagtgcggcagcggctgcggcggttgcaagatgtaccctgagatgaactttgctgagcaaaccacaaccgggacacttgttcttggcgtggcaccccggaaagtgcactttgatggagctgaaatggaaactggggctgaaaatggctgcaaatgtggagataactgcacttgcaacccttgcaattgtaaatgagaaaaaaaagctaagcatattatggaagctgatctaaataatatatgatgtatttgggtttttactattagaataaagcagctatggttcattaggtgttgtgcttcttgtatccatgggtgcttggtttgtgtatgtacgagtgtatatagtgaaatgaaaataatttaacta

SEQ ID NO: 18248 - DNA, 347 bp, Gossypium hirsutum
  unsure (1)..(347): unsure at all n locations; Clone ID: LIB3146-001-P1-K2-F5
attatcatctcccatggaatcccagaatctcaaacaccgttccagggatgaccctcgttttggcaccaccacctccaacgaaaagaacagagcaaacaggcgagaaaaaagaatggcaatggccaaacgtgggctaagatcactagtcatagcagtttcattccctttgtctctcaccttgttaaacatatacttgtttggttcaggtcgtggttacgcctctttagccaaacctttctggttccctcctttgtggcttttacatacgggttgcttggcttcgagcttcttgatggggctgtcagcttggttngtatgggttgaaggtgggtccacgttaaaccgac

SEQ ID NO: 18249 - DNA, 436 bp, Gossypium hirsutum
  Clone ID: LIB3146-001-P1-K2-F7
gactctaaaaatgaggtatcggtataatttctctactacaatatctatcactgggaacttggaacacttgcctattttttgttgttttagctctctgtagcctttccttggtttgttcagaagaatctgctactaatgagcctattacccctgatcaagatcaaggagatttgcccctaacaattgaagaatgaaaaggctaattttgataatttgcctaaacaactttatggaagggacaacgccaaagtgggtgtttcagctttcaaatgcattgaaaaacactcaacggggggaatctccagagtacatggaacttattgctgtcagaataagaaaaggttgtggtaaagctattgatttttcacacaacagtatccaagttctggtccatcctagagatggaaagtgtgccaatctggactgcattcgacag

SEQ ID NO: 18250 - DNA, 452 bp, Gossypium hirsutum
  Clone ID: LIB3146-001-P1-K2-F8
gcttcaagtgccaaaatctagggatttgcggttggagaagacgagagcccatctctctgcggcaaagctcctgtccaggtagaattctcttcttcccttgcgttgtgttctttcctgttcaatcgccatggcttcaaagcggattttgaaagaactcaaggatttgcagaaagatccacccacttcttgcagtgctggtccagtagctgaagacatgtttcattggcaagcaacaatcatgggaccctcagatagcccttatgctggaggtgtgtttttagttactatccatttccctccagattatcctttcaagcctcctaaggttgcatttaggaccaaggtcttccatcccaacatcaacagcaatggaagcatttgtcttgatatcctcaaagaacaatggaaccctgcactaaccatttccaaggttctgctctcaatctgctcac

SEQ ID NO: 18251 - DNA, 451 bp, Gossypium hirsutum
  Clone ID: LIB3146-001-P1-K2-F9
gttcaaaggcacataaagctcaagatatcggttcaaagagaggaaagttatcggttgaggaggttctgtttctaattcgcaaggtaaactcttaatacgaatacgtgaggaactataatctgagtatgttcctggaattggtttttattgaaaaccgatttgaatctgcaggacttgccgaaactaaatcggtgtacggaattgctgtcaatgcaagaggaactgaagcaagcaaggaaggcatttgaggttgatgaagacaagctagcaacattagagtagcttaattggctctttatttgtttaggtcaaaaggccaagtgcattaagcgttgcaaacaaatgtttataatgattttgttataagataaaaggggtttagggttttagaaataatttttggtccctgaatttaagtctactttggtatattggtatttttttttttggt

SEQ ID NO: 18252 - DNA, 194 bp, Gossypium hirsutum
  Clone ID: LIB3146-001-P1-K2-G1
cccacgcgtacgcagtaattgctaacgatgatcttggttacataataactaccaaattttccgttattgccgatatcactatcggaatcaatgaatacatgactgatcaaacgtatgcttacgatagtcactctccacagagacgatattgagctacttactcttaactatcctcacatgcacactgaatatca

SEQ ID NO: 18253 - DNA, 390 bp, Gossypium hirsutum
  Clone ID: LIB3146-001-P1-K2-G10
gttttcattttccttttgtcctttttctctttcctaggttttaggttttctcagccaaaggggttcgtttagcttcatcaatggcacaggaggaggttcagaacggaggaccggagaaggtagcggaggtgagcttcacggcgctgaaaccgcagctcatggtggaagcacccaaggcagctgatgcggtgcagttctacaagtccgcgtttggcgctgttgaggctgggcgtaccgtgtaccctaagcgcaaggctgagcaggagcagcctcatgtcctctccgctcaacttgagctagctggctctaccattctcgtttctgacatcgctgataactctactccggtgaaaaccgaggggactggatgtgtgctctgcctggagactg

SEQ ID NO: 18254 - DNA, 386 bp, Gossypium hirsutum
  Clone ID: LIB3146-001-P1-K2-G2
gactctttggaagaaataaatctatgaaaaaatttcaatttttatatgatattttgattttgtaaaattgatatttatacttggatatttttttgaaaatttttcaaattttatgaatattatcatttctttaatttatatttatatgttttagaattgttctaaattatttataaaaatgatcttccttacattcttaaacaatatattatatataatcttaaaacatgaagaagcgtgacatggcacattctaatagcgtcatgtgaaaagtcaactgtagtcagcaccaatcaatggcgagtcaatatttctaatttaaataaccctaattgccagtgacacattgtgattgacactgtgcagcacttagttttattatcact

SEQ ID NO: 18255 - DNA, 474 bp, Gossypium hirsutum
  Clone ID: LIB3146-001-P1-K2-G3
cagcaaaatccaaagtgcacttggttacatggctcctgaattcgcttgtaagacggtaaaaagaactgagaaatccgacgtgtatggctttggggttttggtcttagaagtgattacagggaagaagccagtggaatacatggaggatgatgtggtggtgctgtgtgaaatggtaagggaagcactcgaggatggtaaggtggaagaatgtgtcgacgggaggcttcgtagtaactttccgacataagaggtaattccagttataaagcttggtctaatatgtgcatctcaagtgccgtcaaatagaccagacatggaagaagtagtgaacatattagagctaatccaatgcccttcggaaggccaggaagaggtggagtaaagtattcgggtccgagaaaagaacgaaacagagcggtgtttcacggtgaagatgaattcagtttggtcaacagaggaagaaaagaaaagagt

SEQ ID NO: 18256 - DNA, 243 bp, Gossypium hirsutum
  Clone ID: LIB3146-001-P1-K2-G4
cccacgcgtccgcagacatttttaccaaaatttttcaacttttatatgatatttagatcttgtaaaattgatatttatacattgatatttttatgaacatgtttcaaattttattaatattatcatttctttaatttatatttatattttttaagaatcattctaaattatttataaaaatgctcttaattacattcctaaacattatattatatataatattaactacagtagacaattaac

SEQ ID NO: 18257 - DNA, 383 bp, Gossypium hirsutum
  Clone ID: LIB3146-001-P1-K2-G5
cccacgcgtccgcaacagaccatgtcaatgattcaggaaagggctagtctacggatcatctgtatacaacccgtttttgccggggctgctagaaaaacttctcatgccgttggccaagccacaaagacgatcatgaatatcatatatcgaggagaatccgagtcagagaatggcgatgatagtgtcattgatcgagttgaaatctaaggactacattgcttctcaacactgatggtctgtgtacataaagaactaagacttgggaccgagcttgtttaattttccaacagcatataatatgtcggaaaaatatacactaatataagttcaatatgttgcatataattaatgaatatattgtggtttgaaattaaaaaataaag

SEQ ID NO: 18258 - DNA, 406 bp, Gossypium hirsutum
  unsure (1)..(406): unsure at all n locations; Clone ID: LIB3146-001-P1-K2-G6
cccacgcgtccgccacgcgtccgcccacgcgttcgcccacgcgtccgaagagttttcctatattgtacttgaatgatgtgtatgcaacttgcccaataggccctggcattacattgtccggtgacttagttgatttgaaattgctaatattgttgtaaatagatttgtttttttatcttctttttgcaggaaaaggctttttcggatgataaacgaacttccgaccatttttgaagtcgtgacaggcaatgtcaaacaaccaacagagcaatatgctaatcacaacagcagtggcaaaagcaaatcaagtgctaaagtggtacaaagttccaaaattgaaacttggatgctnttctcagttgtgttttcatcccctttatatgtgcttctcttaattgatgtcacc

SEQ ID NO: 18259 - DNA, 163 bp, Gossypium hirsutum
  unsure (1)..(163): unsure at all n locations; Clone ID: LIB3146-001-P1-K2-G9
annnnnttcttcttccccccnnaaantttttcccttttccagcgttcctttaaaaacgcaagaacgccccttctaatacaagtttttctttttttttttcctttttccccaaaaaaatcccccccttttacaatatcaatattttattcacttcctctattta

SEQ ID NO: 18260 - DNA, 166 bp, Gossypium hirsutum
  Clone ID: LIB3146-001-P1-K2-H1
caaagatcttccaattgtatactacaggagtatttatcgtattaatcaggaatttacaaatcggcatactaggcctattcatatggactttatagggtactaaggacactacactatatataatatcctggccttgcttttaaaaaattcctctccactcttacac

SEQ ID NO: 18261 - DNA, 453 bp, Gossypium hirsutum
  Clone ID: LIB3146-001-P1-K2-H11
taaaaattaaaaaaaactaattaatctattccttaacccgacccttaaatccctaaatcctgacccctaaatccctaactcgtaacccttaacccctaactactaacccctaaacctttaaatcccaacccttaaaccataatccctaaatctatatataattatttgatcacggcgggtgcaaggcaaaacacgaaaaaaactgaattggataaaaaaattaaaccgagcactaaaaatactgaaccgggatgggataagttagggatatccttggatatagcttatattgattttgaagaaccaaattaatattatcttttttacaattatataataaattaattaatatataaattagaaaacactagttaatctaaaccctaaaaccataaacccttaacatgcacataacctctaaaccttaaaccccagcctttaaatcataaacat

SEQ ID NO: 18262 - DNA, 415 bp, Gossypium hirsutum
  unsure (1)..(415): unsure at all n locations; Clone ID: LIB3146-001-P1-K2-H12
cccacgcgtccgcccactcgtccgccgactcttctcaggtgttggaggagcttgaggaatgcaggaaggcataccccaatgcattcattagaatcattggcttcgacaacgtgcgtcaagtgcagtgcattagtttcattgcctacaagcctccaggcttctaagctttttattaactttgtctctccatttgtttgaatttgtactcagaaaaaatcatgttctttacttttgcttttccttttctttgagttattggcctttgtttctcgatttccgggttttaatcctgagaactaatgaataaaaagttggttttcttcccaaaaaaaaaaattttttaaaaaattaattatatataaaatatcatttaaatttattanttatattttttttattcttaatattaaattaa

SEQ ID NO: 18263 - DNA, 289 bp, Gossypium hirsutum
  Clone ID: LIB3146-001-P1-K2-H2
gtgacatggagctggatgagacggatccaactttttgggcttagttggaagctgcaacggagtattacatggataacaattcggaaactttcaaggatgcttgtgaaagacttgttgcaccatttaaaaatgcgtaagtggagagagttataaatataaatcttaacaaccaatcatgtattttgttgttacagtgtaaaagatataaatgttgtaaatcgtattacgtagatgaagagagaggtaatctgaaaaaaacatctgagacctatttgtgaataatcagatg

SEQ ID NO: 18264 - DNA, 466 bp, Gossypium hirsutum
  Clone ID: LIB3146-001-P1-K2-H5
cccacgcgtccgcccacgcgtccggacccacgcgtccgattcttgacaagaaaataggtcttggacaaccaaaacgaatagagaacgcaaagattttggtggcaaatactgcaatggatacagataaagtgaagatatatggtgcacgtgttcgcgttgactcgatgtctaaggttgctgagattgaagggggtgaaaaggaaaagatgagagagaaagtgaaaaagatcttaggacatgggattaactgctttgttaacaggcagttgatttacaatttccccgaagaactctttgcagatgcaggcatacttgctattgagcatgctgattttgatgggatagaacgtctggctttggtaacaggtggtgaaattgcttcaacctttgacaacccagagtctgttaagcttggacattgcaagcttattgaagaaattatgattggtgaggacaagttgatcca

SEQ ID NO: 18265 - DNA, 453 bp, Gossypium hirsutum
  Clone ID: LIB3146-001-P1-K2-H6
cccacgcgtccgcccatttggctctgcccgttccgactgttcaagcttcctggcaagacaggggtgtatcctgaaccaggctttgagcagcagcacagacaaggcgacacaccatacgctcagatgttcaccgatgttggggtgtattatgctccaggccctgtattgaggggtgaagtatttgatggtgctgaggcagttcgtaaaatggagcaatggctgatcaaaaaccatagttttcagccacagtatgcagtgtcggagctgaacgagaaggatttctggaggatgttcgatgctgacctgtatgagcatgtgcgtaggaagtacggagctgtgggaacattcatgagtgtgtactacaaattcaagataggaaggaagaccgaaaaagaggtccaagaagcggaacaagcccaccttgaaactgcctatgccaaggctgattattga

SEQ ID NO: 18266 - DNA, 478 bp, Gossypium hirsutum
  Clone ID: LIB3146-001-P1-K2-H8
tcccaggcttgcggagacgtccgtccacgcgttcgataactaagaaacaaaattttaaggaatatcagaagagaagctggtctgtttctgtgcacaggtactcagggacacatttgatttccaatctacaataggggaaacaagttccgtggatattcatcgagttctggagttgcggtctccagttatcgttaaggtacttaaaggcatgtgcttcatgaacaataagattttcaggaatcacctcggggtgttctatccattgcttacaaaacttatttgctgtgaccagatggatattcgtggagcactaggtgatctttttagggtgcagttgaaagctctcctaccgtaagagttttaataacgaattattttgttgagaaactttttaggaatggttttcagcgtcgctgcacattcctaaggaccataggcaagatttaatgtttatcaaggaaaatggatgggtgaaaat

SEQ ID NO: 18267 - DNA, 188 bp, Gossypium hirsutum
  Clone ID: LIB3146-002-P1-K1-E10
atataaattttatacatccttattaccctacgactccatatataagcaagtaaaaataaatatggctcgctctgcttcttcctttaagttccttggtgcttacgatactgatgctcattatgtctacatatcaaggagaggttactcaggtgcaccgtcggcagcagtgacggctagctttgagaggc

SEQ ID NO: 18268 - DNA, 234 bp, Gossypium hirsutum
  unsure (1)..(234): unsure at all n locations; Clone ID: LIB3146-002-P1-K1-E12
cccacgcggccgccgcggcagacaagccttggaccgaaaccttcaacncacagccgaaggattccaccaccgggccgccgcaacaaccatggagcccccacggcgcgccgccgccggtaaggcgaccgaggaatgcgcgcgacggccacggaccgacaaacacggcgagcgggcgccgtagcagcgcgcacgtgcgaactgcagcgcccaagcatctagctggggtgatggggc

SEQ ID NO: 18269 - DNA, 234 bp, Gossypium hirsutum
  Clone ID: LIB3146-002-P1-K1-G10
cccacgcgtccgataaagacgtgagagacagatccaaatgccttgaaaagctgaactaggggaaccggacgaggtttagttaaagccgcgtggggtgtgccgatctaaacatagccttatttctgatctcgagtaaacacactgaaaataggatgaatgcaggagcgacaaccctgaaacacggacgaccactcactctccgggacgcactaagctaattggaaagctaaaacg

SEQ ID NO: 18270 - DNA, 422 bp, Gossypium hirsutum
  Clone ID: LIB3146-002-P1-K1-G12
tttggcaattggtttacaaaacccagttccttcctgaccaggacgagatttatcgggtgttcattttgcaatggaatgcctacacgcaaatactaaaagcttgcttgatagtgatctccaagatggtaactacatatcagctaagggcaagaaagtagtagtcatcggtggaggtgacactggtacagattgcattgggacatctatccggcatggatgtagcagcattgtaaatcttgagttgcttcctcagccaccgcagacaagagctcctggcaatccttggccacagtggcctcgcatattccgtgtagactatgggcaccaagaagctgctaccaaatttggaaaagacccaagatcctatgaggttttgactaagaaggttataggagatgataatggaactgtgaaaggacttg

SEQ ID NO: 18271 - DNA, 67 bp, Gossypium hirsutum
  Clone ID: LIB3146-002-P1-K1-H10
cccacgcgtccgctgacgcgctagtgtttactgaactcaaaatgatggcgcatgccggggaagctag

SEQ ID NO: 18272 - DNA, 300 bp, Gossypium hirsutum
  Clone ID: LIB3146-002-P1-K1-H12
cacgcgtacgctcacgcgctcgtgttaacagagaaaaaccttcaagcaaacaaaggaaaaaccagagacaagtattaatttcaaagaatgtaagagaaccccatattaccgtagcctttgaaagaataaggataataagaataacaccccgcatattgatgccgacggaaagaacatcagggcaaaagctcgtacatgcaaacctaagaaacaacaaaaacagatgtaaaaatgaggttaagaagcaaaagactgaaatgaaaagaaaaagaacattgaagagacaaagattataacaac

SEQ ID NO: 18273 - DNA, 296 bp, Gossypium hirsutum
  Clone ID: LIB3146-002-P1-K2-A11
cccacgcgtccgtccacgcgttcgcccacgctttcgcccacgcgtccggaactttcaatactgctgaagaagctgcgagagcttatgatgctgaggcgcggagaattcgtggtaagaaagcgaaggtgaacttccctaacgagactccgcgtacctctccaaagtgtgcggtcaagacaaattctcagaaaccactttccaagtcgaatttgagccctgttcagctaaatctcaaccagaattacaattacttgagccagcctgagcaggaatacttcgataccatgggtttcgta

SEQ ID NO: 18274 - DNA, 439 bp, Gossypium hirsutum
  Clone ID: LIB3146-002-P1-K2-A12
cccacgcgtccgtgctaatggaccgttcaatcatagaggagctgtgcccatcaatagatcttgcgttggttaaacgcattctctgcaacttcactccagatgaattttgtccagatcctgttccaggagctgtattggaagccttgaatgctgagactattgttgagcggaggttatcaggggacccatccagaagtttcccttatacagctgccctcgttgtctatactcctccatcctcagcagatgtggctgaaaaagttgcggaggcaggagggaagtcgccactgtctatgaatgcgtcagtggtacagaggaaagggtataccagtgacgaggaactggaggaattgaattctccactttcatcaataattgagaaatttccattgtcaccaacaattgttaccaatggaggagtgaatgggaaccatgaaca

SEQ ID NO: 18275 - DNA, 307 bp, Gossypium hirsutum
  unsure (1)..(307): unsure at all n locations; Clone ID: LIB3146-002-P1-K2-A2
gcagtttctttttagacagaagcaataggaaattaatacaaatgggaagaagtcatttctctttgtacatatgaccttagtaactcaaaatcttgacctaatcttaaacaattggaaggttgcttggacttggttcattcaggaaataagccatctggtctgagttaagactttcaaaaccctanggaaaaaaaaggcaatgactgaattctgcttgtatatcatcttgtgcatgtgctattatattccttcattgctaatttgattcattatactatgtaatttcaggttgggatatcttctggag

SEQ ID NO: 18276 - DNA, 325 bp, Gossypium hirsutum
  Clone ID: LIB3146-002-P1-K2-A3
attgtagacaaaatgtctgttcgtagctctcctaaaccacccattgattcaaggcgtgttccagagacaatgagatcagctgcaattgggcttccacgatatcgcgttttcagcttggaagaaattgaagatgcaaccaacaactttaacccatcaaattttatgggggaaggatctcaagggcagctctataaaggttggcttgtagatgggtcagtggtggtggtaaaatgtttgaaactacagcagaagcatgcacctcaaaatctgatgcaacacatggaagttttgttcaagctaaagcatcgtcatttgggtagcgttc

SEQ ID NO: 18277 - DNA, 438 bp, Gossypium hirsutum
  Clone ID: LIB3146-002-P1-K2-A4
cggacgcgtgggcggacgcgtggggttagggtattataaatcttgtacataattgctagcactgggtctatgatatagttccatataattaggacatataatcgcttgagtggagatgaaaaaagttctacccccctgccctcgctttgattttatggttgataagtattggtatcaattctcagttcaagaatgttacagatgtccctgtgcttttcctcttatgggagctttatttgcatcttcatctatttccttattttatctttttattccacgaaagaattatatcctgtcataactgaatatctcttaatttcaaagctagaaagggctcgtgtcttctaatggtacttttctgtatgcaaacttatcggttccaatgtattgtcccgatctgaataatgcatagttaatcctataatttggggctgcact

SEQ ID NO: 18278 - DNA, 185 bp, Gossypium hirsutum
  Clone ID: LIB3146-002-P1-K2-A5
catcttcccaggcatcttattttactatggttcctagttaaatagaaggtgtttatgagacaaatgtgtaagaattaataacccttttggctgaataacataagatgtcagggctttcaatctttgatgaactttaaactgtgatttaatttgctgcttgttttcatgtttgcattcaatctcaa

SEQ ID NO: 18279 - DNA, 469 bp, Gossypium hirsutum
  unsure (1)..(469): unsure at all n locations; Clone ID: LIB3146-002-P1-K2-A6
cgcagatggttcagttcaaaatatttctgaaatacctcatgaactgaaagcaatttaccggactgtttgggaaattaagcaaaaaacattagttgatatggctgttgatcgaggatgctacatagaccagagccaaagcttaaatatacatatggaccaaccaaatttcggaaaacttacatccttacacttctatgcctggtccaagggtctgaagacaggaatgtattatttaagatctcgtgcagcagctgatgcaattaaattcaccgttgatacatcgatgttgaaggaaaagcctaaagtagaagatgatgaaacaagaatggcacaaatggtttgttcccttacaaatcgtgaagagtgcatgtcttgtgggagctaaagatcggttcctttttgaagctttgagagcatgcaatcagggaatttggtgtcnacgaatggcgactctatatgtgggttttaa

SEQ ID NO: 18280 - DNA, 404 bp, Gossypium hirsutum
  Clone ID: LIB3146-002-P1-K2-A7
cggacgcgtggggctggacgcttctagaattctaatgagacctttttttgatattggcgtttcggtctcttcatatttgcatttcattttcagtctggttccctttccttttccataaccttcaacctctcagcatactcaggaacactgctgatcagtaactgctggatatcatggatatatgccccgatcatagatctgtctctatttcttcccttgcatttctttattactactaatgcatctctttcgatgatgatttttggccattgcatgttgataccgattcgagttgctgccctataagcaattgcttcagcagcataagccgatacaacttggtgatagatcttagaaaatgattaaagaactgtgccttcgctatcccttgctacgatccccac

SEQ ID NO: 18281 - DNA, 350 bp, Gossypium hirsutum
  Clone ID: LIB3146-002-P1-K2-A8
cccacgcgtacgccttccaagatgcttgccggtttgcctgctatacactggaatcagggccgaggttatagtctacgtggtcatcacagaccacaacacatagcaaaatccatgataatagtcattcagaccgtcattcagaccgtaaaaaagcaagtagagaagcaggtcatcagtcctagaaccacccccaatcccacccacggtcataccgacactgactactgtactaactacgttttaaatgataatttgtctgacaaattctgtacctcacagcatccatggcatctaccaatcggcaaccacactggcatggactgtggtataaaaggatgaggatgaaattc

SEQ ID NO: 18282 - DNA, 381 bp, Gossypium hirsutum
  Clone ID: LIB3146-002-P1-K2-A9
ccccgatctatgttggcaggctattgggggatgggcttgttacaactgaaggagaaaaatgggcgaagaagaggaagttggccaactatgctttccatggggagagtttaaagaacatgactccagcagtaattgccagcgttgaaacaatgctagacaagtggaaagacaaagaaggaaaagagatcgaagcattccaagaatttagaatcttgacttcagaagtcatatcaagaacagcttttggtagcagttacttcgaaggagagaagattttttacatgttgcagaagctcgcagatattgtgagccgcaattcaaacaagtctaggattccaatcctcagcacgttttggaaaactgacgatgacattgagtcag

SEQ ID NO: 18283 - DNA, 449 bp, Gossypium hirsutum
  Clone ID: LIB3146-002-P1-K2-B10
ggacaactcactcagtcttgctcacacgcttgttcagattgtttgtcaagatcataaaggtgggtgatacgacataacgcgaactctaaaggattacaacattcagatttcatatggacgcttctatataaaacaaggaagaaagtgtgagattgacttgtttataatgcaatccgatgggaagaagatagttgatcctagcaagcaaactgcattgtcgtcgcgtctgaaaatggaactgctccaaccactaagagtaactgtagtgagccggggtcctgacactgagcttctagttgcaaatcccgtagagttatcaagcaagggccggcctcttgttttttatgacattacccttgctctaaagatgcttaatacttgcatcttctcggcagagattgggagacacatgatcggagatcgagagtgggaagtttacaggattctac

SEQ ID NO: 18284 - DNA, 292 bp, Gossypium hirsutum
  Clone ID: LIB3146-002-P1-K2-B11
tcgacgcacgcgtccgaagaatattaccacaggcacactagatgtttttattgtgaggggaagcttatacttccattgtgagatcaatggtggtttaggtgtcttttgggctgcctgatgccacccaaggtttccttgctcaaggctactcaaggtgaatctataataaactattaccatgagatgcatgtcattcaagacatgcttgttcctctttacacggttggagatagcccttgagtgggtccaccatgagatggagatctatcccattttgctctacccgcaccta

SEQ ID NO: 18285 - DNA, 419 bp, Gossypium hirsutum
  unsure (1)..(419): unsure at all n locations; Clone ID: LIB3146-002-P1-K2-B2
ctttgtgcaaaaccagaaagtaaaaagaacagttcttggatatcctaagctaatgtcggacgaggagcaccatttcgagtccaaggccgacgccggcgcctccaaaacctatcctcagcaggccggtactatccgtaaaaacggctacatcgtcatcaaaggccgtccttgcaaggttgtcgaagtttccacttccaagactgngaagcacggacatgctaagtgtcactttgttgggatcgacatcttcactgctaagaagctggaagatatcggtccttcttcccacaattgtgatgtgccgcacgtcaaccgtactgattaccaattgatcgacatttctgaaggatggatttgtgagcttgctgactgagagcggagacactaaagatgatctgaggcttccaactgatgaaaac

SEQ ID NO: 18286 - DNA, 274 bp, Gossypium hirsutum
  Clone ID: LIB3146-002-P1-K2-B3
gtccctgtcttactcgacttttacttgtatccttcactctattaagtgtgttcaacctactacggggtaatgaaagattctgatgcgctccttgcatattggaccaaactgatatttcctgtaaaccttagtactggaaagtcactagcccaactctgtctccttcgcatctccaagacttacctggttacactcgtaatggttacagaaggtaccattcgttaataacgccagaaagtcatgtgttcagttcttagactgattggacatatac

SEQ ID NO: 18287 - DNA, 273 bp, Gossypium hirsutum
  unsure (1)..(273): unsure at all n locations; Clone ID: LIB3146-002-P1-K2-B4
gtaagaatcatcactttgaacaggcctcgacatttgaatgtcatctcatccaaagtggtctccgggctagctaaatacttagaaaaatgggaaagagatgagcaagctcagcttatactgatcaagggagccgggcgtgcattttctgctggtggagatttaaaaatgttctatgagggaaggaaatcaaaggattcctgccttgaagtggtctatagaatgtatgggctntgctatcacattcatacctataaaaaaactcaagttgctctt

SEQ ID NO: 18288 - DNA, 478 bp, Gossypium hirsutum
  Clone ID: LIB3146-002-P1-K2-B6
ggatttgaccccaggacagaaacattgaattgctattgctcgagtggtgctgaagagtgctcccatcttattattggatgaagctagctcgtccatcgaatctgagtcaagccgagtggtgcaggaggcacttgacacattgataatgggaaacaaaacaaccattttgatagcccgtagagctgcaatgatgaagcatgttgacaacattgtagtacttaacggtggtcgaattgttgaggaagggacacatgattctttgttagcaaaaaatggcttgtatgttcgtttaacgcaacctcatttcgggaaaggtttgcgtcagcatcggctggtttaggttgactttgcaattgattgtgacttgcatcagttcttctgtatattactcatttcactcatttgaattgctggaactatgaccattctgtgagcttcacttctctcggttgaaaagaatcccaaatcagaaggggaa

SEQ ID NO: 18289 - DNA, 403 bp, Gossypium hirsutum
  Clone ID: LIB3146-002-P1-K2-B7
aaaaaattacataaaaaaaaagagttaaaataattaaggtgaattaatcctctcttgggcttgtgtcttttttgtttttgaagaatacatttaatgctaataaccttacaaaaatgtttaatatttgataatattattagggttttgctatataatccaagctgtaatatactgtaataatcatatatctatcttagttacttactttaatttcagtttatattatgttattctgaccctttttgtcagatgttttcagctgcaaaaaaaactcattaatttccattttgtgtttatataatttatatgtcatttttcaatttctactgatgatgctctgcagggaatatatagcaaatctcttatgtaatcatttaggttttctgtcagcaatctataatca

SEQ ID NO: 18290 - DNA, 330 bp, Gossypium hirsutum
  Clone ID: LIB3146-002-P1-K2-B8
tggacgcgtgggtctgaagtgaagttctttcattctgcttggagcctcaatttgggggttactagttgagagttaaattgtgtttggggcactcttagtaatgaaaaattcacatccttttggttgctcctttagataatgagagacttgacaatgttttaaagagtgctttggctcatctatttgttgtggtagctggagatgtctttagattttgtggtgaagaagaagtttgcttattttgtcgaatgaaccaatagtggactagtaaaagatattaaatcttcaattacacaaactttaacaaccaaaaaagggcggccggtttag

SEQ ID NO: 18291 - DNA, 421 bp, Gossypium hirsutum
  Clone ID: LIB3146-002-P1-K2-B9
cccacgcgtccgttggagtggaaaggtcgattgtttatggtcacctagaagtattggagcaggtgttaaagggaattgctatgatgaaagagttaacattacgaacaaaagactatttagtttcgtttggagagtgcatgtctacaaggatttttgcagcatatttgaataaaattggtgttaaggcccgtcaatatgacgcctttgaaattggtttcattaccactgatgacttcacaaatgctgatattttggaagcaacttacccagctgttgcaaaaagattaaatgatgattggatcagtgatcctgcaatcccaattgtcactggattccttggaaaggggtggagatcttctgcaattaccactttaggaaggggtggtagtgatttgacagccacaaccatcggaaaagcatt

SEQ ID NO: 18292 - DNA, 427 bp, Gossypium hirsutum
  unsure (1)..(427): unsure at all n locations; Clone ID: LIB3146-002-P1-K2-C1
gggaaaagtgaacaagccagtggttgcttgggtcagtggaacttgtgcacgactcttcaagtcagaagtacagtttggtcatgctggagctaagagtggtggtgagatggagtctgcccaggcaaagaatcaggcactaagggatgctggagctgtagttcccacttcatatgaagcttttgaagctgtgatcaaggaaacatttgacaaactggttgaacaagggaagattacacccgtgaaggaagttatgcctncacaaatcccagaagatcttaacaatgcaattaagagcgggaaagttcgtgctccaactcacattatttcaaccatctctgatgacaggggtgaggaaccgtgctatgctggtgtgcccatgtctttcattgtcgagcgaggttatggtgttggtgatgtcatttctctc

SEQ ID NO: 18293 - DNA, 453 bp, Gossypium hirsutum
  Clone ID: LIB3146-002-P1-K2-C10
gttgaatcatccaatgatcccgggaacctcactaacaattgcctatttgcgctcttggaagtggccggttctcattacgccgccatttgtgtagaaaatgatgaaattgttagaggtgaatcaaatacaccaatgaaattgaccgtacggaaaaccattccgtttgttgaagatgtttgcgtctccggaactgatgcagttctacccttacgtggcataattgaacaatagctgaaacttgggcggtatttatttttgatagattattgatatatgagatgcaattggcaaatttcgcaatgtgaatttagcataggcatgtctggatcttttttggttctaggcttcaaacattatctatgagactgaagcatttgttgcactccattgttaattgtgtaagtcttattggttttttttctttggcatctttattttttaaaattatcattc

SEQ ID NO: 18294 - DNA, 384 bp, Gossypium hirsutum
  unsure (1)..(384): unsure at all n locations; Clone ID: LIB3146-002-P1-K2-C11
cccacgcgtccgcggacgcgtgggttctgatcttcaaaaaaaaaaaagatggttgaagaacacccagctccagaaatatgaaggtatgcctgcttggttattgactgtgcaggtactggttgatgatgtacccttgtattctatggtgattgatctttgaaagctgggttagatcatgtttgttgttttatgaccatctgcttcatttgaccgagtgattgaagcaggttcaaatccataaattttgtaggttgggtagaaaatattaacagattatacgagctaccaagtactataattttgtacatacatttaaataatatatattggaatagaaataaatgtgaaagttacaatccttgtgatgccnnnnnaaaaaataat

SEQ ID NO: 18295 - DNA, 433 bp, Gossypium hirsutum
  Clone ID: LIB3146-002-P1-K2-C12
cgcagtgtggagtgtacagggagcgtccaagccatgatttccgcttttgaatgcgtccatgaggggtggggtgtttgtgtgctggtgggtgtgccaaagaaagacgatgcattcaaaactcatccaatgaatctactaagtgagaggacccttaagggtgctttttatggcaactataaaccacgcactgatattcccatggttgtcgacaaatatttgaacaaggagctggggctggatatggacaagttcatcacacactctgtgccttttgccgatattaacaaggcattcgactacatgctccagggtataggtctgagatgcatgattcatttggatgcttaaggaaatgttgctgctgtatatttgcccatccaaggatcaaaactctaatgttttgtcctactatgtgttatattatgtgcctact

SEQ ID NO: 18296 - DNA, 463 bp, Gossypium hirsutum
  Clone ID: LIB3146-002-P1-K2-C2
cccacgcgtgcgcagagtgcagatgactatctttttcaaaagtgcagccaaagcttcataaagagcataacggatttccagaacggaggataaaggagtttcaagggtaacaaatgccaaatgcatcaagtcattgacgtcatcactcttgacatgaaggctgcactgaatgctagacgagtgctgcataaaccttagtctatttacacaaactaacactgccagacacgacattattctgctactgcaatactaatattgatgatggcatggacatcctcaattaaatcattcatcttaaaccatgctttaaatactagattactttaaccataatttcacatctggagttggaactattcgatgctctataacaaactagaaatcaagctagagtgcattacggttcaataatacccagtgcataaattcatgtgaaatactaccgactgacaaccaaaca

SEQ ID NO: 18297 - DNA, 236 bp, Gossypium hirsutum
  Clone ID: LIB3146-002-P1-K2-C3
gcttcctccgtcttcatagaaattttagatttaacggtcttgaccccaaactagttttggctaatgggacagttagtgtggaaacaggatatcaatgttagcttagctgaaaaaaagcctagagttgtttttgttttgggtggccctggcaatgggaaaggtacccaatgcgcaaatatagtcgaacactttcattacacccatctcagtgctgaagatctttttccagcagaaat

SEQ ID NO: 18298 - DNA, 473 bp, Gossypium hirsutum
  unsure (1)..(473): unsure at all n locations; Clone ID: LIB3146-002-P1-K2-C4
cgccttcgcggcgggatgcaaattttcgtgaagtccctgactggaaagaccatcaccctggaaggtgagagctcagacacgattgataatgttaaggccaagatccaggataaggaaggaatcccaccagaccagcagaggctgatttttgctgggaagcaacttgaagatgggaggacccttgcagattacaacatccagaaggaatccactttgcacctggtccttcgcctncgcggtggcttttaagtgtggtgccgaacacctgtccagttattggtgatgtgttaagtttgtatgtgtgtgggtcggatgctaatgtgagctggccactaagcttgggaagcttacgaagtaaaataattgcctttatcaacgcttttagttggtctttaagtttcaaggttctatggcattgaataaatatgttnttgcattttgcaatcaagtttctctcttggtcgaatttacat

SEQ ID NO: 18299 - DNA, 400 bp, Gossypium hirsutum
  Clone ID: LIB3146-002-P1-K2-C5
gggaaaaccaatcagctgatgtgttacacgggttgttttccaaaaggaaccttatcggtaggctgatacttcggtcactgtatgtgatattctgcgggtttatggcagcaatgctccctttctttggtgacattagtggggtcgctggtgccatcggcttcatcccgttagatttcatcctgcctatgcttctatataacatgacttataagccttcaaggtcaaccctcacctactggatcaatttgtccatcattatcgtcttcacaggtgtgggaatcatgggttcattttcatctattaggaaattggttcttgatgccaacaagttcaagccttttagcagtgatgtggttgactaaccagtgatcatatcgcttaaaagctcaggaaattctgc

SEQ ID NO: 18300 - DNA, 266 bp, Gossypium hirsutum
  Clone ID: LIB3146-002-P1-K2-C6
tttgaatttcaaataatgttgaactttctggattaaagcatgaagatagcctttaagggcatgaggctgggctaatcggacataaacagtggttcagcatgttacacacaatcgggatcatgttcaaaatgaaaagccagatggtgaggtattttgatcaagttcttaaatggaaatgtcatgtgtgcaaatatttaatattgacttttcaaggattagtgggaattttatggttttagaagcaatggattatattttctggaaaa

SEQ ID NO: 18301 - DNA, 480 bp, Gossypium hirsutum
  Clone ID: LIB3146-002-P1-K2-C7
ctctactccagaagagctccgagcttttacctttgctcggccccgtacatttaggggggaagaggctgaagtagaggaagaagaagaactagaagagtctgaagaggaaatagaagaagagcctgagaaacgaaaagggacccaagggcttattgagattgagaatccaaatttggctaaacaaaagaatgtcaaagccaaagatgttgatatggggaaaacaactgaactatcaaggcgtgaaagagaggagatagaaaagcaaaaagcacatgaacgatatatgaagctccaggagcaagggaaaactgagcaatcaagaaaagatttagagcgcttagccatgattaggcaacaaagggcagaggctgctaagaagagagaagaggagaaggctgcaaaagaacagaagaaagttgaagctcgcaaataaaaataggtcgaggaactgatatgatcggttaaccatttggttctttt

SEQ ID NO: 18302 - DNA, 404 bp, Gossypium hirsutum
  Clone ID: LIB3146-002-P1-K2-C8
gtacacagagacacctgctggcgctttccagactgacaggaatatgacatctgacgggtcaaatgtcacaacgacaaatgtgtgtggtggtcctacaaccatgcaaggaactgatactagtaagagcccaaaccttaaagattgattggaaacggatgcactagttaagcagatgggtattactccatcgagtcagagtccaaacttgtttaaagatctactaccttgaagaatattgggaaggaaggattgacaagacttacaccaatagggtttcattataggtttacttgcatacagctagcaactgagcagttgataggcgaaccatacgagcaatgatgtatcaagagcacagatttgcatagaatgaggtattaatttgattcaaccgactcgaatgg

SEQ ID NO: 18303 - DNA, 422 bp, Gossypium hirsutum
  Clone ID: LIB3146-002-P1-K2-C9
cccacgcgtccgatctaaaataaaggtgcctgtgttgttcatttcaggggatgatgacctgcgctgtccgattggtgttttgagcaagtttgagaagatcattggcaacggctctagggttgtaatcttcaaaggaagaggtcatgcctttgcccatcgaccaggatctacagaagaggatgcagatgctgagcaggcatttaccttgatgaggaattggcttcatgatggcctactcgtaaacagttgagcgcatctatgttcattggttatcttatagggtgcttaaggtagaattggtgcatctttctggcaatactctgaacaagcaatttgttcttgacgatgctcatgcccattgatgtatatacgctaattaatgtcggttttcatctcttttatattacaaagaatttcaggat

SEQ ID NO: 18304 - DNA, 430 bp, Gossypium hirsutum
  Clone ID: LIB3146-002-P1-K2-D11
acttgacccagtagaagaagcaaacaagcccagctttaagcatattgtagctgagcagcaagagaagcagaaggaagcagagacatctaagacccagatgatctcacttaggcctgaagcgcctaagcccaaggaaaaatggtacgttgttttgagcggaccaaaagcaggagtattctcagaagctgaaaaggagctgatcaaggaccagcccaatatcaaggaggcccaaacgtagtttgaagcccaaacaattttgaggatagcaaagaccatggcagaattcaaaaagcccaaggtcgaaagaagcaagtttatgatgccccagctcataaacagcaggatgccaggaggacccctattagcagaagaaacccaattctcattcgaggaatggaagaggtattatcttctagccaagaagatgatg

SEQ ID NO: 18305 - DNA, 427 bp, Gossypium hirsutum
  Clone ID: LIB3146-002-P1-K2-D12
cgaccacgcgtccgaacacattttatcctgccatgattggtgtcattcttattctcttatctcctgatgtggactggtgaaatttgatgaaccaaacagatgttataaatacttctaacaacccacatgaaattccctgtgacctatcactgcggctgggccctctctcaacaccttgcctgagtgctggaaacagtttgcacaaggaaattaaaaacaccgattccacctttctagagtggaacaagttcagttatctgacacccccaattgtgtaaaagtttatcttccttacccctgaacaacatagatgcccaccttaacccgtattcaaacgcaccgaaaatcctacgctgacatatggatgtagatgcaacattgagcaagcgaaagacaatttatggctcaccaatcaatcaccattttt

SEQ ID NO: 18306 - DNA, 357 bp, Gossypium hirsutum
  Clone ID: LIB3146-002-P1-K2-D2
gaggttttggaacttatggttcggatgctgggtttctcagatgaagacaagcagcggataggtagtgctcaacaaggtactggcaaaggtgttgttcggggtgttttgggtctacctggtcgtttggttggtggcatcttgggtggaggttcggctgatgtacctgcaagtatagcccctgataatcagtcaattgcagatctttgggttgattttctactcaaggaaaccgaagaacgagaaaagagggcggaaggtgctagtaaatccaattgagaccttaatgggagaaatccaaatgctacaagacctactacatctgcgtcttgacaaacaacttgcggttctggtttctct

SEQ ID NO: 18307 - DNA, 317 bp, Gossypium hirsutum
  Clone ID: LIB3146-002-P1-K2-D3
ggaacttatggttcgcatgctggctttctcattttaagacaagcagccgatagacagcagctcagcgataatactgtcgagggtactgaccggcgcaagaatgagctacctaaaactctgagacgacgactactacaacagcagctcggcatttaaacccaaaaacctataaccctatagaccaatcagacagagacttatagacagactccttacactaggcaaacttgtaccaatcattacaaacatgaacaaactaacgattaccaatgatacaatcacttacattcaacaattacaacagacatcacaacatc

SEQ ID NO: 18308 - DNA, 464 bp, Gossypium hirsutum
  Clone ID: LIB3146-002-P1-K2-D5
gcaaaaaatgttgacatcccaggggttgagttttcaaagagtgcagttgtgttaccacttgtctggaacatacaagtcagcacctggcttcgtcactatgtttatgagagacttattacaaaggggaagaaacctggttttttccagttgctggctacacagactgtcagtgctgtttggcatggattatatcctgggtacatgcttttctttgttcagtcagctttgatgattgctggttcaagagttatttatcgatgggagcaagcttcaaatgtaggtcttgtgaagaaaacacttgtcttcatcaacttcgcttacacactgttgattctcaactactacgctgtcggatttctggtattaagcttgcatgagtcacttgcgttgtatggtagtgtgtattatgttggaaccattcttccaataacattgattctccttggctatataatacctgcaaa

SEQ ID NO: 18309 - DNA, 468 bp, Gossypium hirsutum
  Clone ID: LIB3146-002-P1-K2-D6
cccacgcgtccgatcggagcagggattataccaatccataccttcctgtcaatccaacgtgcgatggagggactcatgcagcctgtagttggtcctgatggaaaaaagcaagaacctcagagtaatgtgctacttgcttcaattgaaaatatgcagtatgctgtgacagttgatgttcttcactcggtattctctgcatttggcactgtccaaaagattgctatatttgagaagaatggcggaacacaggcactaattcaatatccggatgtcacgactgcagctgtcgccaaagaatccttagagggacactgcatatatgagggtggctattgcttacagtgataaaagtagagattacacaatcttagacctaagcttgcttgcgacacaaggtccaagtatgccttgcactccaaatgcttggcagaatcctcagaatgctccattataccctgggactgacta

SEQ ID NO: 18310 - DNA, 399 bp, Gossypium hirsutum
  Clone ID: LIB3146-002-P1-K2-D7
accttgcaaaatatccaaaaacacttcatggacatggaattcctaaccgagctaaacgaactagggataaccgatcaccaaagacttaccggcggaagaatgggccgaagaaaactcgaagacgacgacgacaacaacaacagcaaggaattcaaatccaaaaaccttcaagccgagagacgtaggagacagaaacttagtgacaggctccttacactgcgctcacttgtcccaatcattacaaatatgaacaaagcaacgataatcgatgatgcaatcacttacattcaagaattacaaaagacatcacaagttctcagtgaacaactgctcgaaatggaaaggtcggctgaagaaagtgtaatgccgatgaaacttggaatcgatgttggacaacat

SEQ ID NO: 18311 - DNA, 481 bp, Gossypium hirsutum
  Clone ID: LIB3146-002-P1-K2-D8
gcggaagatcaagtctttaggggtttagatggttatatctggtgaaggctctgatgagatttttggtgggtatttgtacttccacaaggcaccaaataaggatgaattacaccactaaacctgccgaaagatcaaggcccttcaccagtatgattgtttgagagctaacaaagcaacatctgcatggagattggaggctcgagtcccattcttagacaagcaattcatcaatgatgccatgtatatagaccctgaatcaaagatgataaaacgggatgaaggacgcattgagaagcggattcttaggagggccttcgatgatgaagagcatccctatctgccaaagcatatcctttacagacagaaagaacagtttagtgatggtgtgggttatagttggatagatggtctcaaagcacatgctgaccaacatgtaaccaataagatgatgcgtaacgcatctaacatcttccctcacaac

SEQ ID NO: 18312 - DNA, 401 bp, Gossypium hirsutum
  Clone ID: LIB3146-002-P1-K2-D9
cccacgcgtccgtccacgcgttcgcccacgctttcttccacgcgtccgcctgcgtctctctcgtcatctctctgaaccaaaaagtctttagcttttcgcttcgagagagaccatgttggtttaccaggatctcatctccggtgacgagcttctttctgactcattcccctacaaggaaatcgagaatgggatgctgtgggaagttgagggaaagtgggttgtgcaaggagctgtcgatgttgacattggtgccaatccttcagccgaaggtgctgatgaggatgaaggtgttgatgaccaagctgtgaacgttgttgacattgttgacactttcaggcttcaggagcaaccccctttcgacatgaagcagtttgtcgtgttcatcaagaagttcatcaaga

SEQ ID NO: 18313 - DNA, 454 bp, Gossypium hirsutum
  Clone ID: LIB3146-002-P1-K2-E10
agaaaagcagagccgcatcactttttgctagctatgctactgtgggagttattgttcttcaggacgagcttctgcagtagctaataataacgttatatattatataaattttatacatcctttttaccctacgactccatatataagcaagtaaaaataaatatggctcgctctgtttcttcctttaagttccttggtgcttctgtttttgatgctctttatgtctccatatcaaggagaggttactcaggtgcaccgccggcggcagtgacggctagctttggtaggcctggagcgatggggaaagtggaacgaagatatgcgatgaaagagtcgtcgtcgtcggagacaagggcttattcttcagcttgggcgcctgaccctgttacggggtattaccggccggagaacttgggggctgagatcgatgcggcggatcttcgggagatgatgt

SEQ ID NO: 18314 - DNA, 411 bp, Gossypium hirsutum
  Clone ID: LIB3146-002-P1-K2-E11
ctgccattgtatatacgagtggaaccactagttacccaaaaggcattatgctttcacataagggcgtattgcaccagatagaaaatttgggggttcttggacctgctaaagcgggggatagatttctaagtatgcttcctacttggcacacatatgagcgggcttgttagtatttcgtatgtacgcatggaattgagcaagtatatacaactgatgatttgagaaattataagccaaattacatgatttcagtacctttagtgtatgaaacattctatagtggaattcaaaagcagatatcttccagccccaatgctattaaattaatagtattttcattcataaggatcagcttggcatacacggagttgaagataatttgagaatatggtgacttgtctagcagtcggt

SEQ ID NO: 18315 - DNA, 419 bp, Gossypium hirsutum
  Clone ID: LIB3146-002-P1-K2-E12
ggtcgaccgcgcgtccgaactgcagccaccataaggactgctttctccttttctctgccgtttcaactccacctccaatgttgcacaacaacgatggcgcctcgacggctcgctgccgccggtttggtgaccgtggagtgcgcgcgacgggcacggagcgacaaacactgtgtgcgggcgctgttgcggcgtgcgtgtgggagctgctgcgcctaggcttcttgctggtgttttggggccattttctgttggactagggttgaaattggctattgggttttaattttattgggcctgctattgtattttattattgattgggcagggcaaataattggtattacagtgttgacaccatttttttggacggaaaacgggatcgacttggttttgaaaaatggaaacgaaaacgagagtcg

SEQ ID NO: 18316 - DNA, 415 bp, Gossypium hirsutum
  Clone ID: LIB3146-002-P1-K2-E2
aaattcagcatatttttcccattttatttagcattttaagataacatgagcaggccaggagatgggaactgcaggtcatgccaacacctcaacttccaaaggagggacaactgccaacgttgcggtgaatctcgatacggtgttagagtcggctcgacattcgggtttaccgcaggctcggacgttcgacctggtgactggtattgcacggctggaaactgcggcacccacaatttcgccagccggtctacttgtttcaattgcggcgcgttcaaggacgagtcggctggaggtttcgacttggacatgtctcgatcaaaaaggttcggaagtaaccgatccggctggaaatcaagggaatggatatgtaccaggttagggtgcaatgaacataattttgctagcagaatggaat

SEQ ID NO: 18317 - DNA, 390 bp, Gossypium hirsutum
  Clone ID: LIB3146-002-P1-K2-E4
agaagctagaactgaattagtcgctcaaaacttttgccctttggttcagtaagacgaacttgccgtataatgggattaggccatcgtattttaggcgtcttcttgaggtcattgattcagtgttttaaatgcgaaagggtgggagagaaggaaatttacatgactgaaccatcgaggatgaatccaacgagtatatcgatttttatatttaaagattttaatatgtgtataaccatatttaatatgtccatgtatttgttgggctcgagtgtattatttaaagaacaaaaaatctagaataacgaaattaaactatgctatccggggtatatagaatctaaaagtaaagtttaagcaaaaaaggaaataactttagggtctaaaaaagaa

SEQ ID NO: 18318 - DNA, 54 bp, Gossypium hirsutum
  Clone ID: LIB3146-002-P1-K2-E5
ggaactatgagggaagacacggtgttccatactttaatagccgaatggaagtga

SEQ ID NO: 18319 - DNA, 412 bp, Gossypium hirsutum
  Clone ID: LIB3146-002-P1-K2-E8
gttatgcgtttgatgtaagcatgatttggtggttcgaaccttagtattatgcttgtgtgattagctaaaatgctcagtagtgctgggttgataacgtcaatatatggatgctttgtgctttctttcgaacaaaaaaatgcaaaaacaaaaaaaaaaagaaaaaaattgacaaagaaaacaaaataaattacaactacatacaataaaagcaaatatcccataaactaaaaaaaaaagggatgacagttctaaggtttcaaagctacctaactgggaaatccaaggccaacacgcatcaaaatggccacgtaattcaaaccccttgtcacggttttaaaaactaactaacctgggaaaaactgagcgtacccaacttaaattgcatagcctgaaatgccaattcgacaagtcg

SEQ ID NO: 18320 - DNA, 447 bp, Gossypium hirsutum
  Clone ID: LIB3146-002-P1-K2-E9
ctgccatagccgtggtgtttaccaccgtgatttgaagccggagaatttgttattagacgaagatgggaacttgaaagtcactgatttcggactcagtgctttctcggaacatttgaaacaagatgggttgttgtacacaacgtgtggaacgccggcgtatgtggcgccggaagttattgctaaaaaaggatacgatggatctaaagctgatatttggtcttgtggggtgattctttatgttcttcttgctgggtttttaccatttcaagatgataatttggtggcaatgtacagaaagatttacagaggagatttcaagtgtccgccatggttttcctctgaagctcgtaggttaatcactaagctattagatcccaaccccagttctcgaatcaccatatcaaagataagggattcttcttggttcaaaaaatccattcccaaaac

SEQ ID NO: 18321 - DNA, 196 bp, Gossypium hirsutum
  Clone ID: LIB3146-002-P1-K2-F1
aaagtagagaagaatccggaggttgctgagacattaaacaatcaatcaaccagtggagaaaagggtgaagaagaagaagaagaagaagagaaagaaggaaccgctgctgctcctcgcagaaggaggcgtgacacttaaaacagaggtgaatggtgataatctgtatatagtatgggaaaatacttgggctttagaa

SEQ ID NO: 18322 - DNA, 416 bp, Gossypium hirsutum
  Clone ID: LIB3146-002-P1-K2-F11
ctacagagtttgcctcatacttccattattgttgttcactaaggtttgatgataagccagacgatgcttatcttaaaagaatctttcgtgacctctttattcgtgaaggcttccagttcgattatgtctttgattggaccattttgaagtatcagcaatcacagttgaccaatcctccagctcgagcccttggcctcggtgctggaacaagttctcccctgccacctgcaattgcgaatgctgacagacacacagctgcagaggacacacgagcagctggtttgtcatccatggattcttctcggcggagagcatcaggacccttgatgagttctggaaattatgcaaagcagaagagtccagttgcaaatgatcattttattgggcagtcaggtggatcatcttcaagacaagct

SEQ ID NO: 18323 - DNA, 306 bp, Gossypium hirsutum
  unsure (1)..(306): unsure at all n locations; Clone ID: LIB3146-002-P1-K2-F12
gcgtccgcaaagtatccttaaactactttaagaaatgtcaatanatttggcaatacatanacatttcttatgcaattattataaaactatcggcaccaccccctatccttcgcccattttatttttctataaaacacacttataactctaaacaatctctctcaatatctcttttactcaatctacctctttctataataatccacacttatacatcatccactgtcatctattttttttttacaacaacttctatttctagcatttcccattctttatatacattacaatacattccctcttttt

SEQ ID NO: 18324 - DNA, 487 bp, Gossypium hirsutum
  unsure (1)..(487): unsure at all n locations; Clone ID: LIB3146-002-P1-K2-F2
ctcagagagtacgggctgctgacatgaaatgtttggcaactgccgcagtcaaagctagcagatggtatcgagaattgaatgcacagactgtcaagcatttggatacacttcacgaatatcttgggcttatgttagctgtgcatggtgcattttcagatcgatcaagtgctttattgacagttcaaactctcctatcagaactatctacacttcatgcaagagccgaaaaacttgaagcagcatcatcgaaaatatttggtggcgacanatctaggattcacaagatagaagaacttgaagaaactataaaggttactgaagacgcaaaaaatgttgccataagagaatatgagaggatcaaggaaaataacaggtgtgaacttgaaaggcttgacaaggaaagacgggttgacttcttgaacatgttgaaggggtttgttgtaaatcaagtgggatatgccgagaaaatttcaaatgtgtgggcaaa

SEQ ID NO: 18325 - DNA, 484 bp, Gossypium hirsutum
  Clone ID: LIB3146-002-P1-K2-F3
caatggagttatacttgttgcaacttcaaatcgtgctccagataatctctatgaaggtggattgcagagggatctttttctacccttcattgccactttgaaggaaagatgtattgttcatgaaattggttcagcagtagactaccggaaactgacctcggcagaagaaggtttctacttcattggcaaagatttgtccagcctactaaaaacgacctttcagcagttgattggtgaacatgttgctagtccacaagtggttgaagtagttatgggtaggacgttgcaggttccccttggtgctaatggatgtgcttatttctcgtttgaggaactttgtgacaaacctcttgaggctgcagactactttggattgttcaagaactttcacaccctagcgctggaaggtgttccaaaattcgggctccacaacaggacagcagcatatcgggtagtcactttagttgatgtaatgtatgaggac

SEQ ID NO: 18326 - DNA, 477 bp, Gossypium hirsutum
  unsure (1)..(477): unsure at all n locations; Clone ID: LIB3146-002-P1-K2-F4
gccttatagaactggctaccactttcagcctcttaaaaattggatgaatgatcctaatggtccagtgtactacaagggagtttaccatctattctatcaatataatccgtatgctgcagtgtggggcaacataacatgggctcactcaatatcatatgatcttgtcaactggattaatcttgatattgcactttctcccggtgatcctttcgatatcaatggttgctggtcaggctcaactacgttcctttccggngagaaacctgtcattttatacactggaagtgataccatgaatcgtcaagttcagaacttggctgagccaaagaacctatctgatcctctgctaagggaatgggtaaaatcatctcataatcctctaatgtcccctggtgatggtattgacccaaagaactttaaggatccaacaactgcttggcaaggccctgatggattatggagagtcttagttggaaa

SEQ ID NO: 18327 - DNA, 423 bp, Gossypium hirsutum
  Clone ID: LIB3146-002-P1-K2-F5
ctgaactctgagactaccctgcggaagaaaatacagaaagcgtgttcaatcttagagttctcggatcctcctttggttcacttcgaaaatgaggcttatcaaaattacctcaatttcctccaagatttaatcaaaaacaatccatccgttgtcgagaagatgaacctagaatcacaactcgtggcagtgtgtgaaaaaatattgcagatatacctcaactgtaccattaaccagaatatggtacagatatcagttaacaagccaacgtcccgttgggtactaccgttgggttcagccaaaagggaagaattggcagcaagaacatctttacttgtgtcagcattgaagactttgagtggtttggagaaggatcgctttagaaaatacattgcaagtttctttcatctgtttgtcgctctgata

SEQ ID NO: 18328 - DNA, 258 bp, Gossypium hirsutum
  Clone ID: LIB3146-002-P1-K2-F6
cccacgcgtccgagctgtcactggtgtctccagcaatgatggggagtagtcaataagtgaatgggagttttatcgtgcttataatatgctgacaagaatcttcgtctccaatgaccattgtacgaaaggtgacaatagctttctcacatggaagaaacagacgtacatttcatcataactggaggcctacgcttgtgaaatgtgattcacaagctagtcttgctcgcatatttttatgtaagatggttaaagcaggta

SEQ ID NO: 18329 - DNA, 418 bp, Gossypium hirsutum
  Clone ID: LIB3146-002-P1-K2-F7
ggaaaataaaaaagctaatcaaggcactagaatctgccaggggaaatgggaccagcatgatatccctcattatgcctcctcgtgatcaaatatcccgcgtcacaaagatgttaggtgacgaatttggaactgcatcgaacatcaaaagtagggtcaaccgtcagtctgtgttggctgccattacttctgctcaacagaggttgaagctctataacaaggttccccctaacgggctggtgctctacactgggacaattgttactgaagatggcaaggaaaagaaggtgacaattgactttgaacctttcaaacctattaatgcatctttgtacctctgtgataacaagttccatactgaaagcttgaatgagcttttagaggctgatgacaagtttggattatagtcatggatggtaat

SEQ ID NO: 18330 - DNA, 475 bp, Gossypium hirsutum
  Clone ID: LIB3146-002-P1-K2-F8
accactcctacgcgcacacatacagtgaactcatcgaagttacgacttcaccggagttatatcgtggtttgcggataaatgtgatcttattcttgttgtattcgaccctcacaaattagatatacgtgatgaatttaaacgagtaatttcgtgtttacgtggaaacgatgacaagatacgtgtcgacctaaacaaagcacaccaagttgacacccaacaactaatgagagtttatggagctctgatgtggtctcttggaaaagtcctgaatacccctgaagttgctcgtgtttacattggctcttttaacgaaaagcaaattaacgaagctgatgatccattggggcaagacctttttgagaaagaacaagatgatcttctcaaggacttattagacattccaagaaaggcttgtgatcgtcggatcaatgaatttgtgaagcgtgctagagctgcaaaaattaatgcttatata

SEQ ID NO: 18331 - DNA, 418 bp, Gossypium hirsutum
  unsure (1)..(418): unsure at all n locations; Clone ID: LIB3146-002-P1-K2-F9
cccacgcgtccgcccacgcgtccgagttatttggcttgtttcttgctctgtgtatggcctttggtgtgattagcatatatacaatccggcattttggaacttatagtgtaatagcaacagttaagtctaatattgtgccttgtgatgaagatgaaacgactagtttggatcattggaggaaacctccttcaaatttgcttcattcaatgagtgatgaagagttactatggagggcatcttttatgcctcgtataaaaaagtatccatttaatagggttcccaagattgcttttatgttcttgaccaatggaccattgccactttctcctctttgngagaggttttttgatgggcaccaaggcctttattcggtctatgttcattcattgccttcattcgaagctgagtttcctccgtc

SEQ ID NO: 18332 - DNA, 413 bp, Gossypium hirsutum
  Clone ID: LIB3146-002-P1-K2-G10
ataaagatgtgagagacagctccaattggcttttcaagctttactatgggaaccggatgttggtgggttattgttgtgtggcttgtgaggttctttacatagccttatttcttatctcgagtaaacatactgaaaatttgatggatgttgtagtgacgaccctgaaacagggttcacctctttctcttcttgttgctataagcttattgggatgctcaatcaagcaggtcatcaatattatacagatgaagacagccgcagatgcatgtgtgctttacgacactgaaaaaaagcagaagcgataactgattcgagtttcgaagagcagagttttgtttctggcatcgactgcttaaatattaaggtatagatgttgacactgatgaatcacattcccaataaatattttgttc

SEQ ID NO: 18333 - DNA, 451 bp, Gossypium hirsutum
  Clone ID: LIB3146-002-P1-K2-G11
cggagaacaaaaaaaaaaaaaaaatcattatgtgcacctaacactaacaggattcaccaaaagagcggagaatggcggccaatttctggacttcttctcactttaaacagcttttggacccggaagaggtggatgtggttcatcaacaagataaagataaaggcatcacgcttgaagaatttaagctgattaagatgcatatggcgaactatataatgaaactggctcaaaatgttaaagtgaggcaaagggttgtagcaactgcagttacgtatatgagacgtgtctataccagaaggagcatgagtgaatacgatcctcgtcttgttgctcctacttgcttatatttggcatcaaaggcagaagaaagcacggtgcaggctcgacttcttgattttacattaaaaaattatcttctgatgaaaagtatagatatgaaatcaaagacata

SEQ ID NO: 18334 - DNA, 456 bp, Gossypium hirsutum
  unsure (1)..(456): unsure at all n locations; Clone ID: LIB3146-002-P1-K2-G12
gttttggcaattggagccacaaaacccagggtccttcctgtaccaggacgagatttatctggtggtcattttgcaatggaattcctacatgcaaatactaaaagcttgcttgatagtgatctccaagatggtaactacatatcagctaagggcaagaaagtagtagtcatcggtggaggtgacactggtacagattgcattgggacatctatccggcatggatgtagcagcattgtaaatcttgagttgcttcctcagccaccgcagacaagagctcctggcaatccttggccacagtggcctcgcatattccgtgtagactatgggcaccaagaagctgctaccaaatttggaaaagacccaagatcctatgaggttttgactaagaggtttataggagatgataatggaactgtgaaaagactngaagtggttcgtgtgcgttgggagaaggat

SEQ ID NO: 18335 - DNA, 442 bp, Gossypium hirsutum
  Clone ID: LIB3146-002-P1-K2-G2
cccacgcgtccgcccacgcgtccgattttagtgtaggaagcagtagcttcaagagcttatctggagttggttcattcagcaagatcagtggccgaggctccggaaggattgctgcagaaaatgaatgtattgataagccttgaaaaaacatgggttgtcagtcaaggacattctctttcacacaatgggagaaaaatcgagcaatcatggtcagtgctagacccattagttatatatgttagatggaagggaggtccatatgtagattttgggggaaaataagcgaaggaaataagtttcattgacttggtaagtttgaaaatagcttcattgggtcctatatttgttgtaatcttttggttgctttaaattgaagtggcgttggccttattgagggtgtattaatttaaatgcctgaattaatagtgaaaaaatatatacc

SEQ ID NO: 18336 - DNA, 485 bp, Gossypium hirsutum
  Clone ID: LIB3146-002-P1-K2-G4
gtcgagtaaaagcagtaaaggtaaataaggaggttgatgactagatgaggaccactgctgcaggtgttgccggtcgtgctgctgttggaggggatgacatgctgtcaaaatggcagcttatggctgagcaagctcgccagaaacgtgagggaggaacggatgcggcatctggttcacaagcacgtaaagatgcgaaccgcagacctttatctgcatctgggaaaagtacaaaggacaatcaagaatctgaaaagaggggccctctcaatcctcatggatctgggacaagcaagaaatttggccggaaccaaggtacgacactcacggtccatgctagagtggctcgtactatttccattaaggatgtgattgcagttctggaaagagagccccaaatgtcaaagtctacacttatttatggcttgtacgaaaaaacctgctccgaatctaaagcggagtgattatagtgcaccttttatacattt

SEQ ID NO: 18337 - DNA, 472 bp, Gossypium hirsutum
  Clone ID: LIB3146-002-P1-K2-G5
cccacgcgtccgcccacgcgtccgtccgaggttttcctccaccggcttggaataccggtgaagaaggttgtatcagttgaaatatcggaggtgaatagaaacatagtaaggggttggtgggagcaaacgaatcagcgggggactttgatcgatatagcagatgtgcaagaactgaatggtgatcgattggagcaattgatgagtagatttggtggatttgaccttgttgtgggtggcagcccatgtaacaaccttgcgggtagcaacagacatcatcgagatggactcgagggtaaagaatcttctctcttcttcgattattgtcgtatattagacttggttagatgcatgcaaaggaaccaatgatttgatgtaaagggggcttatttggggattcttgcttcaaactggagttatcttgcatcttcattattgcctgagcataacattgaaataatgactgacattcttt

SEQ ID NO: 18338 - DNA, 471 bp, Gossypium hirsutum
  Clone ID: LIB3146-002-P1-K2-G7
tgaagctgcaatccataataatgcccctctctgagtttgatcatgcagagaaaggggatgcttgatatgcaatggagcttgccttgtctctcgagaaactaacaaacgaaaagctcttgaacttgcacaacgtggctgagcgaaaccatgattcgcagttgaccgatttcatcgaaggcgagttcttagctgagcaggtcgaatccatcaagaaaatatcggaatacgtggctcagctgagaagagttggcaaaggacatggggtgtggcactttgatcaaatgcttctccacgagggagctgttgcatgaaaacttgaccagagaaaccgccgcttgcttctgataccagcgatccttcttttaagttcccgtgttagtagttgttgagagattaagttttgcaagttggatggctagtttagaaaactttgtgttgatgatataagaagattgagagactcaaaaggga

SEQ ID NO: 18339 - DNA, 479 bp, Gossypium hirsutum
  Clone ID: LIB3146-002-P1-K2-G8
atttggaaaaaaaagagagagagagagagagttaaggtgttaaagctttagggttgtgcaggcggaaattggattaaaggaaacaatggaacacgggtctttcactgataatagtgctgccactttttctttaactgatgaggatcataccatagctaacgctgttagattcactttgaatcaagacccaagggttacattctgtggctacagtattcctcatccttctgaggctcgagttaatattagagttcaaaccactggtgatccagcaagagaggtattgaaagatgcatgtcaaaatctgatgttgatgtgtaggcatgtgaggagcacttttgacaaggctattgaagattttaaagcaagcaatgctgtgaaggccatgaaaattgattcacaagacagtagtggtgatgattcagaagagagtgaatgaaaatgatttcctgctatctatctttcacatcttaagacta

SEQ ID NO: 18340 - DNA, 446 bp, Gossypium hirsutum
  Clone ID: LIB3146-002-P1-K2-G9
gatttctttggtcaatctgtaaaaaatgtggtattcaagccatttgattttgatgcacttgcagaagaactatgggacgacattaaccagagtttctgcaagtctacaggtgcagggtgtttgctagagatagagtcgaaagctatggaacaactagtagcagttgcatatgtatctgatgagaaaagggtggtgagggattgggtggaacaagttcttagcaagggattcgcagaagttaagaaaaagtacaagttcaatgctcacaccgtcgtgaaacttgttccctacgatgctcttacttctgaggagcaaacactaggactaggagtttgtgttccccccaaagttgttctcaattaataactttctttttcaaaagcctaatctggtagtttaaggaaagtgttgtatgaggatttagcatcctgtgaagtatgttcagc

SEQ ID NO: 18341 - DNA, 409 bp, Gossypium hirsutum
  Clone ID: LIB3146-002-P1-K2-H11
ctgattagcgtggataatggaagtgggatgttttgtgatggtgtaggtcctaaagcccctttagttaattctaacaaggacctgcatgcataaaatcttcaagatgttatattcattcgtcggagatgaaaaattagtaatgaaaagtgttccagcaatggaaaatggtggtggtaaaggtgacttatatgttgcacaagcggcacatcaacagtagtcatgttatgttggatgtttcattaactgttgtaggttcaaagagtggagggaaatgcgttattatattattagcaattttgattggtattatttgtgtatcagtggccattatggaatggaattgctcattccagaattggatttgtgaaacgtattatgttcgaactccatatacccattatattttatt

SEQ ID NO: 18342 - DNA, 138 bp, Gossypium hirsutum
  Clone ID: LIB3146-002-P1-K2-H12
cccactcgtccgttttcaaattcaaaaccctttattcatacaaaggaaaaacctgatcttgatagcaatttctaacaatctcaacgccccccataatcttgtagtctttgcaataccacggctaccactcaatatacc

SEQ ID NO: 18343 - DNA, 460 bp, Gossypium hirsutum
  Clone ID: LIB3146-002-P1-K2-H2
gtgagagtgtctcatagtgactgaaagacaaattaatggcatactaaagagtttgcacatggctgagcttgagctcctgacctgtagcttataggtcattaatgggggagcatggtacaacttgggctagctttgttgttgagaggttacggaccctctacagtactgattctacctatgaatgtccttgaacttctctgtaattttgcttacactgctgatcgcataagcagctgctgattgcttcaccattttacattgtccgaaacaagatcccatttgatacaatactttttagacctgatattacatttggaaaattttattttaaaaaaaaatgtttctttccaacaaatatgcagctacgaagcaacttcttcgaagagaaatcgatgtcttgccaaggagcttatcactggcggaatggcatcaatcttcctgggcttcgggtcaattgttt

SEQ ID NO: 18344 - DNA, 491 bp, Gossypium hirsutum
  Clone ID: LIB3146-002-P1-K2-H6
acgcgtccgagaaaattcaatattaggggcaatgatagcttattggatgactgcgtctaccatgtgatctgtgcttgctgtacactatctcaggagtctagaacattggagatgaacaacgtccaagatggtacatggcatggtcgtggtgatatatgcataggaagctatgctgaaggcaccaagccgctctttgggctacaccctcctcctaccatgtcaattaagacccctgaaccctgcagcatgcaaaatggtctaaatggcgatgataatggtcaaacatgagaagcttactcaaaagatgtaggccaatattaggtgtgaaagagaaattcaaacatccgagtcaatttattctttgatggagcgatgttgcagaggtggatttagagaggaaagcttgtgcagcttggatcatcgaatcctgcaggaaggaagggagatccagaagcataacagtgcttccatgtgcatagaaggaaactact

SEQ ID NO: 18345 - DNA, 292 bp, Gossypium hirsutum
  Clone ID: LIB3146-002-P1-K2-H7
cgcacgcgtgctacacactcatgttgctgctgttggctagatctacttccgtaccagctacatcagcttagatcatggagcctacgctaccctatctctcactgagaggcagacttaatatgaacctacttagctagtcttgccaactcggtccgaacacgtatacctcgaatactatgatcgataccagcgccattcaggactttcctggctatgacaaaacgagccacgtgaagcccgtacaatgccactggatacgaattcatacactgctgaaaacacatatatatga

SEQ ID NO: 18346 - DNA, 317 bp, Gossypium hirsutum
  Clone ID: LIB3146-002-P1-K2-H8
gcacgcgtccgcccacgcgtccttgcagcctttaaaggaaatgctctggacatggttgagtctgaacttcttgaccttgttcaggcatcaaaaaacagtcaattgttttctcaattcactaaggacttgtcagtacctgcagagacacgggtcaaagccattaatgagatatgtgggcaagctaaattttcagatcttacaaagaactttttagttatactagctgagaatggaaggctaagacatatagaaagcattgcaaagagatttgtggagttgaccatggctcataaaggagaagtgaaagctattgtcac

SEQ ID NO: 18347 - DNA, 237 bp, Gossypium hirsutum
  Clone ID: LIB3146-003-P1-K1-A1
aaaaaaaaaggggatagagagagacaaaaagatatgatggatgggaggagggagggaggtgttagagtgtggtgtgtttggaggcaaccctgttgatgctcatccatgatactcttcatctttgtagctcttgaaagtcacggttatagctggctatttcttcgccattaagatctttaagtataatttgctcacgtcatgtcaaatgtgctgaatttctgattttgatagttatct

SEQ ID NO: 18348 - DNA, 420 bp, Gossypium hirsutum
  Clone ID: LIB3146-003-P1-K1-A10
gctcacaattagagcttagcatcaatgagcacgatgtcttgggaaaggtttctcccgatgagggcggggatcaacctgccgctctaatcacactttcgtcttcaaggtaagttgctaggcctgacatactaatatattctgtacctgcaggcaatctggactaggaagaatgtgttacagtctatggattttctactgctgatacaaatttagttgtgcgagagtttgaaaagtgtggagcgatattgaatcatgttcctggtccaagggattctaactggatgcacattatatatctgaacctatctgatgcttatacagctcttagcaagaatgtaatgctaattaatggagcactaataatcggtgtgaacccagtacatccaatgcatcgcgtggctctaaatgaaagaatgaata

SEQ ID NO: 18349 - DNA, 112 bp, Gossypium hirsutum
  Clone ID: LIB3146-003-P1-K1-A11
tgcacttactacgccattaaaaaccactggggcgaggacatccatgcgtatatgcttgacacacaccttatggtttaaccacacttataataaatcgatcattccatccatc

SEQ ID NO: 18350 - DNA, 147 bp, Gossypium hirsutum
  Clone ID: LIB3146-003-P1-K1-A12
atgggagatgctaatgcaagcattccgacacctgatccggtgctgtcaaggccaatgtttggaggcattcggcagggctgcaagtgctaactccattgcattcgtcagcagggctgctttaaatcgcggagtcaaagagtcatatgg

SEQ ID NO: 18351 - DNA, 456 bp, Gossypium hirsutum
  Clone ID: LIB3146-003-P1-K1-A2
aacacccctcttttcccccatttatacgaaccttgaagagaccaaaccctagccaccatgtagccaccgcaaacgatgagcgacaagggttggtcttctcgttctttaccccgtttagatccatattcaaggattcgatgctttcaactatgaagaatcaaaaagaaagtctcccccttttgttggatttgattttaacagagaagaactccgatgataccaacggttcaaggctcaggtaagtgaccttctttcgtccttttcctcttattttttttgtaaataatccctataataccgaaacaagaaaaaacttgctaaaaagagttgcgaaatattaaatcggaaaaagaatcacctttttggctatgaatctttttgattaatatgcttgaaaaaaaaaagagagagagagcttttacatagtcgattctggcttttatagcccttttaaca

SEQ ID NO: 18352 - DNA, 432 bp, Gossypium hirsutum
  unsure (1)..(432): unsure at all n locations; Clone ID: LIB3146-003-P1-K1-A3
gtgagtggctgtttgggatttcaccctgctggttctctacaccgcaaatccatgctattcacgtctttgctcgcctttgcgattgctcttctcagcctcttctcacaatccctgaaggttaatagctttccagtattgggtttaaaaagctttataaatgcttgatgaatattttcctgcagttcagatacaagctagcacagatgagcaaatttctcaacttagagcggaggcagcagcgagggaggcagaggcagcagcgagggaggcggagtagaacagaaaatacaatgaactccagctacaaattcagtctatgatgactatgttccagcaactttaaaatccgccatcttaaacattntgtttattgtaacttttaacattatcttaagaatattttgaatattcatttacaatttatataatata

SEQ ID NO: 18353 - DNA, 421 bp, Gossypium hirsutum
  Clone ID: LIB3146-003-P1-K1-A4
acgacatacgaccacgcatacgtacacacgtacgtttacgcttacggactaattttttgaataatggtacggcaacaatggctggacacacagtttacaccctctcagaagtgtctcgatacaaatccaagaacgactgttggcttgtcatcgatggccgagttctgaacgtaacaaagttcctggaagaacatccaggaggagaagaggtgttgttggaatcagcagggaaggatgcgacgaatgaattcaacgatatctgacatagcaagtcggctcagaatttgctcctcaagtatcagattggtgttctccagggtcacactttatagaataatgaacaggttggttcaacctatgagtccaataagaaagagatgagtgcattcgttattaaggatgacctgacgcctaaatatgc

SEQ ID NO: 18354 - DNA, 439 bp, Gossypium hirsutum
  Clone ID: LIB3146-003-P1-K1-A5
gggtgtcttaataaacgccttcgatttactttcggtttccatttacttctttattggtacgggtttgaatttttagtaagcgaaaatgagagagtgcatttcagttcacatcggtcaggctggtatccaagtcggaaatgcctgctgggagctttactgccttgaacatggaatccagcctgatggccagatgccaagtgacaagactgtcggaggaggtgatgatgcttttaacacctttttcagtgaaactggtgctggaaagcacgttcctcgtgctgtctttgtggatcttgagcctactgttattgatgaagtgaggactggtacttaccgtcagcttttccaccctgagcaactcatcatcggcaaggaagacgcttgcaacaactttgtccgtggccactacactattggcaaagagatcgttgacttgtgc

SEQ ID NO: 18355 - DNA, 268 bp, Gossypium hirsutum
  Clone ID: LIB3146-003-P1-K1-A7
cctgttgaccctatgttgcttgggttcttcgttttcgttgtcattggatcatctcggttcgagattatgaggacagcgaccagtggaggcatggcataaggctgcatatagcccatgttaaaaaaaaaaattgcagaagagacttgttatgttctttttctatagtgttgtagcgaactgatgatataatatgtttactagatatgcgttgtaactcatgttgtgaagatttcaaaaatttaattagatcagatgaaatgggccacat

SEQ ID NO: 18356 - DNA, 426 bp, Gossypium hirsutum
  Clone ID: LIB3146-003-P1-K1-A8
cccacgcgtccgtccacgcgtccgttcacgcgtccggtctttttttttgttttttggttacggcaacaatggctggacacacagtttacaccctctcagaagtgtctcgatacaaatccaagaacgactgttggcttgtcatcgatggccgagttctgaacgtaacaaagttcctggaagaacatccaggaggagaagaggtgttgttggaatcagcagggaaggatgcgacgaaagaattcaacgatatcggacatagcaagtcggctcagaatttgctcctcaagtatcagattggtgttctccagggtcacactttaaagaataatgaacaggttggttcaaccgaggagcccaaaaagaaagagatgagtgcattcgttatcaaggatgacctgacgcctaaatatgctgcagtcgtcgagt

SEQ ID NO: 18357 - DNA, 314 bp, Gossypium hirsutum
  unsure (1)..(314): unsure at all n locations; Clone ID: LIB3146-003-P1-K1-A9
ttcacggtcgaccacgcattcacgggctaccatagctcgagactcaacgggcgcacctactacgccattaaaaaccactggaggtcngcgttaaagcgaaaatgcttgtcgatgaccgaatgttttaacgacgattcctctcagccgcttaaacgatccgtcagtgtctgaaccggcaattcaagtagtccgtccgcatccgatttgagtgactcgagtttaccatcttacataccgtgattcaaaactggttctgtagtgccttcgagtcaacatgttgaaacaactttatcggcaaccgatccatctacttt

SEQ ID NO: 18358 - DNA, 68 bp, Gossypium hirsutum
  Clone ID: LIB3146-003-P1-K1-B1
cacaacccctgaatgttaatacctcttcagtattgagcttacaaaccctgatacattctccgacaaat

SEQ ID NO: 18359 - DNA, 344 bp, Gossypium hirsutum
  Clone ID: LIB3146-003-P1-K1-B10
actagtacagcggccggcatcctgctgcaattcggccttagcgtcctcccgccctttgttcgcttcgacgcaacagacagcacgagaaggacactcacacatatacattacaggagggacgtgacatctctcttactagccttggtcctactacttgcttttcaccgatgcgtcacaggcatatcatgcaacaccgcagttgcagatctttaccctacgctatcatacatgacttaaagctgacactttccatcgaactggtgacactgcatcaaaacgcttaaccgttattgccaaaccccttttgaccgtcaaggcctttgtccgttcattaaaaatgcttt

SEQ ID NO: 18360 - DNA, 429 bp, Gossypium hirsutum
  Clone ID: LIB3146-003-P1-K1-B11
gcaccagatccagatgacagttctctagatgatgcatacataatgaaaccgaacttgattgcccctggaaatttgatatggactgcctggagttcccttgggacagattcagttgaattccaaggtgaaagctttgcaatgatgtctggaacaagcatggcagctactcatattgctgggcttgctgcattgataaagcaaaagtttactcatttcagtcctgcagccatcgcctctgcactatcgacaacagcttctctttatgacaagagtggtggccccataatggctcagcgtgcttatgctaatcctgatgtaaaccagtcttcagcaacaccatttgacatgggcagtggttttgtgaatgctaccgcagctctagatcccggtctgatcttggattcaacttatgaagattatatgtctctt

SEQ ID NO: 18361 - DNA, 435 bp, Gossypium hirsutum
  Clone ID: LIB3146-003-P1-K1-B12
gtgacccccttaattccgctgcccttttggatgttttttcatctgtgctgtcggcattgcgggatgactccagtgaagtaaggagaagggcattatctgctataaaaggagcttccaaagcaaatccatctgttatcatgactcatctgtcattaattggccctgcccttgctgaatgtttaaaggacagcagcaccccagttagacttgccgcagaaagatgtgccctccacagcttccagttgacaaaaggtactgaaaatgttcaagctgcacaaaaatacatcacaggcttggatgctaggcgcatagcaaagtttcccgagcacagcgatgatcgtgatgaaagtgaagatgaacaagcaagcagctaaaaatattttccttgaacatatgcttcattaaggcttgagactcgaatggaagtgactgaaa

SEQ ID NO: 18362 - DNA, 333 bp, Gossypium hirsutum
  Clone ID: LIB3146-003-P1-K1-B2
ggcgttggacactattcttctatgtctgagatttcccaaagtggtaatataattccaggaggtgcaccagattgtaattgtaactttaggtggtagttgcagattccataattttctaaaaaagtccttagattcagtctgtaataaataatcactaggatccagattagcaatttgtaatagtttgtaagcactgtgaactgagtatgtaccagtcggtttacccctttagacttgaaaatcttcgtggttagattctgataatgagatttgtaagattgatcaagtcacccttggctgaaaaaaaaataaaatgatataattttaaaaaga

SEQ ID NO: 18363 - DNA, 440 bp, Gossypium hirsutum
  Clone ID: LIB3146-003-P1-K1-B3
tcttcttgcaagatgtgatcggaaaaacggttaatgggacaacctatgctggattgagagcggggactactggagctccacaaaaccattggtttggaccggctggagatcctagaggagcagggatcggaacaccagaagccataaagcttgtttggtcatgtcacagggaaatcatatatgattttggtccgctgccaaggggttgggaaattccaccctcaacttgaggagtgtattcaaaatcatcccttggggtttcattgatgcttttgacagggcagattgcagctttataaataaaaatgtgagggcaatttttgtggctttagtcctagtcttagggtaatgatacgaatctaagatatcagtatgtggcggagctttttcgtataaataaaagatcgtgcatgcacatagctgaatatgtgtaggacacg

SEQ ID NO: 18364 - DNA, 408 bp, Gossypium hirsutum
  Clone ID: LIB3146-003-P1-K1-B4
ctcgagggacgcgcttggttgccagcagatgtagctctggagctcagtggagcactctacgatcaggagatctgtcatggagctcgcttgcaaacttaatggaacgcgagccatggttcagaaagctcgaggtgaacgatatcattacagatgtggtagattacatgcttgatgaggatgactaagggcatgaaagtcaggataatgctgattcaggtactggatctgatccagatcgtggtgcagatgatgctacgtaaatgttactagtggagatgatatgaccggcatgtctgatgtggatgtagggaggtgtgatagagttgtgaatgctgttacaaaagtgggggcattttagaagtgcaataggtatgattgtgacatatgatgacttgacgctattgtatg

SEQ ID NO: 18365 - DNA, 409 bp, Gossypium hirsutum
  Clone ID: LIB3146-003-P1-K1-B5
ggttcagtcaccccattttcaagctttccattcaccccatctcatcacacctccggggttcgtctccttagaaactatcggagagaagtcgacagtctccatacttctcctaggagatccaactttgatatcgagctttcagacacggattctttgtacccatccccccctaattacaccgaaggttcctccacttctcaccaccatgttaatatggaggatcaagttcaagtagactacatcgataatgacataaatgaactaaactttaatgaacgacgtgaactcacacaacatgaaattaacatcgagttgaaagattcttcattcgatagaaggacaactagtatatgaatatatatatatatatgagttttaaatttacagtgattagatgggttatgacaac

SEQ ID NO: 18366 - DNA, 432 bp, Gossypium hirsutum
  Clone ID: LIB3146-003-P1-K1-B7
cggacgcgtggggtcgatgggaaggcagggcctggtgctttgtttgtgaaggttagcatggatggtgctccgtatttgaggaaagtagacttgaaaaactacactaaatatcaggagctgtcttctgcacttgagaagatgttcagctgttttaccataggtcagtatggatctcatggaacctcgggcagggagctgctgagcgaaagcaagctcaaggatctacttcatggatcagaatatgttcttacttacgaggataaagatggtgactggatgcttgtgggtgatgttccatgggagatgttcactgacacctgcaaaaggttgaggatcatgaaaagctctgatgccattggactcgctccgagggccatggaaaaatgcaagaaccggaactagctaccatcatacatgatcttttcccacaca

SEQ ID NO: 18367 - DNA, 449 bp, Gossypium hirsutum
  Clone ID: LIB3146-003-P1-K1-B8
attctttttctcttagatgagtacaaccatggcgaatcacaaacggttccctaattgcgtatctcttattctcctctctctcgtcgccaccgcttctgctgaagttttcttcgaagaacgcttcgaagatggatgggaaagtcgttgggtaaaatctgactggaagaaagatgagaacatggctggggaatggaattacacttctggaaaatggaatggagatcttaatgacaaaggtattcaaactagtgaagactacaggttttatgctatttcagctgagttcccagaagttaacaacaagggaaagactctagtcttccaattttctgtgaagcacgagcagaagcttgactgtggtggtggctacatgaagttgctcagtggtgatgttgaccagaagaaatttggcggtgacaccccgtacagcatcatgtttggccctgata

SEQ ID NO: 18368 - DNA, 113 bp, Gossypium hirsutum
  Clone ID: LIB3146-003-P1-K1-B9
aacctatcattccttcatttgcttagtccgaatgctttacccgagggttctacaacaacttggcgggcctattctggatttcctccaatcatctaatggctgctttggatcca

SEQ ID NO: 18369 - DNA, 456 bp, Gossypium hirsutum
  Clone ID: LIB3146-003-P1-K1-C1
gaagccggctgctaagtccaaacctgcttctaaggccaaggaagggaaacgtgctaaaacagcttctaaatccccttctaagacaaaggctaaagcggcggctaaaccaaaggctgctcctaaggctaaatccaccgcaacgaagacgaaggctgtggctgctgtgaagccgaaggcgagtgcatctgctaagccaaaaaccgtagctaaatcgaaggcgaagccaaaggaaaagccggctaaggcttcgaggacttcaacaaggacttctcctgggaagaaggcggctgtccctaaagctactccgaagaaggctgccgcgcctaaaaaggctccttcgaagagtgctaagccgaaaagtgtcaaatcaccggcgaagaaagctacgacgaggaagggaaagaaatgagaaaggaggctagtcgaaataggggtagtattgtaaattgagtgatg

SEQ ID NO: 18370 - DNA, 451 bp, Gossypium hirsutum
  Clone ID: LIB3146-003-P1-K1-C2
tggaaattcagtcattgctcgagaaactgcttgaacaggtggaggaacgacttgaattctgtgacaaaggtgttgcacctcgtaaaaacatcgatgtaatgaaatctgcaattgaaagtactcagaacaaagatactgaaatggaagaagtggaacctgaagaagcttccgcaaagaaaagcaagaaaaagaagtcaaaaaccgaagatgctccagctgctgctacaaatggagatgccttggaggacggtaaatcggagaagaaaaagaagaaagagaaacgaaagaaggagcaagaggcgcatgaagaagatgggaaaacaaatggcgtaaacgagcaggatgggacagccaagaaaaagaaaaagaagagtaaagatgaagcagctacaaatgaaaatacgaagaagaagaagaagaataagaagagccatgagtgaaattaatcact

SEQ ID NO: 18371 - DNA, 452 bp, Gossypium hirsutum
  Clone ID: LIB3146-003-P1-K1-C3
ctcatgtctagtcatggaatattgcccagggggggatctacacactttgagacaacggcaacctggaaagcatttcttagagtatgctgcaaggttttacgctgcagaggttctattagcactcgagtatctccacatgcttggtgttgtctatagggacttgaaaccagaaaatgttctagttcgtgatgatggccatataatgctctcagactttgatctttccttaagatgtgcagtgtttcccacactaataaaatcctcagcattcgattctgatccttcaaaacgtggagctgctggtacattctgtgttcaacctgcctgcattgagcctacttcagtttgcattcaacctgcgtgctttatcccacggatattccctcaaaagaacaagaagaaaacccgaaaacctcgaatagaatttggggcgccttttcatacccctccag

SEQ ID NO: 18372 - DNA, 399 bp, Gossypium hirsutum
  Clone ID: LIB3146-003-P1-K1-C4
cccacgcgtccgcacaagggtagctttgagtacaatccacgttcaggatgctgctgggcatgggtttgcaactcgtcttggtaatgtgttcacaattggaaaaggaacgaagccatgggtatcccttcccaagggcaagggtattaagttgtccatcattgaggaagctaggaagaggcttgcagcccaaaatgctgcttgaacattaacacaagatatctagatatgtcttgctgctgtagtttattctggagttactagatttcttgctttcggttatgaagaaaattttgaatatgttaatgaacttacaaggctatattttaaatgaatgcttggacttggaagctttcgtgaatatgttaatgctttgattcattatacaatatctctggggaa

SEQ ID NO: 18373 - DNA, 448 bp, Gossypium hirsutum
  Clone ID: LIB3146-003-P1-K1-C5
cccacgcgtccgtaaaactgccatacaggcatagcccgattctgtatattttgttggtagcggaggtgcagaagttgatgttaaacgactaccaaaacgaccggcaccacctcgcttcggaaggaaacttactgaggctcaaaaggcaagagctactcatatttgccttgactgcggatacatatacactgcacagaaaccttttgatgagcagcctgatacgtatggatgccctcaatgtcaagcaccaaagaagagattcgcaccatatgatataaatactggcaaagctatcggcggagggctacctccaattggggtcattattgggctgctggctggtgttggagctgttggagcattgcttgtttatggccttcaatgaaactgtttataatgtgtattctttcatagaatcagtggtactagtacgacttcttaactcata

SEQ ID NO: 18374 - DNA, 449 bp, Gossypium hirsutum
  Clone ID: LIB3146-003-P1-K1-C6
agcagatctcagcatcagttgtctccaattcctggaggtagcagcagtcgcccatgaccagttgatgtggataatcatcaaggaggcttcaatgctacttattctactgacatcattagatcaaacaatgctccaggtcaaggtgttcgcatgcaatttaaaccaacaacaggaaagaacttgatttctgagactactattgataaaaatatttttgaccctcacacaccctcatcttcatttgcacctgctggcacctcaaaaagaaatggtcagaaatcaacagcgccccctgacgctgctaattctggccatggacagggaaacaaaatcagatcttctagtagtttgttttcatcattgcagcgcatttcttctgccaaatgatgaaaatgtgctgtggtgagggaagattagggaaatgataattcagggtgcaattgaagacc

SEQ ID NO: 18375 - DNA, 341 bp, Gossypium hirsutum
  Clone ID: LIB3146-003-P1-K1-C8
cccacgcgtccgcccacgcgtccgttaaactttcattttttggcccttgtttttgtggtttgatatgttttagctagttgcaattgttgaagggaatgggagatcctaatattttgggtttgaagtagtaaaaggacatcggttttcattcattttcaaaaaaaaaacaaaaataaataaatataaaaaaaataaaaaaaaaaaaaaaataatatacaaaatatatatgaatacatacataatactacgactgtatacaaatataacaagaagttttttacatataccatattacaatcttatagtacccattttttaatgattctcattttaataccctt

SEQ ID NO: 18376 - DNA, 261 bp, Gossypium hirsutum
  Clone ID: LIB3146-003-P1-K1-C9
atccactagtcgcgccacggcattcggtcgaaactggacctataatgggatgatccttgctcttccgcttcgttgcaagcttactcaggttgagcatcgcttacatctccgcattcaacttgatcaggctgtattaccccaccaaggtcatgcatctgaaactctaatcataaattacggactatggggccttaaacatggtcaacactactaatggcttgatatattgccatatacgacaaaagctctaaaaataaaatg

SEQ ID NO: 18377 - DNA, 440 bp, Gossypium hirsutum
  Clone ID: LIB3146-003-P1-K1-D1
gcggagcaaacgaagctggtttctggtttctttgtttccgaattttttccttcacttcaatgcctggatgttgcttcgggtgtgaagtatagagttgaaaagactcatgcagaagctgataggattcttcagagcattgttaatgatcacaaagaaagtagagcaagaggcagaagtaaagatgacagggaagatctggttgatcttcttttaaggcttcaggaagatgacgaattccctttaactgataatagcgtcaaagccatcatattagatattttcactgccggaagtgagacatctgcatcaactgtagaatgggcattgtcggaaatgattaaaaatccaagagttatgacaaaagcacaagcagaggtaaggcaggtattccaaggaaaaggaaatgtggatgaaacaagcattcatcaacttcaatatct

SEQ ID NO: 18378 - DNA, 382 bp, Gossypium hirsutum
  Clone ID: LIB3146-003-P1-K1-D10
agcttctgctgcgaacggggacgaaatattttcattatagaatcgtctttgaggcttgcaacagacgcagtctgtcccgaaccaccaaactcgaagccgatcgaaaatttctgttgtcaaggctgcatcaaactgtatcgttgtacattctgtcgcccctgaatggtcataagatctttcgataagaggggacattgtctaaaaacgtgatggctatcttcttcaccggagctacaccgaggacatttgacgtccgtgggtactttcttggaccttagaattaattagggaaggatttaatttccggaaaatcggcattttggtaatggaatttttggtgggcaccgttaattccattggtttctattgaagcctttaattt

SEQ ID NO: 18379 - DNA, 349 bp, Gossypium hirsutum
  Clone ID: LIB3146-003-P1-K1-D12
tctcaacatgctgccttgaacgcaaagcagatgtcattgctcacgtggtgtatgccgttggcgtgcgggttgccctcctcaaaacgctgacaatatctaaaattcatggaaagcttagctaaatagtgattttctagacttattcaaattaattgaaattttggttgaaatatatactcttttttcttttcgattacttaacccggtagttctttacatgagaagaattaaattatctagttagcctaaatgaacctttccatagattatagcttcagcttatgaagttagaaatgtctggtaatgaaatatctatctttttgccaaagaaatgctactttagtgaaaa

SEQ ID NO: 18380 - DNA, 452 bp, Gossypium hirsutum
  Clone ID: LIB3146-003-P1-K1-D2
cggacgcgtgggtccggacgcgtggggtttatttataccgattttgtgtcggaagatgacgggatccatccaatcctctattaacatcttcctgtttgaaatccaaaggttttcatactgtaacattttggaggttacatgttaactgttctcaatttcgttattcattttactgaaatgtctgtttatgcaaaacttatttgttcattaacgtcatctacaaagcaggttggtgtttcactaccaattttttgtgtcggaaggtgacaaaagtaattagatattatatttcctctgctttattagcctgctgaaatgcatttcatcttcatgcagtaatattagtagagggaacaatggtgaaatttttcttatttttaactccccgttgtgatattgatttgattttggtttgatgtttaatggactgatacagcgtatatgtttttgat

SEQ ID NO: 18381 - DNA, 390 bp, Gossypium hirsutum
  Clone ID: LIB3146-003-P1-K1-D5
agaaaaaggaggtcatagttgaaattactggtggtccgacagagagctatgatgaggtctcggcctcattgccggagagtgactgccgctatgcagtttatgacttcgattttgtgacttccgagaattgtcagaagagcaagatcttttttattgcgtggtctccttctgtttcgaggatccgctccaagatgctttatgcaacatcaaaggacaggttccgaagggaattggagggcatccattacgaaatccaggcaaccgacccgactgaaatggatcttgacgtgattagggagcgtgcacattaagtgtccgttcccagaattcacatgcttaggaaaacttcctagaggtacctttagggttgttatatggttcaattaaatt

SEQ ID NO: 18382 - DNA, 449 bp, Gossypium hirsutum
  Clone ID: LIB3146-003-P1-K1-D6
cccacgcgtccggtctctttagcctttaccctttgtttcgttgatttgtttctaaggattgaatctccaaaccttcttcccatttcttcattacattgttcaagaaaaaagaagcaaaaaaacatggccaaagttctgttgttcattgcactatgtgtgcttccagctttggttagtgctacacgcattctgaataatcaattggtggtagaaggctatgtgtactgtgatacttgccgtgctggttttgaaacccctaagactagaagcctagctgatgccatggttaggttggtatgctccgacaggaagagcggccaagttgtcttcaaaaaggagggatacaccgacaaaaccggaaaataccagattcgtgtatccgaggatcacttggatcagatctgtgatgcagttcttgtgaaaagctcccagcttgttgtgccacaatg

SEQ ID NO: 18383 - DNA, 438 bp, Gossypium hirsutum
  Clone ID: LIB3146-003-P1-K1-D7
ggtgtttgcacgcattgaccacaagttcgatctcatgtactcaaagagagctttcgtgcatgggtatgttggtgagggcatggaagaaggagagttctctgaagctcgtgaggatctggctgctctcgaaaaagattatgaagaagtcggagccgaaggtgtagaggacgaagaggatgccgaagactattgatgttcgtatgctgaaatatttacttttgaatatcagctctgtgtgtaagggtattcctatcttttgctcttgtgtagcactgtcttcctgtgtgctgtatgattgttaaattgtgcccatcatttgcctaagggctttttatgctatcaatgaagtaatatttatagttgtgcttgtcatttcttgctataaatgtgtcttctatttatgaaaggtgttccataaacaacatttatgggtgctgt

SEQ ID NO: 18384 - DNA, 423 bp, Gossypium hirsutum
  Clone ID: LIB3146-003-P1-K1-D8
gcaccctttcttcctactccggcctagccattaccccacgtgagttagcccaagcgcgccgtggaagtcagcctgtcccgtgcccgtaaagtgtcgaactacttgtcgacgagtgtgacggggtacaacaagagggaacgagtcgcactgagtgactgcgtggagcaaatagatgagtcgatggaggagttgagcaagacattaggggagttgaagcacttgagaggggagacgttcgagtttcagatgagtaatgcgcggacatgggtgagtgcggcgctgacgaatgaggacacgtgtcttgatgggttcgaaggagttgacggcaaggttaaatctaatgtgaagaggaagatcacgaatgtggctaaagttaccagtaatgctctgtacatgatcaataggctcaatgaaagtcgtggt

SEQ ID NO: 18385 - DNA, 447 bp, Gossypium hirsutum
  Clone ID: LIB3146-003-P1-K1-E1
cggagaacaaaaaaaaaaaaaaaatcattattagcacctaacactaacaggattcaccaaaggagcagagaatggcggccaatttctggacttcttctcactttaaacagcttttggacccggaagaggtggatgtggttcatcaacaagataaagataaaggcatcacgcttgaagaatttaagctgattaagatgcatatggcgaactatataatgaaactggctcaaaatgttaaagtgaggcaaagggttgtagcaactgcagttacgtatatgagacgtgtctataccagaaggagcatgagtgaatacgatcctcgtcttgttgctcctacttgcttatatttggcatcaaaggcagaagaaagcacggtgcaagctcgacttcttgtattttacattaaaaaattatcttctgatgaaaagtatagatatgaaatcaaag

SEQ ID NO: 18386 - DNA, 438 bp, Gossypium hirsutum
  Clone ID: LIB3146-003-P1-K1-E2
atttcttctcttgtaacactgctaatatttttttttatcgtcgtctccgtcgttcgaagatgataaaaaaccggcgtcgtttcaaatggctacgagaacggatcttgatgggaggccaataaagccgttgacgatatgcatgatcggcgccggaggcttcatcggctcccacctttgcgagaaattgatgtcggagacgccgcacaaggtgctcgccttggacgtttacaatgacaagatcaagcatctgctcgagcctgactctctcccttgggctggccgtattcagatccaccgacttaacattaagcacgattctaggctcgaaggcctcatcaagatggcagatctcacgataaatcttgctggcatatgtactccggcagattataatacgcgtacactagacacgacttacagcaattttattgatgcact

SEQ ID NO: 18387 - DNA, 415 bp, Gossypium hirsutum
  Clone ID: LIB3146-003-P1-K1-E3
cccacgcgtccgcaacaacttgctcggtaaatttgagctctctggcatccctcctgctccgagaggtgtcccacagatcactgtctgctttgatatcgatgctaatggtatcttaaacgtatctgccgaagacaaaaccactggacaaaagaacaaaatcaccatcacaaacgacaagggccgactctccaaagaagaaattgaaaagatggttcaagaagcacagagatacaaatccgaagatgaagaacatataaagaaggtcgaggcaaagaatgcattggaaaactatgcatacaatatgaggaacacagtgaaggacgagaagattggtgctttacttccagcagctgataaaaagaagattgtagatgctattgtacaagccattcaatggctagacagcaaccaactt

SEQ ID NO: 18388 - DNA, 427 bp, Gossypium hirsutum
  Clone ID: LIB3146-003-P1-K1-E4
caacgctttccacatcatttctttgtcacagtgattcgatttgtcacccttgttcgaagagaagaagagagaagaagaggagcttaggttcgccacgacacggccggcaagcagcgtgatatcgagattggaagaggtagccaagtcggtgaagttcaacgtgaagaaaagtgagtcaaaggtgaggttacagggtcaagaatgtggaaggaaaggaaaattagctattgctgctgacatatttgcagtgacgccatcgtttttggttgtggaagttaaaaaagacaacggcgataccttcgaatacaaccagttttgcagtaaacagctccggccggcgcttcaggacatcgtctggacttcaccggccgagaagccgacggttgcttgacggggagtttcaagattattaattatctacatgaaa

SEQ ID NO: 18389 - DNA, 387 bp, Gossypium hirsutum
  Clone ID: LIB3146-003-P1-K1-E5
cccacgcgtccgcggattcttctttattgtttctgtggcataatagctggtatgggaggagggctgctaggactaggaggtggcttcatcttgggtcctttattcctcgaactggggatacctccacaggtagctagtgcaacatcaacgttttctatggtgttttcatcttcgatgtcagttgtacaatattatcttctcgatcgtttcccagtcccatatgctgcttattttgtcctagtagcaacaatggctgccattgctggccagcatgtggtcagaaggatcattgcattcattgtaagagcattgataataatcttcatactagctttgacattctttatcaacgcaatcactttatgtggagttggcattgcttgatat

SEQ ID NO: 18390 - DNA, 447 bp, Gossypium hirsutum
  Clone ID: LIB3146-003-P1-K1-E6
gctgattcagcctcttggtactgtgcccttgccttattgaccttaatactgatgggttgcgtcaagacaagttccgtatcatcagatgaagctgcgagagggaagcagcttctgaagccaccctgtgacgaaatctatgtggtaggagaaggggagacacttcacaccatcagcgacaagtgcgacgatccttttatcgtggagcgcaaccctcacatccatgatcctgacgacgttttccccggccttgttatcaagatcatcccttctactgctgggaaactctagaggtagccatacgtcttctgaaaatatttgtgttaattcgtcccttatcaaggccccggttggtaaatttgggggggatggtggatccttagttctctcttatccaaattccatgcacacacatatgacatatatatggtgtaaaacgatgcttattga

SEQ ID NO: 18391 - DNA, 385 bp, Gossypium hirsutum
  Clone ID: LIB3146-003-P1-K1-E8
ggttttcctgactaccacatggaaacctccaaccccatcgacacagtgaaatctggctcgggtttggggctctataatggtggtacgtgacaatcttaacacagtgaaggcaattgctttggagtacgtgggatactaccgttagatgtggacactttgaagcctaatctcattgaagggaaagttttgagttcgctatctgattcgcaaagagaaaaaagttgttgaccaaatatttgtatgctttgcttctccattcattttctgaactttttttcagtttaaaaacaataacagaatatttaaattaattatgttattatgcatggacgatatgctgattattgcccaatgcctcaatgaataacttttgcttgtgcaagca

SEQ ID NO: 18392 - DNA, 428 bp, Gossypium hirsutum
  Clone ID: LIB3146-003-P1-K1-F10
tcggatccactagtacggccgtcagtctgctggaattagcgcttaacgcactaccaactggcttgctccattggctaacttcatccacgggatgtgttacatcgaagatgatcttatcaccactgatcattcgattactgctacccaaatcaccgtaagacgtccataaatgaaggcttggagaggttgcagatactgcctcattcaatatcattctcagcatcactggagcttccaagaccattatccatgttgtgtcagcatcaaatggcaagctaaatggaatggctttccgagttcccactgtcgctgtctctgtaggatactaaacacttacacttgatatgacttataatgatgaacatattaatgctgtcatcccgatagaatctgtaaccaacttgtatgatattctaaattacgcctat

SEQ ID NO: 18393 - DNA, 434 bp, Gossypium hirsutum
  unsure (1)..(434): unsure at all n locations; Clone ID: LIB3146-003-P1-K1-F11
ctggagcaccttggattgagggaatatttctcagagatcgactccaatcctagctgtgtcgacgaggaagagaaactaaggatcttgccttatcatgatttcaccaagagttcccatggctgcaatctctgccccccaaatatgtgcaaagggagggtgattgaaaggattcaagcttctttagaagggaagaagaaaatcatataccttgcagatggcagcggagattactgcccaggcttaaagcttggagaggtagactacatgatgccaaggaagaatcatccagtttgggatttaatttgcaggaacccaatgttgatcaaggctgagatctatgaatggaccgatggtgaagagctcgagaaggttttgctgcaactaatcaacatgatttctcttgaagaagacgatgccnattcttcccaattcat

SEQ ID NO: 18394 - DNA, 402 bp, Gossypium hirsutum
  Clone ID: LIB3146-003-P1-K1-F2
ggtttggagagctgatccaagctttacacctcatgaacgtcaaaggggttgttttagtcctgtgtgggttgcattttcaatcctaattggtggtttattgttggatgtgttaatatccgttactcttggtgtctcggcactacctgttaacatcataattggtgttattgttgtcctaggacttggaacagcccttcgacttgccctcgaattctgccatgagtggagtattaggagagccatgcaaagggtagaagtaaatgcgactctccagtatcatcctgctttgtaggtaaatctgtatatagtaaaattcaagcgttatttgtgtatatgacattcagcatgctattcacgaaggaacccattgtttgttactgcttacatctgtacaccatgata

SEQ ID NO: 18395 - DNA, 377 bp, Gossypium hirsutum
  Clone ID: LIB3146-003-P1-K1-F4
cataaatattccatttctctaatgtaaactttaacctcatcttttacatgaatttcctccggtaaaggcatggatatttcaaaataaaaaaaaaaaaaaaaaaaaaaaaaaaaaaaaaaaaaagaacaaaaaaaaaaagaaaaaaaaataaaactaaaaaaagcatacaacaataaaacacatagaaagaaaaaaaattaattaagatgacaatcagctaacaataaaaactaactagatacacaaaattaaggagctagttactggggaagaatcattaccatttatttttggagctattcatgtttatcctaacagagctttaaatactaaaatgggatatgataccacatagtaacgactacaataatttcctt

SEQ ID NO: 18396 - DNA, 444 bp, Gossypium hirsutum
  Clone ID: LIB3146-003-P1-K1-F5
ggggtttctactgaaagtggtgatggaacatgggaacagaagcttccgaatgggacagaagtgaagaaaaatgagaagcctgaagagtcaactgttcaaaagaccagggaaaatgtcggcggttgttgccagggtgctaatgggtctagctgttgcatgactgctagctcggaagtaagtgaaacaaagaaaactgaagaaacaacaaaagctcatggaaaaaaggggctgtgcggtttgacaagttgggtaggatcatgggatcaacgtgatgttcttacagcagcagcggtggttggagctgtggcaaccgttgctgtggcttatagctactatagaaggtcaggctgaattaaggacatgtaatccaatttcgtactgtttgctcaagggttgtacacccctgttttttgcgtgcggaggcaatggtgacaattaaataat

SEQ ID NO: 18397 - DNA, 444 bp, Gossypium hirsutum
  Clone ID: LIB3146-003-P1-K1-F6
cattgctcctggtgttaatatcttggcaggatggactggtgccgctgcaccaactgatttagacattgatccaagaagagttgatttcaacataatttcaggcacttcaatgtcttgtcctcatgttagtggattggcagctctgcttaagaaagcataccccaattggtcacctgctgccataaaatctgctttgatgacaacagcttacaatttagataactcgggacacaccattaatgatcttgctactggggaagaagcatcaccatttatttttggagctggccatgtggatcccaacagagctctaaatccgggattggtatatgataccgatagtagcgactacatcgcgttcctttgctcaatcggctatgattcaaagaggattgaagtatttgtgagggaacctaatagttcagatgtatgtgctacaaaatt

SEQ ID NO: 18398 - DNA, 435 bp, Gossypium hirsutum
  Clone ID: LIB3146-003-P1-K1-F7
cccacgcgtccgggaatgttctgttgttgattgacaggttcttcgagatgccattggtaggagacatggactaaaagttcctcatggttgttattatctagttgatgctggatacacaaattgtgagggatttattgcaccttttagaggacaaaaatatcatttgaatgagtggcgtcaaggttaccagctaagtactccggaagaattattcaatatgaaacatgcttcagcatgtaatgttattgaaagatgctttgggttattaaaacctagatggggaatacttagaagtctatcattttatcctgtaagggtgcataatagaatcattattgcatgttgtttgctctataattttattcgaacctatatgagtattgatcttattgaagctgtgttgggagatggactacctagtaatgagatatgatg

SEQ ID NO: 18399 - DNA, 271 bp, Gossypium hirsutum
  Clone ID: LIB3146-003-P1-K1-F8
attatttctctcgtattctaacttttttctttatcaccataacagacatacaactgaacagagaaacatactctaaccactataacttctctataatacacattatattctctacagacattgttacttacttctaccacctagcatcatccaaaacttctatcataatttttaacccttcagtatctattattattctaactttttaattctttttatttaatcatttttacttctctagttattttatatatttcttattattttttat

SEQ ID NO: 18400 - DNA, 414 bp, Gossypium hirsutum
  Clone ID: LIB3146-003-P1-K1-G10
tgtgctggaattcgcccttagcgtggtcgcggcctatgtactttattatttttttttttttttttgagatttttttttttattttattatgaattaattttttaattttattatttattaattttaattttaatcttttaatataaaaaatatataataattatagaattagtatcacagattaagaaactaaaactaattgctttttctgaacaacatcacttcaaattaaacacaaactattataagtatatgaactactttatatgatacaccatttaactacacaattatctattgccaacttaacctttaaattaaattattcttattattactcaaacagcactttcaacattcattaaacttaacatatatctacttctttcaaaagttttaattgattttttaatt

SEQ ID NO: 18401 - DNA, 337 bp, Gossypium hirsutum
  unsure (1)..(337): unsure at all n locations; Clone ID: LIB3146-003-P1-K1-G11
gagaaaatgaagaccatactctcatcagagaccatggatatccccgatggggtcaatatcagagtgaaggctaaaatgatcgaggttgaaggtcccaggggtaagctcactcgtaacttcaagcacctcaacctcgatttccacctcaccaaggacgaggagaccggcaagcgtaagctcaggatcgaggcctggttcggtaccaggaagaccagcgctgccatccgtaccgtcctcagccacatcgagaatctcatcaccggtgtcaccaaaggttaccggtacatgatgaggttcgtctacgctcactttccgatcaacgcctncatcactagcg

SEQ ID NO: 18402 - DNA, 440 bp, Gossypium hirsutum
  Clone ID: LIB3146-003-P1-K1-G12
gtgtgctggaattcgcccttagcgtggtcgcggccgatgtacttttttttttttttttttttttttggggggataagacaatctgatttcattatgatagcaaaccccatatcagttatacaatgaagttctcaacttttactcaaagtatcaaatcttttgcatcacataaacttaccattttacaaattacatgcaacatagtcttaaattttaaccaacacacacatttattctaaagcttaaccggatattgaaccgattttttcacataattgggtaagaagcattcatggcaagaccacattgaccgcgtttaggcttgatatcttctttgatcctcatgtatccacgatctccccattttggaccccatgaattcttgaggatccagtaccttggccgctaccacgctaagggcgatttctgctaatattcat

SEQ ID NO: 18403 - DNA, 457 bp, Gossypium hirsutum
  Clone ID: LIB3146-003-P1-K1-G2
gtggagccttggttgcatgtttgctggaatgatattccggaaggaaccattcttctatggcgcatgacaaccatgatcaattagttaaaattgccaaggtcctagatactgatgagttaaatgcttatctcaacaaataccatttggagcttgatcctcaacttgatgctcaagttggaaggcacagccgcaaaccctggtccaaatttattaatgcagataatcagcatcttgtttctcccgaggctattgattttcttgataagttgcttcggtacgaccatcaggacaggctaactgctagagaggctatggcccatccttactttgcacaagtcagggcagcagagagcagcaggatgcggactcagtaactcaatttccttgggaggatttcatttgtaaatcagaaccagactcatctggggtaagagatttaatgtgttgtttaatgttc

SEQ ID NO: 18404 - DNA, 387 bp, Gossypium hirsutum
  Clone ID: LIB3146-003-P1-K1-G3
cccacgcgtccggtcctactggtacaacagctatggatcagttgttacagttgaccaggatgccaagactcggtacccagttgtggttcgattcaacaaagttaattacgccaatgtatctaccaacaactacgcattggatgagattgaagaagttaaatgagtcactgtttcattttgtaataattttgggtttcaatgatcctatggctaatatatatatcgtcttcccccctctatctggctttgagcttgtttctaccaaaaacgacgtgtacaatactatcatctttctctttatttctctcatttattaatgccttactttcctaaaaaaaaaataaaaatttataataataatatgtaaaaaaaaactatatttttttt

SEQ ID NO: 18405 - DNA, 411 bp, Gossypium hirsutum
  Clone ID: LIB3146-003-P1-K1-G4
aattgatctcaatagttcagagcaatatctacccgtatcaatggcggagcaagcggtgcaagagccgcttaacagttcatctgagtctgaaaatggtggaatattggagaaaacccgaccactccaggaccagaaaattgatgagaatattcaagaagattcaggcaaagatttgaaaaaggcatgcacccctgataggcttaaagtccccaaggcattcaagttccctgaaaggtatagaagtccaaccgattctatgatgtcgcctgttacaaaaggtcttcttgcaagaaacaggaaagctggaggttcactcttaccacctagtataaatcaaactaagatccatgaattgcgtgttcaagatgttggtctttctcacaactgaacaagcttaaaccagatggattt

SEQ ID NO: 18406 - DNA, 287 bp, Gossypium hirsutum
  Clone ID: LIB3146-003-P1-K1-G5
gcccccactattgttatgctgtgatcttactgttattgctcactgctcagttttcgtttggaatagatggaactagtttgctacttgttttcgaccattttagttgtgttcccctgaatctaaagatgaataatggtgatgcaggggaagtaaagcgtatgattctctattcctacttttgccatgcttgagttgtctccactctttggcttccatgagatgaattctattgccttttaaaaaaaaataaaaaataaaaaaaagaaaaaaataaaaacataaactga

SEQ ID NO: 18407 - DNA, 539 bp, Gossypium hirsutum
  unsure (1)..(539): unsure at all n locations; Clone ID: LIB3146-003-P1-K1-G6
tactcggtctcgtgaattcccgggtacgactccacgtcgtcgcgtggatggaagggagcaatgggcacattaggcactttgcagcttgtagctcgacggtacgagaaaggattgggggaaaagagcagagctattataccctacagtaaaaagaaagagcgttttacatctttcggtatcccatatccggtcatatgggtagctgacattacccactagtagtatcttggacccaagggcagttaacagtctgctctcttgttctgtattttggcatctttcgcattatttaaacgccatnnntcgtttcaagaaagtacctagtagactcaatagaacagatgatagaattgtctttggttctttttttcaactcatcaaaagaaaataaaaaaataaaaaatagggccggcccgcttctaagaagcgatccatagcttactgtaccgccgtagcatgtcgatctgtcatagcnnttcttctataagtgggtcactctttaaattcaaaattcaacttgggcccgtacgttttttaca

SEQ ID NO: 18408 - DNA, 535 bp, Gossypium hirsutum
  unsure (1)..(535): unsure at all n locations; Clone ID: LIB3146-003-P1-K1-G7
actgacgtactcggtctcggacattcccgggntcgactccacgccgtctcgcgttttcttctgcttactgatgcctaagagtaaatgctcagagacctcccatgnnttcctatctgtggctcgcacttccgcattgggctttgcacgtgttcttcggttcactttggccaccacttcccatcacttggaacctggtattaaccccagcataggcagtcttggagcctgccatcatatactaatcaaagaccatgccttgggatgaccacttgcggtgttctgggtntggaccccttcatntggagctgcaccttgctgcacgtttaccaacctagataatcacttagagcttattccattcaagaccagagattgaaatgattaaatctgtgtgtgtgtgtgtgttgggatcttcatctactttttgtgttcctactagtcctttgttgtgttgaactgcattttgaattatggtgttaatgtgtgtaaattatccctagagttgtgctgtattcagcttttattaatggaggat

SEQ ID NO: 18409 - DNA, 293 bp, Gossypium hirsutum
  Clone ID: LIB3146-003-P1-K1-G9
ctagtcagcgccaggcatcctgctacacttccgaccatcacttgctcagttcagtctttaccacggtggccataaagatctctcggccgacgaattcagccttgtggacggatttaacatccccatgactgctaccccgcacgaaggcaaaggcctttgccccgtcgttggctgcatgcgctaatattctgaccacgtgtcccggcaagttacagtataagtcacctgctcatactacagctgtgggtcgtaagagcgtacgagctatcttcaatacccacaagctttgatgc

SEQ ID NO: 18410 - DNA, 453 bp, Gossypium hirsutum
  Clone ID: LIB3146-003-P1-K1-H1
ggacaagttggttgatctgactacaggaatgtgctggaaacttattgctcgaaaggttcagactgctatctggatcaaagaggaagatccatcatgccttaagcataatgcagagttgaaactcattgatatttgtgatgccgtagacgagactaaaccatcatggatgactcctctaatgaattgtatacagctagcaggtgcaacaatagctaccaagaagctccctcctaggcctgagcgtctgtcagtgtattcggagagcctcagtagaatcggcatcagcagagaagaatttagttcagactccaacttctggcaagaacaagttcactattactggaagctgatgaatgttagcaggacagagatacgaaatgtgatggacatgaatgccctttttggtggttttgctgcagctttgaatgaataccctgtttggtaatgaatata

SEQ ID NO: 18411 - DNA, 414 bp, Gossypium hirsutum
  Clone ID: LIB3146-003-P1-K1-H10
actagtcagacccacgcgtccggttgcctgctggatgcttgcttttgagaatccaactatgccaaatgcctcaaatgttgaaagatcaaatgttcttactgtctcgcctgcttaattttttttgtttatgttctttaaataattaaattggacctttgtttggaattaaactaaacctttgttatattttatattaattcctaattcttagtttttatctgtatatatatttgttccaaggttagccatttggacagtgattggtatcttttgctctgcctagtaaatgaatatttaaattatttatttaaaaaaaaatatctaaaaattctagactttatgaaataaaataaactttagaaactccaattatgtctttaaataaaattaacactaacaaaaaaaaggggcggc

SEQ ID NO: 18412 - DNA, 367 bp, Gossypium hirsutum
  Clone ID: LIB3146-003-P1-K1-H11
cccgtaagcaaaccacaaaggaaagcttggagagagacccaaaaacaatgtctaaggaagttagtgaagaaggacagggtcgtaaggactatgtggaccctccaccggcacctctgattgacatggctgaactcaagtcatggtctttttacagagccctcatagctgagttcatagccactctcctcttcctctatgtcactgttgctactgtaattggtcacaagaaacaacaagatgcatgtgatggtgttggtctcttgggtattgcatgggctttcggtggcatgatctttatccttggttactgcacttgccgtatctcaagtggacacattaaccctggcgtgacttttgggttggtttt

SEQ ID NO: 18413 - DNA, 427 bp, Gossypium hirsutum
  Clone ID: LIB3146-003-P1-K1-H3
cccacgcgtccgcccacgcgtccgctaaaattaaaaatatataaaagttcttccattcttctgtctacctggccgactcaagggcctcatcagcgtcctatgcgcctctacccgtcgtggctcatggctcgggaacaacgaaaacaagaggagccctcccttggtccaatatctacaccgaagaaaggttctccgatgatcgaaaccgcgggtaagttcccttgctactctcctttatttgttttttgaaaaagaacttaaaagcataatagagaaatcaacataatatgaatcgtaaatcaccttcaatctttgagtgaattctttgttttctttgtattcgaaaaaaaaaatcagccccgtctcttacaactgtttgtttttaggcttttatagccgagagaaaaaaaagaatacacatatattt

SEQ ID NO: 18414 - DNA, 435 bp, Gossypium hirsutum
  unsure (1)..(435): unsure at all n locations; Clone ID: LIB3146-003-P1-K1-H4
caaatctgttcttcagggcattctgctttcttcagaaggggaaacgttgaactcgatgaatgggctactctatatgtccccaattgcagttctagttttagtgcctactgcacttgtaatggagccaaacgtgttagaagtcatcatatcacttggaagacaacatagatacatgtggctgcttcttttcattaactccacactcgcatattcagctaacttatcgaacttcttggtgactaaacatacaagtgcattaacactccaggtattaggcaatgcaaaaggtgcagtggctgttgttatctcaatacttttgttcagaaatcccgtcacaactgttggcatcggcgggtatatgatgaccgtncttggcgtcgtggcttatggagaagcaaagcggagggttaaataaatggtgggatggtgtttgga

SEQ ID NO: 18415 - DNA, 175 bp, Gossypium hirsutum
  Clone ID: LIB3146-003-P1-K1-H5
attcttcacttaatttcaagcatctttccattatataaaaaaaacccaaacccagggaataggcgagcatctcatatgcattttcattctactataagcatatttcacccttaaaactcatatatatttcacatatatatcactaaactatctcatactcacatatttttaccaa

SEQ ID NO: 18416 - DNA, 321 bp, Gossypium hirsutum
  Clone ID: LIB3146-003-P1-K1-H6
aaaaaaaaaaaaaaaaaaaaaaaatttaaatttaaaaaaaaaaaaaaaaaaacacaagagaaaggatatatataactaccattttaaaacttccaatatttcaatacacttacattcaacttcttaccctcttcttttatgtcacctaatttcaattaccttaccgttattttacatcttcgcttctcaaaaaatcctgcctttacccactttaatctctttcaactaaatccctttttactcaattttcttaatttctaaaactcctttacctatcgcccttcccaacttttcctcatcttgatttcttaatacttttct

SEQ ID NO: 18417 - DNA, 414 bp, Gossypium hirsutum
  Clone ID: LIB3146-003-P1-K1-H7
caagatcagtgcaagatcatcaccgtcatcatcatcatcatcaacaatacaatactacttacaatcaaatacataatatatgtataggtaaaggacagaggaactgatttatgcaagtggggtctttggcctttccttaccgtgacacaccctagttgctggaccacacaacagatagtgtagaaacaaacaaaggctggtagtaactagtaactagtaactcttttttttttttatctcatattgtaattttttttcatttcctaatcttttcttttaccctccttttttcaaagtgaggtgaaaaaagagaactaagaaaaaaaatctgtatgaactatgtcactttgtgtaaaaaaaaaaaaaaaatattataattaaaataacttaaaaataaaaaatataaagaaaaat

SEQ ID NO: 18418 - DNA, 420 bp, Gossypium hirsutum
  Clone ID: LIB3146-003-P1-K1-H8
tgaagcccaaaacttggtaatttctgcattgtaacactgggaagaagttgtttcattcgaggatgaagcctcactgacaagctcagtcaagagggagatttctaatggtaccaagtatttggcttctcaagagatacgtggatttgattatgcacaaccaagtgcttcttctgcagatatcatttcaaccatctattcacttggaggtttgagcggcttagacgattatgcgctgcatggatatgagcaagcattgacttatcctggccaagtcactaattccctgatctgtgacacagatattactcagactttctgtgatgaacatcaccttcggtatttcgatagtgatcttcaaccccaaatccttggtttggaatcacaagcggatctactaactgttgttgacagattcttttg

SEQ ID NO: 18419 - DNA, 196 bp, Gossypium hirsutum
  Clone ID: LIB3146-003-P1-K1-H9
cacgcttccgccttcatcacatacccacggtctttaccttcctaccagctgatcttgagagagggaactggtaacaacattcgaatcatccagctcgtgatggccgtggcgctaccgcttataagcttccttatggttctacaccaacggcgataccagcttctcaaccacatgcagaggcatgcgcatgatccat

SEQ ID NO: 18420 - DNA, 343 bp, Gossypium hirsutum
  Clone ID: LIB3146-004-P1-K1-A11
atcacatttgcaagtgggcgttgaattcaaagctccaccgccttcggctgaagaagaaactgtgaaggaagttttatctgaaaccccaaaacccaaagctcccatctttaccccacaacaaggagagagcaagcaaacccagattgagaaaccggtctttgtcaagatccaagagaaggaaagcctcaatttcaacgtcaagaccaaaccaaaatcacctgtccttgaagagtcagcttcggaagaggtttccgagatttgcagcgtgagtttaagtgaaagcctttccactattactgataggagagatgaagaagatgaagtgaggcagctaaaggtgttc

SEQ ID NO: 18421 - DNA, 235 bp, Gossypium hirsutum
  Clone ID: LIB3146-004-P1-K1-A12
cccacgcgtccggaaatatcaactttagatctcaacagcaagacattgggttcttgttctgagcatcaagaaactgtgaaaaatgcattatcaagagacaagaacactacagaagagggcctgctgactattggattaggacattcaaaactaaaagctggccgaactggatttaaaccttacaaaaggtgttctgtggaagccaaagaaaacagagtgatgaacaccggcagtc

SEQ ID NO: 18422 - DNA, 240 bp, Gossypium hirsutum
  Clone ID: LIB3146-004-P1-K1-A3
gacaaaaaaacctccaaaaaaaggggttattttttcaatggtggtattttggcgtttgtggcggcagcctcttgggtgtaatccttatgtcctacatccaagataccttaggttgggtactcggttttgccatccccatgtttgccatggttatatcggtcgtgtttttcacatgcggtaatcggacctacgctcataaaccggaccgaaccatgtacaataaacacttttccaacatgc

SEQ ID NO: 18423 - DNA, 176 bp, Gossypium hirsutum
  Clone ID: LIB3146-004-P1-K1-A7
ttcaaaagttgatatgtgggcgatgtgtgtgctataatggccgagttgttcaccttacgtgctctttttcctggtgccagtgaagcagatgaaatctacaaaatctgcagtgtattaggtactccaactaagtatacgtggtctgacgggcttaaccttggcagatctataaacta

SEQ ID NO: 18424 - DNA, 203 bp, Gossypium hirsutum
  unsure (1)..(203): unsure at all n locations; Clone ID: LIB3146-004-P1-K1-A8
cccacgcgtccgcccacgcgtncggctgattcaatatttttccgatttaaggagttgactgcacggccagaagcggtagaagttgctcgacaatatctctctgacttgaaacagactattcgtgggtgggagacagaaaaaccctggctgccgaaagacagaatagatgagttgtcaacccgtatggacaagttgaagacttg

SEQ ID NO: 18425 - DNA, 179 bp, Gossypium hirsutum
  unsure (1)..(179): unsure at all n locations; Clone ID: LIB3146-004-P1-K1-A9
cgcgtncgtatgaaccctattttatcctcacatatgattacttcaaaaacactcaaacggcagcgcctggcttgctttcttcgactgcggcattcctccccttcatccaaggtcagataaacatttttccttctgctgttcctttcattttcctgaaatgcttttttttgtcttaccca

SEQ ID NO: 18426 - DNA, 362 bp, Gossypium hirsutum
  unsure (1)..(362): unsure at all n locations; Clone ID: LIB3146-004-P1-K1-B1
gaaaaagggggggggggaatcaaagctaggtttaggattgaattttgcagaaaatggcaatgaggaaagtttatagcgagataaaagggatgaaagtgaaggaagtccctaactacgtgaaaccgatgctatcaatggattacgtgaagaaagcttttcaaaagggtttggacaattacaattcaaagtacattcaaaccgattcgatccagcctctttaccatgtctgtttcggtgggatggtcttttcttacctcgtcgctctcccaaatgagcgtcgncatctcgagcaccagcaacacgccaaggaacatgggcatcactgatccctgctcaagtaaatttgattcgggatttttaga

SEQ ID NO: 18427 - DNA, 415 bp, Gossypium hirsutum
  Clone ID: LIB3146-004-P1-K1-B10
cccacgcgtccgcccacgcgtccgcttttttttcttctttatttttcattctcttctgcttctccatttgttttcctctcttcttcatctccgttttcaacataattaattcaaagaaatgagatttcaaacatgaggcatctgcaaagttgttttgcttcaatgatctaataattaattcaaagaattgagatttcaaacttgaggcatctataaatcatgtcaaacagtcaactaaaggttacttgttaatgtgtagcatttaaccatatgatggatttaagggcttgattgcatgtaaatcatttgaggcagctcttgaaaccgccattagaatatggagaaggaagaagggaacataaaagaaaaaaaaaggaaagttaaaagaacataaaagaaaaagattagattgctc

SEQ ID NO: 18428 - DNA, 398 bp, Gossypium hirsutum
  Clone ID: LIB3146-004-P1-K1-B12
cgttgcttacccgacggagctaagattacaagcttttgtccctgattatatggaccggcaattcaatgatttgagacctgggaatgtaacgatagagtatgaggggcattcatctggtgttgcatatgggacagcgtttactattcatttctggcttggacgaaggccaagtaaagacgtggaatatagtgtttatgcgccgccgttcacgacgcattccatttcaatgaatcaaaggttgctgaaactgaggtgccggcacaaaacaagggacggcggtggttcgatgagtgctgttttggaagctccaccgtcgccgaatgtggcaccacctggttactatttgcttactgttgttaataatggcatccctagcttatctcaatggattagattca

SEQ ID NO: 18429 - DNA, 222 bp, Gossypium hirsutum
  Clone ID: LIB3146-004-P1-K1-B8
acgacgcgttcatgcacgcgttcgattactcctgcgagcacgcgtgcggacaatatgtgaagatgcgacaggggcatctaagaaacagacaactgagaaatccattgtttcaaatcatatcatgggcaaatctaaatcaaactctaagcgacgttcttgatctcaaacccagcattctaaggcaacagcataaaatgatgatgtttgagattgcatggaaga

SEQ ID NO: 18430 - DNA, 386 bp, Gossypium hirsutum
  Clone ID: LIB3146-004-P1-K1-B9
cccacgcgtccgcagaagcaagttattgtgtagaagcttggtgagccaaccgagagctatgaggattttactaaatgtcttcccgctgatgaatgtcgttatgctgtgtacgattttgattttctaacggccgagaacgtcccaaagagcagaatctttttcattgcatggtctcccgatacatcaaggatcaggagcaaaatgatatacgctagctccaaagacagattcaagcgagaactggatggaatccaagtggaattgcaagcaacagatccaaccgagatgggtctcgatgtcttcaaaagccgggctaactgaatacagttcttttaggcttttgcaacggggaagctttcttccttcctacaggatgtcttttactt

SEQ ID NO: 18431 - DNA, 391 bp, Gossypium hirsutum
  unsure (1)..(391): unsure at all n locations; Clone ID: LIB3146-004-P1-K1-C1
cccacgcgttcgcccacgcgtncgtaacatttggatatgcctcctttgattatgaagattgagaataccaacaatctgatttggtaaaacttgatatcctcttaaatgggaagccagttgatgccatggcaacaattgttcactctttgaaggcacaacgagttggtcgtgaactggtggacaagcttaagaaattcatcgacaggcaaatgtttgagataatcatacaagctgcaattggatcaaaggttattgcaagggagacaatctcagcaatgagaaagaatgtcctcgcaaagtgttatggtggggatgttactcgaaagaagaagcttttggagaaacaaaaagaaagaaagaagcgaatgaagcgagttggttctggtgacat

SEQ ID NO: 18432 - DNA, 447 bp, Gossypium hirsutum
  Clone ID: LIB3146-004-P1-K1-C10
gttgcgtactgtttttgttctttgatcctctttgttttgattctttgacggtggtgctttgtaaatatatagggattcacaagagagcaaaagagaagcttgattttgtgtgtagagaataatggaaggaaataaaaaagtggggtcttcttcttcttctttagcttcagagctatttggttcaaaagacctaccttcttcttctactgggatttttggctctatttttgctcctccatctaaggtatttaggtagggagtcactgcgtcatgaccttattaccaaaaggtacgactcacccaaagagccatggaacacaacaaatccaggtccctatggtatgttcatcagtctagttccattccacaccattttgttcattacatatagtattaagtggtattgtgcactagaccaaaacaagaaccaagttttttttacagaat

SEQ ID NO: 18433 - DNA, 385 bp, Gossypium hirsutum
  Clone ID: LIB3146-004-P1-K1-C12
cccacgcgtccgcccacgcgtccgcagtggtttgcaggtgcaattgaaagatggtcaatgggttgcgccgccaccatcgccaacttctttcgttgtcatggctggggatgctttgatggcatggagtaatgaccgaataccatcttgtaatcatcaagtaatcatgaaggagaagggaataagatactcattgggcatgtttacattcatggatgggatcatacatatacttgaagaggtaggggacgagactcaccccatcaaatacaagtccttccaccactttgaactccttcagtttatgaattccaatttgaaaaccaaccctaacatgtgctttatcaaagccttttgtggtgtttgagacctacacaacaaggatgct

SEQ ID NO: 18434 - DNA, 377 bp, Gossypium hirsutum
  Clone ID: LIB3146-004-P1-K1-C2
gtcggatgaagaggatggagtagaagatgatatatagaggagaaaaagaagaaaaagaaagagaagaaggataaggagaaaaagaaagaacagacgtccaataaagaggatgatgtaaaagatgacgaagagaagaagaaagataagaaggataaggagaaaaagaaagaaaagaagtcggacgaagaggatgatgtagaagatgccaaagaggcaaaggagaagaagaagaaagataacaaggataaggagaaaaagaaagataagaagtgcgataaagaggatgatgtagaagatgccaaagaggagaagaagaaagataagaaggattaggagaagaagaaagataagaagtcggttggagaatatgaaaggac

SEQ ID NO: 18435 - DNA, 463 bp, Gossypium hirsutum
  unsure (1)..(463): unsure at all n locations; Clone ID: LIB3146-004-P1-K1-C3
cccacgcgtncgtnttaattatgaaaagcctacttcatgatttaagcattttatcttttgtgagagagattctctacaaatagcccattaaaacaggagacttgaccgagacgagacagacgtgtgtgtgtaaataggaccatagttgctatatttttcaagttcaacggctgtgtcctaactttggatctaatttttctactcaagttttgtcttatttttattaaaaaaaaagtatgataggctaaaggctttgtaatagagagaggaatcggtagtatcaaatatttgaattcatataccgtgtatttttttctcatttttagtttcttctcttataggatactcttatatttttttttgtgtttaattattttatggtggatgtctttttattctctttttgttattatttttttatattattttcttggtggggggtgctttttattatttttttttt

SEQ ID NO: 18436 - DNA, 393 bp, Gossypium hirsutum
  Clone ID: LIB3146-004-P1-K1-C6
gttgggttcaacgttaaaaacgttgctgttaaggatcttaaacgtggttttgttgcttcaaactccaaggatgatccggccaaggaagctgccaacttcacctctcaggttatcatcatgaaccaccctggccaaattggaaatggttatgccccagtcctcgactgccacacctctcacattgctgtcaaattttccgaactgttgaccaagattgacagacgatctggcaaggaactcgagaaggaacccaagttcttgaagaacggtgatgcacgtatggtaaagatgattcccaccaaacccatggttgttgagactttctctgaatacccaccacttggacgttttgctgtccgtgacatgcgccagacttgtgccgtcggtgtcatc

SEQ ID NO: 18437 - DNA, 345 bp, Gossypium hirsutum
  Clone ID: LIB3146-004-P1-K1-C7
cttgagaatttttcagtcctcaccaatctggcaaatttgcgaagcctatggcttgaaaaaacgtgggttcctcaattgaccaatcccactgttcacatgaaaaacttgcggaaactgtctatggttctttgcaaggttaataacagctttaatccatcagtgatagacctgcccctgatcttccctcgtttattggagctcattattgatcattgtcatgatttgattaagttgccatcgagcatttgtgaggtgaattcactccagaacctgagcataaccaactgccaccgactatgtgaattgcctgctgatttgggtatgctgaagaaactacaggtactt

SEQ ID NO: 18438 - DNA, 99 bp, Gossypium hirsutum
  unsure (1)..(99): unsure at all n locations; Clone ID: LIB3146-004-P1-K1-C8
cggaattccccgggntcggacccacgcccgtccgcctcacgcccgtctcggtttctggtttggatataagtgcttggaacccttgggaggggagaaaaa

SEQ ID NO: 18439 - DNA, 345 bp, Gossypium hirsutum
  Clone ID: LIB3146-004-P1-K1-C9
aggaaaatgaggcggatcatgacggttccattttttaccaacaaggttgtgcagcagtacaggtttggatgggaggacgaggctgctcgtgtagtggaggacgtgaggaaaaatcccgaggcagccaccaacggaatcgttttgaggaggagattgcagctgatgatgtacaacaacatgtacagaatcatgttcgacacaagattcgagagtgaggatgatcctttgtttgttaggctcaaggctttgaacggggagaggagccggttggctcagagttttgaatacaattacggggattttattcccatcttaaggcccttcctcagaggatacttgaagatc

SEQ ID NO: 18440 - DNA, 326 bp, Gossypium hirsutum
  Clone ID: LIB3146-004-P1-K1-D1
ggcgaggaaaatgaagatccgatcctcgatttttagtcgaagctgtatcgatttgataaagagagggaatcaatggaaagagagaggtgctggtactgtgaagctgttgaagcacaaagagacaggaaaagttcgccttgttatgaggcaatctaagactctcaagatctgcgccaatcatctagtgttgccgacaatgacggtgcaagagcacgctgggaatgataaatcgtgcttatggcacgcctctgactatgcagatggtgaattgaaagatgaacttttttgcattcggtttgcatcagtggaaaattgctaaaccttta

SEQ ID NO: 18441 - DNA, 248 bp, Gossypium hirsutum
  Clone ID: LIB3146-004-P1-K1-D10
gtcatttccctagggtcttatctttgtaaggccaaaatgaagtcagctattagtggctacagatgattaattttattgggaggttcaagtgggggtaacacaaattatgaaaagatcccacttttgctctccttcaatgcgcctacgtgtgctaaatttttaggtgaattacttttaatttcttgtagtcccaagtgttgtattcatgtctcattacatgaaagctaaggttgaggacctattcagtt

SEQ ID NO: 18442 - DNA, 446 bp, Gossypium hirsutum
  Clone ID: LIB3146-004-P1-K1-D11
gccggaaataacatgggatatggcataggatatggcactggaaatgggaaccagttaggaactggtatcggatatggtattggaaatgggaaccagttaggaaccggtattggatttggtaccggaaatggaggtcagtcaggaaatagtgttggatatggcgtcggaattggatcaggtggaaacaactggaatggacctgggactggagttggaatcgggtcaggatcaggcggactagggtcagggattggcgtgggatacggctcaggaggtgttcctgcatgtactaccggcaattgcaatctagtgaatggccctgggagctgtgtaccagttggtccagctcattatgaacttcaaggacgatctgctgctggagctgccaaagagatgtcgaagattatgagtacagttactcagccctagacaccacataaactgtg

SEQ ID NO: 18443 - DNA, 456 bp, Gossypium hirsutum
  unsure (1)..(456): unsure at all n locations; Clone ID: LIB3146-004-P1-K1-D12
gatgggagccgtcgagggctaccgtattgtcggtggaccactcggtgaagtgactgaccgagtgtacccaggtggcagctttgacccattgggtcttgctgatgacccagaggcattcgctgagctcaaggtgaaagagatcaagaacggtaggttggctatgttctcaatgttcgggttcttcgttcaggccatcgtgaccggaaagggaccattggagaacttggctgaccaccttgctgacccagtcaacaacaatgcttgggcctatgccaccaactttgttcccggaaagtgaacttagagagtgagaagggatttggcttgtttatgtttttatttggtggcgtgaatttaaatttgttggccaatcaatgaaagtttaatgtgaattttgtgtgctctntaaataatatttttttttattattttatattttttattttttttttgttt

SEQ ID NO: 18444 - DNA, 475 bp, Gossypium hirsutum
  unsure (1)..(475): unsure at all n locations; Clone ID: LIB3146-004-P1-K1-D2
gaaaaaaaaaagggataaggatgaagaagattattataattgctgttcttattttctgcgtgttaagttcacaaatggaaaacgtaacaccacaggtagattgctacgacgcatgtagtactggatgcgttcaaagtaacacgaggcttatgcagcgatgtgatcgcaagtgccagattagatgcagtccagattccaaggtagaggggaatttgggttagctaattgaaagatcaaaatctacttactacatagtttcttgctatataccactcaaatgtattgtgttgaataaaagcatttatatagcttcttatccatcgtcttaccttaaagcattgaagagatactagtaagttcaataattatgtatctttatctagattttgtgttcaataatattatataaaaaataaaatttattcttttttaataaattantatataatatcttttttttttctttttttttttt

SEQ ID NO: 18445 - DNA, 416 bp, Gossypium hirsutum
  Clone ID: LIB3146-004-P1-K1-D3
ggtcgccacgcgtccgctcacgcgttggcgagctggatgacactgttgctttcaagaacttcaagaagtggggtaatatcgaattcccaatgccttttggaagagttatgagtgcaaccgaaagctatattcacgggctagacgagaagaccagtgcatcgttgaaatttacggtgttgaaccctaagggacgcatttggacaatggtagctggaggaggtgcaagtgtcatctacgctgatacggttggagatcttggttttgcttctgagctcggaaattatgcagaatacagtggagcacccaacgaagaggaagtattgcagtatgccagagtagttattgattgtgcaaccgcagaccctgatggtcgcaaaagagccctcgtaattggcggaggaatagccaactttact

SEQ ID NO: 18446 - DNA, 376 bp, Gossypium hirsutum
  Clone ID: LIB3146-004-P1-K1-D4
catgctgatcgaactaaaaaaggggcgtattgagcttgattggtatctgagtaaggaagcacgatgagctgttggcaagcacccttcaacctggtacctacaggaagaccttatctttggtcattgttgatggttttgcagtcgaaatcacagaggctcaggccaatgtgctgagatctgctaatggggtaagagttgtggagaagaatcaagagcttgcttagtgctgctaaagcttgaaagtttgcagaaacgaagagaaaataggtttcaagaacttcttgtagatgtggggtttcagactggttctcttctttaataatcattcaagacttgaaatatagcatattgcagctttaaatagaagcaatttatt

SEQ ID NO: 18447 - DNA, 183 bp, Gossypium hirsutum
  unsure (1)..(183): unsure at all n locations; Clone ID: LIB3146-004-P1-K1-D5
ggggnatngggaaaccaaaaggaaacttgttggatccggtaccttaaatagaagttagtcaggaaataatgttggatagggggtaattgatttacaaatgttaatacagtggagttggtttacaaatttacattttatttggttaggatcttattttttaattaaagtttattttggttaaaa

SEQ ID NO: 18448 - DNA, 298 bp, Gossypium hirsutum
  unsure (1)..(298): unsure at all n locations; Clone ID: LIB3146-004-P1-K1-D6
tgaagaaaaaacttactgcagtcaggctactcgtttcatcgatgtcaggacagtggaagaagtggagaaaggacatgtggaagcagcnaatattcttaacatcccatacttgttcatcacaccagaaggtagggtgaagaatcctgagttcttgaaggaggtgttatctctctgcaaggaggaagatcgtctcatagtgggctgccaaagtggggcgagatcccttgctgcaaccgctgatctttttaaaattggtcttaagaatgtgcacgacatgggaggaggttatcttgcttgg

SEQ ID NO: 18449 - DNA, 403 bp, Gossypium hirsutum
  Clone ID: LIB3146-004-P1-K1-D7
ctttgaaggaaaagtttgagggtctttttatggtcatcaaggatgtgctgggtgacaaggttgaaaaggttgtggtttctgatcgtgtggttgactcaccttgctgtttagtgactggcgagtatggttggactgcaaacatggagagaatcatgaaggcccaggctttgagggataacagcatggctggttacatgtcaagcaagaagacaatggagatcaacccggagaaccccatcatggaagagctgagaaagagagccgatgcagagaagaatgataaatctgtgaaggaccttgttctccttctcttcgagactgctctcctcacctctggcttcagccttgatgagcctaacacctttggcaacagaatccacaagatgcttgaactcggcttgag

SEQ ID NO: 18450 - DNA, 94 bp, Gossypium hirsutum
  Clone ID: LIB3146-004-P1-K1-D8
gcttgataagtatcagctactgtaattaacagtatgtgtcagcaatcaattaccatatatatatatatgcaagcatgataaaaatacttatgtt

SEQ ID NO: 18451 - DNA, 383 bp, Gossypium hirsutum
  Clone ID: LIB3146-004-P1-K1-D9
caacttacaataattatcattaccaccaatgctcttcctttaaccattctagggagtcatccacttcgaggttctcggtttccggtaacatcccgaggactctttcgggttggaagcacgaacagattggtcatggtgatgatgataatgacgaggaggacgatgatggccgcagcaatagtaataatgtgaggcttccttatgttttttgcctcgttttagtgttgcttgtggtgtttgctgtggtggttttgattaggtgggatgctaggaagagatatgagcctgaaatcttcgttaagcgcatagtgtttgagaacttgtattatcaggcaggaaatgatgaattaagggtgccaacagatatgctttcacttaattcg

SEQ ID NO: 18452 - DNA, 419 bp, Gossypium hirsutum
  Clone ID: LIB3146-004-P1-K1-E1
agcagcttcaaacgccaccaggtaaggacttactatagagtgagtaacaatggttgagaaaacaagaggaagaaaggaagaggtggtgaccagagagtacaccattaaccttcacaagcgccttcatggctgcacattcaagaagaaagctcccaaggctatcaaggagatcaggaagtttgcagaaaaagccatggggacaaaggatgtgagagttgatgtcaagctgaacaagcacatctggagcagagggatccgaagtgttccgagaaggattagggttcgcatcgctcgcaagagaaatgatgatgaagatgccaaggaggagctgtactctctagtaacggttgctgaaattccagctgaaggattgaagggtttaggcaccaacgtcattgatgacgacgaggaataatttt

SEQ ID NO: 18453 - DNA, 337 bp, Gossypium hirsutum
  Clone ID: LIB3146-004-P1-K1-E10
ggcgctatccttaaccatcagcaatggcattagtagcagtagcaatgcaaatgggggcccgatccttcccaacaaccagctacctttcggcctccctcatcgccgcaacgtcctcttcccaatctcccccagaaccttccacttgacctccgctgccaaaaagttctcttcccgaaccggacgcttcgatagcaagaaccggaggagcaatctcaccacaaaagaacaagatgaggaacaggagctcaaacggacggcggagattgaagaatcaaacattgctattggagttggattggaggacgttggtgggagttcgtctgagatttcggctgat

SEQ ID NO: 18454 - DNA, 234 bp, Gossypium hirsutum
  unsure (1)..(234): unsure at all n locations; Clone ID: LIB3146-004-P1-K1-E12
natatttttttattattactttcttttttttttttttttttttatgcatttttatgggcagccttttttacttattaatcacaaacacttactttcttcatatatcaaaactataaattctatatttactacaaacttctcaaacataaaacaattttatccattctaaaaaatctataccatcacacaaattctttttttntccctttcttttaaagcactaccaatttttac

SEQ ID NO: 18455 - DNA, 307 bp, Gossypium hirsutum
  Clone ID: LIB3146-004-P1-K1-E2
cgggcgccacgcgtccgcaaattccttagatcgaccaacaatttgtcttttcttaaaggccctaaccctaattgcaggttttgttgttagtcttcacaatgtcaaccacagtccccagaaaaattaccctgcggaccgcggacaatcactaattctaagtcgatgagagcagtatccatggaactcggcaccgtcaagaccttcttcgacgaaaacccttacgccaccgacgaacccatccctctacccaacgtttcctccaagggtttgtctacaatgatagagtactgcaaattacacctgtttc

SEQ ID NO: 18456 - DNA, 396 bp, Gossypium hirsutum
  unsure (1)..(396): unsure at all n locations; Clone ID: LIB3146-004-P1-K1-E3
gcgtncgccacgcgttcgaaaaatggttctgctagacaaaatgtgggacgatgtagtagctgggcctcaacctgaacgtggtctcggcaggcttaggaagatcaccacccagcctttgttcatcaaagatgaaggagaaaagaaaaagtaccagaggtcgttgtcgctgccgaatagtccagtgtcaggtccgacacccgtgacaccgacgacttcgacggcgcgtaaggagaacgtgtggaggagtgtgttccatccgggtagcaacctagccaccaaaagtataggttctgatgttttcgacaagccacaacccaactcttctaccgtctatgactggctttacagtggggagaccaggagcaagcatcgctgagagggtggcgactgacaggc

SEQ ID NO: 18457 - DNA, 355 bp, Gossypium hirsutum
  Clone ID: LIB3146-004-P1-K1-E5
catgtattacgtcataagccagctttcatttggttaaacagtgtcacctcacgatttgaatgatggcaagcgaataataccttaccttgggaggagccatgacaagatgaatggtcgggcattcattaatgaccgcgatttagatgcaaatgttactatagagcactacctttaagttgtcaaaacagaggtcgatacaacaaaatcttctgatgaccatagaattatcgaggaatatgagtacacagcgcacagcagtctgtcacatagcgtgtacatacctgatgcgaactttcattctgaggtatctccgatgcacgttgtggtaacagacgactcagaatcgttttcacat

SEQ ID NO: 18458 - DNA, 448 bp, Gossypium hirsutum
  Clone ID: LIB3146-004-P1-K1-E6
gttcaaagaaaatgacgctgttgactttaaaaattgagtgtctcataatatgtttcattgtgttttttgttcattttcgtttggacgtcatttgcttgtcttcatttggttctgacttcttttctgctccgtaagcacccaatctgtttcttatctgcagtccattggttttgttggtcctgcggttgctcttgttggcttaactgcagcaaaaactccttcaactgcatctgcttggcttagtctagctgttggacttaaagcattcagtcattgtggttttcttgtcaaccttcaggagattgctccacattattctggtgttttacacggattgtcaaatactgccggaacattcgctgctattattggaacggttggagctggcttctttgtggagctggtgggatcattccaaggatttttgttgcttacatcgatcttatac

SEQ ID NO: 18459 - DNA, 327 bp, Gossypium hirsutum
  Clone ID: LIB3146-004-P1-K1-E7
cccacgcgtccgcccacgcgtccggaccaaacccttcctttcaatcagtttaatggaaggcaagttaaggcaagtaactggcaagcacaggttcaacaacagcaccagcaacagcaccagcaccagcaccagcaccagattcagactagattaaggaacaatgttgttggtgggagaccactggggctaccacaatcttcatggcctccacttcaagctcagccccaacagcagaaacattcacaaaatgggatgagagctatgtttcttggtggatctagtggggtcaagagggaatcaactggcactggtgtgtttatacctcgc

SEQ ID NO: 18460 - DNA, 416 bp, Gossypium hirsutum
  Clone ID: LIB3146-004-P1-K1-E8
cctcgggcgacgtgcgcgccaaggtcttacatggaggctgcggcgcctagggtttccttcggctgaaagtgtctaggctctgggctatgttttggggggtttttagttttgggcctgcaaaatttgggctttttatttgggttatttgtttgggctgatgacttattgtaaatggacttgatatttggacttaattatttttggtctattattatttggaacgggttggtccatctttggcttttattgccccgggctaaattggcctattccaattatttttaagtcatttcattcaaaggttctttattcaatatgttaattggttattttcaaattaaatttaattttctctcttttatattttttaattttttctcctatttattgctgcttatatattatttttatttttt

SEQ ID NO: 18461 - DNA, 406 bp, Gossypium hirsutum
  Clone ID: LIB3146-004-P1-K1-F1
ggtgctagtgtcgactgtgacggtgaaaaggatgataccaaacgtagtatatgtcaggaagaatatgtaaatggagatgaagtagggatgttgcagcgtgagcatatgtatcacgtgacatgcatacagaattggctgcagacaaatgttacttaccgagcgtgaccggtttgtctcttggcaactgcccttttcccatttcagatgtttaggcatcagaatgcagaaaattgcaagcattctgcaacgcgaccaacctagcatgatggttctgcaagtgcaacttcatacaggaattctaaacaagggacaacttcatatatattcaatcaacaatcaacaacagtggttttatatctatcaatcaacaatagttgtttgccaattcacatataggacagtaatc

SEQ ID NO: 18462 - DNA, 454 bp, Gossypium hirsutum
  Clone ID: LIB3146-004-P1-K1-F10
gactagttctagcttgtacaaggtggtcatggtcatttggtgatgatgaagaaaaaggatggtgatgatgatgatgatgatgatgatggacctcgagaggcagatttggagggaagagttgagaaatacattggtgtgaaagtgaaggtttcctttaccgggcaaggtgagacacaatcaatgaagcaattatcaggaggacagaaaactgttgtagcccttacattaattttcgcgattcaacgatgtgatccggctccattttatctttttgatgagatagatgcagctctggatcctcagtaccggactgcagttggaaatatgattcgtcgactggcagacatggcaaatacacaattcataactaccacattttggccagagctcgtcaaagtttgctgatcatatatatggggtgacacataaaaacaaggtgagcccgtgtaatgtt

SEQ ID NO: 18463 - DNA, 431 bp, Gossypium hirsutum
  Clone ID: LIB3146-004-P1-K1-F12
gaagatcagctatcggaaaatgtctacgtcaccgtccgtcaccgaactccaggtggagaactttacgttccctccgacggtgaagcctcctggttccaccaaaaccctgttccttggtggagcaggggagagaggattggaaatccaagggaagttcataaagttcaccgcaattggagtttacctggaagatagcgccgtgaattgcctcggcgttaagtggaagggtaagagcgcggtggagttaacggaatccgttgagtttttcagagacgtggttacaggtgattttgagaagttcatacgggtgacaatgatattgccattaacgggtcaacaatactctgagaaagtatcagagaattgcgttgctatttggaaatctcttggaatctacactgatgcagaagcaaaagcccattgaaaattca

SEQ ID NO: 18464 - DNA, 413 bp, Gossypium hirsutum
  Clone ID: LIB3146-004-P1-K1-F2
tgtggagctggtgtagtgaaaggattcgaatgagacagtagatatgagatgttgggtggtggagccaatgttgtgaaccatggctacaccaaaggtgatggtcttggtgctgaaatcattggcacttttgttcttgtctacactgttttctctgctactgatgccaagagaaatgccagagactctcacgttcctattttggctcccctacctatagggtttgcagtgttcttggttcatttggccaccattcccattactggaactggtattaacccaacaaggagtcttggagctgccattatatataacaaagaccatgcatgggatgatcattggattttctgggttggacccttcaatggagctgctcttgctgcaatttaccaccagataatcattagggccatttc

SEQ ID NO: 18465 - DNA, 350 bp, Gossypium hirsutum
  Clone ID: LIB3146-004-P1-K1-F3
ataaactgccagggggggttatataaaaaaaatatatatatataataaaataaaataatttataaaaaaatataaaaaaaaaaaataaaaaaaaaaaaaaaaaggcccccccttttaaaaaacccaaatttacttcccctttcttccaactttatattttttttttttggccccctaaattaaattatctgcccccccttttacaaccccttacctggaaaaaccctgccttaccccaactaataccctttgaaaaaaatcccctttttcccacttggtataaaaacaaaaagcccccacccaatcccctttccaaaaatatttccacccttaattccaaatggaccccc

SEQ ID NO: 18466 - DNA, 431 bp, Gossypium hirsutum
  Clone ID: LIB3146-004-P1-K1-F4
atcacaatctggcattaccatggagggtgccatgttgggaaggtggtggaccctaaccacaaagttcttggaaccagaagactccggatcgtggatggctccacatttagtgaatcccctggaactaaccctcaaggcactgtcttgatgatgggcaggtatatgggagtcaagattttgagacgaagactaggcaaagctgctggtgtgtaaggaccggcctttgtttgtggtagtagtgggagtaggaaatgaaatgtgataagtctgtagagaaataggaaatttggtgtttccttttgatttgcgctgtttatttttctgtcatgttgactgtgctctactaatggttggtgccaagattgatgagaagtcaaaaaaaagggaaaaatattttaggacattaggcttagctatgtgtttgcttttga

SEQ ID NO: 18467 - DNA, 443 bp, Gossypium hirsutum
  Clone ID: LIB3146-004-P1-K1-F5
cccttgtattcggaactgcaaaaaccgagttatacaaactggtttgaaagctcacttagaagttttcaagacaagagatcgtggttggggtctacggtcatgggaccctattcgagcaggtacatttatttgtgaatatgcaggtgaagttattgatgaaaccaaggcaaggcaagaaagtggagatggtgaaagcgagtatgtttttcatacgaaccgtctctacgaatccttcaagtataatttcgaagccgaaagtagcgaagatttcgatatcccatctcccgtaatcataagttcaaagaacagtggaaatgtagctagatttatgaaccatagttgcaccccaaatgttttctggcagccagtgatgtatgaacataaccacgaagcgtttctccatattgctttcttcgcaaagaaacacatccctcctatgacag

SEQ ID NO: 18468 - DNA, 439 bp, Gossypium hirsutum
  Clone ID: LIB3146-004-P1-K1-F6
gcagaggcacatggcttcttttcttgctgctattgagaaaggcatcagcaagaagcttagggagaaagatatggaactagagactatgaataacaagaatagggaactggttgagagaataaagcaggtgactgcagaagcacataattggcattatagagcaaaatacaacgagtcggttgttaatgtgttgaagagccaccttcagcaagtaatctcacaaggtgctcaacacgggaaagaaggttttggagatagtgaagttgatgatgcagcctcctatattgatccgaacaactttctcagtattcctcttggggctgcaaaatgtgttttcaagggcatgaaggaacacattatttgcagagcatgcaacgcaaaggaggtgtccatcttgttgatgccatgtaggcacctctgcttatgtaaagactgtgat

SEQ ID NO: 18469 - DNA, 395 bp, Gossypium hirsutum
  Clone ID: LIB3146-004-P1-K1-F7
gagagagagagagagagatgtcgggaggaatagcgcgtggtcgactcgccgaggaacgtaaggcatggaggaagaaccatccccatggttttgttgcgaaaccagagacgttgcctgatggaacggtcaatttgatggtgtggcattgcacgatccctggtaaagcaggaactgattgggagggtggctacttcccgctcacgctccatttcagtgaagattatcccagcaagccttcaaagtgtaaatttccccagggcttttttcacccaaatgtttatccatctggtactgtttgcctttcaatcctaaatgaggatagtggttggagaccagccataactgtgaagcaaattcttattggaattcaagatcttctggatgcttcaaaccct

SEQ ID NO: 18470 - DNA, 410 bp, Gossypium hirsutum
  unsure (1)..(410): unsure at all n locations; Clone ID: LIB3146-004-P1-K1-F9
ggacaggttatgaagttgaacagaccaaaaactgggcactccctataaactgcagtgcactagcagaggaatctgtttcaatacaaatggcagcaaaagcagcagtgtcagaatgtagagcagatggatggatccaattcgaggaaggagaattacagcaaagaaagaactttgtcgaaaggaatgacacgtggcagcacaaaatgcaattctcttactcatgcctatcacctgttcttagccctaatcctacctctacgacggcagcgattagcactgtcaccaccgtcgtcccaccgtcaccaataagaccaatggacccaaagcaccaataccaacaccaacagctctttaagactcatcatggtcttaataatatctntaaatcaccatgcggatatacaaccaac

SEQ ID NO: 18471 - DNA, 432 bp, Gossypium hirsutum
  Clone ID: LIB3146-004-P1-K1-G11
ccacgcgtccgagatgaagaaggtgttagattgttggaagagagagaaggtgaaggaagtggtaagagcagtgaatctcaggattagatcagttcatggttcgtacttcatattaggattatgaaatatggaagggatgttgcaaataagggctaaagggagatattttggtgatatgatccaaaaagagcttgtattcaatggcaaaaaacattgaggggataatgcattgtgggttttgctatgttgcttctttctattttttaggtttacttattatggccatttcttagtaaaaacatcaggggtttgagatcatatttgtttcttattgcaccggttaatgtaggttagtagaggaagaagaaatctcaaaggccctgtatcttggttttttttttttttggctttcattggctggccttttgtgtt

SEQ ID NO: 18472 - DNA, 107 bp, Gossypium hirsutum
  Clone ID: LIB3146-004-P1-K1-G3
gccatgtacacatgctctttattattgtagtggcataaagaggaagagagtgttttttctatcctaattattgggttttcactttaatttattcgcgtatagaaatg

SEQ ID NO: 18473 - DNA, 419 bp, Gossypium hirsutum
  Clone ID: LIB3146-004-P1-K1-G5
gagaaagtttttggatcagcttctaaattctctgaacaagaaggagatctgggtataggggatgatgttcaaatggaactatatggactccacaaggttgcaacagaagggccttgtcatgaatcacagccataggctttcatggttgcttctcgttccaaatggaatgcttggcaaaagctggggaacatgatttcagacgcggctatagagcagtatgttgcccttgtttcagataaagtttcagagtggacgaaatatacttccgatggtgagcgcaaattagaatctgcagaccaaggcgtagatggttctgtggctcctgatatagattcatttctagataaacatgccatttttattcctgaaaagaatgcagactcgaatactgtttcagctagtggtgtcataactgagag

SEQ ID NO: 18474 - DNA, 407 bp, Gossypium hirsutum
  unsure (1)..(407): unsure at all n locations; Clone ID: LIB3146-004-P1-K1-G6
cccacgcgttcnctacgcgttcgcccacgcgttcgggaagggatcatagactcggatggtgaagtcatcgcaaggggaaacgtaacgtacaagggtaatcaaaagccacttatggcctatgataaggtgcaaataactgtggatcaaggtttggctactctctttgcacctaaatagagacattgttttgatcttcaaagtttcatatgatgatggtcgcgggtccttttacgacttaagaatccaaaccgatctgattgaatcgatcgaatgcctctcgtttcataatcagtttcaatttaaacaatggaaatttcagtgtagccttcaatattttaactaataatcgcaccccatatatcaaccttactccggctgtcaatttgtattaatattaatggtgattc

SEQ ID NO: 18475 - DNA, 151 bp, Gossypium hirsutum
  Clone ID: LIB3146-004-P1-K1-G7
tattattaagaaatgaactccttgttggtatcaattcccaatagagtaaatggagtctcaagtaagtttcttttatgatttagggtttgttcgttctagttttgtgggtgatttaactgacatttctactggtcttttcttcttaatttta

SEQ ID NO: 18476 - DNA, 320 bp, Gossypium hirsutum
  Clone ID: LIB3146-004-P1-K1-G8
gttagtgaactcaattgttgcctctttcacctttatattatctttaatgtttttcttttccttattcagttattaatttgtatcagctcttttccttgcttacttaaagtttttggcaagaattccatgaattttctttgtattgggtattaaattctctttttttagtgctttgctctgcatgctttagtcgttttcttagagttttggagtgcaccccaagtagaaaagatgctgtcaacgaagtcggaatcggatatcacaagccttgctccatcatcaccgtcgaggtcttccaaacgttccgtatactatggtca

SEQ ID NO: 18477 - DNA, 347 bp, Gossypium hirsutum
  Clone ID: LIB3146-004-P1-K1-G9
ggcgatgtcgggagtttcagtgccattcatgagagcaatattggacggctatgatgggttgaaaggcgtgaagagattagttgatgtgggaggcagcgcgggggattgcctccgaatgattttgcagaaatatccccatgttgagggaatcaactttgatttgcctgaggtcgttgccaaagcacctagtattccgggcgtgactcacgttgggggtgacatgtttgagtcgattccagtagctgatgcaatcttcatgaagtgggtgttgacaacatggacagatgatgaatgtaaggcgataatggagaactgctacaaggcactttctgtgggagggaaattga

SEQ ID NO: 18478 - DNA, 367 bp, Gossypium hirsutum
  unsure (1)..(367): unsure at all n locations; Clone ID: LIB3146-004-P1-K1-H1
cgcgtccgatttcataaaaaccccaaatttctaagaactctcttgattcttctttggtttaatagatggaatggagaccaagtctcgcactctagagatcacggttttatcagcagaagacctgagaagcgacaacaaaccggtgaaaaagaacgcctacgtcgtcgtttcggtcgaccctttcaacaacaaggcgaccaaggtcgacggagaaggaggcagctacccttcgtggaacgacaagctggtgatggaaatgccgttacagacgcggtttgtaaccctcctagtcaaatgcaaggggtccagaggggaaaaaacggtggggttagcgaggataccggtgatggatntcgtcggagggtat

SEQ ID NO: 18479 - DNA, 214 bp, Gossypium hirsutum
  Clone ID: LIB3146-004-P1-K1-H10
gaagccggctgataagtacaaacctgctttgaaggccaaggaagggaaacgtgctaaaacagcttctaaatccccttctaagacaaaggctaaagcggcggctaaaccaaaggctgctcctaaggctaaatccaccgcaacgaagacgaaggctgtggctgctgtgaagccgaaggcgagtgcatctgctaagccaaaaaccgtagctaaatcg

SEQ ID NO: 18480 - DNA, 348 bp, Gossypium hirsutum
  Clone ID: LIB3146-004-P1-K1-H11
ctcgaggttgatctctacagcattgaacctgtcagcaccgtaactgttaaatggagtggagagccagtcttcatcaggcgccgaactgacgaggatatcaagttagcgaacagtgttgatctagggtctcttcgtgatccacaggaggatgcagcaagggttaagaatccagagtggttaattgttgttggggtttgcacacatctgggttgcattaccttgccaaatgctggtgattatggcggatggttttgcccttgccatggttcccattaagaagactctagcaagagtcccaagggtccggcaccatacaacctggaaagtcccacttacaccttcttggat

SEQ ID NO: 18481 - DNA, 372 bp, Gossypium hirsutum
  Clone ID: LIB3146-004-P1-K1-H3
atgatatcaacgaagcaaactcagagctacagtgagtccattcctcaccccacccaagacccctctcctaaaatcaagtggagaaaagatcacacacttgtctacaccgaactatagcttcacaattctgccagtttagatgagccaaaccaaagaagctcatgccgagccacaaatgaaccatttcacttaagatctgatattctctgcaccaatgatgaataaaacagttcattacaggttaacaccaacctatatgctacaggatcaaatggatggaaaatgttgaacatttgacgacaagctggcatctctttagatatgttctcctcgtcccaataatcttgccctttgcctgcaacacagagaaaa

SEQ ID NO: 18482 - DNA, 313 bp, Gossypium hirsutum
  Clone ID: LIB3146-004-P1-K1-H4
ataaaatagatagttactctctcgcttctctcttcctgtctctgtccacgaccaacaactaagattatccaaacggtacaacataatagacgacattgtttgctgctactgatagtgaagacccagggcattgtagaaaaacatggataccatcttcttccgcattatgacagcgaggacagaagctgtttgcaaccactctcttgagtctgagattcgatagagtaggaataaaattccataagattcgccatatagtaatagtaattttttatgggagatgtaaattccatagctttttatagaaaatttt

SEQ ID NO: 18483 - DNA, 288 bp, Gossypium hirsutum
  unsure (1)..(288): unsure at all n locations; Clone ID: LIB3146-004-P1-K1-H6
gaccgacccgcgcgaaaggaaggaaaaaggaaaatccaggggcttagatctaatcgggggagncctgatcttatctccggaccacgtgaaacagggaggatgtatgaagcaaatgttgatgatgtggggtacaggttggttgctatttatactccggtcagggaggatggcattgagggacaacctgtttctgcatcaactgagccaattgcagtcgagcatgatgtttataaagaagtaaaacagaagcttgatattggatctgtaaagtttgaggtattatgtgac

SEQ ID NO: 18484 - DNA, 448 bp, Gossypium hirsutum
  Clone ID: LIB3146-004-P1-K1-H7
cccacgcgtccgccgtcttcttcattttactatacgtgcgcatggtacgaaccctgactcgagccacggcttcaaagactgacagcggtccccggaagccgcgtggcataatgaagccccgccctgtgtcgcctgagatgcaagctctcgtgggagtcccggaaatccctcgaactgaagttcttaagcagatttgggcttatattaaagagcacaatcttcaggaccccaataacaagaggtttataatttgcgttgacaagctgaagaagatattttgaggcatatatcgggtcgaatttcttgaatatggtcgggtttgattattccttattttcttttatggattttatagtatgctatagtgtgtaattttatgtttcgatttatgtcatattacttttgttttattgtatcctattttttttatgttgttattttttttttt

SEQ ID NO: 18485 - DNA, 310 bp, Gossypium hirsutum
  unsure (1)..(310): unsure at all n locations; Clone ID: LIB3146-004-P1-K1-H8
ggttgccgtggttcggtccctggtcctacactcttgccagcagactgcatgactatttgggaatatgagatttttttatttggttcctacatcaaggaaatcataattgccnttaaaaaaaaaaaaaaaaaaaaaaaaaaaaaaaaaaaaaaaaaaaaaaaaaaaaaaaaaaaaaaaaaaaaaaaaaataaaaaaaaaaaaataaaaatttaaaaatataaaaaaataaaataactttttatttaattaaaataaaataattataatttataatttatgggggggtctcttttaaagaaaaaaaaataac

SEQ ID NO: 18486 - DNA, 388 bp, Gossypium hirsutum
  Clone ID: LIB3146-004-P1-K1-H9
cttgtcttaaacactaaacacctttgcgctttctcacacttttcctcttacgcataaggctgctctaactcagacacctccattgttacctcaacctcagcttttagctttagtttctcccttcgttaccctaatttgttctcatcaaccatggctgctactttactgttttcactgctcattcttgccatcactgcaggccactcaagtggtgcgacgggcaaatggtgtgtttgcaaagatggtgtgggtgatggaaacttgcagaagacgttggactatgcttgtggaaacggtgctgactgtaaccctatccgttcaaatggacctttgtacaaccccaacactgttaaagcacattgcaattatgctggtaacagctattttc

SEQ ID NO: 18487 - DNA, 312 bp, Gossypium hirsutum
  Clone ID: LIB3146-005-Q1-K1-A10
acaatagtcgaagcggaaggaaggcagagtgtgcacacccaagagcaaagttgtgattgctgacagtggtgaactccctctgtaattatcaaagctcaaacttgggtcttttctttattccaattaagtccatgataaatcctccaagatgaacctttttttttttttttgcttttttgcttttttgtcctagcagactcggttttgtcctagctataggaatcatatctttcacttgctctatgatatgttatgcttagcctttaaaacttataagatttgggttactgggtgatttccatcttatttttt

SEQ ID NO: 18488 - DNA, 420 bp, Gossypium hirsutum
  Clone ID: LIB3146-005-Q1-K1-A11
cccacgcgtccgctcaaatcacttgtatctctcagttcccgatccgctgccgtagcactacttgtgttggtggtttcagtggcagtgcagacccatactacaaatgcacaaagctgcccgaccgagctgacgagcctgaacgtgtgcgcacctttcgtggtgcccggtgcagctgtggctaaccctagcattgactgctgtaacgcactccaatcggtgcaccatgattgcctttgcagcactctaaggatcgcttctcgactcccttctcaatgcaatcttccaccactcacttgtgcttgaaacaaaaacaatggtgctgcctgcttaatgggtaggaaaatataataacgccatggaatatcgatacctccctgtttttttctttcttttttaatgggtaataataagcaatggtgg

SEQ ID NO: 18489 - DNA, 381 bp, Gossypium hirsutum
  Clone ID: LIB3146-005-Q1-K1-A12
cccacgcgtccgcctggttcttctactgctctacattgttattggagcttgctttttcgtatctaaaacacctctaaaccaagtaaacatcacaaactcgggagctgaacttgccacaatcctcagagcttgataagctttgccgtcccgggggatgtcgttactccacccccccccccttttgatgatgaaatgtttgaaacttgaacagagatttcatgcattggttattctttcatatctggggcctggcggaaagctgacaatttgcagttactaggccgcatacaagttgtcatgccttcaaagttgagatggatactatctataagtataccgttgaagcttgatgaagacaggctatacaatacacagcacatt

SEQ ID NO: 18490 - DNA, 401 bp, Gossypium hirsutum
  unsure (1)..(401): unsure at all n locations; Clone ID: LIB3146-005-Q1-K1-A3
cttccatccagcanatcttcaattaaattggatccatacaattggcatataaagagatggagaatggaggagtagagaacgcccacgcccacggcgacggcaacggcaatgggcaggcggcgtcgtatacttattgtgtgagagaaacgacggcggacgctgctccgctccctgttcctaagaagctcactgctcaagacatcctttcaactcaatctcagtctacatctattgtttctgtttggaataaggctggaacttgngaggagaaaaaccttaataactgggctactcaaagattaaaggaattgcttaaatctgtgggttcattggatttatcttgtggcaaggctgaaatttctgatgtaaccaagtgtgttggcgatgcttttttggtgact

SEQ ID NO: 18491 - DNA, 404 bp, Gossypium hirsutum
  Clone ID: LIB3146-005-Q1-K1-A5
attttgttttctctccctccaattaagatgcagatcttcgttaagaccctgaccggcaagaccatcaccctcgaagtcgagagttccgacacgatcgacaacgttaaggcgaaaatccaagacaaggaagggatcccaccagaccaacaacgtctcatcttcgccggaaaacagctcgaagatggccggaccttggccgattacaacatccagaaggagtccaccctccatctcgtcctccgtctacgtggtggcatgcagatcttcgtcaaaaccctgaccggcaagaccataactttggaagtcgaaagctctgacaccattgacaacgtctaggcaaagatccaagacaaggaaggcattccaccagaccagcaaaggctcatatttgccgggaaacaact

SEQ ID NO: 18492 - DNA, 395 bp, Gossypium hirsutum
  unsure (1)..(395): unsure at all n locations; Clone ID: LIB3146-005-Q1-K1-A6
ggaaggtgaagaatgatcaactcaaggcagaggctaaagcaaagggtgaggtcattaccacaaaaaggcagtcagaaagggcctagacctggtttcatggtggatggtgctacacttgaaactgttacgcccatcccatacgatgtcgttaatgatctcaagggcggntactaaatctactctgtttnttgtttgcggtatttgtttggtttccttttttttttttggcaaaacatcagtggtgaactgaattaaacatttggaagtgctgttttctttagtatattttgaagaggtactgaatcttcagagattttaaatgtatgatatcattttagaagatatggatatgcctatgataaagtgtaatatttggttttaaaaataaatttata

SEQ ID NO: 18493 - DNA, 358 bp, Gossypium hirsutum
  unsure (1)..(358): unsure at all n locations; Clone ID: LIB3146-005-Q1-K1-A7
cccacgcgtccgcggacgcgtgggttttagtaccgatttagaagtttccattcccgattaaagccatcatcggcccgaagagctttacagcccaaaatcttatttccgggaaatccaccgataatcgacgaactctctctcgatctcacctaagattcgccgataatcgaaattttaaaaataacccgacaacaacaaagatgaagaaagaagacacagtgaaactcattagcgctgaaggaatggaattcgttatagacaaagaagctgctatggtttctcaaacaatccgtaacatgcttacttctccaggtggtttcgctgaggcggagcatggngaagtgactttcccggagat

SEQ ID NO: 18494 - DNA, 422 bp, Gossypium hirsutum
  Clone ID: LIB3146-005-Q1-K1-A8
cccacgcgtccgcccacgcgtccggattgctcgtctgtatcatgctgcaaataccaccagagtttgccaagatggcctaaaaggaaccggttttacagccttggctgctaagatcgaggctataattaagctctgtgaaatttgtgtcgtctccaccaacttctttgttaacggtgctcattaaaagcttttacccatgaattgtgtgtgcatgtaatagataaataaagggttcccttttgagtattgcacaaaatatttctaatggaatccctcgtaatattttacatcttcaaataccaaaatcaactatcagtctgtcatctcaagtctgcttgaaggcttaaaaaaattgcgatgaagaatattcacatatgacatacgttgtaacaaatatagaagatcattggatacccttcaca

SEQ ID NO: 18495 - DNA, 370 bp, Gossypium hirsutum
  Clone ID: LIB3146-005-Q1-K1-A9
aatggatcttgcaaggaaagaagcatacactcaccctattaaagcatgcattgagggattggtttggaggagagataactaatctataagcaaaatagcaagcattcattaccatgaagcactcaatcgttgtttgaaagattagaagaaattaccataaaacaattaaatcatctttaacccttcttataaaaaagttatgtacttgcaagattagaagaattaacaaaaaaataaaaaacagttttcttatttcaagaaaaaaaaaaaaaaaaaaaaaaaaaaaaaggaaaaaaatatattaaatataaataaaaaattaaataaattaaataatttatataaaaatataaatttggggcggccgttt

SEQ ID NO: 18496 - DNA, 427 bp, Gossypium hirsutum
  unsure (1)..(427): unsure at all n locations; Clone ID: LIB3146-005-Q1-K1-B1
cccacgcgtncgaaaggattctgcagcagctacactgcacacttgaggaaaaattagagtgtgttgtatccttacttaagaaggaagcctaccaatggtgggatactgtatcccatatagttcaaccctcatagttgacttggaagtactttctagcggaattttaaaagaaatacatcaatgagatctatctggagcaacgaaagagagaatttttgtatcttgagcagaataacatgactgttgcagagtacaagagggaatttgtaagatgttaaggagtttgtgtctacagaagctgatatatgtgctcagtttgagcctggtcttaattatgggattagggtatacctaatagctctaaagattcaagagttctctactttagtcaagcgagctttgaaagtagaacaggtcatgaatgaat

SEQ ID NO: 18497 - DNA, 405 bp, Gossypium hirsutum
  Clone ID: LIB3146-005-Q1-K1-B10
gaagtagcttataagaagcagcgtctgggtaaaagctccaaagcaagagatagtgtatttgcagctctgtgttcgaccctaagccaggcagtgctgccaagtaagaaaactacaaacgctatgcctttatctagtcaatcagctgaagggaccaaagccttgggtgagggaaatcatacagagatggaatctagcagtcctagaagttctggtaaaagtggttccgaagaggatagccatagagagaaggaacctcctagaaattgttcagattgcttgcatagcccctcagacaatagacaattaagtggcgatgactgtcccttggtaccaccaaaatcctcacctgaaatgactgtaaatggatcttaagttattttggagaatcatcatgcgcagtgtcac

SEQ ID NO: 18498 - DNA, 410 bp, Gossypium hirsutum
  Clone ID: LIB3146-005-Q1-K1-B11
catgtattcaaatgctgggtcaagggtaggtgttccattttcctttgatgagctttctcatttaaagggttatagagatgctttgcctttacagttgggttcaggttctggcactggatccctttggtctagacagccttttgagcagtttggtgtagctgacaaaagtcacactgctggcaatgaagcagttggaagtgggttgaactcagtaactcgggatactgcttctggtgtggatttagagtccaagcttcttcaatcttttcgacactgtattgcaaggctcttgaaattagatgggtctgactggttgtttagacaaaatgatggagctgatgaggagttaattgatcgtgtagcagcaagggagagatttctttatgatgctgaagctagagagatgagcc

SEQ ID NO: 18499 - DNA, 411 bp, Gossypium hirsutum
  Clone ID: LIB3146-005-Q1-K1-B12
aaatggacctaaaaacgatgagattatagttgatcacagggtctcttttgaattgagcggcgaagatgttgcacgctgtctgaaaaacaaatcattggtatcaagcagaaccatgccggattatgaatatccaaaggacttggtggcgcaaggcaggatagaaaaagatgaaaaggtttcaggagaagctgaagaggaccattgttatcaaaagcatcgttcagttactcttgggtcaattaaagaattcaactttgacaacagaaaaggagaagcttccgagaagcccaccgtcaggtccgagtggtgggctaacgaaaaggttgccggaaaggaagctaggccaggtaacaattgtactttcttccctatgttacagccggaggtcagttgattttttaactatgcaac

SEQ ID NO: 18500 - DNA, 419 bp, Gossypium hirsutum
  unsure (1)..(419): unsure at all n locations; Clone ID: LIB3146-005-Q1-K1-B2
gctacttacatacggccggagaatcccgtatgctgaattatttgctaggatcgatgctgttgatccagccgccattaaacgagttgcaaaccgatttttctatgatagggatatggtgattgctgcgattggcccagtccaagatttgccagactacaactggttcagacgccgcacctactggaaccgatagtagattatcttgctttagtttgataatggtacagcatctttcgtgggcaatcgaaaccaaaggttggcattttttttattcaatttttaggatcctttagctntattgttatttaataaaaacatgtttcagcgtttttgttgaaaattacaagaaatttttgatgttgataatgtttgggttgcatttgtatatttggatcttacctctaaatggcatttttttc

SEQ ID NO: 18501 - DNA, 411 bp, Gossypium hirsutum
  Clone ID: LIB3146-005-Q1-K1-B3
cccacgcgttcgcccacgcgttcgcccacgcgttcgactggatcctgaggcatggcaaaagcatcccaaacgagaaaggtcttattgtttcttcattggaaaatggcattcgccttgaataccaattagcatctgaaggtgttgagcaggctgagttggctggaaagttattcctcaaggaactgaaggaaaatgacataccacttgaaaatgtgcgcatgtgttactcaccatttgcaaggacaagacatacggcagaggttgttgcatccactttgaatcttccatttgagggccctcaatgcaaggtcatggaagatcttcgagaacgttactttggtccttcgtttgaacttctgtctcatgacaaatatacagatatatgggcaatggatgaaaaagatccattca

SEQ ID NO: 18502 - DNA, 411 bp, Gossypium hirsutum
  unsure (1)..(411): unsure at all n locations; Clone ID: LIB3146-005-Q1-K1-B4
tcttatatgacatcttctgggtttttgtttcaaagaagttgttccatgaaagcgtgatgatcgtggttgctcgtggtgataaaagtgggcaggacggaattccgatgttactgaagatcccacgaatgtttgatccatggggtggttatagcataataggatttggtgatatccttttacctggattgcttgtagcattttcactcaggtatgattggctggcaaacaagtctcttcgagctggctactttgtttgggcaatgattgcttatggcttangtcttcttgttacgtacgttgcactaaatttgatggatggacatggtcaaccagcactcctttacatttgtccctttacacttggaaccttttgaccctaggagaaagagaggtgatctagaaattctctga

SEQ ID NO: 18503 - DNA, 425 bp, Gossypium hirsutum
  Clone ID: LIB3146-005-Q1-K1-B5
ccctcccatttatatgcaacttccaagctttggcatatggtttacaactctttagtttatgcaggcaagaattacatgtttctgctttgcaatggactgcttgttttaattgccaccagctctggtttgatcggtagttgtagtgtagagactgatattaaagctgaaaaggctgtgaagatgagcaagggaggtagtcaaacagaaccagaggcagagccaaaagggtccatttcaaaagagacagttgttgcagaatatgatcaaagagaagaagaggtggccttggttgtagaactagaagatgaaggtgaagaagatagaccaaatgagggtgtttcagtggaggaggatgaagatgaagatgaagaagtttgagtcaatgtgtaatgtgaagattttattagaaagatgaaagaagggat

SEQ ID NO: 18504 - DNA, 421 bp, Gossypium hirsutum
  unsure (1)..(421): unsure at all n locations; Clone ID: LIB3146-005-Q1-K1-B6
gctacaactgcaagaatggaaaggtataaaattttggaggagcttggagatggtacatgtggtagtgtgttcaaagccttcaatatagaaacatttgagattacggagaaagcatttctcaaacaacccaaggtgtttttaagaatgtgaaaagccaatgaagcaaggagttctcactcctggacgtgttcgtcttttgcttcacaaaggtctgtggactttgaaatatttttcagaggtattaatttttctctttttcttttcttctttgctgagtttttgaattcttcctgtcttttcttttctgtgaatctgatggaatgcaagtggtattggtcatgtaattacgattagaaatatntcttgtgaatnggatattgaggtgatttttctctggttttttatagctgaaagtttggat

SEQ ID NO: 18505 - DNA, 102 bp, Gossypium hirsutum
  Clone ID: LIB3146-005-Q1-K1-B7
ataatttctgctcctacaataagacatctatctctctatcgagaatgactagctggtactatcatcgtaggtcgccacaatgagagctctacaaagtctatg

SEQ ID NO: 18506 - DNA, 52 bp, Gossypium hirsutum
  Clone ID: LIB3146-005-Q1-K1-B8
gataattctccagtttggtctgattgggctggctgcgacggtgtaggcgctc

SEQ ID NO: 18507 - DNA, 290 bp, Gossypium hirsutum
  Clone ID: LIB3146-005-Q1-K1-C1
caccatctttgcctttattggttactgcttccttaacctcttccacataccatgactcggaatgatatggtggtgaagtccttttcctcccaataacacttccaagccctatctctttgggtcatgggataccgacttgagattactttttgcaaatcaagtcacagcaattgggttttaccttgaacctgaagttgagggcatttacaacattgggagggtaagcccgggaacgtgctagctgaagaagataaccttcttcgaggctcttattaaatgctccagtggag

SEQ ID NO: 18508 - DNA, 421 bp, Gossypium hirsutum
  Clone ID: LIB3146-005-Q1-K1-C10
cccacgcgtccgcccacgcgtccgcagcaatcacaatggaaagaatcttcggcacccaccgagaggatttatatacccataacgtctcataggaataataatgcagctccaactgttcagaggtcagacactgcaataggtttaactcaagagcgagcatatatgccaacatctcataaaaatgacggcctggttcctgtttcaaacaggaacagaagcatttctccagcttccgaccagatatacatgatggcaactactcacctgaatgacaccatgggtcaaaggattcagagaactgatgcacctatgttcccaacttctgagcgcatatatttacctgcaacccctcacaggcccgaccacatgggttcgacctctcaaaggaatgatgttgcattacgaccaggctctgagagtt

SEQ ID NO: 18509 - DNA, 414 bp, Gossypium hirsutum
  Clone ID: LIB3146-005-Q1-K1-C11
caaaaatatcttcactgttcgtttgttccttgtttgaaaatcgcagtaagccattcccaaaaattttggtgcatgatatttgtgatccaagacagatttaataactgccagacttcggtgcttataggacattgcctgaagatgtgataacaatcttcttccctgtagctacaacaagggcaactggcatttttcactattcttctacatctgagattacccaaagtaggaatgtaattccaagagatgcaccagattatgattgtaatcttagatggtagctgtaggatccatagctttccaaaaaatttcttaatttcgggttgtaataaataattactaggatccagattagcattgtgtaatagtttataggcactacgaactgagtattcaccagtcggttcgcccttt

SEQ ID NO: 18510 - DNA, 422 bp, Gossypium hirsutum
  Clone ID: LIB3146-005-Q1-K1-C12
ggttacctctaagagttatagctcttgcaaggtatggttagttggagatgacttgaccgaagaagagcaaagaaaggcaaataaaggaacactatttattcccttttcgcaacttccaccaaaaaaattgcgcaaggactgcttctatcacacaacaccagcgatgcatactccgacggcccttgagaatgtggattcttgcgagaactggttgccaaggagagtgatgagcgtatggcgcatagctgggatactgcatgctctggaaggatgggaagagcacgaatgtggttacaccatgtctaacattgacaaagtttgggaagcatgtctcaagcatggatttcagcctctgaaggtcccaactcaatcaaagtcctagaagatatttggcgatttatctaattaatctacttgatatc

SEQ ID NO: 18511 - DNA, 408 bp, Gossypium hirsutum
  unsure (1)..(408): unsure at all n locations; Clone ID: LIB3146-005-Q1-K1-C3
ccacgcgttcgccagaaaccgagtttcgacctcccatgtctgaggttgtgcaagctttagtgaggttagtgcaaagagcaagcgtggtcaaaaggagatcgagtgatgaatgcggattttcatatagaactccagatcatgagattatcgacttgtcattttgagtgagttgaaaccagaagagaatcaaactcaagaaatggaaaaaaggaaaaagtgaaaggaaaaagaggttctgtaattatatctcacattgtcagaaagttcatagtttacactgcaaatatatagctgtattattggaacattatgatgcatattcacgttttgcatcttcttaataataattaaaaaaaggttttactttatnaaaaaaaannnnnannnaaaaaaaaaaaaaaaataaaa

SEQ ID NO: 18512 - DNA, 425 bp, Gossypium hirsutum
  Clone ID: LIB3146-005-Q1-K1-C4
gtggatattcgcttatctcccaacctcacttttttcgctaggataaactacgatttactcggttcgacttatctcccgatctcgcctcccttatgataacttcctaatgttgtcaagcctagggtttaggaacgtttaatctataccaactaatcctattatgaactcttgttcttttgttaattaactgacgtaataaattaattagttcaataaacaaatcatgcacgatatgaataaagtgctagatttattctaacattcatacaaatattagttgatcatgctaacgaaatataaataaaagaataaaatagaagagtaaagagaatgctcatgaatatatattggctcgtatcgctgatcatccatttttgttcaagctcttccattaaagcttggaatgattatttttgcagggggga

SEQ ID NO: 18513 - DNA, 411 bp, Gossypium hirsutum
  Clone ID: LIB3146-005-Q1-K1-C5
atttagcagcaataggaattctcaatatgaaatgtcatggactgatgcctcctgcacgataacaatggactgaagctctttaccgctgtgaaagcattgtaaaacagggaatgctacattcacgtggtgaattacttctaatgctagatgccgatggggcttccaaggttactgacctagaaaaacttgaaaaccaggtttgtaaaagactctgaccacagtcactgaagacatactgtgtgataaaaattatctaattttttgtacttcagatccatgcaattgtgagaaaagattatcaccctggtgattcagtagccggagaggcaacttttagaatttctgatatcccaatagttgcatttggatctcgtgcccatcatgaggagaaagctctagctacgaggaagt

SEQ ID NO: 18514 - DNA, 421 bp, Gossypium hirsutum
  Clone ID: LIB3146-005-Q1-K1-C6
gtcctatcttaaaggagctgctgaaatgtttgaaaacggagttctagctgttgtggatgtgaagtttttagctgacgttcatattcgagctttcgaagattcatctaccatcggacgatacttttgcttcaatcaaatagtgcatactgaggaagaagctgttaaacttgtagaaaccctgagccctttgttatcttcacaacccaagtgagtctattgtaactctgttattgtcattaaaaagaaaataaaaatagtgacgtcctcaatttatcatgcctcttaaatgcagatatgaatgccaagggagcgaggcctatgctgagaggttgagaaccaagaaattgaacatattggttgaaggcactgcataattgtgaaacttgattttacctttttttcctatcgattatagcttctt

SEQ ID NO: 18515 - DNA, 422 bp, Gossypium hirsutum
  Clone ID: LIB3146-005-Q1-K1-C7
cccacgcgtccggttcctttgaaccttcaaaatagacctgcttggtacaaggaaaaagtttaccctgaaaacaaggtgccgtccttggaacataatggcaaagtcattggggagagtcttgatttgattaaatatgttgatagcaacttcgaagggccgtctcttctacctgatgatgctgacaaaaaggagtactttaagacgttgttatcacacatggacgaatttccagggatggtgtatgctacatttaaaggagactcaacaaaggatgctgatgctgcttttgatctcttggaaactgctcttgcaaaatatgatggtccattccttctatgcaacgagtttactctggcggacattgccttcattccttttgtcgaaaggttccagatctacttatcagaggtgtttaattatga

SEQ ID NO: 18516 - DNA, 406 bp, Gossypium hirsutum
  Clone ID: LIB3146-005-Q1-K1-C8
atcagatctccgggaaaaaggcctttactggcgcgagcggaacaagctcgagagtaccgagttctcgttttcccggttcctgactccctacttggcgaattacaatggttgggcgctgttcattgactgtgatttcctttacttagctgatataaaggaattaatggagttgattgatgataaatatgcgatcatgtgcgttcatcatgattataccccgaaagagaccacgaaaatggatggtgcagtgcagactttgtatcctcgaaagaattggtcctcgatggtgttgtacaattgcggtcatccgaagaacaagggtctgactccagaagttgtaaacaatcaaacgggcgcttttcttcataggttccagtggctcgaagatgattaaatcggatcgatc

SEQ ID NO: 18517 - DNA, 348 bp, Gossypium hirsutum
  Clone ID: LIB3146-005-Q1-K1-C9
cggacgcgtgggttcggaactcgggtttactcccacttcagctcgctccaaggtaatggtgaaggacagcactgtattggcacagggtgccgtgggggttgctgttgccgccgcagtggtgatcctaagctacttttacgaggtccgcaaaagaatgaagtgaaagccatattactcttttctataacagaacatccgttacaaatttagcagaacttaggtcaatcatctggctaatagttatgtagttcatgttttctcctacatgatatcgggtcctacaaaccgtattggcagttaaagatcgacacaatactcttagctcatctatttgaagtaaataacatg

SEQ ID NO: 18518 - DNA, 360 bp, Gossypium hirsutum
  unsure (1)..(360): unsure at all n locations; Clone ID: LIB3146-005-Q1-K1-D11
cggactcgtgggcggacgcgtgggtatgaactagtccggacgcgtgggtgagtattagaatattggttgtaacccatttctgttcacttatagattcttatctcaaagcttgagattttatgggaggtgtctacctaacaatgcccttaaatttatggccatctgtgataaggcttcacatattttttacagttgaacaaggtttcctcttaccagttgattttggtttaaagtaatacttgataagcttcctcctgatgcttgtttcatgcgtnaattaataaaccttgctctttctgattattttattttatttttttattttattttttttttttagttatatatattttttatttt

SEQ ID NO: 18519 - DNA, 410 bp, Gossypium hirsutum
  Clone ID: LIB3146-005-Q1-K1-D12
cccacgcgtccgcggacgcgtgggtggtgatttacctagctctggtcaggtctttgcagttcctgttgctccaggagatgttatcattgctggcacagatggactgttcgataacttgtacaataacgaaattactgcagtggtggttcatgcagtgagagctggtttggggcctcaagtgactgctcagaagatagcagcattggcaaggcaacgagcacaggatagagaccgacaaacacctttctccactgctgctcaagatgctggattccgttattatggtggaaagcttgatgacattactgttgttgtgtcatacattaccagctccgaagaaaagaacaagtctagatgaaattagtgaagctggtatggcctgggatccaaatttcggttataagttgatc

SEQ ID NO: 18520 - DNA, 409 bp, Gossypium hirsutum
  Clone ID: LIB3146-005-Q1-K1-D2
cgcctaactaatgcccagtcagaaaatactgaaacctaatctggcatctggatatcatttctttttttcttttgatgggtcagtttattgggaaagttgttctttcaaaaactgggtcatctttttttcttatactttcctcttagttcttttcttccccattcctttctcaatctggttcatgtctcctttcaatcctttgttgagtttcagcataccccgggacactcattaccaggtacatctcttcctttctttttagagtttttgttgccaaaatatgcacaagagcgtttgcggatcttggtgtgtgtttgaacatgaaacttttggatctgcttagtttcttgtgaaaatcatatatatatgctccaatatgtgatcgatcttgactttttgttgtacattt

SEQ ID NO: 18521 - DNA, 416 bp, Gossypium hirsutum
  Clone ID: LIB3146-005-Q1-K1-D3
cccacgcgtccgcggacgcgtgggataatttttgtagcagggatatgtgtacttctgttcccagtagagaccatgggtcgggatttgagtgatagcatttccagttcaaaacaaacgagtgggttgatttaaaatagtgagggctttccctctttctgtataacagttgttttattaccaaaaaaaaaaaaaaaagaaaataaagaagtccttggacttccatatcaaaatagcttttctaaatattttctccctgcaaacatatttttcgttacattttcgagaattcagtagcttttatggtttagtatcgggggtgggggaacctttatgacgtcttcctcttttgatggcatccatgtcgggaaaagaaagcagtttacaatggcagcattaggatttcattttggggaagc

SEQ ID NO: 18522 - DNA, 425 bp, Gossypium hirsutum
  Clone ID: LIB3146-005-Q1-K1-D4
caaaaaccctagggttctagccatttgcttcttcttctttttcactgtaggctttctgttctaaatgctattgcttttatatccaaaattcaacctttcaaaagtagtaacttaaaagaaaacaagatttggtaaaagctagaaactgaaaggcaatggagggtagattggcgaattcttggcgattgacagtgaacgacaagaatttcatcaaaactgcgttgctttctgaaattcgaatcgatggtcgaaagccctttgaattccgtaagatttcaatcaagtttggcagagaggatgggtcatcagaggtgcagctaggccagactcgtgttatgggaatggttactgctcaattggttcaaccttatagagaccggcctaaggaagggattctttcaatcttcacaagattttctccaatg

SEQ ID NO: 18523 - DNA, 423 bp, Gossypium hirsutum
  Clone ID: LIB3146-005-Q1-K1-D5
atttatctcttgactgatcagaacccaattcaagtcattgttgatgctattatcaacagtgggccacgtgaagatgctactcgaattggttctgctggtgttgtcaggcgtcaggctgttgatatttctcctcttcgtcgcgtgaatcaggccatctatcttttgaccactggtgcacgtgagtctgcattcaggaacattaaaacaattgcagagtgtttggctgatgagcttattaatgctgctaagggatcatctaacagctatgccatcaagaagaaggatgaaattgagagagttgctaaggctaatcgttgaggaattggaagaagattaaacaccatgggagtagaattttgttgttttagtcagtactttataagccgtttttgtattctggacatgctatgaatgtctcgtttt

SEQ ID NO: 18524 - DNA, 256 bp, Gossypium hirsutum
  Clone ID: LIB3146-005-Q1-K1-D6
cccacgcgtccgcccacgcgtgcgtggacgcgtggtactcgcaattctactagcaatttctctatcaagtgcgctatcaagagagagagttatgtgacatattttgtgacgaggaaaaggactagggttgggtctttggttggatgggcgcatggaatcgcacgttaaagcatgagtatgaccatcattatgaccaccattgtgggcacagatgatgataagtatttcacgaataacttcttagagacagagttgc

SEQ ID NO: 18525 - DNA, 382 bp, Gossypium hirsutum
  Clone ID: LIB3146-005-Q1-K1-D7
atcgaattaaagtagaatcagaagcaaaaatcgccgcggaaaacaagatgtcggggcagcaagaagaagataagaaacccggcgatcagtccgccgctcacatcaacctcaaagtcaaaggccaggacgggaatgaagtcttcttcaggatcaaaagaagcacacaattgaagaagctcatgaatgcatattgcgaccgacaatctgtggatttcaactcgattgccttcttgttcgatggtcgccgcctgcgaggtgagcaaactccggacgagcttgagatggaggatggtgatgagatcgatgctatgcttcaccaaaccggtggtactgtgtgaagcgagtactactttgccgcatttagtatctgatgaggtagtta

SEQ ID NO: 18526 - DNA, 412 bp, Gossypium hirsutum
  Clone ID: LIB3146-005-Q1-K1-D8
gaagtatgctgagcactgcatgtacaatcctgcctaccaaagctaccggtgaaggtagttagaacgcctctacttttatcatattatttattaaaaaaaggaagcccagtttaaccattccttgaagtcttgtatttggtcttttttgtttgatatctttgtcattcttgaagttttgttcctcgtgttcatctttgctgtcttgtaaggtacttggtgggtaagaaggtgaatggtgggtggtgtagttagatcaaatgaagtcaaaagtagcatttttttttttttgaaaaaaaatgtggttatggactggaaaatgtttcacattacatgaaatagaaacttgaaaggtgtcagaatcagtgcgagtttgcttgccctttatttctcatctactcaaagtcttttcttt

SEQ ID NO: 18527 - DNA, 262 bp, Gossypium hirsutum
  Clone ID: LIB3146-005-Q1-K1-E10
cccacgcgtccgcccacgcgtccggtcggagcgccgaacagatctagacagaaaacaataaaaccagaataaaacctaaagacgcataccagaggcggcagacagaaacgtgctagggtagcagactttaccattagtctacaactatatttaaaaacaggcttaatgcacattttagttattgaagtatactacttttttcactttagtccttacaatttcttttagtccactttaatatttaacgttatctgatttttcc

SEQ ID NO: 18528 - DNA, 323 bp, Gossypium hirsutum
  Clone ID: LIB3146-005-Q1-K1-E2
aatgtttgaaggatgctaaaatggacaagagcacttgccatgatgttgttcttgttggtggttccactagaattccaaaggtccaacaacttttacaagatttcttcaatgggaaggagctttgcaagagcatcaaccctgatgaggccgttgcatgtggtgctgcagtccaagctgctatattgagtggtgaaggtaatgagaaagtgcaagatctcttgctcttggatgtcactccattgtcttccggtttggaaaccgctggtggtgttatgaccgttttgattcaaagaacaccaccattccaaccaaaaaagaacaag

SEQ ID NO: 18529 - DNA, 417 bp, Gossypium hirsutum
  Clone ID: LIB3146-005-Q1-K1-E3
gattaactgagagtggtttccaattcttggtgtgcatcatgaaactcatggcccctttgcctcttttctgtgtaatttacagttgatggatacaaatgcttagctttggtatattatcagagagtatatctccaattcagaggtatatttgatgagataattattgtgttctgcttggaacttgtttgttagagctattgtgttttgctgttgttaagttcttgaaggggaaattggcatgaatttattgtaaatttttatttggtattggtttattagtatatattatcctcttaaatgtgaatgtacccaagggggtgtgactgtgcgcatgcactaaagtaatagcttgtgtattcttgtgtggctgagcattagcaactacttttagttcaagggaaaaaggtgccatttcct

SEQ ID NO: 18530 - DNA, 406 bp, Gossypium hirsutum
  Clone ID: LIB3146-005-Q1-K1-E5
gttctctgctatttcttttaaaattttcaggatgcaacaagcaattccatacaaatcctggcctctgccatgcatcgacgcaacttcccatcgtgcccgttcaacaacaacacttggccacaacggacgcgggaaagacgtgcttaatatagtgtcggagaacgcggtgatagtgttggccaggaagggttgttgtatgagccatgtagtgaggcgtttgctgctgacactgggcgtaaaccctgcggttcatgagattgatgaggaggatgaggctggtgttttgaatgaattggggacgatttgcaaaggtaccgaaaacaataaaatggttcagcttccggctgtgtttataggtgggaggttgttggggggattggataaagcatggctacgcatattaacg

SEQ ID NO: 18531 - DNA, 384 bp, Gossypium hirsutum
  Clone ID: LIB3146-005-Q1-K1-E6
aggctagccactgattttattgctgaacctttgggttacacaaacaaaattcgacctttccttaacaagagattgagaccagttgatatcttgcatggtgttagtttcgcatcagctgcttctggttatgatgagctcactgccaatctctcacatgtcctgccggtttccaagcagctagagtatttcagggaatataagatgcggctgaggcaactggttggagcgaggaaagcagaaaatattataaaaaatgcggtagctgtgatgagtatgggcacaaatgactttcttcaaaactactatttagaacccattcgccccaagcagtatactttggaagagtaccaaaattacttggcttcttgcatgtctgacgatgtt

SEQ ID NO: 18532 - DNA, 421 bp, Gossypium hirsutum
  Clone ID: LIB3146-005-Q1-K1-E7
cccacgcgtccggacccacgcgtccgcccacgcgtccgggggattgctggagttccgttcgattcagtgatgaagaaaacaaagacattagaagacaattgggtgccttgttggaacgaggaattcgaattccatctaactgtcccagaactggctctacttcgggtagaagtgcatgaatacgacatgtctgaaaaggatgactttggaggccaaacatgcctaccaatttcggagctaagaagtggtatccgagcagttcccctcaacagccgcaagggcgagaagtacagctctgtaaagctcctcatgcgcttcgaattcatcgatccataggcacccaaagttgagttctgggccatactttcaaaccaaccttcaatctgtttgacgggatgtgagcttgtgtgcaagtttacct

SEQ ID NO: 18533 - DNA, 320 bp, Gossypium hirsutum
  unsure (1)..(320): unsure at all n locations; Clone ID: LIB3146-005-Q1-K1-F1
atgtggtatcgtgtgacagctcaaaaagatacaaaaaaaacccgcctgtcaacattggtgcaaaaaaatgggtggatattggactttggaaactctcccaaagagtgtttcaaaatcttaaaatcacgtggttatcggattgctacaacacacgtaggaatggatgccgtatccatatacgacatggattggtcaaagccaactgcaattgtagttgggaatgaaaataggggaataagtgatgaggcgctggaactgtcaaatttgcattgtagtattccgatgaaaggcatggntgactcttttaatgtttcaatggc

SEQ ID NO: 18534 - DNA, 213 bp, Gossypium hirsutum
  Clone ID: LIB3146-005-Q1-K1-F10
cccacgcgtccggagaaatctgagtaaatttctctcatattattttagtttatgctctgatcgtcgagttgcaggtttggttagggaagtcttgaattatgagttctcgtaagacataattttggatggttttagtcaaaattttcatacttagtatttcttttcatgtaataatgtaccttgtatatatctgtgatatatatcacttacatt

SEQ ID NO: 18535 - DNA, 367 bp, Gossypium hirsutum
  Clone ID: LIB3146-005-Q1-K1-F11
gaaatgagaaggttcaggatctattgcttttggatgtcactcctttgtcccttggactcgaaactgctggtggtgttatgactgttttgattccgagaaacactaccattcccaccaagaaggagcaggtgttttcaacttactctgataaccaacccggtgtcttgatccaagtttatgagggtgagagagctcgaacccgggacaataatttgttgggtaaattcgagctctctggcattccaccagcacccagaggcgttccccaaattacagtttgcttcgacattgatgctaatggcatcttgaatgtctttgccgaggacaagactactggccagatgaacatgattaccattacaaatga

SEQ ID NO: 18536 - DNA, 393 bp, Gossypium hirsutum
  Clone ID: LIB3146-005-Q1-K1-F12
gaaggtatactcaagcctgtgggatgcagatgaatgggcgacaagaggcgggctggtgaaaaccgattggtcgaaagctcctttcaaggcgtattataggaattttaatgcctattcatggaactccgtcggaaccgatgtttggcgaactcgggcactggatgctactggaagaagatggctccgatgggcacagaaataccacatggtttacaattattgtgctgatttgaagcgatttcctcatggtcgtccctttagtgtaggcgctctaggttcctttaaccgcccaaaaagaatgttgcttcaatctaggatttaattttgtctattgctactgtaaatttgttctatttatgggttaaatttggaaattcacccattttatttttt

SEQ ID NO: 18537 - DNA, 357 bp, Gossypium hirsutum
  unsure (1)..(357): unsure at all n locations; Clone ID: LIB3146-005-Q1-K1-F3
gtgatccaagcatcatcagccaaaggctacctgtcatcatgcatcagacccaaaagcttgtagtccctggtaatgtaaattgccacgcgcaacagattcattagttgaatatgtagacattgcgaatttgatccatttcggtggattcataagcaaaaaaaatcatgttcatgcacttgatgtaccattaacaagcaaaatttatgatgtgattttgagtgtaagcaaaanaaaaataaaaaataaaaaaataaaataaattataaatataaatataatatatattaaatttgggcgggngtttttaaagttccaagtttattttcgcgttcatgcgacttaatagctcttttttag

SEQ ID NO: 18538 - DNA, 418 bp, Gossypium hirsutum
  Clone ID: LIB3146-005-Q1-K1-F5
agattagtgaaaagaaggtatcgactcctattgaggttctttgtaagtcatatccgtctgagtttgtgtcttattttcatcactgccgatctttgcggtttgaagataaacctgattattcatatttgaagaggcttttccgagacttgtttataagagaaggttatcagtttgactatgtctttgactggactgtattgaagtacccaaagattggtggcagctccagagggcggcattccagtggaagggcaggtttagctgctggaccaaccattgaaaaacccgaaagaatctcagtgggaagagagattcgggatagattctccggtgctgttgaagcattttccaaaagaaatatttcaagttccagtccctatcttgatcattctagacacaagactgttgatgatggggc

SEQ ID NO: 18539 - DNA, 423 bp, Gossypium hirsutum
  unsure (1)..(423): unsure at all n locations; Clone ID: LIB3146-005-Q1-K1-F8
attgtcgatgaatatccccggatctgattcttctgcaggtgatgctcaaatgtctgaggcaactaatgacgaccaggaattcgccttggcacttcagatgtccatgcaggatggatcaaaagattcgtcagctcaatcagatgtcagcaaggtgttgggggatcagtattttatgtcatccattctttcatcgcttccgggagttgacccgaacgatccaaaagtaaaagatttgctagcatctttgcccagccaatctgagccgcaagaaaagaaagaagaagatgaacaacccaaagatgacaagtgaagatctacattccttctaacaatcgatgtgtgagccgatttctagccgagttaagttcttttttctccagagactngagaaatgtgtcaaaactgtgctgaattgtgggctcg

SEQ ID NO: 18540 - DNA, 402 bp, Gossypium hirsutum
  Clone ID: LIB3146-005-Q1-K1-F9
cttacatacataggaaatgtggccaggaatcctgatgaggagaaattcagaaaaattagactaaataatcaaactttccaggatagagttggatctgtaaaaggagtggagttcttggagctgtgtgggtttgagaaagttgaaggagaggagttcttgtttctctcaagaaacaaggttgacatgcaagttctcaactcagctggatctgagctcaactctgctatcaataatcccttttttggggtcctttaactctgaaaatttactttaataaaactatataattaaggcatatgcattcatatatctattttggcttgttcctctttggtttttctttggagaatgtggaattttatctgtgaatttaatgatgtaccaactgggtattttccgctc

SEQ ID NO: 18541 - DNA, 264 bp, Gossypium hirsutum
  unsure (1)..(264): unsure at all n locations; Clone ID: LIB3146-005-Q1-K1-G1
cgatatctgaagatcattgaaaaaaagggctaccaggctcttccatgggtacgatatatcacaatggcaggcgagtatgaactaagacttatttaatgccaattcctttaatattgagagatccagttcacctcatttttcgagagttagaatggacataaggatacaaggaaagcggttgataaacaaaagcccttgtgaagagcatgaaagagtggttcctnctaaaaaaaaaaaagcacttttctgcttcgtatttataat

SEQ ID NO: 18542 - DNA, 414 bp, Gossypium hirsutum
  Clone ID: LIB3146-005-Q1-K1-G11
gtttattattaggtgttatgaggtggggattaacaaaactgccactattgaaaccattgctaatctcttgcaggaggttggaggtaaccatgctcaaaatgttggattttcaagagatgggtttgctaccagtcccactatgcgaaaattgcatctcatatgggtgaccgcacgcatgcatattgaagtatacaagtaccctgcttggagtgacgtgatcgaaatagaaacgtggtgccaaaacgagggaagaatcggaaccagaagggattggatcctaaaggatgtcgctactggtgaagttataggaagagctacaagcaagtgggtgatgatgaacgaggacacgagacggttgcagaaagttagcgatgatgtcaaagaagaatatcttgtcttctgtccacgagaacc

SEQ ID NO: 18543 - DNA, 221 bp, Gossypium hirsutum
  unsure (1)..(221): unsure at all n locations; Clone ID: LIB3146-005-Q1-K1-G2
ctttatcctttttttttttccctcaattttaataattatttgcttccctttgcttatcttaattaatcgttatattagttgtaattttctctctcctttttctaaacttaacagctgaagttagtatttggttgactggtcgtcaacgttggcgggtttcgggatcaggagtgagaaactaagagattaattaattacaagtatttgtcattttnnaaaaa

SEQ ID NO: 18544 - DNA, 405 bp, Gossypium hirsutum
  unsure (1)..(405): unsure at all n locations; Clone ID: LIB3146-005-Q1-K1-G4
ggtggatgcagttcggtaatgactatgtgttgggttattggccttccttcttattctcctacttggcggacagtgcttcgatgatcgagtggngaggtgaggttgtgaattcagaaccagatggacatcacacttccactcatatgggcagtggccgtttccccgaagaaggttttggcaaatctagttatttcaggaacatacaggttgttgatgactccaataatctcaaggctcccaaagggcttggcacctttacagaacaatcaaactgctatgatgtacaaacagggagcaacggtgattgtggccattacttttattatgggggccctggtaaaaaacccaattgtccttaagagcaagagggaaaagcacctttttctttttggcggtgtgttttct

SEQ ID NO: 18545 - DNA, 426 bp, Gossypium hirsutum
  Clone ID: LIB3146-005-Q1-K1-G5
gctgaactcaaccctcacctttcagactcgggcttggcgacgtttattccaaatgcagatgaggtactaaatcgtgacgatgtggggtctggacacagtgcacctgaggttactatgtccggacagtactctcttaagagtgatgtttatggttttggagtggttatgttggaacttctcactggacgtaagccatttgacagcacaaggcctagactggagcaatctttggttcgatgggcaacacctcaactccatgatatcgatgctctatccaagatggttgacccggcacttaaagggctttaccccgttaaatctctctcacgttttgccgatgtgatcgctctttgtgtccagcccgagcctgagtttcggccacccatgtcagaagtttttgaagcattggttcgactagtgcagcga

SEQ ID NO: 18546 - DNA, 420 bp, Gossypium hirsutum
  Clone ID: LIB3146-005-Q1-K1-G7
cggacgcgtgggcggacgcgtgggcggacgcgtgggcggacgcgtgggaaagaagttgaaacatttgaatttaagaccgtcttcgtaacaagaattactcccatctgatcctgaaccaccaggcctgccatcgatttgaaatcccttcggttaaaagtagcatcaaagtgaatcgtcatcccagaactcgtatctctctgaatggccctcgtagtcgtacacaaggacccatatgccacagcatagcaatcgaccttttgagagttctcttttggaacatccaagtaagccagccccagaacctctgaaccaaaaagttattaacccaaggaagatctaacattttccaaacttctattactacatgacagttccgaaagacatgtgataaatcttcttccccagatctacatcgagaac

SEQ ID NO: 18547 - DNA, 421 bp, Gossypium hirsutum
  Clone ID: LIB3146-005-Q1-K1-G8
gttgattaatgggttgtgtggtgaagggagaattgaagaggcggctaagttgaaggatgagatggataattcaaaagtgttaccagatgttgttacttataatacattgattgatggatattttaaacatgggagtagtgaggagggctttaggttggttgaggaaatgagggagaaagggatggagctgaatgcagttactaacaatattttggttaaatggtactgcaaagaatggaagatggatgaaacgagtgaaagagttaggatgatggaggaaagtgggtttccaccggataaggttacctacaattctctgattaatggatattgcaaggctgggaaattgggtgaagcttttgagatgatggatttgatgggaaggaaaggttttaagatggatactatcacacttaatacc

SEQ ID NO: 18548 - DNA, 119 bp, Gossypium hirsutum
  unsure (1)..(119): unsure at all n locations; Clone ID: LIB3146-005-Q1-K1-H10
antatttttttttatttttgttatttatttttttttagagtaggggaattgtttgatgggggggtggtttcgtttgctgtgggaaaaaaatatacaaaacccccccccgtattgtataa

SEQ ID NO: 18549 - DNA, 421 bp, Gossypium hirsutum
  Clone ID: LIB3146-005-Q1-K1-H11
gggaccgtggtccaggaccctgaattaggacaggtgattcaacttcaaggtgaccagcgtaagaatgtatcaaccttccttgttcaggctggcatagtgaagaaggaaaacatcaaaatccacggtttctaagcctgcgcggtggaagcaggaaatactatctgattaggacatatcttatgttggttggatgacaaagtatgcatgttgtgttacatgtgctttccagttcagtggatgattatgatatgtttggaagtttgtttggctatgttgcttatgttagacctttatatgtgttgaaatattctgtggtttggtgcttattttggcaattagtatgggtgaagaaaaatgagatatagtaattagagatgtaattagccgagctggatctctacaatcacaaagctgatactgg

SEQ ID NO: 18550 - DNA, 360 bp, Gossypium hirsutum
  Clone ID: LIB3146-005-Q1-K1-H2
ctcaattgggataagcaatccacgaaggccaaccaaaagccaagccgaacttcgagcctcctatccccttctactcctaagtcagcatccataccagcccgaaagctgaagtcagcaagcccgaggagtggtgtggctggtttagatgatgaaacaagaagcatagtcagtatgaagtctgacagaaaccggagacacagcatcgcaggctcctcagtgcgtgataatgagagccttgccaactctccatcacttccaagttacatggtaccaactaagtctgcaagagttaagaccagtttgcagagccccttgtgaccagaagcaaatggaacacctgagaaggatccaattggatct

SEQ ID NO: 18551 - DNA, 410 bp, Gossypium hirsutum
  Clone ID: LIB3146-005-Q1-K1-H3
cccacgcgtccgcttgaaccatttgctaagaaggcttcttttagggctgccattgactatatagtttctgagagaagtgatgttttcatgccatcccatggtggaaatatgggccacgctattcagggacagagagcgttttcaggacacaaaaagtatataactccaaataaaagacatatgcttccttattttctgaactcctcaatgcccgaagcagagttcaacaggatcataaaagaattacaccatgaatctttgggacaaccagaactcatgaccagcaaagctggaagggatgtaaccaagtatccggttccagaatgtatgtgcaatgatgcacattcccacttcatttgatacagaaagcttccaacccgatagctaacattgcaagagtcttcatcgag

SEQ ID NO: 18552 - DNA, 390 bp, Gossypium hirsutum
  Clone ID: LIB3146-005-Q1-K1-H5
cccacgcgtccgggaaaattgcttgaaggttaccaatggagtggatcatgttttcaaccttgccgctgatatgggtggcatgggcttcatccagtccaaccactctgtcattatgtacaacaacacaatgatcagtttcaacatgctcgaggctgctcgaatcagtggagttaagaggtttttttacgcctccagtgcttgtatctatcctgaatttaagcaattggaaactaatgtgagcttgaaagaatccgatgcctggcctgctgagccacaagatgcttacggcttggagaagcttgcaacagaggagttgtgcaagcattacaccaaagactttggaattgaatgtcgcattggaaggttccacaacatttacggcccttttgg

SEQ ID NO: 18553 - DNA, 369 bp, Gossypium hirsutum
  Clone ID: LIB3146-005-Q1-K1-H6
ccgaaagttggctgtgaacctgatcccgttcccacgtcttcacttctttatggttggttttgcaccacttacatctcgtggttctcagcagtacgtttctctcactgtcccagagctaactcagcagatgtgggatgcgaagaacatgatgtgtgctgctgaccctcgccatggtcgctacctgacagcgtcagccatgttccgaggcaagatgagcaccaaagaggttgatgaacagatgatgaatgtccagaacaagaattcatcttacttcgtggagtggattcccaataatgtgaaatccagtgtttgtgatatcccaccaaagggtctgaagatgtcctctactttcatagggaactccacgtc

SEQ ID NO: 18554 - DNA, 418 bp, Gossypium hirsutum
  Clone ID: LIB3146-005-Q1-K1-H7
attgaagccttgcagtttatgaagggttcatgttctgttctgagctttggattgctgatcaaggctatggcctcctagctctggaaaccgttccaatgttgatgtggctttcttatttcaccttaaaaattgggaaaactcaatacaaaggtaataccgtccacataagttcacttgaaaatagtaggcattgtcagtaaaattcgctctgaccaaccttctcataaatttgaggaggagacggattggcttcattgtttttcacattacatggtgcatgtactctttcgtgccattgtagatatccctgtctgtggcatggctttgactatgttgatgtatttcatgcctgtgtgctgatttccctttccattttatttccatcttttgtacttcaatgctgcatatttgaggaaag

SEQ ID NO: 18555 - DNA, 417 bp, Gossypium hirsutum
  unsure (1)..(417): unsure at all n locations; Clone ID: LIB3146-005-Q1-K1-H8
atctccactgactgtatctcaaccagagattgacctgatggactccaacccatctgcaacctgccaaacggataccgttgagccaacaacagataagaaggaaaacccgtcccccagtataatagatcaaatggattctattctatcgaatcaagtaaactcgggtaccaaatcttccgatcaagtaaatcaagctccaacaagcgaagatcctgctggttcataatgcanatactaactaatggtgttaaaaacttagaataggggactgcactggtatatatatatccctttgcttgatggtttaatgcttgaaactgaaccatcagattatctttttttctctttgatcttttttgtgcatctaacttgtaaatttcacttgttagtgttaagagttgagtttttttttctttt

SEQ ID NO: 18556 - DNA, 260 bp, Gossypium hirsutum
  Clone ID: LIB3146-006-Q1-K1-A1
ttcccaattcgacccacgacgtacgcgtgtcttgactccatactgactgagaccctttcattaacatcaaaaacactgcctgtgtatcggttaccacataatgccatgctagaaattgtaacatgaggatgcggaactgactgcttgtgtggcagctgctaatagagatgcacgaccttgcatacctggacgccgccgaaactaccacaactgatactctggttcttgctcttgcacccgagaatgcacactttgaagga

SEQ ID NO: 18557 - DNA, 443 bp, Gossypium hirsutum
  Clone ID: LIB3146-006-Q1-K1-A11
gaaaaaggtaaatgcacctaaagcatctaccgagggaaagatagccttgcctaaggcaacaaatgaggagaataacactttatctgatgtaacaaatgaagaattatctccaacccaactgcagccagcagtttctgctgctgattcaggtgaaagtcagccagacattgatcaagtggacttggttcaagagccgattgcactggagcatttaagcatggcaatggtttcaagtggatgttcatatacaaagttcttgacctgtatttgcctaatttaatgactactaatactgtaatattttatgatcaattgtttaaaaatgtttttacatttcccgttcatgattgtttttttctctattttataactattctctttttaatttcatttttcttttgttatgccttttttttttattaattttttgattattttttttt

SEQ ID NO: 18558 - DNA, 335 bp, Gossypium hirsutum
  Clone ID: LIB3146-006-Q1-K1-A12
cccacgcgtccgcccacgcgtccgattcagtgcagaactatgtgcaaaagtgtaagcggttggttttcgagtatgggccattgatcctcgcaaatgccgagcacttcttggaaactaccgatgtttgcaccatacttcatgcctgtgatggtggaaagcaagaatcagtggcagattcttgattttattttatgaaaaccacaaaggatattttgttgtaatatagtgtctgtatatacacgtaaaacattttaatcccaagtttgcaaattgtgtgttgaacgaattataaatattgaaaatgttatgtatttgctcgaatttgaacttgactt

SEQ ID NO: 18559 - DNA, 264 bp, Gossypium hirsutum
  Clone ID: LIB3146-006-Q1-K1-A2
gaaatgccgaagagctttcctgctagccggtttccacccagcccgataggataaattcttgacaaggaaaagaaggagagagctccagcagcggctgataatagacctgtacgggcgtcggctatcaaggatcacatcctacgctcgcggacgtgcgacgttaaatctgctcaatgagcgggcgtgaactaacttgacttgggagtcttctacaacgaatgaactggtaaaaccctgcgagttccatacttaatgcggttggag

SEQ ID NO: 18560 - DNA, 410 bp, Gossypium hirsutum
  Clone ID: LIB3146-006-Q1-K1-A5
gttaagtcaaggcttaaacaattttcaatgatgaacagattcaaaagaaaagccctacgggttattgctgagttcttatctgttgaagaagttgaagatatcaaagttatgttcaataaaatggacactgacaatgatggcattgtttcggtcgaagagctgaaagccggatttaaaaattatggttcacagcttgcagagcctgaagtgcagatgctcattgaagctgttgatgctaatgggaagggaacattggactatggggaatttcttgctgtttctctccatctgcaaagaatggccaatgatgagcatcttcggaaggccttttcttactttgataaagatggcaatggttttattgagcccgatgagcttcgggatgcattgatggaggatggagcaaatga

SEQ ID NO: 18561 - DNA, 337 bp, Gossypium hirsutum
  Clone ID: LIB3146-006-Q1-K1-A6
cccacgcgtccggacccacgcgtccgcctgcatccaagacgttggctgaaaaggcagcttggaaatttgctgaagaaaacaacattgatctcattacagttatcccttctctcatgactggtccttccctcaccccaattgtccccagcagcataggccttgctacatctttgatttcaggcaatgaattcctcataaatgctttgaaaggaatgcagatgctgtcaggttcgatctctatcacacatgtggaagacgtatgccgagcccatgtttttctggctgaaaaagaatctgcatcgggtcgatatatatgcagtgctgtcaataccagtgt

SEQ ID NO: 18562 - DNA, 371 bp, Gossypium hirsutum
  Clone ID: LIB3146-006-Q1-K1-A8
ccggaatggtacagctgttgctagtacgccaaaggcatcaattactcatgatcagccggttttgtgctcaacctggaaggatgatgggatgacagtcttttctggaggctgtgacaagcaggtcaaaatgtggcctttattatctggtggtcaaccaatgacagttgccatgcatgatgcccctattaaagaagttgcttggatcccagaaatgaacctgttagctacaggaagctgggacaagacattaaaatattgggatacaaggcagtcaaacccagtgcatactcaacaacttcctgatcgctgctatgcactcacagtgaaatatccattgatggttgttggtactgcagataggaatctgatag

SEQ ID NO: 18563 - DNA, 397 bp, Gossypium hirsutum
  unsure (1)..(397): unsure at all n locations; Clone ID: LIB3146-006-Q1-K1-A9
cccacgcgtccgggccccgacttcgaatcatgccttacggattacggtctcacgttattccgagaccccgagtcaccagaagagctaggtgccgccacttttttctatagggcacccgaatgtcgggacatccgaaaatcatcgactcaaccggccgatgtttatagcttcggagttctcctacttgaactcctaacgggcaaaacacccttccaagaccttgttcaagaacacggctcggatatccctcaatgggtaagatcggttcgagaggaagagaccgaatccggggacgaacctacgtcaggtaacgaaacgtccgaggggaagcttcaatcccttttgaacatagcaatggcttgcattgcccngcgcccgagaaccgtccatgatgcgg

SEQ ID NO: 18564 - DNA, 408 bp, Gossypium hirsutum
  Clone ID: LIB3146-006-Q1-K1-B1
gcagatggtacacgggaataaatcatgcagagcacatgcaattacttttcttattgaagcatataaaagggcattaccagtataccttccagtttatttgattcctgctttgatagttcatcatcaaggtctcttcaaaaggccttgcacaatattaggaaaaggtattgttgatattgccagatcaagcttatttttagccacctattgcacatcagcttggatgtggacttgcatcctgtttgggttcttgagaagatgtagcataccattgatagcaattggatcgtttccagccggtctgagtgttgctattgagaagaaaagcaagcggatggagatatcactctactgccttgcacgagccatagagagcttctttacatggatggctgacatcgggtattt

SEQ ID NO: 18565 - DNA, 224 bp, Gossypium hirsutum
  Clone ID: LIB3146-006-Q1-K1-B10
gacttttcttttcagttttttttatttcacagatttctcaactccctaatccccaatttcttaatttttacagaatatcaggtgttttaattcgcggagaggtagctatgtttaaagggatttttggaaaaaccaagccggaaacaaatgctctaaccactttatacaagttaaatgagacccttgaaatgctagagaaaaaggaaagtgtgcttctgaaaaag

SEQ ID NO: 18566 - DNA, 389 bp, Gossypium hirsutum
  Clone ID: LIB3146-006-Q1-K1-B11
atcgggggtcgaccagcttgttgagattattaaggtcttgggcactccaacccgagaagaaattaagtgcatgaatcctaattatacagagttcaaattccctcagattaaggctcacccatggcacaagatattccacaggcgtatgcctcctgaagctgttgatttggtgtcaagattactccaatactccccgaatctccgatgttctgctctagatgccttgatccatcctttctttgacgagttgcgcgatccaaatgcccgcttgccaaatggccgtttcctgccgccattgtttaacttcaaacctcacgaactgaaaggcgttccggaggagataacggcaaaactgataccggagcatgcaagaaagcaatgtccatcac

SEQ ID NO: 18567 - DNA, 389 bp, Gossypium hirsutum
  Clone ID: LIB3146-006-Q1-K1-B12
cgttgaaaagggcgaggcagaatctgttaagcaaacaccaaattttcatcgtcgaaggggatttgaacgacggcccgttgttgacgaagctgttcgacgtcgtcccgttcactcatgtgcttcacttagcggcacaggccggtgtacggtacgccatgcaaaacccacagtcgtacgttaagtcgaacattgctgggtttgtgaacttacttgaagtagccaaagcggtgaatccacaaccggcgatcgtttgggcttcgtcgagctccgtttatggactcaacactgaaaacccattctccgaacgtgatagaactgaccgtccggcgagtctttacgccgcaacgaaaaaagccggtgaggaaatcgctcatacttataaccatata

SEQ ID NO: 18568 - DNA, 367 bp, Gossypium hirsutum
  Clone ID: LIB3146-006-Q1-K1-B2
ggaccattctccttgagtcaggcttccaagtctcaacactcaaatgcaatcaaatctcagcttcttgagttagagattcgccatcctgtttttaaggtaatactgtcaacaagatagccatagaaaatttcctacactgatgactgacccatcttataacttgtgctcctttggtgttttccgttattttggttgccgataagctagtggtaggtagggcatgagtcttgagggctaccaactttgaattagagcagagtagaaatgtgtagtttggaattctataggtaatatgatcgtctaatggtagggggattttcaaagtccaaggcgatgaacttatttctttatttctggacataatatg

SEQ ID NO: 18569 - DNA, 415 bp, Gossypium hirsutum
  Clone ID: LIB3146-006-Q1-K1-B3
cccacgcgttcgcttgacgactgtccaagggttgaagaaagaattcagctacaacatgatactcagagacctcaagaaggagttttgctgcaatggtactgtcgtccaggaccctgaattaaggcaggttattcaactgctaggtgaccagcgcaagaatgtgtcaaccttccttgttcatgctggcattgtgaagaaggaaaacatcaaaatccatggtttctaaattgcaactgcttatggttttctgctaagtcacctgtgcctcgtgtcgaagcaggaaacacaacttgattacaatttgattagagtataatctatatagtgctatggcttctttatgatggtttaataaaaaacaaaaagcactcttatatattgtgtttttcaggcaataggatgctgtattggtgga

SEQ ID NO: 18570 - DNA, 169 bp, Gossypium hirsutum
  Clone ID: LIB3146-006-Q1-K1-B4
cccacgcgttcgtcaacaccttccctccttctcgtcccaccgtcggtcgccccaaagctccggccaagaatctcgtcatgggtcaagtcaagatcctcaaacgcggcgaagatcttaaaccatctaagccggataagcatgtgaggttcgcaaagggaaaacgttcatg

SEQ ID NO: 18571 - DNA, 444 bp, Gossypium hirsutum
  Clone ID: LIB3146-006-Q1-K1-B6
tgttatctgtttacttctcatttttatccaaaacgagactggtagattctcgccattcataactttgtaggtctcaattagtaggacttaggctttcacaagcctcttggtggtcttctggtaactatggcatgctaggacatggagctttttcaaggaaaggcaatggtaccacaagatgatcttagtagtgccccgaccacccagaaagacttgagagttcacaatttcatttgctcccccatgttgcctaggaggccaagagttctgaggtgggaagccttgcttggtgagcagtcaagatcaatgttgatgcagcctagattttcaaaggagccttgtgtgcacaacgtctcgatggagcttgataatgctcattcagctaaggccttattgttggaggtcttatgatgggtaaggagcatggattccaccacattacta

SEQ ID NO: 18572 - DNA, 378 bp, Gossypium hirsutum
  Clone ID: LIB3146-006-Q1-K1-B7
cttaaagaggctttcagggtgtttgacaaggaccagaatggtttcatatctgctgctgagcttcgccatgtcatgacaaatctcggtgagaagcttacagatgaggaagttgatgagatgatccgtgaagctgatgttgatggtgatgggcagataaactatgaggagttcgtcaaagtcatgatggccaagtaaggataaaaaatgggtaaaaaggggaacagggcagataagtttgctaagacctctatttatatcaatagggcatctatgtttttatgttactacctttcgttggattgttgactgtttctttgtatgcattatttcgtggactataccctaatatctacctgtttgctctggtttttgttcatt

SEQ ID NO: 18573 - DNA, 217 bp, Gossypium hirsutum
  unsure (1)..(217): unsure at all n locations; Clone ID: LIB3146-006-Q1-K1-B8
gcttctctttctgtaggaagatcacttcaatcaacaaactgaacttgtaatttttattaactggtgtgctcggttggttctctagtgctccacctatggaaaattttatgtaacatattatccgtttcaatccgaaaatctcaaggctttgtcccaaantaaatattaaaaattaaaaataattaatatacaaataaaaaatataaaataaataaaa

SEQ ID NO: 18574 - DNA, 378 bp, Gossypium hirsutum
  Clone ID: LIB3146-006-Q1-K1-C1
cccacgcgtccgcccacgcgtccgcaattattatcagttctaaccccatttttcgagcagctttgttaagtttaagataacacaggcacggcagcaacatagatgcagtgacactcaagaacgatcctataaaggccatcacgtagccaaaaaatgggatggttaaggcaacaatcactgtgctgctcactagtgcagttctaatgaggatgcttagtgacctgctgttgcaaaagagggatgtttcttcgatcgcagtcgtaattggagcggttatgatagcatatttcgtcaggggattgattagagtagtataaattgctatttttgtggtcatcttttttatgggaagatttaatgtcacttgagacttcagat

SEQ ID NO: 18575 - DNA, 387 bp, Gossypium hirsutum
  Clone ID: LIB3146-006-Q1-K1-C10
gttgtaatgtcatggtaagttgagtaaatttctaatggagttactaagcattcaatatggttacccgttgtttccttttttttttgtagattgttgacttgtagaatgtgtcgatcgaatcgtcccgaagctcacactatcctacgatagactctgtagtttatgatcgtttttagacttgattatgtgtcttgtacataggtgttgttatggtaacctaaaatgatagttttggtttgaactttggttaatgcttgatcttgtcaaggttaatgtcaattggtatatgtaagtttggtaatatgtaatgttgtgtgtatggtacttataatttttaagtttggatatgtaacttttggtggatgttttgataattttgcaatttgg

SEQ ID NO: 18576 - DNA, 374 bp, Gossypium hirsutum
  Clone ID: LIB3146-006-Q1-K1-C12
ggaaaaccaccaagtgaaccaaggttgcaggatgttaactactatggttcctcagggatgccaaatatggaagagaaatctgtttcagtggtttctgatgtaaattctggtagtggtttgattgaatactcttcaagtagtagtaggtcagctagaagtaggacagagaaggagccaattggtaggagcaaaccacataatagggtggccatctttcgggatcgcgagactgaccgcaaggaccctgattatgacaggaactatgataggtacatgcaaagatttgatcctgggtttgggttcaatagtggtccatacacaatgcaacctatgtacacccctgcaatttactacaacaccgaatttccacaact

SEQ ID NO: 18577 - DNA, 246 bp, Gossypium hirsutum
  Clone ID: LIB3146-006-Q1-K1-C2
ggaccactctactggagccatgcttacaaattcaaacacacgaacgcgaacaaatatctggttctggagcttaaaaatcagcgtcctgtatttaacgtaatacatccaacaatatagccatagatcatttactacactgatgactgaccgaccttatctcgtgcgctcccaccgtgatataggggatttggagtgcctatctgcttgtgactacggagtgcatgagccttgacggctaccaacctt

SEQ ID NO: 18578 - DNA, 431 bp, Gossypium hirsutum
  Clone ID: LIB3146-006-Q1-K1-C3
gcagaaaaagcttaacttaccggtccttcccaccacaaccattggatccttccctcaaaccttggaactcaggagagttcgtcgtgaattcaaggctaacaagatctctgaggacaattacattaaagccattaaggaggaaattaagaaggttgttgaccttcaagaagagctcgacattgatgtcctggttcacggagagcctgagagaaacgatatggttgagtatttcggtgagcagttgtctggttttgctttcactgttaacgggtgggtccaatcttacggatctcgctgtgttaagccaccaatcatctatggtgatgttagccgtcccaagccaatgactgttttctggtcatcaactgctcaaagcatgactcaacgcccaatgaagggaatgcttactggccctgttaccattcttaact

SEQ ID NO: 18579 - DNA, 437 bp, Gossypium hirsutum
  Clone ID: LIB3146-006-Q1-K1-C4
cctgcatgtgcttctaccgcgaatggagttgtaatgttggtatggattactgactttgagaccaaaatctccccaccctggcctcgaacaatcagtcccgaagcagatcttgcattttgctgatcaaaggccgcatcaaagtagactgagattctcgtacatctctcaacagttcgcaggacaccatttcctgccaaatgatccaaagcccgcaacagaaaagtcagcactgttcgtttgtcccgcgactaataacccatagcatccacgaaaaatatgattacagtcctcctcttccagtttgcatcgaggacatcgagcatctacaactgttcgtttgatcttcagattagcaaaagtaggaatgtaattccaagagattccccatattgtaactttgattttcggaggaatttgtaaattccataattttttgt

SEQ ID NO: 18580 - DNA, 406 bp, Gossypium hirsutum
  Clone ID: LIB3146-006-Q1-K1-C6
gaaaaagctagcggagcttgatgtggaactgaccgtataagagcggaacctgctctctgttgggtacaaaaacgtgatcggtgctcgaagagcatcgtggaggatcctgtcttcgattgagcaaaaggaagagagcaaagggaatgagcaaaatgttaagaaaatcaaaacgtctaggcagaaagtagaatcggagttgtccaatatttgtaaagatattatgggtgtcattaatgagcatctcattccttcttgctcgggtggagagtctactgggttttattataaaatgaaaggagattattataggtacttggcggagtttaagatgggtgatgagaggaaagaggccgctgatcagtccatgaaagcatatcagtctgcaacaactacagcagaagctgag

SEQ ID NO: 18581 - DNA, 363 bp, Gossypium hirsutum
  Clone ID: LIB3146-006-Q1-K1-C7
cccacgcgtccgaaagaaatggcctatattccattggacgaggacaccaaggttaaagggaaggctgccattgatgttgtctgcaacccgttggggaagtccgggggtgctctgatccagcagttcatgatcttgacctttggatcacttgcaaattctaccccataccttggagggatacttatggtgattgtttttgcatggctgtcggcagccaggtctttggatgtccaattcactgcattgcgtagggaagaagaacttgagaaggagatggaaagagcagctgttaagataccaatcgtgtccgaaagtggaagtgtctctccaagtggttcatcagtagactcagtaacgggtgac

SEQ ID NO: 18582 - DNA, 438 bp, Gossypium hirsutum
  Clone ID: LIB3146-006-Q1-K1-C8
cttcaaccccaaccctatgcgccgccgatcaaacctagcgcccatgccccgatttcgacggagagggctcctatttgacgattccgacgaccaggtaagctttccctctttcttttatgttattttaaacaaaataaaatgaaaataaaagaaaataaaacatatgaaaataaaaatggatactgaaaaacgaaaagaaaaacctttgtaaaaaaaacacttcgatatatgtattttctattcccttttacaccgaaaaaaccccgatttgcactcgtattgaattttctctctgatttttcctctcccccattacagtacttgaaatcggtcttttatagccgaaatagaaaagagaaaaaaaaaagaaaaaaaatctaaaaaaaatctgttctgttgtttgttggcccgaattttgctcttctgtttgtgtgtgtt

SEQ ID NO: 18583 - DNA, 459 bp, Gossypium hirsutum
  Clone ID: LIB3146-006-Q1-K1-C9
gttttggtatcaagaacttaccagggaacatgttttgctgggccccgtatggaaaacggaaatatctgtgcatggtggatggttgacattggcaaagatcatcagcttatgtgcaactactacacattgagacaggacggctccagggcatacataaggaattggaaatttcagggttgtatggatggaaagacttggatagatttgagagtgcacgagaatgaccaaacaatgtgcaagccaggtcagtttgcatcatggcctgtaactggaccaaatgctctgcttccatttagattcttcagggttctactcactggtctgaccacggatgcctcaaacccctggaacttatgcatttgcttcctggagctgtatggttacttccgttgaatgtgaaattaatatgtgcatctattctggcgttttccaatagcaagtccttttcaagtttttttt

SEQ ID NO: 18584 - DNA, 423 bp, Gossypium hirsutum
  Clone ID: LIB3146-006-Q1-K1-D1
ggcaaagaagcagccaccaaggccattaaggagtggggccagcccaagtccaagatcacccaccttgtcttttgcaccactagcggtgtggacatgcctggggctgactaccagctcaccaagcttttaggcctccgcccctccgttaagcgcctcatgatgtaccaacaaggttgcttcgcaggggggacggtgctccgagtggctaaggacttagctgagaacaacaaaggtgctcgtgtacttgttgtgtgctcggagattactgctgttacctttcgtggacctagtgacactcacctagacagtcttgtgggccaagcattgtttggtgatggtgccgcaactgttataatcggggcagaccccgtgcccgaaatcgagaagcccatgtttgaactaatctcagcagcccaaacgatc

SEQ ID NO: 18585 - DNA, 449 bp, Gossypium hirsutum
  Clone ID: LIB3146-006-Q1-K1-D10
aaaacgcaagaaaaaaaaaagagaaataaagggaaacccccctttctctgctagggttccaagattgaaaccccgccgccgctatgcctccgtcgtccgatgatcggagccgtgcgaggacgccccccaacggcgccttgaagtgcgctcataagtcgaggccgcgaacaccgagacgagggggaagagaagagcttcggcccctccttgaacccacatccggcgacgatgaagttccatcggcggtgggcctaagggccgactcaggtggtctgatgcacgaccgacatgcgaggccggtgattggagagcaacggctgtggcgtgagcaagaagcgtgcggcgctggaagcctgggcgtgcggcgcttaagcctaaggtttctgtcttgttcctaatctggtgggttagggttttttttttaaaaatttgggcctggtgagtatttt

SEQ ID NO: 18586 - DNA, 438 bp, Gossypium hirsutum
  Clone ID: LIB3146-006-Q1-K1-D11
tacctttcttgtcccaaaaaggtatatacacccattgaggaaaaagaatcgaatttagtaagtactgcacaagcaatgatgagtttaattgttagtggccaggctgagagggatcctacacctctacatcgagctgcaaaattgttgataaattctcagttgccaaacggtggttttcctcagcagggactggctggtgtcttcatgaggaactgtatgttacactatgcaatatatagaaatgtttttccactgtgggcgcttgctgagtatcgggaccatgtttggccttcaaaatatatatgcttttgaattataagaatggatcagagaattatatacaatagattgggtaacctacgatctgagtaaaaataatgatgtaataaagttattgaaatcttgcattaaaattagatgtagctttcggtggaatct

SEQ ID NO: 18587 - DNA, 356 bp, Gossypium hirsutum
  Clone ID: LIB3146-006-Q1-K1-D12
cccacgcgtccggcttttagtgaccggaaacctgagagccgccgcaccgctcccgctctcggtttccctcgcgttaggttcttccgtttccggcgcttgaggcaatcgtcgactccgctccacccgtattcccaacaagaaaaaaaaaacggagaagagaagttcatttattacttttttttttattttcttctttatatttctcgtttgaattattgtataatatgacacttggaatatgccgaattccaaaaataatcgtaaggagcaggagaagaaccggaagggtaagttatctgaaaaggcgtcgtcgtttcacgggaaattcccgacggtggctccgtctgatctgaggc

SEQ ID NO: 18588 - DNA, 450 bp, Gossypium hirsutum
  Clone ID: LIB3146-006-Q1-K1-D2
ctttgtagtgaaccagatcaaagaactggtggtcctacagcaaattctggtgttgcacctgatgcagctgaaatacagcttaaaagtccaaattggctatttggccaaagaaagtttgaagaagttggctcaggccccaaagtctctgtgcgcgaaattaaaaatggaggggccaatggtgaaatgaaacttgacgatttctgtgacttaaattggctttcttcctatgttgatgatgaacaggatattttccagaggtacctctcaatgacgtctgttgatgaagccaatggttggtatggtggaacacttcttggtgatcaagatgaaagcagtgagatatataggcattacgctgaattatgtcaggggctagccatggagcctttccaacatgatctggaaagggagaagcattacactgatgttctacaaatgaacacgatcgat

SEQ ID NO: 18589 - DNA, 449 bp, Gossypium hirsutum
  Clone ID: LIB3146-006-Q1-K1-D3
agaaattgctgttcctaaggtcttgaaggcgaacggtgatagcagacatcttagtagctcttattcggctgcttgtgaaatactgaagcctactgtgggatctgatgagcctgctccttcagcttcggcctcaaaaatctttgaaatcccagaatctgaattctacaattttgatgccgacaaaaccaaggaaaagtttcttgttggtcaggtctgggcattgtatggtgatgatgatggcttaccaaagtactatggtgagattaagaacatcgagtcccacccggttttcaaaatacacgtgacgtggcttcttccttgccaatcagaaagaagaaccaagtggtacgatacaagcatgcctacttgttgcggaagatttagtagaaagggttcccaagtctacacctccactgactccttttctcataagttaaaggcagagtcta

SEQ ID NO: 18590 - DNA, 427 bp, Gossypium hirsutum
  Clone ID: LIB3146-006-Q1-K1-D4
ccttaagggccaaacgtgggtgcctgttaagcctattccaaatgcactcgtcatcaacatcggtgacactctagaagtacttacaaatggaaaatacaagagtgtggagcatagagcagtaactcacaaagagagagaccgcctttcaatcgtcactttctatgctccaagctatgaaatagaacttggtccaatggcagaactggtggatgagaagaatccatgcagatacagaagttacaatcatggagagtacagtaaacattacgtaaccaacaagttgcaaggcaaaagaaccctggatttcgcaaagatccaatccaagacctcgaattaacaaggattccactttggtctccccccccccactagatcactattcttgtactatttaactgtaagaaatgagcttctgtcatggtggact

SEQ ID NO: 18591 - DNA, 446 bp, Gossypium hirsutum
  unsure (1)..(446): unsure at all n locations; Clone ID: LIB3146-006-Q1-K1-D5
cccacgcgtccgcaggatagtttcttcgctagctttgctcttggttggctcatcacaaatggtgctggccttgcatcttacccaattgacactgttcgtagaagaatgatgatgacttctggtgaagctgtcaaatacaagagctcgctcgatgccttctctcagatcttgaaaaacgaaggtgccaagtctctattcaagggtgctggagctaacatccttcgtgccattgccggtgctggtgtgctcgctggatacgacaagttgcagctcattgttttcggaaagaagtacggatctggtggtgcttaaatttagggtggtactatctcccttcttttgttatgttttaggttttaaagatggcgatgaaaagctcgacacattgagaaatttatttcggcaaaaaaattcattaataattcaaatttanggggggaaattac

SEQ ID NO: 18592 - DNA, 390 bp, Gossypium hirsutum
  unsure (1)..(390): unsure at all n locations; Clone ID: LIB3146-006-Q1-K1-D6
agaagctcgaggaagaacttggtttggtttctggtaatgctgaagctcgtgaggctaaagaatcaacaggttagaattgagattttagctgttattttgctggtggtttgagttagctgctttatattcttttgcagctaagaatgattagatgaactatgcaatccaccatagaagtttgaatgatgataatattttttttcttagatagttttacaaaaggtcaattctgcttaattgtaaggattaatttgtgttactcttttgctatgtttttgtttcattgttctacttgttttggaatgaaaagaaaattctttttnnnnaaaatncnaaaattattttccatttaatttgttaaaaatttttatttttttctcaattcctttt

SEQ ID NO: 18593 - DNA, 393 bp, Gossypium hirsutum
  Clone ID: LIB3146-006-Q1-K1-D7
gtcagaagaacagctccgacaacaagggtgagaaaaccggctgtggcaacaccattaacactgccgtacccgcggcgtttgttaaggtcagcatggatggtgcaccctatctacgcaaggtggacttgaaattatacaagagttaccaagaactatcggatgccttaggcaaaatgtttagctccttcactattggtaactgtgggggttcacaaggaatgaaagatttcatgaatgaaggcaaattaatagatctcttgaatgggtctgaatatgttcctacttatgaagacaaagatggagattggatgcttattggtgatgtcccatgggagatgtttgtcgattcatgcaagcgtttacgaatcatgaaaggatcataagccatcggac

SEQ ID NO: 18594 - DNA, 442 bp, Gossypium hirsutum
  Clone ID: LIB3146-006-Q1-K1-D8
agaaagagttgagcgttgataagttagagatatctaccagcattagagagccaaagaaacgagctaaaaaccgaaaggtcttagacagacttgcttctgatgctcataaattgatggctcttcaaacctctgtcaaacaactgaaaaagagaatggaaatcaagaagaggaagaaggcattcgatttagaatacggacaagtcaaagaacaattgcaagaggtggaggatgcaatcaaggagttgtgcaacgtcaatggtgaattgaccaaggatgtcgaagggagttcatctttagacggaacaaactcaatggaattggaaggacctggaaagggcaacttgaaaaacgtacgtgagcaggcacaaaaagggtctgaaaagatcggaaggttgcagttcgaggtgcagagcattgagtacgttatgctgaaactagaaga

SEQ ID NO: 18595 - DNA, 370 bp, Gossypium hirsutum
  unsure (1)..(370): unsure at all n locations; Clone ID: LIB3146-006-Q1-K1-D9
cggatagcatggttcggagagggaaaccgagttctaaaaataaattcgaatgaaacatacagtttttgtttattttggtgccaattggagtccatggaagcggccgtgttgccatagaatctgttggcactcttagtgtgtcctttgcttatgattttattgacaggtaattagggattgatagattttgtttgctatttataactaatgcattgtggaatcatattaaatgttttatggtgttttgtggagtttaatctaagtttgtgactcaatttggtgcagaaatatgaatattggatggttttattnaaaaaaaaaaaaaaaaaaaaaaaaaaaaaaaataaattaatataaaataaaaaataat

SEQ ID NO: 18596 - DNA, 367 bp, Gossypium hirsutum
  Clone ID: LIB3146-006-Q1-K1-E1
tgattatcaagctttaaaattacaataaatgaggttggcatttagttctcctgttaaaaaagttgatgcaggggaaaccaagaaactcttttcttttttttttccttaaaatgataatagtaaatttaaatctaaagtttagaaaaacaaaaaattatgaaaaaaaagcaacagatatatgcatagtaagacaatacataaataaagtaaaaaacaaaaaaaaaaaactaaaaatgaaaacgtaatatgtaataaataaaaaatgggggggccctcttaaagaatacaaattttatttccccggcttggcaaaagtattttttttttaataggggcccaaaaataatttctcgggcgcgcttttaaa

SEQ ID NO: 18597 - DNA, 439 bp, Gossypium hirsutum
  Clone ID: LIB3146-006-Q1-K1-E10
gtgagtttcgcagagtgtaacagagatggctttgagcttgaaaccttattgtctggttgttttgtttttgttttggataagtttgaatgcattggtcagtgatgtaggtgcagcaggagagtgtggaaggacccgaatcaggtcggctgcagcaagcttaagcccatgcctgggagcggctcggaatgcaagggctaaagttcctccagcttgctgcgccaaggtgggtgccttactcatgacctctccaaggtgcctttgtgctattttgttatcaccattggcaaagcaggccgggatcatgcctgggattgctattgccattcccaaaaaatgcaatattatgaacaggcaagctggcaaaaaatgtggaaggtacaccgtcccataagaaagaaaccatgaaggagaaaaattattagtaatctcagttatttac

SEQ ID NO: 18598 - DNA, 323 bp, Gossypium hirsutum
  Clone ID: LIB3146-006-Q1-K1-E11
cccacgcgttcgcccacgcgtccgcggaagagcttccttttttttctctcctttgccacgcgccgtcgatctcgatccttatcctcgttttcaaacaagctcgaaaaagatggccaacgctgcatcgggaatggctgtgcatgatgattgcaagttgaagttcttggagctcaaggcaaaaagaacccaccgcttcattgttttcaaaattgaggagaagcaaaagcaagttattgtggagaagcttggtgaaccaaccgaaagctatgaggattttactaaatgtctccccgctgatgaatgtcgatatgctgtgtacgatt

SEQ ID NO: 18599 - DNA, 437 bp, Gossypium hirsutum
  Clone ID: LIB3146-006-Q1-K1-E12
cccacgcgttcgagaaaccaaggcaatggcttctcttgcaaccttagctggtgtgcaaccaacgaccatcaagggccttggtggcagctctctcaatggaaccaagctcttggtgaagtcaactcgccagagtttcaaacccaaaaactacagggctggtgctgtggtagcaaagtatggtgataagagtatatactttgatttggaggatattggcaacacaactgggcaatgggacttgtatggatccgatgcaccttcaccgtacaacccactccagagcaagttctttgagacatttgcagctccatttaccaagagaggattgttgctcaagttcctgatctttggaggcggttccctctgtctttaccttagtgccactgcttttcgatgaccttttaccgatcaagatagggtcgcaactcccacccaag

SEQ ID NO: 18600 - DNA, 359 bp, Gossypium hirsutum
  Clone ID: LIB3146-006-Q1-K1-E2
ggaacttgttcctcgcttgaatgcagaagaagtaagaggcctttttgctccaccaccatggggtgatgatgtgccgccatcagcattttgcatgacgaatgtgggagaatgggacaaatttaggactatagatatggataaagaggctaatattattggcgccttaaataattcatctatgaagaagaaatttcatgctgacgctgataaggcagctttcttgagtgcatggcgaagagttgattgccgaacaagagaagcacttcgccgtagctttctttcagatcttattgcgagctatgaggactgcatacggaccttcatccaggaacgtggacatggggatgtccttgctttac

SEQ ID NO: 18601 - DNA, 430 bp, Gossypium hirsutum
  Clone ID: LIB3146-006-Q1-K1-E3
cggacgcgtgggcggacgcgtgggcgctcatcgaacttccgatttgctttttgaaacgcaagaaagaagagaaatctcaatggcgccgaaagccgagaagaagcccgctgagaagaagcctgccgagaagccaacggaggagaaaaagtccaccgtcggcgagaaagccccagcggagaagaagccaaaggccggcaagaagcttcccaaggaaggtccaggggccggagataagaagaagaagaaagccaagaagagtgttgagacctacaagatctacatcttcaaggtcctgaagcaagtccatccagatatcggtatctcaagcaaagctatgggaatcatgaacagtttcatcaacgacatcttcgagaagctggctcaagaatcttcaagactggcaaggtataacaagaagcccaccatcact

SEQ ID NO: 18602 - DNA, 396 bp, Gossypium hirsutum
  Clone ID: LIB3146-006-Q1-K1-E4
cccacgcgtccgcagtcatatctctgcaaatggtcaaagagtgctaccaagtggaggcatcagtgcagatggacctccaaccactctcagtggtactggcgttgatcgcatggcatttctgcaggccaatatcacccgtgataataccaagtttataaatggtgctatagttggtgagaggaatgtgttccaggtggaccaaggacttgggattggcagcaagtttccattctttaaccgccatcaactaactctcacacgatttctccaacttagacaagtggaagaaggtgttggtaagcctccgccacctgttctagtccttcatggacattacggaggttgtgttggtgaccttccaagttatgatgcttttacccttggaggcccatattc

SEQ ID NO: 18603 - DNA, 410 bp, Gossypium hirsutum
  unsure (1)..(410): unsure at all n locations; Clone ID: LIB3146-006-Q1-K1-E6
cgaaccctgnggaggttgtgaagcctgattcttgcaaggcaatcaatgatgaggggatgccattataccagaggccattcatgaagggcaaattgtacattcagttcactgttgaattccctgattcccttggccctgatcaggttaaggcacttgaggccatcctgcctccaaaaccaacctctcagttgagtgatatggagctagacgagtgtgaggagactacgctatatgatgtgaacattgaagaggagatgaggaggaagcagcagcaggcagcgcaggaagcttatgaggaagatgaagatatgcatggcggtgcccagagggtgcagtgtgcccagcaatgatgatgaagcaaaaaagaaaaaagaaagtgatatatggtttcaaaagtattctcgaggata

SEQ ID NO: 18604 - DNA, 414 bp, Gossypium hirsutum
  Clone ID: LIB3146-006-Q1-K1-E7
cggacgcgtgggggagtttggaaatggtgagttcaccgaggctgaattgaagaaaattatggcaaatgagaagcttgctgagattgctatgactgatccaaagcgcgcaaagaggattttggccaatcgtcagtctgctgctcgttccaaagaacggaagatgcggtacatttcagagttggaacacaaggttcagactctgcagactgaagctaccacattgtctgctcagctaacacttttacagagagattctgttgggcttacaaatcagaacaatgagttgaagtttcgtcttcaagccatggagcaacaagcacaactccgtgatgctctaaacgaagcattaactgcggaggtccaacgattaaaactcgctactcaacagctaggtggtgattccgacccttcaaa

SEQ ID NO: 18605 - DNA, 400 bp, Gossypium hirsutum
  Clone ID: LIB3146-006-Q1-K1-E9
gaaagcaagaagtatgttggtgtgcctggaatgaattccatttgcaaagcattgtgccacgagcctggagtagacagtaagtttaatatgggcatcgggaagtttgaatggttagaacacgagaatctatggtcattgataggtttggacggacagcatcttggacattttaagggagtggtggcatcagacaaaaacattgctttgccaaggtttacagcgataacaggacaaccaccccctcttgatttgagtttggctccggagttagtgaaactgcacgatattcccatttatccttgttttgctctaatgctagcattcaatgaacctttgtctttggtacccgcaaaagggttgtcattcgccaattctaaagttttaagccgtgcacaatgtg

SEQ ID NO: 18606 - DNA, 400 bp, Gossypium hirsutum
  Clone ID: LIB3146-006-Q1-K1-F1
cggacctgaaaagtccggtagagacaataagctgcctcggcatataaaatttcctttcacatatcctgttagatgccgcattgttcaaataacactaagccttccccttcagcggcctggttcaagctccgtgaattttgataaagacattaatctcttgtctctagatgatactccctttcctcaagaaactcgatctttcgaagcagcaatgccacgggatccatgccttcatgccaaacgaatcgtgatagctggaagccctgcaaacgaagagataggacttagatcatcacaaagtactgatcaaataaattatataaaccggttgaaccaaactccgcagttaagattcaaagttccgattgaggctgagaagctaatgtaccatgatctcgtc

SEQ ID NO: 18607 - DNA, 299 bp, Gossypium hirsutum
  Clone ID: LIB3146-006-Q1-K1-F10
gcttgtacttcccggtgagcttgcgaaacacgccgtttctgaagggaccaaggccgttaccaagtttacatcttcttgaaaaatgtgatttgtggttagggttagggttttcattttaaaagtagatcgcgttgtttttctcttccgttgtgaatcattctgctcttctgttatatgattccgtgtgtatcttgaagatggatctgctcgatcctgatttgaacatgttataattgaatgcaattaaatactaaaatttagcgtattttcttgctttttataataattaatatataaaa

SEQ ID NO: 18608 - DNA, 421 bp, Gossypium hirsutum
  Clone ID: LIB3146-006-Q1-K1-F11
aagcgattgaaagatggtgaagaagtgcatacccctttgcacattgatacttctcttgcggcacagggtcagcatattgggctgagttctgcacctggggacaatagtgggtttctggtaaaggtcatgcacctacgaaggaggcttggggcatgtgattccagatttgctaggttttcatatctttttaaacttaatcggcgatctgttcaaatgatactgacagttgtgtttgccttcatgcttttaggtatattggtctcccatgtcacttgaaaacggttgtttgcaattcgagaagatcatcattgcatgcctgaacaacaattcttgggagtatttcgtcgattcgattgttctcgaaggtttcatgtcaaactgctaggaagtggctagtcgctgccgtttgctgaagcaagtc

SEQ ID NO: 18609 - DNA, 319 bp, Gossypium hirsutum
  Clone ID: LIB3146-006-Q1-K1-F12
gcactgaagagcagagaaccaactgagtctatcaacctcaataaagaaactgaaggctcttgcagttacagaagtgagaacagctcatatgtaaagttggatatctcaagaacaccagcaattgacagccccttatctactcatccaacaagcagaaccttctttccaacatccattatgccaacaggtggtgctgcacaactattccaaacctcatcgtcaaggcctgatcaccatcatccatgttaaaagatggatcaaatggttaaagaagaaagcctcatcaacatgttctgcaccattgaagatcaaactgggt

SEQ ID NO: 18610 - DNA, 346 bp, Gossypium hirsutum
  Clone ID: LIB3146-006-Q1-K1-F4
cgccgagcagcgttccagccgaggccgagccggctttccgtgatgtctaaagcggaggatttatgaagattccttttgcggtatgtgtaatcttctaatgctttttggttaagtctccaagattttccggtgataggggatcgagcttcggagtaacgccggatggtagcgttgcagtcagatttcggcgtagaggttggagatctggacgaaggattcgggacggatatgatttttagtgtactccgggtgaccgaaaccgtaaaatccgaggaacaaattatcatatagtttgttggtgtaaatacatatatttgcaggcaatggtaaatttgaggagcttttg

SEQ ID NO: 18611 - DNA, 439 bp, Gossypium hirsutum
  Clone ID: LIB3146-006-Q1-K1-F5
cttcaaataaggcaaagaaaaaaaaacacccaaaagatgaaaatcgggttccttgtatttgtagctgttgcattgctagcattcttgtgtagcccgaatgccgtgtatggaattagattcgtaattgatagagaagaatgcttctctcacgatgttaagtatgaaggggatacaattcatgtgtcgtttgttgtcatcaaggctgattcaacttggcataatagtcatgagggtgttgatctggtggtgaagggacctaccggtgatcagattcaagactttcgagacaagataagtgagaaatttgagtttgttgctcatcaaaaaggaattcaccatttctgtttcagtaataaatctccttactatgaaacggtcgactttgatgtacatgaaagtcattttacatactatgatcagcatgcataggatgagcatt

SEQ ID NO: 18612 - DNA, 388 bp, Gossypium hirsutum
  Clone ID: LIB3146-006-Q1-K1-F7
cttatttgtattttccgtggcaggcaagacttatgacgacgcatggcgagaccgctgcaacgagcacgctcgatgcgcacatgcatcgggcgtgctcgttgcaggaagggatagcggagttctacgaccagtcgtctgggctttgggaagacatttggggtgaccatatgcatcatggtttttacgatccagattccaatgtttcaggctccgatcatccagctgcccagatccgaatgattgaagaatcgctccgtttcgctggaataaccgatgatccagcaaagcagcccaagacaatagttgatgtcggatgtgggataggaggcagctctagatatttagcaaggaaatttggagcagaatgtcgaggcattactttgagccc

SEQ ID NO: 18613 - DNA, 417 bp, Gossypium hirsutum
  Clone ID: LIB3146-006-Q1-K1-G12
cccacgcgtccgtttacatgtaaaatgttttaattttaactggctgatccatgaggcatagctcaataatacatttaagctgccttttacatatctacattctatatgggagttaataacttctcaatttctttcagaagtcgtatttgtcaaagctttccttaatatttccacatcaccacaagaacagatgccatccttgaaatggtggaattcttcagtatccctaacagaaatctcccgtcgtacaatcttagagatgaatttaatggtactgtgacagctttggcacatatagagattcttggttacccaaataggcgttccatgaacagtattaatgagaccaaatgcaacagctagtctctcactgtgcccacagaagatctcagcttttgaaatttcaacttcatccat

SEQ ID NO: 18614 - DNA, 352 bp, Gossypium hirsutum
  unsure (1)..(352): unsure at all n locations; Clone ID: LIB3146-006-Q1-K1-G3
agtggacaaaatcgatggaacatctttttcttgaaattctagtagaagaggcctagagaggaaataagccttctaatactttaaaagcaatttctattaatcaagttgccgaagttatttctgaaagatttcaagtccaatgcgatgcgaagcatgtggaaaatcatttgaggactgtaaaaaaccagtggcagattatatgcataattcanggtgaaagtggttttggatgggatgataacatgaaaatgatcacatgtgatagagcgacatatgatgcagtagtgatggcacacaagaagtatgaaccatttttgaataaaagcattgatcattatgatgaaatggcttt

SEQ ID NO: 18615 - DNA, 384 bp, Gossypium hirsutum
  Clone ID: LIB3146-006-Q1-K1-G4
cccacgcgtccgatcaagggtgaggtgcaatgactttgtggaccatacactagttggaagcttcaccatggctggtattaaggatatgatcaagttggcattgaaatgcatgagttttcccggggaaaggcggccagatatgaacaccgtttcgattgaactcgaacggatccgtgaaaacgagatggaaatgacaacagtcaaaggtgaaggtactgcaaaaatcgctctatgtagtgagctatttgcttcaaaataaggatccatcccaatgtagttttattaaagcttggggccaaagcttatgataaaaaatgaagtgtttataaagtaagggtagtgaagctgctatcattaaataatgggaaatggggatatttaatt

SEQ ID NO: 18616 - DNA, 322 bp, Gossypium hirsutum
  Clone ID: LIB3146-006-Q1-K1-G5
ggccgcccttttttgttttcattcacaggctaatcaaaacaattataatgcatcatcatttggtggatctatgcatccccagttgcgaacagaccctccacgggagggaaaagagtatgcgggtaatgaaggttttgagtcatggagtcctgataatagtccaaacaggtcatcagagtatgttgcaggaaggaactacatggaacccagaatgaattctgggtggaactatagagctgataggccatcatggcaaggaaattcatctgggtatagagacccgaacagacagggaaatagacggcgtgacagaagatgacga

SEQ ID NO: 18617 - DNA, 460 bp, Gossypium hirsutum
  unsure (1)..(460): unsure at all n locations; Clone ID: LIB3146-006-Q1-K1-G6
cccacgcgtccgtttggatcaggtcaatttaccaggaagaagatgaacaaggtttcaaaggtcttaaagtcagcaaagacctaacggaaatcggcggcgacgccctcaaaaccaacatcacaacattgggtccactcgtcctccccttctccgaacaactcttcttcttcgccacccttatttggcgccatttcttcggcggcgataaatccaagacctccctatcaccgtcgtcgaagccatacatccccgactacaagctcgccttcgaacacttctgcgtccacgccgcaagcaagacggtgctagacgagctgcaaaagaacttggaactcagcgaaaacaacatggaagcatcgaggatgaccttacaccgattcggcaacacatcgagcagcagcatatggtacgaattggcttnattggaagctaaagaaagggttaaaaagagggataggat

SEQ ID NO: 18618 - DNA, 359 bp, Gossypium hirsutum
  Clone ID: LIB3146-006-Q1-K1-G8
ttgggggctgcgggtggacatacgcatgcaaatagtttgtgtgatactttagtggcaatgtagctttactatgattatttattatttgaatttcatcccaaggatccgattagcttttgtattttgacctataaagatgtagaatatagaatttagctgcttggtaaataccatttatcataaaactttagtagcaatgtagctgttctatgaataattatacttaaacctggcggcaatatattattaaccgcgtggggaaataccatttaccttgcaagagattaaaaatgggattttaattttagttaccccttttttgggtgattggttttgaccttcaaaaaaatcatttatta

SEQ ID NO: 18619 - DNA, 440 bp, Gossypium hirsutum
  unsure (1)..(440): unsure at all n locations; Clone ID: LIB3146-006-Q1-K1-H1
ataggatgatcttcgaaaggttcttccctcagaactcagcacgattgaccgtcccgggaggagcaagtgtagcatgcagcacggccaaagctgtcgaatgggatgccacttggaagaacaaccttgacccgtcgggcagagcagcacttggagtgcatctctcagcttacgacgcggagacacctttcgataacaagccgtccaagattgttgagtcaataccgttgatgatggagattcctggagttgccatacatggttaagtgccatgaaaattgaagcaaaatgtgtgaaatttaatgattgattagtataatttgtgccatattatccatggaacttcagtatgctataatgtataatatgggtaatatataaaaccactatatatatatatatgtatgcatgnatgtatggaaggatggatggatggatgtata

SEQ ID NO: 18620 - DNA, 344 bp, Gossypium hirsutum
  Clone ID: LIB3146-006-Q1-K1-H2
cccacgcgtccggcagaaataagaagctacaagggtctgatggtctctgaaaagatgacatcaaacaaacaaattgcagcgacgagcaagtctttccaggaagtagaagaggattttatgtgaaacttgctgtccgtcaaagaagggtggtttctttttacttctttttcattgcaagcttaagttatttgcctcgattaagtcggctcacttaggatttttacctccattttgcgtgagatgaacttctgctataggtgccatagattctatgaaacacgattcagatttccattgctgattaaggtgttatttctctttcaaattatatttattctgattcc

SEQ ID NO: 18621 - DNA, 395 bp, Gossypium hirsutum
  Clone ID: LIB3146-006-Q1-K1-H3
gttttgtatttcatactcatttagcccctttcattagcatcgaaatcactccagttttctttatcactgaaaaatgtcttgctgtggtggaaactgtggctgcggttctggctgcaagtgtggcagtggctgtggaggatgcaagatgtacccagacctgaacgttgccgagatgaccacaactgagactctggttcttggtgtagcaccccagaaagcacactttgagggagctgagatggaattcggggctgagaacggctgcaagtgtggagacaactgcacctgcaacccttgcaattgtaaatgattagagaccaaagccaaagctccctggaagcagagacgcctttgtctttaagaaataatatgttttgttggttatgtgtttttag

SEQ ID NO: 18622 - DNA, 427 bp, Gossypium hirsutum
  unsure (1)..(427): unsure at all n locations; Clone ID: LIB3146-006-Q1-K1-H4
aaaagtgggagatcggttcttattgatgatggtgcgcttccatggattgtgcaaaacgctaacaatgattcctcacctattatgagacacattgagcttgcactatgtcatttagcccaacatgaagtaaacgcaaaggacatgataagtggaggtgccctttgggagctagtccggatatcgcgggattgttctcgagaagacataagaagtcttgctcgacgaactctgaatttaagtcccatatttcgagctgaaatgagacgactaaggatagaagtatgatttgagacgaagtgttgggttttcgaaaccgagtgtgtggatgtagctataggaaaaacaacaaaatgttggcattgtataggggctaaggtgggagaatcttaagagtgggttggctatgatnatatatgatcatgttact

SEQ ID NO: 18623 - DNA, 478 bp, Gossypium hirsutum
  unsure (1)..(478): unsure at all n locations; Clone ID: LIB3146-006-Q1-K1-H5
ttccgcggtgtcgacgccacgacgctcacggcgctatttcaaccaatgggtgtgggagaaaatggggaatnncatttaaatnntcgttggagccccatattggtgttaccagatgctcnntctactnnncagataagtttaaatatatcttnnntccggtgtatgacangnntgctaactcttttttgttatacctggtggagagtagagcccatcttaattnnttgttgataccccttaaaggcgatttcggggaaccaaatcttgataacaaaccctcttganntcgttggatccgggtttttaattataatgccttgatanttaaaatgccttnntatatcaaaagctnnntctggcattttatnattnnattgattctgaatacaagnngaagtttgttttggaagttgtcaaatcaaattctaaaatgggggggctcttttgcatctgtgggcttttggaatctacaacttgc

SEQ ID NO: 18624 - DNA, 313 bp, Gossypium hirsutum
  unsure (1)..(313): unsure at all n locations; Clone ID: LIB3146-006-Q1-K1-H6
ccacgcgtncgggagaaaggagtgaagagacaaattaaaaagaagagctcatcctcattcccctctacttcattaggttttatatataatattatagtgggtggaatagaagacatgaaaaagagttagaattgagaagtttaacaaatggcttctcaatagattaaaaaggagtggtttttatttgtgcttcagagcagagcaaatgtctggttttttcccttctagtggtgtgctgtgatcaaagctttgcagcattttataatttccatattaaaaaacaaaaaggctcgganttgtatgtgtcttttgg

SEQ ID NO: 18625 - DNA, 401 bp, Gossypium hirsutum
  Clone ID: LIB3146-006-Q1-K1-H7
gggagttattcatcccgctattgccgggttagctgtgacgtatggactcaatctgaatatattgcaagcttcgatggtttggaatatttgcaaaacggagaataagattatatctgctgagagaatacttcagtattgtagtattcctagtgagcctgcccttgtggtggaaacgaatcgctcagaccattgttggccgtaccacggagaagttcagattcttgatctgcatgtacgatatgccccacacatgccacttgtgttgcgaggtctgacctgcacattttctggagggttgaaaaccggaattgttgggagaacaggcagtggtaaatcaactctcatacaaacacttttcctgatcggtgaaccttcaacagggtcttatcataatcgattgg

SEQ ID NO: 18626 - DNA, 458 bp, Gossypium hirsutum
  Clone ID: LIB3146-006-Q1-K1-H8
cccacgcgtccggaagaacacatacctaaaccctatttggcaagggcatttgctaatccagatgtggaacatccacatggaacaccaggacgtgacaactatggaatgagtgctcttcagcaacacgcttccttttttgatcaagataaagatggaattgtttatccttgggagacctacagaggtatgagaaatattggtttcaatccaatttcgagccttgttattgcaattaccatcaatgtggcattgagttattggactctccctggatggctaccaaatctatattttcccatatgcatagatagaatacataaatgcaagcatggaagtgactcttcaacatatgacactgaaggaaggtatatgccaatgaactttgagagtatttttagcaagtacgctcgaactgtgccggacaagttaacactgggggaactatggcacatgactga

SEQ ID NO: 18627 - DNA, 401 bp, Gossypium hirsutum
  Clone ID: LIB3146-006-Q1-K1-H9
cccacgcgtccgctccgttcttttgccgtcgtattttttttccagagatttgttcttttcgcttctttcgttatggggaagatcaagatcggaatcaacggatttggaaggatcgggcgtttggttgccagagttgctctccaaagtgaagatgttgagctcgttgctgttaacgatcctttcatcaccaccgattacatgacctacatgtttaagtatgacagtgttcacggtcaatggaagcaccatgagcttaaggtgaaggactcaaaaacccttctctttggtgaaaagcctgtcactgttttcggcatcagataccctgaagaaatcccttgtggtgagactggagctgattatgtcgttgagtctactggtgttttcactgacaaggacaaagc

SEQ ID NO: 18628 - DNA, 228 bp, Gossypium hirsutum
  unsure (1)..(228): unsure at all n locations; Clone ID: LIB3146-007-Q1-K1-A1
cacggaggnggcggcgaattctagaactagacggatccgtcgggctgtaggtattcagcgcgcgcacattatatttgttggtttgatcgtcatgatcgatatgctaatcaaattgtggtcttttttgatatcaacatgttgggattagacgtactccaaggccctgtatatgtaggcacagggtgtgttttcaacaggcaggcattagtatggctacgatccgccggt

SEQ ID NO: 18629 - DNA, 408 bp, Gossypium hirsutum
  Clone ID: LIB3146-007-Q1-K1-A10
tgtgagttcctcatctctttccctgttcttttcatggactgggaaggagagggagtgatcgggtactgtcggaaactcattggagcaacagatcctcaaaaatcagagcctggaaccatcagaggtgatctagccgtggttgtcggaaggaatataattcatgggagtgatggtcctgagactgccaagcatgaaatcaacttgtggttcaagccacaagagttggttaactatacaagcaacgctgagaaatgggtctatggaaacaactgatgagggcatgttttttcaagttaatcagtagtagttcaggaaaatttagtcccacatcaggtgtgggttagaggcataattttttagaataaatgcgttttatggaggtgaggagcattgagccaaatgctttga

SEQ ID NO: 18630 - DNA, 404 bp, Gossypium hirsutum
  Clone ID: LIB3146-007-Q1-K1-A11
ggggcgacccacgcgtccacccacgcgtccccccacactcgtacttacattaccttccttatagccaactattccctgttgggaacaatctacggttggatggtgcctcactctctccctaagtttactcccttccttatgtggtctcttattcatccttctccacgccatcaccatatccggtgccgtcaccggttgttccgtccccgtttctgggtcaaacagattctacgcagctcacatggtggttatggtgttaacatcgatatttcaaggatccgtttcggatttgatcttaacccgaagtaatgatttcttggggtatttgaaatcttatgttagggaagatgatgggaacgtgataatgaaaccttgtggtgggctttgtgtgacagccttttgtt

SEQ ID NO: 18631 - DNA, 304 bp, Gossypium hirsutum
  unsure (1)..(304): unsure at all n locations; Clone ID: LIB3146-007-Q1-K1-A12
aaannggggcgacccacgcgtncttgaagttggaaattccctttggagcttttatttagaacaaggaaattaatggccccgagggggtttgatataggcccgtctgccaacccaaatttccctgattttggtgtgttgcagtagataacgaacgcatcttttatatatataggaagtaaaataaaataaaaatacttggaacagaagtagtatttgcgtttcatatcacatatatatgttgtatgtcttgcgggagttttccttgaattactatttttcgaggtatgatgaaaaacagtgttct

SEQ ID NO: 18632 - DNA, 305 bp, Gossypium hirsutum
  Clone ID: LIB3146-007-Q1-K1-A2
gcctttgaatattttgttctaaaacctttcctgtttatttttcccctcatgtatgaattgatttctggaaaaccatatcaaccatagagcataacagaagagtcggcattgagcgccgttacttctcttgaaaacccagacatgaagactttcctctgcccaggggcaaccacagagacatctatcatttgaagtgactttcctgtacttgagattagcaagattagggatataatcccaggaaattggccaaatagtgattgcaattttttagggtagttgtaggctccataatttcctgtaaa

SEQ ID NO: 18633 - DNA, 309 bp, Gossypium hirsutum
  Clone ID: LIB3146-007-Q1-K1-A3
attcaggaaatgttccttagagtaagtgagcagttcctgccatgtttcgcaggaaggctttcttgcactggtatactggggagggaatggatgagatggagtttacggaggctgagagcaacatgaacgatctggtttcagagtaccaacaatatcaagatgcaacagctgatgaggagtatgattatgaggaggaggatgcggaggaggatctccaggaatagtagtagtgtgtgtttcttactgtttgctttcttaacgatttggattttttttttctgttctttcaacctgaattcctggtttggg

SEQ ID NO: 18634 - DNA, 306 bp, Gossypium hirsutum
  Clone ID: LIB3146-007-Q1-K1-A4
cccacgcgtccgcgccttttcaatatgataaatgccttccgacaatatttgaagttgtgacaggggcaactaagaaacagacaaaggagaaatcgtcagtttcaaatcatagcagcaacaaatctaaatcaaactctaagcgaggttctgaatctcagcccaagtattcgaaggcagcagcatcaaaggatgaggttgaagatggcatggaagacgaaaacgatgaggagcatggagagacgttatgtggggcttgtggagagaattatgctgctgatgaattctggatttgctgtgatatctgtg

SEQ ID NO: 18635 - DNA, 308 bp, Gossypium hirsutum
  Clone ID: LIB3146-007-Q1-K1-A5
gtccttttattattttttaaccctacggttctcgttttggggttatctcaatacagagtgtggtggtctgtttggaggattttaatcttactgagtgcatctgttgcagttaggtgcagggaaaagagcgatggcggcagttcccggacagttgatttgggaggtagtgaagaagaacaattgctttttggtgaggcagtttggaagaggaactgctagccttcagttcagcaaagaacccaacaatctctacaaccttcactcctacaaacactctgggttggcaaacaagaaaacagtcaccattc

SEQ ID NO: 18636 - DNA, 301 bp, Gossypium hirsutum
  Clone ID: LIB3146-007-Q1-K1-A6
cccacgcgtccgattttaaaaaaaaaggagggcatgacatagtggagcctgttagagaaattatttgaaaagcatacggcttttgaaatttctatctatgatacaactttctcactccatttagctgaacagataccattttctctgatcaggtaatgcaaatggtatgtggttagaactatcttaatataagtgtcactttgtcttgaaaatcatgacatcgttagactaattaatgttattcttacacgattcactgagctgttctgatatgtgatgtaactttcatgtgcattccata

SEQ ID NO: 18637 - DNA, 255 bp, Gossypium hirsutum
  Clone ID: LIB3146-007-Q1-K1-A7
cccacgcgtccgcttattcgtccggaagttccttgtacttgggaaataagtgcaaacaccgtttgttttattcgtctcttagtagcacaaacacaagcttacagcagaaaataagctggttcatcagattagtacacaatcacagaatgtatcactctttagttaagaacaactcatttttagaagagttcatctaattgtaaaccctaaataaataaataaaaaactaggacatcatcttgaaactttatcttc

SEQ ID NO: 18638 - DNA, 303 bp, Gossypium hirsutum
  Clone ID: LIB3146-007-Q1-K1-A8
aacagaagttccattttttccacttgacattaagctatgttgggtgaagatgtaatggtgggccactcttctggtttgcctcttcccatgaatgactttggttttttgcttgagagtttgctccacggtgaaagctatttccttgtttcaagaacaagttgaagaggaaataaagttggaaactagtgggagaaatttatgataatatggcatgctatgcaacaaagagttacaagaccccccctaattgccctatctattttgttcttatttatatctcttcccctaaatattattattttt

SEQ ID NO: 18639 - DNA, 411 bp, Gossypium hirsutum
  Clone ID: LIB3146-007-Q1-K1-A9
tgtgaattcctcagctcgggccctgttcttgccatggtctgggaaggagagggagtgatcagatacggccggaaactcattggagcaacagatcctcaaaaatcagagcctggaaccatcagaggtgatctagccgtggttgtcggaaggaatataattcatgggagtgatggtcctgagactgccaagcatgaaatcaacttgtggttcaagccacaagagttggttaactatacaagcaacgctgagaaatgggtctatggaaacaactgatgagggcatgttttttcaagttaatcagtagtagttcaggaaaatttagtcccacatcaggtgtgggttagaggcataattttttagaataaatgcgttttatggaggtgaggagcattgagccaaaagctttgattt

SEQ ID NO: 18640 - DNA, 316 bp, Gossypium hirsutum
  Clone ID: LIB3146-007-Q1-K1-B1
acccgtccgacacgttgatgttaacgatttgacgcgtggatgtgtgcatgcagctccaaggatgaccctgctaaggaggctgccaacttcacttctcaggtcatcattatgaaccaccctggacaaattggaaatggatatgccccagtccttgactgccacacgtcacacattgctgttaagtttgctgagcttttgaccaagattgacaggcgatctgttaaggagcttgagaaggaacccaagttcttgaagaacggtgatgctggtatgattaagatgattcctaccaagcccatggttgtggagaccttct

SEQ ID NO: 18641 - DNA, 227 bp, Gossypium hirsutum
  Clone ID: LIB3146-007-Q1-K1-B12
tccacacttccgaaaatagaagtattttttactctaccgcagaggcatcgcttctggggtggttatcaattacgagcggtcatctgtctttcatcccatctaccataataaccctttctgcagctctttcccttgaatactaacaaatcttggactatactatctcatgatccaacaaagataattgctactttttcatgcctcacgtgttaacattccaaaacccc

SEQ ID NO: 18642 - DNA, 303 bp, Gossypium hirsutum
  Clone ID: LIB3146-007-Q1-K1-B2
cggacgcgttggcggtcttttttctgacgcttggaacaaaaggggcctcatatgtatgagctgaagtctctacttacatatcatagctaatcctcgcttcttgttatgggatataggtgttgtgtgtactgtctgcctgttggatgagttttaaattatagtgcattgctgaatggggggacaattatgagtcatggaatatgattgaaaatactaaacagtgcccatccttttcaggcgaatttttttcaatttaatggtgtcgttaaaatatgtctcaatctacgttaaacattttctcag

SEQ ID NO: 18643 - DNA, 307 bp, Gossypium hirsutum
  Clone ID: LIB3146-007-Q1-K1-B3
cccacgcgtccggaaagctggtatcgtcggactgatagaaccgcagcatgcgagttaggtgtgcacgggattcgtgtgaactgcatttctcctcatggtgtacctacagatatgctcattagtggttatagaattttccgggggaacgaaacaacacccgaagaagtgaagaaactggtcggtgatcaagggagtctattacgtgggaaagctgcaactgttgaagatgtggcccaagctgcagtgtttcttgcctcagatgacaccggattcataacagcacataacctcattatcgatggtggat

SEQ ID NO: 18644 - DNA, 299 bp, Gossypium hirsutum
  Clone ID: LIB3146-007-Q1-K1-B6
cccacgcgtccgcccacgcgtccgctgcttttcccccttttatctttcttcttctttttctccttacttcagccgaatttttccggcgaaacggtgtcagatctttgtgatctatagccggaaatttcatttcgagttcgacgatctcacccttcgatctttctattttcttcagcctaccatgaatcccgaatatgactatcttttcaagctacttcttattggagattcaggtgttggaaaatcttgccttcttttgagatttgctgatgattcatatgtagaaagttacataagca

SEQ ID NO: 18645 - DNA, 303 bp, Gossypium hirsutum
  Clone ID: LIB3146-007-Q1-K1-B7
gcacagttttttgtgttcgttggggaccctaactggataaaatagtagtaaaagattgtgagccttctatcttcaaggcaatgctcttgtttatttataccgacaagcttcctgatgtacaagaaattgtagactccacatctatgtgtacatctaccaacatggttcagcatcttttggctgctgctgatctgtacaatttagatagactcaaagtgttgtgtgaggcaaaattgtgtgaagaacttaatgctgatacggtggcaacaacccttgcacttgctgagcagcaccattgtgcac

SEQ ID NO: 18646 - DNA, 286 bp, Gossypium hirsutum
  Clone ID: LIB3146-007-Q1-K1-B8
cggacgctggccattcttatgtgaatgctgagagctaacgggagtcttcgagcatacgttgctttaaaggttatacaaggtgcttattataaatactattgtacccttatcaacaattcatgcagggactgaacagcttcgttagtcttctgattctttcttttgacccattttaaagaaaatcatgatggacccacatgtggcagccgttgggttcacctatgaggcaatgagagatactgttatggctggatggtgggcacgatacctttccttgtacgaatat

SEQ ID NO: 18647 - DNA, 247 bp, Gossypium hirsutum
  Clone ID: LIB3146-007-Q1-K1-B9
cccacgcgttcggggggaaatagctgtacagatatatcagctaaccatctcttgtaagctataggtccagactttctttatatcattcaacttaaagctgatgttgaagctttaatgacagatatttgacataaagatgcattgatcaccttaactacataacggctgttgtattgatgttgaagcttatactttatagagaggaactcgtctcatcatctatggaaaaaaaaaaaaaaaacaaaaa

SEQ ID NO: 18648 - DNA, 234 bp, Gossypium hirsutum
  Clone ID: LIB3146-007-Q1-K1-C11
ctgaatacaaaaagaaagtaaggtgtttccttttcattaatcctcaagcttttatttttgcggataagtttaaccccagttgggcttaatcctccatgggcaaaggcgtaggctgtgtcccaagcaaaaagagacaaccttcctctgccgaaggctctgccgctgccactgtcactgccactaccgtcaccaacaacgcacccaattgaagccgatgaagaaacccacaaaact

SEQ ID NO: 18649 - DNA, 306 bp, Gossypium hirsutum
  Clone ID: LIB3146-007-Q1-K1-C2
cccacgcgtccgcccacgcgtccggagatgctgtgtactaaccgaagccgtcgaccagaccttgcttcagaggtgtacaaggtgcttattagaaatactattggacccttatcaacaatccatgcagggtctgaacagcttcgtcagcctcctgattctttcttttgtcccatttcaaagaaaatcatgatggacccacatgtggcagccgatgggttcacctatgagttaagagagatacggagatggctggatggtgggcacgatacctctccttgcacgaatattccacttgctcatcgcatt

SEQ ID NO: 18650 - DNA, 230 bp, Gossypium hirsutum
  Clone ID: LIB3146-007-Q1-K1-C3
cggacgctttggtcgatttatacattcacccacgctactatgggctttccagcttctatggtctataaacttatttttataaagattatttgaatttttatattatctactagaatcttttatttacatatattatatatatatcattatttttatatttcatttttttattactataaataaaattatagaaaaactttatttttcatttctaatatttacatttattt

SEQ ID NO: 18651 - DNA, 262 bp, Gossypium hirsutum
  Clone ID: LIB3146-007-Q1-K1-C4
cccacgcgtccggccgatgccgcagtctatcttgctcagatgatgcaaagtatgttagtgggcataatttggtggtagatggaggttttacatcatttaagagattggaacttcctaagagctaaagtcttataaatgctgctcaaaggatatattttggaaattgaagtacgaggtatatttcaagtttcttctagtttttgacagtctggggaacaacaattagactaaacacaaatgaatttcagtaccttgagatttt

SEQ ID NO: 18652 - DNA, 298 bp, Gossypium hirsutum
  Clone ID: LIB3146-007-Q1-K1-C5
ccggcgggaccccccccgcggacgacgcaacaaatgtttttttcgggacctaaaatgtagcttgcgtcggtcgaatcgacgggggctaaatctatgttgagtggtgttaggatgcatagatcatgttcacaagctcatgatgctattagcttcaataatgtagtgatgggaaaacttgatagatatcccttagaatttggtagagaatagtgaactggacctgtttgctcagaaaacggtgatgttgtgtaatataaaatgactgcccttgccttggcagtgaacatagattggtgat

SEQ ID NO: 18653 - DNA, 278 bp, Gossypium hirsutum
  Clone ID: LIB3146-007-Q1-K1-C6
gggaggaatcggcgggtccgaccccgcctcccacacgttgatctattctttcgagcatgctgagatctacgggccctcgttgactacacgcgtgctaaaggagtgcaccatgcacttggtgcaaatactattgggcggtattcaactattcatgcagactctgaacagatagaccagtcctttggaggttgatagtgcacaatccattaacaatgtatggggtaccacccaggacaaggcgggtgttccacctaaccaacaaaggatgaacttagacg

SEQ ID NO: 18654 - DNA, 305 bp, Gossypium hirsutum
  Clone ID: LIB3146-007-Q1-K1-C7
cccacgcgtccggtttatctgtgggtttgtgatcaaacgccgcatcgaaaaagatgggcttattcgcccttcgtatcctctgtctaggccttgtactggttgccaaaattccccatagcccgcaccaaaatcccatgcactgttcatttgtccctttgctgaatacccagatttggaagacgtggatgctatcttcttcgtcctggctacatctcaaacaacgaacctcttctcgattttagattagagaaagtggatatgtaattccacgttattctccatactgtaattttaattcttaaggg

SEQ ID NO: 18655 - DNA, 143 bp, Gossypium hirsutum
  Clone ID: LIB3146-007-Q1-K1-C9
tctctttccggctagtttcccaccactttattactctcctgtacctaataagaccggcagagggtgttccaaacattcaaaggcctaacatgatttaaaacttttcttgtgtgctaaccatttcccatccctcacagaattcc

SEQ ID NO: 18656 - DNA, 306 bp, Gossypium hirsutum
  Clone ID: LIB3146-007-Q1-K1-D1
cccacgcgtccgggactcgatacaaatgacttggcctcctatccggggctcacaccatcggcatagctcactgcccagcattttcacgccgattgtacaattcgaccggccctgggggagtagacccaacgcttgacagtgaatacgcagctaacctcaaaacaaacaagtgtacaacacccaatgataacaccacaatagttgagatggaccctggaagccgtaagacctttgatcttagctactacacattgttaaccaaaagaaggggtcttttcaattccgatgctgctttaactacggact

SEQ ID NO: 18657 - DNA, 437 bp, Gossypium hirsutum
  unsure (1)..(437): unsure at all n locations; Clone ID: LIB3146-007-Q1-K1-D11
ggaaaaangggccgacccagcgnccgcccacgcgtccaagaaagttttgtagggcttataatcccagcggggttacattggtgaaatgggtgatgttgaggatgagaccttcaaccctgttgttagtagatcaagtcaaacatgtagaattgatctactcgaagagatcattgaagatgctaaagataacaagaaaattttgtttcaggccatgcaatcaattatggacttgatgaaagaagttgaacttcaagaggcagctgccgaacaagcaaaagaggaagccgcaagggggggcatggatattctcgtcaaggtggaggaacttaaacagatgctgccacatgcaaaggaagcaaatgacatgcatgctggagaagtatatggcgagaaagcaatcctagtcactgaagtaaaagagcttgaaaatcgcttgc

SEQ ID NO: 18658 - DNA, 238 bp, Gossypium hirsutum
  Clone ID: LIB3146-007-Q1-K1-D3
gtttcggtgtcctgaaatattattccacccgaacttggttggtatagatcaagtgggtttagacgaaatgactggggtctcgatcagaaggttgccatccaaggacaaggcacttgagaacaggttgaccagttcggtctttatgactggtgggtgcagtctctttcctggcataaatgaacgtttggaagctggaattcggatgcttcgaccatgtggatcggcaattaagggggca

SEQ ID NO: 18659 - DNA, 304 bp, Gossypium hirsutum
  Clone ID: LIB3146-007-Q1-K1-D4
cccacgcgtccgaaacttgcctaatttggtcgccgcttgcgttccgttggtgccggcgagtgttggcacaagcacggcagctttttagagcatctggtcgatatctatcggattctcaaaatatggaaggcgcaagactccgtttgcctttgcggtcttttccactctgcttactccaactcttacgtcaacctcgccatattcgacccttcaaccggccgcgacgtcgttcgaggccacgtcggcgacgctgcagagcgtttaatccatttgttctgcgtcgtccctaggcaacctttgatcc

SEQ ID NO: 18660 - DNA, 304 bp, Gossypium hirsutum
  Clone ID: LIB3146-007-Q1-K1-D5
gataaataagcgtttgtctcagatttttgaagtggcccgtgccaagcagacagcccgtaagtcgactggtgggaaggctccaaggaagcaacttgctaccaaggctgcccgtaaatctgccccaaccaccggtggtgtgaagaagcctcatcgctaccgtcctggaactgttgctcttcgtgaaattcgaaagtaccaaaagagtactgagcttcttatcaggaaattgcctttccagaggcttgttcgtgaaattgcccaggacttcaagactgatttgcgtttccagagccatgctgttcta

SEQ ID NO: 18661 - DNA, 405 bp, Gossypium hirsutum
  Clone ID: LIB3146-061-Q1-K1-H8
gggaggaccatctcaaaaaaatcactggattcagctattaggcaaatggacataataaatggcacaacaaacattcggtccctttcaagcacgactctgtttcctcagagcattcgatctgccactgctaagacccaatctcttcgttccttaagtgcttcagactctgataatagcaacggaagccctggtaggttgaaaaacagagacttgcccgagaacggaaatagtattagcagagctgcagagtgtggaagtgatttccatgatggaagatattatgccaaattaagtgaggtggacatctacgagagttcccggtatgatgttatattgctaaaagaagacttgaagaataccaactggttgcatagtattgatgataaatccgatttagtatccatc

SEQ ID NO: 18662 - DNA, 324 bp, Gossypium hirsutum
  Clone ID: LIB3146-061-Q1-K1-H9
ggacgaacgagtcctaagcagagcaagattggcgggagattgtgacatacttttcatacccattgaagagcaaggactattcaaggtggcctgataagccagagggttggattgaagttacaaaggagtacagcgagaagttgatgggcctagcttgcaagcttcttgaggtgttgtcagaggccatggggttagagaaggaggctttgactaaggcatgtgtggacatggatcagaaagtggtggttaacttctatcctaaatgccctcaacctgacctcactttaggactcaagcgccacactgacccaggcaccatcacac

SEQ ID NO: 18663 - DNA, 208 bp, Gossypium hirsutum
  Clone ID: LIB3146-001-P1-K2-A9
cgtcgaaaaaaaaaaaaaataaaaaaaaaaatttttaaaaaaaaaaaaaaaaaaaaaaaaggggggcgtataaaagagacaaggtactaccatcattcacagtctactcctttatatgaccctctttatttcctccccccttttttcaacctcttgcttgcaaaccctacgtttgcaattattcccttcatactttcctttttgccag

SEQ ID NO: 18664 - DNA, 388 bp, Gossypium hirsutum
  Clone ID: LIB3146-001-P1-K2-C10
ggccgccctttttttttttttttttacatcatacgtgctactttattattattctagtagagggaggttttcataatttattacataaagcctaacaccaagtaggtgatagagttatacaagtacggtacggagcctaagcgtacataatattggatacacggtataaggatcatggacgaggcttgtgtggctcgggatgatgacctggaccacctggtcctggcggtggcgcatgggggcctggtccaggaggaggagcatggcctggaggaggatgatcagcatgtggcggacctctttttcaccatgaaaatatgggtataccatgggaaattgcaaagcttggggtcaagctaggcatgtggggaactgttaggaagattga

SEQ ID NO: 18665 - DNA, 281 bp, Gossypium hirsutum
  Clone ID: LIB3146-001-P1-K2-C7
tcgacctattgcgtcaccatatctttttcagacttttacaagctccctctcttccgtgaagttagggtaatctttgtaccaacaactgcttattgcagcgacacgtataactagacagtggttagcagtgcatagaaagggtacaaggttgcctactatttgcctttggttcctactgaaaagatcgctaaggtgtttgttgaacagactactgaaatggatccattggtatctgacagttgatctgctttgaatcttgtttactttggcttataactgtg

SEQ ID NO: 18666 - DNA, 182 bp, Gossypium hirsutum
  Clone ID: LIB3146-001-P1-K2-D7
aaattggcaattgctgtgtgtgtgagagaaagtgagagtaatagtagtatcaggatttggcttacgttgcatctctgtgtctgatgcaacagagaggaagaactaacaaccgtagatcaaggtctttctccagatctcggcttgctgtcgaaggattttagttccccttttcactccccatt

SEQ ID NO: 18667 - DNA, 266 bp, Gossypium hirsutum
  Clone ID: LIB3146-001-P1-K2-E1
gacattctctacagtcaagagtggaatgattttcattcttcaaatgttctgttgtactttgcgtcattattgtagagaatgtcggttgaaagctttttaagaacacagaactagtcatatgggtttcttcttccttaattttcttggaattgtcttcaagggaggaaataagttccggaggctgttatcttagatgtttgctgatgtactgattacattgatcattacaattgatgaactatatactcccagaaattttcttatgt

SEQ ID NO: 18668 - DNA, 227 bp, Gossypium hirsutum
  Clone ID: LIB3146-001-P1-K2-E4
gcgacactcttaccagaactagtgcaatgattttaagtcctttaacatcatgctgaactgtgggtaattagggtagttcatcgaaacatcatagctaattactaacacacacctagtcttaaagattccttattcattaattagcttgaaattaacttcatctaatgaaatgacatacatagactgtattccaagatgttagattcatgtacagaatactctgatca

SEQ ID NO: 18669 - DNA, 440 bp, Gossypium hirsutum
  Clone ID: LIB3146-001-P1-K2-F11
ggtatacccaatacgttaaatgtcattttttatttccccttcttagttatcggtgttataagccttgtattgtgtttttataagaattatttcaagttcagtttgcaaggtgaactatggggttggacttgttttttcattggtgtggctgctgttggggttggttcctcatactatcatctcgacccaaatgatgcccggcttgtgtgggatagattgccgatgacaattgcattcacatcaattatggcaatatttatcattgaaagaattgatttgcagaatggaactatttccatcataccgctgctgctggctggcttaatcagtattttgtactggaggttttttgatgacctccgacccttcgccaatgttcagtttgttccttgcattgtcatccccctcatggcaatcttgttgccttcgatttacacaca

SEQ ID NO: 18670 - DNA, 97 bp, Gossypium hirsutum
  Clone ID: LIB3146-001-P1-K2-F6
aaaaaaaataaaaaaaaaaaaattaaaaaaatttaaaaaaaaaaaaaaaaaaaggaaaaaaaagaaaattaaaaaaaaaaaaaaagaaaaaaaaaaa

SEQ ID NO: 18671 - DNA, 384 bp, Gossypium hirsutum
  Clone ID: LIB3146-001-P1-K2-G11
cccacgcgtccgcccacgcgtccgcccacgctttcgcccacgcgtccgtccacgcgtccggcgacgcgttcgggcccatccttactttgcacaagtcagggcagcagagagcagcaggatgcggactcagtaactcaattcccttgggaggatttcatttgtaaatcagaaccagactcatctggggtaagagatttaatgtgttgtttaatgttctcaaaaatattgtgactgcggttctcaatcttaggcagttaaaaaggctgtggacgaaacataaacttctctttacttttcactagcctcggtaacttcgtttccgagtttatatacatttattttcaagaacgaagtatttatgctttaattttacaatcgtagctc

SEQ ID NO: 18672 - DNA, 461 bp, Gossypium hirsutum
  Clone ID: LIB3146-001-P1-K2-G8
gaaatgtttgaaaaagacacggtaacttggcttcatcgggttgagagctatgggaatctctggagtccaaagattgaggatgacacttcgagaaatttgatggacatgaaagcaaactggggatcatttgcagctgctcttaaaagcaagaatgtttgggtgatgaatgttgtcccggaggatggaccaaacacacttaaggtgatatatgacagaggtctgattggcactactcataactggtgtgaagccttttccacataccctcgaacctatgatttacttcatgcttggactgtcttttctgatatcaagaagaaaggctgcagtgccgaggatttgttactcgagatggatcgtattctccgtccaagtggattcgttatcatccgggacaaacaaccagtgatagatttcgtaaagaaatatttatcagctttgcactgggaagcggtagcaac

SEQ ID NO: 18673 - DNA, 309 bp, Gossypium hirsutum
  Clone ID: LIB3146-001-P1-K2-H10
cccacgcgtccgaagaaagcagcctgtccggtgtgatgtagggggccaatgctcaaccatgggttaaattccatcctctattgggttgtctttcatgggttgatgtttgtatagggttttaaactttataagtttaagtgttccaatcttgtgtgaagtcaagacctgttcttttgtttttttacttaggttgttgctttaaactgggattgtctgtttctggtattatacaatcacttgaggaacaaattgtatcaaatcaaccaacttatttgttattttgttaatgttataaatatgatttgacat

SEQ ID NO: 18674 - DNA, 456 bp, Gossypium hirsutum
  Clone ID: LIB3146-001-P1-K2-H4
gcggggatgagtcttctgatctttgagagctcagcagcaggatatttagagactgcacgcctgcgtaagcattttaaggagcaagggagggatagggatgcttgggattgttcacgggttccattctgtccaggtggcaagcgccaattctatggctacattgccatgaaagaagatctggatttatttaaccagcactctcaaggaaagtccaagctgaaatttgagacgaggtcatatcaagagatggttgagagtcagataaagaagataaatgatgatagtcagcagcttaacctacttaaaaagaatgttgctcaagagcagcagccctcacaagtccttgcagagtctctaggacgattgagtgagaagctgcgccagacgacagaggaatatggtatcatgaggcagcaaactagattgcagcatgagcagaacaaagaggagttgggc

SEQ ID NO: 18675 - DNA, 182 bp, Gossypium hirsutum
  unsure (1)..(182): unsure at all n locations; Clone ID: LIB3146-001-P1-K2-H9
attcacaactgtaataattttacatacatcctttcagttacgctctttccatatttaccacgatttattttactaaacatatcggcacgcncaaacctgaaccaaataatttataattatcacattttatcatcttcatcatcttcacaaaatccctatctaaaattccctctcttataatc

SEQ ID NO: 18676 - DNA, 150 bp, Gossypium hirsutum
  Clone ID: LIB3146-002-P1-K1-F12
ccctcaaaatgcaggcttcgacgctgaagtcctggacgcacatccatcgatagcgagcgtccacacaacgactgcaacagacgcagggataaaaaaaaaaaaaaaggcgacgcggccgcgaatgccggcagcccgggggaaccactagtc

SEQ ID NO: 18677 - DNA, 256 bp, Gossypium hirsutum
  Clone ID: LIB3146-002-P1-K2-A1
ggtaaatagaggatgtttagtaaacaaatgtgggggaattagtaaccctttgggctgaataccataagatgtcagggctttcaaactttgatgaactttaaactgtgatttaaatttgctgcttgttttcatgtttgcattcaatctcaaaataataaatttgtgaaatatatttgaaataaaaaaaaaccatatattaaaaatataaactgcttaaacgtaaaagatgtgcaaataaaaactattgtattaataa

SEQ ID NO: 18678 - DNA, 146 bp, Gossypium hirsutum
  Clone ID: LIB3146-002-P1-K2-E3
tgttattggcactattaatatttttatagtttgttattcttgagttatgtcgtgtattgtatgtgcatattggatggaaagtacggatatgagaggaataaaaaaacttaagctatggctgaattctaaataaaaacagtgttaga

SEQ ID NO: 18679 - DNA, 171 bp, Gossypium hirsutum
  Clone ID: LIB3146-002-P1-K2-E6
tcgatttgtaattagcaatgcttgtgtgtatataatatacgggtgtgtagtgttagtctgtgtatagaattttcgacgatgggataaacaagtacattttgacaaatttgttaatgcattattttagtttcaaaaaaaaagagaaaaaaaaacattaaaaaaaaccaaaaa

SEQ ID NO: 18680 - DNA, 141 bp, Gossypium hirsutum
  Clone ID: LIB3146-002-P1-K2-E7
cccacgcgtccggtttaatgatgtttcattttgtagttttaaagataagcaagttgtgtttattagccaaaaaaaggctttaaattgcataaaagttgtattgtgatggttttgttatatggtggaagttttctttttatt

SEQ ID NO: 18681 - DNA, 392 bp, Gossypium hirsutum
  Clone ID: LIB3146-002-P1-K2-F10
gcgcccactcgtccgatcacttgtatctctcagtttcttatccgctgccgtagcactacttgttttagtagtttcagtggcagtgcggacccatactacaaatgcacaaagctgcccgaccgagctgacgagcctgaacgtgtgcgcacctttcgtggtgcccggtgcagctgttgctaaccctagcattgactgctgtaacgcactccaatcggtgcaccatgattgcctttgcagcactctaaggatcgcttctcgactcccttctcaatgcaatctcccaccactcacttgtgcttgtaagaaaagcagtggtgctgcatgcttaattgtgtaggaaaatctaaaaacgccatggaatatggataccggcctgatattttccttctttt

SEQ ID NO: 18682 - DNA, 183 bp, Gossypium hirsutum
  Clone ID: LIB3146-002-P1-K2-G1
tcgcccacgcgtccgtggcaactgaaagaaaaaagttccttatgttatcccatggtcattttaagcatatcaagtcgagtaacaatccttgtgaaatggaaaacaaatgagccgttttaagtatttttatttttattttttggttaaaaaaaaaaaaaaaaaataaaataaaaagtagaaaaa

SEQ ID NO: 18683 - DNA, 452 bp, Gossypium hirsutum
  unsure (1)..(452): unsure at all n locations; Clone ID: LIB3146-002-P1-K2-G3
cccacgcgtccgcccacgcgtccgatntagttttgaagctttagcttcaagagcttatctggggttgattgattcagcaagatcagtggccgaggctccggaaggattgctgcagaaaatgaatgtattgataagccttgaaaaaacatgggttgtcagtcaaggacattctctttcacacaatgggagaaaaatcgagcaatcatggtcagtgctagacccattagttatatatgttagatggaagggaggtccatatgtagattttgggggaaaataagcgaaggaaataagtttcattgacttggtaagtttgaaaatagcttcattgggtcctataattgttggaatctcttgtttgctttagattgaagtggcgttggccttattgagggtgtattaatttaaatgcctgaattaatagggaaaaaatatattccaagtgaaataag

SEQ ID NO: 18684 - DNA, 131 bp, Gossypium hirsutum
  Clone ID: LIB3146-002-P1-K2-G6
gttctttgtttcatgtttgcattatttggtggtccgaaccttagtattatgcttggttgctctgcttttttgttcagtgagtgctgggttgttaacgtcaatatttttatgctttgtgctttctttcgaac

SEQ ID NO: 18685 - DNA, 328 bp, Gossypium hirsutum
  Clone ID: LIB3146-002-P1-K2-H10
cggacgcgtgggtgttaagtgaactcaaaagtctggtttatgtcggggaagttagggatcatggggcgatggtctacttgatattaatgtactattattttagcctttcaccgtatcgccaccattaagatgacgggccctatggggctggcggtgggcggacaattggtgcttaattccctacttgcttaccttccatcttttaagcattttgcttaagaggatgtttggagctggagactgtattgtggtgcttattattatttaatattcaagggttttgagaacattaatgttaatagctattattgtacgagatttttttttg

SEQ ID NO: 18686 - DNA, 395 bp, Gossypium hirsutum
  unsure (1)..(395): unsure at all n locations; Clone ID: LIB3146-002-P1-K2-H3
cccacgcggccggctgaagaagaanncaaacggtaatgcttttaacggtgctgtcttgcagctcgacccatgcgtatcaatgaggtggcctcctgctagcccattcgacaattgccttaaagcagccagacattaaacaaggatattgtagtagcttttacggtgcaaagttgaaggaagtaactagattgtagtaacccttatgtttcgaacgctagtgataatttgagggcatacattccctactattactaatccttcttgtggacagtgtgtatcttcttcttcaaagttgaatgaactaatttgaagccaacttttagtcagttaaatgtaatcatgccattctgacaggctttcgtgctccgggcaacaaaataacagagaaaacaaag

SEQ ID NO: 18687 - DNA, 224 bp, Gossypium hirsutum
  Clone ID: LIB3146-002-P1-K2-H4
aaaactgacaggtcgaaggagggaagtaacactaatctgatgcctgaatttagaaggagccggtctactgctcgcggaaaattgttggttttgccttgaggattctacactatatgggaactagtttcctacccttcgaaatattccttttaaattttgtacagttgttgcattatcagaggaggttattgatcaagatgtctttatactcatgatgatcgaat

SEQ ID NO: 18688 - DNA, 320 bp, Gossypium hirsutum
  Clone ID: LIB3146-003-P1-K1-A6
gcaggatgttcttgggttggacatttctgccaggatgaacattcctgcaacacagcatgggaactggagttggaggatacctaattccacgagttttgatagcctggaaaaagaagcgttaagattaagagagatgctttccatgtacggtcgaaagtagttcaggaaagcttcatatctttcttttcctcagtcattacacatgattttagtgccacccccaacattatgtgtctaaaaacaatctctctagctttgaataagttcttttaaaaagcttgataccctttcatttctttctcgttaatatcttactttct

SEQ ID NO: 18689 - DNA, 483 bp, Gossypium hirsutum
  unsure (1)..(483): unsure at all n locations; Clone ID: LIB3146-003-P1-K1-B6
tcggaccggattcatatggggaaagggactgttaatgtgtaaagcactttgattatcctagggacacggtgcaagagcaagaactcatgatcgcctaaaacttccagggtagagggcttagaaaactattaacgatccaataactctactttgttttactgtattatgcttatagacattgactaggattaaaaaggcacagtcgtttgatatcttggcgtttcactcaaaaaatattttgcttagagactttcctctctttttaaaggttctgttcgtttaggattagttgggataaacttattgatggaatggtttaggacctgtactattacaagtttactagactaaaactttgcttgtggtgttcatataaatggagattactgttataaaggggatgtctttttacagttacctactgtaaagggggtcgttganntattttcaattggatataataataattaatttaattaagtt

SEQ ID NO: 18690 - DNA, 484 bp, Gossypium hirsutum
  unsure (1)..(484): unsure at all n locations; Clone ID: LIB3146-003-P1-K1-C7
tcgtctcgattatttaataataaatcctctttagttatgctgttatataaaatcttctctgtcactttcatgtggttacaggtctacatattgttattatgtaacgttctttggattaaaaaaatattatctgtgtcgtggatgttcgttgaattaatcagtcaattctgtattcttagcttaanagagtaacattggtcactttttattaaaagatttcactccatttgtacgttaaaacattggtatgcattgatgaaataatcagatagtgatacgtggcttaccacatgtaccccatgctgatatacaatgaccaatttttagctgtagaaataaatgaaatttttaatagaaggatcaatttgttaatatacaatggctaagggtctgtttgtttaaatgaaaaaagttttacggaaaatgttttttgcatttttctatgtttgtttcacagaaaacaacttggtcaatggaaaatgac

SEQ ID NO: 18691 - DNA, 362 bp, Gossypium hirsutum
  Clone ID: LIB3146-003-P1-K1-D3
acattaattgaacgatgttagggatttaaactttagtataaaacgacaatgataaaaattgagagcagatttacttttggcttcatattttttaactaaaacagtgaaacaatcgactcccgctgcatatggtcagattatgggataccttattacctcacccaagacaggttcaggcttcgagtctcttctatatctaatgaacttccgtggagccattatcacttccctttgtgacgatgacactttcactgggagagagggtttcagagtcagaaacatgactaggggaactgtctaccttgccattgtcagaagcatcagaatccgagttcaaatcaagcgaattcaaatcaacatgt

SEQ ID NO: 18692 - DNA, 394 bp, Gossypium hirsutum
  Clone ID: LIB3146-003-P1-K1-D4
gttctagatcgcgagcggccgcccgcgatctataacttggaatttttgagtgttgttggaaggttggaggctgagcaacaaaagcaagtgcaggatttccaggaagaggtattggaaagagcaaaaagagccaaagagcaagcggcacgcgaggcattggaggcacaaaggctgattccaaagtctactttcctaagtacatctatgggcagtggtgccactgcaaacaatggggctgcagctaaagcttcgccctcaactgccaataacggagtttctacaaccccatcctcctataatcccgtcaacgctgctgctgctaatacagaccctgggcctgacgctaaaaaggaatagtgccaagtatctctatttgtatttcacactttttatc

SEQ ID NO: 18693 - DNA, 404 bp, Gossypium hirsutum
  Clone ID: LIB3146-003-P1-K1-E7
acgaaaattttaagattgatgtttaatatggtattagagtgaggttttattatattgggctgaagaaaaaaaaaaaaaaaaaaaaaaaaaaaaaaaaaaaaaaaaaaaaaaaaaaaaaaaaaaaaaaaaaaaaaaaaaaataaaaaaaaaaaaaaaaaaaaaaaaaataaaaaaaaaaaagggacaactttttaaagaaacaatattaacgtacgctaccgtgaaaatcataatcttttctataggggtacataaaataaaacaatagaccaaccatttaaaaacggagaaattgaaaaaaccattcatttaacaaattaaaacatttttgaaaaaatgatctttattaaaaaagggttaaaaacaaaaaggtcaaaaccattggccttttcaaaaaattgcaa

SEQ ID NO: 18694 - DNA, 342 bp, Gossypium hirsutum
  Clone ID: LIB3146-003-P1-K1-F1
cccacgcgtccgcccacgcgtccgcccacgcgtccgcaaagaacaaatttcttgttagagatgcatgctgtacttatacaaaccgatatgttaactgctaaaggagcccaaagtcaactacagcagcttagaggtagaaactggaccatttaagatgagtttggatcaagttagttgtagtattgtttcgggttaaattggattagtatactatggtgtaagttaaatatcatttcatagttggtaaagatcattatgcttattgttatcattaatttgtaatacttggaaacttttatcggtgtaatcatatactcattatttgtggaagtcatctttagc

SEQ ID NO: 18695 - DNA, 433 bp, Gossypium hirsutum
  Clone ID: LIB3146-003-P1-K1-G1
cccacgcgtccgcccacgcgtccgcccacgctttcgttcacgcgtccgcccacgcgtctcgggacgcgttcgcctacgcgttcgcccacgcgttcgtccacgcgtccgaccacgcgttcgcccacgcgttcgttgtaaagttattgtcgccaatcgttgctattgtggaaatggatgatgtggtttttttattatttcctaaataaaatattttttaattttaatagaaaaattctatttttttttttgttctattttttctttcactttttttttatgctttatttttcttttagatttttctttattcaattttttggtgtgtataatttgttctttcttttttgggatctctttttttttttcttttttttttttctttttttttcttttattttttttttatatattttttttttttattatgtttttt

SEQ ID NO: 18696 - DNA, 113 bp, Gossypium hirsutum
  Clone ID: LIB3146-003-P1-K1-G8
tttctgtatgaaacaattattttctttccttcaaagcttagaaatttatctcgtctgcctgtggctactgattcaaaactagccatttaaagtacaattggtttattaactgg

SEQ ID NO: 18697 - DNA, 337 bp, Gossypium hirsutum
  Clone ID: LIB3146-004-P1-K1-A10
cccacgcgtccgtactttttgacaggtacctgttggtggaacactttgaccaactaaatgatttatccaaatagttcggtgtctaccaaacaagctcctaaagactatgttccatgctaccatattattttctttggagttaggcctttgtttctttatataatatatatatattctgtttcttgtgtgcaaatggcatccaattttaaaggcaaacagatacttggtgaagggctaaaattatatttctacaaacttcatttggtagacatttttgtaatattcaagctcaacaatccgaggttaagccctttcaaaaaaaaaaaaaaaataaaat

SEQ ID NO: 18698 - DNA, 245 bp, Gossypium hirsutum
  unsure (1)..(245): unsure at all n locations; Clone ID: LIB3146-004-P1-K1-A4
cccacgcgtntcgccacgcgtncgctcagaaattttgaatcggaatcaccttcgaatgctcgttgctttttttgtatttcaaaatgcatcgattgtgcctgtatagcctattgtgcctttatgttgcgtaaaaaactcacctaggctattacatggcctttatagccgaaaagaaagaaaaatctaaaaatgaaaatgctatttctcttttttcctattcgctgctgctctgtgtgtctttttcg

SEQ ID NO: 18699 - DNA, 366 bp, Gossypium hirsutum
  unsure (1)..(366): unsure at all n locations; Clone ID: LIB3146-004-P1-K1-A5
cccacgcgtncgcatggacatgaatgcatcttttggaggttttgcagcagcacttgtatcagatgcagtatgggtgatgaatgttgttcctgctcggaagccattaactcttggtgtaatatatgacagaggccttattggagtataccatgattggtgtgaacctttctcaacatacccacgtacttatgattttattcatgtagctggcattgaatcactaataaagcttcctggttcaagcaaggagcaggtgtaaccttgtggacctaatggtggagatggatcgaatgttgcgttctgaaggaacagctgtgattcgagattcacctgaagcaatcgacaaagtggcacgcatagctcacg

SEQ ID NO: 18700 - DNA, 431 bp, Gossypium hirsutum
  unsure (1)..(431): unsure at all n locations; Clone ID: LIB3146-004-P1-K1-A6
nncgnccacgccgttcgtccacgccgttcgtgattttgaggttgatggttatcttcacaatgaggaggagaggcgtttcaaaaagatcatttgggaagaaataaaccgggaatatcttgaggaacaagcagccaaggaagcagctttagcagctgctaaggaggcttgcatggccaactatgataaatgtccagaggacctccaagctgcacaggagcttgccgcagctgctgcagaagtagtggcaaaatctaaaaaggagaggctacaaaagcgagctgctgaagctaaaaatgcacgtcctgctaagactgctgctgaggcaacccgacaaatgctggttaagaagagactaagctcaaaaatcaactatgatgcgttggagaaactttttgatgaaccggtggctacagagaaatgcaagaaacaaa

SEQ ID NO: 18701 - DNA, 369 bp, Gossypium hirsutum
  Clone ID: LIB3146-004-P1-K1-B11
gagatgcgtttcgctggaaataatgatcactctcttctatacagtggacgctcacaaaccttactgaggcgaggagtttttcaagctagcaacgagatatgttcggatgatgctttctgatcaactcttaataatcaacaatctctctcgcaacttttaaacaatctattcgctaagaattatgatgtgcattattagctactacgttttagcatttattctggccatgtgttgatacaccaacttatgtaccccttttttttttcttgtataacttcggaatacatgcccatgaccaatgtaataacctataatgtcttttggatgtttttatttaaatgtgattttttttgtcgttttattatttat

SEQ ID NO: 18702 - DNA, 413 bp, Gossypium hirsutum
  Clone ID: LIB3146-004-P1-K1-B4
attgtacaagagaagtggaaatgagactatctcaagggaaattaaaccctggaattgacgtgagttctgcatttatagactgaatgtcttaacatattgggttatataacatccaatggttgttatttctatttgcagaaggatataaagaaactgctggcttgaatttgatgggtggaagagattagctgatcacctcatggagttaataaattagatatgcctacgaataaaaaaaaaactaatctatctcttgttatgtttcccccatcttctaatgattggaacgactcttctacacatttgaatgcgtgccctttgtacaaagtttttttccatggtgcaacctctaaagttcttcctccaattctaatattccctttttatttttgatctttttaagattttttatt

SEQ ID NO: 18703 - DNA, 432 bp, Gossypium hirsutum
  Clone ID: LIB3146-004-P1-K1-B5
gcttgttaaacggagactcatttcaaggtgtttgggagtatgattcggtacttttcaacgaaaccgcaagccgaaatgaagccaatcgagttgaaaacgtcgctagagcaaacgcagaccataagcagagtcacctttgacattctcaaggagcatgggcccctcaccgtcggtgatacttgggaacgagtcaaggtcagttgtttagagagactataatctgtattcattgcgtatctatatttgttgcttccacatctaattaagccaagccccagagtgaagggcagtgcagctttatcgttgcataatcttaggatcttgaattccataagatattgtttttttcatgctttacttgcctgtgctcgacatattggagtagaaatgtgtttatgaagtcaggaggttggactgagaggacttacaaac

SEQ ID NO: 18704 - DNA, 405 bp, Gossypium hirsutum
  unsure (1)..(405): unsure at all n locations; Clone ID: LIB3146-004-P1-K1-B6
attattttggcaccagattgggcttggctactgtctcctctgagcaacacattccttgtttcntggagctatgcatcggaatcccttttccaatgtttttncctaccgtggtctgaatgtttcccttgtctacgcgatgatcccacttcaaatacaccttaacaaaaggaactccttggtggagagaatatagcatatgctgcttctgtgtggaagctgagtgcatgtgatttatgtgagattgcccgtaattcagtctaccagtctggtttttcacatgctttgaagtcacactggattggaaaggagtattacaagagagggcctaatggaaatgagatacagaggacaaatgtacctcatattcggctggaatttcgtgacaagatctggagagaggagatg

SEQ ID NO: 18705 - DNA, 368 bp, Gossypium hirsutum
  Clone ID: LIB3146-004-P1-K1-B7
cggacgccgtgggatctgtcaaagatttagattgcagagatcgaaacacttgctggacgtgctgaagaccttgaaaagaagctcgaagatctacaacagctggtagccaacccaaagtccattattgccgaaatcctgggaatggcatctgccaaggcaaaggctgatgagaagagtgcatctcctgctgtggggagttcattgcggatgggtactggtaacaagaatggaggttttgattcttcaactgttttcactggttatacaaatggggctgcagcagtcacgcatcttggtgtcttaagacgaggtgtgaaacctgttttgatgagtccagtagaatctggaccagcaaaaaaaccagtcac

SEQ ID NO: 18706 - DNA, 389 bp, Gossypium hirsutum
  Clone ID: LIB3146-004-P1-K1-C11
ggggaatgatcaaatatggcgaccttttagttgccgtctcagacatgttgcagtccatccaggtcatgaatgttccctagaaacaacacagtatgatgcaaattatgttcgttttcgaatcctgcttgtagactcacttgtgtattgaactcgctgtatctttcgcaatctattcggctttgattaatgttaggatgaaaatgactaccaccggaaaacagaggagcttggctcagccaatcttgcggtcacagtttcactcaacaaaggtaaatcagttgaatcattttgtgaccccctaaattattttgaattttaactttctatttgagagacataaacaaacctttttttttttactatgtagtgtgctgtatgaggtttctaag

SEQ ID NO: 18707 - DNA, 138 bp, Gossypium hirsutum
  unsure (1)..(138): unsure at all n locations; Clone ID: LIB3146-004-P1-K1-C4
ntcgccacgcgtncgngacaaggaattcataacatataaaaacatgtgaatgaaaaaaaaagctgcaatgtacatcatttgaaaattggattatattatatatcattttcacatgaaactctaaatattttttgaatt

SEQ ID NO: 18708 - DNA, 151 bp, Gossypium hirsutum
  Clone ID: LIB3146-004-P1-K1-F8
tctagatcgcgagcaaccgccctttcattcaattttttttttttttatttttttactggtcgttttttattaaataattattttcacacccttattctttctaacttaaacatttattaaaaaattctataaaatttcttctaataaatct

SEQ ID NO: 18709 - DNA, 414 bp, Gossypium hirsutum
  Clone ID: LIB3146-004-P1-K1-G4
gtgctagtgtcgactgtgacggtgaaaaggatgataccaaatgtagtatatgtcaggaagaatatgtaaatggagatgaagtagggatgttgcagtgtgagcataggtatcacgtgacatgcatacagaattggctgcagacaaatgttacttaccgagcgtgaccggtttgtctcttggcaactggccttttcccattccagatgtttaggcatcagaatgcagaaaattgcaagcattctgcaacgcgaccaacctagcatgatggttctgcaagtgcaacttcatacaggaattctaaacaagggacaacttcatatatatccaatcaacaatcaacaacaagggttttatatctatcaatcaacaatagctgtttgcaaattcacatataggacagccatctttcctttt

SEQ ID NO: 18710 - DNA, 261 bp, Gossypium hirsutum
  unsure (1)..(261): unsure at all n locations; Clone ID: LIB3146-004-P1-K1-H12
cccacgcgtncgcggacgcgtggggtaagacattgcaagatgttttgagactgttgtaggagactgcatatgttccatgcatctttgtacagcattaaaggtcctcattatggcaagagttgtttggtttccatcaaataccaaatatagatgtccattcaactactcttaaatggctttggaaacaataatcaattctgacaagattacttcctttgntgtttatttatagctggtgtagtcatacaaggtaattatatg

SEQ ID NO: 18711 - DNA, 276 bp, Gossypium hirsutum
  Clone ID: LIB3146-004-P1-K1-H2
acccttatggtgcctggtccaccgagacccacctagttccctgtgtgtgggcactccaagctgtgcaacatgattgcctctgcagcactctcaggattgctgctcaacttccttctcaatgcaatctcccacctctctattgtgccacctgacatatatgcatgcatgcaagcaaactggtagaatatatatatattttatttttcttttgtaacgtgtggcatcatatgtgacaaagcaaatgcaatggagatcaaagttataattagtacttgg

SEQ ID NO: 18712 - DNA, 373 bp, Gossypium hirsutum
  Clone ID: LIB3146-005-Q1-K1-A2
gcgtcgcgtgcactgttagaatatgaaaagtataagagagagaatggtgagattcaacttcctgcttcttcactccctcatgcaagtggtgaaaaggagtcaagtggtttcctagccttggggtcaggtagggcacgcatggatgctgccgctcgtgccatgcaaggttggcatgctcaacgttctgttggatatggtgagattaccgagcccattgtgaaggagaaaatcatgggttctgcttcaaaacgtgaaagacatctaaaagtattggttggcaaacagaaatgccatagcgcaagttgataatctgcacatgataagcaactgattactgaaattgttgatgttggaacccctgctgattggggtg

SEQ ID NO: 18713 - DNA, 290 bp, Gossypium hirsutum
  Clone ID: LIB3146-005-Q1-K1-A4
atttgaaactgaagacaaagcaagcagacttctgagtaacgtgtcatttttgttgaaatcagggggttattttttcggtattactcctgaaaaagtgattgccaaaaactgttgttgctggatttgtgtatttttctttttttttgttcttgtggttactggtgcacctgtttctgggaggtgattgtgtaaacattttagtgtgatttagttattgtaagaatatttttaacattgttaattttaatattattgtaaaataaaaaaaaattttatgaatttcttaaatt

SEQ ID NO: 18714 - DNA, 420 bp, Gossypium hirsutum
  Clone ID: LIB3146-005-Q1-K1-B9
tcgcccacgcgtccgactacttctaaattgtgattttctattaacatacaaactcggacatgcttatacatgtatatgcatgtttactattacacctgatttatttgattactaaattggtatgcttttgtttcttaagataacacttacaggatttatgttcttggttacctcagcagtgcttggctatgtgagtgacgaggtgtgctagtgaactagcttcttccatgtctttattaataaaagacatggcagaaacccaatgctccttccaaatttcttcggtcaatctcgtatctatcctcaattctaagctggctccagtttaactactttgaaaacacggagaggagcaacatctatagaaccaattagatatttctttcaatggcttgaattgctactacttgttaatatttg

SEQ ID NO: 18715 - DNA, 372 bp, Gossypium hirsutum
  unsure (1)..(372): unsure at all n locations; Clone ID: LIB3146-005-Q1-K1-C2
tcgtccacgcgtncgcgggataaaaagaatgcttccatcagagggggaggaattgcaattttttaataacatttacgagttagtaggagtgccagttgttaccgtgcaacttagatacaacggctgggtgacagagttgcgggatctggagcagtcaaagttgtccttaaactcattaaaaggaaactgaggcaagctgttggccttgataatctcctgtacactccggatgcagatttctcctgctttgcagacttagctctcacttctccagaagattactacatcgagggacaaggttcattgctccaatgtgtcttgacaccaggtgacccttacatgccattgccgaatgatgaaatcataaagaga

SEQ ID NO: 18716 - DNA, 386 bp, Gossypium hirsutum
  Clone ID: LIB3146-005-Q1-K1-D1
tctagatcgcgagcggccgccccacgcgtccgatctgaaaccgcatgttgcaatcttggacggcataacaatgggatgtggaggtggaatatctctccctgggatgtttcatttagtgaccgataaaactgtttttgctcatccagaggctcaattggggttccatcctgattcaggggcttcattttatctttctcgcctacctggttacttaggggaatgcttagctctaacgggagaaaaattgaatggtgtcgaaatgattgcctgtggcctggctacccattattgcttaaatgctcgactttcttgggtcgaagaatgccttggtaacatgatgaatgatgatcccactgtcatagaatcttctcttgcacaatatggtg

SEQ ID NO: 18717 - DNA, 195 bp, Gossypium hirsutum
  Clone ID: LIB3146-005-Q1-K1-E4
gacccacgcgtccgcccatatttcagtaagcaggatacgagggataagcaatttgcacatatgttttagtgaaaagctgggttttaatttctacgtttaatttgcagatgaggttgttatgtagctaaataatatatgtaaattgcttctctttgtttacagattttgttttattaataaaaagtgacatttgat

SEQ ID NO: 18718 - DNA, 308 bp, Gossypium hirsutum
  unsure (1)..(308): unsure at all n locations; Clone ID: LIB3146-005-Q1-K1-F4
tcgcccacgcgtnncggaaaataaatataaaaatcgaacggcgataatctctggcgatggttcgaccgacggcgataggcaccacgaacagatcgtcatcagcgatgtccaccatgacaaccaccatgacgatcgagaacacctccggcgtgtcctcctcgtcgtcgcagcctcaagaagctctcgtcctcgaactccgccgtaggaagaagaaagttacgtggaaagaaggcaccgtggacaacgaattcatgaacaaagagagttccaatatatgttgtatttaccataaagaaaagcccttcgac

SEQ ID NO: 18719 - DNA, 162 bp, Gossypium hirsutum
  Clone ID: LIB3146-005-Q1-K1-F6
cccacgcgtccgttaaataaaaataataataataaaaaaaaataaaaataaaaaaaaaataaaaataaaatattaaaataataatatattaaaaaaaatacaaaaaatatatttaaataaaaagggccgccccttttaaaaaaccaaattttacttcccctt

SEQ ID NO: 18720 - DNA, 317 bp, Gossypium hirsutum
  Clone ID: LIB3146-005-Q1-K1-F7
ggggaaactggatttcatcacgcaagcgcatatttacagcttaagaaaaaacaaagaacacagagaaaaaagtattcgcttgcaagcagtttcttttagtaacactaagatgatgtacattgcaaaacaaggtgagcaaatattagagtttacaaacacaaagaagagcagtgcacctttcgttttttcccttcgctagctaagccaacaccgaatgcatttgatctgaaacagaagccagaccctgcatcaacctacagatttccacctgtttgtccaagtaatacttatccttacttgggttttctagatcggga

SEQ ID NO: 18721 - DNA, 258 bp, Gossypium hirsutum
  unsure (1)..(258): unsure at all n locations; Clone ID: LIB3146-005-Q1-K1-H1
tcgcccagcgtncggtttnttttctcgatataaagggcggtcgggtagaatttggattcgagcctcgagaagcacatcaagagtacaggctggcttagtttcgggggcgattgctcgtcttaagctggaaaatgctgacggtcgactggactcggttactcgcgcgtctgatatttgcgtgagtctgactaccgaatgcgcaggacacagaaaccgatctgccctacatcacttgcgaagacgacaaactgacagctg

SEQ ID NO: 18722 - DNA, 192 bp, Gossypium hirsutum
  Clone ID: LIB3146-006-Q1-K1-A10
atttatctatgatgtttgtattgcaaagagcttggcattgtgtgatatacttgttcaaataagtaggcatgtgggttaacatttaactccgcctaatgtaatgttattttattgtaagattgttaatgttaagtttatgatttgattaacaaatttttcaaatctattataataatttgttaaaaattttat

SEQ ID NO: 18723 - DNA, 269 bp, Gossypium hirsutum
  Clone ID: LIB3146-006-Q1-K1-C5
cccacgcgtccgaaaaacatcggatcttgcgcctcgtaaacggatttgggcataaatcggagcactgattttcttttttccggcaagttatcggagcatatccgatgaaaccatggaagtcataagactcagggaacttcaatgcttttgatgaaagattcgaacatttttcgacacatacactccttttttatccttctaagcttttgtatatggaattatttgttgttagtaacatcattttttaacaataaaatggtgattctatc

SEQ ID NO: 18724 - DNA, 236 bp, Gossypium hirsutum
  Clone ID: LIB3146-006-Q1-K1-F2
tcgcccacgcgttcggaaggactttggctgattacaatattcaaaaggagtccactcttcaccttgttcttcgtcttcgtggtgggttctaagccttaaggtcttccttaatgtgggttttctggttttacgtgaaggattgtgccctttgatggccttttaaataatttctagtctttgtttaccggttgcatctatgtatggtttctctttgaatggaatttgcatatttacct

SEQ ID NO: 18725 - DNA, 427 bp, Gossypium hirsutum
  Clone ID: LIB3146-006-Q1-K1-F3
tcgcccacgcgttcgcccacgcgtccgcaacatcagtatacccatcagattagcttagcagtagcgggttcatggctctccaagcagcttcatcgctcccacccaccatctccattcacaaagaggccaaatctaatgcttgtcttaaagagacaactctgtttggtgttccattttcaacccatttcagctttcctcttcatttaactcaagaactcaggaaaaagggagtagctgccggaattgttcgagcacaaacagctgctacaactccggcagtcgatcgggctgctccacaagggaagaagaccttgagaaagggtaatgtgataataaccggtgcgtcgtccggtttaagcttagcgacggccaaggctcttgccgagacaggggaatggcatgtaatcatggcgtgtagaaattttct

SEQ ID NO: 18726 - DNA, 310 bp, Gossypium hirsutum
  Clone ID: LIB3146-006-Q1-K1-G1
ccaacgcgtccgcggacccttggccggccgcctggccggaacccctgtgggagttggaacggttcgtcactaattataagaagaagggcagcaagatcaagcgacaggctttgatggcaaacaatgttgcttctaatgacagcaataggagagatacaactgtggagaagatggatgttgcaatggatatgaagaagccgaagaaaggtgatgccgccgatgaagatgttgacatcggggatgaaatgccaatgagcagttttccacctgtggagatcgagaaagattatgaccgtgccagtagcagttc

SEQ ID NO: 18727 - DNA, 180 bp, Gossypium hirsutum
  Clone ID: LIB3146-006-Q1-K1-G9
gagattatttcctgaaaaaaaaaatttgagatatatacatattatctctcttttatttctacattattctgcaaaatctcgtccgttttttggctgatttcacttttttaaaattttggctactttccgttacattaaaaattctaaactttttatacccttctagttctaacgagtttc

SEQ ID NO: 18728 - DNA, 310 bp, Gossypium hirsutum
  Clone ID: LIB3146-006-Q1-K1-H11
catacctattcgcggcaaagaaatgctggacccggctcaagacaggaaaaacgacgcttacaaatggctgcttcatcatgcaaagaggtatagattggctgaaggcataatggtgaacagtttcgtggagttggaagcaggagcaacgaatgcgttgcaagagaaagaacccgataagcccccagtttacccggttggtccacttgttaacgttgatgcgagtaacaaaggcaaagctgatgggacggattgcctgaagtggctagataagcagccacatggctcggttttgtatgtgtcttttgggagc

SEQ ID NO: 18729 - DNA, 306 bp, Gossypium hirsutum
  unsure (1)..(306): unsure at all n locations; Clone ID: LIB3146-007-Q1-K1-B5
gggaaatgcagnnggtttagagcgcctcagnngcattaccggttaacaaattccataaaggcattagcttttgttccaccgtttctctaactcattctttcccccaacaataagatgttgggggtggcacaagctatgtatcaccttgcttgctcaaaagcaagtccaacaacagattatcaagaaccccacaaattgtggttgcaaaacagaatcatgctttcatgccgagatgagcttgaagatgcctgctactgtacagttcttcatctgccagctcttgcatctaaatagtcttttgagaaa

SEQ ID NO: 18730 - DNA, 303 bp, Gossypium hirsutum
  Clone ID: LIB3146-007-Q1-K1-C8
gactagttctaaatcgtattgtacagctccaacaggtatgatgggctgtggggctgctgcggggacacaagatagtaggagaggggaggaagggatagaaggacaggcggaggacgccgagtcggcttacgtggaccctgaacggatggtttcttcgggaccatcttgcaaggcgtgtcggacacgcgtcgcctcggtggtgctgcttccgtgtcggcatctttgcctttgtacagagagtgaccgagtggcgcaagcctgcccgttttgccttgccgttcggaattctagcgttgaggtttt

SEQ ID NO: 18731 - DNA, 306 bp, Gossypium hirsutum
  Clone ID: LIB3146-007-Q1-K1-D2
gactagttctaaatcgcaagcacagctccaacaggtatgattggctgtggggctgctgcggtgacacaagatagtaggagaggggaggaagggatagaaggacaggcggaggacgccgagtcggcttacgtggaccctgaacggatggtttcttcgggaccatcttgcaaggcgtgtcggacacgcgtcgcctcggtggtgctgcttccgtgtcggcatctttgcctttgtacagagtgtgaccgagtggcgcaagcctgcccgctttgcctcgccgttcggaattctagcgttgaggttttcctt

SEQ ID NO: 18732 - DNA, 305 bp, Gossypium hirsutum
  Clone ID: LIB3146-007-Q1-K1-D6
gaagaaaggaaagttgataccaaagagtttgagccatgcaacaactttcaagtaagaagagcaacgatgacatttttatcaaactgggttctgaaaaggacaagcgcaaggatgctgataaagaagaaagagtaaaaaagtctgttagcatcaatgagtttctgaagccagctgaaggggagaggtactacggacctgggcgtggtcgaggccgtggccgtggtcctagaggtggatatggaggcaatacagctagcagtgtgttagctccctcaatcgaagatcctgggcacttcccttcattg

SEQ ID NO: 18733 - DNA, 287 bp, Gossypium hirsutum
  Clone ID: LIB3146-007-Q1-K1-D7
ggaggcaccaaagacttttcagcacgaaattgaggagtccgggacgacgccctgcgattgggtctccacggcgttaagagcgacctcgtcggatctcaccctctccaatctgcttacgaatcatcaaagaaaacgcaggaagagatgaagagaaaagttctggccaatacttatgggacagcaatgccactcaaaatggatctcgataggcaaattctctggcggtttcagaggccattgctaccatcttcgatgctagggttggaagctgtgacaggaactttata

SEQ ID NO: 18734 - DNA, 301 bp, Gossypium hirsutum
  Clone ID: LIB3146-007-Q1-K1-D8
gttactgcattgttttttgccatctcatacccacatttgcagctgtaccacacatgttcatcaatggctacaagaatgtcttggctgttgcagttgcaacagagtattctttccgtcaggccgataaagtgaaagagtatttggcggatccaagcaaatttgccgttgctactgcccctgttgctgctgctggtggtgctgctccggctgctgctgtccctgcagaggagaaaaaaccagaaccagaagaagagtctgatgatgatatgggattcagtctctttgactaagtttgtcttta

SEQ ID NO: 18735 - DNA, 226 bp, Gossypium hirsutum
  Clone ID: LIB3146-007-Q1-K1-D9
ggaaaatgttaaaagcccagtgcctttctctttctttagaatgtacggtcattcccatggtctaccccgggtgaccgggtgcctacgtggatttcccggtgtttatgtagtgaaccgggacggttcaaacctgcgccaggttttccactgaatgcttttggaagcgcttgggacccggccaaagggaattgtatacacagtgctgaccgattttaagtgtggtctg

SEQ ID NO: 18736 - DNA, 391 bp, Gossypium hirsutum
  Clone ID: LIB3146-007-Q1-K1-E11
gcttggaagtcctgaacaccgttcgatcagttggccaacctcttgtcgatgactggagatgcgctcaagaaaatggtgaggactttcgaaacacattgtgtatcactagcccagtacgggatgaaacacatgcgatcccttgcaaacatctgcaatgccgggattcacacagaacagatggctgaggcatcggcacaagcttgtgtcagcgttcctactggtcgttggagctctcttcagaaaggttttagtgcataaaaataccactggaattggcaaatattatcggccaaagcttggattatgtttgtacttgctgtgttttcttatatcccgaatggtccgaatgctgctgcattttgatgattattcatgcgatttcttatttctg

SEQ ID NO: 18737 - DNA, 389 bp, Gossypium hirsutum
  unsure (1)..(389): unsure at all n locations; Clone ID: LIB3146-007-Q1-K1-E12
aaaccaggggcgacccacgcctccgacataatcgcacgaaggtcctggctttccttttgacgcccccnagacacccatcagggacggtttttcataaacaaggggccgataaacaaactttccttatcactatcagttcactcctgtaaccaacaacgcgccaaatcatattgatggcctacatgctgtaaaaaaagccatacttcaaatgcttgtgctcacaatatcttaactttcctttctcggaaatagacctcccttaactcatgatataggacattcttccatctatcatccagttttacgttccttgtcacatattggacaatgtgtatcgtttctctcgttctcccaaatcctcatatccaacaaaaaatttttttgaattt

SEQ ID NO: 18738 - DNA, 307 bp, Gossypium hirsutum
  Clone ID: LIB3146-007-Q1-K1-E2
aaaacaacttgaggatggccgaactcttgccgactcaacatccaaaaggagtccaccctccacctagtccttcgtctaaggggtggcatgcagatatttgtgaaaacccttactggcaagaccatcaccctcgagttggaaagttctgatacgattgataatgtcaaggccaagatccaagacaaggaagggatccctccagaccaacagaggcttatctttgcaggtaaacagcttgaagatggccgaactcttgcggattacaacatccagaaagagtctaccctccaccttgtccttcgtctta

SEQ ID NO: 18739 - DNA, 305 bp, Gossypium hirsutum
  Clone ID: LIB3146-007-Q1-K1-E4
ggagttggtggaaggcagcctttaaatctacaactcgctactactgttaggatttgctagacttgcttctacattgagtctagactatcaggtacatgtgggggaatatggagtcaactggaatttctttttcacacttgctggtgtatctatccttacatccattttaaatgttcccgcagaatattctggaattcttggttcagtaattttagttgggtaccaaagttggttgactaatgggctaaatgtttatcttctttctaatgaaaggggtacggatgtcataagcagaaacaaggagg

SEQ ID NO: 18740 - DNA, 232 bp, Gossypium hirsutum
  Clone ID: LIB3146-007-Q1-K1-E5
gttttactaaaaattatttcttcacaacaaagcttctaagccgatagtctgctttgacatgacctgatatacactaccatctgattacatccgcgatggaactcttttccgtttgcactcccccaactgttgaataacctacttgctctttgtatctgcaaaaaaagcgtaagacgcaccagcaaaaatttctcaatacaaatgctcatccattacacgatgtgatccccaa

SEQ ID NO: 18741 - DNA, 302 bp, Gossypium hirsutum
  Clone ID: LIB3146-007-Q1-K1-E6
attcgctgctgattactttggtcaccagtatggtttccaaatgcgacaagaaaaactgatgaagaagatgaaccgaagtggaagtcccactttaagagtggtatccctcctccttatgttaaaccaagtaccaaaccaaaggatcacaggcatgatgccaatgtgggatcttcacttgctggttttgacagcaatggggtgtccgatgatcctttgacacatgaaagggcgtatgtggttaataggacagataagtacaaggaagggttagatcatcctggtaaagaagagcagataattcc

SEQ ID NO: 18742 - DNA, 354 bp, Gossypium hirsutum
  Clone ID: LIB3146-007-Q1-K1-E9
gttccaggtatattggtaccagaggccttattgttaggaaactgggtaaaagctcaagaatgggcagcaattccagggggccgagccacttacttagggaacccagtcccatggggtacccttcccaccatcttggtcattgaattcctatctatcgccttcgttgagcaccaacgaagcatggagaaggacaccgagaagaacaagtaccccgtcggtgctttcgacctcttgcgattctacaaggaccccaaaaagttcgaagaatacaacgtgaaagagatcaagaacggtcgtctagcattgttggcattttgtgggatcttgtgtttaacaatcatgtttacccagtca

SEQ ID NO: 18743 - DNA, 297 bp, Gossypium hirsutum
  Clone ID: LIB3146-007-Q1-K1-F1
actagcgcgatcccccgggctgcatgaattcggctttatgttccctcaacaattacttccaatacagacaacaaaaatatcaagtttcaacccaaacacaaataaaacatgaaaaagcataacagacagtataccatttcaggtctgtaacacgcttcaaagaatacaagctagcttaacacggaagcaactggtagtaaaagacatcatacgcacactcaatcacaggaacttgttagtactcattatgttcacgctgattacccttaggctgctcattaccaacttgtccataat

SEQ ID NO: 18744 - DNA, 366 bp, Gossypium hirsutum
  Clone ID: LIB3146-007-Q1-K1-F11
cgaactgttatgttgtgagtcgaaagccgtttctaagaacatagccatattttctcggtgggggctctgactaaacttgggaggcgctactgatagtatccatagcccatatctgaatcctcgacactgttcagttgttcccttgctgaaaacccaggacactgttgaaagacgtggttactatcttctgtttcctgaccacacctcaagcatcgatcctcagttattactcttctcagttttaagctggagaaagatggaatgtagttccacgcgattttccatactgtaatcttaatttttgtaggcatatctagattccataatttcctgaagaaattatctgtttgggtctgtaaataatca

SEQ ID NO: 18745 - DNA, 270 bp, Gossypium hirsutum
  Clone ID: LIB3146-007-Q1-K1-F12
aaaagggagcccacgcctcggaaacctcttcatacttcattttattgcggacctgcctcgttaggaagggttttcaactccgtgagtttgaaagctaataaaatggtaaatttgtgctctggcccccaagaatcaaacaaaatgtacctaataataatagggcggacgtttaaggatccaactttcttcgcttctgcaactcataatcttctatagtgcacctaaattaatcactggccgactttacaacgctgactgtaaaaccctgcc

SEQ ID NO: 18746 - DNA, 304 bp, Gossypium hirsutum
  Clone ID: LIB3146-007-Q1-K1-F2
tgcttatccggtcacatggtcgatcgagtcagcaggtaaccccccaaagcgcctgtgagaataacgtagtaaaagagtagcagttgaaatgataaaattctactctttttttccttttttggctaatttggcctatttcaatattcatattgcggtattatcaaggtcctggattatacggaccgagaagagtgccaaagttgatcaaagtaccttctttgtgatgtggtcgccatcgattacgtattccttgtaaatggaaaaaaaagtaaagggcttttgatatatatgcaaagaaaacacc

SEQ ID NO: 18747 - DNA, 303 bp, Gossypium hirsutum
  Clone ID: LIB3146-007-Q1-K1-F3
cgatctgttatgttgtgagtcgaaagccgcatcgagaagatagccatattttctctttgttgtctctgactagactttgtattcgttactgagagtatccatagcccatagctgaatcctcgacactgttcagttgttcccttgctgaaaacccaggacactgttgaaagacgtggttactatcttctgtttcctgaccacacctcaagcatcgatcctcagttattactcttctcagttttaagctggagaaagttggaatgtagttccacgcgattttccatactgtaatcttaatttttg

SEQ ID NO: 18748 - DNA, 305 bp, Gossypium hirsutum
  Clone ID: LIB3146-007-Q1-K1-F4
cccacgcgtccggaaagaaagaaatcaaatatgggtccatttccaagagtttccttctccttgctcttttagctgctgttgttcttctcatttcttcggaagtggcagctcgagatcttgctgaaactaccactgaaaacaataatggtgaggtggctaccgaaacaacccaggctgagctagaagatggacgcggaggttataatggaagaggacacggagggaaaggagggtatggaggtgggcacggagggtatggtggtggtggccacggagggtatggtggtggccacggaggatacggt

SEQ ID NO: 18749 - DNA, 298 bp, Gossypium hirsutum
  Clone ID: LIB3146-007-Q1-K1-F5
cggacgcgtgggcgttttcttgggaaaaggagagagctcaagaccagcagatgcggctaccttcactaaaccgtatgtttgtggatgtgcttagtagccctcgttaatctttctttgtcataataactagtactgttaagcatgttattagattttcctcatctgcaaatcagtagtaattgttctttaatgtgcaattgatgtgtttcataacttatttgctgccttttatggccaaattttctaacatggatcggagatgtactaatatctgcttaattccatttgattcatcttt

SEQ ID NO: 18750 - DNA, 112 bp, Gossypium hirsutum
  Clone ID: LIB3146-007-Q1-K1-F6
ccacgcgtcccacctcgttttttgatccttatgttggcttgagattggtcctacaagatcacacattgttgtgattactgtcggcctacttaaaggactgctcaactgtctg

SEQ ID NO: 18751 - DNA, 302 bp, Gossypium hirsutum
  Clone ID: LIB3146-007-Q1-K1-F7
aacagttttgcaagtcatccgtagagccaatggtgaagagagtgatcatgtgcacattactgccctttcagatgctctgggtgtgccaattcgtgttgtgtaccttgatcggagctcttgtgacattggcggtgttagtgtaaaccatcatgatttccttcctacttcgggcgataagtcaaatgctaaaggtggtagcactgttcctgtcaagccttttatttccttgctatatcgtccaggccactatgacattctctatccaaagtgatgcatttgcattttctggttgttaacaatgt

SEQ ID NO: 18752 - DNA, 256 bp, Gossypium hirsutum
  Clone ID: LIB3146-007-Q1-K1-F8
tgggacaggaaggggcgtttttagcttctgcctgcaagtgacaggcgaatctctacgattttgcggttggagatgggatgaccctactgcataccttgtcagagagatgcagtacggtctgctgaggatagcgctggaagtgcgactgactagagcaaagagtgatgcggcctttataacgaccccgtttggtccatgtactgtaattggaagaaatggaggtgtttgccattattaggaagatgagcgactttga

SEQ ID NO: 18753 - DNA, 336 bp, Gossypium hirsutum
  Clone ID: LIB3146-007-Q1-K1-G1
ggcgggagttccaggcagacccacgcgtcgcgctgcttgctctcccttcgatcaagaggcagatctcgataagaccctgaccggcaagaccatcaccctcgaagtcgagagttccgacacgatcgacaacggtaaggcgaaaatccaagacaaggaagggatcccaccagaccaacaacgtctcatatttgccgggaaacaactcgaggacggtcgcaccttggccgattacaacatccagaaggagtccaccctccatttggtattgaggcttcgtggtgggatgcagattttcgtcaagacgttgactgggaaaaccataactttggaggtggg

SEQ ID NO: 18754 - DNA, 301 bp, Gossypium hirsutum
  Clone ID: LIB3146-007-Q1-K1-G2
gggacaggaaggggcgcgtgagcttctgcctgcaggtgacagccgaagctctccgcttttactgttggagttgggtgtccctactgcataccttgccagagagatgcagtacggtctgctgaggatagcgctggagtgcgacgacaagagcaaagagagatgcggcctttataacgtccccgtttggtccatgtactgcaatggaagaaaggtggggtttgccattaagaggaagatgagcgacaatgatgcggtggtgcttaagctcatgcagtccgtgtcggtgggagccggagttttg

SEQ ID NO: 18755 - DNA, 304 bp, Gossypium hirsutum
  Clone ID: LIB3146-007-Q1-K1-G3
cggacgcgtgggcactgtcaatgttattcgttattccctactcaggccttgaactttgccttcaaggattacttcaagaggcttttcaacttcaagaaagacagagatggttactggaaatggtttgctgggaacttggcttctggtggtgcagctggtgcttcttcccttctctttgtctactccttggattatgctcgaactcgtcttgcaaatgatgcaaaggctgcaaagaagggaggagagagacaattcaatggtcttgttgatgtctacaggaaaaccctaaaatctgatggtattg

SEQ ID NO: 18756 - DNA, 302 bp, Gossypium hirsutum
  Clone ID: LIB3146-007-Q1-K1-G4
cccacgcgtccgctaatagttctctggacaagaggaaaccagaaagaccctgtccccatattcgacttgaacaccaacatcatgaagagctggacgacgacaaccattaataagacccattctctgtaatttatattgtagaaattgttgtgtggctgaggctgttcatttggaaacttaatttagctctagcataaatcttgatgacctttgaagacaaggcatgttatcaattaacaatagtctgtatcattcaaaaaaaaaaaaaaaaagacaaaagaaagcgtgcattgataagcttc

SEQ ID NO: 18757 - DNA, 291 bp, Gossypium hirsutum
  Clone ID: LIB3146-007-Q1-K1-G5
gttgttgtgtgatatttttcacattagtggctcgttgctgctcaggaggcaaacaatcgtttcgtgttctgtgacattgtcacaaccaccacccacatgagcttgaggggtcctaaggctggtatgattttctaccgcaagggaccaaagccaccaaagaagggccaacctgaagatgcatgtgtatgactttgaagacaagatcaactttgcagcttccccttcccttcagggtggtcctcacaatcaccagattggtgccctggctgttgccttgaaacagttcatgac

SEQ ID NO: 18758 - DNA, 303 bp, Gossypium hirsutum
  Clone ID: LIB3146-007-Q1-K1-G7
cggacgcgtggggtaccgtggggatgttgtacgaaggacgtaaatgccgctgttgctaccatcaaaactaagcgggcagttcagtttgtagactggtgccctactggtttcaagtgcggcatcaactatcagccaccaacggtggtaccagggggtgatcttgctaaagtacaacgtgcagtgtgtatgatcagcaataacaccgctgtggccgaggtttttgctcgaatcgaccacaaatttgatctcatgtatgccaagagagcattcgttcactggtatgtaggtgaaggaatggaggaa

SEQ ID NO: 18759 - DNA, 305 bp, Gossypium hirsutum
  Clone ID: LIB3146-007-Q1-K1-H1
cccacgcgtccgcccacgcgtacggtggtttcgagaccatgtataatgggcacacaggcaggcggcttactgctatgatattcttgggacccacgtattaccaacgactaaagcacatggtcgacgataagatccattcacgtggtcggggtcctgttcaaattctaacgaggcaacctgcagagggacgttctcgtgatggtggtctgcgttttggagagatggaacgagattgcatgattgcacatggtgctgcccatttccttaaggaaagattatttgaccaaagtgatgcatacagagtc

SEQ ID NO: 18760 - DNA, 204 bp, Gossypium hirsutum
  unsure (1)..(204): unsure at all n locations; Clone ID: LIB3146-007-Q1-K1-H10
gaaaaggggagcgccccgggctgcaggaattcngcacgaggtttaaagttttttttttcctaactacttgaaacctattcgaccgggggattattttaagagggcttttcaaaacggtttggacacttacattttaaatttcattcatacctattctatccaactcttttaccatgttttttttggtggtatggttttttatta

SEQ ID NO: 18761 - DNA, 271 bp, Gossypium hirsutum
  Clone ID: LIB3146-007-Q1-K1-H2
aaaagatcccacaaggtttgattaccagaataacacagcaccacttttcccagacttcagaacaagtaaaaccagaagcgtagagatcaattgataaaacaaaatatagatgaaataagaaaacaagacaaaactcgtgccagcggcatagacctaagcgtgctagggcaacagacaatagtcctcgattttttattctacattcctaattcaatttttaaaaaaaaattgtctaaatcctttgattttattttattcaatttttgatggc

SEQ ID NO: 18762 - DNA, 309 bp, Gossypium hirsutum
  Clone ID: LIB3146-007-Q1-K1-H3
cggacgcgtgggagcaaacacaagagctgaagagaagagaccgcaaaaaagaaaaatccccagcgaaaaggatcgaatgtcgaggagaaagctagtaagaaactcaagcgaaagagccctagtaccgataaacagggtaagaaaaaagccgatgagcaagaggggcccctaaagaaacaaaagaaaaataaccaaactgtggagccaaatagtcgaagtgccaaggcaaagcctaaaagttcaacttccaaggaacagaaaagagcaaagcttcgaagcaaggcaaggaacagaaaaagccgaagcaaa

SEQ ID NO: 18763 - DNA, 307 bp, Gossypium hirsutum
  Clone ID: LIB3146-007-Q1-K1-H4
gcagacaacaagtatagaccaaggggacggggcaatgttattttggttcaggcaatgatatcatggacggttttaatgaattgaacaggggacctagggctaaggggcctaagagccaaaagggtgcaacacctatcacagcatctactaaggggcaaaatattccctcagatggaaccaaggatgaggaaaaggcatgtgttgttccagaccgtgaacagtataacctagtagaattccctgtggattatgacgatgccaagttctttgttattaaatcatacagcgaggatgatgttcataaaag

SEQ ID NO: 18764 - DNA, 304 bp, Gossypium hirsutum
  Clone ID: LIB3146-007-Q1-K1-H5
aattacagttgccttttttccctaaatttaccattatttagttcctttcatccaaaattttgatcctagaagaagtcgaatggcgtcaagaacagttgccaaagatataataactcttcgaggctcagcggcaattgtcagcgagttttttggatatgcagcgaacagcattttgtacaatcgaggagtttatccagaagaaagttttgccaaagtgaagaaatacgggctcccaatgttgcttactcaagatgaaggtgttaaatcgttcattaccaatctaacagctcagctttctgaatgg

SEQ ID NO: 18765 - DNA, 223 bp, Gossypium hirsutum
  Clone ID: LIB3146-007-Q1-K1-H6
ttcctttttaagctattaatgtaatgaccgaatatttaatgggaacagtatttctgtatttgttctttccttttttacattgtaatagttacggtgtaatttcgttgaatgtttgctagaaagagaaagttataatgtcaaaaataaaaaaaaaaaaaaaaaaaaaaaaaaaaaaaaaaaaaaaagaaaaaaaaataaaaaaattggaagattatttaaaagg

SEQ ID NO: 18766 - DNA, 242 bp, Gossypium hirsutum
  unsure (1)..(242): unsure at all n locations; Clone ID: LIB3146-007-Q1-K1-H7
tatttaggggttatgtatgaattgatgggtggaaaaaaatattaanaatagagtataatagaagagtnggtattgagtgatgttagttatattgaaaaaagagatatgaagattttgttttggagaggggtaaaaaaaaagacatttattatttgaagtgatttttttgtanttgagattagnaagattagggatatatatttaggaaattggagaaatagtgattggaattttttagggga

SEQ ID NO: 18767 - DNA, 356 bp, Gossypium hirsutum
  Clone ID: LIB3146-008-Q1-K1-A1
ggattggagggtataagtttgttgacatcctctaaagagctggttgatcttataaagaacgtagatgtggtttttcattctaaacaagctgtatcaagaaaatcagcactcaatagcttgtatagaattgttccttcaattcgtgaacaattgaaggattgggaggatggattatgtgaaagtgatgctgatggatctttcttgcatgaaaactggaacaaagatctaaaactctttagtgatggggaagatggaggacaacgactacttcagttgtttatattgcgtgcagaagctgagttgcaaggtggtgatattgcacacgcgcacagcctgcagatcatagattcattaaa

SEQ ID NO: 18768 - DNA, 377 bp, Gossypium hirsutum
  Clone ID: LIB3146-008-Q1-K1-A11
gaagcgggcaggccacgcaacagaaaagctaaatcactggaaaatctcatcgatccgaactcaaagaggacggcgaagaaagaggggacgaaaaaatggggtttcagaatttgaaaggaggcatttcccaggtcgtatctaatctgtttttccaacttatatccacattctgtatcatggaagatcatgtatagtgttacaagttgtaatttcttgagctttctgtttttggagctttaagatttcatattttttttcccttaacctttttactattgttatttgtgttattgaatgtctgtgatgtgctcttgaaatttggaaaagaagaatgttcgtttgagtgaataaatctttgggtgaataaatttgattat

SEQ ID NO: 18769 - DNA, 396 bp, Gossypium hirsutum
  Clone ID: LIB3146-008-Q1-K1-A12
ctagttctagatcgcgagggccgcccttttttttttttttttttttttttttttttggataccactcaataaccatatcataagaccatatatataaaatgattataatgttatacatgccatactcaaaatatacaagccattatgccaagatggtatacgaatagtgtgaacgagcctccgaccattcccaattttcgagtttacttgtcaaaactacaaaaaatgaaaaaaagggaatatgcataaatgcttaataagtttacatgcaaatagcaagtaagataaccatataagcaaacataaaacatcatttgcataatcatcaccaagacattcatatcacattttcatttatcattttaccataatggtgtttatatcgattttttaacc

SEQ ID NO: 18770 - DNA, 329 bp, Gossypium hirsutum
  Clone ID: LIB3146-008-Q1-K1-A2
aagcataaaaagcacaaggaccgagataaggacaaggataaagagcataagaagcacaagcaccggccttaagataaagatcggagttaagattaagacacgggaaaaaagaaggatagaagtgggcatcatgattctggtgctgatcactcaaaaaagcaccatgaaaagaaaaggaagcatgatggagatgaagatcttagtgatgttcacagacacaaaaaaagtaagcataaaagctcaaaaattgatgaagttggtgcaattaaagtagcaggctgaaagggtggctctctagttcatattgtctcagatggttttcaaagtat

SEQ ID NO: 18771 - DNA, 333 bp, Gossypium hirsutum
  Clone ID: LIB3146-008-Q1-K1-A3
ggatcctactggtgaaatcaagttggcagactttggcatggcaaaacatatatcagcttgtggtaaaatgctttcgttcaagggaagtccttattggatggcaccagaaggtggtatgaatacaaatggctacaaccttgcagtggacatctggagcttgggctgtactatacttgaaatggcaacatcaaaaccaccatggagtcagtatgaaggggtggctgcaatatttaagattggaaacagcaaagatgttccggagattcctgatcgcctttctaatgaagcaaaaagtttcattaggctttgcttgcaacgagacccatcagcacg

SEQ ID NO: 18772 - DNA, 373 bp, Gossypium hirsutum
  Clone ID: LIB3146-008-Q1-K1-A4
cccacgcgtccgaggattcttgggtcgatttatttgtacgcggacgcgtgggtttagaggttgacaaggcccttcttgatggtgctaataccccttcaaactatggtttcgtagaatcaaccataggctgttagcgcacagggactgtaaagacaactgaattcttatgcaatgcacatacactgtgaacttgtgccaatgccttccatgatgtgtgttgggacagtgttcatgcatcgcaggctgctaataaggtccttgattatacatttttttttcaaggcattccccttctttaattcgtcaggacacctagtatacttgtcctttttaaactgaactaatatctgagactacttacttgttctattat

SEQ ID NO: 18773 - DNA, 168 bp, Gossypium hirsutum
  Clone ID: LIB3146-008-Q1-K1-A6
cgcgtccgcttgtattgcttgaaaaagggaaagcaatttgttttaagtgaatcccatgtcacagatgctggggctattatgagagaacagacggtagtgactatataatgattgtaatcattgtctaaacttttatgagattattttttataggattggattgattaa

SEQ ID NO: 18774 - DNA, 394 bp, Gossypium hirsutum
  Clone ID: LIB3146-008-Q1-K1-A7
cttcggccacgcgtccgcccacgcgtccggatctgcagaacttgaaaaatctgcaaagataggcaaaaatggaatcaggtatattgagaattctatctctttcacgcctaaagatttcggatctgctctgtgggacatgattaggggaaaaggaacaggttactctatgaaaggtcacatcaacgttgacactccgtttggagcaatgaaattacccatcagcaaggagggtggcacaacccgccttaagaagaatagggaagacggtggtgatgatgatgatgatgatgatgaggattaaagcaaaagatcaacagggatggtccccttgagcttcttttgttttgttacagagttcattgcaataatatactaatggggtgtggaatttaat

SEQ ID NO: 18775 - DNA, 375 bp, Gossypium hirsutum
  Clone ID: LIB3146-008-Q1-K1-A8
gtgtgttttgcttttcatactcatttagcccctttcattagcatcaaaatcactccagttttctttatcactgaaaaatgtcttgctgtggtggaaactgtggctgcggtactggctgcaagtgtggcagtggctgtggaggatgcaagatgtatccagacctgaacgctgccgagatgaccacaactgagactctggttcttggtgtcgcaccccagaaagcacactttgagggagctgagatggaattcggggctgagaacggctgcctgtgtggagacaactgcacctgctacccttgcaattgtaaatgattagagaccaaagccaaagctcccttgaagcagaggcgcctttgtctttaagaaacaatat

SEQ ID NO: 18776 - DNA, 401 bp, Gossypium hirsutum
  Clone ID: LIB3146-008-Q1-K1-A9
cacaaatcacaactaccaagccactatcttttttgggtcatggaattaccgacattgagattcactttttgcaaatcaagttcacagcaattggggtttaccttgaaccagaagttgtaggacatttgcaacaatggaaggggaagcctgggaacgtgctagctgaagatgatgacttcttcgaggctcttattaatgctccagtggagaagtttctgagagttgtggtgattaaggagatcaaaggttcccaatatggagtgcagcttgagagtgctgtgagggaccgattggcagctgacgacaaatacgaagaggaagaggaagaagccttggaaaaagttgttgaattctttcagtctaaatattttaagaaggattcagtcatcacttaccatttt

SEQ ID NO: 18777 - DNA, 389 bp, Gossypium hirsutum
  Clone ID: LIB3146-008-Q1-K1-B1
ctttacgccgcaacgaaaaaagccggtgaggaaatcgctcacacttataaccatatatacggcctttccctcaccggacttagatttttcaccgtttatggtccatggggaagacccgatatggcttacttctttttcactaaagatattcttcaagggaaacccattgatatctacagaacccaagatcaaaaagcggtggcgcgtgacttcacttacatcgacgacgttgtgaaaggttgtttaggagcgttagacacggcggaaaaaagcaccggtagcggcggaaaaaagaaaggaccggctcaattaagggtttacaacttgggaaatacttcccctgttcccgtcggccgattagtctcgattttagaaagattgctcaacac

SEQ ID NO: 18778 - DNA, 404 bp, Gossypium hirsutum
  Clone ID: LIB3146-008-Q1-K1-B10
tatcatagtgctgttttaatagattgtgtattcaccattcactctacaaaagccagggatgcttgtaatggttctagagtggtcccacctacttctgttgtgatggagcctaaagtggccagctctgaatacaaataaaaacctttcttggaatcttcgtattcagcttctcttgatgttagttcttctagggcttatgttgctagagagtcttctgtagtgactgcattttgttcccttgagttcagaccattcaatatctagatcttttcctgatcagattgcaatttccatttgaaagttacatggaatccttctgtttataaatttagaaatcttttttttatttctaatagttgcttgaaaccttcactttattgcatactaaatttgctttgattgtt

SEQ ID NO: 18779 - DNA, 370 bp, Gossypium hirsutum
  Clone ID: LIB3146-008-Q1-K1-B11
cggacgcgtggggtcggagctttggtcactttctattcttacaacttgctatctctagtccttgaacaccatgctcaattgggtcgccgacatcttcgcttcagagacatggctaatgacatcttggggccaagatggggtcggtactatgttgggccaattcaattcatggtctgctatggtgctgtaattgcttgcactcttctgggaggacaatgtatgaaggcaatttacttgctatcacaaccaaatgggagtatgaagctttacgaattcgttattatatttgggctcttgatgctggttttagcacaaatcccatcttttcactcactaaggcatattaatttgatatccttggttctatgcc

SEQ ID NO: 18780 - DNA, 384 bp, Gossypium hirsutum
  Clone ID: LIB3146-008-Q1-K1-B12
cgttcgggtttcacgaaggtacggcgagaagttgaagctttcagggcagttgagcttgggttctttgaaacctgctgcaacgccaccgtccacggctgctcagaaaccggcttccggtaaggcaacgacggtggagaagggacaggtggaggcagagggtgggaagaacctcaagcaggtgaacattccggctggacttagggtggtttgcaagcatttgggaaagagtagatcggcttcctccgccgtggcggcttcccctccggcgccaactttgtctaagaggagagatgattctctattgcaacagcaagatggaatccaaagcgccatcctacattgcaagagatccttcaatggctgtcaagattcttcagagtcttc

SEQ ID NO: 18781 - DNA, 185 bp, Gossypium hirsutum
  Clone ID: LIB3146-008-Q1-K1-B2
accagacgagtggattttaacatcatttcaggaacttcaatgtcttgcccacatgttagtggccttgcagggttgctgaaggcggctcacccagattggagtccagcagctattagatcagctcttatgactacagcttatacggaatacaaaaacaagcagaaaatgcaagatgttgcaacggg

SEQ ID NO: 18782 - DNA, 380 bp, Gossypium hirsutum
  unsure (1)..(380): unsure at all n locations; Clone ID: LIB3146-008-Q1-K1-B3
gtcagcctcacactttctccttccagcgtcgattcatctccatcagatagatgctcttagagcctggaggaatcttggccggagatccctcctcaacttcaatttcaacgaagagaggaggagaaatctgtagcgtgctcgcgcggtaaggtttctcagtcactgttcttactatgtttttttttaaaaatggtgaatgattcccatagaatacgaaacgatgtgaagaaaggtaaagagattcgaaggaagaaatcacatctgctattttttgctttctattacgtgtatattctgtgaatatgcgttagtattgcttgtgtgtaaccgattacaaggatcaaaacttctgctttatagccgaagaanaaagggaaatc

SEQ ID NO: 18783 - DNA, 423 bp, Gossypium hirsutum
  unsure (1)..(423): unsure at all n locations; Clone ID: LIB3146-008-Q1-K1-B4
ccggcncgaatcccgggcggaccacgcgtccggcttttgccaaaagacagctaaagacgccactttgaaaaccggaaatgtcggacgaggagcatcatttcgagtccaaggccgacgccggcgcttccaaaacctaccctcagcaggccggcaccatccgcaagaacggttacatcgtcatcaaaaatcgcccctgcaaggttgttgaagtttccacctccaagaccgggaagcatggtcatgcaaagtgtcactttgttggaatcgatatcttcactgccaagaagctcgaagatattgttccttcttcccacaattgtgatgttccgcatgtcaatcgtactgactaccagttgattgacatttctgaggatggatttgtgagtttgctgactgatagtggagacactaaggatgatctga

SEQ ID NO: 18784 - DNA, 339 bp, Gossypium hirsutum
  Clone ID: LIB3146-008-Q1-K1-B5
gcttttgccaaaagacatgttttagacgccttcttttaaaaccggaaatgtcggacgaggagcgtgatttttagtccaaggccgacgccggcgcttccaaaacctaccctcagcaggccggcaccatccgtaagaacggttacatcgccatcaaaaatcgcccctgcaaggttgttgaagtttccaccttcaagtctgtgaagcatggtcatgcaaagtgtcactttgttggaatcgttttcttcatttccaacaagctcgaagatattgttccatttttaccacaattgagatgttccgcatgtcaatctttactgactaccaattgattgacaattc

SEQ ID NO: 18785 - DNA, 405 bp, Gossypium hirsutum
  Clone ID: LIB3146-008-Q1-K1-B7
tgatatcaaaagtacatatgatgacatttagcctggcagcatcattccatataggctgaaagttgatctcattgttgatgttcctgtttttgggaggttaactttacctcttgagaaaactggagagatccctataccttacaagccggatatcgatatggagaagatacactttgagagattctcttgggaggaaactatagcagttcttcatttgaaattggagaatatgaatgactttgacttgggactcaatgcccttgactatgaggtctggctatctgaggtcagcattggatctgcagaacttgaaaaatctgcaaagataggcaaaaacggaatcagttatattgagattcctattattttcaggcctaaggatttcggatctgctctgtgggacat

SEQ ID NO: 18786 - DNA, 404 bp, Gossypium hirsutum
  Clone ID: LIB3146-008-Q1-K1-C1
cggacgcgtggggtctaccgtaatggactaaattcttttcccggtacatggtgattattccgatattattacgtatatttataaatatacgggaaatcttgccttttgaggccgaagctttgtggttgaacataagcgcgagcaattcggaggtatgaattagtttgttttcgtttttggtgcaacagaataaaagaaacaaggttaagggatgtcaatgttgtgagatggtggtgactgtttttgttttctggcaaagagaaaaatgatgtgctcatgtgtcatgctcagggacattaaagagggggaaaatattatattgttgatcttacatggtattttagtggtggaagtaagctttgaagttaaaatttgtaatagcagttgactcaaaagtcatttta

SEQ ID NO: 18787 - DNA, 315 bp, Gossypium hirsutum
  Clone ID: LIB3146-008-Q1-K1-C11
atccaagaaaaaagctacaaatttatatccaaccttatgtgaaatagaaggtttaactgtggatgagcagtttcgagcattaagtaaaattccagatcatccaactcaaatgctcgttttctttagtttaccttctaatgtacaattggaatgggtcagaagatttcttgctgaccattaaaaattatggttttgttgatgacattttcgtaactttttctgtttgtaatatttgggatggtatgtcattacaatgttctaactttttggtgtggcaaaactgtataacatatggattgtgacatagaatttcat

SEQ ID NO: 18788 - DNA, 301 bp, Gossypium hirsutum
  unsure (1)..(301): unsure at all n locations; Clone ID: LIB3146-008-Q1-K1-C12
cccacgcgtccgggctaggctaacgctgaattagtacatgtttatatgctgtacagtcgcatattggctacagtaattgctctggcagttttaaatttgccaccgttgttccatttaaatctgccttggaagtagaggctcgttaacgattcatcacattgttgagtctttcctttgttgagaccctctttgcaggtagtctttctattacattttaggttgtacaataattgcatcaaattagtttattgctaccatgtgttggttagtnaaaaaaaaaaaaaataaataaaaaataaaa

SEQ ID NO: 18789 - DNA, 405 bp, Gossypium hirsutum
  Clone ID: LIB3146-008-Q1-K1-C2
gaacaacaagaacagctgcacaagcagcagcaatacgatccaagcaatgggcaagacttaaatttggagctgtcgattgggattgtttcagctgactcatctcgggtatcaagtgccaactcggccgagtcgaaaccaaaggtagataacaacaatttccagtttcttgaacaagctatggtggctaaggcggtatgtttgtgttggcaattaggttttggaacaagtgaaatttgtaggaactgtcaaaattcaaattcaaatggcttctatagttattgtagacccttggattcatagggtcatctttttcttctttctttctgtttttaggagataaattaatgcttaattattatctttttgcctgcccactgtaatcaaagcaaaattataaaacaaact

SEQ ID NO: 18790 - DNA, 406 bp, Gossypium hirsutum
  Clone ID: LIB3146-008-Q1-K1-C3
cccacgcgtccggagggttttctggatgaacaattcacccaacttcagtcactccaagatgaaaataacccagattttgttgtggaagtagtgtctcttttctttgaagattctgaaagacttcttaatgaactgagtaaagcactagagcagcagatcatagatttcaaaaggatggatgctcaggttcaccagttgaaaggtagcagctccagcattggtgctcacagagttcagaaactctgcatcgtcttccggaactattgcgaagctcacaacgtggaaggatgtcttaaatgtctgcaacaagtgaagcatgagtatggcattattaaaaccaagcttgaatctatgttccagcttgaacaacaaatcttgaatgctggtggctcaatccctgtgtaat

SEQ ID NO: 18791 - DNA, 167 bp, Gossypium hirsutum
  Clone ID: LIB3146-008-Q1-K1-C4
gcgtcttgttcaatctcccaattccttctttatggatgtcaaatgtcaaggctgcttcaacataacaaccgtatttagccactctcaaactgtggtggtgtgtggaaactgccagaccgttctgggccagccgttcggcagttgacctagtctcactgaggtctgtt

SEQ ID NO: 18792 - DNA, 360 bp, Gossypium hirsutum
  Clone ID: LIB3146-008-Q1-K1-C6
cccacgcgtccgcggacgcgtggctcgttgctaagcgtatctcgcttgatattttagagggcgaactggcgaaacataagtcttacgccgaatatctgcttcaacagctatttcgtgcgaagaatatacatttaagggagggggaaacttttaagggagtagtagaaaatcatttggtttttgaagagcccttaaaagagcaaattgatgggctctatcaaatctgttgtgatctcattctaaatggggccaacagtagctactttctaaaaattgtggaattttatggatccacgcttggtatgtagccaagcccaagaaaaaaggaacgaggggaagaatcgacaaggaatccataac

SEQ ID NO: 18793 - DNA, 400 bp, Gossypium hirsutum
  Clone ID: LIB3146-008-Q1-K1-C7
cacactcatttgtttgtttactctgaaggggtgctctgagatcacatagaaaaatggtgaaagcagtggctgtccttagcagcagtgaaggtgttagtggaactgttttcttcactcaagagggagatggcccaactacagtgacgggcaacatttctggtcttaagcctggcctccatgggttccatgttcatgccctaggggacacaacaaatggttgcatgtcaacaggacctcacttcaatcctgctggaaaagagcatggtgctcctgaagatgtgaatcgccatgctggtgatctaggaaatgtcactgttggtgctgatggctctgcgagtttctctattgtcgacatacagattcctctcttcgggccacactccattattggaagagcggt

SEQ ID NO: 18794 - DNA, 311 bp, Gossypium hirsutum
  Clone ID: LIB3146-008-Q1-K1-C8
aaaaataatatgagagatagagagtttctttttaagcgtgactttacatagtccggggggcacctactaacactatggtagctattaatccactcattttaatcctatgacatgatctatattttatactattcattcttaaaaagaatcgctgcattgtatttttttcattttctaaggtctttagttgtctacagaacctcactctaccatgatggtttactggatgaacatttcaccctacatttattcactttcagatgaattttatactataattttgctgctgtatgtataatattttttttttt

SEQ ID NO: 18795 - DNA, 344 bp, Gossypium hirsutum
  Clone ID: LIB3146-008-Q1-K1-C9
ctcatcctcctaatgttgctgctgtttaccgaaacattgacaagctatttgcacttcctgtaggttatgacctggtatggaggaattgtctagatgactacaccacaccggtctctatttggtatccgcgagcacctgatggattcttctccctgggatgtgtagctgttgcgggttttgaagagccagaagctgatttggtacgttgtgtggcagaaacagttgcagaggagacaacatttgaggagcagaaggtatggtgtgctccagaatcatatccgtggggttgtcatgtataccaagttcaaagtgacgccctttattttgttgctctaagagaaact

SEQ ID NO: 18796 - DNA, 404 bp, Gossypium hirsutum
  Clone ID: LIB3146-008-Q1-K1-D1
agacagcatgagcagcaggtacatgaagaaattgacaccgcaaactctcctttcatcaattactccaagaagagttttgttgacaccaataatcaagctccaatggggttctctgcaacacactttgagggaggatcacaatttgagggtcactttgggttttttcagtcttcttcgccatctcctgaccagctacaaaataaccagtggctttcaggaaatcaaagagcatggagttggaaatttgagattaaagcaatggaagaaaggagttgccataagtcaaaagaataaagatctcaaacagaattttattttatttttttataatgggtagggtaggagctgttcaggaatcaaatttagaactagtgttaacccagtactggcaattgcaatgggaa

SEQ ID NO: 18797 - DNA, 344 bp, Gossypium hirsutum
  Clone ID: LIB3146-008-Q1-K1-D10
gggtaccttttctttttttatgataagctcctaaaataggattatatttctcctcactcataacttcaaaactcttcttgtatgggaacgtggttggatgaaaattactgttattatgattcaagtcaaagtcacacattagatccaaaaagggaaagattctgctaccacgagttcttgaactatgcctgtagcatgtcttcgtcgattttgttatattttttttctatttccaattcatgacgaggcaaagcttgttatttgtttgacaggaaagtattgcagcagaatttttggacaggcttgtgaaatggggctgatcaattaggaaccatagtcgagat

SEQ ID NO: 18798 - DNA, 58 bp, Gossypium hirsutum
  Clone ID: LIB3146-008-Q1-K1-D11
caaaaaagtctttactaaacaaagagtctcttttttcttacagataattttctctcct

SEQ ID NO: 18799 - DNA, 403 bp, Gossypium hirsutum
  Clone ID: LIB3146-008-Q1-K1-D2
cccacgcgtccgagaacacacaggaactgctcagcagcaatttgaaaattcacattcttcccttgctgctgctctacaggaagctattaaatctgcaacttcaatcacacaaaccttaagtggtgaactggccaacgcgcaacgaaatcttctagctatagcagctgcaggtggcaactccaatgcaggaaatcccttggtttcacaattgagtaatggaccactgactcatctgcatgagatgcctgaggcacacttagatccaactaaagagttagcaagattgatagctgaaaagaaatatgaagaagcattcacctcagccctgcatagaagcgatgtctctatagtttcctggttgtgttctcaggttaatctgcaagggatattgtcaatgaaacca

SEQ ID NO: 18800 - DNA, 393 bp, Gossypium hirsutum
  Clone ID: LIB3146-008-Q1-K1-D3
cccacgcgtccggacccacgcgtccgcccacgcgtccgcccacgcgtccgcccacgcgtccgcccacgcgtccggcagatgagtactttgagaaacatcccgaactgaaaaagaaattcgatgatgagatccgcaatgacaattggggctattgacatgtttggtaatataagggtcaggctataaaacagtcccaaccagtatttctgagttggtcttattatttcttttgttgttttaaccccaaatgatgattaccgaaactctgttttttgtggtaatttcatcgggaactaataatattataattcacttgagaaccaaagtggatattgcaagacatgcttttcatttaagtggcatccatgttcatgaggaacattcttttatttc

SEQ ID NO: 18801 - DNA, 293 bp, Gossypium hirsutum
  Clone ID: LIB3146-008-Q1-K1-D4
cccacgcgtccgaattatgggacctccattgatgtttggtcggtaggatgcatctttgcggagattcttggtcggaaaccaatctttcctggaacggaatgcctcaaccagcttaagctgattatcaatgttcttggaagtcaacaagaggctgacattcagtttattgataaccccaaagctcgacggtacatcaagtcacttccgtactctaggggtacccccttttcccttttatacccacaagccgatccattagccatagatttgttgcaaaggatgcttgtttttga

SEQ ID NO: 18802 - DNA, 375 bp, Gossypium hirsutum
  Clone ID: LIB3146-008-Q1-K1-D6
atcttaagcccaacaaaagaaatcactcctctttcaaacctcaaacaatggaagtggtgagagaacttggacatccaaagatacatgggaaagtggtacgagatagcttccttcccatctttctttcaacctaagaagggggagaacaccagcgctttttacactctgaaggaagatgggacggtgcatgtgcttaatgtgacttttgttaatggcaagaaagattctatattatgcttcttcttctttgtttgtttttattattgtcttttctcatcttatattttttttttattttcttattttttcttttttatcttttgttcttgtttttaatttttgtttttatattttattattttttttatttttttt

SEQ ID NO: 18803 - DNA, 402 bp, Gossypium hirsutum
  Clone ID: LIB3146-008-Q1-K1-D7
gaagaagcttaatgaaagactttattcccttcgatctctggttcccaaaatctctaagttggatagagcttcaatccttggagatgcgattgagtttgtgaaggaactggaaaaccaaaagaaagaactccaagatgagcttgaagaacattcagataacgataatggtgctaagaaaacaggaatgaacggagtccacaaaaagttccaatctgagattttcttacaaaatgatcaaatccctgtgtattttaaccctgaacatgacaagggaccaaatggctttcctgttggaggtaatggcagcgtctcaagggcacaaaatcaagaagtggacacttgtgcagacaagacacagcagatggaggtacaagttgaagttgctcaaatcgatggaaacca

SEQ ID NO: 18804 - DNA, 402 bp, Gossypium hirsutum
  Clone ID: LIB3146-008-Q1-K1-D8
gtttgataagtctcgaaaagtaggtggaccaagggccttgcatcctagccagtgctattgcttgggggttgaagacatggagctactatcaggagaagagcttcatacgccaaattcattcctagttatgttaaatgggctgattcttggcaaacatagaaggccacagctatttcaccaatacgctgatccttctcgtagttaatgggccaactgagggtcttgctctgatatatgtaatactttttgacacaatttttggtggttgaaaattataaagattttgcattcttagactatgcaagagttggtagggcattggccttatacgaggttggaaacgaagaagaagcttttgtagagatggaagatgtttcaatatctttaaagggatatccaggt

SEQ ID NO: 18805 - DNA, 401 bp, Gossypium hirsutum
  Clone ID: LIB3146-008-Q1-K1-D9
cccacgcgtccgcccacgcgtccgtgtaggtgcaaactcgacatccgtgcagtgatcggcagaggagagagcagactttgaaacctcgtcgttatctgagccaccaatgctttctgttacatgaagtttgtgacatcaatccgattaattcccggcctgaaatttttttttctgcttgattgtgccggtattagggaggcgggtcacaagatttcaggtaacaaactatggatggatcatcgatcactgtgggttcatttgtattaaattataaacagacagctatagaaagctttatatctagttttagtcttatttgcaaaatgttagctcgagaagttaatgcatgttcttgtctgtcaaggttttctttatttttttgatgatgcctagattaaccc

SEQ ID NO: 18806 - DNA, 402 bp, Gossypium hirsutum
  Clone ID: LIB3146-008-Q1-K1-E1
gaagcagattcacgatcagtttttgttggcaatgttgattatgcatgcacacctgaagaagtgcagcagcattttcaatcttgtggcactgtaaacagagtaactattctgacggacaagtatggtcaaccgaaaggatttgcttatgtagagtttctggaagcagaagctgttcaagaggctcttgtgctgaatgaatctgaattacatggccgccagttgaaggttatgccaaaaaggactaatgttcctgggatgaagcagtaccgtccaaggcgattcaatccttacatgggctaccggtccaggaggccctatataccgccttatttctattctccttatggattcgggaagattcctagattcaggaggccgatgcggtatatgccctactactag

SEQ ID NO: 18807 - DNA, 399 bp, Gossypium hirsutum
  Clone ID: LIB3146-008-Q1-K1-E10
ggaagattttgggcaactttgaatcaatggcctataccgtgggaagaagaaatctgggtggatttcaggtttttcaatccccggtttgtttagtttctatcagttgattgtgttgtagcttaaatttatatttgagtgagctcttagagcttaacaatggtttctttttcttgttggacttgtcatgtttttcatgttaccaatcaatgtttgctactgtttcctagagttactactgagatgggaacctagtttgttctaaataaaattatttattttattaattttctttagatatattattttttttaatttgtggattttttctttttttagctttcttatttttcattttgtctgtgttttttttatttgttttctctttttttctaacttttt

SEQ ID NO: 18808 - DNA, 357 bp, Gossypium hirsutum
  Clone ID: LIB3146-008-Q1-K1-E12
cccacgcgtccgctgctatgtatggtatttctgttgctgcccttggaatgctgagcacgatagctactggactggctattgatgcttatggtcctatcagtgacaatgctggaggtattgctgagatggctggcatgagccacagaatacgagagagaacggatgctcttgatgctgctggaaacaccactgctgctattggaaagggtttcgccattggttcagctgctcttgtgtcccttgccctctttggtgcttttgtgagctcggctgctattttaacagttgatgtattgaccccttaagtttttattggcttgcttggtggggcattgtttctttactgtttttctgttt

SEQ ID NO: 18809 - DNA, 403 bp, Gossypium hirsutum
  Clone ID: LIB3146-008-Q1-K1-E2
ctgagacggaacctgattttgatttggatattaaagaggatgttgaagaagaatgcagcaaatatggcagggtgaagcatatttatgtggacaagtaagcatcggactgtctattgcattggataaactcattttttacagcaattttttgttctttttagttggcttgataattgtgtactccagaaccggataaatatattttatctgttctttattgtttatgaaggggcaaatgttgtatcaatgttgaggaaggggataatcacatatttttacatctattaatctgttagtaatgttatttctgtgcaagttatggacattatgcagtcattcagcaacttggttaatatctgtagctgacaatcaatgactaatggcatcttattttgtattataa

SEQ ID NO: 18810 - DNA, 308 bp, Gossypium hirsutum
  Clone ID: LIB3146-008-Q1-K1-E3
aaggttcttcacattcaacaacaaggggaagtctctcctgttggtgaaaggaacccaaacacatgggataagaatttgagctctcgtgttcaccaagcgagtttattgatcttttcagctcccctgatgtggtcaagcagatcacatctatcaccattgaacctggtgttgaggtggaggttactattgcagattcttaaatatgcctcacttatatgcttctttggcaacctttagttttagtcaattagaagactcccatcttgatatacccctctaatgcctaaacaatcttttaagctttgagt

SEQ ID NO: 18811 - DNA, 335 bp, Gossypium hirsutum
  Clone ID: LIB3146-008-Q1-K1-E9
cccacgcgtccgctccccatcgtctgccttcaagagaagacagagaggtctcctcacaaccaccgtaatgggtcgtgtcattcgagctcaacgtaagggtgccggttcggtcttcaaggcccatacccaccaccggaagggtcccgcccgtttccgcagcctcgacttcggtgaacggaacggttaccttaaaggtgtcgtcaccgacgtcattcacgaccctggacgtggggcttctttagcccgcgtcgttttccggcaccctttcctttacaagaaacagattgaattgttcgtcttcgtcgagggtatgtacactgtgcagtttgtgtatt

SEQ ID NO: 18812 - DNA, 397 bp, Gossypium hirsutum
  Clone ID: LIB3146-008-Q1-K1-F1
cccacgcgtccgcgtttttgctggatctggttcaggcatggcttttaataagctgaccgacggcggtgcaacaactccggctggtctcgttgccgcctctctagctcacggatttgcgcttttcgtcgctgtctcagtcggtgctaacatctccggtggccatgtgaatcccgccgttacattcggtgctttcgttggcgggaacattactcttttacgtggtatcctttattggattgctcaactccttggctcaaccgtcgcttgcctgttacttaagttcgccactagtggcctgggagtaccagctttcggactatcatccggcgtgggagcattaaaccgcgtccgtttcgagatcgtgatgaccttcggactggggtacaccggttacgcc

SEQ ID NO: 18813 - DNA, 55 bp, Gossypium hirsutum
  Clone ID: LIB3146-008-Q1-K1-F10
cccacgcgtccgagcatctccagatttttttgtatgaaaaatcccggatacatgg

SEQ ID NO: 18814 - DNA, 264 bp, Gossypium hirsutum
  Clone ID: LIB3146-008-Q1-K1-F11
cccacgcgtccggtggtggtatgcctgtttttggtggtaacaatgagggttaaaaagggattggaggtaagaaaggtggtggtgctggagggaatcctaacggggggaatccatatcaaggtggcggtggttaaaactggtggtaaaaatggcggtggtttaccttatgagctgcagaagaatggtggtatcaaccgtgatggaaacggtggcaaaaagggagctccctactttgtttccgatgggatccctatcatgggatgc

SEQ ID NO: 18815 - DNA, 352 bp, Gossypium hirsutum
  Clone ID: LIB3146-008-Q1-K1-F12
cccacgcgtccggtttcttcagttccagtgttacaacaggttcgtgacattcaacataatctcaggaacatcaatgtcttgtcctcatgtttctggtgcagctgcctacgttaaatcatttcatcccacatggactcctgctgctattcaatctgcccttatgaccacagccgcccccatgagctctggcatcaacatggaagctgaattttcattcggttcaggccatttgaatcttttaaaagctgcatattcaggtctagtttacgatgcttatgaaaccgaatatataaacttcttatgcggactaggttacgccactctgctaatacaattattatccaaagacaac

SEQ ID NO: 18816 - DNA, 406 bp, Gossypium hirsutum
  Clone ID: LIB3146-008-Q1-K1-F2
caacagaatccggatcacttgatactgttggtacagtagggattttggagctttacccgggagcaatcaatagcatccctagtaaagctcaccttgaaattgatgtacgagatatcgaggaaagctttaggaatgctgttattaataaaatccataaagctgcaaaatcaattgccaaaaagcgcaaggtcaccttatcagaattcaagatcataaatcaggacccaccagctcattctaacggatcagtaatcaaagcagtggtagacgcctcggatgagctgaacctaacgtataagtatatgatcagcagagcttaccatgactcactgtttatggcaaggatagctccaatgggcatgatatttattccatgttacaaaggatatagtcataagccagaaga

SEQ ID NO: 18817 - DNA, 401 bp, Gossypium hirsutum
  Clone ID: LIB3146-008-Q1-K1-F3
tacaaactcaaaaaccccaagttctcactttcaaaaaacttcccacattcaccatgtctgacaggtgcggcaactgtgactgcgctgaccgcagccaatgcacgaagggaaacagcaacaccatgatcattgagactgagaagagctacatcaacactgctgtgatggatgctccagctgagaacgatggcaagtgcaagtgcggtactggctgcagctgcacagactgcacctgtggccactaagccaacatacaatggtcatgcttcaggtcatggcatatatagggatctaaataatgaatttaaggttgaataatttgtctgttgtagtttgtgtggtgacttatatctgtcagttaacctttgtatcctttactatgatgtaatggctatgcttat

SEQ ID NO: 18818 - DNA, 392 bp, Gossypium hirsutum
  Clone ID: LIB3146-008-Q1-K1-F4
gcctacaaaaaaaagagcaaaaaatggcagaaagaggcggcggagagcgtggcgcttttaggcgcggcttcggtggaggaaggggtgaccgtggtccaagaggcaggcgccgtggccgcaaggacgaagaggagaaatgggtacccgtcacgaaactcggccgtttagtcaaatccgggaaaatcacgtccctcgaacaaatttacctccactctctccctatcaaagagtaccaaatcatcgaccagctcgtcggcccttccttgaaagacgaagtcatgaagatcactcccgtccagaaacaaacacgtgcaggccagcgcacgcgtttcaaggccttcgtcgtcgtcggagacggaaacggacacgtcggattgggtgtcaagtgcagc

SEQ ID NO: 18819 - DNA, 394 bp, Gossypium hirsutum
  Clone ID: LIB3146-008-Q1-K1-F7
gcttgcctctgttcccagcggtggtggtgttgctgtggcggcatctgcacccggagccgccgccgccgccgctcctgctgcagctgagactaagaaggaagagaaagttgaggagaaagaggaatccgatgatgatatgggcttcagtctcttcgactaaaactaccacgcaccgccagcaacctatcaatgaaatacggatggttttttggtttctacggaggatttcttttgaatttaaggctgccctaggtttttaaagttagttatccagagccatgtatgtctttctttttggattcattatatttgttttgctgaacccttttgttggaatggaatattcttcccacttaattttaaataaaatttttttatattgatatttatatta

SEQ ID NO: 18820 - DNA, 211 bp, Gossypium hirsutum
  Clone ID: LIB3146-008-Q1-K1-F9
attctttataaatcaatgaaaaaattataaatgataaaaaaaaaaaaaaaaaaaaaaaaaaaaaaaaaaaaaaagaaggaaagaaattccaaaataaagaaaaaaaaaaaaaaaaaaaaaaaaaaaataataatagggtggtggaaatattaaggtatatgaaattttttttggtgtgtcaggggggggccttttatgagtttgggggttt

SEQ ID NO: 18821 - DNA, 403 bp, Gossypium hirsutum
  Clone ID: LIB3146-008-Q1-K1-G1
gaacaacataccatataatgtcctcatctccgattgtggaaagcggatctttctccttccacagtgttatgctgagaaacaagctctcggggaagtgagtccggagcttctggacacccaggtgaacccagctgtgtgggaaattagtgggcatatggtgttaaaaaggaggaaggactatgatgaggcgtctgatgaaaatgcttggaggctcctggctgaggtttctctctctgatgagaggttccgggaagtgaatgcactcatctttgaagtcattgccagtggcgaagatggcattgaacatgatgctaagagtctgcctaaggagcccgatcctaaagctgaatccactgaagaagaaagcaccatcaccaaaacctcccaccgcgctatggtgggt

SEQ ID NO: 18822 - DNA, 217 bp, Gossypium hirsutum
  Clone ID: LIB3146-008-Q1-K1-G12
tcgtccacgtttttttttttgtcattgtgtttttgtgccgggtcaaaactcataaatggcggatagcattggtccggagcgtcctgtttatgttattagatcatgttcggctttcatttataaaacacaccttaccttataccccaattgttttgggtattaatataaataaaagtttttttgtaatttgtttaaatatgggcggccgttttagagg

SEQ ID NO: 18823 - DNA, 405 bp, Gossypium hirsutum
  Clone ID: LIB3146-008-Q1-K1-G2
cccacgcgtccgctctttccaattattgttgataaaggtagctctaaaaaactaaatgtgcccaatttgcaaactctgaagatagagaggtgctttgtaatggaagaaataatccaagactcacgagtatcaaccataagctttcaatgcctgagggaaatacaagtcacagaaagtaatgatttgaaatttctcttcccaatgtgtattgctaatagtcttgggaaattgcaaaccctaaagatagagagatgctttggaatgaaagaaataattcaagactcacaagtatcatcaaccataagcttccaatgcctaagggaagtacaagtcacagaatgtaataagttgaaatttctcttgccaatgtgtgttgctaatagtcttgggcaattgcaaactctg

SEQ ID NO: 18824 - DNA, 404 bp, Gossypium hirsutum
  Clone ID: LIB3146-008-Q1-K1-G3
cagagccgttcactcataaacaaggctaaaattgttgctgccaagaaagatataaaagctcttgaggagcttgcaaatgttgaggttgagaagtttatggatctctggaatggtaataaagccttcagggatgattatgagagaagaattctgaaatccctggacactcgactattaagcagggatggtcggataaggaatcctgatgagaagccattagttctaccagagataacagtacatacgggaactgaagcacttccaaaacctggtgcgaaacaaccaaaggaagaagccaaatcctctccccaaccaggtactaaacacctgaaaaagggccagaaagatgctgagaccaaagcaatggagtcaaaatcctcttcagagaatgttgtagcagacaa

SEQ ID NO: 18825 - DNA, 115 bp, Gossypium hirsutum
  Clone ID: LIB3146-008-Q1-K1-G4
ctacttttgaaactctaagacagtgtagaacagatctcggaattactgcctgacagactcagtaaaagtattttattaataattaataatgataagaacctctttggctggcctt

SEQ ID NO: 18826 - DNA, 187 bp, Gossypium hirsutum
  Clone ID: LIB3146-008-Q1-K1-G5
agaatgtgatgatgtagtgatgtaggccatcttctattcagcattgcagattgactgtcattttatgcccctgccgtctgggccgtatgtactcacaggtgcggttcagaggctttgttgtatatatagaggataattgtttcagtttaccaattgatcaggtataatatcccaagaaattacatgt

SEQ ID NO: 18827 - DNA, 403 bp, Gossypium hirsutum
  unsure (1)..(403): unsure at all n locations; Clone ID: LIB3146-008-Q1-K1-G6
aaggaataccccaatgcattcattagaatcattgggttcgacaacgttcgtcaagtgcagtgcattagtttcattgcctacaagcctaaaggctactaagttgtttacttccctcctaggaattccatttgtttcaaagttgtacttaaattaagcccctcaaaccccccccccctttttctttttcttttttaattgaggtatttggcttggggtctttctctttgttttgttttggatttccaatggaacggctgagaactaatgaataaaaaggtagtttcttgccatatttcttggaaaaaaaatantattaattatattaaaattttataaatatataatatattntttattttttttttttttatttatttatatanttatttaaatttatattttt

SEQ ID NO: 18828 - DNA, 392 bp, Gossypium hirsutum
  Clone ID: LIB3146-008-Q1-K1-G7
cccacgcgtccgaaaagagttggagctaatcttaaggagtctgaaatttatgatcttatgcaagcagctgatgttgataatagtggcacaattgactacggggagtttgtagctgctacgctgcacctaaacaaaatcgagaaagaagatcatctatttgctgccttctcctactttgataaggatggtagtggttatattactccagatgagctccaaaaagcttgcgaggagtttggcatataagatgttcgccttgaagaaatgatccgagaagttgatcaggataatgacggacgcattgattacaatgagtttgtggcgatgatgcatgggggaaatgtttccggtgctggtaagaaaggcctgcaaaatagttctagcatcaagtt

SEQ ID NO: 18829 - DNA, 401 bp, Gossypium hirsutum
  Clone ID: LIB3146-008-Q1-K1-H1
ggatggggttgcaaaagcttggccaacagattcctgatgcagatttgcagatcctagtggaagctgctgatgttgatggtgatggaactctgaattatggggagtttgtagcagtttcagttcacctcaggaaaatggcgaacgatgagcacttgcataaagcttttgccttctttgatctaaatcaaagtggtttcctagagatagaagatctgcgagattccttaaacgatgaagttgataccagtgaggaagttatcaatgccattatgcatgatgttgatactgacaaggatgggcgcataagttacgaggagtttgttgcaatgatgaaagctggtactgattggagaaaagcatccagacaatattcacgcgaaagattcaacagtctaagcttg

SEQ ID NO: 18830 - DNA, 314 bp, Gossypium hirsutum
  Clone ID: LIB3146-008-Q1-K1-H11
atttcttttagcgtaagaccacagaagtttgttcaagaaatagaaacaaatcgattgcaatggcaagcaagagctcgtcgtcgcattcttcaactcgggtctgcctttgctctccgaccaatcaccctgggtctttcaggtgcagcctccataggaattcggatagagtttcaagcaaatcggcggcgacgccccatgttaatagacagagggagcgtcagtcgaaggcggcgatgatgttgatgatgtctaacgtatcatcgtcatcgtcgaaatcaagcttgatcaaaagcctttctgatgcagatcattag

SEQ ID NO: 18831 - DNA, 247 bp, Gossypium hirsutum
  unsure (1)..(247): unsure at all n locations; Clone ID: LIB3146-008-Q1-K1-H12
acgcgtgggctgattcgtgggcggacgcgagggnggcagggggaatttaaagaaaaaaatggcccccccaaaggctaaggacattatatgtatcaaaacccgagaacgttttcagaaagataaaaagaaccgagctgagaggaagtaaagcaatagctataaaaacttggagcttctttcaaggccatagaacttgacaaagaaagtgatggaactgatattcaagcagctctggctgagtggaccg

SEQ ID NO: 18832 - DNA, 400 bp, Gossypium hirsutum
  Clone ID: LIB3146-008-Q1-K1-H2
attcaacatatgggacccttgaagtctatgaaatatgggtcactaattaaggcaatttacaaattcacaatggtgcagcaaaactacggcaaatgagaggctgcaattgaagatcattttcctggacaagttgagccataaactatatatagaataagttttactgtttcaagtttggtcagcattaacttaaacatgatccatatacaacataaatagctgataattttcttgatgctggaaagcattttctccagagttatttatttgtagaatcatcagtgtttgttaattatagtagaacttttattattgtggcccaatctggtgattatatgtatggaaaaactgtgaacttgagaaagatcaagtggaaatcaaatgaaaccttcattcatgg

SEQ ID NO: 18833 - DNA, 396 bp, Gossypium hirsutum
  Clone ID: LIB3146-008-Q1-K1-H3
gaaggaaagaccctttttcaatggcctgtgcgaattcctcagctctggtcctgttcttgccatggtctgggaaggagagggggtgatcaaatacggccggaaactcatcggagcaacagatcctcaaaaatcagagcctggaaccatcagaggtgatctagccgtggttgtcggaaggaatataattcatgggagtgatggtcctgagactgccaagcatgaaatcaacttgtggttcaagccacaagagttggttaactatacaagcaacgctgagaaatgggtctatggaaacaactgatgagggcatcttttttcaagttaatcagtagtagttcaggaaaatttagtcccacatcaggtgtgggttagaggcataatttttagaataaatgc

SEQ ID NO: 18834 - DNA, 347 bp, Gossypium hirsutum
  Clone ID: LIB3146-008-Q1-K1-H4
ggaccaacaaaaacaaaaactcataaaattaagatagaataactgaacaccgtattgaaatgcagagcaatttaaaatctgacggtctaaaaagcagtaaatctaggccgggaccaagccaaaaaaaaattttaactcagccgtgggtattaaaagcttcccacaacaaattctttggggcagggttagttaagtctcgagcttgcaaggcggcagtcctcagagtcctaatcgtcgatttattcgcctcccagaaagacagactccggtaaggcaatttgtgcttcttgcagagttccctcaccagaggggaaaccttccttaaatggcaccggggcaacctgggg

SEQ ID NO: 18835 - DNA, 306 bp, Gossypium hirsutum
  Clone ID: LIB3146-008-Q1-K1-H5
gcaagcaagtgcaaaagaaagtttactaagtcaaaccagtgatagtggtgcaagtactgttgtcgacaatgctgaaggtgattgtgatgagctaagaacagaggaatctcatcatctaaacccaagtattaagattgtatcagtttgtaatacttttagtaagagcgacgccgaccggattcgagagatctttaagaggaggagatgtgatagggctgcaaatttgaagcgaatgaaagttagagatgacgaggtagacagtgaagcctggatagagagagaactggagatgggaatagaactgga

SEQ ID NO: 18836 - DNA, 282 bp, Gossypium hirsutum
  Clone ID: LIB3146-009-Q1-K1-A1
gacccacgcgaccgaggaagagaagcagcaccgaagaagaaggaagtagtttttcggcttaagttggctatgaggtgtggtgtgatgaatccatctattttaggaaaagttttatgggaacattacatgagaaagaagggtgcagcagcttcggcttaagttggctatgaggttgttttgatgaatccatctattttagtaaaagttttttgggaacattacatgaaaaatgtcaattattacatttggatgcctttaaatatttgcggtttttatttttat

SEQ ID NO: 18837 - DNA, 240 bp, Gossypium hirsutum
  Clone ID: LIB3146-009-Q1-K1-A2
ggtgtattggattagaggtgtaatagcaaatcaactgtttggttgaatctaatggaatagaggcgtaatagtaaaactgtgtttggaatagaggtgtaatggaatagaggcgtaatagtaaatttgtatattctctcagttgctatattttttagttttcttactttaaaaaaaaaatataataaataatgttgtacgttaaaaaaattttttattttagtaacgcatgcattaaaattt

SEQ ID NO: 18838 - DNA, 360 bp, Gossypium hirsutum
  Clone ID: LIB3146-009-Q1-K1-A3
gcacttggcatagccttgaagttaactttttcaggaatgaatcagcttgtatatccacaaacatgggcctttactttagttgtggttacttgtgtggttactcaaatgaattatttaaacaaggcacttgatgctttcaacacagctgttgtttctcccatatactatgttatgttcacgacactgaccattttggcgagtgtaatcatgtttaaggattgggacaggcaaaaccctacgcagattataacagagatgtgtggatttgtgactatcctttcaggaacttttcttcttcacaaaaccaaagatatgggtgatggtacaagtttgacatctatgtcaatgcgacaattaaag

SEQ ID NO: 18839 - DNA, 430 bp, Gossypium hirsutum
  Clone ID: LIB3146-009-Q1-K1-A4
cccacgcgtccggttctagatcgcgagcggccgcccgcgatctagaaccccacgcgtccggaaagaatatatcaggcctcaagaagagcttacaagcataggtaacgtgtttgaagaagagaaaaaagaggaagggcctcaggttccgaccatcgatttgacagaaatcgagtcggaggacaaagaggtccgggaaagatgtcagcaggagctgaaaaaggctgccatggaatggggtgtgatgcaccttgttaaccatggcatctccgaggagctcatggatcgtgttaggaaagttgggcagaaattctttgaactccctgtggaggagaaagagaagtatgccaacgaccagagctctgggaatggtcagggctatggtagcaagcttgtaacaatgctagtgggcagcttgagtgggaggactact

SEQ ID NO: 18840 - DNA, 210 bp, Gossypium hirsutum
  Clone ID: LIB3146-009-Q1-K1-A5
cccacgcgtgcggtcttagtgcgggatcttttttctgcgacctaaaccgctacccgtccagcgagattatctctagcgtcatgaagagcttacctgcataggttatgagtttctatattagaaacccaaggcatggcctcaaaatatgacgactgacttcacacacatcatgtcgacggacgcatatgtcacttacagatgtccttctat

SEQ ID NO: 18841 - DNA, 434 bp, Gossypium hirsutum
  Clone ID: LIB3146-009-Q1-K1-A6
attagtttctgcatctttcgttttatttttcgtatattaatgacgggtcggggtaagactgtgggatccggagcctcgaagaaggcaacatcaaggagtagcaaggctgggcttcagtttccggagggtcgaattgctcggtttcttaaagctgggaaatatgctgagcgggtcggagctggagctccggtttacctcgccgccgttcttgaatatcttgccgctgaggttcttgaactagcagggaatgcagccagggactacaagaaaacccgaatcgtgccacgtcacatgcaacttgccgtaaggaacgactaagagctgagcaagctgctctgcgatttgacgatcgccaatggtggtgtgatgcctaacatccacaaccttcttctccccaagaaaaccggaaccttcaaaactttcggtgccgatga

SEQ ID NO: 18842 - DNA, 436 bp, Gossypium hirsutum
  Clone ID: LIB3146-009-Q1-K1-A7
gaaatattcaaaaccccaaatccctgtctccttttatgtcttgtggtactctgtttcactatcccaatcgcattaaccaaggcagaagcaactacaaccagcctccctgaaaacgaagcgaacaatgctgaacctgtgagcaacaatgctccatttgctaaacttgttgggaacaacgggaaacaatcccaactgggttatcaacagcagaaagacccaaactatccacaacaaggcattaaccagccactatcgtcagggttgaaccagccgtattcggctacgaaccatccttactctgccgggtttaatcagccgttttctagtatcagtcagccatttgggggcaccaaccaaaggggctcaatggaaaacgttgctttcgaaaatggggttaaaaaggagaagactgggattccaagtgttgccttggttt

SEQ ID NO: 18843 - DNA, 427 bp, Gossypium hirsutum
  Clone ID: LIB3146-009-Q1-K1-A8
ggagtgcatcatgaaccacctttctagatgttgcggcataggaccaaaataacatccagctgttacattcatacctcaaaggcagggtgtgcaaaaggttttcaatcttttgagcttaggatatgaacgcagttgtacagaggggtaacctttctttggattgagaagaggtgtcatatttttccttctcaaccttatctttatgttactggatttaaaggtcagtaatgattcaggtaactgcttccttgatgttcttatcaaaatgaaacatgttttaaggaatattttgtgctcagcatgtataattatatttgtatccacatcaagagtccagttttcactgctcggggatcatcttctggatatggtagcaaaaaaaataaaatcctcaatccggtggttgcaaggaatttcatggaggaac

SEQ ID NO: 18844 - DNA, 436 bp, Gossypium hirsutum
  Clone ID: LIB3146-009-Q1-K1-B1
gtccgactgcaagggctattcatgacttggccaccgattgtttggaaagtgccaagactgctccattctgagagaatttggttcaaaaagaccttgaggttctctatttagatgagcctatcgaagaggttgccattcagaaccttcagacctacaaagagaagaaatttgttgatattagcaaggaagacttggaacttggtgatgaagatgaggtaaaagagagagaaactaaacaagagttcaatcttctctgtgattggataaagcaacaactgggagacatagtggccaaagtccaaatttctaagcgactaagttcatcaccttgcgtgcttgtctctggcaagtttggatggtcagctaacatggaaaggttgatgaaagcacatgcgcttggagatacagcaaggttgggagttcatgaggggaagga

SEQ ID NO: 18845 - DNA, 474 bp, Gossypium hirsutum
  unsure (1)..(474): unsure at all n locations; Clone ID: LIB3146-009-Q1-K1-B2
gccacagcagtccgataccttgcctaggctttctttaatatagcttaacagtccgtcgtagctattatgtacctgctagctaataggacacgtagctcatgctcgtagcatcttgcgacgctatctatagcagccttagnctgattagcggtgtggtacccgccaccacanttcctctgcttcaaatccaccgcttggcagccatccgcatatccccaaatttccttcgaaaaagaccgatgaaaagcaaaagggtaaggtggatggtggtgtgaagaatgaaagaagtgatggtaggcaaaacatttacatcaggatcgaggaggacgatgacgacgatgaagagaagtgtagcaaaagtagcaaggatacaagtaaggggggaggtcttgaaaacaagaaaggcaaaatattttcaaaccctaaggttcatgaggcatttatgggaaggggtgaatatgagaatatgtgttt

SEQ ID NO: 18846 - DNA, 428 bp, Gossypium hirsutum
  Clone ID: LIB3146-009-Q1-K1-B3
cacaaatggttcgaccagtaaccggacaagccggtcaaggctactacaccaacgtacagagaatgcctcatgaagtttaccgggagcaacccgtttacaacatggtggcccaacctcaacctgcgcccactcaacaccagccgatatcaacgataccacaacaggtggtaaggccgccaagcagtggtgtaacagatgctggatatggacacgtcgcagcattcgacagacaggcttactatactgcacaggggggtgtcgtgcctcctcagtatcaaggcgttggtgtggcggttagtggtgacaaaagaggcaacgtcgacggcaaagtggtatataaagtttcacaaggttcagtttaatttctaaaattatgaaaggtttttcgatatatctgtgaggttaattgggattattacgtattacta

SEQ ID NO: 18847 - DNA, 437 bp, Gossypium hirsutum
  Clone ID: LIB3146-009-Q1-K1-B4
cccacgcgtccgcccacgcgtccgaaaaagttctgagagaacaaattgctgacggacagcccaggacacatatgccatggaagaagataattgttgtcgtggagggtatttatagtatggaaggggaactttgtaagcttcctgagattgttgccatatgcaagaagtacaaggcttatgtttatttggatgaggctcacagcattggggctgtgggaaaaactggaagaggcgtatgtgaactcttaggagtggacactgctgatgtggatatcatgatgggaacttttacaaaatctttttggtcttgtggtggttatattgctgggtccaatgaacttatacaatatcttaaggacacatgtcctgcttatctatatgcaacatcaatatcaccttcagctgcacagcaaattatatcttcaataataggttat

SEQ ID NO: 18848 - DNA, 398 bp, Gossypium hirsutum
  Clone ID: LIB3146-009-Q1-K1-B5
tctctgacgagaggtttgatgaagtgaatgcttttatctttgaagccattggcggtggcaaagatgcaactgaaaatgttgaggagcctgatacaaaagctcaatctattgaaaaagagaatggcatcaccgaaacttcccaccatgctatggtggctgggacacaacagtgccttgttctgcattagcatttcattaatagaaccctgtaccttgcaggtactgtttacacaatttcagcttagttggaatttctatggattatggctggcaccaagagcctaaataagcaaactcagtttgcactgttgttatcgactttgttgaaactgctatatgcttttggcttcatgatgtactacttgtttggatcatgaaaaatacaatttaatgttcgc

SEQ ID NO: 18849 - DNA, 421 bp, Gossypium hirsutum
  Clone ID: LIB3146-009-Q1-K1-B6
cccacgcgtccggtcatttgccggtgagtttgttgaactttgagaacttgcaggagatcaatttagcatacaatggattgacgggtcgggtaccggtggcgtacggacagcgattggggagaccgtggaaaagcttgtttttggatgataacttcttgtcgggtcggattccacggcagttcaatagtagtgcccttaggataagcggtagccttgcgaataattgcttgagttgcccggtgacgatcccgatttgcggcggtgggcagaggccggcttcagcttgcattggtgagattggtaaccactgattaaaacggtgaccaaaggatttgaaataaattgggcaaaaagaacggaaatgtaatttctctttctctatagatttagatcttacaatttgtttacactggcatcattc

SEQ ID NO: 18850 - DNA, 353 bp, Gossypium hirsutum
  Clone ID: LIB3146-009-Q1-K1-B7
ccggacgcgtgggcggacgcgtgggcggacgcttgggtccgagggcaattcgtacgacaaactgtgaacaccaatgaccccttatctgaagccaattcatccgacaaatagcaaagaggaaaacactagaagagtccagctgataaggtaacaagatttgatccactcctctgataagataccttgttgtaatattatttgggaatgttaaaaagatttgatgaactccatttttattggtatatttagtgttataagctttaaagaacgtgccttaaaggggaactgaaagaaggtagaaaaacttctataataattatccattttgtgtcctaaaaaaacataatgaaaaa

SEQ ID NO: 18851 - DNA, 389 bp, Gossypium hirsutum
  unsure (1)..(389): unsure at all n locations; Clone ID: LIB3146-009-Q1-K1-C1
gcagcaagccatctaatctaacggtggattgaagggcgcccccttgaagcctgagaaaccatctacttcaaagaagctcccatatgttctctacagcgttgggcccttcgctttcgaacccacatgtcacaagaactagagtagaaatctataatcccactgttgagctcgtactctttttaccatttttcttttatgtgcttaaactactacgtacaagtctcttagcttattgtgatggcatcttgttcggtgtggtaagctttgggttgcaataagttattgtaatgtatggaaatagattagtgatgaataatcaataaattatcgggtgtcttatttccagaaaaaccctntttttnttattttttttttttatatttaatatt

SEQ ID NO: 18852 - DNA, 444 bp, Gossypium hirsutum
  Clone ID: LIB3146-009-Q1-K1-C2
cccacgcgtccgcccacgcgtccgcccacgcgtccgggtgacgcaacggttcgggaatctagatttcaagctaaaatttgtggaggtaccttcgtgatccatttacactgtaatttgaatgtcaagcaaaaaaggatggcgtgttagagcttcatgtgaccacaaatcttgggaatcttaaatttgactttcacctggtttattgcagcacaacattcgtttccttcaagaagttatccaaaatagacggtcagatctcttggaatggtgtatcattttcttgttgaccatcgagaatgtaatagcaatatacgagattgtccgcgaatcaagcggcgtttctctgtgatttggctagctgatgaggaagtgaggatatacaaacttgattacaggtacaaaaggtaaaagtagtttattacccagaaaaaaaggaaatttcag

SEQ ID NO: 18853 - DNA, 429 bp, Gossypium hirsutum
  Clone ID: LIB3146-009-Q1-K1-C3
cccacgcgtccgcccacgcgtccgcaacgacattacttctatcgcaagcaatggcggtagagagcaatgcatgcaagtgtggcctgctactggaaagaacaagttcgagactctctcatacctccccgatcttacacccgtgcagttggctaaagaagaggattaccttcttcgctcaaaaagggtgccttgcttggaattctaattagaggagggattcgtgcaccgtaaatacttgagcctacccacgtactacgatggacgctgctggaccatgtggaagctgcctatgttcaggtgcaccgactcggctcaggtattgaaggagcttgaggaatgcaatatggaatacccctatgcattcattagaatcatgggcttcgacaacgtgcgtcaagcgcagtgcattagtttcattgcctacaagcc

SEQ ID NO: 18854 - DNA, 442 bp, Gossypium hirsutum
  Clone ID: LIB3146-009-Q1-K1-C4
ctttcgacaagaagcagtttgtcgtgttcatgaagaagttcatcaagaacttgacaccgaaactggatgcggaaaagcaagagtccttcaagaaaaacattgagggagcaaccaagtttttgctttcaaaattgaaggaccttcaatttttcatcggagagagcatgcacgatgatggatgtttggtatttgcttactacaaggatggtgctgttgacccgacatttttgtactttgcgtatgcattgaaggaggtcaagtgctgaagtttgaagcaaagaaaaaaaaagtggttgctgaagaatttagtcctttttattatagcttttggctcttattttcagtactctgctaaagacataaattatttatggtttttgatggttttgaattaattggttggtggtttatcatggaatgagttctatttttatgggttgac

SEQ ID NO: 18855 - DNA, 367 bp, Gossypium hirsutum
  Clone ID: LIB3146-009-Q1-K1-C5
cggacgcgtgggcgagaacctttgcaaggcttgagttctgtttacccctattacaggtcgaatctctcaagcagagatcagatacatccagagtcaactatttggtcaattattttcacttgaaagattcgggcttatgtatgttgctgaacattcatttctggtccattgtttgcaaaaacctctccagctgagcttctttctgtgtttccttttttcatcttcccaggcatcttattttactatggttcctagttaatagaaactgtttattagacaaatgtgtaagaactaataacccttttggctgaataacataagatgtcagggctttcaatctttgatgaaaaaaaaaaaaaaaatatat

SEQ ID NO: 18856 - DNA, 326 bp, Gossypium hirsutum
  Clone ID: LIB3146-009-Q1-K1-C6
gttttgggttaggttattgggctgtgtaatgggctaggattaggctttaatgttttgggtcttaggcttggtctgttattgggtcctagaccgtttaaagggacttcgattatttatttggctttattttgtatgggctagtaaagactgtaagcggactatttttagactatttaatttaaaaaaattatatttttatatttttttattgcttctgatgggcccgggcaaattgggccgcttacaatatattttaaagattggattggagatgatttgatcaagccataaaatctttcgaataataaaaattatattggaattac

SEQ ID NO: 18857 - DNA, 177 bp, Gossypium hirsutum
  Clone ID: LIB3146-009-Q1-K1-C8
cagcttcttaatccccttacaagacatatgtttatgcggcgggtttaccaatggctgctggtagggctatattcaccaggtgggagacgaaagctgtagctgctgtgaagactaatacgagtacatatattatgccaaaacccgaagcttaattggaggcgaagcctattgttaagc

SEQ ID NO: 18858 - DNA, 435 bp, Gossypium hirsutum
  Clone ID: LIB3146-009-Q1-K1-D1
cccacgcgtccggatgttcgtccaatattttggtctaaccgtcctaagagttacataaccaggactattggttgggatcagtacccatatgggcgatggggtgattctcgaaatccgtcctatggtgcactaacagaccatcagttcatgaggcctcgagcacgtgacaagaaacttcaagaagaatgggcttccccattgaaaagcattgatgatattcaagagaaatttaaaagttattgtctgggaaagttgagaagtagtccttggtccgaactggattcacttcagcctgagacaaagatcatacatgaacagctgggaaagatcaatttgaagggtttccttactatcaatagccaacctgctgtcaatggtgaacgctctgattctccatctgtcggttggggtggccctggagggtatgtttaccag

SEQ ID NO: 18859 - DNA, 386 bp, Gossypium hirsutum
  Clone ID: LIB3146-009-Q1-K1-D2
cccacgcgtccgcggacgcgtgggcacgagtccccttcttagacaaagaatttatcaatgttgccatgtctatagaccctgaagcgaagatgataaaaaatgatgaaggacgcatcgagaagtgggttctaagaagggcatttgatgaggaagaacatccctatctgccaaagcatatcctctacagacaaaaagaacagttcagtgatggtgttggttatagttggatcgatggtctcaaagcccatactgcccgacatgtgaccgataagatgatgtccaatgcttctttcatatttcctcacaacacaccaactacaaaagaagcatattactacagaatgattttcgagaggttcttccctcagaactcagctagattgact

SEQ ID NO: 18860 - DNA, 388 bp, Gossypium hirsutum
  Clone ID: LIB3146-009-Q1-K1-D3
cccacgcgtccgctccaaaggtgccagatttcaatctttagaggccaaggctgtagatgataatcaaagagctaaaccgaagagcattgtttgcgctgattgtgacggaaatggtgccaaacagtgttctcaatgcaaaggtaccggagtgaattccgttgatcactacaatggacgatttaaagctggtggattgtgttggctttgcagggggaaaagggagattttatgtggagactgcaatggagctggtttcattggtggatttatgagcacatttgatgactgaatgtaaaagaggctcagtctttttgaatcagtttttttcatggatgtttactataataatctgttgtaacttctgttttagttcttagatgaacgatac

SEQ ID NO: 18861 - DNA, 448 bp, Gossypium hirsutum
  Clone ID: LIB3146-009-Q1-K1-D4
caccactacatatacgggattccaatgtaccgtttctgaagaaacctcggaaaagttcaagggattgcccggggttctttgggtgttaccggattcatacatagacgtcaaaaacaaagattatggaggtgataaatatgtcaacggggaaataattccatgcaaataccctacttatcaaccaaaggcaagaaaagaatccaaatatgtgagcaaaaaatacgagagacgaaaagacggccctcctgcaggacagttccgaccaaagcaagcagcaagtcagtcggaatcatcgtcttgacaaggtaccagaaatgctgtttcgagactactcatacttatggaggtctaaagtccaggttttcatcatgcaacttagttgctctcgtttgttattcatcaatgtttcactgctaggaccggtaaataatattcgagctgatatcaa

SEQ ID NO: 18862 - DNA, 433 bp, Gossypium hirsutum
  Clone ID: LIB3146-009-Q1-K1-D5
ggttgttttcgatttttgtattaagagtctccctttggtgtttttctaattcaatcagtgaggtgaagaaaaatgtcttgctgtggtggaaactgcggttgcggctccggttgcaagtgcggcggcggcggcggctgcggctgcggcggttgcaagatgtaccctgagatgaactttgctgagcaaaccacaactgagacacttgttcttggcgtggcaccccggaaagtgaactttgatggagctgaaatggaaactggggctgaaaatggctgcaaatgtggagataactgcacttgcaacccttgcaattgtaaatgaggggaaaaaaaaaaccgaagcatattatggaagctgatctaaataatatatgatgtatttgggtttttattattagaataaagcagccatggttcattaggtggtttgcttc

SEQ ID NO: 18863 - DNA, 190 bp, Gossypium hirsutum
  Clone ID: LIB3146-009-Q1-K1-D6
cttagtactttagcagttttaaaggactttgttttatggcctaacatcatgcagtggggaaagggatccaatatgttgaggcagggtaggaaatgcaaatggaaagtccatttggatggagctaaagctgagttctttttatcaatatatttgaacttgctggtgtaaggtaccttggttttgctatcta

SEQ ID NO: 18864 - DNA, 279 bp, Gossypium hirsutum
  Clone ID: LIB3146-009-Q1-K1-D7
cccacgcgtcctcccactcgtccgcggactcttttgtggaatttcaaggctaatctatatattgggattggagcagctctcattatatattttgaggttccttcaaatttccaggctcaataatttatatcttgccaaaaaccgaaaataaaacgaaagctaacccaaaggaaaagccatctaaagcttggaggactgcaactttagacttttcctgggaagaaggcggttgtccctattgcttctcccaaaaaggctgctcgcgcctaataaggctcc

SEQ ID NO: 18865 - DNA, 429 bp, Gossypium hirsutum
  unsure (1)..(429): unsure at all n locations; Clone ID: LIB3146-009-Q1-K1-E1
cgtaaagcaacatctgaagatgcccctgctcctgcagaggataagaaacttgctacttggggaactgaggttcctgaggacctggttcttgatgaaaaacttcttactgaggcacttaagaaagaggatgagaggagaagagaggagaaagatgaaagaaaacgcaagtataacgtcagatggaatgatgaggttactgctgaggaaatggaggcatataggatgaaaaaggtacaccacgatgaccccatgaaggatttcttgaattgaaaaggtaaatgtaagagcaaagaaaatggataatgccaatcagctttgtggttgtcattgagttgatgaaaatcatgtcgntgttttgtttgtataatacactaaaagtattaaattaggttccagtgacagatggtcttggcttcttgtaaattatga

SEQ ID NO: 18866 - DNA, 181 bp, Gossypium hirsutum
  Clone ID: LIB3146-009-Q1-K1-E2
atgaaaacgacgatgctgttgaggctattgcttttgttggttgtgcaattgatgaatggagtgatgaaattgcaaggaaactgggacgaggatgatgacgagctacgaaggtgatgatgctattgaggctattgctgaggtagaaggagcaatagatgttgggcgtgttgaacttgaaatg

SEQ ID NO: 18867 - DNA, 428 bp, Gossypium hirsutum
  unsure (1)..(428): unsure at all n locations; Clone ID: LIB3146-009-Q1-K1-E3
gcaccaaagaaaaccccggtatcttttttcttttttccttattttctttggtgctaagctttgaacataaaatggtagtacatacaagcttgcaaaatctggagctgctggtgtggtgggtgtctttgacagtctccaccactgattccggtatcacgcagtctttaatgcaattttcagacgaggatcctttggctatgtaggtaccaaagcaagtcccgtgcaatatatatatatctttaattcccattctctctgcactaacaaaatatattagatttgtagataattattttgcattgcataagatagagtttatatacactntatgtaggagagacaatgtcatattctcccataatgctttacccatgaatatttcatttgtagtttgtatcatatgagaaatgttaggcacttcattgcat

SEQ ID NO: 18868 - DNA, 397 bp, Gossypium hirsutum
  Clone ID: LIB3146-009-Q1-K1-E4
tgtaatccagtttatatatatgtttaaactagttgagcagaaaatagaaagacataaaaaaggtagcttgattgggaaaaaaaatagggttttgggggttatatgcttgaatgtgcagataatatgactttgaattgatgatttgcatgatctgtatgaaggtactttgttttaacacccccctgagaagtctgaaaggtgtgaatgaatgcagttaaaattggagatttcagtccttggcttttgagttggaatgatgtacgggtgttttattaggtaaaaatccagtggggaacaaattgtgctaataactttttgtaagtaaatattataagctgggtatctgctagttttcttatttaacacataagatgtacgtttattgtggtttcctttt

SEQ ID NO: 18869 - DNA, 320 bp, Gossypium hirsutum
  Clone ID: LIB3146-009-Q1-K1-E5
cccacgcgtccgcccacgcgtgcgagaaagcgtggagaagaccttggttggtgtggggagatgatcgtcaaggatagtttttgccaaccccgttcccactgtacacttactatagcactatctacatgttcgatttgcatgttctaatatatataaatatatatatgtgcatgtacgaaacgaacaacatactggaggggaagccattatgcatcgtcttccttttagagctgcacgctactggatttatttattctggatcccatgctgcttgattgaaacatgcttgaagagacacttgctgcatgtagcatgttatg

SEQ ID NO: 18870 - DNA, 178 bp, Gossypium hirsutum
  Clone ID: LIB3146-009-Q1-K1-E6
cccactcgtacatacacacatgctaaaacgcgttgagcagaccttggatagtcataggagagggacctcatgggtagaaaatgacaggcctgtgcccacatatacacttgctattgctcattctacatctgtgatttgcatttgcgcatgaacagaaagatatatcttttcatgaaca

SEQ ID NO: 18871 - DNA, 416 bp, Gossypium hirsutum
  Clone ID: LIB3146-009-Q1-K1-E7
caagtattgaacattgaactggatcaagttattgaggcttgcaaatttcttgatgagagttggaaccccaagtttgtggtcattgtggcacagaaaaaccatcatactaagtttttccagcagggatctcctgacaatgtcccgcctggaaccgttatagacaacaaaatctgtcatcctaagaacaatgacttctatctttgtgcccatgctggaatgattggaaccacgaggcctactcattatcatgttctcttagatcagattgggttttcagctgatgatctgcaggaactagtccattctctgtcgtatgtgtatcaaaagagcaccactgccatatctgtaggtgctcctatttgctatgcacatttggcagcctcacaggtgggtacattcatgaagtttgaagatac

SEQ ID NO: 18872 - DNA, 332 bp, Gossypium hirsutum
  Clone ID: LIB3146-009-Q1-K1-F3
ggaaatctgttggaagtagcacacgtagttcctgccttcaatcaaggggaacttcaccctgtatggcagcagcctaagctgcacgaatattgtcattccaagggaattcacttgtctggatattcaccattgggtagccaagctggagaaaatatcaagagaagagttcaggaaaacccggttcttaaaatggtcgcagagcgattggggaaatctccggcacaagtggctctccggtggggacttcaaaggggccacagggtactgcctcatagcactagtgaggcaaggcttgaagaaaaccctgatgtttttaactggtctattccaaa

SEQ ID NO: 18873 - DNA, 375 bp, Gossypium hirsutum
  Clone ID: LIB3146-009-Q1-K1-F4
cacaagactatgagcaggtctttttcttgtgactcacagtctaaggggtctgtttccacacctcgtgggtccacgaaggttgacctcagcaaacttgagatggctgctttgtggagatattggcgacacttcaatcttgtggatgccattcccaatccatcaaaagagcaactagtcgatgttggccaaaggcattttgtgtcacagcaaatggatgagcttcaggtcattgtgggatttgttcaggctgcaaagagattgaagaccgtctgcatatgaccccgataagaatgttcaaacggggtttagagtggggttggcaatgctaacagaaacttggtatcctaatgtcctttgcccctaagagctatatcg

SEQ ID NO: 18874 - DNA, 236 bp, Gossypium hirsutum
  Clone ID: LIB3146-009-Q1-K1-F5
cacatgactatgagcaaatgcttttgttgttgctgacagacctacgggtctgtatcctcacttggggtctccacgaaggttgacgataactaactttgtatgacttccttgttaagatgttgccgccacttatatctggagaatgccttactgtattctttaatataacatctagttgttggtgtacaaggcatcaataggcatccgctatgggttcaaccccaattcattaggtg

SEQ ID NO: 18875 - DNA, 431 bp, Gossypium hirsutum
  Clone ID: LIB3146-009-Q1-K1-F7
cccacgcgtccgtacagcttcaacatcaccctttgagaaccaaggcaattacggctgcggttttgtcagggattagtgacactgtttctcagaagctttctggaatacccaaacttcagctgagacggattcttctcaaaatgctctttggatttgcttatcttgggccatttggtcattacatgtatatgctactggataaaatcttcaaggggaagagagactccaaaactgttgccaagaaggtggtgctggaacagttgacaacttctccttgcaacaacttgcttttcatgatttactatggggtggttgttgagggaagaccctggatgcatgtgaaaactaggatcaagcaggagtatccgaaagtacagatgactgcatggacgttctggcctgttgtgggatggataaatcaccagtacatg

SEQ ID NO: 18876 - DNA, 435 bp, Gossypium hirsutum
  Clone ID: LIB3146-009-Q1-K1-G1
agaacatcaaaagttgtattaaagctctttgcaatttcaatgctgccaaaggcttcgaaataggaaaggataccactttaccagtaacgtatatacgttccatggaggctcctttggaaaatcttggaggaaagcctccttcagagaggaacattctggccttctttgctggggggatgcacggttatcttcgaccgatcttactacagtattggcagaataaagaatctgatatgaaaatctttggaccaatgcctcgtgatgttgaaggtaaaagaaagtacagggagcatatgaagagtagtaagtattgcatatgtgccaagggttatgaagttcatacaccaagagtggttgagtcgaattactatgaatgcgtgccggttatcatatcaaataactacgtgccaccattctttgaggtgttgaattggg

SEQ ID NO: 18877 - DNA, 283 bp, Gossypium hirsutum
  Clone ID: LIB3146-009-Q1-K1-G3
cttttagcagatgttaccacaaaattatagttcattttcttaaatccaaccgttcaaaccgcaactgaaactacagattggttgaattggtttatgtgatagcacaacacaatttaactttcatagctcattttgcagaggcagattttgttatgctactgcgataaatacatttttccatgtatatagatggatggtgacatacatttcaagtgtaacctatgatgtctgcatcattaaagattcaatatcgatggtgatcatctacgaacacccttttccc

SEQ ID NO: 18878 - DNA, 73 bp, Gossypium hirsutum
  Clone ID: LIB3146-009-Q1-K1-G4
tcgcccacgcgttctgggtcacatgggagagagatctgtcttgccacataacggggttgaggaatataatctc

SEQ ID NO: 18879 - DNA, 109 bp, Gossypium hirsutum
  Clone ID: LIB3146-009-Q1-K1-G5
ttttgtatgtagttttaattaggtgagagggagtacatttttttattaaaatataaaacataattttttatttttgggacagaaaaaaaaacaaggtccaattttaatt

SEQ ID NO: 18880 - DNA, 237 bp, Gossypium hirsutum
  Clone ID: LIB3146-009-Q1-K1-G6
cagggaattaattcataggccaccatgactctttcgttcaactttctacccatgctcctcttgcttactttatcagccctgactgtccaataaatttcaactgcaccttcctgcacttgaagttgccatataattactcccatgcctcagctttctttctttcaacggttctgcagatgttccatctcggacatgttgtttggatgctcaaactttttgcttacgatgcacattacc

SEQ ID NO: 18881 - DNA, 82 bp, Gossypium hirsutum
  Clone ID: LIB3146-009-Q1-K1-G7
gtgtaaacaactggacacaccattggcggtgtttttagaatagtttccagttctctgttcgcgaggagtcaaagagatctta

SEQ ID NO: 18882 - DNA, 422 bp, Gossypium hirsutum
  Clone ID: LIB3146-009-Q1-K1-H1
gtgccgacatgagcatatactacccttacaccgaggtgaagaagaggttgaagcatttccattgcgagatcgaacaacttctttacagcaaagttgaaaatgaagagcactggtgtgtgctaaacgaccacaacaagccaattctatttacaatggcaaggctggatcgtgttaagaatttaagtggacttgttgaatggtacgggaagaatgctaagttgcgtgaattggttaaccttgtagttgtcggcggagatcggagaaaagagtccaaggatttggaagagaaggctgagatgaagaagatgttcgagctcattgagaagtacaagctgaacggtcagttcagatggttatcatcccaaatgaacagagttaggaacggggaactttaccgttacattggtgacacatagggtgcc

SEQ ID NO: 18883 - DNA, 112 bp, Gossypium hirsutum
  Clone ID: LIB3146-009-Q1-K1-H2
cttgggtaaacgctgaattcttgctagaaaaatgtttggttggcactttggatgatggcgtaggcacccatacattattaaaccgcttgttggtactttgccatgttgtcta

SEQ ID NO: 18884 - DNA, 385 bp, Gossypium hirsutum
  Clone ID: LIB3146-009-Q1-K1-H3
ccttcttgaaacttaaagagaacgttaatgatgaagtgcaaggtgagatattaggggtaattaaagggattaaggacggtgtctccggtattcaacagatcacttgtggggagaatttctcacccgcaagagctaaaggcttttcgattgcctcggttgcggtttttaatggagtcaatgaaatggaagagattgagggaaacgaagaatatgtgaacctacagaaacagaaggttagggattatttggatggtgtcatagttgttgattatgtggtgccatcatcatcatcatcatcaaatctttgatatgttattaactacaaagaaaaccttgttacttgcttaattaatggttgctgttggaacaatattcaactttgaat

SEQ ID NO: 18885 - DNA, 331 bp, Gossypium hirsutum
  Clone ID: LIB3146-009-Q1-K1-H5
cggacgcgtgggtttaggttgatcttggttgatagcaggatccaccgactcgcccgctattacaagaagacaaagaagctgccaccagtgtggaaatacgagtctaccactgccagcactcttgtggcctagataaatcaaattttgaactgtcctcccgtgcttcaattgatattcttccggatgggctagcaggagttggactttttgtatttacattctattaatgccgtaaaagaactagtccacttaatttgaagttgagatacttaatgtgttaaatcttatgtttagtatattggaataattcattttcatttcattttttcaa

SEQ ID NO: 18886 - DNA, 432 bp, Gossypium hirsutum
  Clone ID: LIB3146-009-Q1-K1-H6
cccacgcgtccgagctgttttcctattagtcatggtccatctgccagacgcctccatgaattgtttctgcgccaattttgtgatgctcacacttgctctggaaaagcaaaacctttccctagaggaggaaagaagcaaacaaatttactctacatggctacatcaatactacttatgatgctgcttcctcttttctatcttctttattatttatatcaaagagacatgaagcaagaaacccaagtgctaagacgagtgtcacaagttggacggaaagcaaaaccttcatagttgtgaggaagatgataaaacgatgaatattgcttcctccgagttttgcccttaacttcattatagcttcgagtcagaaagttgaaaaacaatgtggttgcgtcctttgaatgtcacggacatttcagtggcatgaatgcc

SEQ ID NO: 18887 - DNA, 71 bp, Gossypium hirsutum
  Clone ID: LIB3146-009-Q1-K1-H8
tccacgcgttcgtgccaatttatgaaggctattccctcccccatgctattccttgcttggacctagctgtt

SEQ ID NO: 18888 - DNA, 311 bp, Gossypium hirsutum
  Clone ID: LIB3146-010-Q1-K1-A1
ctcttgctccaacttcaaatttcaactccaaatcttgcttgtcatttggatcttcaatgcgcgtacctgcatcttcagcacctcagtggcctaatgatgggaaacaaactacagtcttcgcaagccatacgcagcttaacgaggttgctgcagagaaatcatcgaattctgtagcgggtgttgacatgaaacctaaagttgcattgcctgaggaagatgataaaaaatccgcagagaaggctattgcagatgctgcggcaatttcagaattcatggcacaagtttcagaccttgtaaaacttgttgattca

SEQ ID NO: 18889 - DNA, 312 bp, Gossypium hirsutum
  Clone ID: LIB3146-010-Q1-K1-A10
gttaaaagggaaattttaattgtattcccttcaaaattaatggtgcattttggtgtcttttaacccaaaatttttaaatttggcccaatttcattttggcccttcctatacaaaaattttggcttccttttaatcttataacatttttagctagtatactaacaaagcctttaaacagctattagactatattttaattaaataagcctctatctcatgataagtactttgacaaaattctaatagacattaacaactcaaggaaggaagtgaataaagctctagtttgacttatttttggtactagcatct

SEQ ID NO: 18890 - DNA, 345 bp, Gossypium hirsutum
  Clone ID: LIB3146-010-Q1-K1-A11
cttgtgaatcactgacctagagtctccctcaacttccacgcccttcaggccgagttggaatcccagatctagtgcctgataacacaccaacacctcggccgcaaaagcagacgccgcgtcaaaatttatcctcagtcatagccctgatggagcaacccatctggttgtatggattcttttgtcagttatcttagctactgaaggctcggggatagtcgaggattgtcaccatactatcgaattcattttggtacttttgaaagtgtaaatatttttaagtatagcatgtataggatagaatgtctatgtatttaagttttgatatgtatatatgttatgccatga

SEQ ID NO: 18891 - DNA, 342 bp, Gossypium hirsutum
  Clone ID: LIB3146-010-Q1-K1-A12
cgaagaaccacgataagggagttgaggactttttatcagaggaagagattcgcgtaagaagtaatgaaatgctcgagaatgaagaaatgcagcaccttctccgtcttttcaatatgggaggtaatgcttccattaatatgacagaagacagtgggtacgggttcccaaattacataccatccccaatgccaaactttgtagacgaagaccgttcacgttctggcaaagctgttgtagggtggttgaagattaaggccgcaatgagatggggattctttatccgaaagaaagctgctgagagacgggcacagatagttgagctagaagaagaagaagaagaag

SEQ ID NO: 18892 - DNA, 293 bp, Gossypium hirsutum
  Clone ID: LIB3146-010-Q1-K1-A2
gacgactccggcgaccaggtatggaggctgttggggagtgcgcacgctcgtgaaggcgcgattcttgcggaagagactctggctcctagtcgtgcggtgactggagttgctggtagcgacggcttgctgcctggggcttcttagttttgttaggctagggtttagtttgggcttacgtgggtatttagtttgggcttgtttattggtttgggcccgggcatatttgggcttgtacacaactcattaacatataacaggacaaaacaaatatataatataaaatttatataagg

SEQ ID NO: 18893 - DNA, 340 bp, Gossypium hirsutum
  Clone ID: LIB3146-010-Q1-K1-A3
cccacgcgtccgatcagtactgcattgttgtaaagtttttcttaattttcttcctttgggaaatcctgaggaattaacacttgagtgttagctcatctcgcatgagctattgccaattgtcgattttgatgacaacaatctgtagccttcttgaaaagattattgatagcaaaaaccatgtttttgttcgatttgtgtgatgtatggtgataaaagaagactttggattttccatttggtcactatatatctttagtttgatattattgaatcgagttagactcgttttattaagtccattgatggaagtgttacttgccttatcttctttgttcgcttc

SEQ ID NO: 18894 - DNA, 122 bp, Gossypium hirsutum
  Clone ID: LIB3146-010-Q1-K1-A4
ggaaatcaaccggtggtaaagctccacgtaagcaactggccacgaaggcggctcggaagtcggctccggcaaccggaggagtgaagaagcctcatcgttttaagcccggaactgttgctctg

SEQ ID NO: 18895 - DNA, 332 bp, Gossypium hirsutum
  Clone ID: LIB3146-010-Q1-K1-A5
gtttcattggcaagcaacaatcatgggaccctcagatagcccttatgctggaggtgtgtttttagttactatccatttccctccagattatcctttcaagcctcctaaggttgcatttaggaccaaggtcttccatcccaacatcaacagcaatggaagcatttgtcttgatatcctcaaagaacaatggagccctgcactaaccatttccaaggttctgctctcaatctgctcactgctgaccgatccaaaccctgatgaccctcttgttccggagattgctcacatgtataagaccgatcgggccaagtatgaagccactgctcgtagct

SEQ ID NO: 18896 - DNA, 322 bp, Gossypium hirsutum
  Clone ID: LIB3146-010-Q1-K1-A6
aaacacttctccagtgaccaaaaaagcttcattgtctcttctatcgaaaaccccatggctgctcttaagctagtttgtgctctagtgttgtgcatgttggtggttgagcccattgccacaaccaccataacatgcggcgatgtgacaagcaaagtggccggttgcttatcatacttgcagaacggagggaacgtgccgaatgcttgctgcgacgggatccggtccctgaacaacatggctcgaaccacccctgaccgccaaaccgtgtgtgggtgcttgcaagctgccgctaaggctgtcaaaattaaaggcaacttggctg

SEQ ID NO: 18897 - DNA, 333 bp, Gossypium hirsutum
  Clone ID: LIB3146-010-Q1-K1-A7
cggacgcgtgggtggaatatctccattatgattgtgatcccggtatagttcatcgagacatcaagccggaaaacatcctcctcgactccgatatggaaccgcatatctccgattttggaagtgctaagctcctcgacgagtctgtggcttcagaaccgtcgatggtagttgcgggcacggttggacatatagctccagaaaatgcattcagaacaacatggagcaaagaagcggatgtgtatagctatggggtggttttgctcgagctgataaccgggaagagggcattggatccatcatttatgggggagaccgatatcgtggggtgggtca

SEQ ID NO: 18898 - DNA, 335 bp, Gossypium hirsutum
  Clone ID: LIB3146-010-Q1-K1-A8
cccacgcgtccggtaacccttttacagctttttactttgctttatatagccaaaaataatgaaaaatctttcaaaaattccccctttttgtcgtaatttctgctgccgtttgctactcgtgattcctgattttgttgcaagtaagcattggattaaagtacgtgggctatgcgagggcgacgtgcgtgacatataggctgctgtgcgttcgtgcgtggagacgattactgcggtgtcgaggctgggaagaaggctgctgctgaagattgtagggttttcagatttttcagttttgggttgatttgggttttagggtaatcgggctggtgaaattg

SEQ ID NO: 18899 - DNA, 296 bp, Gossypium hirsutum
  unsure (1)..(296): unsure at all n locations; Clone ID: LIB3146-010-Q1-K1-B1
acgcggacgcctggggtggtcgctcctttagagacttactgattaagtcgtgccactatcgagccgctgttttagtattcgaccttaaaaaaatgtcgttgttgtgtcctattaggttttcttatgaactgaggaaaaaaggataatcttgaattgatcttttagcacatcttagtatcaatgaagttttaatcgatgttttaacatanaaaaaacaaaaaaaaaaaaaaaaaaaaaaacaaataaaaataaagaagacgaagaataataaggaagaaaagactcgtacaagtgaa

SEQ ID NO: 18900 - DNA, 312 bp, Gossypium hirsutum
  Clone ID: LIB3146-010-Q1-K1-B10
gtggtgcgcagagagtacaatgcgctcagcaatgataaaaaagccgaatgtccgagacacagacggtggtttttggcgatggaatgtactgtggttaaaaaaaaaaaaaaagaacatttgagagtaagattctcaaacattgttgtgttttggtagtcctttattttttgtttttaatagtgcaagtattttagtaattgcaatggtgttatatgttctgaaacctgatactaagtatgcaacgattaaaaaaaaaaaattaataaaaacaaaaattaataaattgaaaaaagaaaaaataagttttttttt

SEQ ID NO: 18901 - DNA, 335 bp, Gossypium hirsutum
  Clone ID: LIB3146-010-Q1-K1-B11
ggggggggttcgagggttgatggtgagtgacaagaaaggttgaagggaacccaagttggaggaggtttttttttgtttgtcatattgtcaaaaaacccaaactcccttttgttcttttttcttacatcacagtctgattggagctcttcatttcaatccttttggtttttattttgccctctaagttcattaatcattatatcaccaccaaattgctttcactggctctttttaaactctttttggccattgcagcatcaaacataaagttgcaatggacggttatatctttttaaaacaaaatcttatctaagcattcaaacgaaagaaagtgg

SEQ ID NO: 18902 - DNA, 346 bp, Gossypium hirsutum
  Clone ID: LIB3146-010-Q1-K1-B12
aaaaggaaaatataggtgaagacaagcaaaatccagctgaggaagacgaagaaatatcaactttagatctcaacagcaatacatggggttcttgttctgatcatcaagaaactgtgaaaaatgcattatcaagagacaagaacagtacagaagagggcctgctgactattggattaggacattcaaaactaaaagctggccgaactggatttaaaccttacaaaaggtgttctgtggaagccaaagaaaacagagtgatgaacactggcagtcaaggtgaagagaaatgtcccaagagggtacgcttggaaggggaaccttcaacttgacttttacacaattgcat

SEQ ID NO: 18903 - DNA, 116 bp, Gossypium hirsutum
  Clone ID: LIB3146-010-Q1-K1-B2
gccacgcgtccgaagcttgtggtaaagatgttctgttggcttaacaaggttcttacaattggcttaagatttgtaaacctcggaaaatataattcattatgatgattttacccggt

SEQ ID NO: 18904 - DNA, 352 bp, Gossypium hirsutum
  Clone ID: LIB3146-010-Q1-K1-B3
gaacttgaagttactgatgggcctttgcttccaacaaaaggctcagatgaattcaagccgtttattcgtaggctacctgagtttaagttctggtactccatgaccaaggctttctgcatagcatttgtcatgactttcttttcggtatttgatgttcctgtcttttggcctatattgctttgttattggattgttctctttgtccttacaatgaggcgtcagattgcacacatgatcaaatataagtatattccattcagctttgggaagcagaaatatactggtaagaaagcttccccaagtagcaatggctcccgtgtggattgaagcttggctggttcacaggtatgca

SEQ ID NO: 18905 - DNA, 343 bp, Gossypium hirsutum
  Clone ID: LIB3146-010-Q1-K1-B4
cccacgcgtccggaaaaaagttcttcttgcattgcaagcctttactctgcaactccaaggctgcaatttcaatctctcaacaacatccgagttcccaaggcggattggcagattatccgaggaaggacatggcttaacaccatgcaccgaaggaagccttgctccaccattccctgctagcacaaggtacaagcttggaagaacatctgaaacatatgattggtctgatttggagacctgcaacaacgaaagaagtgttcttagtcagtttcaagatgagcatttcaggctcaagaataaaaggtacactcctaatgcaagggaaaggatgtataaatttgga

SEQ ID NO: 18906 - DNA, 334 bp, Gossypium hirsutum
  Clone ID: LIB3146-010-Q1-K1-B5
cggacgcgtgggcggacgcgtgggcaaaatatacatcctttgtatcgcttcacctctttcaattattttttctctcacactgagaacatgcaaagacaatccttaggctcgcctacctctaagctccatagccatggaggagaagagattaccggagcaatcgtcgacgacgatgaccgccgcaaagacagcaagtctcgccgattgacgttttcggcttcttcttcttcgtcgtcgccgttgttgttgccgacgtctcctaagtctgagaagctcattcatctcattcctgttcttactctcctttgcttcctcatactttacttaaattctc

SEQ ID NO: 18907 - DNA, 338 bp, Gossypium hirsutum
  Clone ID: LIB3146-010-Q1-K1-B6
gtcgatacatcaactatcccaactaagaccaagtacacccctcccaagcagcctcactatgagcaggacaagacctcggactttgttataaagcttctccaattcctcgttcccctgctgatcttgggattggccttcggagtccgcttctataccaaatcacctgcttaagcatcaagaccacaacccagaatggaaaaacttctcaatattattattatgttagtttaaacgtttgtttggaactgttacatattgagggatggttcgaaatactatatttactcgttctgtttattgaccagttcccggtgccccattttcaatgtaatatctaa

SEQ ID NO: 18908 - DNA, 227 bp, Gossypium hirsutum
  Clone ID: LIB3146-010-Q1-K1-B7
atggattttcctcatactgaatctctggccataaaatttccacttttgataagtaaactttgttctataaaaaacttttaactgtcacagatttagatttagaccaaattttgttccttcactgctttcaccagttggtgtaatgtgttgtggctcatgtacagaagagttgtgtatcattgtaatctgcagaccaacacgattcaattccaaatggctttatatgg

SEQ ID NO: 18909 - DNA, 333 bp, Gossypium hirsutum
  Clone ID: LIB3146-010-Q1-K1-B8
caggatgttacaacttgctttgttctggttttgtccaaaccaacaacaaggttgccattggagcagcaatctcaccaaggtcctcttacaatggcagacagttcgatatcggattaatggtttggaaggatccaaaacatggacattggtggttagaattcggaccaggattattggtgggatactggcctgcctttctttttagtcacttgagaagccatgccaacatggtacaatttggaggagaaattgtgaacactagatcctcaggattccacacatcaacacaaatgggcagtggtcattttgcagaagaaggctttagaaaagcag

SEQ ID NO: 18910 - DNA, 343 bp, Gossypium hirsutum
  Clone ID: LIB3146-010-Q1-K1-B9
gactggccaagcttggatcagacaaagcaggcggacatgtttcaactcgagtattgggcacccagggatacgttgctcctgaatatgctttaactggacatctaactacaaaatcagatgtgtatagttatggtgttgttcttttggagttgcttacaggcagagtaccagttgatgcaaagagacctcatggggaaggtgttcttgtatcatgggctttgcctcagttaacagatagggagaaggtcgtccagataatggatccaacactagaaggtcaatactcaatgaaagaagtgattcacgttgcagctattgctgctatgtgtgtgcaaccagaagc

SEQ ID NO: 18911 - DNA, 340 bp, Gossypium hirsutum
  Clone ID: LIB3146-010-Q1-K1-C1
ggaatctatacggcattcaagaatcataatgagagttcaatacctaatctctacagcgtgcattcttggcttgggattggaatcattaccctttatggcattcagtggatatatgggtttctcatattcttctaccctggagggtcgaccggattaagaagcgaatcacttccatggcatgtactgttggggctgtttgtatacatcttggcagttggcaatgccaccttagggttcctggagaagcttacattccttgagaactcagggcttgataaatatggtgccgaggcataccttgtaaacttcacagctattgtcacaatattgtatggagcct

SEQ ID NO: 18912 - DNA, 302 bp, Gossypium hirsutum
  Clone ID: LIB3146-010-Q1-K1-C10
cccacgcgtccgctttattatgaagtgtgatgtggatatcaggaaggatctctacggtaacattgtgctcagagggggttcaaccatgttctctggtattgcagaccgaatgagcaatgagatcactgcacttgctccaagcagcatgaagattaaagtcgttgcaccaccagagagaaagtacagtgtctggattggaggatctatcttggcatcactcatcacctttccatcatacgttgatttccaagggtgacgcataatgaattcggtccatccattgtccacatgaagtgcttcta

SEQ ID NO: 18913 - DNA, 341 bp, Gossypium hirsutum
  Clone ID: LIB3146-010-Q1-K1-C11
tgtcactgccatccacgatgatgaaggagcccaagccttcagcgagaaacgtggccataacttggttattacagccaattggagtgatgtaagtgtttatgattacgattgccttgttgtgccgggtgggaggtccccagagttgctggtaatgaacgacaaagcagtcactctagtgaaggaattcgctgagaaaaacagggtcattgctggtgttgggcaagggcaatggctccttgctgctgctggtgttctaaaggggaagagatgtgcatgcggggatggaatgaaggtaatggtgaagattggtggaggggaattggaagagtctaaagggtgtg

SEQ ID NO: 18914 - DNA, 346 bp, Gossypium hirsutum
  Clone ID: LIB3146-010-Q1-K1-C12
gtatacccggggcatggtattcaatttgttcgcaacgatgccaagattttccgtttctgtagatcgaaatgccacaagaacttcaagatgaagaggaatccccgtaaagtaaaatggaccaaggcctataggcgtttgcatggaaaggacatgacacaggattcaacatttgagtttgagagaaaacgtaataggccggagagatatgatagaaaccttgcagagaatactctgaaggccattaaaaagattgataaaatcagatcagacagggcatctgaccacatcaaaaacaggcttaagacaggcaaagtccagaggcagaaagaagcaaggaagcaattgg

SEQ ID NO: 18915 - DNA, 292 bp, Gossypium hirsutum
  unsure (1)..(292): unsure at all n locations; Clone ID: LIB3146-010-Q1-K1-C2
gttgggaagaagcagaaactcaaatgtagctagtaatcagcaacaaaataaacttgattttaaagttgaactcttgcgccttcaacttcatctttagcatgagaatttgagtgttaatttgtttttattttcagtggtggaggattactcaaaaatcatggataattcatatcagaccggaatttgatatcatctacttaatttgtttccctacgnnggaaangccacctaaaggtaactggaaaagcttacattacattgaaaactaaaggcttgataaatataaannccg

SEQ ID NO: 18916 - DNA, 325 bp, Gossypium hirsutum
  Clone ID: LIB3146-010-Q1-K1-C3
gcagcattttgcccaaggaaaagtaaaaaaaagaagctccactactatgaattactttttatgtaaattacaggttctttttgcagtgcaaggtagatattagatatgttagtttgctaagcaaaataaatcaaatggctaagcagccctttgtttctttttctgttagtagagtgcatttaatttatctctgcaaggcggagtcagaatttttctttttggtactgaaattaaattatatatttttatattttattattttaatagtctacatctttataatttttaaaaaattaaattaaatttttattattttgtggggagc

SEQ ID NO: 18917 - DNA, 255 bp, Gossypium hirsutum
  Clone ID: LIB3146-010-Q1-K1-C4
gtaaaatgaaagtctataaccctaagatgggtatggatgctcttcaagttttccctgttagtcgtgctgctgctgaccagcgcgcaagtcgtgctggtagaactgggccaggcacatgttataggttggatacagagagggcatacttaaatgaaatgctgccagcttctgtgcccgaaatacaaaagaccaaccttggcaatgggggggtgctggtcaaggcttttaaaataaaaaacttggttaaatttgatt

SEQ ID NO: 18918 - DNA, 109 bp, Gossypium hirsutum
  Clone ID: LIB3146-010-Q1-K1-C5
cgttactttaccattatattgtattctttgagacattattatttttttaccttttgaggacactctttttttgtatttgaaggaatttattgtttattttgtttggaat

SEQ ID NO: 18919 - DNA, 336 bp, Gossypium hirsutum
  Clone ID: LIB3146-010-Q1-K1-C6
aaaaggcagagcctccatctgtttcggccctccgagctccggcgccaaactcaaccccctctttccgatttagacccggcgatggcgctggtacacagcaaggtcaacttgccatttcggtgaaaggagggctggcggtggcagacatcgggcgtggtgcgcgctgaaggcgcacatggcgtagcaacggcgcgaggggcgccagaaaccctagggtttctggccattccaaaattttttaaggttttgggccaccgggctttgtttcagtaattgggcttaatttagtttgttgggctggagcaaatttgggctttgtacagtatttattatata

SEQ ID NO: 18920 - DNA, 330 bp, Gossypium hirsutum
  Clone ID: LIB3146-010-Q1-K1-C7
ggacaactgaggaggttaaaaagatcattacaacattgaatgaagctgaagttccttctgaggatgttgtggaggttgttgtgagccctccatttgttttccttacctttgtgaaaagtctgttgcggtctgatttccatgttgctgctcagaactgttgggttcgcaaaggtggtgcttttaccggagaaattagtgctgagatgcttgttaatctgagcattccatgggttatcatcggtcactctgaaagaagggctctcttgaatgagtccaatgagtttgttggagacaaagtagcgtatgcactttctcaaggcttgaaggtta

SEQ ID NO: 18921 - DNA, 337 bp, Gossypium hirsutum
  Clone ID: LIB3146-010-Q1-K1-C8
ccttaatatcccaagaatcatctttttcaaaacattttactccaacgttttgatttccatggagcaaaccttcattttcctcacaaaaacctcagtctggttctcagacccattcgtcctctagtgttttgactgcataccttggtaccgctccttccagtgttccagaatcggttcgttaagacaatggctaccctcagaatagctcttcgtaacgtccaccgcatctttaatacctccgccgtttccggccgtacaacgaccgttttcaggtacccattaatttttttgttagttttacattataaaagaattgtcctttatcaggccacagtat

SEQ ID NO: 18922 - DNA, 345 bp, Gossypium hirsutum
  Clone ID: LIB3146-010-Q1-K1-C9
aaaacacgtatcatatatggagggtctgttaatggaagcaactgtgctgagcttgcaaagcaggaagatatcgacgggtttctcgtaggtggcgcttccttgaaggggccggagtttgctacaattgtcaactccgtaacatccaaaaaggtggctgcctaaatatatatgaagctgattgaaagtaagaaataaaggacctaaatgaagaagctatttgaggttgaagcttcacgtgacatatttagtgttatataccccatggagttttttgattacttattgagttccattttcccggaaaatgataggaaaaaaagaattgtggtgttgtgaaataagttg

SEQ ID NO: 18923 - DNA, 329 bp, Gossypium hirsutum
  Clone ID: LIB3146-010-Q1-K1-D1
caacgactctcaccgtcttgccactcttcagctcgtggcagaacttcataattggcgttcttgctttgttgcgtatttatgttcacaaaagtcatacattgaagctcttagtggatggcttgcgaagttcgttgcacccgaagtagaattatgctccaagaagaggtcttcggcccctacgttaagagtcaatggaccaccgttattggcaacttgtcatgaatggttggctaccttagagaagttgccaaaagaagctgtaagttgtgcattaaaaagctttggaaaggatatgcgtgcgctttgggttcaacaaggtgaagagcaaa

SEQ ID NO: 18924 - DNA, 274 bp, Gossypium hirsutum
  Clone ID: LIB3146-010-Q1-K1-D10
cccacgcgtccggtgaattgactccaatggatggatgggccccggttaccattttgaattggcaattcattccatttggagagaaactggatatggaaatgtcagctctccgtacatgataagagaatatcctggaaatgaggaagagaagatgagaggtgcaatatggaagtttggattgtcagggaaagcgcaagtgatgccgatgaagaacctatctgatggacagaggagtcgagtcatcttcgcgtggttagcatttcgacaaccccac

SEQ ID NO: 18925 - DNA, 344 bp, Gossypium hirsutum
  Clone ID: LIB3146-010-Q1-K1-D11
cccacgcgtccgcccacgcgtccgcccacgcgtccgcccacgcgtccgcccacgcgtccgcccacgcgtccgcttccttttattggaatcaccgaaatgggcggaggaggagtcatgagggcggtggggaaggtcgccggggtcggaattgttaactccagccttcgtggtggtgttcagggaactccgctgtctgctgagcaatccgttatgcgtgtcgccgccgcttcccgttctgcttcttccgtggtttctgtttctagtgaaggagtttcgtctgttgccgacacgactgcgtcggtcagtcacaagtcatcttgggagatggtggatgattgggaatt

SEQ ID NO: 18926 - DNA, 345 bp, Gossypium hirsutum
  Clone ID: LIB3146-010-Q1-K1-D12
cccacgcgtccgcgactgccacacctctcacattgctgtcaaattttccgaactgttgaccaagattgacagacgatctggcaaggaactcgagaaggaacccaagttcttgaagaacggtgatgcaggtatggtaaagatgattcccaccaaacccatggttgttgagactttctctgaatacccaccacttggacgttttgctgtccgtgacatgcgccagactgttgccgtcggtgtcatcaagagtgttgagaagaaggacccaactggtgctaaggtcaccaaatctgctgccaagaagaaatgagagattatttgagagagaattatatcagttttcat

SEQ ID NO: 18927 - DNA, 342 bp, Gossypium hirsutum
  Clone ID: LIB3146-010-Q1-K1-D2
cttgccatctcatacccaactcttgctgctgcaccacacatgttcatcaatgcatacaagaacgtcttgtctgtcgcagttgcaacagagtattctttccctcacgctgataaagtgaaggagtacttggcggatccaagtaagtttgcggttgctgttcccgctgttgctactgatgcgggtgcagccccagctgctgctgctgcggcagccgaggagaagaaaccagaacccgaagaagagtcggatgatgatatgggattcagtctctttgactaaggttgtattattatttgtttgggttgcaagacatatcagttacaatggtgtggttagattatt

SEQ ID NO: 18928 - DNA, 339 bp, Gossypium hirsutum
  Clone ID: LIB3146-010-Q1-K1-D3
cccacgcgtccgcccacgcgtccgcccacgcgtccgcccacgcgtccgcccacgcgtccgcccaattgaccaccatgtttaaattaatcaacatcctaaccatccttgtgctacttacatttagttcggaaattgcagatgccgcacctccgtgccaggaggttatcgtgtcgattaccccttgcttgagcttcataaaaggccaacccgatccggcaccaggatgttgttcgggtgctaaagggcttgctaagcaagctaacaccaaactagataggcaaggaatatgcgagtgccttaaaggtgtattgccaaaaataggaccatatgaccctaaaa

SEQ ID NO: 18929 - DNA, 341 bp, Gossypium hirsutum
  Clone ID: LIB3146-010-Q1-K1-D4
aattacgcttacaacatgagaaacacagtgaaagatgaaaagattggttcaaagctctcaccagatgataagaaaaagattgaagatgctattgaagaagctattcaatggttggatagtaaccagttggctgaagctgatgaatttgaagataaaatgaaggaattggagagtgtttgtaaccctatcattgctaaaatgtaccaaggtgctggtggtgatatgggtggtagtatggatgaggatgctcctccgtctggtggaagcggtgctggccctaagattgaagaagttgactaagtaattggtcaaggctctattttaaattagattcgcttaaa

SEQ ID NO: 18930 - DNA, 247 bp, Gossypium hirsutum
  Clone ID: LIB3146-010-Q1-K1-D5
cccacgcgtccgagaacttccaagcccgttgttgttgctgactgcggacagctctcttagagaagaaaaagagaactatgtgttaagttgggatgttgtctaatgtctagaatatttaatgtctgtcatttagactcttttatggtgctgtttttatcgtcactgggtttggtggttttcaggaacttgctttatgtagtttttacgattaactaccattaaataagatactctttttcgtcatcat

SEQ ID NO: 18931 - DNA, 334 bp, Gossypium hirsutum
  Clone ID: LIB3146-010-Q1-K1-D6
ctggaggaagcaatactaagaatttgtcttattcttccacttctggacaatctcctgcccaagcaaagagatctaaacccaattgtcagggcatacatgttccgcgttgccaagttgaagactgtaactttgacctctcctcagcgaaggattaccatcggaaacacagaatttgtgaaagtcattcaaagagtccaaaggtcattgtacgtggtcaggaacgccggttctgccaacagtgtagcaagttccatggcctgtcggagtttgatgaaaagaagagaagttgtcgccggcgcctttctgaccacaatgcaagacgccgcaaaccaca

SEQ ID NO: 18932 - DNA, 336 bp, Gossypium hirsutum
  Clone ID: LIB3146-010-Q1-K1-D7
ggtggtttaagatatccgtatgcctccgcatataatggggttgaaggtgaatcagctcagaggtgtaaagccagattggagagatatcaacgaacagctgaacgtgcagctaaagctctcgaagaaaagaacatgcgcgatcttattgctcaaagagagcaagctgaaagaaatagattagcggaatctcttgatgcggatgtcaagaggtggtcgagtgggaaagaagggaaccttcgtgcattgctttcaactttgcaatacgtatgtactattatccaaattctctccaatcaagcttttataatcatttcctttgtttactgggtcgtttaa

SEQ ID NO: 18933 - DNA, 335 bp, Gossypium hirsutum
  Clone ID: LIB3146-010-Q1-K1-D8
aaagaagtaaaacagaagcttgatattggatctgtaaagtttgaggtattatgtgacaaggatcgcaacccaaagaaggtcccaggagaagggtgccttgagagaagaatcctggaaattaatagaaaacgagttaaggttgtaaagccgggttcaaagacttcttttcctgctaccgaaatacgtggaacctttgctcctccttttcatgtggaggttttccgtaatgaccaacgccgacttaggattgtgttggacagcgagaacgaagtagacctcatggtgcattcgcgatacatcagggatgttattgttcttgtgatccgtggtcttgc

SEQ ID NO: 18934 - DNA, 341 bp, Gossypium hirsutum
  Clone ID: LIB3146-010-Q1-K1-D9
cggacgcgtgggcttgattattgcgagggaatctccttcaaaaatgagtgcctgccaaccatggtcaactcctacttggactgctttcctacaggcaattgcttcagcagcaaaagcagatggaactccattgtggatttctgagcaggataaaagaatttttccttccgagtctctggtcacaacacctgaggctgaccggttctgaatctgattatatgcaccatcaaaattaatctttatggattcccactgtggtgcacagcaaaagagtcgactttgatttgggtttaactgctctagcgcccagcacagtcacggaataagtgattcatcgtttc

SEQ ID NO: 18935 - DNA, 340 bp, Gossypium hirsutum
  Clone ID: LIB3146-010-Q1-K1-E1
cggacgcgtgggcggacgcgtgggattgtagaacatggtgataaacaaaatgattagtgcaagatgtttgttatcgtcttgctggcaaattttgttccaatgcaaggatgaaatttattgttctactttggggggcgaaatcacgcctggccaacaatgaaacactcggtgtacctgtattcagttataaggagatggtgaagttaggaagagaaaattgtgctgtccttattgattctcttgatgctagaaaaggttgcagatatgaagtgatcggctgacatgatattgctgccattgtatatacgagtggaaccactagtaacccaaaaggcattat

SEQ ID NO: 18936 - DNA, 340 bp, Gossypium hirsutum
  Clone ID: LIB3146-010-Q1-K1-E10
gttacttcgaaggttagaatattttttacatgttgcagaagcgcgcagatattgtgagccgcaattcaaacaagtctaggattccaatcctcagcaagttttggaaaactgacgatgacattgagtcagagaaacttgctagagaaatacaagatctggttatagagattgtgaagaaaagagaaaacaaattttctagtggaggagcagagagcttctgcagtgattttctgggattattagtaaaagcgtttaatatttcagatgaaaaaaactagatttcaatggaagatttggttgatgagtgcaaaacaatttattttgccggacaagaaacttg

SEQ ID NO: 18937 - DNA, 328 bp, Gossypium hirsutum
  Clone ID: LIB3146-010-Q1-K1-E11
agaaccagaggaacccccgggctgcatgaatttggcacgatttcctatcagtcagcatagtgaagatcaggtgcaagaaaattacaatggaatttcacaggaacttaatccaacatgtgaaagtgttacatgtcaagggcagctcaatccttcatgtggtgatttggctgaatctattcaaaggcatgaagggttattaactcaaacgttttctttgaacaatgcaccatatgagcatgataacatggaaattggagatggtaattgcacaacagctgctgaacaagtataacaaatttctgaaaaggtttacttgcctgaggggggt

SEQ ID NO: 18938 - DNA, 345 bp, Gossypium hirsutum
  Clone ID: LIB3146-010-Q1-K1-E12
cttggatgatccaactcctggctgtcacttgtctctctttggctgcaaaagttgaagagacacaagtgcctctgctcctagacctacaagtggaggagacgaagtatgttttcgaggccaaaactatacaaagaatggagcttttggtgctctccacactgaaatggaagatgcatccaattacacccctttcatttctagatcacatcataagaagacttgggttgaaaacccacctccattgggagtttcttaagcgatgtgagcatctcctcctctgtgtaatcactgattcaagacccatccattatcttccctctgtattggctactgcaaccatgatgc

SEQ ID NO: 18939 - DNA, 331 bp, Gossypium hirsutum
  Clone ID: LIB3146-010-Q1-K1-E2
gtgagtttgcaaatgttgctaggggaaaacagggttctggaagtgatccataatacatgacaaccagcaggaagcatgtgagtgcttggtgggatgatattagcagcagaccgtcctagcagaaggttctccagctctatgctcctcatttctaagaattgaaaatgatgcaatctggggatggggtctttttaatgatgtctgctttgttgtttagcagtttggtttggtttggggtctggtctttgactgttttaagaggccaactagttatcctgtgttagttatacttacaataaaatgttggtaggggtagggggttacaattatc

SEQ ID NO: 18940 - DNA, 314 bp, Gossypium hirsutum
  Clone ID: LIB3146-010-Q1-K1-E3
cggacgcgtgggcggaaggaacaaaacacagtgaaaaaatggtggtcaccagtggagctgaagttcatgatgattccaacaactacgacagagaaaaagaactgaaagcattcgacaattcaaaagccggtgtcaaaggtctggtagatgctggaatcactaaggttcctcgtatgttcatccgttcagacatttcatcgaacactttagagacaaccaagaaaacccaatacaatattccagttattgatctacaagggatcgaagatgatccacggcggcataaagagatcagtgaccaagtcaggcatgca

SEQ ID NO: 18941 - DNA, 342 bp, Gossypium hirsutum
  Clone ID: LIB3146-010-Q1-K1-E4
attctgctttatggaaaggctatggctttgtaaggcctcggagatggaacgagttaggccatttaaaattggggacagcgtgaagatacgggtagggcttgtgaccccaagatggggttggggaatggagactcacgccagtaaagggcaggtggttggggttgatgcaaatggaaaactaaggataaagtttcagtggagagaagggagaccatggataggagatcctgctgatattattcttgatgacagctcttctggcacaaccaacacctcatgaatcacaccttgaactatgttttcagttcattcctgaagctcggggttactttgctcgaaact

SEQ ID NO: 18942 - DNA, 328 bp, Gossypium hirsutum
  Clone ID: LIB3146-010-Q1-K1-E5
atctcacttacatatcatgcatataggctgttactgaagattcactgtggtagctcaaccggtttggatgctgaatcacgttcatcatgtaagtccccttttaaaggattgagactctattgggatggcatggaactcggtaccatggtagccatgaccgtcggatatcggatactaacctatgctttcttaaggtgaatgaacttaatgacaataaattagtctagattcttcaacaatcttgactggtgaacatgaactttatcgagccaataagtaggattaaaagaaaatgtccacgttgtaaaaaaaaaaaatccttaataag

SEQ ID NO: 18943 - DNA, 332 bp, Gossypium hirsutum
  Clone ID: LIB3146-010-Q1-K1-E6
gtaccaagttcacttccactgaaaaagaagaaaaaaattaaagtatatgttgaagctttacaaccaagccatgtcagattgtgagttgattcatcccatttttcacgacttgttccatggttaaatagtgttattagtccttggactatgcataaatgttgatttagtcattgtgctttaatttagttaattttagttcctatttcaaattttgaaaatttagcttagactaaacagtaactgttaaattcaatagcagcctccatatgaagtactccttgtttgtgacgacctccatggtgttagtatgctaagaatggttattgtataac

SEQ ID NO: 18944 - DNA, 317 bp, Gossypium hirsutum
  Clone ID: LIB3146-010-Q1-K1-E7
cccacgcgtccgtgcatgttacaagggaaaccaaaagttttttggtttatggtgcatcatggcttgtgattgttctaatattgtttgtaatgaagactgtatctgttggaaggcggaggttcagtgcaagctatcagcttgttttccggctcatcaagggattaatattcttgacatttgtgtccattctggttattttggtcacacttgctcatatgacaattcaagacattatagtgtgtatttttatcttcatgcctacggattggggaatgctcctgattgctcacgctttgacgcctgttgttaacaaagct

SEQ ID NO: 18945 - DNA, 333 bp, Gossypium hirsutum
  Clone ID: LIB3146-010-Q1-K1-E8
cagaaagccaaagcctcttgctgcatatctcttcagtgatgatgaaaagattaagaggaagtttgtgcaaaatatttacgccggaggaatggctattaatgacaccattctacaagtcacagttcccactctacctttcggaggagtcggggagagtggaatggggtcataccatgggaaattctcttttgatgcttttagccataagaaggcagttttatacagaagttttgcaggggattcgccgactaggtacccaccatacacaccgggaaagaaaaagcaaataaaagccttactcagtggcaagttacttaacattatgcttgcttt

SEQ ID NO: 18946 - DNA, 324 bp, Gossypium hirsutum
  Clone ID: LIB3146-010-Q1-K1-E9
cccacgcgtccgtcgaaatccactgcagaagagcttttagataaggagctccctttgaagtttgtagaggttgacgaggaacagtccaggcttgtcttcagtaaccgcaaggccatggctgatagccaagcacagctcggaattggatcggttgtcctcggaactgttcagagcctgaaaccatatggtgctttcatcgacattggtggaattaacggccttcttcatgtcagtcaaatcagtcatgatcgtgtttcagatattgctacggttcttcaacctggtgacactctgaaggtcatgatattgagccatgaccgtgaa

SEQ ID NO: 18947 - DNA, 336 bp, Gossypium hirsutum
  Clone ID: LIB3146-010-Q1-K1-F10
cccacgcgtccggttcggtttcaaaatatatcctccatgacgaaaaccttataggaagcctgactttgactttcgacgaggcaacgtccggtgttgcttgtgatctcaattctcgtggattccatgtattgtgcaaagcaactgaagaggctgttggacatgtgaaaccttactcaattaccggaagtttgccactcattcgggagctacaagatgaaggttttgatgttcaaactgctggctacggtttaatggccacgtaccacgccaagaacgagtactgccttctttccgatatgtgccaaggttatcacgtatttaccggcatcatcgctc

SEQ ID NO: 18948 - DNA, 344 bp, Gossypium hirsutum
  Clone ID: LIB3146-010-Q1-K1-F11
aattaaccttcccccagggacggttcctccagtaactaagccaccaagtgggaaaccctgcccaacaccaccaaccaaggacacttgccccattgacacactgaaattgggtgcttgtgtggatctgctgggagggttggtgcacattggactaggtgacccggttgtgaaccaatgttgtccggttctttcaggactcgccgagctcgaagctgcggtctgcttgtgcaccaccctcaaacttaaggttctcaaccttaaaatttatgtgccactggctcttcaactccttgtcacatgtgggaaaacaccccctcctggttacacttgctctctctaaaacc

SEQ ID NO: 18949 - DNA, 344 bp, Gossypium hirsutum
  Clone ID: LIB3146-010-Q1-K1-F12
atcacgaacctcggtgttattttagcccaaatgagggtttaaatagatattgcattagtaaattatataacctgaacaaattgtccagatatgttgtagcgaaatctgaacttgctggggctgggacacctgatgcttcctattctttatcagaagttaaactatcttcgaaagttagaggagtatgcttttatgctgtcacggcaattgcagctatttcacttattgggtttatgatagtggcacatccctttgtgctcttgtttgatcgctacagaagaaaagctcagcattttgttgccaaactttgggctgcagcaactgttgctccgttctttaaaatt

SEQ ID NO: 18950 - DNA, 341 bp, Gossypium hirsutum
  Clone ID: LIB3146-010-Q1-K1-F2
gagaaaaattgcagacgagttggaccgtactcctggggagatactgaagaaactcgaagaagcccgaaacaagatcatttgagatagcagatagcatcaaaggtcaagttctcttttacccggattgcgggaaaccaattgcggttaagaaggctttagcacgttggaatccaaggcagatgaggaagaaattggacgatggagtcgaaagtcaagaacacgagaccaagaatgggagtattgtataagtagttatgaggcaaactagttgtgttagtagaggcaaaaaatcagtattagctgctgcagattcgagtatttgctgctgttattgcagtttt

SEQ ID NO: 18951 - DNA, 330 bp, Gossypium hirsutum
  Clone ID: LIB3146-010-Q1-K1-F3
aacatatttaaaaccaaaaaagattacctattcttttcttttaacttgctacttttttggtatttctccatgggtaaaaattacaatatattgttatgacctttatagccaatattacactatttatttctgttttgctactattttgtgtctgttcttgcattatttggtctttgtcctttttctttctttttcttgcagatggcgtggaggtcaacgatggagatgggaagcgtacccttgccattttggtgcaacgatggcaatggcatgtcagacctcgggcagcgagcacgctgacaaggcacaaggagcggggccaatggaaac

SEQ ID NO: 18952 - DNA, 340 bp, Gossypium hirsutum
  Clone ID: LIB3146-010-Q1-K1-F4
taatccccatcgttgggctttagcttcacctcatcaccatcaccgttttgccgccgtcggtgatttccttcaagctggtggtattaaagatatgaactttggtcccgacccatcgtcttcgacgagacccaatgtcctctccgtttcaacttcccctccggtgaccgcaaatggtaacacggcgtcgtttcttgggattgttcgacgtggtttgcctatagatttgaatgagccacctccactgtggctgtgaatgtggtttttcttctctaggcattttgcaggctccctttttaacctttaacccttccttaggcatctttgctacttctgtttagta

SEQ ID NO: 18953 - DNA, 305 bp, Gossypium hirsutum
  Clone ID: LIB3146-010-Q1-K1-F5
cttggtcgatcataaactgtgtacaagcatgctgtgctgaagtagaacttatttttaggcttggtactcctgattgtgatttggaatttggataaaataaattagatacagaataggaaagcttacacttatttggagcctttctatacttgaggttgtaatattattattattataatcaatggtttcaaacactcctttttcatcaggaaagaatatagataagaatgaaccacctacactgtggctgtgaatgaggtataatttttgtatgcattatgcaagctcactttttaacctttaac

SEQ ID NO: 18954 - DNA, 333 bp, Gossypium hirsutum
  Clone ID: LIB3146-010-Q1-K1-F6
cttttacgagcttatggaatagctcggtatggtgaagatgctctaaatgtgtataaagagatgaaagataagggattggagttgactgttgttctttacaatacccttttagcaatgtgtgctgatgttggttttgcagatgaagctgctgaaatttttgaagacatgaaaaattccggggcttgcaaacctgacagttggacgttttcatctttgatcaccatatattcttgtagcgggaaagtttcggaggctgaggggattttgaacatgatgcttgaagctggctttgagcccaacatttttgttctgacatcccttatgcaatgctac

SEQ ID NO: 18955 - DNA, 335 bp, Gossypium hirsutum
  Clone ID: LIB3146-010-Q1-K1-F7
cccacgcgtccgtccacgcgttcgcacgaatacctagcccctgaaataatcaaaggagaaggccatggaagtgctgttgattggtggacctttgggattttcttgcatgaactgctatatggtaaaaccccctttaaaggttcaggaaaccgcgctacactattcaatgttgtagggcaacagctgaaatttccggattcaccagcaaccagttatgctagccgcgacttaatccgtgggttgctggtaaaagagccacaacaccgattaggggtgaagaggggtgcaaccgagatcaagcaacatccattctttgaaggtgtgaattgggctct

SEQ ID NO: 18956 - DNA, 381 bp, Gossypium hirsutum
  Clone ID: LIB3146-010-Q1-K1-F8
aaccgcgccggactggcccggacgacccacgcggtacccacgcgtccgcccacgcgttcgcccacgcgtccgctctctaatggcttcccttgctggttcatcaatctctatgcaacctcgccagaccctggctacaagcagggtttctgggttgaaattggtttcatttgtgaaccggggaagaagcagcctctcctttaggttgcgtccagatcgcttgcggatttcatgtgctgccaaaccagagacagtggataaggtatgtgaaatagtaaggaaacaactagccctaccaagtgacaaaccagtcacaggtgaatcaaaatttgctgaacttggagccgattctcttgatacggtcgagattgtaatggggcttga

SEQ ID NO: 18957 - DNA, 341 bp, Gossypium hirsutum
  Clone ID: LIB3146-010-Q1-K1-F9
cccacgcgtacgccaaagcttaaaatcaaaaaacctaaatcagatctaacatttttttgtcaaaatttaccgcaaaagatatggctctagaatgggtagtgctaggctacaccgccggcgctgaagccatcatgttgctcctcctcacagttccaggcctcgacggactccgcaagggcttgatcgccgtcacacgtaacctcctcaagcccttcatgtcggtggttcctttctgcctcttcctcctcatggatatatactggaaatacgagatgcgtccaacctgtgacgccgatacctgtacaccttccgaatatctccgtcaccagaaatccatcatg

SEQ ID NO: 18958 - DNA, 342 bp, Gossypium hirsutum
  Clone ID: LIB3146-010-Q1-K1-G1
cggacgcgtgggcaagtcgggagtttacaaacatttgactggcgatgttatgggaggccatgcagttaagctgatcgggtggggaacttcagatgatggagaggattactggcttcttgcaaaccaatggaatagaggctggggtgatgatggttacttcaagatcaaaaggggtgtagacgagtgcggtatcgaatccgatgtcgtagccggattgccttccaccaaaaaccttgttcgagaggttacagatacaggaattgtcgaagatgcttcattctaagagaagatcatctagacaggcttacctaatatcatagtttatcaatgaaggaactgtta

SEQ ID NO: 18959 - DNA, 325 bp, Gossypium hirsutum
  Clone ID: LIB3146-010-Q1-K1-G10
cccacgcgtccgcctgcatttgccttcgctatgaacggggacgatattgtggagtggagtgctgattttgaggcaagaaactcgttcatctcccccctcaccaccatacccgaagtcgatcttgaatattcgttgtcaaaggttgcatcaaaatacatagttgctatcgtatttcttgtgttctgtctctgacgtctgttatcacctaaggtagatggtctttctttctttccatcaatttctgctatggatctgtggacttcgtttgacatctttcgccctgtggatgctttccccttgtcgaaaccatttttaaatttgaaaa

SEQ ID NO: 18960 - DNA, 346 bp, Gossypium hirsutum
  Clone ID: LIB3146-010-Q1-K1-G11
cccacgcgtccgcccacgcgtccgcccacgcgtcccccacttccttgttattattgaaaaaaaaaaaatgaaaaattggtttcacaaaaaaaccagaagggttggtgaaagaatcatgggagggtttgaagccagatattccttactccagcttgcgtttcttttcactgatattggagatagcaccaggtgcgaagaacatgttcagtttcttgagggagtcagaggagattcctcaaaataatccaaagctcaaagctcatgctgtcaaggttttcaagatgacatgtgagtcagccatacaactgagagagaaaggggaagtggtagtggctgatactacttt

SEQ ID NO: 18961 - DNA, 340 bp, Gossypium hirsutum
  Clone ID: LIB3146-010-Q1-K1-G12
acatttcaaccaaattttacttgccctaaaatcaatttgtttgggctgattctagcaatcggggaaccaccattccatttggtggccgacaatgcacaagcagcgaccatattatcactgacgagtgctctgctcaaggaaatattgcaactgctgtactgaggaaacgggaaacggctcgtgggcacccatccccttaacaatgttctggcgtttcccagaaatgaatggggttcccggctgctgatttactttgacaacaatatgctatagcgtttgcgagattacaattgctttttaggttcgcgtctatttaattgggaattaaaaaaatggcttt

SEQ ID NO: 18962 - DNA, 327 bp, Gossypium hirsutum
  Clone ID: LIB3146-010-Q1-K1-G2
aaggaatagctttaggagatttcaacggctcaggcccgggcggagcgggccacaacagagaatctgatcctgtgggaaaattcaaatgacgataaaggattacttggctatttgcaaaccaagggaatagaggcggggctgatgatgggtactaaaagatcacaaggggagaagacgagtgcggattcgaactcgatgtcgtaaccggattgccttccaccaaaaacctagatcgaggaggtgcagatactggaattggcgaagatgcttgattttaagaaaagatcatggaaacagggggacttaaaatgagagtttataaatgaa

SEQ ID NO: 18963 - DNA, 340 bp, Gossypium hirsutum
  Clone ID: LIB3146-010-Q1-K1-G3
gagctgtagcaggggtggtaaccgccggagctttctttttagctctatttgccggtgctttaatctgggtttactctaaaaagttcaaacatgagaacaaattaggccaatcttttgcatcggagataatcaaatcgccaaaagaattcacttacaaagagcttaaagccgccacgagatgcttcgatgccaatagaatcatcggccatggtgcttttgggactgtttataaaggtattttgccggaaaatggtgacattgtagccgtcaaaagatgtagtcataacagtcaagggaagaacgagtttttagctgagttattaataatcggaactctaag

SEQ ID NO: 18964 - DNA, 342 bp, Gossypium hirsutum
  unsure (1)..(342): unsure at all n locations; Clone ID: LIB3146-010-Q1-K1-G4
gcccaatactagagtagatggcaaaggagtcttcattagaccattttgtgttgaatgtctcgaattttgcttcatgacatttaatgtcggaatctggtcatcaagagttaatagaaacatgaccaagatgattgggtttcttcttagaaaacaatggaaacgtaaattgtttttctgttgggaccggaaactgtgtacaattacaaaattcaaaaccctcgagaatgatgagaaaccgcttgttttgaaggaacttataaaattatgggataggtgtttacccgagcttccttggaggaagggtgactatgatgnaatcaacacactattgttggatgattc

SEQ ID NO: 18965 - DNA, 337 bp, Gossypium hirsutum
  Clone ID: LIB3146-010-Q1-K1-G5
gtcctaatgagggtagagcaagatcaaagggtgacagaagatgctcgcagatttgctgaacaagatgcagctgcacaaagatatgctgttcaagtgcttcaggaaaagtatgaagaggccgctgcttcacttgctgaaatggagaaaagagtggtaatggcagaatcaatgttagaggctaccttacagtaccagtctggacaaagtaaagtccaaccttctccacgatcatcacaccctgattcatcagcacgcagcaatcaagagcctcaacaagaaatccctgcacggaaaattagcatactttctcgaccatttggactcggctggcgtgata

SEQ ID NO: 18966 - DNA, 284 bp, Gossypium hirsutum
  Clone ID: LIB3146-010-Q1-K1-G6
ctggaatattgggaggagttggcaacggcttaggcccgtccggaactgggatcaacacagattacagtactgatggaggatttaggctgcaatactgcttctcttcctatgcaaccctcttgatttcaggattgatgctattgtggggttaaaagaagttacaagggaacatgttttctggtcattcagtcttgttctcttctagtgtatggtgttgttgatctaaaaacatgtttgctaagggttttttttttttttgggtatgggatttaaacattttaaaa

SEQ ID NO: 18967 - DNA, 325 bp, Gossypium hirsutum
  Clone ID: LIB3146-010-Q1-K1-G7
gtttcaagtactcatctatattttttttccttcttactttcactttttagggtctgaaatttctaaaactttgttcaatttagttgaatctgaactgcactatggatgcttatctgtatgcaaatcaaaatattgtagtctataagtttaaatcggtataaataaatataattttccttttagctctctgggtttttgtccttttgattgttttataacagactcttcttaaaggataagtgatatacgaaatccatacgaaatccgggagttgaatcctggagttgaaatccaagagttgaatcccttataaagtttaaattta

SEQ ID NO: 18968 - DNA, 336 bp, Gossypium hirsutum
  Clone ID: LIB3146-010-Q1-K1-G8
cccacacgtttgagttattaaatcagtggcatctctcaggtcccaagcagcagcaatacttgtgctgctgactgtaaaagcaatgcaaacccagacgggtaaggcacaaagctgcagtactgagctcaccaacttgaatgtgtgcgcaccatttgtggtccctggtgccactcagaccaaccctagccctgactgctgtgctgcactccaatcagtgcaacatgactgcctatgcaacactcttagtattgcctctcgactcccttctcagtgcaatctgcctactctgacttgtggtaatcgatgatatgcagattagcgcatgattcttatgca

SEQ ID NO: 18969 - DNA, 343 bp, Gossypium hirsutum
  Clone ID: LIB3146-010-Q1-K1-G9
ttccggtagtatgcacgggattccgatggaagtttcagtcgcattaggcgtattggtatcggatttaagtgaaaaaccatggaaaggaaagcttataacttttagtgaaagccctaaacttatattagtagaaggtgaaaacttgaaggaaaaaacagagtttgtgagagatatggaatggggtggcaacactgattttcaaaaagtatttgatcttatattgaaagtggttgttgaagggaatttaaaaccagaacaaatgattaaaaggttgtttgtgtttagtgatatggaatttgatcaagcttcaatgtcaccatgggagactgattatgatgttatt

SEQ ID NO: 18970 - DNA, 330 bp, Gossypium hirsutum
  Clone ID: LIB3146-010-Q1-K1-H1
gcatctccctcgatttctactgcgtccaaacacatggttatccccaacctaactgcatgagcgcatgtacaagcttccgcgacaaaagaggaggcaatccgattctccaccactgacttggagaccaaaacctcccccctatcatttctgaccaccaaccccacggcagatctgaagtgatgatggttaaaagccgcgtcaaaattgatgcgcacggttccgttctctaggggtttccactctaaacaagaaagatgtttgataacccaaagtgcgtagcaaaacgttcgacactagctgctcgatccttctgcaaaaacccagatcatt

SEQ ID NO: 18971 - DNA, 348 bp, Gossypium hirsutum
  Clone ID: LIB3146-010-Q1-K1-H10
tctttctctcgctcactcactcacattgggggagaaaagatttgatcttttagtgaagttttaggagggaaaatccaaatcaaagaagaaagaaacgaaaaccttccttaaagtgtccgattcattactggactgacccataagtgaaaaaaagagggaccccaatataataacctctttgtctttggtggtttagccattgaagaaacgaagcagaagagaaaaagaaaattaacagagttggaagaaagaatgttcgcagcggagaatggactcaaaggggacccgaggctacaagccatatctgacgccattagagtggttcctcacttcccaaaaccagggatt

SEQ ID NO: 18972 - DNA, 343 bp, Gossypium hirsutum
  Clone ID: LIB3146-010-Q1-K1-H12
cccacgcgtccgatcagagtaaattacaagggtagtatgcttcagggtaagttcccgaaacagattgttccagccgatgagaagccggaaaaagtaaaagcggtggccgaagttccgaacccgaagcctgatcataagcctgcagatgtgccggagaaacaaaacaaggcagttcaagaaggtcatccccagaccaccctggaaaaacaaacaggtgatgattcaaatacagatggggtagccaaggaggctggcaaagtttcagagaaaacaccagacaaacaagaagaaatggaagatcaaaggcatgcatctaatggagctgatcacagacttatggaga

SEQ ID NO: 18973 - DNA, 341 bp, Gossypium hirsutum
  Clone ID: LIB3146-010-Q1-K1-H2
cccacgcgtccgcccacgcgtgcgcccacgcgtccgcccacgcgtccggagaaaaacaactttgaacttcatgttttggaattggaagcacaggacactgaagatagggtggaagctgttaatttaaaagttaaaaaggtttgatggtcagaggatgctgatggtgattgggactgtgtgcaaactttaggtgaatctagcaagtactaagcctagaactctttctatttgttctgtttcaattcattttcttgttcattgtattgtctgatatgtacttttatatgtacctattaagtattgtggtgatgtctttgaaatttgtattataccttaaagat

SEQ ID NO: 18974 - DNA, 343 bp, Gossypium hirsutum
  Clone ID: LIB3146-010-Q1-K1-H3
tgaaagaggacctcccccgaaacatttctaaccaccattcctgagactgaattttcccgagattcattaaaagcagcgtcgaaattaagtttgacaacagaaccagttggtgggcaccaacccatacactcatgcctcatgatcgcccacaaagaacagcaaaacactcgacattgtatgctggaattattcttgaacacctagggcaatctctgaagatattatcaatgttttcagcagttgcctgacatctgggacatactaccaccgagagcaatcgcttacactgaagattcataaagtggggaataaaattctaagaaattttccagattaagatttt

SEQ ID NO: 18975 - DNA, 232 bp, Gossypium hirsutum
  Clone ID: LIB3146-010-Q1-K1-H4
cccacgcgtccgcccacgcgttcgctccccccaaaactctaccgaatttattcttaatcaagtgatgtaagtgtttggtgtagagacgagggatgtgaagatgttaacttcatttttttttcttttttctttttatttccgaaggacccattatttataatgttatatacaagtttctttctaagcttgtgtgtattgtacttcacattttatgttattataagcacttgtc

SEQ ID NO: 18976 - DNA, 335 bp, Gossypium hirsutum
  Clone ID: LIB3146-010-Q1-K1-H5
ggtcggtccgggaagtcctgtcggctccgatggtgcaaccaactgtctccgcaagttgagcatcgggccttcacccccgaggaagacgagaccatcatcagagctcatgcccgatttggtaacaagtgggccacaatagcccgactcctcaacggtcgtacggacaacgccattaaaaaccactggaactcaacgctaaaacgtaagtgcttgtcggttggggaagagagtaatttcattacacatggtgggtatgacggtaatttgggaggggaagggaagcaacaaccgttgaaaagatcagttagtgctgggctttacatgagcccggggag

SEQ ID NO: 18977 - DNA, 334 bp, Gossypium hirsutum
  Clone ID: LIB3146-010-Q1-K1-H6
tgatctcatggcacaagtttcccagctacaaaatgaaaatcaccagattttaacaacggtgagtatcaccacacagcgttacttgaacgtggaggctgagaactcggtgcttagagctcaagccaacgagcttagccacaggttacagtccctcaatgatatcattgattccttaaatggatgcaataacaatattggtggtgctgacggtggtggtgattgtggtggttttaatgttgcaacgattggtttcaatgagatggttgatcatagctttattaaccctttcaatttggcttacttgaatcaacctatcatggcttctgcagataat

SEQ ID NO: 18978 - DNA, 332 bp, Gossypium hirsutum
  Clone ID: LIB3146-010-Q1-K1-H7
cttagcttgcttggttagtctcagattctaatgttttctaagctgaaattgcagaagaagctagtaatcaaagtggaggccacgggagatctgtatctaaagaatctggtgaagattcaaagggatctagaggtcgtaagcgcgttgagaacatccagttcaaagggaagaacacatttgcagtgccaagaaatgttaaaccacttggatggactaacaaacctggaacccgggaagaggaagatgagaagccaaaatcaaatgatgagttcagaaaaatgtttatgaaaacctgaggttcactctcaagtttctggttaagatcaatgctc

SEQ ID NO: 18979 - DNA, 337 bp, Gossypium hirsutum
  Clone ID: LIB3146-010-Q1-K1-H8
aatagaggcagcagtggcttgacgttcccctttgctcccttcttccagaagccaaaagtttgagttaagaacaatggcttatgctacaatgaagccgaccaaacctggtttggaggagtcccaggagcagattcacaagatcaggatcactctctcctccaagaatgtgaaaaaccttgagaaagtttgtgctgatttggttcgtggtgccaaggataagagactgagggttaaggggccagtgagaatgcccaccaaggttcttcacatcacaacgaggaagtctccctgtggtgaaggaacaaacacatgggatagatttgagctccgtgttcac

SEQ ID NO: 18980 - DNA, 266 bp, Gossypium hirsutum
  Clone ID: LIB3146-010-Q1-K1-H9
tttccctcaaaagggtggaaaacttttcttcattggatcgagtctaaaagggataaatggatgtggagaataataataattgtaccaataacaagaatttctttctgggcataaccaccgaaaaatacgtatatcatattctgaataataactttagcaattgtcaaatctgtattatttctctcctatcagtttactgtttaacctaattggcactctttcgagtgctctctccttatttttatttttttatattttctttttta

SEQ ID NO: 18981 - DNA, 336 bp, Gossypium hirsutum
  Clone ID: LIB3146-011-Q1-K1-A1
cccacgcgtccgttcagatctatcctctagcttctcttgtagtttacgaatcaccggccgagaatcgccttcaatctccacctccctcaacccaaggtgaaattcgagttgccagtgcttggagacctgccaccacttttgctgcaaaggcggatgtatgttcgagtttattattgattttgagcaaataacctctgctttattatttcggataactaacccagaacacgactcttttctatgtttgttgaaagcggcgtcaaagttaattttaagccccgttccccccggtgcaacctatcttacctaacagagccgtttttcagggcactcccg

SEQ ID NO: 18982 - DNA, 322 bp, Gossypium hirsutum
  unsure (1)..(322): unsure at all n locations; Clone ID: LIB3146-011-Q1-K1-A10
cggttagtgaagtcgaagagagggatggcaagctctggctagggagtgttcttatgccctttgtggcagtttacaacttggcttgagttgggaggcagaaggaaaaataaagacttagcaatggtgctttatgaatgtggcaaatcttctcttagccatcgttttcactttgaagaaaaacacaagaatgttttctaagtctatacttgttattggcagtggggctgtattacttggattgcaagtatttggataaaattctgctgaaaagaaagtatttgggttttttcaaaaaaaaaaaannnnaaaaaaaaaaannaaa

SEQ ID NO: 18983 - DNA, 335 bp, Gossypium hirsutum
  Clone ID: LIB3146-011-Q1-K1-A11
gaagatgttctttgtaggctgtacaagctagttacgatgaattaccatccatcatgtacaaggcctgaccttgctttaggtcttattccacattcagatggaagggccattactgtgtagcagcaaggtaatgatagctcattcggtcttcaaatccttaaaggccaaacgtgcgtgcctgttaagcctattgcaagtgcactcgtcatcaacatcggtgacactctagaagttcttgacagagctgctgactaaatggactatctttacacattacctcacattgagagagacacgctttcaatcgtcactttctatgctccaagctattaaat

SEQ ID NO: 18984 - DNA, 362 bp, Gossypium hirsutum
  Clone ID: LIB3146-011-Q1-K1-A12
cccacgcgtccgaacattgtttgcacttgttattgccataaccaaggatcttccagatgtagaaggagatcgcaaatttcaaatatcaacattagcaacaaagcttggagttagaaatattgcatttcttggttccggacttctactggtgaattatgttgctgctgtgttggctgcaatatacatgcctcaggctttcaggcgtagtttaatgatacctgctcatatctttttggcggtctgcttgatttttcagacatgggtgttggaacaagcaaattacaaaaaggaagcaatctcggggttctatcgtttcatatggaatctcttctatgcagagtatgcgattttccccttcgtgt

SEQ ID NO: 18985 - DNA, 235 bp, Gossypium hirsutum
  Clone ID: LIB3146-011-Q1-K1-A2
tttttattttttgggttactttatttttgctttttttcttttttttttctggaaatttacctttaaagcctattattttcgattgtaaaggggttcttttttaggcaattttcccacattgaaaaaagcatccaaaaaatcaacgaggtgattattcggcagaagatcatttttatgacttgaaagccttattacccaaggagaaataccttaacaatcttttgatggaagggga

SEQ ID NO: 18986 - DNA, 359 bp, Gossypium hirsutum
  Clone ID: LIB3146-011-Q1-K1-A3
gggttgatttggccgtagaccacggcctgattcaaagcctgcaatctcggctctgatggtgggtggctggaacgacgggacacgaatagacgcgtttgattctggccccgaatgaccccacaatcccagggtgagacgaagaggcgtttctgcttgcggcgcaaaccctggctagggtttcctaaagctgaaaataagttgggccaattgggccaattaagtcttgggttattgggctagcttagtatgtaacgggtctgctgggtttaggctaaaaccgagtgtaggacttttagtatttgcgtcaattgggcttgtgaatgtaaatggactgtaataaataaacttttgcttatttt

SEQ ID NO: 18987 - DNA, 356 bp, Gossypium hirsutum
  unsure (1)..(356): unsure at all n locations; Clone ID: LIB3146-011-Q1-K1-A4
ttcctaaaaggagtttaaagaggttgattcttaacataaagccaaaagatatcagttcaataattgttggctctccaggtgaggatccaaagatggtagccaacttcaaagaccttctagaaaaaatttttgtgcttgatccagagaagagaatgacagtaactcaggcattggctcatccattcatcacgggcaagtgaaacatgttgctgattttatgtctccagaaatgtgttccgctagatatttgtacattatgacctaactcatatttagatatctaatcattgngaattctgtcttttatcttctctgtgctggacaaagagctttgggcacttgttttggcatggttg

SEQ ID NO: 18988 - DNA, 342 bp, Gossypium hirsutum
  Clone ID: LIB3146-011-Q1-K1-A5
gccaatcaaccgtggaggctaatcatttgcttctggctgcacgctggtgttattcatcttcttgcaaacatgttgagcttgatcttcattggaattcgccttgaacaacaatttggattcagtacgttatctgttcccttttgcagtggtagcgtactatcgtctcttttcattcaacgtagcatttctgttggtgcctctggtgctttatttggccttcttggagcaatgttgtcagagctgctgactaattggactatctatacaaataaggctgcagctctgatcacactcacggtcatcattgtcattaacttagcagtgaggattcttgctcacgtc

SEQ ID NO: 18989 - DNA, 276 bp, Gossypium hirsutum
  Clone ID: LIB3146-011-Q1-K1-A6
tttggggtttttcttttgagtagggaataagccatgaggcttatacaaataatgagatttatgtagtttataacagtgcattagtgcttagtttttaaagaaaaatggtgtgttttagtagtagaactcttggtggtatgccacctgaccatgaagggaatccatgccctttttaggtacccttcttggaatgttgtggataagtgatggcaagtttggctttaaataaaggggaattttattaaaaaaaaaaaaaacacacaagctatttttttt

SEQ ID NO: 18990 - DNA, 345 bp, Gossypium hirsutum
  Clone ID: LIB3146-011-Q1-K1-A7
cccacgcgttcggagatcgagaaacatatcagataaaagcgaaatgagaaaaactccttcactggtagacctttgtgttagaacagtgatagataatgtaaggtaccttggagatgttggtgagacagattcacatcttcttgaacgtattctaccgcattgtacagtcgatcaattattgcatgtggaaacaagtacaaagggaagggatctctgttcagtaactgataaactatggaagaatttctatgagctgcagtttggccgtgagagtatgaaaatagtaattgagaggatgaagctaaagaaagtaatcgttagatggagacagttgtatgaggcaaa

SEQ ID NO: 18991 - DNA, 452 bp, Gossypium hirsutum
  Clone ID: LIB3146-011-Q1-K1-A8
attcccttaggctttcatctagcatgctgccgccgacaataggagtatttgagtcatgaaatcaatttgcagccccaagatccctcctctgacttcgatttcaacgaagcaaagaagaatccatggcgaatttgcaaagctcggttgtacggagaagcgaggagacgtgcgaaggaggccgtgcgaagagccactcgtgtgagccctaactctctggcctattctggcacgttcctgaagcttctagtgctgctgagataattttaggtgtattgggcctcgggttttagggcttattgggtcatggtttattttagtaattgggctaaggtattggacttttattgtattggtttttttcattttagctttgggttttggaattggactttggccctattaacaatttatttttggttgggtttattaatatatatatttttatttttttt

SEQ ID NO: 18992 - DNA, 256 bp, Gossypium hirsutum
  Clone ID: LIB3146-011-Q1-K1-A9
gaccgccgcactgtcatggcggcggacgctgtcgccggacactccgatgatccattctggtacctctctcaccaccaagaaatcgtacgtgcaacaaatggtgacgtgcagtgccagtggaagtactcaggcggtgaatttggcttcggggacttccgtccgaccgactagcatattagtggttggttccaccggaactcttggaagacaaatcgtgagacgtgcactcgatgaatgttacgatgttaggtgcctt

SEQ ID NO: 18993 - DNA, 280 bp, Gossypium hirsutum
  Clone ID: LIB3146-011-Q1-K1-B1
tcggcaagccttccgcaaggcgtccgtttagatcgcgagcgggccgcccttttttttttttttgggtttttttttttttttttttttttaaaaaataaaatggactttttttatccttccccataaatgaaaagcttattaataagaggaagggtaatccttacatttcgtttcgaaaaacttgtaccaacatcaaactttaagctgattaaaactgataaatttagactaagaaagtggtctttgatgggcagagtgaatagagagaaggaggaaaaga

SEQ ID NO: 18994 - DNA, 470 bp, Gossypium hirsutum
  unsure (1)..(470): unsure at all n locations; Clone ID: LIB3146-011-Q1-K1-B10
taccgagcgaatcccggtgcgacgcacgcgtacgcttggaatccttatgagtaggcctcgtactgtttgccaaaattccccatagcccgcagcaaaatcccatgcactgttcatttgtccctttgctgaatacccagatttggaagacgtggatgctatcttcttcgtcctggctacatctcaaacaacgaacctcttctcgattttagattagagaaagtggatatgtaattccacgttattctccatactgtaattttaatttttaagggcaactgtagtttccataatttcttgtaaagattttttgtatcagtctgtaaataagcattaggctctaatgttgactcctgtgnaaaatatttttattttttttcttttaaaaaaaataatattttatttttattattaatggtttttttaaatataaaaataaaaaatttttttttttttttaattttaatattttt

SEQ ID NO: 18995 - DNA, 295 bp, Gossypium hirsutum
  Clone ID: LIB3146-011-Q1-K1-B11
cgaggattccagggggtggttccagaagctatccgagctcaggatcatcagttattctgccattggatcaccaagacaggttccaaaaagtcgaagtcatggtatgcggcggcgcggcctcgggagcttacgaagcggcagccagagggagattcctacctgcattgagctcctgtgggagaatggtgattacagggaacaatctcatatggaaaatggaaaacatgccaggacctcgtaccatgcatgacatgttgatccttcctacaggtcatatactaatcatcaatggcgc

SEQ ID NO: 18996 - DNA, 334 bp, Gossypium hirsutum
  Clone ID: LIB3146-011-Q1-K1-B12
gtgaattaccagaacctgatgcccaccccctacaccctcgacgtggatttgaaagacgtggtcaacgccgatgctcttcagaccaaggacaagaaagtggcggcttgtaaggccactaaagagaggtttcaagagaggttcaagacggggaagaacaggtggttctttactaaacttaggttttgaatggttcattctaatggtgttaaagctttttatgtagtttctttaacattttggatttgaattttgagtctgttgtgcaatgagatattttctgggtttcttattgatttttctcgtttctgttacaaattcatataattatctgagt

SEQ ID NO: 18997 - DNA, 302 bp, Gossypium hirsutum
  Clone ID: LIB3146-011-Q1-K1-B2
cttcgggtgggggtcatggcaattcaatatccggcttacatttattatgggcacagcaattggatggttactagtaaaaattacaaaagctcctcaacatctaagaggtcttattctgagttgctgtgcagcaggaaacgtgggacacttgcccttaattgtcgttccagcaatctgtagggagaaaggcagtccctttggagctcctgacatttgccatacgtatggaacggcttatgcttcactttccatggcgattggagccatttacttgtggtcagtcgtgtacaacgttgtccgag

SEQ ID NO: 18998 - DNA, 324 bp, Gossypium hirsutum
  Clone ID: LIB3146-011-Q1-K1-B3
cccttggccgaccccttggaattgctttgaaggaaataattaaaaccgagtccttgaggaatgagtggtggtattggtcatcgctatctgcagctgcaaaaatttccactgtgtcttctcttgctctacgtgtatactcacttgatgctgctattgtttatgaaaagtcatgcgactttaattcaattgacaatttgaagcccagcagcatgccaggcccaaaactgccctccaacttggatctgccggagaagtgcaaggtgagtcggaggactatcaagaaaagggaggaaccagaaaggctgatctttgtgaaatttcaaa

SEQ ID NO: 18999 - DNA, 400 bp, Gossypium hirsutum
  unsure (1)..(400): unsure at all n locations; Clone ID: LIB3146-011-Q1-K1-B4
gaagcacctaaccaatcaaaaagctgttgatatagttcagaatcattcacgaagtggaattgcaaggaggctggtgaaaactgctctacaagaagcagcaaagaaaagagaaatgaggtattctgacttgaagaaaattgaccgtggtgtccgtcgccatttccatgacgacatcaccgtaattgtggtgtttcttaactcaaacctcgtgagcaaggcctcctctgttaagggtcctaatctatctgttcgagggggaggagttaccttacctcctcgtactctggctccttgtgccatgccagtctaatctggcagtacctgatcatatgccgtattgcatgtttttcatgttgtatcattttcttatgtgaataccaggtagcttncaaaagcgatg

SEQ ID NO: 19000 - DNA, 329 bp, Gossypium hirsutum
  Clone ID: LIB3146-011-Q1-K1-B5
gagaccattcttttgccgcaacagggtccgtgggctcttctcctttgtctcattcacttggaagtgaattgcacagggctgaaaccgtgaccagcgatgttgctcttattaacaattgggaggctttctatatttctaaagacttcatcttgaatcaatcccatataggggggaacacaattgctgatgaaaagtttatgtctgttctggtcaagattatgcctaaacttaagcaactacatggcaaactcttagattgagtttcaatacatttgctcggtaatctctacatttgatatgcactttaagtcccacacattaccatattc

SEQ ID NO: 19001 - DNA, 307 bp, Gossypium hirsutum
  Clone ID: LIB3146-011-Q1-K1-B6
gattctcaggaaccagccgcccccttttgtttggggtttctaaataaaagatcggggggtgtgcatgttaagaaatgacctgatatgattaaaaaagacgaaaacgctccgaccccctttgaaaatcgagatacgcttgccatttctatgctacaaacggatcacaatggatcgagctattacatactgtaaatccatatcccttctacctagtacatatctgctattaacagctgccttattgggcaaaacatattgttgaccctatcaggaaacgcgtgggtgtatgtctgctatctagtctctc

SEQ ID NO: 19002 - DNA, 384 bp, Gossypium hirsutum
  Clone ID: LIB3146-011-Q1-K1-B7
acgcccacgcgttcgacaccagaccagcagaggttaatttttgctgggaaacaactcgaagatggcagaacccttgcagactataacattcaaaaggaatctaccctccatttggtgttgcgtcttcgaggcggtatgcaagtttttgtgaagaccctcacaggaaagactattaccttggaagttgagagttctgatacgattgacaatgtgaaagctaagatccaggacacggaaggtattacaccggatcaacagatgctgattattgctggcaagcagctggaggatgggaggaccctcgctgattataatattcagaaagagtcaaccctgcacttggtgcttctgctgcgaggtggaatgcatatatttgaaaaactt

SEQ ID NO: 19003 - DNA, 297 bp, Gossypium hirsutum
  Clone ID: LIB3146-011-Q1-K1-B8
cccacgcgttcgatcttaacaaagtggtggatggttgtgttgctcgcattgctgctaagcttgaaatcatggaaccctgttctagtgtcaaagacaggattggttatagcatgatcttagatgctgagaaaaaggatcttattacccctggaaagagtgtcctcatcgaacctacaagcggaaacactgggatagggttagcgtttatggctgccgcaaagcaatacaggcttatcattacgatgcctgcttcgatgagtctcgaaagaaggatcattctccgagcatttggagctg

SEQ ID NO: 19004 - DNA, 299 bp, Gossypium hirsutum
  Clone ID: LIB3146-011-Q1-K1-B9
acgcccacgcgttcggcagctggcacgctctcatcattttactacgggaccgtcagtcttgccaaacaccttctgtccgagaaaaaaaaagctcaagagagaagaccatggccgaacaacttaccggcgagcagaaatctgggttttaagaggggtttgtgccctttgtcccagggatggaggggggtgttttactaatgaactggggactgggatgcggtcacttggtcagaaccctactgaggcagaacgtcaagatatgagcaaagaagatgatgctgctggaaatgggaccattg

SEQ ID NO: 19005 - DNA, 304 bp, Gossypium hirsutum
  Clone ID: LIB3146-011-Q1-K1-C1
agaacacatttatccaggatgggaaggacatggcatcagtgctttatacttatcacagctttgtcaaagcacttcctcagggggtatgttggaattcacagtttgggattcagaaacttgctgctaaaaccggagctgcttcgatctattgtggattctggttttgaacatccttcctaaggcaaagttttaaactcatgtctgatgttaacattcgtgaattccatgaattaagtcattttgtttttcttgcttttagtgacttataatggtgggcagtatacaagtttggtgcttaataatt

SEQ ID NO: 19006 - DNA, 244 bp, Gossypium hirsutum
  Clone ID: LIB3146-011-Q1-K1-C10
cccagaccttctagagcgctcgacaatttatgattagatatcgatacgattctattgcattcaggccaacaaagcacaataaagggacgtaatctaaacgattgttaaaactatccgagttaatgcttgctctgagccgttagaggtctggtataatccgacatggtaaatatatataaaacatctgatagacagtgctgtgtgatttaaatgaggtgtgatgaggcctgaattggtgatgaaa

SEQ ID NO: 19007 - DNA, 359 bp, Gossypium hirsutum
  Clone ID: LIB3146-011-Q1-K1-C12
gggaatagcagctcctggacggttgattttaatcctgttcttttatttcctaacctgattaagcatgttcagtattcactaagctcaagcaggggcagctcatttcctagccatgccctgagaaatgtgtctgaaaatcaagttgtgattgagtctgatctcgctgtgctggctaatgttttcgtcacggtggatcaagcttaagcaccatgacctgacttattattattattattattattatcatcatcagcagcagcagcatcattatcagcatcatcatctgatggagagttaagatcctttgacaattgtgaatatggggtgaaagactagtattggcttttttctctgaaagt

SEQ ID NO: 19008 - DNA, 406 bp, Gossypium hirsutum
  unsure (1)..(406): unsure at all n locations; Clone ID: LIB3146-011-Q1-K1-C2
cgtccaaaaaaagtgcgtcgtgagtccaaggctaaaaagatcactgaatatgattatgtcaatgccatgaaggaggaaattagcaaagttgtcaggctccaggaagagcttggcattgatgttttggtgcatggtgaaccagagagaaatgacatggtcgagtactttggtgagcaattatccggttttgccttcactgtgaatggttgggttcagtcatatggatcccgttgtgtcaagcctcctattatttatggtgatgtgagccgccccagagccatgactgtcttttggtcttcaacagcccagagtatgactagacgacctatgaaaggaatgcttactggcccagntacgattctgaactgggtccttgtgagaaacgaccagatangcatgaacatgc

SEQ ID NO: 19009 - DNA, 410 bp, Gossypium hirsutum
  Clone ID: LIB3146-011-Q1-K1-C3
agccttcgggaaggggatttaccattgaccgaccgctgacaacggttcaccggcgttgattcgggcgtcgaccacggcatgattcaaagcctggaatcatggcctggaatcacggcattgatagtgggtaactggaacgatgcgagacgaacaaacgcgttgattgaagtgtttgcggcgcctaaagtttgtgaaaccctaggtcttccgtccttggcttacgatttgggccacttgggcttctctgagttgggtcaagggtgtaatgggttagtgggtttaggtataactgggtgtgggcttattgggttgtaaccgggcatagggtcttaggctaaatgggtcttgtatcatcaggcctataggcccatttgtaaactggacatttcaacatcgagatttaattattt

SEQ ID NO: 19010 - DNA, 365 bp, Gossypium hirsutum
  Clone ID: LIB3146-011-Q1-K1-C4
gggttccggaattccaccactaccattggtgatggcggaagcggtttggatttgtgggactccatggtacaggttcaaaacgcctcaggggagccctttaactatcgtgtggagggttctattattggcattgaagaagaaaaaacagccttatccttcccaccccagcctcttgaacgattacgacaaccgaaaggttccctacacgccaagattcaagtttctggacaaggctgcaatgctagacgacaactgtgctgtcaacgcagaaaaaaaataacccatggctagtatcaactgtgacccatgtggaagaagtaaaaatggtgataaaattactccccatatggtctacgtgcatactc

SEQ ID NO: 19011 - DNA, 301 bp, Gossypium hirsutum
  Clone ID: LIB3146-011-Q1-K1-C5
ttcagtcttctagctctcaattcctttttctttttgaccttctaatttcatagatccagggtgctcttcttcttagttcacattgacatagataaaggactgtacggtcagatctaaaccgcattctagcaatgtcgtttaccggtactcagcagaaatgcaaggcttgtgagaagaccagttatccggtcgaacttttgtcggctgatgggatcccttaccataagtcttgcttcaaatgcagtcattgcaaagggacactaaaagtgggtaattactcctcgatggaaggtgtcgttta

SEQ ID NO: 19012 - DNA, 254 bp, Gossypium hirsutum
  Clone ID: LIB3146-011-Q1-K1-C6
gcctttaaccctggcctgcctgctactgctaaatttcaatcccccttctttctgtttcgggcagcaatggcatgtcaaagaaggttgtttcctatttttctgactctgacgctgcttattgcttagctgctaacaagcctttgctgctagttcctcttcagtcggattttttgtcgttttaatggagtcaacaagattggccatgttctttcttttctttctgtacagacatgtggatgaacaagtttagtttc

SEQ ID NO: 19013 - DNA, 395 bp, Gossypium hirsutum
  Clone ID: LIB3146-011-Q1-K1-C7
cccacgcgtccgggacggcggtgcttcctataacccacgtacagtcgaagaagtctttcgagatttcaagggtcgtcgagctgccatgattaaagccctcaccactgatgtggaagagttctacaagcagtgcgatccagaaaaggagaatctttgcctttatggatatcccagtgagcagtgggaggtgaatttacctgctgaagaggtgcctccagagcttccggagcctgcactgggtattaactttgccagagatgggatgcaagaaaaggactggttgtctttggttgctgtacacagtgacgcgtggttacttgctgcggctttctattttggtgctaggtttggattcgataaagctgataggaaacgccctttcaaatatgataatg

SEQ ID NO: 19014 - DNA, 280 bp, Gossypium hirsutum
  Clone ID: LIB3146-011-Q1-K1-C8
acgcccacgcgttcgaccatatatgggtaatatttggaatgtcctatctatgcgcctccaaaacaaccgtacagttaagtttcagaagtctctggtgattttcatgtcactcttcttaatcaagcatggggctacaaatctagtggacacaatgaatgcagttcaggacaacattttcttggttattttggagcagttctggattcccaatcttaagctgattactggagccattgagcttaagttaacggcagttgcttcaaccagactcatatgtgaa

SEQ ID NO: 19015 - DNA, 244 bp, Gossypium hirsutum
  Clone ID: LIB3146-011-Q1-K1-C9
cggacgcgtgggtggaattggtggtgggcatggtggtggagtcggcggaggaattggaaaaggtggtggatttggcggcggtgccggaggtggatatggcaagggtggtggttttggaggtggagtaggtggtggagctggaggtggaaagggcggaggttatggaggtggttggggtggtggaaatggacaccattgatattcaatgctaacgatgcaagcatgcttggttcaacattcaata

SEQ ID NO: 19016 - DNA, 339 bp, Gossypium hirsutum
  Clone ID: LIB3146-011-Q1-K1-D1
tttttccgcctttcggcctcactactcacccctcaatccccaatctcatctctctcctttgttttcccttttgtctctctctctctttttccaaccctaaccctacctcaccaaccaggattcaacatgaagggaggaaaatccaagtcagatactaagagtgccaagctatccgtgaaatccaaagctggaaagaaatcggggaaggctgccaaggatccaaacaagccaaagaggcctgctagtgccttctttgttttcatggaagagttccgtgagcaatacaagaaggatcaccctaaaaacaaatccgttgcggctgtcggcaaaagctgtgga

SEQ ID NO: 19017 - DNA, 361 bp, Gossypium hirsutum
  Clone ID: LIB3146-011-Q1-K1-D10
taccgatgccgaatctgctccggtgcgacccacgcgtacgcccacgcgttctacagcgcgtgcgcaggatgttgtaacctcaagacgtttcctgtgatcccaagacactttcctattttagaattaagtgattcaaatatagaagaagtgcctgattcaattgagcatctggtcagacttataaagttgtgcttgaaaaactccaaggtctatattgtatcaagcaatcttgcaaagttggaatcacttcatgatctggaccttagtcattgcccaatagccggatttccaaaaatcccaagaagcttgacagaattaaacttatctgaaactcaaattgaaaatgtgtgcttgtgtagct

SEQ ID NO: 19018 - DNA, 333 bp, Gossypium hirsutum
  Clone ID: LIB3146-011-Q1-K1-D11
ctttgcttcagttgctcccccaattattttcaagggcaaatcccttgcaggtattttgcctgcgattgatctcattggccacaatgctttggtggggatattctacttcattggttttggatttttctgcattgaatcattgctcagtgtctgggttattcagcaagtttacatgtatttcagaggtagcggtaaagctgacgagatgaagcgtgaggcggcaagaagaaccgtggctgcagcactctgataatgataaggaggccgtagcagaagatggtatttgcttgtattggacttagatcatgtcggataagataccatgtactcaaa

SEQ ID NO: 19019 - DNA, 299 bp, Gossypium hirsutum
  Clone ID: LIB3146-011-Q1-K1-D12
acgcgcagttcaagctgatcccgcggaagaggtacgtattatatgcatcgtaaacgcacgtgccaggtttaatcctccattaccttcggggtactatgggaatgcattcgcgttcccagtggcagaagcacaagcagggaaactttgtcaaaacccattagggtattcattagagctagtgaaacaagcaaagaatgatgtaacacaagactacatgaaatcattagcagatttaacggtgattaagggtcgaccacatttcacgggtattcgatcttacctggtgtttgatgtgacac

SEQ ID NO: 19020 - DNA, 412 bp, Gossypium hirsutum
  Clone ID: LIB3146-011-Q1-K1-D2
agccttcggttcagtcccttttttcatggtttttatgccaattcaaagggtttttcttcttcttttgaaatgtttgaaaaaacccaccgtttatttccctttccctctccttgttatttgattatgacattgaaccttgtttttttggcttgagatttccccataaatacctccctttccctttctccccatccatccttattcaccaaatgctatatttctaaccttttagtataagggttcgaagatgaagaagaagatgacggtgatgatgatcatcatcatcatcccaaagcattgcactctccatccatttttttttcattcaaaacataataccatgacatgctaccatgcatatttgttacatcatcatcaacatgacatccatgtatgtatgtgcctggcttcc

SEQ ID NO: 19021 - DNA, 367 bp, Gossypium hirsutum
  unsure (1)..(367): unsure at all n locations; Clone ID: LIB3146-011-Q1-K1-D3
aaaccagggggttacccaattgaagttccagcgcagcaggcggtctgttgcagaggagcgagctggtcgaaaattaggaggtctcagagttgttaactcatactggatcaacgaggattctacttacaagtactttgaggttatccttgttgatgttgcacacaatgcgatccgcaacgacccgagaattaactggatctgcaatcccgttcacaagcacagggaacttcgaggactcacatctgcaggtaagaaaaacaggggtctgcatggaaagggtcacttgcaccacaggaatcggccgtctcgaagggctacctggaagagaaacaacaccctttcccttcgtcgntannncgtgagttag

SEQ ID NO: 19022 - DNA, 317 bp, Gossypium hirsutum
  Clone ID: LIB3146-011-Q1-K1-D4
caccggacaccaccacaaactcatttaaaccagccccccccaaatctttttgctcagttccctccaaccccaacatggcatttgcatcccaggcactgatatcaacgaacagctgtgccttcacttccccaaacttgttgtttttgaagaaatgttccaaaattaacaacaagaccaggcaattccatttcttcactgttagagcatcttctgatgaatccgatgactgtaatgaagaggaatgtgcacccgataaagaggttgggaaggtgagtgtggaatggttagccggcgataagacaaaaagggttgggaca

SEQ ID NO: 19023 - DNA, 372 bp, Gossypium hirsutum
  Clone ID: LIB3146-011-Q1-K1-D5
gtcttataaccaacctgaattttggagttgaaaagaataattggccacccttattaccaatcccatgaaactaaaaataatgtgactggtgtcccaattgccactaaaagtccatatataataaaatcacaccaggtatcttgcatcttatttttcagaaagatcaaacacttacctccgtcattggcatcacaatacggaccgcactaacgatagattgcaaaaattccacgatattatcaaccgtggccggcactgagcagtccttttttatcatttatggctccccaatcacttgaactgtccactttgaatgatgccattctcattcaagtattccacgaattcatctattagatagggccatgcacc

SEQ ID NO: 19024 - DNA, 308 bp, Gossypium hirsutum
  Clone ID: LIB3146-011-Q1-K1-D6
cttggggaagggggcttcggacccggcttttaagggtaacttggccaagatggtccgggtcggccttaattttttgcttgtcgttggtcaaggccctcaccagggaggcccttcagggtcaccgtgaatggcttactgaggtcaacttcctcggccagctcaggcatcccaatctggtaaagctgatcggttattgttgtgaggatgatcacaggctacttgcatacgaattcatgttacgtggtagtcttgagaaccacctatttcgaaaggcaactgtacctatatcctgagcgaaaaagatgatg

SEQ ID NO: 19025 - DNA, 292 bp, Gossypium hirsutum
  Clone ID: LIB3146-011-Q1-K1-D7
ctattataatgctagctgattctatgaaggctccaaccgtacgagcacgaacctgcggaaggtctactaaggtatatattgacttaccactaataaatttaaaaaggcaacacaactatttgagtgttaaatctcaaccttcacaactcacaagctttttccttatcatacatttatattcaattcccggcttaccaacatcatatggaccgatcgagcttcccaacaacaaaacgtcctaaatgctcatgagatctcgactttcatcagaaaaatacccactctttcagaa

SEQ ID NO: 19026 - DNA, 371 bp, Gossypium hirsutum
  Clone ID: LIB3146-011-Q1-K1-D8
cccacgcgtccgcggacgcgtgggttttcttttgatgaatatgttagatggagatttaattggtttttagacttgtaatatattagattcaagataatttctttcaaagttgccaattcatgataatattttgttgacataataataaatagggaaatatttgtagtttatgatttatgactgttttttggaccaaaagatgcttaggaatagcttttgttttgttttcaggaaagagttgttgatctcacggcaaagcctactcagtttgcagctcgacctaatctttctccttatgcacccccagtgattcctatggactatgatgatggtattccatacagaggtattagtggggtgacaggagaact

SEQ ID NO: 19027 - DNA, 350 bp, Gossypium hirsutum
  Clone ID: LIB3146-011-Q1-K1-D9
aaactgttcggtgatgacttcttttcagcttttgctagttactggcgtaaagaaaacctcaaatgctgagagcaacaaggggattctcctagaggtttcttgcatgccggctgatattcctatcgacatgcttaatgatgatgacatctcagaggaagaatgcatagatctgcaacagaggataaaagatggtattatcaaaagacctactgctgtggagctcgaagagaaagccaaaagtctgcatgaagatataacaaagcattggattcagcgagaattagttcaattgcagggtaaaattgattttgcgcatgagaaaggacggaaatacatgttggaacgatttc

SEQ ID NO: 19028 - DNA, 269 bp, Gossypium hirsutum
  Clone ID: LIB3146-011-Q1-K1-E1
gagagtttggcgagcgtggaggccgaaacgtgcggcgatcgggcgttgggcgcggcgtgggtgctgttgcggcgctgaggcagatgcggctagggttttgtttttgtgttttgctgtgttgatctttgggtttgggctgctttgttgggcttgtaaaatgtaggcctgttcattttttgttttggcttattacgtgggcccaggccgattgggccttattacataaccattttaataaaaacaattctatgccgaccaatattaggatt

SEQ ID NO: 19029 - DNA, 309 bp, Gossypium hirsutum
  Clone ID: LIB3146-011-Q1-K1-E10
aaaagagtactgagctccttatcaggaaattgcctttccagaggctcgttcgcgaaatcgcccaggacttcaagactgatttgcgtctccagagccatgctgctctagctctccaggaagctgtataggcatacctcagtgggtctctctgaagacaccaacctttgtgcgatccacgccaagcgtgtaacaattatgcccaatgacatccagttggctcgtacgatcagaggagagcgagcataatctccatgtgtgtggatcagacccttagaaagacgcacctattgattattctcacgctaatgt

SEQ ID NO: 19030 - DNA, 351 bp, Gossypium hirsutum
  Clone ID: LIB3146-011-Q1-K1-E11
tctagatcgcgagcggccccctttctttatcggactctttgtgctatccaaatccgaatttgtatccaaatttattatcaacaaaagttctttgattcatatcagtaagtaatgttctttgcaaggctaaaacaacaacaacatgatgaacatgaagacaaggattctattgcatccccatggaaatatttacaggtactcaaagaaactacgcagaaagtacagatattttacactatgcttattcccattataaaggccaacaagatttgattctatcactgaagtaatggaactcacatcttgacaaccagtttgtctgaatcactggcgtcagatagtgtacccttg

SEQ ID NO: 19031 - DNA, 255 bp, Gossypium hirsutum
  Clone ID: LIB3146-011-Q1-K1-E12
cttcacccgtatagatgtgacccccgagcttgaaactcttcgacaaggtatggagtacggcatcaaggagtatgtcttgaaaactaacatgaaactaaatgatgaatttaagctggcaaagaaagcccttaataacaccgtgggagttataatgcgagcattaatttttgagctttaaatttgcattgccaagcccaatcttatagaggaaattttgtccaggatttgcaccctttacggggacttaccatttgg

SEQ ID NO: 19032 - DNA, 331 bp, Gossypium hirsutum
  Clone ID: LIB3146-011-Q1-K1-E2
agccttcggccaacccgtccggtttctcctcttcctttgaacgccggcctctcaaactccaaccaaggaagcaccaagcatttatttgagtttcttcctctggtttcatcatcgatccatttttttttcgctttataatggcaactaggctacagtttgaaaattcatgtgaagttggagtgttttccaagctgaccaatgcttattgcttggttgcaattggagggtctgaaaacttctacagtgcttttgagtctgagttagcggatgtcattcctgtcattaagacctctcttggcggcactagaataataggacggctctgtgctgg

SEQ ID NO: 19033 - DNA, 362 bp, Gossypium hirsutum
  unsure (1)..(362): unsure at all n locations; Clone ID: LIB3146-011-Q1-K1-E3
ataagggttttcttgccatcggccagttgaataaaaatttcatgctcaactagtaacggataatacaaactgcccttgcaaagatcaaaaaacaaaagtcaattcatctggtggtgtcagtggagctagtttttggaatttctgacatgtgcagttctaaaaccatgttttagtggacaatctttttgatttacttgttcaggctggctgagcttcattgttactaaaatttgttattaagattttgctgactagtattctaagaacattctttaaggtgattatatatgattagaatattttcactaannaaaaaaaaannttntnnaaaaaaccaacaaaaaaaaaaaaaaaannaaaat

SEQ ID NO: 19034 - DNA, 329 bp, Gossypium hirsutum
  Clone ID: LIB3146-011-Q1-K1-E4
taaggccgaggcagccttaaggaaactagagatgaagctggaaaagaagagatcgtcatcaatggataaaataatgaataaactaagatcagctcagaagagagcccaagatatgagaagtttgatgctggccaaccaggcccaccaggttacaaagacctcgcatatggctatatctttcagaagaacccgccagatgagttcattgagtggttgcttcacctgccaagctttctaatgcatttgcttatctatctgttactggttgaatcaggcctgaaatgcaggtttgaagaacagagacctctggagacgatgaatattgcaca

SEQ ID NO: 19035 - DNA, 357 bp, Gossypium hirsutum
  Clone ID: LIB3146-011-Q1-K1-E5
ccgttaaatatgaaccttttgaggctttgttcaaggaaccatttgacaaattggttgaacaagggaagattacacccttgaaggaagttatgcctccacacatcccataagatctcaacagtgcaattgtgagcgggaaagttcgtgctccaactcacattattgcaaccatctgtgatgactggcttgaggaaccatgctatgctgatgtgctcatgtcttacattgtacgagcgaggttatggtgtagatgatgtcatttatctattgagggtcaaacgtagccttaccagatactgtactcatcttatcgagatatgcatcatgctctgttcctaccatggtacatgtgtctct

SEQ ID NO: 19036 - DNA, 280 bp, Gossypium hirsutum
  Clone ID: LIB3146-011-Q1-K1-E6
tccaattactcgggccgtgtggcgccctgggttgggggttccccagactctgctcaatactccctacttcctctcacctcaagacgagttgtcctcagtctccccattttgttcatatagaacggtcgcaatctagtacccaatcagcagataagaccgttcaggctgtgaaaatggacgggaatagcagcattgttccaagcatcgacgcctatgttactgctcctaacagagaagcaggtaggaagttggctggaagcatcgtgaaagagaaacttgc

SEQ ID NO: 19037 - DNA, 394 bp, Gossypium hirsutum
  Clone ID: LIB3146-011-Q1-K1-E7
gggggacgcacgcggccggagagattcactagcgtggaggccgaaactttttgcgatcgggctttgggcgctgcgtgtagcctgttgctgcgctgaagcaaatgccgctagggttttgtttttgtgatttgctgtgatgatctttgtgtttgggctgctttattgggctcgtaaaatagaggcctgtacattttttgatttggcttattacgtgggcctcaggccgattttgtcttattacataaccattttaataaaaacaatactatgtctgccaatattaggatttttaaaaatttaggaacattttctatccctttaaataaatgaggaatatttttctttttgttgaaaataataaatcacaatttttcctattatattttttcatctt

SEQ ID NO: 19038 - DNA, 310 bp, Gossypium hirsutum
  Clone ID: LIB3146-011-Q1-K1-E8
acgcaaggactctaagaaagatgcactaaggattgattccatccctaaaacctcactagatggcattaaggaatggctcgatacaacacacatcacgtattacgagagcaagctgaatctgtactggcggaagattctgaagacaatcactgatgatccacagagcttcatactgaatgggcgctgacaattccagaacttggaagctagagatacatattctgagcagaccgaggaatcatatcaaggttatgagccatctgatgtggagcctgaatctgagtcagaggatgatgattcctatcgtgag

SEQ ID NO: 19039 - DNA, 228 bp, Gossypium hirsutum
  Clone ID: LIB3146-011-Q1-K1-E9
acgcaacactactataaagcggacgtccacatacatggctagttccggtgtccttaactaggtttgcatgatgctaatggagtgcatgaccatgatgagtgcacacaaggcagcctaagtcgacatcacatgcatgcacgtcatgaactatctcgaatccgagcttgcactacctacaaacacggcggtacacccgctgctgcatgctgcagtggtgtaaaagcacta

SEQ ID NO: 19040 - DNA, 273 bp, Gossypium hirsutum
  Clone ID: LIB3146-011-Q1-K1-F1
acgcgtgcgcggacgcttgggtcggtgcaaagctgcgagggaagaagtgaggagggtcttatcgttaatcaaacagaagttgaatatggggtccagttcttgagtcctaaaaaatggtgatgtaaataaatgcactctacagttactatggctcgcatgtaataacagcgtcttcgatgttatctgaagactatgactatgactgatgaaatgaagtgtgttcttgactgttgcaaggcgaaaaaattaattatttaaaaaatctatttcatc

SEQ ID NO: 19041 - DNA, 313 bp, Gossypium hirsutum
  Clone ID: LIB3146-011-Q1-K1-F10
atttcatatcttaacagcggcatccagggtttaggaattttgaatatgagctctacgggtggatcaacgaaaggagggagagggaaaccgaatgcatcaaagtcggtttcgaggtcgcacaatgccggtcttcaatttcctgtcgggaggatcgccaggttcttgaaagctggaaaatatgccgagcgtgtaggtgccggagctaccgtctatctctctgccgagcttgagtaccttgctgctgaggttctagaacttgctgggaatgcatcgagagacaacaatcagacccgaattgttccaagacacattc

SEQ ID NO: 19042 - DNA, 249 bp, Gossypium hirsutum
  Clone ID: LIB3146-011-Q1-K1-F12
gcactttctcctatcaccggcaacgaagctcattattcgatcataaaacatggccaattcattcatttggatgacttgtgcagagctcatatctttctattcgagaatccagaagcggaaggtcgctacatttgcgcctctcaccatgctaccattatcgatcttgcgaaaatgctcagtgaaaaataccctgcatataatcgctccaccaagttcaaagatgtggatgagaacctgaagagtgtggag

SEQ ID NO: 19043 - DNA, 390 bp, Gossypium hirsutum
  Clone ID: LIB3146-011-Q1-K1-F2
agccttccgcggccccttggccggccccgtgggttctggaccaacggtattaatcattgtaaattctgtgtttcaaagtatatgaaataaacaaactggtaaccctttggatccaactcggctttgttgcaaaaaatcaatctgtcatggcaaccatctcggctaccaccacccctgcagctcttgttcacaagacattgcccaggattgcatccccagtccccattgggtcgccaacaatgggaaagagggggaaggtgatgatgatgtgtagcatggagaagaagagtgagaatgggtcaaacatggggatgagtgcatcattgctggcagcagccttgtgcagaaccatgtaaacccagccatggctctggtggacgagagaatgtc

SEQ ID NO: 19044 - DNA, 310 bp, Gossypium hirsutum
  Clone ID: LIB3146-011-Q1-K1-F3
gcaggatgtatcggcccaagccgagaccggccagttcgtgaacctaagggaagtattgggtgcgtttccgatgaacaacgtgactaggatgttactagggaggcaatatttcggggccgtatccgccggcccaagtgaagccatggagttcatgcacataacacatgaattgttttggctcttaggtgtgatctatttgggggattatttgcccatttggaggtgggtggatccttatggatgtgagaaaaggatgagggaagtggagaaaagagtggatgattttcataaaaggatcattgcagaacat

SEQ ID NO: 19045 - DNA, 273 bp, Gossypium hirsutum
  Clone ID: LIB3146-011-Q1-K1-F4
aggagaatatattggaagggcaatttgcaattaggggtcccagggattctgaatttgagggagggatttatcatggaaggatccaattgcctgctgagtatccattcaagcccccttcatttatgttgctgactccaaatgggcgttttgaaacccagacgaaaatttgcttaagtatatcgaatcaccacccggagcattggcagccatcttggagtgtgcggaccgctctagtggcactgatagctgtcatgcccaccaacccaaatggtg

SEQ ID NO: 19046 - DNA, 313 bp, Gossypium hirsutum
  Clone ID: LIB3146-011-Q1-K1-F5
aatggcaaacctgtctaatttggggactaagtcaacccaattttgaactgcacatggatgatcataaatcaatctttggttaaattacacaaggcccttggagagctaaagcaatcagcgcttttcctgcagatttggaggtgactgagtcttagtcctgagttgtggtggcactcaaattgaccaagaatcaatcagattgagccacatttcctcaattcatggtcggtcatccttggaagaagcttcaaaagatggaaactactatttttagcagactagctctcttgcctcacctattaatcagagctca

SEQ ID NO: 19047 - DNA, 355 bp, Gossypium hirsutum
  Clone ID: LIB3146-011-Q1-K1-F6
aacgattcgaaaccgcccaaaaccttgttgaggtccaccattccggagtggtgaagggcgcctcgacattggcaaaatcagtcttcaccgtggtcgagccaacagttgaaaaatgtgctgtttcgatttggcagacactgaacaaaatccctctctttccacaagtagcttcggtagttgttccgacagccgcctttttcaccgaaaagtataaccagacggtggcaaccggtgccgagaagggttacaaggttgcctcgattttgccagtggttcctacccagaagatcgccaaggtgttcagtgtaaggaaatctgattagtttacatgatgattatatgggaatatataata

SEQ ID NO: 19048 - DNA, 397 bp, Gossypium hirsutum
  Clone ID: LIB3146-011-Q1-K1-F7
acgctcacgcgttctagagaaaaaaaaattatatataaaaaaaaaaaaaaaaaaaaaaaaaaaaggaaaaaaaaaaaaaaaaaaaataaaaaaaaaaaaaaaaaaaaaaaaaaaaaaaaaaaaaaaaaaaaaaaaaaaaaaaatggggggggccttttttaagaattaaattttatgtaagcttgcttgcaaggtaaaactttttttttgggggaactaaaattaaattaactggccgtttttaaaaaaatggggattggaaaaaccttgtttttaccaaaataaattgttttgaaaaaaatcccttttttgcaaattgggaaaaaaaaaaaaaggccccaacaaaatgcttttcaaaaagttgccaaacttgaatgggaaatggaacccccttttt

SEQ ID NO: 19049 - DNA, 61 bp, Gossypium hirsutum
  Clone ID: LIB3146-011-Q1-K1-F8
accgcccacgcgtctcgactgcggtctaggtatcgcgagtcggacgtatctagagcgacct

SEQ ID NO: 19050 - DNA, 141 bp, Gossypium hirsutum
  Clone ID: LIB3146-011-Q1-K1-F9
acgcgtccgctagcaaccatgagatcatactgaatcttttctgattgatgcgtcatgccttattggggggggcacactttatatcataaaggaagtatggatcccttctctcaagtacatcattacgagtatagtactagg

SEQ ID NO: 19051 - DNA, 257 bp, Gossypium hirsutum
  Clone ID: LIB3146-011-Q1-K1-G10
gcctggggcaataacccacgcgttcgtccatcttacttcacattttacactctttttcaactttctcttcttctctaagcccaaagaggggctggagttttagccaaagaaaactccatggctaaacttgttgctactttcttcttggctctcatagccatctacatggttcaaactttggttatggcatcacatggacatggtggtcaccattatgataacaaacgttatggacctggaagtctcaagccttacca

SEQ ID NO: 19052 - DNA, 220 bp, Gossypium hirsutum
  Clone ID: LIB3146-011-Q1-K1-G11
acgctgaatacctgtatagcactggcgctctttagtatattgtgttaacccggcctgatgtggcatatgctgttaatagggtgtgccaatttatgcatgctcctactaatctacatatggtagcgttaaaacgcattcttaggtatttacgtggcactctttcttatggcttgcttttccggacatctgaacggctttcgctggtcggttatgccgatgc

SEQ ID NO: 19053 - DNA, 391 bp, Gossypium hirsutum
  unsure (1)..(391): unsure at all n locations; Clone ID: LIB3146-011-Q1-K1-G2
cttccgttgaaggctaaaccatggttgaaccttacggtcttattttacagaaagctcaaccattaaaaatcatcgcacattcagtctaaaaatattctgttgaatatttgttgaatgttggcaacaatgcagcagcaaggaaatattcagtgtgtaatttggttgttggaactttttgtaatatgtaaactaagtttagtttggttgtaattttgtttttactaaggttagtgagctacttagctgatttagtagctttttaggttattattaagttgattttacagcttggatacaagcacaagttacgtttgttttcttccaatgttatggagctatttatgcatattgtatngntactaaaactagtaatgagaattatcttttcacc

SEQ ID NO: 19054 - DNA, 354 bp, Gossypium hirsutum
  Clone ID: LIB3146-011-Q1-K1-G3
attcaaaaaggttaactggggaaggagttaatggaacttcaaaataagaaggttcatctgagacaaagtggtgggcttctattttctagggctgaaccgagacacaagcaagagatagtgagattgctaaaggaagatggagaggtggttgctatgactggtgatggagtaaatgatgcacctgccttgaaactagctgatattggaattgctatgggcattgctggaacggaggtagcaaaggaagcttctgacatggtgttggcagatgacaatttcagtacaattgtttctgccgttggtgaacgaagatccatttacgacaacatgaaaagctttatcaagtacatgatc

SEQ ID NO: 19055 - DNA, 348 bp, Gossypium hirsutum
  Clone ID: LIB3146-011-Q1-K1-G4
aacgagctgattctgggattcttcttatcaggtaaaaactctcttttttttagtgcctcctatgtaataacatgagcatcgacattctttggtttagggacaaaatgaaactcgatctcctggaatctgtcttttctgctttgtatatcccttacgatggctccaatgaccgatttatctgtaccagtattttggcatttcttgatgacagcttttgagtctcccactatttcgattgtatataatcccataaaaatccctaagttgactgcttgtaacctcgcatatgcttctgccatgaacgaaattgatattctcgagtgtatgactgcctgtgatgcaaggatc

SEQ ID NO: 19056 - DNA, 341 bp, Gossypium hirsutum
  Clone ID: LIB3146-011-Q1-K1-G5
ccgccaacgcgtccgcggactcttgggatttaggcgaggcctccccccaggtgatggtgttttgtactacccaggtgaggtgttctcgtcttcaaagaaacctgttgcttcccttagactagagcgcattctcagcggcttgcaagactctgaatacctgaagctttatgcctcaagatatgggaaagaagaagcacttacacttttagagaagacggttgtttatttaggtccagagcggtacacccatgaacatatggccattgatataatgcggggtgagattttcagcagttgcagatcatgttcctgaaatatctatgctaatgctctatttttga

SEQ ID NO: 19057 - DNA, 323 bp, Gossypium hirsutum
  Clone ID: LIB3146-011-Q1-K1-G7
acgcccacgcgttcgaccacgcgtgcgacctaaagcatctaccgagggaaagatagccttgcctaaagcaataaatgaagaattatctccaacccaactgcagccagcagtttctgctgctggttcagatgaaagtcagcgagacattgatcaagtggacttggttcaagagccgattgcactggagcattaagcatggcaatggtttcaagtggatgttcatatacaaagttcttgacctgaatttgcctaaataaggacgtctaagactgaattatctgatgatcaaagcataaaaaagattatacattaccggttatgat

SEQ ID NO: 19058 - DNA, 389 bp, Gossypium hirsutum
  Clone ID: LIB3146-011-Q1-K1-G8
acggtaaatcgctcattggagcgtatgtctagctttagtaaattgagaatacatgcaatgaatactgcagtgaatggttctgctagtgctaggaggagaagcaggaataggggattctttttcatttctattttaggtgcattgtgtgctgtcttatggttcttgataggaacagttagggtcctagggagatctatctcctcctgaatatatatatgtataagttggaagtgaagtgaagtgaaattattgcatggacaacatatatgcatagttttaatatctaactaattttgaatgtaaaggaagaaagtgatagctgaagtaaggaaatgaatgttgaaccccttttttcgtttggagaagacctttttcttaacttaatattt

SEQ ID NO: 19059 - DNA, 425 bp, Gossypium hirsutum
  Clone ID: LIB3146-011-Q1-K1-G9
cccacgcgttcgaccacgcgtgcgcccacgcgttcgtgccgtcataaaggaagttcgtgctgcagaagcctagttttctagtcgaaatcaggaattgattgtgtggtttgctggaggccacgtgttgttctcagatatggaatgcttttaaatcagttgcttgggaggagcagcagatgcaatgccggtcggttttaactttcttattgtagccttgttaagaacttaaattggtattcagctttatcttttgggaaaattttcccttttgaggacattgttttcactatgctagagttgcatgctatattttaagatctgttatagttaggagatagtaactacctatctgtttaattaagatagaagctcattatgatttactaattacaaaaatgatgatcacgggtttttgttttggatgt

SEQ ID NO: 19060 - DNA, 369 bp, Gossypium hirsutum
  unsure (1)..(369): unsure at all n locations; Clone ID: LIB3146-011-Q1-K1-H1
ggaaacaatgtcatcagaggctaaatccaaaatacagagcgagataaaagggctgttggagatggtaaacacaatggttgaatcatcatcatcttaggcaaaaaagtagtcacttttaggatgtatggatatgtagaagtgtatgttacgtcattgctgttacatacattgggttaggattttgtaagaaatacttaggtaagtagttcatagttaccatttgcatatgttgaaatcagcacatgctatatatatatatatggcataagctgcagtagttgaattctgttttcattggatacaaattctgttactattgagcatactggaatcagatttttcttttaaaanaaaaannnnntttttttt

SEQ ID NO: 19061 - DNA, 248 bp, Gossypium hirsutum
  Clone ID: LIB3146-011-Q1-K1-H10
ttctctaaacaactttttctttttgagttttttttatttcaatttctaccccattcacacaatatcacttctctatttcttacttttatactcctacttttttattttttccttttcaacccacactcaaaaaaaaaaatccatcccaaaatctccaaatttaaacaaattttttcacaaaaaaataaaaaatctcatacctactccttatccctaaaattaaaaaaaaattaaattaccctataata

SEQ ID NO: 19062 - DNA, 383 bp, Gossypium hirsutum
  Clone ID: LIB3146-011-Q1-K1-H11
caacagatccgttgatgaatttcaaagttgtttgttacaggaaatggctggtggaacagctccccctagaggaagtgcagcagcagccgcaagcatgcgtaggcggagaaccacaagtggtgcagcctcaggaggggctgctgggaccatgctataattttacacggctgatgcaccaggtctcaagatctcgccgaatgatgcgcttgacatgagcatcggtttcattgcttatgttgccgatctacatgttatgggcaagctgtattttgctcgtagagaggctacgaaggaatttgtcggccagaaaaagaaaatgtcaacaggatttatttaggagtcttgagtgccaagcaaaactgtttctttttaataataaaaac

SEQ ID NO: 19063 - DNA, 386 bp, Gossypium hirsutum
  unsure (1)..(386): unsure at all n locations; Clone ID: LIB3146-011-Q1-K1-H2
cacagttgtgcactctttggagatgagcagacagggattccggagaccgatgaggtgatcaggacatctttttcaagtctgaagaggttagttttggaagctgtcgcctttggttctttcctttgggacattgaagaatatgttgacacggtctataagctgaaggacaactgattcggggaagaagtcacagcagtttgagcataatgcttttgtatagaggagttgatgtttttggcattttctacttcattgctctggtttgatagcactgggcaatacgcattgtatagttataagtngatacgatgaaataatgtacagtagaagactntgttcatcaatgggatcaattcccttgactggtatattgttgatagtcctag

SEQ ID NO: 19064 - DNA, 347 bp, Gossypium hirsutum
  Clone ID: LIB3146-011-Q1-K1-H3
cttccccgaccccttggccgaccccttggccggccccgtggggaaaaccgttaccaaggctgctccctctggaagtccatggtacggtcctgaccgagtcttgtacttgggtccactatctggtgagcctccatcttacttgaccggagaattccctggtgactacggttgggacactgctggactctcggcggacccagagacatttgccaggaaccgtgagctcgaagtcatccactgtaggtgggctatgttgggtgctcttgggtgtgttttccctgagcttttggctaggaatggagtcaaattcggtgaggctgtgtggttcaaggccggatctcagatct

SEQ ID NO: 19065 - DNA, 333 bp, Gossypium hirsutum
  Clone ID: LIB3146-011-Q1-K1-H4
tcgaaggagaccgaccaaattcctggaggtcatttttttggcaccaaagccgggagagctcatccatgaaccagtcctggccattaattatgatgcatcaagtgaggacatcgctcgagtgtgccatgcacatcctacaatgagtgaggcattgaaggaagctgcaatggccacctatgacaagccaattcacatctagaaatatggatttttacatgtcattcttcatttcgatttatgtttgaaaattttcgagattgattcggcagcagtcagcacaaactgtacattttcttgtttgcccttactcgaaacagatggcgtgcttgaata

SEQ ID NO: 19066 - DNA, 395 bp, Gossypium hirsutum
  Clone ID: LIB3146-011-Q1-K1-H5
aattcgggggacgaccgacgtcccggttagaaaaacttgaagctttggaaagtcagagacgggccgacatggcattactcgaggctaagaagatagcatcacagtaccaaaaggaagcagacaagtgcaattcaggtatggaaacatgtgaagaagcaagggagaaagctgaagcagcactggtagctcagaagaaattgacagcaatgtgggaaacacgagctcgtcaaaaagggtggagagaaggggttgccaaatctcatacagactcgtaaggtaaaaattcaagctgtctaaatgatctgtcattgcctcgtaaaagaatttcaaacaagaattccagagttaatcctataggtagtctttaagtatagttacccttgttttctatggag

SEQ ID NO: 19067 - DNA, 151 bp, Gossypium hirsutum
  Clone ID: LIB3146-011-Q1-K1-H6
ggctaatctatcttaggggtattctatgttgtatttgttaaaaatagtggccgcgaccaacgtatttttacctttgtaccttatcagcgcactgaaaaatttggattagcatcatttgagttctttagtaatgaagagttattattggact

SEQ ID NO: 19068 - DNA, 311 bp, Gossypium hirsutum
  Clone ID: LIB3146-011-Q1-K1-H7
cgaagctgtgaaaaatgccatcgtcgaaggaaagaccaaagtgttatacttcgagtcgatgtcgaatcccacgctcaccgttgccaacattccggcactaagcagaatcgggcacgagaaaggaacgacggtggtcgtggacaacacgtacgcccccatggatatttctccggcaaggctgggtgctgatgtggctctacatagtatctgtaagctcatgagcggcggggccgatgttattgcatgtgctgtttgtggccctgcaagcctggtgaactcaatgatggatctttatcaaagcgcgatgatgc

SEQ ID NO: 19069 - DNA, 364 bp, Gossypium hirsutum
  unsure (1)..(364): unsure at all n locations; Clone ID: LIB3146-011-Q1-K1-H8
ggcggatgggttggtcccactttatctttgtgtcaccctagggaccacttccaccacggctgttgacccaatcgaactgctcgctggtgtggcgaaggaacatggcatgtgggttcacgtggatgctgcttatgccggaagtgcatgtatatgcccggagttccgccatcaccttaatggggtagagctagttgactcgttgagtttgagtccccacaagtggctactcagtggcttagattgttgctgcttgtgggtgaaaaaccccaccgcacttgtcagagctctaagcaccaacccccgatacttgagaaacanacaaagcgaaatcgattccgtcgtcgatttcaaggactggcaagtc

SEQ ID NO: 19070 - DNA, 308 bp, Gossypium hirsutum
  Clone ID: LIB3146-011-Q1-K1-H9
cccacgcgtccgctttttcaaagaattctctcagcttgataccaagatcaccggtgacacttagatcctcttatccttgatgggaaggtacacaataaaccaaaaataacacttccacatggctgctttcgtaagttatttctcaaaaatggacttgttttagttggtgcatatttctggatctacaatttgtatggtggctcggtaaaaagtgtaatggcttcagcttctggtacttgacaattataagcttgcagatggattgaatttgactaattttaaatgttctgccacaataactatgttct

SEQ ID NO: 19071 - DNA, 371 bp, Gossypium hirsutum
  Clone ID: LIB3146-012-Q1-K1-A1
tgacaaacctggctcgttccggtgtccttaaggtggtttacatgattctcatggtgtgcatgacgatgatgagtgcgcccaaggcagccaaagccgccatcacgtgcatcgacgtggtgaaccacttgatcccgtgcttgtcctacgtacaaaacggctgtacacccgctgttgcatgctgtattggagtaaaagcactctacggtgaggaacatccctacatgggccacaaaaggggtgcaaccgcaaaaaacctgctgtgaactgaattccgaacaccaccaataagccaaatgtcgtagacaacctagctgctaaatgtggtgtccaactcctttacagtatcaaacccttcacttgactgtatcaag

SEQ ID NO: 19072 - DNA, 325 bp, Gossypium hirsutum
  Clone ID: LIB3146-012-Q1-K1-A10
acgcaaaaaagctgtagaaccaatgaacttttttgaagctctagagaatgattagcctagcgggtgcttgcttgttgctaagtataaaaaagacggatttgctaccctctagagtcatacacattagcagcatggtaatactattgataatgcctacattccaaaggcaaacagcattgacaataacacacaagtgtcagacgtgttatcaaaaccaactattgtaattcctaatgaaaccctggtttttcgtctcaatgcacctattcacgatatttattgaaaaagaactcatctccgtttgaaatagatatgcccattccca

SEQ ID NO: 19073 - DNA, 230 bp, Gossypium hirsutum
  Clone ID: LIB3146-012-Q1-K1-A12
atttcccacagtctataactcactctttttttcccttcatccaatgtcatatcctagggggatcttaataaataggcggtctcactaaaaattgttaacaatctgcttttccaagcccattcttaatcatatcatttctatgcgtattaaatctttaacaaaatcgtcctttccaagcccaatgtagatgtccatctataaatttaaatgttctctttttcttaacttca

SEQ ID NO: 19074 - DNA, 340 bp, Gossypium hirsutum
  Clone ID: LIB3146-012-Q1-K1-A2
ccacgcgttcgcttattctacaatataaataacatatatttacatttcctttcccttttaacatgcactgatggggattatatacatgcttatcataccaaaatggcctaccttttttattatgatcacctgattgattgattacatccatgtttctacccctatgccacatgttgcttcatttgcaaaacctctatactcttctgctatatccaacattggatcacagttatttaatgctctacaattcttatcctaaactgttttcagaggtttaaatttataactgaagctccttattagcaattgctaatttttttaaaatatatacaccttttac

SEQ ID NO: 19075 - DNA, 324 bp, Gossypium hirsutum
  Clone ID: LIB3146-012-Q1-K1-A3
gaaattaagccatcaaatgtgagggtcatactaacatgtttaaggagcttatatatgtcatagaaggttcttgaatcagcctaacatgctaagtcgaaacaagttttttattacatcatcgtagaattcttgaaaaatacatttacctatgagtggtgtctgcccgcaagttattaattaacatttattctcccaatagaaaccgattattctgaaaatgcttattcaccttggtcgatggaatctaacttgatttattagtaacgggttgagttgatttttttagctagcttattttagtcccgatgcactttctttttgtaa

SEQ ID NO: 19076 - DNA, 437 bp, Gossypium hirsutum
  Clone ID: LIB3146-012-Q1-K1-A4
acgggaaagtgtggaaccagcaagtgtatctattggattctcaacggtagagagtgtgacggatgtgattgagatgcaggctatgggtgcgggagctgttgaaaggagagttagatttgcgattgatgatgatgactccgaatctgatgtgcaaaccaaaatgtatgttcagttggaagaagagctgagggatctgatgacagcccaagaagcagggactgcattcatactaggacacacacatgtggaagcaaagcaaggatcttcaattttaaagagattggccattaattttgggtacaatttcttgagaaggaattgccgcggaccagatgttgcactcaaggtgcccccagtatctttattagaggttggcatggtttatgtggtgtaagcttcccatctcatgtaactagtttttgtagcttatatattta

SEQ ID NO: 19077 - DNA, 405 bp, Gossypium hirsutum
  Clone ID: LIB3146-012-Q1-K1-A5
cccacgcgttcgaaaaaaaaaaaaaccaaaacctaaaaaagaaatcctctcttaagaacgcccaatccccgatgaagcaaatccggtcaactccgccatggctctgccttatatggtggccagagacctataaacccacctttctcaccgatttttggagcccatcatctataaagcatagattcaagggcaaaactccgagaacatggccaaaatcggtggagcaaccaagaaatgcatatttattctcctttttcgatttgacccgaatggagaacggccatcaacaaggtgtcagaggcatgtggaggcaagccgagcggcggtggcaaagccaacggtggcgtgcggcgctggttaagctgaaggaagctagggtttgttggctgaaaagttttacgatta

SEQ ID NO: 19078 - DNA, 414 bp, Gossypium hirsutum
  Clone ID: LIB3146-012-Q1-K1-A6
caagaattggaagaagagctttcaataacgtgacaggaagctgagctccagcaagctgcgatactcgaacgttgaagtgaagatcaaacaggaggatttggccgttgctgctggaaaacttgctgagtgtcaaaaaacaatatcatctttagggcagcaactgaaatctcttgcgacacttgaagactttttaatcaacaccacgagcatgccggagttttctagaggagtgtcgttgattacgaaatctaatgaaccttggaagttacattctaatgaaacatattcacccaaagcagatccagagtcaaaaagagttggtgctgaccattctagccctcaaggaaataagaatgatggaaatggcaacacaccaccattttcatgctcgacttcaattgtgtcaacaactca

SEQ ID NO: 19079 - DNA, 396 bp, Gossypium hirsutum
  Clone ID: LIB3146-012-Q1-K1-A7
gttaatgcagattcacatgaagcacttacaaaagcatctatccaggagaaagctaattgcttctctgaacatctccgtagtgatcagaacattgcagtgagcaaaatccaggatggactccaaaatttttcgtatgtggtcctttcgaactcaatgccagctgcttgaaaacctgaattctctgcatgtcttgttagtgcgaatgtaaatagttgcatcttagatgggttttaacccccagtattactaaactttttatgctctacaccattgaaactgaactcattttttaagcagggggtaaagcagtttcttttgtgtagatttcattgttaaacttgaatgttaatctggaatgttaaacaaaccatttccacgttaaggatgaaatgaaat

SEQ ID NO: 19080 - DNA, 385 bp, Gossypium hirsutum
  Clone ID: LIB3146-012-Q1-K1-A8
aacaaaatcaacaaagggactttcatcaccagttacaaggcagatatgccttccggatgggttttgtcagaaaagagactgaattccatggataggaccataattcatcatcaaaacaagatgattagatagctggaaagactaagcaagctttgtcatgataatctcgtacatcctattggtgtcgtcatctatgaagatatcgctcttatgttacatcattatttaccaaatggaacacttgcacaactccttcacgaatcgtcaaagcagtcagagtatcaatcagactggcccagaacactatcaatagccattggagtaccagaaggattggcttttctccatcatgtggctgttatccaccttgatatatcttcgagca

SEQ ID NO: 19081 - DNA, 305 bp, Gossypium hirsutum
  Clone ID: LIB3146-012-Q1-K1-A9
gtgctttgggtcacttttcatagcggatattatttcgggtatttgcttaaactatggggctgcaagagatagcccgatactcaaactggcttcttcaaactgatcaaaatgtattttgcgatggtatacgatatcaaacatatgatgaagttctgcaatggcctacatggtggtttaaacaagctggccgagttgttagaagtggaaagagttggtgtatgccatcaagctggttcggatagtttgctcacatcatgcacatttaggaagttgagggataactttttcaaatcagtacagaaata

SEQ ID NO: 19082 - DNA, 434 bp, Gossypium hirsutum
  unsure (1)..(434): unsure at all n locations; Clone ID: LIB3146-012-Q1-K1-B1
cggacgcgtgggcggacgcgtgggggagaattaagatactttcttgggattgaaattttaaggtctccagaaggcattttgctaaatcagctaaagtatgcacaagaactcatccaagacactggtctaagtgacgcaaaggttgctcttacaccacttgagcagaatcaaaaactaacaacagcagaatttgatgaagtcactcagcagcattaaaaagataagttgttagaagataaaacagtttatcagaaactcattggaagattgatctatttaacccatacaagaccagaaatcacctttgctgttactcatcttagtcagtttatgcaaaatccaaaacaatcgcatatagaaacagtattgagagtagtgagatatataaagagggatccagggctnggaatttttttgaaggctaacaataaaca

SEQ ID NO: 19083 - DNA, 163 bp, Gossypium hirsutum
  Clone ID: LIB3146-012-Q1-K1-B10
aacacccgcaccgacccacacgtaacctcacaccctctacaactcaccctctttttttttcactttaaatcttcttcttaccggagcctattttctacaattttccctcccctatctaccccaccaacatctacttttttactttttcaataaatatatatta

SEQ ID NO: 19084 - DNA, 302 bp, Gossypium hirsutum
  Clone ID: LIB3146-012-Q1-K1-B11
gccgaaaataataccgacttcactttcaatgaatgaactgtttacaagcaatggagggggcaattcttcaagtgaggtcggtctgatgcctgttattggaaaagctatgacttcaataccaatcagtcatgcagcaccaataagctacataatgcagagaaagccacgtgttgatgaagaacctttcactgttgttaccttgctgaactcactcagatcggggaaatatgccattcattttacagctgaagacttggatataactgcattaaggccaatggcaaactgatacctcaaacagc

SEQ ID NO: 19085 - DNA, 219 bp, Gossypium hirsutum
  Clone ID: LIB3146-012-Q1-K1-B12
acgtcttgattatttttttaccacccccactttacaaaaggtcattaatacacattaaaagatgttttccaaatcatctaggtcttatttcctatccccaaacggtgctagaaatatgaattccttctatcctcatcaagaatgaaattgtgcaatgtatatcatgcattgtaacggtgcacaacatttggcgccttcaattaaattaaacttattctt

SEQ ID NO: 19086 - DNA, 411 bp, Gossypium hirsutum
  Clone ID: LIB3146-012-Q1-K1-B2
gaaagcaataacatgtgcgaactgcttaggatcaactgcgaccgaggtgttatgcttgctgatgggaaaaccagattttccatcaacggcaagcctatctaccactttgttggaacctcgacctttagccaatatactgtcgtccatgttggccaggttgccaagatcagtccaaccgcccctcttgataaagtctgtcccattagctgtgggatatgtacaggttttggggccactgtgaatgttgctaaacccaaaaagggtcaaactgttgcagtttttggactgggtgccgttggtcttgccgccgctgaaggtgcaagggtttgtggggcttctcggatcatcgctgttgatgtgaaccccagaagatttgaagaagctaagaggtttgggattacagaatttgtg

SEQ ID NO: 19087 - DNA, 398 bp, Gossypium hirsutum
  Clone ID: LIB3146-012-Q1-K1-B3
cccacgcgttcgccatcctcaacaacaagaagaggaggaggaggaggaggaggaagaagaggaggaggaggaagatgaggatgaaatgaaaatggaaaatggaggcaaccatggaaaggatatgcttttggaccatcttggggatgacattgttgctgcttctgcaactgtggagcaacacgaagaagcaccttctgcagaagaaatgcaagaaaggatggatcagttcacctacatcatgcagcagaagtttctctctggtgaagattatgagtatttagattactctaaaatagatgatgatgagaccttggatgatcactggcttacggaagctaaccatgatgcagaagagaagtattttgctgaagattaagaacggaaaattacatccattc

SEQ ID NO: 19088 - DNA, 324 bp, Gossypium hirsutum
  Clone ID: LIB3146-012-Q1-K1-B4
aagtagacctcaacttggggatagtataagtgacgtgaatgctgggattcgagataggctaaattctgcttagtccatgtattttatgaaagttgtggttttagtccctaaaaaaaaaaaaaaaaaaaaaaaaaaaaaaaaaaaaaaaaaaaaaaaaaaaaaaaaaaaaaaaaaaaaaaaaaaaaaaaacaacattaaaaaaaaaaaataaaaacaaaagaacaaccatttaaaactacaaaaaacagaaaaaatcaaaactaaaaaaaataatataaaaaattgaggtggcgcctctttataaaataataccttttggaaaca

SEQ ID NO: 19089 - DNA, 395 bp, Gossypium hirsutum
  Clone ID: LIB3146-012-Q1-K1-B5
gcatcatatgaagaagtgataagaggaatgtgcttggacttctcatctcccattgcagaagaagaggaaatcaatggaggaggggatagtgatgatgctgataatagagttactcaaacacctcgaactgatatctttggcatatccacgtcccttgatcactactttgatgaagaacagcattaggtcactcgcaaaccaaattaagaaataattttgttaattactgcgtcaagtttgaagtaggttttaagattgtatactttgcttccacttccatcaatcttggtggaagttatcagtgtttccttctcaattggagatggttatcattgtcctatgaatctcaaataatatacaactcttggttatgcaaaaaaaaaaaacaaaagggc

SEQ ID NO: 19090 - DNA, 319 bp, Gossypium hirsutum
  Clone ID: LIB3146-012-Q1-K1-B6
gctttattttcagaagcgataagatgactttactggtcacttgcatacccaatgggcggaggcgggcaaacaaatcatcgatgggaatggactgctgcacataaaaacaatgctcacacacgtccaacagaactccaggggatctgacactaacttgataagtacagtcatcaacaacagcgttgctgactgaatcaacgagaactcacactcctgatcgtcagtgctgactcaagttttcaggtaactgtcagaggcgttactgcctttgcactgcgcttactcatgcttgcagggatcaggcctgccttcaatactg

SEQ ID NO: 19091 - DNA, 427 bp, Gossypium hirsutum
  unsure (1)..(427): unsure at all n locations; Clone ID: LIB3146-012-Q1-K1-B7
atttaaaatggctttcttcgatccctcgagagctcaagacttcctcttcatatcaggcaccaagatgcgggctcttgcgaagaacaaagagaaccctccggatggattcatgtgccctggcggttggaaagtgttggtcaaatactacgacagcttgacaccatctgacaatggaaggatccatgaagccgttccggcttagacaaatgatcgataaagatactccatatgattggaaggagcatatttaacactgtttgatttccaatgtgtgtgtgatgcagaatctctttaataaaaccatgagaggcactggtacagagacaatgaaaaaagcttgcctctccctgtaattaggttgcccccattatggtgtctgccattggtgctcgctttgcttgtgggcaacatngnactatatatgtct

SEQ ID NO: 19092 - DNA, 430 bp, Gossypium hirsutum
  Clone ID: LIB3146-012-Q1-K1-B8
cccacacgttctagaactcaaggcctgggatgctgattttgtcaaggtagaccaaggggccctctttgatctcatactggcagcgaactatctgaatatgaggagcttgctggacttgacctgccaaactgtggctgctatgatgcagggaaagacacccgcggagattcgcacgaccttcaacatcaataacgatttcaccccaaacgaagaagaagaggttaggagggagaatcaatgggcattcgagtgataggaaagcctttaaatctaatgccgatattattatagctaatatgctcctctggttaggttgtcaagaaaggggaaaaaaattaagaacattggctatctttcggctgattttgttatatgcattaatgacgcctcatttagaggatatttaatatgaacgctctccattctctat

SEQ ID NO: 19093 - DNA, 435 bp, Gossypium hirsutum
  unsure (1)..(435): unsure at all n locations; Clone ID: LIB3146-012-Q1-K1-C1
caatagtagaggaagtgtgcgtgttgtattgtaaatgagctgtagttaagactcgatagccactcttaacagtgtattctcctaaacctttgtgtttccaaaccagcatatcctccgagctacttccagaaatcggaatagaaaagattcgagctgttatatcttcatcaactaaataatgaaccagctctctattccaggtagccaaagatcattccaaatattgatgcgagcaccactgccaaccctccacacaatctcttccacaatcaactccctagcactgcaaatacttctccaggtaaaagaaggaagatggcaaggagatgtgttcgaggaaaatccttgttgaaccttangaatagattaggataaaagtgacatgtcactaggatgggtgagcattcgaactcgttgaagtgagtccgagttcac

SEQ ID NO: 19094 - DNA, 211 bp, Gossypium hirsutum
  Clone ID: LIB3146-012-Q1-K1-C10
gggatcaaatgtacaatacattcattctataaaacagcaaaaatatgatacaagaatatctgctttaataacaaaaatgtaagaaaaacgaacttgggattgagctccgtacgtgcaataagcttggattcgaattccagcctccttatgtaactaagccttttcctccccagaaggaaacctgactattctttatcttgtgctattaccc

SEQ ID NO: 19095 - DNA, 321 bp, Gossypium hirsutum
  Clone ID: LIB3146-012-Q1-K1-C11
cgcgttctttgttcatcatgtttgagatctctatcagaatcaaagctaagtattttggggtctaaaccttgtaactccgaaacataactattaatgtgattggaaatatctgagcttgttgtgtttctattttcataaaggagcttgtttctacttgtctagatgatccataatccacagcataaaagacgacactgttcgcttgtcccccgttgaaagcccatgacattgccgaaaaatctaaatactgtcttcttcatttcaatgacacctggggcattgagtctcaacagcaactcgctttatcttaatattaacaaa

SEQ ID NO: 19096 - DNA, 165 bp, Gossypium hirsutum
  Clone ID: LIB3146-012-Q1-K1-C12
ctctgaactaatatatcttcccaattattttttaaactataaaagcgcattattggtgggacttttattgagtgcggggcatctatcttaaaaaacccattacaaaaacttcaaaccccagacttagattgtttaaatccaaaattctgtattccttacttttta

SEQ ID NO: 19097 - DNA, 425 bp, Gossypium hirsutum
  Clone ID: LIB3146-012-Q1-K1-C2
cccacgcgtccgcaaaatctcaaacccagatttgttctctctctctctctctctctatgtccaatcaattaattcctccattggaggagcttagggtttgttggtgttctggtctttgctttgtctgaaaaataaacagaattataaacgaacaccaacgccatgggaagatttgaagagagaggattcgattcagtggtttgccctaagcctatccgaacctttagatggtctaccaacagctgttatcagactgagatggctgattcaaaaactggtgcagagcttcttgatataatcctccccgagggagggtatggggccgagaatcccaccaaccaaatggcttcatcaccaccgtatttctgtggatcaccgccgagcagggcgtcgaatccggtaatccaagatgcccgattcaacga

SEQ ID NO: 19098 - DNA, 383 bp, Gossypium hirsutum
  Clone ID: LIB3146-012-Q1-K1-C3
atatttgaacaaggagctggggctggatatggacaagttcatcacacactctgtgccttttgccgatattaacaaggcattcgactacatgctccagggtataggtctgagatgcatgattcatttggatgcttaaggaaatgttgctgctgtatatttgcccatccaaggatcaaaactctaatgttttgtcctactatgtgttatattatgtgcctacttaagctacctttcccggttatcaagagtgcctatatagaactctctctctctcaaaaaaaaaaaaaagagaaaagagttctttatatggagttttatattatatgctgagagaataaattatcttgtaaaagcttgctttgttaatgaaataaatttctatt

SEQ ID NO: 19099 - DNA, 433 bp, Gossypium hirsutum
  Clone ID: LIB3146-012-Q1-K1-C4
gtttttgagccctgaaagatcaaatctcccatctcccccctccccttgtgtttcgtggtgatcaacagtttagggtttttgttctctttctgaacaacaaaaatggtggggactactgagggagtggattcctctgcctccaacagcaagaagaatcgtatccaagtctccaatacccagaaaccccttttcttctacgttaacctcgccaagaggtatatgcagcaatacaatgaggtggaactctctgctcttggaatggctattgctactgttgttaccattgctgagatattgaagaacaacgggctggctgttgagaaaaaaatcatgacttctaccattgacatgagagaggaatcagggggacgaccagtacaaaaagcaaaaattgaaatactgctggggaagtcagagaagtttgatgagttga

SEQ ID NO: 19100 - DNA, 368 bp, Gossypium hirsutum
  Clone ID: LIB3146-012-Q1-K1-C5
tgtaaatatggtgcccaatggcctatagatacctcggctgagggatcgtgtagtcaaaattattactgattacagaactgaaacttatctcagacatggctgcaacgatatacttaaggctgattgtgttaacctgtcggtaaaatactacaatgaagcgaaacgagcagtttgcttgagtaatgaagaagatgatgcacgatccaagagggatgccagtagagcttatcaaatcataacacctagtgtgagaaacatggaggtttagtctaaaacaaggggaagtggaagatgttgcatgtgttttgatcctttctcgatacaaaacgtatcagtcaacgtgttcttttgctgccatgcttatcaca

SEQ ID NO: 19101 - DNA, 415 bp, Gossypium hirsutum
  Clone ID: LIB3146-012-Q1-K1-C6
gcaagttgcagccaagcaagcagcacatggcagaaacatcaagctgtagagatcaggctataatttatccctggctgctcttccggttttcttatcggttggtctgtatgttagataatggtaagaaaactgtcacataattgcatgtttgcaggtctgcaggttttgctttattggaaggaatagttccagccatgcaggggggagtccagtgatggctattggttttctgacagctactttgggcttgagttgaattttcatttagcactagaatccttcaaacgttgagctctctttagttatggattgattctcctttgttctaatttggttttcctacagaacagtagcttcaacttttatgaacctgatttggtagaatcttactcactctggatgttgttattttaat

SEQ ID NO: 19102 - DNA, 387 bp, Gossypium hirsutum
  Clone ID: LIB3146-012-Q1-K1-C7
acgattatagaaaggagagcgggcgcacggcatttacgagatgatatcctccattatagtaaggaaccagctgaatacttgcttagtgacctgccaagctcttatggcgaaggtgcaaccagtagctcaatggggtatgatagcattaataacaaaatcatatttgaacttgaaggtgcacactgattatataatcagacttttgcaggagaataattgtgttaagtttcagcagcagatgaagtgtaatctgtatgcgtggtttagatttcagtgttcattgttgttgtgttgctaagctaaacaattcttccataatatataatatcatttattgttaataaaaaacaaaaacttccagcgtacatgttaaaaaaattttttatt

SEQ ID NO: 19103 - DNA, 440 bp, Gossypium hirsutum
  Clone ID: LIB3146-012-Q1-K1-C8
acgcccacgcgttctgaacctgtctccataatgtcggttgtgaaaagcccaatgggtctcatggtgggatttatgctggtggtggtgtttttaatgcccaaattagtggaaaacatggatcctgaagaaatgagacgagcacaagaagaaatgagaaaccagggagttccctccttagctagtttgttaccaggaggtgggaggaattaagtgttcgattgaggagcaggaacttcgagataatggtttggcaaaatcaaggggcagttcaaacgtcgagctcgattggtcttctaccctgatattcatcttttgattgcagaaagaagggatgataccttttgaattcctgggggcatctcaaaggttatgtagtgttttacttgatagttgcagattttcagaacttattatgggattcaacttctcataacatctat

SEQ ID NO: 19104 - DNA, 427 bp, Gossypium hirsutum
  Clone ID: LIB3146-012-Q1-K1-C9
cccacgcgttcgaccacgcgtccgaagaaatttgccataaatgtggtatactctttggtgagcaagaattgcagggaacctgatgtggtattgaatgtgcctcatacttctttgctagaagtaggtatgatctatcatgtctaactctaactccatttatctcaatcataagagaaatgtaaattatacaaagggaaatagggtcccttaaatttacatatgatgtgtatacaaagagacggggcacaaaataacttccaatttaacaggaggctgtcctacacgttaagaaccacttgacatgaaaatcccttcaatggttttttattttcttgctatggtagcaatgatctgatatcatcatattccaaaataaaatcacaaggtgaatatatatatatatatacatgtctactaggttcgtggg

SEQ ID NO: 19105 - DNA, 319 bp, Gossypium hirsutum
  Clone ID: LIB3146-012-Q1-K1-D1
gacccacgcgtccgaaaagtatgccttcaagtgccatcgaaaatctgaggctggacgggacattgtatatccagtaaatgccattgcattccatcctgtatatggtacatttgcaactggaggttgtgatggttttgttaatgtgtgggatggaaacaataagaagaggctgtatcagtattcaaagtacccaacaagcgttgccgctctttcattcagcagagatgggcgactattggccgttgcttcgagttacacattcgaagagggagataaagcacatgaaccagatgcaatctttgtacgtagcgtaaatgaa

SEQ ID NO: 19106 - DNA, 254 bp, Gossypium hirsutum
  Clone ID: LIB3146-012-Q1-K1-D10
tgaaactatggctccgttctctttacgtagccgtcttcaggcttctgcgctaagcaggaggcgtctcaaatccaaagccaagcatgggaggaaagggatgaagaacatggcggaaagcttcaaaagattgaaatctgaaatggaagaaataagcgaggaacaaaagaatatcagggaagggcaaaggcaagttaaagaaaaattcggaatcatcgaatccgagtgcgaggaattgaaaagggaaactaggctca

SEQ ID NO: 19107 - DNA, 225 bp, Gossypium hirsutum
  unsure (1)..(225): unsure at all n locations; Clone ID: LIB3146-012-Q1-K1-D11
acgcccacacgttctaccacgcgtncgcttttatcactgtggctttgacttattttcaaggtgctgctgaagaccatgcagggaggttgaaggtctttctttggggaggggctaccgggctggtcatatacacctactgtttgtgttattacaatgcgcggtcaaacatgtcaagctttatgcaaacttcgatcttctttgggtacatggaccgcatttgctatg

SEQ ID NO: 19108 - DNA, 218 bp, Gossypium hirsutum
  Clone ID: LIB3146-012-Q1-K1-D12
acgatactccaatgaattcgagctcactttttttacactacataaactccctatgaacgtcgccatttaagattcggagagaattaccaacctaacaatattggatatcatactgcataactcaaccatcacccctgatcagcttattaacatattttataaaaactactacatgctcctgcacatattcaatacacagggcttgctggagataacat

SEQ ID NO: 19109 - DNA, 392 bp, Gossypium hirsutum
  Clone ID: LIB3146-012-Q1-K1-D2
gtttttagttactatccatttcccttcagattatcctttcaagcctcctaaggtcgcgtttaggaccaaggtcttacatgccaacatcaacagcaatggaagcattcgacttgatatcctcaaagaacaatggagccctgcactaaccatttgcaaggttctgctctcaatctgctcgttgctgaccgatccaaaccctgatgaccctcttgtttcggagattgctcacatgtataagactgatcgggcaaagtatgaagccactgctcgtaactggacccagaagcatgccatggtatgacagctgttggtgtgtaatatgtatcacctttcttatgtagccaactgtgtcaaaccattatatgttttcttttggcgaaaggagagggtgt

SEQ ID NO: 19110 - DNA, 345 bp, Gossypium hirsutum
  Clone ID: LIB3146-012-Q1-K1-D3
cccacgcgttcgaaaaaaaaccctaaacaatatcttataccatgcttactccttgcttgtcgccttgaataaagaaaagaggctaataccgaggcttctatcagccgctggaaaccatcatagcaaggccctacaacggggtgagtatgattcgcagtaagacccacatactgtctctgatccgatacaggagacgagggtcctactgtgcatcatgatgaagaggaggaacagggcgaaattctaggcaataatctccttagaaataagcttggaagaattctatggagctttgtatggatttcgggcacagtttctgtcacaaaaaatataaaagggcggacg

SEQ ID NO: 19111 - DNA, 307 bp, Gossypium hirsutum
  Clone ID: LIB3146-012-Q1-K1-D4
acttattgttgatccttttgatctgtgtgccataactgaaataaagtctcatatactataagttttacgcttatggtcctaattaataaatgccgttttatgtgttaaaaaaaaaaaaaaaaaaaaaaaaaaaaaaaaaaaaaaaaaaaaaaaaaaaaaaaaaaaaaagaaagaaaaaataaaaaaaaaaaggggccgtgcgtctacgggataaccgctttagatacgctatcttgcgaccaaaattaatattatatggaacacttaaataaaattaattgggcgaaatttttaaacgtactcactt

SEQ ID NO: 19112 - DNA, 353 bp, Gossypium hirsutum
  Clone ID: LIB3146-012-Q1-K1-D5
ccaatgtcctattcaagggaccgtcttgctgaacattttttgtcttcagattagaggaggttggctaggtcttactctagtgacccttcacctggccagtccttaatgagtgcctatcctagggcacaaaaccagtggccagctggttatggcgcacaacctcaaacttggccttttactacacaggcacaaacatggacccctggctacagccaacaggctgcatatggtgcgtatggtagttatggtagcacttatgctactccacaagtacccacatcagtttcacaaagtgctgggtctggtgcttatgcgactacatattctgttcagacctttgcttaacaaagtta

SEQ ID NO: 19113 - DNA, 404 bp, Gossypium hirsutum
  Clone ID: LIB3146-012-Q1-K1-D6
gatttattcaatgggaaggagcttttcaagagcatcaaccctgatgaggccgttgcatgtggtgctgcagtccaagctgctatattgagtggtgaaggttatgagaaagtgcacgatctcttgctcttggatgtcactccattgtcttacggtttggaaaccgctggtggtgttatgaccgttttgatttcaaggaacaccaccattccaaccaaaaaagaacaagtcttctcaacctacttcgacaaccaacctcgtgtgttgatccaagtttacgaaggtgaaagaacatggaccagagacaacaacttgctcggtaaatttgaactttatggcatacctgctgctactagaggtgtcccacatatcacttgctgctaagatatcgatgctaatggaatttt

SEQ ID NO: 19114 - DNA, 363 bp, Gossypium hirsutum
  Clone ID: LIB3146-012-Q1-K1-D7
acgccacgcgttcgaaacgctacaaatttatggaaggaacttagagaagcttcagctgatgttgtaccaaagcatcaaaacgacgttgcatatttaataaatagttacaaaagtttatacccaaaatgggcttttgatctcagattttcttgtttgtatgtttatgcagaggttcggtgtcaagcaaaaggagaagattgcatcttttaagacttcagttgatgttcttactttctatgcagcacctatacccagaacgctttatttatctatgactggtttacgtgatgccagtgggacgaccatcctgcaatcatggctgtgggtgttgtagatggaacttaataagtcatttttcagaca

SEQ ID NO: 19115 - DNA, 218 bp, Gossypium hirsutum
  Clone ID: LIB3146-012-Q1-K1-D8
cttacacgttcttaaaaatactaattcatttatataatttaaacaatcttcagctcatgttgttccaactcatattcactactttacataccatatatttttttacaaaaaactatatccaaaatcttactatcaatctaaaattttctatattttatatctattcaaatgcttttattttatatccttaatattattattattccatttttttactt

SEQ ID NO: 19116 - DNA, 330 bp, Gossypium hirsutum
  Clone ID: LIB3146-012-Q1-K1-D9
acgcacactgaccctaaaaggttccatgctctcataaaattgctttcagtaaaagagctggtgtgttagttgactctccaaacaaaatacaatcatctttaaataacaaatgcgatacttgtgggccccttctgctagccttaaccccttacaaaagtccttctcttagtgtcagtctcataaggcatgataagccctctccacatatcaaaaataaaaataggcttaagggatcaccttgtcttagtcctctcgttggacgaaagttctctccaatgggaccattaaaagacgactgaattaagatgttttggattacaccatgtcata

SEQ ID NO: 19117 - DNA, 425 bp, Gossypium hirsutum
  Clone ID: LIB3146-012-Q1-K1-E1
taaaacagagaaaggaaagcagcgaaatgggtgaagaagtgaaggtttttggatattgggcaagcccttacagctacagggcagagcttgctttgaagttgaaaggtgtttcttatgagtacataaatgaggatatctttggcaacaagagcgatttacttttgaaatacaatccggttcataagaaagtcccagttcttcttcacaacggaaaatcaattgtagagtctgttgttattcttgaatacattgaggaaacttggaagcataatctttatttgccacaagatccttatgacaaagctaccgctcgattctggatcaagttcatcgacgaaaagtgctttcctaccctttggctagctgcatggagccccgagaatgagcgagaaaaagtgacgaacgaagctggcgagtatatgaaa

SEQ ID NO: 19118 - DNA, 216 bp, Gossypium hirsutum
  unsure (1)..(216): unsure at all n locations; Clone ID: LIB3146-012-Q1-K1-E10
caaggagccagaacncccgggtgcgacccacacgtaaccttacacgttgtcgaacgcccgcccttttattctacagtagctacatatatagagctgggggatgatggactatacaaaggaagctggttcactgacaattggtctgataaagaacacatgccaaatattccatgttcctttaggaatgctaaggaaataatgaaactccatgctcat

SEQ ID NO: 19119 - DNA, 382 bp, Gossypium hirsutum
  Clone ID: LIB3146-012-Q1-K1-E11
gcaaccccatcattgctaagatgtaccattgtgccggcggtgacatggatggtggcggggatgatgatgttccggctggtggaagtgtttctcatcctaagattgaggaagttgactaaatcattgattttcttcacctgatttatctattgttctcttatgttttatgcgatttaaactgttcggtttagttgatcggtttctaatccgaatgatatgaactttcatagggttagctcctttttagggatactctatcagtaaacccttgttattgtttgtgtttaggaaaatatgtcgctttttgaacctatttaagaatatccaacactctattttattaaaaaaaaaaaaaaacaggctgcctcttttagagaatcca

SEQ ID NO: 19120 - DNA, 267 bp, Gossypium hirsutum
  Clone ID: LIB3146-012-Q1-K1-E12
ctcacaccttccattacagcctgcatgacactctgaatggcactcctcatggcaatggtggtgccctctaagttgaccactcattatattacccccaatttcctcaccctgtctctttcacagccttttttggacattttttcgtccaacacaacgtcacactggacggctctatgctcccatctctctatccaagccaggcttccaaccaaacgtacgtggtaaggaggactgttgtaactactgatatgactgaaaatagtggaa

SEQ ID NO: 19121 - DNA, 396 bp, Gossypium hirsutum
  Clone ID: LIB3146-012-Q1-K1-E2
cggacgcgtgggcggacgcgtgggtttggccattaacagtttacttcccgatcgagatgcacattgcgcaagcaaaaataccaaagtattcattcaggtgggtatggttgaaaatactaagctgggtttgcttgataatatcacttatagcagcagctggatctgttgaaggactaattcaaagccttaagacatataagccatttcagactcggaatgaggagtaatccttgcttaaaggttaggttttatgaaatacttaacattgttcaataagacagagtttgcagtaaatgtaatttattgttgtcttcacttatgtattccatatgcaaatctgcttgttgtagtgtggctccttttgaaagagaatagagtaaccaattttaatttgat

SEQ ID NO: 19122 - DNA, 413 bp, Gossypium hirsutum
  Clone ID: LIB3146-012-Q1-K1-E3
acgccacgcgtccgcccacgcgtgcgcagcaattgctcttctctcgtatggtttcttcaataaaggccttgtacctggtctatgtttcggtgctgggcttggtataacgatgtttggaatggcatacatgttcgtccacgatggtctcgtccataagagattccccgtaggccctatcgctaacgtgccttacttcaggaaggttgctgcggctcaccagctccatcattcagaaaaattcaatggtgttccatatgggctgtttctagggccgaaggaagtggaggatgtgggaagacatgaagaattggagaaagaaatcaacaggagaatcaaatcaagcaaaggttcctgaatatataataagattaatttaactgttttcaaggaacccccattttttgagaaacgat

SEQ ID NO: 19123 - DNA, 233 bp, Gossypium hirsutum
  Clone ID: LIB3146-012-Q1-K1-E4
tctgttattgtcaaatcagtggacttgtcgtttacaggagtttacaagctcctgaggtgtatggacattatgaatggacactatgcttatgtcaacagagagttgacaggcctatggtgtccatctttataaaatacgaggtacacatagctcgagttcatcttcctagcaagaactaactgttgaatattcacggcttaccgagcattacgttaacttattccacaatgggc

SEQ ID NO: 19124 - DNA, 382 bp, Gossypium hirsutum
  Clone ID: LIB3146-012-Q1-K1-E5
ctgacattctctaaaaaagccgtgctattttttactttccacaggataccaaaaagcgggggcatttggacaacgtaaaaacattcttttacaattttagcacagtattaaatactatatgtgtacccccatactcttaccaatgaattcatttccactgtactttacctttcttagtacacgcttgataaaattgctgcttaactgccaaataaggttacgaagaaacgaaaagaatgcaaatttctatggcagagcgtacaacaagtctgaacgataatagaagtacattatgacaaaccatccgttacattaggactaaaaattgattcattgtcactgaaaccttgcgaagaaaacatttgattaaactctgcttcac

SEQ ID NO: 19125 - DNA, 401 bp, Gossypium hirsutum
  Clone ID: LIB3146-012-Q1-K1-E6
acgcttgaatgctgaaaagaaggcgggcttttatgtccatgaggtaggtttgggatgtgacggtcactatgttcttggcagaggggaacaaaaattgggggggaaacgtgctgccaaattgaaggacccattcagctggagggttcttaacgtatggaccgatgcacctgggatgcaattatacactggtaaacacgtgaatggaggtgcccggaaaggaggtgctgtttataataagcatgcagggttatgcttggaaacccagggattttcaaatgcgatataccaacctaacttcccatcaactgttgctcaacctgttcgcaagcaccagcacaccatgtagcatgagttgttaggtgagtaagtttgtaaagtctatttgataaagatttgggaat

SEQ ID NO: 19126 - DNA, 420 bp, Gossypium hirsutum
  Clone ID: LIB3146-012-Q1-K1-E7
cccacgcgttcgcaaccatgggtgttgtgatggtcctaaaactggcagactcagggtattggataatgcaccaaagctctttgattatttggcagagggttagtgaagcacaggatatagccacaaaattaggtggacaagtcattggtcacacatggcttttagaatcaattgcagcatgactgagcaatgcttcctttacagatctgggaggcttctttcagctgtacatcatggttttcatctggtgctaggaatttgattaagcgtattcttgatccaagccctcttacccgtataactattcctgaaattctacaagatgaatggttcaagaaaaggttcaagccaccaaaatttgagcaagatgaggatgtaaatcttgatgataatatcttatattatacatggttatgaatt

SEQ ID NO: 19127 - DNA, 406 bp, Gossypium hirsutum
  Clone ID: LIB3146-012-Q1-K1-E8
acgctgacgcgttgtcgaacgcgcgggctgactcgtggggtgggaccattcattggggcagcactagcagcactctaccacgttgttgtgatcagagccattcctttcaaatcaaagtgatgagattaagatcaagagtcatgattccatgattatgagcttaagttaaacaaaaaaaaaaaaaaggagaaacccaacaacccttttaagtttctttgtatttttcttttgtttgtatgcttgtgtttttgtatgtaaagaagatacaatcatatgcctctgttttttatttattaaacttgaaaaaggggggttggtaatgagcaatgacccatctaaaaagtaagtgggcattcgtatttgtatggctatgatttgtgaatgagaaatgtcattttcatgccct

SEQ ID NO: 19128 - DNA, 129 bp, Gossypium hirsutum
  Clone ID: LIB3146-012-Q1-K1-E9
acgctcacaccctctgatatactagcgaccttctttttttttctatatactagctacctttttcagggaggcactatatataaatggggtcattattaacaccacactttgcatttcactcatataact

SEQ ID NO: 19129 - DNA, 407 bp, Gossypium hirsutum
  Clone ID: LIB3146-012-Q1-K1-F1
ccgaaaactgaaacgacccgtcgttggagtcggctgcgcttccactggtgacacatcagctgccttatccgcttattgcgctgccgcgggtattccttccattgtctttttacctgcgaataagatctccattgcacaattagttcaaccaattgcgaacggcgcgttcgttttgagcattgacaccgatttcgacggttgcatgaagttaatccgggaagttaccgccgagctaccaatttaccttgccaattcattgaacagtttaagactcgaagggcagaaaacggctgcgattgagattttacagcagtttgattgggaagctccagattgggttattgttcctggcggtaatttgggtaatatttatgctttttacaaagggtttaaaatgtgtcaagaac

SEQ ID NO: 19130 - DNA, 256 bp, Gossypium hirsutum
  Clone ID: LIB3146-012-Q1-K1-F10
cccactcgttctaaaatatgcaagcgagaaattgctgattaattggattcaaccatgggtggctggcgaaccttatattgtcataggatgtagggattatgcagggcgacttgcacgcactgagtgactaagatccaaagacatcacccatcgagcgaaaattaataatttctggctgggtgtagtcctcctggcatttgttgatgaggtgctgtgctggctttacagaacaggcaaagagtattacgactacata

SEQ ID NO: 19131 - DNA, 288 bp, Gossypium hirsutum
  Clone ID: LIB3146-012-Q1-K1-F11
ctgatggccagtcttgatttctctccatctcgaggtttggttatgccctgtacctgtggggtttagggaaaaaaaaaattctcggttcttctgttttcttcaagaggattccatgaacgtttgatgaacttaatacacttgtgtgaaatgtcttgttctaaatttacgggtcagctttgtcctttctctcttgtccctcttgtccttctgtcctttctctctttccctattaatgaatgagctagttaaatgcattccacacacacttgaattgttatgacttgatcc

SEQ ID NO: 19132 - DNA, 273 bp, Gossypium hirsutum
  Clone ID: LIB3146-012-Q1-K1-F12
cacgcctccttcaagcgagagcgtcctattttttttttcttcctttcccgcgacgccgggggaatcaccaaccggccggtgcgccaaatgctagggttccgcggagcgcgggagccggctcgactttcgtagcctcgccgccggcgcgcgggaaccggatgctgctaagctgcgggtcgctctcctcctgggtgcgccgcttcgtcgcctgcattggtggttgttttggatgtgcccaacctactccgataatagctgtcgatgaacccacaa

SEQ ID NO: 19133 - DNA, 437 bp, Gossypium hirsutum
  Clone ID: LIB3146-012-Q1-K1-F2
ggaaattgccaggatggcttttcctctattgtactaaaaaaaccgcttcttttgcgcttaacaaacttcattcattcattcaatcacctactctttctttttatttttttttctctcaaagaagcaagcaaaaattttagggagcacaactccccccccccaagtttcgctgttcagtgacaatggcgattgtgaagatggtgatggctgtggttatcatggcagcgtccctcggagggaaattgggtgcagcacaagtgcaccatgtggtcggaggtgaccgtgggtgggacgtttcctctgacgtggcatcttggtcctccggtaggagcttcagggttggagacaaaatttggtttgcctacgccgcatcacatgagagcattgctgaggtgaatagcccggaagaatatgagtcgtgcgatgtgagcaacccc

SEQ ID NO: 19134 - DNA, 286 bp, Gossypium hirsutum
  Clone ID: LIB3146-012-Q1-K1-F3
cccacgcgtccgcccttttactaggcaatttaggtaccttccaatgtcaaatatcagtagaacgaatccggcggttggcgttgtaacattagactcagtccaacacggtccaaacccgaacttcagagtttacgtggcaggcgggatgtccgaagcaccacgagggggtgccatgtacgaactcaagctggaaatgtacgactcgacggacgacacgtggcacgtcgtggggttcgtgccaacggaatttgctgtgagactaactgtgtggacaccaaatgagagt

SEQ ID NO: 19135 - DNA, 263 bp, Gossypium hirsutum
  Clone ID: LIB3146-012-Q1-K1-F4
cggacgcgtgggtttccttggggggtatcagtaaggaattggaatgtaataatattgattcatataggaggaaaaggttctctattgattcaaatgctgtacctatgggatagggatagagaaagaggaaaaaccgaagatttcacatagtgcttttgatcgaaaaatcaatctgatttatttcgtacccctcgctcaatgagaaaatgggtcagattctataggatcaaacctatgggacttagggaatgatggaagggaat

SEQ ID NO: 19136 - DNA, 383 bp, Gossypium hirsutum
  Clone ID: LIB3146-012-Q1-K1-F5
cgggattctattttggcgtgcctacttttttatccgcatgctcgtgcaactgatggggagctcttgctgcgtccatgtgttaagaggcttttattcacacactcaggctcaccatctactcatcttggtcgtcggatatgaatgtacagccacgaaactaaatggctacatgtaatccgatacccatcttctgctgaacataaatacgtagccaacatgctccttcggtcatgtcacagaagaaacattgtcctggaaccttcattatcacaccatgtgtgctatccatatcctatgatacctgcatattattcggttacaacggtccatttttggtatcagttgagcttcattcagcgcttctatcttgtgtttctttgcag

SEQ ID NO: 19137 - DNA, 424 bp, Gossypium hirsutum
  Clone ID: LIB3146-012-Q1-K1-F6
acggtgctatctcggaatatgcgcaacgagtgtatcaactacagcttcacttacgaatcgccgcttcctgttgggagactcgccttccagctcgccgataaagcacaggtttgcacccaacgctcttggaaacgaccttatggtgttggcctgttggtggctggcttggatgaatctggggctcatctttactataactgtccaagtgggaattacttcgaataccatgcttttgccattggatcacggtcacaagctgcaaagacatacttggaacggaggtttgagaactttacagactcctctagggatgatctggtgaaagatgctattacggcaataatggagaccctgcaaggagaaactctgaaaagctcaatatgtacaattgctgtggtaggggttggagaaccgttccatgtat

SEQ ID NO: 19138 - DNA, 153 bp, Gossypium hirsutum
  Clone ID: LIB3146-012-Q1-K1-F7
aacctcaaatcctctttttcttcctaccttttttttttttttatcaataacaactaagggtgaaattatttacggcaatccaatacatacaaacctttaaatccaaatctttctacgcccacacattaaactttacacatctgatacaactac

SEQ ID NO: 19139 - DNA, 207 bp, Gossypium hirsutum
  Clone ID: LIB3146-012-Q1-K1-F8
acgctcacacgttctagagcaaccgcactattttttttattgctatgacccctacaggcgggaggattcaatcaacgacactatatgcaacataaaaggacaggttattgagggaccattccgccattcatacccaatttccatcatcctcacactctgatatggatcaggagcataatcggaatgagacccattaagtgacaacat

SEQ ID NO: 19140 - DNA, 290 bp, Gossypium hirsutum
  Clone ID: LIB3146-012-Q1-K1-F9
gttgcaacctctgctaaatgcttccacattttagtgggaaggaaaaaagatggttaaggggtttctgccgacatgatattcctggagttttcttaggactcatttcttgatgtcgattcttgaagaacctctatggtctgcttggagctttctgtatttgttgggtttgtagatatagttagcagtagcgcgggtgcgccgatttatcaataacagctggtaatgactgtcttccttcttaagagaacagcacactggttgatgctttatggatgtaatattacacttga

SEQ ID NO: 19141 - DNA, 399 bp, Gossypium hirsutum
  Clone ID: LIB3146-012-Q1-K1-G1
cccacgcgtccgcaactttccctgaaaaactagagataaaatcaatcatggctcgagggaagatccagatcaagctgatagagaactcgaccaacaggcaagtcacttattcgaagagaagaaacggtcttttcaagaaagctaatgaacttacagttctttgcgatgctagagtttcgatcatcatgttttccactactggtaaactccatgagtttatcagcccttccaccacaacgaagcaagtaattgatcagtaccagaaaaccttggggatcgatatctggaacacccactatgagaaaatgcaagagcagttgaagcagctgaaagaggttaacaggaacctgcgcaaagagattaggagaaggatgggcgactgtttgaatgatttgagca

SEQ ID NO: 19142 - DNA, 318 bp, Gossypium hirsutum
  Clone ID: LIB3146-012-Q1-K1-G10
acgtgttttctcagagtcgaacctcctctaatcttactccctccctccttaccgctctgtgggctgtcgcttccatggctgtcttgtttaaaatgcctgtcgttacgggtttatacgtgggtcttatgatgctggctttggctagctcaactgagtatcatgagctatttcaacctggctgggccaacaatcattttatctatgaacgaaagctcctttagctcaaacttgataactcttctggtgctgggtctgcatcaaaaagcacgtgttttgttgccaaagtatccatgcacattaaacttgtacaaggtgact

SEQ ID NO: 19143 - DNA, 332 bp, Gossypium hirsutum
  Clone ID: LIB3146-012-Q1-K1-G11
acgatagaataatggaggtgggtcactgatagtggtccacagctgggtcagaaaagagaagaggggtaattgtagaagtcagtcgctttgcaagagagaaagggtacttgagtaacgaacaaggaactcttatgatcttcaaaacgcataatcacatatagctgtcggctcatggcattatgttttaatatctttgaagtgtccaccttgaaggctattaagtctatttacaaagatgttttcttgatcataaatctaccttaataacttattatgaaaaaaaaaaatattttaaagatatattactgtatacttaattaaagtaaaataca

SEQ ID NO: 19144 - DNA, 342 bp, Gossypium hirsutum
  Clone ID: LIB3146-012-Q1-K1-G2
cccacgcgtccgcccacgcgtccggatgaatattgttttagaaatagtaatactttgtgagtgtgtctgtgtgtgtgtgtttttatgtattaaattacatattgaatcaatgtttatgtattaaatttaaattcattaatttttatatttagttttaaagttaagaattttaatagaaaatttttatatttatatcaaaaaaaaaaaaaaaaaaaaaaaaaaaaaaaaaaaaaaaaaaaaaaaaagagaaaaaacataaaaaaaaaaaaaaaaaagaaaaaaaaaacaaacaacaaatttgttgaaaatgcacgaacaaaaaaattcggttgatcgttgata

SEQ ID NO: 19145 - DNA, 65 bp, Gossypium hirsutum
  Clone ID: LIB3146-012-Q1-K1-G3
cccacgcgtccggaaaaaaaaaaaaaaaaaaaaaaaaaaaaaaaaaaaaaaaaaaaaaaggaaaa

SEQ ID NO: 19146 - DNA, 419 bp, Gossypium hirsutum
  unsure (1)..(419): unsure at all n locations; Clone ID: LIB3146-012-Q1-K1-G4
cccacgcgttcggaagatgttaacttcattttttttcctttggtctttttatttccgaaggacccattatttataacgttatatacaagtttctttctaagcttgtgtgttttgtacttcacattttatgctattagaagcacttgccacaaggagctccacccaactttcaagtttttcgatcaacactcttccctataccttgtgcatgaatttggtagcccgtcagaatggttagagttggcagtggaaactctagaaccgtggaaacagtttgaataatatgcagtgaaatttatggtcgcaaaacatgtaaaatttttctattttccaaatatgttggccatgtataacacctttagtgtattcgtaatatacattatcgaatatcannnttnangaanaannnnnngannngg

SEQ ID NO: 19147 - DNA, 408 bp, Gossypium hirsutum
  Clone ID: LIB3146-012-Q1-K1-G5
ctcacggacaaagaattgatctctgactgtttgaaatgttgcacagaatactcaggggaggctacaagtaagattacttattcaggtgcaatactggaagtttgcatgaggaaactagtattctatccagaaattggcggtttcattgaagaagagaaggacaagtttccaacagttaaagttcaatatcttttcaattctcctcccaagatgatcatgttggatgatgaaggccaacataaggaaaccataaaaattgacaattggaaacctgaacacatgctgcaattcctgcttaagaaagttcagccctattctgcaagctcataaacaggaattcacattcctgttatcgcacgataaaagaaaacccgaactccacaagaatgaactatttattcatgttag

SEQ ID NO: 19148 - DNA, 377 bp, Gossypium hirsutum
  Clone ID: LIB3146-012-Q1-K1-G6
agaaaatttgtgggctgatggatgtgaagaaattgacaatggaagcatctatgcgtgctgcacagaacgatagacttccgctacgagttgtagttcaagttctcttcttcgaacaggttaaggctgcaactagagctcaatcacgtaactccgatgcccgcgctacttgcgtttccaagatgagccccgatgaagaatgggacaagaccatgggtgaagattgtcggtccctcaaaaaaaagatgagtgaagtcgatacaaatgaggatggaggccagaaaaacagtaaaatgggcaagaagaagagcagaaacagtaagagtggggtgcagctgctgccatcacggtctagaagaatatttcacaagctgtgggta

SEQ ID NO: 19149 - DNA, 294 bp, Gossypium hirsutum
  Clone ID: LIB3146-012-Q1-K1-G7
cccacacgttctagatcatgcactattttttttttgtagtgccaaaatagccatgggggggatcctaagaggcgcctctgctccttatttaactgcagaagtaccctaatgagccaatcccgaaacttagctcttgagttgatggtcacccatgaaagggttaacatctgccaagctgctaaacttgttagacattgtttaaatatgtgcgagcagtagttatgcctcaaactaccgcgtgggcagagagcatatatgaacactcttctgcttcttttgattacatgtgagggc

SEQ ID NO: 19150 - DNA, 441 bp, Gossypium hirsutum
  Clone ID: LIB3146-012-Q1-K1-G8
acgccagattttactacagggggaagcttaattttaccagttgaagaccttgaatggtccgggcgagaccacatacgacatcaacaacaacggtttcaaactgatgttcggatcttcattcgatttgtcttcattcgattacaatgatgaactccaagctgatggaatggacgccatgccaaaacaagatgtctcaatctggttctagtaacaatctcaaggctgtgactgaaaccagacccgactcaaccctgctgagtaccgtgtagtgtgtttcatggttatagaattttttcaagcttgtgacgatagtgataaaagttttaacaagttttatcaggtttatcatatatggggaacagattttatacatagaacgtgactttgtcttataaataaggtaggagtctggtttgttgctctttcattctcactgttttt

SEQ ID NO: 19151 - DNA, 360 bp, Gossypium hirsutum
  Clone ID: LIB3146-012-Q1-K1-G9
ccgggtgcgacccacgcgtacggtgtactccattaaagcgacctgcctttctcctaaactggaagaagtgtacgcggagggggtccttttgctgaaaccgggatctctatacgtgtcttacgagtgggtgacgactgacaggtacagaggtgataaccctgaacacgtggaggttattcaaggtatcaaaagaagcgatgctttgcccggtcttaggaactacaaggacataacggaggttgcaaaaaaggtaggctttctaggttgttaaagaaaaagatctatccaagccaaccgccttaccctggtggaccaagcttaagatggggagaatcgcctactggaggaaccacttttttg

SEQ ID NO: 19152 - DNA, 171 bp, Gossypium hirsutum
  Clone ID: LIB3146-012-Q1-K1-H1
cccacgcgttcggaactgccttcagacagctttggtgcctatataatctcaatggctacagccccatctgatgtgcttgctggtgagcttttacaacgtgaatgccatgtaaagcaaccattacgggtagttccattgtttgaaaaactcgctgatcttgaagctgctcct

SEQ ID NO: 19153 - DNA, 297 bp, Gossypium hirsutum
  Clone ID: LIB3146-012-Q1-K1-H10
acgaaactattatcctattctttcttgctttcagtttcttcactcactggcccaagtctctggggtgaacggagatggcatgaaaaggtggaaaggggcttttggcggccaaaacaacctcatctaacaaggacacggacacggataaggacaagaagcgtccggtttctcgatcatctcgtgccggaatttaattcccagtgggttctatccaccgtcatctcaagtttaaggcatctgctaatgtgagagttggggccacacccgccgtttacttggactttattattgaatacc

SEQ ID NO: 19154 - DNA, 432 bp, Gossypium hirsutum
  Clone ID: LIB3146-012-Q1-K1-H2
agaagatgattgtatcatgaaaatactgtctaactatatacacttgaactaaagtgaaccagtgtgcgggggctcaactacgggatcaggttgttcttctgtgcaacacctttttccagacgatgaaacgatggatcatcgggacagtcgattgcatgtgctatacttaaattgaagacatacattcctcaacactcaacaccgaatcaagggcttattacacctaacagacgcggcatttttcatcatcgtggggatgttagaagctaagacatgccagacactcaccttttcgagtatcatctgtcttcgccaccaacatctctccatggatttgatacaattttacagaaacaacgctatcaaccccaccagtacgtgaagatggaagaacataatttcttcactgcagatgaagcttgttatttcttt

SEQ ID NO: 19155 - DNA, 325 bp, Gossypium hirsutum
  Clone ID: LIB3146-012-Q1-K1-H3
aaccttaagctcactccggaccattattgtgaaatgggagaaggtattaccacagggtgtgagtggatttatggctctggatgtctcccaccaagaggtccttatggatctgggatgttatgggggtatatcataccgattgactatggtatcttgaaattggttcagaactgtatttccattattcgattggtctaccattatatacatgggatatcgtgtttgtctgggcacaacaattattgaagttttttgtttaccatcagctgagactactcttagtttgctctggtttatgcatgcttgggctgggctcattcaatcc

SEQ ID NO: 19156 - DNA, 401 bp, Gossypium hirsutum
  Clone ID: LIB3146-012-Q1-K1-H5
aaaacctataaaacgaccactctttttttaaaatcgtacacaataaatcaaacgcgtgggcaaaaacaataaataaacacataaaacaaacacaaaaaaaaaaaaaaccccctccctttctcccaaccttttccccacccgtttacccaacctttcccccaacctgtttgttttaaaatcgaaagcgccctttttaaagaatcaaactttattcccccgcctttgcaacccaattttttttttttggggccccaaaatttaaattaatggccccccttttaaaaactttttaatggaaaaaacctttcgttaccaaatttaatattttttaaaaaaaatttctttttccccaattggtataaaacaaaaaagcccccccctattctcttttcccaaatttt

SEQ ID NO: 19157 - DNA, 431 bp, Gossypium hirsutum
  Clone ID: LIB3146-012-Q1-K1-H6
acggttctatctctccctgtgttctccctcaatctcagcccttaagtacaagactccaccggcgcctccatggccagtggccggagttgcgcgaaacgggcttctcagccctcctttcacggcgtgcctgaaggctaagccttctaatacgcgggaccgagagaaaaaaggaagagactcccctccccgctcgactctggtgatggcgaaagtgggttccggccggccctctaaacaaataggtatattggtttaccttcttcgattcgtttttgataaaaagagttgttaaacaaacgagccttaaattgactacaacgaaaatcaagaaaagacaaagacgctagaacagaaaaagaaccggaaacaacctttttataatatttgatctgataattcatattcactggtgtggtaaaaacaactctgaa

SEQ ID NO: 19158 - DNA, 412 bp, Gossypium hirsutum
  Clone ID: LIB3146-012-Q1-K1-H8
acgaccgcttctttatctttaaccatccttatgcttttcacagcggtaaatactaacaaaggggggatcaaatacggggaatctagattcaccgtgctgtaccgggggatccctttgggtaaagcttaggtttctgggttttatcaagaagctcatagtactcgtaacgtggaagcaaccatcgccgctgatcgagctaacttaatgcaagctgacgccggcgatttaatcagagacgcctgcatttatgaccgtgttcagctccgagttctcagcgacgacggcgcctagatccgtgtattagacttcgattcttctgtcgtacacgtatcagtggattgtgcaatagtgattagtccaaggcagcactcacttacatacaagcaatgtggatatgcaggattgaatggtt

SEQ ID NO: 19159 - DNA, 378 bp, Gossypium hirsutum
  Clone ID: LIB3146-012-Q1-K1-H9
cgagcaattagaatcatccatggtgttttgggagaacgccatacacgattttggtcgagcgcaacgtgtttgatgaatcaacgagttgttctgaaagtccatctatatcttccatacaactcagcattgaaactcaacctaaatcccctcagatcgacatgaattccgagccatccactgtagttaccccagagcccgttacatcaatggaacaacctgctccttcaccagctggggttaatgatggattctgggaacaattattgaccgaaaatccacgtttaacagatattctagaagttcttgccgaaagaaaagatcctgatacgagaaaagactaataacaaccccaagggcaaaacatattttggcggaaca

SEQ ID NO: 19160 - DNA, 308 bp, Gossypium hirsutum
  Clone ID: LIB3146-013-Q1-K1-A11
gctaagagtcccttcaccgtcctttatttttccaactaaggttaggctttaaactttaaaacattatgggtttagcagcagccctcctcttcctcctcctagcagctccggcggcttttgccgagcaatacaccgtacgagacagcagcggttggacctcgaccggagattaccaaagttgggttcaagggaaaacattcaccgtaggcgacacacttttgtttacctactgtggcagccactcggtggaggaagtatgcaagagcgactacgataattgcaacaccggcaatgctattaaattctac

SEQ ID NO: 19161 - DNA, 195 bp, Gossypium hirsutum
  Clone ID: LIB3146-013-Q1-K1-A12
cccacgcgtccgcggctttgattcttttattagcataaatagcgactgataatggagtggttgtggcagtgtctttattgtttcttttttcttttctgcaactttataccagagatcgctttgtcttttatttgaactggtggtttttagttgtagaagcttcaatcatccttgctcatggacaggtatggactc

SEQ ID NO: 19162 - DNA, 161 bp, Gossypium hirsutum
  unsure (1)..(161): unsure at all n locations; Clone ID: LIB3146-013-Q1-K1-A2
cacgcgagcgaaaccaaanaaggaaggacaaaaaaaaaaaaaaccggggccagaaanaaaaacagggggaanacaaacacgagaagagggagngcgggagaagcccncgaccaaancggaggggcgagggcgagcagcagaggcgaanacacgagaccgaa

SEQ ID NO: 19163 - DNA, 90 bp, Gossypium hirsutum
  unsure (1)..(90): unsure at all n locations; Clone ID: LIB3146-013-Q1-K1-A3
aacgcccgcgccgacccacgcggccgcccacgcgnacgaaaggggacngnnnccacaccncgngggaccacgaaggaagaccacagcaaa

SEQ ID NO: 19164 - DNA, 101 bp, Gossypium hirsutum
  unsure (1)..(101): unsure at all n locations; Clone ID: LIB3146-013-Q1-K1-A5
acgcccacacgtncgacaacgcgcgcgcccacgccgacgcccacgcgaccgncggaagggaacaacgggggggnccaaaggcaaagaacaagaaaccggaa

SEQ ID NO: 19165 - DNA, 226 bp, Gossypium hirsutum
  unsure (1)..(226): unsure at all n locations; Clone ID: LIB3146-013-Q1-K1-A6
acgcccacgcgtccgagagaaggcaacaataataatangactncaactgctttccgagcttgaagnctctgattattcaatacaaagcagttgaagtcaaattatgattattacattcacttatgccacactatatgaggtatgactccccatactccatgcttttgcgggcaggaaaatcacttccacttactgaatacgccgcctccatgctttccgtgcttga

SEQ ID NO: 19166 - DNA, 292 bp, Gossypium hirsutum
  Clone ID: LIB3146-013-Q1-K1-A7
cgacccacgcgtacggttgacaaatggatgtccagcgatatgtaacggttcatttctcgactcctggatacgaatcccgttacaaggatctcacttgatgagatccttaaggatccatggatcaggaagggttacaaagagcccaagttccactaggagcaacccaaggatgacgctcacgcctcaagctcgaagctgaatgcattcgaatggatatccttctgctcgggtttgaacttgtctgagatgttggatgagtctcacgattactgcgaacggatcatattgagag

SEQ ID NO: 19167 - DNA, 127 bp, Gossypium hirsutum
  unsure (1)..(127): unsure at all n locations; Clone ID: LIB3146-013-Q1-K1-A8
gacccacgcgaacgcccacgcgnccgaccacgcgnccgaaaccaaataaggatgaacaaaaaaaaaaaaaacccccgctagaaaaagaaacagagggaatactaacaagagaagagggagnggggga

SEQ ID NO: 19168 - DNA, 347 bp, Gossypium hirsutum
  Clone ID: LIB3146-013-Q1-K1-A9
accgacgcgtacgcccacgcgtccgcccacgcgtccggccaagattaagatcagcatggagtaccctctcaggcctcctttgtttactgtgaatctttactctcctggagaaagttcttccaagaatgactattccgggtggcagaatgaagttcgtgctatggaagctgaggtaaatcttcatatgttaaagatggtacccccagatgatgaaaactatacattatcacatcaagtctactgtcttgctatgttgtttgactattacatggatgaggcaactccatcttccgagaagaggaagagtagttctgagattgatgttggattgtgtaaacctgttagtg

SEQ ID NO: 19169 - DNA, 345 bp, Gossypium hirsutum
  Clone ID: LIB3146-013-Q1-K1-B1
aacggagggccgaccgcgcgtccgagaaagtcaactagagcggcctctgtttctgctccaactcaaaggttactagtaccaatgctttcggatgcgagattcatcgaggaatacattaagaccaataaaaggaggctacaaaatatgcatgccttatttgaagctggtctgaaaggattaaatattagatgtgcacatagtaatgctggcttgtctttgagggctgatatgagcaaattaatctcctcatacagtgagaaaggagaacatgagctaagggatatgctattaaatgcgggtaagaacaatgtaactccgtgttcagcttgccattgcattgaaccg

SEQ ID NO: 19170 - DNA, 140 bp, Gossypium hirsutum
  Clone ID: LIB3146-013-Q1-K1-B11
gagatggctgatactggtcgaagattgagatttacgtcgtggcgtttgattggacctacctggcatattgaaaggaacgacagcttggacacagagtatttcggaataagtccgacctgattttttaggaatgtttagac

SEQ ID NO: 19171 - DNA, 219 bp, Gossypium hirsutum
  Clone ID: LIB3146-013-Q1-K1-B12
cggctcgacccattcgtacacggacccgtgggtgtggatggcccatagtgggaatcaaaagagatgactttgatttgggggtaactgctgtagcgcccagcacagtcacggaataaatgattcatcgtatgagctcctaaaacacatcggggacaccttgtgatgactgctaatgtccggtgttgcagatctaccattgaaagcaaatagtgccatgat

SEQ ID NO: 19172 - DNA, 72 bp, Gossypium hirsutum
  unsure (1)..(72): unsure at all n locations; Clone ID: LIB3146-013-Q1-K1-B2
ggacgcgngggnccaggacaacagagggcggcccagaccagagacggaaaagaaanagggaaacccgaaaca

SEQ ID NO: 19173 - DNA, 282 bp, Gossypium hirsutum
  Clone ID: LIB3146-013-Q1-K1-B3
acgcccacgcgtccgacaacgcgtgcggattgataaggcgtaccctactgattacatgcaaagagggacagtgagggtccagttgaaaaaggaagatgggactatatggaatccatccattatttcaaggaagcagctgatgctacaagttgcagagttggcacctagacacccgggaaggactatgaagcaggaagcttcatcaacatcaaaagctgctgacagatcttacaagcacacgaagggcggaagaaaaaagcgatagttgcgcaaccttcctaa

SEQ ID NO: 19174 - DNA, 249 bp, Gossypium hirsutum
  Clone ID: LIB3146-013-Q1-K1-B4
cccacgcgttcgaccacgcgtgcgcccacgcgttcggctgttgttgctgccacagagtagtcctttgctttctccttctaaaactaaggatccatggaattataggagctgcaaatgcatagcatatggatcagtctgcatatgaaagtacttgttgagtgggaaacgaaaagaagaaaaagaactgattggttatgagaaatggtagacactcactgatatgtagctttatgttaaaactagcttaaa

SEQ ID NO: 19175 - DNA, 244 bp, Gossypium hirsutum
  Clone ID: LIB3146-013-Q1-K1-B8
cccacacgtccgacggcgcgagggcgattggatgaccatcgacccatcaccacaacgcatgaactagaagctgacgccgagcaccattcggacgagcaaaggggtcgcaatggtagcactgctgctgaccaacctgacatattctgtgatgaaaataaatactgtgagcggtagcagaaaaacccaatgcaggataccaaataacacgacgagacgaaagcaagaagaccatattcgggcggac

SEQ ID NO: 19176 - DNA, 356 bp, Gossypium hirsutum
  Clone ID: LIB3146-013-Q1-K1-B9
cgacccacgcgtacgggaggtcttgacccgacgaaattacttcaacacctttggtgggaaccctgtatgtacggctgcaggattagccgttttgaacgtaatcgaaaaagaaaagcttcaagacaatgccttcgtcgtaggatcttacttgaaagagagactaattgcactaaaagataaacatgaccttatcggggatgtgagaagacgtggattgatgctcggagtcgaacttgtcactgatcacgagctcaagacaccggcaaagcttgaaacacttcatgtattggaccaaatgaaagagatcggtgtattggttgggaaaggtggattttatggcaatgtatatagaatta

SEQ ID NO: 19177 - DNA, 243 bp, Gossypium hirsutum
  Clone ID: LIB3146-013-Q1-K1-C10
acgcccacgcgttcgaccacgcgtgcggtcctatccattttcgtgctcctgctaagatcctatggcgtaccattcgtggaatgattcctcataagactaagcgcggagcagcagcacttgctcgtttgaaggcttacgaagggattccagctccgtatgataagataaagaggatgggtattcccgatgctctcaaggtttttgggcttcagaaaggacacaagtgttggttggtgggcaagc

SEQ ID NO: 19178 - DNA, 249 bp, Gossypium hirsutum
  unsure (1)..(249): unsure at all n locations; Clone ID: LIB3146-013-Q1-K1-C11
aacacagggtcagtgcaattcctcccatgaaatgcaaaantcttagcgatcctatctctgattttgatacactatatgaaaaatatatgatttgcgtgacattatgattttctttgattggcgttactaggctgaaagcgaatactgctcgtatacacagatagatgagtacttcggcggatgaagttcgtggtgaaaaagtcaaaaggatgtcggatcagagattgacaaaaatatgttgtgatattt

SEQ ID NO: 19179 - DNA, 365 bp, Gossypium hirsutum
  Clone ID: LIB3146-013-Q1-K1-C12
ggcgcgacccacgcgaacgggaacatatcgaagatgtgcgcgtgcaacgagataaaggttttggttttgtgagatacagtttgcatactgaagcagctttagctatacagatgggaaatgctagaattctgtgcggaaaaccaattaagtgttcatggggtagcaagcctactgcaccaggaacaagctctgcccctttgcctccaccggctgctgcacatatgcctggtttttcagctgctgatctggctgcctatgaacgacatatggcaatgagtgaatatggcggtgcacaggtaaatgagtatgatgcatccacagggacaagcaatctatgatggtggataccaaaacgttgcaacaac

SEQ ID NO: 19180 - DNA, 140 bp, Gossypium hirsutum
  unsure (1)..(140): unsure at all n locations; Clone ID: LIB3146-013-Q1-K1-C2
cccacgcgcccgacagcgggcaccggatgatgggaataacaaagcagaaccnnggaaaaaagcacgaaagccaggagcnngcagaaaagggannccgacccgaagagcgcataaccgcagggacaagcacacaccaaccc

SEQ ID NO: 19181 - DNA, 97 bp, Gossypium hirsutum
  unsure (1)..(97): unsure at all n locations; Clone ID: LIB3146-013-Q1-K1-C3
cccacgcgcccgggagggggaaaccncgagganggggcnggaancaacaaananggggcagcancaaacaacgcaacnancnggccnggaagcagca

SEQ ID NO: 19182 - DNA, 226 bp, Gossypium hirsutum
  unsure (1)..(226): unsure at all n locations; Clone ID: LIB3146-013-Q1-K1-C4
atnggacatggtccacaagncgcacggggaaagaaggngccgncnnnngagaangnncaganatataacttggtaacttcgattctcaagttagagggtgctcctaataatggttcttcagcatttgctgagtctgttcttttgcctagtcagtcattttatctcctaagcatgttcagagtgatcttagctgctgaaatatgggagtagaagtgggcatgatgtc

SEQ ID NO: 19183 - DNA, 288 bp, Gossypium hirsutum
  unsure (1)..(288): unsure at all n locations; Clone ID: LIB3146-013-Q1-K1-C5
gatcgagccgnngagagggacagaggaaaagatatatcngacgacgcaaggatagaagcaaggggatgcatcatgggcccacctatagcattggctattggggcaaagattgttcctatgaggaaacccaataaatagccgggggaggcattatcggaggagtattctacggagtatggaaaggacacaatggagatgcatgacgatgctgacaaagcaggagaacgcgctttgataatagatgatcttgttgccactggtggaaccttgtctgctgcaatcaagcta

SEQ ID NO: 19184 - DNA, 223 bp, Gossypium hirsutum
  unsure (1)..(223): unsure at all n locations; Clone ID: LIB3146-013-Q1-K1-C6
anngaagccacgggacgggncagcaacgggggagcanccaaaganccacngcaaaacaacggacgggcaaaacacggatgacgcaaagcaaagcacngccganangaccggacaggggcaaanaacgcancaacaaaggcaaaccaagaancaaacaagggcggannccagnaacaccaagancgacgacangggaaacgcgggaaacgaaaaggagcaaagc

SEQ ID NO: 19185 - DNA, 287 bp, Gossypium hirsutum
  Clone ID: LIB3146-013-Q1-K1-C7
gacccacgcgtacgcccacgcgtccgaccacgcgtgcgaaaaaaactaaaagctttccccttttctctcctttctcccttcttctccggccaatatggtcatcgtccaaccaccatggcttgtggcctccaacgttggtggccgccgtatatggcggtcggacgaatacgaaaagaggtctgtttgaccgattggtctccccaaccctgatgtaaaaccaaaaatcctagaaaaagccttttaaaagtgaaataaaacaaccaaaccctgggttcccttctccgatc

SEQ ID NO: 19186 - DNA, 359 bp, Gossypium hirsutum
  Clone ID: LIB3146-013-Q1-K1-C8
cgacgaaccgccaagttaccttttgtaagaggcgcaatggtttgctcaaaaaggcttatgagctatcggttctttgtgatgctgaggttgctttgattgtcttctccaaccgtggtcgactctatgagtatgccaacaatagtgttaaagcaacaattgagaggtacaaaaaggcttctgattcctccaatactgggtcagttgctgaagttaatgctcagttctatcagcaagaagctgacaaactccgaaatcaaatccggaatttgcagaatacaaacaggcacatgctgggggagtccgtacggggattgcctatgaaagagcttaagaacttggagactcgtgtagaaaaggat

SEQ ID NO: 19187 - DNA, 303 bp, Gossypium hirsutum
  Clone ID: LIB3146-013-Q1-K1-D1
cccacgcgtccgaccacgcgtgcggctcgatgcccctttgagcaagttactgcaactctcttaaattttgtgaggttgtttcggaaagcacacgaagagaatatgaagcaggttgacttggagaagaagaaagctgagaaggagaaggctaagggaattaaccttacaaaaaagggtgcaaattagtctgaagatcagtttctcttttcatacaagataatatgctcctaccaagcagcagatgtttgtgcccaagagttcgattgaatgacaatgatgctgctttttggggatgtccagata

SEQ ID NO: 19188 - DNA, 406 bp, Gossypium hirsutum
  Clone ID: LIB3146-013-Q1-K1-D10
cgacccacgcgtacgcaaaaaaaaaaaaaagcggaagaaaaaaaaaaaaaaaaaaaaaaaaaaaaaaaaaaaaaaaaaaaaaaaaaaaaaaaaaaaaaaaaaaaaaaaaaaaaaaaaaaaaggggggggggggcaaaagggacaaaaagaaaaaggggcgggggggggaaaaaaaaaaaagaaaaaagggggccccaaaaaaaaaaaaagggggggggggaaaaaaacgcgaaagagggaaaaacccgggggaaaaaaaaagaaagggggggaaaaaaaaacccccgcccaaaaagggggaaaaaaaaaaaagggccgcaaaaaaagccctcaccaacaaagggcgcgacccaaaggggaaaagggaaagccccggggaggggacaaaaaaacggggggggggggg

SEQ ID NO: 19189 - DNA, 127 bp, Gossypium hirsutum
  Clone ID: LIB3146-013-Q1-K1-D11
ccgaccacctcgattatatgtagtgatgatgttgttgtataactccaatcctttggctccgtaagatagctcactactgttttgaacatcgggtttctgggtaaacacgatggatttaattgatacc

SEQ ID NO: 19190 - DNA, 364 bp, Gossypium hirsutum
  Clone ID: LIB3146-013-Q1-K1-D12
cccacgcgttcgcttacatcttttctttccttttcaacaattgcatctttcgctttcgatcccaaattctgggtttcctcttctgtccatccgtcaattcatactagttactcgaattggttaattgtaagtcgaagaaaaatgggaggtggaagggaaggcgaatcaagtgacaagggctgggtacttatgttgctggctatgccgccggacattattctccgactggatcctaccctgcacaaggatattctcctgaaggatattccccacaaggatacccaccggctggatatcctgcaccagcgggatatgctccacatcgcggatacccacctgcacgggatgcttctcatggaggata

SEQ ID NO: 19191 - DNA, 341 bp, Gossypium hirsutum
  Clone ID: LIB3146-013-Q1-K1-D2
cccacgcgtccgaaggaatttggttaataatatgcaccgtcgttatctatatattgtttagatttatgagtggatagaaaattgttgtgaagagcaagcttagcttcatgctttcctttgtttccacacctcaattccaaatgaaatgaatgaatatatcatgacagaggcattgatggctgatgatgaactggagaccgacaaacgggctgagctttaagaatgtgaatggcaggctgtgatttgcgcacctctatccattatatagtcaatatttgttactccctaaaatctgtttggaaaccttatttatagagtatctcgacattaacgggtgacga

SEQ ID NO: 19192 - DNA, 181 bp, Gossypium hirsutum
  unsure (1)..(181): unsure at all n locations; Clone ID: LIB3146-013-Q1-K1-D3
ggacgcgngggngggcaaaaaaaggcgagacacgagaaacgaagggganncgcanacaaaagggaaacgaaaagaaaccaaaagaggaaacaggagaacagggggnnnnnngaggacgaagggncnnccacggcccagggccccanacaacaaaggngaacaagggacccaaaagaacccc

SEQ ID NO: 19193 - DNA, 124 bp, Gossypium hirsutum
  unsure (1)..(124): unsure at all n locations; Clone ID: LIB3146-013-Q1-K1-D4
cgacgctaccaacaacgaggagggccaagccannnnngcaaaaagagccagcagggcacgagggccgaacccnggacgncgccaaacaaaaaccacaagggcggaaggacacagccgagggagg

SEQ ID NO: 19194 - DNA, 324 bp, Gossypium hirsutum
  Clone ID: LIB3146-013-Q1-K1-D5
cccacgcgtccgcggacgcgtgggggcaaagaagatgcacccggaattgttgatcttcaggagtggtggggtgtggattttgagataaaaaaccatgccttgaagatctatcaactgggcccgggattcaaagcttttattacacatttgtatcgaggaaaggttggtcttgatgatgctgatgcacaacacctaatggatggtctcgactgacaaggcgctgcaaaggatatctgtgcttcggttgattggcttaaagctaatggttcaaaaaaagcttgagtgaccggattttgcatggggggtgctctctatattgcagag

SEQ ID NO: 19195 - DNA, 345 bp, Gossypium hirsutum
  Clone ID: LIB3146-013-Q1-K1-D7
cggcgcgacccacgcgtacgctttgttcaacatgatgacattcaaggtgatgaccacctttatgtcccctcctcctgaagccacgttcttggcatttcatccacaagacaataatattatcgcgattggcatggaagactccacaattcaaatttacaatgttcgagtcgatgaggtcaaaaccaaactcaagggccaccaaaatcggataaccggacttgccttttcacaaactttgaattctctggtgtcttcaggggctgatgcacagttatgtgtttggagcatagatggatgggagaaaaaaaaatcgaagttcatacaagctccggctggtcgtcaatc

SEQ ID NO: 19196 - DNA, 325 bp, Gossypium hirsutum
  unsure (1)..(325): unsure at all n locations; Clone ID: LIB3146-013-Q1-K1-D8
ggataaacttttgcctctgaaactatggctccgttctctttacgtagccgtcttcaggcttctgcgctaagcaagaggcgtctcaaatccaaagccaagcatgggaggaaagggatgaagaacatggcggaaagcttcaaaagattgaaatctgaaatggaagaaataagcgaggaacaaaagaatatcagggaagggcaaaggcaagttaaagaaaaattcggaatcatcgaatccgagtgcgaggaattgaagagggaaactaggctcataatccagcaaagtgcgagaactcangttaaacttgctcttatgttccgcatac

SEQ ID NO: 19197 - DNA, 395 bp, Gossypium hirsutum
  Clone ID: LIB3146-013-Q1-K1-D9
gacccacgcgaccgggaaaaacttttgcctctgaaactatggctccgttctctttacgtagccgtcttcaggctgctgcgctaagcaagaggcgtctcaaatccaaagccaagcatgggaggaaagggatgaagaacatggcggaaagcttcaaaagattgaaatctgaaatggaagaaataagcgaggaacaaaagaatatcatggaagggcaaaggcaagttaaagaaaaattcggaatcatcgaatccgagtgcgaggaattgaagagggaaactaggctcataatccagcaaagtgcgagaactcaggttaaacttgctcttatgttccgcatactgaaagcaaggggaagccggcgaggtgaataccgctgccactctcactgaaatgct

SEQ ID NO: 19198 - DNA, 361 bp, Gossypium hirsutum
  unsure (1)..(361): unsure at all n locations; Clone ID: LIB3146-013-Q1-K1-E1
aaaggatgctaaagagggaaaagactcgaaaaacgnngacaaggctgcatcgaatggaactgcagagaaaggggcacccgtttcatctgcaaaagatggcgccgcccccactggcactgctgctaataattcctacgctgaacaagatgccgacgccacgaccgctcccaccaaggaccaaactgtcgcggaaccagaggcaacagcagcctaattgcttacaacacatttaccatggttgtctccttgccctatactttaatggtgcatgctcaaggtgacgatttcaaattgcatagcctattaccatggtatgttcctgggaaggattgagtaccatgaggtacatacacaagtacta

SEQ ID NO: 19199 - DNA, 344 bp, Gossypium hirsutum
  unsure (1)..(344): unsure at all n locations; Clone ID: LIB3146-013-Q1-K1-E10
aattcctggaggtattggctcgggcctagaaacggaagatcaggtaacccgtgaatccaacgagttggtttataataattcatgaaggaaattatcatatttccgcaagtcaattagatgcgaaatataaaaattgactttttttcgtagttgcacaagaggttttgttttttgttggaagccctctttttttttttatctatatctaacgactactcttacttgttactagacgactaagcaattcctttatattnaaaaaaaaaaagaaaaggggaaaaataaaaatttcccctaaaaatttttataaaacaaccccggggataaacagggttaaccaaact

SEQ ID NO: 19200 - DNA, 330 bp, Gossypium hirsutum
  unsure (1)..(330): unsure at all n locations; Clone ID: LIB3146-013-Q1-K1-E11
ccggcgcgacccacgcgtacgcccacgcgttcggcagttcaagtagagcacacaaatggaacattagatatggattaagcatatatatctaggattagagaaacaaaggtatagaaaatttaacattaaagttctcaatatacaagtgcaacttccagagcggaatagctgtattgtaatgcataagtgcataaaagaaagggaggcttgcagtagatgaagaatataatccccccaacccaaccacccccaagaaaagaaaaaatatgaagcaattatggganattannctctggggnnaaaagaannnggangaaaaaaaaaatacaa

SEQ ID NO: 19201 - DNA, 291 bp, Gossypium hirsutum
  Clone ID: LIB3146-013-Q1-K1-E12
ggcgcgacccacgcgtacgcggacgcgcgggtggtgaggcgaccttacatgattttaaggatgctgagttaatcaatcataacgtaagagaatggaacagggagttaatggtcaataacttcttagaagaagcagcaggtaagatcctcggtatcccactggcaaaagaacctgatgaggactttcacgcttggagcgatgaacctttgggtgaataagcagatcgaagtgcctataaaccattacaaagcatagaacctagagcatacacttgacaaacgcttaatcgaa

SEQ ID NO: 19202 - DNA, 409 bp, Gossypium hirsutum
  unsure (1)..(409): unsure at all n locations; Clone ID: LIB3146-013-Q1-K1-E4
ctnaactcctngcatgcggaaagccngatagccacttttttcttctcgttacttgtttatgcacgtggagctacatcgaaatgaaactgtatttaacaaatgaagatgcttttagtatctgaaagctacaagggaaaagagcaaccgattaaagttcttaacctttaaaaaggagtacggtagagggtattgtctgatggaagccaataccaggaccagccagcaatgctagcagaattgtctaaaagaaaaaaaaaaaaacaggtaaatgtaaccaaatactagtgcctttatttattaatctttggcatggttcatatgtcaaaagacatcgtcaatcatcagtacgacgtcgagtaaaaaattggttgaatgtagaaaaaaaatgaaaccgtttttctttaactcc

SEQ ID NO: 19203 - DNA, 58 bp, Gossypium hirsutum
  Clone ID: LIB3146-013-Q1-K1-E5
gcgcggggcacgggagccgggaagccacacaaagaagaagggaagggaccacccaaaa

SEQ ID NO: 19204 - DNA, 119 bp, Gossypium hirsutum
  unsure (1)..(119): unsure at all n locations; Clone ID: LIB3146-013-Q1-K1-E6
acgcccacgcgtccggaaaagggcagcgagacacaacccncngaagccgagcacagngaacaacacanggcaaacgaggacgggccgggagcaccacaggagacacacgaaaacacaga

SEQ ID NO: 19205 - DNA, 303 bp, Gossypium hirsutum
  Clone ID: LIB3146-013-Q1-K1-E7
cccacgcgtccggaaggaactagactaccttgttggtgctgtttcaagccccaaaaggccttttgctgccattgtgggtggctcaaaggtctcttccaagattggagtcattgaatcactccttgagaaatgtgacattctccttcttggtggtggtatgattttcacattttacaaggcacaaggcctatcagtcggttcatccctggtagaggaggataagcttgaacttgcaacatcacttcttgtaaaggccaaggcaaaaagagtgtctcttttgttacccactgatgtggttatcgc

SEQ ID NO: 19206 - DNA, 201 bp, Gossypium hirsutum
  Clone ID: LIB3146-013-Q1-K1-E8
cggacgcgcgggttgacggatgctttgtaaagcaccaaaaggactggtagaaccacagtcgggggcttaaatgactgtatcgaaagagtacttacagaataacttcttgatgaatgtttgtttcggagggacccaaaaaccggacaaaaaaattttggggggctcaccgcctataattcccaaaacaaaaagttgatgctg

SEQ ID NO: 19207 - DNA, 377 bp, Gossypium hirsutum
  Clone ID: LIB3146-013-Q1-K1-E9
tagtttcgctaaacccataatctctttacaagtcaaagcaaattctcctgctctttcagatgaactgccactggatgcttccccttctcaatcttcttctggtaaagagaagcttggagtggtggtgaagccattagagaagccacgggtagtattgaagttcatatggatggaaaaagatatagggatggctcttgatcaagtgataccaaggccatggttcaatccctttgagtccatattacttttggcctagaaaagatgcttgggaagagctcaaggttttgcttgaaagcaagccatggatatctcacatgcaaaggattcaccttctcaaccaagctactgatatcatcaatttatggcagacaagtggt

SEQ ID NO: 19208 - DNA, 123 bp, Gossypium hirsutum
  unsure (1)..(123): unsure at all n locations; Clone ID: LIB3146-013-Q1-K1-F1
gacaanccaaagcggacgaccgaacggananngaaagggcacaacaacgaacgaacaaagcaacgggacacggacagcggcgacgcaaagaaaacacgcacgaggaagaggacaggaaagaac

SEQ ID NO: 19209 - DNA, 404 bp, Gossypium hirsutum
  Clone ID: LIB3146-013-Q1-K1-F10
ctttttcacatacctcaatttacgtgataagaagctacaaccacaaccggggctgcaagtttcatccgctttgcccaagtccaagttgagtgagggaaatggggagatccgcgatcggttcggtactgaaactgtctaacaaaaaaaggaatctatgaggatactggagatgctaaaactagattaaccaaacccttttgcataggaagctaatcatttcagtgttgatagcgagtaatgggttttaattatgccttttaacagatacaagggctttgatatgccaatatgttggctgaatattgagtttgatgggagatatgattattagcctctcttcacccaagcttttgactttgaagcaatgagtatgtatgatttaagtttattagatgaatgttggg

SEQ ID NO: 19210 - DNA, 373 bp, Gossypium hirsutum
  Clone ID: LIB3146-013-Q1-K1-F11
ccggcgcgacccacgcgtacgtacattttcatacttgccaagggatctgaatttcattgatcatacaagcaatattgggtggaaagagtttcatagagctaagccaattattatagatccagggttgtacagtttgaaaaaagctgatgtgttttgggttactcaaaggagaagcgtgcctactgcattcaaactctttacaggttctgcttggatggcactttctcgatcttttatcgattactgcatttggggatgggacaacctacctcgaacagttctcatgtactacgctaactttttatcttctacagaaggttacttccacaccgtgatttgtaatgctcaagaattgcgtaacactaccgtgaac

SEQ ID NO: 19211 - DNA, 311 bp, Gossypium hirsutum
  Clone ID: LIB3146-013-Q1-K1-F12
cccacgcgtaacgcatatataatatgaaatcgaataagctgttagatctttaaaacaaaaaaaaaaaaaaaaaaaaaaaaaaaaaaaaaaaaaaaaaaaaaaaaaaaaaaaaaaaaaaaaaaaaaaaaaaaaaaaaaaaaagaaaaaaaaaaaaaaagggacaaaaataaaaaaggcgtaaatgggaaaacaggaaaacagaaaatgggaaacaaaagtcaaaaataaaaccaaaataaattaaaacagaaaagaaagggaaaaaacgtaacattaaaaaaaaaaaaaaggctaaaaaaaaaattcgcttt

SEQ ID NO: 19212 - DNA, 174 bp, Gossypium hirsutum
  unsure (1)..(174): unsure at all n locations; Clone ID: LIB3146-013-Q1-K1-F2
cnnagaaaagcagcagaggccaggaacccacagacagnngagggggacaanaacccgggcccaaagacaaacanacanggaaaggcagancgagccaacagcnacgacagcagacaaggaagaaaccgggccaggggaacgcacnacnnagaaggacgcccgggaaggaaagaa

SEQ ID NO: 19213 - DNA, 278 bp, Gossypium hirsutum
  unsure (1)..(278): unsure at all n locations; Clone ID: LIB3146-013-Q1-K1-F4
aaaaaaaaaaaaaaagcggaagaaaaaaaaaaaaaaaaaaaaaaaaaaaaaaaaaaaaaaaaaaaaaaaaaaaaaaaaaaaaaaaaaaaaaaaaaaaaaaaaaaaaaaaaaaaaaaagaaaaacaaaaaaaaaggaaaaaaaaaaaaaaaaaaagcaaaaggaaaaaaggggggcgaaaaaaaaaaaaaaggaggaaaacaaaaaaccccggangaaaaaaaacnaaaaggggaaaaaaaaaaaaaangaacacgcaggcgaacaaaaaagaagagag

SEQ ID NO: 19214 - DNA, 286 bp, Gossypium hirsutum
  unsure (1)..(286): unsure at all n locations; Clone ID: LIB3146-013-Q1-K1-F5
caggaccggaacgcccggaggcgcgccacgcgnaagagnggaagaacgagagcggccgcccnnnnnnnnnnnnnnnggaaannaaagaanaaaaagggcgaggagcaaaagggaaagaacggggaacagagncgaaaaggcagcaaggaaggggggaaaaaaaaagaaaaacaaaacacccggagggggacggnaaaaaagggaacaagaaaaaaaacgggaaaaaaaaaaaaggagaacaagaccaagggaaaaaacagaagaaaggggacagaaggaagagcgg

SEQ ID NO: 19215 - DNA, 185 bp, Gossypium hirsutum
  unsure (1)..(185): unsure at all n locations; Clone ID: LIB3146-013-Q1-K1-F6
ccggaccggaacgcccggggcgacccacgccgacgcccacgcgcccgggaccgaccggccccnngcgnaccnncccaggaggcaaagnggaaagacacgatggccgcggcccngaccgcaaanaacagaccaagaacgaaganggagacacncnggccgcccnnagacgcaagaaccaagacaag

SEQ ID NO: 19216 - DNA, 352 bp, Gossypium hirsutum
  Clone ID: LIB3146-013-Q1-K1-F7
cggcgcgacccacgcgtacgatttttgggtaactaattggccttttgatcttattttattttatagcaaaatatcccagatggaaaggttgtacgttctcaagatggagctaggtctgtaacttcacagaagccaatggtcaggtcgagtttgaagtcaatgacataatgtgttgtagatgatgcatgtggagagttgttaccaaaggagtaaggccggtgcctcagtaagtgttcctttaattgcttgcataaattgcctgttttgctctgaagttttagattggacgaaccatgaagctaagaatgctggtgctttgaatggctgctatctcaattttaaacactcgtac

SEQ ID NO: 19217 - DNA, 296 bp, Gossypium hirsutum
  Clone ID: LIB3146-013-Q1-K1-F8
cccacgcgttcgcccacgcgtgcgattgcaaccaaatgggcaaaaatattatcagttctcggaatataacaaaaacagatactattaaaattggttttaatctcttgaatacccttgatgattgctccaatgaccgatctgtcttgttctgaactttggcactttttgataatcggtttcgaatctcccattatttgtaaatctttaaccccataaatcttccccactaaagcttgtgaccttgcatgtgcttctgccgctaatggagttgcaatcgtggtatggataactgactt

SEQ ID NO: 19218 - DNA, 319 bp, Gossypium hirsutum
  Clone ID: LIB3146-013-Q1-K1-F9
aacgcgacaaagacctgatctcatacatgatattttaacaactttaaggaggaacatagacactccagtaacatgcaagatccgacttttaaaaacatcccaggatacagtagaacttgcaaggagaattgagaagactggtgtttctgctcttgctgtccatggaaggcaagttgcagataggccaagggatcctgcaaagtggaatgagattgctgatgttgtatcagcattaactattccagctattgcaaatggtgatgtttttgaatatgatgacattcagcgcattaaaggtgcaacaagtgcttcataagta

SEQ ID NO: 19219 - DNA, 171 bp, Gossypium hirsutum
  Clone ID: LIB3146-013-Q1-K1-G10
aacgggaggatgtaacctagatagtggactgatgtcagttctatttgttgcattatctctgccggtgaagctgtctgtacaacctttttatttgtattggaattgaatcaaacatctatgtttatgcaaccgaagcagatggcagcattatgctgttgtcgagacttgacg

SEQ ID NO: 19220 - DNA, 364 bp, Gossypium hirsutum
  Clone ID: LIB3146-013-Q1-K1-G11
gacccacgcgtacggatgagtacatcacacacaatgtgacccttggagatattaacaaggcatttgatctgatgcatgaagggggttgcctccgatgtgtgcttaagatgaatggatgaggctaatatgggtgaactaaaggggtgatctgtgaagaactacgtgcctatcttctacaaccgggtttgtacttccactgccaacttatgagtataaagtagagtctgttggaacaaactttttctatgaagcctagtagtttaaccttgtgaaaaatgtttggtttatgatgttaaaagaaaaccaacgatggaagtgtgtgcatgaatgaataaaataattaatctccaaattatctgaatta

SEQ ID NO: 19221 - DNA, 63 bp, Gossypium hirsutum
  Clone ID: LIB3146-013-Q1-K1-G12
gacgcgccatggagcggcgcataaaacgcagaaggtgtggtggatacgcacaaagtgaccggt

SEQ ID NO: 19222 - DNA, 247 bp, Gossypium hirsutum
  Clone ID: LIB3146-013-Q1-K1-G3
ggcatgtataatataactactaggatccaagttagacttctgtaatagatgataggcgcttctgactgaaaaatccccggatagttcccttcgccatactcgaaaatcttcatgcgccggctctgccaatgggaatctgcatgatttgatttgctacggccaaacaaaaggtattcatcacaacctctactgtccagcttctagtcgtagcatctactaaatcagaaactaactcaatgttatcatt

SEQ ID NO: 19223 - DNA, 313 bp, Gossypium hirsutum
  unsure (1)..(313): unsure at all n locations; Clone ID: LIB3146-013-Q1-K1-G4
aagaaagggcgatngcagaacgcgcagagatggtgaaacaatcaaaggagtactgggaatctcaaaccaaatatgtggtgggctattaactaacatttttatttttaaaaatgaagccaatgatgaatatgcttagctttccattaagctatggaaaacagagttaggcttagcttagctttagacgtattttgagtttttcaataattttattggaattattaattttttgtatgaacaagattaattattgaatgaagattgtggttaagggtaagccagcttgtggtgtatgaccaaatgtttcgactcg

SEQ ID NO: 19224 - DNA, 105 bp, Gossypium hirsutum
  unsure (1)..(105): unsure at all n locations; Clone ID: LIB3146-013-Q1-K1-G6
cccacgcgcccggnaacaagacccgnaancgcatgccccggcacancaaangaaggaagccagnngaaancgcaaaaacaacagcncaaggangccanngagaag

SEQ ID NO: 19225 - DNA, 198 bp, Gossypium hirsutum
  unsure (1)..(198): unsure at all n locations; Clone ID: LIB3146-013-Q1-K1-G7
ggcgcgacccacgcgaacggncgaagncgcggcagagcccgcccaggactcccnaccgnaaagaagaacaaggagaggcgcangaaaanggccggngcagnccgcaccggcgggaaggggagcaagagaagaaagaagaaggcgggccacaagacaacgaccacagacgacaaacggggacaaagcacccncaagaga

SEQ ID NO: 19226 - DNA, 86 bp, Gossypium hirsutum
  unsure (1)..(86): unsure at all n locations; Clone ID: LIB3146-013-Q1-K1-G9
ggcgcacgcgnnacgaagctnggagggcccaaagcggtcaccaataaattaagcctgggaaaggatatacacacataggcataaat

SEQ ID NO: 19227 - DNA, 309 bp, Gossypium hirsutum
  unsure (1)..(309): unsure at all n locations; Clone ID: LIB3146-013-Q1-K1-H1
cacggaccggaacgcacggggcgacccacgcgtacgctnagaccaggtacagaggcagccgctggagcagacattacggcgnagagggcagcagccgcgggccaagaaccagcaangcagaaagggagagagacngccaggagccaacacagggaccagaaggcaggaaaaganaaacnataaacccggcaaaacacaacacgcacagacatagatttcaaagcgacggagtataacaacggttctgagatcttgaactacagaacttgcaagaattacctatcttgcctgcgactttgaaaattttat

SEQ ID NO: 19228 - DNA, 373 bp, Gossypium hirsutum
  unsure (1)..(373): unsure at all n locations; Clone ID: LIB3146-013-Q1-K1-H10
acgcncacgcgtncgacaacgcgtgcgcccacgcgttcgcccacgcgtacgaaggcctttaagtatattgtgcaaaaggcttcatagatggccatgattggatgcgcattggatcttttctttatagagattgggcacccatcatatatgtatacaaagttttgtacatagtcgtggatttcatcgaacgaaaaaacttagacatatggcattatctatttcagtagatcatattgatgtaatgtaattaggcacagaacacctgggaacagacatgtgtgattggcggattatcatacgggccacattcccactgtaatcttggatcgttttgatgccgtgagaatgcatttttaaaccgcatttattaact

SEQ ID NO: 19229 - DNA, 156 bp, Gossypium hirsutum
  unsure (1)..(156): unsure at all n locations; Clone ID: LIB3146-013-Q1-K1-H2
tccccacactcaccagntgaagatatgtgattanggtagtgcaaaaatgttggtaccaggtgaacctaacatatcatatatatgctcaagatattatagggcttcagaacttatatttggggcgacggtgtataacactgctattgatatgtggtc

SEQ ID NO: 19230 - DNA, 326 bp, Gossypium hirsutum
  unsure (1)..(326): unsure at all n locations; Clone ID: LIB3146-013-Q1-K1-H3
atctcgcgaaagctagatttatttttaaaatgcattatgtgaaaagagaaataaataaataataataatgtgatagaaatacggataaccaaatgtgttggtgaataatattccatctattttcaatatgccttattttgtgttttgagtttatatgttaggatttgtgaaacagatgcaatctacactcttacttactagtctcattttttgtcaagttcttttctagctcttcgnggagggaaccttcgatgatattagttgaatgtgagaatgtcagttttatgtagtggataatgaatcagcttgaaagatgaaaaatacta

SEQ ID NO: 19231 - DNA, 276 bp, Gossypium hirsutum
  Clone ID: LIB3146-013-Q1-K1-H7
cggcgcgacccacgcgaacggattggtcgtgctctgaattatttacatcatgtggttggtgtttgtcatcgcgatattaagcctcaaaatttactggtcaatccccacactcaccagttgaagatatgtgattttggtagtgcaaaaatgttggtaccaggggaacctaacatatcatatatatgctcaagatattatagggctccagaacttatattcggcgcgacggtgtataacactgctattgatactggggctgaaggtatgtcatggctg

SEQ ID NO: 19232 - DNA, 223 bp, Gossypium hirsutum
  unsure (1)..(223): unsure at all n locations; Clone ID: LIB3146-013-Q1-K1-H8
gacccacgcgaacgcggacgcgtggggntntgggattnggaaaatggagcgnnatgagatactgaaagatattggatcagggaactttggggttgctaagctggttagggataaaaggactggtgagctttatgctgacaagtatattgaaagaggccccaagattgatgagcatgtgcaaagggagattatgaaccataggtctttgaagcatccaaatata

SEQ ID NO: 19233 - DNA, 193 bp, Gossypium hirsutum
  Clone ID: LIB3146-013-Q1-K1-H9
cggcgcgacccacacgtaacgcgggacacccggtagagcggcgcgccctaagattttgtactgtgaggtaatcaagcagatgggatcatggacctagttgggtgctgtgcgacattggtgggcactcacagttaagaaaaaaaacgagaaggaagcaaaaagcgtgaagtcaggggtgaacaacgaccgagat

SEQ ID NO: 19234 - DNA, 353 bp, Gossypium hirsutum
  unsure (1)..(353): unsure at all n locations; Clone ID: LIB3146-014-Q1-K1-A1
gaccaagccgtccgccaacccgtccgaaagtcttgaattgagaaccttttagcaagtgaggagacaatattatctatgagagatggtacagtgcttgtgataatgattctgtcaacgcactccattaagtggactctaacgcctcaaatttccaatatagtaattggtagtgatcagggaacatatatagtgaattttggaggaaaacttggaaataagttattaaatgaatgttcttatggnggaaaaacttcanngngattaatcaaaggacaacataaggttttgtttaaaatcctttaaggctctggtggatttatattcaaaataaggcagaaggaatgccttaaaaa

SEQ ID NO: 19235 - DNA, 217 bp, Gossypium hirsutum
  Clone ID: LIB3146-014-Q1-K1-A10
aaggaatgatactgcttacaacaactcttatctacaaccctctatctggtggaaggtcgtgggttataaactgggactcctcttattattatggatagcattacttgtactgcaggttaccaagaatagtacaactgcttgaccagcggtgtatagggtgttgaacttgctgcgtataccacgattatgatgtgtttctctatagaaaggacccatg

SEQ ID NO: 19236 - DNA, 439 bp, Gossypium hirsutum
  Clone ID: LIB3146-014-Q1-K1-A11
tttaaaagcaatttctattaatcaagttgccgaagttatttctgaaagatttcaagtgcaatgcgatgcgaagcatgtggaaaatcatttgaggactgtaaaaaaccagtggcagattatatgcataattcggggtgcaagtggttttggatgggatgataacatgaaaatgatcacatgtgatagagcgacatatgatgcagcagtgatggcacacaagaagtatgaaccatttttgaataaaagcattgatcattatgatgaaatggctttggttgttggaaaagatatggcaatagggagttttgcagaacatttgctgacatagatttggatgatggtaaccaagattcagtgtctatagactgtgacaattgaaagactagagagggtaagaacaaaagcatattcatctggcacattcaaacgtaaaagaaaa

SEQ ID NO: 19237 - DNA, 345 bp, Gossypium hirsutum
  Clone ID: LIB3146-014-Q1-K1-A12
gcaaaataaaaaaaaaatggagctttcagctttttataatgaaaacccaaattcattatgatctgagttttctttatttttgtctatcaagtgacttttcatttttttgggtagaaaatggaaaacccagaagcaaatcatcttcctgaggtggattcattaccagatggctttgttgagagtcctacagattcattggctccaaaaactccaattttggaacaagaaaagcctttgcaatctgattataaagaagaggatttagttgccaccgagtttggagcaagcaagggccaaaagcaaagaacatttccatttccattgtctgaaggggacaggtttaat

SEQ ID NO: 19238 - DNA, 332 bp, Gossypium hirsutum
  Clone ID: LIB3146-014-Q1-K1-A3
agaaccggggcgacccaacccgtccgtttgcatcctgcaggtgacaccccttcatcttgccgactatttgatgctattgtgagccattgtgttccagtgattgtcagtgataagattgagcttccctatgaggatgaaattgactactctgaattctcaatattcttttctatgaaagaggcattagaaccaggttatttggtcaatcagttgcgtcagtttcccaaggatcgatgggttgaaatgtggaagcaacttaagaatatttctcatcatttcgaattccagtaccctccaaagaaagaagatggcgtcaatatgttatggagaca

SEQ ID NO: 19239 - DNA, 409 bp, Gossypium hirsutum
  Clone ID: LIB3146-014-Q1-K1-A4
tcgcaccatttcagagattgccgacattttccaagggattccaaccttgaacctgttggaggatcaataaatttaactcgttattcaggttatgatgagctcaaacaagatttggctcgtaggtttggaattgaggggcagctggaagaccgagggagagtaggctggaaactagtctatgtggatcacgagaatgatgttctgctagtaggagatgacccatgggaggagtttatcaactgtgtcagatgcatcaaaatactctcccctcaggaagtccagcagatgagcgtggatggagagtttgggaactctgtcctgcctaatcaagcctgtagcagctctggcaatgggaatgcataaactagtatggttacaagctaaggtccatcagtagttcggggctcat

SEQ ID NO: 19240 - DNA, 438 bp, Gossypium hirsutum
  Clone ID: LIB3146-014-Q1-K1-A5
cttcggccaaaccagggatcctcctaaggacaactcaaataaagaagtctctattttggagaatgtttgttggaaagaacttggactcctttgtttcgtttggattgcattccttgtactgcagattaccaagaataatacaactacttgttcagcattgtattgggtgttgaacttgctgcagatcccagtttcagttggggtatctctatatgaggcagttagtctctataaaggatatagagttattgcatccaagggagaacatggcacaagttttcgagtagcccagcttgttacctactgtgcttttggagtactagctggagttgtcggccgtctgcttggcctaggaggaggatttatcatgggtccactattcttggagtttggtgtccctcctcagtatcaagtgctacagctacctttgccatgaca

SEQ ID NO: 19241 - DNA, 409 bp, Gossypium hirsutum
  unsure (1)..(409): unsure at all n locations; Clone ID: LIB3146-014-Q1-K1-A6
cttccgaacgagggaaaaaccattgttgtgaaccaccgtcttaagcaccaacaaatccccttttgggtcccatcctaccagtcctgttgctgacttggagcttcttctgtcaaacgctgcgtcgaactgaatcgttgcttttgggcactctcaaaatacatggaggctttcttcaaaccaggaccggcaacgagggcattcatcatttgtaatgactttcctgcacctgagattaacaaaattgggaatatagtctcaggagattctccaaatagtcattgtaatttttgggggtaactgtaagccccataattttctataaaattctttatatttggtctgtaataaataactagtaggatttagggtagcctcttgtaatangttataggtgctgtgtacagaaaat

SEQ ID NO: 19242 - DNA, 342 bp, Gossypium hirsutum
  Clone ID: LIB3146-014-Q1-K1-A7
cccacgcgtccggttatagtgtaaagttactgtccgataaaatcatataaagctatttttctaacaattacctgattcatctttaaaggttttatgaataggcttctctgttgtataaagttacttttgtagttcagaccagatctttcctcgtctgggaaagtaaaaccagatctctatcttcacttattaaagaaactaaaactgaaaatgcattcccttatgaagcaaagctgcagtgtgattagtcaaagtacaacataagttttgctttaaaatccttaaagtcttttgtgaatttatatccaaaataagcaagaagaattccttaaaaattttact

SEQ ID NO: 19243 - DNA, 366 bp, Gossypium hirsutum
  Clone ID: LIB3146-014-Q1-K1-A8
acgcccacacgttctagaacgcccgacctttttcgtcctttaaaatcatatacaggttgggggtaacaattacctgatgcacctttcaaggagcaatgaataatcgaaggtgatgtttaaagttacttttttaattcactccaaatctttgctccaccagaaaaaaaaaacctgatcactatctgtactcaatacacaaactcaaactgatggtgcattttcttataacgcaaaaatgcttatttattaatcaatgtacaacatccattttgcaataaaaaaaatatcaattctttttgaactatagccaaaatcttaaatgtttatgccttacacttttttcttaaccgtttaatgtaactaaaa

SEQ ID NO: 19244 - DNA, 272 bp, Gossypium hirsutum
  Clone ID: LIB3146-014-Q1-K1-A9
aaggaagctcgtcaagtacacgagcgttcagctaaggctcaaaaggcgctgggtattaagggtaagatgattgcgaagaaaaattatgctgaaaaggccctcatgaaaaaaacattggctatgcatgaggaatcatcaactaggcgtaaggttgatgacgaagtccaagatggagctattcctgcctatcttatggatcgtgaaaataccacacgtgctaaggttcttagcaataccataaagcaaaagaggaaagagaaagccggaaaatg

SEQ ID NO: 19245 - DNA, 369 bp, Gossypium hirsutum
  Clone ID: LIB3146-014-Q1-K1-B1
gaccaagccgtccgccaacgcgtccgcccacgcgtccgcacacatgtctactatcaggagtatacatagggaatgtgaaggtgctagtgcgattgcaatttggaattgatggtccaaaggatgtagctatgaaacttgctgttagatctgaggacgaagctgttagtgatgccattcatgagattgtagctagcggctaggtaggttgtcgattttttgtttgtttgtactttttttaattaatttttttttgcatatagtccggcttttatactatttgtggctttatatgagacacgggaggcttatggctacacaacacgttaaaaatgaaaaatataagctagtaggaaggattgattgcttctt

SEQ ID NO: 19246 - DNA, 97 bp, Gossypium hirsutum
  Clone ID: LIB3146-014-Q1-K1-B10
gaagggggtttgggcatattttccatcatcttatctttcaaaagccttcgcatgatttactcaaagtaatccatctcattgttatgatcttatgttt

SEQ ID NO: 19247 - DNA, 309 bp, Gossypium hirsutum
  unsure (1)..(309): unsure at all n locations; Clone ID: LIB3146-014-Q1-K1-B11
acaatcctttcgcccacccttcagacttttcttccggtggccgtcgattgggaatggggtgaagaagatgaaggggatgatttggataacacgaagcttgtccccatttttgcgcacacggtttctttccaaaagagacaggcgttagtgacatatctagagcacaacagagctaggaatgcagggtacggtgtcatggtccacagaactgtgaaccgcaccatatatctgatctagactaactntactgctttggctactcaacangacaatagtaaacttgacatgaacaccatatatgacggacag

SEQ ID NO: 19248 - DNA, 436 bp, Gossypium hirsutum
  unsure (1)..(436): unsure at all n locations; Clone ID: LIB3146-014-Q1-K1-B12
gcttatgcgaattactgaaatggttgagtcaaagctgaaggagacgactgtcaggttggagcagcagttagcagaggagcaggcagcacggctgaaggcggaagagttggcgcagttagctcaaatgaaatcaaatgatgaaatccggaagcttcgagagaatctagaaagagcacagaaagagacagaggagctccgcaagcaagctgctcggtgtgccatcctgtgactgccgctacaatgagaagatgcctctcttatgctattatatttattttcaatgttttaaattgctataatgcttttaaatcctgcgtaaatgattttaagcttttccaaagtcaactgtcttatcttcatgcctctntgtaaatattgaagtgtataagagatttcaacacactggttttattggtgtgatatatctctttcttat

SEQ ID NO: 19249 - DNA, 398 bp, Gossypium hirsutum
  Clone ID: LIB3146-014-Q1-K1-B2
agccgtcggccaacgcgtccgcccacgcgtccgcccacgcgtccggccaaatggtgacacaaggaatgtgggagcgagactctatgcttctacagctcccatacttcactaaggaattagccaagagatgccaagagaaccctgggaagaacattgagaccatttttgatctggtggagatggaagatgacgagaggcgtgagctgttacagatgtctgatttgcagcttctggacattgcaaagttctgcaatcgtttccccaacatcgatttatcatacgaggtgattgatagtgacaatgtaagggctggggaatatgtcaccttgcaggttaccctcgagagggatctagaagggaagacagaggttggaccggttgatgctcccaagtacccg

SEQ ID NO: 19250 - DNA, 344 bp, Gossypium hirsutum
  Clone ID: LIB3146-014-Q1-K1-B3
acccttccaatctttttttaagttgatctaatccaaaaataccatctcttcattttattggaatcaccgaaatgggcggaggaggagtcatgagggcggtggggaaggtcgccggggtcggaattgttaactccggccttcgtggtggtgttcagggaactccgctgtctgctgagcaatccgtcatgcgtgtcgccgcctcttctcgttctgcttcttccgtggtttctgtttctagtgaaggagtttcgtctgttgtcgacacgactgcgtcggtcagtcacaagtcatcttgggagatggtggatgattgggaattcgctggtgattttgaacaggaagct

SEQ ID NO: 19251 - DNA, 413 bp, Gossypium hirsutum
  Clone ID: LIB3146-014-Q1-K1-B4
cttccggagaaggccaaaaacccccttacctatgaatttcatgaaactattgcccccaactgaggggtggaagcctaaaccgtctctccaatcactggtcgtttacttggatgccaatcgaaatatgtagagccttctgaagctttctcgatgttgatgaaaaacgagaagagtttggaaattctctacaataagaaccacactgaagttggggctggtgtgaccggctccgatggtgggggtccctatttctggtgtgtactactcagcaacggcaagcataacaatagctttgttgcacaaggtggtgtggctaaaatctcgagaccgggatgctatagtggtgccaatgatgaatgcagcggtgctaatgatttatctcgacttcatcacatgttgctgtacgccgtaac

SEQ ID NO: 19252 - DNA, 97 bp, Gossypium hirsutum
  unsure (1)..(97): unsure at all n locations; Clone ID: LIB3146-014-Q1-K1-B5
gccgacccctgggntattattttatttttcaaaagccttctcatgatggggggaatgttatccatcttattgttatgatcttatgtttaaggggaac

SEQ ID NO: 19253 - DNA, 311 bp, Gossypium hirsutum
  unsure (1)..(311): unsure at all n locations; Clone ID: LIB3146-014-Q1-K1-B6
tttttgacaattgaaacatggactgttgttatggaaggaaaatctgcatggtgtgagggtatccttatattatgcaaacaggctaggaaagttgagctgttgttggataaagtaggcaggtgtgcaggacctgtgaaaattacggttagatatctggattaagaaaggcatattgcggttttgtcctgtcaagcatgaaaaccatcctgctgtcactgaattacgcccactcagatctgagtgctgagatgctattttacagctgctatangctgtcttgctgtcatccgtgttgagaatgcaatagtgac

SEQ ID NO: 19254 - DNA, 335 bp, Gossypium hirsutum
  Clone ID: LIB3146-014-Q1-K1-B7
ctgagagagaaaaaaagggaaagaaaagtttttatggctccccaagacaaaaatgcgagcaaaatcttgaagaaagctaacgttactggaagtacgagcagccaagaggtgcatttcaggggagtaaggaagaggccatggggtaggtacgctgccgaaatcagagatcccggaaagaaaagccgtgtttggcttggtactttcgatacggctgaggaagctgccagagcctacgacgcggcggcgcgtgagtttcgtggacctaatgctaagaccaacttccctttacctgatgaaaccaacttgtacaagggccagaaccagcagagccctag

SEQ ID NO: 19255 - DNA, 372 bp, Gossypium hirsutum
  Clone ID: LIB3146-014-Q1-K1-B8
cttgtttcaatcaattaagcaagcttctccaatctgattcaaaggccattacagctctgaggagaaatccgtatttaatggtatgtaatttcgatacttatgtgttgcctaatatcaaaactttgatagataatggtgtgcctgaatcgaatatcgtaactatgtttaattaccatccatggtctttcgttatgttgccggatcggtttaaggagattgttaaggatgttaaggaaatggggtttaatccattgatggttaagttccttcatgctgtcattttgtttagaaaagtgagtaaacctgcgatggagaagtagtttgatgtttataagaaatgggggtggtctgatgatgagatttgggaacttt

SEQ ID NO: 19256 - DNA, 297 bp, Gossypium hirsutum
  Clone ID: LIB3146-014-Q1-K1-B9
cccacgcgtccgcccacgcgtccgatcacttcttatctagcgttagctatctttaagcattcaaagaagctttcagaagtaagggagcaaacagaaggtattgctatggagagacggcttccaatgccattattaggtgcagccttggctatcggaatcaatcttgctgccaagtgggttggttaccggcatttgacatggatgatagtgtgaggacagttaatcggtttcacacatctactgtaacgacattgatcttttgtctggaaataattttgtgtcatgtagattcatttc

SEQ ID NO: 19257 - DNA, 425 bp, Gossypium hirsutum
  Clone ID: LIB3146-014-Q1-K1-C1
gaccaagccgtccgccaacccgtccgcccacgcgtccggtcactccaagtggtgcagttcactttacggcctcaaataatgactgtggagtcagagattttgatatggagaaatatcagctttccaagcattttcattttctttggcctgtcaatcatacttctctgagccctgatgggaaacttctaataatagttggagacaaccctgatattatgttggtagactctgatacagggaagactgttatgcccttgcgtggacacttggacttttcatttgcgtcagcatggcatcctgatggtgtcacttttgcaactgggaaccaagacaaaacatgccgaatttgggatgttcgaaacttgtcaaagtcaattgctgttctaaagggaaaccttggagcaatacggtccattcgctacaca

SEQ ID NO: 19258 - DNA, 396 bp, Gossypium hirsutum
  Clone ID: LIB3146-014-Q1-K1-C10
atggaggcagtgactgccttacttggaggtagaatccatgttggggtactccttcaagagaagaaagtgagagatgacagtcgaactctattacaaaccggtatttcatctgaagataatttggatgctctgggtttcactttggagcctggtcccgtgataggtcctcgacctatattctccgaagaaccccctctacagttgccgcgtggctctgcccctcaaaatttaacaagctctttagtagtcacaccagccttagataccggggattccagctgccacacctgacccacctttactgaccaattcagcaaaacctgtggatagtaattatgaacacgtttcgtcccaaactgacatgctaaccgatcaaaatctgtcagagtctagagc

SEQ ID NO: 19259 - DNA, 401 bp, Gossypium hirsutum
  Clone ID: LIB3146-014-Q1-K1-C11
agcaagacaaacatggtgatggtgtttggtgagatcactaccaaagccaacgtagactacgagaagatcgtgcgtgacacctgccgtggcatcggtttcacatctgacgatgtgggtctggatgctgacaactgcaaagtgctggttaacatagagcaacaaagccctgatattgcccaaggtgtccatggccatctcagtaagcgtcccgaggaaatcggtgctggtgaccagggccatatgtttggttacgccacagatgaaacccctgaattgatgcctttgacgcatgttttggcaaccaggcttggtgctcgcctcactgaagttcgcaagaacggaacttgcccttggctcaagcctgatggcaagactcaagtcaccgtcgagtattacaacga

SEQ ID NO: 19260 - DNA, 328 bp, Gossypium hirsutum
  Clone ID: LIB3146-014-Q1-K1-C12
tgacactcgagctcttgcagtatttctcagaagaaaaaataactcaatattgcaagtgaagaaatgggagaaaggttattgggaaagtctcaacaagcagtagttgatgcctggttttttctcgttttctttttgtcatgatgaatctagacaactatacttttggtttatgtccaaaatttaagaaatacatggctgaaccctttacagcaccatggaagaatacccccgatcaatcaaataaacttggatcgagtgattttgtcgagtcaacttttggttcgattgaaaccaagattaagaccaagatccatcaatttataaaggg

SEQ ID NO: 19261 - DNA, 365 bp, Gossypium hirsutum
  Clone ID: LIB3146-014-Q1-K1-C2
ttttaaaaggtattgtaatggcctttggtgcagagggatccagctcggagaaattttctcttgacatcattgaattacagtttaacaagtgctattgatgttcttgaatctattgatgcacatggtggggttagaaatctccttaaacagaagcagcatgttgagttcatacagaggtggcacttgttccggtacaagctggataaagcagtttctgctttgtcacattttgacttcgagatggcattctattacataaagtcttcagatcacgatctttatgcaattcacgatctcgtatacacttcatcacaagaaattgaagcatcacttgtttgtttcaaggacccaccattcccgtgggc

SEQ ID NO: 19262 - DNA, 331 bp, Gossypium hirsutum
  Clone ID: LIB3146-014-Q1-K1-C3
cttcgggccggttaaccaccgggggaccttccaaggttccactgcaaaacaatggatgggcaaagttcggatgactcaaagcaaagcactgctgatatgactgtttttgtgcaaaatcttcttcaacaaatgcaatctaggtttcaaacaatgtctgattccattatcaccaagaatatcctttcacatgttctttcataagataacaacttcgtcaaatatatcaaatgtcactagtaactggtttgtcgtatttggtaatgaaaaaattgtctagttttcttgttgagcttttaattttattgttacataaataggttggattgtctaa

SEQ ID NO: 19263 - DNA, 149 bp, Gossypium hirsutum
  Clone ID: LIB3146-014-Q1-K1-C4
aaaacggacccccctaaaacggcgaatccggccttggccaaagcaaacgcaagatagatcaaagacaatcgtccccattattatgacgggaagcaggcccgcttcatgataatgaactcacggcttgctcatacgtgcacatgatgcag

SEQ ID NO: 19264 - DNA, 296 bp, Gossypium hirsutum
  unsure (1)..(296): unsure at all n locations; Clone ID: LIB3146-014-Q1-K1-C5
cgaaaggattgaactgttgaaaaaaccacctcattttggtaaagtggaaggactccctaatccgattcttcctagtaagttatgaccttggctataattcctggtgctccatatatatatatatatatcatatcgaaaaagatcatccnccgaatatgctgaaccaagtttaaaacacttttgtatgatgacctcggtcttgcccgagttagctcacagatcatataaacaatgggttttggggggaagtattaaggagtcccctctcatttgtaattacatttctcaactttact

SEQ ID NO: 19265 - DNA, 266 bp, Gossypium hirsutum
  Clone ID: LIB3146-014-Q1-K1-C6
ggcctccgccattcgaaaccgcaggtaagaacctccaaaatcttttcttttttcttatagtagtgaaaagagaaaaatgagagtttgaaagcgagatcagtagccaaatattgaaacgaaaaatcacctcttttgatttctttgccctttttttgtgttatgtgcgcgtaaaaaaacatacaatctagtcttggggctttatagccaaatacatgtgatttgatttttgcttggtatttgggttatctctgcttttgctgtttctt

SEQ ID NO: 19266 - DNA, 375 bp, Gossypium hirsutum
  Clone ID: LIB3146-014-Q1-K1-C7
cggacgcgtgggcggacgcgtgggcggacgcgtgggcggacgcgtgggcggacgcgtgggtcatattaaaaatcttcgaaatctccctctaacatcttaacatacgattttggttgtgtgggagagagagatggacgcccttgacaacgtggtagatcctctgagagacttcgccaaggacagcgtccgcctcgtcaagcgttgtcacaaacccgatcgtaaagagttcacgaaggtggctttccgtacagcgatcggtttcgtagtgatgggattcgtcggattcttcgtcaagctcatctttattcctattaacaacatcatcgttggctccgcttaggaattgcaagctcgtagaaattggtgggggatatg

SEQ ID NO: 19267 - DNA, 162 bp, Gossypium hirsutum
  Clone ID: LIB3146-014-Q1-K1-C8
gaaaatacgttttcttttcttatatattgcttgcgtataattgatccatgggttactttaatttcatcatgatgtattcagtgaccaatgttgtttgtaatatgaatcttagatggtgaacttttatggtttatattatgtagctaagtgatttcaagagtc

SEQ ID NO: 19268 - DNA, 361 bp, Gossypium hirsutum
  Clone ID: LIB3146-014-Q1-K1-C9
cccacgcgtccgcggacgcgtgggttcatcccttgttttccttcaacccaaacaaaacctaatctttttgaaaaaatggcaccaaaagctgaaaaaaagccagccgagaagaagccagccgaggagaagaaagccgtagctgagaaagccccggcagagaagaagcctaaggctggtaaaaagcttcccaaggaaggcggagcggctgccggagacaagaagaagaagagagttaagaagagcgtcgagacctacaagatctacatcttcaaggtcctgaagcaagttcaccctgacatcgggatctctagcaaagctatggggatcatgaacagtttcatcaacgatatcttcgagaagc

SEQ ID NO: 19269 - DNA, 365 bp, Gossypium hirsutum
  Clone ID: LIB3146-014-Q1-K1-D10
cccacgcgtccgcccacgcgtccgcggacgcgtgggatgatggccaagtgtgatcctcgccatggcaagtatatggcttgctgtttgatgtaccgtggtgatgttgtgcccaaggatgtcaatgctgctgttgccaccatcaagaccaagagaactattcaattcgttgactggtgcccaactggattcaagtgtggtatcaactaccagccaccgactgtcgttcctggtggtgatcttgctaaggtccagagagccgtttgcatgatttccaactcaaccagcgttgctgaggtgttctcccgcattgaccacaagtttgatctcatgtatgccaagcgtgcctttgttcaactgtacgtggg

SEQ ID NO: 19270 - DNA, 401 bp, Gossypium hirsutum
  Clone ID: LIB3146-014-Q1-K1-D11
tcagattagggttgagcagatatggccaagtcaaagaaccacaccgctcacaatcagtcttacaaggctcacaagaatggcatcaagaagcccaagaggcaacgccatacttccaccaaagggatggatccaaagtttttgaggaaccagaggtatgcaaggaagcacaacaagaagaatggggaatctgccgctgaggaagagtaaatttaaatgaaaaagaaattacccttcattaaggtttttctagttagggctgttttactatattctatggaatttggtgttaattttacactccttttgtttttgtattggtgttttatgggattattgattatatttgttagaaaagatctgaagttgtgagcttattaatatcatgaacatgttttgatctt

SEQ ID NO: 19271 - DNA, 431 bp, Gossypium hirsutum
  Clone ID: LIB3146-014-Q1-K1-D12
gttaacactgtgcttggttcaaatgcaccacctctaacagtgaagcttgtgggggtttttacttctggttcaaaggctgcatctctagttgaaagccaagaactactgtttgatgatggaactggaatgtataacttgaaaaacttgcccaagagtatagatgttggaagttacacatttgtttttgagattgtgcttcatgaacttgagcatgaaaagatttacatcacgggaggccaaaaaaaggtacctatatttgtctcaggacttatcaaaatcgaaaatgctgaaattgcagtacttgacagtgatcttgggagcatagaaacacagaaaaagttagatttagctggacaaaaatgctgtgtcattatcagcaaaccatctacagaagctgcgtgtatcttttaagttgacaactcctcatggac

SEQ ID NO: 19272 - DNA, 357 bp, Gossypium hirsutum
  Clone ID: LIB3146-014-Q1-K1-D2
tcgaaacaattccgctggaaacttttggccctatttatggaaggagaggtcactttggcatggctgaagctgctggttggtttcttaaccatgaaataggaagatatgaaagtgcttgaaggaatatgaggttaaggttggcggagcattctcttcgagctgcattagcttcttgataattcctcatgagaagtaaaaaatggagcgagggtttagcctcaacattgtctctactgtaatttcacagtctactccaacttgcgtttccaaagaacttgctgaaaggtgttctggttttgttacgacaatcgtaatgcaaattgtgcccataaagaaggaatcaactttggccccctg

SEQ ID NO: 19273 - DNA, 334 bp, Gossypium hirsutum
  Clone ID: LIB3146-014-Q1-K1-D3
cttcgcttaaaaatcctggttttgggcctaggattcctatatattttggacctttttaaagaaaagaaaaaaaagaaccctttttacattttgtttcatggcttttatagcctgttttcactgtctgtttgttctctttgttgctgttgcgtgtctttctcattttgcagggcatggctggtgttggtggagcaggtggccggcagtcaggggcatggggctgtcagagggttggtggcgcaagtgggggtaggtttggttagggtttgctaattgtatgtgtttgggcctttgcttggttaatttaggtgggtatttgggctgttgtaaaaag

SEQ ID NO: 19274 - DNA, 424 bp, Gossypium hirsutum
  Clone ID: LIB3146-014-Q1-K1-D5
cttcgcaatgacccccttggaaggcctaatggtttttttggagaagaatgaatcagagatttctccttccactttgtatgctattgcttgtgttcttgaaaatgttcctttcatcaatggcagcccacaaaacacctttgttccagggttgattgatttggctattcaaaggaactgtctgattggaggagatgacttcaagagtggccagaccaagatgaaatctgtcctcgtggatttccttgttggggctgggatcaagccaacatcgatagtgagttacaaccatctgggaaataatgatggcatgaatctatcggcaccccaaaccttccgttccaaggagatctcaaagagcaatgttggtgatgacatggtttcaagcaatggaatcctgtatgagcctggtgaacatcctgatcat

SEQ ID NO: 19275 - DNA, 423 bp, Gossypium hirsutum
  unsure (1)..(423): unsure at all n locations; Clone ID: LIB3146-014-Q1-K1-D7
gtgcttggttcctttgatgagaatgatcctgaaggaggagatgatgatgatgatgatgatgatgatgatggagaaaaatccggtgggggtgaagctaatgaggatgaactggaatctaaaatgaagaatcttgaagttggccaagaagaatagatagtttacaaaaatttctcagctatgcagctttaggttttaataattgtagaattcattgctgagcttattttcccagcgaatacccaactcgtgttttagtagggtagcctcttctgcaggatcgttgttctccttttattttcgttagggtatgtatgatccttgaaagttggatcttcctttcaaacttttataagtcttgttgtgatagccattagccaagctntctctggacatagctaatgatgcttgagatccgttctgttc

SEQ ID NO: 19276 - DNA, 234 bp, Gossypium hirsutum
  Clone ID: LIB3146-014-Q1-K1-D8
cggacgcgtgggcggacgcgtgggcggacgcgtgggcggacgcgtgggtttttacaacaaaacaaaaaccttataaaccctagcctctgccaggccttcaactcagccaccgccgctgccattcaaggccgatttatggcctcagtcatcccagtctccgatcgcgacggagatgggatgaaacgcgacgaagctaggtaagtttcttttcttctctttgtattattattttac

SEQ ID NO: 19277 - DNA, 381 bp, Gossypium hirsutum
  Clone ID: LIB3146-014-Q1-K1-D9
cccacgcgtccgaaaaaaaaaaaaaaaaaaaaaaaaaaaaaaaaaaaaaaaaaaaaaagagagaaaaaaaaaaaaaaaaaaaaaaaaaaaaaaaaaaaaaaaaaaataaaaaaaaaaaaaaaaaaaaaaaaaaaaaaaaaataaaaaaaaaaaaaaaaaaagggggggggcctttttaaaggttaaaaatttttttgcggttttttgaaaagtaaaattttttttttgggggaacaaaaaacaaattcaagggccgtgttttaaaaactttgtgattggaaaaaccttgggtttcccaaaataaatcgttttggaaaaaattctttttttacaagttggttttaaaccgaaaaggccctaacttttggtttttttaaaaat

SEQ ID NO: 19278 - DNA, 431 bp, Gossypium hirsutum
  Clone ID: LIB3146-014-Q1-K1-E1
agccttcggccacagccttcggccaagccttccggcaccattgtgatcctcctaaaaggcgattccctttagagaaagggttcccccaccatggtggcctactggaaatgaagaatggtggccacaactaggattgcccgaagatcaaggccctcctccctataagaaacctcatgacttgaagaaggcttggaaagtgggggttctcacagctgtgatcaagcatatatctcctgatattgccaagattcgcaagcttgtaaggcagtccaagtgcttacaggacaaaatgacagcaaaggagagttcaacttggcttgccatcattaaccaggaggaagccttggcccgagaactttaccctggatttctgccacctttgtcctcaggtggtggaaaatgtatctttggttataaatgactgcagtgag

SEQ ID NO: 19279 - DNA, 172 bp, Gossypium hirsutum
  Clone ID: LIB3146-014-Q1-K1-E10
gcaaagggcaagagatcggttgaagaggataaaggccgaaccttatttcaaaaaaggcaaattgaacctggtgattgccacctgtttcaaaggaaaatcaactgttgttgctgaagaaaccaaggttaatttaactgcttcttttctttgcaaaagatttcgacttttaaat

SEQ ID NO: 19280 - DNA, 406 bp, Gossypium hirsutum
  Clone ID: LIB3146-014-Q1-K1-E11
ggaacgtggaggttcgcacgacggagaacgtaaaagggtcaaagcagaacataaagatcggaagcgttaaaggaatcaacggtgggaaagtaacgaaatcggtttcttgccatcagagtttgtacccgtatttgctttactattgccactcggtccccgaggtccgggtctatgaagcggatattctggatccgaagtcactggagaagatcaatcatggtgttgccatctgtcatttggacacatccagttggagttcgaatcatggagcgttcttggcattgggttcgggtccgggtcggatcgaggtgtgccactggattttcgagaatgacatgacttggaccatctctgattcttaaactagaaaagcttctggatgggtaaatttagtaaattttaccca

SEQ ID NO: 19281 - DNA, 364 bp, Gossypium hirsutum
  Clone ID: LIB3146-014-Q1-K1-E12
caaacatcccccgcccctaaaaaactctcactcatataatttaaattcgaagaatctgctacatcaaagggaaatcacaaatcccatttctcttccttacatcttttctttccttttcaacaattgcatcttttgcttttgatcccaaattctgggtttcctcttctgtccatcaatcaattcatactagttactcgaaatcgttaattttaagttgaagaaaaatgggcggtggtagggaaggtgaatcaagtgacaaagggctgttttctcatcttgctggctatgccgccggacattatcctccgcctggatcctaccctccacaaggatatcctcctcaaggatatcccccacaaagata

SEQ ID NO: 19282 - DNA, 368 bp, Gossypium hirsutum
  Clone ID: LIB3146-014-Q1-K1-E2
aaggattaacctttggttggacccaacaaaagaataccactcctactctgtcctctggaacatgtatcagatagtgttctttgtggacgacataccaatcagagtgttcaaaaactgcaaagatttgggagtgaggttcccattcaaccaaccaatgaagatatactccagcttatggaacgccgatgactgggccacaaggggtggtctcgaaaagaccgactggtccaaagccccattcattgccacatacaagagcttccacatcgacggctgcgagtcgtcggtggaagccaagttctgcgccacacagggcaagcggtggtgggaccaaaaggcattccaggacctcgacgcctatcagtggc

SEQ ID NO: 19283 - DNA, 346 bp, Gossypium hirsutum
  Clone ID: LIB3146-014-Q1-K1-E3
ccaaccgggtcgttttttttttaagggccacccttcgtttgttgaacgagggaaattacttgcatagtggagccgtagcgacatttgtagacttggtttcctccgcagcaatatacactgctggaggtaccttcgttggaacttcagttgagatcaatatttctttcatggatgctgctcatgctgatgaggatattgagatagaagcaaaggctttacatgttgggaaggctgttgctgtcctcagtgctgagtttaagaagaaaagtaatggtaaaattatagctcaaggtcgtcatactatgtatctacctctaccaaagtaaatgtagataacatattaatg

SEQ ID NO: 19284 - DNA, 432 bp, Gossypium hirsutum
  Clone ID: LIB3146-014-Q1-K1-E4
cttttctgcaagggaaaaaagaaaagatttttttggatcaaggccgaaaatgaaatatgatggtaaacctccactggctgctaaatcgcctatccgcctacgaccccgtcgctcccttccatcaaactctgcctccctgcaaacccctccaggttctttaacgagatcccagaagccgattcttacttggggcattgaagaatccgagattcgacccgagtaccgctctatttcttgtgagttacgagttttggctcggacggttagagatgaacttggaaatggggaaacggaagccgctggtttaggcaagaagactgtgctcagcgtcaccaattcttgtccagtggtcgagagaggtcggttttacgaggaatactcggcgagaagaaacgagaggcttaagacgaagaaaggcgaaacccagaatga

SEQ ID NO: 19285 - DNA, 240 bp, Gossypium hirsutum
  Clone ID: LIB3146-014-Q1-K1-E5
cagcgttcggccagccttcgggcaaattcgatcctgttagattgagtacgatctctattgtcaaggcatcatttaagactaccgagagagcttgagaatatttactgaactggaggaggagagaagagctaggtaaaagcctgagaggcagcagctcggggtatgttatcgagtgatagtgaacgacaaattgagagactgaggactatttggagggctgcctatttacaacttgtatgc

SEQ ID NO: 19286 - DNA, 267 bp, Gossypium hirsutum
  Clone ID: LIB3146-014-Q1-K1-E6
ttaaactgaatctcaaatttttacacagggaaaaccacacctttttgcttaccattttctttcccggcacacaattggcctaatccccaggggccgggtttatgccaaatggagttttttgggagagaggaattggttttaatttaattggagatggttaaggccttacattccaattatgtgttaattccaagacttatgtaatttttaattatgtagtgattcaaagacttatgtaatgtttctaattatgtagtgattcaaaga

SEQ ID NO: 19287 - DNA, 365 bp, Gossypium hirsutum
  Clone ID: LIB3146-014-Q1-K1-E7
tctggccaagtccatttgggatgagatccacgattgctttggctgagaaagggataccatacgagtacagagaagaagatttgaggaacaagagtgatttgttgctgcagatgaaccctgttcacaagaaaatccctgttcttatccataatggtaaacccgtttgtgagtctgtcattcaggttcagtatattgatgaggtctggcatgataaagctcctttgatcccttctgatccttatcaaagagctgttgccagattctgggttgatttcgttgacaagaagatatatgacctggggagcaaaatatggaagacaaagggagaagaacaagcaaatgcaaagaaaggatttaattgagtg

SEQ ID NO: 19288 - DNA, 379 bp, Gossypium hirsutum
  Clone ID: LIB3146-014-Q1-K1-E8
cccacgcgtccgggcatgttaagaatggtgttaaagctacttgttttcagacgatgaatctgcaaaactaacgatcgattcttcttgtttttacacttcattgggtgattgggagatttgccctggatcatactagcaattgactcaccggtgtggcatatggtcttcgtaattatgattctgtttttgagaatcattagttagtttgctgcgtaccattgaatttatggttctcaaagtgttggatttatgtctctctctctctctctctctctctctctgtttctgccttcagtgtcagtctttatgtcgatcacatgatcgtaaaggagactgctgtgtcaatagtttatataaaaaaagaaaagcagctctgctc

SEQ ID NO: 19289 - DNA, 338 bp, Gossypium hirsutum
  unsure (1)..(338): unsure at all n locations; Clone ID: LIB3146-014-Q1-K1-E9
cccacgcgtccggtccaagagaggttgatgcttggccttatttcactgattgtagggcactgtctaaagatatggttgctatcttcttctccgagactgcaccgaggacatctgtcgttggcggtcacttttttgcatcttaggttagctaataaaaggaaatagttccaggagatccgccatattgttattgcaatttttgatggcatctgtaaatcccatagttttcgatagaaatttttagtttcgggttgtaataaatagctattaggatctaagctgttatactgtaatagtttataggcgcttcttattgagaaatccctngaaagttcttc

SEQ ID NO: 19290 - DNA, 420 bp, Gossypium hirsutum
  Clone ID: LIB3146-014-Q1-K1-F1
tcggccaagccttccgccaacccttccggtgcttgacagattcatttgatccaaataactcagaacatcagaaaattaaggctgaaattgagattggtgatggtcttccggatatcaggttgactggacagtgcctggaagctctaaaagaggctggttttgagataatttgggagaaagatcttgctgttggctctccactcccttggtacttgcctttggatacaagccacttctcattgagtagcttccgtctaacatctgttggacgcttcatcaccagaaatatggtaaaggctctagaatttgtgggattagctcccaaaggaagtcaaagagttcaagattttctagagaaagctgcaaaagggttggttgaaagtggtaggaaagagatatttacgcctatgtatttctttt

SEQ ID NO: 19291 - DNA, 228 bp, Gossypium hirsutum
  Clone ID: LIB3146-014-Q1-K1-F10
cccacgcgtccgcccacgcgtccgatcattttgcattgaaatgttctcgaaatgtaagggcgcttgtaagggtgtttcttagaacattaggaagaacagttgctgtaggggtcgtgacccgaatagttgaggagctggtatagtttgaagctaagactgaagacggttgtgtactaattcaaggctgacagtgattataaaatgagtaaaaggcaattcattttgtgc

SEQ ID NO: 19292 - DNA, 431 bp, Gossypium hirsutum
  Clone ID: LIB3146-014-Q1-K1-F11
ggatcacccacctcaaatgctaatggttcgtgggaagcatttccttcaaatggagagccagaggtgacttctgcatggcaaacaccagctgctgagcctggtaaagcggattgggaattggcgttggttgagtcagctagtaatttatcgaagcagaaagctggattagcaggtggttttgatccgttgttactgaatggcatgtatgatcagggggcagtgaggcagcatgtgagctccagtcagctaagtggtgggagtgcaagtagtgttgcgatgcctggccctggcaaggctgcttctcaagtgctggctttgcctgcaccggatggtacagtgcagccagtaggacagcaagatccttttgccgcatcgcttacagtgccaccgccttcgtatgtgcagatagcggacatggagcagaagcagca

SEQ ID NO: 19293 - DNA, 422 bp, Gossypium hirsutum
  Clone ID: LIB3146-014-Q1-K1-F12
gcataaccgccttggaggataaagaggaaccccaatgcccaccgggcctccgacagtacgagacaatggccgtcttgagacccgacatgtctgaagatgaaaggcttgctcttacccagaagtacgaggagcttcttgtcgccggtggtggcatgtatattgaggtatttaatagaggggtcatcccattagcttacagcatcaagaagaaaaataaagctggggaaaccaacgcttacttggatggcatttacctcctctttacctactttacaaaacctgagtcaataacggctctcgaagcggcgttgaatacagacgatgatgttatccgctcaaccagcttcaagataaggaagaggaagtataattagattggtatgtacctacatgtctgtatcttgagatgaatatgattagga

SEQ ID NO: 19294 - DNA, 372 bp, Gossypium hirsutum
  Clone ID: LIB3146-014-Q1-K1-F2
ggtttttgaagaggggggaatctccaatttgcttaagggatctgccagctcctttgagggttggaattgcatacataccactgtacagggaatgtgttgaggtggggggtcgtctgttatcgcaaaggctgagggggcagcttgttgaagctgttcgaatgcttggaggtgggtcattagaagaggtaagtcaaggcagagagcttctagctactttggaacatcaccttcctccatttttggttcgtgcccccagtgttggttagacctcttggattttcgcatgcccttgaccctatattatcccatgtgccatacgtaataatatcattttagcagttggtacgtcacaaagcttctaagtttgtcaaa

SEQ ID NO: 19295 - DNA, 433 bp, Gossypium hirsutum
  unsure (1)..(433): unsure at all n locations; Clone ID: LIB3146-014-Q1-K1-F3
tcgccacgcgttcgggtcaaaggattcaagaaattgaagtccgcaggactgccggttccatggttgaatggggaacgaaaatttattcagcgaagttggttgtgtatgactttgtttgttcatgactttatcagctgtataattgacaaagacatcaatgtttctaggtttaatgcaaaggaagtttattttaaagttctttcaatcaatttgctgcttctcagcacttctttcccctgacaactttccttatatgcagggatgtcttttttagcattcagtcagagactatcatgcaaaagtcatgcagggctttctcttctggagacggaacatcgacacctgtggttcagttcttcgcacatagttattggattccagcttgcaagtggcacaatacgtctnctcttcatttactttctttcatctatga

SEQ ID NO: 19296 - DNA, 432 bp, Gossypium hirsutum
  Clone ID: LIB3146-014-Q1-K1-F5
tcggaatatcaaaatgcccaattttggttttgggcctttttaaatgaaaatgacaatgtctattttcactgaatcctgaaaatgaaagatttttcaggtattaaaaagaaaatggttactgttattcatactctgtttgatgactgttgaaaattgcgtgtatacttgttgctaaaatggtatgcagttcaagggttcagaagttgtggaacgccaaaatgaccatttctcacgtacttattatggcatttgtatacctctgagctaatataggtttggttttatttagagtgacagatgttgtttagatggactaaaattcttgtcacatagtgctaaacctattgtttgaaaaccaatcattttaaacttaaaatgtatgcccttttggattttaaagactcttgctaaacttttcattttgtccctagc

SEQ ID NO: 19297 - DNA, 434 bp, Gossypium hirsutum
  Clone ID: LIB3146-014-Q1-K1-F6
gggtcgacaccacgcgtgcgggataaccgacttggagggctaacgcggggttggaagcggtgagaaacccgctgtgccaaccgtgacttctgtgaggggatcaccagctgccgcctcctaaaaccggcgctggaatttgtttcccctcaacctgtttctggcgctgatatcctggcaccagctgttagagactctgtcgtaatatcagggggtccaagttgggaagtgcagatggggagaaaagacagcttgggtgctagcaaagaagcagcaacaaacaatattccaggtccaaattcaacggtgccaatgcttgttgccaagatccaaaacgttggactctcattcaatgacatgattgcactttctggtgcacacacgttgtgaatggctcgatgttcgacatttagttcacggcttcaaggctcaaatgg

SEQ ID NO: 19298 - DNA, 405 bp, Gossypium hirsutum
  Clone ID: LIB3146-014-Q1-K1-F7
cccacgcgtccgcccacgcgtccggaaccacttgatttctgccaccatgagtggtgtgacatgctgccttcgtttccctggtcaattaaactcagatctacgcaagcttgccgtcaatctcattccattccctcgcctgcatttctttatggttggctttgctccccttacttctcgagggtcacagcaatacagggctcttactgttcccgagctcactcaacaaatgtgggatgccaaaaacatgatgtgtgctgctgatcctcgccatgggcgatacttgactgcttcagccatgttccgtggcaagatgagcaccaaggaagttgatgaacaaatgattaatgtccagaataagaactcatcttactttgtggagtggatccccaataatgtgaagtctac

SEQ ID NO: 19299 - DNA, 229 bp, Gossypium hirsutum
  Clone ID: LIB3146-014-Q1-K1-F8
cataactctagaggcacaggtggacgtgttggcggaggtggaggaggtggtggtggtggtggacggtctggtggaactgatttgaagcgctatgaatgtggagagcctggacattttgctcgggaatgccaaacacctggttgttctggatgacgtcacaaacgccaacctagatatcgtaagaacccaaactatcgtctcagaagctacaatgctcatggactgtccc

SEQ ID NO: 19300 - DNA, 224 bp, Gossypium hirsutum
  unsure (1)..(224): unsure at all n locations; Clone ID: LIB3146-014-Q1-K1-G1
cttcggccaagccttcggccaagccgtccggtttcagttagaatcctgcttttatccttttctttggtagtaactgggttcaaaatgatgatgaatatggaaactttttttttcttaacatctttggttctgctgtcatacatgggagctgtcccatggatttatatgctatgtgagacaatatgttattttattgcatgttgattaatggattgtacaccgna

SEQ ID NO: 19301 - DNA, 374 bp, Gossypium hirsutum
  unsure (1)..(374): unsure at all n locations; Clone ID: LIB3146-014-Q1-K1-G10
ggctggtgtaatctggctatacagagtggtgactattatcccactggattttatcaaagttgcaatccgctatgttcttagtggaaaggcttgggataaccttttggagaacaagactgccttcactacgaagaaagattacgggaaagaggaaagggaagcacaatgggcagctgcgcagaggactctgcatggccttcaaccacctgaaaccacaagcattttcaatgaaaggagcagttacagggaactttcagaaatcgcatagcangccaagcgcaaggctgaggttgcaaggctgaaggagctgaatacactgaaggggcatgttgaatcaatcgctaagctcaaggggcttgatatccataacattc

SEQ ID NO: 19302 - DNA, 425 bp, Gossypium hirsutum
  Clone ID: LIB3146-014-Q1-K1-G11
gaaaggtcacttagcaaaccatccactgccccctaaaacaacccaccaccaactcagtaaccgcaccgactcagcttcttcctcgtcctcttcatctggcgatgatgagcaagagaaaagcagggaaacactactcgaagacaaatctttggtttatgggttaagagagaatcccaagaagagtttcaggttcgcagatcctgaattctcattcgccggtgattccgcctccgtcgtccaagacagagagagcgagactgagtccaggaacccaactcggagacgatccaagagaaaacccaaggtgggtactgctaatgcaacaacagcaactgacgaaatcaagaaaccgaagctgttgacgagtttccccagtttgatcgactcaccggcggagccttgaaccgtgagctcagtctccgata

SEQ ID NO: 19303 - DNA, 401 bp, Gossypium hirsutum
  Clone ID: LIB3146-014-Q1-K1-G12
cccacgcgtccgcccacgcgtccggaaaggactgttacaggttattgaacaccaaccaggtttctcctatctcgatgaccccatgaatcctttatatacccttttgcctaaactacgacaagtgcttgttgaaagggctctcaaggattgtaaaggcgatgaaaatgggttttcaatattcaaaaggatcccagttttcatagaggaactcaaggaaagactggaagaagagttaccgaaagcaagaacgaaatttggaaatggagagtttgggattgctaataagatcgaaaaatgcaggagttatccgatatatggatttgtaaggactgaaattggaactcagcttcttattggtgaaaaaagggtgagtccaggagaggatatagagaaaatttatg

SEQ ID NO: 19304 - DNA, 320 bp, Gossypium hirsutum
  Clone ID: LIB3146-014-Q1-K1-G2
taccaagggttggaaggcgagttgaaaaatttccacaaaggatgggatgtacttttgacaaagatgatgaaagagcatgaggaaacagcttatgaacgcaaggggaagccggattttcttgatataattatggagaacagagaaaactctgcaggggaaaggcttagtttgaccaatgtcaaggcgcttctgttgaatctattcacagctggcaccgacacatcctcaagcataatcgaatgggcattagctgaaatcctgaagaacccaaaaatactgaacaaagctcacgaggagatggataaggtgattggcagaaa

SEQ ID NO: 19305 - DNA, 330 bp, Gossypium hirsutum
  Clone ID: LIB3146-014-Q1-K1-G3
caaaatttacgggatttataccgagatttcgccctcaatttcccctgcttatacatctaattccccttcaaacccaacttatagcccaaccagcccatataattctggaggcaatcctgactccagcccaggttcgccacagagcagtccaagtgctgggtactcccctagtgctccagggaatgctccatcctaaactggtcagtacactgcaagcaacacggatgatcaggcagctgatgacggaaaacatgacaggagttaatgataaggcacgccgttttggaaaagctcgataaaaccaacgtggaatgcggcgaagactttttc

SEQ ID NO: 19306 - DNA, 452 bp, Gossypium hirsutum
  Clone ID: LIB3146-014-Q1-K1-G4
cggggcgacccaagccgtcggccaacccttccgccaacgcgtccggttaactggaaatcaaaatatgaggctgctgggatatggtatgaacaccgtctcattgatgatatggtggcatatgctctaaagagtgaaggtggttatgtttgggcatgcaagaactatgatggtgatgtccagagtgatttcttagcccaaggttttggatctcttggattgatgacatctgtgctggtttgcccagatgggaaaacaatagaagcagaagctgctcatggtactgttacacggcatttcagagttcaccaaaagggtggtgagaccagcacgaacagcatagcatctatctttgcttggacacgtgggcttgcacacagggcaaaattggatgacaatcctaaactcttagatttcattgagaaactagaggcagcttgtattgcaactgtgga

SEQ ID NO: 19307 - DNA, 355 bp, Gossypium hirsutum
  Clone ID: LIB3146-014-Q1-K1-G5
cggacgcgtggggccggtcggtgcctcctctcttccatctctttcgtgtcgattatacaaattctgaacttgtgaccatgatgtcttgaattttgattttgcatctacccttctttgatacaacactgcatttggtagactagttttccctcattcttttccaaatgaaccttttcttcgaggatctgatgcaatttcatcatgccatggaagtgtctttttggtgattttctgatgttacaacgtagaatttatattccaaatacagatatttaacatcatctgtttattactctgatccttgtactgaaaaaaaaaaagggaatagaaaatgaaattctcgattaaggatggc

SEQ ID NO: 19308 - DNA, 369 bp, Gossypium hirsutum
  unsure (1)..(369): unsure at all n locations; Clone ID: LIB3146-014-Q1-K1-G6
ccaggaaaaaattgacccattgttgccaccaactcttatggagcctaaaggcgaccatagggcctggtaattactcgatggaggtaccattgcaagtgagaactatagggtgagattttaaaaattttcatgtttacgtctcattatgattatacaaacacatgattaagattgtgaaagatgattacagaataagcaagtgctgttagctgtgcagtatagaaaacaaaaaaaaaaagaaaaagaaaaaaggagggatttcttgacagtgtcatttatgatgaagttttttattcttcattttattattctctatgataccatttatattcaatgaaggaaactcatactgaatagtttttattcnna

SEQ ID NO: 19309 - DNA, 421 bp, Gossypium hirsutum
  unsure (1)..(421): unsure at all n locations; Clone ID: LIB3146-014-Q1-K1-G7
cgaagaattcggggtaagaaagcaaaggtgaacttccctgatgagatgccacgcacctctccaaaacgtgtgattaagacaaatgatgagaaaccacttcccatgtcaaatttgagccctgttgaaccaaatatctaccagaatttcaattgcttgaacaaaccagagcaggtcttctatgataccgtgggtttcgttgaagagaaggcaccaatggatccatttgcttatgtggacactgttggattgaaaccctttggccaatctgacaatacccccttgtatttcagctcagacaggggaagtacttcctttgactgttctgacttcggctggggagaacatggtgcanagactccnganatatcatctgctcttgaagctactatggagggtgatgatttttggaagatgcaaccct

SEQ ID NO: 19310 - DNA, 352 bp, Gossypium hirsutum
  Clone ID: LIB3146-014-Q1-K1-G8
gttggttgatgctgcggtcaggagttcgagctctgataagacagcagtagttgctctcgcaggtggtgttggtactcttgatgagatgtttgagatactggcattgatccagcttgaaaggattggatcagagcttccggttcccttcattgtaatgaactatgactcattctatgcaaagctcttagattttcttgatgattgtgaggattggggtaccgtctctaagggagaggtttcgtctttgtggaagatctgtaacactaattctgatgctctagtgtacttggcagagttttatgatctgccattttcggatgaacacaagcatggaacagaagcgagaagcgca

SEQ ID NO: 19311 - DNA, 399 bp, Gossypium hirsutum
  Clone ID: LIB3146-014-Q1-K1-G9
aacccgggcggcccccgcgtcgggttacaagaagaggttcgagaggcaaaaataaaggttttgggaagcctgaagcaggatggtgatgaagatcgctcagaatggaaaaaattagctcaatctctcaagtctgagtaccctaggtacactccattgcttgtaaagatcttggaaagtttgctttcacgaagcaatattggggacaaaatccactattatgaaaagattataagtgcggcagatgaggtgattgatagtatcgatgcagatgaactggcaaaactcttttcacttaaagctgatcctgaggatgaggattcagaggaaaaataagacgatgatggagacaactcgtgatcgattagcagaagcactgtaccaaaaaagacttgcactggc

SEQ ID NO: 19312 - DNA, 391 bp, Gossypium hirsutum
  Clone ID: LIB3146-014-Q1-K1-H1
aacgtttggtttaaaacttaaaagaatggcccgacccaaccaaactgcccgtaagtcgactggtgggaaggctccaaggaagcaacttgctaccaaggtgattcattgctgcccgtaaatctgccccaaccaccggtggtgtgaagaagcctcatcgctaccgtcctggaactgttgctcttcgtgaaattcgaaagtaccagaagagtactgagcttcttatcaggaaattgcctttccagaggcttgttcgtgaaattgcccaggacttcaagactgatttgcgtttccagagccatgccgttcttgctcttcaggaagctgcagaagcataccttgtgggtctctttgaagacaccaacctgtgtgcgatccacgccaagcgtgttac

SEQ ID NO: 19313 - DNA, 334 bp, Gossypium hirsutum
  Clone ID: LIB3146-014-Q1-K1-H10
cccacgcgtccgttattatcaatcaataccagcttcccttatccgccctttgtttttatgtagcttttggattcaatctgaagattggagcctcgggttctgttttgataaggggcatttgagtttaagagttgatcttttgtttgtccgacaatggcgactgctattgggatgattggtgggaagggttgttcctcgtggatgcaagttaaggaaaagggaaagaagaagatggccaacagagttagagtttattgttcttctgctccgtcggtgatggatccttataaaactctcaggatccaacccggcgcctctgaatctgaggtcaaaa

SEQ ID NO: 19314 - DNA, 323 bp, Gossypium hirsutum
  unsure (1)..(323): unsure at all n locations; Clone ID: LIB3146-014-Q1-K1-H12
caacgtaaagtagcaccgcttcatactgtgcgctgatctcgacctctaagacaacacaaataagcggttctggcatcatgtgtacgctaagtatttaacaaatctgtgttgaatatatacctcacgcatcgaagttcctaagaatacacttccattntgaccgaataaatgantttcttgagaagaactaataccttggtgaacgtaccatcaaagggagccttgaagcatactcttgcatacacacaggaacttgataaagactttctctcagttttgaaaatgagatccttgactctcttgggaaatcttcagataccgac

SEQ ID NO: 19315 - DNA, 397 bp, Gossypium hirsutum
  unsure (1)..(397): unsure at all n locations; Clone ID: LIB3146-014-Q1-K1-H2
tccggagtgtacatgatgtatgggggtctgaccccacccttgttggtcaagtgggtttgtgacatggcggaaaagttctatggcgtgcagcgtaaaaatccatttcaagatatgttcggagacatgctgaaggtgagtgatgcatccaactaatactcatcttatcttaagctgtttattaacaacaacattccttgtgcagatgatgtgatgagttgtcggctcaaatccctttccagtttctgattagagaagcaatttccttttcatctccaaatatttatgatattgtttcctatttatttataatattaattaatgttataccctttgtaaacaagatggatccattctttgttaaatcaaattttgcctccgnnnaaaaaaannnnnnnna

SEQ ID NO: 19316 - DNA, 163 bp, Gossypium hirsutum
  Clone ID: LIB3146-014-Q1-K1-H3
atggttttggtggttaagttaaggatcattcttaagttcttaactgtaatgcctttagatcttgactctagatctatatcgttatgtacttgtttgtgtactcgagtgatgttataatgatttgtaaccttaagattgatcgaataattttcatttgcaaaaa

SEQ ID NO: 19317 - DNA, 394 bp, Gossypium hirsutum
  unsure (1)..(394): unsure at all n locations; Clone ID: LIB3146-014-Q1-K1-H4
cttcggtgtaaaatcccatttgaagtttgcaatttccccgtaaccgaaactcgctttcaccccctccctccctttgcttggttgaaagaagggaaaataagtaggatgtgtggatcaaatatgttattgggttttagggggagcataagttcttgtttcagaggaaccacaatacgagacaaggggaagctggagcaagcagaagagaagatgacatttcaagagatcaattatgggtcttttagcatcattattccttgtttctcaaagcaatgattgttaattttgccttgtcttttcattttgaaacaatatgtaattttgaatagctaaagctgagttattcattagaactcaatatatatatatctgngtgtgtgtgtgtttgagctac

SEQ ID NO: 19318 - DNA, 414 bp, Gossypium hirsutum
  Clone ID: LIB3146-014-Q1-K1-H5
agccttccgcagccaaagaagattgagatgacgactatacgccgattttgctgcaatgatcttcgtttcgcatccgtcaatctcgaccacttaacggaaacctttaacatgtcattttacatgacatatttagctcgatggccccattactttcatgtagctgaaggccccggcaatcgaataatgggttacattatggggaaagttgaggggcaaggtgagtcttggcatggccatgtaacggcagtcactgtagcgccagaatatcgtaggcagcagctggctaagaaactgatgaaccttttggaagatatcagtgataagatagacaaggcatattttgtggatctgtttgtgagagcttctaatacaccagctataaagatgtatgagaagcttggatatgtaatatac

SEQ ID NO: 19319 - DNA, 273 bp, Gossypium hirsutum
  unsure (1)..(273): unsure at all n locations; Clone ID: LIB3146-014-Q1-K1-H6
aggcggcggcaaacgcggtgctttaaggcgtggcttcggcggcgggagatccgaccgtgggccaagaggtcggcgccgtggccgcaaggatgaggaggagaaatgggttcctgttacaaaacttggccgtttagtcaaatcnggaaaatcacatccctcgaacaaaattacctncactccctccncatcaaggagtaccaaatcatcgaccaactcgttggcccttcacttgaagacgaggtgatgaagatcactcccgtccagaaacaaaca

SEQ ID NO: 19320 - DNA, 386 bp, Gossypium hirsutum
  unsure (1)..(386): unsure at all n locations; Clone ID: LIB3146-014-Q1-K1-H7
ccgtccgnnggttggctgatgaaaatctcagannggtttttctctcctacccgcctcaaagagggnncgaggacccttagtgtggtgctgtnnacttgtgaanntttcggagcccaaatgcccactcgtaacccatttgcnnattttcnntcctttgaagggcatgnnngcttggagcccctgggattgggtgttttaatgggtgtttgnnngagtgatangcnnntatattatnnnctctcnngtctttaatantnntcttcaaattgtacnnncggagacccgaaggngnngttaacntcnnntcgagnngaaatcnnngaggtgannaatgtctaatagnnngtttcggcaccttgtgcttacttnngttcaatgnngctgaa

SEQ ID NO: 19321 - DNA, 337 bp, Gossypium hirsutum
  Clone ID: LIB3146-014-Q1-K1-H8
ctggcatcaaaatcaatgcaacaaagtcgatgatagggcactgtctgggtgcagcgggcggtttagaagccattgccagtgtgaagccattaccacgggatggctgcatccctccataaaccaatttaatccagagccatcagttgagtttgacactgttgccaacaaaaagcagcagcacgaggttaatgttgcaatctcaaattcatttggatttggaggacacaactcggttgtggcattttcagccttcaagccatgaaagtctgttactacatgttctgcatttgttaggaaagatgatgatagagaaatatgatccttaaaagagcgagtc

SEQ ID NO: 19322 - DNA, 303 bp, Gossypium hirsutum
  Clone ID: LIB3146-014-Q1-K1-H9
aagacattggtctccatcaaagatgtaaaagctgctttcataggccacgatcatactggggacttttgcgggaatttagagggaatatggtttcgttatggtggaggctttgggtaccatggctatggaagaattgtcttggcacggagagctagagtcatattgcctgaacttatgaagggcgataatgaatggatggtagtggagaggatcaaaacatgggagcgtattgatgacgagaatctcatcaagattgatgagcatgtgctgtgcgagttgtcaccatctatatgattctctttt

SEQ ID NO: 19323 - DNA, 267 bp, Gossypium hirsutum
  Clone ID: LIB3146-015-Q1-K1-A1
ccacgcgtccgtggaaatatatggtatccgtggtccctcttaccagttcttcaatataggtgccatcaactggcgaaaatgatatcgaaaagtgcttaacatgggaagtttatagtcagcttgcaagaggaatgactatacagttcctcgacactgctgccaaagaattaggatgtaatatttccatataacatcgattaactttcggattatcagtataaataccctttttctttttttaaaaaaaaaaacctaaaaataataact

SEQ ID NO: 19324 - DNA, 302 bp, Gossypium hirsutum
  Clone ID: LIB3146-015-Q1-K1-A10
gttggagtggagaattcaacgggacgcattcacctgcccttgcgcatttctggctacaatccccgtcccagatttgaaaaaaaatccttatcaaaggctgcgtcaaaattaagtttgatgcatattcccaaagggggcttccattttgcatagatcaccttcctgataacccccttttccttgacgccttctatttctttcatgtatcattgaatgaaccttgatatgtcaaccgccgatttagcataaaaaaaaaaaaaaaattcgataaaaattttattaaaaaaataaaaaagggtaat

SEQ ID NO: 19325 - DNA, 372 bp, Gossypium hirsutum
  Clone ID: LIB3146-015-Q1-K1-A11
cccacgcgtccgctgttggtgcatatggaggaaggagggagatcatggagatggtggcaccagcagggccaatgtaccaggctgggaccttgagtgggaacccattggcgatgacagccgggatacagacccttaagcggttgaaagagccaggaacatatgaatacttggataagatcaccggacaacttgttcaaggcattttagatgctggaaaaaagacaggacacgcaatctgtggagggtatatcaatgggatgtttggatttttcttcacagaaagacctgtttataactttgacgatgcaaagaagagtgatacaacaaaatttgccacgttttataggggaatgctggacgaaggtgtatact

SEQ ID NO: 19326 - DNA, 225 bp, Gossypium hirsutum
  Clone ID: LIB3146-015-Q1-K1-A12
gtcgaatgtttcagatttaagattcgttgcatattattgtaaatggataagaatatgggattgttcttgtagctggctgcattttgaagataaaaatgtgccttgctaaaataaacaacaatcctttcaatttcctgtttatagaatgtatgccattatggggttttaaaaaaaaaaaaacatgaaaaaaagttcaataacatgtaatatttgtttataaaaata

SEQ ID NO: 19327 - DNA, 378 bp, Gossypium hirsutum
  Clone ID: LIB3146-015-Q1-K1-A2
ctccttggtgtggtcactgtaagaagcttgctcctgagtacgagaagcttgggtcaagtttgaagaaggctaaatccgtcttgattggaaaggtggactgtgatgagcataagagtgtctgcagcaaatacggtgttcagggctacccaactattcagtggttcccaaaaggctctttggaacctaaaaaatatgaaggaccacgaactgcagaggcccttgctgagtttgtcaacactgaaggagggaccaatgtgaagatagccacattaccatccagtgttgtagtgctaaatgctgataattttgatgaggttgtccttgatgagaccaaagatgtgttggttgagtttatgcaccttggtggggcattgcaaa

SEQ ID NO: 19328 - DNA, 384 bp, Gossypium hirsutum
  Clone ID: LIB3146-015-Q1-K1-A3
caaggaaggcatcccaccagaccagcaaaggctcatctttgccgggaaacaactcgaggacggtcgcaccttggccgattacaacatccagaaggagtcgaccctccatttggtattgaggcttcgtggtgggatgcagattttcgtcaagacgttgactgggaaaaccataactttggaggtggagagttccgatacgatcgacaatgttaaggcgaagattcaggacaaagaagggattccaccagatcagcaaaggttgattttcgctgggaaacagttggaagatggaaggactttggctgattacaatattcagaaggaatccactctccaccttgtcttgcgtcttcgtggtggtttctaagctctcctatgaaaatg

SEQ ID NO: 19329 - DNA, 439 bp, Gossypium hirsutum
  unsure (1)..(439): unsure at all n locations; Clone ID: LIB3146-015-Q1-K1-A4
gaaaaaaaaaaacaccccccttttccatttgccttctctgctagggtttataaaactcatcatcgccaccgtcgtcatgcctccttgaagccacccatgatttccaccgtagacggtggtcggggccacgtgaaatcgggttagtctcttcttcttctttgattcttttttttgttttaaagtaagttaataaataaaaaaataaaataaagtaaaaaaataaatataaagatcgagataacagaggaaaaaaaatcgaagttaaccttctaaattttcttttttgtttttgatttctgatgttcgtaaccaaaaaaattacaaagggatgtttcggcttttataaccgaattacatagattcngttttgtttttttgcttggtgtctgctactattttttggtttttcttcttggttcttggattttgcatgttagtt

SEQ ID NO: 19330 - DNA, 451 bp, Gossypium hirsutum
  unsure (1)..(451): unsure at all n locations; Clone ID: LIB3146-015-Q1-K1-A6
gtttcgtgcatcatcatgtacatatcattacaatcatataatttagtccaacaatttaacatagataagttcatttcattataatccattatcttataaaaattatatatcattagcattcatcaacattcgacgtccaaatcaagacgaggacattttcattcgtatcataatattatgacttttattcatacctctactactttctatttattccgttcatcttatcaagtaagccatatacactacatcatataagcattaagcaaatatgaatatttatcacatatgcatcataaacttttattcatacttttctgaaccgagacttatcataatcataattgtactcaaataccttcacataacattgaacatggntggggcagctcggntggagagnaccctgtctaaataagacggtactcatacgcgtcgaaagacatgacac

SEQ ID NO: 19331 - DNA, 217 bp, Gossypium hirsutum
  unsure (1)..(217): unsure at all n locations; Clone ID: LIB3146-015-Q1-K1-A7
ttacgtttggtggcaccacatacctgtttttcttggctctctttgcggcccttcttgtttgttggttccttcttggtacttactgttttaagaatttgatcaatttgtagcttttatatttttcaactctccaactccattaatgtaaagatgtgcttgtaagattcaaaanaaaaaaaaaaaaaaaaaaaaaaaaaaaaaaaaaaaaaaagggcaa

SEQ ID NO: 19332 - DNA, 346 bp, Gossypium hirsutum
  Clone ID: LIB3146-015-Q1-K1-A8
cccacgcgtccggatctggactaaagaagctgatatttcttgtggaaggtgatccggggacttcagaagctgctgaaagcatcaaaacagcgtgcttcacaacagagatcctggaggggtttgatgttcagagaacaagtagtttacatgataccctgaggaagtatgcgtgtcttactcgagcaatagctcaatattataagctgcatctgcctgagggccattctaaattgtctggggtctgtcctccctttaatgaatttatcataaggtgccaagaagctggataaaaatgaccaggcagtgatggatattgccattctactttatggcccgtacccccagg

SEQ ID NO: 19333 - DNA, 418 bp, Gossypium hirsutum
  Clone ID: LIB3146-015-Q1-K1-A9
acgaaaacatcattttttttccactcaatggaatggctacatctcagttaacagcatcaggaatgacagtatcagtaaggaatttggcttcatttgaaggattaaggccatcatccattgtgaaattctcttcctttggatctttaaagcctgggtctttgactcaaaggtcctttaagggtttggttgtaaaagcggctaccgttgttgctcccaagtacacctcgattaaacccttgggtgatagagcgttggtgaagatcaaagaaacagaagagaagactgagggtggaattttgctaccaacaacagctcaatcaaagcctcaacgtggtgaactggttgccatctgcgaggggaagacaattggtaagaccaaattggaatgttctgataaaactggtgctcatgttatata

SEQ ID NO: 19334 - DNA, 317 bp, Gossypium hirsutum
  Clone ID: LIB3146-015-Q1-K1-B11
ggtacctttgttttatcagaacacgtccaccttggaagcattcttggagccattatcatagtctcagggattgcgtattacgtgcaacgagtggtgatccgggaacgaggaccggtgttccttacgtcattcagccctctatgcatgataatcactgctgctctcggtacctttgttttatcagaacacgtccaccttggaagcattcttggagccattatcatagtctcagggctttacactgtggtgtggggtaaaagcaaagatgggaaaagcccaaaaggtgatgaaaaaagcaaaggcttgcaagaatggcc

SEQ ID NO: 19335 - DNA, 338 bp, Gossypium hirsutum
  Clone ID: LIB3146-015-Q1-K1-B12
acggtcaaatgttctatattggaccatctttttttatgatggtgatcagagaaaaagatgcgactgctttggcaatgggctacacttcgaacatataaaaggaacctctcttagattaacgaccataatcagacccttatgtgtattcaatagaccccatcatgtggttgctttgataagatcaccggacaacttgttcaaggtattttatatttctcgataaaatacaggacacaccatttgtgaatggggtatatcagggaaatttggatttttcttttcacaaaaacctgtgtgtaactcttacgaggggcacaatagtgatacaccagcaattt

SEQ ID NO: 19336 - DNA, 396 bp, Gossypium hirsutum
  Clone ID: LIB3146-015-Q1-K1-B2
ggtaccagcacataagttgtatatattggaactataaccatttaatttgttctgctttcatggataccataagctttgcctcttagtcttccttttataattccttctgaaggcctcataggaggtaagggaattctgttttgcagattctaaagggataaaaaattcaaagagtaaaaagaagaaccgaagaagaaaagatcagcagaagaccacatctgccaatgaagccattaaaaaccataataaggaaccaaatggtcttaaccaagtgtgccatagtgccgaagttggtcagaaagttcgggctggtgttggtgctacctcaaacttacatgatgtcgaagataatatttttgacaataagaatgagcttgatgatggtgatattgatga

SEQ ID NO: 19337 - DNA, 452 bp, Gossypium hirsutum
  Clone ID: LIB3146-015-Q1-K1-B3
agtacctgagctcacccagcaaatgtgggacgcaaagaacatgatgtgtgctgctgatcctcgtcacggtcgatacttgactgcatctgctatgttccgtggtaaaatgagcaccaaggaagtggatgagcagatgttgaatgtccagaacaagaactcctcatactttgttgagtggatcccgaacaatgtgaaatcgaccgtttgtgacatcccacccactgggctgaagatggcatcaacatttattggcaattcaacatccatacaggagatgttcaggcgtgtgagtgagcagttcacagctatgtttaggaggaaggccttcttgcattggtacacaggggaaggcatggatgagatggagttcactgaagctgagagcaacatgaatgatctggtctccgagtatcagcagtaccaagatgcaacagctgatgatgaagagtacg

SEQ ID NO: 19338 - DNA, 337 bp, Gossypium hirsutum
  Clone ID: LIB3146-015-Q1-K1-B4
cttcggcacgaatcttaaaatttggccggccgttccttttttccataacaggaatggcgacggaagttgaaccccccgccaccaccgcacccaaagaccccacccaacctcaccttgaagtaaaactcttcaatcgctggagcttcgaggaagttcacgttgctgatatctccttgagtgattacattggtgtccaagcttcgaagcatgctacctatgtgccacacactgctgggaggtactcaattaagcgtttcaggaaggcccagtgcccaattgttgaaaggcttacaaactcacttatgatgcatggccgaaacaatgggaagaagcttat

SEQ ID NO: 19339 - DNA, 357 bp, Gossypium hirsutum
  unsure (1)..(357): unsure at all n locations; Clone ID: LIB3146-015-Q1-K1-B6
tccggaaatatatgaaacaaagctccatgcctataccaaatagaaaccagggtttcatagacatggacacagaaaaaagcctggaaaatatcgaaaagcaaagtgggtggtaagtagctaaaatcttaatacccaccaaaaagaaaagcttaaaaacttgaaattaagagattttccatggatgattgtaggtggacaaggagcacttgggcattcttgaatgaacctccagttcttgaccgacctacanacaattaccaaccacagttccatgttgccagcctcgctacttcaaagtttaacaagacttctggaatcagtgccaactacgcgttttaactcctaatgggatcttat

SEQ ID NO: 19340 - DNA, 340 bp, Gossypium hirsutum
  Clone ID: LIB3146-015-Q1-K1-B7
acgctgacgcgtggttgaacatcttgactagttgagggagctgggttctggtacatttgggactgtatatcatggcaaatggaggggatcagatgttgtcatcaagagaataaaaaaaagctgcttcacaagtcgatcatctgagcacgaaagattgaccaatgaattatggcgggaagcttacatcctgtcaaaactttatcattcaaatgcggtcgcattatatggtgtggcgcaagatggaactggaggaacaatggctacttgtacacatttcatgtgttatggttcccttaagcatgttttactctccaaggattggcagcttgatcgtatgaag

SEQ ID NO: 19341 - DNA, 317 bp, Gossypium hirsutum
  Clone ID: LIB3146-015-Q1-K1-B8
acgctgggggacggttgattgaacagacggctatagagaggcatgatgaagaggaccatgcggctaatatactcaaggaactggttctagtcatcaactattgacctgatatgcgtgatgggtatggtgatataaagcctgagaatatacatgatacagttactgaacatatgaagctagcacatcttgtattaactgatatgatgtcaaatgtgcataactggacatgtagagtaggcaaggctgcttatgtatgcctaaatgtattaacaggccattataccgaaaaagtagacatctggagtgatggtgttcta

SEQ ID NO: 19342 - DNA, 445 bp, Gossypium hirsutum
  unsure (1)..(445): unsure at all n locations; Clone ID: LIB3146-015-Q1-K1-C1
cttcggccaacccgtccaattttactcctactatggttctgcatctcggttccactcaccttagtcggaggatacttcggagccaaggcacctcacattgaataccctgtccgaaccaaccagatccctcgagaaatcccagctcaaaaatacccatcatggctgttagttcttggtgctgggactctacctttcggtaccctttttatcgagcttttcttcatcatgtcaagcatatggatgggacgcgtgtactacgtcttcggctttcttctcatcgctatggtcctcctcgttgtggtttgtgccgaagtatcattggtgttaacttacatgcatctctgcgtagaagactggaaatggtggtggaaatccttcttcgcttctggttcagtcgccatctacatcttcttatactccgtanactacctcatattcgatctca

SEQ ID NO: 19343 - DNA, 448 bp, Gossypium hirsutum
  Clone ID: LIB3146-015-Q1-K1-C10
gttaatgagagcatcgcgagagctgcacaaggatacatgatgttttatgtacagaaggtgctatattataaagaaagtgaaaaccaaggcacatcatgatattgatgagagataagaatttggttgtttgactcaaatcatgcaaaggcataaggtggtctacataatttgagattgtgattaaatatgggctagtttcgtatacgaggaaaacaagttgggccaggtttaaatatgggctagtttcgtatacgaggaaaacaagttgggccaggttggtcaaagttggggacggcttgctctatcagtgcacttcgaggataatttataatactcaattagagtgttaagtgagcctaaatttttgaggcactccaaatattcaggaaaatcaagtttatgaggtattaattccttaaattgatttctgaatttcatagtcaagtgt

SEQ ID NO: 19344 - DNA, 367 bp, Gossypium hirsutum
  Clone ID: LIB3146-015-Q1-K1-C11
gttaatgatagcatagtgagagctgttctttgatacatgatgtcttatgtacagaaggtgctatattataaagaaagtgaaaaccaacgcacattatgatattgatgagagataagaatttggttgattgactcaaatcatgcaaaggcataaggtggtctacataatttgagattgtgattaaatatgggctagattcgaatactaggaaaacaagttgggccaggtataaatattttctagtttcttatacgaggaaaacaagttgggccaagctggtcaaagttgatgactgcttgctctatctgtgcacttctaggatacattataatactcaattataatcgttagtgatcctaaatttttg

SEQ ID NO: 19345 - DNA, 388 bp, Gossypium hirsutum
  Clone ID: LIB3146-015-Q1-K1-C12
acggctgatgcaatggctagggccaaggttttcgacattgatctgcaaaagcaactgagaccctacatggaatccatggtcccactccctggaatctacgatcctgatttcattgctgctaaccaaggtgaacgtgccaataatgtcatgaaggggaccaagaaagaacaagttcagcaggtcatcaaagacatcagggagttcaaagagaaaaacaaggtggacaaggttgttgtactctggactgcaaacactgagaggtacagcaatgtcattgtggggctaaatgacaccgtggaaagccttatggcttctttggagaagaatgaatcagagatttctccttccactttgaatgctattgcttgtgttcttgaaaatgttcctt

SEQ ID NO: 19346 - DNA, 371 bp, Gossypium hirsutum
  unsure (1)..(371): unsure at all n locations; Clone ID: LIB3146-015-Q1-K1-C3
cccacgcgttcgaccacgcgtgcgcccacgcgttcgcccacgcgtccgcccacgcgtccggtagcatttagtggaaagaaccgactacttggcagaggagtgcatctgagatttgtttagggttttttttaaactcccccttttgtccatttttgtcattctataaatatataatagagagagatttttactgaaaggtatggtctttgcctggataatacattaaattcatgttttcaaaanaaaaaaaaaaaaaaaaattaaaaaaaaaaattaataaattataaaattttatatattctcctttctctggtttttattaaatatataatttaactttcgttacatatatatggggggggggggggggg

SEQ ID NO: 19347 - DNA, 303 bp, Gossypium hirsutum
  Clone ID: LIB3146-015-Q1-K1-C4
acgttctttcgtccggggccgtaaaaactaatgtattcaactttgggttaaatttacaagcgtttcctactccttgatcttgtaactgccgtcgatattctcaaacctaatgaagtggcagctcgagatcttgctgaaactaccactgaaaacaactatggtagaggtggctaccgaaacaacgcaagctgtgctagaagataaacgctcagcttataatggaagatgacacggcagtaacggacggtattgaggcgggcacagacgttatggaggtcagcacagaaagtatcgcggtggaca

SEQ ID NO: 19348 - DNA, 306 bp, Gossypium hirsutum
  Clone ID: LIB3146-015-Q1-K1-C5
acgcccacgcgttcggaaccggcctgccttttggttttcctttttttttcccaaaacttttttttaaacccatttgctaaaaatgcactgggtttttccagtgttgctggccgctatcggagttactgcactgctcgttgttactccggtaagtgggtaccgtccatggacgtacttaaaacccaacagctccgacttaatgttcggaggctctaagaaatgtgagggctcatcggagtgtatccatatgagatatcatatgggtccagtccttactgctaatatcaccatccacccaatctggta

SEQ ID NO: 19349 - DNA, 358 bp, Gossypium hirsutum
  Clone ID: LIB3146-015-Q1-K1-C6
acgctcacgcgttcgacaacgcgtgcgctcaaacataactgaaaacataatcatatgcaaaccctactccatcgatgacatggtctcaagctaatcagtgcgcctagtattgtagtgcatgaaggatatggaacccatggcctcaactgctctaacatgtgtacatgtgcgacgtcaaacgggtcgacgtataaagtattagcagcgtggaaggaacactctaactgctagttgcaactgagcatggaacctaaacatgcaagctagaaccactcgagaccgatatactacatgcacatgcttgcaaactgtcgataggaccatatccggctttaatactaaattggctggcggtctt

SEQ ID NO: 19350 - DNA, 176 bp, Gossypium hirsutum
  Clone ID: LIB3146-015-Q1-K1-C7
tttttattgttgtttgttaaaaggggggggttattatttgggggaaagcataaaatctttgtgcttaaatattttatatgctggcggggcttggggttcaaaggggggggcggtttcatgggtccccttttgttttctggggggggggctggaattatatttttttgtggtgggct

SEQ ID NO: 19351 - DNA, 393 bp, Gossypium hirsutum
  Clone ID: LIB3146-015-Q1-K1-C8
gcttatttcgaagaatatagaaaagagcctggtagaagcatttcaaccattgggcatatccgattggaactcccttttttggattgctcatcctggtggtccagcaatattagatcaagtagaagccaaattagcactgaagccagagaagctacgagccacaaggcacgttctttcagagtatggtaacatgtcaagtgcttgtgttctatttattttggatgagatgaggaagaaatcaagggaagatgggcttcagaccacaggagaaggattggagtggggagtgctctttgggtttggacctggcctcactgttgagactgatgtgctacataatgttgctgcttaaagttaaacaaacatgccttttaagtaattggtcgtgctcca

SEQ ID NO: 19352 - DNA, 428 bp, Gossypium hirsutum
  Clone ID: LIB3146-015-Q1-K1-C9
cgacatggatgctgatgtgataaccatcgagaactcacgttcagatgaaaagctcctttctgtattccgtgaaggagtgaagtatggtgctggaatcggccctggtgtctatgacatccactctcccagaataccatcaaccgaagagattgctgaccgaattaacaagatgcttgctgtgcttgagacaaacatcttgtgggttaacccagactgtggtctcaagactcgcaagtatgccgaggtgaagccagccctgaacaacatggttgcagctgccaagctgctccgcacccaacttgcgagtgccaagtgagaagcatatccaaagtcggacatcatcctttatatcgaaaatgatccagaggaaatttggcttaaatcatttgaataactgtgtgttggaagtattgttaggcgtatcatat

SEQ ID NO: 19353 - DNA, 413 bp, Gossypium hirsutum
  Clone ID: LIB3146-015-Q1-K1-D1
cttccggtcaatggtgattttaatggatccctgggtagggagctgctgaccgaaagcaagctgaaggatcttctgcatggatcagaatatgttctcacttatgaggataaagatggtgattggatgcttgtgggtgatgtcccatgggagatgtttactgatacctgcaaaaggctgaggatcatgaaaagctctgatgctattggactcgctccaagggccgtggaaaaatgccggaaccggaactagctagtttgatacatgatttttgctatccgatgcagttctttctgaagaaataagaggatgttggagcgggcaagagatcacagggtatctgcttttcacatggtgctactttttatcttctatttgcatgggaatttatatcatgtacgctttgttttatctac

SEQ ID NO: 19354 - DNA, 428 bp, Gossypium hirsutum
  Clone ID: LIB3146-015-Q1-K1-D10
gaaaactaaaaaaataagaacccatttgtctttcataacctgctgtttatttttcactgaagttgatgaaaccctaatcagtagctcatatttttttggagctgtgagacttaaaacgacatcatctgggttttgaagaaccaagaatttgttaatgaattagttcggaataagaggctaagactaggaaaaatgtgaatacttataatctttgttgtgggttggggtgctttaattgtggtattttctgcgcttgtaaatataaaatgtggtctggcagtgtattccttgtttgcagcgagtgaaagtgtcgctgcttacagcttttatactgctgccattaatttaattagcttcactgtcattatagggggtttaatctgtacatactcattaggatgattatcatgtgaattattcaaggatgc

SEQ ID NO: 19355 - DNA, 316 bp, Gossypium hirsutum
  Clone ID: LIB3146-015-Q1-K1-D11
acgataccctactctagaaaaatccgactccttttgatgttatattcaaaatgggagcatacaaggtcttttccgagttatgccgcacgttcagatcgttaactatacgagaaaccaagctatacttgaagcacttgaggattccgaccgaatccacatggaggattacgatataggtttacgagctcaatgggcttattgtatgcatgaacttcctatgaggagcaaaggagttcgaacgtcattgacaatgacagctcatgttttcatttagacataccatactatcgaactcatgattataagggaaaatctt

SEQ ID NO: 19356 - DNA, 217 bp, Gossypium hirsutum
  Clone ID: LIB3146-015-Q1-K1-D12
cccacgcgttcgggacactacgttattttttacttttactttctccaaagatccattctagattgactaataattatctatagactccgtattgagagtcattaacagaacagtttacatttgccggacatgttatattgatgcgtatgatgcatgattaacggacagcatcaatcatatttaaacatcaatgtcatttgcatctgaaaaagaaaaa

SEQ ID NO: 19357 - DNA, 431 bp, Gossypium hirsutum
  Clone ID: LIB3146-015-Q1-K1-D2
cacgcgttcgaggacgcgtggggtcgtgactcagcaacctcgttagctcctggcttccggttccaccccaccgacgaagaactcgttcgttactatctaaaacggaaaatcttgaacaggccttcctttgatgccatttctgttatcgatatttatagatccgagccttgggatctccctgataagtcaaagctgaagagcagggacttggagtggtactttttcagtgcactggacaagaaatatggaaatgggtcgaggaccaatagggcaactgagagaggctactggaagacaactggaaaggaccgtgcaattcgctttaaggaaagagtggttggcatgaagaaaactcttgtttaccataaaggtcgtgccccacgtggcgaaaggactaactgggtaatgcatgagtaccgtcttactgatga

SEQ ID NO: 19358 - DNA, 360 bp, Gossypium hirsutum
  Clone ID: LIB3146-015-Q1-K1-D3
accggttgatgccgaggatgcaatcgcaccacaacgtgctagcaaggaacatgaccatgtcttccacacctgttgtttacactccttcaaatcccttcaccttgtaaattgttagagggaaaaggatcaagagtctaaatagttatacagaacggtaaagatgagatgaatcgattattctattccgtggccctcattaatatatttaatataaaggtaaagatgaatttatattacaaaaaaaaacccgcggttaaaaaatttaaaaattttatactttttccctaaaaaaaaaaaaaaagggtaatggtttttaaggggtttcaaaacaaatgggtgaaaaaaaaagggtattttctt

SEQ ID NO: 19359 - DNA, 414 bp, Gossypium hirsutum
  Clone ID: LIB3146-015-Q1-K1-D4
acgagaaggtttaattttaccaaccttgcttggttctggtgtccttaagtgggtttcaatgattctcatggtgtgcatgacaatgatgagtgcacccaaggcagccaaagccgccatcacgtgcagcgacgtggtgaaccacttgatcccgtgcttgtcctacgtacaaaacggtggtacacccgctgctgcatgctgcagtggggtaaaagcactctacggcgaggttcagacctatccggaccgtcaaaacgtgtgcaagtgcatgaaatcagcggtgaacggaattccgtacaccagcaataacactaatctcgcagccggcctacctgctaaatgtggtgtacaacttccttacaggataagcccctacactgactgcaacaaggtgcaacgacgttgatgatgatgata

SEQ ID NO: 19360 - DNA, 342 bp, Gossypium hirsutum
  Clone ID: LIB3146-015-Q1-K1-D5
acgcgcgcggggtttttttgctgtattgagggattgaatacaccaggtaacaactgatggatcatcaagagctaaactagtctcacacaagacagaagcgctataagagcaggaatacacgatggagcaagacccagctgagctttaggtggcacaggaacgatcggtacatgccaggcacatcagcggacaatttttaaatatcgacaatcccgagttggtagctgagcacagttcataggaacctcagacatatatagcacctaacagtcttattgcatcacctacagaacaatcagctcctgtgatgtatgcacggctagcatctaaaactgataaagc

SEQ ID NO: 19361 - DNA, 404 bp, Gossypium hirsutum
  Clone ID: LIB3146-015-Q1-K1-D6
acggtcaagtcagataggaaaaagagttcagcagctgctggaaagcctcagaataaacgaagtcatagtgctggtagtgcccgaggcagtggaccacctgctttccgtcacacaaaagcagctaagttttcaaatgtttatccccctttcaatcgccgaaacccagctccctcagcgcagcaaagcccggctgcacgattttccgcacagtataactatgttggccagaatgttttcgaggctcctactgctccttatgcatcagcatatggtgtgactcactcacaaagtgctgctgcagttactcaacagcactacgtacacccggtggaaaatttgggggttttcagttttccaaccagtggtgcttatgggggtcaaactagttatgtagcatatgacta

SEQ ID NO: 19362 - DNA, 368 bp, Gossypium hirsutum
  Clone ID: LIB3146-015-Q1-K1-D7
gaaaacttcatcaaacaaggaaaaaacttgaagtaaaacaattgagagaagatgtcgcggcaagcgtatgtcgatgatcacttgatgtgtgatatcgagggcaaccatctctctgccgccgctatcattggccaagacggcagcgttcgggcccagagctccaatttccctcagttcaagccagaagaaatcactggcatcatgaatgactgtgaacctggatcgcttgctccgactggattgtaccttggtggcacaaaatacatggtgatccaaggtgaacccggagctgttattcgagggaaaaagggccctcgaggtgttactgttaaaaagaccaacctggccttgatcattgggatctatga

SEQ ID NO: 19363 - DNA, 348 bp, Gossypium hirsutum
  Clone ID: LIB3146-015-Q1-K1-D8
agcacttgcaaatgctactccagaacagcaaagaacgatgctgggggagaatctctatccactcgttgagcagctggaacccgatgcagcagccaaagtaacagggatgcttctggagatggaccagacggaggttttacacttgctcgagtcaccagaagctctaaaagccaaagttgcagaagcaatggaggttctgaggactgtagcacagcaacagcagcaagctggtggagctgctgatcagctggcttcattgtctttaaatgacaaccttgtttcatgagttggtagtagtgttggcctttaatgtgctgaaaatgagtttgattggttagaatgatgata

SEQ ID NO: 19364 - DNA, 383 bp, Gossypium hirsutum
  Clone ID: LIB3146-015-Q1-K1-D9
acgcttgtttaaaatataacaaaaaaaatcatacgcaatgagcactgctggtcaggttattcgttgcaaagctgcggtggcatgggaggcggcgaagccactatcgatagaagaagtggaagtggcaccaccccaaaagcatgaagtccgtattaagattctcttcactgctttatgtcacactgatgtatactactgggagtgtaagggttacactcctctgtttcctcgtatacttgggcatgaagcctcacggatcgtggacagagtgggtgaaggagtgaatgatatgaaacctgaagatcatgtgctaactatcttcaccggagaatgcaatgaatgtgggcactgtatgtcagaagaaagcaataacatgtgcgaac

SEQ ID NO: 19365 - DNA, 65 bp, Gossypium hirsutum
  Clone ID: LIB3146-015-Q1-K1-E1
tcgggtacctttaagctaaaaaccaaacgttcggttgtttgtggcggttccggggaaaaacaaga

SEQ ID NO: 19366 - DNA, 440 bp, Gossypium hirsutum
  Clone ID: LIB3146-015-Q1-K1-E10
acgctaccaaggtatgtatcaaacttgatgattttgatgatgagaagaaaaagaaggaagctttgaaggaaaagtttgagggtctttgcaaggtcatcaaggatgtgctgcgtgacaaggttgaaaaggttgtggttactgatcgtgtggttgactcaccttgttgtttactgactggcgagtatgggtggactgcaaacatggagagaatcatgaaggcccaggctatgagggataacagcatggataaatacatgtcaagcaagaagacgatggagatcaacccggagaaccccatcatggaagagctgagaaagatagccgatgcagacaagaatgatcaatctgtgaaggaccttgatatccttctctacgagactggtctcctgacctctggacttagccttgattaccctgacacctttcgcaacaggatccac

SEQ ID NO: 19367 - DNA, 374 bp, Gossypium hirsutum
  Clone ID: LIB3146-015-Q1-K1-E11
cccacgcgttcggtaaaaggttgtcttaacataaccacaagatttagtgttgattcagagaaatcagtgcatgccaaaacacaggcaagccaatcagttgaagaaattatagtggaagattctgatacagcttaagaaactgcatgggcaattggtagtgatatatatatgcggacaattgaagatagtgatttttgaattgaagatagagatttacgattgaagattaatcattgttaatgtttaaatcgaatgccatttattcgttattatgcaccttcaatagctcaatatttgcctggccccgcgtataaattaacataaccaatgaacaatactgtgttcaattaaacagtcctgattaaaaaaaatat

SEQ ID NO: 19368 - DNA, 448 bp, Gossypium hirsutum
  Clone ID: LIB3146-015-Q1-K1-E12
gtgctacaatgattgttcacaaatcgatgctttcttaagaagtgatcagaaccgttgtgctagtaaacttctttctgcttatacagaaggtgatgtagaagaaatcaaacgtgtagatcataaagcttgcaaggaagttgcctactggtgatgtggctgaactaaaggaagaagctgctaaaggtgaggaagaagcactggatgaaaatgacctgacatgagttttacctgtaagaaattgtttcatcctctgcatccatgggatttgtgtgtgctgctcatcccatcctttcttttcatgtaattacataggcatagaaacatgttccatttaagtttgctttaactcttgttgtgctttgcctacttgaaaaagaatgatgtttaatcatttttaaactgttgcttgtttatacgagtgggcttcacaatgcaattgcccttattg

SEQ ID NO: 19369 - DNA, 342 bp, Gossypium hirsutum
  Clone ID: LIB3146-015-Q1-K1-E2
cttggggaagaaggaaaaaaccgaaacttagataactttcccatcatggaacctgcttgttcgtatgtatgctcgttaaagctgctgctgctgttgttgttgttgttgttgttgtaatgttcgtgacagtctataactgattgctattaataatgtcttagaatgtcgttttcgctcaaaaaaaaaaaaaaaaaaaaaaaaaaaaaaaaaaaaaaaaaaaaaaaaaaaaaaaaaaaaaaatattaaaaaatataaaaaaatttttacattttaataaataccacctacctaacccttttttttaaacataaatatttttaaaaaaaatttatataaatttaa

SEQ ID NO: 19370 - DNA, 447 bp, Gossypium hirsutum
  unsure (1)..(447): unsure at all n locations; Clone ID: LIB3146-015-Q1-K1-E3
ctaccggttaatattccaaaactgctgggggtaaccattggttatacaattacagcatcaattagtatggtggctgtgaaaaggtcaaattgttttcacacgcatggtcatcacgtgaagtgccaaacatcaaacaatcctttcatgatcatctttgcttgtattcaaattgttcttagccaaatcccaaattttcacaagctttcatggctttcaatccttgctgctgtcatgtcttttacttatgcttgcattggtcttggactctccattgctaaagctgcaagtgggggagaacatgtaaggacaagcttaactggtgtacaagtaggggttgacgtgtcacgctctgaaaacgtttggagaacattccaagctattgnggacattgactttgattatgcttactacaccgtcctcattgagattcacgatacaatacaagcg

SEQ ID NO: 19371 - DNA, 379 bp, Gossypium hirsutum
  unsure (1)..(379): unsure at all n locations; Clone ID: LIB3146-015-Q1-K1-E5
ctacgcttatttcgtgtacctgggccgacctgaatggggtctaactgaaaactgcggggtcccgatcgagaagatagacattgttgctgctgccatgggacatgcattggcnacagacggaggattctgcactggatgtgctcgtgtcattgatcatcaacggatgagcagttctggctacgtcttctctgcatctctacccccatatttggctagcgctgcaattactgctattgacatcttagagcaaaatcctgatctgacatcaaagctgaaagaaaacattgccattttatggacaggactctatgatattcggaggctctcaatagcaagcaatccagaatcaccgattgacttcttgtgcttgaaaatcaac

SEQ ID NO: 19372 - DNA, 265 bp, Gossypium hirsutum
  Clone ID: LIB3146-015-Q1-K1-E6
tctttggtacacaaaatcttgcatatatagcattcttgtcggttctatgagactgagacaaatttataggtataccgactgtctaccatattcgtggaggcacagatctgtgggcctttttcacgctataaaagaatttccccgcaactgatgaatatcagatgctgagggcgggaacaaaagcttataatcaactgacaaaagcctacattcactccctcagaaacttacaaggccctgtaactgtccctatgcatcaaaatac

SEQ ID NO: 19373 - DNA, 425 bp, Gossypium hirsutum
  Clone ID: LIB3146-015-Q1-K1-E7
acggagaaccaaaatacatatggcactatagatgaaaacaaaaggtttgaacatgctttaggtatatatggtgacgatgtacctgatagatggataaaagttgcagagatgatacctggtaaaactgttttagatgttattaaacagtacagggaattagaagaagatgtttacgatatcgaagccggtcgaattacgatccccggttattccacctcatattttacattagaattggtcgataaccatgattttgatggttataggaaaagacctaatggagctaaaggccatgatcatgaaaggaaaaaaggtgtcccatggactgaagatgaacacaggaggtttctaatgggacttgtaaagtatggtaaaggcgattggagaaatatttgatggaactttgtggtttaaagacacctaca

SEQ ID NO: 19374 - DNA, 395 bp, Gossypium hirsutum
  Clone ID: LIB3146-015-Q1-K1-E8
acggactagttctacccacgcgtccgatttgctgcttgttgaacacgccgattgacttcactatcgctcaacactcgtcttacactttttttttttgaatctgcatcttttacaggccatattggagatgctttttcccaaatacacacgcaatcatttatgtggttgatgcaagtgacactgattgaattggaatagccaaggacgaatttcatgccattttagagagggacccatggcctcaggtttctgacaatgctaaggacctggtcaagaaaatgcttaatactgatccatagcagcatcttacaatacacgaagcccttggaaaccttctgatgcatactatatctatggcgatatatatctgctatgcatgaaatatcatgccaact

SEQ ID NO: 19375 - DNA, 229 bp, Gossypium hirsutum
  Clone ID: LIB3146-015-Q1-K1-E9
acgctttgatgcgttttatccagcgcgctcacttcataccccaaagtgattctacaccagagggagagcatgtcccccaagagaaagggttctggtggataaaatccctgttcgggaagtaggaaaagatgaatcatggtgaagcgtacaaaaaataaatatattggcatcaaaatccaatttggggctttttttattgaaagtcgattcttattttttgcttatggga

SEQ ID NO: 19376 - DNA, 379 bp, Gossypium hirsutum
  unsure (1)..(379): unsure at all n locations; Clone ID: LIB3146-015-Q1-K1-F1
ttccgggccggttcttcaagtacttaacccaccaagggggaaaccttgcccacaaccaccaaccaaggccactggcccaatggccacactgaaattgggtgcttgtgtggatctgctgggagggttggtgcacattggactaggtgacccggttttgaatcaatgttgtccnggtctttcaggacttgccgagctcgaagctgcggtctgcttgtgcaccaccctcaaactgaggttctcaaccttaaaatntatgtgccactggctcttcaactccttgtcacatgtgggaaaacacccnctgctggttacacttgctctctctaaaaccaangttgctaggttgatggaatggacatgagaggatgtcgagcttttc

SEQ ID NO: 19377 - DNA, 360 bp, Gossypium hirsutum
  Clone ID: LIB3146-015-Q1-K1-F11
acggtcaacgagtgatgccgaagcgaacgttttgggcacatgggcgagtccattcgtgaggagggtaaggattgccatgaacatcaagtctgtggcctatgaataacatcaagagaggttatgggaaggcaaaagcgagcttctcctcaaatcaaacccagttcacagaaacggtccctgtcctcattcatggcgatgacaccatctgtgagtctctcattattgtccaatacatcgatgacgataggccttctgctcccattcttccttctgatccccatgaacgtgccaccgaccgttaatgggctgcttatcttgacgacaagaggatcccttacttgagaactattggtatggctg

SEQ ID NO: 19378 - DNA, 430 bp, Gossypium hirsutum
  Clone ID: LIB3146-015-Q1-K1-F12
gatagctcacgctaacatcaccgataatttcttttccccgtccccatttggaagcttgtatgcaatgaatgatcccctcactgtagggccagatctaacatccacggtcattggaaacgcccaagggatgtacatagcattaagtcacgaccctgccaagttcactgcagttttttatgctgattttggatttaccactggcaggttcaatgggagctccttcagtttgttctcacgatatccccccacagattatgttcctagccccgacaccattcgtgaaatggcaatagtgggagggagaggtgcgtttaggatggctaaagggtttgctatattgcgggccacttcttcgaatgccacgacacggaatgctagtctcgagttcaatgttactctgtatcattactaaacccaatcgcagaatact

SEQ ID NO: 19379 - DNA, 281 bp, Gossypium hirsutum
  unsure (1)..(281): unsure at all n locations; Clone ID: LIB3146-015-Q1-K1-F2
ctacgggttaatggcttcctttttttattttattaaatgttagaaaatgctatgtcaacttttatgattcagggagcttggagaaaccgagaccctgcangcttatctcctatctttggtatctctntaaccacaatgaaattgtttaatttcatatgtttaagggtgttttattgactcgcatgaaatccaaaaacttgatggntnaaaaaaaaaaaaaaaaaaaaaggataaggtttttccaaactcccttaataaaaaaaaatggaaaaaaaaannaa

SEQ ID NO: 19380 - DNA, 402 bp, Gossypium hirsutum
  unsure (1)..(402): unsure at all n locations; Clone ID: LIB3146-015-Q1-K1-F3
cgtcgaatggaaaatgtggaaaatgaaagcaatggcaaatcgtctggaattcttcatagtgctatgtgccctgcttgcgagatggcagttgtgtggatgcagaaccaactgatggagaatcagactcaagaccgcatattggactatgccaatcagctntgtgatcgggtgccaaacccaatgggagaatctactgtcgactgtggaagtctttcttccatgccaaccatttccttcactattggtggcaaagcttttgagcttacaccagacgagtacattctgaaggtgggtgaaggtgctgaagctcaatgcatcagtggctctactgctttggatgtccctgctcctcgtggaccactctggattttgggagatgtgttcatgggtcgctaccacact

SEQ ID NO: 19381 - DNA, 377 bp, Gossypium hirsutum
  Clone ID: LIB3146-015-Q1-K1-F5
tttttggccatcgaaatttgtgaaatgatgctcttatgtatctcagatctgagtgagacttcttgctctgtaatggcgggacaacgttcactttctttataaaggacgcttaacgaaaataattgatagcttatttgagtccttaattctcggtcgagagggccgaataaacagggttaacattgtgatggaacattcaggctgatgttgcacggtgcacgtacgataaatgtccggcgtcttttgaccggagactgtatgtctgacagacgaagaccgatttcattaagctttttggaaaaatgagctcgagaaatttcaacactttttgttgtcgagaaaagaggaaagaatacatcatgtagattgaaggaatt

SEQ ID NO: 19382 - DNA, 389 bp, Gossypium hirsutum
  Clone ID: LIB3146-015-Q1-K1-F6
acgcccttgtgaaacctacaatcaagtcgccaccggttgttcctccaatagttaaaccacccattgacctcccttcggttacggtccctacaattaaccttaccccagggacggctcctacagttactaaaccaccaagtgggaaaccctgcccaacaccaccaaccaaggacacttgcccgattgacacactgaaattgggtgctagcgtggatctgctgggagggtagatgcacattggactaagtgacccggttgtgaaccaatgttgcacggatctttcaagactcgccgagctcgaagctgcggtctgctagcgcaccaccctcaaacttaaagatctcaaccttaaaatttatgtgccactggctctataactccttgtcaca

SEQ ID NO: 19383 - DNA, 416 bp, Gossypium hirsutum
  Clone ID: LIB3146-015-Q1-K1-F8
acggttgcaaccattatagcgggcgacatgtttttataccactggagcctgaatttatcgggggaaacattccccttactgcatatactgttgtcaaggatggagaatatcgtggggagattaaacttggtctcactttcacccccgaggaacgtgaatgcagggattttgaagttgaagaatattttcgagggtggaagcagtctttatacactgattatgctggccacttatagttttcaacctttattcccgatttcaagaaatatcttttttgtttgattctcggaccatggttgaaaggatgtgatgaccatgctatcatttttactggagataacttgttacactgggaaaattttttatctttttgaaaaaatttttgccttaatattcttcctcctggagaatttaat

SEQ ID NO: 19384 - DNA, 294 bp, Gossypium hirsutum
  Clone ID: LIB3146-015-Q1-K1-F9
acggaatatgtctggagcatggactaacaacataaaggcttgaatcatacacaaaacaccgagccgacgaagctaaacattgggtgcgagatgtaacggtccgagcccagatcgggcagttcgtgaacctaagggaagtattgggcgcagtattcaatgaacaacgtgactaggatgttactatggaggcaacatttatgggccgtatatcgtcggcccaagatacaacatggaggtgatgcacataacacatgaatgattttggctattacgtgtgatctattcgggggatta

SEQ ID NO: 19385 - DNA, 381 bp, Gossypium hirsutum
  Clone ID: LIB3146-015-Q1-K1-G1
ctacgacaatttggtttgaaaaccaaagccagttcgagtccggttgttggagtttacacgagtcaggtccgtatggtacttttgttggtgtatatgatggacacgttggcccggagacgtcccggtacatcaacgatcatgtctttcaacatctcaaacgattcacttcggagcaacaagggatgtcggttgatgtgatacgtaaagcatatcaagcaacagaagagggttttttgtcactcgttaccaaacaatggcctatgaaaccacaaattgcaactgttggatcttgctgtctggtcggtgttatctgtaacggaactctttatgttgctaacctcggtgattctcgtgctgttttggagagagctgtgaaggcaa

SEQ ID NO: 19386 - DNA, 198 bp, Gossypium hirsutum
  Clone ID: LIB3146-015-Q1-K1-G12
acgctcgcatacaccgaaagcgctcgcatttttatttattacctttccacaacggaacggggcattttttaggaatcgaataagctaactaacaaagctaaaggtgtgtataaagtactagatttaatggaatttcataggttaattaaacctatgagggcttaatttgttgggattacaatcaagaattcatcaaaa

SEQ ID NO: 19387 - DNA, 442 bp, Gossypium hirsutum
  Clone ID: LIB3146-015-Q1-K1-G2
acgcccacgcgttcgaaaaaggaaaaagaaaaaagaaaaacaattgctgattcggacccccgaaaaccggatttcgaaaccctaatcggatctcccaaatagctccgttgaagaaagaagatgacgggagtaaccaatcaagaggaggacaagaaacccgctgatcaaacggctcacatcaatcttaaagtcaaaggcctggacgggaatgaagtgttctttaggattaaaagaagtactcaactaaagaaacttatgaatgcttattgtgatcggcaatccgtggatttcaactctattgccttccttttcaatggtcgccgtctgcggggcgagcagactccggatgagttggaaatggaggatggggatgagatcgatgcaatgctgcatcaaactggtggtaccatggcctaactagctagctaattataggttacta

SEQ ID NO: 19388 - DNA, 380 bp, Gossypium hirsutum
  Clone ID: LIB3146-015-Q1-K1-G3
acgcccacgcgttcgatcaaattaccaaagtacatggtttagaattgacaatggtaactaatagatgtagtttctgatggtgactagaaaatgaaaattttaactttgattcagctcgaaactttttctctcttttttttgatgcgagtgtaggatgctagctgcaaagtttatttcatgaaacaaaccgtgggaaatgcttgtggaacgattgggcttcttcacggcgttggaaatgtcacttctgaaatcaagcttcaagagggatcgtatttagataggttttttaagtctactgccagcatggatccattggagcgcgcggcatttcttgagaaagaaagagaaatggaagttgctcactccgtgacagctacagc

SEQ ID NO: 19389 - DNA, 418 bp, Gossypium hirsutum
  unsure (1)..(418): unsure at all n locations; Clone ID: LIB3146-015-Q1-K1-G4
acggggacagtatcttgagcatgtctgagcctgaactatcaaaaaccacgatcacagcttccgttgagggaccttacgggcatgaaatgccataccacttgatgtatgagaacctgattttagttgcaggtggcattgggatttcgccattcttagcgatcttaagtgatatcctccaccgcattaacgatggaaaaccatgtctaccaagaaagattttggttgtttgggccgttaaaaagtcggatgaacttccgcttctttcaagtatcgacatggaatcaatttgcccatttttctccaacaaaataaatctcgagattgatatttatgtcactcgangaatccggccttcaatggaagaaggtaggttcatgtggcatcgagctctttctgccctttctcgggccgcaacatg

SEQ ID NO: 19390 - DNA, 367 bp, Gossypium hirsutum
  Clone ID: LIB3146-015-Q1-K1-G5
tctaaagcagggaacgtgcttttttatggttggccagaattgttgggtaagcggactaatattggatcaaagagaatgggtgagcttgatccaaaggctctgcatgacactagtgagtcgcgattcccttctgatgaagcggaaattcaagccactactctatgctcatcatggcaagtgaatctgaaaaatccagattggcattcattcaaagttatcgtgcggggagggaatactaaggaaattctaaatgaggaagatgagatactgacacatctgacgctggaatggggcgaagagatttataatgcagtggtaacagctttgaaagaactaaacgagtataatcccaagggggagatatgta

SEQ ID NO: 19391 - DNA, 341 bp, Gossypium hirsutum
  Clone ID: LIB3146-015-Q1-K1-G6
aacgaatggagcggccaccatgcacgagccaaggaattcagcaacggatatcaacatttcgttgccagcaggttaatcttataaaatcggactcggaggctgactagactaaaatccctgatgtttttcgttcatcaaagagtacggagtgttatgtgttgttgaatattaatgtaggatgatgaggtaggattaatatccagctaggttttaatgtctcaggcaaagacaatcttttcttctttttttagcctgattgatgagagttgccctagattttaaaagatctcccaattatgtagaagtgacatttgtatcatttctattcatatgggttcatt

SEQ ID NO: 19392 - DNA, 128 bp, Gossypium hirsutum
  Clone ID: LIB3146-015-Q1-K1-G7
acgcgtagatgaagtcataccataattcctttggcaacaatgtttcttgtctcttgcaatctaattttaagtcatgtatttctgcatatcaattttcagtgtaagttgaaacttaatatatagtatgt

SEQ ID NO: 19393 - DNA, 196 bp, Gossypium hirsutum
  Clone ID: LIB3146-015-Q1-K1-G8
ttcacacgttcaaaaatggacggggggaatttctttttaatccttattgagaactcgccgaacaggcatgtcacgtctccaaagagaaaaaccggttttttcaagaaggctaaggaccttacagttttttgcgatcctggagtgaaaatcttcatgttttccactactggaaacctccatgagttcatcacccctt

SEQ ID NO: 19394 - DNA, 313 bp, Gossypium hirsutum
  Clone ID: LIB3146-015-Q1-K1-H10
acgcccacgcgttctaccgatgcatcactttttatttatgagaggtaaactattcattcgggggactgttgactaccctgactcgttgaccccagaccaatgcaaggcactggaggctgtgctttctacaaggcataggatcagctgactgacatggagctggttgagtgcgaggaaacaaccatgcatgatgtttacattgatgaagagatgcgtaggaaacaggctcaagctcaacatgaagcttatgatgaagatgaggacatgcatggtggtgcgcatagagtatcaatgcgctcaccaatgattaaaa

SEQ ID NO: 19395 - DNA, 387 bp, Gossypium hirsutum
  Clone ID: LIB3146-015-Q1-K1-H12
acgaccacgcgtacgaccaagggaagcttagttgattaaaaggtgcaaaggaagggtatttgcattgcaagatgaacctgaagtatgtacagtatggttgccattagacgatgcaccagggctagccatggctcaagcgtttggagattattgcttgaaggaatacagggtcatcttcatgcctgaatttttccatcgtttacttacataaaatgatcaattctttgatctagcatcagatggggtatgcgatgtatagatcaatgaagatgtagttgtgattgcatcatcggcttcatcccgcacatcattagccaggatgttgtgtctctaatctgcactagaatggaaactgaagtacactacttaaaagatggatgattgcgc

SEQ ID NO: 19396 - DNA, 312 bp, Gossypium hirsutum
  Clone ID: LIB3146-015-Q1-K1-H2
gcagctttggaacactgatgatgattatagttccattagtcacaaactagattctaagagaaaggacggagattcatctcaaggatgtaaaaataggggaacagcaacagcctttatgccattcaagatgaatttgggttttgcagtgaggaaagaagagaaagaggagataccagttcatggattaacgcttttgactcctggaatcaagaatctgaaagaggaatcatgttctacggggtctaagacaagttgtaacaaagcagtttcttcttctgcccccaatgctcaatccacttttcgctctgtacc

SEQ ID NO: 19397 - DNA, 443 bp, Gossypium hirsutum
  Clone ID: LIB3146-015-Q1-K1-H3
acggcctaataaaggctgttgggtacgatatggcatacatgtttgcttacagcatgagggagaaaacccatgcccatagaaactacattgatgatgttccggaagaagtcaagcaaaggaggcttactgaactgattgaagctttccgtgagagtacaggtcagcgatatgattctcaggttggaaccatccaacttgtgttggttgaaggaccaaacaggagagctccagataaagagcttatcggcaaaagcgataaaggccatagagttgcatttgttaatcatcctttgctggatcgggagaagcaaacagataacaaaaggaatcctgttgtcggtgattacgtagaagtccatataacaaagtcttcgagagcatcactttttggcgaaacagttgctataactaaattaagcgcattttacgacaatgtggatgaa

SEQ ID NO: 19398 - DNA, 246 bp, Gossypium hirsutum
  Clone ID: LIB3146-015-Q1-K1-H4
tttgggtgtcaaaaagtctttaagcttagtgctagtgttcagttttacatatatgatctataatatgatcgtttttgagtaatgttttgtggcaatggtttacatgtactctctttttgtaataaaataaacttttgtgtcggatacgtatttatatccgtagacggtggctttagctctccaataacaaaaaacatttttaaaaaacaaacattttataaattatatattaaaaaattgaaaact

SEQ ID NO: 19399 - DNA, 229 bp, Gossypium hirsutum
  Clone ID: LIB3146-015-Q1-K1-H5
attctatataaattttaccctattttttttttattattcttaaatatcctatagagggcctttttctgaagcaaaaatcactctcttctaattaaaaagagcataaaaaaagctgtgtgttatacagcttaattaatgcctcatataggatggcataaacttatattagtgctaacagaatacatggttctctattgttaaaaccacatgttaatttatgggtataaag

SEQ ID NO: 19400 - DNA, 259 bp, Gossypium hirsutum
  Clone ID: LIB3146-015-Q1-K1-H6
ttctgctattggggcaggctatattattttgccctggtgggccggcacaagcattgcttgggacacttacaccagacatagcagttctcacactctagtacaggataaatgggctgggtgtcgccatagttaatgactataaaagtagcgaaggagacaaagctctaggattgcaggcacttcaccgagcctctggagctgaaacagctaaatggatcagtgtcggtgctattgacatacctcaaatgtctatacgctg

SEQ ID NO: 19401 - DNA, 303 bp, Gossypium hirsutum
  Clone ID: LIB3146-015-Q1-K1-H7
acgctggcatcttatcaagcggaatggtttcttacctgttaagtggcatgttataaaagacatgcctaacaaggagctctttcacatcatcctagaaaacaatgagaacaaacctgtgactcatagtagggacactcaagagattggtctcaagcaaggcttagaactgctcaagatttttaaaggctattcagaaaaatcatcattgttacatgactttggattttatgaaaatcgagagaagacacttgatgcgaaaaaagaatacaagcctgctactctagaatacatggaaagatgatt

SEQ ID NO: 19402 - DNA, 397 bp, Gossypium hirsutum
  Clone ID: LIB3146-015-Q1-K1-H8
acggtggggaactagaaaaggaagacatgaaataagcgagggaaagaggctggaaaggaaaagttacaaaacctggtcgagttatacgccctggagcaatcaggattaatggaaaatgcccattgactcctttagaggttggattgatgcttagaggaatgggatttgataataatacatatatctttttggcttctggaaagatatacaattctgagaaaacaatggctcctttactggaaatgtttcccaacttgcaaacaaaagagatgctggcatctgaggaagaacttgttccatataagagattttcattcaggatggctgccatagactatactgtttgccttcatagcgaggtatttttgactactcaaggtgggaatttgtcttattt

SEQ ID NO: 19403 - DNA, 298 bp, Gossypium hirsutum
  unsure (1)..(298): unsure at all n locations; Clone ID: LIB3146-016-Q1-K1-A1
aaattaaaatttttttattaaaaaaaataaatctattggtaaattaatttttactaataatccaaataatttcataataaatttagaggtggttgatttttcaaattatccaacattgcataaattaaaaatttacctacttaaatatttaaaatccaaaaccctaaatttgaatgagttcatatacggcatctatatacagaaagaaaaatgggggagggagggtggcggttcaaagcaagcttgaattgattctgttatgacttctncaagttcctttgatctttcaagtatttta

SEQ ID NO: 19404 - DNA, 376 bp, Gossypium hirsutum
  Clone ID: LIB3146-016-Q1-K1-A11
cccacgcgtccgtgtatgttgaggtctaatcagcttaatttcgaattagtttgttctgggtgttttgctaacagactgtagatataaacaatctttaaacatattggattttgctcaaagagtattgattctctgaagaattgaagagaaagaatggtggcagcgaaattggaattaaccaaagattagaaagcagagctcaagatccatggcttctgctctccgagattggaaggagaagtttcttcccatgtatgaagattttataaaatgcataggctgaaataggaatattggttgaagcaaatgtacaagacgctttaactttgtaatttgtcatcttgcaacttataattagcagcaaaaagctgttttt

SEQ ID NO: 19405 - DNA, 387 bp, Gossypium hirsutum
  Clone ID: LIB3146-016-Q1-K1-A12
gagattcattcatcaatggctttgattcatacactgtctcccaaaagaacgaactttgtggtgtttcctctgttcttgatgatgatgtcttctcccagatccaacaacaacaacaagaaatcgagcgtttcattgctgaacacacagagaaagtgaggtttgaacttgaagaaagaagaaaaaggcaatcgacaatgttgattactgcaatccaagaaggggcaatgaagaaactgatggaaaaagaagaagagatgcagagaatggggaaactgaactggattcttcaagaaagggttaaaagcctgtacgtagagaaccaactgtggagagacctggcacaaacaaacgaagccactgccaagtccctgcgtaccaatttagagc

SEQ ID NO: 19406 - DNA, 297 bp, Gossypium hirsutum
  unsure (1)..(297): unsure at all n locations; Clone ID: LIB3146-016-Q1-K1-A2
aagggagaaaatgtttattttcgcagagagagtggggtggaaaatccaaaaccaggaggaggcggtggtgcaccagttctgccaagagattggggtgaagagaagagtcctcaaggtgtggatgcacaacaacaagcacaacctagccagganaaacccttgtaattccaccgccaacgccactgctgctgctcctactaccactgctgcatgactatgatgatcaaagtcaaaacgccaatttaatcagtatctctcctctttcagcctttctagtaatttgtgtctcatttcatt

SEQ ID NO: 19407 - DNA, 195 bp, Gossypium hirsutum
  Clone ID: LIB3146-016-Q1-K1-A3
acccacgcgtgcgcggacgcatggttcacatctatctttctactatgttcgaccagggccttgcatatattaaaagagcgggacttgactcatatgaggcagaatattgcctagggcacaaggcaaaggctgtatggagctattattatgtttgtgtctactcactacaaattctgtaaagatactgaccgcgcg

SEQ ID NO: 19408 - DNA, 359 bp, Gossypium hirsutum
  unsure (1)..(359): unsure at all n locations; Clone ID: LIB3146-016-Q1-K1-A4
caaggagatcatggattcaaccaaatccgcggttgaactcgtgaaactaaacccgacgagtgaatacgcgcccggtttagaagacaccctcatcttgaccatgaagggaatcgctgccggcttgcaaaacaccggttaaaccccacttcggctaactcttaagtcgatttagtcccgagaataagaattacacatcgaanaatattgacgacgggttaaaagatgtggatgatgctatttaaattcctagttacagtgttcattgttgcaccaaaacttattatattatatggcttttaattattatgtaagcaatctggccaatatatatatataatgtaagcaaagtacttatcttg

SEQ ID NO: 19409 - DNA, 283 bp, Gossypium hirsutum
  Clone ID: LIB3146-016-Q1-K1-A5
gttgcttcctttatagctttgattctttttctttgattaatatggagttcaacattttggggggattttctcaccaggatgaattatgttttagaaattctaatactttgtgtgtttgtatgtgtgtattctttttatgtattaaattacatattgaatcaatgtttatgtattaaatttaaatccattaatttttatatttagttttgaagtttaaaaaacaagtcctgaataaaattcccaaaaaaaatctaactttaataaaaaaaaaaaaacaggctgt

SEQ ID NO: 19410 - DNA, 336 bp, Gossypium hirsutum
  unsure (1)..(336): unsure at all n locations; Clone ID: LIB3146-016-Q1-K1-A6
gggttggtggttgaaatgggacctttgcttcccactttaccagataccaccttcgttcggccgttggatcctgcaaacatcattgttccactgaggttcgttgatccactctggaaattgaaaagatttctcaatgtgggctccgaagctctacttggaaagagcatcaaagtcattgatgccttcacttacaatgtcataaggagaagaaaatctgagataaaagaaattcgagaatcttgcaaaaccagcaagataaagcatgacatattgtcaaagattatgaactaagtgaagatccagaaggaaatttaactgacanaagtcttagagata

SEQ ID NO: 19411 - DNA, 383 bp, Gossypium hirsutum
  Clone ID: LIB3146-016-Q1-K1-A7
catgcaggatttattgatgaggatgactttagactccatttgctggtggggtttggagttgaaactggaactctggctcccactttaccagataacaacttcggtcgggcgttagatactgcaaacatcattagttaaaaaaatgacctactgaaatactctaaaaaccagaaaacgctatttcagtgtgggctccgaagctctacttggaaagagcatcaaagacattgttgacttcacttacaatgtcataaggagaagaaaatctgagattaaagaaattcgagaatctttgcaaaccagcaagtataagcatgacatatttgtcaagatttattgaactaagttgaagaccataaggaagattaactgacaaaagtctt

SEQ ID NO: 19412 - DNA, 308 bp, Gossypium hirsutum
  Clone ID: LIB3146-016-Q1-K1-A8
ctcccaagctgctcccgctgaagcaccagttgtctccaaacctgcccctgctcctgaagcagtagatatttccaagcaaattccggctggtattaacagtatttccgcaaacaattacatgcgtgctgatggtcagaatactggcaatttccttacggatcgaccttccaccaaggttcattctgcccctggaggcggatcttctctggactacctatttggtggacctggaggtagtaaatgaaattgtgccttaataacatctttgataagggagaagtattgttttgtggattttgggggaaagc

SEQ ID NO: 19413 - DNA, 336 bp, Gossypium hirsutum
  unsure (1)..(336): unsure at all n locations; Clone ID: LIB3146-016-Q1-K1-A9
ccacgcgtncgcttgtattcgttggacaagttctctccctgtcgtctctttcctctcgtgcatgagctgatttctggagaaccagattagccataaagcaatacagaaaatgcggcattggttctcagttcctctcttgaaaacccaggacattgtctgaaaatatgaggactgtcttcaaccccaacatggcaacgggggcatctgtcacttacagtaatccttctatatctgagatttgctagatgggggatgaaatcccaagagattcgccagatagttatagtaatttttgaaggaagttgtaaaccccattaatttttgtaaaaatttgta

SEQ ID NO: 19414 - DNA, 195 bp, Gossypium hirsutum
  Clone ID: LIB3146-016-Q1-K1-B1
accacgcgtaagatgtgtttcgcccggtttataacctgaaaaagttcccaagaggttgttagaatttttccttttaaagtttggccatgattttggggggttcttaaccctttctttttggttcacccatttatggaaatgcttgcgcctaggttcacttcccttatttttaactggccatttgccatttttttt

SEQ ID NO: 19415 - DNA, 230 bp, Gossypium hirsutum
  Clone ID: LIB3146-016-Q1-K1-B10
cccacacgttctataactctcttccgcttttgttttgaaacccatcatcgtccgtcgtgcgtgtctatttccaacacataatcggtttttagaaacaaaacgagactggctttctggtcctttgataagacacccccgaaggccattctttcttagtcctaaaagtgccgacaaaaagggtcttttcccaacatattagatccgatcccgccgactgaagagagaccttc

SEQ ID NO: 19416 - DNA, 313 bp, Gossypium hirsutum
  Clone ID: LIB3146-016-Q1-K1-B11
cttgacacctcagcaagcttccatggttagagaatgcttatctcgtaataagtggaagcttcttggtgctaggagcttctgtgttctaccctttgattctaggtttcgatttctcttcctattggaggatgatgggaactccctttcctctacatcataagaccaaccatgtttcgttttctaactccaaaagtaggcaggcaattcttcagcacaagggctgtttccatgttatctattgccttgtaaattgatctcattgtacagtagttatgcatgggaaaaaattcaagccaaggttccttttttttct

SEQ ID NO: 19417 - DNA, 314 bp, Gossypium hirsutum
  Clone ID: LIB3146-016-Q1-K1-B12
attgacacctcatcaagctctcatggttatagaatgcttatctcgtaaccagtgggagggggttgttgctaggagcttctgtgttctaccctttgattctaggtttcgattctccttacaatcggaggatgatagaaactcactattctctacatcttaaaaccaaccatgtttcttattctaactccaaaagttagttggcaattatttatcacaagggctgttttcatgtaatctattgcctagcaaaccgatgtcattgtacaatacctatacctgggaaaaattttaaaccaaagaagctttttttcttt

SEQ ID NO: 19418 - DNA, 243 bp, Gossypium hirsutum
  unsure (1)..(243): unsure at all n locations; Clone ID: LIB3146-016-Q1-K1-B2
acaagggctaaaaccttggctggctttgtcctattagctttcatagttagttgcgcacttggtcaggctcctagctcggccccaaccaattcaccgccgtcttctaaccctactccggctcccaaggtttctccaaccatgtctccaaccgctacaccaaccgcatctncgccgtcaacatccactcccccgtcttcagcccctgaatcttcaccaacttcctctcccactacttctccccca

SEQ ID NO: 19419 - DNA, 118 bp, Gossypium hirsutum
  Clone ID: LIB3146-016-Q1-K1-B3
ttttcctttaaaataatggtgggcataaaaggtttacaatgatggggggtggttcctttcttttaatcttcacttgtccttttggttattgctgttgatgattatataagaatgagag

SEQ ID NO: 19420 - DNA, 404 bp, Gossypium hirsutum
  unsure (1)..(404): unsure at all n locations; Clone ID: LIB3146-016-Q1-K1-B4
ggtttttagttaaaggttttggaaattgcattatcctattaaccaatggtgtttcagaagaaaaagtcttttacgtgatagttggttgatctttgtggatggatttctgttattgcataaggatatcagtgccaacagattttgtcatcactgaagacatgatattgatccttgcaggatgaatggagggatacagtacacgttacaacatggcattagagagctcaatttaacacatgtaagacaacagagttcccaaaatattgttctgtcaaatctcaaagatgtccttagttttcagaatttctcagaccatgaatccattcaaagtttgtagatagttagtggcaaggtattttatttttatgatgtaatttcattgtaatctncaatttttagtagtg

SEQ ID NO: 19421 - DNA, 332 bp, Gossypium hirsutum
  unsure (1)..(332): unsure at all n locations; Clone ID: LIB3146-016-Q1-K1-B5
atggttggggccaaggttaaggctgggtggctggaatctgcttaactgcacctccaggaaggcaagatctgtaatttccagcctattaccctactgcttagggggtttaggcttggtggcttaaatctgcttcactgcaatttcaggaaggcaagattcaccgttgtgatttcaatctgtcccactgcatcttcaggggtgttggaattttatttctttagtctgttacaccattctttagagaacatgatctatttcatggacctatttatgcntaaatgataagatgtcatgatcaaaatggatcaaatgctcctaactagatgtgcatg

SEQ ID NO: 19422 - DNA, 383 bp, Gossypium hirsutum
  unsure (1)..(383): unsure at all n locations; Clone ID: LIB3146-016-Q1-K1-B6
aaaaaggggaaaaaattggaattaatttccggcaattattcaccttaaaggtttatttggattattttctattgatctttgtatgtattctgtatacaatttctctgaaaaaaagaaagaccccccttttacaatccaaatttgacagcttttatatccaaatacaagtggtttcttgccgttttcttgctcaaaatgcaggttgtgaagacgtgggagcggagcacacgaacgtggggtgtgcaacgcgcaagccagggtcatgcgtggagcgtgcgtggggctgctgcgcaaaaggggaactttagggtttctgaaaccctaaaaattagggcctatcgggccgttgtaaaattttgngcttgtaaaccgaacccatttaa

SEQ ID NO: 19423 - DNA, 248 bp, Gossypium hirsutum
  unsure (1)..(248): unsure at all n locations; Clone ID: LIB3146-016-Q1-K1-B7
gaattacccgggatctctagaggatcaagcctgcttgaaactgtggtatccatgataaactcatattctgcagaaattttcnntatgcaggcacctacacgtggaaagagttaaatatgcactcataacttcctcttaaaaaaaaagaaaaaaagaaaaaaataaataaaattaaaaattgcttccaaaaaaaaaaaaaagaaacaaaattaaaacaaaaataaaaaatggcggggcggtctgttcta

SEQ ID NO: 19424 - DNA, 403 bp, Gossypium hirsutum
  unsure (1)..(403): unsure at all n locations; Clone ID: LIB3146-016-Q1-K1-B8
cgcacacgtcgccnacctcactccggttttatgttcctatttctgtttcacatacctgagccgcatctcaatagtgctgaatcaattatggtttcaagtacaacctcaacatgccccttttttcctataaataattgttggcatagaatgtttacaacgatggtggggtgtttctttttttttatcttcacttgtacttttggttattgcttgtgatgattatataacaatgagagttatcattaataaaaaaattcgaatctttatttctatttttaatgtcccaattattttttaactttttttccattactttttattattatcctttttaaaaatataggggcggcctttttttaagttccaaatttttctaccctttctttccaattgaaattttttt

SEQ ID NO: 19425 - DNA, 334 bp, Gossypium hirsutum
  Clone ID: LIB3146-016-Q1-K1-B9
cccacgcgtccgcccacgcgtccgcccacgcgttcgcccacgcgtccgcccacgcgtgcgggcgaagattctctcaatcgggtatagaggagaagcaaagccgtgcatcaaccgagagttaaatgtaagctgtacttttgctaaggtctagatttgcagcttttatcccatgcttaggttgttttcaataaattcgaaataacctatatctgtcataattaccagttttttgcttttattttcgaagtacatgtattttgattttacttgaccttttcttgtataacaataagatgcattttgtttcttaaagtccgcctaatattctggtttt

SEQ ID NO: 19426 - DNA, 347 bp, Gossypium hirsutum
  unsure (1)..(347): unsure at all n locations; Clone ID: LIB3146-016-Q1-K1-C1
ttaaaagccaaaaatttttcctttttgtgcccggatccaaatctttttggggctaaggaccctcctgctggaatttaaggggaaaactgactgcactccatcatcttcttccatggttctagctgggatgcttagctttccaccatcatcttcttccatggttctggctgtgatgcttagctttccagtgtaaattttgttcaaagtttgtaaaaagcaacatctgagtataggctttttctctcttttgcatttgtgcatctgtgtgggtatagtttcaaaaaagggggaaaaaaaaagggatctttgagagctatgtgaantagtgaatagataatgtcttagnt

SEQ ID NO: 19427 - DNA, 371 bp, Gossypium hirsutum
  Clone ID: LIB3146-016-Q1-K1-C10
cggacgcgtgggtccaacgtgaaaatactgaggcaaaatcacgagtggaagcgatgtgggagcaaatgaataaggggatacctaaggatgccttgagacaattttcaagcaataaagcttcagccacaaataaaacttcgcacaaagcttccaataattggatgaagtatctgcaaatgagaccagcagtgcctgctggcgatacggtgcaagaaagatggacagagtcaaaggctccaagtgccaccaaagaaactgaagcgcttaataaagataaagcagtgaaagaagctacttgtgtgcagaacaatgtcagtgatgaggcaaaagaagcttgcagctgcttgccctgtcagcagtgaaaagatgct

SEQ ID NO: 19428 - DNA, 405 bp, Gossypium hirsutum
  unsure (1)..(405): unsure at all n locations; Clone ID: LIB3146-016-Q1-K1-C11
cggacgcgtgggtttgttgataagcccgcggcagccgagacctcggcagctgctcctggagctggaaagggagcctatgttccaccaagcatgagagccggtgcagagagaacaaccggatcggatatgagacgtaggaacgatgaaaactctgtgagggtaacaaacttatctgaggacactcgggaggctgacttgcatgaacttttccgaccatttggtgctgtgacgcgtgtgtatgtcgctatggatcagaagacaggcacaagtagagggttcggttttgtcaactttgtgaacagagaggatgctcanagagctattaacaagctgaacggatatgggtacgacaatctcatcctgcgagtcgaatggccacaccaagacanactagaacatatcatc

SEQ ID NO: 19429 - DNA, 341 bp, Gossypium hirsutum
  unsure (1)..(341): unsure at all n locations; Clone ID: LIB3146-016-Q1-K1-C12
ggaaaatttagggttttatttgaattaggggaaaatggcgatgaggaaagtttacagcgagataaaaggtatgaaattgaaggaagttcctggttacttcaagccgatgctatctatgggttacttgaagaaatctgttcagaggggtttggacaattaccatgctaagtacattgagactgattctatcgaacctctctaccatgtctgtttcggtgggatgatcttttcttaccttgttgctcttcccaacgagcgtcgccacctcgagcacaagcagcatgctgagcaacacggtcatcattaatcccatctagctttaaagatggttcnggatcgtg

SEQ ID NO: 19430 - DNA, 303 bp, Gossypium hirsutum
  Clone ID: LIB3146-016-Q1-K1-C2
atatatgtataaggggtagttttataatccatatggaatttccctaaggcaataagataaaattaaaaatggttaaaaggtaaagcttagtgtacaattggataattgggtgggtgacaggtgtatccgacccactcctgaagagctggagaattttggtactccggacttcactatatacaatgctgggcagtttccgtgtaatcgttatacacaactacatgacatcctttactagcatagatcttaatcttgctaggagggaaatggtcatcctctgtactcaatacgcccgggaaaatg

SEQ ID NO: 19431 - DNA, 376 bp, Gossypium hirsutum
  unsure (1)..(376): unsure at all n locations; Clone ID: LIB3146-016-Q1-K1-C4
gattcccaccttgggacctgccgaaaccatgctgcggttggtgcctatggctttaggggttgctgcacttgttgtcatgctcaaaaactcacagtccaatgactttggctccgtttcatactcagatcttggtgctttcaggtacttggtgcatgctaatggtatttgtgcaggctattcccttctttcagctattatagcagctgtgcctagtccttctactatgcctagagcttggactntcttcctactcgatcagattctaacatacgtaatcttgggagctgctgctgtttcaaccgaggtgctttacttagcanacaaaggagactcagccatcacttggagtgcagcttgtgggacatttgctggtttc

SEQ ID NO: 19432 - DNA, 421 bp, Gossypium hirsutum
  Clone ID: LIB3146-016-Q1-K1-C5
gaaaaataaaattttaaaatttttctcaggcaattgggccagaaaggggggttcaccgggagccatttgctggtcaaatatgctgagacgcatttttcttctctctctaaaatcgatctaatccgataaattttgaaaaatatgacctaatctagtaattcttcaaaattttcagcattctgggtgattcactctcagtagagctatataatttcaattaatcaaaatgtaatacattcagcccatgatatatatatcttattggctgaaggttaggaagtatgtaggggcagttaaacaacgagatgatcataaaaacgtggcagttccaggtattttggctgatattgacaagctctagacggtgctgtttatatggatctcagtttgatctcaccaagctgtgacgatatttaaagat

SEQ ID NO: 19433 - DNA, 264 bp, Gossypium hirsutum
  Clone ID: LIB3146-016-Q1-K1-C6
ccgcccacgtttccggccgttggaaatgttgtcggtgaggggaaaacctaaggaagaggaagaagagtgttcggagttgtggcattccctgcaaggaacacatggatagttccaactattattctcatttcattattgattgttggcactgtataattatccattcatagtttgattgaagaacaatttgtcaccactttgttctttgtaacataaagttctcaaatgttgtcactgaaccataaatgccaagtgattgtttgt

SEQ ID NO: 19434 - DNA, 362 bp, Gossypium hirsutum
  unsure (1)..(362): unsure at all n locations; Clone ID: LIB3146-016-Q1-K1-C7
atgcccacctggaggacaagngtaacatcaggataatcaaccccacgagcagatacatctgatgttacaagaataagtccttttgacttccggaattcatcagatacccttgttctgtaactctgtgattttcttgaatggatctctctaacattcaggttcatttcacgaagaacatctgctaccaacttcgttaccatagcaagagtgcagaatacgagaaccttatagtcaacatcatctgcaatatgttctttcagaagaacatacagtagggaaaactgcttatctagtggagcaaccatgtgcacttgtcggaccagtgaatgttattcttagtgccttttttgattttttttttt

SEQ ID NO: 19435 - DNA, 355 bp, Gossypium hirsutum
  Clone ID: LIB3146-016-Q1-K1-C8
gccacgcgtacggaaaattgaaaggattcttcaatgcgggcttcgaagctatacttggagagagcgttgacgtcattgacgacgtcacttgcagtgtcatatggggaagaaaatctgtgattgaagaaatccgagactcttgcataacccgcgagatatagcctgacatattggcactatttattgaactaagtggagatccagctggcaattgaactgacgatagtgttatagatattgtgctggatggtgtgaacgctggccgtgacacatcaacttcgactctcacctggaccatgtacatgagcatgaccaatgcccgggtagactaaaagctttactcataacttaaagc

SEQ ID NO: 19436 - DNA, 343 bp, Gossypium hirsutum
  Clone ID: LIB3146-016-Q1-K1-C9
cccacgcgtccgcaaaaacatagcagccatggcagtccgtatgcttcttgggttaggtgtcctgctactctgccttgcaaaggtttcatctgatctgaaggcagaagaagttataaccaatgtcggtgaggtgggttctttggttaccagaggcggaaacagaagactgatgctagagattgattgtggaggattatgcaagaaaagatgcagtcaacactcgaggccaaacagatgcaacaaggcgtgtgggacttgctgcttgaggtgcaagtgcgtgccaccggggacttcaaggaacaaggaggtctgcgggacctgctatactggcatgaccacccat

SEQ ID NO: 19437 - DNA, 270 bp, Gossypium hirsutum
  Clone ID: LIB3146-016-Q1-K1-D1
cccaaagtccgggggttaaaagagccaattcaattgtgaaggaaaagaattcaactggaaaggaccacagtttgcgacatctagctattgggttcgatctgaaccaaaagggaaagccttatagtgaaaaggaaaccactttcgctcatccttctctgatatttgacttaaatcagaagcagcacaaaaatatcaatggcgaggaagttattctgcgaagttcttcaccaattcttgacttaaaccagagggaaaggctttacagtggaa

SEQ ID NO: 19438 - DNA, 430 bp, Gossypium hirsutum
  unsure (1)..(430): unsure at all n locations; Clone ID: LIB3146-016-Q1-K1-D10
aagannatcattgaacctaaaagtttaaggttatttatattagtgcnnctttattttggttttttgtgggttcttaatggtcccaacttttgcnnctttagcnntgtctttnnatagttttaatgatcccctattagtnntcctcttatntnnttttatatgaaataagaaagttgtnncacatgnnatttgcnntatcttgctnnntctatgggaaatttcaagaaaaaaatatgttggttgaatgtacccttgctcttttagggttcgtacttttattattatgggnntatgctntttattccgactctttatgatttaagtaccagtgtccganacccatgggatgtgggaaacttgaaaaaaattgacatactcattagcatgcttataccatattgcatgtttatctgcactacactatactggt

SEQ ID NO: 19439 - DNA, 290 bp, Gossypium hirsutum
  Clone ID: LIB3146-016-Q1-K1-D11
ctttccgggcatatagatagcacttcagaaaatgctcgaaaggtggacgaggaagagaaagcagctgatgaattaagtgaagactctagagaacctgctagtaaagcaactggatcagaacccgaagaggctgaagaaagtgatcatgttgagagtaaatctccaatcttgaaaaaaacatcgaaagggtcttcctcaactttggatgttgcagattcccgggatttctgatgatgagccccttagcaagtggaagcataaggtcggaaaatccggttccaagaaactga

SEQ ID NO: 19440 - DNA, 305 bp, Gossypium hirsutum
  unsure (1)..(305): unsure at all n locations; Clone ID: LIB3146-016-Q1-K1-D12
gcagtaaccaacattttcttttgggccagtatatgttgtgttacgtagtaatgtgatgatgtatcgatgtttaagacttcgcatcagttgtaaccaagtaaaaaagtatattatattggtgtctaagtaggtgtctttctggcttgatttgatttaagttaataatattttacattagatttcttattttgaattcaattcaagttattttttnnagaaaaaaaacatgatgaatccaagctcttgtgttatatgatggatcaaaactatgttgctatgtttactggtccttgctggcctatgtg

SEQ ID NO: 19441 - DNA, 136 bp, Gossypium hirsutum
  Clone ID: LIB3146-016-Q1-K1-D3
gcatggccctacggggcggggggtaccggaaggagtccttaatttggtccgacgagcttcgattacaagacttgggaatggctccatcgtgtttaggacctcaagatgatcctttcaaaaccggtgttcattcaaa

SEQ ID NO: 19442 - DNA, 368 bp, Gossypium hirsutum
  Clone ID: LIB3146-016-Q1-K1-D5
ccttaaagactcaatttttaatcaaagcgcggtttgcagatgaggatgtagtggtagcacagccgcaaaatgtgagatttgctccaccacctgcagaggaacttcacagggattaatctgccgtatggaaactagaccaacgaagtgtaccttggtggggttgatctctgcttggacacgacaattgcctaaagaagtgtagtttgccccttcgtaaaagcgttcaagcttacattgctaatcatgaaaacaatatatcttgattcgcattagaagttagctattgtatatatgacctactacagttatgctgatttggagatttgagttttgtaattttatacctacactgagtgctttttgttggt

SEQ ID NO: 19443 - DNA, 439 bp, Gossypium hirsutum
  unsure (1)..(439): unsure at all n locations; Clone ID: LIB3146-016-Q1-K1-D7
gtaaaccccaaatccaggcccagttgaatactttgaacgcatgcaatagcctccgccgcgaacaccgatggtacattttcatttaactcaaccgtgaaactcaatacccgccccatagaatctctgattgcaatccctgagcaagatttgttttcatgttttctgtatgctgcatcaaagtttattttcacaaatgggttctccgatagctgccacttttccaattccattctttgaacatgtatggaattattcaacccatctagtttataaacataattcctaataaaatctgttatggctaaagctattttcctttgcccctcatgcaccaatttgtttcattcagcccatatttcccataaagcatagacaaaaagacaacattgaatggtggaatngttctaaaaaaaccaggacaatcatgcagagcatgttc

SEQ ID NO: 19444 - DNA, 319 bp, Gossypium hirsutum
  unsure (1)..(319): unsure at all n locations; Clone ID: LIB3146-016-Q1-K1-D8
cggacgcgtgggtgtgaatctactattcacgtagccatgaaaggggtgatatagaattattttgggggtgctttttgtgcatggttgtgatgtaattgaactacatatcttttgttaatttcatctttctttagaggttatggtttcaaattagttttcaagggtttcaaatgcaaaccgagaaaacagtcatgatgcgtgattgaaatgtactttttagccactttttgccattgaaataaactggatttcatgaaccgnnnantnaanaaaaataatataaaaaaaatattatttaaaattaaaaaaaattttataa

SEQ ID NO: 19445 - DNA, 368 bp, Gossypium hirsutum
  Clone ID: LIB3146-016-Q1-K1-D9
atctgaactccaataaaagcgaggtgtcttccgtggagggcacatcttgaaattttggaagcaattagatatacatgcagtggtcttattgcttaaaagccagaaaaataggtttgatcagcctttttccaacagtagcatagtatcggaattacttctttttagctcagaaattacatcttaatagtgtgtatagacttcgaagtaatagcaggaccttagggaggttgttaaaactgaagcaaggtagagtgttgtttaagtgcatttacagttcttttgcacatttttatctgagggaccgatagttaatccgcatggacgtgtttctttgcacttaaatactaagataggagaaaaaactggag

SEQ ID NO: 19446 - DNA, 265 bp, Gossypium hirsutum
  Clone ID: LIB3146-016-Q1-K1-E1
aaatcttaaccccttggccaggttggccacccgacctgggttaaaagaaaccaattctgtcaaggccaaaaactgatagtagtatagaaatactttctattaagcattagttctttggcaagaatgattcatctgttcttctgggattccctttgttgattgatttacattgagtaatgatggaacgggaatgaagtaaagaagcacggaggattttgaggatttatttatctccaaataaagctttgtaactttgtttgggcta

SEQ ID NO: 19447 - DNA, 405 bp, Gossypium hirsutum
  Clone ID: LIB3146-016-Q1-K1-E10
ccgaaagtaaaaaaaaatgaagaaaaaagaaaaaaaatacaaaaagctgctccttttttgtctctattttgctgttgtctgcttgtctgcttgcaggaacgtggcggtgtacggaggtggtacgattgtgtcgacgtggaggcgcgaacgatgttagtgctggaagatgctgaaggctgctgcagcgccaagcgaatggggctagggttagggtttccaagaaactttcaaaggattaggcctatcgggctctattagttgttgggccattgagtattgagctaggattaattcggttttgagttttaaatctgagtttgggtttgaaattgggatatgtaacttgtacttgatgacatttaatcttggttaatttttatttattttttaaattttagtttttag

SEQ ID NO: 19448 - DNA, 307 bp, Gossypium hirsutum
  Clone ID: LIB3146-016-Q1-K1-E11
ggcaggaacaatgataggtaccactggctttttggaagagttgatgatgctatcaatgcgagcgtgcatcgtattggcacatctcacgtggaatctgctctagtttctcatcctcagtgtgcataagctgctgtggttggtgttgagcaccaggttaaagggcagggcatatatgcctttgttactccaatggaatgcttttcttacagtgaataactcataaagagccttatactcaccgtgcgaactcatattggagcattcgcagcacctgacaaaattcatttggctccctgtcctttcaaaa

SEQ ID NO: 19449 - DNA, 407 bp, Gossypium hirsutum
  Clone ID: LIB3146-016-Q1-K1-E12
cgagttgacagtataaaggctgtatttgaagaagcaaggactgatttaggcaagaatgagattgataaagaagtggtggagaaggtttgggataggattgctcctggtctagcctctcagttcgatgcacctaacacggtgccggctattgcacctcgccctttgttaattgtaaatggagctgaagatccccgttgccctcttgaaggcttagaaattcccaagacaagggcatacgaggcttatggagaggcccattcagacaactttaagcttgtggctgaacctggaatagggcatcaaatgacaccattaatggtgaaagaagcgagtgattggtttgaccagttccttaaataataaattgtaaggcctctggctgtgttggtatttgtttgtagatgtaa

SEQ ID NO: 19450 - DNA, 406 bp, Gossypium hirsutum
  Clone ID: LIB3146-016-Q1-K1-E2
cttcggaatggccgttcagaaggtttgttgaaatcgggagggtggctctcgttaactacggcaaagactacggaaaattggttgtcatcgttgatgttgttgaccagaacagagctcttgttgacgccccagatatggtcagaggccaaatgaacttcaagaggcttactttgacagatatcacaattgacattccccgagttccaaagaagaaaacattgattgaagccatggagaaggctgatgttaagaacaagtgggagaatagctcatggggtagaaagctgattgtccagaagagaagggcagcgctcaccgacttcgataggttcaagcttatgttagctaagatcaagaaaggctgagtcgtcaggcaagagcttgcaaagctaaaaaagagaatgca

SEQ ID NO: 19451 - DNA, 218 bp, Gossypium hirsutum
  unsure (1)..(218): unsure at all n locations; Clone ID: LIB3146-016-Q1-K1-E3
aaaaaggattttcttccaatattttccgaatggatggaaggcttgtaatgatgttaaattccccttttttcctgcttcatttctactttgtagtcgtcattgatggattgtattcatgaaaatctggtaaatttcttccaccaatctctatgcctgttagcatttaatggtactctcaagcaatggaatattgatagtttgtgcccgannaaanaata

SEQ ID NO: 19452 - DNA, 341 bp, Gossypium hirsutum
  unsure (1)..(341): unsure at all n locations; Clone ID: LIB3146-016-Q1-K1-E4
tttggatttttttggggccggaattcccccccccccccgggggggcattcaatgtcggtaaataaaataggttggggcacatggctgccctcgatggagtaattaattggcgttaagtcatcatctgtatggaagctttgtgaagctaagttgcctggatttaattaataatttcttcccagtcaacataacgggttgattgctagtttaggatttagttaaagaacatgatgattccaagctgttgtatgatatgatggatcanaactatatttatatgtttactggttattccaggcctatgtggccatgtcaattataacatccaactcttgaagtcc

SEQ ID NO: 19453 - DNA, 276 bp, Gossypium hirsutum
  Clone ID: LIB3146-016-Q1-K1-E5
agggttgggggtggctttttttggggaacgaaacctgtttcggcaattacattaaaagctggattctgacctttggctgtaccgggaagttttaaaagcctagatttctagttaggtgcaatggatatatatcctgttaactttgaactcgcagtaatatgttttatgtactcggtttcccaacttttttgttttttatgtctgatttgatttcattagcttaaaaaaaaaatgtaaccagttaataccaagcctataaaaaaatggaaaatataa

SEQ ID NO: 19454 - DNA, 388 bp, Gossypium hirsutum
  unsure (1)..(388): unsure at all n locations; Clone ID: LIB3146-016-Q1-K1-E6
ggttttggttcttttggggggttggggggttgggggtccctccaccgaaaaccaaatcgtattcgtgaaccaaatcaggaaaaagaaggattattatgagattttggggttagagaaatcgtgttccgttgatgatattcgaaaagcttatcggaaactgtctttgaaagttcatcccgataagaacaaagctcccggtgctgaggaagcttntaaggcggtttcgaaagcgtttcagtgcctaagcaatgaagaaagtaggaaaaagtacgatcttgttggatcagatgaacctgtttatgaaaggagagcttcaccgttccgtggcgggggcaatgggattcagcggcttttacgatactgatttttgatgctgatgaagatatta

SEQ ID NO: 19455 - DNA, 420 bp, Gossypium hirsutum
  Clone ID: LIB3146-016-Q1-K1-E8
caacaatataccccccaaaatgaaagcattattagtgatggtatgcattctcctggcttccaatctctttatccctacttcaaccatggctcgacaactggtggcgaaggacatcaatgatcgaccagtgtttaacactcctaggaggaataaacctgctgtaccatgtggccgtggaatgccttataaatcctgcatacaacctcccacgaagcagccctgtatacccacgtataatcgacactgccattaatttccacctcaaccttgaatgtgctggagaagctaaaggaataggatccattggcgaatttgtaatggaatatatataaacatatgcagataataaatgagttggcaaaccagatcatgaagttgcattagttgaccatgatttgtgttcttttaagactatgtact

SEQ ID NO: 19456 - DNA, 383 bp, Gossypium hirsutum
  unsure (1)..(383): unsure at all n locations; Clone ID: LIB3146-016-Q1-K1-F1
aaaaaaatttattttgggtttacccgagccccgtgggaaaaaagaggaatttggaaatcgcaaatggggcgcgaaggaaaagaaaattgggccaaaagcttcgaagaagaaacaatgggacggtggtggagtaagtgtgtggtggcgttcatggcgttgaccctcttctttatctccgccacagcgaggccctgcaagaccttcctcatttcctcgtattccatctctttccataaccctaatgacccttcctccgctgtctcctcccgatttgtcaccgtcttcactgagatcggtcaattgaaccccttatccatgcccgccgataccaagccctnctacgtcttcagctcccttcgtgatcgtagtanggacattctcag

SEQ ID NO: 19457 - DNA, 370 bp, Gossypium hirsutum
  Clone ID: LIB3146-016-Q1-K1-F11
aaagcgtttgtcttagatctcagaagatggcccgtaccaagcaaactgcgcgtaagtcgactggtgggaaggctccaaggaagcaacttgctaccaaggctgcccgtaaatctgccccaaccaccggtggtgtgaagaagcctcatcgctaccgtcctggaactgttgctcttcgtgaaattcgaaagtaccagaagagtactgagcttcttatcaggaaattgcctttccagaggcttgttcgtgaaattgcccaggacttcaagactgatttgcgtttccagagccatgccgttcttgctcttcaggaagctgcagaagcataccttgtgggtctctttgaagacaccaacctgtgtgcgatccacgc

SEQ ID NO: 19458 - DNA, 411 bp, Gossypium hirsutum
  Clone ID: LIB3146-016-Q1-K1-F12
gctcatgggatttgttgaaggatacagagttggtgggggaccactcggtgaaggactggacccaatttacccaggtggtgctttcgacccacttggactggctgatgatcctgacgcgttcgcagaattgaaggttaaggagatcaagaatggccgccttgcaatgttctccatgtttggattctttgtccaggctattgtcacaggaaagggtcccattgagaacctctttgaccaccttgccgatccggtggccaacaacgcatgggcttatgccactaactttgtccccggaaaatgaacttagattatagatatgtctctgaaagctgtaacaattaattgctatgtaacatctgttgctgtgtactgatgtaattcactgctagtcttttgagctgttgtttcatt

SEQ ID NO: 19459 - DNA, 362 bp, Gossypium hirsutum
  Clone ID: LIB3146-016-Q1-K1-F2
ggggtgttctggtttttaaccttagttaaggcaccattggaggtggttagtttcagtccagttgaaaagagcatctgggtttgttctgtaatggaagctttgttggctgaaactttggttcttgctggaaaatctcttgcttgccttctcatgctgacaggatcgatgctgaatgataagaatgcatctcttaaattgactgcagtggatgagaggtttccatttgatgaacttctaaaaatggaacgtcctggtccagaaaacaaagatgctagtgatacagaggatgatgatgatgatgaagatgaagacgaggacaatgcagatgatcaagatgatgatggaggtgatgaagatttttc

SEQ ID NO: 19460 - DNA, 270 bp, Gossypium hirsutum
  Clone ID: LIB3146-016-Q1-K1-F4
cggggccgttacctcggttttggagttacataaatggttggctcggcctggtgccatcgacaaagtcttttctgtggtgaaacaaatgaagcctgaacttgttaccatcgttgagcaagaagcgaaccacaacggtcctgttttcttagaccggttcactgagtcattacatttttactcgacgctttttgattcgttggaggggtcggtgagcagtcaagataaggttatgtcggaggtgtatttggggaaacagatatgcaatgtggt

SEQ ID NO: 19461 - DNA, 383 bp, Gossypium hirsutum
  Clone ID: LIB3146-016-Q1-K1-F7
atgccctaccatatgcacataaaccttgagcttctggaggctgtgcatttgatatgtgctatgcttcttgaggttcctaacatggcagccaactcacttgatgccaaacgcaaggtgataagtaagacattcaggcggttgcttgaggtgagtgagaggcagccatttataggtcccccggaaaatgtccgagaccatgtaatggctgcaacccgggccctctgcaagggagatttccagaaggccttcgacgttattaattctcttgatgtttggaagcttcttaggaatcgagagagcgtgcttgaaatgctgaaagctaagatcaaggaagaggcttctgaggacttaccttttacctactgttcttcctatgatacact

SEQ ID NO: 19462 - DNA, 436 bp, Gossypium hirsutum
  Clone ID: LIB3146-016-Q1-K1-F8
attctttccgttttcatctgtcaaagctgtagaatactgtgggaattgaagcataatttgtatcaatttatttggccagttatcacattttttcagagaataaaatggaagagaagtatgaaactctgaagattcagcaagaatcgccaaattctggagtttttaacctaatcataaaccgcccatctgtcagtaatgcacttggactcaatttctttagtgaattccccaaagttcttaatgcgctcgaccaaaaccctaccgtcgctgtcatcgttctatccgggtccggcaaccacttctgcggaggtatcgaccttaaaagcctcgcagctatggccgatgataactcgggagatcaaagccgcaccagcgaacggttacggagaaaaatcaagttcctgcaagatgcgatcaccgtcatggagcggtgccc

SEQ ID NO: 19463 - DNA, 280 bp, Gossypium hirsutum
  unsure (1)..(280): unsure at all n locations; Clone ID: LIB3146-016-Q1-K1-F9
cccnaccanangcacataaaccnngagcnaanggaggctgagcatttgatatgggggaggctttttgagggtcctaacatggcaaccaactcacttgatgccaaacgcaaggtgataagtaagacattcaggcggttgcttgaggtgagtgagaggcattcatttataggtcccccggaaaatgttcgagaccatgtaatggctgcaacccgggccctctgcaagggagatttctagaaggcctttgacgatattaattctcttgatgtatggaagcttt

SEQ ID NO: 19464 - DNA, 358 bp, Gossypium hirsutum
  unsure (1)..(358): unsure at all n locations; Clone ID: LIB3146-016-Q1-K1-G1
aagattccttaaaagtcaaatggaggctctcagcttaccgtacttgaccagggatggatcatcaggaaatatgaggcagcagcaacagtctctgttgaatgaaaaatgcatgaagaagaggaaaggtagtcctgctgatcttcaggattctaatgaagaaccaaagaaaaacctaaagagtagagggctatgcttggttccgatatcatgtacacttcaagtcngaagcgacaatggagccgattattgggctcctccgtctttattagggtttntgggaaaggctatagcaaagcacacttaaaagggaaaaaaaaagcaacaaaaaaaagtagtcctaggtagagatgatcaaatg

SEQ ID NO: 19465 - DNA, 436 bp, Gossypium hirsutum
  Clone ID: LIB3146-016-Q1-K1-G10
ggcccgcccgcgtgcggaaaagattttgttggaggtttggcatctaccgtcaccgaggttgactttaagaactactttgatcaatttggtaaaattactgatgttgtggtgatgtatgatcataatacacaaaggccgagagggtttggcttcatcacctatgattcggaagaagcagtagacaaagtcctacataaaacatttcacgaactcaatgggaaattggttgaggtcaagagagcagttcctaaagaactatctccaggtgttaccaaccgcaatgttattggatataattatggtttaaatagggctttcaactttcttaatagttatgcgcaaggatttaatctaagttccattcgaggcatttgaattagggatgatggtaagtttaaatcctcttgctaataagcaaaacgggttttttttcatt

SEQ ID NO: 19466 - DNA, 338 bp, Gossypium hirsutum
  Clone ID: LIB3146-016-Q1-K1-G12
ggtacaaaggacggacaggtggtttttttcatggagagggatatagggaggtttgacgctatttaaatggttcacgccacccccaaggatatggctagggacatggctatggagagggtcatggcatcggtggggacaattaaaatctaacttcgtgggcatgcccgcttttaaagagaaaaaaaatatattatccataaataatatgaaggttgctatgtttatttacccccgcgttaattgcattcgagctaattgggatgattcatactggggttccttattaactttaaatttgtcagggtcccccaatctgcttctgttgtttttattctaaa

SEQ ID NO: 19467 - DNA, 58 bp, Gossypium hirsutum
  Clone ID: LIB3146-016-Q1-K1-G3
gggggaatatataaacaagtttccatcccaccaaaaaagaaaccaaatgaaaattctc

SEQ ID NO: 19468 - DNA, 79 bp, Gossypium hirsutum
  Clone ID: LIB3146-016-Q1-K1-G4
ttaaaacctcctttgatcaattgggtaaaattactgatgttgtggtgatgtatgatcataatacacaaaggccgagagg

SEQ ID NO: 19469 - DNA, 285 bp, Gossypium hirsutum
  Clone ID: LIB3146-016-Q1-K1-G5
tccgccattttttcggaccaggggttggcccacacatcgggtggttcccaaggagccaaaatgctctaatcgccaccattaaaaccaaccgcaccataaagttcgtcgatgggtgtcctactggattcaagtgcgggatcaactaccaaccacccactgttgtacgtggtggtgatctctccaaggtacagagagctgtttgcatgattgctaacttcaccagtgatgctgaagtcttacctagcattgaccatatgttagatcttatgtactccaaacgtgtct

SEQ ID NO: 19470 - DNA, 273 bp, Gossypium hirsutum
  Clone ID: LIB3146-016-Q1-K1-G6
ggggcaaggcttcccccaacggttaggtggacccgggggggccggatttgggggtcgtccactttttgaaggtgcggcatacaacattacaattacagttttatgagtctgagatggccaacattgacacgtgagatttatgttattagagagggatggtggaacgtgttatatatgaaataatgagagttagcaactggcatcgaatattccattataagaattcatcaacttgcatcgcatatttcattaaaaaaaagcagacggactaaa

SEQ ID NO: 19471 - DNA, 204 bp, Gossypium hirsutum
  Clone ID: LIB3146-016-Q1-K1-G7
gataatcctccaaacacatttaacagtatttcataaggtctcaattacttgaaaaagcggcgattttataatatcctgcttcctcaccttactaaataaacttctatcaatcaaataatgtcatattcactcatctacgggataaagaaaattcacaaagtcatataatttaaaatacatatgtgataactaaatttgattaat

SEQ ID NO: 19472 - DNA, 267 bp, Gossypium hirsutum
  Clone ID: LIB3146-016-Q1-K1-G8
atgaaaattccgcctagaacaatgttcatggcacagatcgtgggaaccctcattgcttgctttgtgtacctgggaactgcctggtggctgatggagaacatccctgatatttgcgacacaacggcctccaacagcgtgtggacatgtccaagtgataccgtgttttatgatgcttctgtcatctggggtttaatagcaccccgcagaattttcggtgacttgggaacttacgaggcagtcaattggttcttccttgcaagaacagtg

SEQ ID NO: 19473 - DNA, 350 bp, Gossypium hirsutum
  unsure (1)..(350): unsure at all n locations; Clone ID: LIB3146-016-Q1-K1-H1
ctgttaagaagaccaatttggccttgatcatcggaatctatgatgaaccaatgacacccggccaatgcaacatgatcgtcgagaggctcggcgattatctcctcgatcagggttattgattctcttcggtgtgtgtccttatttgaatgcatttcttcttgggtttttctctatacgaaaaaaaagaaacatgcatcgaagcgtctccgtattactcgtatttacatggaaaaagtttgtaatgggtatgttttatgatctctttgctttgcttttatgtattttgattagatggatactatgaangttgtggagtgaggaactttttggttttcttcttttacatttac

SEQ ID NO: 19474 - DNA, 422 bp, Gossypium hirsutum
  Clone ID: LIB3146-016-Q1-K1-H2
aagagttctgtagtgtaggtgatgattcctgcctcatactatgggatgcacgagttggcagtggccccactgtcaaggttgaaaaggcacataatgctgatctccattgtgttgattggaacccccatgatgacaatcttatcctgactgggtctgcagatcatactgtacgtatgtttgatcgaagaaatctgacttctaatggaattggatcacccatttacaagtttgagggtcataaagctgctgttctatgcgtgcagaggtctccagacaagtcatctgtatttggcagctctgctgaggatgggctcttgaacattcgggactatgacaaggttggcaagaaggtggaacgtgcttcaagatctcctagtgcttctgcgggactgttttttcaacacgctggacacagggacaaa

SEQ ID NO: 19475 - DNA, 338 bp, Gossypium hirsutum
  unsure (1)..(338): unsure at all n locations; Clone ID: LIB3146-016-Q1-K1-H3
tcgaattcggctttattggccattcccaatataaaaaaatggttggtttaatcctctggaccgggtggggcttcttgctgccatcttttcctcttttccaaatgtttgcaggttatgggagtgtcaggcacattgaggaggagggcatgcgcggngtgtggtggccgagcgttgaacgtgctgcccgagcacatggngagcggcggctggaggctttgggctagggttggctgctaaaaattcttaagattagtgngctgttatttgggctcttttttattgttttgggttttgttattgttttaattgtctgggccaaaaattggccattacaataa

SEQ ID NO: 19476 - DNA, 308 bp, Gossypium hirsutum
  unsure (1)..(308): unsure at all n locations; Clone ID: LIB3146-016-Q1-K1-H4
ggcagggtggttcaggtcatggtgagggatatggggaggggtcaggcaggggaaatggttcaggcaatggtgaaggttatggcgagggacatggctatggagagggtcatggcagcggtggggacaattaaaatctaactttgagtgcatgcttgcttgaaaagagaaaaaaaatatatatccataaataaatgaagtagcatgttatttacccgtgtaatgcatcgagtaatggatgttcatatggtttcctataactaaatgtcagtccccaatgcttttgntnnannaaaaaannnnnnnnnnaa

SEQ ID NO: 19477 - DNA, 188 bp, Gossypium hirsutum
  Clone ID: LIB3146-016-Q1-K1-H6
agggctcctcgttgcgactcaaattgaaccctaaagccatggttattaccatgaaagaccgaagcaagaaccggaagccgctgcagaaaggcaaggaaccttagcatcgaaacgattcaagcggtgcagtcgttgaagcgagccaaccgcaacgtttccaacacttcgctctcggaaattggagcgcg

SEQ ID NO: 19478 - DNA, 268 bp, Gossypium hirsutum
  Clone ID: LIB3146-016-Q1-K1-H8
acgcccacgcgtccgctcaaactgaagggtatcacctcttcatccaggatgctaatgaatatgggagaagggttcgccagcaagccatgcaatacccacctctggtctagtctgttattaaaaaatactaactaaaactttccatgaaattgctggtaaatgccggctgggatggctgcttgcctcatgaataatgctagactctgcttttgctaagagaaaatatgctgccttgggtatttggtaatctatatcaactgtatgaacc

SEQ ID NO: 19479 - DNA, 283 bp, Gossypium hirsutum
  Clone ID: LIB3146-016-Q1-K1-H9
atactctggtctgctgttgcttttgctgcatcttttcctcttttcaaatgtttgctggttatgggagtgcaggcacattgaggaggagggcatgcgctgggtgtggtggccgagcgttgaacgtgctgcccgagcacatggtgagcggcggctggaggcttggggctagggttggctgctaaaaattcttaagattaatgggctgctatttgggctcttttttattggtttggggcttggtaatgatttaattgtctgggccaaaaattggccatttcaataa

SEQ ID NO: 19480 - DNA, 404 bp, Gossypium hirsutum
  Clone ID: LIB3146-017-Q1-K1-A1
gcagatgatggaacatattcgccatcaactaactacttggtttaccaatcgtcgtgaaatgggaatgagatggacctcaattcttgttccatctgctgagaagcgaatttcggaggcaattgcagatgctcgttgctaccaagtacttagagcaaatgaagtggagtttgagattgtctcaaccgagaggactaatatagtggatattaggaatcgtgtgtgttcctgtcggcgatggcagctgtatggtttaccatgtgcacatgctgcagctgcccttatttcttgtgggcagaatgctcatctgtttgccgaaccttgtttcacagtgggaagctaccttgagacctattcacagatgatacatcctattccagataagagcgtttggaaggagctgggtg

SEQ ID NO: 19481 - DNA, 441 bp, Gossypium hirsutum
  Clone ID: LIB3146-017-Q1-K1-A10
gaaaaaaaaagttctgatgaacttgaatgatgaatagatggcaaaatcgttgaagccagcgtcctccgatgaagaactgtacaatggttcgagttcatcgaagaggagcgaatgaacgctcatgtcaacggcgaagaagatgatgaaagaggagatgattggaaagctaaaagaattgggcaactctgttctgggtcgttttgggatgagtattgacaacttcaaagctgtcaaagatccaaacactggctcttattctatatcattccagaattgacatcgtcactacccacaagcaacatgtgagagaaaaatgaaggcagcctttatcatgacacaagatacgttagcttggaatttttttatgctgaatatttctttgcaagtagactgtgcaatctgtgtcatgttcatatattttctcgatattctagtcgcttt

SEQ ID NO: 19482 - DNA, 393 bp, Gossypium hirsutum
  Clone ID: LIB3146-017-Q1-K1-A11
acgcccacacgttctaaaaaaacccatcgttttacatgaggatggtatttcttctattacgatggaggttgaagcaaatgggaaggtattcaagcacacatccacagcttgtgataagaagatggccaagaaactggctttcaaagaagttttgaagtctctaaagggagccaatttcagctagattttgcatttgacttgagcggagattgaacatattgccttgcagtatctttaacaaagcttgaaaacatatgtgactgatgttcattaaattaactataattatgacacacgtaagtgctcttattattaaacaatagtataattatggttactacaggaatatcgaattggcgaaggttgaaaatatcaataactattattatttta

SEQ ID NO: 19483 - DNA, 407 bp, Gossypium hirsutum
  Clone ID: LIB3146-017-Q1-K1-A12
acgctacaagcttgttttcactggatcaaccgaaacgggaaaaattgtccttgagttggctgcggaaagcaaccttaagcccgtaacattggagctcggaggaaaatcgccttttattgtatgcaaggatgctgatgtcgacaaggcggttgagcttgcccactttgctttgttcttcaatcagggacaatgttgctgtgctggctctcgtacatacgtacatgagagtgtgtatgatgaatttttagagaaggcaaaggcacgtgcattgaaacgtagtgttggcgatccatttgtagcaggcattgaacaaggccctcagattgattcagaacagtttgaaaagatcatgaggtacataagatcatgtgttgaaagtggagcaactttatagaccggaggggaga

SEQ ID NO: 19484 - DNA, 191 bp, Gossypium hirsutum
  Clone ID: LIB3146-017-Q1-K1-A2
cacgttgggttttaacaaagggaaccaaatggtttttgaattttgaacaaaaaacccgggggccaaccagttggggggactggttttttcttccaccttttgagggaaataataccactgaggatggcagggatactgcaagtcgttcatccgaagacttgaggaagtcgagattgggatttccgcagggc

SEQ ID NO: 19485 - DNA, 147 bp, Gossypium hirsutum
  Clone ID: LIB3146-017-Q1-K1-A3
gacaagaataaacgattcgcatagctgtggtcaaatgtctagttgaatgtgtctcaggccctttagatatgacaggtgttcaccagacccaaagaagagatggtgcttcgtataagtgactgccctaattgctgagcgcagttgcgc

SEQ ID NO: 19486 - DNA, 416 bp, Gossypium hirsutum
  Clone ID: LIB3146-017-Q1-K1-A4
ggaactttcgtgtaaagtttgatgatttctttgtgagtggagtcatagctgaaattgaagtaggaatgggtccatgtggggagctaccctatccgtcgtatcctgtaaagcatggttggaaatatcctggtattggtgaatttcagttcagtgttatgataaatatttgatgaaaagactaaagaaagcagcagagattagaggacacactttctggggtagagcaccatataattctggttcttataactctgcacctcatgagactggattctttcgtgatggaggtgattatgacagctactacggcaggttctttcttaattggtattctcaaattttggttgatcatggtgatcgtgtgcttgctctggccaacttggcttttgaaagcacttgcattgctgcaaagctat

SEQ ID NO: 19487 - DNA, 410 bp, Gossypium hirsutum
  Clone ID: LIB3146-017-Q1-K1-A5
ctggtatttaaaatcaatttggactgtcatatacgattgttgttagggaggtaatggagcttaacgacaaagtgaccatttcgtaacaaaacgataacgtgactaaaacataacatttcaaacataaatgactaaaatgtaatctgaggcaaataaaagcgactatttttatagtttatctttatatatatatacactagtgtattgacccatgcaaggtacgagatttaatgttttatattttcatttttctaaattggtgcaatatcattaatatttatcagttattaaaattcaataatagaaatattaaaatataacatatttaaattgcaaatattataatgatgtttgataatattttttttgtaatattatgaaactttaatatatgtgaaatatgaattact

SEQ ID NO: 19488 - DNA, 392 bp, Gossypium hirsutum
  Clone ID: LIB3146-017-Q1-K1-A6
cccacgcgttcgggaaaatggcgggaggttcaccagcaggatccatttgcctgaaaaagtgtacaagactgaccagattaaggctgagatgaaaaacggtgtgctcaaagtggttgttccaaagatgaaggaggaggagaggaatgatgtgattcaggttcaaattgactgagttaactggttgcatacggatgaggctaagtgggttttctttggtttggggctttgggtcttgtacgtatttagttttgataataagggcttcgagtataatacgagaaaatattaatgtagaactttcattttgtgttaacagaaaaccttgttaattttggatctatataacaaaatttgataataaattttttgttaaaaaaaaaaaccttcaaaaa

SEQ ID NO: 19489 - DNA, 185 bp, Gossypium hirsutum
  Clone ID: LIB3146-017-Q1-K1-A7
acgctcgtatcatctataaaagccgactttattaagcatttggataaaactatcggggggaggtttactaccatagcacctaaacttaactatattatacagtatatgctttatagtataacaaaactaacagagtctgctaaggtcagagatagttatgatagaattttccaatccaactacta

SEQ ID NO: 19490 - DNA, 137 bp, Gossypium hirsutum
  Clone ID: LIB3146-017-Q1-K1-A9
ggggtgcgcgggcaagcaacgtcatatctcttctatagcgtcacttaaatacattttactggccggcggtctacaacttgttgtttgggaaaaccccgatatatctcaacttattttcacttgtaaacattctccat

SEQ ID NO: 19491 - DNA, 373 bp, Gossypium hirsutum
  unsure (1)..(373): unsure at all n locations; Clone ID: LIB3146-017-Q1-K1-B1
ctgattgcatttcccttctccatttggcaccaaattcccaggaagcgaagttatttgaaggatatcaaaagctgacagaaaggaaccccataatggccactaccaccccatctaccaccgggaagtccacaggcaatggtgcatagaagagtgggggaggaaaaggaaatgaaatggctttgggagcttctttatgggttttcactatgcttcttcttaactttggtgtggaatacacaactggaatttaccaccaactgctattattatatttggtaaacacaggtccacgaaaaaaataaacttatggagtttaaatataggttatatcacaaatcacacccttcttttntntaaaaaaaaacactcactg

SEQ ID NO: 19492 - DNA, 413 bp, Gossypium hirsutum
  Clone ID: LIB3146-017-Q1-K1-B10
gggcgacccacgcgtacgcccacgcgttctaaaagagagaagctctttttttgaaagttatgaagaatatcgacaagagcttacttgacgaccttgattcagattaatgagaacaaatgtacgacttataagtgcagtacttgactatagctaaaaatttgagggttgatattgtttgtctagtaatttgttaaataaataaaaagagagaattatacttaacatattgacaatgttactgaacataactaattaaagttaactaaccacgatgacaatagtcttgctgcattccatttatatagctatgatttatgtataatccttgtgagcggcattcaacttttatttattgcatcatgtagtacaagttggtaaacagtttaattaatttaatgaactttttaacctgt

SEQ ID NO: 19493 - DNA, 440 bp, Gossypium hirsutum
  Clone ID: LIB3146-017-Q1-K1-B11
tgcggttcaggaatcttttggtactgataaatggcgcttcacgggcttttatgggttgctagatgtgcgatttcatgcggaggcttggagtttcttgcgatctttggaacaagatcagagttttccttagctggtttgtggtgattttaatgaaatacttttttcttttgagaaaagaggtggggttgttagggacgagcggtgtatgaaggagtttaggaatgccttgtcggcttttcttttggaagatttgggttttaagggttcatggtttactttggaaaggggcagattggtttattctaatattcgagaacggcttgaccggagggatgcaaattttgcttggtgggatcgatttccttctttctctttgaaacacttgcctcatttgatttcggatcatcgcgggcaaaaacggcatttgtgcactaaactta

SEQ ID NO: 19494 - DNA, 413 bp, Gossypium hirsutum
  Clone ID: LIB3146-017-Q1-K1-B12
caagtgttcgttgctgcttacaacaaacgacttcttaagcttcctgcagagggacaggaatgtggagttttctatgatcctcctttaaaggaatacgtgctgtcaaagctacccctcacctaccagttcaggttcttgaacaaagccgcgattacaaccaagaatgatttagaagacgatggttcccctaaaaaatggcggttgcgcagcatccaatatgtagaagaggtcaaatgccttatcacaatcatccctatatgggcttctggtatcattagcttcaccgccatggcacaacatggaacattcaccttatcacaagctttgaaaatgaacatgcatcttggtcccaagttccaaatcccagctggttccatgggtgtcatatcgacgctcacaattgggattttcct

SEQ ID NO: 19495 - DNA, 308 bp, Gossypium hirsutum
  Clone ID: LIB3146-017-Q1-K1-B2
gcggtggcgcgtgacttcacttacatcgacgacgttgtgaaaggttgtttaggagcgttagacacggcggaaaaaagcaccggtggcggcggaaaaaaagaaaggaccggctcaattaaaggtttacaacttgggaaatacttcccctgttcccgtcggccgattagtctcgattttagaaggattgctcaacacaaaagccaagaaacatgtgatttcgttgcccagaaatggtgatgtcccctacacacatgccaatgtcacgttagcttacaaggattttgggtataaacccaccacggatttag

SEQ ID NO: 19496 - DNA, 371 bp, Gossypium hirsutum
  Clone ID: LIB3146-017-Q1-K1-B3
gcgagatgttacccaatacactaattttggctggaaggttgattgagctttgcatggattcatgcccctttggggccgaaaaggagaagtcatgaaatctttatcttgatgttgctacaaaaaaaaaaaaaaaaaaaaaaaaaaaaaaaaaaaaaaaataagattaaaataaaaaaaaaaaaaaaaaaaaaaaaaaaaaaacaaaaaaaacattttttttattacaaaaaaaaaggaaaaaaaaacataaacaaaaagaaaatgaaacgggggcgccccttttatggaaacaattttaaaatccggggatttaggagttgaaatttttttattgtggccactaaaatcaaagtaactgcccgtttttaaaa

SEQ ID NO: 19497 - DNA, 280 bp, Gossypium hirsutum
  Clone ID: LIB3146-017-Q1-K1-B4
cccacgcgttcgctcaagttgtaatggacatgatattaatatatagctaacatataatgggctggtttccatatgtcggctgtggctgcttatttaaaatggaggtccttgttgttattgattttaccaaaaaacgtagaaatcttttttaaatttccaaattgaagatagcaacaactttatcttctctttggctttattgggaattcacttttaaaaaaaaaaaaaaaagctgaatatttaaaaaaaaaaaaattatttctcgctcctttatataaat

SEQ ID NO: 19498 - DNA, 344 bp, Gossypium hirsutum
  Clone ID: LIB3146-017-Q1-K1-B5
ctagaatctagtgtcggcttcggcatcatcaaatagcactcgcatggttgcctcagctagccacgacaagtgtgtgaagctctggaaatgattttactccctgcattttatccactctactgttaaaaaggtatagttccttgcactaaaatatataacagggttttctgacattgttttgtcctaagctcatccaaactattttgaagcagcaaaaaaaaaataaaaaaaatggtggtgccgcttaggggccccgggggggggggggttagttttttccaccaaagaaaaaaaatggtaaacctcttggccaaaccagtcaactaagacatcttttttttttt

SEQ ID NO: 19499 - DNA, 425 bp, Gossypium hirsutum
  Clone ID: LIB3146-017-Q1-K1-B7
ctgacattggctttgaagttgacaaattccataaaagaaagaaacaagatggagggttcaatgcattttatgacaatgagccagggcgaagtgggtcaaatagtaagcgttctagcaagggtgtacttgcccctgctaattggaaaagcagtaccaaggagaaagagtggtcggaattagagtcaagagatgcggagattcagagttcaacacaagaagctgttattgataataatgaaagcaaggttaaaaaggttaagctcaaggttggtggagttacgcgcacaattcatgcaaactcgacagttaatggattgccagggactgggtcctatgcaaggaagaacagtctccagggaagtagcaatgatgggcactcacctccaggtaggagtggtttgcaaggtgtaccctggaaagatttc

SEQ ID NO: 19500 - DNA, 257 bp, Gossypium hirsutum
  Clone ID: LIB3146-017-Q1-K1-B9
acgccacgcgttcgatagttgtcgaccgcgagctgcgcccttgatttttttttttccgttgggtgatggccgacaaaaagaaaaaatgaaatcacctatcatatattataaggagggacatatgttcttgcaaaagcacttttgggttttgaaaaagaggccccagattgattttgaactttgtgcgatgacgacgaaggaatttaccctacgaactattacaagaataatgagggttattcttttgaagaactcta

SEQ ID NO: 19501 - DNA, 401 bp, Gossypium hirsutum
  Clone ID: LIB3146-017-Q1-K1-C1
ccttgaaatcaccgaaagaccattcctttgggttgtaagagaagatattacaaaaggaaaacaccataactaccctaaagggtttaatgaaagagttggcaatcaatgtaggatagtaagttgggcaccacaagcagcagttttgggtcattcttccattgcatgctttataagtcactgtgggtggaattccaccatggaaggtgtaagcaatggggtgcctttcttgtgttggccttactttgctgatcagttcctgaatgaaagctacatttctgatatttggaagcttggattaaaactccaaaaggatgaaggaggtatcattagaaaagaagaaattaaaagcaaagtggaacaattggttggtgatgaaaatttcaaaacatgagctattgaac

SEQ ID NO: 19502 - DNA, 426 bp, Gossypium hirsutum
  Clone ID: LIB3146-017-Q1-K1-C10
cccacgcgttctgaggaaagcatacacctagtgacatggttcaagagaatgcacatcaacgaggagtcgttccgcaaagccatcgaccccacaatcgacctcaatgaggaaacgctagccagcatcagcacagttgccgagttggctggtcattgctgtgcaagggaaccttatcagaggcctgatatgggtcatgctgtaaatgtgttatcttctctagtggagctctggaaaccaaccgatcaatgttccgaaaacatatatggcattgaccttgaaatgtcattgccacaagcactaaagaagtggcaagcttatgaaggccaaagcaatttggaatcttcatcatcttcacttcttcccagcttagacaacactcaaaccagcattcctacgcgaccgtacggattttgtgagtcatttaca

SEQ ID NO: 19503 - DNA, 190 bp, Gossypium hirsutum
  Clone ID: LIB3146-017-Q1-K1-C11
acgcccacacgttctaaagaaaccatccacttattgacttgtttcatgaaaaacaacatttacggggagccgtccaataaatccatcatccccacaatcatctcttaatgaggaaacgcttagccaatatcagtacatattttaactgcgatgtttacagctcttaacagtaaccatataaaagatctgt

SEQ ID NO: 19504 - DNA, 434 bp, Gossypium hirsutum
  Clone ID: LIB3146-017-Q1-K1-C12
aacgctaaggagatacgtgagtctgcccacacgcttttttatcccattatcataagacaccagatacgagggcgcggggccttcatgatctgcagcacatcctcgtttatactcgtgctggcgaagatgtcattactccacaagaactaatggctgctaatatctaatcattggaaaacgagcagcttctctacgttctatatgagtgtaagaaggatctcactgctcccggagcgataggaacagcaccgactgactacctggatattgatactcccgttgggaagacgaatgaaagccaacatcgtgatgcatcattagaggaatgcaccatctcggtttgcaaacctcactggatgcatgctaggagctgcagacgagcctaactttctggattctcactggaatggaccaaggttctgtttacggaatga

SEQ ID NO: 19505 - DNA, 344 bp, Gossypium hirsutum
  Clone ID: LIB3146-017-Q1-K1-C2
cgacgccttgcccgtaggggaggagtgaagcgtttcatcggcttaatctacgaggaaacgcgcggggttctcaagatcttcttggagaacgtcattcgcgatgcggtcacatacaccgaacacgccaggagaaagacggtgactgccatggatgtggtttatgcactgaagaggcagggtaggactttgtatggatttggtggttagttgatttaggttctaggttataaaataggggagaattgtaggactcacttaaagttacaaggtgggttttgttgttcgctgttataaattgtaattcgcatcatcaattgcatattttattgaattttgaaggtcat

SEQ ID NO: 19506 - DNA, 380 bp, Gossypium hirsutum
  Clone ID: LIB3146-017-Q1-K1-C3
ctcttttcctttgttttgtaatccaaagacttttaaggcatgcaagtatgttaattgaagttgtttaagctatgtttattatttcataggtagtagtacagaaccattaggttcattttggttgcaatcaaagttaataagcttaactgcagacttgaggcagtgagcaattacggctacattttctaagttagcttaatgactgatccagacttgtgaattgccatttaaattcagacagatttctgatactctgctgttgtttgaaggagtttaccttctgtaaattgttgttagtgctgtttttgcaattcagaaattgtttttgttgttagtgagtagaagatgaaaggggaaattgttgcccgattttgatattt

SEQ ID NO: 19507 - DNA, 243 bp, Gossypium hirsutum
  Clone ID: LIB3146-017-Q1-K1-C4
aacgctcacaccttctatatatttcaaccaatcttttttttctcatcttatttaaaaaaaaagggcggtgtttttttaaatgaatctatttccactattatgtgacctctcgcccttatactcccatgacaaatttaaggctttcatcaacctttattctcataaaaaggagcacaaccctctacaaaatatctagacaccaaaaaaccttgtacaaaattcttaacatacataaaatttcat

SEQ ID NO: 19508 - DNA, 369 bp, Gossypium hirsutum
  Clone ID: LIB3146-017-Q1-K1-C5
tctcccacgcgttcgtttttattgatggatttttactaacgatgatgatatcaaattaatcattattcattccaatatatttgaataaaggaacatttgttcagataaaatatactctatgttctctggtcttatctaatttatcatcaatttgccttctcaacgacatgaattttaccagaatcctcactgattgaatcatacctatgaaacatgcgagctataatatactgtgtaagctaatggagttaccatagtatagctcttttattgtatgactagtagcaaatggaataggaaaaaccaactacactagattgcggtccaagaacaatttgcacaatgcacataatggcttgctactacctc

SEQ ID NO: 19509 - DNA, 275 bp, Gossypium hirsutum
  Clone ID: LIB3146-017-Q1-K1-C6
acgagcggggaacatatacgtggcatcatttgtttggtcgtgcagcggagtgtgtaagtggggggagaagatgaaatacgtgcacaactcttgtggagaaggcgattctagtatttggaaatcagatttttaagttgccttcctacctccttaccggctttttattatccattttcaaatttattattaagtagtaaaattacttcaagaactttcaacactttgcatactccttttattattattattattattattattattatcatgtattt

SEQ ID NO: 19510 - DNA, 416 bp, Gossypium hirsutum
  Clone ID: LIB3146-017-Q1-K1-C7
acggtcgcaatcacatcaactggcattattatttgtgaattgcttttggctgatgtaagcggggagctgaataacaataacatcacaaccaatgtcaaagttgacactaagtctactctttttgccactgttaccgttgatgaacctgcacctggattgaagacaatctttagttttattgtccctgatcaaaggtctggcaaggtggaactgcaataccagcatgaatatgctggcataagcactagcattggtttcaatgctaatccccttgttaacttctctggggtggttggaaacaattgtgtcttactggggactgatctctcatttgacaccgccagttgaaactttaccaaattgaatgcttggctgaatttcacccattctgacctcattgctttcctaacattaaa

SEQ ID NO: 19511 - DNA, 395 bp, Gossypium hirsutum
  Clone ID: LIB3146-017-Q1-K1-C8
acgcaaaaaggcttttgattcctccaatactgtgtcagttgctgaagttaatgctcaagcacgtgctgggggagtccgtacggggattgcctatgaaagagcttaagagcttggagagtcgtttagaaaaaagaattagcagaatccgttccaaaaagaatgagctgttgtttgctgaaatagagtatatgcagaaaaaggttaaaatagtgaaatgcactgtgaatgacatacccggggacatctctttaaataaaacggctgggctatctgcactttgctttctggagaaggtttgagtttttggtggatgcatagttcacgattagctgaattcatgcatagtgacttgtttaagctaactgattatcttaaaagagcattctatcattatt

SEQ ID NO: 19512 - DNA, 457 bp, Gossypium hirsutum
  Clone ID: LIB3146-017-Q1-K1-C9
acgggaaaccaaaccaaactagtgagccgctgtttcttttcttctgtatcccaaaatggttgggtttaggtttcatcaataccaagtggtgggcataggccttcctacagaagcagatgagcatcccaagatttaccgtatgaagctttgggccactaacgaagtccgagccaaatccaagatttggtattttttgaggaagctgaacaacgtgaagaaaatcaatggacaagttttggctatcaatgagatctttgagaaaagccctaccaagatcaagaactattgcatttggctgcgatatcaaagtcgaactggttatcacaatatgtacaaggaataccgagacacaaccctcaatggggctgtataacatatgttcaccgagatggcgtctcgtcatatggtgaggtttccttgtattcaaattattatgacatcttccattccagcaaaa

SEQ ID NO: 19513 - DNA, 148 bp, Gossypium hirsutum
  Clone ID: LIB3146-017-Q1-K1-D1
acgcttacaccttctctaacacacaaccttactttttttttttacccaaatttctactcatggggtgctaaaccttaaaagacttatattacaaattaaatatactttaccaaaagtttcaactcattattcaactaacaatcattaa

SEQ ID NO: 19514 - DNA, 294 bp, Gossypium hirsutum
  unsure (1)..(294): unsure at all n locations; Clone ID: LIB3146-017-Q1-K1-D10
agcatatgaacctcttttttcttgggcaatgattttcattgtaccaaagaaaaggggtgtgtgctagagatgattattacttatttgtgttgtaaccaagtgttgtgatgtatatcagtctacctatatatgaatttggaacttggtatttanaaaaaaaaaannanntnnaagaaaaaaaactcaaaaaaaattttaaaagaaatttaggggttttaaaaaaaaaaaatggttttacaaaacaaaggaacttaaatttttttttgccacaccccctttttttttttataaaaa

SEQ ID NO: 19515 - DNA, 278 bp, Gossypium hirsutum
  Clone ID: LIB3146-017-Q1-K1-D11
cggacgcgttgtttattagccaaaggttcagctttaagtttgggatcgaagaaatctacgaccaaaccgtggaatattagaagtctaaggggctgctcaagtgaagcgctttgactcttccacaatgattatggtgtaagattgttgcgttatcgcaacaatattccaatatcttcatgttctacacatgaaagcgcaaccgtgtggcgttcgttatccatttagattttgaatttctatcacctcatgttcttcaatcccatacttaaagctgaacc

SEQ ID NO: 19516 - DNA, 402 bp, Gossypium hirsutum
  Clone ID: LIB3146-017-Q1-K1-D12
cccacgcgttcggccaggacccgcctacatgacataacattccccaataaacttgctgcctggacatttcaactactcaatcccacttgaaacgctctgcagagacactgagatgactatatggcactatcatggaggctgccaagatagcaggggtgttgaccccgataataaagaacttggcgtcgaaactctaaaggatatcgacgggtccactttcaactttttgtctgggactaatacgtacgccactgtcatgatgcttggaacgtacaagggtgtgaagatattaagagagagactaggccattaataatcctcatgattcggtatggaagatccttatttcttttgatcaagacatgatggacggatggatgaccttgacttggcaatacatat

SEQ ID NO: 19517 - DNA, 284 bp, Gossypium hirsutum
  Clone ID: LIB3146-017-Q1-K1-D2
acggttgccgagtcatatccggagaccacgtggaagccaaagtttgaggttgagaaggaaaaacagggggctgaggatgaagctgccgattctgccaggcttgcaggctttcagaggaagggttttgatgtcttatacaaggttgctgacattcctttcttaaacaaatacaagcatcaaattctcgatcttattgagcatgctgagacacaacccgacctcaccaatggtgtcttggtctctatttgggggaatattctcaccaatttcttcaaactcatttt

SEQ ID NO: 19518 - DNA, 416 bp, Gossypium hirsutum
  Clone ID: LIB3146-017-Q1-K1-D3
acgtggctctcgaaattgttagcgggaggtgcaacactaaaagccgcccaaagcaagaacctgtcattctccttgaatgggctcatgttttgaaggagaatgggagcttgttggaattagttgatacagggattggctcagattgcaacacagatgaagtcatggcaatgatcaacattgcactattgtgcacaaatcccacttcttcagctaggcctttaatgtcttcggtagtgagcatgcttgaaggcaaggctgaagttcaggaatacctcacagattcaagcatttcttcaaatcgtcaaatgagtgcagagattatgaaaaagttgtatcggaaacttgaagaagatgatacaaatgttagccaaacaaggagtatgttagctgatgggccatggaccaattcttctaca

SEQ ID NO: 19519 - DNA, 232 bp, Gossypium hirsutum
  Clone ID: LIB3146-017-Q1-K1-D4
gctaattattccagccaacaaagtaaaccattagagaaaatattttcttttgtaaaaaggtgctgaacagaggaaattttagtatgcacctgtttagagatggcttttgtatgcctttttggacgacattagtgtcgcttatctgtttgttctctgtttcttttgtgtttttgcttgtgacacctataggctttgcttcgggaacatttatattcatattaaatcgtctttt

SEQ ID NO: 19520 - DNA, 356 bp, Gossypium hirsutum
  Clone ID: LIB3146-017-Q1-K1-D5
aacggttgaatcatcaataaataacattcttttttttaagatattactaaaattttaatggcggttattttaatacgttttaattataataaaaatattttagttaggagcaagttaaatagatataaaagttttgatcttattttttaaaatagattaatatattttttattgcaggtgcatggaatgaatgtgaaggctcgtcaaaatatatgtatcatcatatatttttatctgcggagaaaatgaaaagaaaaaaaaaaagttaaaaaaaggactgtctgaagtgtatagtattaatagcgcatgatttattaaacaagctatgaatgtactaatgaaacaaaataaattat

SEQ ID NO: 19521 - DNA, 386 bp, Gossypium hirsutum
  Clone ID: LIB3146-017-Q1-K1-D7
acgcccacgcgttcgtgagatttcaggttccggctcagcttcggcttcgggttcaggggcagccacaggaaccggtggagggttgtactctagtgatgggtcggtgaggatggttggggtggcgggtattttaaggaaggagcaagaaatgtgggagagtactgataagagtttgcaggatgcttttcaggacttaaatgctttcatgagtaaagctaaagagatggtgatgttaccggaaaaattgagacaaaagcttttgttctgaacgagttctcaaacaagtggaacaaatgatgaggatatgggttcaaaggaagagatgcaagattggttgttgagtgttggcataatatccccagtcactaaagagtctgcaggtgccc

SEQ ID NO: 19522 - DNA, 242 bp, Gossypium hirsutum
  Clone ID: LIB3146-017-Q1-K1-D8
catcctttccccatgcgactacctccacattagaaacaatttcctcccaatggccattattactccagttgtacagacactaactcatcaaggtcagccagcaacatcagctgtgcttacttaatcatgttgaactcacacacctgatcaccggttgtcactcactttttctgttaaccggcatatgcgttaatgccttctcgctatacgttcgcatcccttctaggctcacgcctttcaac

SEQ ID NO: 19523 - DNA, 428 bp, Gossypium hirsutum
  Clone ID: LIB3146-017-Q1-K1-D9
acgcccacgcgttctggccgaccgatggttacccacgactgttcctctgcctctcctttcaaccgctagaacagtcaatcgaggcttcattggaccaaggggatccgcgggtcttgcttaccagccccaaatcgccactgtgtttagatggtggcggaacacgcgggcgactcgaaagctttggaacgcacaaaatttctccactttcttttggttctttttgatgatcaaataataaagatatcgagtcaattaaattctgaagagcagcgaattcataacagagaagggataattacctactctgtattctcgagtgactgcgattatctccgtgtccgcattgcctattttgtattcgtacctttacaacgattaaaagcttggcttttatcgccgataaaagagagaaaaagaaattgaaaata

SEQ ID NO: 19524 - DNA, 359 bp, Gossypium hirsutum
  Clone ID: LIB3146-017-Q1-K1-E11
acgctactatgaggaaaatgtttcgctggagaggatatgtcgcaggcctattacttaaaagctgaagttgtgcagaaacaaattgacgaaattaaccgtaaacaactcttcaatgagttggtgtttacatttttcgcaaacaagagatgtcaggggccttcatccaagcttcttaaaacggcattttcttattgagggagtgatgtagttcgtaaggaggaatacgtctctcctttgatgagcaatttgtaagtttaatgtaagccttcattgaagtctatgatgaaaagaagaaaataacaatttcttggtacagaaaaaaaaaaatatttgtttaaaaaaaaaataacacccccctt

SEQ ID NO: 19525 - DNA, 452 bp, Gossypium hirsutum
  Clone ID: LIB3146-017-Q1-K1-E12
cccacgcgttctataatactatcaagtgaaacagatcggatttgaagagacgcccaaatattctaaaggatatcgcaggtccatagaagatgatccgtgtcttccggtcctttcttgcaaagagggcatagaacatcaacctttaaggtcctttgtagctaattactgtaatggagcagaaaattattaaccaatctccatagatgtattttggttttttctggaatatgtaaagtccataaggacttgtagaaatccttatgagcctcaaaattaggcgtggtgtaattattgtcctgtaaatactttgtaacaagggcccgataaccactcccaacagagtaatctgcagaaccctcatatttccagaccaatatattctccggactagctagaaagtgggatgggaagaatgcggcttacctactcctcatcaacaagtattaaaaata

SEQ ID NO: 19526 - DNA, 354 bp, Gossypium hirsutum
  Clone ID: LIB3146-017-Q1-K1-E2
acggcactataaagagaatgctgaaaaaggttggggcattttcaaaagatccatttcgtgacacttgtgtaactgtctggggtgtgtctgagctcgatgcatgctccgatgcttgagctcgtactgtttgggtcaaccaacattaggttcccaactggaatgacctttggcttccaaagtgttagagggaattccttagactctttggttcgaaatcttaagggtttttcctctttaattttaaacattaatatttgtagaatattgtgctttaattacagtgactgctatcttggtcccaggagttggccttaaagtagtgatcctacgcaggcaattttatgttgaatatta

SEQ ID NO: 19527 - DNA, 414 bp, Gossypium hirsutum
  Clone ID: LIB3146-017-Q1-K1-E3
acgctggtattctatgcatcatactaactgttttccacttgtatatatgtgtaattaccaccggaagaaaaactaatatgtgcacgtgatgtctactgacccgctacgaaccgtgtgcgctgtctgttatttataaaaaacatactgcaccgcactaagtgtttcttgcgcgtcacgtcagctccgaaatattaccctacactttaaacaaacctactatcgccacgaaatctcctgtattattactatggaaactggtattggtatctgagtcaattacgattccgtgatctaacggttccatagattggactcagaaactcatatcctatcatttccacaaaatcaacaacaccttgacctctcccttgattcacatcaaaggctgtctcatatatttgctccacctcaacc

SEQ ID NO: 19528 - DNA, 390 bp, Gossypium hirsutum
  Clone ID: LIB3146-017-Q1-K1-E4
acgtacatatcatagctactcacaaccgagaatggaccccatttttgcaaactcagcaccctggctgtacccaccatacaatctgtgtgttcctcagtctaatgtatacaacgataccagtcgtgttcagaatcaaagtcatcctgcaacatataatgggtccacaaatggggaaggaccattcaaggtaaatgggggagataagtcttattacaatgagcttgagagcctacttttggataaccagtgagctcctggagggtctcttactgcaggacttaatgcaccatctcctcctgatcatatacctctagaaactggtatgcttttctttgatatctaaagctcttgggatcgtctaactcgcgcatagagcagattagcatttgc

SEQ ID NO: 19529 - DNA, 227 bp, Gossypium hirsutum
  Clone ID: LIB3146-017-Q1-K1-E5
aaaacccggactcgacccacacgtaacctcatatcatatcaaccctccacccttttttttccctattaaaacaaccataacgggcggcttaaataaaccatacatcctccccttacctccatacaatcttccaaacttatcctctaacttccaaaatcaaccaacaacttcttccccacttaattcacattttccttacctacccattcaatataaatccttatact

SEQ ID NO: 19530 - DNA, 419 bp, Gossypium hirsutum
  Clone ID: LIB3146-017-Q1-K1-E6
acgcttgttttgtgaatacatgtcgtccatcactgagagggccacctctcgttgttagtggatctgttgacggaactgccaaactcatgggatatgcgtcagagaggtgccatccaaacattttctgataaataccaaattacacgccgtagttttttcgatgcatcatataagatcttcaccgatggcattgacaatgatattaatgtttgggacttacgtaaaggtgaagtaacaatgacacttcaagtgtatcaagacatgattacaggtataagtttgagtcccgatatgttgctaccttctcaccaatggtatggattgcaaactctgcatataggatatgcgcccttatgcaccacagaatctttgcgtaaagattatcgaatgccaccaacacaatttcgaaaagaacttgt

SEQ ID NO: 19531 - DNA, 415 bp, Gossypium hirsutum
  Clone ID: LIB3146-017-Q1-K1-E7
acgcaccaattctatgcatgtgtcatggatattcaaatgccagaaatggatggatttgaggcggcgaggagaattcgggatgtggaacagaatatcaataatcatattaaatttggagaaatttcagtggatgattacaacaatgtttcaaactggcatgtacccattttggccatgacagcagatgttattcaagctacacacgaggaatgcctacggtgtggaatggatggatatgtgtcaaaaccattcgaagctgagcagttataccgggaagtttcacgatttttccattaggcattattagatcagaaactgttggaagaacatctgctcatgacttggcatgggcactaatgggactgcctgtactatggcattctttgcgatacctcaataaattcagattattccc

SEQ ID NO: 19532 - DNA, 398 bp, Gossypium hirsutum
  Clone ID: LIB3146-017-Q1-K1-E8
gaaccccgggtgcgacgccacgcgtacggacccaccctttcgatcggtgctctttattgttgccgcacatgcatgctcacaaatggagcctgcgagcaaggagtaaatgtctacaaacctcgcttctatcaggaatgcaggaaaggctgatttatgtgccttgatttgctacttacaattttcattactgtctctggaatatgttcactgcagaggttcaatttgctgcagactttcgccacgcataaaggattctgagagctggtaagcactaatcaagttagttcgatagatttatagtcacaagctgtcagatcctcccttcggatgtttgtgggacaacatctacaccattgagaggctatacgagctgaaaccttatgtagaagtgatctggc

SEQ ID NO: 19533 - DNA, 376 bp, Gossypium hirsutum
  Clone ID: LIB3146-017-Q1-K1-E9
cgtacgctattatactttatattacccaaacttaattttttataaaataaagattgagaactacagggggaaaggtggaagttgcaataatacaacactcttcattgctttacgtttccttgcctgataaactgtcacaatggccacaattgcttgtcccaccccgaacactttgtacttcacattttttcctggacaactatacttgtgccgcactttcattaacccccttgtcaccaccactcttctaccaattgtaactacagtctaagcctaaaacgcagacgtagtaacatgaccccgtaccattggcaaacattggctcaggcactgtctccgccatacagaaatgcaacgttacttttgtcaattactg

SEQ ID NO: 19534 - DNA, 415 bp, Gossypium hirsutum
  Clone ID: LIB3146-017-Q1-K1-F1
gcaaactctagacccctttttagcctcaacatcgatccaccatcacgacggcggtcagcagttgcaaggcctcgaaaagtcaattcttaaccttgaggttccctctagacttcgatttcaacgaagtaaaaaagaaccaacggcctattcgcaaggtcagatcacactttttcttttacttttgcttttaagatgtagataaaaaagcttgatggaaatagattaaaaaaaaacagagaattaaaaggaaaaaggaaaaaatcaccttttgaaatcgtttttgaatttttctattcagtatgcgtatagtgtgcatgcgtaagttttttttaggtacattcgacggctttttatagccggatttacagagtaaataaaaataaaattacattttatttgctgtaaattctgttat

SEQ ID NO: 19535 - DNA, 266 bp, Gossypium hirsutum
  Clone ID: LIB3146-017-Q1-K1-F11
gccaaatggtaaagttgaacaactttaagtcttgttatcatgagttaaggctgaacctggggcttttgttcgggtctgttttcacttggttaatattctagaaattgctgctatttattgctgtcacgaaatcgctggacatacaaatgtactagtatggtgttctgtaaatttagagaactctttgttctcttcttgttcttataactttggttaaatattgatttttaagataaaacataattacataagaaagtcgtactgtt

SEQ ID NO: 19536 - DNA, 385 bp, Gossypium hirsutum
  Clone ID: LIB3146-017-Q1-K1-F12
cccacgcgttctaccacgcgtgcgctcactctttctgaaaaccataaccgtgtgcgaactggtagaatgcgttccacttgtactgatctttttggtccaatatctacccgcgatgacctggtgagaatggcttctgaggccaaaaagtcggcacatgaagaggtgcgcaagatggtactgaaaatggaggctatggaggaaaaatatgctcgtatggaaaaccatataactagaatgacttcaagcatggagaagtgtctcaagaaggtgggtgagatcttcaaatactttgggtctcagaacaggctgcagaaccagaagaggatgatgcttaatggacttctttacccaccattatgctgaaagtggctttatgctgattcta

SEQ ID NO: 19537 - DNA, 411 bp, Gossypium hirsutum
  Clone ID: LIB3146-017-Q1-K1-F2
acgctgtaggcctctcaaccaaccgaccgtcatggatagctttcctatacctttcattgaagaactgcttgatgaactaggccaggaaaatttcttctctaagggtccgtttgattgccagtaaaatgttttccgtaaaatgatttttggaaaatgttttatttttctgtaaaatgatttactgaaaagtattttctggtgtttgattgaatctgtgtaaaatattttctgctgtttgacagatttcctgaaaatattttccggaaaagttgtttttacatatagtaatatatattaataaatttttatattttaaattatttttacatatattgcaatgatttatttataataatattcaattattaagctgcaatattgatcgttataaattgaaaaaaaactaatatc

SEQ ID NO: 19538 - DNA, 419 bp, Gossypium hirsutum
  Clone ID: LIB3146-017-Q1-K1-F3
acgcccacaccttctatatcatccgaccggcattagttgctgcgttacacatccatttctcggtctgtatctgctccggtggtataaaatggactaccgaagatacaacagttctcacgaggcaaaccttggaactaaacagcaaatttcagaagagcaagcataccaagattctcttgttgaggagttggctgaagatttccgcttgccaatcaatcacaagccaacggagaatgttgatctggataatgttcagcaagcaacgttagatacaaagttgaattcttcaaatgttgggtttaggcttcttcaaaaaatgggttggaaaggaaagggtcttgggaaggatgaacagggaataattgagcctataagatctgggattagagatccgaagttagggattggaaaacaagaaa

SEQ ID NO: 19539 - DNA, 390 bp, Gossypium hirsutum
  Clone ID: LIB3146-017-Q1-K1-F4
acgctcacacgttctgttgtgtatactgatgtaaagtctacgctcaagcggacacatgaacttgatgatagatttgatgatgcaatcaaacaactcggaggaacagacacagctacacctaagggtgtgatgagggacaaggggatttcaggacatactaagtgtcatcttaaaagctatttacagaaatacatggctggggaaaagcctagcgaacaatacagatcacaacgagattcatgagcagtaatgggaatgccattggggacacatgtgatggaatgcacgggcaaatgaatgaaagctagcatatccaataagctctgcacatgcaaatagaactacatcgaaagcttgatgaacagatacatgttcagatacatttacagc

SEQ ID NO: 19540 - DNA, 414 bp, Gossypium hirsutum
  Clone ID: LIB3146-017-Q1-K1-F5
acgctcaaatcctctgaagcagccaccctattatgcatccacgaggcatgcatatgggggctgagtccacagattggagaattgctctagatgatagaaccggctttgaattaacaggaaaaacaggtcatggagctcatcaatctccggaaaacggggactacgatcggatcactggatagacatttgtctcacggttgaaagcactgttttccccactttctcttttttttttttcttacgaagacctaattgatgtgcaactccatggcccttccttctttcacagagtgtaacatgatatacatgttcaggtcggctcgttactattatggtaggctctatttggagtacggtgggaaagtccaattgtaaaccgacatccaataacgtgcgattcgtatcaccgtgcta

SEQ ID NO: 19541 - DNA, 415 bp, Gossypium hirsutum
  Clone ID: LIB3146-017-Q1-K1-F6
acgcccacacgttctgtatccttcgattttgatctttggccattcatgttcaaatcctattgggactgcttttcgacatgcgattgctttagctgcaaaggcggaagttaccccatgatggatctcagagcaagaaagtaagactaccccttcttcatttctgatcactatacctgaagctgattggtggtgagtcccatcatatgcaccgtcaaaattaatttttatgaactcactagatagcccaaagaccacaacagaagaggtggttctggcttggagtaaactgatcaaagatccaagtaatccgctgtacaaaatccatgttaggatccataaaaatattctgaatttttaaaagtgtccacagttccactgtgacaggacattcacgaaaaatacggtcgattgtttc

SEQ ID NO: 19542 - DNA, 247 bp, Gossypium hirsutum
  Clone ID: LIB3146-017-Q1-K1-F7
aacgctcggatagaagtctatcattctttcttttatatttgctactcagcacactatgctggcggatttacattacaaatattataatctattgaaacaatactctgattaaatataagaatactttagctctgtatcttatatttaacactaaaatgttcctgaatggaaatagatcctttaatcttaaatcgcacaaaatgttgtgtaaaaaaaaaaaaaaaaacaggcaagtccatctattatt

SEQ ID NO: 19543 - DNA, 142 bp, Gossypium hirsutum
  Clone ID: LIB3146-017-Q1-K1-F8
gaaaaccggcgcacccaacgtacgctcaaatcaactcaaacaaccattttttttttttttccactcaaaaacacatccgggcggttttttaattaaccactcccaccctatatcatcaataaaacacttctaactacaaaca

SEQ ID NO: 19544 - DNA, 378 bp, Gossypium hirsutum
  Clone ID: LIB3146-017-Q1-K1-G1
cggacgcgtggttccgagcacgcattgatagcttctacttttgcatttacattgataattgagtttgctcttgtttaaattgtttgtactctttatctcttactgaagtctggtaaattttgttccttttaaatagatttgacatcgttccttgttataaaaaggaaaaagaaatatcaccttttattgttcatgtgcatgtacgtgatgtgtttgtttgcaggcttacatgcatatgttcgcatgtccgtatacatatctctgctgctgtgtcaccatactcatgtttcaaatagcatttatttaacataaccaattaccagcatctcgtcgtaaaataaacagtttaatgttgtttgtgggggggggttacaattc

SEQ ID NO: 19545 - DNA, 417 bp, Gossypium hirsutum
  Clone ID: LIB3146-017-Q1-K1-G2
gccgtctctgacaaaccaaaaatgactggagaaccagtgaaccccaaagcataccctttagcagatgctcaattaacgacgacgattttggatctcgttcaacaagctgctaactacaagcagctcaaaaagggagctaatgaagctactaagacacttaatagaggtatatcggagtttgttgtcatggctgccgatactgagcctcttgagattcttttgcatcttcctttgcttgctgaagataagaatgtcccatatgtatttgttccctcaaagcaagcacttggccgagcatgcggtgtcacaagacctgtaatcgcatgctccgtcacatcaaatgaaggaagccagttgaaatcgcaaatacaacagctcaaggatgccattgagaagctcctaatctaaagatattac

SEQ ID NO: 19546 - DNA, 386 bp, Gossypium hirsutum
  unsure (1)..(386): unsure at all n locations; Clone ID: LIB3146-017-Q1-K1-G3
ggcgaaaaagtgatcgggaaaaaaagttttattttgcggtggtggtgccaccgttttttgtttgttaattttctggggaaaacaaaaatggaaaatcggaactctttgtatagagatttgtttgtcattttgtctcgtatattatctctttactttctttaatcaatgtaatatatttcttcaaaaaaaaaaaaaaaaaaaaaaacaaaaaaaaaaaaaaaaaaaataacataaaaaaaaaaaaaaaaanaantttttaaataaatcaaaaaaaataaaaaaaaataatttttcttacaaacccactnnnngggggtgttttttaagaaatccattttttcggccggggggatgatcaattaaattttttttttatgggcccaaaa

SEQ ID NO: 19547 - DNA, 421 bp, Gossypium hirsutum
  Clone ID: LIB3146-017-Q1-K1-G4
acgcccacgcgttctaaggaaggaaaaaaaggctaaaagaatgtttttgcgaatgatatcgcggccgttgttggctaaggtgaacgagacaacggggatcgacggattagacgttgtacctaacgcaagggaagtgcttatcggtctatacaacaagactatgaaggagatccaggccgtacctgaagaccagggttaccgcatggccgctgagagcttcactcgccaccggctgaaggttggtcaagaggaagaagattgggaaatgattgataagcgccttggatgtggacaggtccaggagctcattgaggaagctcgtgacgagctcactcttatttgaaaaatgatcgagtgggatccatggggtgttcatgatgactatgaatgtgaggttatcgaaaatgatgatcctattccc

SEQ ID NO: 19548 - DNA, 295 bp, Gossypium hirsutum
  Clone ID: LIB3146-017-Q1-K1-G6
aatccggtcgccactcgaaaatacccacgagtcatattttgcttggactagccgggggcttgttattattttcaatttatgacttttctattaatattttactcttttgagagcttttgtcaaagtgacccttattttgcattcccaggaaaaaatgctcatacattagtgagaaattgttatcgtaaattaagattgtttaccaccaatatttgatcactgacaatacatccttctggtaaagtaactaattaaggtaaaacaattttagatcaactaccaatgacaattttac

SEQ ID NO: 19549 - DNA, 409 bp, Gossypium hirsutum
  Clone ID: LIB3146-017-Q1-K1-G7
acgagagagttatgaagagcgtcgagacctacttgatctacatcttcaaggtcctgaagcagggtcaccctgacatcgggatctctagcaaagctatggggatcatgaacagttgcatcaacgatatctttgtgaagcttgctcaggaagcctctaggctcgcgaggcacaacaagaaacccaccatcacttacagggaaatccacaccgctgataggcttgtacttaccggcgagcttgccaagcacgccgtttctgaaggtaccaaggccgtgaccaagtttacttcatcttgaaaaggctattaactgatctgtacatggcgttaaggttaggaggttgctctttaaattagatcggtgtggttgttatgcctatttagctgaaagctctgcatatctattttgat

SEQ ID NO: 19550 - DNA, 101 bp, Gossypium hirsutum
  Clone ID: LIB3146-017-Q1-K1-H1
acgatcagacgtacgtgcttggctggccgaaagcttttaacagcattgcactataaatcctggggggggtgctatctgtctccaagccactctatctgata

SEQ ID NO: 19551 - DNA, 346 bp, Gossypium hirsutum
  Clone ID: LIB3146-017-Q1-K1-H2
ggggcccacgcgtcccaagaccctgaggataacgattaggctcacttcttttgatgacgacgactatcattatggggggggggaggatgaagaggatgttgaataccaacaaaatgaagatgaggaagaagaagatgaagatgaggaagccctgcagccacccatgaaacggaagaagttaattgttaggaaataagtggaagcctcctccattaaaaaaaacccttttggtttaggtaaactggttcatctaacactatgtgatgttttatttatgcattgaggaggatgctgtttagggttaaatgtcttacgcattatatatcactccactttatcttacctt

SEQ ID NO: 19552 - DNA, 241 bp, Gossypium hirsutum
  Clone ID: LIB3146-017-Q1-K1-H3
gatcatactcttaactaggggggggatctatttgagtacaaaactatcacctttattctcatgagacttaaatgaggacaatgtccaaaaccgaaaaaaagcatcaatttttcttgtcaaattagtgacttggggggattcaccattacctagagcttcaattgagtttggaaaaatcgtgaatccttctaggattaactccccaataacgtataaattgaatctaaattcaactttttta

SEQ ID NO: 19553 - DNA, 395 bp, Gossypium hirsutum
  Clone ID: LIB3146-017-Q1-K1-H4
cggggcgcgccacgcgtccgcttatggctgaggagctaaagaacttaactggaggtgtcttgctgcttagaaacaagtgggtggttgtcatataccgcggaaaagatttccttccaacaaatgttgcagctgctctggcagaaagacaagatttgacaaaacagatacaagatgctgaagagaaactccggatcaaagcagttgagccagctctctcaggtgaagacaaaggacaggcaccagctggtactttggctgagttttatgaggctcaagcccgctggggaagagatatatctgctgaagaacgggaaaagatgattgaagaagctttcaaagctaagcacgctaaacttgttaaacgcgttgaacataaattagctattggccaagcc

SEQ ID NO: 19554 - DNA, 411 bp, Gossypium hirsutum
  Clone ID: LIB3146-017-Q1-K1-H5
cccacgcgtccgcaaccgcgcctaataaccgttcggatttttctcagacgtgaaaaaaatggggctgtctttcaccaagctattcagccggctatttgccaaaaaggagatgcgtatactgatggttgggcttgattctgctggtaataccaccattctttacaagctgaaggggggagagattgtcactaccattcccaccatcggtttcaatgttgagaccgtggaatacaagaacatcagcttcactgtttgtgatgttggtggccaggacaagatccgaccattgtggagacactatttccaaaacatgcaaggacttattttcgtggttgatagcaatgatcgtgaccgtgtggttgaagctagagatgagttgcacaggatgttgaatgaggatgagttgaggga

SEQ ID NO: 19555 - DNA, 216 bp, Gossypium hirsutum
  Clone ID: LIB3146-017-Q1-K1-H6
ctcaagtgaagcgcttcgaccctcccccaatgattatggtgtttgactgttgtgctattgggataatattcgaataacttcatgctctacaaatgaaggcaaaaccgtgtggcgtttgtcatctattttgattatgaatttctatcaccttatgtcctacaaatgaagcatgcattttgttctaataacacaacagtaaaacaccataataattgg

SEQ ID NO: 19556 - DNA, 406 bp, Gossypium hirsutum
  Clone ID: LIB3146-017-Q1-K1-H7
acgcccacgcgttctgacccacgcgtcctaaattgaatgaattttaagttagaattgaaaaagggattaaattgttaaagaaactatgagttttatgttttagggactaaattgaggaaaattcgaaattgggaaaatatgctgaaattttgatagttaaatttgagtttggatggaatttgaatagaaatagagtgtgaattgagttaggaaaataagtgaatttagttaggattaaattgagaataatgaagaaattgaatagaaattcaattatttatcataattagtgctgaaattaatagtataaattattattttcgtagctaacaaagaacccgaggcaccaacattaaaggtaaaggagaagattatcgacgagtaaactctagaaaatcacggtcga

SEQ ID NO: 19557 - DNA, 296 bp, Gossypium hirsutum
  Clone ID: LIB3146-017-Q1-K1-H8
agcgtacacgctcacacgttctcaaacacccgtccttattttttttttttaattaataaaatagggaaaggggtcaaattgcgatcaaaatattcacctttattacatacttaatcctcttaagctcacttctcaattaacatcaaatccttttctctaccttttttccaataatcatttaacttaaatgaaatccactataaatgaaaattaataataacaactctcgactacttttcatacttaatcaaatatttacccaaatcccccctatattgaataaaatcattttttta

SEQ ID NO: 19558 - DNA, 131 bp, Gossypium hirsutum
  Clone ID: LIB3146-018-Q1-K1-A1
aattgatatcttattttataggcggaaaaatgaaaaaaaaagtaaaaaagggggtgaatttggggtatgaaggtaatagtgtgtgatgtatttgacaagctatgaatgtaatatgatatgagaataaattt

SEQ ID NO: 19559 - DNA, 331 bp, Gossypium hirsutum
  Clone ID: LIB3146-018-Q1-K1-A10
acgaatgcacaatctcaaatgtccgctctgttttcccttttctctctctaaaaggaaccctaaccgtacctcaccaaccaggattcaacatgaagggaggaaaatctatgtcagatactaatagtgccaagctatccgtgaaatgacaccgctggaaagaaatcggggaaggctgccaaggatccaaacaagccatagaggcctgctagggcctcattcgatgtcatggcggagttccgtgagcaatacatgacggatcaccctaagaacatattcgtcgccgctgtcggtaaagctggtggagataaatggaagagctggcttgaagctg

SEQ ID NO: 19560 - DNA, 134 bp, Gossypium hirsutum
  Clone ID: LIB3146-018-Q1-K1-A11
attatttcgtgaaggcgagtccgtggagagatgggaagggcgatgttgatgctgagttggcttggggagctaaggaagcacgatttgcatttgggctctatctgtctgcatgacataggcatgaaagttgctat

SEQ ID NO: 19561 - DNA, 353 bp, Gossypium hirsutum
  unsure (1)..(353): unsure at all n locations; Clone ID: LIB3146-018-Q1-K1-A12
caattctgctgcatctgtttccggttttaagtagatttcagtccaactcctaacgaagtttctgcacatttttccccttgaatcaaagggcaacagagatcgaaaaagcctcttgtctgagatgcttgttcactggaaccttgcaattttgatatgttgctgactagattattgcatggttcaagtggtctcttcccgaatgatccgaaaaagctcgagattatttattttcagttggatttttgtatcgtcacttgtaagataattntcaagatttatggttgatggttagaaacatttgttgacattactgctatttatgatcatgcttcaatcacaagacacaacatgtc

SEQ ID NO: 19562 - DNA, 282 bp, Gossypium hirsutum
  Clone ID: LIB3146-018-Q1-K1-A2
tctaaccttatcaatttgcggaggacgcatagtccagcacgtggggggggaagcccacttgagagacgtatcccatccccaagggatcgcacacatgccaatggttcggattacagtgggatgtccatggggaggagcagaactcctgatcgtgaagctgatgctgaatacagggattatatgagctccgcaaaggaaaatgggaacagccgctgtcctagcccagttcccaaagatgatcggagccctatatattatgaataagatgatgagaaatatgca

SEQ ID NO: 19563 - DNA, 435 bp, Gossypium hirsutum
  Clone ID: LIB3146-018-Q1-K1-A3
gacacactactcaggtgtatccgaattcttggaccgccatattggtctccttggacaaccaaggtatgtggaatgtgcgatctacgttatgggacaggcaatatctcggacaacaattctacctcagagtctggaatccggttcgcagccttgctaacgaatacgacattccctctaatgtcctactctgcggccaagccgtcgggcgtcacccgtagttcgattaaaccattgaaaaccaattttttctagggtcatgagagtttgactggcggagaaaaatagatgatagaaaagagaaaggatcgaaatcattgttctttcatttgtgtatctttagagcattagataaattatgcattcattggatatttggattactatattagctccaagagcctgaattatatgttacgaaaagaacagaggctctat

SEQ ID NO: 19564 - DNA, 352 bp, Gossypium hirsutum
  Clone ID: LIB3146-018-Q1-K1-A4
acgcccaagccttcggacaacgcttccgttaaccctgttgggaaagcccggaggcgagacccgaggaggtttcattattcgggtacagctcgccctgatttccgaaaaggaatctgcaaaaaaggcgattcgtgtgagttcgctcatggtgttttcgagtgttggctccacccagcacggtaccgaactcagccgcgtaaggatggtaccagccgtaaaaggagggtctgttttttcgctcacacaccataacagctccggttgttaccacaacagagtccgagaggaaacgggtcgatttctggcgatttggattacgttgggtctacaatacgtcatcgtttagatatag

SEQ ID NO: 19565 - DNA, 384 bp, Gossypium hirsutum
  Clone ID: LIB3146-018-Q1-K1-A5
gacccttgtgaacgtgctgtcgctcggttttgggctgcatatcttgacgacaagtggttcccagcggtgaaaagtataggagtcgctaaaggagaggaagcaaagaaagcagcaatagcgcaagtggaagaagggttggctttgatggaagaagcatacgacaagtgcagcaaagggaagggttactttggtggggatgaagttgggtaccttgatatagcttttgggagcttcttgggatggcttagagtgacggagaagttcaatgcgatgaagctgctggacgaggggaagacgcctggtctggtaaaatgggcggacaggttctgttcccatgccgctgtgaaagacgttatgcctgataccgacaagcttgcggagttt

SEQ ID NO: 19566 - DNA, 373 bp, Gossypium hirsutum
  Clone ID: LIB3146-018-Q1-K1-A6
gaaaatggctgtaaaacatattatcggttctgttgtggcatcatttgctgttgcttatgtaatggataaacttgttgctgatgagaagatttttggagggactacaccccacactgtttccaacaaggaatggtgggaagaaactgacaagaaatttcaggcatggccacgcactgccggtccacctgtggtgatgaatcccatcagccgccagaatttcattgttaagtcgggttctgaatgacgtaatatttgcttgtattttagtcgaagtgtcagtttgattttacattcgctgtgaagaaattgttgtattagacttgagttaatccggctttgcatttaagagtagctcttgggtcctaaatatgtc

SEQ ID NO: 19567 - DNA, 444 bp, Gossypium hirsutum
  Clone ID: LIB3146-018-Q1-K1-A7
tgtggatgaagaacagccattatgcattagtggcgatagtggaggtggcatatttttatggagcattaatatccctttcggacaagatccgttaaagaaatggtacgaggaaaaggattggcgctatagtggaatccatgctttggcagtttcagaaaatggctatttatacactggaagtggagataaattgattaaagaatggtcattgcgggatggcaccctgtcaggcactatgactggccataaatcggtagtttctgccgtagcagtgaataatggagttctttacagcgggagttgggatggaactgttcgattatggagtctaagtgatcatagtcttttgactgttttaggggaaggcatgctgagatctgtgtccactgtcttgtctcttgcagctgaccagcatacacttattgctacttacgaaaatggctc

SEQ ID NO: 19568 - DNA, 478 bp, Gossypium hirsutum
  unsure (1)..(478): unsure at all n locations; Clone ID: LIB3146-018-Q1-K1-A8
gcgacgccacagcgtaacgcaaggcaattcctgtatggtcagcgactaatctttgtattttctcggaagttggaagggtaaagcagtgagcgcgtatcagtctccttcaagcatatacctacgagatnngagaatggctgccctaagtnagaagaaaccggaattttgtgaagtacacattggtgagctgcaatggcaaggccgagacanccattgagagaaatttnagcttcggcttttgaagagcnaaaganggagatggagaaanagactatgcagacacacgtgaaaggagatggatttgcttaaaagaannaaactagctggtattagaaacttgcacaagaaagaaaggccaacaacatatctaacatagttcactttcggataatgtaaagaactcgaacccatgacgtgnngctttccttataaagcagttctaagatgaaatactcaaaaagggagcttgcactcgact

SEQ ID NO: 19569 - DNA, 457 bp, Gossypium hirsutum
  Clone ID: LIB3146-018-Q1-K1-A9
cccacgcgtccgtcaagctttcttattaccttccctccattcttctgtaagttcattagttgttgcttgggagaaaatgggaccaggtgggccaggagggccaccggggccaggtggaccaggggggcctccagggccaggaggaccaggagggcctccaggatggggcggtcctgcacccggaccaggagggccaccgggatggggcggtcctccacccggaccaggagggccaccggggtggggcggtcctccacccggaccagggggaccaccggggtggggcggccctccggtcggaccagggttttttggtggcttctgtgatgtaattggtgcttgtgtcaacttcctgtgctgctgctggctgtttcgagactgttttggtggtccaatgggtcctcctgggccacctggacctccaccaccatagttagatgctttcttgctccttcat

SEQ ID NO: 19570 - DNA, 354 bp, Gossypium hirsutum
  Clone ID: LIB3146-018-Q1-K1-B1
cgcgtccggggacgcgtgggctgacccatgcgtccgggtgcggattgtggaggcggagcgggacgatatagaaatataagtgtctgaaggcgatacaatctgcatctgatttcataccattcctaaagccgttcatttgacttcaataatctctaccaatgctttcaagcaatgtgaatgctttaccaaaaataaccctatttttgatattaacttggcggagaaaattcataatcttgttgtaaaaggccttgtgatggtaaggtgctttcaacgggcatagctggaatggccaagctctttgctgcttccaccaccactttcatatcttgattcatgtgcaccttttgcact

SEQ ID NO: 19571 - DNA, 334 bp, Gossypium hirsutum
  Clone ID: LIB3146-018-Q1-K1-B10
acgcccacgcgttctacaacgcgtccgcttggatttgcagtttcaggaggttgccgtggaattgggcgctttaatgtgtctattgatggcggaaaaacatcgacggaagccactacgtttcagaaaactggtaccccttacatagcagatggtgtaagcaatgacacatggtcatggatgctttttgagctcacatttgatatcccacagagcactgagattattgccaaagcaggagattcatctgcatacgtgcaacctgagaaggcgcaagatatttggcacctaagagggattcttaacacttcatggcacataattcatatcctcattg

SEQ ID NO: 19572 - DNA, 337 bp, Gossypium hirsutum
  Clone ID: LIB3146-018-Q1-K1-B11
cccacgcgtccgccaccaccgactcagatcatcaaggctttgatggtgagtctttagagacagtcgtccgtggagctcgttccgagaggctgttcttcgagccaggcggtgacacgagttccatcctcgaagaagccaaagcagccggtggtggtggtgatgggttgttcccgttcaaagaaagcgtgattctagctatggaatctgatgatccgtacgtggactttcgtaagtcgatggaagagatggtggagacacatgggatgaaagattgggaatggttagaacaactgttgggatggtatttgaaggtgaatgggaagaacaccatggatta

SEQ ID NO: 19573 - DNA, 288 bp, Gossypium hirsutum
  Clone ID: LIB3146-018-Q1-K1-B12
cccacgcgttcgacaccacccactcatatcattaaggctttgatggtgagtctttagagaggggcgttcgtggagctcgttccgagaggctgttcttcgagccaggcggtgacacgagttccatcctctaagaagccaaagcagccggtggtggtggtgatgggttgttcccgttcaaagaaagcgtgattctagctatggaatctgatgatccgtacgcggactttcgtaagtcgatggaagagatggtggagacacatgggatgaaagattgggaatggttagaac

SEQ ID NO: 19574 - DNA, 392 bp, Gossypium hirsutum
  Clone ID: LIB3146-018-Q1-K1-B2
cattcatggatcagcacgaacaagattaattgatattcatcatgctatatttttcttatttcatggtgaaggcaggctttgtaatttatgatttgagatgaacagtgcccagcatgaagttagtcataggtactgcacgatcaatgaatgaaaaatatgccaaggctggagctggagaaagcagttgtagctatcaatggtattatcagaatgtgttatatttcctcaacaatgtctaatttgagtttatagaagcaataaactcatgtagtaaacagtggatgtagtaaacccatttcagtctaatttcagagggtttttgaatttcaaaaaataaaaaaaatatggcggggggcggttgattttaaaaataaaaaaaaaaaccccgcttt

SEQ ID NO: 19575 - DNA, 383 bp, Gossypium hirsutum
  Clone ID: LIB3146-018-Q1-K1-B3
aaaagggtttgctgttttggctcaataagtttgcttatgcttccatttttattgttattggtgcttggatacttttccggtttgttggaccggcacttaatctttatcaacttgattctcctcctttgcctcctacctccatgtttaagggctcttgaaaggataccatagtgctttgtctttgtattggtttgttttgtagcatcttgtttagggaaatggagcaataatgagacatcttttactaattgtctatataacatatctgagatatagtcccatttggttataagtggtgcccttttatgtgttatgaattggtgtctcgtgaagacccaacttttcaaggtttgtgaatgtttgttttaataatattgctttca

SEQ ID NO: 19576 - DNA, 366 bp, Gossypium hirsutum
  Clone ID: LIB3146-018-Q1-K1-B5
cttccgctggctcctctttgttaatcccgactccaaattctagtacctgaaaaggtcttttgaaactggggaggccgcttgtggagagttacggaataccaaaatgtttcttaagcttttggaggcagcgcttaaaacagggaaccgtatgaatgttggtaccaaccgaggggacgcccatgctttcaagctcgacacactcttaaagctcgttgatgtaaagggtacagacggaaaaaccacgcttgtgcattttgatgtgcaagaaatcatcacagctgaaggttctcgtctttccaatgccaatcagaacccaaaagctgagaaaatacaacagtcgcgatcttcaagatgatgttgtgtttc

SEQ ID NO: 19577 - DNA, 298 bp, Gossypium hirsutum
  Clone ID: LIB3146-018-Q1-K1-B6
ggccgacccgcgcgtacgcccacgccttcgacaccacccactcatatttttaaggctttgatggtgagtctttaaagacgagggttctttgagctcgttcccagaggctgaacttctttccaagcggtgacacgagttcgatccttttagaaaccaaaacaaccggtggttgtggtgatgggtacgtcccttctaaagaaatcgagactctatctatgctatctgatgatccgggcgtggactttcaaacgacgcttgaacatatggtggagacacatggcatgaaagattgggaatg

SEQ ID NO: 19578 - DNA, 428 bp, Gossypium hirsutum
  Clone ID: LIB3146-018-Q1-K1-B7
agaaactgaaggaacagctaaaggatgtggatgccgtccaatccaaggaaatacccttattctggtgtggcatggctgagagcgtacaagttctggggtcattcgacggatggagtcaaggggaacacttatcaccagagtacaccggttcattcgccacgttctccaccacattattgcttagacccggaaggtatgaaatcaagttcttggtggatggagagtggcatctatcaccagaataccctaccattggtgagggattaatgcaaaataacttgctcgttgtagactagagtcgagtatttgatacagctttatgttagacagatatgcgtaagtcttttttgtagtcacattcaaatatgtgttgaatacaagtacatatattattatggaaaatgaaaagattctagctactttgatgc

SEQ ID NO: 19579 - DNA, 450 bp, Gossypium hirsutum
  Clone ID: LIB3146-018-Q1-K1-B8
acgctagaataatctatatgcaacggccttaccatggttttggatggacatcggtcaaccaagggggtattttaccggactaaaactctctctagactccgttataaagaaagcttaacctaagtgggccactggtacaaacgttgaacgaaacgttctggttcatgagactgacaaaatcggataaagatgtttggtctgaccacatgtggcaatcggaccaagctgcggagctaagactggagtaccactctctcggtgcacgatgatgcctggattgcgcattaagaaacacgcatgcatattcagcagtatcatcggaaggcattacacagatgctcaatgggctatagtagaaaacatgaccattcttggagaagacggtcacgtttgtgacgaaatttacagcaacggcggagtggttttgcctcacaaagagatcaaatcgag

SEQ ID NO: 19580 - DNA, 341 bp, Gossypium hirsutum
  Clone ID: LIB3146-018-Q1-K1-B9
cccacgcgttcgcccacgcgtgcgcccacgcgttcgcagaaagaaatgtctgctgatcggggcatgagaatccatgcagcgtattccacgttgtcggatcctaatcaacgtgcggattatgataggaatcttagacggtggaaccgtgcctttacgactatggaagcaactgcgactgcggtgggttcctatgggttctctagttatggtggtaataggaattgggagaccgagcactgctggcacgtaattatatgtattcttttttcattattaatgtatgtttcatgttcgtggtccatacaaatgagattttttagaaacgatatgtatcttttaat

SEQ ID NO: 19581 - DNA, 386 bp, Gossypium hirsutum
  unsure (1)..(386): unsure at all n locations; Clone ID: LIB3146-018-Q1-K1-C1
cggccgtccttttttttttttttttagaaaattttaatttttttatgataataaaggggggggaaggtcaatttaaattttccttaaaataggagacccttatgcatataacaaaaatagcccaaagaaagccaaattttttaattttttttccccacttggaaaccctaccaagaaaagcttaaaaccattattattctcacctttaaattaaagggtttttctatcactcgaatgcccatagattctccctactaacctncttttcttcctggggggtgaaatcgctcttgatgttgaaggtcttgcgaatctcctcgggtgtcttgccctttatcatatcagccacagtttggcaggtcaagtccagcaagctctagatattc

SEQ ID NO: 19582 - DNA, 226 bp, Gossypium hirsutum
  Clone ID: LIB3146-018-Q1-K1-C10
acgcccacgcgttcgagagcagacaccatctttttttataatttatacacgaacatgaggagacgcacttttttcatggtaactcactccactttaccacctacaaggcgttgataaccctatcaagaggagaattaacaccctagacactgcacaactttggatgttcactatcatacagaggccagattgatttgagaaaatatgaaagattttgctggataac

SEQ ID NO: 19583 - DNA, 440 bp, Gossypium hirsutum
  unsure (1)..(440): unsure at all n locations; Clone ID: LIB3146-018-Q1-K1-C11
gaaacttgaggggaagaatcttgctatcccttgcttttctctcgcaaaaaattctcaaacttgtttttaacgttcgctgaatactatcgctcatttcttccctcagaaccctaatcgataactgaagccatttaatcatgtttgggcgtgttccaaaaaaatctgataacactaagttttacgaagtacttggggttcccaaaagtgcaagtcaggatgaattaaagaaggcttataagaaagctgcaattaagaatcatccggataaaggtggagaccccgagaagttaaagaactggctcatgcttatgaagtacttagtgacccanagaagagagaaatatatgatcaatatggtgaaaatgctcttaaagaaggaatgggaagaagccgttcttctcacaacccatttgacatatttgaatcatttttcggtgggg

SEQ ID NO: 19584 - DNA, 182 bp, Gossypium hirsutum
  Clone ID: LIB3146-018-Q1-K1-C12
caaacacgatgggaagaatcctgctatccattgcttttctctcgcaaaaaatactcagaggtgtttttaacgtgcgctgaatactatccctcatttctttcctacaaaccctaatgcgagcactgaagccatttaatcatgattgggcgaagtgcataagaaaactgaatacacttactttt

SEQ ID NO: 19585 - DNA, 445 bp, Gossypium hirsutum
  Clone ID: LIB3146-018-Q1-K1-C2
ctttatccttctaaaacggtcttcctcccatggcttcctccacggctccgatcggtgttgctgtgtctgccccttcttctgctctttctaatcggagaatatccagcagatttccggagtttcgcggtctcaagatcaaacccaggttggcgtcgctgactcactctaccagatcggcgattcaggatcggcgtcaactcggacgtgtcgtgtgcgaggctcagaacacatctgttgatgtgccaaccattaatgatgaaacatggcagtcactagttcttgaatgcgaatcgccctgcctggttgaaattcgggctccgaggtgcggaccttgacgtatgatccaccccataatcgacgagctgtctaagcaatatgctgggaagctcaaatgctacaaagttaacaccgacgagagtaccaacatcgcaactcgatgtggaat

SEQ ID NO: 19586 - DNA, 395 bp, Gossypium hirsutum
  unsure (1)..(395): unsure at all n locations; Clone ID: LIB3146-018-Q1-K1-C4
acgttttgggaaaaattgtcaaaaaattcggggaggcgcaaaaagagcttggaggttgccgtatggaaacactagaaagggaaaggaaaaccctccgaatccaggaaatggaggctgtgatcggaactatttcggaatccatctctagcaatgaggcaagattgagtcgattctatgagaggtctatggtggatgggctactttgtctttgaccccccaactgttacgaactatcaccactcaactggaccaggctgcgtctggtgagcatcgtgagcacaagatngatataagtttctttgagctgaacgggctgaacccaagaccttatcgtacaagaagtcactatgcgattctagtgactcaccaacctacccactttttttatttattta

SEQ ID NO: 19587 - DNA, 254 bp, Gossypium hirsutum
  Clone ID: LIB3146-018-Q1-K1-C5
ccttcatacaaggcggccccaaagttttttttttgtttttggcaaaaccaatcaaagaggagtttcgttttagctcacacgctcctttatcgagtgctatattgggtaaggagactgttcacgtcaacattgaggtcattggccatgtcgactctggaaagtctacaaccactggacattcgatctacaagcttgacgcaatagacatgcgcgtgattgctaggtttgacaacgacgctgctgacatgaacaaa

SEQ ID NO: 19588 - DNA, 224 bp, Gossypium hirsutum
  Clone ID: LIB3146-018-Q1-K1-C6
tcggcgcggagaaagcgaagggttaaccattccaccaattggtggccttgggaatcgaccaacatcagatgtattgagctgcaggggtactgattgttaaggagagctgtgaatgttagaggtgtattttgattttgttgagatgttttgccatgttattgtgtgtttgcaaaatctgaagaatgctgttttgatataaaatccatgcttcctttcggcccccc

SEQ ID NO: 19589 - DNA, 432 bp, Gossypium hirsutum
  Clone ID: LIB3146-018-Q1-K1-C7
cccacgcgttcgccaacgcgtgcccttacgcgtactcccacgcgttcgcatctggccatgtgttgtctagaggagctgatgtctacggcttggagaagaccactcggaatgccacatgcctctgccgatggacgtgggaggatgaaccatgctgacgtcagacataaagataccaccaacgctgcgaatgtaatcggccggatcaacggaattgctccggacagaaactctgaagaggaggaaaatgcaatggacccaccacagccagcccagaggggtgctaccgagctagccgaggctgccctgctacccaaaaatttatgtacaatggatccaacatggcatccctggttacgattgtacacatggtatcctacaaatgtccaaccctgttgtagataaatcataaatgtagcaattgtcagatttgat

SEQ ID NO: 19590 - DNA, 432 bp, Gossypium hirsutum
  Clone ID: LIB3146-018-Q1-K1-C8
acgctgacgcgctggataagcgttcggcctcacggatggacaaaagagtaaacacagtggcaaagctaggatataagaagtgtatagtgcccatgtcagctgaaaaatcattagcaactctggatttgggggagctggagattattggctgcaatgattcgaagggggtcatcaatacagcgatgactaaaaattgaacagagtttagcagcattgcttcacaaattatgtaaaatatattagatcggcatgcttaaaattgtgatttgtgagtgtaatgattcaccacgaacaaacaaggttgtgggtagaacatgaaaaattgttaatataattaacactaggttgtgttcttatgttgaaatcaaacttgttgagttgataatatctgctataaatctcccgaatgtaaagtgctagatgccctacttt

SEQ ID NO: 19591 - DNA, 456 bp, Gossypium hirsutum
  unsure (1)..(456): unsure at all n locations; Clone ID: LIB3146-018-Q1-K1-C9
acgcccacgcgttcgcgaagagaaagcatcttgaaatacaatttataggcgaagatgaagaagggacttcctgtatggtaactcattccactgtttcagcttcaggtcgtttcttacgtaataagaggagagttaacgccagaaacaccaggcaacaagggatgttaaatagcaaacagttttcagattgctttgagaaaatatggaagatcttcccggataatcagagggcttcttttacttacctcgattgcttgtggttttcatggtacatggatgaattgtttaaagaaaaagtgttggtatggatcagtaggaaacatattttcaccaagaagtatgttttcgttccgatattgcactggagacattggaatctattgatattctgcaactntgataaacctttgcaatctaaaactcaaacaacttgtatgttattgcttgattcaatgc

SEQ ID NO: 19592 - DNA, 441 bp, Gossypium hirsutum
  Clone ID: LIB3146-018-Q1-K1-D1
cttcgggaactggaaggaaaaggccttcccctttgaaaatgtccccatgtgttactcaccatttgcaaggacaagacatacggcagaggttgttgcatccactttgaatcttccatttgagggccctcaatgcaaggtcatggaagatcttcgagaacgttactttggtccttcgtttgaacttctgtctcatgacaaatatacagaaatatgggcaatggatgaaaaagatccattcacaaggccagaaggtggagaaagtgtcgatgatgtggcttctaaacttgcaagtgctatggctaccatggaatcagaataccaaggatgtacgatcttggttgtcagccatggcgatcccttgcaaatcttgcaaaccatactcaatgcagcttcaaaacagatggaaccaagctgcaatgacctagcatctataattcaagc

SEQ ID NO: 19593 - DNA, 333 bp, Gossypium hirsutum
  unsure (1)..(333): unsure at all n locations; Clone ID: LIB3146-018-Q1-K1-D10
agattaatgaaaataaatccagaaattttagattagcacaatagcattaaccaagtaagcggtgctcctaatatatgtaacaaaatactttatacactaattttcatgctagtagtgctggtcgtttcatttgtttagggtagtatctcttgctaaaagtaatgatggtacgtagtagagctaagagtgaggaagggatttgagaaggtgagcttcaagaattaacttgttgcaagtagagacgataaaagcagttgaacacggggattcanatgctactttagaaatttttgagtcgagaataataaatatcctagtttgtaaattactttt

SEQ ID NO: 19594 - DNA, 271 bp, Gossypium hirsutum
  Clone ID: LIB3146-018-Q1-K1-D11
gacttgacagatccagctcctgcaccacctttggttaattggattccacaaccgtggtgccgaccgatctctgagcgcgggatttatcctgctgtggatcctttggatactacaaatcgtatgctctctcctcatatattgggtgaggaacactacaacactgctcgtggtgttcagaatgttctccaaaactacacgaacttgcaagatattattgctattttggggatggacgaccttactgaagatgataaattaactgctgcacgtg

SEQ ID NO: 19595 - DNA, 226 bp, Gossypium hirsutum
  Clone ID: LIB3146-018-Q1-K1-D12
tgagcttttgcagaaatgctataagtaagaaaatgttttgaattaataaaaataattaccatgtttaaacggttcctcatatagtatctttaagagtttttataagcccttgaaaaatggaaaggagccctggtcattagctgtggaaaaaaaaagtgcataaatgtgcagaaatgcataattattacatgcatgcataattatgctattgctatctgtagatggg

SEQ ID NO: 19596 - DNA, 325 bp, Gossypium hirsutum
  Clone ID: LIB3146-018-Q1-K1-D2
ctacatggggcccccgttagttttgttgtcaagaggggcatacaccccatctgggccggttaggcttcagacaccgtcggcgctaaaaatttcatgagtgcggcgaacacttacagagagaggagcccaaggttacctcgaccgcgctgaaggtaaacgggtccattcgaagatctaactaacatacatcacatggcccaagctacagtggctacagatcaacatgtggaccctacgactcaagacgcagctctgttgggcttagccatgtctgaaccaccgcgtggaccatacaggtcactcggttacctgcgatccaattttg

SEQ ID NO: 19597 - DNA, 268 bp, Gossypium hirsutum
  unsure (1)..(268): unsure at all n locations; Clone ID: LIB3146-018-Q1-K1-D3
cttggtcgatcataaactgggtacaagcatgctgtgctgaagtagaacttatttttaggcttggtactcctgattgtgatttggaatttggataaaataaattagatacagaataggaaagcttacacttatttggagcctttcgatacttcaggttgtaatattattattattataatcaatggtttcaaacactcctttttcatcnnaaaaaaaaaaaaaaaaaaaaaaaaaaaaaaaaaaaggaaaacaaaaaaaaggatccaaa

SEQ ID NO: 19598 - DNA, 403 bp, Gossypium hirsutum
  Clone ID: LIB3146-018-Q1-K1-D4
agccttcgccttgatccttttaaaccggggatcaaaaatgctgggctggagtttcactgaattttacgcgggggacttttgattgtgagagggcatgtgtatgcaccacattatattcagaagtgatagcttacactctgtgcggagcctctaggactcaatgttgtaatctgtaatatgattataagtacatggttactgacacgcctccagattgctctcctctccacacctgaaagtcttcatgggtagactttgttagcggaatttacagtattttcctagcaatatctgttggaaatgtacggactatcaaatcactttttcatgttcgattatcttcgtcgattaagtcagacactaatctaatgttcgaaaaaaaacaaaatggagacggggaaaa

SEQ ID NO: 19599 - DNA, 452 bp, Gossypium hirsutum
  Clone ID: LIB3146-018-Q1-K1-D5
cgcccaacccttccgcttggccccacaaaaatgccggccttcagtgcccgttttgaagaatttgagaagctacccaccggaatatttggcgtttctatggacagcgtgttctctcaccttgcctgggttcaaacagatcgaaagccaggtggtcttggtgatatgaagtctcctctcatatctgatgtcacaaagacaatcgccaaagcctatggagtgttgcttcctgatcagggaattgcattgagagggcttttcattatagatacagagggaattatccaccactccaccatcaacaatcttgctattggacggatcgttgatgaaacaatgaggactctccatgccttgcagtatgtgcaggaaaatccagatgaagtatgcccagctgtgtggaaacccggagagaaatccattgaacctgacccttagctcagcaaggattactt

SEQ ID NO: 19600 - DNA, 209 bp, Gossypium hirsutum
  Clone ID: LIB3146-018-Q1-K1-D6
ggcatgagcaacatccaagggggggaagcctgatggagtgcagatgctgaacagatatctgtgaagcgaaagtcctactgctcttcctcagttagctggggaaaaaatagtgagtgcttaaacatcagaggatagatcgacatggcctcttgtaaagtacgggactcgctgtgcatgctgtgatatgcataatcgattcactattgtac

SEQ ID NO: 19601 - DNA, 360 bp, Gossypium hirsutum
  Clone ID: LIB3146-018-Q1-K1-D7
gacccacacgtaaccttacatcctctaaaaccaccgatcttttttttttctctttacattaacaacatgcagaggcggtctttatacaataactaactcccacttattatacaaatatcaatcaatccccaattatcatatactcttcatcttttacacatacatactgttttttttccaaaaacatcataacatacatctaaaatacctcatttaaataaatttactcattaattacactgttatattcatatttatacaatttttatcattatcatactcattttctccttatcaataacaacaaacttttattattcaatagtcaaaaaacttccactctaacaaacacctttttaa

SEQ ID NO: 19602 - DNA, 442 bp, Gossypium hirsutum
  unsure (1)..(442): unsure at all n locations; Clone ID: LIB3146-018-Q1-K1-D8
gccggaancccggtgcgaccacgcgtacgcgttctatactgtaacgcccgcgctcgcgattttaaagttttttgtaaaaatttctgttgatgggttgtaaagcataagctctaggattgtcaatcgatctctgtaatagtttgtgggcgcttatgaccgtaaattcacccgacatataaccttcccagaacagaaaatcttcgtgcggagtttgtgctacagggattctgaggattcttgcagcatctccttccgtaaaggagcaatttctgtacaatcatgaagactgtgccccaacattccacacccaaagcaaaaagtctggggctgtttcatacttgaatggaatctaaaatttatttcccaacaaactattcctaagatcgaatggcaaatctattagctttgttttacaaaccctcttcaaaaattttttcaaaaa

SEQ ID NO: 19603 - DNA, 227 bp, Gossypium hirsutum
  unsure (1)..(227): unsure at all n locations; Clone ID: LIB3146-018-Q1-K1-D9
tttaactttaattatttttgttgaaatatcacgctgaagttttatagtgtcaaacaagtctgtccaattgattatggattttgcggcaattaattttttgtagtgaaactgtaccgttttgaaaaattttaatacacagttatagtattttttgtccaaaanaaaaaaaaaaaaaaaaaaaaaaaaaaaaaaaaaaaaaaaaaaaaaaaaaaaaaaaaaaataaaaa

SEQ ID NO: 19604 - DNA, 369 bp, Gossypium hirsutum
  unsure (1)..(369): unsure at all n locations; Clone ID: LIB3146-018-Q1-K1-E1
aatggggggtctgagacttgagccattaaccacgactcgctttattttgagattgacaaaggatgggatgaaattccatgatatcctccatactgtcatttgaatcttcgaagggaaaagaaatttccatagatctctatggaaatttttcgttctggaaaaaaaaaaaaaaaagggggggggggataaagggaaatttccccccctcttgggaaaaaaaaaaaaaaaaggggggggggtaaaggggttaggttttaaggccccctttaaaaaaaaaaaaaaattnnnnnnnngggggcggggggccctttttaaaaaaaaaaatttttttcccccggaattttagacattatttttttttttgccccc

SEQ ID NO: 19605 - DNA, 359 bp, Gossypium hirsutum
  unsure (1)..(359): unsure at all n locations; Clone ID: LIB3146-018-Q1-K1-E11
acgcagagatcagatatatcggacggaaatgaattttggttttgctaaaaaaactttgggagggggttgaggccggtcctaaaccggaacgtggtcttggccggctgaggaggatcaccaccacccaacccttgtccaccaaagatgaggcttcatcaatggcgatgccgacgagtccgacgacacctgggacaccatcgacgccggtgtcggctcgtanggacaacgtgtggaggagcgtgttcaatccaggtagcaaccttgcaaccaaaggtattggcgctgaagttttcgacaagcctcaacctaactctgctactgtttatgactggctttacagcggggagacccggagcaag

SEQ ID NO: 19606 - DNA, 428 bp, Gossypium hirsutum
  Clone ID: LIB3146-018-Q1-K1-E12
cggacgcgtgggcggacgcgtgggcggacgcgtgggtttcaaaaaatggctctcctccaaattcacacacttcctcaccaaattccttcactttcacccattgttttttcatcaaaaacccattccaaaaactcactcttcttctctacaacaaaggttatacctttctcactttcaacacaacccagaaagctgctttgcaaacccccacttggcaaatatgtcagggaagattatcttgtgaaaaagatgtcatctcaagaaattgaggagctagtaagaggggagagaagagtacccataattattgatttctatgcaacatggtgtgggccttgtattttgatggctcaagaacttgaaatgctagcagtggaatctgagaaaaatgcaattattgccaaagttgaatccgatgacgagtatca

SEQ ID NO: 19607 - DNA, 425 bp, Gossypium hirsutum
  Clone ID: LIB3146-018-Q1-K1-E2
ggggcccaagagctctgccagacttttctgttttgggtctggtcctaacagcgttttgatggagtaaaggcgagcggcaatgcattgtagcaggaacagttcttcacagcaactcgtgcagctaatacctctgcagagcagcagttgctccctttagccccattccaccaagtgagacctgctgcaatgccatcaaagctctggggcaaccctgcctgtgcgttattgtaaatggccctcctatatctggtgtcgatcggaacatggccctgcagctgcctgagaaatgcactgcaaactttgaaccatgtgatataatgaagtagttgcatgcgagattttaagaataagtgcgtggagagctcatgagaacctttcccaattagttctactggttgattacccaacataaaaggatatatgaa

SEQ ID NO: 19608 - DNA, 453 bp, Gossypium hirsutum
  Clone ID: LIB3146-018-Q1-K1-E3
cccacgcgtccgcccacgcgtccgaaaaggtcctagatgttggctgtggcattggtggaggtgacatttttatggctgaggaatttgatgttcatgttgtgggcaacgacctctctgtaaacatgatatcctttgctcttgaacgagctactggactgaaatgctcagtggaatttgaagttgctgattgcaccaagaaggtttatccggacaacagttttgatgttatctacagccgtgacactattctacacattcatgacaaacctgcactgtttagatctttctacaaatggttgaagccaggaggcaaactcctcataagtgattactgcaaaagttccaagactccatccagggagtttgctgagtatatcaagcagagaggctatgatcttcatgatgtaaaatcatatggacagatgcttgaggatgctggttttgatgtgattc

SEQ ID NO: 19609 - DNA, 390 bp, Gossypium hirsutum
  Clone ID: LIB3146-018-Q1-K1-E4
cttccgcccaaatttgccatgagtttgaaaggttcattccttatctaccagatattaaagttgctggcttctatggtggggtcaatattaaggttcacaaggatttactaaagaacgaatgtcctcatattgttgtcgggacacctggacggatattggctcttaccagggataaagatcttagtttgaagaatgttacgcattttatactccatgaatgtgacaagatgcttgagtcacttgacatgacgagagatgtgcaagagatcttcaagatgactccacatgataagcacgttatgatgttttcagctacactaagcaaggaaattcgacctgtgtgcaagaaatttatgcaagatcccatggaaatttatgttgatgatgaag

SEQ ID NO: 19610 - DNA, 323 bp, Gossypium hirsutum
  Clone ID: LIB3146-018-Q1-K1-E5
accagatcggccatgacgtggacaggtggagtacttatatagccaatattaacgtggttgtgtgctttcaggaggtgaataatcagggaccgaatgtgtcaccgaaccacgagagtccttgcattgagaaactggcaccaataatgagatgggctattgcatggatcatataactaaaccagtagatgtaaaggaaccatactaaaagaacttgacgaggtgcctatgtaccaggcatgcaggcaggggtgcgccgagatcttcaagatgactccacatgataagcaagttatgatgtttacagctacactaagcagggaaat

SEQ ID NO: 19611 - DNA, 391 bp, Gossypium hirsutum
  Clone ID: LIB3146-018-Q1-K1-E6
cggacgcgtgggcggacgcgtgggcggacgcgtgggtttcaaaaaatggctctcctccaaatgcacacacttcctcaccaaattccttcactttcacccattgttttttcatcaaaaacccattccaaaaactcactcttcttctctacaacaaaggttagacctttctcactttcaacacaacccagaaagctgctttgcaaacccccacttggcaaatatgtcagggaagattatcttgtgaaaaagatgtcatctcaagaaattgaggagctagtaagaggggagagaagagtacccataattattgatttctatgcaacatggtgtgggccttgtattttgatggctcaagaacttgaaatgctagcagtgggagttgagaaaaatg

SEQ ID NO: 19612 - DNA, 247 bp, Gossypium hirsutum
  Clone ID: LIB3146-018-Q1-K1-E7
gacccacgcgtacgatcatatattccaaagcctccacacattttttttttatctaccacatattaaatctgggtgcctgttttttaaccaccatattcaccttcacaatgatataccaatccacgaatctccacatattttacattacacacccataaaaaacttttctcatacaaaatatctacatctaaccttatacaatctaatgaaacctatcttaattccatcttacaattttctcaaccct

SEQ ID NO: 19613 - DNA, 426 bp, Gossypium hirsutum
  Clone ID: LIB3146-018-Q1-K1-E8
acgctaagatcatgtataacgaccagactttgtttataaaatgattgaggagaaggataaggagggttgtaaacttaaggatgacaacaagaatcttcaacgatctctggagtcaagacaactggatgatcacactgacaattacaacacagccacacataaacaagatgctccaaatctaaacacctctgcagcagaacagcagattctgcttttagcaaggcaacaagctcagagggaggaagagctggcacaatcacagcgacacattttatcccttcaggaagaaattgacgagctcgaacgtgaaaatcgttttcacagtcaacaggaagctatgctgaaggaggaacttctcgacatggaaaggtcgaaaaggagagaaggtgttgaatttacgtatctgaaaaatgtaatcataaagct

SEQ ID NO: 19614 - DNA, 426 bp, Gossypium hirsutum
  Clone ID: LIB3146-018-Q1-K1-E9
acggtacatcttcgcttagagatcagacccaaaattctcctttcctcttatttccgattccgcaatgtttcctgaaaccctaatcctaatcccagattcctcctgtctacatcgtttagcaaacggcagccgaggacccggcagtcgtggcagaccccgcacccgagacggaggaggacaagactgctgagaccaacgctacttcaaaatccggctgagcaaagaaagccagagaacccaacaccaagaaagctgcagctcctaggaaaccacgggctgctactactcatcctccttacgaagagatgatcaaagatgcgatcgctactttgaaagagaggacaggttcaagttagtacgccattgctaagttcattgaagagaagcagaagaatcttcctggaaatttcaagaagcttatgcttg

SEQ ID NO: 19615 - DNA, 410 bp, Gossypium hirsutum
  Clone ID: LIB3146-018-Q1-K1-F1
ccttcggtttttgggtcacggggggtgaaattgaaaccgagagcatcttggccacagggctccagggattttttgaggctgtgggactcctccttagaggcactgaggacaaaaaggaagcattggagaacttgcatcttatgtcgttatgcctcgatgagattgatgatggcggtataattctcgaaactgatgcaaatgtcattgacggacaagttgatagtcataggatggatgccggagctcctttgtgcgagcagacaataactcaagcattggctaccgctcgtgaacatcttacaagatctctcctcaagtaaaatgtgtgtacatggaaccaaacgagataagctcgacggtattatctatgcagtatgatactgtacttgatatgcattaggataattttt

SEQ ID NO: 19616 - DNA, 443 bp, Gossypium hirsutum
  Clone ID: LIB3146-018-Q1-K1-F10
acggcagaggtccataacctctccgagaggagacgcagggatcgtataaatgaaaagatgagggctttgcaagaacttatacctcgttgcaacaagtcagataaagcttcaatgctggatgatgcaattgcttacttgaaatcacttcagatgcaaattcagatgatgtctatgggttgtggcatggtcccaatgtttccaggtgttcagcagtatatatccccaatgggaattgggatgagtatgggcatggatatgggaataattaggccaatgatgtcatttcccaacgttgtggctggttcagcgttaccaacattggcagctgcagctcatttgggtccaaggattcctatgccagcctttcatatgccaccatcaattccagctcctgacccatcaagattccaaccaaagcatcaatctgaccccatcccaaaccc

SEQ ID NO: 19617 - DNA, 395 bp, Gossypium hirsutum
  Clone ID: LIB3146-018-Q1-K1-F12
acggttggatgaattcaatcagccaaacaggttgcttgagaagagattaaaccaaagtgggcaggtatttgtgctcgacaatctacacctctccaccttaaacccgactcatttcattacggttctccgacaaaccgagaagtcgattcggggtttcatccggctgatgatcgatgaaatgaagttagccgattgggatatcaatgctgcagcacgttcaatacagagtggtgttatgtattggaaagaagatgataaacgttttgcatttgagtccttcatttgcagggaaatgttcaaggctttccacctgccttatttctccctttttggtagctcagtaccacaagggaagaaacatcctcaagtgttcttcgataggagtatggaattga

SEQ ID NO: 19618 - DNA, 297 bp, Gossypium hirsutum
  Clone ID: LIB3146-018-Q1-K1-F2
cacgcgttctataaaagctctgcaagccggatccatcatagctagactactaaaggatccttcggtcattttaccagatgcacacatccctctacaggccaaagagctaatgcacacatgttgcgattctaacatgaacaccaaggaagatcttagaattgttagcagtttgctttacaataagatcatcagttccatgatcgctcgcttgtatcatgctgcgaataccactagagtttgccacgatggcgtacaaagaaccggttatacagtcttagctgctatgatcgaggatat

SEQ ID NO: 19619 - DNA, 251 bp, Gossypium hirsutum
  Clone ID: LIB3146-018-Q1-K1-F3
accactgttctcatgactggaagcatgagttgatagaagggtgcataggacgcaacacttgagttaagacgagatcttgtgcggagtgctgcggcgaacgattctgcgtaactgtaagcgtgtgtgacaccgactggcagttctgctgagcataccgcagtacatactgcgtactacgacctggtaaaagagcgggtcaaaactgacgagcatcttgctatgcatgtctgtctcactgcatgactaaaaag

SEQ ID NO: 19620 - DNA, 327 bp, Gossypium hirsutum
  Clone ID: LIB3146-018-Q1-K1-F4
acctgaaggcggactcgcctggttttttatgatcaccaccaaacctttgtccttcgagggatgagcgataaatgaaaaagtaccacaggttgatgccgatgacgaatagtacagagacaagttcgacacctcagacaccgacgtatccgacggctcataaggagaacgtgtgtaagagtgcgttccataccggtagggacctacccaccataagtatacgttctgatgtaatagacaaggcacaacccaacttttctaccgattatgactggctttacaggggggagaccaacatcaagcatcgttgaaaaggtggcgactgacagg

SEQ ID NO: 19621 - DNA, 369 bp, Gossypium hirsutum
  Clone ID: LIB3146-018-Q1-K1-F5
ctttatttctttacaaggatccactttttttttttgcctgggtgccacaaatatggaagagctggtctaacaaaagcactggggagctcagtaacttaacatgcttaatgaatgttgctggctcgctcgtgagagtattaaccagcctccatgaaaaggcaccagtcctggcttctttggggctctgtacttggttttgcaacaaatggcgcaaacctgagtcaaattatactgtatcggaatccacaagttcagaaggagaataaagcagagttgactgttctcatgtcaggctcagaagtatgatgaggttaagattggcgcactgggcgatcataagattatcactaatcttatagcctgacacta

SEQ ID NO: 19622 - DNA, 360 bp, Gossypium hirsutum
  Clone ID: LIB3146-018-Q1-K1-F7
actcttgttactcttaaattggttttggttcattgtgaagctcttctagaattcctattattattgccaaaaaaaaaaaaaaaaaaaaaaaaaaaaaaaaaaaaaaaaaaaaaaataaaaaaaaaaaaaaaaaaaaaaaaaaaaaaatttaaaaaaattttttttaacaaaaaatatttaaaaaacaggggggggggggcaatttaaaaaaatcaaagataattccccgtccgtgggaggaaaaaatttttatttgggggccccaaaatcaaattaactggtcctctattaaaaactccttaattggaaaaacctttcatttccaaaaattaaattcctttggaaaaaatttttttttat

SEQ ID NO: 19623 - DNA, 431 bp, Gossypium hirsutum
  Clone ID: LIB3146-018-Q1-K1-F8
acgcccacgcgttctagaactttcagcatgagattcagtagccatggcactatatgcgataggtgggtcgatttgtgctcctgtgtgggaggagatagtttttcgaggtttccttctcccttccttgaccagatacatgcctgtatggagtgcaatactggtaagttcagttgcctttgctctggcacattttaatgtacagagaatgttgccgcttattttcctaggaatggtgatgggtgttgtttttgcacggtcgacgaatctattgccatctatgcttctgcacagcctctggaatggccttgtgttcttggatttaatgagataatcaatcttgtcttctcatgttagctttggctgatccagtgctagtgaagcatatgcgtcaggccaattttctggggtatgcttgttacaggatattcttg

SEQ ID NO: 19624 - DNA, 350 bp, Gossypium hirsutum
  Clone ID: LIB3146-018-Q1-K1-F9
gcgtctcctggagtcccacttcggtgtcgacgtcgccactccccccgacgagctcactcagctttacaactccattttcgagaggtttgattgcgatggcagcggcaccgttgacctccaggagttcagatctgagatgaagaagattctgcttgctattgctgatggattgggatcttgccctatccagatggttcttgaggatgatgaccaaagttttctgaagaaagctgctgatcttgaagctgctaagctcgatccaaaccatgctcaagcctcctgaatgatgctcccaggttgctgaacttgaatttatgctgttggatattcttatcttttgcagctacttt

SEQ ID NO: 19625 - DNA, 464 bp, Gossypium hirsutum
  unsure (1)..(464): unsure at all n locations; Clone ID: LIB3146-018-Q1-K1-G1
cgtncgaacaattttgtcttggccaagagccgccaaagtgagagtgatttgtggtcatttgaagctttacagaggcccgtgtcgtgaccgagcactcttattcctccaaaccatgtnggttggcccatctaattgggagcctttgctttttcattggtctttgaccaaatccacctccacttttgtttggtggctttctggtaagtatttaaaatagggtctcaacctactttntaaaaaannaatggtattattgacttntaanngtgcttgcttggttggtgtataacaaacaagtgagggtggaatgatattgacaggatcaatttggtaaggttcctctctattggggaatcaccgccgacggatatgtggcctntgctgataatgctgaattgctgaaaggtgcctgtggcaaatctcttgcttcttttcctcaaggctgtttctactccacagcagta

SEQ ID NO: 19626 - DNA, 432 bp, Gossypium hirsutum
  Clone ID: LIB3146-018-Q1-K1-G10
tcaaaaagacaattcaacaatttatttttttaatttttactgaaaaatcaaagggggcaatcatgagattcaagaaaggtagcaaagtcgaggtattaaccatgaaggaggttccaaccggcgcgtggcgctgtgccgagattatctccggcaacggccacacttactgcgtcaagtatggttggtttccgatcactggcgaggcggcgttggtcgagagagtcccgaggaaagcgattaggccttgccctcctcctataaatgggaccgacgattgggttcctggcgacttcgtggaggtgttcgacgagttgtgttggaaaccagcggtgatcgttagagttttcggtggaaacaacatgttttctgtcaggattcttggatcgaagagccaactcatagcacatcaatctcgattgcgtgttcgacaat

SEQ ID NO: 19627 - DNA, 295 bp, Gossypium hirsutum
  Clone ID: LIB3146-018-Q1-K1-G2
tccggtaggcgtttctatgaaagccgtcaaacactagccaagcaacaactggagacgataatgtctgcgcgatggattatcagagaacgtattcgagattgctttaaagagcttagcttagttttatagcttagctgtttaaatggtatcaaataacatttgctgctctgctcattgagttatagacaaagaaatattaaaccaaaaaaaagctgttaattatgtcataaagtgaagagtgtttttgtgtgtgtttttagtattgtggaagtgagagtgaaaggtttttatcttg

SEQ ID NO: 19628 - DNA, 356 bp, Gossypium hirsutum
  Clone ID: LIB3146-018-Q1-K1-G3
tccaatttatggtttgcacgagccgtagtgcgccgtttgcatcaggaagaaatggcggcccctttgctgtctaagaagattgtgaagaagcgtgtcaagaagttcaagaggccccaaagtgaccgcaagatctccgtcaagacaaactggcgaaggcctaaaggtatcgactcccgtgttaggaggaagttcaagggatgcactttgatgcccaatattggctatgggtccgacaagaagactcgccactatcttaccaatgggtctaagaaatttgtcgtgcataacgtgcaagagctggagcttctcatggtgcacaacaggacatactgtgctgagatagctcatgatgtttc

SEQ ID NO: 19629 - DNA, 430 bp, Gossypium hirsutum
  Clone ID: LIB3146-018-Q1-K1-G4
tcgggaaattttgaccttgaaggccgtggtggtgctggttttccatcgggcctcaaatggtctttggtgccaaaagtatctgatggtcgtccttcttatcttgttgtcaatgctgatgaaagtgaacctggaacctgtcaggacagggaaattatgcggcacgatccacacaaactattggagggctgcttgattgcggcggttggaatgagagctacagctgcttatatctacatcaagggtgaatatgtgaatgaacgtaaaaaccttgaaagagcttgaaaagaagcttatgaagctggactattgggcaaaaatgcatgtggttctggatatgattttgatgttcacgttcattatggtgctggtgcctatatttgtggtgaagaaacagcacttttagagagccttgaaggaaaacaagggaaac

SEQ ID NO: 19630 - DNA, 361 bp, Gossypium hirsutum
  Clone ID: LIB3146-018-Q1-K1-G6
ctgcaaggctatagaacaacaaacaatatgttaaggatgatgattatggtgaagaaatggagagagttgatgttttattgacattacctgatgaagaccgaaatcctcatatggatgataccgatatcaaagctctaattcaggatatgatagctgccgcaacagatacatccgctgtgaccaaccaatgggcaatggcggaagtaataaagcatgcgcgtgtcctccgcaaaatccaatatgagctcgattcaaccgttggtcccaaccgaatggtcaacgaataccatctacctcaccttaactacctacgctgcgtcatacgtgaaacattccgtatgcacccggacggaccgttttt

SEQ ID NO: 19631 - DNA, 302 bp, Gossypium hirsutum
  Clone ID: LIB3146-018-Q1-K1-G8
acccacacgtaccaaacgatcctatagagcactcacccttttttttttttccattatcaatcacaaaaaaaggcgagtgtttttaatacacaacctcccccatcaatccaacaatcattctctttaataaaaacacaccccaaaccaattactccttacaatattatctacctgccaaaacatcactcctccacacactaaatttaatccttacaatacccaataccatacacaactagccctttgtcaaaaataatcaaactctatttgccactcaataccatattactctctctcattta

SEQ ID NO: 19632 - DNA, 301 bp, Gossypium hirsutum
  Clone ID: LIB3146-018-Q1-K1-G9
acgccacgcgttctaccacgcgtgcgctcacgctttcggttttctttatcaagtcgggatttgggttttggggtgaaaaaaatgttgggagtatttagcactgcgatagtgtctacgccggacgagctgttggcggacgtatgccgaactccattacctatgataacggccgacgctctggtgaaacggttccttgagacgaactactacggcgtgtacatgcacatctgagaccatgtccaagccgcttattctcaccataaagagtctactttacagtccagatcatttgctgtgaaag

SEQ ID NO: 19633 - DNA, 152 bp, Gossypium hirsutum
  unsure (1)..(152): unsure at all n locations; Clone ID: LIB3146-018-Q1-K1-H1
cggagggggggaaagcttaaaaggttgaaaatttttttttaataaaaatttaatgggagaactttgaagtaaaaattgtaatttgtgacaaanaaaaaaaaaaaaaaaaaaaaaaaaaaaaaaaaaaaaaaaaaaaaggggggccaatctaa

SEQ ID NO: 19634 - DNA, 295 bp, Gossypium hirsutum
  unsure (1)..(295): unsure at all n locations; Clone ID: LIB3146-018-Q1-K1-H10
aatgaaggncgaccacgcgtgcgtccgccatgcgttcgagcagatcccaagatgtcatttgctgccattgtctgtggaactaaggggtggaccaacattggcgtgatcgaatcactctcggccaaggtcgatactctcatactgggacgtgggcgtgatgttaaccttctacaacggccaaagatctgcggttgcctctctacttgtgcaagaagaccatctctatctagcaacatggcttaatgagaatgacaacgctaaaggaggctctctcttgctccccactgatgtgaat

SEQ ID NO: 19635 - DNA, 372 bp, Gossypium hirsutum
  Clone ID: LIB3146-018-Q1-K1-H11
tttcatctggcaaacccaaggttcctatcatattttttgttcaaaaaacgaaggaagatgcgtggggggatatctccaagagtgtggctcaatcacaaaatgttaccaaagtcaaacactatacccctaaaaatggtagtaccatcagacagatggctcttcaaaagtaggcaacaaatccaataatgaggacactggtcatacacccaagtctaccaaatccaaggatgacgacgcttaaagagtttgcaacagatccaaaaatgaggacactggcgacacacacaattctaccaaatccaaagaggatgtcacttcaaaagtaggcaacacatccaaaaatgaagacactggtgacacacccaagtctac

SEQ ID NO: 19636 - DNA, 385 bp, Gossypium hirsutum
  Clone ID: LIB3146-018-Q1-K1-H2
gcattgggaacacaatgaagaggatttcagttatagtgtcgtccatcatcatcttccacacacgtgttcagcccattaatgctcttggagctgccattgccatccttggaaccttcctttattcacaggcaaagcagtgagaaaggtcaaagaatttcaagattttgttgaactgacaaacaataaaaaaggggctttatgaatatttggaaggaattcactgaagatgatgctaatgggcttagttttgatgcattccacatgaagtcctggagatggaagcaacaagttaatatgatagtctttgcaaccttcaatgctactaattaactagtagatttttattttacattttgtaagttgaaacaaagggggggggggtgca

SEQ ID NO: 19637 - DNA, 257 bp, Gossypium hirsutum
  unsure (1)..(257): unsure at all n locations; Clone ID: LIB3146-018-Q1-K1-H3
ccacgcgtncgatataaattcaattcgggttatatactgattaccgataagcatttattatgtgcaacacagattaagctagacaggataaaaaagcttgttgcgttgccattatatcctcagttctccatttccacaactggaagagattgacatggaatataagcacttagctcttgaatccggaatcgagaattggggtcgtgttcctgccctccgcatgttgatacattggtggacggtatcaaatgggatga

SEQ ID NO: 19638 - DNA, 397 bp, Gossypium hirsutum
  Clone ID: LIB3146-018-Q1-K1-H5
gcttcatctggaaaatccaagggtgctgtcacaaagtctggtcaaaaaacgaaggaagatgggaaagaggatagctccaagagtgtggctaaatcagaaaatgttaccaaagccaagcagcatacccctaaaaatggtagtagatcagttgatggcgcttcaaaagtaggcaacaaatccaaaaatgaggacactggtgatacacccaagtctaccaaatccaaggatgatgtcgcttcaagagtaggcaacaaatccaaaaatgaggacactggtgacacacccaagtctaccaaatccaaggaggatgtcacttcaaaagtaggcaacaaatccaaaaatgaggacactggtgacacacccaagtctaccaaatccaaagatgatgacaatgtta

SEQ ID NO: 19639 - DNA, 268 bp, Gossypium hirsutum
  Clone ID: LIB3146-018-Q1-K1-H6
cacgcgtacgcggacacgtggtgctccgctcgttgcttatgttttcatcctgtgccgtcgcctcaaatgaacgcgagcggaccgtcgccgtccaaatttgagcgtcttcaaatttcaactccactcttttttattccttcctttttaatttcaaatcttacaattgtgtatttttcttttatcataatggtggatgattattcaagaaaaaaaatatccacaactgccgtattatcaaaaaagcccgcttcagaacgagcttacaaat

SEQ ID NO: 19640 - DNA, 407 bp, Gossypium hirsutum
  Clone ID: LIB3146-018-Q1-K1-H7
cacccacgcgtacactcacacacactaaagagaaccccaaatttttttactttcatcattaacaaaaacacacccgctgtttttaaaaatacatcccccccctccaactccaaacttaaaaccactcctttttattcctcccatcataattacaaaactaacaactttcaaaatttttttttattctcaaacaataaaaaaaagccaccattaatatttccaaaaaatacacaaaaaaaaaatcttacttaccaaattttttcttccttccacatacaaaactctctacataatcaacaactccttattatttactttttactcttcattccttacttatttaaaataaaatattttttttacttttttaaataaaaaaccagcgaattttcatcacctcctttttt

SEQ ID NO: 19641 - DNA, 319 bp, Gossypium hirsutum
  Clone ID: LIB3146-018-Q1-K1-H8
aacggctggatcctgaacgactcgcattatactgttttgttagggcctagggaaaccaatcactagtcagctggagcagccaaatcataatcaaaatcgtatctttttaaatacataccgaaaattggggcgtactctagatacagatccactatatgctatactgcatgagtcaatatactgacagggagcatattctcggtggcctgctcacagagtgatggctgatcacgagagcaaatatgatgcaatcaaagctgcaaaagaagggcgtcctgggctattcacaagcgagatgatattttcatggacgcttgat

SEQ ID NO: 19642 - DNA, 290 bp, Gossypium hirsutum
  Clone ID: LIB3146-018-Q1-K1-H9
gacccacgcgtaacgcatatgtcctatagcccgagctcccttattttttttaaagccatcaaaaagctagatcgtggtagattacccgagattttactgattcatttgaagagattctcatatagccgtttttttaagaacaagcttcaaacatatgtggactttccaattcatgatctcaatctctccaattacatttcccatattgataaccaactgtccaattgttatgaattatatgctgtaactaatcactatgcaggcatgggaggcggacattatactgcttt

SEQ ID NO: 19643 - DNA, 275 bp, Gossypium hirsutum
  Clone ID: LIB3146-019-Q1-K1-A1
agtaattttctgcattaagaagagttgtaactcttattttaatcaagctctgtaagtagaactcgataaccgctcttaacagagaactccccaatagcgccatgcttccagaaaaaaaaaaaaaaaaaaaaaaaaaaaaaaaaaaaaaaaaaaaaaaaaaaaaaaaaaaaaaaaaaaaaaaaaaaaaaaacaaaaattattaaaaaaaaagggggcggtaactttgaaaagaccgataattacgcgccgtggaaaagaaactttaatacatagtt

SEQ ID NO: 19644 - DNA, 445 bp, Gossypium hirsutum
  Clone ID: LIB3146-019-Q1-K1-A10
cccacgcgtccgcggagcgtgggagaccatccaatctgatggcattgctggtctttaccgagggttcaatatctcatgtgttggaattattgtttaccgtggactttactttggaatgtatgattctttgaagcctgttgttttggttggtggattgcaggatagtttcttggcaagtttcttgctggtttggggtatcacaataggtgctggactggcatcttatccaattgatacggtacgtagaagaatgatgatgacttctggagaagcagtgaaatacaagagctcgatggcagcattttctcaaatcatcaagaatgaaggtgccaaatcgctgttcaagggtgctggtgcaaacattcttcgtgcagttgcaggggctggtgtgcttgctggctatgacaagctgcaagtccttttcctgggaagaaatatggatctg

SEQ ID NO: 19645 - DNA, 449 bp, Gossypium hirsutum
  Clone ID: LIB3146-019-Q1-K1-A11
gtttacactatgaagaatgtaattcattaacagtagggataagcagggtctaaattgatccatttaatagtaggaggactaattttatccggtccctatggtagagggacttgtaaggcacattcacctcaattatttgattcatggggtgccagctttttgatccttttcttttttggttttctttgcccttgtaattgtagtataccacattgttccgaagaggagaattgcgttctgtcccttcatccattcaggggacaggatctattatctcttctgcatctctagataactcactctctgacttgtaccaatctcctccaagacccttgccttatgatgctgaggctaaatatttccgcttacaacgtgatggtcttgtttcaagacatgagaagggttcaagtcagtcacacgaagagtcagaacctttaagaggcgaaaac

SEQ ID NO: 19646 - DNA, 447 bp, Gossypium hirsutum
  Clone ID: LIB3146-019-Q1-K1-A12
cccacgcgtccgctcgttggccatctcaaaaattccttctgtttcactcgacaaaagtcacaaaagtcaaagtagaagtatgagaggttgagaggtgccctcctgcaactaggggaatccagtcttaaaagaaattcagcgaatagatgaccaacatacaccagtgtagctttgtgtaaattatcagatgatagaggagaaagctaggaacgaaaatttgcttctttgtatttttgatgtagcggtagatatatacatatatatgtttagtgttctttagttttatttagaattattataatctgatctgtctaggccatgctcttttgtatatggaacgtctctaagtagttgggtttgataattgaagtgcagcatcggaagtgatatcaacccatgtattttgttgcatctaactgctcattgcttattcagccttctttgctc

SEQ ID NO: 19647 - DNA, 315 bp, Gossypium hirsutum
  Clone ID: LIB3146-019-Q1-K1-A2
cggacgcgtgggcggacgcgtgggcggacgcgtgggcggacgcgtgggcggacgcgtgggttcgtccactacttcgatcgcagatcagctgctcttgctatattgtctctaaatggaaggcatttgtttggacagcctatcaaggtcaattgggcatatgctagtggtcagagagaggatacatcaggtcactttaacatttttgttggggatctcagtcctgaggttactgatgcaatgctgtttgcatgcttttcagtctatcccagttgttcggatgcaagggttatgtgggatcagaaaactgggcgttca

SEQ ID NO: 19648 - DNA, 355 bp, Gossypium hirsutum
  Clone ID: LIB3146-019-Q1-K1-A3
gtctcattattcgatcactgtacttcaccatggaacaccacttcacccaactcgacgacggcgcctccgccgacggcaaaccggcgtctaatttcggagcggcggttgcgacggtgctcctagctttgcttttacaaatattttgccgttgctgtcgctcaatttaccgtaatcatgtcaagaaatacaagttttcttcttcttccgccgccgctaacatggaccggtcgataatcgccgccgtggagaagatccttaaatacaagtttaaagacaaaagactcctggaagaagccttgacgcactcttcgtgccgcgaagacatgtcgtacgaaatactggagttcattgggga

SEQ ID NO: 19649 - DNA, 285 bp, Gossypium hirsutum
  Clone ID: LIB3146-019-Q1-K1-A4
caagaccctccagtatcgattcggagtgcactagaacactgatgatttataaaccaaatagatctctgcttcctctggttcttgctctgggagattcgaaatcgaacttgaacctttattttggctaactgcccgaaaatgttaaaaagagagtgagcatgccaatatttagtgcaaattctatagtaagctctacttaattcatcctaaacattttgagacagtgctttattagatgaaacatgaatataggtgcttgatttcaaatctaatgacgaaagactc

SEQ ID NO: 19650 - DNA, 347 bp, Gossypium hirsutum
  Clone ID: LIB3146-019-Q1-K1-A5
tcgtccacgcgtccgtccactcgtccgtccactcgccggtcccacgcgtccgcccacgcgtccgaaaagagtcgtctataatctcaaaagctaatatctgaaaattgctagttatcttctagaaaatccctttcttgtttcttctcccttcgaccggtcaacggcgagttgtgtgacacggacgacgcgtgtgttttgtgatccttcaataatgatattgaccgccgcgttttttctggcgatgggagatgacttatctgcggcgttgacggcgagtactgatcgtgagcttcttattccagttgctgtatccgtagaccatgattcccccaaaacttcttcttatt

SEQ ID NO: 19651 - DNA, 288 bp, Gossypium hirsutum
  unsure (1)..(288): unsure at all n locations; Clone ID: LIB3146-019-Q1-K1-A6
acgcccacgcgtccgcccacgcgttcgaccacgcgttcgccgacgagtgtcccaaatactatgaacgatgctaaggagggtgaaattgagtgagagctggtttgcgtacgccaaactagcgtaacttgcccaacattaacagaagagagtagagaatatcatgtgatctctataaaaatcctgccttggntttttggggattacttgaacctatgtagtacgtagaaaatatagtcgaaagatgctcaagagcacttgcgtaggatagtgtgggcaaagggggaaaac

SEQ ID NO: 19652 - DNA, 190 bp, Gossypium hirsutum
  Clone ID: LIB3146-019-Q1-K1-A7
tcgaagcaaagtctctgcctttcaaaagaatttaatccagtaaatataccaactttcatatgcgtcggattaaagataggagggatcaatgtcaactgccacttttcaagaagggatgaacggttttctttacccaaaatcaaaccttgaagagtataaacctacatcgacagcgtatagagagtcccat

SEQ ID NO: 19653 - DNA, 213 bp, Gossypium hirsutum
  Clone ID: LIB3146-019-Q1-K1-A8
agtaaatgttgaattgttgaaacaacaacagcactcggacggttctccgctcaaggacgtttagctcggcaaatctcagccttagatatgtatgttcttcatttatcttttgtttctttttcaaaaattgatttggctaatgatttaagctcttggaattggctcgtcaaattttaaaagtttactaatttttttcctacgttttcttttttt

SEQ ID NO: 19654 - DNA, 448 bp, Gossypium hirsutum
  Clone ID: LIB3146-019-Q1-K1-A9
cggacgcgtgggtggaaatgatcttatctttcgggttggatttgttgatgttgtcttctagactggaaaactatttagggaggctgacaaggaatcgggtcacaaaaagacaataacatcacttacaaaatctgcagactgttcacacttccttactggttccttagataaatctgccaagctatgggacacaagaacgttgactcttatcaagacctatgttacggaacgtccagtcaatgctgttgctatgtctccacttctcgaccatatgtagagggtcagcccgagagcattgtgcaagatattgagaacatggttcgctcttacattgagaaggtaaaatgcatttgatctttattgtgtgctccttctagtaaaatttacttaaataagatttacaacgatgttactgccaataatattttaggataacgcgtattttata

SEQ ID NO: 19655 - DNA, 370 bp, Gossypium hirsutum
  Clone ID: LIB3146-019-Q1-K1-B1
gtcccatcatgtaattactgtaatcctgattggatactcatacattacaagctttttccgcattggttcaattatccttgccctacatgatgcaagtgatgtgtttttggaagcggctaaagttttcaagtattccgagagagagcttggagcaagtgtgtgctttggattatttgccatctcctggctcttgctgcgtctgatattctttccattttgggtcattaaaacctcaagctatgatgttcgggagtttttaaatctttcggagtcatatcccatgtccctatactatgttttcaatactatgttgctgatgctacttgtgttccatgtgtactaggggtttctcatttgctcaatgatcatg

SEQ ID NO: 19656 - DNA, 159 bp, Gossypium hirsutum
  Clone ID: LIB3146-019-Q1-K1-B10
gttaatttggttggatgcatcccatgaagggatgtactaaaagaactcgtaatgttgatgttagtgcagtcttaatgcttagtgaggccaaaactatatgtacttttggttttgttggtgctacttttttaaaattttgacttctgagatgtttcagtt

SEQ ID NO: 19657 - DNA, 534 bp, Gossypium hirsutum
  unsure (1)..(534): unsure at all n locations; Clone ID: LIB3146-019-Q1-K1-B12
cgcccacgccgtccgtgttgaatgcatgcgagctaggtacctggagaaactaccttgccctcgtatagagggttgtacctnnacaactcattacccaatgcacgatgggtgacaaaataaatattagtgggtggtgtacttcgagatatttgattgtaggtatgatccaagcgtgtatttgtgcctacatggctttcctagatatacattgtccactagtgatgccgggtagcactcatttgttattgtgcatgggtatcaacatgtgtacaatgccctaatgatagtatatataggaacttgaccgatggctagggaaagcatactatggtgtgtgcttggactttaggtgggcttaggtcaatagttgcttgtgaaagatcggtaaaggcctttaggattgaatagtcaactgtcattatgtagcttccccacagatatgagtcttgaagcaatcaatagaacttggtgctgactcattccttgtttctaacgatcccgcaaatatgaagtcagctattggtaccatggact

SEQ ID NO: 19658 - DNA, 297 bp, Gossypium hirsutum
  Clone ID: LIB3146-019-Q1-K1-B2
gccgttttcatccattcaaaccccaaagaagacaagcccaagctgccatgtagccaccgccaacggtggccgacggagggtggtccattcggattctaaccccgttcagacttgcgatcaagaatctaacctctatgatagcaaggaatcaaaaagatagtatcaccctctttattagatttggtttcaacagagaagaaactccgatatataccaacggtctacgattcaagtgccatgcgacgcgtggaagaggcgacagtcatgggcgtggtggccgatgcggcatgcgtggga

SEQ ID NO: 19659 - DNA, 359 bp, Gossypium hirsutum
  Clone ID: LIB3146-019-Q1-K1-B3
ggttcaggtgctatgaaaccagaaccaaaaaagcgtgggaggaagcgaaagtttgatcctaatgttcaggattcatctgctggacgtgaagatgatgctgacatgcgccttagatgttatgaaagtgcttctgcccgaaagagaaccgtgacagctgaagaaagagagagagcaattaatgcggccaaagcatttgagcctattaaccctttctgcagggtcgtcttgcgaccatcatatctatacaggggatgtattatgtacttaccatcgtgctttgctgagaaacatctaagtggggtttcggattccattaaacttcagcttcctgatgggagacaagggtctgtacgatgtcg

SEQ ID NO: 19660 - DNA, 288 bp, Gossypium hirsutum
  Clone ID: LIB3146-019-Q1-K1-B4
cccacgcgtccggagcgtttgtctcagatctcagaagatggcccgtaccaagcaaaccgcccgtaagtcgactggtgggaaggctcctaagaagcaacttgctaccaaggccgcccgtaaatctgccccaaccactggtggtgtgaagaagcctcatcgataccgtcctggaactgttgctcttcgtgaaattcgaaagtaccagaagagtactgagcttcttatcaagaaattgcctttccagaggcttgttcgtgaaattgcccaagatttcaagactgatttgcg

SEQ ID NO: 19661 - DNA, 334 bp, Gossypium hirsutum
  Clone ID: LIB3146-019-Q1-K1-B5
caaagaacctgcagcaaccaacatcttatcagccagcaagacgtttagcttctctttctgaagaatcaagatttgggaggagaagaaaacaaagctttgaatccaaaaagggaggagcggtgaactttcaccaaaatcaaagctaaaatagtagaacccaacatcgacagcgtatcaagagttccattccaatttgtccttcgtcgccatcgtcatcacagaattaagtactccatcatcctaagcaccataagcctgtcttctccgaccctccaccgacagcatgtgagccgttctattgacagatctgggtagtgagtccccttgcacgatc

SEQ ID NO: 19662 - DNA, 386 bp, Gossypium hirsutum
  Clone ID: LIB3146-019-Q1-K1-B6
tttggacatcagcaatgaggtcaaatttgcatggaaaattcagagggacatggctgagagagggcacagccttgaaagcattaaagctagtattgaagccaggaaacccgatttcgatgcctatattgatccccaaaagaaatatgctgatgcagtgatcgaagtgctgccaactcagctcattccagacgacaatgaagggaaggttttgagagttaggttgataatgaaagaaggggttaagcatttcagtcctgtttacctgtttgatgaaggctcaaccatctcatggataccatgcggaaggaagctcacttgctcttaccctggcatcaaattccactatggccctgacacttactttggcaacgagggttctattctgg

SEQ ID NO: 19663 - DNA, 341 bp, Gossypium hirsutum
  Clone ID: LIB3146-019-Q1-K1-B7
ggtatatgctgtcttaaaccagtggcaaatacgtgcgcgcacattcgaaagcccgatcatagaggccaggagtcatcttctgaacacgtagatagattctgccgtgcgcctttgacgagatgaaaatgcttatgtccgtgtgcgatgcgcccctgctagtgaaagagtgatagctgctaatgcgggcttagaacttgagcgtattgaccatttgtggagggtcttgttgctaccatcatatcgatacaagagatgtattatgtacacaccatcgtgctctgatgagaaacatataagtggggtgtcggattccattaaacttcagcttcctgatgggagac

SEQ ID NO: 19664 - DNA, 179 bp, Gossypium hirsutum
  Clone ID: LIB3146-019-Q1-K1-B8
acgcccacgcgtccggggatttgtatggttatttgaaagagagtaaagctctcacatatggtgtttaacgcctgtagaatttatgtaccaccttattttttatgatagggagtagaacacctgtcgaatttatgggccaccttatattttatggaaataatacattgccttttttttat

SEQ ID NO: 19665 - DNA, 387 bp, Gossypium hirsutum
  Clone ID: LIB3146-019-Q1-K1-B9
cccacgcgtccgctcgatggaagactcaagtggcgaccaattgtcttgccagacaactatatcgagcatgcatcaccgaaagaacagcttgctcttgctgggctgactggacatcacattgctgcaaccacattgagtctcctcggacgtacccgtgaagcgttacttttaatttgctagaatgctgtatagttttccttactggattgatgatgtacctgaagagcgtgagaaggctaagcaaagaatgaacagtggaatagaatattgtagcattttgatgatccctgtaatttgtatagatgttgaagtgtgaattgtgaagttgacagagtagtggtgaagaaccagaattgaagtgaatgaattttatagaaaattctacct

SEQ ID NO: 19666 - DNA, 301 bp, Gossypium hirsutum
  Clone ID: LIB3146-019-Q1-K1-C1
ggaatatgctgccttaaacgtgtggcagatacatccccacacttttgatatccgatttatagatgcttgaagttgctataaaaccacttggaagattaagctgcatccatttgccaagttcgaaattaagagatagttgtccgctgtacccttttaagttagtagttaatatttgcagagttgagtttgaaccttgtttgactgtaagattgcaagtgattatgttcttcacatgcagcaagataaaaaacgtttctgtttcaacttttactttctactaatagcgaaagagatgatgatt

SEQ ID NO: 19667 - DNA, 448 bp, Gossypium hirsutum
  Clone ID: LIB3146-019-Q1-K1-C11
gtttgaaacgctggaggacagttcctttgtttttgagagaaaagagtagatcttggctggtctccttcgttcgattccgcttaattatagcccgcgtttctctcagacgtgaaaaatggggctgtctttcacaaagctatttagccggcttttcgccaagaaggagatgcgtatactcatggttgggcttgatgctgcgggtaaaactaccattctttacaagcttaagttgggagagattgtcactaccattcccaccatcggtttcaatgttgagaccgttgaatacaagaacatcagctttactgtttgggatgttggtggccaggacaagatccgaccattggggagacactacttccaaaacacccaaggacttatttttgtggttgatagcaacgaacgtgatcgtgttgttgaagcttgagatgagttgcacatgatgttg

SEQ ID NO: 19668 - DNA, 344 bp, Gossypium hirsutum
  Clone ID: LIB3146-019-Q1-K1-C12
acggttactccatattgttccttcagccattcttctcatattcctgcgagaacatgggtggggtggtcatacagtggatttgttgctcactctactactgctgtcaaagctgttccctgtggcttgccagtaactcgaggcggaagttttgggggtcaggttattcttccactagctcatactattgagcatgaagagttcatggaggtcattaagcttgaaaatatgggtcattatcgagaagacattgatcatgcctggtgatattcttccttttgcatcttagtataggagttgatgataatgcagattggtactttgttctgttcttatcttttgccccc

SEQ ID NO: 19669 - DNA, 362 bp, Gossypium hirsutum
  Clone ID: LIB3146-019-Q1-K1-C2
gcgagagttaagtggctcattgcaaagagaatcagatgcaaagaataaaaagcaaatatcaaatgcaaagtataaggagattagtggacatgacatctttgcccctccggaaaataagccacgttcgttggctgctgtcacctctgaatcaagaggaagcaaagacatgggagaacctgcaccacgaaatgtccgcacatctgtcaaagtttcaaatcctgcaggaggtcagacaagtatcctattcacggacgaaccagttgtcaaggtgacaaagaagatacataaccaaaagtttcaagagctgaccggtaatggtatcttcaaaggagatgtcccacccaggtctgtggaaaaaccac

SEQ ID NO: 19670 - DNA, 337 bp, Gossypium hirsutum
  Clone ID: LIB3146-019-Q1-K1-C3
gagagggggtgggtgtttattggtgaatcaattctttaccaaaactagaagatctagataaaatgcatgggccattgataggtaagctcgtatactctaaagcgctacgggcagtgactaacaagacagatcctatgggtcctctacatggtgaagattatttgtcttctttgttcctaaagcctgttttaaactcacgtttgggaaaaattgaaaatctactcgacatttaacataaatgatattcactcacgcaccaaacatgcccgccaactagaggtacactctcgacaaaaacaagaacgaatcccatttattggattaagattatatatcc

SEQ ID NO: 19671 - DNA, 389 bp, Gossypium hirsutum
  Clone ID: LIB3146-019-Q1-K1-C4
cccacgcgtccgcccacgcgtccgcccacgcgtccgcaattgctagggtttcggcgccgcagctctgtggcttttccagtcccctttgcccttttggttgacttgcaggctaccacggcaccacgcgcgccttcatcatccgtcgtagctctgaccggatccccaaggatccgtttggccttggacggagaggcaactgtcgattaagtcggcgtcgatcgacaggtaagagatcctcccccttctttatactcgtatcacagataaagaaaaataaataggagataaataaaaaagaaaaacgatgaatgaacaaccttgaaatctttgctttctctatttgattgcttgatattcagttgttttttggagcggatctctgtgtttat

SEQ ID NO: 19672 - DNA, 273 bp, Gossypium hirsutum
  Clone ID: LIB3146-019-Q1-K1-C5
acgtgcacgcgtacgcttgatcgatattacattcgcacactaattgctatgctattcatagaggcatggtgtggcttttctaccacatgaaagattcaccggcgtccattgggcatgatcgaaattaagagagagttgatctggcgcaccctatagagccagtacgctctcagtgcagattacaaggttcacctgattggactgtagaatcgcaagagtttatgcgatactcacaccatcgggatggatcccgattctgtgaagacccatacg

SEQ ID NO: 19673 - DNA, 263 bp, Gossypium hirsutum
  Clone ID: LIB3146-019-Q1-K1-C6
acgattatttatctatctaggaaaaatatttttatgcttaaaataaaaagcaaatatcaaatgcaaagtataaggagattaataggaactgccatctttgcccctccggaaaataaagccaagttcgggggctgcttttacctgtgcctcaataagaagccatgacatgggagaacctgctcctctatatgtccgcacatctgtaaaaaattgaaatcctgcacgaagtcatacaactgtcctattctcggacttaccaattt

SEQ ID NO: 19674 - DNA, 145 bp, Gossypium hirsutum
  Clone ID: LIB3146-019-Q1-K1-C7
cgatacccacttttcacagagtacttcttattgccttcatgctttcaggctcgcatatattgcgatctatcaccagaaatcgccatgaagaaaatacacgtcgcttgagcaaaaaacaatagctgaaaaagctccgaccgaaaaa

SEQ ID NO: 19675 - DNA, 408 bp, Gossypium hirsutum
  Clone ID: LIB3146-019-Q1-K1-C8
attgatttgacagtgactgttctcacaacaagattctggccaagttataaatcatttgacctcaatctccctgccgagatggtcaagtgtgtggaagttttcaaagggttctatgaaacaaaaacaaaacacagaaagcttacatggatatactcactgggaacttgtcagattaatggcaagtttgatcagaaaagtattgaactgattgtttcaacttatcaagctgctgtcctgctgctttttaattcatctgatcggctgagctattcggagatcatggctcagttgaacttgaaccatgatgacttggtcagattactacattcactgtcatgtgccaagtataagattctaagtaaagagccaaacacataaaccatcttccaaagcgacttctttgaattc

SEQ ID NO: 19676 - DNA, 91 bp, Gossypium hirsutum
  Clone ID: LIB3146-019-Q1-K1-C9
acgctcacactcacttaagttatcaccctttttttttcttttttttaaaaaatacatagggggggttattcttacaacatacccatctttc

SEQ ID NO: 19677 - DNA, 375 bp, Gossypium hirsutum
  Clone ID: LIB3146-019-Q1-K1-D1
gaactcttcaaattcagttttcaaaactctattttctcctaaaccccaaacgaaccctcagaaatggcaccaaaagccgagaaaaagccagcagagaagaaaccagcggaggagaagaaaacagtagctgagaaagctccgccggagaagaagccaaaggcaggtaaaaagctaccgaaggaaggcggagcagctgccggagacaaaaagaagaagaggaccaagaagagtaccgaaacctacaagatctacatcttcaaggtccttaaacaagttcatccagatatcggtatctcaagcaaagctatgggcattatgaacagtttcatcaatgacatctttgagaaacttgctcaagaagcttcgagactcgcg

SEQ ID NO: 19678 - DNA, 369 bp, Gossypium hirsutum
  Clone ID: LIB3146-019-Q1-K1-D11
cccacgcgtccgcccacgcgtccgcccacgcgtccgggcagatgtggacttatgaagaacttcatgaactttgcactcaaagtacctgttgtatgtgttcattagttactcaaatcaaatgctacttatttgggcgatcgtgttattcagtgtaaagcgtggtccaggcatttgtttatgtcctggtccttggacatgtaatttagatgaaaacgttatgaaatctgtcagctattcaatgttatattattactctggaactctaaggcggtgtttttattctctttccttttatgagacagtagtaggggaggggtattttgttgccggacctgtatggattttgatgaatgcaaatctctctctagt

SEQ ID NO: 19679 - DNA, 466 bp, Gossypium hirsutum
  unsure (1)..(466): unsure at all n locations; Clone ID: LIB3146-019-Q1-K1-D12
ccgtccgtcccacgtccgtccnnngccaaaatannnaaacttggtcnnatcaacanntgataatggnnngcagtgtnngatgaatgggcatnttnntcggaagggacccttatnnactggnnccgaaagannnagcagannttgaatnnccacatangnnccttcnntcgaagtggttngnngtaagaattggcaaccaacctaaannntaatctaacnnnaagttgtgnnngccacaanntgaaaggggtgcggtgnnngctgatnnncaagtttnnngtggcaggacctnntgggtgggaaattggccaacncnncaatgtttanngaggaaanngggaccanngaaatnngcttaaagaccaatnntattcccctgcatttttcctttgaaaccaatcagcagaaaagaatatgnaaggttggctttcttgcnnccttggggaaaatcaaaatgnncagtatc

SEQ ID NO: 19680 - DNA, 395 bp, Gossypium hirsutum
  Clone ID: LIB3146-019-Q1-K1-D2
gaatttgatgtctatttcccaatgcttgatcaccgtgctgctcttcttcggccattctcagagaccaagaccttgggcctttgggacatcaaatgcacagtttaaggaggtggtctttctggtcaagtaggaacaattcagctgggaatcagtctggccttgcaaaattttgagccggagctacgtgctccccttagagccgctggtttcttgacaagggattcacgtgtggttgaaaggaaaaagccagggattgcaaaagcatggaagagcttccaatgggtcaagcgttgatggtcagcttcttgctgctcagatttttcctcaaagggacatcttttctttcctcggtttctttgcattggatgaaaagctgacctttattttgacaatgc

SEQ ID NO: 19681 - DNA, 301 bp, Gossypium hirsutum
  Clone ID: LIB3146-019-Q1-K1-D3
cggagtatcctctaatgcatttgatgaagtactgaaagcaacaccaccttctttgtcagcatttttggctggcttgccttctatcgagggtccggcaccaaatgtagacattgcattgtctatttgtttgcagaatgactatccaactgtccagacaaaaaaagcaacgagccttccatctcaaaagactgcaggtcctgctcctagcacaagagatctctctgggtcaagcaagtcccatcccattcccagtaattcatctttcaagccacgggacagacagctcggctaaaggaaggat

SEQ ID NO: 19682 - DNA, 229 bp, Gossypium hirsutum
  unsure (1)..(229): unsure at all n locations; Clone ID: LIB3146-019-Q1-K1-D4
tagtaattcaattatctactcgagcttagccatggacaccttactttccctactactatcttaacctttctctcttgcaggtttcaatttgttccatttccttgtttgcttagtgaagctcatgtatcgattccagatcaacataacaaagcatatatttgtacataaagttattaatttcaagtattttatattcnctgctcctaaaacaagtgaaattcttgggtct

SEQ ID NO: 19683 - DNA, 360 bp, Gossypium hirsutum
  Clone ID: LIB3146-019-Q1-K1-D5
agataaggttttgtgcacctaatactaacacaaaccagacaaaatctgatccaagtttgaggtattggtttagagccaaaggaaaactttcagatgatcaagctctgcatagatgtgtagtggcctttgcttcagatctgatatttagtgctgtcagtttgaatccacaccgcagaaagggttttaagtcagcttcccttagcctggaccactcgatgtggttccaccggcatcttaaggctgatgactggttattgtttgagattgttagtcctacagccagcgtcacccgaagctttgtttcgggccaaatgttcaacagaaagggagagcttgttgtatcattgactcaagaagcac

SEQ ID NO: 19684 - DNA, 355 bp, Gossypium hirsutum
  Clone ID: LIB3146-019-Q1-K1-D6
gaaaaagaaaaaaaaaaggtgagattatccaaatggcttctaaaagaagcaggaaccggagttaacaatacactttcagagatcctcgtttgtccgctctccaaacaagctttaagggtttgcgaggaaccaccttctcttatcagcgattctattggtgtctcttttcctataaaggatgggatcccatgtttggtgccgacagatgggaagatacttgatactgatgatacaatgaaacatgataatgctgctgatgattcagcttacaacaagtaacgaatggcttgttggggatccttgtatcttgctattttcatggtgctatggatggaaaatgaagacctcacctatt

SEQ ID NO: 19685 - DNA, 195 bp, Gossypium hirsutum
  Clone ID: LIB3146-019-Q1-K1-D7
agatttggagaaacggctcgcaataacatcccgaatatgcatattaatcgagcgttaacccaataggaaaggtgatcgcttccaagccgtcttgagcttttactttagagactaccgtcacataagggtgcagggaccttacttgacttaacaggacacctttggggctatcactgacgggcctggcatttttga

SEQ ID NO: 19686 - DNA, 275 bp, Gossypium hirsutum
  Clone ID: LIB3146-019-Q1-K1-D8
tatagatgcaagttttgtagaactcacttggctctccctgatgatcttgcttggagggctttccattgtcgccgggggaaagcctacctcttcaataaagcaattccattcttcatggtgaacataacagttggagccttggaagagagggagatgctctcttgaatgcctactgcggctgatatattttgctgctagctgagacagattgttggctggaaataccaagctgcacatgagaagaatcaaaagttcaaagaacgaaagtttgttct

SEQ ID NO: 19687 - DNA, 443 bp, Gossypium hirsutum
  Clone ID: LIB3146-019-Q1-K1-D9
cgcacacacgcgtccgcccacgcggtctctcacgcgtgcggttcttcaacaaccgcgggtgtgttaaactacgcccacaatcgcaaacccaaacccccacttgctcagttcgtggaatctaagctccatgttgcttcgatttcaccgaacccgattcctaaactggcttacctcatctccggctcagccggtgatggggttagcttgttgaggactttgaaggctttgtaccatccaaggaaccagtatgccgtacatttggatttggaagcttcggctgaggagaggttggaagtggctgagttggttgaaaacgaaccggtttttaaacgagttgggaatgttaggatggttactagagctaatctagtgacttatagaggaccaactatggttactaatactcttcatgctgccgctattttgtttaaagaaggtggtga

SEQ ID NO: 19688 - DNA, 382 bp, Gossypium hirsutum
  Clone ID: LIB3146-019-Q1-K1-E1
gtcagaaatctgtgaactcactgggtgatcttgtcccttttagcaacaaaatatataggggagatttggagaaacggatcggaataacatcaggaatatgcatattaatagagcataaacccgaaatgaaaggtgatcgctacgaggccatcttcagcttttacttcggagactacggtcacatagcggtgcagggaccttacttgacttaccaggacacgtatctggctattactggtgggtctggcatttttgaaggcgtctccggtcaggttaggctccaccaaatcgtcttcccctttaagattttctacactgtctatttgaagggaattggtgaactcccagaagagctgctttgcaagccagttgacccacaccc

SEQ ID NO: 19689 - DNA, 217 bp, Gossypium hirsutum
  Clone ID: LIB3146-019-Q1-K1-E10
ccctaatggttagtgttggacggcattttatttggaaataataaaataatatgaaatggatggttaagcagtttatggtgctccagctaaaggtggagtaggggcaatacctggagtagcaagttttttaataccattcaataacaagaatggagaggctggaattgtgctaccaattacgttgccagccgaatctatggaaatatttgtgaaagaa

SEQ ID NO: 19690 - DNA, 405 bp, Gossypium hirsutum
  unsure (1)..(405): unsure at all n locations; Clone ID: LIB3146-019-Q1-K1-E11
cccacgcgtccgcccacgcgtccgggagagtataatgttattagctgtgtaatatttgtgatatttagcatttggaaggtggtttttgattcatgttgttacctttgcattagtcagatctgttattatattttctaatatgaaagaggtgaaatggcaacaaggtacaagtttcttccctataaaaaaaaaaaaaaaaaaaaaaaaaaaaaaaaaaaaaaaaaaaaaaaaaaaaaaaaaaaaaaaaaaaaaaaaaaaaaaaaaaaaaaaaaaaaataaaaaaaaaaaaaaaaaaaaaaaataaaaaaaaattttannaaaaaaaaaaaaaaaaaaaaaataaagggggggcggttttaaagaaatatttttattaacggtggtttggaaaatattttttttttt

SEQ ID NO: 19691 - DNA, 310 bp, Gossypium hirsutum
  Clone ID: LIB3146-019-Q1-K1-E12
gccaatcgttctatctctgctcaatttttatttttaaactattaacgaatgcccattggggagattccatttatgagaggtcaactgtacattcagttcactgatgacttccctgactcgctgaccccttaccacttcaatgcactaaaggcttgtgctttctcccaatgcatctttttatctttctgacatggatctggattattgccaggaaactacccttcatgattttaacattgaagaagtgatgcgtttgatacataactcaatctcaacatgtagcttatttttaatatgtgtacatgctttt

SEQ ID NO: 19692 - DNA, 411 bp, Gossypium hirsutum
  Clone ID: LIB3146-019-Q1-K1-E3
ataatgctaaaggttcacttatgtagccttctttcgatgtacacttccttttttgtgctctggcggtcaagcaaggcacttcctaaaattgagccaaaattcataattcaagcaggcaaaagttatcttaacccaacaatgcctagtatttcttatgtcattgttggttggttaactctgtaatatccctgtcaacatggctgatttgatgcttatgtgatccctttgatgcttatatgatcccctgcaagatcaaacaaattccccagagtggagaagttaaaagtgttgaaaatagtaattgcaatgaaacagtcttgcatgcttagtcatatctccgaaagtagctacttttgttttatgcttttgtgaagcagtacatgataatttgagtcggaaattggtgattga

SEQ ID NO: 19693 - DNA, 374 bp, Gossypium hirsutum
  Clone ID: LIB3146-019-Q1-K1-E4
cccacgcgttcgcccacgcgtccgcttaaagattgttgagagccagaattccgggaaatctagtgaatgtgctgagaatcaagcacggctgcagcgaaacctcatgtacttggctgcaattgcagattctcaaccgcaacctccggccatacatgcccaggctggagggcactacatgcagtatcagcatcaaactcaacagatgtcaccgcaatcgctaatggctgcacggtcctccatgttgtatggtcaagaaccattttctgatctccaacaacaagttctgcatggtccacttggcatgagctccaagtagagcaccggtctttacatgctgcaaagagaaactagcactacatgtggcaatggagcac

SEQ ID NO: 19694 - DNA, 354 bp, Gossypium hirsutum
  Clone ID: LIB3146-019-Q1-K1-E8
cgacccacgccgtacgcccacgcgttcctccaagcgttcagtccactcgtcctcccacgcgttcgctatattctctgcgtagttggtttcttggaaaatcttctgatcaagaatggcgcaccttatcatcatcaacgcgttcttgtacgttagctttgcattggcgcttctctcatcgagtgttgtgactgcgctagatactgaactggcaccgtcaccttcttcgtctccatttattgaaactggagctgggttttttctgtgagccatatgctatagtcctttttttttattgatccttttatgatctttcttttcttcgggattaaaaattcctgacatttttattggcaa

SEQ ID NO: 19695 - DNA, 449 bp, Gossypium hirsutum
  Clone ID: LIB3146-019-Q1-K1-E9
cctacacttaatacataacatcctgttttgtacatagattttgttcaatgcgacatggggggcctatgatggagacgtcaaattcctgatactgttgtgattaatcctccatttggaactcgaaagatgggtcttgacatggattttctatttgtggcattgaacggtgcttctcaagctgtttattccttgcataagacctctacatgagattatattaaaaggaccttcttgagggacttaaatgctatcaacgctgacgacttgtgtgagctcccatttgatgttcctcaactatacaagtctcacaagaaaaaggaggtatacatcgctgaacatctatgtcgatttgatcccaaaatgtgtcaggtaaaagacaattagctgctcgaagtgcactttgaaaccatgcatgaagcacatataactcagttaatcattctttaaaa

SEQ ID NO: 19696 - DNA, 402 bp, Gossypium hirsutum
  Clone ID: LIB3146-019-Q1-K1-F1
caaaaccctaacggctacagctctagaattcaagcctttcgaccatggcggatgttgagacggaggtagcggcggctggagtgcccaagaagagaacattcaagaagtttagcttcagaggtgttgatttggatgctctccttgatatgtccactgatgagcttgtcaagctctttcctgcccgtgctcgcagaaagttccagaggggtctcaagagaaagcccatggctttaatcaagaaacttcgcaaggcgaaaagggaggctccaccaggtgagaagccagaaccagtcagaacccaccttcgaaatatgatcatcgtacccgaaatgattggtagcattatcggtgtgtacaatggcaagacattcaatcaggttgagatcaagccccgaatgatca

SEQ ID NO: 19697 - DNA, 349 bp, Gossypium hirsutum
  Clone ID: LIB3146-019-Q1-K1-F10
gccactcgttcgatgacacgtgggtttattcattggtgaaaacgcacattcagaaaggctggccattatcccttcggtcctgcacatagttctcattaatataacacgaaaattcaatgatgcccgaatgtacattacctttaatgggatggatgatgaagaggacaacagattgcccctaaatgagattcttgatgacaaaatatgagtctactaatttaagggataccttgatgcagtcgctcatgcaatcaatgattgagcagatttgaggggatactatgcatggtcattattagacaatttagagtgatctcaatgctataccaagcgctttgttttggattat

SEQ ID NO: 19698 - DNA, 433 bp, Gossypium hirsutum
  Clone ID: LIB3146-019-Q1-K1-F11
gaaagaaagatttgggacgcatacaatttttttgcgcaaacatttaagacagcgatgggagcagcttgcatgcttctaccaattgatgacattgtaagtgggattaagaagatgcaggctcctggagctggccatggtccaacaaaacccaaggtcgtgactgaagcacatgcggatggtgagcaaattcttcctgatgaagatactgaatcacttaaacacacccttcgctttcaaactgtttgatgagaagatgggtctgttttgttaaaaatagaaaaagggatttgttgaacatattattgcttgtatttttgagaattttaatctgtggttggtgtgagcttttaagtcattatctttttactatgtcattctaataaaccttcaattccttaaatgcgtgaagttactaaaatagttattttaaagt

SEQ ID NO: 19699 - DNA, 433 bp, Gossypium hirsutum
  Clone ID: LIB3146-019-Q1-K1-F12
ccaagttgcttgagaagttgcattggctttgttacaaatatttcctaagaggtccaggggggaatgacattcataagacaaatgttccaaacatgatgattgcctttcgacatgagacatggatagatgatatgcagcatctttactcagggagagcaagaattccagaagaaatatatcctgcgatgtaactgaatgtaatacgtgaatcatgaaatttcaggtagtgggaagatgatgcgaagatttggagagctacgggttgaatgaggctggctagctattctttgaagcttaaccttattagtggcggaagggatttttacccttagctattttcttacagattggaaatcattcaattcttgctgcaatcattattgatactaatatatatagtgaattaactatgttatatatatttctttcaata

SEQ ID NO: 19700 - DNA, 398 bp, Gossypium hirsutum
  Clone ID: LIB3146-019-Q1-K1-F2
cccacgcgtcccccacgcgtccgcccacgcgtccgcccacgcgtccgctaaattctctccttatttggtttcttggaaaattttctgatcaagaatggcgcaccttagcatcatcagcgcgttcttgtacgtttgctttgcagtggcgcttctctcatcgagtgttgtgacggcgctagatactgaactggcaccgtcaccttctccgtcgccattgattgaaactggagctgggtctttcctccgagcctcatgcttcgtcctcttctcttcattgatcttctcagttctttcttttcttccggattaaatattcttgacattttattgtcaaaattgaaaacctttggggtttgattgaaaaagtggtgtgctgatgtaattttaatttctttttc

SEQ ID NO: 19701 - DNA, 88 bp, Gossypium hirsutum
  unsure (1)..(88): unsure at all n locations; Clone ID: LIB3146-019-Q1-K1-F3
acccngccggtaaattctttccttcggggcacggcggaaataacctctgcttaaaaatttaacaccacaacgcaccttcggagttttg

SEQ ID NO: 19702 - DNA, 237 bp, Gossypium hirsutum
  Clone ID: LIB3146-019-Q1-K1-F4
atcgtggggtcatgagatttattcatggttctcgcttaaggtcttctctgacatctccgtggagatttctaagagctaaagctgctggtcaagaaccttttttaaaagaactttctgtcgctactggcatgaaaccttctgttctgattggggctgaggatcgtattatttatcccggggctccctttgcaactaaaaatcggtcactgccactcattggaggtggatctaccaaaa

SEQ ID NO: 19703 - DNA, 351 bp, Gossypium hirsutum
  Clone ID: LIB3146-019-Q1-K1-F7
cggaggagaaggtgttggagacggtggtggtggcggtggatgtgaagagaatctagcggggaacgtcgaacaaaacggcgggtttttgactcaacaagaagttttacagccgttgctggaaccgggaacggaaacgcaaacgcaagctctattcacttctttgcttatgatgcaaacgcaagagagtgagcgcatcgttaatggaggaaatgtggtattaaacggtaatccgtacaatcaaacttctcaggtactttcctttatttcattaaaaaaaaattcaatgttacttggctttagaaaattgtattaacaataaattggttagaattgattacaaatttgggattt

SEQ ID NO: 19704 - DNA, 451 bp, Gossypium hirsutum
  unsure (1)..(451): unsure at all n locations; Clone ID: LIB3146-019-Q1-K1-F9
gagaatcgttgaatgggaagggggtgaaaagattggtgaaaaggcagcttcagaatggctttacattgtcccttggggcctccggaaggttctcaattatatagcgcgaaaatacaataatcccccaatatacatcaccgagaatgggatggatgatgaagaggacaacagtttgcccctcaatgagattcttgatgacaaattaagagttcactactttaagggataccttgctgcagtcgctcaggcaatcaaggatggagcagatgtgaggggatactttgcatggtcattattagacaattttgagtgggctcaaggctataccaagcgctttggtttggtttatgtagattacaagaacggtctcactcggcatcccaaatcttcagcatattggttctcacggttcttgaaaggcggtgaaaagaaaaatgngcaggaaaactaa

SEQ ID NO: 19705 - DNA, 405 bp, Gossypium hirsutum
  unsure (1)..(405): unsure at all n locations; Clone ID: LIB3146-019-Q1-K1-G1
agcagtccgctgatagcagcagaaaaatgaaacatagtttctttaggagtttcactagatcccttgagtagccgacagttcatgccttagtgccaaatgctctcgattatcgacaaatgacgagcatcaatctcggtgaggttccggcgagaaaaaaggtacaatctggagagcgagacgtacgtgtggggagagccgatgcattcacaagtgaaggagtctggctagagctgcggcgcaaaatcgctccagaaaccctaagggtttctggatgcttcaagaaaatgggccacttcgagttgggctatggtttgggtctggtgttgagctattcgggtttggaaatgtatttaggtaaataatngngcctgctgtgtaataaaactgacattattttttatttta

SEQ ID NO: 19706 - DNA, 427 bp, Gossypium hirsutum
  Clone ID: LIB3146-019-Q1-K1-G2
atcattcgccggtaaagcagtgaagttctccccttccacccctgaaatccggggaactggccgtgtttccatgaggaaaaccaccaagcctgttccttctggtagcccatggtacggtcctgaccgagttttgtacttgggtccactttccggtgagccaccatcttacttgaccggtgagttccctggtgactatggttgggacactgctggactctcagctgatcccgaaacctttgctaggaaccgtgagctcgaagtcattcactgcagatgggccatgttgggagctcttgggtgtgttttccctgagctgttggctaggaacggtgtcaagttcagtgaatctgtatggatcaaggccgggtctcaaatcttcagtgaaggtggacttgactacttggtaacccaagcttgatccatgctc

SEQ ID NO: 19707 - DNA, 308 bp, Gossypium hirsutum
  Clone ID: LIB3146-019-Q1-K1-G3
cccacgcgtccgggaaaatgtcttaccgatttctaagccgtaagacattttcccttctgttcggtctcccttcctctctgttcatctctgtccatcgtcccttctcttcgttggcttcaccaagtaaatctctgcctcgtcatctccgtcggtcgaccgaccgtcgtccttacctctgtattttgaagaaacttagcaaccacagtcgagaaaagaagacccagaataggaagctagttggattcctgatcaatggggtcatactcgatgtagagccttaaattgttctgcagacaacgcgacaaatc

SEQ ID NO: 19708 - DNA, 407 bp, Gossypium hirsutum
  Clone ID: LIB3146-019-Q1-K1-G4
ctcaaggagctgcagaatttggagcagcagcttgatactgctcttaaacttattcgttcaaaaaaaaaccaactcatgtatgagtcaatatcagagcttcagagaaaggagaaggcaatacaggagcaaaacaccatgcttgcaaagcagatcaaagagagggagaagacagtggcgcagcaacagcagcagcagccgctgtgggggcagcaagaccatggcctcaacacatcatcctttctgctgccacagcctcctccctgcttgaatatcggtggcacataccaggaagaagcaacagaaatgaggaggaatgaactagaccttactctggaacctatttactcatgccacttgggatgctttgctgcatgaaaatgggtacaattaatttaactatgcttttg

SEQ ID NO: 19709 - DNA, 345 bp, Gossypium hirsutum
  Clone ID: LIB3146-019-Q1-K1-G7
cgcgtacgcaagaactgattccatgctatgaacaagaatgatatcatgtgcagtttcccggaggtggtatggagttgggattttccccatgttgattcagaaaagaagattgagaaacaaaaggagcttgtttctcctctaatgttcagcaacaggtgtggtgttctggaatgatgtgtaatcttcccctgaaggtagtaaattttgtggatttgtgtgcatttatgttatctatatgatttctgttttaaaactgagtttatcgcgattaatcaatgttcattgtaattttttaggttgtgattggaatttaaagcatgctcaaatgaatcttcactaataaat

SEQ ID NO: 19710 - DNA, 149 bp, Gossypium hirsutum
  Clone ID: LIB3146-019-Q1-K1-G8
cgctatgagccccgtttttttaagcttctcattacacattgcttccgacatcataccggcaaaacatgacatctattgagcctcgcacttttttttctgtctccgatggcgacggcgctacaagagcttcacggcctgctttcaaagca

SEQ ID NO: 19711 - DNA, 346 bp, Gossypium hirsutum
  Clone ID: LIB3146-019-Q1-K1-G9
cccatcatccggttaggcttgtactttcttttgagcttgcgaaacacgcctttcggggggaccaaggccgtaccaagtttacttattcttgaaaaatgtgatttgtggtttgtgttaaggttttattttaacagtcaatcgcgttgtttttctgtaccgttgagaatcattctgctcttctgttatatgattccgtgtgtattttgaaaataaaaaattatattttttaatttaattacataaaaaatttatatttttttatattatataaataatttttgttttttttatatattccatatcttttcttattttttgtatataatatggcgtcttgtttttttta

SEQ ID NO: 19712 - DNA, 329 bp, Gossypium hirsutum
  unsure (1)..(329): unsure at all n locations; Clone ID: LIB3146-019-Q1-K1-H1
caagaactgattccatgctatgaacaagaatgatatcatgtgcagtttcccggaggtggtatggagttgggattttccccatgttgattcagaaaagaagattgagaaacaaaaggagcttgtttctcctctaatgttcagcaacaggtgttgtgttctggaatgatgtgtaatcttcccctgaaggtagtagattttgtggatttgtgttcatttatgttatctatatgatttctgttttaaaactgagtttatcgcgattaatcaatgttcattgtaattttttaggttgtgattggaattangcaatgctgaaatgaatcttcnct

SEQ ID NO: 19713 - DNA, 439 bp, Gossypium hirsutum
  Clone ID: LIB3146-019-Q1-K1-H10
ctattcccaatcctgaatacaagggcccatggaagccaaagaaaatcaagaaccccaactacaagggcaagtggaaggcaccaatgattgacaaccctgatttcaaggatgatccggatctctatgttttccccagcttgaagtatgttggtattgagttgtggcaggtgaaatcaggaacaatgtttgataacatcttagttgctgatgatgtagagtatgccaagaaactagctgaagaaacatggggcaagcagaaggatgctgagaaggcagcatttgaggaggaagagaagaagaaagaggaagaggaatcgaaggatgagccagtggattccgatgctgaggacgacgacgatgatactgatgatggtgaaggaagtgagtcagaatcaagcaaagacagtgctgaggaagatgcagtacaacatgatgagct

SEQ ID NO: 19714 - DNA, 413 bp, Gossypium hirsutum
  Clone ID: LIB3146-019-Q1-K1-H2
tgctatcagccccgttttcttaggtttcgcataacacattgctaccgccatcaagccctcaagccatgaagtcgatttagcctcgaacttctttctctaactccgatttcaacgaagcaaagaaagattcatggcaactttacaaagtaagattccttctttcactcttctttatattttgaaatataatactgaaatattgaaaaagaaaatgcaatgattctaaaaaaagaaattaaaagcgagtaaaaaaactggaaatcacctttctattcttactttcgaaatattcaatgtgctaatgtaagtgtatattctgtggatgggtctgtgtaatccttttgcaggtacagaatgaggcttttatagcctggatttacagagaaaataagtaaaaagaaaaaatatttttc

SEQ ID NO: 19715 - DNA, 260 bp, Gossypium hirsutum
  Clone ID: LIB3146-019-Q1-K1-H4
agactatgggcaccaagaagctggttccaaatttggaaaagacccaagatcctatgaggttttgactaaaaggtttataggagatgataatggaaatgtgaaaggactttaagtggttcgtatgcgttgggagaaggatgccagtgggaggatccaattctaggatgttgagggcttataggaaattatcgctgctgtacttgtcctgctaaccctgtggttccttggacacaaatctacactgtgggaaaaatttggtg

SEQ ID NO: 19716 - DNA, 329 bp, Gossypium hirsutum
  unsure (1)..(329): unsure at all n locations; Clone ID: LIB3146-019-Q1-K1-H5
cggacgcgtgggtttattcagatgctttgttctgcgttctcaaaaacaaatgtaagaacacagaattgccctaaaatctaatcctctactcaacagctcccaccatgaaaaggaacaaaactaacaaacacacaacacattgcatgccattgccttctccactaagcttcagattctaaaggtatgaattgcagtgtgaagttaggtttttctgtttgttttgacattaaccaacatgcttgcttgatcttccatttgagttaaaaatcgaggttcacttctgaattcaaactcgaattaaaattgactgtncnaaaatcattcctntt

SEQ ID NO: 19717 - DNA, 392 bp, Gossypium hirsutum
  Clone ID: LIB3146-019-Q1-K1-H6
cccacgcgtccgtgaaatttgaaaagaagagaaaaaatgcataatccaccaccaccagacccgcaccatcctcaccatccccaccacccacattcggaaccccatgctccggctccaggtccgccacatgctgatcatcctcctccaggccatgctcctcctcctggaccaggcccccatgcgccaccgccaggaccaggtggtccaggtcatcatcccgagccacacaagcctcgtgcatgatccttataccgtgtatccaatattatgtacgcttaggctccgtaccgtacttgtataactctatcacctacttggtgggaggctttatgtaataaatcatgaaaacctattgctactagaataatgaataaagcagcacgtttggatgt

SEQ ID NO: 19718 - DNA, 440 bp, Gossypium hirsutum
  Clone ID: LIB3146-019-Q1-K1-H9
agcagaagtatcccgaggctgtgaagcattatacggaatcattgagaagaaatccgaaagatccaaaggcatacagcaacagagccgcatgctacacaaaattgggtgcattgcccgaggggctaaaagatgctgaaaagtgcattgagcttgacccaaccttttccaaaggttacacaagaaaaggtgctgttcagttcttcatgaaagagtatgacaaagctttagaaacataccaggaagggttgaaacacgatgccaataaccaggagctgctcgatggtgttcgaagatgcgtagaacagatcaacaaagccaatcgaggtgatttgagccccgaagaactgaaggaaagacaggctaaggcaatgcatgatccagaaattaaaacattctctcatatcctgtaatgagacaagatttgaatgattttcaggaaa

SEQ ID NO: 19719 - DNA, 426 bp, Gossypium hirsutum
  Clone ID: LIB3146-020-Q1-K1-A1
cccacgcgtccgaaaggcttgatgaagaaggtgctgcaattgctgaggcggttgcattgcatgtcctacttggtgaagacactgatgatgttggcaatttcgatctatttatcaatggaggaagtggtcctagccttccccatcaagttcattcaaaaggtttggtcactaatgcatcatatcgagctggatgtgagtgggcaatgttcggaaacagtgactggtctttctcatgtggagactacggaagggatctgattgaaccatgttttgaggatagtgtttggggaactgcaggactttcagctggtcttatcgccgcgcaagctgtttcggcacttcggattacagagaatgcagaagtaaacacggtcgtcctcaacgggatgttgagaggctagacaagcgtgtttgttgctacatcaa

SEQ ID NO: 19720 - DNA, 429 bp, Gossypium hirsutum
  unsure (1)..(429): unsure at all n locations; Clone ID: LIB3146-020-Q1-K1-A10
caccaaacaaaggaatcctgcctttctttgtaggagcaatggaaaaaaatgacaatcggaacacacctcaagataaggtaaccaaaaagcaagaggaagacgatgtatctgcctccctttccctttccctttctttcccttttccagagatggagcggaatgtaaaacccgttcctaaaccagagcagcagttgcctgaaagacatcctgtgaatacatcgctgctactattccggggcttccctgaaaaataaggctcctgatgaggaggatcctaagttgttaatgccattacagtttcctactacatgaatgtggtaataatgtatactactatggccttgcattggggtttgtaggaaaatccacattcccatctgttcataacccatacagaacttagcaattaacntctcatttgtttttttt

SEQ ID NO: 19721 - DNA, 425 bp, Gossypium hirsutum
  Clone ID: LIB3146-020-Q1-K1-A11
ggcagcaacgtgggtgacggaacggaaaatagattaggatcttggttaatgctgacatgtttccaaacttccgttatttcttcttcgatgtttttaactgcaatggcggcgaatccattaagtgctaatttagctttcaataccattaaacagcagatcgggtggatggattgggctaaggcggcattcgtgccgggtttagtttcgttgcttgttgtgccattgattttgtatgttatttatccaccaacggtgaaaactagtcccgacgcgccaaagcttgctagggagaaactggagaagatggggccgatgtccaagaatgagattatcatggctgggactctatttctaacggtggggctctggatttttggaggggcgttaaatgtggatgctgttactgctgccattcttgggttatc

SEQ ID NO: 19722 - DNA, 341 bp, Gossypium hirsutum
  Clone ID: LIB3146-020-Q1-K1-A2
gaggagaagaaacaagcaaagttgctaaaaagtaattgtaaccttaacaatgcagcttgcaaattgaagcacaaagattacaagcaggctgcaaaactgtgtactaaggtattggagcttgatagcgggaatgtgaaagcactctacaggagggctcaagcatatattcaacttgttgacttggatttggcggaggctgatatcaaaaaggccttggagatcgaccctgataacagggatgtgaaattggagtaccgagtcttaaaagagaaaatcaaggagtgcaacaagagggatgcgcaattttacggcaacatattcgcaaaaatgaacaagtcagc

SEQ ID NO: 19723 - DNA, 431 bp, Gossypium hirsutum
  Clone ID: LIB3146-020-Q1-K1-A3
cggacgcgtggaaagaaatcaggctggtcaacagtgttactaccagcaaagggtggtcaagctctaaatctcaacttcgatgataccaaaaaccatgttcaacctcaattcaatcccacttttgcattaaactatgatgctttggtagcaagaagaaatgcactggtgacaccagccagaagaaattattgaccagatgggagcttaaacttgcctcaagaatggacttactgaaaatttaatccaaattttgtccaaattttctctcaaaatagtggttattttgatggaaaaagatagtagggtagtagcttttatgataggggatatgggattttgggttatatatatatatatatatatataaagaagaattccagaatgtgagtgtagtttagaaattaattaaattaaattgtgtttttaaggtt

SEQ ID NO: 19724 - DNA, 127 bp, Gossypium hirsutum
  Clone ID: LIB3146-020-Q1-K1-A4
ttttgcagatagattcttttgctccttggagttcatgtaatcattaaaagaaaaacgtataggtctcaatgtaggaacattagccttgatccaagttaggccttgaacaagaaaaaatttagaccct

SEQ ID NO: 19725 - DNA, 424 bp, Gossypium hirsutum
  Clone ID: LIB3146-020-Q1-K1-A5
cccacgcgtacgcggacgcgtgggcggacgcgtgggcggcgccattggagttgttgagtccgataacttgagactcagatgtcgaatagcaccttcggcttacataccttcgttatccgtcagtggcagcaacggtgcagcctatgccgtggtcatagcagctcacccatcggaaccaaaccagattgctctcgggatgagtgatggagcagttcacgtaatcgaaccctctcaagataatggatcccataatccatcaaattcatctaatccttcattaactgttaaacaaccaacagagttaccttctaggtgaatattattaatgtagatacaaaaaaaaaaaaactccttttacttttggaatcaatttgccttaaaaccactccccaatgttatgtaatattcattggaattttctttt

SEQ ID NO: 19726 - DNA, 440 bp, Gossypium hirsutum
  Clone ID: LIB3146-020-Q1-K1-A6
cggacgcgtgggcggacgcgtgggaaagtttccggtactgagggttggggttgtgttattgttatgtaatccaaggccccttacaaaagtctgccatacaaatgcaggcagatctggaagcagtttggagtaaaatattgattgaaacgtacgagctagcagaagaatgctgaggaatcggctatcttggttgatcatggagataaagaaaatccacaagaaactaatgatcgtgacacagccagtttcgatgaggaattgcaaaaagatggagcaaagcaggaaagtattgaagaaccagcagcttctgtgctagacaaaaagattgtaggaagtaagttagatgagccgcaagtggaagagatggaggagagaacaccggacgactaagcttttcggctccagcgccaaccctatgcgtaataagtgctgggtttttg

SEQ ID NO: 19727 - DNA, 420 bp, Gossypium hirsutum
  Clone ID: LIB3146-020-Q1-K1-A7
ctcgaagataagcatttttcatcactgggtcacagtgatgatgctattctaccagaaacacaggcaaacggccaccagaaatgtgatgtgactgagagtgttgatgaacttgctcctgactttgaagaggacctaaaaaatgtaggtggttcttcccaaggtgcggaagaatcaaccatctcaccaactgcctgggtagaaatagaagagcatcagaaactgcctgaccaatgtgaagaccaaacgggtgaaattacctcttcaacttgcactgcacctgttggatcggctagtcctcgtgtccgtcactctctgtcacagatgctgcaagaagaaagtagtgaagctgatactactgaatggggaaatgctgaaaatcctcctgcaatggtctaccaaaaggatgcacccaagggattg

SEQ ID NO: 19728 - DNA, 433 bp, Gossypium hirsutum
  Clone ID: LIB3146-020-Q1-K1-A8
taaaggcttgtttcgtgaattggagatgagttgcttcatgaagctaagatggagatgagttcttcatgaagctgtcagatcaatggggtgtgtttttgtttgatggggacttggggtctagcattgactgcctgagttttcttttttggagtttgttccccttgttttggtgtttgagtttgttgcatctttttggagtcataagtttatcgaataatattcatttacattatttttgtaacgaccatgttttgactcgaaattaggtacagtgatggatcgggtttggaattagtggagaattttttaaatagaacaaataggcactttgagtatgaaattagaaagtttgtcgacccgataggaaattagaaaatactccttaaataggaaaactttaaataaaagcattgactaaattgaaagagtaaaa

SEQ ID NO: 19729 - DNA, 229 bp, Gossypium hirsutum
  Clone ID: LIB3146-020-Q1-K1-A9
atcattttctcctgttctagaccatcaagaagtttggctgaaattttataggattcgcatagaagcggttctcttgaagtccaatgttcttagtgaagtccagaggtcattgatagatggtggaatgcgtgttgaggatttgccagttggtccattgcctcgatctggatcatctcctcatcttggccagcaaacacttacatcataatctcctggaaggcctagggaa

SEQ ID NO: 19730 - DNA, 374 bp, Gossypium hirsutum
  unsure (1)..(374): unsure at all n locations; Clone ID: LIB3146-020-Q1-K1-B10
gtacctgaagacgtgggtgctatcttcatcggaatgtgacatcggggacaacgagcttgtactacaacttttttattctttagattagctagagttggaatataattccaataaattctacaacatgtaattttaatttttggagggatctgtaaattccataattttctatagaagtttctaatctcagtctgtataaaattattactaggacctgaattagtctcttggaataatttataagcacttgggactggatactcttctaacgggtctcctcttcattnnaaaaaaaaaaaaaataaatataagaatataaataaacaataattaaaaaataaaaaaatatcaaaaattgcaaaaatgtccaaaaa

SEQ ID NO: 19731 - DNA, 281 bp, Gossypium hirsutum
  unsure (1)..(281): unsure at all n locations; Clone ID: LIB3146-020-Q1-K1-B11
cctttttttttttttttttttataaaattnnnncnnaaggagatttaaaaaaaaaaaataaattttatatctacgcatttttccagttacatttattatcaaagtcaactaacaaaccctttatcatgtcattatacacataatcttttctatttatctttgcacattttctcaacctgaccacactccaatctctatttccttcctcacccgctgatcatattcttccagaaccttcaactattatataaacacttacttttcataacattcacatctat

SEQ ID NO: 19732 - DNA, 394 bp, Gossypium hirsutum
  Clone ID: LIB3146-020-Q1-K1-B12
caagttgggctgaccgtcatggtgcagttctctcactgttctccttgctcaggcataacccttccaccatatttatgtctccagagtgcccgtctattttactccgtctcaaaagctccttgaaagatgagaagttcccactacgtgaaacatcaaccaaggcactggggaggcttttactctatcaagttcaaagtgacccccttaataccactgcccttttggatgttctttcatctgtgctgtcggcattgtgtgatgactccagtgaagtaaggagaaaggcattatctgctataaaagcagcttccaaagcaaatccatctgctatcatgactcatctgtcattaatcggccctgcccttgctgaatgtttaaaggacagcaacacccc

SEQ ID NO: 19733 - DNA, 309 bp, Gossypium hirsutum
  unsure (1)..(309): unsure at all n locations; Clone ID: LIB3146-020-Q1-K1-B2
caagatccgactcacaccaaaatcagctattttaaccttcttcttcgaattgatcaacagattcgagggttttatatcgcgatgaacgatgtgtctccggtgaaggtagtttaaaccattgaggatttgtcgagctagatccgataagttagattcgtgtgatatatgagtcccttctaaagatccaacatccatgaattccaataggacctgaatttcgccattttgatcgtacatttcatggcatttgacaacgttaggatgattaacatcacgggagatttcgatctttctacngatctgacgacg

SEQ ID NO: 19734 - DNA, 438 bp, Gossypium hirsutum
  Clone ID: LIB3146-020-Q1-K1-B3
gttacaaaaccactatcccgaaaggttggcgatggcggttctatacaatccgccaagaattttcgaagcattttggaaggtatgaaattctaatgcattgtaaaacaacatttctgaattcttgagtgttgaatgtcacttaaatggagataacatcagtgcatttacaccagcattatcacctgttatggtcaattgggcaactcgggttttttttagtaggtattagattttcgggctcagataatttaaggtttaggtttgatactaagagttcaaatcattttaagttaagtctcatttcaaatatttggagtattttttaattggttaaaatgtcataagtttttgtactattcaaaaattcagaattttatttcggtatttttattttcaagaatttagtccctttacattttagatttaaaaaaatgggtt

SEQ ID NO: 19735 - DNA, 433 bp, Gossypium hirsutum
  Clone ID: LIB3146-020-Q1-K1-B4
cccacgcgtccgaaggatttaatctccaaaccttcttcccatttcttcattacattgttcaagaaaaaagaagcaaaaaaacatggccaaagttctgttgttcattgcactatgtgtgcttccagctttggttagtgctacacgcattctgaataatcaattggtggtagaaggctatgtgtactgtgatacttgccgtgctggttttgaaacccctaagactagaagcctagctgatgccatggttaggttggtatgctccgacaggaagagcggccaagttgtcttcaaaaaggagggatacaccgacaaaaccggaaaataccagattcgtgtatccgaggatcacttggatcagatctgtgatgcagttcttgtgaagagctcccagcttggttgtgccacaatgtcccccggtcgtgaacgtgcccgt

SEQ ID NO: 19736 - DNA, 429 bp, Gossypium hirsutum
  Clone ID: LIB3146-020-Q1-K1-B5
gtggtaatacccctgttcatcatagcttctccgtcgggacaacacctcgagttagcaaggtcaccgtggaaggatcacctatgtctgttctggaaacatccccgatgggaaaaaagaagaagctcctcgaactgttccgagagagcgttagagaagaccgaaaccttacttcaaaatctgcaaatgttaccccttatcatgtctctggagctacctcactttgcagtagtgaaaggactgctaatggagatcatgataaccctatgttcaaggagaagccattaaagtctttgcaatgttgccttccaagctttgttacatgcagtagcttcaatgagaggaagaagaagatgagccctgcaatagctgtaaatgataggcctcaatatccatcaattcactagcacgtaggtcgacgaagccagattc

SEQ ID NO: 19737 - DNA, 320 bp, Gossypium hirsutum
  unsure (1)..(320): unsure at all n locations; Clone ID: LIB3146-020-Q1-K1-B6
gacgaaattgccgtgaaggaagaatgggaaggtggagtcaattcgtggttgcggtgactattctggcggtgggcctcctttcggcatcagccaccgctagaccctgcaagacattcttcgtcgcctcctattctttctcttttgaaaaccctaacgacccttcttcctccaccggattcgtcaccgtcttcaccgagatcggtcaattgaacgtcgtaccaccaagacccaagccctccgatgtcttgagctctctccgtgagcgcagtaaggacatccttagcgtggtcgtcgctcttctcttcggcgtcngtagcggc

SEQ ID NO: 19738 - DNA, 418 bp, Gossypium hirsutum
  Clone ID: LIB3146-020-Q1-K1-B7
caaacccactatcccgaaaggtattctatgtcggttctatacaatccgccaagagtttgggtatcattttggaaggtattaaattctaatgcattgtaaaacaacatttctgaattcttgagtgtcgaatgtcacttaaatggagataacatcagtgcatttacaccatcattatcacctgttatggtcaattgggcaactcgggttttttttattaagtattagattttcgggctcagataatttaaggactatgtttgatactaatagttcaaatcattttaagttaagtctcatttcaaatatctggagtattttttaattggttaaaatgtcataagttctttgtactatttaaaaattcataattttattttggtatttttattttcaagaatttagtccttttacaatttta

SEQ ID NO: 19739 - DNA, 421 bp, Gossypium hirsutum
  Clone ID: LIB3146-020-Q1-K1-B8
gtgaattaaagaaagattgtcacgatggaattgtcgttaatggcggaagcgagggccttttactctcacatgccaacagcaacaagctcattatcgataccgatcccgggattgatgatagcatggcgatctttatggcatttcaaaatccagaatatgagatcttaggtttgaccaccatatttggcaatgtccaaaccgaagatgccactcgtaatgccttacttctgtgtgaaatcgcagggcgtcctgatgttcctgtagcacaaggcagccccgagccgcttacgggtgggaggccgattgttgccgactttgttcatggctctgttggactggggaatatattcctatctcctccaaaaactagcaaatctgataaggctgcctctgaatttttagttgagaaagtttctgaata

SEQ ID NO: 19740 - DNA, 420 bp, Gossypium hirsutum
  Clone ID: LIB3146-020-Q1-K1-B9
agggaaccactgcttataaaagggaaggttgcaaaggtcatgattattgtggttcacttcctattaacctaagatttgattttttaaccaacgcaatgatacaagatataactaccaaagacagcaagcagttccaggctaatgttctaggatgcaaaaacattactttcgaacatttcaccgtatctgcacctgacgaaagcccaaacacagatgggattcacattgggagatcggatggggtcaatgttcttaactcggagataaaaactggtgatgattgtgtttcaattggggacggttccaaaaatttggttatcaatggagtaacttgtggaccaggacatggtatcagtattggtagtctcggattgtttaaaaatgaagaaccagttgatggagttacagtaaaaaattgca

SEQ ID NO: 19741 - DNA, 447 bp, Gossypium hirsutum
  unsure (1)..(447): unsure at all n locations; Clone ID: LIB3146-020-Q1-K1-C1
ggcagatgtaataatggcattggctggatcaaatggaggatcttggtcgacaacctactctactaaatctgctgtgaggacaggggaaaattatgcacccggcggagaacctgaagcagtaggaagcattgctttctcacgtgaacttcggggaaagatggctgttactgataatgcaagtcaagcaactggttccggtgaacgaatgccgatacaaacaggggttcctcaaggcacaattgttatggctagagatggaagaaacctggaagctggtactgaagataaaagagaggtataaagtttaagcaaagttttcggaatagcttcaaatccagatattacagaaattgcagatttccaacctgctatcatctctacttattaggaatagtcccatccatttcatgtctctgtcattaatgcttaaaactttntcgaattttt

SEQ ID NO: 19742 - DNA, 410 bp, Gossypium hirsutum
  Clone ID: LIB3146-020-Q1-K1-C10
cggacgcgtgggtgggtatgaagtcctagagtagaaaaaggagaagaggtgaccagctcttctcgtggcaatcctcaacacttacattagaaaactggcaagtgcctgctttcttacactgacaggacagcattaaggacatgggactcataagttttatatgcaagatgtttcaagttgtataaataggtgattatacttcaaaagtattgcggctgaagaaataggtttgtataaggatagagaagacatccatagacagaggccgattggtaaaattgaaaaagtggagtttgctattgttttggcatcatcattccccggaggctgtttttgttcacctgagatattaaatttagtgattctattttagtttggagcctcttaaggaaaatactgcgacaaaaagc

SEQ ID NO: 19743 - DNA, 430 bp, Gossypium hirsutum
  Clone ID: LIB3146-020-Q1-K1-C11
gagttcgtctcggccaagtttctcgaatttaccgcgagttagtctaatgtttcaaggagccgagatgagtgtatccggcgagaggctattatatcgggtacccgatatgaacaaagggagtgattcagtgtattgcttcacatttggcaactctgatctcctagggatcgaagcattcgtgattggtcatcatcatcaacaaaacgtgtggatggaatttgatttggtgaaatcaagggttggatttgctgagattagatgtgaacttgcaggtcaaaggcttggtattggaccctaagggccccacaaaaaagaatgtaaaaacgttgtgaaaggattttggatgggtcccacatcgtccaatctacggcccacctgttttgatggaaggtggaccattgatcggacaatgtatggtcatgattggaaa

SEQ ID NO: 19744 - DNA, 363 bp, Gossypium hirsutum
  Clone ID: LIB3146-020-Q1-K1-C12
caggattcccctagtaactgcgagcgaacttggaaaagcccagcttgagaatcggtcggcatcggcgtccgaattgtagtctgaaaaaacattcttagcgactgaccgggcccaaatcccctggaaaggggctccagataaggtgagtgccccgtcgtaccccgaccctgtcgcaccaagaggcactgtctaccaatccggttgtttgggaatgcaagcctaattgggcgggaaatttcgtccaaagcttaattctggccataaagggagcgacaagcccgcaaagaaaaaaaacttgacaaaaacataacaacatttaagcgctgacggaggcagccaacctgaaatcctacttaacaaaag

SEQ ID NO: 19745 - DNA, 412 bp, Gossypium hirsutum
  Clone ID: LIB3146-020-Q1-K1-C2
ggtggcagggatttagatgactttgtttctttcatcaacgagaaatgtgggaccagtcgtgatgcaaaagggcagttaacttcaacggctggtattttgtcaagtttggatgcattagtgaaggagtttgtggctgcttctgccgacgagaagaaagtagtcttctccaagattgaagaggaagttgagaagctcaagggttctactgcgaggcatggaaagatatacttgaaagctgctaaaagctgtttagagaaaggtgctgactaccccaagaaggaaattgagcggctgcagcgcatgcttgacaagtcaataagcccagcaaaagctgatgaattcacgctcaagaagaacatcctatcaacatttgcatcttcttagatcaatgtatttcacctcgtctagtgct

SEQ ID NO: 19746 - DNA, 401 bp, Gossypium hirsutum
  Clone ID: LIB3146-020-Q1-K1-C3
cggacgcgtgggctccaatgccaccatctattcttagccgtggtattggttggcagggagttgcaattttggtgtcgggattgtttggaactgccaatggttcctcagtttctgtagagaatgctggccttttagccttaacacgagttggcagccgaagggttgtccaaatctcagcagggtttatgattttcttctctattcttgggaaatttggagcagtctttgcttcaattccagcacctattattgctgcattgtactgcctattctttgcatatgttggtgctgggggtcttagttttcttcagttttgcaacctcaacagcttccgtacaaaatttatattaggcttctctgtttttatgggcttatctgtgccacagtacttcaatgagtat

SEQ ID NO: 19747 - DNA, 405 bp, Gossypium hirsutum
  Clone ID: LIB3146-020-Q1-K1-C4
gcagagagagagactaagggtgaaaatggcctggtgtagtttaaggtctattcacgttccaaccgtcgatgtcggattactacgcactcgctccccgttagccgctgtcggtggagtcgttgccggctcttcatttttgcgatcttcctccagaaatggctctccttttgcttgcttaagcctatccacttctcctgggattaaggaggctgtggcaactgacaaagctccagcagcattgggaccatattctcaggccatcaaggccaataatcttctctttgtctccggtgttctcggtcttattccagagactggaaagttcatctcagacagtgtagaggatcaaaccgagcaggtactgaaaaatatgggagaaatactgaaagctagtggtgctgacta

SEQ ID NO: 19748 - DNA, 444 bp, Gossypium hirsutum
  Clone ID: LIB3146-020-Q1-K1-C5
atttatacatgctattataacttatagcatgaccccactctcttgtcttgactccaccattcctaatactgacattctgcgcggatctcagacttgttggacacatgtttcactctaggttgcttgtggagcatgcggtccttcttgttcctagaattgacattctgtgtgggctctaggtctactggacacctatttcactctaggttgcttgcggtacacgtggtcccccttccacgagctccttggacaagtgcaaactaggactgtgaccttcgtttggctcgtgtgagctaaacttacgagcttgccttgtgagttgggtctgcgaaatcctcttgatgtcctctcacggttcacctcaccctatgtcatttggcgaagcctatttgggtcacgagtgggtaacctggatcctatttaggactcgggttgatgattaca

SEQ ID NO: 19749 - DNA, 442 bp, Gossypium hirsutum
  Clone ID: LIB3146-020-Q1-K1-C7
cggacgcgtgggctttcacggaaattgaggaagcaactctcaactttgatccctctctgaagattggagaagggggatatgggagtatttataaaggtaatctgcgtcataccactgtggctataaagatgttgcattctaatagcttgcaaggtccatcggaatttcaacaagaggttgatgttttgagtaagatgaggcatccaaatctggtaactctgattggtgcatgtcctgatgcttggactcttatttatgaatatcttcccaatggaagtcttgaagaccgacttagctgcagaggcaattccccccctttatcatggcaaactcgtatccgtcttgctactgagttatgttctgttctcatcttccttcattcaagtaagcctcatggcatagtgcatggtgatttgaaacctgcaaacattcttcttgatgc

SEQ ID NO: 19750 - DNA, 419 bp, Gossypium hirsutum
  Clone ID: LIB3146-020-Q1-K1-C8
ggacaacccagtgctgaaagctgagcaagatgcacagattggaaaaggctcccgtggagatgtaactatactgccaacccttgtgataaacaacagacagtatagagggaagttggacagaggagctgttctcaaggcaatttgtgcaggttttcaagagaccacagagccagcaatttgcttaactgaagatatacaaactaacgagtgcttagaaaacaatggtggttgctggcaggacaaaagtgccaacataactgcatgcagggataccttccggggaagagtgtgcgaatgcccgttagttaatggtgtgaagttttctggagatggttatacacattgtgaagcttctgcggctttacgctgtgaaatcaacaatggaggatgttggagagaaacacgggaaggaaggacat

SEQ ID NO: 19751 - DNA, 418 bp, Gossypium hirsutum
  Clone ID: LIB3146-020-Q1-K1-C9
atcatcgtcgctcgaggtaggagtagttccagatgggaactccgtgtcggatatctgatatactttgggacggaccatgggtgacccaagcgcaccaatctgggcagctacagccaataaccaagcaccaccccaggcccaagtcggtggaatggatcgagaagctagagttctaaggtacagagagaagagaaagaacagaaaatttgagaaaacaatccgctacgcttcgagaaaggcatacgccgagtcaaggccaaggatcaaaggccgtttcgccaaaagaagtgaaaccgacaacgaagttgaccacatgtataactcggcttcttccgctgctaccgcagcagctttcatgtacgataaccagtacggcatcgtcccatccttttgaggatgtcatgaatgaatctgattc

SEQ ID NO: 19752 - DNA, 426 bp, Gossypium hirsutum
  unsure (1)..(426): unsure at all n locations; Clone ID: LIB3146-020-Q1-K1-D1
cgccgctagggtttcaagggatttcttccggtgcaaagagcagcagccatggttctcaagacggagctttgccgatttagtggtgccaagatataccctgggaaaggcatcagatttgttcgtggtgattcccaggtcttcctcttttccaattcaaaatgcaagaggtacttccacaaccgcctgaagccatcaaaacttacatggacggccatgtacaggaagcaacacaagaaggacattgcccaagaagctgtgaagaagaggagacgtactgcaaagaagccatactccagatccattgtgggtgccaccttagaggttatccagaagaagaggagtgagaaacccgaagttcgtgatgcagccagggaagctgctctccgagaaatcaaggaaaggatcaagaagactaangatgaaaag

SEQ ID NO: 19753 - DNA, 392 bp, Gossypium hirsutum
  Clone ID: LIB3146-020-Q1-K1-D10
gtacagcatcaatgcaacagttgaaagaacgacttgagaaagacttgcttgaggaatctcctcaagctgctagagttaaagtactggcaagtggaaatgcaacagaaagaagattcagtgtttggataggagggagtatattggcatctcttggttcattccagcaaatgtggttctccaagtcagagtatgaagaacatggagcttcatatatacaaagaaaatgcccttaagatgaggatgacaggcttttgcatttatcctcatggttcaagatctttttcggatccgaagtatgcccatttgtgctataacaaatttcaaattgacatcgcttggaggtcaatggacgatatattcttattaaaggaaaaggcattattagcttttat

SEQ ID NO: 19754 - DNA, 403 bp, Gossypium hirsutum
  Clone ID: LIB3146-020-Q1-K1-D11
tataagaagaattggtggtatggtatgttctcttgttgcagtgggattggtgaatgagtgtcatcaaacagcagctgtagcgctatttttggtcgctatagttgtttcgatagtttgtatccaactcttcccctatgatacgaagggacgggagcttagtgatactagttgataggaagtagttaacttctaaagacaaatggctaattgggtgccatccgtaattttgtttttaagggaaataatgcggccgcttcctatttatatgaccataataaccggggaaaagaatatgacctcattctctctctctcaacaagcagggagaattctgaaacatcctcccttcacatgttgctttgtgacgacgagaggtttgtgaaggctgaatatagatcatcta

SEQ ID NO: 19755 - DNA, 415 bp, Gossypium hirsutum
  Clone ID: LIB3146-020-Q1-K1-D12
aatggctggtgttttatcttgcaaagcttataattctgcaaaatttattcagtttataggctaaaagattgagcgtataaccaggagcatacttgaaaaaaaaatgtttgatgtctttaagatttgttctcccttctgccttgtgggctgaaaactacattttgttccactccatttgtttgtaacttctactgtacattatgtatgctatcataagctgcataaaagaaaagtatgttatcgtaatcagctaaaggaactactacaagaacaacgtatttggaccatatgaattggaattggaattggaattggggaaaacggttttgctaaagaaagtcgaatcaagcaaagatattttaattattatgtaatgatgtctgtctgaattggattgattgtacttatctaagat

SEQ ID NO: 19756 - DNA, 431 bp, Gossypium hirsutum
  Clone ID: LIB3146-020-Q1-K1-D2
caatactaaatccagatgatcttcagagaaaaatacgagcgctgttggatgagtatttctacgttaggctgcttgatgaagctttgctgtgcgtggaggaactaaaatctccatcacaccaccctgaggttgtgaaagaagcgatttcaattgccttggacaaaagcccaccgtgtgtcgagccagtctggaaacttcttgaatacttgtttacaaagaaagtttttactgcaagagacattgggaccggatgcctcctctacggtgccttgctggatgacattgccattgacttaccgaaagcaccaaataattttggagaaataatcgggagactcattttggctgggggactagattttaaagtggttaaggaaatccttaagaaaatggaggatgacctatatcagaaagctgtattcgacgcagca

SEQ ID NO: 19757 - DNA, 429 bp, Gossypium hirsutum
  Clone ID: LIB3146-020-Q1-K1-D3
cccacgcgtccgcccacgcgtccgggcaaacagagttgagaaagctttgttattccttgaagagatggatgaaaaaggctttcctccttgtccggctgcatattgtagcctgatcaatagtctagggaaggcaaaacgatatgaagcagcaagtgagctatttcaggaattgaaagagaattgtgggcattcaagtgctcgggtttatgctgtgatgataaaactttttgggaagtgcggccatctgagtaaggctgttgatctattcaatgagatgaagaaactgggatgcaaccctgatgtttatacttacaatgcactgatgtcagggatgataagagcaggcatgatagatgaagctcattccttgctgagaactatggaagaaaatggttgcaccccagacttgaattctcacaatatcattct

SEQ ID NO: 19758 - DNA, 414 bp, Gossypium hirsutum
  Clone ID: LIB3146-020-Q1-K1-D4
cccacgcgtccgactttccggtgagccaccatcttacttgaccggtgagttccctggtgactatggttgggacactgctggactctcagctgatcccgagacctttgctaggaaccgtgagctcgaagtcattcactgcagatgggccatgttgggagctcttgggtgtgttttccctgagctgttggctaggaacggtgtcaagttcggtgaagctgtatggttcaaggccgggtctcaaatcttcagtgagggtggacttgactacttgggtaacccaagcttgatccatgctcaaagcattttggccatctgggcttgccaagttatcttgatgggagccgtcgagggctaccgtattgccggtggaccactcggtgaagtgactgacccattgtacccaggtggcagctt

SEQ ID NO: 19759 - DNA, 433 bp, Gossypium hirsutum
  Clone ID: LIB3146-020-Q1-K1-D5
ccttcgcgttctttcaatccgaattctatctgttcaccgtcaatcaacccaatggctcgtaccaagcaaacagcaaggaaatcaaccggtggtaaagctccacgtaagcaactggccacgaaggcggctcggaagtcggctccggcaaccggaggagtgaagaagcctcatcgttttaggcccggaactgttgctctgagagaaatcaggaagtaccagaagagcaccgagcttttgatcaggaaacttccattccaaaggttggtgagagaaatcgctcaagatttcaagactgatttgaggttccagagtagcgctgttgccgctcttcaagaagctgccgaggcttatcttgttggactgttcgaggataccaatctctgtgcaattcacgctaagagggttacaatcatgcccaaggatattcaacttg

SEQ ID NO: 19760 - DNA, 420 bp, Gossypium hirsutum
  Clone ID: LIB3146-020-Q1-K1-D6
aaaaaaaaaaaaaaacagtttccgaatcttttacagctcgtaaactcgttgaagtgactcatggcttccgccgttgcttccgttgctaagaagaaaaccgctggctccaagaagcctaaatcagctccttcacaccctccatttcttgagatgatttcagatgcaatcgtttcgttgaaagagaggacaggatcgagccaatatgcgattgcgaaattcattgaagagaagcataagcaattaccggcgaatttccgcaaagtcttacttgttcagacgaggaagtttgttgcttccggaaagctcgtaaaagtgaaagcctcttttaagctgccttcggcttatgccgcagctaagaaaccagccgccgtagctaagaaacctgccgccgcgaagcctaaatctgcaactaccactacc

SEQ ID NO: 19761 - DNA, 434 bp, Gossypium hirsutum
  Clone ID: LIB3146-020-Q1-K1-D7
cagctgttaaatcgttctccactcgagcagccaggtcctccctcaatgaccccaatcctaactactcgaaccggcccccaaaagagaccatcttgctcgacggatgtgattttgagcattggcttgttgtggtggagccgcctaaagaggatgctactagggatgatattattgatagttatatcaaaaccctagctcaagtagtgggcagtgaggacgaagcaagaatgaagatatactcagtttcaaccagacattactatgcatttggtgctttggtgtctgaagaggtctcatataagctcaaagaacttcctggagttcggtgggttcttccagattcctatctagatgtcaagaacaaggattatggaggggaacctttcattaatgggcaagctgtgccttatgacccaaaataccatgaggaatgg

SEQ ID NO: 19762 - DNA, 238 bp, Gossypium hirsutum
  Clone ID: LIB3146-020-Q1-K1-D8
cccagccaagcactaaaatcaagcaatcatgtcatgatgtcttagctcgtctggggtcattattattttttacttctgttttgaccccccacccaccccccctttaacaactcgtgtttttgatttttttaccctctcaatatcccatattaacacatacatgcatttcctcctttgccgtgctgaattccctggctccaaatcttttatatttttttctatcaagtctctttcttaa

SEQ ID NO: 19763 - DNA, 386 bp, Gossypium hirsutum
  Clone ID: LIB3146-020-Q1-K1-D9
gaaaaaaacccagacagtcagacaaagtttatctcgtattgttcaaccaagatgatggggtatatggtaaactggagctggacctccacattcgtctggacttcgtcctccacagtggtggctactcttttcagtacaggaccaaataacccaactttccacttaccttcaatcaaacttactgattttaagcttaaccttcctcacgtggacactgagttaattcctaacgtgcacgctactatcatcatcatcgtacacatccattaccgctacaccgccatgtttattttttacgaaagcaccttgcttatagcggctcaagtgaaatgcctgtcacaacgtgctcggtcttgtcaagtactaaagcttccgactcggcttga

SEQ ID NO: 19764 - DNA, 431 bp, Gossypium hirsutum
  Clone ID: LIB3146-020-Q1-K1-E1
cggacgcgtgggaagaaaacaagctggttaacagtgttactaccagccaagggtggtcgagctcttaaacttaacttcgatgattccaaaaaccatgttcaacctcaattgaaatccacttttgcattaaactatgatggtttggttgcaagaagaaatgccctggtggcaccagccagaagaaattattgacccgatgggagctttaacttgccttaagaatgggcttactggaaatttaatcccaattttggcccaattttctcttaaaataatgtttattttgatggaaaaagatagtagggtggttgcttttatgtaagggcatatgggagtttgggtcatatatctatctatatgtatataaagaagaattccagaatgtgagtggtgtttatgaattaattaaactaaattgtcttttttaaggt

SEQ ID NO: 19765 - DNA, 340 bp, Gossypium hirsutum
  unsure (1)..(340): unsure at all n locations; Clone ID: LIB3146-020-Q1-K1-E10
gagttntctactggagctattcagaattttttagatgcccaaacactctgtaaagtaggactggtccacaatagttggtcaatattctctgtgactgccttgcaaaggggacaaacaacactatcccgcaaggttctttgattcagatttcagtcattaggcaagaaaatattgagtaattccagacctgtctttcaactgattgctgccatgcgcataccctataataacctataataattcttgaaaccgacatcgccttgactgatatacttactgcttaccaaatgctctattattaaaggcacccgaccacattcttctccgtttcagcaataac

SEQ ID NO: 19766 - DNA, 328 bp, Gossypium hirsutum
  Clone ID: LIB3146-020-Q1-K1-E11
tgccccggcttttaaagcaagaatagatgcttatagcctcaaaagaattgctatcacaatgagtgaaaagattgtaaatgagttcaagagttgaataaaaaaacttcgcttggtcgaggctgaagaaatgcgttaacaaaagtttgaagagtttcaagctctataaagagcttacagggaatgctatgggatgaagacaagaatggaagctgatattaaagatcttctgttgaaaatggaagccacaaagcgaaaccttgccatgtgatgtgctaaatagaatggttctttgctttcaattagaattagtattgtaagtaatgtcatc

SEQ ID NO: 19767 - DNA, 272 bp, Gossypium hirsutum
  Clone ID: LIB3146-020-Q1-K1-E12
agcagactcatagacggacttcgtagagacgagtattcttaaatcaacccagagatttccaggtcgagatacctagtcagtcagttcctaccattaccttttatagagttaaattaatacatttatgtatcactcttttaagtcttataacattgattttaactattatattgcatatcacattacataaactaattggtctaaattgactaattctttaagaattaaaaatttttttatataaccacaatttttatactatttatttaata

SEQ ID NO: 19768 - DNA, 423 bp, Gossypium hirsutum
  Clone ID: LIB3146-020-Q1-K1-E2
cccacgcgtccgcgatggacaatggaggtatgcccctgacttgccatgggctcaagacggcacgggcaatgctaacaacattttggacttgcaggattatgttccggaagatattgaaagtatatctagtttcgaacctccgctgtcccccgagtcaagttacagtaatttgccgcttggagccgaagatttcgctaaggagccaccactcgtccctcctcacctacaacttcctctccttaatctacctgcatctcacatggagatcccgccacctctgtcgagaccaaagcacgtaatcctcaaccatctgtacattcaaaaggggaaaaatggccaacccgtggtggcactcggttcgactcatcggtttcgagccaagtatgtgactgtggtgctgtacaaacccgtgcagcggtagta

SEQ ID NO: 19769 - DNA, 421 bp, Gossypium hirsutum
  unsure (1)..(421): unsure at all n locations; Clone ID: LIB3146-020-Q1-K1-E3
ccggaggaaacaacgaaagtgacacgtacgattatgatcgtaaaatcgccgcgttaccagagcggatcgcctccggtttcgccggccgaatcgactcctccggaggaagcagagagtcgtatcggcttcggagaaggtcaacatcagatgcatacgagaaggggaaggagggtggaggtaggagccttgctcctccttacgacgtgtgagatgtgaacctctcctctcctctctgctgatcccccaattcgccgacaagtcaatattaatttgcatagtttctacgtttatacagctgaactttataatgttaattagagtttgcccactttgttttttttgcatgcatgtatgtatgtatttatgtgtacttgtttttgcaatgtaactacttttatcatcatggnatattatatataat

SEQ ID NO: 19770 - DNA, 419 bp, Gossypium hirsutum
  unsure (1)..(419): unsure at all n locations; Clone ID: LIB3146-020-Q1-K1-E4
cccacgcgtccgtgggacgccaaaaccgtacacctaccattgttgttgtatggtcaattctgcttgcctccattttctctttgttgtgggtgcggatcgatcccttcacaaccagagttaccgggccggatgtagaacagtgtggaataaactgttgagagagaacctataaagactgaagatttgttttggtgtcactaagcttccaatgccaaaggtttgtttagttgtaatttgtgtatttcagttcacatcatgtgcagaatatacggttgatatatatatgtcatcttgtttctactttgatgtaaatatttggngnngnnacataactttatttatttgtgctaaatattaagaaaacactactttgtaaattaaatattattattttgtttttatcttactatatttttttt

SEQ ID NO: 19771 - DNA, 438 bp, Gossypium hirsutum
  Clone ID: LIB3146-020-Q1-K1-E5
gtcttctctggttgacaccagcattggatttccttgtagaattgatccgcagggtacgggcacattcatattggactatgaccgaatcttgtacagacttctatggcaaaaccctgaaaaagtttcatggctggattgctagttccgatttcactgctgcattgaagttggctccagattggaagaagttcatggaagtgatagctggcaccggagatgttaatgctgacatggagaaattttgttcgactatccctccatttcttgaggagaatcacaaatatctggccaagttttgcttggatgatataaaagcatgatgtaacaagtttattgagtataggagagactaccttcctatatttttactcccgtgtttgaacttccaatatcttgcttccggctaaaccttccttttacttgaataattaatacttt

SEQ ID NO: 19772 - DNA, 416 bp, Gossypium hirsutum
  unsure (1)..(416): unsure at all n locations; Clone ID: LIB3146-020-Q1-K1-E6
cccacgcgtccggcacattcaagcctctcgttttctggccttactggagagagtggcgctggtgattatcaagattgtggggcttcatcaatgctcctcatgggagagcctccctggtgtcctccatgtactgagagctcgatcccatcagcaactcgaagtgatgctgtcatgcgttacaaggaaaagaagaagacacggaagtttgaaaagcgagtgagatatgcctcgcgcaaagcaagggctgatgtgagaaagcgagtgaagggacgctttgtcaaagctggtgatgcctatgattatgatccgttgaatcaaaccagaagctgctgagagtacaaaatnttttaaccatgcttacaaaaaggaaagaaacacatgaatgttagtttgaaagaatttattattctttgcct

SEQ ID NO: 19773 - DNA, 425 bp, Gossypium hirsutum
  Clone ID: LIB3146-020-Q1-K1-E7
cccacgcgtccgttttgaatgttccgaggatgatttcaaacaatttcaaaatggatttgatgcatcaccagtatctgatgcaaaggtggagtctaaaagacaaaagagatgagtaaaccatgggaaagtttattgttgcatgagagaagactcattacgcagatttagcttgtggctggttagtaacttatgtgtaggagacatcatttgtatctgtgttaggtttaggagattaatgtctgtgcaggaggatcaattgtctgtagttctctgatgttgaaccgatattttcgggtaactcatcttattgacttattgattatgctttgccatcttacttgggaagaagtgcaaaaactctgttgagaactcaagaaaagcatttttccagagtttatgagattgtgattaagaaaagttagtgc

SEQ ID NO: 19774 - DNA, 420 bp, Gossypium hirsutum
  Clone ID: LIB3146-020-Q1-K1-E8
caatgacttacatggctgcattattgattttggattgactcctttaatgacttggcgaggggtttcgtctagatgtgcacgattcctagcaccctgtgtgatcgaatctcgaaagattactcaaaagtctgatgtctacagttactgtgtacttctcctatagatgctgacaggcaaagcaacaacccaatcatcatggcatgaagacgtggtctaccttccaaggtgggtgcagactgttgttagagaggaaaggactgttgatgtatttgatgtagagctgatgaaatatcaaaatattgaagaagagttgttgcagatgctccatatagcaatgacttgagtggcaaggctttcggacatgagacctacaatggaagaagtatctcggatgattgaagaaatttgacctttttgttt

SEQ ID NO: 19775 - DNA, 369 bp, Gossypium hirsutum
  Clone ID: LIB3146-020-Q1-K1-E9
cgctgagtttaagcatatcaataagcggtaggaaaagaaacttaccaggattcccctagtaacggcggatctcgttactcaaaaagcggcggtgcatctgatggcagctggaggtcttaagtttaggtttcaaagtgggcttgggcctatattgctatgggtttggttagggtttagtagttagcaattataagtgtctctattactggttggtttagattctctattctttgatcgattttgatactgttctcttaaaatcacattgatggtgttgagagttatgcttttctttttggaatgtatggacctttagcttatcgggagccaggaagagcattccttcatgctgccgtttaaaatctgacg

SEQ ID NO: 19776 - DNA, 450 bp, Gossypium hirsutum
  Clone ID: LIB3146-020-Q1-K1-F1
cccacgcgtccgattgacaacgtcaaggccaagatccaagacaaggaaggcatcccaccagaccagcaaaggctcatctttgccgggaaacaactcgaggacggtcgcaccttggccgattacaacatccagaaggagtcgaccctccatttggtattgaggcttcgtggtgggatgcagattttcgtcaagacgttgactgggaaaaccataactttggaggtggagagttccgatacgatcgacaatgttaaggcgaagattcaggacaaagaagggattccaccagatcagcaaaggttgattttcgctgggaaacagttggaagatggaaggactttggctgattacaatattcagaaggaatccactctccaccttgtcttgcgtcttcgtggtggtttctaagctctcctatgaaaatgagggttctggattttatgtgaatga

SEQ ID NO: 19777 - DNA, 423 bp, Gossypium hirsutum
  Clone ID: LIB3146-020-Q1-K1-F10
ccagttttcacagcaatcttcactccattagctctagtcataacagcaatcttctctggattcttgtggaaggaaacccttcactggggaagtgttgccggggttgtcctactggttggtggtctttacagtgtgttgtggggtaagaagaaagaagatgagaaaatggttagaaatgaacaaaatcccggtactaataaagaagaaattgtactggagtgcattacacatcagtgattgatgggactcaaatattagctataatggcttttggttttggccattttgatgctcacattttccacagtgtgaacctcttcaaggaagacaacaccagcttagatttcatcctttttttctcttcttttctttttttgcagcttgtgttattagctagtttgctgtctttggtctaacttggta

SEQ ID NO: 19778 - DNA, 396 bp, Gossypium hirsutum
  unsure (1)..(396): unsure at all n locations; Clone ID: LIB3146-020-Q1-K1-F11
aaccactctttcgcaattattnttctagttaattgatatttttttcatcaaaagttcaagaaggctatagagagttttttaacatacctgattcatctgtagttgcggaaactgcaaagcggaaatccccaagctcatctaaaggacagggaaatgatcccaagcctgcaaaaaagctgcgagatgagccaaaagccacttcacctgtaccgtcataaccaacctagatggatcttgtccattgtcaaacttatctgaatcctagatttcattggagcctttttaaatgtccacagtgcatctagccatgcatttagaattgtcatacgcttacgcttgctgctaaccaatatttcacagtacttatgttttattggggtctaatagttttttttt

SEQ ID NO: 19779 - DNA, 386 bp, Gossypium hirsutum
  Clone ID: LIB3146-020-Q1-K1-F12
tcgttcgctttcatcaaaagctgttttgaaattgatatttactacctttgcaggattgttggtcttcttgtagaatcctgttatttctgtcaccccaaatttcccataatgcacagcagacaaccttactctgagatggagaactctgcaaaaacacccagatgagccactgcgtgaactccaggttcggttcttgtagcacatactaatatgatagttctttccatactggtactgaaattaaacattctctgaataggtgttccatatttttttatcctcgtccacatcgagggtattctgtagtatttgaaactctctgtttatacatattagcccttgtagctaaaaaattttttgaaatcttccagaatgtattttttatc

SEQ ID NO: 19780 - DNA, 342 bp, Gossypium hirsutum
  Clone ID: LIB3146-020-Q1-K1-F2
ggcgcatatggcgagggactgtggacagggctgcggcggcggcggcagtggtctgtcttgttacaactgtggaggctccgggcattttgcaagagactgtgcaaacagtgatcgttaaaagcatactctgttccttattcaaagcagcttcgtttgtttgttttttgctaatgttttttttttgaaggattgttgtttattcaaatttttttggcttttggtcctttgtttttgacaaatgggaatagatttagaattttgtttttttatttgaaagattttgaattttgttaattgtgaaaataaattggattttattaattatattttgtctttgattct

SEQ ID NO: 19781 - DNA, 406 bp, Gossypium hirsutum
  unsure (1)..(406): unsure at all n locations; Clone ID: LIB3146-020-Q1-K1-F3
cccacgcgtccgcacagatctaccatatcgtgagcaagaaagctatggagaccagcgaggaagggaatgcttcagctgtcccatcaaagggagagaaaatcgatgtgggtaaagacgtgtcagctatgaagaagggaggttgctgctcaagctaggatgatcacactaatctgaagtcagattgtttaaatgatgcggccggggtttcgatttcatcataaaccttggttttgtaaaattttcttaaaagggtgcctaaagtagatctgagcagagattgatttaatttttcattcatttttttccctgatgactgttattgttagtagacaagaggattacgaagaacagggtcttacactattgcatntaaatatgtgcttagaacgtctgtttacttagaaca

SEQ ID NO: 19782 - DNA, 422 bp, Gossypium hirsutum
  Clone ID: LIB3146-020-Q1-K1-F4
tctttatccaatctaaagagatttagattagagaaggtttcagttccatccttcagtacgagcgcgtttcagctaaagaatctgcgaaaaatatccttggtcatgtgtaatatcagtcaggcttttgaaaagggcacaaacaaaatgtcagataattttccaaatcttttggaaatcgacatcgactattgtgatgatctgacggaactgggtgaagggttgtgtgatgttgttcaactgatgaagcttagtatcaccaattgccacaagctccgtgcactgcctgaaggcattggaaagcttgtaaacttggaagttttgagactaacatcctgcactgacctcatgtcgttgcctgagaccattgggagcttatcccagctcactattcttgacatttccgactgtctaagcatcaaaaa

SEQ ID NO: 19783 - DNA, 429 bp, Gossypium hirsutum
  Clone ID: LIB3146-020-Q1-K1-F5
gaaagtcggttcacccaggaagactgagatcatgttcattgcaccaactggggaggagattagtagcaggaaacagttggagcaatatctaaaatcacaccctggtaatcctccaataacggagtttgattggggtaccggtgagacccctagaagatcagcaaggatcagtgaaaaggccaaggctactccaacaccagaaaaggaacccccaaagaagcgaggccgaaaatcgttgagtgcaaagaaggaaaacaaggaaacagaggctgttcccgaaaaatccgaaggtgagaaagaaaatgaaaaggaagatgcaccaaccactgaaaaggaaactgcggaagctgaaagagaaaaagatacttccattgaaactcaggttcaggatggaggtaaaacagaagtggcagaccagactgggcatgc

SEQ ID NO: 19784 - DNA, 432 bp, Gossypium hirsutum
  Clone ID: LIB3146-020-Q1-K1-F6
ctttagtcaaggatatattaaacagggcagtacaggtaggcgtctcctaaaacttacgggatctgaattccgactccactcagagatggcaacgggaacagctccaccaagaggaagtgcagcagcagcagcaagcctgcgcaggaggagaacaacaagcggtgggggtgcctcgggaggggctgctggtactatgcttcagttctacaccgatgatgctccaggactcaagatctctccaaatgtggtgcttgtaatgagcattggtttcattgcttttgttgcagttctccatatcatgggcaagtttgttcgtagggactaggaagtattccaagcgtgtagcaaacactttttctttttttttggtcttaacaggagcaaacacttcccattgttataatttttcagttttccttattcctggatttg

SEQ ID NO: 19785 - DNA, 445 bp, Gossypium hirsutum
  Clone ID: LIB3146-020-Q1-K1-F7
gaacgacccacgcgtgcgaatacacggaggggagtggcgagaacgatattgtgacaccaaatgagttcaaggagatggtgggcgagttgttcttgcttaacggggtgctaaatatcggtgactcgatcccttggctcactttcctagatttgcagggctatataaagagaatgaaggcattgagcaaaaaattcgacaggttcttggagcatgtgttggatgaacacaacgccaggagagaaggggcggaagattatgttgcgaaggacatggtggatgtgcttttgcagctttctgaggatcccaatcttgaggtcaagcttgaaaggcatagtgttaaggcatttactcaggacatgatagctggtggaacagagagttcagccgtgactgtagaatgggcaatctcggagctattgaaaaaacccgaaattttggcaaaagc

SEQ ID NO: 19786 - DNA, 417 bp, Gossypium hirsutum
  Clone ID: LIB3146-020-Q1-K1-F8
acgactagttctaggccaagtgtatatccatcgtctgatactttatgagattttgtggaggtggcactgcaatttggaatgatcatgatgtttgcctgtgcgtttccccttgcatttgctttctctgccttgaacatcattgcataaatgagaacagacgcctttaagctgcttgccatgttgagactgcctgttccacgagctgtcttcacaattggagcttggcttaacatttttcagttcctaatattgatgtcaatatgcaccaattctgcacttctagtatggttatacgatcaggaaggaaaatggaaacttgatcctggccttgcagccattcttgtaatggagcatgttctgctattgattaaatttgtgttctaccgctttgttccctatgaaccttcttttgtgaga

SEQ ID NO: 19787 - DNA, 286 bp, Gossypium hirsutum
  Clone ID: LIB3146-020-Q1-K1-F9
cccactctttcatccactcgtgcgcgagtgtacattcgagataagtacccatcccttagagaaagatttattggagagcattttaagcatcgacgccttcatgtgaaaagttggcgacaagacgccaaagtcgctaagtattgaaaggaaaacaaatcacctactcttagtatattcctaattagaagaatttatttttcttttgttttctgtttcttgtatttcacttcaaagttcttaattttagtttcctattttaaaaatcaatttaataaacaaactattt

SEQ ID NO: 19788 - DNA, 291 bp, Gossypium hirsutum
  Clone ID: LIB3146-020-Q1-K1-G1
aatacacggaggggagtggcgagaacgagattgtgacaccaaatgagttcaaggagatgttggacgagttgttcttgcttaacggggtgctagatatcggtgactcgatcccttggctcactttcctagatttgcagggctatataaagagaatgaaggcattgagcaaaaaattcgacaggttcttggagcatgtgttggatgaacacaacgccaggagagaaggggcggaagattatgttgcgaaggacatggtggatgtgcttttgcagctttctgaggatcccaatc

SEQ ID NO: 19789 - DNA, 204 bp, Gossypium hirsutum
  Clone ID: LIB3146-020-Q1-K1-G12
gggtcctctttctacacctgaaagtctgtatgttctatctctgctaaaggaatcttagaaattttttgcagctatgtccgattgaaaggtattgttgattagatttcgcttccaagtcctgttagtactgttaattaaatctgaaactaataatactccactgtttgtctcaaataaaatatataaacattatattaatattaa

SEQ ID NO: 19790 - DNA, 443 bp, Gossypium hirsutum
  Clone ID: LIB3146-020-Q1-K1-G2
cccacgcgtccgcccacgcgtccgggccaaaatcctctttcagtctcgaaatctttcccctctgccacttctatattctcaggtggttggttatggattctcagcttctacgacttaacccacccaacaatctttctattaaaccattacactccccccattttccttccttcgccgcccctagtttcatccgtctttccccactttcttttccttcagctacagtcacaggatcggcttgtaagagaataaggtgtgcaatgaagtcttataagttatcagaacttagtcatgttgaggtagagagcttgaaggctcgtcctcgcatagatttttcttccatattcagtgtgatccaaccaatagtggatgatgtccgcagcagaggcgatgctgcagttagagtttatactgaaaagttcgataaagttaagctagagaaa

SEQ ID NO: 19791 - DNA, 417 bp, Gossypium hirsutum
  Clone ID: LIB3146-020-Q1-K1-G3
cttcacagcttcaacaacagcagcagcaacagccacccacacagtttcaacaaagccaacaaggtcatcagaacactagcatgtccagtggttcatcctcctcccagaagaatttgcagaaccagcagcagaggtcacatggaggtgatgtcagtagtggcagtggaaactctcaagtgtttcatgcctctaaaaaggattcacctcatcccttacaactatggcaacagcagcaacagccgagtcagaatgattctcatcaacctaggcaacttgatggtgaatcagatggcaaagatggcccatcaactgctactgatagcagagtatctcgttcaaatatgaatatctatggtcagaattttgctatgcctgtacagccttcaaactttgctttgatgaccgctgcttcaatga

SEQ ID NO: 19792 - DNA, 413 bp, Gossypium hirsutum
  Clone ID: LIB3146-020-Q1-K1-G4
gaagctgatagcatgaggcttcaaaaattagctgcccaggctaaagctttccgcacaaatgatgatgatgacgaggatgactctgatgatgactttagtgacgatgaagaactacagtcaccaatcgatgaagttgacccgtttattttctttgtcgatattgtcaaggctatgcaagctgcggatcctatgaggttgcagaaccttacacagactctggatttccattatcaagctcttgcaaatggtgtagctcaacatgctgaacagaggagagcggagatcgaaaaggaacaaatggagaaggcatcagtcgctgccgctccaccatcatgagttcagtttcgaactcgatgttcatccataattttcattcattcagaaatggttattttatgaaaccaagatttgtt

SEQ ID NO: 19793 - DNA, 405 bp, Gossypium hirsutum
  unsure (1)..(405): unsure at all n locations; Clone ID: LIB3146-020-Q1-K1-G5
acgcatacacggacgggagtggcgagaactagattgtgacaccaaatgagttcaaggagatggtggacgagttgttcttgcttaacggggtgctagatatcggtgactcgatcccttggctcactttcctagatttgcagggctatataaagagaatgaaggcattgagcaaaaaattcgacaggttcttggagcatgtgttggatgaacacaacgccaggagagaaggggcggaagattatgttgcgaaggacatggtggatgtgcttttgcagctttctgaggatcccaatcttgaggtcaagcttgaaaggcatagtgttaaggcatttactcangacatgatagctggtggaacagagagttcaaccgggacttgtagaatgggcaatctcggagctattg

SEQ ID NO: 19794 - DNA, 324 bp, Gossypium hirsutum
  Clone ID: LIB3146-020-Q1-K1-G6
cttatcctcatctttgctgaagctttggctctttatggtcttattgtcggcattatctggtcatctcgggctggacaatcccgagcagaataagatactcaagtgctgcatagtattctcttattgattttatctgtagcactagaccgaaaaccatttcgatcaatatcaggttagttatggttggacagcaagtgccgcgttcgcacataaatattgatgaacatttgtttttggtggatgctcttgtcctctttgtagtagtagaaattgagtttcttttaactcttaataaaatgttgtggagctttcccttgtttgatt

SEQ ID NO: 19795 - DNA, 386 bp, Gossypium hirsutum
  Clone ID: LIB3146-020-Q1-K1-G7
attggaaaacccggcccgacgcacgcgtacgctggaatggcacctacaggtgatacaagatttcaatttcactccgatcaaattggcatgggggtatttcatgaaactcaattagcaatatatcatgcctccaagatggagcgcgttcgacagtggattctacaagatgtattgcatgcacccatatcttacgcaacatactcctgtaatagtcaatctgtttatgccaccttttgcgatggtaacattggggtatttgatgctgatagcctgagacttacatgccgtatcgctccatcagtgtacttgttctcagtaatcttaaaaggaagtcaaactgtgtacccgcttgttgtggctgcacacccgatataagcaaaccaatt

SEQ ID NO: 19796 - DNA, 429 bp, Gossypium hirsutum
  Clone ID: LIB3146-020-Q1-K1-G8
acgcccacgcgtccggtcttatacaaggttgctgacattcctttcttaagcaaatggaggcgtcaaattctcgatcttattgagcatgctgagacacagccgaacctcaccattggtgtcttggtctctattgtggtgattattctcacgattttcttcaagctcatttttggtgggaagaaacaaccaatagtagagaagaaaccagagggtgctgaaacatcaaatggtgaaggaagcagtggagaaaaggctgaagaggcggagaaggaagaagctgctgccgctcctcgccgaaggcgccgtgacaattgagcaaatcttaaaacaaaggtggctggtggcgactagcagtttgagttttggctaatttttgcactcgaagtggttttcgtagctgagatattatttgcctttggcattatttta

SEQ ID NO: 19797 - DNA, 378 bp, Gossypium hirsutum
  Clone ID: LIB3146-020-Q1-K1-G9
cccactcgtccagccaactttgtacgttcttgtgaagtgatccacaatcttgatacagggatacgttaggtagttttcagcatacttgttttgagtttagtggttgtagataaagaaaaaatggctgaagagcataccaaggttggtggtgaggaagcagtggagagcaaggagcgagggatgtttgatttcttggggaagaaagaagatgagaagcctcaacctcaagaagaggtggtcgccacccagtttgagaaagtcaagattgatgaggtacataaggaagatgagaagaaacacagtctcctggacaaagcttacctatccaatagcagcttcagctctgtaattacttttttttactttcttgcttactat

SEQ ID NO: 19798 - DNA, 414 bp, Gossypium hirsutum
  Clone ID: LIB3146-020-Q1-K1-H1
cccacgcgtccgcccacgcgtccgcttttttttgttttttgtttacaacaacaatggctggacacacagtttacaccctctcagaagtgtctcgatacaaatccaagaacgactgttggcttgtcatcgatggccgagttctgaacgtaacaaagttcctggaagaacatccaggaggagaagaggtgttgttggaatcagcagggaaggatgcgacgaaagaattcaacgatatctgacatagcaagtcggctcagaatttgctcctcaagtatcagattggtgttctccagggtcacactttaaagaataatgaacaggttggttcaaccgaggagcccaaaaagaaagagatgagtgcattcggtatcaaggatgacctgacgcctaaatatgctgcagtcgtcgagttcg

SEQ ID NO: 19799 - DNA, 184 bp, Gossypium hirsutum
  unsure (1)..(184): unsure at all n locations; Clone ID: LIB3146-020-Q1-K1-H10
cggtttcggaatttcccgggntcagacccacagccgtccggttaggcatatcacatgctcatagtagccattcctttagctagataccatgggagatagaggttataggcgctgcggatcataccatgtctgccattaggtagctagaatgataattagacaaagagagattagctagaaaaga

SEQ ID NO: 19800 - DNA, 413 bp, Gossypium hirsutum
  Clone ID: LIB3146-020-Q1-K1-H2
cccacgcgtccgcccacgcgtccgcccacgcgtccgcccacgcgtccgcgcgaatcaactccggattttgtaatccgccattcgtacgcggcggtgtaaaggaaaagagaggtgaggagaggaggatgttggaaaaccctacacccaccgcagctgatgccgctcctgccatcaaacgctatgctcctcccaatcaacgaaatcgttctctcggacgccgtaaatctggagagaagaatcaaggtgccacatcgagaaacattaatccagtcggggatgctgggagcagcgctatcctgaatgaagacaaccctcgtcatgctttgatacctttagaaggctgttctagaagtgatgcctctcggcttttaagcaatcgttgggcagctgtcttacatcgctaccatgataca

SEQ ID NO: 19801 - DNA, 385 bp, Gossypium hirsutum
  Clone ID: LIB3146-020-Q1-K1-H3
gctaaaatgaagaaactccataacaaattcgataggttcttgagtgccattcttgaagaacacaaaaccaaagctcgacaaagtaatgggcaagtgaaacacaaggattttttaagtacgttgatttcattggagaatgttgatggcgctgaaggtggaaagctctccgacactgagatcaaagcattacttttgaacatgttcacagcaggaactgatacatcttcaagcacagttgagtgggcaatggctgagctaattcggcatcccaacatcatggctcaagttcgtaaagaattggactcagtcgttggtcgagaccgcctcgtctccgacttggacttgcccaatctaacctacttccaagccgtcatcaaagaaacct

SEQ ID NO: 19802 - DNA, 420 bp, Gossypium hirsutum
  Clone ID: LIB3146-020-Q1-K1-H4
cggacgcgtgggctaaaggctacaacagaaaagttgaagctgctcttcattacctcgagcaaaaacccagggtactgaataaaaatatgccagctattttcttcggcacaaccgcacctgggacaaagagtgttcatcactaccctctttattttaaggttgacaaaggaagggataaaatcccaagaaatcctccaaattgtcatctgaatctttgaagggatatgtaacttccataatttgttgtagaaattttttgtctcggtatgtaataataaatcattagggtccagattagaaccatgtaatagtttataggcactcctcaccgagaactcccctatcggttctcctctccatacttgaagatcttcttgttctgtctccgcaagagggatttgtaatatttgctctgcaaca

SEQ ID NO: 19803 - DNA, 443 bp, Gossypium hirsutum
  Clone ID: LIB3146-020-Q1-K1-H5
ctttcctatggcaattgaggactatatgactaaactaaaggacacctccacttcgggagcagtattttttgcagtttgtcgtggcaaggtcagtgaaggattagattttgctgaccatgctggaagggcagtggtcatcactgggatgccatttgccacacggacagaccccaaggttcgtctcaaacgtgagtacctggacctacaggcacaatcacccagggaaggatgtaagatgattaagttgttatctggagaagagtggtacaatcaacaagcatcaagagctgtaaatcagtcagtcggacgagttatccgtcaccgtcatgattatggagcgattatcttttgtgatgaaaggtttgctcaatcaagtcgacagtctcaaatatcagtttggatactgcctcatattaagtgttattccaaatttggggatgctg

SEQ ID NO: 19804 - DNA, 305 bp, Gossypium hirsutum
  Clone ID: LIB3146-020-Q1-K1-H7
gaagaccgggcccgacccacgcgtacaacgacgcatccgcatacccgatttggtgtgattgatgtgtgcacattgaagcagcggcacggcatccaaactctacgaactaatgtgcaattgggacacaccgattggtggagtacttatatcacataggagaatgtttgttgcgctgtaagaacaaagctcttcgacgctcccatcaaggctttacatttgaacatgctcacagctggcactgatacatcttcaagcacaattgagtgggcaatggctgagctaatttggcattccaacatcatggc

SEQ ID NO: 19805 - DNA, 374 bp, Gossypium hirsutum
  Clone ID: LIB3146-020-Q1-K1-H9
cccacgcgttcgggggccacttggtgaaagactggacccaatttacccaggtggagctttcgacccacttggactggctgatgatcctgatgcgttcgctgaattgaaggttaaggagatcaagaatgggcgccttgcaatgttctccatgtttggattctttgtccaagctattgtcacaagaaagggtcccattgagaaccttcttgaccaccttgccgatccggtgggcaacaacgcatgggcttatgccactaactttgtccccggaaaatgaacttagattatagatatgtctgtgcaagctgttacattaactgctatgtagcatgcgttgctgagtactgacgtaattcactagctgtcttttgagc

SEQ ID NO: 19806 - DNA, 191 bp, Gossypium hirsutum
  unsure (1)..(191): unsure at all n locations; Clone ID: LIB3146-021-Q1-K1-A1
cccacgcgtccgggtttacaatttttctttttatccatgcacgttcccattattggtgggtccatgctcttcgatgttgccaaccatgagtacatatccaaactacttgtttacaattttccatataaaagctaattatttgtcccaacgtctcanagcacaagatttataaaatatatttcaggttattc

SEQ ID NO: 19807 - DNA, 386 bp, Gossypium hirsutum
  unsure (1)..(386): unsure at all n locations; Clone ID: LIB3146-021-Q1-K1-A10
ggcaattgacggatgtccggagttgagcaaaagatacagacaaaatgggggtgaagattggcacaaaattgctcacatccaaaaggttgttattaaggatgaagattgagatggagatggatgaatcaagcagaggttgaggcaggacaaggaagacttttgctttatttgcatttgggtttcagttgtaattctaataagtgagcttttgctttggatatttcagactcttgcttaatggcttcatgccatggattgtaatgtttgtttgacatgtatcaacttttagctttatgcatatttatgtttctcatggttnanaaaaaaaaaaaaaaaaattaaaaaattaaaattaaaaaaataaatattttaaattattataaaaa

SEQ ID NO: 19808 - DNA, 344 bp, Gossypium hirsutum
  Clone ID: LIB3146-021-Q1-K1-A11
cccacgcgtccgatcgacgcctgcttgggacagaagtgagcttgccaccggaaaatgggaacaaaactcatgattcctaccttagcgagacaaatttcgataccaacttggtggttatattggcagctcttttatgcgctctgatctgtgcagtggggttgaactctatagtccgttgcgctctacgttgcagccgaggttttcgacggagaccccagaacaagcagctgctcgcttggcgacaacgggcctgaagaaacgagatttgagacaaatcccggtggcagtgtatggggaaggagtgagtttgccgtcgatggaatgcccaatatgcctgggagagt

SEQ ID NO: 19809 - DNA, 423 bp, Gossypium hirsutum
  Clone ID: LIB3146-021-Q1-K1-A12
atactattggatcaactgtgtcaggcgacaccattcgaaagcttgccataaatacttttactgagtttttacagggattgctgaagaaaggtgcaaaatacgtggtcgttgaagcactgccgacgacaggttgtttaccgttggcgatgacattggctccttcagacgacagagatgacatagggtgcgtgaaaagcgtgaacaaccaaagcaacgcccataacctcgtcctccaatccaaggtgtcggatctcagacaacagtttccccaagccatcattgtttacgctgattactggaatgcttatcgcacggtgatgcaaagcccagaaaaatacggattcaaagagagcctcaaagcatgttgcggaacatgggagccgtacaacttcgaggttttcaatacgtgcgggaatccttcgg

SEQ ID NO: 19810 - DNA, 244 bp, Gossypium hirsutum
  Clone ID: LIB3146-021-Q1-K1-A2
gcaagaatagatgatgtcctttatgttaacgatgttatcaagcgctgtgctgaggcagaaacagtttcccttttcgacaggagaggattgggtggtcttccaatccaaaaacgaatgtccccaagccccttctcaattcagcacactccttatgcctctccttttgcaacgccaaccttctgttcttcaaccccgctcactggaagccctggaagggcaccttcctctttgaagagaaacattc

SEQ ID NO: 19811 - DNA, 270 bp, Gossypium hirsutum
  unsure (1)..(270): unsure at all n locations; Clone ID: LIB3146-021-Q1-K1-A3
cccacgcgtccgcccacgcgtccgcccacgcgtccggacccacgcgttcgtgaagnaggggcagtttccatttttgacaggacacgattgtacggcctttcaatctaaaaacgaatgtgcccaagcccattgttaattcagcacactctttatgcatctaattttacaacggcaaccttctgttctttaaccccgcttactggaagccctggaagggcaccttcctttttgaaaaaaaacattcttaaagaggaattcaatttggaaaat

SEQ ID NO: 19812 - DNA, 414 bp, Gossypium hirsutum
  Clone ID: LIB3146-021-Q1-K1-A4
cccacgcgtccgttttcctccttcgaaatcagctcaaggagatatggctcaaagaaccgaaaaagaagagactgaattcaaagtccctgaaaccctgacgctatgcgttaacaactgcggggttccggttattcaaccaccaacaacatgtgccagaagtgttttagtgccaccacggccgcaacatcctcctcttcctcttcctcttccaccaacaacaccgctactttcgctaccgacgataaatcctcgagatctacgccgactcgttcacaggacaatcgatccgattccgctccacctacaacagctgcaacaacggcaacagcaacgacgaatagtccgatgaccgcttcaaatcggtctggatacgataccgcggaaaaaaagtcggtgaatcgatgttcttgttgc

SEQ ID NO: 19813 - DNA, 294 bp, Gossypium hirsutum
  Clone ID: LIB3146-021-Q1-K1-A5
ctcggttgatagacatttacagaccctacttgttcttcgatgcaatgtatgcatctataaattcttctaattttatttttttacattgaaatctctaaatttaattatattatcaaatcttaaaaaacaacatcgaactgcacaatggtgtagctacggcttaattacaagattgaagtctgaaaaaatttaaaattcttaagggcaagttaggaaattattaataaaatatttagagcgagacaaaatgcaataatcaattataagaacgcgaggagatctctgtttggttaa

SEQ ID NO: 19814 - DNA, 388 bp, Gossypium hirsutum
  Clone ID: LIB3146-021-Q1-K1-A6
gctagagcttgcaagtggcaagaaacccctcgagaaagtgaatagaacagtgaagcggtcgatttccgaatgggcactgccattagcttgtgaagggaagttcgatgaaatggcagacccgaaactgaacgggaagtatgtggaagaggagttaaaaaggatcatccttgtcgcacttgtttgtgccgataatcggccagacaaaagacctaccatgcttgaagtcctcgagctactcaaaggtgagtccaaagagaaattaactgaactagaaaacaatgaactatttaagactctgcaaactgtttgcgacgatgacgggataacagctgccgaaaaaaactcagacataattaaagaagagaaagatttgaaaccggcgaaagat

SEQ ID NO: 19815 - DNA, 332 bp, Gossypium hirsutum
  unsure (1)..(332): unsure at all n locations; Clone ID: LIB3146-021-Q1-K1-A7
cccacgcgtccgcccacgcgtccgcccacgcgtccggttcgagggaggaagcatagtccagcacgtgatgaaagaagcccacaagagagacgtagcccatccccaagggatcgcagacatgccaatggttcggattacagtgggagtcccagggggaggagcagaactccagatcgtgaagctgatgctggagacggngattataagagctccgcaaaggaaaatgggaacagccgcagtcctaaccccgctcccaaagatgatcggagccctatttatgaaaaaaaaagatgatgacaatcatgcattttcgaaacccaacggattaaatt

SEQ ID NO: 19816 - DNA, 288 bp, Gossypium hirsutum
  Clone ID: LIB3146-021-Q1-K1-A8
cccacgcgtccggcagataaattcaatggagttccttcagaatatggcttccggagatgactcagttcgtcaaatggttgttagagaaggaggggttcgtccattagtacgcgttttggatccgaaatcatcgacctcttcaaagacgagagaagtagcattgagggcaattgagaatctatgtttctcttcgcagagttgcataaacatgttgatgaatttcgggtttatcaatcaactgttcttcttgctacgcaacggtgaggcttcggttcaagaattggcact

SEQ ID NO: 19817 - DNA, 254 bp, Gossypium hirsutum
  Clone ID: LIB3146-021-Q1-K1-A9
ttttgttttcattttccttttgtcctttttctctttcctaggttttcggttttctcagccaaaggctttcgtttagcttcatcaatggcacaggaggaggttcagaacggaggaccggagaaagtagcggaggtgagcttcacggcgctgaaaccgcagctcatggtcgaagcacccaaggcagctgatgcggtgcagttctacaagaccgcgtttggcgctgttgaagctggccgtaccgtgtaccctaagcg

SEQ ID NO: 19818 - DNA, 337 bp, Gossypium hirsutum
  Clone ID: LIB3146-021-Q1-K1-B1
cggacgcgtgggtgctgatcctgctcaaactgaacggtatcacctcttcatccaggatgctaatgaatataagagaagggttcgccagcaagccaagcaatacccacctgtggtctagtctgttattaaaaaatagtaactcagactttccatgaaattgctggtaaatgccagctgggttggctgcttgcctcatgtataatgctagacttggcttttgctaagagaaaatatgcttccttgggtatttggtaatctatataaactgtatgaaccagcattggtatttcaactctcatcggattcggattaatgggttgttctaattttatactac

SEQ ID NO: 19819 - DNA, 246 bp, Gossypium hirsutum
  Clone ID: LIB3146-021-Q1-K1-B10
ctgtattgaggccttcagaaaaccgttcagaaactcaagctattgaaattgctattaccaaactgctcttaagatcatactatgacattgttaggaagaacatagaagactctgtgcccaaagcaattatgcacttcttggtaagtttaaaccgagtagatttgctaattgtgtattttttggtttctttctgctatctatccatgttcacattcaagctcctgatgactggaattcaaaaacgca

SEQ ID NO: 19820 - DNA, 421 bp, Gossypium hirsutum
  Clone ID: LIB3146-021-Q1-K1-B11
ctgaaaaataacttcttgaaaatctgttttcttcttctgaatatctctgattatggctccgataactgacttgtcatttgaagttgcttgacattttttataactgtttttgaatcccccataagacagactgattggatactaagtgaacttcctaattttgcaccttccgggcacgcataagcctctactgcgaaaggtgaggggacgtttctgtagataaccgtctttaacaccattaagtttcccctcaaatcccaccctaccaaacctgtcgctgaactgaaggttttactgtcgaatgctgcatcaaaatagattctcgttcttgtaccacaacatccataaagcgtaccagaatagctgacactgaccattgttgcttctcttgaaaacccagtgcattcatggaagacatgga

SEQ ID NO: 19821 - DNA, 340 bp, Gossypium hirsutum
  Clone ID: LIB3146-021-Q1-K1-B12
tgatgatccattgttggacgtggtctatcaacattttgtcttcctaaggatgatttttttttctttggttctttgtgggcttggaaaatcaaaggttttcgtgtgagctaaagctatatattgtggggaaaaaagaacctaggctatatattaatccaacaaaataaagtatatatatatatagactaatatcagggagtatactagtgtgattttattacgtgtttaattatgaattataccataataaatgcgaaaatattgggttatcactttcatctttttcgctgcgtattgtatttaatgaaagattatccttataaaaccttaattactgaat

SEQ ID NO: 19822 - DNA, 333 bp, Gossypium hirsutum
  Clone ID: LIB3146-021-Q1-K1-B2
attcaatttcagcaggcaatcagaatccattgatttgcagatctgttcttgcttcctctagttcttgatttttgtatatatgggagcagtggttgtctaggatgttataaggagcctaaatctgatcctttgatgaatgatacatcaaaaggattagaagttccaggtcagacggtgaggaaaaccagtatatctgaagatttctggaccactagcgcttgcgatatggataacagtgcagcgcagtcacaaggaagcatctcgtcaatcagcgtgatcaatcagtctctagatccccatggcaatgccaatagcccatctgaattcgtaaat

SEQ ID NO: 19823 - DNA, 236 bp, Gossypium hirsutum
  Clone ID: LIB3146-021-Q1-K1-B3
atagactgtggcccaacacggaaacgggcgcatcatgcatgcgtatgcagcattttaaggaatgctttgatactaacttatggacgcaatcgaaaatccataactactgcatagaacaaactcaagggggcaatctgactagctttaccaaagtaaacagccatcttgggtatcgagcctttcgcagttcaactatgtctggttccaggggatataatatgcgaatgatgtgagga

SEQ ID NO: 19824 - DNA, 305 bp, Gossypium hirsutum
  Clone ID: LIB3146-021-Q1-K1-B4
tcttttaggtttttaattaataattttaaaaaatttggaaccttgttcgacatggattcgaaatcggagtggacctctgtattggcgattacggatgatacaagttacgctgttactgctttaaatgcatattgggagtttgagaatgaaaaccccaaacgcttcgaccctcaaattatcttgcaagcttcttctttagctcggttgccgctcgaatcatacaatgtagacttggtcatttacatctctaggtcagttgaatttccttttgatgagctgtatgctgaaatctttatagttttggt

SEQ ID NO: 19825 - DNA, 261 bp, Gossypium hirsutum
  Clone ID: LIB3146-021-Q1-K1-B6
cccacgcgtccgaaaaagaaaatttcgaagagagagagaaaaaatgtttgcatacgatcgcgtaagccactcgagtgccaacaaggcggatgagatagatctagaatcaggggagactttgtacccgggactcagctacggcgaagaccaactccggtggggttttatccgcaaggtttacggcatcttggcagcgcaagtggttctaaccaccgtggtatccgccttcgtggttctttcggcttcggtcaacgagcttct

SEQ ID NO: 19826 - DNA, 321 bp, Gossypium hirsutum
  Clone ID: LIB3146-021-Q1-K1-B8
cggacgcgtgggattcagctgcatgctatgcgatatggaacagttccgatagttgcctctactggtggacttgttgacacagtcaaggaaggattcacagggttccaaatgggagctttcaatgttgaatgtgatgaagtggatccaagtgatgtgattaaggtggtaaaaactgtcaagagagctcttgcaacatatgggactcaagcactgaaagaaatgatccagaattgtatggcacaagatttttcatggaagggaccatcaaagttgtgggagaagatgttggtgagcctcggggtggctggcagtgaaccttgc

SEQ ID NO: 19827 - DNA, 409 bp, Gossypium hirsutum
  Clone ID: LIB3146-021-Q1-K1-B9
ctcctccagttgaagccttaaaacctgcaaacagcaccgcagcggagaaagctgcagaaaggagattttgaggtaatcttaagtaattaattggttggtttaggggcgaaatgggaaacgaagcaaaaaccacctccaacgtgggaggaggaggattcagggcgagaatggaacactacatatatagcggtgaaaagaagcatgtaatggctggcatcgccatcgtcgccctcgtttttggtgccccttggtttctcatgaaccgaggaacaaagcatcagtcacaccaagattacatggagaaagctgacaaggcacggagtcaacgactttcttcttcaaaataatagttaagttaatcaattgtttccttcagcagctttttgattgtcagcgcgggagctgctac

SEQ ID NO: 19828 - DNA, 255 bp, Gossypium hirsutum
  Clone ID: LIB3146-021-Q1-K1-C1
cggacgcgtgggcaagaaatcatggtaagtctcaaatcacttgtatctctcagttcccgatccgctgccgtagcactacttgttttggtggtttcagtggcagtgcagacccatactacaaatgcacaaagctgcccgaccgagctgacgagcctgaacgtgtgcgcacctttcgtgggtgcccgtgcagctgtggctaaccctagcattgactgctgtaacgcactccaatcggtgcaccatgattgcctttgc

SEQ ID NO: 19829 - DNA, 220 bp, Gossypium hirsutum
  Clone ID: LIB3146-021-Q1-K1-C10
aataaatgataaaaaaaaacaaaaaaaatttactaaaaaaaaaaaaaaaaaatggtagaggcctattttcgggtcgcactataaagaatccagattcattaccacttatatgctacaacaagccttcttatacttggtatttaactacattcatctggcctagattattcaataatttgattgagataacgctggtcaaatccactataagtagtttgta

SEQ ID NO: 19830 - DNA, 419 bp, Gossypium hirsutum
  Clone ID: LIB3146-021-Q1-K1-C11
cggacgcgtgggtgggtcactgggctcattcccaccggttatggcccctcattatggtaggcatggtgggggccatggtcatggtggttcttatcgtcatgggagagattaccatcggaagcgacaccgagatgatgaccactatgcacgtgagtcctcaaagagaaactcggatcatgaatccaggaaagcctctgaccatgacgctagaccggagaagaatccacgtttccgagagagcggtgattctgatgaagaagaagatgatgatcgtaaacgacgatcttaatagatacattattaagtgtaatatgtgaagtaagtttttggtgtttttatgcatttgttaagaggggctcgagacgcagaacaatgaggagttttcttggtacaattggtaggacaccaaatgctgcttt

SEQ ID NO: 19831 - DNA, 258 bp, Gossypium hirsutum
  Clone ID: LIB3146-021-Q1-K1-C12
gtcctcaacaaaagatcatcaatttaaacggagggtgatgacttatttgtagaacatactgacacttactgaggcttgggttcagtatactgacccactaatgcagactttattaaacatctgtaatggtacctataattaagcataatataagatcctattataaagcacatgaggtaactatcatattatgcatttccgatctgccccagcaggcaggactcagtggctactcgagacctatcactacaaatgact

SEQ ID NO: 19832 - DNA, 339 bp, Gossypium hirsutum
  Clone ID: LIB3146-021-Q1-K1-C2
cggacccgtggggttgttttcccctcatgggcaagttggtttctggcactccatatcatccatgcagcacagcaaaaaaggcgacattgttgactgttacctatggtaaaaacccagggcactgtctaaacacatggttgctatgttcttttgcatttcgacaccgggggcatgagctatctgaagccactcttcttagtcttaaattctttagggtaaggataaagttccatgaaagacgccaaataatgatggcaattttttatgggtggtgtaaattccataatttcctatagaaattttttgtttcagtctatattaaataagcactaagatcct

SEQ ID NO: 19833 - DNA, 329 bp, Gossypium hirsutum
  Clone ID: LIB3146-021-Q1-K1-C3
cggacgcgtgggcatgaattcatggcatgtttaaatttatttgtatcactcaatatcagggacgcgtgacaagcactactggcattggaggtactagtgcctatgcagacccctactagcaatgcacaaacacatccgacctatctgacgagccataacgacaccgcacctttagcgttcccaagccatttgtggctaacctaaatattgactgctgtgacgaaatcacatcgggcaccattaatgtttttgcagcactctaatgatcgctttaaaactcccttttgaatacaaaattctatcaattacttgtgctttaaagaaatgca

SEQ ID NO: 19834 - DNA, 431 bp, Gossypium hirsutum
  Clone ID: LIB3146-021-Q1-K1-C4
cccacgcgtccgcccacgcgtccgggaacagatacccaaatcaaagaaatcttcactattcaaaagagagctagatttacagacatgaaagctctggtgtttttggtggcggccaacggcataactgcagcttactcattggtacaaggagtgcgttgcgttgtgggtatggggagaggaagtgtcctttttagtaagcctctggctttggccattttttctggagatcaggcactggcatacttgaatttggctgcagtgggagctgcagcacagtcagcggcgtttgctaagttggggcaaacaaagcttcaatggatggtgatatgcaacatgtacgggaaattttgtaaccaagttggggaaagaatagcagtgtcactactagttagcatctgcatggtgggcctatcttgtatctcagcatttgg

SEQ ID NO: 19835 - DNA, 408 bp, Gossypium hirsutum
  Clone ID: LIB3146-021-Q1-K1-C6
cccacgcgtccggcagataaattcaatggagttccttcagaatatggcttccggagatgactcagttcgtcaaatggttgttagagaaggaggggttcgtccattagtacgcgttttggatccgaaatcatcgacctcttcaaagacgagagaagtagcattgagggcaattgagaatctatgtttctcttcgcagagttgcataaacatgttgatgaatttcgggtttatcaatcaactgttcttcttgctacgcaacggtgaggcttcggttcaagaattggcactgaaagtaacgtttaagttgtgtagcgcatcagaagaggctaaaaaggcaataagagatgccggtttcatgcctgaacttctcaaattgctcgatgcaaagtcatatgaagtgcgtgaaat

SEQ ID NO: 19836 - DNA, 415 bp, Gossypium hirsutum
  Clone ID: LIB3146-021-Q1-K1-C7
cccacgcgtccgagcagctcgaagacggccgcaccttagccgactacaacatccagaaggaatccactctccacctcgtcctccgtctcaggggtggcgccaagaagaggaagaagaagacctacaccaagcccaagaagatgaagcacaagaagaagaaggtcaagctcgcagtgctccagttctacaaggtggatgagtccgggaaggttcagaggctgaggaaagagtgtcctaatgcggagtgtggggccgggactttcatggccaatcattttgataggcactattgtggtaagtgtgggctcacttacgtttaccagaaggctggtggagactgagcaacgtccgattccaccttcaagaaaaaaaaaaaaactgaaatcaatagtttatttttatcagtatgagtagc

SEQ ID NO: 19837 - DNA, 373 bp, Gossypium hirsutum
  Clone ID: LIB3146-021-Q1-K1-C8
gaaagattctaaaattcaaaaaaaaaaatggaaaagaaaagaaaacaatgattgtctagggcccttagtgcagggtgtgtaaagaaggaaacgtgtgtgggttttctgtaggaagaaaaacatggttagaaacattgaactccttagtatggtatcaaaaagctgataccatattacatagtcaaaaagctaatgaaaaaaaaaacaaaactaaaaaaggagttaaaaagggaatcaatcatacataatttttgtagaaaatttatgtagtggtggaattggcagatcaaattcacactttgtaaacagtgtgttgcttgaacttgatttgaatttttttttattggaatgaaaaaaaaaagtttattttttt

SEQ ID NO: 19838 - DNA, 299 bp, Gossypium hirsutum
  Clone ID: LIB3146-021-Q1-K1-C9
attccttgctgccacggtgcacttgaataaactggaaagggaagagaatctggtgggtgccttctcctttttcgacaaagatgggagtggatacataaccattgatgagcttcaacaagcctgcaaagagtttggattaagcgacgtccatctcgacgagatgatcaaagaaatcgatcaagataacgatggacaaatagactatggggagtttgcagcaatgatgaagaagggcaatggaagtattgggaggagaactatgagaaggacgatcaatttgggagacgcgttcggagtga

SEQ ID NO: 19839 - DNA, 420 bp, Gossypium hirsutum
  Clone ID: LIB3146-021-Q1-K1-D10
tggctattcaactcttctctcgtcagatcccgagccaccagacctgttgctgatctgttgtttctgctgtcaaacgctgcatcaaagaagatcgtgactctcgaaccatattaaccataaggcgtaacaaaaaagtcggctttgatcatcagttcctcccttgaatacccaggacaatctcggaagatatggagactattttctgtccaagaacagcatcggggacatctatcatttgttgcaactcttctatacctaagattagctagattaggaatgaaatcccaagaaattcgccagatagtgattgcaatttttggggatagttttaggctccataattttctgtaaaattccttagtttcagaccccaaattagcatcttgtaatagtttataggcgctgcatactgaatattta

SEQ ID NO: 19840 - DNA, 370 bp, Gossypium hirsutum
  Clone ID: LIB3146-021-Q1-K1-D11
cccacgcgtccggaaaaagatacttccattgaaactcaggttcaggatggaggtaaaacagaagtggcagaccagactgggcatgctgacaccaagatggaggaagctggtacagatgttaaggtaccagaaactgcagaggctggcaaaaaagaagaggctgctggtaccgaagaaacaccaactggcaatggaggttcaagagaaacctgcagaagctagttgcatagatgggactcaaactgcaaaagaagaggaagcccctactgaaaaggtgccacaaactcaggcagagaaagagaatggtacatgtgagaaacaaccagaaaacccagaaactgtgacattggaagctaatgggggagtggag

SEQ ID NO: 19841 - DNA, 207 bp, Gossypium hirsutum
  Clone ID: LIB3146-021-Q1-K1-D12
gcgaccggccgaatccgggtccccacgcgtcgagaattcgcttcgtacatctaggaactggctcaactgctgaaaacaagactgattcaccacaaaagactcgaagaaggggaagctcaatgggcactgctaagacattacatggactcaacacaaactttaacctttaatgcaggactcagaagtgctaatgccacgccagagcac

SEQ ID NO: 19842 - DNA, 393 bp, Gossypium hirsutum
  Clone ID: LIB3146-021-Q1-K1-D2
gactaaaagtaatttctgtcatgttccttccctaccttccctaccaaacaaggcctcagcaaattttattttatactgcaactgctacattcttcaggccatctaaagactcgtttagttaattagttgacaaagtttcagaaccaaatgcacttgtttatactagttttctgagaaatacagaaacctgtgtttacaacagaaatccggaacttagttcatgctaccaccctctgcaaatatgggattcgaattttggcatctgtaatattttctgttattcgtagactatggtgtcttttgtactaatattacattatatgactctctttattctgggttatgttgaaatcaatatgtgaagtttggcttaaaaaaaaaaaaaaataatta

SEQ ID NO: 19843 - DNA, 324 bp, Gossypium hirsutum
  Clone ID: LIB3146-021-Q1-K1-D3
gatgcgcactatataaaggtaaatggagatgctttcgaatgctcttttcgatctctaaaatttgtcaatatcacttttgttgctgaagggaataggattcctgtgcctaagttaaccaagagaaacgagacgaggatcaagctgagttttggaaatggagcttgaactagaaaaggtttggcaagtacatgcagtgatgaccagagctttgaaaccaataggcaagatggatctgtatggtttggggttcgagccagatatgggctaaagaaggaagcagttgtagaagaatcaagaaagaagaatggcaagaactttagatct

SEQ ID NO: 19844 - DNA, 293 bp, Gossypium hirsutum
  Clone ID: LIB3146-021-Q1-K1-D4
gaagaagtctgggcctgaacttcctcaacttttgacccaattctctgctggcattgccgggactggtcttgctgttgtcttttctgttttctgtaaggtagcgtatgtgagagccccattgtgtacatctaacctctttagcactagccttggtttcgggctagtttggctctcctgggcagttaacagactgagggacacgattgtacatatcagcaagaatactggcaagttggatatgaaagaaaaagagatgatttagagagttgagaaaagtgttgatgacatctact

SEQ ID NO: 19845 - DNA, 369 bp, Gossypium hirsutum
  Clone ID: LIB3146-021-Q1-K1-D5
aggaggtgacttcaccgccggaaacggtaccggaggtgaatccatctacggatcaaagttcgctgacgagaacttcatcaagaagcacactggtcccggtattctctcaatggctaacgctggaccgggaactaacggatctcagttcttcatttgcacggctaagactgagtggctcgacggaaagcacgttgtgtttggacaagttgttgaaggcatggatgtggtgaaagccattgagaaagttgggtctagcagtggaagaacttccaagcccgttgttgtcgctgactgcggacagctctcttagagaagaaaaagagaactatgtgttaagctgggatgttgtctaatgtctagaatatttaa

SEQ ID NO: 19846 - DNA, 420 bp, Gossypium hirsutum
  Clone ID: LIB3146-021-Q1-K1-D6
tggatacttcaggttggagctctgatcatgtcgcttttcgcatgcttggtattaagcaaggaaacactgtttgccatgtattttctcaaggtaattttgtttggattaatcagccatcggatatcgctgccggtgccatataagtgttgaactgttcgatggagcactcatttgccactacgtatggagactctgatcccgatataagtatttaaaagctagtcttatgttcactaggtttcatggtgtttcggtaatggtgtgactttctatctgtattaagtatcaagtaattaagcaataaaaagtatgtattagagttaaaattatattattttagtcgtcattacattaatgccacgccatatatttttaaaaattattaaataatataacacttgtgtttttatttttcttaat

SEQ ID NO: 19847 - DNA, 349 bp, Gossypium hirsutum
  unsure (1)..(349): unsure at all n locations; Clone ID: LIB3146-021-Q1-K1-D7
cccacgcgtccggggttaatggtgtttcctgatgtgttgagcagcagcagcaattggtgattatataagatattgtatacatgatacatttaaaagaaacaaccaaatgtttagcttatggttgagctctgaagcggaactgctatttgtagatctagaagaacaggatacttacaggctgcactctaatcctttcttgtattcatttaatttttcatactaatttctcagaaaaagcgtcttttaccttgtgaggattttaaattttgtttcagatgacatcagttgaagacagaaattcacctgngatgcatatatatgcntgtgtgtgtgtgtgtgtgtgtgtgtg

SEQ ID NO: 19848 - DNA, 357 bp, Gossypium hirsutum
  Clone ID: LIB3146-021-Q1-K1-D8
gatcagtagagctccgctttttgcagagacaaaaatggaagacaaaacttctcagttcaagagtgcagacattgacgagaaaggtatcagaaaggagaagccagaggagttggtcatggcccttgctgaagcaaaggcagacgcaatcttacagaggcttcctgtcagtgattatgtaaaggaagctgagccaacattactaattacttctgatcaagtggtggtctatgaaggtgttataagggaaaaaccggccaatgaggaagaagcacatcaatttataaaaggctattcaagtgggcatgctgcaactgtgggatctgttctagttacaaaccttaaaactggattcagaaa

SEQ ID NO: 19849 - DNA, 388 bp, Gossypium hirsutum
  Clone ID: LIB3146-021-Q1-K1-D9
agagaatgtacaattagccacagaatttgatattgtcaagtcggatcctgcgactgggattgcaataaatggtacctctgaacacgtccgcgcctcggtcgaggctagcctgaagcgccttgatgttgattacattgatctctactaccagcacagggtcgacactaaaacaccaatagaggatactatgggggaactgaagaagctggtagaagaggggaagataaagtacattggtttatctggagctagccctgaaactataagaagggcacatgttgttcatcccgtctctgccataaaaatgaagtggccgctttggactcgcgatagcaaggacgaaataatccccctcttcagggaacttgggattgggataggtccatat

SEQ ID NO: 19850 - DNA, 371 bp, Gossypium hirsutum
  Clone ID: LIB3146-021-Q1-K1-E1
agatctaaatggtctctttattatttgttctaagatgaaattccactttagctcatgtaggaaatacgttaccatagtacacaattatagatgctaaacataagaacaaagtgatgattcctgacaaagcaatcttgtcagcgcctccgctttcacctcctggtgaggggtggagcagatgtggaagaagtagcttatggtgtaggagctagaagaaggtgtaaaacaagtaattgaagcggctgcttttgaaccaggttgctgaaatttcctcaatttgtaagtgttcctaaacaatcttaactatatgtcattggaaggcaaatgctgtggctccatccaaaaagggtgtcggattcgattgcttttta

SEQ ID NO: 19851 - DNA, 455 bp, Gossypium hirsutum
  Clone ID: LIB3146-021-Q1-K1-E10
ctgtctcgcttgtgagttggattgaggggaaggctgaattgtctctggttgttgccttgatatcacactattctactgcaactagccagcttgtgaagaaatgtttggatgtgtggagtgtgtagctcagtggagtgtttctcgtgaacctcataccatgctattgcaatgaactgcagttgctgtttggagtggaccggaattttcatggaggtgcatgataatccattaaatgcaccggttgatggtcccactcaatggccactgcgccatttggaggaacttctggaagagctaattgcaatagctggagtaagcaaagggaagaaacgcttcaacattgatctcacaccctattcaggttaggaagattccaagagttgttcgagtggataagcaagtgattgtttaccgttaaagcacgtttaagtagaaacagcggttgattcttgaat

SEQ ID NO: 19852 - DNA, 427 bp, Gossypium hirsutum
  Clone ID: LIB3146-021-Q1-K1-E11
caaattttgtatgagggaaggaactgtaacaatgatcccgggcaaaggtcgaccactgactcaggaagattgtgaaggcggaaagtttgcacctttgatgctttttgactgcaggggttacgagcctgtagggtttgtatttggcgttggctggaaggttgaatctctggaaggaactaaatttgaaggtattgacttatctggagatgacttctgaatatgatgagaagggagagtgccctgtgatgatatccaacctccgttctacttttgaaccggtgaagtagagtaatactgcacactgttttagtaaataaaaactaacaggtcaccaagaatgaggtagaaaccattgaccggaatacatgttggcattaagctattatatcctaaggtggtctgatgtgaaacattacaatttggtgca

SEQ ID NO: 19853 - DNA, 394 bp, Gossypium hirsutum
  Clone ID: LIB3146-021-Q1-K1-E12
cttggtgcttctgtttttgatgctctttatgtctccatatcaaggagaggttactcaggtgcaccgccggcggcagtgacggctagctttggtaggcctggagcgatggggaaagtggaacgaagatatgcgatgaaagagtcgtcgtcgtcggagacaagggcttattcttcagcttgggcgcctgaccctgttacggggtattaccggccggagaactgtggggctgagatcgatgcggcggatctccgggagatgatgttgaatcacagggttagatcacagtagaaacttgccaccgcatgtgatcaccgtagcagagcatagcctgaatgttttgcaaatgtttgggtgcctttgtattttgttttggttttgagttcaaaatctttta

SEQ ID NO: 19854 - DNA, 356 bp, Gossypium hirsutum
  Clone ID: LIB3146-021-Q1-K1-E2
cccacgcgtccgtattccccccattcagcaccgattagggcatccttacccgattcttattttcgtttcctttttctgccctcatcgatttctgcttcttcttccataggtattgcagagttaatttctgtcctcatttcttctgctttcataacaaatcctcaaatatatctcttcaatccaaatctcctgccatttctttactggttctctctctcggactcttttaaatttttttcctgtcatttttttagctttgggtaaccaaaggccaaaacacacacacgctagaatttgttttttgtggttttttaaaatccatgcttcattggagactggttttgagtggatttatt

SEQ ID NO: 19855 - DNA, 339 bp, Gossypium hirsutum
  unsure (1)..(339): unsure at all n locations; Clone ID: LIB3146-021-Q1-K1-E3
ggcgaaccacccttccgccaacccttccgaagaacaagccaaggtgcttaaacatccgccagtgtgcatagggccagtgtgggggtggggcataagaacaagaacaagtcgaagagccgaagtcgctatcactcatctgccaaattacctgcactggcttcttcatcccgttaagatattttaccagtaatttgcctggacaattcatgggcatttttttctttatttccttgtttttgctttgtgagtgaacctaaaagactgcttgcttcgcagacatatcaaccccgctctgttttctttntgtatgtttgggaatttgatttgtggttgtgtggg

SEQ ID NO: 19856 - DNA, 462 bp, Gossypium hirsutum
  Clone ID: LIB3146-021-Q1-K1-E4
cccactcgtccgaagaacaagccaaggttcttcaacattcgccagtgtgcataggggcggtgtgggggtgtttcataagaacaataacaagtcgaatagcccaaatctctaacactcatttgtcaaattaccttgcactgtctatttcattccctttagatatttttccagtaatttgcctggacaatttattggcatatattattattatttcctgtttatgcttttttagtttaactctaaattactgatttctttctaaaaactatttacatacctctttattttatctatattgatatgtttttctatatatcaatttaatattattttatattttttacatataattttatattttttattaatcttatctttaattatatatttgcttgacttcttttttaaaacttttatttattattttatttattacttatttacttttactttatatctatt

SEQ ID NO: 19857 - DNA, 365 bp, Gossypium hirsutum
  Clone ID: LIB3146-021-Q1-K1-E5
cccacgcgtccggcgagcggccgctcgcgatctagagcacgtcctccttattttcagatgatcaaggaggcgcttttggctttgaaagagaagagtggttcaagtccgtacgctatagccaaatacatggaagagaagcacaaggcggtgcttccagcgaatttcaggaaaatcttaggtcttcagcttaaaaactcagctgccagaggcaagctgataaagatcaaggcctcttacaagctctccgaagccggcaaaaaagagaaagcccctgttacaaaagctaagacagaaaaaaaagcttaacccggcttcaaacccgaagaaagctgaggctacaaagaagccaacaaaagagagtcggg

SEQ ID NO: 19858 - DNA, 394 bp, Gossypium hirsutum
  Clone ID: LIB3146-021-Q1-K1-E6
gaggcagtcgaaagacgatccgccgactgagctcgatcgggccgcacgttcttcatgtccggtcatttttcctgcatactcccggcctgaatttttacccttgtaaaaattttggccagggagaataacgcgctgaaacagcgcgtcatctgctcatgcacagcccccgcaagccctttcagacccacccccatcgcccacgggagacaagatgcccacgaaccaggattcacgcccgacggccgaatcggatcacggagaattctcgctgagcgaagtcccgctcgagaaacgcaccggatttctgtccatcacgatggtgctgctgagcttcacgttcttcaccggcacgatgtttgccggcggcaagatcggcgtcgccttcgacgtcgtc

SEQ ID NO: 19859 - DNA, 280 bp, Gossypium hirsutum
  Clone ID: LIB3146-021-Q1-K1-E7
cccacgcgtccgccagctataatgtcctactgggatcttagccaagctgagaggagcaagtacgggattttggataacttgattcgattcagcttcggggttgaagacttcgaagatttgaaggccgatatactgcaggccctggagaccatagcttaaatagcgttttgatgtgtttagtatttttcctagtctaaatggagcatgttgatctccaaaagtactttctgttgtgtttgattttggtagatccacattggttgaatgaagtcatgatttt

SEQ ID NO: 19860 - DNA, 418 bp, Gossypium hirsutum
  Clone ID: LIB3146-021-Q1-K1-E9
cagagacgacaaagcaaagatattggaagacaattatgctactgcgtacttccacaagacttctgtttttgaaaaccatggtgaaggtgacaaattaaagagtttggaagacaaatattccacggcttactttcacaaaacaatatcttccaaaatgatgaaggatcacaacatggaacatcaccacctttaccataaccatgttgaaagtgcagagataggcttgttcaccattgatgaactacatacctttcacgtagggaagaaattacccatctgtttccctgtaaaaaaccactctctttaccctcctctattgcctaaacaaattgctgacaccatccctttttcatcttcccaagcttctaatattctacgattcttctcagtttcttcggactcccccaaaggcaaagct

SEQ ID NO: 19861 - DNA, 319 bp, Gossypium hirsutum
  Clone ID: LIB3146-021-Q1-K1-F1
cccacgcgtccgagcgcactgagcagatgaactacctgcgtctcgcttcccgactcgatgctgtagttgccaggctcgatacccaggctaagatgaccaccatcaacaagtccatgggaaatatcgtcaagtctctcgaatcttccttggccaccggcaatttgcagaaaatgtcagagacaatggataaattcgagaagcagtttgtgaatatggaggtccaggcagagtttatggagagtgctatggctggctctacttcattgtccacaccaggaggtgaggtcaacagcttgatgcaacaagtggctgatgatta

SEQ ID NO: 19862 - DNA, 393 bp, Gossypium hirsutum
  Clone ID: LIB3146-021-Q1-K1-F10
cccacgcgtccgatactgtgaagcagatccagagcacttgtagccaaattattacattttctcactttgttcctaggcaagagctctgtccagagaaaagaatgctgttctatccaaacctcccaaaaatcattggctctgattggctcgaggatcgtataaggtctatacacggggttgaaagtagttcctttgcatgtcatgtgttcggccacacgcatttttgctgggatgctgtcgtggatggtatcagatatgtacaggcaccattggcatgccctatagagaggaaaagaagaatgaatgggggtgagactttggtaccatttcgtatttatttggatggggaatttggtgccaaaattatgccttgctattggtctgatttttatg

SEQ ID NO: 19863 - DNA, 363 bp, Gossypium hirsutum
  Clone ID: LIB3146-021-Q1-K1-F12
cccacgcgtccgcggacgcgtgggtgaaatttgaaaagaagagaaaaaatgcataatccaccaccaccagacccccaccatcctcatcatccccaccacccacatccgcaaccccatgctccgcctccaggtccgccacatgctgatcatcctcctccaggccatgctcctcctcctgggccaggcccccatgcgccaccgccaggaccaggtggtccaggtcatcatcccgagccacacaagcctcgtccatgatccttataccgtgtatacaatattatgtaagcttaggctgggtaccgtacttatgtaataaattaagaaaacctatttctactataataataataaagatgtaatttc

SEQ ID NO: 19864 - DNA, 352 bp, Gossypium hirsutum
  Clone ID: LIB3146-021-Q1-K1-F2
cccacgcgtccgcccacgcgtccgcccacgcgtccgcggacgcgtgggttcttattcttcttcttctttttctccttaccttgctaactctcttgggtcactttgcaaggcttgtaaacctgaggttgaagtggaagcactggtaatccaggggccaaagctggggacagtgatgagccaagtgaagaaacttgaggtttcagtgttggtactgggtcaaaaaaggcattctccatttctaagctgtgtttgtgggagcagcagcacagatgagttcgtggagcggtgcatcaacatgcagattgttaaccattggggttaaaggcaaagcaaggcgtggggggctatctta

SEQ ID NO: 19865 - DNA, 352 bp, Gossypium hirsutum
  Clone ID: LIB3146-021-Q1-K1-F4
aaaaaaaaatatataaaaaaaaaaaaaattttaaattttaaaaaaaataaaaaaaatatgtttaaatttaaaaaaaaaaaaaaggggcggccgcatttaaggtatccatgttttctttcgcgtgctttcaacgtattattttttttatatgtttacttaaattcaattccctggcctttttttaacatagtgcgccttacaaaaatacggtttttttcctattttacaactgtggatttgatatcttatctgctgatcttcgttatattattttgtattcatttcgttttgattttattaaaaattttccatcttattttttcattgttatttactctttattccgattttt

SEQ ID NO: 19866 - DNA, 342 bp, Gossypium hirsutum
  unsure (1)..(342): unsure at all n locations; Clone ID: LIB3146-021-Q1-K1-F5
cgcccngattcccggtcgaccaccgtccgggaaaataagggaagatggacttacacaacagtgtaaggactggttggggagtgcttttgggttcagacctggcctactgttgaactgtgttctacataatgtgctgtttaaagaaaacaaacatgccttttaagtaattggtcatgctccacttggcttgcaaatttatctaatacttttatcctttcttaaattatttaaatcctattaatttttgtgtgtattgagcaagactagaacactttgattgtatggacggtaagcttaactcctattcaattcatgtaccaacttatattaaatttatggcaa

SEQ ID NO: 19867 - DNA, 381 bp, Gossypium hirsutum
  Clone ID: LIB3146-021-Q1-K1-F6
gattgtctgagtcttggttcatgcaggtcctagttattgcaagagcacaacgccagattatgcatcagttagacaatctgagcaatctaatacatgaataccggggagaaagatgtcgccaagaaaggaacgatcgatcaaacagagcaattgacgttgagactattggtgttccgcttatctttactctagcaattggtggtttaggagtaattttgtttaggaatctaacatcccaaaagtaacatcatcacttggaggtccaaattgcaatttctggcatcatgaaaatggtcttatgcccttgtgctttaaaggaccatggaaggcaaacacacgtaccgtaggttggcatggaaaaattgtaaatattggaaaaac

SEQ ID NO: 19868 - DNA, 263 bp, Gossypium hirsutum
  unsure (1)..(263): unsure at all n locations; Clone ID: LIB3146-021-Q1-K1-F7
ttaacatgctccaaatcccttggaaaagccactatccgtcgtcctttactgtcttggataacaccttccaccacccttttggcggtcccttccacctattgcagttcgaacagtcttttagctactacctaaacctacaggcgcaacatcaaatatgcacaaaaaagaagaagaagaagaagaagaagaatgaagaagaagaagaagaagaagaagaagaagaagaaaaagagagtnaagaacacaagaataatagataaaag

SEQ ID NO: 19869 - DNA, 305 bp, Gossypium hirsutum
  Clone ID: LIB3146-021-Q1-K1-F8
cccacgcgtccgtttcgatgctattacttctgagaagttccatgcggtgttattacttttgggtggaagtgaactgacttcacgtccctatggtgttgaaatgtcagctcagaaccaatgggttgttttggactttacgagaggatttaactaatcgtatagagcagtctttttagatatatttctttagaagagataagagcgatgcttttattataaagtcttgtttttggtttgtttagaaatttgtttttatttagcagttgtatttagtggtctattttaattttttaatattaattttt

SEQ ID NO: 19870 - DNA, 393 bp, Gossypium hirsutum
  unsure (1)..(393): unsure at all n locations; Clone ID: LIB3146-021-Q1-K1-F9
cttaaagagaccttaaaatggagagcagaatacaaaccagaagagatccgctgggaagaggttgctcatgaagcagagacagggaagatctacagatcaaattatatagacaagcatggaagaacagttcttgtcatgagacctagttgccagaacacaaagtcaactaaaggacagataaggtatttggtttattgcatggagaatgcaattttaaatcttccaccagacaaggaacagatggtctggttgatcngattcaatggctacaacttgtcacatacatcagtgaaagtgacacgggaaacagcacatattttacaagaccattatccaaagcgtctgggcttggcaatactatacaacccacctaagttctttgaaccattcttg

SEQ ID NO: 19871 - DNA, 370 bp, Gossypium hirsutum
  Clone ID: LIB3146-021-Q1-K1-G1
cccacgcgtccgcccacgcgtccgagatcttctttcaaccgcgcctaataaccgctcggatttttctcagacgtgaaaaaaatggggctgtctttcaccaagctattcagccggctatttgccaaaaaggagatgcgtatactgatggttgggcttgatgctgctggtaaaaccaccattctttacaagctgaagttgggagagattgtcactaccattcccaccatcggtttcaatgttgagaccgttgaatacaagaacatcagcttcactgtttgggatgttggtggccaggacaagatccgaccattgtggagacactattttcaaaacatgcaaagacttattttcgtggttgatagcaatgatc

SEQ ID NO: 19872 - DNA, 413 bp, Gossypium hirsutum
  Clone ID: LIB3146-021-Q1-K1-G10
cccacgcgtccgcttctcaacttagaacctacaatcttacagcaagtgatttggttaaagatcacttgcgatatttgatgggaggcagattgaatgtagaaaacgaggttctatgccgatttgttttcccggagaggcctggtgctttgatgaagttcttagacacatttagtccacagtggaatattagtttgttccattaccgcggtcagggtgaaacaggagctaatgtgttggtcggaattcaagttgggaagagcgagatggaggagtttatacaaagatcggaaagtcttggatacgagtatgtattggtaaccaatgacagcaatttccaacttctgatgcattagttaagaaataagttctcatatttatagaaatagaatatgtagctcgcaataaaggttaaa

SEQ ID NO: 19873 - DNA, 328 bp, Gossypium hirsutum
  Clone ID: LIB3146-021-Q1-K1-G11
tggaattctgcaaatggcttttaacatgttatcaatcaatagttgaaaaaaaaaatcatgttaaattcatatctaatttattttagcacttagaattgattgcaacacatctatatttgtttttccactttgcacccttcaaggttagctgaggatgtcttagtgggagtttatattagcctgttgtgcagaaaattcatacatgtattggggatagagattcaagggttcccccccccccttcctgtatgggtattgattttgttccattatgactctgttaatgcaacgcatagaattcagtagtgcatagggttataaatatacc

SEQ ID NO: 19874 - DNA, 321 bp, Gossypium hirsutum
  Clone ID: LIB3146-021-Q1-K1-G12
agccaacctttccgcagctcgctaatgggggcttacaagtacgtgtcggagctatggaggaagaagcaatcggatgtgatgaggtttttacagagggtgaggtgctgggaataccgtcagcatccaaccattgttagggtcaaccaccctactcgtcctgataaggctcggcgcttgggttacaaggctaagcagggttatgtagtttatcgtgttcgagttagaaagggtggtcgaaagaggcctgttcccaaaggtattgtctatggttagaccacaaacaacggttgtactcaattgaagttccagcgcaacaagcgg

SEQ ID NO: 19875 - DNA, 214 bp, Gossypium hirsutum
  Clone ID: LIB3146-021-Q1-K1-G2
attttacaataagattctttttcttctttttcttcttcttcttcttcttcttcttatttttgattaatggttaacaaagtataaagtaataactattgtgaggaaatgacaagggagttttaactgcgataactgaatgtgttgttcacattgttttcaagttaattatataccagttgcatattatggttggaacaccattaccatccagctt

SEQ ID NO: 19876 - DNA, 382 bp, Gossypium hirsutum
  Clone ID: LIB3146-021-Q1-K1-G3
gcagtgtcggagctgaacgagaaggatttctggaggatgttcgatgctgacctgtatgagcatgtgcgtaggaagtacggagctgtgggaacattcatgagtgtgtactacaaatccaagaaaggaaggaagaccgaaaaagaggtccaagaagcggagcaagcccaccttgaaaactgcctatgcagaggctgattagtgagcatgggggagtttggtagattttatgtgagaagaatctttgcattctctttgttgtctctttaatttagtatttgctttcaacgatggtattatggggggtcggaactgatgttatgggataagtttaaacagtgaatgttgggggatgatttattgctatagtttaactattattgat

SEQ ID NO: 19877 - DNA, 391 bp, Gossypium hirsutum
  Clone ID: LIB3146-021-Q1-K1-G4
gcatatagtaatagtaagcagtaatagcaatggcctcctccatgatctcatcggcaaccattgccaccgtgaaccgctcctccccggcacaggccaacatggtggcccccttcaccggcctcaaatctgcctctgctttcccagtcaccaggaaggccaacaacgacatcacttctcttgcaagcaacggtgggagagtgcaatgcatgcaagtgtggccgcctcttgggaagaagaagttcgagactctctcatacctgcccgatcttactcccgtacagttggctaaagaagtagattaccttcttcgctctaaatggattccttgcttggaattcgaattaaaagagggattcgtgcaccgtaagtactcgagcttacccacgtacta

SEQ ID NO: 19878 - DNA, 325 bp, Gossypium hirsutum
  Clone ID: LIB3146-021-Q1-K1-G5
gtttttgttggaggaagtaggcatgccatgggggcttttgccacttagagacatcgaagaatgtgggtacgtgaaggacacaggtttcgtgtggctcaaacaaaagaagagcatcactcacaagttcgaaaagatagggaagctggtttcctatgcaactgaagtcacggctgtcgttgagaaaggcaagatcaagaagctgactggggtgaagaccaaagagcttttggtttggatcacactgagtgatatccaagtggatgatcctcccactgggaagatcacttttaagaccccttcaaggctgtttaagactttccctgta

SEQ ID NO: 19879 - DNA, 338 bp, Gossypium hirsutum
  Clone ID: LIB3146-021-Q1-K1-G6
cccacgcgtccgcccacgcgtccgataaagaaatggctccctcacgcgccgatgagatggataattgggcgtcggctaagaaatcgactcgtgctgggaacggatttggggttggatttgagaggagagagagaggagggggagggttttttgattcgcaatcgaaagccgatgaagtagataactgggcatctaataagagtagtaaaagcgtgaatgctgctgcaccgccacggagatttggtggggggtttgagagaagaagcagtttcgattcacttcaaagggattcccaaagggatttggataattggggaaagaaaaaagaagagactggc

SEQ ID NO: 19880 - DNA, 311 bp, Gossypium hirsutum
  Clone ID: LIB3146-021-Q1-K1-G7
gggcaagcccttacagctacagggcagagcttgctttgaagttgaaaggtgtttcttatgagtacataaatgaggatatctttggcaacaagagcgatttgcttttgaaatacaatccggttcataagaaagtcccggttcttcttcacaacgggaaaccaattgtagagtctcttgttatacttgaatacattgaggaaacttggaagcataatccctatttgccacaagatccttatgacaaagctaccgctcgattctggatcaagttcatcgacgaaaagtgctttcctaccctttggctagctgca

SEQ ID NO: 19881 - DNA, 211 bp, Gossypium hirsutum
  Clone ID: LIB3146-021-Q1-K1-G8
cccacgcgtccgtttcgatgctattacttttgagaagttccatgcggggttattacttgggggtgtaagtgaactgacttcatgtccccatggtgttgaaatgtcagctcagaaccaaagggttgttttggactttttttgtggttttaatcaactaaataaagcaagctctttagattgatttctgttgtatagataagagctatgcttt

SEQ ID NO: 19882 - DNA, 398 bp, Gossypium hirsutum
  Clone ID: LIB3146-021-Q1-K1-G9
cccacgcgtccgcccacgcgtccgcccacgcgtccgggcagatgaatctgccggatcgatttgacatctacagtgctggtctcattttccttcaaatggcatttccatctttaaggacggacagcgcattgattcaattcaaccgtcagctaaagaggtgtgattacgacttggttgcatggaggaacaccgtcgagcctcgtgcaagccctgacctccgcaaggggtttgagctgctggatttagataatgggataggatgggaacttctgacatcaatggtccgctataaagcaagacaaagaatcaatggcaaagcagcactggcttacccttactgtgacagggaaaggctattagctttatccttcgtacaaaatctgaaagtgcaagtcttt

SEQ ID NO: 19883 - DNA, 225 bp, Gossypium hirsutum
  Clone ID: LIB3146-021-Q1-K1-H1
tttacatttcagacaacaaagtgatattgactgagggttttgatggggtggtacctgtcaagtgctttgagaaaaatagaatcatggccagacagaaaacctatacctttctcaaatgtttaaaattggatgaaatgatcagcttttttttttttttttcactttcttttaaacctgtgtgatgacaaattttgaattgggatcttataaaaagatgttccattt

SEQ ID NO: 19884 - DNA, 358 bp, Gossypium hirsutum
  Clone ID: LIB3146-021-Q1-K1-H10
gcccaagctaatttccactcttttcttcttcttcggtttctgtaattttggtttaataatggcgaataccgagttgaaatccgataatttgtttgagatgatgaaagctcacttggctagtgatgctggtaaagagctcaccaagaagatcggcctcgtttaccaaatcaatattgcccccaagaaaattggatttgatgaggtttcttactttgttgacctcaagaaaggagaggttaccaaaggtaaatatgaagggggaaagcctgatgctatattttcgttcaaggatgatgattttatgaaggttgccactggaaagatgaatccacagattgcttttatgaggggtgcgatg

SEQ ID NO: 19885 - DNA, 357 bp, Gossypium hirsutum
  Clone ID: LIB3146-021-Q1-K1-H11
cttcaggaagctgcagaagcataccttgtgggtctctttgaagacaccaacctgtgtgcgatccacgccaagcgtgttactataatgcccaaggacattcagttggctcgtaggatcaggggcgagcgtgcttaatttccaagtgtgttaatcacacacttagaatggagaaactattgtttgttgttaggcaaatgtgttgtactatttttttatgtttatttttaatcctcttttaggacaagattaaatgataggtttatcttagtgcgtaagttccaatgttatgatgaaatggggttatggtggagagtgtgatgtctgatattttaatggataagatcttatgtcttgtat

SEQ ID NO: 19886 - DNA, 378 bp, Gossypium hirsutum
  Clone ID: LIB3146-021-Q1-K1-H12
gttgaatttgaattcaaaatgtgggaaagctgcaaaatcgaaaagaaagaattttcaccagaaagagaagctgaacaggaatcccttgaggaggaagtggaatcaaaagtggagggtagtgagagtgttgatataaatggttcgacagaaaacattgatgatggcggaaactcaccatcaaagcaacagcaacagaaaaagaagaagccattactacgtaaattcggaagcctactgaagaagaagggaagcagcaaccagaagtagataaccaaaatcagccatggcatgatttagtccctaccaacagacaggtatattggatactatcttgcagctgaatgtgtttgcttaatttgctgatttgcttctaatgtt

SEQ ID NO: 19887 - DNA, 374 bp, Gossypium hirsutum
  Clone ID: LIB3146-021-Q1-K1-H2
gcaacatcacgccttattgtgcatgaaagtattgcggcagaatttttggacaggcttgtgaaatggagtgagaacattaaaatttcagatcccttggaagaaggttgcaagcttggccccattgttagtagagggcagtatgagaaagtaatgaatttcatttcgaatgctaagagtgagggagcaactattttgtatggtgggaatcgtcctaagcatttaaagaaaggattctttgttgaaccaaccatcatcactgacgtaacaacctccatgcaaatatggagagaaaaaagtttttggacctgttctttgtgtcaaaacatttaccaccaaaaaaaaaagccattggaatggcaaaatgatacccatta

SEQ ID NO: 19888 - DNA, 260 bp, Gossypium hirsutum
  unsure (1)..(260): unsure at all n locations; Clone ID: LIB3146-021-Q1-K1-H3
aaaaaataaatcggtgttgaagaacaacgtaaagagccatcgatcatcatctcagcagcatcacggtgatgtaatcacttgtgcaaagcctcagtcgaaacccaagattaagtctaagattaaatcatcaagaaaattatgacaaccgattttcattttttttttacatttttcctttactttttttttttgtattttcttttataatgtatgaaacatctcattttgttggtatatatttggctgcagattnccngnna

SEQ ID NO: 19889 - DNA, 420 bp, Gossypium hirsutum
  unsure (1)..(420): unsure at all n locations; Clone ID: LIB3146-021-Q1-K1-H4
ggaannacccgggntcggacccacgccgnntccgctcttggtcgtttttcacttatactnnctggccttcaaacctccttccgagcccttannnatctgcgttgatgaaggacatgagattgcccgatttggggttttaattcattnntcaagcgtcatcgcgagaaggtgcgagcctcaatttgaaaaatggtgcaattttatgtgatttcatgtgttcttagaacttcacacgttccctccagatggaaaccggggtttggagaaaaatcactgtattgccgttttgttattattgtcttgattgtttagtttaatcttttattctgatttctgcacgtagatttcagctcgtaatgctggtcacttggcaagcacgtattgcgccctagccatactaaagacaggtggctttaatct

SEQ ID NO: 19890 - DNA, 302 bp, Gossypium hirsutum
  unsure (1)..(302): unsure at all n locations; Clone ID: LIB3146-021-Q1-K1-H5
ggaaaacttgcgttgtgcgaggcaactggacgtgcgagcaagaacgtggagcaatgggacggttgctgcggcgtgaggacgtgtgtggcgcanggcaaactgcctaaggtttctgctgaactttttgggccactctgtaattgggctaggattaatagtttgggctttattgacttgggccttattgggccaaatgtatttgggccgttgttttatttttttatgcttatttatttgggcccgggcttaaaattgggtattacaattatattttagtaataatataaaaaatttattattna

SEQ ID NO: 19891 - DNA, 283 bp, Gossypium hirsutum
  Clone ID: LIB3146-021-Q1-K1-H6
cggggcgcccacgcgtacgtttcatgaagctgcaaaagcataccttgtgggtctatttgaagacaccaacctgtgtgcgatccacgccaagcgtgttactataattgggaaggacattaagttggctcgtaaggtaatgagcgcgctctctttaatggcaagggtgaaaatcacactgatggcggaaacttaaccatcaagcgtcgaaggcaaatgtgttggactatttttttatgtttatttttaatcctcttttaggacaagattaaatggattggttttt

SEQ ID NO: 19892 - DNA, 417 bp, Gossypium hirsutum
  Clone ID: LIB3146-021-Q1-K1-H7
cccacgcgtccgcccacgcgtccgcccacgcgtccgcggggataattggaggacagctcaagctgttgctagggaggtgggtatccgagatgttagggcagaggtaatgccggctggaaaagctgaagttgtgcgatcattccagaaagatggaagcatagttgctatggtgggtgatgggattaatgattctcctgcactagcagctgcagatgttggtatggcaattggggcagggacagatattgccatagaagctgcagactatgttttaatgagaaataacttggaagatgtgatcacagccatcgatctgtccaagaaaacatttaaccggatacggtggaactatgtttttgcgatggcgtacaatgtggtggcaataccaattgctgctggggttttgtatccatcatt

SEQ ID NO: 19893 - DNA, 405 bp, Gossypium hirsutum
  Clone ID: LIB3146-021-Q1-K1-H8
ctaaaggaccctgcagagagaccttctgttgaggatgtgatgtggaacttgcaatttgctgctcaagttcaggacgcatggcgtggagattcccggagcagttctcctggcggctctccttcccaacctgcaaacctccccgttgccttccattagtgataactttcaggatatggcaacacaagaggaacccttggtttgtttgggaggatagagaagacaaagggttggaaaagcgtttaatctgatggttttgtataaaatatgaagtttcagaacttaaccattggaccaaaagtaattttactttgttttatttctattcttcttaccaagcaaagtctcgggaagtttaagcactctattctcttcatgtgagaatcaaaataatgtatagtttcttac

SEQ ID NO: 19894 - DNA, 213 bp, Gossypium hirsutum
  Clone ID: LIB3146-021-Q1-K1-H9
ctatctatgtatgcttttctctctgtctctctgctattgtccccccttctttacagatttgcgaaaggctttatagccttaaactactggctattttggaaaggaatcgggagaattcttggcctctttgaattcctttccttttcttgctctgccttttttgtgtatctgctgcttgtttccttttcttgcaggtgactcgcgaagatttcg

SEQ ID NO: 19895 - DNA, 278 bp, Gossypium hirsutum
  Clone ID: LIB3146-022-Q1-K1-A1
cccacgcgtccgtgttcacaagctcatgcacctagaggaactgatagatattttccttggacacgattggccgctcagcatcactgattatgggaactggcaatgacttgtttgctgcaaaaaaaaagattcaaagatgagatccagcaaggaactcttggaagcaaacctgctgctcagctgctcgaaaaactcagaccatcgtattggttttcagctcacttgcactacaaattcaccgctctttgtgaacatgaaaaaggtggtcgagtgacaaa

SEQ ID NO: 19896 - DNA, 447 bp, Gossypium hirsutum
  Clone ID: LIB3146-022-Q1-K1-A10
cggctcccaaggtttctccaaccatgtctccaaccactacaccaaccgcatctccgccgtgaacatccactcccccgtcttcagcccctgaatcttcaccaacttcctctcccaccacttctcccccagctcctcccgctggttctcccgctggttctcccgctggctctcccgctggctctcccgctagcgctgtttctcccacaaactccatcagcgatacaccaggcagctctcccacttctcctacgagtgcagccgctttgaacagggtcaccgtcgccggatctgccgttgcagtcgtttttgctgctttgttgatttagatctgactttcgggggaggacaggatttggatttgatgatttttattttaggctcattgttaatttcttatttttagtagtgtatttcttttggttttatttatttttatttatattttga

SEQ ID NO: 19897 - DNA, 445 bp, Gossypium hirsutum
  Clone ID: LIB3146-022-Q1-K1-A11
tcgcccacgcgtctcgctatttaatatgaacctatcgacgaggttgccatccaaaatctgcggacgtacaaagaaaagaaatttgttgatattagcaaggaagatttagaacttggtgatgaagatgaggtaaaagagagggaaactaaacaagaatacaaccttctctgtgattgggtaaagcaacaacttggagacaaagtggccaaagtccaaatttcgaagcgtctatcctcttcacctagtgtgcttgtttctggcaagtttggatggtcagccaacatggaaaggttgatgaaagcacaagcccttggagatactgcaagtttggagttcatgaggggaaggaggatactagagattaatccagatcatccaattatcaaggatttgaatctgcatgcaagaatgcactcgaaagcagtgatgccaagagagctgttga

SEQ ID NO: 19898 - DNA, 352 bp, Gossypium hirsutum
  Clone ID: LIB3146-022-Q1-K1-A12
tgatattgggatggctactctttgattcggagctgacactgaaaaatatactcgggatggcgattgccatcctcggcatggtagtctacagttgggctgttgaagctgataaacaaacggaatccaaggtttcaccactccccaaggaagcttctgaagaaaatgttgaattgttaaaacaacagcagcaatcggacggttctccgctcaaggacgttgagcttggcaaatatcagccttagatttgtatgttcttcatttttttgtttcttttttaaatattgatttgtttaatgttttaagcacttggaattggctgtacaaattttaaaagtttactaatttttttcct

SEQ ID NO: 19899 - DNA, 435 bp, Gossypium hirsutum
  Clone ID: LIB3146-022-Q1-K1-A2
cccacgcgtccgaaaagaaaatggggtttcgtgagttatgtgtggggttaatgatgatgatgattctcctgaaaccaattagcggcagagatgccgccctagtacttaggagcaacgccacttaccagtgcaatggccttctcggcggctgcgttatccgggaagaattggagtcggagctggatttgttgatgatagattctaccgttatcagaatcctcaagcaaggtagcggtcacatatctatcaacacgtttataaagggtaagccagcagtaaatcaaaatgactgcggtcctagttatgggaattgtgttttaaaacccaagccaaatggacataattctaattgtaacggtaatagcccttattgtaaacaatgatgtttatcaacctatctatgacaataaacgccctattcattattcgaatcgt

SEQ ID NO: 19900 - DNA, 282 bp, Gossypium hirsutum
  Clone ID: LIB3146-022-Q1-K1-A3
gttgttccagcgccaggattgaggttgaagagctattgccacagtcacacggatataccgaacgtcagtttcttttgagaaaatctttagcaatccatattctgcggtgtaacttaggggaaatgcaacaggaccaagttcacagttgtataaaggatatcatgaagaaacgtgcgattcacattcactcgggaattctaaccctggcctctctctgcaatcagtcaggtgggcactaccctatagaaaaactatacgaaccatggtggcaataaagacatg

SEQ ID NO: 19901 - DNA, 356 bp, Gossypium hirsutum
  Clone ID: LIB3146-022-Q1-K1-A4
cccacgcgtccgcccttgatgagatctctcccttgacatttagcgtcgggaacaccatggagcgtatatctgttatagtctcctcaatcatcatcttccacacgccggtccagcccatcaatgctctcggagctgcaatcgccatcctcggaaccttcttgtattcccaggcaaaagcgtgaggaaaatcggggttttgagagtttagattcatcatgtaccatagatgatgaaaaaaagagcaaatatcatctggaagaagttacctcagatgagatcatgttttaatgacttttgtctttagtattggattgatgctggattatcgtcatagtgtagatatatataataatgat

SEQ ID NO: 19902 - DNA, 430 bp, Gossypium hirsutum
  Clone ID: LIB3146-022-Q1-K1-A5
aattaaggatccaaaagccagtcttgatttttactctcgtgtgttgggcatgtcgcttgttaagatagtggatgttccagaattgaagtttaccttgtactttatgggctatgaggatgtttccaaagctccaagtgatccatacggtagaacagtttggacctttggaagggcagctaccattgaattaacacataattggggtactgaaagtgaccctgagttcaaaggatatcacaccgggaattcagaacctcgtggctttggtcatattggcatcacggtggatgatgtgaataatgcatgcgagagatttgaacgcctgggagtagaatttgtcaagaaattaaatgcacgcaagatgaaagggattgcattcattaacgatcccgatggttacttgattgaaatttttgatttgaaaaccatt

SEQ ID NO: 19903 - DNA, 276 bp, Gossypium hirsutum
  Clone ID: LIB3146-022-Q1-K1-A6
caaatctgattatatgccacctattctcactacttaggggatctttactgggatcttgagcaataataacttgaatagttaggtgttactggctgtggtactgacaataaaacttgcttttgagcttgtgtcatagcctgcagagctgcattgttgggttgatattgcttttccgatagctgtgataccgagtggtgattctagtgctgactggtataataaaacttgtagcctaacgtgtatgtgtactgctgttattgctaatgatatggtaaa

SEQ ID NO: 19904 - DNA, 277 bp, Gossypium hirsutum
  Clone ID: LIB3146-022-Q1-K1-A7
tcgaatatcgattccgatgatcgagtcaaaattttgaaatctttattcaatatagctggagcggatcccaacaatcaaacaattataaaaaaatctattgtaataaaagaaataagtgaaaaagttcctcgacggtcatacaaattaatcgacgatttagaacaacaagagggagaaaacgaggaaaatgtaacagcagagcatgaaattcgttcaagaaaatccaagcgcgtcgtgatttttactaataaccatccaaacgccgatgcttatacta

SEQ ID NO: 19905 - DNA, 382 bp, Gossypium hirsutum
  Clone ID: LIB3146-022-Q1-K1-A8
ctgctgtgcaacagaaggtcttgaagaacctcaacaaccattcctctctcgagacccggtcaacccctggccggccatgggtgagagggtgggatgatataaaaaaaggtcgcgacagcccaatcaccggaaatcagtagcttttcttttgcctttgaggtaacaggttctgaaggcttgtttatttcgaaacaaattaaggtttgtaatatgtaatttcttcgatattgtatgctagagtatgaaataaggatggctgcattgctgcagtgaagctggagatgtaagaaaaccctgaatgtatttggtataggccttatttaaagtgatctatagcataaaaattgtggcttgaattgacatttcttctctatgctttagc

SEQ ID NO: 19906 - DNA, 389 bp, Gossypium hirsutum
  Clone ID: LIB3146-022-Q1-K1-A9
caaaaggaaaaatcgatggatccagacgctgtagccaaggcttttgtcgatcactactactggacattcgatgcgaaccgggccggtttagccaatctctaccaggaaggttccatgttgacctttgaaggtcaaaagatccaaggatctcagagcattgtcgctaagctaaccagccttcctttccagcagtgcaagcacaatatttccaccgttgattgccagccatctggcgccggcggcgtcctcgtcttcgtctctggaacactacaactcgccggcgaacaacatgctctcaagtttagccagatgtttcatttgatgccaacaccacaaggaagcgtttatgtgttgaatgacatattcaggttaaaactacgcgtgaagag

SEQ ID NO: 19907 - DNA, 387 bp, Gossypium hirsutum
  Clone ID: LIB3146-022-Q1-K1-B1
gtgaagctgatcccttggattctcaggtggtcagcattgcgaaattccaagggggtggtgcattcaatgtcattcccggattctgtcaccattggtggcactttcagggcattttcaaaaaaaagttttcttcaactcagacaaaggattgaggaggttttttcgaaacaagcaagcgtgcaaagatgcaatgcgacagtgatcttcgacgaaaggtccatgtaccctgtgaactcaaacaacaaagagttgcatgagcatttcagaaaggttgcaggggagattttgggctttgagaacattatagaaatgcaaccgcagatgggaagaaaagattttgcattcttttctgagtcgatccctggactttttttctttcttgggatg

SEQ ID NO: 19908 - DNA, 305 bp, Gossypium hirsutum
  Clone ID: LIB3146-022-Q1-K1-B10
cccactcgttcgtctcaacacatgtgatgggaacctttggttacttggctccggagtatgcgatgaccggtcaccttcttgtcaaaagtgatgtttatagttatggggtggttctacttgagctcttaacagggaggaaacctgtggacttgttacagcccccgggtcaagaaaatctcgttgcatgggctcgtccactccttacagacaaagaaggtctggaaatggtcatcgatccagccataaaatctgatatctcacttgatagcatagcaaaggtagcggcaattgcatcaatgtgcgtg

SEQ ID NO: 19909 - DNA, 423 bp, Gossypium hirsutum
  Clone ID: LIB3146-022-Q1-K1-B2
ggaacaaagctgatctagtggacctcagagccgttccaactgaagacgctggtgagtgcgcaggggatcagggcctattcttcgccgacacgtccgctcttagcggggacaatgtggataaagcttttttcaagctgctgcgtgagatttacggtgtgctttgtaaaaaatccttggaatgtgggaatggaaaactcaacggtgctgatcacgccaccgcgttgaaaggatctaagattgaggtcatcgctggtcctgatttagaaatgagtgagatgaaaaaattatctacctgctcttgctgatcttgctttcatttaaaggaatggatgctttattaaccttattttattcgatatttgcatttgtgctcttgggttggttgtacatttcaatcatatcgcatattatatgtatgaatat

SEQ ID NO: 19910 - DNA, 223 bp, Gossypium hirsutum
  unsure (1)..(223): unsure at all n locations; Clone ID: LIB3146-022-Q1-K1-B3
aaaatcacgtcggacgtggatgaagaaaatcgtcctaactcttcttatccnncccgtaaattatttggctcnaactctttttcgcnnntttttttttactttgtttcaaccttaacgttatttcattttacttaaaaatggaaaaaaagggaaaagaaaaaggagagctctttgggaaanaacgaaaatgaataatgagaaaataataaattcaaaagaaaac

SEQ ID NO: 19911 - DNA, 427 bp, Gossypium hirsutum
  Clone ID: LIB3146-022-Q1-K1-B4
ggacgcgtgggcggacgcgtgggcaaggtgcctgtctacctgggtggcatttctgttggtgtatgttttatggctgctgtggtgtcccttggaatttctatcacaattgtgcctcaacaagtgatgccatggactggtttgttcttgatgtatgagtggacgtttacaatcttctttcttttgtttggagcttttcttcatttgatttatcagcagggaaggagaatagtgacgcaactgaccccagtttctgctgatacagatttgtttaactctgattctaaaaaaagtttacaaatacataaaatattgtacatagtcatgataaaatacaatgtgagttctcttttcatattcgtctaacactgttggtttacaaaacttgtatgttcattttcagatcatcgacaggcattctcttgtgata

SEQ ID NO: 19912 - DNA, 430 bp, Gossypium hirsutum
  Clone ID: LIB3146-022-Q1-K1-B5
cccacgcgtccgcggacgcgtgggttcatcacaacataggtcgtcgaaaggatctgggggactcaccaaagcacgaaagccaggatctttcagaaaatggattcctattcgaagagtgcataaccgcatggataagctcacactaacccgtcaattttggatccaattcgggattttccttggggggtatcagtaaggaattggaatgtaataatattgattcatataagaggaaaaggttctctattgattcaaatgctgtacctatgggatagggatagagaaagaggaaaaaccgaagatttcacatactgcttttgatcgaaaaatcaatctgatttatttcgtacccctcgctcaatgagaaaatgggtcagattctataggatcaaacctatgggacttatggaatgatggaaggggaatatat

SEQ ID NO: 19913 - DNA, 434 bp, Gossypium hirsutum
  unsure (1)..(434): unsure at all n locations; Clone ID: LIB3146-022-Q1-K1-B6
gaagaaatgaagcttctggctgaggtggaccaaccaggcagccacattgacaatggtgggacccagctgagcttcgttctttcacgcaaggctgctagtctggtgagtcttcaagctcgccttgcccggttccagcatcgactgaaagagcaggagatactgagtcggaaaagagttcctcgttgatgccagctctttgttctctgctttcattgctgcatcagactctgtccatcgatgcacggagctgcattaaggtcttgagaggaaattcagcagtgtgcaaagatcctgatcctatttcccccaacatcaaacgttgcagatcgcgtttcttcaaacgcaatggcaaagataattcangtgcaaatacttgtgtgatgcttgatttatcaaaatgtgtattgttttagatgaatctgataatggtctgg

SEQ ID NO: 19914 - DNA, 401 bp, Gossypium hirsutum
  unsure (1)..(401): unsure at all n locations; Clone ID: LIB3146-022-Q1-K1-B7
ctgaaacgcaaatctcgctttcggaaaatcctcaaatggcagaccaaccgcaggggtatgaactcaacaatggaaccgtggttgttaagatcaccaactatggctgcactatcacctcattgtctgttcctgacaaaaacggtaaattagccgatgtcgtcctgggattcgacactgtcgaaccgtacgtgaaaggtgcttcaccttattttggatgcattgtgggaagggttgcaaacaggataaaaaatggcaagtttactcttaatggaacggagtacactttgccaatcaacaagcctccaaacagtctccacggtggattcaagggttntgacaagaaaatatgggaagtagcagaatataagaaaggcgacaaaccctccattacttttaaatat

SEQ ID NO: 19915 - DNA, 322 bp, Gossypium hirsutum
  Clone ID: LIB3146-022-Q1-K1-B8
cccacgcgtccaccaaatctgacaaaatctaaaaaacgttttcaatctttcctttgcttgtgcttactttaaatccccttgtgctcattgatttttccctccatcgaattaccaaggcacaccacactcggtggccaacaacggctaaaaatgggtctttcaaccctgtttcaaagccatgttcggataagctgtctcttctactcttattttttttttttaaagaagatttatatatattttttaaagaagaaaacacaacacacaaaaatgatatttttgtttgaatcacaaggggagaaaactcccctattcttcgctt

SEQ ID NO: 19916 - DNA, 447 bp, Gossypium hirsutum
  Clone ID: LIB3146-022-Q1-K1-B9
tcggtaattgggaggtctccttgttgttagaataggtccacatacaaaggatcatgggctaggaaagaatattagcgtttgataacttacatccaaactcatggagagggttgttggagatcccttccgaaagctgctggccttctccgttgtggtaagagttgccggcttcgatggattaactatctccgccctgatgttaagcgaggtaattttaccgacgaagaagatgaactcatcatcaagttacatagccttcttggtaacaagtggtcaatcatagcagggagactacctgtgagaacagataatgagatcaagaatcattggaatacccacataaagaggaagctagtgagcagaggtattgaccctttgacacatcgaccggtcaatgaacaagctgcaattcacaccatatatacagtctcatcaacagcagttcta

SEQ ID NO: 19917 - DNA, 379 bp, Gossypium hirsutum
  Clone ID: LIB3146-022-Q1-K1-C1
gtcaaaataccagttactttgatatatgatgatatcaaaagtacatatgatgacattaagcctggcagcatcattccatataggctgaaagttgatctcattgttgatgttcctgtttttgggaggttaactttacctcttgagaaaactggagagatccctataccttacaagccagatatcgatatggagaagatacactttgagagattctcttgggaagaaactatagcagttcttcatttgaaattggagaatatgaatgactttgacttgggactcaatgcccttgactatgaggtctggctatctgaggtcagcattggatctgcagaacttgaaaaatctgcaaagataggcaaaaatggaatcagttata

SEQ ID NO: 19918 - DNA, 448 bp, Gossypium hirsutum
  Clone ID: LIB3146-022-Q1-K1-C10
cccacgcgtccggttttctgtcttcctaacttctaaccttttttgtgtgattttcttcggggccaaacagctattaagagcaaatggcagattcgacggtcatcaacggcgaagtggagaatcagatggcggacaatttctacgacgctgatgaagccaaattcactgaacaggatagcaaaattaaagcgcttgaaagtgagaagctggacctgagcaacgagaacaaagagttgaaggagaaggtgaaaaaggcgaccttagaaattgatcaactgcgaaacaaggaagaagaaatgaggcaagaaatggataactgggacgaagataagaaggtcctgaaatcagttgccacgagatcggctgatctcgaaaccgaggttgcgaggcttcaacatgatctgatcacttcgatgagtgatgcagatgaagcgaacaaacagtcgat

SEQ ID NO: 19919 - DNA, 432 bp, Gossypium hirsutum
  Clone ID: LIB3146-022-Q1-K1-C11
gccgagtcacggaggttactctcgactctgctgcttattccggttctctctcttcgatttgctggaacctcccttacttgcaaacccttgacctctccaacaatttcttctccggcaggattccaggctcactctccaacttgactcggttaactcggctgggtctttcaaggaatgcattttccggtgaggtaccagcctcgattgggtccttgtctactcttgaagaactctacctcgataacaacaacctacaaggtcctatccccccgacttttaatggtcttggtagcttgaaaaggctcgaaattcaatcaaacaacatctctggtgagttacccgagttgggttcactcaaaaacctgtactttcttgatgcaagcaacaatgtcatttctgggtatttgcctacaacgctgccaccttttttag

SEQ ID NO: 19920 - DNA, 450 bp, Gossypium hirsutum
  Clone ID: LIB3146-022-Q1-K1-C12
aaaagctttatactatatcccctaaaagctttgcaagtccggccactgtcgctccagcattgaacttggtgttcggtcatgcgcaaagttgagtctctaactccgctcaagccactcggagggttagttgctccacaacatcaagagaatgaagggagaaaacccaaccccctcccttgatccgaccttggaggaatcgaggctccaaacgacgaaccaaaggtcacgaagacgtggaggaggaacgggcctgggacgtgctacacgcgagctggggcgaacatgcgtaagggttgcagcatgtggtttacaacgtgggtgacctaaggtttcctaggttggttgtataaattttgagcaatgggtattgggtctgtttaatggaaattgaacctgtttcatttttttaggtttatttattttttggtgatttgggcctgggcaattttt

SEQ ID NO: 19921 - DNA, 364 bp, Gossypium hirsutum
  Clone ID: LIB3146-022-Q1-K1-C2
cccacgcgtccgcccacgcgtccgcccacgcgtccgctcaccatttttatcatctcttggtcggcgttgagaaaatagctccttttggtttgtagtctgtactaacggaactaggatctttcctataatcatctaaatttgtgctttttcttttctttttttctctcatggattgtcttttgaatttgtatattgatggccctttgtgttctcacactttccttcaactactttggatttagatatgtttgatctgttaactgaaacatggagaaattgcttcctattgtttcttgtgatgtaatctgatctagtatgttttaatgaactaatattatatttgtggttttggagttaaacaaaa

SEQ ID NO: 19922 - DNA, 425 bp, Gossypium hirsutum
  unsure (1)..(425): unsure at all n locations; Clone ID: LIB3146-022-Q1-K1-C3
accgcggacgcccgtgggcggacgccgtgggcaggacttcgtgggccggacgacgatgggggattattgggcgtnttgggccgctcctaaacccgaagtggtggatcactttaccttcagnnagaagctnnntattagcngaaagggattcacgcgtttatagtattgggaatcgacgggaaatctactgaccaanaaccgtcggaatatttgaaagtctaaaggggcgtgctctaaggtgaagcgcgtttgaccgcttcccacaattgattatgggtgtttgactcgttgtgctcattgtgataaaatattcgaataacttcatgctctacaaatgaaggcaaaaccgtgtggcgtttgtcatctattttgattatgaatttctatcacctcatgtcctacaaatgaagcatgcattttgatct

SEQ ID NO: 19923 - DNA, 367 bp, Gossypium hirsutum
  Clone ID: LIB3146-022-Q1-K1-C4
cccacgcgtccgcccacgcgtccgcccactcgttcgcccacgcgtccgcaaaatcaactgcttgacaatggcctctacaaccatggctctttcttccccatcattcgccggtaaggcagtgaagttctccccttccacccctgaaatccagggaactggccgtgtttccatgaggaaaaccaccaagcctgttccttctggtagcccatggtacggtcctgaccgagttttgtacttgggtccactttccggtgagccaccatcttacttgaccggggagttccctggtgactatggttgggacactgctggactctcagctgatccacagacctttgctatgaaccgtgagctcgaagtcattcac

SEQ ID NO: 19924 - DNA, 323 bp, Gossypium hirsutum
  Clone ID: LIB3146-022-Q1-K1-C5
aaacccgggtgcgacccacgccgtccgcgagacgccgtgggcctggtacttatccataacctttggcaagaacatgttctgggcatggcgcgtggttgtgatctaagtgtgctgcttctctagtggaggtaggatattgctgagaaagatggcatgtcccagcatggtcaacgttcttccaatcaccacattggggtttcctctcaaagaagcttgctggtttacactgaagttgcttgaactgtttggtccactgattttatgatgagtcgattatctgctagggagacattctaggtccatagtggttcaagtgtgatttg

SEQ ID NO: 19925 - DNA, 427 bp, Gossypium hirsutum
  Clone ID: LIB3146-022-Q1-K1-C6
cgaggtcccttctttacttaacctcgaaccagttgggaaggcatatatgatggggggtgttcaggaacttcggttgggacccaaaacaaggcgagagtaatctggattttagtatgcttcatctaagaaaatgaaggaaatagggacgttctttggtaataggacaaaggcttcaatggttagaaccttgaaacaaagcatggaacaaatctatatcaattccaagtgcttttaatagaagaggcttttgagaaatgtagcttttacgaggtcccttctttacttaacctcgaaccagatggtgctttttcaaaaagaatggtcgaatctgaccatcaaattctatctgcttaggtgattatcatacttcaccgctgcttatctcttatgttaatcggattcacgtgtgagtttcagatattttatg

SEQ ID NO: 19926 - DNA, 329 bp, Gossypium hirsutum
  Clone ID: LIB3146-022-Q1-K1-C7
ggaagagaaactaaaagataaacctggattcgaacaccttaatgagccgttgcgggttgtgtggatgctgaacttccccaaaatataataaattctcgtttggactacgctgttgccatactaaaaaatcttctgaaacctgtggatgaatccttggataactataagaaacaacaccttatggaggtggctttactcaatggtacattaaaggaagagagttccagaatgagcccgactattaaccctaatatgtcacccttttaccggactggaatgaaacccgcccagacacgaagatgacccttattgtgacaagatgttgagtc

SEQ ID NO: 19927 - DNA, 459 bp, Gossypium hirsutum
  Clone ID: LIB3146-022-Q1-K1-C8
gaaaacccgggccgacgccacgcgtccgcccacgcgtccgcccacacgtccggtttttgtaggaaatttgcctattaaagcgaagcgtagagtcttgttgaaggagttcactaagtttggagagattgagtctgttagaattcgatctgttcctctaaatgatactaagaagccgagaaaaggagctataatgttaaagcaaattaatgagaatgctgatagcgttcatgcgtacattgttttcaaaactgagcaatctgctgaggcatctttagccaataacatggctgtgattgcagaaaatcacattcgtgttgatagggcgtgcccgccgaggaaaaaaatgaaagcagagaatgctcctctctatgataacacgaggactgtttttgttggtaatctcccatttgacgtgaaggatgaagaaatttatcagcttttttgtggtatcaataatct

SEQ ID NO: 19928 - DNA, 412 bp, Gossypium hirsutum
  Clone ID: LIB3146-022-Q1-K1-C9
tccactcttccgtccactcgttcgttctcatctcccaagcgaggtttcacttgcagaagcgaggctattccatctgataactcaactccggaaaaagttcaagaactacatgtgtatgagttgaatgagagagatcgtgggagtccagcttaccttcgtttgagtcagaaatctgtgaactcactgggtgatcttgtcccttttagcaacaaaatatataggggagatttggagaaacggatcggaataacatcacgaatatgcatattaatagagcataaacccgaaatgaaaggtgatcgctacgaggccatcttcagcttttacttcggagactacggtcacatagcggtgcatggaccttacttgacttaccatgacacgtatctggctattactggtgggtctggca

SEQ ID NO: 19929 - DNA, 432 bp, Gossypium hirsutum
  Clone ID: LIB3146-022-Q1-K1-D1
attctcgaatctccgatgttttcgccgttgatatacatccggcagcaaagatcgggaaaggcgtcttgttagatcatgccaccggtgtggtgatcggagaaaccgcggttgttggcaacaacgtgtcaattttgcatcacgttaccctcggtgggactgggaaggcatgtggagatcggcatccgaagattggtgatggagttttaatcggagccggtgcaaccatattagggaatgtgaagattggggaaggagcaaaaatcggggcagggtcagtagtgctgatcgatgtgccacctcggaccacggctgtaggcaaccctgcaaggctcgtcggagggaaagagaaaccgtcaaagcatgaggaatgccccggagagtccatggatcacactttattcatctctgaatggtcagattatatcatttgat

SEQ ID NO: 19930 - DNA, 390 bp, Gossypium hirsutum
  Clone ID: LIB3146-022-Q1-K1-D10
gcttctactataacaggacattctcggaataaatggtccattgtttcagctctttctctaggttgggggcagcttttgttggttgctaacttcctatactgcatatttacttttgtaggcaaataattccatgagagtcttcagattgtaatctttatttttgttggtagatttaggctccaaattttttttgtaaaatttcctgtagatggtttgtaaagcataaactctaggatttgcatcagaactctgtaatagtttataggcactttggaccgagaattcacccgacgattctcctcccagatgaagaagtcctcgtgaggtgtttgtgtcaaggggatccgaaggattcttccagcgtcttcttctgtgaaagtattatttaac

SEQ ID NO: 19931 - DNA, 447 bp, Gossypium hirsutum
  unsure (1)..(447): unsure at all n locations; Clone ID: LIB3146-022-Q1-K1-D11
cggtgttgtttcaagtatccttttcgttttctatgctaaaataatgcaagcaaatcgatggaaaagagggaaagatttgaaatcacctttagataacttttttgatttcttttctactatttagaatatgtattgtagtgtgtgtatctcgtccccaaaaaaaaagagagactttacaatcgaaatacgcagggcttatagccaaaatccccaaaagatcaaaacataaaaaataaaaaatacaacttttctttgtttttctatttgctactgctgtggtttgtctgttcttcgcaagtacggggtgcgttggcatcgtacggaagctgtgctggcgcgggcgtggctgctggagggtacagaagctggggctgctgcggcgcaaacagattgctagggttctgccctattnttgaatcttgggccacttgggctgatataatttgg

SEQ ID NO: 19932 - DNA, 308 bp, Gossypium hirsutum
  Clone ID: LIB3146-022-Q1-K1-D12
agaaaagtgcctagaaaacaaggatcgcagttggttggtttatttgccgatatttggtatggacatactagaccgcaaacttgggggaaatcatgtgtgaacttttattatgttgaatatgtaggaaatttcgtaataaagttgttgggattcttagtttaaaaaaaaaaaaaaaaaaaaaaaaaaaaaaaaaaaaaaaaaaaaaaaaaaaaaaaaaaaaaaggggggtcaatattaaaaatacaaaatttattaaagggggcgggcgactacaaaaaaccatttttatgtccccttaattaaaaata

SEQ ID NO: 19933 - DNA, 215 bp, Gossypium hirsutum
  Clone ID: LIB3146-022-Q1-K1-D2
atcctagcatggcggataagcaaagcctttgtatccatctaaatccgaaaataaagaagggggggtgcatgaatcgactcacattcagaaaaaaaaagaaaaacagaaggtcctgtcaaaactgtgagcataggccttacaaaaggcatcattgggacggtctgggcttaagaagagcggcatgaaatgatgtgtttttaaaacctgaactaaac

SEQ ID NO: 19934 - DNA, 422 bp, Gossypium hirsutum
  Clone ID: LIB3146-022-Q1-K1-D3
ctgctcagattggagcagcagcaagtaatgcatccttgcttcgtggtctcggtattgtggcgtggtcagcaccacaagaaaatttacaatggggtcaggcacaagtggaccctgacaatgcctccattgcagcaggggttggactcgggcttccctgtgatggaaggcaggattaaaggaactgatgatgggaaccccagtgttcggtcctaagcaaactactttcgatttccttggattgggggtagctgccggtggcaaccccaatgccagcctgtcagctctaattacccctatcggaggaagatttgatgctgccacggcggcagcatcgtttcgaggtggagattacaccgacaaggacattggaagaagctcgtgatacattgtgaagggttatctattatcaaaatatacggcat

SEQ ID NO: 19935 - DNA, 338 bp, Gossypium hirsutum
  Clone ID: LIB3146-022-Q1-K1-D4
atccatgcaaggcggcaaagctaaaacttttaagcaacctaaatactataacaacgagtgcggggggcatgattatggctaacattcagaacaagaaagaagaagataaggtccttaaagagctcatagcaaaggcattacacaagggatcatctggtggtactggtcttaagaaaattggcatgaaatgaggcatttaaaaacctcaactaaaccgaacttattgagacatgtcttgggattaaaacatatattatgctaatgtctcttcgctcaattgtgattgtattgatgattagatggactagattcattccgagtttgctataaaaaacatt

SEQ ID NO: 19936 - DNA, 254 bp, Gossypium hirsutum
  Clone ID: LIB3146-022-Q1-K1-D5
cggacgcgtgggtttggttctccttgctgaacttagcaccaggatccagttcaaggctggtggagagggcaagttccacactttccatcctgtggctacaatcctcagttacctcaccaaagcccctcttgttccaccaggcacaccggtggtgaacgcactgtccaagcagcgtgcaatgctggagaacatactaagggccagcattggcttggctcctgaaaacaacatgattttggaatacaagtgaaaaa

SEQ ID NO: 19937 - DNA, 393 bp, Gossypium hirsutum
  Clone ID: LIB3146-022-Q1-K1-D6
cgttctcctggtccatggtcttctcttatgagaagatcacctgatggatttgggggccgttgggaattacctcatcgaagatcaccaccactttacaggatggagagaataaggtcacctgatcgtccttgttttgctggcgaaatgggtgttagaaggcatggatctccaccatatttgcctcaaccctctaatgatttgagagacctggatcccagtcgagatcatggtcatccaagatctggcatctctaataagagcccatctggtcgaattttacttagaaacagtagaaggttggatcttgtagatcctcgagaaaagaatgaatgtgacgattactttggtgggcctatgccctctggcaaggttcatgatctttgaactgatggg

SEQ ID NO: 19938 - DNA, 405 bp, Gossypium hirsutum
  unsure (1)..(405): unsure at all n locations; Clone ID: LIB3146-022-Q1-K1-D7
gcagaacaacatatacagtaggcccgagttaatgatgttcgtataaattgctggggtggggggcagatatcacttttggactgattttattggactttgaatgttctcctttactactgctgtaggtagttaaaaaattagaactcttaggcctataatgggattgtgacattgtttattagtattaattttggactgtgtgatgtaattgcatgctatgaaatgaaatgattatatggcaaaccaacaaaaaaaaacccaaaaaccgaccgtaaaatttttattcctcctatcagaagaggaattttttcttccacccctccaaaaataaattcaaaganggggggcggcccgtttaaagaatccaaactaacttccgcttccttgcgacatgatatctttttt

SEQ ID NO: 19939 - DNA, 280 bp, Gossypium hirsutum
  Clone ID: LIB3146-022-Q1-K1-D8
cccacgcgttcgatcattttatcattcaaaaccctaaaggccgctcccgccgcaagcgcgcgcgaaaatggcagtctccgcgggattggttcttcgccgcaccatgcgagcccacaccgatatggtcactgccatcgccactcccattgataactccgacatgatcgtcacttctctcacgtgacaaatccatcatcctttggcacttaaccaaatacgaaaaaacctactgcgtctcgcgtcgacttctcaccggacactctcatttcgtccaagatgt

SEQ ID NO: 19940 - DNA, 450 bp, Gossypium hirsutum
  Clone ID: LIB3146-022-Q1-K1-D9
aaatcctccgccgtcggcgccgcctcatcatcatcagcaatgaaagaaagggtaaaatgcgggggcatattcggtggtttcataatcacatcatcatcgtcttcctcctcctcatcttcatactggttatcgtcatcagcggaggagcataacgggaatgggaaagcaacaggagcagcgctgatccatgggaggagcaggagttggggatgggcatttgcaagccccatgagagcattcaccaaaccatcctctggtaagaaagatgctaccaccgtcattagagaatcaaacaacaaaaacacaactcccaatctggctgccattccttccttattagctgttagaagctaaaaatgattccagttaatacgcattacattggcttaattattattacctgtttatttccatgtttattatcatctgttcttaagagactctattcct

SEQ ID NO: 19941 - DNA, 397 bp, Gossypium hirsutum
  unsure (1)..(397): unsure at all n locations; Clone ID: LIB3146-022-Q1-K1-E1
gcagaaanagaaccgtccaacggcaccgagctagagacgccgcgcgaggggactgttggcgcgcggtgtggtggttcgtccgtatcacatggctggttacctggtgatattccacgaagccttctggcccttgcttttgagtaccgaacctgcttaggagcaccacgactatgtgctgtggcgcctgatctagcaacattgggatttgggcttagggnnttagtcttagaattgggcccacctgtgaatacgggcttagggattttaggttttgggccttttatnttgggtgttgggttttgtactancgcttactataatttggggttaatgggttttgaaatttggaatgtaagtggactgttaaagtttggactttttatttttattttnnaaa

SEQ ID NO: 19942 - DNA, 318 bp, Gossypium hirsutum
  Clone ID: LIB3146-022-Q1-K1-E10
gaatacggggccgacccacgcgtacgctctattacattccatcaccagactatgattataaacaaatctgaatgccactgggggaagcattattttacaccaaattactccttctatgcaacttatctatccaaagcacatatcatcacatcttactgatatttcatataaaaatacctatcctcagatactatcaacttcaagtgcactactatgcccaacaaaaaaattaaaataaatcagcctctagatctattacatattaacgcatattagcttatctaaaaactctaaaaaatttttattgataatatttac

SEQ ID NO: 19943 - DNA, 442 bp, Gossypium hirsutum
  Clone ID: LIB3146-022-Q1-K1-E11
cttacatctttttgcacttgctgactaggttgttgaactcgatttcctttatccaagtggggggattcatagaagatgggaaaaaggatatcggattaccgcagcagctgctacagaggaccaagctgcattcatacttagtgcgtccaagagaaaatcacaagatgtaatgcaagaaactttgcgtacatctgcttttcctagtacccatgtaaaggataaatggttgaaaaatctgtatatttcatccatttgctatgggaggacagtgtcctgaagtttggtattcggaagaagcaactgcagtttacaagttaaaaggcaggtaaactatcccggtctattattcaaggccttgaaattaataacagttgatgagtcttgtaaagattccatctgattgcgcattttgtcccgctaatacttaatgctttgaatcaaa

SEQ ID NO: 19944 - DNA, 254 bp, Gossypium hirsutum
  unsure (1)..(254): unsure at all n locations; Clone ID: LIB3146-022-Q1-K1-E12
tggacgcgtgggcggacgcgtgggcggacgcgtgggcggacgcgtgggttgtaacgttcctttttttaggtctgtgtgctttctcacccaaaggtctttttgttggtgccattgccatcttcgttgttttagcttgtaagcaatttatatatatatattatccagtgttgggttttcaaagcattaggggagctgcaggtgtttcacttgtgcgtaattcattatatatatatattatccagncttatttgatc

SEQ ID NO: 19945 - DNA, 177 bp, Gossypium hirsutum
  Clone ID: LIB3146-022-Q1-K1-E2
cttctgaaggtcgccccaaggctgttgaggtcacgggccccaacggcaaccctgttgcggtatgatctagatccggacgcggcggcggcggtggtagcggttatggcggtggatccggtggttatggtggaggaggaaggagaagcggttatggtggacgacgcggtggtggtggtg

SEQ ID NO: 19946 - DNA, 437 bp, Gossypium hirsutum
  Clone ID: LIB3146-022-Q1-K1-E3
cggacgcgtgggtggaggctaaggttgtggaccctgatagtggtaaggctttgaacgtgaaccagacgggtgagcttcggcttaggggcccctccgttatgaaaggttatttcagtaatccagaagcaacgacgtcgacacttgactcggacggatggctgaggactggcgacttatgctatattgatgaggatggcttcatatttatagttgacaggttgaaggagctgattaagtacaagggatatcacgttcctcctgcagagcttgaggcattgctcctttcccacccggaaatcttagatgctgcggttattccgtttcctgataaggaggttgggcagtttccgatggcatacgtggtaagaaaacccgggagcaatttatcggagacaggagtgatggatttcgtgggtagacaggttgccccatataaa

SEQ ID NO: 19947 - DNA, 307 bp, Gossypium hirsutum
  Clone ID: LIB3146-022-Q1-K1-E4
cggacgcgttgtctgacgctcggactgttttttatcacacttatgcaactaaaaacctggaagggagtgtttcaacctgttttattgaacctagatcatgttatctcatgatttcaacttcataattgtttacctaacataatctattaggcatacaactgagatatatggatgaacgtttcatgatgtttattgtgtcattgcagttaggaaggttaaacttcattcttggtctgtgatcacattgcttcctgtggatggttatgatgcttaaacgttccatcatgttttggccttattgaatgtg

SEQ ID NO: 19948 - DNA, 431 bp, Gossypium hirsutum
  Clone ID: LIB3146-022-Q1-K1-E5
cccacgcgtccggtgcttggtccttcgcacggccatttactccattgatgtgggcggtgacagctgcatttttcctcattgtgggatcagttgtgtggatccttgagcatagaagaaatgatgaattccggggccctccaaagcagcaatttgtcacaattttgtggttcagcttctctacgatgtttttttcccatagagaaaacacagtgagctcacttggacgcctagtactgattatctggctttttgtggttttgatcatcaactcaagctatactgcaagcctgacatcattcctcacagtgcaacagttatcatcacccatcaaagggattgataccttaattggtagcaatgaacgaataggcttccaagtaggatcttttactgaaggctatctgatggaagaacttaatattccaaaatct

SEQ ID NO: 19949 - DNA, 391 bp, Gossypium hirsutum
  Clone ID: LIB3146-022-Q1-K1-E6
tctccactcctcccaatgatactcttgtcattacaccccaacaagataccctcctgcggggctgtgacttaatacgagacccacaccacaacacttctaaacaagccgtataacgtcgatccccaacgatattttctacaacataatgacaatcgatcttccgctctttctcatgctggatacaacctgattaacaagctccttacctatgaccctgctaaaagaataacatcagatgatgctcttaatcatgatgctttcccggagctttctctgtcaaaatctaattatttcttacctacttttccaccaaaactgttaattgaacacttttcttggctcatttggcgaaacctgacacaacccaaaaatttttacccccattttacct

SEQ ID NO: 19950 - DNA, 286 bp, Gossypium hirsutum
  Clone ID: LIB3146-022-Q1-K1-E7
caagagtgtcgagaagaatgacccaaccggtgccaaggtcaccaagtctgctggtggggggaagtgaagaggccaaaaggttttacccgtgaaacatattgagtgttttatctttggttatatgtggtttgaagtttttgcctgttttatgtaggatttttaaagtttgagatgctttggtttgccaaggcgtcttaatcaagttttgtgtctgatcttgcggaactatactttgtttttttctatatatttgtctgtttcatttttctgaaaaaataattttctc

SEQ ID NO: 19951 - DNA, 447 bp, Gossypium hirsutum
  Clone ID: LIB3146-022-Q1-K1-E9
ctagattattggcctccacaagacagggatgtcaaccacaggagtctctcactccctgctggtggattgctggccgaatgtcttgagcttaggaagttatttatccatgggacggctcatgaacacttcatgatgttccttcttaaaatacctaacctcagagacgtacagctgagagaggactactatccggcaccagagaatgatatgagtactgaaatgagagcaggctcatgtagtcgctttgaagctgctctaaataggcgacacatcctcgattgaaatgatttactggtgtggagcctagccctgattagattatacacgggaagaacaggaggggtttcaagtacgaaattttcttttttcccttttctagaaaagaaactgtaaaagttcatccaaggtctgcgtttctttatatacatgcaattccctccccaactt

SEQ ID NO: 19952 - DNA, 428 bp, Gossypium hirsutum
  unsure (1)..(428): unsure at all n locations; Clone ID: LIB3146-022-Q1-K1-F1
ctcaaatcacttgtatctctcaattcccgatccgctgccgtagcactacttgtgttgggggtggtggtggcagtgcanacccatactacaaatgcacaaagctgcccgaccgagctgacgagcctgaacgtgtgcgcacctttcgtggtgcccggtgcagctgtggctaaccctatcattgactgctgtaacgcactccaatcggtgcaccatgattgcctttgcagcactctaaagatcgcttctcgactcccttctcaatgcaatctcccaccactcacttgtgcttgaaacaaaagcaatggtgctgcctgcttaatgggtaggaaaatataataacgccatggaatatcgatacctccctgtttttttctttcttttttaatgggtaataataagcaatggtggtggtgaaatggaaactaata

SEQ ID NO: 19953 - DNA, 346 bp, Gossypium hirsutum
  Clone ID: LIB3146-022-Q1-K1-F10
gttctcaataattacagaccaggataaggttcaaatgtctaaagttatgatgggggggatgcttgcaaagagcttgcaagccccggatgtagtgtttgaaaaggtatggcgtgctgtttatttagcttttataggggttgtgtttggggggagtggtgtcttccgttgaaagttggcggaaaatgccctccggctagttttggctgtgacacgcagcggtttacttactgaaaaggttttgaaaacaccacaggtgtttttaaaaacacctacactttctgtccacaagcacgggccttggtatattaccccgattggcaatatgtgattgttttttttggatccc

SEQ ID NO: 19954 - DNA, 420 bp, Gossypium hirsutum
  unsure (1)..(420): unsure at all n locations; Clone ID: LIB3146-022-Q1-K1-F11
gattantgaaacagtgaatggaaagcttattttaggggcaaggattcttcaagtaggagggttggtgaatgttttcaagcagttctttattttcagagaaggagagaagctgttaaaggcttgccaatgttatttatcaacaacagcaggccctattgcaggcttacttttcatctcatctgaaaaggttgccttttgcagtgagagatcaatcaaaatcccttgtccaaatggagaatatgtgagagtccattacaaggttgtggttccagttgagaaaataaagcgggtgaaccacagtgagaacatgaataaaccatgtcaaaagtacatgtaaattgtgacagtggatggtttcgatatctgcttcatggggttcttgaattatcacaaagctttcaaagtttgcagcaagcaatc

SEQ ID NO: 19955 - DNA, 216 bp, Gossypium hirsutum
  unsure (1)..(216): unsure at all n locations; Clone ID: LIB3146-022-Q1-K1-F2
cccacacgtactggctctgttactgtttaaacctcctccactttatatacttgaccacgtttgtgcttctctatatctaanccacactcanaatataaggagaatgattaaggctcacttttcgcactcccagtttattgatgtttcactgaaagagggcatgtttaataatgccaacgttctttttcgaacaaaattcttggatggtgtttccac

SEQ ID NO: 19956 - DNA, 333 bp, Gossypium hirsutum
  Clone ID: LIB3146-022-Q1-K1-F3
cccacgcgtccgatgagttatcaagtattaagaaacaaattcttgaaggcttttcaccggatggtgcatacccattcggtgctccattgtttatggagaccccaaaaccatgttccccacttgcgcaaatggagtttcaagcatttgaagaaattatgccacttgctgcaataactgatgatgaagcctttcctgaaagcaatggaagtcaatcaagtcgcaaagcatcactatcgctcaatacactagatgtgctaagtgtcaatgagcttttggattcggttctggaaacagcgcgacaagtagcaagcttttcagtttcgcctacaccca

SEQ ID NO: 19957 - DNA, 252 bp, Gossypium hirsutum
  unsure (1)..(252): unsure at all n locations; Clone ID: LIB3146-022-Q1-K1-F4
aaaaaagaancgaccgcacgcgtacgggacatggagcacttgaacctctttaaaaatattctttttatgcttttttctangcctcccgtcttaatgccgttcttgtaaatggaaaggaattaacataccgtagttacccatcgaaagcagccactgtttctcctgttcttggttgaaatgccagccaagtagatttagctgtaccgaattttctttaattttagaaaatgcgatacgctggtttcatgaaaa

SEQ ID NO: 19958 - DNA, 409 bp, Gossypium hirsutum
  unsure (1)..(409): unsure at all n locations; Clone ID: LIB3146-022-Q1-K1-F5
aaagaattcttgtggcaacagatttggttggaaggggaatcgacattgaacgaggttggtttgttatcaactatgacatgccanattctgctgatacatacctgcacagggttggtagagctggtcggtttggcaccaacggtcttgcaattacatttgtttcatccgcttcagattctgatgtgctcaatcaggtccaagagaggtttgaggttgatataaaggagcttcctgagcagattgatacatctacgtacatgccatcataaatgaaggttcattcaacaataccagtctcgggccccaaatcatgaatcggntagtgtggttgcggatgtgtatctgtttgtaaactaatgtgtaacgccttttaaatcacatgcttgggagggagcggcagatgcactat

SEQ ID NO: 19959 - DNA, 399 bp, Gossypium hirsutum
  unsure (1)..(399): unsure at all n locations; Clone ID: LIB3146-022-Q1-K1-F6
cgaggaatgccacaaaaatcacttacagatcacaggctatcacgggccttgccgcggctgcgcatgtatgtgcaacaatcaactctttcnacaaaactgatggtgaaacacccatggctcagatcgtttctccacagatgtatccggtggacgtcgattgggaatcagatgaagaagatgaaggggatgatttggataacacgaagcttgtccccatttttgcgcacacgtgacatatctagagcacaacagaactggaattacagtgtacggtttcatggtagacaaaacttggatccacaccatattccggatcgaactagctttactgctttggctactcaacaagacaatagtaaacttgacatgaacaccatatatgacggacagaacttaacc

SEQ ID NO: 19960 - DNA, 98 bp, Gossypium hirsutum
  unsure (1)..(98): unsure at all n locations; Clone ID: LIB3146-022-Q1-K1-F8
aaaaaaagagccgacccaccccaaacacggacccccnnacnaacacaaatacaatttcttaacctttaatttccctccccctctctcttttttttact

SEQ ID NO: 19961 - DNA, 409 bp, Gossypium hirsutum
  Clone ID: LIB3146-022-Q1-K1-F9
ctgaaattttatagcaagactccttatttctccgatgtcgatcttcgaatacaacgggagggccctaatagccatggtaggcaacaactgcttcgccattgccagcgatcggagactcggagttcaactccaaactatcgccaccgatttccagaggatttataaagtccacgatcgcctcttcctcggtctctccggcctcgccaccgatgctcaaaccttgtatcaaaggcttgtctttcggcacaaactgtttcatctaagagaagaaagagacatgaatcctgagacttttgctaaccttgtttctgcgattctttactagaaaaggtttggtccatacttttgccaacctgcaattgctggattaggagatgaagacaagcccttcatttcaccatggattcca

SEQ ID NO: 19962 - DNA, 206 bp, Gossypium hirsutum
  Clone ID: LIB3146-022-Q1-K1-G1
cccacgcgttcgaaatgcttaatcctgatccagagcagcatcttacagtacagaaagtgcttgggcatccatggctacaaaatgccaagaaagcacccaacgttttgttgggtgagactgtgaaagctaggctcaaacaattttctataatgaagctgaaatgaacaaaaaaaaaaaaaaaaaaaaaaaatgcaaccaattctaac

SEQ ID NO: 19963 - DNA, 260 bp, Gossypium hirsutum
  Clone ID: LIB3146-022-Q1-K1-G10
actcgttcttccacacgttcttgaaactgaagtaaatatactgatggtgcggatggtcattaaatgggtgcaaaccctcaacccataattgatcaaagcccttcattctattgaaactctccaagttcaagcttcatgtatactgcccctcctcctccttactcatatgttagccaacctccacctttccctgttgttcaacttcgtggtcttcccttcgattgcacacaaactgatgtggctgaattctttcatggtct

SEQ ID NO: 19964 - DNA, 441 bp, Gossypium hirsutum
  Clone ID: LIB3146-022-Q1-K1-G11
atccaagacgattcgagtaatgtgacgcgcttcgttatgttagctcgggagccaatcatcggtcgcacggaccggccattcaaaacgagcatcgtattcgcgcacgataaagggacgagcgtgcttttcaaagtactatcagcttttgcgtttaggaatatcagtttgacgaaaatcgaatcccggccacaccgcaatatgccgatccggttggtatatgacgccaacgttggaaccgccaagcatttcgagtatatgttctacgtggatttcgaagcgtcgatggcagaggttagagcccaaaacgcgttggctgaggtccaggagttcacttctttcttgagggtattgggcagttacccaatggatatgacgccttggtgcccttccagcggagattaacaaaacctatgaaagttaaaaaaaaaaaaagaaaaagga

SEQ ID NO: 19965 - DNA, 279 bp, Gossypium hirsutum
  Clone ID: LIB3146-022-Q1-K1-G2
taattttatacgtgataagtaccgattgaagtttcctgagcttgaatcgcttgtgcatgatcgggttgattatgctcgtgtggcgaaaaaaattggcaatgagatggatttaacccttgtggatttggaagggcttctgccttcagctatcattatggttggttcagttacagcatcaactaccaagggcaagccactttctgaagatgttttccaaaaaactgttgatgcgtgtgatcgagctctggctcttgatacttgcaaaaaaaaaggtttttt

SEQ ID NO: 19966 - DNA, 409 bp, Gossypium hirsutum
  unsure (1)..(409): unsure at all n locations; Clone ID: LIB3146-022-Q1-K1-G3
caggaattgtcgaagatgcttcattctaagagaagatcatctagacaggcttacctaagatcatagtttatcaatgaaggaactgttatcgttgtttccatttcaagtttcaaatgttacgcttcgcattgcaagaacttcagcctgtatataattcatatgttctgcttcgtagtatggataatgtaatgcaaccattctgacaaattaccacttcgatttagctttataattatcgaannaaaaaaaaaaaagaaaaaagggaaaaaaagaaaaaaaaaaaaaaaaaaagaaaggaaaaaaaaaagaaaaaaaaaaaaaaaaaaaaagaaaaagaaggganggaaaaaaaaaaaaggaaaaaaaaaagaaaaccccgnnaaaaaaaaaaangggggggcgccccttt

SEQ ID NO: 19967 - DNA, 337 bp, Gossypium hirsutum
  Clone ID: LIB3146-022-Q1-K1-G4
ccacgcgtccggtgagagagctcaacccggccaataatttgttgggtaaattcgagctctctggcatggcgggggcacccataggcgttccccaaattacagattgcttcgacattgatgctaatggcatcttgaatgtctctgccgaggacaagactactggccagaagaacaagattaccataacaaatgataagggtcggttgtcgaatgaagaaatcgagaagatggttcaagaagccgagaagtacaagtccgaggatgaagagcacaataaaaaagttggatcccaaaattcattggaaaactattccttccacatgaaggaatctattaa

SEQ ID NO: 19968 - DNA, 380 bp, Gossypium hirsutum
  Clone ID: LIB3146-022-Q1-K1-G5
attgtcaaaaatgcttcaatctaaaagaagatcatcatgacaagcttaactaatgtggggagtgttatataataaacagaacatgttatcagatgttatacataatcaaaacctcaaatgatacgctttgcaatgcaagaactttagactctatataatacatatgttctgcttcgaagaatggataatgtaatgcaaccattcttacaaactaacacatttgacttacctctatgattatctatccattatgactaccgatttgcaagtgtaagttggtggaatgtttatgggtttacttcaaatttcatctttctttgtttgattattgagtgatagcaataattcattccgaacttatgtaaacttttgcctttttt

SEQ ID NO: 19969 - DNA, 218 bp, Gossypium hirsutum
  Clone ID: LIB3146-022-Q1-K1-G6
cccacgcgtacggcaaatccttcaattccgatcatcatggatggacctgggactggaggagcacctttccgaggttttctacacgaaagagtggtccttaaagaagatggcgcagaacttggtccatctctactcttttttggatgtaggaatcggaaaatggatttcatttacgaagatgagctcaataatttggtggaacaaggtgcactatacga

SEQ ID NO: 19970 - DNA, 395 bp, Gossypium hirsutum
  unsure (1)..(395): unsure at all n locations; Clone ID: LIB3146-022-Q1-K1-G7
gaaggaanaccgggccgacccacgcgtacgacacgcgtacgattgtcatgttaagggctttggtgttaacggcttaacggtttgttgggtatacatggatatgcgacgattgatccattcttgactttatgagggtagattttcgcgaggagggttgggagtcttagtcgttttatattaaaatgttctcattttaagatatggaattattgatttgggcgtgggactatattgtgggagatgttgcatcttgttaatttgaacattcttcgcttttgcttattgtgtattaattaagcaaaaaaaaaaagataatttgtaccattttagtcgttatcaaaaaataaaaattatatgttctttggataaaaaaaaaaaaaaaaaaaaaaggccgc

SEQ ID NO: 19971 - DNA, 412 bp, Gossypium hirsutum
  Clone ID: LIB3146-022-Q1-K1-G8
cgaagagtttgaaggtgctgagttagaataacagcttctccagcctgcaacaacggctgctgcagcaccaattcatgtgcctgctggaaggcaaccggctcgtcctattcctcaaaagcacacagccgaggaagatgaactcgccgcattgcaggctgagatggctctttaaggcttacagtagagaactgatttttttttttgcgtggcctacggaaaagagacgccatatttgtattactgaatgtgtgcatttaaagtttgacaaacaatgtacaaaaattatttgtactttgcttccttcaaaaaaaaaccattgattctaagtccttgtacctatattgacttggcttcgtatggcaacaaacttgtgacaaaatcctattggaaaatgccttttgtgttttttagc

SEQ ID NO: 19972 - DNA, 451 bp, Gossypium hirsutum
  unsure (1)..(451): unsure at all n locations; Clone ID: LIB3146-022-Q1-K1-H1
gaaaaaagggcgacccacgcgtacgagngctggtacagagatagngaanattttttgtttctggatggcataaaaatgttcggtaggtgatttatttgtgaaaagtgagaaaaatattctggtaaaagtggcagtttagcctttattttttaaaaaggttgaatctattcaatgcttttctcttctcctgcccttgacagcacattcatttgaaaggataatttggaaaccctgttgcaagagaaggacattcaggctaatcttgtctattgcttgcagcatttgcagttaagatatgaaactgaagacaaagcaaggagacttctaaataatgtgtcatttttgttgaaaccaatggggtatttttttggtattactcctgacttatataccatattgtattcaaaaatgattggcttccncaaaaaattctaatattttatatattttt

SEQ ID NO: 19973 - DNA, 449 bp, Gossypium hirsutum
  Clone ID: LIB3146-022-Q1-K1-H10
gaaaatctttccagtttcaattttctcacaacaaaactgaaaatgtcttgctgtgcaggaaaatgtggctgcggcgctgattgcaagtgtggcagtggctgtaacggatgcagtatgttccctgacataatatagaagactacaactgagactattgttcttggtgtggcaactcagaaaatgcactttgagggatctgagatgggagttggggttgagggtggatgcccgtgtggagacaactgcaaatgcaacccttgcacttgcgggaagtgaacaacaaagagaagcagagtggcctttgtcattttaactaaataaattctattactttagtatgtatcagcaaatcttcatgaggatctggttcttaattatgtgtaatgtggcttttctgctatgtcagaatgtattatgatatttaagaaagtttgttttctattgaaaga

SEQ ID NO: 19974 - DNA, 147 bp, Gossypium hirsutum
  Clone ID: LIB3146-022-Q1-K1-H11
ttaagcaaaaccctatccactctcttctcaactccccaatgggggcttataaccacgtggcggatctattgaagaagaaccactcccccggcatgaggtttttacacacggtgaggcgctgggaataccgcctgcatcttttctatt

SEQ ID NO: 19975 - DNA, 257 bp, Gossypium hirsutum
  unsure (1)..(257): unsure at all n locations; Clone ID: LIB3146-022-Q1-K1-H2
cccacgcgtncgcccacgcgtccgcccacgcgtacggcaataatgaaatatttatgtggtgtataaaccaccctttcactagctttaacaaccctagcaaaaattacaaggtttgctcagttatcactactcatttttgtgacaaaaactacactcataaagctaatcatctatcagatgcctgcaaaaaatgcaatcattcacttaaagcatatagtgcaaatgctgctattgatttatcaatttttttgaattac

SEQ ID NO: 19976 - DNA, 340 bp, Gossypium hirsutum
  unsure (1)..(340): unsure at all n locations; Clone ID: LIB3146-022-Q1-K1-H3
ccaacattcaatagaccacagcaccttaatttcgggagataatcgagaagtggaacatggtttatctgttaaactgcaagttcaaaagctaataatccaagctacttcccatgaaaatttatgccagaactatgttgggtggtgtcccttttggtgaagaaaaacaaatgtatattttgtataaaacctgtacatatctgtatttaatgtaaatatattgttttctttttcattcttctttctctgttagtattgaagataaaataaaattattgtggtaaatctatttatcacattgaattaagttatcaatttcatttttcccatgccaaacangnna

SEQ ID NO: 19977 - DNA, 426 bp, Gossypium hirsutum
  Clone ID: LIB3146-022-Q1-K1-H5
cccacgcgtccgatcaaatcaaaacagaacttccaaagctttcagacaagactagggaggcgtgttcaaagaaccaaacaagccaagtacatggttgatttggacgttcagatccctacaactttcgatccattcgccgaggctggggaatttgatggcactggaaccaaggagtatgttcatatacggattcaacaaaggaacgggaagaaaagcttgacgacggttcaaggcctgaggcatgacctgagctacgagaaaatcctcaagagtctcaagaaggacttttgttgcaacggcaacgttgttaaagacaaagagctcggcaagatcattcaactccaaagcgatcaacgcaagaacgtgtcgcagtttctcgttaatgcctgcatcgtcaaaaagaccaaatcaagattcatggttttt

SEQ ID NO: 19978 - DNA, 254 bp, Gossypium hirsutum
  unsure (1)..(254): unsure at all n locations; Clone ID: LIB3146-022-Q1-K1-H6
cccacgcgtccgcccacgcgtncgcccactctttcggcaataatgaaatatttatgtgctgtataaacgtttttttcactagctttggcaaccctagcagatgttacaaggtttgctcagttttcactactgatttttgtggcaaaaaatacaaaaataaagctaatcatttatcagttgcatgcaaaaaatgcaattggtgagttgaaccatgtaatgcacggtggnttattgattaattaatttttctggag

SEQ ID NO: 19979 - DNA, 435 bp, Gossypium hirsutum
  unsure (1)..(435): unsure at all n locations; Clone ID: LIB3146-022-Q1-K1-H7
caatcatacaatatggggtagtttgaattcttattgaggctttttcttcctaaagtatggatttatttcatatagcatatagaaggaaattgatttcatatagaaagtatagatagattactatgtatcgactgaaccaatgactattcatgattccataattgaatcaatgctccaaactagaggaatgttatggtaaaacttcgtttgaaacgatgtggtagaaagcaacgtgcgacttgaaggacatgatcagctgtggatgtcaaaacccaccactttccgttatgtagaaatgaaagtgctttttgctcgacatcctttgttctattataatcacgctttttgttgggttgtaatgtaaatagtacaggatggagctcgaaaagaaacatccatttttcacgggcaaggatctanggttagttaatggaa

SEQ ID NO: 19980 - DNA, 252 bp, Gossypium hirsutum
  Clone ID: LIB3146-022-Q1-K1-H8
cggacgcgtggggatgtcttagctttttcttacaagattctcttttaactctttttttgttttcttttattgttcctctctctgctgctaagatccttttcagacttgctcttcttcattgctaagaaaattgtgtaggcttatatctggattatcccatcacatggcttttacttttactgttattattctaatgatcgaagtaaagaaattcttgatgtggtactggtattattacacatacaagattgg

SEQ ID NO: 19981 - DNA, 452 bp, Gossypium hirsutum
  unsure (1)..(452): unsure at all n locations; Clone ID: LIB3146-022-Q1-K1-H9
ctaagctccagtttaaaggtgcgaacaagaagggcatcccagtttcaagggacccggccgcactcttggccaagtactctgatcccttggtctacactggtccaataagggcccgaactgggcatgagatattgcgcatttcctcttatttgatgcggaactttaagtccgtgacagtcccattctttgttctgcatgggactgcagacaaagtcactgatccactcgcctcccaggatttctacaacgaggcatcctccaccttcaaagacataaagctctatgaaggcttcttgcatgatcttctctttgaacccgagcgtgaagagatagggcaggatataatcaactggatggagaagcgattaggcaccatagccgaaaatattgatcatatctggtgaatgatcttgcaggacgccatctcaagtgttntttttttcctttctcaa

SEQ ID NO: 19982 - DNA, 296 bp, Gossypium hirsutum
  Clone ID: LIB3146-023-Q1-K1-A1
atcgattccaagtttgtggatcggttagtgaaaattggtggcattgttgctatgcaattaggtgatgaaatctcaccaggttttcaaaaccatccggttatattaatgggtatcttaagaaatatcattccaccattggtgcaatgaaaaagcttggttcaaagaaccatttattggattcttcagctaaaaggaaagcttttcagttaacaacggaagctaaaaaggcagcattgagtggtttggagatgtttgttgaaccaccagaaagctggctaatacatctactgagaaat

SEQ ID NO: 19983 - DNA, 322 bp, Gossypium hirsutum
  Clone ID: LIB3146-023-Q1-K1-A10
cggacgcgtgtgaaaatctcggtaaatgcatggtggcttgccaacaaccctgctaactggaaaaatcccgacgaatttacgcctgaaaggttctttgaagaggaagccaaggttgaggccaacggtaatgatttacgctaccttccatttggcgtggggatgaagaagatgcccaggaattattcttgcattgcccatccttggtattacttcgggtcgattggtacagaattatgagctcttgcctactcatgtgcactgctaaattgataccactgaaaaaggaggacagttcagccttcatatttctgagcattccacc

SEQ ID NO: 19984 - DNA, 406 bp, Gossypium hirsutum
  unsure (1)..(406): unsure at all n locations; Clone ID: LIB3146-023-Q1-K1-A11
ctcctgcaatgcatttgaggagtcttaactgtatttcatgacctaaagttaagactcctgcaatgcatttgaggaaacaaacacgaagaagctgaatgccaacttctctttatatatccgatgtaatagaggttgtatatgtaacaggaggaattgcgtggctttggttagggtagcacatgttttctggatgtgttgtgtccttaaaaaataatgccgatagcggcagctgtgatagttttagatgtttgttttcataatgtctgttatatcgttgtacgagtagtatgtgttgtttttgttgaaacaatcttcatatcttagtgataaatgataatgctgtgtaagcatagtttttagtttgcaataaaaaattccttcttcgggnananaaannnnnnnnnng

SEQ ID NO: 19985 - DNA, 158 bp, Gossypium hirsutum
  Clone ID: LIB3146-023-Q1-K1-A12
aacaagtagaaggtaaaagttttattatacattgagatgcgctcaaggggggctactagggtatgcagtgccgcaaacatgcaaggaaaaccgtggattctacaacaggccatggatagtataaactgtgtttaggtgaagataaatgtgtcatggca

SEQ ID NO: 19986 - DNA, 274 bp, Gossypium hirsutum
  Clone ID: LIB3146-023-Q1-K1-A2
ctttcccagagcctgtaatatcacgaccacgtttgtggacatcggcgatctcgaagctgtgaaaaatgccatcgtcgaaggaaagaccaaagtgttatacttcgagtcgatgtcgaatcccacgctcaccgtagccaacattccggcacttagcatgatcgggcacgagaaaggaacgacggtggtcgtggacaacacgttcgcccccatggttctttctccggctcggctgggtgctgatgtggttctccatagtatctctaagctcataagc

SEQ ID NO: 19987 - DNA, 426 bp, Gossypium hirsutum
  unsure (1)..(426): unsure at all n locations; Clone ID: LIB3146-023-Q1-K1-A3
gaagatgctgccgaacaagttaaaaatggtttgtcaaagattcttgttcatcattatccacttgctgggcgactaaccatcagctccgaagggaagctcatagtggactgcaccggggagggggctgtttttgtggaggctgaagctaattgtgggattgaagagatgggggacataacaaagcctgaccctaacattcttggaaagttggtttatgaaatctctggtgctcagaacttgctagagatacctcttttggtgattcacgtgactaaatttaagtgtggaggattttctattgggatgagcatgaaccactgtatgctcgatgggatngctgctatggaatttgcgaatggatggngtgaagttaccagangcttgccattaaagacccctncatttttagacagaaccatactgaaa

SEQ ID NO: 19988 - DNA, 341 bp, Gossypium hirsutum
  Clone ID: LIB3146-023-Q1-K1-A4
cccacgcgtccgcagcattctctcattctttacccggaacacatataaacactaagaacaagacaatggcaccaaaagctgagaagaagccagctgagaagaagccagctgaggagaagaagacggtagctgagaaagcccccgccgagaagaagccaaaggcaggcaaaaagcttcccaaggaaggcggagctgcggccggagacaagaagaagaagagggccaagaagagtactgagacctacaagatctacatcttcaaggtcttgaagcaagttcaccctgatatcggtatctcaagcaaagctatgggaatcatgaacaagctcatcaatgatatc

SEQ ID NO: 19989 - DNA, 419 bp, Gossypium hirsutum
  Clone ID: LIB3146-023-Q1-K1-A5
cggacgcgtgggtagtattatcgtgtaagtcttaatgttcataagaatttaaaagatgttctccatggtcgtcagctcgttttttcttgctggaccgaaagggagaaatttgttagcgtccataatagttccatagcttttgtaatttgaatcctattaatgttatttatggtccttttcccttgtctgaaataaaaacttagacaagatgaaaatgaaggccaataaaattactgataccatcaagatctatataatcaaggtcccaaaacaatgaatacactgatatctatatctggggcggcccttttaaagtaccaaactttagttacccgtgattgctacgtaataaatttcctatagggcaacttaaatcaaattgacagcccgggattttacaacgtcttgactggaaaaac

SEQ ID NO: 19990 - DNA, 435 bp, Gossypium hirsutum
  Clone ID: LIB3146-023-Q1-K1-A6
gcttgtcctatcacattgtttcttgtgttctatttatgatttgatgagctgagtgcctctatagttaagaaggacactgctgcggaaatggctaagaaacgagagcaggagcgccaaagactggaaaaacttgaagacacaagccgattaagtcgtcaaaggtaccaaatccacagtcgcagtaggagcaatagtcgttctcctccaagaagacatcgacgaagtagaagttctagtaggagccgtaatcgaagatatgtttctcgctcacgttcacgatctaggtcccgctcttactctcgctcgcattctcgttcaaagtctcgctcacccaggtaaaatgcttggcagtgaagacttttctctgaatgatgcttggaggctgatttaatgatggtataaaaaatacagggtaagaagccattcaaagtactg

SEQ ID NO: 19991 - DNA, 388 bp, Gossypium hirsutum
  Clone ID: LIB3146-023-Q1-K1-A7
gtttgaatcaaaggggaaatggaggaagagaagggaacaacaggaagcataaacctaagcctgaatggtaaagaagagaaaataaatctgagtggtcaggttcatcatcttccattctgcatcaaattcaatggcccttgcactgtttctcagtacttcaaacccaaacttaaggggatggagattgatggattagcagtagaggaagcgcattttagaggaaggaagcttcaaggaactactatttctcttccaaatggatatgctggctttgttcttgcgaagaacaactctggaaagaggaaagcttgtgatgtatctgaaggaaactcaaacgattgggaaatgaaagccaaatttgataaattgacatattggaatcatgatg

SEQ ID NO: 19992 - DNA, 346 bp, Gossypium hirsutum
  Clone ID: LIB3146-023-Q1-K1-A8
gacgattccgaagggaaccttgttccccatgtgcggaatgaatctggcatttaaccgagaattgatcggccctgcaatgtactttggactcatgggagatggtcaaccaattggacgatacgatgatatgtgggctggctggtgcaccaaggttatttgtgatcacctcggatggggagtgaagaccggacttccctacatttggcacagcaaagcgagcaacccgtttgtgaaccttaagaaagaatacaaaggaatttactggcaagaagagttgattcctttcttccaatccgttgcccttccgtaagactgcaccaccgtacagatatgctacatcgagatc

SEQ ID NO: 19993 - DNA, 341 bp, Gossypium hirsutum
  Clone ID: LIB3146-023-Q1-K1-A9
cgaaaagtgtgaaaatgaccttaactcaagcagaccctgcatggacagggctctctcttctaacggagaaaccgacgctaatgatcttcggtagatacactacaatatacggagtcgcttatgttatactatccattcaaattataaacagatgttggagcatgcgtatgaaacctaagactgaattgaggaaggaactaaagtaaactgctaataaacggttattccacgaacgctagaccctcgaacggcatgtctatcgttcggtagaacaaaattttgaagaccaactctatcatagcggtgatgtttcatatatactgatgtaaaaaattgtcggg

SEQ ID NO: 19994 - DNA, 426 bp, Gossypium hirsutum
  Clone ID: LIB3146-023-Q1-K1-B1
ctcttttaatcctaggaaaaaaacttcgtttatggactttaatttcgtttttttttgttgttgcaggattcagttacagctgaaggagcaaaagtttctgaggaagggataatagaaacgtttgaaaatgacgatgaagctttggatgcattcgataatgtcttggtggttatggacctttcacattttggaaggttaagagtcagtggagatgataggattcagtttcttcataatcaaaccactgccaattttgaatgtcttagtgaagggcagggatgtgaaaccgttttcgttacgccgactgcaaggacgattgatattgcttatgcttggattatgaagaaggcagttttattggtgctttcaccagagacatgtggaaacataactgaaatgctcaataagtacatattttttgcggat

SEQ ID NO: 19995 - DNA, 447 bp, Gossypium hirsutum
  Clone ID: LIB3146-023-Q1-K1-B10
ggcggggcgagcgacccgttcgttggtgggtttttattagggcttcaattcacctccacagcattttgggggaggggtatacccaaattggtaccattcacaaacgggagtttcgctggaccctcagcagcaaaaccctagggatgggtccctgagtgggtctcaaggccagccaccatcaaagcatacccagcaggtatggcaaaacaattactaatcttgtctgcttctggtttattaggggcttataatgagtttgaaagtggccaatcaaagggccttctagcgactgagaataactatacctgcagataatcaacaatgatgggtctgaagagacattggctggctactgccctgtgccatgaaggtgtattctacttttaaattattgatctggtctggtctgtacgttaacttacgaacacaacatgctaatttgggata

SEQ ID NO: 19996 - DNA, 383 bp, Gossypium hirsutum
  Clone ID: LIB3146-023-Q1-K1-B11
gttcaattctctcatcccttgttttccttctaagccaaacgaaatctaatcatttttgaaaaatggcaccaaaagctgaaaaaaagccagccgagaagaagcctgcggaggagaagaaagccgtagctgagaaagccccggcagagaagaagcctaaggctgggaaaaagcttcccaaggaaggcggagcggctgccggagacaagaagaagaagagagttaagaagagcgtcgagacctacaagatctacatcttcaaggtcctgaagcaagttcaccctgacatcgggatctctagcaaagctatggggatcatgaacagtttcatcaatgatatcttcgagaagcttgctcaagaagcctctaggctcgcgaggtacaac

SEQ ID NO: 19997 - DNA, 288 bp, Gossypium hirsutum
  unsure (1)..(288): unsure at all n locations; Clone ID: LIB3146-023-Q1-K1-B12
gaangggcggggcgacccacgcgtacggttcaattctttcattccttgtttaccttctaagccaaacgaattcgggtggtgtttaaaaatggcgccaaatgctgaaaaaaggccagtcgataagacccctgcagcggaacaataaggctgggttcataaatgggtgtcagagcctaactctaatgctgcggaaccgcttcctatgggaggccgatcgcttgtcggagacacgactaagttttgagggacttatagtgagttggcaatgaagcactacataggccttgt

SEQ ID NO: 19998 - DNA, 178 bp, Gossypium hirsutum
  Clone ID: LIB3146-023-Q1-K1-B2
cggacgcgtgggcttttgtgaagctgttgctatatatggtgtaattgttgcaattattttacaaacaaagttagaagagtttccaataataaaaattttatccgcctgagtctctaaaagcaggatttgcaatctttgcttcgggaataattgttggctttgcaaatcttgtttgcgg

SEQ ID NO: 19999 - DNA, 424 bp, Gossypium hirsutum
  unsure (1)..(424): unsure at all n locations; Clone ID: LIB3146-023-Q1-K1-B3
acaaaatctggcaagaaggtgagcaaagcctcaaaaatccagaggctggtgactccattgacactgcagaggaagcgggctagaattgctgacaagaagaaaagaatggccaaggccaagtcagaggcagctgagtaccataaactgcttgccacaaggttgaaggagcagagggagcgccgtaccgagagtttagcgaagaggaggtccaagctctctgctgcttctaagccttctgtttcagcttagataagttttgataaaccaaaaggggtctcggtgagtacccagttttttgcagtgccatatgctgtcataatttatcgcttagtatccaatgtggtaatgttatttttccatctactatgttaagtcatctctgtgacaattatcaataactaaatngcttcatctaatgcatact

SEQ ID NO: 20000 - DNA, 433 bp, Gossypium hirsutum
  Clone ID: LIB3146-023-Q1-K1-B4
acttcactccccccccccaaatcaatcagataatccttagaatgcagaacagtgaaggcagctgtttgtcttacatggcggcgtggttgggaagcagcgtggcccaagctttcttcgcgtctctcgagcgttgctcttgcattaacctttccacctccgatgatgccgatgattccgaggctcatgatctccctctcatgttcactaattgttcctccatctcttcatcatcagtcacctctatccctaacaacaacaacaacactccttcaaacgacgtcgttaatctccctgtttaggtcatggatcgcgtattgtttctagggtttcgaatcttttgtctatagttctttttagtactttgaatcttgatgtaagcttttttcttgttgtttgactcttttttttcttagtttggatgtctatgaaattc

SEQ ID NO: 20001 - DNA, 367 bp, Gossypium hirsutum
  Clone ID: LIB3146-023-Q1-K1-B5
acttcacgtgggctcgttaaatcactgatttaatacttgcaatgcacgaacattgaaggtggctaagtgacttacatggcgtgctgtctggaaagaaagatgcgccaaggtctcttcagaggcatcgtgcgttgctatcggttagcctattgcctccggtgatgccggtgattcgaggctgaggatgtctatatgtggtcactgatcgatgctgcatctcttcataatcagtcacctctatgaatatcagacaacaacaacactgtttgagacgaggtcggtaatcttgctgtgtaggtcacggatcgcatataatttctagggtcaagaattgtaaggtaaagttctatttacgactttgaatcat

SEQ ID NO: 20002 - DNA, 426 bp, Gossypium hirsutum
  Clone ID: LIB3146-023-Q1-K1-B6
gacgattccgaagggaaccttgttgcccatgtgcggaatgaatgtggcatttaaccgagaattgatcggccctgcaatgtactttggactcatgggagatggtcaaccaattggacgatacgatgatatgtgggctggctggtgcaccaaggttatttgtgatcacctcggatggggagtgaagaccggacttacctacatttggcacagcttagcgagcaacccgtctgtgaacctcaagaatgaatacaaaggaatttactggcaagaagagtcgattcctttattacaatgcgttgcccttccgaaggactgcaccaccgtgcagaaatgctaaatggagatctccaagcaagtgtaggcgaaactcggtatggtagatgactacttcaaatatctagcagatgctatggtgacatggattga

SEQ ID NO: 20003 - DNA, 281 bp, Gossypium hirsutum
  Clone ID: LIB3146-023-Q1-K1-B7
acgcctgctggagtgcccaagaagagtaacattcaagatttttagctgcagaggtgttcatttggatgctctccttgatatgcccactgatgagcttgtcaagctctttcctgcccgtgctcgcagaaggtaataagaaaacagaagcaagtttcattttgtttttgcaaaatatgtttgtttaattgctataagtgaaaaatatgaaatggagtttccttattactattaccactatcattattattattattattattattatcatcatcataggttcc

SEQ ID NO: 20004 - DNA, 115 bp, Gossypium hirsutum
  unsure (1)..(115): unsure at all n locations; Clone ID: LIB3146-023-Q1-K1-B8
gccacgcgnttgcccacgcgtccgtggatttattatttttattactattattgtttcatagaataaggtaaaataagtnngcggcggcggcgtcggtcgcgtcggcggccgcgtc

SEQ ID NO: 20005 - DNA, 349 bp, Gossypium hirsutum
  Clone ID: LIB3146-023-Q1-K1-B9
ctcctgcgatgcatttcgggttgcttttctgcacacaacgacctaagggtgggactcctgcaatgcgtttggggaaaaagccacgacgaagccctatcataacatatctttacatagccagccgtatctatgcgaacgatcggatatgacgaattgccggccttgcgtgaggggcacatgttatctacatgacctacgatcacaaacatacatactgacagttacttcggagagatctgtagattgacgagaacatagtagatattatttcctcccaccattaatatgtgttatgtatttcatatcaatctgcctatctatgaaatgaatgatatttctgaggattgat

SEQ ID NO: 20006 - DNA, 436 bp, Gossypium hirsutum
  unsure (1)..(436): unsure at all n locations; Clone ID: LIB3146-023-Q1-K1-C1
ggcggctggagtgcccaagaagagaacattcaagaagtttagcttcagaggtgttgatttggatgctctccttgatatgtccactgatgagcttgtcaagctctttcctgcccgtgctcgcagaaggtaataagaaaacagaagcaagtttcattttttttttgcaaaatatgtttttttaattgctattagtgaaaaatatgaaatgggttttccttattattattatcattattattattattattattattattattattattattataagttccagaggggtctcaagagaaagcccatggctttaatcaagaaacttcgcaagggcgtaatttgntcttccctttcctcttttcatttcttatgtttatcaattttggatttatcttagatctaaaatttgatgtgaaagttgagaattttgacttaattt

SEQ ID NO: 20007 - DNA, 430 bp, Gossypium hirsutum
  Clone ID: LIB3146-023-Q1-K1-C10
cggtaagtccagatgggaagttgcttgcagtactcggagatagtgtggagtgcttgatcgttgatgcccaatctggcaaaattaccaacagcctaaaagggcatttggactattcttttgcttcagcttggcaccctgatgggcacattctggcaactgggaatcaggacactagctgtaggttgtgggacataagaaacctgtcgaagtccctagctatattgaagggaagaatgggagcaataagaggcgtgaagttcacatcggatggtcggttcctggccatagctgagcctgcagattttgttcacatctttgatacaaagttggggtatgttaattgccaagaaattgatatttttggtgaaatagctggaatatcatttagcccggatacagaagcgctctttgttggggttgctgatcgcac

SEQ ID NO: 20008 - DNA, 419 bp, Gossypium hirsutum
  Clone ID: LIB3146-023-Q1-K1-C11
gttttacagaagtcaggaagctctccacaaagcttctaccgaaaatgccgaagcaaattcatgagatcaaggacttccttctcactgccagaaggaaagatgcacgctctgtaaaaatcaagaagagcaaagactttgtcaagttcaaagttcgctgctcaaagtacttgtatacacactgtgtgtccgatgctgagaaggctgataagttgaagcagtctcttcctccaggtttgagtgtccaggacctgtgaaaatagggccgcttcgagtttatcatccaattactaggtgaaagctagattttgactttgcttttatcatatttcatgcctttcaaactcaaaatttactgtaatggatttgtattctggttatttttatggatatgagtaaggtcgagttactttttaatggtt

SEQ ID NO: 20009 - DNA, 397 bp, Gossypium hirsutum
  Clone ID: LIB3146-023-Q1-K1-C12
gtgttacagattatttgaagtttttttctaaaacttttaccaaaaatgcgcgggtttgattcataaaatcccagccttgccaaattactcaccaaacgaaaaaggcactctctctaaaattctgcattagctttgacctctgcacgtcacatcctctctgcttaaaatacttacatatcactctatgtttccgctcctaataaacctgacaaaatctctatctctattcataccgattatattgatcattaccagtcaaaataattccattatatacttatttatccactacaaaataatatctatattttgactacatatttatcacaaagtcttgccttttataacttaatatttaatttaaattttttgtattattaaatttttttcatttatt

SEQ ID NO: 20010 - DNA, 353 bp, Gossypium hirsutum
  Clone ID: LIB3146-023-Q1-K1-C2
tatatatatatattgttcatatatacataaaaaagttccctcggcgacctcgtccgctcttcgtggcctcgctcgcaaggtaataatgtaccgagaccagctgccgtttttgctttgcaaaatgtgtgttgttaattgctattagtgaaaaatatgaaatgggttttccttattattattatcattattatcattattattattattattattattattattataggctccagaggggtctcaagagaaagcccatggctctaatcaagaaacttcgcaaggcggtaatttgttcttacctttcctctttcatttcttatgtttatcaattttggattatcttaatctaaaat

SEQ ID NO: 20011 - DNA, 426 bp, Gossypium hirsutum
  Clone ID: LIB3146-023-Q1-K1-C3
gaaaggtttgctcctagaaatgaaacaaattttcaaacctaatatctccaatggagacctttatagagatgatcaagaggggagctcaagaactactatgtcaggaaatggtgataccatgatccaaacctccggttttcacagatttttacatgccaaatatctcaaccccgctcaggcggtaccactttacatattggcacaaattctgggttcaattatggcagcattaatgggagagtttatctatggcataaaatcggatgttttgacaacccggcctggccaaggctgccaagccgccttcttggcggagctcatcgctgatttcatcgttgtgtttgtgattgcagcggtgacacaacaagcacgttcagttggtccactgtctggactggttattggaatgtccattgcgctagcagt

SEQ ID NO: 20012 - DNA, 137 bp, Gossypium hirsutum
  Clone ID: LIB3146-023-Q1-K1-C4
catttcctctcattcagccaaatctaaaccccagtccctttgtttctccctcaaccgttcccaaaattccttcattcaaactccaatcaaccttcatgaacagcgatccgttcattcaagccttgaagggtgttttt

SEQ ID NO: 20013 - DNA, 267 bp, Gossypium hirsutum
  Clone ID: LIB3146-023-Q1-K1-C5
gcggatttgctctcattgagacaaatctaaaatcctaaccctttgcattgtgcacctccattgcgatgatcacgaggggaactctagaactactatgcctggacagggagctgcccatacccacacctaagggtgtcacagagccttacatgcccattatacttacctcgctccggcgctagcgctctccatttgcccactcacacggggtccaactcttgctgcttctatgcaagagggcctactatatcccataatgccatgact

SEQ ID NO: 20014 - DNA, 432 bp, Gossypium hirsutum
  Clone ID: LIB3146-023-Q1-K1-C6
cggacgcgtgggtttctttaggcgtcttcacacccaatgatgatctagcaaaggagttatttcaaacatcagaggccagtggtgagaaattttggaggatgccattagaggaaagctattgggaatcaatgaaatcaggagttgctgatatggtaaataccggcggtcgcaaggcagtgctatcaatgcagctttgttcttgaaacaatttgttgatgaaaaagtaaaagtggatgcacgttgacatggctgggcctgtcttgaatgataagaagcatgtggcaactagatttggcatctcaactttggtggaatgggttctgaagaactcttcttcttaaatgaaagcttggaacatgctcttgtgtgacggtggcagaccgaaaaagcagaacaacatgttcgagggtgttgggttctgtaagatctgtc

SEQ ID NO: 20015 - DNA, 278 bp, Gossypium hirsutum
  Clone ID: LIB3146-023-Q1-K1-C7
gcattccatcaatgtctagcccgcgctgaattactatgacaaggacccgtggtgcgaagccatgaagaccatggaatccatcgttagcttgattcctatagcaactgcttgaaccagccattgagatcaatgcatttaatatatagaaagattttgttaataaacaaagtatgataaatgctctgatagatccatgctgctatattatatgaactgagcagtgtgactaatctactaagagtttcactaggaacgaagagagtagtgaatatatatga

SEQ ID NO: 20016 - DNA, 382 bp, Gossypium hirsutum
  unsure (1)..(382): unsure at all n locations; Clone ID: LIB3146-023-Q1-K1-C8
agctcctccaccacttcctgatgagccagagccaaaaagacagaaacttgatgatgccaagcttgttccagaagatcagttttttgctcaacatccgggtcctgcttgcattactgtgtctgttcccaaccttgatgaagggaatctcaaaggacaacttcttgagatcacagtgcatgccttatctgaaacagttggcagtttgaaggagaaaattgcaggggagattcagcttcctgcaaataagcagaaattgagtggaaaagctgggtttctgaaggacaatatgacccttgcatattacaatgttggagcaggagaaacgcttgctctttcattganggaacgtggtgggaggaaaaggtgatgagttttttgaacg

SEQ ID NO: 20017 - DNA, 428 bp, Gossypium hirsutum
  Clone ID: LIB3146-023-Q1-K1-C9
acatgaatgcaataaacttcctgtttttttgactcgcttgagaccccctggggggggcactaacctacgagtgagtcatccattcctggttgaagaagaaagatggaactggttttgcttgtatgatttacttattatatctggatgacatcagtttgtgtttgtaaatgccatcactatatgcaaagctttggggattgcaaaatgtgaggaaaagctttatattacccaatattttcctaaaaaaataagctcccactttatttgtttcccagttacctaaggattttttcttgttctttaaatgcttggttttggttactaattgttctatcaatagtaattctggaaaatattggtctctataagactacctttgagaacaacatcaagttgggaacattacttttgagaacaatgcttgaacg

SEQ ID NO: 20018 - DNA, 433 bp, Gossypium hirsutum
  unsure (1)..(433): unsure at all n locations; Clone ID: LIB3146-023-Q1-K1-D10
gaacatccaaaagcaatatggtaagcttttgaaggacttcaacaaagggttggacaacaacaaggagatccaagagctgaaggttgatgttgagaagttcgcatcctcattcgatatgcctggcttcaagatgtccgaaatgaagtacaaggattagatctaaataaccatacgatctaattgatgttattatcagcatctgccactttttgggttgcccccatttgatgtcttatgagtgaaaggaaaaagaaagggaaaagagaaggatgcaaatgccttccacgtacggttttaagtgtcttcatttactggtcaatttgatatgatatttttcaagtttttgctgttctgtctttataagagtttgcataaaacgtatgtactaattntatgtattcttttttgttgctagaaaagttttttttttggg

SEQ ID NO: 20019 - DNA, 370 bp, Gossypium hirsutum
  unsure (1)..(370): unsure at all n locations; Clone ID: LIB3146-023-Q1-K1-D11
gaacatccaaaaacaatatggttagattttgatggactaggacaaggggtgggacaataacaaggcggtccaagaactgaatgttgatgtggcaaacttctcattcttattggatacacctggcacggaaacgtccgaaatgtaatgcgacggaaagaaacgaatcaccatgaagccctatagggggcatgactcacaatctcgcctttttcagatcgacctcatctgttatgatataatcgacagcgcaatcaaaggctgtgctggtggtatccacctcccttctacatgcagngtcaatcaagttcacgaaccttagaaggagctattggatcctgcaagtaaatgaacgcttaatgttctgacaagc

SEQ ID NO: 20020 - DNA, 420 bp, Gossypium hirsutum
  Clone ID: LIB3146-023-Q1-K1-D12
cccacgcgtccggttctgaagatgctcgtggactgctcaaagctgctattagagatcctgacccagttgttttccttgaaaatgagttgttatatggtgaatcattccctgtttctgatgaagttcttgactccagcttttgtcttccaattgggaaagctaagatagagagaaaagggaaggatgtgactattacagctttttcaaaaatggtgggctatgctcttaaggcagctgagatacttgaaaaggagggaattgatgctgaggttataaatttgcgttctattaggccactggatagatcaacaattaacgcttctgtcaggaaaaccaacagattaataacagttgaagaaaggtttccacagcatggtgttggtgctgaaatctgtgcatcagttgtggaggagagttttg

SEQ ID NO: 20021 - DNA, 417 bp, Gossypium hirsutum
  unsure (1)..(417): unsure at all n locations; Clone ID: LIB3146-023-Q1-K1-D2
cccacgcgtccggcgaaatatttacgaagttctaccgccatggggagaagacctgcaaggtgttatcgtcagataaaaaacaaaccttacccgaagtcacgttattgtcgtggtgttcctgatcccaagattaggatttatgatgtgggaatgaaaaagaagggtgtggatgagttccctttctgtgttcacttggtctcttgggagaaggaaaatgtctctagtgaagctctggaagctgctcgtattgcttgcaacaagtatatggctaagtatgctggaaaggatgccttccacttgcgagtccgtgttcacccattccatgtcttgcgtatcaacaaaatgctttcatgtgctggagctgatangctccaaactggtatgcgaggtgcttttggcaagcctcaaggaacatgt

SEQ ID NO: 20022 - DNA, 352 bp, Gossypium hirsutum
  unsure (1)..(352): unsure at all n locations; Clone ID: LIB3146-023-Q1-K1-D3
cagggatcaaagaggcagatatagtgctggtggttctgaccctgccctcttttataactcctccagttactgggatgagtttgtttggggtggagcttggttatactacgccactgggaattcttcctaccttcagttggctactcatcctaaacttgccaagcatgccggtgcattctggggaggcccagattatggcgttcttagctgggacaacaagcttgctggtgctcaggtgcttctgagccggttgagattgtttttaagtcctgngtatccatatgaggaaatattgagaacgtttcacaatcaaaccagcatagttatgtgctcattcttccagtttttacta

SEQ ID NO: 20023 - DNA, 421 bp, Gossypium hirsutum
  unsure (1)..(421): unsure at all n locations; Clone ID: LIB3146-023-Q1-K1-D4
ggagatccagggaagatggttgctgtgcaaagaaatttaagcaagtttgggatcaaagaaattgctagaacaggaaagattgctcttagaagggaaaaaatgggtgcatctgctccattctggcgattttcagcagcttcatatcctgatcttgaagaaacagtacctgataacgctcttgcaggggctagaaagcaatcagtatttagcgaggccgatgtttctggagggggagacgtctatccggtggagtcgcctgatggctttacaatcaatcaagttcttgatgctcattgnggtgttctcactgatgaagatacaagtggacatcaatctcatactttatccatgctcgtaaatgactctcnncggagtctaaacctngttacaggttgttttgctcgaagagggctatatcttc

SEQ ID NO: 20024 - DNA, 323 bp, Gossypium hirsutum
  Clone ID: LIB3146-023-Q1-K1-D5
caatatccaaggaagattgttgctgggctttgaacctgacgcgggtgtagactcgaacagagtgattgaccaggataaatcgctcctagcccggaaatacttgatccatgtgatgtattttgtccatttacatggatttatgatctggacctgaaaaagacaggtgtggatgacgctcatgccgaggctaaaatgctctcatgattgaccgaaacctttttttttgtagggctcgactcttctcgtgtagattgcaactagggtttggctatgcatcttggtatggatgcctatcgctttcgagtcactgttgaacaatcata

SEQ ID NO: 20025 - DNA, 403 bp, Gossypium hirsutum
  unsure (1)..(403): unsure at all n locations; Clone ID: LIB3146-023-Q1-K1-D7
cccacgcgtccgatctttacaggggtactgatacattgctgcagttggcgttttggcatttttcaaatatgggacattgcttctctaaggataaatctgacggatctgattcagaacaggctgttgagtttgttggtggaaatgtgcaccgggttacctctaaggaggattgggatcagaagttgtctgaagcgaagagagatggcaagattgttattgcaaacttcagtgcgacatggtgtgggccttgtagaatgcttgcaccattttattgtgaactctcagagaagcacccttctctaatgttcttgttgatagatgttgatgaactaactgatttcagcacctcatgggatattaaagccactcctacatntttctttcttaaagatgggcagcaaat

SEQ ID NO: 20026 - DNA, 228 bp, Gossypium hirsutum
  Clone ID: LIB3146-023-Q1-K1-D8
accactgcgtgcgaccgttacagggctacttttacaaacctgcagatggcgtttgggcgcggggcaaatatgggacaatgccggtctaaagataaatcgaactgacctacttgctagcaatctgagagagttgaaaatagatatgtgcacacgctcaacctctgacgacgataatgatcatacaaagtctcaaccgaagagtgacgcattcgttgttgctgaagacaa

SEQ ID NO: 20027 - DNA, 425 bp, Gossypium hirsutum
  Clone ID: LIB3146-023-Q1-K1-D9
aaaacactacaccatggatgaagtgaagctctttgggttttggccaagtccttttagtagaagggtcatttgggcattaaagctaaaaggcgtggaatatgaatacattgaagaagatctgccttataataagagtgatctgttgttgcagtacaacccagttcataaaaagatcccagtgctcgttcatggaggaaagccaattgcagagtcattggttattctggaatatatagatgaagtgtggccacataatcctttgttgccaaaagatgcttacgagagatccgtagctagattttgggccaaattcattgaggaaaagactcaaccaatgtgggaattctttcgtaaattcggtgaagaacagcaaaaggcaatcgagaacaactatgaaattctgaggacgattgaggaacatggtc

SEQ ID NO: 20028 - DNA, 192 bp, Gossypium hirsutum
  Clone ID: LIB3146-023-Q1-K1-E1
cattcccttactctgatattcactagaagtttgtcttttcggcggcggcgggctgccactgggccagggttaaagatgggtccacaaatcaactatgctagaggccgtgaaaactactggaaggacggtatctaggggccatgtgactctagttagaggcttgcttgtgatgatcacaaccgtattattatg

SEQ ID NO: 20029 - DNA, 257 bp, Gossypium hirsutum
  Clone ID: LIB3146-023-Q1-K1-E10
gggagacccacgcgtccgttctggtgttttccttcgctttttttttttcacccacaaaacaggggagggtgaaataaaaatggggcggtccaccttaagcaaagtatgaaatcctttcctacttaacgagatgagaaaactcatatttaaatgcatgttattaaacaaacgatacctaatattaaaattataatcaaagatggcactaaaacaatctttttaaaaaacctgaagtccacactgtgaactacaactaa

SEQ ID NO: 20030 - DNA, 424 bp, Gossypium hirsutum
  Clone ID: LIB3146-023-Q1-K1-E11
gcatctttgaaatttacagtgttgaaccctaagggacgcatttggacaatggttgctggaggaggtgcaagtgtcatctatgccgatacggttggagatctcggattcgcttctgagcttggaaactacgctgaatacagtggagcacccaacgaggaggaagtgttgcagtatgccagagtcgtaattgattgtgccactgctgaacctgatggtcgtgaaagagcccttgtaattggtggaggaatagccaactttactgatgtgggtgccacgtttaatggcataattcgagccttgaaggagaaagaatcaaagctcaaagcagccaacatgcacatatatgtaaggagaggaggtcccaattaccagaaggggcttgcaaaaatgcgggcacttggagaggaaattggcatcccaattg

SEQ ID NO: 20031 - DNA, 408 bp, Gossypium hirsutum
  unsure (1)..(408): unsure at all n locations; Clone ID: LIB3146-023-Q1-K1-E12
cttggcagtaatgacggttatattcttttgggctgcatacaagaccaactttttcccgcgtgtatttggggtggcaactcttgagaaaacagctcatgatgacatcaaaaagcttgcctcagctgtatatttgcaagtgagcattataagtcaggccctaatatttgtaactcgatctagaagttggtcctttgttgagcgtccaggtttactactattggcggcctttgtcatagctcagttgattgctactcttattgctgtgtatgccaattggagctttgctgcgattgaagggatcggatggggttgggctggtgtgatctggctntataatattatcttctatatcccacttgatttcatcaagttcttcattcgctatgctttgagtggccgggcgtggga

SEQ ID NO: 20032 - DNA, 435 bp, Gossypium hirsutum
  Clone ID: LIB3146-023-Q1-K1-E2
gtggcctactatggtggtgacgggttctggcagctattctcaacagccatatggtggtggttatcgatgagaatgggttcctatcccggagaagaggagtaaggaaattacatacaagcttgtgatatgagagagtaaaaaagagatgggaaaatagctaaaacattagacgttgggaatggaatcccaaagtagaagcagtagagtcgcacatttgtgttggcagatgagaaccatgttttttattcatattattgtcattcttggttaagctattgcagtgtttgggccataatcactccttccattgattactggtttgagctgttgtgaaattgtgtggatgaaatggtatgatgaagcttcataaattctgtaataagctccaatatcttatttttaatttttttaaataaattctgcaataaaaattta

SEQ ID NO: 20033 - DNA, 421 bp, Gossypium hirsutum
  unsure (1)..(421): unsure at all n locations; Clone ID: LIB3146-023-Q1-K1-E3
cattcccttactctgaaattcacaagaagcagccgctacggtgtcgttggtctcttacttagccaaatttaaggatggattcacaaattaagtttgctgtggtggtgaaaattatgggaaggacgggatcgaggggtcaggtgactcaagtgagagtcaagtttttggatgatcagaaccgttttattatgaggaacgtgaagggaccggtcagggagggagatattctcaccttgctcgagtctgagagggaagctaggaggcttcgttgatcacttcctcttatctccattntgttacgttattaaatgttatgttgcgcaagtagctagctgtttcttatttctgaaagtattccaatttcaaatctagactnngattttggagactgattaaatggatgagtngttttaaagcatat

SEQ ID NO: 20034 - DNA, 276 bp, Gossypium hirsutum
  Clone ID: LIB3146-023-Q1-K1-E4
ggaggggttaattcctcattggatcaggcctcttccacctaggttccctgtggatgaggagctagtgtggctcaaccctgataacaatcatgagcttcaatgggatcaaggaatgtgtgctgatactagtagaggagcagcagtgagagatttaattgcaaaagctttgaggggaccacttgctcctaaccaacaagagcaagtcctcgtggagctggctaatgaccctaaacttgtctatcactgtggattgactccaagaaagctacctgaatt

SEQ ID NO: 20035 - DNA, 408 bp, Gossypium hirsutum
  Clone ID: LIB3146-023-Q1-K1-E5
cggcttcttccatccttctatctttattttctcgcctgtgacgagaagccgacgctaccatggttcacgtcagtttctaccgcaactatgggaagacctttaagaagccacgacgtccgtatgagaaggaacgattggatgctgagttgaggcttgtaggagagtatgggctccgatgtaagagggagctgtggagggttcagtatgctttgagccgcatccgtaatgctgctagggaccttctcactcttgatgagaagaaccctcgtcgtatttttgaaggtgaagcccttcttcgtaggatgaacagatatggacttttggatgagagccagaacaagctcgattatgtgttgggcttgactggtgaaaacttccttgaacgtcgtttgcaaacgctcgtgttca

SEQ ID NO: 20036 - DNA, 156 bp, Gossypium hirsutum
  Clone ID: LIB3146-023-Q1-K1-E6
gcgggggtcctttcttccttttaggcttattctttctactgctacgttaactgatgacgacgatggtctatgtcattatctacctcacctgcatgaacgccatcaagaagacacttcgtgcgcttgtacaagaacgagagcatgcagattagatgc

SEQ ID NO: 20037 - DNA, 326 bp, Gossypium hirsutum
  Clone ID: LIB3146-023-Q1-K1-E7
cccacgcgtccgctcaagctgtgctctctctcttctgtcaaatcaaccgtggggctccaggaaccaggctttgaatttttctgtaaatggcgtgataagtactgaagggtcctctgcggcacaaccaacaacgcttcatggtgcagttgtgaacccttattcaaatgcctctttggatttcaatggcagtgacactgttcgcagttctcacaagatgctgccacacctagatttgggtcaaatcccagaccctgttaactgtcaattctctagtgaccttgagttgtctcaacaaagctggatgtcatatatggaacatgagcagt

SEQ ID NO: 20038 - DNA, 390 bp, Gossypium hirsutum
  Clone ID: LIB3146-023-Q1-K1-E8
cgacccacgcgtgcggtatctttcatgcattaggcctattctttctcgtccacggtgactgaggaggacgagtttctatgccctaatctcaatcaccagcttcaacggcatcaaggaatctgttctgatactcgtacaagaacgagtgcaagagacttagttgcaaatgctgtagagtgaccacttgcttctgaccaacaagaacaagatctcgtggacctggataaggaccctaaacttgactatgactgtggattgacttcaagaaaactacctgtattggtggaagagaattcgactaatgctgccgatgttcatatcatgatgaataagtctccataaacagctgatgctctaacaattcctgttaacatggacatgagtctacac

SEQ ID NO: 20039 - DNA, 170 bp, Gossypium hirsutum
  Clone ID: LIB3146-023-Q1-K1-F1
aggctttcggtacggatgcatgctggcattcattctgttcctgtagggcaaagtagtaaaaggcacaaatttagctgtccgggatatgatgacgagtgatccttatgttgtcctgactcttgggaagcaaactgttcagtcgactgtaatatcaagcaacttgaattcaa

SEQ ID NO: 20040 - DNA, 421 bp, Gossypium hirsutum
  unsure (1)..(421): unsure at all n locations; Clone ID: LIB3146-023-Q1-K1-F10
agattcttctagttccgaccaaaaaaacaattgctcatctttccttcagagaatatttgttttgagtgaaaaaaaaaatgttgggagtattcagcggagcgatagtgtccccgccggacgagctggtggcggccggttgcaggacgccgtcgcctaagataacggcggacgctcttgtgaaacggttcatcgaggcaaacccctccaccgtgtccttgcagatcggagatcatgtccaattcgcgtattctcaccgtaacgagtctgctttacttcccaggtcattcgcggtgaaagatgaaatattctgcatgtttgagggggcacttgataacttanggagtttaaagcagcaatatggacttggtaagtcagcaacagaggtggtgttggtgatagaagcttacaaggctcttcgtga

SEQ ID NO: 20041 - DNA, 257 bp, Gossypium hirsutum
  Clone ID: LIB3146-023-Q1-K1-F11
acaacgcgttctaacgaatgctaatgttgccatatactaccatgggaaacaggattgttcaaaggtgatacctgctactgttgatgtgctgcatagtgtatatggggaggtattctgatgtgctctagaagcacatatgctgaactatgtagctgaaacgtatacaacgggttcttgtttatagtactgtactaatggaaaaggcaatgcagaacctggatctcatttactgctaagagaaattattgcagtctctc

SEQ ID NO: 20042 - DNA, 197 bp, Gossypium hirsutum
  Clone ID: LIB3146-023-Q1-K1-F12
ttgggatccttccgcagcaaccccaccaactaaaaaaaaaatcaacccaaatagctttgtctccacttcactctttttctattttctccatttgttcgtttgtgtgtatgagaagattattattatgaatgatgatgatgaccctctccatgtatcactgttttttcacattgtgtgcagtgtaaatctcttttaag

SEQ ID NO: 20043 - DNA, 367 bp, Gossypium hirsutum
  Clone ID: LIB3146-023-Q1-K1-F2
ccaagaggtaaattctgagcagggggttcaaattctcaaaatatttaaagatcattccactaagacatgcattctcgacgatctggaattctacgaggctcgtcaaaagataatacaagaaaaaaagactaagcatcagctgtcacaaaaacagatccaggtttcaagtggggagcctaaagatgctgtaactgataacaaaaaaagtgcagcaatagcaaatgagactttggaaaaatccgcaaaggcagctttgatagaagaaccaactgttgcatcgaaaggtgagaatggaaatatgaaacccgtagaagagaatggatcgagtgctgcaactgaagacgacaaccccgcaaaagcagctagt

SEQ ID NO: 20044 - DNA, 337 bp, Gossypium hirsutum
  Clone ID: LIB3146-023-Q1-K1-F3
cggacgcgtgggcaacaactgagggagggtgtgcacaatttctttgtgacctttatcgaagttctacgtgatagaccccctggtcatgattgggagcttgaaccaggtgttacatgtggtgactacctgtttggaatgctacagggcacaagatcagctctgtatgcaaataaccgagaatccatcactgtcaccgtccaagaggtgacacctagatctgttggggcactcatagcactttatgagcgagcagttggaatttacgcctcgcttgtcaacatcaatgcttatcatcaaccgggtgtggaagctggggaaaaaagctgcttgtgaaagt

SEQ ID NO: 20045 - DNA, 424 bp, Gossypium hirsutum
  Clone ID: LIB3146-023-Q1-K1-F4
cccacgcgtccgggttttgttgtatttgacaaaaggggaactatgataagaaagctttattctttgcttgtttaagaaccaggatgtagtatttgaacaattagcaattcctacatggggcaatgagagagaattcatgatttgtgcggcaatggatagtgctgagccaagtagtaagtgaatatatatttgattggaagacatgggtttgtctgtctgtgtcaatccaagaaaaagaagcatcacaagttgactgttgaatggatcaaaggttagaatagaatgaaacagatgataacgaaatttgatcaataaatttgttttatccaaataatgaatagattccaattgaagggaaaaatagctgacagatgtgttcgtggtacacaaagaatttgatcagattaggagtcttgaatgagaa

SEQ ID NO: 20046 - DNA, 427 bp, Gossypium hirsutum
  unsure (1)..(427): unsure at all n locations; Clone ID: LIB3146-023-Q1-K1-F5
ggttgacagcacttcttgacaagaaagaagcgcagcttttggccatgaatgaacaatgcaaagtaatggcactaagttcttcaaacatatgaaatctgatctcattgtctatctcgttctactgcctgttggactgcgctgcctggttgcttagttacaacagactagatcaccagccagataaatattaggtgggacaactaatgctgcataggcgtgtttgcaacagatactcttgaaagtttaacatggaactngaattattgccattgttgtgctttcgaaattgagccagtatgcatggatgcatattattgtgctttcggaacacaattttcatcttttctgtaaagctagaaatctctgtgtttgtcgaatatcccacctttctcgctgtctcttttcatctgaaactaaaatatagtgc

SEQ ID NO: 20047 - DNA, 102 bp, Gossypium hirsutum
  Clone ID: LIB3146-023-Q1-K1-F6
aaaaaaaaaaaaaaaagggcggacatatatttagaatacaagcatacaaacacatgcatgcagataaaaaaaatataatatagtgtaacataaaaatcaatt

SEQ ID NO: 20048 - DNA, 179 bp, Gossypium hirsutum
  Clone ID: LIB3146-023-Q1-K1-F7
tcgcccacgcatccgctcacgcgtggtttggattattagattgggtcgacaaccgaatgtgatcgtgctttaccaggtgatggctgctcagacgaatatacatttcgttatatattatgcctaacgtggtgaaatgctcaacaacgctgcgtcagggaaatttgcagatgatgctgcat

SEQ ID NO: 20049 - DNA, 436 bp, Gossypium hirsutum
  Clone ID: LIB3146-023-Q1-K1-F8
aagaaatcatggtaagtctcaaatcacttgtttctctcagttcccgatccgctgccgtagcactacttgtgttggtggtttcagtggcagtgcaaacccatactacaaatgcacaaagctgcccgaccgatctgactagcctgaacgtgtgctcacctttagtggtgcccggtgcagctgtggctaaccctagcattgactgctgtaacgcactccaatcgttgcaccatgattgcctttgcagcactctaaggatcgcttctcgactcccttctcaatgcaatctcacaccactcacttgtgcttgaaacaaaagcaatggtgctgcctgcttaatgggtaggaaaatataataacgccatggaatatcgatacctccctagttttttctttcttttttaatgggtaataataagcaatggtggtggtaaaatgg

SEQ ID NO: 20050 - DNA, 250 bp, Gossypium hirsutum
  Clone ID: LIB3146-023-Q1-K1-F9
gaacccagaaatttctcgcacctgcatcatataatccgcgtaaagggaaaggggcacagcatcatggggatgtcatatgcactctcactcctataatacatccagggttggcttaagacatggctagcgacaacaggacaaccttccatacatcaattctgaaatgagccttgaaatgaaaaaaacaacttgttcatcctcagccgaaacataggatactgtcgcaagatctgtcttggcgatatgaaac

SEQ ID NO: 20051 - DNA, 268 bp, Gossypium hirsutum
  Clone ID: LIB3146-023-Q1-K1-G11
ttcacacattttctttaccacttaattttcccaaaactaccatttgcggcgggcttattcaaaggtgggacgcacctactcataactatcttcacatgttaaatattgcggtataccaatctgccttaaaaacgcaaatactttatcatgttcctgaaactaaatcaaaaagtttttttttatttcactctactaatgtaaaatgagatgacgaacactcgatctcctatattcctaattataatgattagactctctcatactatcc

SEQ ID NO: 20052 - DNA, 432 bp, Gossypium hirsutum
  Clone ID: LIB3146-023-Q1-K1-G12
atcgctttttatttctcttttatttctctttttccacccattgatctagttgtatatttgaaaatgaaattaaaaaaagtggtaatgtacagggaaagagaacatggagttttggtaaaagaaggaacaagacccacactctctgcattaggtgtggccaccgtagcttccatctccagaagagccattgctctgcctgtgctttccctgctgctcgtaagaggacatgtaagtgcctcatgcgctttttctttgttatcaagatcgtgaaggcaatcagaagaaagaccactggaaccggtaggatgaggtatctgcgccatgtccctcgcaggttcaagacttgtttcagagaaggtactaaagcagcaccgaggaagaaggttgcagcagcttctgcttgaggtattacaaggagctaatgcctataat

SEQ ID NO: 20053 - DNA, 335 bp, Gossypium hirsutum
  Clone ID: LIB3146-023-Q1-K1-G2
tcgcccacgcgttcgcccacgcgttcgtccacgcgttcgtccacgcgttcgggatgacatactttattttactcttattctcatgcagagcatgtaggcactaaatctgctgttcaaatttgaagccatgctcaaaagtttttctctaaggctcattgctttgagttcattacaagatttccttgattaaataaatgtattatatctttttttaccaagatttacttgattaagaaaatgcattattgcttgagaaagcaaatccgcatattgctctctcttgaattaatttctcattctgagcctgctgtagtagcattcatctatgcccttga

SEQ ID NO: 20054 - DNA, 216 bp, Gossypium hirsutum
  Clone ID: LIB3146-023-Q1-K1-G3
cccactcgtccgctgtagcagcttctgtggctcctccagaggctactgagccgaatccggagtcggtgctgaattcaacggacagtctagcggaccgtcccgtttcgcaaccgatctcatatccggccacatatttgtgtcctcagtttgggcctgattatgatcatgctgctcatgactctcatcatagaccacaacatattcctgcggatcatg

SEQ ID NO: 20055 - DNA, 429 bp, Gossypium hirsutum
  Clone ID: LIB3146-023-Q1-K1-G4
cccacgcgtccgcccactcgtccgcccacgcttccgtccacgcgtccgggatgacatactggattgtactcttattctcatgcagagcatgtaggcactaaatctgctgttcaaatttgaagccatgctcaaaagtttttctctaaggctcattgctttgagttcattacaagatttccttgattaaataaatgtattatatctttttttaccaagatttacttgattaagaaaatgcattattgcttgagaaagcaaatccgcatattgctctctctcgaattaatttctcattctgagcctgctgtagtagcattcatctatgcccttgaggccttgactgtacttgggttctgttgttgcaatagcttgcgggatggtacatagcatggctatattactgaagatgagcatattttattgggtttc

SEQ ID NO: 20056 - DNA, 422 bp, Gossypium hirsutum
  Clone ID: LIB3146-023-Q1-K1-G5
cccacgcgtccgcccactcatcctctcacttcttacgcccacgcgtccgggatgacgtacgggattttactcttattctcatgcagagcatgtaggcactaaatctgctgttcaaatttgaagccatgctcaaaagtttttctctaaggctcattgctttgagttcattacaagatttccttgattaaataaatgtattatatctttttttaccaagatctacttgattaagaaaatgcattattgcttgagaaagcaaatccgcatattgctctttcttgaattaatttctcattctgagcctgctgtagtagcattcatctatgcccttgaggccctgactgtactagggttctgttgttgcaatagctgtcgggatgtacatagcatggctatattactgaagattgagcattatttta

SEQ ID NO: 20057 - DNA, 257 bp, Gossypium hirsutum
  unsure (1)..(257): unsure at all n locations; Clone ID: LIB3146-023-Q1-K1-G6
cacgcgtgcgnccacgcgtccgcccactcgtccttccactcttacttccacgcccacgcgatgacatacgcgagctggctcttactctgatgcggaggctgtacgcgctaaatctgctgttcatattcaaagccatactcaaacgcataagtctaaggctcatgcgcattgagttcatgacaatgatctccattgactaagataaaaggataagatctattttttaccaagaacctacattgactaagaaaaatgac

SEQ ID NO: 20058 - DNA, 388 bp, Gossypium hirsutum
  Clone ID: LIB3146-023-Q1-K1-G7
cccacgcgtccggattcgctctactttcgcctaactttcgcaagatttgtagattcatttctatcgtatctccgtctccgaatcaatggctttgccgaaccagcttacagttgattatccgagcttcaagctcgttatcgtctgcgatggtggaactggcaaaactaccttcgtgaagaggcatctaactggagagtttgaaaagaaatacgagccaaccattggtgtggaggttcatcccttggacttcttcactaactgtggcaaaatccgtttctactgctgagatactgctggacaggagaagttcggtggtctcagagatggtttctatatccatgggcaatgtgccataatcatgtttgatgttacttgcccgttgacatac

SEQ ID NO: 20059 - DNA, 328 bp, Gossypium hirsutum
  Clone ID: LIB3146-023-Q1-K1-G8
cccacgcgtccgcggacgcgtgggttcaaattctcctgttgagcaagaacaggtccttatggggaatatattcaagctgcacgacaagtatattgcatatgtgaccgacttttttcaaaaccatactctctttcacaagtgactgttctaatatctaaactcaactgcacatcctgggattgatttgacagtgactgttctcacaacaggattctggccaagttataaatcatttgacctcaatctccctgccgagatggtcaagtgtgtaaaaagtttcaaaggggtctatgaaacaaaaaccaaacacagaaagcttacatggata

SEQ ID NO: 20060 - DNA, 272 bp, Gossypium hirsutum
  Clone ID: LIB3146-023-Q1-K1-G9
atcacacgtttttctttccacttaaatatccccaacctaccatatggggggggcgttttcaaagaggaggccggctacaaatcaccatccgaacaaaatatatattgtgggataccaccctcctttaaaaaaccaacatctgcaaaaagattctctaagcatagtcaaactgttttcgttctcaaacacaaaaagatgtaaaaggagagtactgacacctacctcatctacatctttaatgaatgatacaagtctatccacatatccctatc

SEQ ID NO: 20061 - DNA, 250 bp, Gossypium hirsutum
  Clone ID: LIB3146-023-Q1-K1-H1
tcgcccacgcgtccggattcgctctactttcgccaaacaaacgcaagatttgtagattcatttctattgtatctccgtctccgaatcaatggctttgccgaaccagcaaacagttgattatccgagcttcaagctcgttatcgtcggcgatggtggaactggcaaaactaccttcgtgaagaggcatctaactggagaagttgaaaagaaatacgagccaaccattggtgtggagggtcatcccttggac

SEQ ID NO: 20062 - DNA, 328 bp, Gossypium hirsutum
  Clone ID: LIB3146-023-Q1-K1-H10
tccacgcgttcgcttcattacattattccctaccctacattgctctgagagtgaatttttgaagtgtggatatttggacataaatatgatatatgattgatactatttaaggttaaaaaaaaaaaaaaaataaaaaaaactttctgtatttggtggtgcgactttaacatttcaaatgaaaaagaaagatgataaccgcaagctgttttactctagagccaagcagaatgcaaaggagtatggagctcatgaaaaagagttgattaagatgaagctcgaagccagataaaaaagagggttttatgttaatacggaagcttaacttttg

SEQ ID NO: 20063 - DNA, 545 bp, Gossypium hirsutum
  unsure (1)..(545): unsure at all n locations; Clone ID: LIB3146-023-Q1-K1-H11
cgcttacattaagccatgatgtgggtcaaagtgtgactgnnactgacgcttcaaangatagcgtattgctgatatgctaaactatagtggcgagaaacggnnttggagaacctancctacctccgnnttcttttctcgttggtggtcnnaatggaacccagttgctcnnatgaattnncattgtggaccttatagaggggatttagagagacaccnnngctggaatttagaactctgaagaaaatgttgctannaacgtnncttatggaccttatggnnattccatggtcctttacaatgnntcatggcctnngttccaggcaccactttcatgattgaactccnnactgaaagtgaagagcaagggggcggagcttcganttaggttctgtgaatgcttcnttcatctccattagngnngaagaaatctgctcagaaatttgagaatggaannnaagctgatatcncnnacaacaatnngttctgaaggggaagctcnnctcatccaaccaatcttttgctcattgggtgaaatgcatggacaa

SEQ ID NO: 20064 - DNA, 230 bp, Gossypium hirsutum
  Clone ID: LIB3146-023-Q1-K1-H12
cccacgcgttcgccacactcgaagcataacgtcggtaacttttcatacttgaatgggatccaacatttatgacctgtaccagtcgaaacaaatatacccctgcgaaggggtttctgcacatttaattttattctaaggcgacagaattcacccataaaaaaaaaaaaattaaaaaaataaaaaaaatttaataaaagtttattaattattttttaatttaagttttttgg

SEQ ID NO: 20065 - DNA, 159 bp, Gossypium hirsutum
  Clone ID: LIB3146-023-Q1-K1-H2
tcgcccacgcgttcgcggacgcgtgggttcaaatgctccgggtgtgcaagaacaagtccttataaagaaaataatcaagccgcacgacaagtatattgcatatgtgaccgacttttttcaaaaccatactctcttccacaagtgactggtctaatatct

SEQ ID NO: 20066 - DNA, 425 bp, Gossypium hirsutum
  Clone ID: LIB3146-023-Q1-K1-H3
ctggtcagagatttgcagctaaaatgagaaacatagagaattaggaagcatggtgtaccccaatgaatcccttgaagactctccccagaagaaaatggggagaggaaagatcgagatcaagcggatcgaaaacacgacgaaccgccaagttaccttttgtaagaggcgcaatggtttgctcaaaaaggcttatgagctatcagttctttgtgacgctgaagttgctttgattgtcttctccaaccgtggtcgactctatgagtatgccaacaatagtgttaaagcaacaattgaaaggtacaaaaaggcttctgattcctccaacactgggtcagttgctgaagttaatgctcagttctatcagcaagaagctgacaaactccgaaatcaaatccggaatttgcagaatacaaacaggcacatgc

SEQ ID NO: 20067 - DNA, 142 bp, Gossypium hirsutum
  Clone ID: LIB3146-023-Q1-K1-H4
ccgacgcgtgcgtagacgcttgagttcaaatgatccttctgtgcaggaccaggtgcacatgaggaaagtcatcgagcaccacgacaagtctatgccgtatctggccaagtttgttcataagcatactgtattcaagacgaga

SEQ ID NO: 20068 - DNA, 402 bp, Gossypium hirsutum
  Clone ID: LIB3146-023-Q1-K1-H5
aaatcatggtaagtctcaaatcacttgtatctctcagttcccgatccgctgccgtagcactacttgttttggtggtttcagtggcagtgcagacccatactacaaatgcacaaagctgcccgaccgagctgacgagcctgaacgtgtgcgcacctttcgtggtgcccggtgcatctgtggctaaccctagcattgactgctgtaacgcactccaatcggtgcaccatgattgcctttgcagcactctaaggatcgcttctcgactcccttcttaatgcaatctcccaccactcacttgtgcttgaaagaaaagcagtggtgctgcatgcttaattgggtaggaaaatctaattacggcatggaatatggatacccgccctgttttttctttcttttgtaatg

SEQ ID NO: 20069 - DNA, 284 bp, Gossypium hirsutum
  Clone ID: LIB3146-023-Q1-K1-H6
gttcccactactatcacaaatgatattggccatggccagcatctagtattgctttcgtcgagctacagacctatcccggataacatcactatttcagggaattctcagcaggaaatgccagacaactatgtgaacggagcttttgtgtatgacgtcggtgatggcttcatctggatcgttttctggaccaagaataatcaggtctctactaagatcttcatacgttataatgactccactgaacccaataattccattctctggcaccaagttgtaaacaatct

SEQ ID NO: 20070 - DNA, 303 bp, Gossypium hirsutum
  Clone ID: LIB3146-023-Q1-K1-H7
cccacgcgtccggggacacttttcatcatgtttgcttattaaacattgctttgactataacctcagggtctccatggaactgctcacatattcaaggatactctgccattgtttccccagaaacttgtgaacctctcaaggaaagtatctaccccaaccattcttcagattgttaccatctatccaatcatttgcggagttcaggtaatcaaaacaaaggttcttggttacattcttggtaaatagtgggtaacatataattcgttttaccctgaaatccaccctttgtcatgattttttttt

SEQ ID NO: 20071 - DNA, 258 bp, Gossypium hirsutum
  Clone ID: LIB3146-023-Q1-K1-H8
tgccaggaagcttgcgggtgatcctaatcttcacttcgtggagtctcctgcacttgctcctccagaagtacacattgacttggctgcacagcaacagcatgaggctgagcttgcggcagcagccagtcagccccttccagatgatgatgatgatgcatttgaatagagaggggtttggagtgccagaaagccatcaacaatttctgctgctttttcattttcactcccgtctgaatgtgtgctctcattttcgtattt

SEQ ID NO: 20072 - DNA, 420 bp, Gossypium hirsutum
  Clone ID: LIB3146-023-Q1-K1-H9
agcggccagctaaaatccaatttatatttctacaattggaatcgaatggagggtaggttctgcgatggatcatcgttcaccggggatgctgtcgatcgagctaataatctctttttcaaaggaaacagcatatgggaatttatcattgctgatctactatcaaaaggaatgagaaatgctaaaaatgctattctttctggctgttccgctggtggattggcttcgatattgcactgtgacaggtttcgagctctccttcccgcttctactaaagtaaagtgcattacagatgctggcttcttcctccatgcgcaagatgtctcgggagggaagcacatagaagaattctatggcaaagtggctagactacacggatccgataagaatttaccagcgtcttgcacttcaagaatgggagcc

SEQ ID NO: 20073 - DNA, 321 bp, Gossypium hirsutum
  Clone ID: LIB3146-024-Q1-K1-A1
ccggaacgatattgcttaagaagcccttgtatcgagaatcaactgatatagtcattcactctgtaggagatcaacctgaatataaagccatcgccgaaataggaactgagcttgccggagacaagaacctgcaagaatcagaaatagatggtatgaaggaaatcaaaaccactgatgctggcaaagtggttgaaaaaccagccttaagagttacagaaactactagaccagtgctctgaccataatcgttgctcagctgagccggttgacaggctcaacgttgggccatgtcgagaaacccctgctgcagaactctgcagc

SEQ ID NO: 20074 - DNA, 436 bp, Gossypium hirsutum
  Clone ID: LIB3146-024-Q1-K1-A10
cttacatagccatgatggggtcaaagggactgactgacgcttcaaagatagctattctgaatgcaaactatatggcaaaacggttggagaactactaccccgttcttttccgtggtgtcaatggaacagttgctcatgaattcattgtggacttaagaggatttaagaacaccgctggaatagaacctgaagatgttgctaaacgtcttatggactatggattccatggtcctacaatgtcatggcctgttccaggcacactcatgattgaacccactgaaagtgaaagcaaggcggagctcgataggttctgtgatgctctcatctccattagggaagaaattgctcagattgagaatggaaaagctgatatccacaacaatgttctgaagggagctcctcatccaccatctttgctcatgggtgatgcatggac

SEQ ID NO: 20075 - DNA, 306 bp, Gossypium hirsutum
  Clone ID: LIB3146-024-Q1-K1-A11
ggttgctaggttgatggactctatatgatggtattggacatgagaggatgtcgagcttttctctttgtttcttagttggattggaaatctgatgcagtttttattgtaaaaccaattattttttttcttttaaaagattgttgcaacttgcaagtgtgtttctgtatcttccacaaagaaaaaaaactaaaaaatgcgctcaagaatgatatttgtctttggtcatgaacaaaacagaaaaaagtatcaaagagcaaaagccatacatgttggaaatatcttagaaccaataacctgaagaagttg

SEQ ID NO: 20076 - DNA, 423 bp, Gossypium hirsutum
  Clone ID: LIB3146-024-Q1-K1-A12
ccatgaccaagcagcaggctaactggtctccttacgacaacaatggaggatcttgcgttgcgatcgctggagctgattactgtgttatcgccgccgatactcgaatgtcaaccggttacaatatactgacccgagagtactccaaaatctgtaaacttgcagataaatgtgtcatggcatcctcaggatttcaagctgacgtgagggctttacaaaagcaactggcagctaggcacttgatttatcagcatcagcacaacaagcaaatgagctgccctgcaatggctcaattgctttccaacacactttattacaagcgtttctttccttattattcttttaatgttttgggtggccttgataacgaaggaagggttgtgtcttcacatatgatgctgttggttcctatgagaagttggatac

SEQ ID NO: 20077 - DNA, 327 bp, Gossypium hirsutum
  Clone ID: LIB3146-024-Q1-K1-A2
catccatggctcatgtttctttcgttagtcattgtagcagtgtaggaaaaataaatgatccggaaataactgtagtaaggaatagtagtaggtgggtaatgccaacttaatttcgggtttccctggaaactctgatatgtctcgatcttccattagcaagcctggtatttgaagagaggagaaagcatccattaccattggcacatccaagcttggaaaaatgatggggttgtcaacttggcactatgttggctgtagctctctacttaattgaaaagtattgtacctcaaacgtcttgttgtacttgaatcaagtttcagtttatt

SEQ ID NO: 20078 - DNA, 272 bp, Gossypium hirsutum
  Clone ID: LIB3146-024-Q1-K1-A3
agcggggaacatatgcgtggcatcatttgattggtcgtgcagcggagtgtgtaagtcggtggagaagatgaaatacgtgcacaactcttgtggagaaggcgattctagtatttggaaatcagatttttaagttgccttcctacctccttaccggctttttattatccattttcaaatttattattaagtagtaaaattacttcaagaactttcaacactttgcatactccttttattattattattattattattattattatcatgtattt

SEQ ID NO: 20079 - DNA, 404 bp, Gossypium hirsutum
  Clone ID: LIB3146-024-Q1-K1-A4
cggacgcgtgggatttcaacacttctctcaccgttactcgccttggagactctccaccgtcagcttgcagttcttcgacggcggagattgcgccggtgcattgcccttacgtttgggagagtagtctttccaaccgggtggggaaatcagttccgggtcttgttcttgcaatttagtttcctcctcccacgtgtggataagataacagatgtgagttccatgagttgagttggtctggtgttaaaatattgtgtcagaactgtcaatttggtaacttatattgttgttgtgtgtgagtgttgttttccatgcaatggatttagtgaaaaaaaaaaaaaaaaaaaaaaaaaaaaaaaaaaaaaaaaaaaaaaaaaaaaaaaaaaaaaaaaaaaaaaagggggcgg

SEQ ID NO: 20080 - DNA, 434 bp, Gossypium hirsutum
  unsure (1)..(434): unsure at all n locations; Clone ID: LIB3146-024-Q1-K1-A5
cggcacnaattcaagatcttcttgcagccattattggcagnctgatgcatgctgacgtaaaantctgcaatgagctgagcggatctcagtcatactccaaaacatgacttcacttctcacctccttcatcgtcgccttcattgtagaatggagggtctctcttctcatcctcggtaccttccctcttctagtccttgcaaactttgctcagcaactctctctcaaagggtttgctggtgacactgcgaaagcacatgcgaagactagcatgattgctggcgaaagtgtaagtaatatcagaacagttgcagccttcaacgcacaaaacaagatcctttcgctattttgtcatgagctccgagttccacagatgcanaagccttcgtcgcagccaaagtttctggccctcctctttggcctatctcaacttgctc

SEQ ID NO: 20081 - DNA, 361 bp, Gossypium hirsutum
  Clone ID: LIB3146-024-Q1-K1-A6
cggacgcgtgggcggacggtgggatcctcgtatacaagaagaggctttgagaaagtctctattccttgccaaacagcttgatatgcagggatgatgaagatgattctgctgccaagatgaaggcagctgaggaagccttcgaagcaaaacagaaagtaacaaatagcttgtctgctacctgttctttttttttttatcatgttttataattttgagacaaattgttcttggtactctgaagatatttatgcaaaattaccctatgattctattgtatttatactgcacgactgcaccatgtatttcttaactagtttgataaattttaaagaaaaaaaaaaaagaaaataaaattacatat

SEQ ID NO: 20082 - DNA, 432 bp, Gossypium hirsutum
  Clone ID: LIB3146-024-Q1-K1-A7
attcgcttcagctcatcacttcccatagtctctcctcctccctcaccaaatgaaaatgtctctggtggcgaacgaagactttcagcacattttgcgtgtgctgaacaccaacgttgatggaaagcagaagatcatgtttgctttgacctccatcaagggtattggaaggcgtttcgctaacattgtttgcaagaaggctgatgtcgacatgaacaagagggctggtgaattgactgcacaggagctggacaatctcatgaccattgttgcaaaccccaggcagtttaagatccctgactggtttttgaataggcagaacgattacaaggatgggaagtattcccaagttgtgtctaatgctctcgacatgaagttgagagatgacttggagcgattgaagaagatcaggaaccaccgtgggctgaggcacta

SEQ ID NO: 20083 - DNA, 430 bp, Gossypium hirsutum
  Clone ID: LIB3146-024-Q1-K1-A8
ggttaccccagtgtgattcactggcttcaggcataccatcagttaatattagccctctgtcgtctgtcaccccgactgttattatggcctctagttctactgcaagtggagataaagctgataaaccgagtcagccacaactggatactccacatcgaacaagctcatctgaaacagcctctttctcagagtctataaaatctaaatggtccactgattcagccagatacaaggaaacaatatctaaaggtaccaaaggtctcaaagagaagcttcttgctcgtaataactctgttaaggagctcagcaagggagtgcagcgtgagatgactgctggggttgcaaaaatgattgagcgcctagatatttcatcaaaaagatctggagcctctgtacctgcttctggtggcacaggcagtacctcaaatat

SEQ ID NO: 20084 - DNA, 430 bp, Gossypium hirsutum
  Clone ID: LIB3146-024-Q1-K1-A9
cccacgcgtacgcccacgcgtccgatacatataaactgtaattccacaaaaccaacttctttttatacgtagaaaaaggagaatatgaaggcatcatatattgcattgtgtgcagtgatggtgatcctcttggcagaagcagtaggggtgtcaacggcggtgacatgcagcccaacgcagctgagctcctgcgtgagcgccataacatcttcatctccaccatctcaactgtgctgtagcaagatcaaggagcagaagccatgcctttgccaatatcttaagaaccctaaccttaagaaatttattaacactggcaatgccaggaaggttgcttccacctgtggaactccttttccaaagtgctaagctagaccctttgcttaaggctttctttctctctattttcactgcacaatggatagagaggaag

SEQ ID NO: 20085 - DNA, 399 bp, Gossypium hirsutum
  unsure (1)..(399): unsure at all n locations; Clone ID: LIB3146-024-Q1-K1-B1
accggntcggaaannnccgggggagccacaccttcgctactatttaatttttaaaaacttatttaaaaagatatttcacgggtgcctggtttaataaggaggcgggccgcaaaatatcattctcttactccacagatagatgatctcttcagaagaaagaacgctagtgatccttcttaacctaccctcactgtagagattgaaacacacaagcagacacagtttttgctggaagcatctattcttcatcagcatgcatcttatactaatcgaaagctaatgacattacaaaccaacatagggaagagttactacatcgatgatattttaaggtcagggtcagccaaaccaagcacgaaacaatccatggattggattacaaacaacttacatgaagtt

SEQ ID NO: 20086 - DNA, 433 bp, Gossypium hirsutum
  Clone ID: LIB3146-024-Q1-K1-B10
aattaagcaagggcagtatgtgtacgatataccaactgcggcaaatagcattgggggtgcacctggtgatctatcaaatcacttgcagaatcttaaggcaaagggagaaataacatatgagttgaaggatccagcctactgctataagattgtaaaggttcctagtgatttctgttctctcacggaacttcttaccagatggttactggatattgaaaattgcaaggtatggaaataggatgccatgtacagttctgcagtttttgtagtggatacatgtgagaagacacatgattgcaatgttgctcagcagacaacatgcttgcaagagagaattttggattattttaagggggacaataaccttgacgttcttgataagatgggtcagaacagcccttttgttccagcagatataaaggtctttctgcag

SEQ ID NO: 20087 - DNA, 436 bp, Gossypium hirsutum
  Clone ID: LIB3146-024-Q1-K1-B11
ctcctctgcgccgctcccaattgctcccttactaacaacaaaaacccggaaatgtcggacgacgatcatcatttcgaatccaaggctgatgccggcgcatccaaaacctatcctcagcaagccggtactatccgtaagaacggctatatcgtcattaaaggccgtccctgcaaggttgtggaagtttccacctccaagacggggaagcacggtcatgctaagtgtcacttcgttgggatcgatatcttcactggcaagaagttggaagatattgttccctcctcccataactgtgatgttccgcatgtcaatcgtactgactaccaattgattgacatttctgaggatggatttgtgagtttgctgactgagagtggtgacactaaggacgatctgaggctcccaactgatgagaacttgttgaaacagatcaagg

SEQ ID NO: 20088 - DNA, 435 bp, Gossypium hirsutum
  Clone ID: LIB3146-024-Q1-K1-B12
gcaggctggtgggtttcgacaagggctacaaccaccttcacagcattttgggtcacttggatacccaaatttctaccattcacaaacgggagtatcgctggaccctcagcagcaaaaccctagggatgggtccctgagtgggtctcaaggccagccaccatcaaagcagacccagcagttatggcaaaacaattactaatctcgtctcctcctggtttttcagggtcttatagtgagtttgaaagtggccaatcaaagggccttctagcgactgagaataactatacgtgcagataatcaacaatgatgggtctgaagagactttggctggctactgccctgtgccatgaggttgtattctacttttaatttattgttctgttctgttctgttatgttaacttaggaacacagtgtgctaatttgggatagtgga

SEQ ID NO: 20089 - DNA, 433 bp, Gossypium hirsutum
  unsure (1)..(433): unsure at all n locations; Clone ID: LIB3146-024-Q1-K1-B2
ccacgcgtccggccttctttgctcttagatgctcgaatatgttatcttggcatgccaattgtaccagcagtgactgaacttattgttgctcaattaatgtggttagattatgataacccttcaaagcctatttacttatacatcaattcatctgggacacagaatgagaagatggagactgttggatcagaaaccgaggcatatgctatagctgacaccatggcttactgcaaatcagaaatgtacactgtgaattgtggcatggcatatggtcaagcagcaatgcttttatctcaaggagctaaaggttatcgtgcagtacagccaaattcatccactaagttatatctgcctaaagtcagcagatcaagtggggctgtcatagatatgtggataaaggccaaggaacttgatgcanaanncgagtcctaca

SEQ ID NO: 20090 - DNA, 431 bp, Gossypium hirsutum
  unsure (1)..(431): unsure at all n locations; Clone ID: LIB3146-024-Q1-K1-B3
gtgctgtaggaggcctaataggagtgatatacatttgtcagtggaagaagaggccaaattggaggagcagaccagggattactttgatcacacagcacctaaacgtcacactaagcctcaacgaagcgactattcttccaactacgtcgacgctcttgccgccgctgattccggtatccctgaatacctcgagtttcaacgtctagagaatgatccccagaaaatagtttacaatggaagtgaagtgagagaagaatttgtggagactgaatattataaggatctcaattgcgtcgacaaacaccaccacacgacaggaacaggtttcataaaggtagagaacgacaatggcagaaactntaatttggaaccagattcagacaccagctgccatgcnctcttgtagggaaatccagcaactaacgactgga

SEQ ID NO: 20091 - DNA, 440 bp, Gossypium hirsutum
  Clone ID: LIB3146-024-Q1-K1-B4
cccacgcgtccgcccacgcgtccggactagttctagcggacgcgtgggtggccataccttcaattatcttgttgacaatggatacacttattgcgttgttgcagatgaatcagctggaaggcaagtgccgattgcttttttggagcgtatcaaggatgatttcgtgtcgaaatatgataacgggaaggctgctacagctcctgccaacagcctgaacaaggaatttggaccaaaactgaaagaacatatgcaatactgtatggagcatcctgaagaaataagcaagctggctaaggtcaaagctcaggtttctgaagttaaaggtgttatgatggagaatatcgaaaaggtgttagatagaggggaaaagatagagctgctagtggataagaccgagaatcttcataatcaggctcaagactttcgaagtacagggacaa

SEQ ID NO: 20092 - DNA, 400 bp, Gossypium hirsutum
  unsure (1)..(400): unsure at all n locations; Clone ID: LIB3146-024-Q1-K1-B5
gaactattgaatttggaaaaactaggcaaaagtgatttttcaagggtaccttcattaatgaggaagcaggccagaaggtatcaagctcttactgcaaagattgatgatctctgcagaagaatgcaggctagtgatccctctgaacctaccctcagtgtagagtttgaaacacagaggcagacggagtttttgctggaagcatttcggcttcagcagcatgcatctgaaactggtcaaaagctaatggcattacaaaccgagatagggaagagttactacaaggatgatattggaaggtcagggtcagccaaagcgggcacgaaacaatccatggattccattagaaacaacttaagggaagtacanagaaaactggagatatggttggccagaattatag

SEQ ID NO: 20093 - DNA, 104 bp, Gossypium hirsutum
  Clone ID: LIB3146-024-Q1-K1-B6
ctaaaatctgagacggatggacggaggaaatgatgcagctcgagcgttggatgattcaggagacagcttggactacggatgctataatggaacagaggtagaaa

SEQ ID NO: 20094 - DNA, 342 bp, Gossypium hirsutum
  Clone ID: LIB3146-024-Q1-K1-B7
gttctatggccatacggagcagaaatcgctcgtagtgacgtggaggaggcttgaatgctgcgatactggtttcgtgtgaggctgttgcgcacttgagcttggtggcttagggtttccagagacctcacctgtccgggccatttgggccagacaatcgggctattttagaagtggattgttaattttgttagggatttgggtttaggtttattaggttgggcttatttgggcttttattattgggttataagtgatttgtaaatggactttgatgatgaactttttttggttttttttaattttttttaatttcgaacacaagacagtacataaataaaaata

SEQ ID NO: 20095 - DNA, 412 bp, Gossypium hirsutum
  Clone ID: LIB3146-024-Q1-K1-B8
cggacgcgtgggtttgagtgtcagcacgttagcgggcacccctggctacgttgcttctgaatactaccagagcttgcgatgttccaccaagggcgatgtttacagttacggtgtggttttactcgagctactaacgggaaaacggcctacggattcagccgattttggcgataacaatcttgttggatgggtgaaacagcatgctaaactcaaaataagtgatgtcttcgatccagagttgatggaagaagaccccatggtcgagatcgagcttttacaacacttaaaggtagcttgtgcttgcttggatgatcgacattggagacgacccacaatgattcaagtgatggcaatgttcaaggagatacaagcagggtcggtgctcgacacgcaatcgaccattgccaccgat

SEQ ID NO: 20096 - DNA, 414 bp, Gossypium hirsutum
  Clone ID: LIB3146-024-Q1-K1-B9
atctagggtcattttcattttaaaaattctttacaatccgtttgggttcgatgcatcataagacgaaaaaggctgcagataaaaatgctaacattaacttcgcagcttcggtgaataatatcaatggctacttacaagagaggatttatcagaatggtactgttcttgcaagtgatcagcaagcagaaaggagaaacggcttagtcttacaaacaaattggcatatttcaagacaaattgtttctttaaaagatggaaaaacaggctcatctctaaatcagcatgtgcttaccaaaggtgtatggtagactgatggtgctagatgacatgatatagacctagaatctactgctcagaccatagaaacacatgattcggaaagtcatggaactggatatgtcacagatgaatggg

SEQ ID NO: 20097 - DNA, 433 bp, Gossypium hirsutum
  Clone ID: LIB3146-024-Q1-K1-C1
cccacgcgtccggctttagtttcggtttgtaaattaataggattttgagtaccctcctgtaatagtttgtaggcgcttctaaccgaaaaattaccagatggttctcctctccagacttggaagtcttcatttgctgacgttgtcaaaggaatctgtaaaatctttttagcaacttccgcattgaagaggtccttccaaacagaaatacgatcccccttaccaaccctccagcaaagtcctcattcgagaatgccttttgccgactagatacttttccaggtaagcgaacgtaaattccctaattgagcagttagaaaacacgcattcggataatatttagctttcaatactcgagctagcaaagaatctggaaaattaatgagacgccagccctgtttagctaataatgcaatattaaatttatcaagttttc

SEQ ID NO: 20098 - DNA, 436 bp, Gossypium hirsutum
  Clone ID: LIB3146-024-Q1-K1-C10
acatgtcaaagcaaatgccctacttcaggcccacttctctcggcagcatgtgggtgggaacctatcactagaccagcgagaggtgctcttgtttgctactaggctacttcaagccatggttgatgttatttcgagcaatggttggttgagccttgctcttcttgcaatggaggtgagccaaatggtgacacaaggaatgtgggagcgagactctatgcttctacagctcccatacttcactaaggaattagccaagagatgccaagagaaccctgggaagaacattgagaccatttttgatctggtggagatggaagatgacgagaggcgtgagctgttacagatgtctgatttgcagcttctggacattgcaaagttctgcaatcgtttccccaacatcgatttatcatacgaggtgattgatagtgacaatgta

SEQ ID NO: 20099 - DNA, 427 bp, Gossypium hirsutum
  Clone ID: LIB3146-024-Q1-K1-C11
gaaaatgagtggtataaagaacttgtttcaacgactgtttgtgaccccctgggaacagcacgaaccttcgagtgattcatccattcctggttgaagaagaaggatggaactggttttgcttgtatgatttagttattatatctggatgacatcagtttgtgtttgtaaatgccatcagtatatgcaaagctttggggattgcaaaatgtgaggaaaagctttatattacccaatattttcctaaaaaaataagctcccactttatttgttccccagttacctaaggtttttttcttgttctttagatgcttgtttttggttactaattgttctatcaatagcagatctggaaaatattggtctctataagagtacctttgagaacaacatcaagttgggaacaattacttttgagaacaatgttgga

SEQ ID NO: 20100 - DNA, 333 bp, Gossypium hirsutum
  Clone ID: LIB3146-024-Q1-K1-C12
tcggtcacgccgttcgattttaattgtcaggatgaagtatgactgcgttaggaaggtgccgggggtggatagacataatcaagtgctcagcttgtgatagatgttctgatcagaacaccatagtgtctaatgcgtctcgatcgtttccatgcttacttcttcttagatgccgcatcgcacatctaagcggacgaagatgtacactcatcgaatcccctgttggttcgcttgttgcaccttcatgaacattaataagttgtctgatgtggataatactgctatctattatgtaccttttatgatttaaagattgaatggacttacgatagaatc

SEQ ID NO: 20101 - DNA, 439 bp, Gossypium hirsutum
  Clone ID: LIB3146-024-Q1-K1-C2
cccacgcgtccggacggaagcttattggaggaagtgatgttggagggatgaaagaaactcaggagatgctagacttctgtgctaagcacaatatcactgcagatatcgagctgattcggatagaggaaatcaatacggccatggaaaggcttgctaaatctgatgtcagataccgttttgtgatcgatgtggcaaattccttgtcacagtagggttcattgtgaaggaactagtccagtaagtttaaagattatgatcttaatggagaagagaaaaaagatgaactttgatggcttgggacttgtaatgctatataataatcatttatatgagatcattttgtgggtgttctgcttcatgttatcactgttggtcggatggaatctttattttaacctcactattatttttgcagtcaataaaggaaatagttgcataa

SEQ ID NO: 20102 - DNA, 430 bp, Gossypium hirsutum
  unsure (1)..(430): unsure at all n locations; Clone ID: LIB3146-024-Q1-K1-C3
agaagatgtttgaggtatttgctgacatggaagagcttggtgtcaaaccaagtatatcagttgtttcaatggttggaaatgccttccaaaagttgggcatgttggacaagtacgacaaattaaaaaagaaatatcctccaccaaaatgggaataccggtacatcaagggaaagcgtgtcaaaattcaagtaaagcagctacaggaatttgataaaaaggccaaaggtgtcagtgaggacaaggaaactgaagagaattcgagtttagagcatcaggaagcagaagcaagtttaaataaaattgccaaaggtgccactgaggacaatgaaactgaatggattatgaaatntgaagcatgaagaaccagaagcacaatcaaatacattcactgctggagttgatataatttcatgattaatcaatagtctta

SEQ ID NO: 20103 - DNA, 401 bp, Gossypium hirsutum
  unsure (1)..(401): unsure at all n locations; Clone ID: LIB3146-024-Q1-K1-C4
tgagaaatatggcgaggagataaattgtgcggtgattccaagggaaggagtgagcttggatgaagcagaaatcacgaaatattgcaaaaggaatcttgcgagtttcaaagtacccaagaaagttttcatcacggattccgcgccgaaaacagttactggaaaaatccagaggacgatagtaacagagcatttctcgactcaaatgtctgcctctaaagtacccaaatttggagcttaaattcagcattgcttgtctatcgcttagttgcttacgtacatatttaagcgactgtaatatattggttgtgtgaacaggtattactaaagcaccatgttacatgtgaatctgnttcgtgatagaccagaaccgcaatcaaatgcattcactgctaaaacttata

SEQ ID NO: 20104 - DNA, 405 bp, Gossypium hirsutum
  Clone ID: LIB3146-024-Q1-K1-C5
gagcaaccccctttcgacaagaagcagtttgtcgtgttcatgaagaagttcatcaagaacttgacaccgaaactggatgcggaaaagcaagagtccttcaagaaaaacattgagggagcaaccaagtttttgctttcaaaattgaaggaccttcaatttttcatcggagagagcatgcacgatgatggatgtttggtatttgcttactacaaggatggtgctgttgacccgacatttttgtactttgcgtatgcattgaaggaggtcaagtgctgaggtttgaagcaaagaaaaaaaaagtggttgctgaagaatttagtcctttttattattgcttttgtctcttattttcagtactctgctaaagacataaattatttatggtttttgatgtttttgatttaa

SEQ ID NO: 20105 - DNA, 407 bp, Gossypium hirsutum
  Clone ID: LIB3146-024-Q1-K1-C6
cccacgcgtccgagaaaatttcactgcgagattcatatcgggtttcaactcttttcctccaatttgcacttgaagtgatggataccggatcaaaggtgaagaaaggagccggaggaaggaaaggcggcggtccaaagaagaaaccggtttctcgttcagtgaaagccggattacagtttcccgtcggtcgaattggccggtacttgaagaaagggcgatactctcaacgtgtgggaacgggtgctccagtttaccttgctgctgttcttgaatacctagctgctgaggttcttgagttagctggcaatgctgcaagagacaacaagaagaataggatcattccaaggcatgttctattggcagtgaggaacgatgaagaacttgggaagctttagctggtgtgacca

SEQ ID NO: 20106 - DNA, 319 bp, Gossypium hirsutum
  Clone ID: LIB3146-024-Q1-K1-C7
accggatcgaatgtttaaatgattttctctatgaggtctttttatgattggtggaaattcttaatgcccaaagcttgtattattttcgtcaaaacaaaaaaaaaaaaaatctccgcagaaagcaagcaaaacataccaaaaaatcaaccggactaaaaaagaaaaaaaaaaaaaacattcaaaaaaaaaaaaaaattgaactaaactaattataaaaaaaaaagcgctggcccttttagagattcaaactttattttgccttgctggtggactcaaacctctattttagtgtagcttaaataaaaatggggggcggtca

SEQ ID NO: 20107 - DNA, 439 bp, Gossypium hirsutum
  Clone ID: LIB3146-024-Q1-K1-C8
ttcagcgtgtcgtcgaactcttcgtttatgtcttctgcgatcaccggagacggcagcgtttcgaacgggaagcaaggatcatctctatttttgacaccggcggcggccgtttccgcgggaaaaccaccactatcctctgctccattcaagaagaggtgccgcgaacatgagcactccgagaacgtctccggcaacggcaagtgtcactgctcaaagcgaaggaaaaacagggtgaaaaaagtaatcagagttccagccatcagttctaagatcgccgacattccggcagacgagtattcatggaggaagtacggtcaaaaaccgatcaagggctcaccatacccacggggatattacaagtgtagtacggtcagagggtgtcccgctaggaacacgtggagcgagcgaccgatgatccgtcgatgttgattgtaacata

SEQ ID NO: 20108 - DNA, 383 bp, Gossypium hirsutum
  Clone ID: LIB3146-024-Q1-K1-C9
cggacgcgggggtcgaactatgcgtttatgtccgctgccaggaccggatacggttgtttttttaacgggaagcaaggaacaacatctattgatgacaccggatggaggacgagaacagacggaaaaccaccactatcctctgctccattcaagaagaggtgccgcgaacatgaacactccgagagcgtctccggtaacggcaagagtcactgctcaaagcgaatgaaaaacagggtgaaaaaagtaatcagagttacatccatcagttgtaagatcgccgacattccggcagacgagtatacatggaggaagtacagtcaaaaaccgatcaagggcttaccatacccacggggatattacaagtgtagtacggccagagggtg

SEQ ID NO: 20109 - DNA, 374 bp, Gossypium hirsutum
  Clone ID: LIB3146-024-Q1-K1-D1
gtttcatcaatgacatctttgagaaacttgctcaagaagcttcgagactcgcgaggtacaacaagaaacctactattacttctagggaaatccagaccgctgttaggcttgtacttcccggtgagctagcgaagcatgccgtttctgaagggactaaagctgtgactaagtttacttcgtcttgaagaaggggatttgtacgtttgtctttttagttagggtttgctttaagttgatgtttggagattgtgtattggaagatggatttactcgatcctgatgtgattatatagtagatttaaatggaattatttcacaatttcgcattatttctaggcatttgttcgtttttctaattcaactaatgggagatt

SEQ ID NO: 20110 - DNA, 426 bp, Gossypium hirsutum
  Clone ID: LIB3146-024-Q1-K1-D10
cccacgcgtccgcattcgcgtgcggttaagatggtgacatcactggattctggatgcttgataaagaaggaggacttcaaccggtccatctgaatgccaaattcgagaacgagtagccggcccgtcttgaaacaatgttcgtattgcaaacacctcgaaagtgggattatgttcatgagattcatggagctgttttataatgaaaacggctagaagttcatcaaaaaatgactgcatatctattattacttgtcactactctatcattatatctgcttgcctccgtagcgtcatttattttgggttgaagcataacttgaaatctcatgtagcttttatgcagatggatcatattgcaggtatattccaatgtaccgatgatgcagagacctgattgcttccttttgcccaacatgctactctgga

SEQ ID NO: 20111 - DNA, 437 bp, Gossypium hirsutum
  unsure (1)..(437): unsure at all n locations; Clone ID: LIB3146-024-Q1-K1-D11
gtggcagagcagtgaagagaatcagttgagatatgtctaagcaaggagaagtggtctgcgtaaccggggccagcggcagcattgggtcttgggttgtcaaactcctccttgttcgcggctacaccgtccacgggaccgtcagaaatctcaaggacgagaaagaaacgaagcacctagaagctctagaaggagcagactcacatctccgcctcttccagatcgatctcctcgattatgattcactcgccgccgcaatcaatggctgtgctggtgttttccacctcgcttctccatgcagcgtcgatcaagttcacgatcctcagaaggagcttttggatcctgcgattaaaggaacgcttaatgtactgacagctgccaaagagcttggtgttaaacgtgtgggtggtacgtcttcaatcttctncatgtggccctgc

SEQ ID NO: 20112 - DNA, 363 bp, Gossypium hirsutum
  Clone ID: LIB3146-024-Q1-K1-D12
gtacagaacagaactgggtgttaagatcttgtattggggggctgagtcacaggcgggggatcaacacaggcgtgcaaaaattaggggttgtggtttgatgaaagctgaattggtttgcttaatgatgagcctggattgctgcaaggaagaaaaagagaaacttgaagcttctatgcaagactgcaggggggaaaaatctcaaatctcacttgaacttagcgtagcgcaagaattgctcgtggcatacacataaaccatgaatgtgcagaaggaaatagatagcaaactgcaaaatggctgcttgtctgatgaactagttgccaataatgctcaaactaccgacatttatactaaatatttgga

SEQ ID NO: 20113 - DNA, 403 bp, Gossypium hirsutum
  unsure (1)..(403): unsure at all n locations; Clone ID: LIB3146-024-Q1-K1-D2
caggaatgtgagagacaattagctgctaaagaagcttctctgcctctggagccatcagccgatgaggaaaatgctgtaaaccttctagtgcgaatgccagatggcagtcgaaggggccgtttatttctcaagtctgacaggctgcagtctctctatgacttcatagatatcggtagaggagtcaagccaggcacttaccgattggtgaggccgtacccaaggcgtgctttcagtgatgatgaatgcagcttgacgctgaatgaacttggattagcaaacaaacaagacgccctattttggagttgatctaataacatcttaactattacatgaatatcatagaataccactaggtaatnttagttcacttagatatggaatttcataaggttcgtgaatgttg

SEQ ID NO: 20114 - DNA, 415 bp, Gossypium hirsutum
  Clone ID: LIB3146-024-Q1-K1-D3
cggacgcgtgggcggacgcgtgggcgaagcaggcttggatcgttgacggcgagtccccgcaggtaagaaacccttccttctatactgctattttacaaaaaaaaaacaacttgcaacctaagaaaagtgagggtgaaattagtgggatatatgtgaaagtgagcatggacggggctccttatcttagaaagatagatttgaaggtgtttaaagggtacccagaattgcttaaggccttggaagagatgtttaagttcaaagctggtgaatattcagagagggaaggatataatggatcagaatttgtacccacttatgaagataaagatggtgattggatgttggtcggagatgtaccatgggaagatgttcaccaattcttgcaaaaagctgaagatcatgaaaggatcagaag

SEQ ID NO: 20115 - DNA, 441 bp, Gossypium hirsutum
  unsure (1)..(441): unsure at all n locations; Clone ID: LIB3146-024-Q1-K1-D4
gtgaagctatacgtacagcccataatagttttgcaaggcctgagccatttgttccagaggagcagaaagctgctgggaaagatgacgatgtctaccatttcataagctacataccagttgatggagtactttacgaacttgatggactgaaggagggacccattagccttggtcaatgccctgctagtccaggtgacatggaatggttgaagttggtgcaaccagtaatccaagaacgaattgagagatactcccaaagtgaaataagatttaacctcatggcagttatcaagaacaggagagaagttgtacaccgctgaacttaaggagctccaaaagaagagggaacgcatcttgcagcagttggctaccatacagtctgaaagacccacagacaaaaccagttntgaagcactaaacaagcaactttgagaagttaat

SEQ ID NO: 20116 - DNA, 290 bp, Gossypium hirsutum
  Clone ID: LIB3146-024-Q1-K1-D5
cccacgcgtccgattttcttcatttttttgggatggaaggtgatgaaggggcggctaatgatcttaagggatcagtgactcatacgaatgctttaaacagcttcactgctagctctcagataatttttgcaagagtagtgggtgtgctgcttcttttgcttgatagcggctgactcaactaccttgtgatggaaaatctgaaatgtaagaccctggatccgtctttctgaccatggtctttatggtactatgtgcgcagccacacgttaatgctgtaccagatgcatatt

SEQ ID NO: 20117 - DNA, 409 bp, Gossypium hirsutum
  unsure (1)..(409): unsure at all n locations; Clone ID: LIB3146-024-Q1-K1-D8
cccacgcgtccgaatctttcaccttatcgtatttttgtagtagtttcaaatggaaacaaaagagaaaaaaaagaaaaagaaaaatccaaacagaataatcaaagcaaaaacgaataaaggaaccacctttttattatttttgattttgatttctatcggatttttttttatatttcgaatatcgagtttttatttccaaaatcccccttttgacaatcgttttttgtgtggctttatagccaaaatacttgttactgttctatcactattcggccttgcttctgctgcagcgttttcgctgtgtttttgctacttttgggttactctgcaggtctgctaagagttaacgggggcaggtntacgttttggtacaggagcgagtggtgcgctcgagcacaggggggagctg

SEQ ID NO: 20118 - DNA, 371 bp, Gossypium hirsutum
  Clone ID: LIB3146-024-Q1-K1-D9
cccacgcgtccgaatatgcgaccggatgagatcaaggtcccgaactggattggtcccgatgtacgcaggttgatatcgaaaatcttggatccgaatacaaaaacaaggatctccatggaaaaaataatggagaattcatggatccgtaaggggctagacccgaaacctgaacttgtagatcctgaagtcaaagaaccggctattggactccaaactggaactccttgcaacttgaatgcttaagatataatctctgtgtctgcaggcttcgatttatccggtttattcacggaacaagaacaaaagaaagaggtcagattcacgttcaacaaaacggcttcgactatcctttcaaaactagaagatgtagc

SEQ ID NO: 20119 - DNA, 269 bp, Gossypium hirsutum
  Clone ID: LIB3146-024-Q1-K1-E1
tgaagctttgcaaggtcagcattcatcatctaaatcacctacttcatcatcgtcggactgtgaagagagaggagatgcaaaagtgaatactggagtgaaagctaccgatgatgagacggctgctgaagtaattgagcctcaggatgcaaataaaacaaagaacaaaaaacaagttgaccggtcctcatgtggctccaacactccttcaagcagtgaggtagagacagatgcgttagaaaaacatgaaaaagacaaggaagattcaaaag

SEQ ID NO: 20120 - DNA, 435 bp, Gossypium hirsutum
  Clone ID: LIB3146-024-Q1-K1-E10
cccacgcgtacgccctcgcgtccgcttcttttcatcaaccagaaaaaaaaaaggaagaagaaacaaactatttttatataaaggaaatggaaaggaagaaatcggatgaagctcgtggtgatgagaaaaatgaagttgaagctcaagtgaagaagaaaaagaaaaagaaaaagaaaaagaagaagaagaagaagactaaagaggatggtgatgtggaacctgaagtgactactgagaaggagaaggaacatgaggttgaagcgggttcaatatgatactgagaggaaaaataagaagagcaacagagagtgatgaggctgttgctgctgctgttgatggtgctcatgacataggggctgatgaaattgagacaaacacaaataagaagaagaagaagagcactgagaatgtagatgctattgaggctattgctgt

SEQ ID NO: 20121 - DNA, 434 bp, Gossypium hirsutum
  unsure (1)..(434): unsure at all n locations; Clone ID: LIB3146-024-Q1-K1-E11
cccacgcgtccgcccacgcgtccgagaaaagccaccattgctgttgaaaagtcacggaggacctactgctgaaactcgtggaattttgaatctaagcatccagtactgggactagcccagggtgggcatttggggatggtaactatggtggaagcacaagttaccgaagagaatttcgtgaacgacttttggaccgttggggaattgttgatgttgatgactgttgtagctgtgctaaatttttgttggagaacgggaaggcagataaggaacgactttgtataacaggaggctctgccggtgggtacacaaccttagcagctcttgcttttagagatacattcaaggctggagcttccctctatggngtagctgacttaaacttgttgaaggccgagacacataaattcgaatcccattatcttgataaactc

SEQ ID NO: 20122 - DNA, 422 bp, Gossypium hirsutum
  Clone ID: LIB3146-024-Q1-K1-E12
tgctggtgagttttccgggccaattgcaattcccctacctgtcgggtcagttctagttttaaatggaaatggagcagatgttgctaagcattgtgtgcctgcagttcctacgaagaggatatcgatcacatttaggagaatggatgaattgaaacggcctataggatatgctccagaatcagacttgcagggcattgaaccattgtcatatgatgcagagaggcccaagggatttaattcaccaaaatctgaacgccctgtaaggcaaccgtttagaagagaagataaaagggaagccaagggcttaacagagaataatgagccctcagaatggcgttcctcaacccggcctcgaagaggcccttcatataggagaaggttcactgtgaatcagagcaggtgatgggtcgctgaatgtctac

SEQ ID NO: 20123 - DNA, 443 bp, Gossypium hirsutum
  unsure (1)..(443): unsure at all n locations; Clone ID: LIB3146-024-Q1-K1-E2
cggacgcgtgggcgaatttctcagcaaccaaacaaaatcttccattgtcttctagaactttccaagcacactagagttaatcaatggctcgtacaaagcaaacagccaggaaatcaaccggtggaaaagctccacgtaagcaactggcgacgaaagccgcgaggaaatcagctccagccaccggaggagtgaagaagcctcaccgtttcaggccaggaacagtggcgttgagagaaatcaggaagtaccagaagagtaccgagcttttgatccgtaaacttccgttccaaaggctagtaagggaaatcgctcaagatttaagacggatctgagattccaaagtagtgcggtggcggctttacaagaagcggcggaagcttatctggttggcctgtttgaggataccaatctctgtgctattcatgccagnagggttactatta

SEQ ID NO: 20124 - DNA, 426 bp, Gossypium hirsutum
  Clone ID: LIB3146-024-Q1-K1-E3
gacccacgcgtccggcgaagaagagatgaaggaaaagtaatggtagatcgcaagcgctagaagttaccgagaagactttatagatccctatgtaacgcactactttctccattttgcgttttttctccactacatttcccttttttattttggttgagtatcggaaagagggaatttcagcggataacagaagttcattttaatttataaaatcatggttgccactgctgctacatcctcattctttccaatcacttcttccccggactccattgactcaaaaaacaagaagcttggaaatggatctactaaccttggaggtataaagttgaaaccatctgcttcttctggaagtttgcaagttatggcaaatgcacaagcccccccaaagataaatggtaccacggatgtgatgactccagtaga

SEQ ID NO: 20125 - DNA, 426 bp, Gossypium hirsutum
  Clone ID: LIB3146-024-Q1-K1-E4
ctgatatgtgtgaccagtggcaactcttacttgggttctttcattgtcaaagagctattggctcatggttaccttgttcgagtaaccattcaacacccagctgaatttgaagatgtgaaagacctgctaggggtggaagatttaaacctattggaaagtgtagttgtaaccaagatggaagatttacaaagcctttgtgatgcttttagaggttgccatgctgtttttcatacatcttccttcattgatccacatggtatctctggttattcagaacaaaaggtgtttttggagactgaagtggcaaggactgtcatggaagcttgtgctaaggcagcctatataaagagaatgcgtcttcacttcatctctattggcatccacttggaggaatgaaaatatagatggaattattgatgacagctg

SEQ ID NO: 20126 - DNA, 356 bp, Gossypium hirsutum
  Clone ID: LIB3146-024-Q1-K1-E5
gggttcaccaccactttggattctgcttctgggtgtgttgtttatggcttctggaacaatcgcagctccccctaggaagcctgtagatgtcccattctccagaaactatatgcctacttgggcttttgatcacattaagtatttcaatggtggctctgagattcagctccaccttgacaaatacactggtactggtttccagtccaaaggatcatacttgttcggacacttcagtatgcaaataaagctagtccctggagattctgcggtgactgtcactgccttttatttgtcttctcaaaactcagagcatgatgagatagattttgagttcttgggcaacagaacagggcaac

SEQ ID NO: 20127 - DNA, 432 bp, Gossypium hirsutum
  Clone ID: LIB3146-024-Q1-K1-E6
ggcggctccgagatgctgttaagacggtgcttacttccgggcgcaataagcaattcgacagcaatgtccatattgtcattgcagggttgacaaatacttattcacaatatgttaccacttttgaggagtaccaagtgcagagatacgagggagcctcaactctgtatggaccacacacgcttaacgcatacatacaggagttcaagaaacttgcagcagctcttatcggtggtggatctgttgaaccaggtccgcaaccacctgatcttcttgataagcagattagcttattacagcggttgtccttgatgcaaccccacttggtgtgaatttcggtgatgttaaagacgatatcgctaattccactttcaaacggggcaatacagtctcagtcaccttctggtctgcttgtcctaggaacgacctcatgac

SEQ ID NO: 20128 - DNA, 435 bp, Gossypium hirsutum
  Clone ID: LIB3146-024-Q1-K1-E7
atcagtagacccatatgcagatgctgtggtggaaggtgaaggagaaaaggtgaaaggggaggtgtctgagcatcagtatagccgtatggaggagaggcatgaggaggaggaagatgatggggaagaagaggaagaggaggatgaggaagaaaatgatatcaagactattaacaaagatgaaggtcaaacgaaagagcaatcacagttcacagatagcttgtcagaggagcgcggtagaaaatctcagcctgaaacagtggataagtccagtgcagtacgtccaaaaccagaaaggaattataacacacaacgaacaagaaagtatagcagttcaacaacagagatacaaggaggctcaagaaaggcaacaaatgtctaaaatgttggagagcttatgctacgagaatcccatgcttcttaattatgtggagatct

SEQ ID NO: 20129 - DNA, 423 bp, Gossypium hirsutum
  Clone ID: LIB3146-024-Q1-K1-E8
gtcagctccgccatgctgagatgtttttgcggactttccgtcacaagaggcgagttcgcagatgtgtccatatttgtattaccggtttgacaactccctgtttaccttgttttaccattcctgatgagggccaaagacacatatccatgggagccttaaatagtaaccgaccagacacacttaccacgcatatgccgtacttcaagaaggtgacatcatgtcttacttgcgtcgtatgtgatgaaccacatacactacgcctttatcttgtacataagctgagtatcagatagtcatcggttgcgctctgacactatcgcacttggtgtgtgtgtctgtgtaatataagacgggatcgctaactccactttgatatggcgttttacagatcgtaagcacctacagatctatttgtactagata

SEQ ID NO: 20130 - DNA, 362 bp, Gossypium hirsutum
  unsure (1)..(362): unsure at all n locations; Clone ID: LIB3146-024-Q1-K1-E9
gaacattttaccaaccttcacaagtgctttccatagttcaagcttagcagtgcacattttagtgtctggactccaagcaaaaccacttctgcaattgaaaaggtcgtaacactcataaaagtatgcttcagagtctttatacgatttttcaagaggccattgatttctctctttgacttacactttgtttataaactattgttaaattattttatttatatgtatattcaaatatctgtctaaataatagttgagacatcgatttgaatatagaataaaccgacttatactcctcaaaaaaaaaaaacaaaaaccataacaattattgctattaaaaaaacattaaaagccggaacttntgg

SEQ ID NO: 20131 - DNA, 438 bp, Gossypium hirsutum
  Clone ID: LIB3146-024-Q1-K1-F1
ccggagttctcgtttgtagcgtctgcttcatctttgcttgagaaaatagtaaggtttcatatactacctcgaaagctcacctacatggaacttgcttctttacctgcaaatgcaacattatgtactttagctccggaccatgatctcgagatatccaaggccgtaaatattacacaagaattgatgattaaccaagttaagattgttgcaccaaatatgtttgaatccaagaagtttgtgatccatggaatatcacaagcattcaaattgggtgagcttcctaacacctccagatgaatgcatttttatagtaaagaaggattcaatagcttgtagatttcattagaggcatgtatatttgacctcttacttgtttgtataatttttggtatttgagagcctgccagagctcaatatacaatgagtaagatcttgaat

SEQ ID NO: 20132 - DNA, 312 bp, Gossypium hirsutum
  Clone ID: LIB3146-024-Q1-K1-F10
accacgcgtccgctggaggggagcaagtagctgctgatttgaatgcggactgggtttccatggggcggggcacacagtgggtgggggactcaaaatatgcaagcaaacaagagagctggcgtactcccgtgttggtggcactccgattggcctcttagattaattcttggagcacatacaagccgcacttgatgcagcaacagagaacctggtaataatacctcattcaatcgtcagtcatatggggcttgcattgcatctgttgtacatcactataacgcatccgttggatatatatgtaaacttgtactc

SEQ ID NO: 20133 - DNA, 431 bp, Gossypium hirsutum
  Clone ID: LIB3146-024-Q1-K1-F11
cggacgcgtgggctgttattcaagagaacagagtggctactgctcagtgcttgtctggtactggttccttgagggttggagctgagtttttagcaaagcattaccaccaacgtactatatacattccacagccatcatggggaaaccatgtgaaagttttcacgatggcagggttgtcggtgaagaattaccgctactatgatccaacaactcgtgggcttaatttccaaggtttgctagaagatcttggcgcagcaccagctggagctatagtgcttcttcatgcctgtgctcataatccaactggtgttgatccaactgttgagcaatgggaacagatcagacagtcgatgagatctaaagggttattgcctttctttgacagtgcttaccagggatttgcaagtggtagcttagatgtagatgcacaa

SEQ ID NO: 20134 - DNA, 216 bp, Gossypium hirsutum
  unsure (1)..(216): unsure at all n locations; Clone ID: LIB3146-024-Q1-K1-F12
gggnggcccacgcgtacgttgggatccttcctcagcatctcccaccaactaaaaaaaaaatcaacccaaggggctttgtctccacttcactctttttctattttctccatttgttcgtttgtgtgtatgagaagatcattattatgaatgatgatgatgaccctctccatgtatcactgttttttcacattgtgtgcagtgtaaatctcttttaag

SEQ ID NO: 20135 - DNA, 420 bp, Gossypium hirsutum
  unsure (1)..(420): unsure at all n locations; Clone ID: LIB3146-024-Q1-K1-F2
cccacgcgtccgcccacgcgtccgtgttattccatctccttttgaatacgctgatgttgtgacaaccacaacacacaagtcacttcgtggtccacgtggtgctatgattttcttcaggaagggactcaaagagattaacaaacaagggaaagaggtaatgtatgacttggaagacaaaattaatcaagctgtctttcctggtcttcaaggtggaccacataatcacaccatagctggtttagcagttgcattgaagcaggtcagaacacccgagtacaaggcttaccaagagcaagttcttagtaattgctcgaaattttctcagaggttgctggagaacggctatgaactagtatctggtgggaccgagaaccatttagtcttggtcaatttgcgaaaaaggngtattgatggctaaga

SEQ ID NO: 20136 - DNA, 431 bp, Gossypium hirsutum
  Clone ID: LIB3146-024-Q1-K1-F3
aaaatttattaattttatgtcagcttggactgctaccccttattagttgttcaatggctaagtccccttattttttctcccaattagcacttgaagatatggtgcttttatgttaaagattaaattttctgtatctttgccatatgaaattggtaatcttgactttttctgtttgtaactgtttagtgtttatttcgattactttctcctggagattcaagtatgattttgtcaattcatagacatatacgatcaagtccccctaattgttttgtctttcaatataaagatgttcattatcttatcactctgaaatgcaggtaaatatgaagggggaaagcctgatgctatattttcgttcaggatgatgattttataaggttgccactggaaagatgaatccacagattgcttttatgaggggtgcgatg

SEQ ID NO: 20137 - DNA, 442 bp, Gossypium hirsutum
  Clone ID: LIB3146-024-Q1-K1-F4
gtcctgtatgagtttgactgatcgagttcttactgagatccctaaccttggaccctttaaacatgcatatgcctctgctgcaaatggtgagggaacattgttgtgaataaccttctttagtgccagtagatctccccttagatctgatccccccaggcctgtcgctgatttgaagtttctactgtcgaacgctgcgtcaaagtggatcgttgattatggtatgtcctcctggattctgtagcttctgttcattttatcatgaatcttcattacttctattccttcatagattgccatgagcctttgaatattaagtgctaaaacctttcctggtatatttgtcccctcatgtatgaattgatttctggaaaaccatatcaaccatagagcataacagaagagtcggcattgagcgccgttacttctcttgaaaacccagaca

SEQ ID NO: 20138 - DNA, 281 bp, Gossypium hirsutum
  Clone ID: LIB3146-024-Q1-K1-F5
cccacgcgtccgggcaattgcactagttcttgttccttttttattttcacctttcaagtttttgagggaactgaggtttgtatagtaagaagttacctattgttctttgccaagaacagccatgtctttgcatggcgctttggccattttcttccaccttttttgctattaaattatgttccatcatgtcgtatactttatacagaacgaatctatgtctttaatttactacaaactgtcgatttgctacgtgttaaaaaaaaaaaaaaagagaataataa

SEQ ID NO: 20139 - DNA, 174 bp, Gossypium hirsutum
  Clone ID: LIB3146-024-Q1-K1-F6
tcctgcctatccttgagacgcgggtggtgtgtcaacaaacgcacgcaagtcagttcttggtgaagatgttctttcgactaagatcttgaagggccttaaagcgtgtggcaatacaatgctacatctataagaaagtgttgtaggaaagtatgtatctacgcgtgtgtgatactg

SEQ ID NO: 20140 - DNA, 387 bp, Gossypium hirsutum
  unsure (1)..(387): unsure at all n locations; Clone ID: LIB3146-024-Q1-K1-F7
cacgcgtncgaaaatttattaattttatgtcagcttttactgctaccccttattaattgttgggtggctaattccccttattgtggctcccaattagcacttgaagatatggcgcttttatgctaaagattaaactttctgtatctacgccgtatgaaataggtaatctggactttttctgtcagaaactgtggagagtttatttcgattactttctgctgcagattcaagtgtgatcttgacaattcatagacatatactatcaaagccccctaattgttttggctttcaatataaagatgttcattatcttatcactctgaaatgcaagtaaatatgaagggggaaagcctgatgctatatatttgtgcacggatgattatttta

SEQ ID NO: 20141 - DNA, 435 bp, Gossypium hirsutum
  Clone ID: LIB3146-024-Q1-K1-F9
gtgatggtgtttttatggtggctcatgctgatggaaacatgtacgtgtatgaaaagaacaaggaaggagctggtgattcttcattccctgttgtgaaagaccaaactcaattttcagtttcacatgcacgttacagtaagagtaacccaatagcaagatggcatgtttgtcaaggttcaattaatagcattgctttctcccatgatggggcatacttagcaactgttggaagagatggctatctgcgagtttttgactattctaaagaacagctcgtatgtggtggcaaaagctattatggtgctctactatgttgcgcttggagtatggatgggaaatatattctgaccggaggtgaagatgacttggttcaagtttggagtatggaagatcgaaaggctgtggcatggggtgaggggcacaactcatgggtta

SEQ ID NO: 20142 - DNA, 430 bp, Gossypium hirsutum
  unsure (1)..(430): unsure at all n locations; Clone ID: LIB3146-024-Q1-K1-G1
cggacgcgtgggtgggtccagaatcccactgcccataccgcattggatgacattcttccctgtgtggacaatgcaacagcccaagagaccttgtcacgatccaagaatgtcactcatcaacttgtaaatgtcgtgaatggtgtcatcaataatgttttcaaccgaaatttcccaccagcattggcaccattatattttaatcaatctggtccattggtgccagttctctgcaatccatttcattcgaatcttacaaacagagactgtgcatttggntgaagttactttgcataatgccacagaggtttggaagaagtatatatgtgaaggtttcgggctctggagntatgttctacacctgggcggttaacccttcaattttacactcagatgtcggcagcatgaatttgattatggtttgtatcgctat

SEQ ID NO: 20143 - DNA, 334 bp, Gossypium hirsutum
  Clone ID: LIB3146-024-Q1-K1-G10
gtctcattctgttcttgtgtcccagtttatctctaagcacaagaaaatgggggccggggctgttaagaagccagctgcgaatacgccatctgaggagaagaagacggcagctgagaaagcccccgctgagaagaagcctttggcaggccaaacgcttgccaaggaaggctgttcatgcggtcggacacaagaagatgactagggtaaagaaaagtactgaggcctacaatatctacatattcaaggtcttgacagcaagttcaccctgatattggtatgtcaagcgtggctatgggaatcatgaacagcttcatcaatgatatctttgaaaagc

SEQ ID NO: 20144 - DNA, 226 bp, Gossypium hirsutum
  Clone ID: LIB3146-024-Q1-K1-G11
gtctcattgtttcttttccacccagtctttttctaacagcaggccaatggcggcgggtgcttataagatggcggcctacaacaactcaccactggagataaatacggtgggaggcaataccaaccgctttaagaagccatatgctggcaaaatgttccccaaggtatgcagagctgcggtcggaaacatcaagaacaatagggtcatgcatagtactgccaccttc

SEQ ID NO: 20145 - DNA, 442 bp, Gossypium hirsutum
  unsure (1)..(442): unsure at all n locations; Clone ID: LIB3146-024-Q1-K1-G2
cccacgcgtccgcccacgcgtccggttgtgtgaggcgaaattgtgtgaagaacttaatgctgatacggtggcaacaacccttgcacttgctgagcagcaccattgtgcacagcttaaggccatatgtttaaaatttgctgcaactccgtcaaacttgggagcggtgatgcaatcagaagggttcaagcacttggaggaatgttgtccatctttgttatcggagatgttgaaggcctttgcatccagcgaggaaagctcgagtctgctttcaagtcggaagaagagtgtcagcagtgtatacgggtatggatcttgcagcagaaggtccggcagcagaaccgatgaatcccaatggcaggcgagttcgaaggcgttgattggcaatcaacgntaagtgtgttggggggtgtttctgggggcataccattgaaatatttggagt

SEQ ID NO: 20146 - DNA, 273 bp, Gossypium hirsutum
  Clone ID: LIB3146-024-Q1-K1-G3
gaatgaacagccgctttttcttctttagaagacaaaaaaaaaataaaatgagggagaagataaaagaaaaaaaaataggtcgaacgacctgagtgttccaatctcacgctcacgtgcacgcaatgacatggcttttctgtagagtaaaataaactaaactaacgggcggtcgcttgactaagagtagaatgggacacccattgtttttccgaagttattcctgttgcagtacatccaaataataccagtgggggttataacaagaaggtcttt

SEQ ID NO: 20147 - DNA, 311 bp, Gossypium hirsutum
  Clone ID: LIB3146-024-Q1-K1-G4
tccacgcatgcgtccactctttcggttgtgttatgcgaaaacgtgtgaagaacgtgctgcttttacagtggcgcacaacccttgcacttgcttagcaacaccttcgtgcacagcttatggacttatgtttaaaattggctgcaacttcctccaactctggaacggtgatgcaatcataacggtttatgcacttgtaggaaagttgtacatctttgttatcggacactttgaatgcctttgcatccaacgtggaaagatacagtctgctttaaatactgagaagagcgtcaccagtgtataccggatggatc

SEQ ID NO: 20148 - DNA, 433 bp, Gossypium hirsutum
  unsure (1)..(433): unsure at all n locations; Clone ID: LIB3146-024-Q1-K1-G5
cccacgcgtccgccacgctttaatttgtttttgcatctctcgttttatttctcgtatattaatggcgggtcggggtaagactctcggatccggagcctcgaagaaggcaacatcaaggagtagcaaggctgggcttcagtttccggtgggtcgtattgctcggttccttaaagctgggaaatatgctgagcgggtcggagctggagctccggtttacctcgccgccgttcttgaatatcttgccgctgaggttcttgagctagccgggaatgcagccagggacaacaagaaaacccgaatcgtgccacgtcacatccaactngccgtaaggaacgacgaagagctgagcaagctgctcggcgatgtgacgatcgccaatggtggtgtgatgcccaacatccacaacctnctnctcccgaagaaaaccgggacc

SEQ ID NO: 20149 - DNA, 400 bp, Gossypium hirsutum
  Clone ID: LIB3146-024-Q1-K1-G6
cccacgcgtccgcccacgcgtccggttgatgttcaaaattgctcattcggttctgtacttgtagtcatgtatcttaatcattgaagatctcaaaatgatgctgcacgctagctgagattcatgtaatgatgggctttattagcatctttacacaccaattttgatttctactatgcttattggcgcagttctgttggatttcatgcatttctaccaacctacaagatttaacgcccgtgcctagtcgttttaatacataattaggtaattattgagtattgctcatctttttatgcattgttgattgcatattatggctgtcagattcccaacttatctattctgagatttagctgcatatttggttataagtgtcgatctatctgaatgcttgcggaca

SEQ ID NO: 20150 - DNA, 373 bp, Gossypium hirsutum
  Clone ID: LIB3146-024-Q1-K1-G7
gaaaaaaaaaaggccaaaggaagatgaagaggtggttcgatccatggcctgtgttctacaagagagagttcaatcgcacttggcctttccttgttggcttcgccgtcaccggaaccatcatcaccaagttctcccttggtctaaccgaggaagatgctaagaactctccctttgctcagaagcacaagaggtgatccaactgatttcaaaagcctatatggttgcagtcccttggtatgagaggctcagctgttttcctttttcctttttccaatgaacaatgaaaataacagaagacattagttctgagtacactttattttgggaattatgatttttggcatcaattaatgattctgctttgaataagggt

SEQ ID NO: 20151 - DNA, 440 bp, Gossypium hirsutum
  Clone ID: LIB3146-024-Q1-K1-G8
gaattttcgagtcttactcccgaagacgctaccgatacgcgaacttgttcggtacgcgacggtttcgttcttacactcgaaaacgaataacaacaagggcaaaactccaagcttgaatatgaaatctgggtttcaacatttctgtattcatcctggtggaagggcagtgattgatgcaatgggacgaagtctagggctaaacgaatacgacctcgaaccgactcggatggcacttcatcggttcgggaacacgtccgcggccggaatatggtatgttttaagttacatggaagctaagaagaggcttaagaaaggtgataggatattgatgatcagtcttggagcaggttttaaatgtaataattgtgtatgggaagtcatgaaggacgccacggatgacgttaacgtgtggaaagattgtatcggtcgatatcctgtga

SEQ ID NO: 20152 - DNA, 437 bp, Gossypium hirsutum
  Clone ID: LIB3146-024-Q1-K1-G9
ctctcattcttttcccgggacccagacaaactctaagaacaagaaaatggcgccaaaagctgagaagaagccagctgagaagaagccagcggaggagaagaagacggtagctgagaaagcccccgctgagaagaagccaaaggcaggcaaaaagcttcccaaggaaggcggagctgcggccggagacaagaagaagaagagggtcaagaagagtactgagacctacaagatctacatcttcaaggtcttgaagcaagttcaccctgatatcggtatctcaagcaaggctatgggaatcatgaacagcttcatcaatgatatctttgaaaagcttgcccaagaatcgtctaggctcgcaaggtacaacaagaagcctaccatcacttccagggaaatccagaccgctgttaggcttgtacttcccggtgagcttgcga

SEQ ID NO: 20153 - DNA, 306 bp, Gossypium hirsutum
  Clone ID: LIB3146-024-Q1-K1-H1
tggcggaggggccaggtgggaggggaataactagggttcttgagaaagggccgaagatctcgaatgtgaaagtgagtcccttgaatattcaccaaccaatgtagatcgattcctgcagatatgaaatgggaggtcttcttagagcccaaaaccgacagctttaagttttatcttgtgctaactgtcactaggtgatccatctctttttaaaagtctgaattggtgaaattattgtgtacagaaggctaagcctgtaatctgtaaccttgtttcaatgatacttgaattacctcccatattccacat

SEQ ID NO: 20154 - DNA, 329 bp, Gossypium hirsutum
  Clone ID: LIB3146-024-Q1-K1-H10
ctgaagccgcatactaattagatactttgaatttgtatcctgcttggaatggggggggtttaatttagatgggagatgggtgaagaagctaatgctgtggatcccgaatcactattgaagaagaataagaggaatgaacaatggcaacttgctaaaaagcaacagcttgtctttccacagaagaagaaacattgctacgcctgtgctttccctgctgctcgtaagaggacatgtaagtgcctcatgcgctttttctttgatatcaagatcgtgaaggcaatcagaagaaagaccactggaaccggtcggatgaggtatctgcaccatgt

SEQ ID NO: 20155 - DNA, 323 bp, Gossypium hirsutum
  Clone ID: LIB3146-024-Q1-K1-H11
cttacacggccgagttaagttcagcttgactgactgaccctgcggatacggccggggttgtttcttagcgggcgcaacataatattggaccttgataaaggcagggcttcactactgcccatctccaccatcacattgaaaacagcgaggatcgactactaactagcggcgcgactggtacaccccctgaatcagatccaatacacgatatcttccatattgataccactatgtcaagctataaatgtacgctacaaaggtttgagtaaaaaaacatatggatcctctgtaaaggataacctttaagactttcacgcaaattt

SEQ ID NO: 20156 - DNA, 360 bp, Gossypium hirsutum
  Clone ID: LIB3146-024-Q1-K1-H2
tgacgatcggtggtcagcccgctggtcggattgtgatggagcttttcgcagattgcactcctcgcactgcggagaacttccgtgccctctgtactggcgagaaaggcgtcggccgcagcggtaagcccctccactacaaaagctcttctttccatcgtgtgatccctaactttatgtgccaaggaggtgacttcaccgccggaaacggtaccggaggtgaatccatctacggatcaaagttcgctgacgagaacttcatcaagaagcacactggtcccggtattctctcaatggctaacgctggaccgggaacaacggatctcagttcttcatttgcacggctaaaactgagtggctcga

SEQ ID NO: 20157 - DNA, 372 bp, Gossypium hirsutum
  Clone ID: LIB3146-024-Q1-K1-H3
ctagcctaaatattagtcccgatgcaacaattgaggatgatgatgatgatgtagaagaaaccgagacagaatcggacacaaaagacagtgcagtcaaagatgagttgtagattgcctgaaacctcggggacatgccttttgagttagttttaccctctgatgacaagccgaaggaactgtaacatgcattttcaagtctgaaacttggataaagggaaacattacaaacattacttagtagaatatatgtaaaccgtagtcgactgtgaaattaatctgtctgcaatttttgctcttttaatgcatcgcagaggttttaaaactaaaaatttcattagaaaaaaaaataatgaacggctcgatagaaaggtc

SEQ ID NO: 20158 - DNA, 419 bp, Gossypium hirsutum
  Clone ID: LIB3146-024-Q1-K1-H4
ggaattggggcagatgaccaaaatgaaacattatttacaactctggtagacaccgacatcttgttgaagccaaataggccggctcttgttgtaagcagtacaagctggacaccagatgaagattttgggattctattggaagccgcggtgatgtatgatagacgagttgctgctctactggatgaaaatgattctgctgatgaaggggtcctctggaaggagatctctggtggaaagcaatacttgtaccctaggttattgttcatcattacaggcaaaggtcctgaaaaggaaaagtacgaagagaaaataaagaggctaaatctcaaacgtgttgcatttcgtaccatgtggctgtcagctgaggaatatccattgcttcttggttcagcagattaagtgtttgtttgcatactttc

SEQ ID NO: 20159 - DNA, 405 bp, Gossypium hirsutum
  Clone ID: LIB3146-024-Q1-K1-H5
tcggccacgcgtgcgggcaaatgtacttgtccatgaagatcaagcctggggcggacgaatccgtgggagcatgccattccgacggaccttgatcctattattagcagctgaacccctccagcattacctgcaggcctatttagggaacccacacgcccaaaaataaaaatatctgtatctgcacattcaacatgtgacacggcaccacagtgttttaacaacaaagctacccgcgtgcgtgacaataaatagatccctgcgtatgttatcgcaatcacaggccaaagtaccagaaagacaatcttcattgatggatctgcaacggtgtatcctcatggcgtcattgaccctactgaggagcttggtacactggctgatacctatggaatttgtctacatgatgac

SEQ ID NO: 20160 - DNA, 396 bp, Gossypium hirsutum
  Clone ID: LIB3146-024-Q1-K1-H6
gaaaatggtacttctaaacttacttttcttttacgaacatttcctccgattggcattttaagtgatgggtgcaggatcaaaggtgtagaacggagccggacgaaggaaacgccgcagtacaaagaagaagccggattatcgttcggtgaaagccggaatacagttatccgttggtcgaattggccgatacttgaagaaaggccgatactctcaacgagagagaaccggtgcttcagattactttgctgatgttcttgatacctagctgttgagggtcttgtgttagctggtaatgctgcaagagacaacaagaagaagttgatcattccacggcatgttctattagcattgagaaacgatgaagagcttgtgaagctcttagctggtgagactatt

SEQ ID NO: 20161 - DNA, 437 bp, Gossypium hirsutum
  Clone ID: LIB3146-024-Q1-K1-H7
cccacgcgtccggtgaattccaagtgtaatctctatcttcttcgaattcgacttccaattctcagagtcgaaaaccttcgttgaaaatctcgttgccgcataaagtggagtggattcagttcggcaaaccggatttaaccgaggtaaagccaaagaattcaaataccgaagagaaaactaagcattacagaggcgtccgacaaaggccgtggggaaagttcgcagccgagatccgagatcctaaccgaaaaggttcacgggtctggttgggaacttttgacaccgccatagaagccgcaaaggcttacgaccgagccgcctttaagttacgtggctcaaaagcgattcttaacttccctctcgaagctgggaagttggatgtaatcgctgctgacggagagaggaaacggatgagagacgacgacgcttgggatgaa

SEQ ID NO: 20162 - DNA, 443 bp, Gossypium hirsutum
  unsure (1)..(443): unsure at all n locations; Clone ID: LIB3146-024-Q1-K1-H8
cccacgcgtccgggcaacttgctgaaatgatgactaaggtctatgcaaaggtaagtggtgaaccttcactggagtcaccaacaattgatgtcagttccaaggaattttatggggagggatatgatgatagtgacaagagaattccagacatgaccataataaatagacaactgggttggaaccccaagacatccctttgggacttgcttgaatcaacccttacctaccaacacaggacttatgctgaggctatcaagaaatccatggtaaaacctattgcatcctaaataggtaaagatgttcagaccatgcctaaggaaggatgcatgtaaaatttacttgttcgaaaaatgttccaattctttttgtccttttaaggaatcctatatatatctgaattgttgatnttacttgtatgctactntntgggtcatcccttgtgt

SEQ ID NO: 20163 - DNA, 438 bp, Gossypium hirsutum
  Clone ID: LIB3146-024-Q1-K1-H9
gataaatggcacaacgttctcatgtaccccagtttggcaattgggagagtgaaggtaatgttccttacacagcttattttgataaggcacgtcagggtcgcagtggaggaaagattgtgaatccgaacgatccccaagagagtccggaattacatcaagattatggagctccaactagagctccccctgcttcacgaccaaaaccagaatcggatgaaccaataggacatggacctgcaagaaggggacacgaacgaggaaggagcagggaagaaggtgacctcaggcaatatgctaactctccagcacgtaacgagaatgtcaaccgcagagctgctggagactctacaccttctcgttatggtcgtggagtaagttctggtgaatcccagaaacgttccatgagaacaagtattggatctgaaaacagcatagata

SEQ ID NO: 20164 - DNA, 399 bp, Gossypium hirsutum
  unsure (1)..(399): unsure at all n locations; Clone ID: LIB3146-025-Q1-K1-A1
ggaanngcaggggcgacccacgcctcccgggccgcgtgggcggacacgtgggcggtacgcctggggaaaaacaccatgcctgcatgcttgctgttggtagccgtgggtatggagctataaaaaaggctgttcttggcagggggagggagtattggtctcaccatgctcattgctcagtgaagatcgtggagaggccgtagatcaaacattaatgtgtgcaataaaattgaacccacaactgggggtgctgcatatatttagtcgtctaataacaccatggtgttgcacactgggactgcgataccaatcatgctgaatattacatattggtgtggataaggagaacttacacgattcttatgtcttaatgctttttaattagcttgtacaagcgttact

SEQ ID NO: 20165 - DNA, 395 bp, Gossypium hirsutum
  Clone ID: LIB3146-025-Q1-K1-A10
agtgaaagcaggaaaaaattcgattaagagatagaaagatggcggtgatgcagaagctgaaaatattcgtggtgcaagagccagttgtcgcagcttcttgcctcatcgctggttttggtctctttctaccagctgttgtaaggcccattctagattccttagaatcatcgaagcaagtccctcagcctgctttaagagatgtggttgctggtgtgactggtaaaaagcagggctgatgtgatttatgagttgggaagaagcagacactcaaatgtagctagtaatcagcaacaaaataaacttgactttaaagttgaactcttgcgccttcaacttcatctttagcatgaggaatttgagtgttaatttgttttgattttcagtggtggaggatt

SEQ ID NO: 20166 - DNA, 398 bp, Gossypium hirsutum
  Clone ID: LIB3146-025-Q1-K1-A11
cccacgcgtccgaagcctctcagcagccctttctttctcttcttctccttctccccttctgcggtccctgagcaggccagcctgtaattcaaataagatgtatacatcaatgaagaagatccacaaggataaggatgttgaaccaactgaatttgaggagtcggttgcccaggcattcttcgatttggagaataccaaccaggacctgaaaagtgacctcaaagatctctacattaattcagcagtccaaattgatgtttccgggagccggaaagctgttgttatccatgttccctacagattaaggaaagcttttcgcaaggttcatgttaagcttgtgagggaacttgaaaagaagttcagtggcaaggatgtgattctcattgccactcggagga

SEQ ID NO: 20167 - DNA, 393 bp, Gossypium hirsutum
  Clone ID: LIB3146-025-Q1-K1-A12
gttttcccatcggatccatttgatgccggaaatgctgcagtgacagaggaaggtttggtccttatatcatcaggatgtcctaagctcaactcattgctgtatttctgtcatcagatgacgaatgctgccctcatcactgtagccaagaattgcacaaattttatccgtttcaggttgtgcatccttgaccccgtaaaagctgaccctgtaaccaatcagccattggatgaaggttttggggcaattgtccggtctaacaagagtctgaagcggttatcactctctggccttctgactgatcaggtttttctttacataggaatgtatgctaagaagctcgaaatgctgtccattgcttttgccggcgacagtaacaaaggaatgctctacgtg

SEQ ID NO: 20168 - DNA, 452 bp, Gossypium hirsutum
  unsure (1)..(452): unsure at all n locations; Clone ID: LIB3146-025-Q1-K1-A2
gacccacgcgtccgcccacgcgtccgcccacgcgtccgagtgtttcgagtggattcaaagttgctgctcgattctaaagctgggaaactaggccctcatatcgaagatgtcatatacagcttgagctactcgttgaggcttctgcgttccggaaaagttgtagcttggtattctccaaagaggaaggaagggatgatagaattgcgccttttcgaattttaactcatcttctgtcatcctatcattggttttgttcagaatttctttttctaatcatatgattatcctagttagaggctgatgtgaaatcttgcagctgaatntacagcttcatttccctttttttgcccaattcccatgttttgtaggcctttatggagcttcatagttaatcccaaatccaaaccctgcatgttaagtttgtcttctcccttttatattcaacaattgag

SEQ ID NO: 20169 - DNA, 63 bp, Gossypium hirsutum
  unsure (1)..(63): unsure at all n locations; Clone ID: LIB3146-025-Q1-K1-A3
naaaaaaaaaaaaaaaaaaaaaaaaacaaaaaaaaaaaaaaaacggccggcgagataaaagat

SEQ ID NO: 20170 - DNA, 272 bp, Gossypium hirsutum
  Clone ID: LIB3146-025-Q1-K1-A4
cccacgcgtccggttatttttttaaacaaagatccccgatctcctgcttagagttagtttctcatatttatggggctacttgaccagttgtgggacgacaccgttgcgggtcctcgacccgataatggtctcggcaagctccgaaagcactccactttcactttccgctctaactcctccaaggaaaccgatggcgggagtgtgagatcgtacaatgatgagacgccggaggaaacaacgaaagtgacacgtacgattatgatcgtaaaatc

SEQ ID NO: 20171 - DNA, 407 bp, Gossypium hirsutum
  Clone ID: LIB3146-025-Q1-K1-A5
cggacgcgtgggcggacgcgtgggcggacgcgtggggaaaaacaccatgcctccattctcgctgttggtagccatggttatggagctataaagagggctgttcttggcagtgtgagtgattattgttctcaccatgctcattgctctgtgatgatcgtgaagaggccgaagatcaaacattaatctctgcaataaaattgaacaaacaactggggttgctgcatatttttagtcgcctaataacaccatggtgttgcacactgggactgtaataccaatcatgctgaatattagatattggtgtaaataagcagaatttacacgattcttatgtcttaatgttttttaattagcttgtacaagtgttactggaatattctatacttaaatctatcatgcgagtgttg

SEQ ID NO: 20172 - DNA, 436 bp, Gossypium hirsutum
  Clone ID: LIB3146-025-Q1-K1-A6
atcaagctgaacaatgcaattttagctgaggagaaacaccttcccatgtatcaagaaatggcatccaagcccaatgtagacaatattgctggaagtgctactcaaaattcaatcaaagttgcacagtggatgctgcaaattcctggcgcaactgtttacattggctgtattgggaaggacaagtttggggaggaaatgaagaaaaactcaaaagctgctggcgttaatgttcaatatcttgaggatgaaactgcaccaacaggaacctgtgctgtttgtgtagctggtggtgaaaggtcactcattgcaaatctatcagctgctaactgctacaagtctgagcatttgaagaagcctgacaatagggcgttggttgataagggcaaaggcttgtatattgctggatcttgccttactgtatctccggaatacatac

SEQ ID NO: 20173 - DNA, 447 bp, Gossypium hirsutum
  Clone ID: LIB3146-025-Q1-K1-A7
ggcttagcaacggtgataaggtcccaccagctgaatttgcaaaggtagctcaagaatattctgaatgcccttcagggaagaaaggtggagatttaggatggtttccgcggggtaagatggctggtccgtttcaggaagttgcctttaacacagtcattggagctaccagtgcacctttcaaatctacacatggataccatatcatcctctgtgaagggaggaagaattgaagcgagccaagatacagtcaggcagtgaagatgagttttatgttctatattaatgcagacatgaagtatgttcagtttgaaatattatccaatgattattcttcggatttgcaactgggataatgcttcttcttgttgaaaaatggcctgtaagttgatcttggatgtttgatgccaagatattttacatgttttcacatttcaaggtcttagttat

SEQ ID NO: 20174 - DNA, 253 bp, Gossypium hirsutum
  Clone ID: LIB3146-025-Q1-K1-A8
ggcgagagccgtggcaggggaagccggggtgccctttttctcatgcgcagcttcggagtttgtggagttgttcgttggagtaggcgcgtccagggtaagggatttgttcgaaaaggcaaaatccaaagcgccttgcattgtattcatagatgagatcgatgctgttgggagacagagaggagctgggcttggaggaggaaatgatgaaagagagcagacaatcaaccagttgctgactgagatggatggattt

SEQ ID NO: 20175 - DNA, 349 bp, Gossypium hirsutum
  Clone ID: LIB3146-025-Q1-K1-B1
catgagttgagttgggtctggtgttaaaattattgtgtcagaactgtcaatttggtaacttattattgttgttgtgttgtgagtgttgttttccaatgcaattggatttagtgaagtgtgtggggtccagcatgagaagagttccttctcctccttctcattttcggtgtttccattgtctaataaatatctgctatcttcttcactttcttattattgcagatacttctacttcaaaaaaaagatgaaagtgaaaaaacaggaacctttgcctcttaattagaacaaagaataatgtttgtcataaagaaactatacctgtgactactgttaaaacacaaaggggggg

SEQ ID NO: 20176 - DNA, 383 bp, Gossypium hirsutum
  Clone ID: LIB3146-025-Q1-K1-B10
cgggccggcccacgcgtacgtacgattattcgatgaacttttaaaaaacgtgttagatttgtatttctgcgaaaaattatcggagtctgttagggcttaatgtgggtgaattgctagggtcatgtcattgtataaaaaatacatttggttagaccattcattccttggtttctaatttttgatggatcatatagctaggtaaggagactgtaacaatgatgtttgaaaactttgatgttttttgaaaacttagatatatactctttcttctcttcaaaaactccacaacgacaccaagcgcacaaacactcaacttaatactctgcagcggatacatcacgcactgcctcttcaacccgttatacgatgctcttaggctcctt

SEQ ID NO: 20177 - DNA, 263 bp, Gossypium hirsutum
  unsure (1)..(263): unsure at all n locations; Clone ID: LIB3146-025-Q1-K1-B11
taaaaaatgttttagatttgtatttgtgggaaaaattatgggggtntgttagggattaatgggggtnaatagatagggtaatgtaattgtataaaaaatagatttggttagaagattaattanttggtttntaatttgtgatggatgatataggtaggtaaggagaatgtaagaatgatgtttgaaaantttgatgttgtttgaaaaataagatatatagtgtgtgttttgtttaaaaaaaaanaaaaaaaaaaaaaaagaag

SEQ ID NO: 20178 - DNA, 395 bp, Gossypium hirsutum
  Clone ID: LIB3146-025-Q1-K1-B12
ctttcgatgggagcggcattaaaagactattaaccaacaagttcgaactagacaagttgcttaatacggctttagaaaatgtcccgaaagatcgtaatggtaaagtatcaaaggagtacttgcgcgtcgtgctagacgtagtggcaccatctgccagtttacctccaataggtgcagttgaacagatcgaccaggtcgttgccgatgcttttgacatgataaacgcggacgacgggaaagcggttaaagaagatgagttcaagaaactattgacggagatcttaggaagcgtcatgctgcagttagaaggcaacccggtctcgatttcttcgaattctgtcgttcacgagcctctcgcatcgtcctcatcgttactgcaaccatcatcctagttg

SEQ ID NO: 20179 - DNA, 330 bp, Gossypium hirsutum
  Clone ID: LIB3146-025-Q1-K1-B3
gtccgatcaacgtattcttacatttttttcctccaaagactccccttcggaggtgtttgaaaagctgttcgtctgcaaaaaataataagacctgttatatacctcggcgaacatatgacaggagacgattggaatgcacatttctacatggcgaatagcctagtctatcaaggccaaatgactttctcgctgtataacctaatcactccttcaccttgacctatacttttagctttccctactctaacatcaacatctataatcggaacgctcatcaaatttaagctcgactccaaagcttaaagacgatgacaatctttgatggaattg

SEQ ID NO: 20180 - DNA, 285 bp, Gossypium hirsutum
  unsure (1)..(285): unsure at all n locations; Clone ID: LIB3146-025-Q1-K1-B4
gtccgctcaacgtatacttacatatcagttctgccaatgcttcccttcatctttggtggccagtgctgatcgtctgcagattatgattgacactgtttcagacgcggcgtagctatgcctggggacgatgggattgcacattcctacatggcgagaggcctggtctatcaatgccaaatgactntgtgcttataatcgaatgcacgcgttccccttcccctatgcttctaccgttacctactctatcgtcgacatgtatcaccggaacgctcatagaagttgagc

SEQ ID NO: 20181 - DNA, 416 bp, Gossypium hirsutum
  Clone ID: LIB3146-025-Q1-K1-B5
gggcgacccacgcatgcggtcttatgagctgatttgttgctggtcttcttagccttgcgaaagaactgcctgtgggttaactgattctcgttgctgaaaaaagaccgtcactttacaatgccttcggatgataaagaaaggcgtggcttccaacgtcacaagagttactaccctactgtttgattcacgctgccccataaggtgatacatgtgtctatatccttcactgtgtattgttgcaaatacttctactcccacaaacactacatcttcgaagacctgaagcaagttcactctgacatcggaatctctagctttgctatgtggatcatgatcacgattcataattgatatcttttagaagctggctcatgattcctatttgctaacaatgtacaccaagatacccaccatta

SEQ ID NO: 20182 - DNA, 246 bp, Gossypium hirsutum
  Clone ID: LIB3146-025-Q1-K1-B6
gccaatccaaccgtacattaaaacggaccgaacgattgatggaacaagagctgatgcatgatctaaagatctagctccaagtcttgcttccagtgggacttctttagggatgactctctgtatgagttaccggctcttgtgcctgtgcacgtacgtgttcacatatgataaaataattgatgaactaatagctgacctaaaatatgcctaaataaatgcatagattggttccgggattggattcgg

SEQ ID NO: 20183 - DNA, 278 bp, Gossypium hirsutum
  Clone ID: LIB3146-025-Q1-K1-B7
ggtcgataccacttattgagttgatatttatttactgccgaggcatcaaagggggagggtacaatttacttgcaggtataccagaaggttcatctgttccacttttacccaagcacatatatgatgatgtcctgatggattatgatgcactcaaggctgtccagtcaagactgggaactgctgcagtaattgtgatggataagtcaactgatgttgtagatgcaattgcgaggctttcgtacttctacaagcaccagagttgtggacagtgcacgccc

SEQ ID NO: 20184 - DNA, 445 bp, Gossypium hirsutum
  unsure (1)..(445): unsure at all n locations; Clone ID: LIB3146-025-Q1-K1-B8
gggaactcggaatttccacaagactatgcattttttgagggtactacacatcctgttatagatggtgcaaacacttacaccaatgcatttgatggaaattatgacacattaattgcggccctcagtaaaatgggatacgggcagatgcccatagttattggggaagtgggctggcctacagatggtgcggtcggtgctaatctcactgctgctgaggttttcaaccaaggcctcattaagcatgtgttaagcaacaaaggaacccctctaaggccggctgttccacccatggatgtttatctcttcagtttacttgatgaaggggcaaagagcacccttccagggaactttgaaaggcactggggaattttctcctttgatggccaggctaaatacgcactagaccttggtttgggaaacaagagactaanaaacgccaagaatg

SEQ ID NO: 20185 - DNA, 441 bp, Gossypium hirsutum
  Clone ID: LIB3146-025-Q1-K1-C1
ataccacttaaggagttgatagagaggcactgcggaggcatcagaggtggatgggacaatttacttgcagtaataccaggaggttcatctgttccacttttacccaagcacatatgtgatgatgtcctgatggattatgatgcactcaaggctgtccagtcaggactgggaactgctgcagtaattgtgatggataagtcaactgatgttgtagatgcaattgcgaggctttcgtacttctacaagcacgagagttgtggacagtgcacgccctgcagagaagggactggatggctatggatgatcatggaaagattgaaagttgggaatgcaaagttggaagagattgacatgcttcaggaggtgaccaagcagattgaagggcacacaatttgcgctttaggtgatgcagcagcttggcctgtgcagggtctaatacgg

SEQ ID NO: 20186 - DNA, 395 bp, Gossypium hirsutum
  Clone ID: LIB3146-025-Q1-K1-C10
cttataatggtgtactttgtgaccgcagattgatgtgctaagaaacagaatatgcatatcctacttgtcttcaatacaagaaccaataccatggttgtcagcttatgggttttaactttgaatgtcctcatttttcttctctttcttttgcaagtcccgtttctctcacattcgatctaaatgataaaggagtatgattgggttgacaaatttgatccaccaaaaagggagggggtgaaagaaaatttgtaaaatttcagccctcggtccaatttctttaaactgtgaattggagagaaaccgggaaagggaaatggattttttatttttatttttatttatttaaccatgggaaagtaactggaattcaaacgtattttgggaaatataaggaa

SEQ ID NO: 20187 - DNA, 396 bp, Gossypium hirsutum
  Clone ID: LIB3146-025-Q1-K1-C11
cccacgcgtccgctggatcctgttcagaagctggcctctggtggatgtgacaatatggtcaaagtatggaggctgtataatgggagttggaagatggactacagccctgccctccagatgcacactgattgggtgcgggatgttgcttgggcacccaacttggggctcccaaaatccaccattgcaagtgcttctcaggatgggaaagttattatatggacttgcggtaaagaaggggaacaatggaagggtgcgattttgaaggatttcaagaccccagtttggagggtctcatggtcgctgactggaaacttattgtcggttgccgatgccaataacaatgttacattgtggaaagaaacggttgatgatgagtggcaagaagtgaatgctatt

SEQ ID NO: 20188 - DNA, 395 bp, Gossypium hirsutum
  Clone ID: LIB3146-025-Q1-K1-C12
atttgctgagaaagcaatgcatgagattaagaagcagtatgcagtgtttgatgcaaaggttctaagtaagattccaaggggaccattaaaggagaaaaagaaggattagatttaccggccaagagggtttctgacatacatttggtagctgccttccgtgaaaatgtgttatttactatatatcctgtatcagttagaaccctgtttgaatattttttcggttttagtacacaatgggttcaaaaagtttgatgaatttggcatctttttttctaaatcttgtttagttgttttttgatatggatccatatgctatgtgacgatatgttatcatattgcatgttggttggaatacattgagttgaaagttttttcaacttgcgttgtatatcttt

SEQ ID NO: 20189 - DNA, 220 bp, Gossypium hirsutum
  Clone ID: LIB3146-025-Q1-K1-C2
gcaaattcccttcttttcccctccacccaagcctaaaaaatcatggcgacagctcaaatcagcaaaaagcgaaagttcgtcgctgatggagttttcttcgcggaactcaacgaggtattgaccagggaactggctgaggatggatactctggagtcgaagtcagagttactcctatgcgtacggagatcatcatcagagccacccgcacccaaaacgttc

SEQ ID NO: 20190 - DNA, 440 bp, Gossypium hirsutum
  Clone ID: LIB3146-025-Q1-K1-C3
cccacgcgtccgcccacgcgtccgctcttttcaatgctctggcaaaggctaatattaacattcgtgctatagcccaaggttgttctgagtacaatatcacagtggttctcaagcgtgaagattgtatacgggctttaagagctgtgcattcaaggttttatctttcaaggacgaccatagcaatggggatcattggacctggattgattggtgcgacattactcgaccagttgagggatcaggcagcagtcctcaaggaagaatttaacattgatttgcgtgttatggggattactggttcgaggacaatgcttttaagtgaagttggtctcgacttgtcaagatggagagaacttctgaagcagaaaggacaagttgctgatttagaaaaatttactcaacacgtgcatggaaatcattttattccaaatactgttttg

SEQ ID NO: 20191 - DNA, 311 bp, Gossypium hirsutum
  Clone ID: LIB3146-025-Q1-K1-C4
agagtgtcaagtcaccggcgaagaaagccccgtcgaggaggggaaagaaatgagagaagagagggtggtcaacataggggtagttttgtaaattcgagtgaagcttagtggctgtatttgggtccatacccatgaaaatatgacatcggatcttatctgttcttgaacttttcttcgaggggttgttttttttttgttgttgttgattgacgctaaatttctaaattccttagtttttaaagcagattttagatgtaatttttcagttgaatggattatgagatgaaatcagagctccctgatattttatc

SEQ ID NO: 20192 - DNA, 433 bp, Gossypium hirsutum
  Clone ID: LIB3146-025-Q1-K1-C5
gaaattgaaatccttgaggcggcggtccaatggcggagaaacctcaaccggtcgtcgttcaatactgtcaagtctgcggtttgcccgccgaatactgcgagttcggatccgaattcgataaatgcaagccctggttgatccaaaacgcgcccgacctgtacccggatctcctcaaagaagcgaatgctaaagaagctgataaagttgctgatcaattacaatccactggcatctcttctgctgattcaggtagtagttcagaagctaagcaagaagaagttaaacgtcttcctggtgggaaaattaaaaagaaagagaagaaagaagttgtaattgaaaaggttgtgcggaacaaacgcaaatgtataactactgtaaaaggcctggaacttttggtgtaaaattaagcgatgcttcaaagaaacttggaaag

SEQ ID NO: 20193 - DNA, 312 bp, Gossypium hirsutum
  Clone ID: LIB3146-025-Q1-K1-C6
atcggagtctcgtgccgatgacaggcaatggcttacatattgggttctctattccatgatgacattgctggaactcacttttgccaaagtcattgaatggattcctatctggtcctatgcaaagctgattttcacttgctggctggtcatcccgtacttctctggcgctgcctatgtttacgagcactatctgcgacccttctttatgaacccacaacagacgattaacatctggtatgttccgagaaagaaggatttcttcagtaagccggacgatattttaactgccgctgagaaatacattgaagagaa

SEQ ID NO: 20194 - DNA, 373 bp, Gossypium hirsutum
  Clone ID: LIB3146-025-Q1-K1-C7
ccctgatgacccacttgttctggagattgcgcacatgtataagactgatcgggcaaagtatgaagctacagcacgtggctggacccagaagtatgccatgggatgatggtggttagtgggtaatacgtattggcttttgtacgatgccatgtatgtgttaaaaccttcatatattttggtttgggaaggaacttgtgattgtgcttagatttggatttgaattatgtggacatcttatatcaaaggtgggtctatggttgtaagagagaatgccattccattccatgtctttttatagcttgttatatgatgaagcatttcctaaaactttcatgcttattaaaaaaaaaaaaaaaacaaaaaaataactact

SEQ ID NO: 20195 - DNA, 418 bp, Gossypium hirsutum
  unsure (1)..(418): unsure at all n locations; Clone ID: LIB3146-025-Q1-K1-C8
caaatttgaaatgcatattcaggagaagcagagatggtggtggaaggggtggaaacggtggcggaagtggtggaaaaggtagcaacgacggcggagaaagtatcaactgaggtggcggaaaagcttcccgatgatagcatgctgaaaattgcagcaatggaggtggaacatgtttctgatataactgcccatgatgctcatgccactacacacttcattcaccaggttgaagaaataaagcatgagttggatgatttggttaacaaagttggagaagcaaggaccccaaaaaattgattcataggtaaaacttctttgaataagttctaaaaaataagtttgctattaattttaacaattcatgtaattntttttaaaaaaagtcatcgtattaattgtataaatatgaatataatta

SEQ ID NO: 20196 - DNA, 451 bp, Gossypium hirsutum
  unsure (1)..(451): unsure at all n locations; Clone ID: LIB3146-025-Q1-K1-D1
agatcatccaattattaaagacttgaatgctgcttgcaagaatgcgcctgaaagcagtgaagccaagagagcagttgacttgttgtatgatacagcattgatctccagtggtttttctcccgacagccctgccgagttaggtaacaagatatatgagatgatggcaatggcacttggaggaagatggggtagatatgaggacgatgatgaagtggaagcatcagaagttagtgctgctgaaactgatacgagtgccagtgaagcttcagagaaccaagtgatcgaaccatctgaagtaaggacagagagtgatccttggcaagattgaagtgtcaaaatttaaataaaaattttcctgtattatctgattgctattaacaaaagaatccagaaggaaagaagagttgtgggttccgttggngaagatgaggatgttagtgataatggctgt

SEQ ID NO: 20197 - DNA, 388 bp, Gossypium hirsutum
  Clone ID: LIB3146-025-Q1-K1-D10
cccacgcgtccgggtttttgtttagagttataacttttttaagtgcaggaggaaacgaaggttttgaaggagctggtgggtttgggtcagctagtaatatcgggattggttgaggaatttttgcagagtaatcaacaagatttaagttcgttatgatccatgctatctatccagccatcaaagcgatcatatgcacataactcacacgtacagttaagagcccatggacaatgtcctgttttgggatctctgaacatatagtgtggtttcccatcagcagtaaagctttcagtaagctttctttttggacctggttcacagggtccacagcaacagtcttggattatctccttcctctgggtctggtactggttgcatcattaacatt

SEQ ID NO: 20198 - DNA, 392 bp, Gossypium hirsutum
  Clone ID: LIB3146-025-Q1-K1-D11
ctttgcttctgaagatccagagaatgacatgatcaaaccagcgacccaaggagtggtgaacgttttgaaagcttgtgccaaagcaaaaacagttaaacgtgtcgtcttgacatcatctgccgcagctgtgtctatcaacacactgaatgggacagatctggtcatgacagaaaaagactggaccgatatcgagttcttatcatcagcaaagccaccaacttgggggtaccctgcattcaagacgttggctgaaaaggcagcttggaaatttgctgaagaaaacaacattgatctcattacagttatcccttctctcatgactggtccttccctcaccccaattgtccccagcagcataggccttgctacatctttgatttcaggcaatgaat

SEQ ID NO: 20199 - DNA, 394 bp, Gossypium hirsutum
  Clone ID: LIB3146-025-Q1-K1-D12
cctcactccacatttttgccttctgttgctgttactccgattgcaccacctaaccgactaaagaaaggagtcccatcagttgactccaaccatgtgaggaatgagaatgctgttttcaagaagcaagcagcagtctctaaaaatgcagctgatgatcattcgcagctgttaggaatgcagaaacaacaatcaaatggcatttcttttggtgtggtcagtagtctctcaaatgtaaaaatattgagcaaatctaaagaccctacagaaattaatagagccaattttgagagaacaagtgttgaaagcaaggcctctgctcatggaaggtctaattcgaattttgttggaaaacaggacagggcaactggggcagcattaacttctagaagatagc

SEQ ID NO: 20200 - DNA, 449 bp, Gossypium hirsutum
  unsure (1)..(449): unsure at all n locations; Clone ID: LIB3146-025-Q1-K1-D2
cccacgcgtccgcccacgcgtccgaacagcctgaagaaaccctaaatgatttcctatctcatcaccctcacaacactttctccatgagctttggcaacgctgctgttttggcttatgtccgccatgaacgtgctgcttcagttcatcagaggttgttttgtgggtttgatgacatatactgcctcttcttagggagcttgaacaatctatttatgctgaatagacaatatggtctttccaaagggagcaatgaggcgatgtttgtgattgaagcatataggacgctgagggataggggtccataccctgctgatcaagttgttaaaggatcttgaaggaagctttgcctttgtgatctatgacagcaagactggaaccgggtttgctgcactggggtctgatggggngtgaagctgtattgggaattgcagctgatggcttgggtcata

SEQ ID NO: 20201 - DNA, 451 bp, Gossypium hirsutum
  unsure (1)..(451): unsure at all n locations; Clone ID: LIB3146-025-Q1-K1-D3
gccggcacttcctctcttccgtaatctcttactttcagatttcagtctcagtaaagctttttcagcaccagccaaaatggggaagactcgtggaatgggagctggccgtaagctgagaacccaccgcagaaggcagaggtgggccgacaaggcatataagaagtcaaatcttggaaatgaatggaagaaaccttttgctggatcatcacatgccaagggcatagttcttgagaaaattggcattgaagctaagcagcctaactctgctatccgaaaatgtgctcgtgttcagttgatcaagaatggaaagaaaattgctgcttnttgtacccaatgacggttgcttaaactacattgaggaaaatgatgaggtattgattgctggatttggacgaaaggngcatgctgtgggagatattcccggagttcggttcaaggttgttaaggtttc

SEQ ID NO: 20202 - DNA, 445 bp, Gossypium hirsutum
  unsure (1)..(445): unsure at all n locations; Clone ID: LIB3146-025-Q1-K1-D4
cgacaagacgaggaatgcatggaaaacggtctctcagatacggatttcgagcattacgtgaaggtaatcagatggttagaatgcaaaggacatatcgaaaagaacttcagacagaaattcctcacctggtacagcttaagagcaaccccgcaagaagtaaggatcgtgaaagtattcgttgatatcttcatttccgatccagcatctcttgcggagcagctcgtggacacattctccgattgtatctccagcaaaagatcatccgtcgtaccggctggcttttgcatgaagctttggcattgacatgaacggactgtgnncgaagtagtgagctacatgtttccgagtgcaaaaccggattaanagtcggtgttcggcaataattctttagacccacaacattctggatttagttgcttttgtcattgttatgatcatgtcagaa

SEQ ID NO: 20203 - DNA, 319 bp, Gossypium hirsutum
  unsure (1)..(319): unsure at all n locations; Clone ID: LIB3146-025-Q1-K1-D5
gaccggaaggangggncgggccacgcgtccggccattcgaacccctttgtcggtggtttttttccgcgtataactcctatcggggcgggcttttaacttcaagtcctcggaaatcccatgctatatcgcgaattatctcccgcgtttgatgaaattacagcctgcttcttttgaattccactcgtgctgctaacattcatataaaaggggtggaagaggaagtagctgttatggctactatggaattccaatctcttggggtatctttttttcatgcaggggatgggtctgaagctgaggatgtagaacttcaacctat

SEQ ID NO: 20204 - DNA, 454 bp, Gossypium hirsutum
  Clone ID: LIB3146-025-Q1-K1-D6
cccacgcgtccgcccacgcgtccgaaagattggtatgctggaatcaggtcagtaatatattctcgtggtgacctcaatcatagctgacaacagattagaatcccttttcacctgtttggcgtatgtggatgatttggagaagtgttagtcttctatgtggtctttgtcaagttgaagggaagaaaaatgttaacaaaaataaaaataaaaataaaaataaaaaattaaccatttctcgtgtttcttctagccatatcgtttgcaaatctttggaggaattctacgtaaaattattattgcttcgtaaaatcgatagatgatgaatccgtcatatctcctttatacttatactgctctaaatttgaaaggacacagaatcctgtatgttctagtatcttgtatatagcatatatgtatcctgaggttgggaaaactcatttaaaaatgtaaatta

SEQ ID NO: 20205 - DNA, 313 bp, Gossypium hirsutum
  Clone ID: LIB3146-025-Q1-K1-D7
cccacgcgtccggccttcttctttttcctccgcggctacatttccactctcgttcccgagatatcaaagtaaaatgaaggtggtcgccgcctacttgcttgccgtgctcggaggaaacgcttctccttccgccgatgacttgaaggttattctcggatcagttggagctgaggctgatgatgataggatagagttgctattgtctgaagttaaaggcaaagatatcaccgagctaattgcaagtggaagggagaagttggcttctgttccttctggtggtggtgctgttgcggttgccgctcctacagctggt

SEQ ID NO: 20206 - DNA, 452 bp, Gossypium hirsutum
  unsure (1)..(452): unsure at all n locations; Clone ID: LIB3146-025-Q1-K1-D8
aactagagcagactaggttattggttcttgaagcagctgaccagcttgatcgacttggaaacaagaaagcccgtggaaccattgcaatggcgaaggtagcagctccgaacatggccctgaaggtactggacagggcaatacaagtacatggtggagccggggtatcatccgacactgttttggcacacctttgggcatcagcaagaacattgagaatcgctgatggacctgatgaagtgcacttgggtaccattgctcagttagaactacgaagagcaaagctttgaaggatcttgaaactatgatcatcacacaacagnnactttttattttttcttcttgcagtctcgaagataaaaataaggaaaaggaatccaaaaaattgggcattttcttagtaatattatggaattattatgaaagataataataataatgataatntatgtagt

SEQ ID NO: 20207 - DNA, 451 bp, Gossypium hirsutum
  Clone ID: LIB3146-025-Q1-K1-E1
cccacgcgtccgtgatttgtgtttgtccttgttggtgggttgagttgaaggaatttgtaaaaagttggagctctggagttgggactctcgtgttgtgcacccaaagcataaatttctgcactgatggaagagcttgtgaagtgaaaattgactgacactgctatcgaaaaaggtggttgcctgtgaagggcaagaactgtggtgtggttattttcccaacactttttaacttgctgtttttacggtgcccctttcatcttaagatcattgctttactcgtctgggacttgttgaggtgtgaaacttacggcactgtaaatttgccgcattcatgttactcctgtttctcacgttttcatttagatattagtttatttttgtttcgttttgtatcagtgttccaaaggcaattctatatattcttttctccctctagagttatgataataag

SEQ ID NO: 20208 - DNA, 197 bp, Gossypium hirsutum
  Clone ID: LIB3146-025-Q1-K1-E10
gtttctatctaccaccgagagcaatcgcttacactgaagattcataaagtggggaataaaattctaagaaattttccagattaggattttaattttccttggaatgtgaatattccacagttttttgtaaaatattctagcctcagtctgtaaataattaggaaaatgccttgtaatagtttataagcagttcgcac

SEQ ID NO: 20209 - DNA, 358 bp, Gossypium hirsutum
  Clone ID: LIB3146-025-Q1-K1-E11
aacgactgcaggtctgcatgccaaccgtttaatgcagcaactgcttcggtgactatcagcagtacttgtgtacccgacctcaatctggatcttaccactcggccatggccctttcccatcaaaacttggcacttaattaatttgaagtgatatgatgtgatattaacatcactattctactgcttaattaatttcattctttgatcacaataacacctactatgcttataagcctgttaaaatatgttagcgagttagagctcaaaaatactggctggagtctacttaagtgggatacactgcatgtttagccacgaatttagactatatctataaaatcgaggcctatcaagaatat

SEQ ID NO: 20210 - DNA, 390 bp, Gossypium hirsutum
  Clone ID: LIB3146-025-Q1-K1-E12
cccacgcgtccgcccacgcgtccgcccacgcgtccgagcggtttaatctacgaggaaacccgtggggttttgaagatcttcttggagaacgtgattcgtgatgcagtaacctacaccgaacatgcgaggaggaagactgtgactgctatggatgtggtttatgcactgaagaggcagggcaggactttgtatgggtttggtggttaaatgatttagggaatagatcttttagcgatgttggcggatctggacttgttgtcatgctagcaagaatgtttgagtttaggattagggatagggcttgtaattaaggggtgctattgggattactggaaattataatttggtcgtgtagttttctttggtgatttgtaattcgtgccatgaatt

SEQ ID NO: 20211 - DNA, 447 bp, Gossypium hirsutum
  unsure (1)..(447): unsure at all n locations; Clone ID: LIB3146-025-Q1-K1-E2
atttaatgtcaaaactaatgattagattaatcaaaatatttgattaaaataatactttaatttaaagatttaattgaaaaatttttaaagtttaaaatcaacttaaaatttagtcaatttattagggcggttggtgcaattaagctctttttttctttttaagtagttcatcttttatatcaaggatgtttgaatcgagaaccgacagatgtatcgatctgaaaaaggttttgaactgatagactaaaaattggtatagaccgattgaatctgttaaaaatcaattgaataaggattttaaaattgtttaaatgtttgatggttttttaatcgaattgattagattgatggagctagcanaccggtgggtcttgatttaaaaaacaattgaatttgagtacaaagacactttatatagcactaatatttgagaattggnggtgatgt

SEQ ID NO: 20212 - DNA, 106 bp, Gossypium hirsutum
  Clone ID: LIB3146-025-Q1-K1-E3
cggacgcgtgggtttcatttgtcaaaagacatcttcaatcatcagtacgacgtcgtgtaaaatattggtgaaatgtagaagaaaaatgaaaccgttttcctttaat

SEQ ID NO: 20213 - DNA, 444 bp, Gossypium hirsutum
  unsure (1)..(444): unsure at all n locations; Clone ID: LIB3146-025-Q1-K1-E4
attatgatcaactagtcaagatagccaaggttcttgggacagatgaattaaatgcttatctaaataagtatggtatcgaattggatccccatcttttatttcttgttgggaggcatagtcacaaaccttggacaaagttcattaatgctgagaatcaacatctggcattacctgaggccattgatttcctcgataagttgcttcgatatgatcatttggaaaggctaactgcaaaagaagcaatggctcatccttatttttacccgattagaaatgcggaaagcagcagaactcggacctagcatgccaacttcacggtgatggatgttaaggcatggcatcttcttctttcttcatatagcatgttaagatcctcatccctttatagaatgacagaagattaaagtctcttttntttttcttttgattttcatgtctccccca

SEQ ID NO: 20214 - DNA, 454 bp, Gossypium hirsutum
  unsure (1)..(454): unsure at all n locations; Clone ID: LIB3146-025-Q1-K1-E5
atcacctgaaactccaggggtaaagatatcagttgaaccacagactttgagttttagccaagcaaatgagaagaaatcatatacggtgacgttcagtggtagttcacagccaaccggtacgaacgtgttcgctcgtttggagtggtctgatatgaagtataccgtgggcagtcctattgcaattagctggacatgataggagaataaaggggatggacagtttttaaactttaaaaagttgaatggcttcttaaactcactcaacaagatgagatgggggttggttcaattgttttagtgttttgtagttgccagattcatgatagctaaaccagctaataatggaagctggggtcttaagtgtttgatgttattctctgagagagggaacaatgaaaactaggaacattggtaggttntctttctcagtatacagtgtattaatatgctttta

SEQ ID NO: 20215 - DNA, 419 bp, Gossypium hirsutum
  Clone ID: LIB3146-025-Q1-K1-E6
cccacgcgtccgcccacgcgtccgcccacgcgtccgcggacgcatgggtggacccacgcatacatggacgcgtgggtcaagaggacattgctgagatgactggtggaggagtctaccgcaaggttgaatgtaccgggagcatccatgccatgatttatgcatttgaatgtgtacacgatggttggtgagttgcagagcttgtggaggttcctaacaaagacgatgcattcaaaacacatacagtgaatctacttaatgaaaggacttttaagggtactttatttggcaactacaaacactaaactgatattcctgctgtcggtgagagatacatgaacaaggatcttgaacttgataagctcatgactcactctgttcccttatgtgagattaacaacgcatgcgatttcattcttgct

SEQ ID NO: 20216 - DNA, 234 bp, Gossypium hirsutum
  Clone ID: LIB3146-025-Q1-K1-E7
cccacgcgtccgctcaaatgctcgttttctttagtttaccttttgatgtgcggttggaattggtcagaagatttcttgctgaccattaaactttttatttctgttgatgatattttcataactttttctgtttgtaatatttgggatggtatgtcattacaatcttctaactttttgatgttctaaaactgtataacatatggattatgacatagaatttcatgaatttcattt

SEQ ID NO: 20217 - DNA, 414 bp, Gossypium hirsutum
  unsure (1)..(414): unsure at all n locations; Clone ID: LIB3146-025-Q1-K1-E8
ggtatcttataggtcgtcgacttcataactttggggaaaactcagaagagaagcaaaatgaggcagggtcttcctcagaaacacagatttctgatctgcgggacactggaataatccagcatgaccgagaggttgatgtggggctgagactaaggcgcgctgctaattaaaaacgatgctgatgctcgaaatgcttgtatgaatctacgttccatttatgacaagctggtatacttgttaggtagtgtttgaaattggccaatacaatatttggcttacgcttactntttgtgcacagaatacacgttaactttgcaattagggtttgtcttaaaatttcagcaagttagataaataatgaattactattttattttacctncanaagnntggggcaacaaatncttacatatt

SEQ ID NO: 20218 - DNA, 230 bp, Gossypium hirsutum
  Clone ID: LIB3146-025-Q1-K1-F1
cccacgcgtccgcagactcgttcgctttcgcgtacgtttcgatgggcgggcggaattggttaaaaaagttattgcttgacattaaactatatatttctgctggtgatagattgataactttttctgtttgtaatatttgggatggtatgtcattacaatcttttaactttttgatgtactaaaactgtgtaacatatggattatgacatagaatttcatgaatttcattt

SEQ ID NO: 20219 - DNA, 399 bp, Gossypium hirsutum
  Clone ID: LIB3146-025-Q1-K1-F10
atcaaagcagcagcagcagcaacaacaacaaaaaaagaagaagcctctactccgtaaattcgggagcctactgaagaagaaaggaagtaacaacccgaaatagataacgaaaaacccgaaacccgaaatccgtaatggcatgacttttagccttaccagcaagcaggtatagcagataatgtcttgcaagctgaatgtgttttgcttcacttattttgtttgttttttcttctaaaaatgtcctcaaatagaatttaaaattgaagagggttgtattcatgtttagtttcttcttcttattttttttttttatttgattctccatattggatagtatcttgtatgtgatggagataattcttttttttttttttttttaattttcttgtacttcatttt

SEQ ID NO: 20220 - DNA, 396 bp, Gossypium hirsutum
  Clone ID: LIB3146-025-Q1-K1-F11
gccaaaatctcctgcttcgactgccctcataattatgacttctcaggcatccaagttgcagtgaagtgtgagaaagtgaagaaactagccactgcgaccactgaagaaaatggttctttcaaggtccagcttccatcaggcatctcaaacactaactgccttgccaagctcctaggtggaccaaaccagctatacagcaagaagaaaaacctggtgtccaaggttgtcaaggtgggacatcaacccaacacttacaccctctccactccactggctttctccacttcatgcccttcggcatccattgatgctaaatcatgtggagctcaaaaggggatcggttcatccaagaccgtcgatctgccactacccccggagtggggacttgcaccatcc

SEQ ID NO: 20221 - DNA, 396 bp, Gossypium hirsutum
  Clone ID: LIB3146-025-Q1-K1-F12
ggagatctgctgcgaccaatcttggaaaatttgctgctactgtagaagcacctcatttgaaggtggacatcatgtctatgtttgatgatttgacacaggatgatcaagattctgttcgcctattggctgttgagggttgtgcagcacttggaaagttgttggaaccccaagattgtgtagcacatattctccctgttatagttaatttctcacaggataagtcttggcgtgttcgttacatggtcgcaaatcaattatacgagctgtgtgaagctgtcggacctgagcctactaggtcggaactagtacctgcttatgttcgcctacttcgtgataatgaaactgaagtgcggatagctgctgctggaaaagtaactaagttttgccgaattctga

SEQ ID NO: 20222 - DNA, 433 bp, Gossypium hirsutum
  unsure (1)..(433): unsure at all n locations; Clone ID: LIB3146-025-Q1-K1-F2
cccacgcgtccgcccacgcgtccggaaggctttcaccatgtttctatcatgtcctatacagcaaaatatgcaagttcattttatggccccttccgagaagcactggactctaacccacgctttggagataaaaaaacgtatcagatgaacccagcaaattacagagaagcattagttgaggctcatgaagatgaggctgaaggtgctgacattctattggtcaagcctggtctcccttatttggatatcattagacttctaanggatcaatctcctttgcctattgctgcctaccaggtttcaggtgaatactccatgatcaagccggtagtgttctaaaatgattgatgaagaaagggtcatgatggaatcatngatgtgcctncgccgggctggtgccgacattatccttacatattntgctctacaagct

SEQ ID NO: 20223 - DNA, 333 bp, Gossypium hirsutum
  Clone ID: LIB3146-025-Q1-K1-F3
cttaataactgctataatgtcattattaacagcggccaatcaagtgagggcgggtcacatactcatcaagcaccaagtctctagccaaaaggcttattgtaaggatccagagggtctcgtcttctacaccaacaatcgaaacacctctgtctcactgctgaaacaacatctcgacgacatcatttacaacattcctactgtagacaaggttgtgtctaaattctctctgatgctctgcgacaaaaattactaacatatattttcatacattcttttctagatgattagtctttttagagatgcataacatacaccgtacttcagttagttatg

SEQ ID NO: 20224 - DNA, 459 bp, Gossypium hirsutum
  unsure (1)..(459): unsure at all n locations; Clone ID: LIB3146-025-Q1-K1-F4
gttgatgttcttcccaagaagcctgctaaacagtttcatgagcaggaaaatgggaacattgagaaaaatggaaagcattctgagcaaaagagctcaaagaagcagcaaaatggttcagttcagccaaagaaaccatttcaaagagtgaatgtggatgaggtagaatttgttgatagcaggcttgaagataattcatactgggcaaaggatggtgctgaaactggatatggtgcaaaagcacaagaagttctaggtcaagtaagaggaaaggggtttccggcacgagaagaccaagaagaaacgtgtgatcatacaggggagggcagatttgactggcagtcgcactctataaaattcaattattctgatggggagtaaatgctgactttctagttggatgatgagcactgctgtaccctctaacacntttcattcattggagtatattaagtggaactc

SEQ ID NO: 20225 - DNA, 454 bp, Gossypium hirsutum
  Clone ID: LIB3146-025-Q1-K1-F5
cccacgcgtccgctcaaggagcatactcagtacccggtctgatcgttataggagacatagcattgcagggtcctcaatgagagacgatgagagccttacaagctcacctgcagttccgagttatatggcaccaacacagtccacaaaggccaggtcccaaataccaagccccttaggaagtggcacaccagataggagagtggcagggtctgcaaagaaacagcttttgttctcagcgtccccagccagtagtaggagacattcagagcctcctaaagtggacataagtgaggttagaaagaatcaacatgcaccaagcaatggaaggcaagtggtttggtgaagagtgcaacaaaagttagattgaataaacaaggaagggttattacaacttgaagctcttgagtgtgtttgtgattatctttttcttcctaggttttatgattattaatta

SEQ ID NO: 20226 - DNA, 82 bp, Gossypium hirsutum
  Clone ID: LIB3146-025-Q1-K1-F6
aaaagttgtaaatttctattgtgattatcttttgtttcaataagttagatggctttgatgtggagtcatatcatatacaagt

SEQ ID NO: 20227 - DNA, 444 bp, Gossypium hirsutum
  Clone ID: LIB3146-025-Q1-K1-F7
cactatttctattgtatctgctagttggtttttattgtctgtcagttgaaactgcagtgctaaagggtgtagctcagtagtgtggaccaaaaagcatttgtttccgtgttgcacgtttatttgctcatacgaatgtcttttttttttttttttttttttttctctccaggtatatgggtacagtaactggcataagcgatttggatcaagttcgctggccaaattcccattggcggtctgtgaaggtaattattaacatttttttacatggatctcatagtagatggtttttattgtttgggatggataatatcatgttctattttattatgcatgtctaaagaaatttatgtgtttaacgtccatgatttcttgtttgatgtctttgatttcatggagattcaatgctaattgaatgattatgtaatgttagaatcttgaatg

SEQ ID NO: 20228 - DNA, 445 bp, Gossypium hirsutum
  Clone ID: LIB3146-025-Q1-K1-F8
atcggttctacacttaattaaagaccttccggttaccttagcttctcaggtgggcgaataagacgaaggagagtctccttcctttccatttctttttccttttccaaaaacctccgatacttcctatctccctttcctccgattccatatctctctctctttctgctagggtttgggagttagtgaacaacgggttgctatttcatggggcaacaatcgttgatctacgccttcgtggcacagaggcaccgtggtcttagccgactatacggagttcaccggaaacttcaccggcatagcttctcagcgtctccagaaacttccttcttcaaacaacacgttcacttacaactgctatggccatacctttaactatctcgtctataacggcttgactaattgtgtggttgctattgaatacgttggcatacaggttcctatggca

SEQ ID NO: 20229 - DNA, 391 bp, Gossypium hirsutum
  Clone ID: LIB3146-025-Q1-K1-G10
cctctatcaaagagtaagcccaacaatgccgcccaagtttgacccaacacaagttgtcgatgtgttcgtccgcgtcaccggcggcgaagtcggagctgctagttccctcgctccgaagatcggtccactcggtttatctcccaaaaagatcggtgaagatattgccaaggaaaccgcaaaggaatggaagggtctccgcgtgaccgtcaagctcactgtccagaaccgtcaggcgaaagtcatggttgtcccgtcggcggcggcgctggtgattaaggctttgaaggagcctgaaagggataggaagaagaccaaaaacatcaagcataatgggaacatcggccttgatgacgtcatcgagattgctaaagtaatgaagccaaggtcgatg

SEQ ID NO: 20230 - DNA, 405 bp, Gossypium hirsutum
  Clone ID: LIB3146-025-Q1-K1-G11
aaaaaccggaccgacccacgcgtacgactatacccaatagccatttcaacaacgcctttcaagacagacccaacggcgaaaaatcactgtgaatattcgcataacatgcggacaaaccacacctactattaccctcactccgaatacccagccactctgctcatctcccaacaagatcatccaatcatataacaccgaaacctacaaaaaattgaacggtatcctcttcaccgccaagcacactctccaaaaccctcagacaaaacccatggctgtaccatctattactgatctcgatattaatgctattaatgatcctgaaccgtatatgacgaacaccaaaaacattaaacgtcatgtcaacatcaacctttataacaaaatctatattgctaaaataatgat

SEQ ID NO: 20231 - DNA, 401 bp, Gossypium hirsutum
  unsure (1)..(401): unsure at all n locations; Clone ID: LIB3146-025-Q1-K1-G12
gttcttgacaatttggacgaaaaccagcacacatttcttttacttaagcgccttgctcttgagggggacgtaagctgccattccgcacctttttgtgtttattgtatataagataagcatgtgcacacgcacgcacgcgtgcacacacacacgtntgcatgtcacaacaagaagtcgcattttgaacaagaaagagcaacctattcatagcatcaaaattgcatttttataacttctgtatcatccgtataagaacaaaccaagatggggaatgaaaagagaaatctgatgatgatatagggtctgctctgcagtttgggttaaaacgatcttttgacagtaacacacgtgtttgaaatttcatccgctttactttgaaactgacatgccagtgtgctatt

SEQ ID NO: 20232 - DNA, 270 bp, Gossypium hirsutum
  Clone ID: LIB3146-025-Q1-K1-G2
ccccgacgtctacacaagttcagggagattcgtcgccaggtttggctttggcggcaaaaaagcagctcccaagaaagtctcgaaacgaaccccagaccgccctctatggtacccaggagcagtggcgcctgattggctcgatggaagtttggtgggtgattacgggttcgacccgttcgggttagggaaaccggcggagtacttgcaatatgatttggattctttggaccagaacctggctaagaattcggctggtgagataattggaac

SEQ ID NO: 20233 - DNA, 454 bp, Gossypium hirsutum
  Clone ID: LIB3146-025-Q1-K1-G3
ggctttggtaccatctttggtgagcaacagacaggggatgttggaaatgttggcattgatcttttctttgagatgctttttgagagtttgtccaaggttgaagaacaccgtgtagtatcagttccttatcagtcagtggagattgatatcaatataaaccctcatctcccctctgagtacataaattatctggagaaccccatggaaatcattaatgacgctgagaaagcagctgagaaagacatctggagtttgatgcagtttacagagaatcttcgccgtcaatatggaaaagagccatattccatggaaattcttttgaagaagctttatgtaaggcgaatggcagcagatcttgggatcaacagaatctatgcttcaggaaagatggttggcatggaaaccaggatgagtaagagggttttcaagctgatgacagattccatgatatctg

SEQ ID NO: 20234 - DNA, 253 bp, Gossypium hirsutum
  Clone ID: LIB3146-025-Q1-K1-G4
cccacgcgtccgcccacgcgtccgcccacgcgtccggcattgttgatcagccagctataatgtcctactgggatcttagccaagctgagaggagcaagtacgggattttggataacttgattcgattcagcttcggggttgaagacttcgaagatttgaaggccgatatactgcaggccctggagaccatagcttaaatagcgttttgatgtgtttagtatttttcctagtctaaatggagcatgtttgatct

SEQ ID NO: 20235 - DNA, 446 bp, Gossypium hirsutum
  Clone ID: LIB3146-025-Q1-K1-G5
gtgaagtgtttacttgaactgtttagaaaatgttattctagtccttaccctcctatcgtccatttaggtgggatgcttggcattgttaatgcttttggggcaggtgctggaaatttagttgattttcacccttttaactcctctgtgcaaactggttatgatcaaaaggaaccttcccatatttcaggtccaatacttgtgaatcctgtttgtgaagaccactcaacatcactgatgcaagagatttttcttgttgctcaaaatcctgatgataatcaattgcaacaatatgcagcgtgggcaatttcatttcttcgacagcgactgtggtctagagaaaattcgaatagtgctggtggtacacaaactgagtctgctggctcaaaatctatttcgcacggtgttcctgaggacagtgcagtcatgaaactgggtctgtggcttaa

SEQ ID NO: 20236 - DNA, 447 bp, Gossypium hirsutum
  unsure (1)..(447): unsure at all n locations; Clone ID: LIB3146-025-Q1-K1-G6
gtttggacaacactccttgtgtggttgttacatcaaaatacggatggagtgctaatatggagaaaatcatgcagtctcaaaccctatctgattctagcaagcaagcttacatgcgcggcaagaggatcctagagattaacccaagacacccaatcgtcaaggagcttcgtgagagagttgccaaggactctgaggatgagggtgtgaagcaaacggctcagcttatttaccagacggctctaatggagagtggtttcaatctacccgatcccaaggattttgcttcacgcatctacagctcggtgaaatctagcctaaatattagtcccgatgcaacaattgaggatgatgatgatgatgtagaagaaaccgagacagaatcggacacanaagacagtgcagtcaaagatgagttgtagattgcctgaaacctcgggacatgccttt

SEQ ID NO: 20237 - DNA, 316 bp, Gossypium hirsutum
  Clone ID: LIB3146-025-Q1-K1-G7
cccacgcgtccgcccacgcgtccgtgcaacctgaaaaataagtatgtaccattaataatatatgtttgtaaaaaaatgttctgcattcgcattcattggttaatgttgttgaactgaattggctttttagcagactcttccactttacatgattatatatagcttattttttctaaactaaattatgtctataaccactgggaagtcaataatatctgtcagataaatgatcatacagtcttttgaagtgttttgcacgagtctctctacattatactatcatctctaaaagagcactctccatggaaaatctttt

SEQ ID NO: 20238 - DNA, 449 bp, Gossypium hirsutum
  Clone ID: LIB3146-025-Q1-K1-G8
gtaaaagcaatgacactttccctctcggttttagttgccatcgaaatgttcaactcccttaatgccctctctgaagatggaagtctcttgacaatgcctccatgggtcaatccttggctcctcctcgccatgtctgtgtcattcggcctgcacttcttgatcctctatgtgccattccttgctcaagtattcggtatcgtacctttaagctttaacgaatggctgctggttctggccgtcgcattccctgtgattttgatcgacgaagtgttgaagttcgtagggaggttgggacggcggatgagatcctccagtcaaagacctttgaaacccaaaacagagtgaagacagatatggtataaatccgataagtggatactagacagccaatgctagcctctaaaatgattaaaattcttgggaactgtcctctaacatggcgtttttac

SEQ ID NO: 20239 - DNA, 200 bp, Gossypium hirsutum
  unsure (1)..(200): unsure at all n locations; Clone ID: LIB3146-025-Q1-K1-H1
ctagatcgcgagcggcccacgcgtccgcccacgcgtccggtctatattccttgtcaatttgttggcgatacatttaagttcgcccctgtttgtaagtctttgtttgtgctggtttgatggaacaatcgatatgatcgccttgtaatgcttcttttcatatgcacttctttcttctagtagcnnnnnnnannannnaaanc

SEQ ID NO: 20240 - DNA, 368 bp, Gossypium hirsutum
  Clone ID: LIB3146-025-Q1-K1-H10
gtcagctcaactacttatgttgattcatcttctggtgggaggttttgttttcctccagttgattcgcaattgttacgacctgctggtgctgttccatcccattacccgaggccctatgttgttagccttacttatggtagcaatagtagtggtgctgagaacggtaggcattggggaaggcaaggtctagacttaaatgctgggcctggagttccagacattgaaggaagagatgagtcggcacctcttgcatcaaggcaactgtctgttgccagttcacaagtccacgcagaggagcaagcaagaatctatcaggttccttgtagcattttgaaaaggaaggaacctgatggaggatggaatggata

SEQ ID NO: 20241 - DNA, 395 bp, Gossypium hirsutum
  Clone ID: LIB3146-025-Q1-K1-H11
cggacgcgtgggctgatctgtctcctccactcagccatcgccatatcaagcggcgccttcatgatgttccgtatgaaagaaatctacaccttcacgcacgggatcgaaactgcctccaagctcctcggctccaccccacacgaccaactcctgatccggacctccgattcgttctccggcctgctcttgttcaccatcgggttcttgctcttcatggtctccttcgttgaagacaccgatttccagtccttcttcgccgccggctgcaccttcttgcacgttttcatggccgtgtggaggttttggttcgagaccagagtggaggatttggcttgggattgtattaggcaaacggttggcgatattttattggctctttcttgggtttcctttta

SEQ ID NO: 20242 - DNA, 418 bp, Gossypium hirsutum
  Clone ID: LIB3146-025-Q1-K1-H2
atggaccataaccatgtaatcgagcttcataattactgcacaagtgtgtatgaagaaggcgatgctcgctcagctctcattactatgcttcaatcactcaatcatgctaaaaatggggtcgacatcgtctctggtacgagagtaaaatcccacttcgccaagcctaattggcgcagtgtctacaagcatattgctgtcaatcacaacaactctcgagtgggggttttttattgtggggcaccggcgctgacaaaagagcttcgccagctagcttcagatttctcccacaagacgtccaccaagtttgatttccataaagagaacttttaatcccatgccagggtcccggatagggagaacctaaaaaagaaatggcttggagctaaccagactctaagacagttacaagcaccttcat

SEQ ID NO: 20243 - DNA, 451 bp, Gossypium hirsutum
  Clone ID: LIB3146-025-Q1-K1-H3
cactgttgaagcaatatcagcactctccttttcatgttacccttcttcttctgcctctaaattcctcttatatgccaaacccagtagactctcttccctaacttcccacattcccaagtctactcctttactttcccacaatatctccatctcgccattaatcagcacccaaaagaaattgagttttcaactctgctctacactgcaagaggtgagcttagaagctgaaacagataaaacccagaaatcaaatgtgaaaaggaagctttttgtgttgaatttgccttggtcttatacggttgctgatatcaaagacctctttggccaatgtgggactgttaaagatgttgagatcataaagcaaaaagatgggagaagtaggaacttcgcatttgtgacaatggcttctggtgaagcagctcacgctgctatcgatatactcgattctcat

SEQ ID NO: 20244 - DNA, 387 bp, Gossypium hirsutum
  Clone ID: LIB3146-025-Q1-K1-H4
agcaatctcaccacaaaagaacaagatgaggaacaggagctcaaacggacggcggagattgaagaatcaaacattgctattggagttggattggaggacgttggtgggagttcgtctgagatttcggctgatggtaagccgttccccgatcttccgggccttcagccggatttatgggaaggtcccaagtgggatgttctcggtttccttgttcagtatttgtgggcttttggcatcgttttcgcgttaattgcatgcgggattgctgtggcgacttacaacgaaggggcaacagattttaaggagactcctgcatacaaagagtcgatccaatctcaagagctattagaacaacctgatgcctctaatcaaaacgtctttgaatca

SEQ ID NO: 20245 - DNA, 224 bp, Gossypium hirsutum
  Clone ID: LIB3146-025-Q1-K1-H5
cgattgcgctgataacgggataccgttgcctaatgttacgagcaagatcttggcgaaggtgatcgagtactgcatgaaacacgtctaggctcctaagacagacgatcgatccgccgatgactagctcatgattggggacgcttactttgtcaaggtggattaagctactctctatgatctgatactcacagcgatctatttgaacatcaaggtctagctggatc

SEQ ID NO: 20246 - DNA, 374 bp, Gossypium hirsutum
  Clone ID: LIB3146-025-Q1-K1-H6
cccacgcgtccgcccacgcgtccgccttagagctgggctccatggtttgccacaaactttgaggcgctatagaaagttttgtttggtaaaggaatattgaggtgagcgtagaagagaggcgaatgtttgaagcatgttgtactttgcccatttcataacttggtcagtcagtcagtcgcatcataactgtagtatttgttaatacataaacgtggaaaattttgccaatggaaaaaaaaaaaaaaaaaaaaaaaataaaaaaaataaataaaaaaatataaaaaaagaaaaaaaaaaaaaaaagagtaacaaaaaaaaaaagtttaattttataaataaaaaaaaggggggggccgttttaaaggatcaaagtt

SEQ ID NO: 20247 - DNA, 287 bp, Gossypium hirsutum
  Clone ID: LIB3146-025-Q1-K1-H7
gagaaagtgaaggaattggaaaccagtgaagccgactctgaagaaaatatagagcaagtagcctgaatagcagtggagatcttgtacagtcttcaaaattgaaacaattctccccatatatggtaacacagatggcttcaatatatttgtttttgttttgttctgttggtcctccgtcgcagtttgggcattacctctgtcaagccgagagaatttgaaggaaaaatgataatattctctattgatttgatttacacgagtatatatacaaaatactatcaactctt

SEQ ID NO: 20248 - DNA, 313 bp, Gossypium hirsutum
  Clone ID: LIB3146-025-Q1-K1-H8
ctgacgcgtaggcagacgcatgttttttatccttgcatgtctaatactggggggggtatatgccgctaatcctagggttctaaaggtcaatctatgaacttaaaaagctagtacaaaatgttccattcgggcttgtgattcacataacagattttgaaacaaaatgaaggaactaagtaaaaacaaactgatgtcctttgtaaaacctaaagaatgagaaggattattgtggagcatctctactgatttaataaacacgagtatatattcaaaatactatcaactctaagacaaccaaaagtgatttccatac

SEQ ID NO: 20249 - DNA, 235 bp, Gossypium hirsutum
  Clone ID: LIB3146-025-Q1-K2-A1
cccacgcgtccgtctaaccctagccctctatcaggattcaaacatgaaaggaggtaaatccaagtcggatgccaagagcgccaagctctccgtgaataagaaatcaaccacgaaagctggaaagaaatcggggaaggcagctaaggatccaaacaagccaaagaggcctgctagcgccttcttcgttttcatggaggagttccgcgagcaatacaagaaggagcaccctaaaaac

SEQ ID NO: 20250 - DNA, 407 bp, Gossypium hirsutum
  Clone ID: LIB3146-025-Q1-K2-A10
aaaaagatgaaaatcgggttccttgtatttgtagctgttgcattgctagcattcttgtgtagcccgaatgccgtgtatggaattagattcgtaattgatagagaagaatgcttctctcacgatgttaagtatgaaggggatacaattcatgtgtcgtttgttgtcattaaggctgattcaacttggcataatagtcatgagggtgttgatctggtggtgaagggacctaccggtgatcagattcaagactatcgagacaagataagtgagaaatttgagtttgttgctcatcagaaaggaatacaccgtttctgtttcagtaataaatcttcttactatgaaacggttgactttgatgacatgaaagtcattttacatactatgatcagcatgcaaaaggtgagcat

SEQ ID NO: 20251 - DNA, 404 bp, Gossypium hirsutum
  Clone ID: LIB3146-025-Q1-K2-A11
ggaattaacaccaagatcacagcatgcttagatcctgatggttggaagacggtttttgttgataatattgatttcctcaaggaattggagtgaggtttagagacattctgatatgatccttttgacacggtccaaatccgagctgcaaggatttgtggaagaactccaccaatcccgttttgtagatgagtcttctacagtgacaattgcataacttcgtggaagtgaagaaacaccgagatgtcagttacaatttcaattatattttcctttttttttttttttgtttcaatcaaattcactctctatgtaggaaagagaagaatggcacagcaaacatacctgcttatcttatgtgtttgaggttgatttctcttcttttgttttttcagtcccacaaataa

SEQ ID NO: 20252 - DNA, 271 bp, Gossypium hirsutum
  Clone ID: LIB3146-025-Q1-K2-A12
cccacgcgtccgcccacgcgtccggttggcactttccgggattacctagcgaagctgcttttctggtgtatgctattaggtcatcatttgagaggcttggagaacagattgcaactaagttgtgtcgtcggattattgtagagtaaggtttgtgaaattgtatagcctatctttttcttgtctttcttgtggtatttttggtttatcaggtaatgtacattcttcttcatgaagctattagtgaacttatattgttccaactctatttttt

SEQ ID NO: 20253 - DNA, 370 bp, Gossypium hirsutum
  Clone ID: LIB3146-025-Q1-K2-A2
ctcaactaaacttataacgttcgatcgtttaacgcaaacccatttttaagtgagggaaaggtttcagttcagagtcataagcaacatcaatggctccttcaactctgacggctcttgcggaagagaaaaccttgcaggcaagcttcgttcgtgatgaagatgagcgtcctaaggttgcttacaaccaattcagtaatgatatccctgtcatctctcttgctggtatcgatgatgttgatggcaagaggggtgagatatgcaagaagattgttgaggcttgtgaggattggggtgtcttccaggttgtggatcatggtgttgatactaaactcgtgtccgaaatgacccgtcttgcgagagagttttttgc

SEQ ID NO: 20254 - DNA, 416 bp, Gossypium hirsutum
  Clone ID: LIB3146-025-Q1-K2-A3
tctctacaggctcatctggccaaactgctgggcagggaactcgccctgaccattgtgatcagcagtccaaaaatttagtgttctcaaatgctttatcaagtcctgttcgtcggagtctccagcattaccacatagctcaagaaggctactgtcctaatggcggccttccttcaggaaacggagccaggaacaatgaacctagctttctcccaaaccagactagggattcaaatcctcttagctctaatgactcctcaatggacatgcatgccgatagtccatctcatgaatctacctactgagaatgcaaggtaactcccttttgaacccccaacgattaacaagatcaagaagggcttttggtgcattaccattttgtttgtcgctgcttgtacccaagtaaagaaagcatgaca

SEQ ID NO: 20255 - DNA, 405 bp, Gossypium hirsutum
  Clone ID: LIB3146-025-Q1-K2-A4
atcgaggtactacattcggactgaaaactggaggtcgaattgaaagtattcttgtttctcttcctttatctgcacgatgggaatatgatcataaaccagaagagggaagtgaagagtggaaactgttagatgcttgcatcaatcctaaggaatggatctgatacttctggtcgagtttctttcaatcctttcgaaaattcccattggttcctttatttttaagatgctctccttttagggagttccttcttgcagtagtagttgtaagttttagcttcatggatttgttgtattaatgtaaatcacgtgaatgtaattagatgccctataatacgcattgcttagagttaagaggtctaacagttgctaatggattgtgtatctgctaacatatttgtgtacttt

SEQ ID NO: 20256 - DNA, 404 bp, Gossypium hirsutum
  Clone ID: LIB3146-025-Q1-K2-A6
cccacgcgtccggcactctgttccagaacttcactcatgattacaattcggaggatgcttctggcttctttgtttcgttactttttggcctcggacctttgctgggtggcctcattcttgttgcatttgctgttgctttctgccttaaacatgcccttctcatgggtgctgcttctggcattgccttcatccttggtgcctggcgaccattgcaactgcttgtattttctaaaatgggatttttcccacttgtgtcgctacttgccataggtgctgcatttgtccatgtttcaagctccagtattttgaagattatgtgcaacaaaagagcttcttcaaataacctaccatcagttacgggatttcctgtgagtgttctgacgcttcagtcagttttagcatgt

SEQ ID NO: 20257 - DNA, 258 bp, Gossypium hirsutum
  Clone ID: LIB3146-025-Q1-K2-A7
ggttttgtcaatgacatggagaagcttcacctgtagtacatgaagggacaggtccatcagaggcaaatctcttctcaggcaaatatatactagatccaaatcaagctccgagaaagcaagtaaaaccggtcgctcgacttcagaagattctcaagttcagattgttactcgacgaggatgttcaagtcgaaacaaattcccaaaataattcaattgtgtcaactagcaaactcaaaatttgtagttaaatgtaaatcc

SEQ ID NO: 20258 - DNA, 373 bp, Gossypium hirsutum
  Clone ID: LIB3146-025-Q1-K2-A8
ctcaactaaacttataacgctcgatcgtttaacgcatacccattcttaagctgagggaaagggttcggttcaaagtcataagcaacatcaatggctccttcaactctgacggctcttgcggaagataaaaccttgcaggcaagcttcgttcgtgatgaagatgagcgtcctaaggttgcttacaaccaattcagtaatgatttccctgtcatctatcttgctgggatcgatgatgttgatggcaagaggggtgagatatgcaacaagattgttgaggcttgtgaggattgaggtgtcttccaggttgtggaatatggtgtcgatactaaactcgtgttcgaaatgacccgtcttgcgagagagttttttgctt

SEQ ID NO: 20259 - DNA, 324 bp, Gossypium hirsutum
  Clone ID: LIB3146-025-Q1-K2-A9
gaaggaacaaggattacaacactaacttaaattgtaagcacattgcttagcccgtggtgaaattgtacactgaaacgacagatggttttgccattgagactaaagagagctcccttgtgtggaactaccgagatgctgatcctgatttcggattttgccaggctaaggaacttttatatcacctctaaagcgttcttgctaatgagccagttttggttaatagtggccagcacattgtataagttaaacctcagggtgtgaacaagggtctggttgcggaacatcttctgttgacaatgaaacaaaagggaatgctacccgatt

SEQ ID NO: 20260 - DNA, 413 bp, Gossypium hirsutum
  Clone ID: LIB3146-025-Q1-K2-B1
gattgggaaacttgtatctctgtgccggactttgattggaagcagattgctgagcccgtgatgaaattgtacactgaaacgacagatggttctgccattgagactaaagagagctcccttgtgtggaactaccgagatgctgatcctgatttcggattttgccaggctaaggaacttttagatcacctcgaaagcgttcttgctaatgagccagttttggttaagagtggccagcacattgtagaagttaaacctcagggtgtgaacaagggtctggttgcggaacatctcctggtgacaatgaaacaaaagggaatgctacccgattttgttctgtgtattggggatgacaggtctgatgaggacatgtttgaagtgataatgcgagcaacggctggcccctatctctcccc

SEQ ID NO: 20261 - DNA, 355 bp, Gossypium hirsutum
  Clone ID: LIB3146-025-Q1-K2-B10
cccacgcgtccggagaaaaaagccgagaaagccccagctgagaaaaaaaccaagagccgagaagaagctccctaaagaagcgggggacaagaagaagaagcgaagcaagaagagcatcgaaacctacaagatctacatcttcaaggtgctgaagcaagaaatgaataaaaatgaggaagaaatgaagaagaaaagaggaaatttcaatgaagctgaagcatgtacagaagatcatcaggtcagcaattcaaagcaaataagaaaaagtgaagaagttgaagatctagtagagaaaagagtggtggttgaagaagaagaagaagaagaagaaaacattgaggcattaaaagctgtc

SEQ ID NO: 20262 - DNA, 408 bp, Gossypium hirsutum
  Clone ID: LIB3146-025-Q1-K2-B11
gggggtgcagctggccttcgtgtagcaaaagacattgccgaaaacaatcccggaagtcggatcttactagctacttctgaaactaccattattggtttcaaacctccaagtgcagatagaccatatgatctggttggtgcagctctttttggcgatggtgctggagctatgatcattggctctgatccagttttgagcattgagagacctctctttgagcttcacactgcaatgcagaatttcttgcctgatactgagaagacgattgatgggaaacttacagaagaggggattagtttcaagcttgcaagggagcttcctcagataattgaagataacgttgaaagtttctgtgagaagttgatggcaaccgttggattgactgacaaggactacaacaagatgttt

SEQ ID NO: 20263 - DNA, 315 bp, Gossypium hirsutum
  Clone ID: LIB3146-025-Q1-K2-B12
catttctctaccgtaagacattttcctttctccttttctcttctaagcaaattttcttccacatcttcatctccgttcataacctcccctcaccatctccgtccgtcatctccgtcgaccgtcggccttacttctattttgaagaaactgtcatctctgtcatcaacagcctgcacttttgtatattttaccgactgttattggattcttggctgctcactgtgtatggaatggagatgtcaaaaccgctatttggagttttgacgaagttgaaagactgcggttaacgtcctgaaagatggggtaggtgaatga

SEQ ID NO: 20264 - DNA, 411 bp, Gossypium hirsutum
  Clone ID: LIB3146-025-Q1-K2-B2
aatagatgtatattgggacctttcttcggctaaattcggatccgggcctgaacctttcgaggggttttatgttggtgttgttgctaataagcaaatggttttgcttcttggggacatgagtaaagaagcttgtaagaaaactggtgcaactcatatcccttgtaatgccagtttagtggctaagaaagagcatgtttttgggaagagggtatttggtaccaaggcgcagttttgtgataatggtcgaattcatgatctgataattgaatgtgacgcggttggtatgaaagatccttgccttataattcgtgtggatggaaaggctttgatgcaagtgaagcggctgcggtggaagttcagagggaaccataccattttggtcgatggaatggctgtagaagtttactggga

SEQ ID NO: 20265 - DNA, 254 bp, Gossypium hirsutum
  Clone ID: LIB3146-025-Q1-K2-B3
ccgacgcgtgcgcaggcacgtgtgcggccgcatggacatcgagtatatgttctacatcaattgggaaacgtcgagggcataggctagagcccacaacgcgttcgctgatggccacaagcatacttctctatggagggggttgctcacatacccaatggatatgactcctagaggcccttgcatcctagattgacaaaacctatgttcgtccagctgccgaagaagctgaagtgaattctttgcacataaaggat

SEQ ID NO: 20266 - DNA, 349 bp, Gossypium hirsutum
  Clone ID: LIB3146-025-Q1-K2-B4
cccacgcgtccgaaaccccttgtcttccaggttggtcaccttggagaagcttaccaggaatgggttcatacgcctattgtgacagatgaaagtcctcgctttttcaagagtgatttcatggagatcctgactcggacagtgtggtgggtagtaccattgatatgggtgccgggtgcaatgtggttcatctcactctcttacacaatgggtcatacacttccccaagttgatttaatgtctgctgatggaagtttcatttggacattcttggaatactgtttccaccgcttccttttccacattgaaacagagagttactgagcaaacactgtacactatctaattcatg

SEQ ID NO: 20267 - DNA, 407 bp, Gossypium hirsutum
  Clone ID: LIB3146-025-Q1-K2-B5
atttcagcaggggaagaagatgatgaagaatatcctttgatggaatcattatatccagcagaagaaaacgaagaatatccattgatggaatcattacatccagcagaagaaaacgaagatgaagaagaatattcaccactaagatcgtcatttttggtggaagataaccgaattgatgatgatgaagaagaagaagaagatgatgatgatgatggagagtattcaacaaaggaatcatcattttcaacagaagaagaaaaagactcattgttgcaatcaccactttcaacagaagatgagaagggtgaaaatgttgcagggatggaagaagaaagctcagaaggagcatggagctcttccacagaacctaacacggaggtaatttggccagcaaagatgatgggggt

SEQ ID NO: 20268 - DNA, 407 bp, Gossypium hirsutum
  Clone ID: LIB3146-025-Q1-K2-B6
aagatgggagattcagcacagacgccatcgacgccgttggttggcgacggaagctttgtatggtgaacgtggctaaacaagggattctttacgacgccgctaatgacatatgggaacagatgccggaggggatggtgggtggttggagaggacccgttgccgccatggatgaggaagttctatatgccgttgacgaaggtaagggattactcacgaggtataaccaagacagcgataattgggaggtgataatggaggtagagagtcttaaaggggcatgccaaatggccgccgctggaggaagattatgcgttatttgtggcgatggggagattctagtcatcgatgtggtggcggcgccacccaaattctgggcagtccaaaggccggcggagttggaaccgttg

SEQ ID NO: 20269 - DNA, 410 bp, Gossypium hirsutum
  Clone ID: LIB3146-025-Q1-K2-B7
ctctttttgttttcattttccttttgtcctttttctctttcctaggttttcggttttctcagccaaaggctttcgtttagcttcatcaatggcacaggaggaggttcagaacggaggaccggagaaagtagcggaggtgagcttcacggcgctgaaaccgcagctcatggtcgaagcacccaaggcagctgatgcggtgcagttctacaagaccgcgtttggcgctgttgaggctggccgtaccgtgtaccctaagcgcaaggctgagcaggagcagcctcacgtcctctccgctcaacttgagcttgctggctctaccattctcgtttctgacatcgctgataactctactccggtgaaaaccgaggggactggatgtgtgctctgcctggagactgaggacgtcgaag

SEQ ID NO: 20270 - DNA, 407 bp, Gossypium hirsutum
  Clone ID: LIB3146-025-Q1-K2-B8
cccacgcgtccgcaagtttcataaaattcctcgtccatggacatgtgctaaattaaaggcttcagcattttatcttccttttctaccttgttttaagattctttgttgcacttaacggcatgaaaccttgcattagtaattgtcattgttcatgggttagaaagacaagtgccaaaataggctttgagaagttttaaactatgatacaaatatgattaggtttatatgcatataaatagcattcagataggcttcagaagaacaaatagcaaaaagtcttaacaaggttgcaatgtctctgctgattgttctgtggtggattatatgataggaagttgacgacagttgcatatgtttaatatttgaatactccttttttcatcgaagatgttagtatcttgatttct

SEQ ID NO: 20271 - DNA, 411 bp, Gossypium hirsutum
  Clone ID: LIB3146-025-Q1-K2-B9
gctattcagccggctatttgcaaaaaaggagatgcgtatactgatggttgggcttgatgctgctggtaaaaccaccattctttacaagctgaagttgggagagattgtcactaccattcccaccatcggtttcaatgttgagaccgttgaatacaagaacatcagcttcactgtttgggatgttggtggccaggacaagatccgaccattgtggagacactatttccaaaacatgcaaggacttattttcgtggttgatagcaatgatcgtgaccgtgtggttgaagctagagatgagttgcacaggatgttgaatgaagatgagttgagggatgctgtgcttctagtatttgcaaacaagcaagatcttccaaatgctatgaatgctgctgagattaccgacaagcttgg

SEQ ID NO: 20272 - DNA, 329 bp, Gossypium hirsutum
  Clone ID: LIB3146-025-Q1-K2-C1
gttttcttctaccttctgcttgtttcagtgagctgtgatgttatccatgattcttgtgacaaagctgcaaagggtgatcccaatatcaagtttgacttttgtgtatcaagttttgaagggaaccccaaagctaaaacggctaccggggttgcagatttggttaaagtagccatagaaacagccatggctaatgcgacgagcactggtttgataatatctaagcttttggataacaaaacccttgatacatatgcaaggaattgcttagaagattgctctgagctttattcaggtgcagggtctagtatacaaagtggtgggaaagcttt

SEQ ID NO: 20273 - DNA, 388 bp, Gossypium hirsutum
  Clone ID: LIB3146-025-Q1-K2-C10
aaacctggaagaatgcttcaagatctatgaatccgttattcatggatccaaacaatccctcatggggatggagttggttggaacgatggatggcagcacaaccacaggagggtcgtggtacaacagaaaaggaacagaacgaccagtcattcataaggagtgcacgcagcaactttggaggagaaatcagcaaagcttatgctcgctaccaactcaatttggataagcaatccccaaaagctggccaaaagccaaaccaaacatcaagtctcctatccgtttcaactcctaagacatcagctttaatacctgcccgaaagctgaagtcagcaagccctataagcagtgtggtcggtccacatgatgacggaagaagcatggtgagcat

SEQ ID NO: 20274 - DNA, 410 bp, Gossypium hirsutum
  unsure (1)..(410): unsure at all n locations; Clone ID: LIB3146-025-Q1-K2-C11
gcataacagagggagtaaacaacttgaacatcatggattcatcaccttcaaacaacaccaccaggaagaaccgttttcaagtctccaatactaaaaaacccctctttttctacgttaatcttgctaagagatatatgcagcaatacaatgaagtggaactctctgctcttggaatggctattgctacggtagctaccattgccgagatattgaagaacaacggactggctgttgagaaaaaaattatgacttctaccattgatatgcgagaggaatcgggggggccgacctgttcaaaaagcaaaaattgaaatacttctggcaaaatcggagaaattcgatgagttgatggcagctgctgcggccgaggatgctnttggaaacgaggagcaaagctaagattgttactt

SEQ ID NO: 20275 - DNA, 388 bp, Gossypium hirsutum
  unsure (1)..(388): unsure at all n locations; Clone ID: LIB3146-025-Q1-K2-C2
cccacgcgtccgcccacgcgtccggttaaaagtgcttaaatgtgataagtctgtaatcccatctatatatgacttccgtagcgtctatttttttcacgcttacttgacgttggatgaggctgagaacttaagtgaattagaagaagtcgaggaagttggctttccaatgtcagaggttcctaggaaagcaaaacgaaccaggtctcgaacttccaatggtctactaaaagcaaagaaacaaaagactagtatgggcagcattctctcgcagcggagacaaaacaaagagaaatggaggtataatgaagattttgagccagagccagagtctgacattaagggtttagaggaagatgactngtcagaggatgatttgctcgatgattat

SEQ ID NO: 20276 - DNA, 254 bp, Gossypium hirsutum
  Clone ID: LIB3146-025-Q1-K2-C3
gttctcaatcatcaccaccccaaaccctatgttcacccacttggctggaagcattggggcatggaaggcgatatcacctgaagttcttcaagcagcattcaaggttcctgctgagacagagaagcttttccgctccaagaggaccaatgatgccatcttcttcccaccaccaaaatgaaggccatccgtttagctgtcttctgccagtttttagtgttttgttttttttccaaataaaatgggttttagtgact

SEQ ID NO: 20277 - DNA, 408 bp, Gossypium hirsutum
  Clone ID: LIB3146-025-Q1-K2-C5
cccacgcgtccggtttcttttttctaaaagaaaagcagtgtctctggttttttttaacccattatttggccgccatttaaccgtgcgccaaggccccgattgtgacggagatggcaccggctcgacgacttcggcgattaggtgagtttcccctttcccttttatattttaagagaaaaataactaaaaaataaaggaaaaaaataaaaacaaaaccgataactaagaatgacgaacaccaaataaataaatggaaaaaaaacctttttgtattcaaaaatctctttatatctccccccttttacactgaaaatattggccttttatagccgaaaatggaaaagaaaactaaatccaaacaaatctattcggttgtttgttggctcgatttttgctcttctctttcgc

SEQ ID NO: 20278 - DNA, 404 bp, Gossypium hirsutum
  Clone ID: LIB3146-025-Q1-K2-C6
cccacgcgtccgcccacgcgtccggagccagcaacctgtgaaccttaaaggtgaagttgtgagcaaccatgatgagcttatgtccaactttttcgcacagccggatgccctagcatatggaaagacagcagagcagttgctgaaggagaatgtttcgcagcatcttattcctcataagacgttctctgggaatcggccttctctcagtcttttgctaccatctcttaacgcttacaatattgggcagctcttggcaagctatgaacatagagttgctgttgaaggttttgtttggggcatcaattcttttgaccagtggggagttgagttgggtaagtcactagctactcaagtccgaaaacagcttaatggatcacgtacaaaaagtgaacctgttgaaggct

SEQ ID NO: 20279 - DNA, 410 bp, Gossypium hirsutum
  unsure (1)..(410): unsure at all n locations; Clone ID: LIB3146-025-Q1-K2-C7
gcagatcaatggcgaaggagttggaaggattcaatttcgagcaaaggcatggaaaggcgagggtgagagtgggtagagtttggaggagcaaagatggatgccgccacttcatggtcgaatggaatgttaacatcagcttgctttccaattgcgttgccgcttatgtccgcgatgacaactctgacatcgtcgctactgacaccatgaaaaactctgtttatgtcaaagcaaaggaatgttcagaacaactttcggcagaggaatttgctattctacttggcaagcacttcacatcattntatccacaggtttttactgcaatagtaaagatagtggaaaagccatgggaacgcatttctgtcaatggccaaccacatgaacatggctttaaactgggatctgaaaagcat

SEQ ID NO: 20280 - DNA, 286 bp, Gossypium hirsutum
  unsure (1)..(286): unsure at all n locations; Clone ID: LIB3146-025-Q1-K2-C8
cccacgcgtccggctcttcgcactgtgaattcgcccgacgcctctacactccaaacccgaaaatcatcatgaggtttttctgccaatgggatgccaataatcttctcagctacatcctctggaaaggtagaaattatcaactcttttttccatgttctgttactttgattaattaaatcggcaactttaaaatcattcaaatttgtatttaaagctganaaaaaaaaaaaaaaataaaaaataagagactaaaaaaaaaaaaaaaaaanggcgggcggtcctatat

SEQ ID NO: 20281 - DNA, 409 bp, Gossypium hirsutum
  Clone ID: LIB3146-025-Q1-K2-C9
cccacgcgtccgccctactaaatcttgcaaagctaggggttctgaccttcgtgttcattttaagaatacacgagaaactgcctttgcaatccgaaagctacctttgacaaaggcaaaaaggtacttggaagatgttattgcccacaagcaagcaattccattcaggcgcttctgtggtggagttgggcgaaccgcacaggctaagaatcgccattctaatggacaaggccgttggcccatgaaatctgcaaaattcattctcgatttgctcaagaatgccgagagcaatgctgaggtgaaaggcttggatgtagattcacttatcatatctcacatccaagtaaaccaagcacagaagcaaaggcgccgaacatatcgtgcacatggaagaattaacccctacatgtct

SEQ ID NO: 20282 - DNA, 124 bp, Gossypium hirsutum
  Clone ID: LIB3146-025-Q1-K2-D10
cccacgcgtccgcccacgcgttcggtcagatgctgatcaaccagtacaacattatagagacttaactctcagttttttggatccaattataatattttttgttcagaaaacaactggaaaggta

SEQ ID NO: 20283 - DNA, 409 bp, Gossypium hirsutum
  Clone ID: LIB3146-025-Q1-K2-D11
ctaagagtcacagtgaagctgaaaggagaagaagagaacgaatcaacaaccatctcgcaaagctacgcagcttactcccaagcaccaccaaaacggacaatgcttcactgcttgcggaagtgatccaacacgtgaaagagcttaaacggcaaacgtgtttgatagcagaaacaagtccggtaccgaccgaaaccgatgaactaacggtggatacatcggaccaagatggtaagttcgtgataaaagcttcgctttgctgtgaagataggtccgatcttttgcctgacctaatcaaagcattgaaagatttacgtctcaaaacactgaaagctgagatcacgacgctgggcgggcgtgtcaagaatgtactcttcattaccggagaggaacaagaatcgagctgtagcag

SEQ ID NO: 20284 - DNA, 75 bp, Gossypium hirsutum
  Clone ID: LIB3146-025-Q1-K2-D2
cccacgcgtccgaaaaaaaaaaaaaaaaaaaaaaaaaaaaaaaaaaaaaaaaaaaaaaaaaaaaaaaaaaggcga

SEQ ID NO: 20285 - DNA, 403 bp, Gossypium hirsutum
  Clone ID: LIB3146-025-Q1-K2-D3
gaggaaactacaagtgctcctgtgaccctacatgaggaaactctggctattccgacaactttggctgagaacagtccaactatgaccgcaaaattggatgaggaaactccaaccagtcccacaaacttagctgaggaaactttgacttctcccacaacctcaggtgttgaagcttcaacagttctcgaaactaacagtgaggaaacatcagctgtttctacaactacagaaatggaaactttaccccctgcgggtgctgaaagtgtagaacctgcaacttaattgctttactgtattacttggaaatttcagaattgttgtaggggagaatacgtccagtggttctgatatcggtgtggggtttggtagggatgattcgagttgccatagaagaaagcaagca

SEQ ID NO: 20286 - DNA, 404 bp, Gossypium hirsutum
  Clone ID: LIB3146-025-Q1-K2-D4
gccattagggaacacttgccagaaaaaggaaagggagtacaaggaagcccttgatgcatttaatgaaaagaacaaggaaaaagtacaactaatcacaaagttaatggagctggtgagtgaaagggaaaagttaaggatgaagaagctggaggagctgagtaagaacatagattccatacactgatcatataaggaaagagaagcccctttagctttggttttaactgattaggcttgtgtgtgatgtatttaaggtgactttgaatatttatatatgggtgtgttgtaatggtaatctttgtttgtttttggttagcattcgatgaatgttcaactgatttagaaaaagggaaataccctataaaaacaaaacaggtttgtaactaaaatgcatctcttacatt

SEQ ID NO: 20287 - DNA, 336 bp, Gossypium hirsutum
  Clone ID: LIB3146-025-Q1-K2-D5
cccacgcgtccgggaaaatgacggaagcgggagacccattcgttgaatccgaggtaattggaagtgatcatttgatggagccaagttttcacaagtacgtgacagttaggagaggtggtggtggggcagatatggaggaacaagaatcatcagggagcaatagtatagcgggcagtgggcagcagcattggggattttcatcctcctcgtgggaacccaattcagcagattcaacggatcgatggagtttaaggacaaaaagcagacaagaggattacaacagtcccctgggactccataggcatgcctttgctgaagcaggtagtggcatgaaaa

SEQ ID NO: 20288 - DNA, 355 bp, Gossypium hirsutum
  Clone ID: LIB3146-025-Q1-K2-D6
cccacgcgtccgcccacgcgtccgggacaaccaatctcaactacagctgctgggaatactaatgttgttgttcctatgacgaaagcaagtggtgatgatgatagtggaaaagaaggagaaggaaaaactgggtatagttcaaagaaggtgaaagaggtggtggagtgtaggatatgtcaagaggaagatgatttgctttctttggaagctccttgtgcttgcagtggcacttctaaggttggttaaaaggaggggcttccaaaaatgtgccacaaggaaggggaccttacctggcaaaatatgcaaccaggtttttcaacaaattaatttttttcttccaacaaaaaccattcaa

SEQ ID NO: 20289 - DNA, 406 bp, Gossypium hirsutum
  Clone ID: LIB3146-025-Q1-K2-D7
cggacgcgtgggcggacgcgtgggcagccatgcaagtgctaatttcccatttgttgaagggaacccattcacagctaccttatgggtcggtttagaggggttccatatgactgtaaatggaaggcatgaaacatcatttgcatacagggagaaacttgaaccatggtcagttagtggagtcaaagttgtaggtggtttggatctcttatctgcgtttgccaaaggcttgcctgttcctgaagatcatgatttaattgtcaattccaagatacttaaagctcctgtgattactaggaaaagacttgtaatgttagttggggtcttctccactggaaataatttcgagcgtcgtatggcattgagaagatcttggatgcaatttgaggctgtacgctccggggatgta

SEQ ID NO: 20290 - DNA, 408 bp, Gossypium hirsutum
  Clone ID: LIB3146-025-Q1-K2-D8
cccacgcgtccgggagaaattaacaaagcaaaccttgcttgagcaaacgatgagtgagcagctaaaggagaggcaggaacaggagaagagactacaaaaggttgcgaaaacaatgaaccatatggaaagagctaagagagaggaagcagcacctttgattgaagcagcttttcaacgacgactgctagaagagaaggtgcttcatgaacgtgaacaacagatgttctatcttcatctgcatttccatatcttgaagggaagagcagcgtttatatgtcgcagtctttcttcatgagagctggaagttgagttgagtaggcagcatcatgatggggacttgaaagagaagaataggttggcacgcatgttagaaaattattcaggcctggaagcaggaaagggatatca

SEQ ID NO: 20291 - DNA, 407 bp, Gossypium hirsutum
  Clone ID: LIB3146-025-Q1-K2-D9
cccacgcgtccggctttgatggaggtaaagagtgttgggttatgggtatttggggttgttttggctaccttgtctggagagaccaaaccatacttggagatcaaacaagtgattgtcaggttcaattctgctttgttaattgatgtagattcatgtgtttttaaggttatggtggagaaaggtgagacattaaaagaggttaaggagctgaacagtgcagcaaattccctagtatcagcaatcctttctggtaaaaccagtgttgcagccatggatttcggtggaaagttaggtgttttcgagaaggagatggatgctttagaaaagcaagtggatgccctgttttcgagtgtattggcagccagaaatgaactgcttaacggtgttcggcaacgcaagcaataaca

SEQ ID NO: 20292 - DNA, 410 bp, Gossypium hirsutum
  Clone ID: LIB3146-025-Q1-K2-E1
cccacgcgtccgcccacgcgtccgggaagaagaatgagaaaagtccagcagaaattgcattgctagttgagagtgtaatggcggagcttgaggtaactgctgaagaagatgcagagcttaatagacaagggaagccagcaattaataaactcaagaagttaccacttcttactgaagttctgtcaaagaagcaacttcaaccagaattcttagatcatggggttttaaccttgttgaaaaattggcttgaaccccttcctgatggaagcttaccaaatataaatatccgtgcagctgttttgcagattttaactgattttccaattgatttagagcagcatgatagaagggagcagctaaagaaaagtggtcttggaaaggtaaggaactttgtatttcaaagcatgttt

SEQ ID NO: 20293 - DNA, 398 bp, Gossypium hirsutum
  Clone ID: LIB3146-025-Q1-K2-E10
cggacgcgtgggcaacaccaaaattacattagggaattaattcataggccaccatgactcggtcggtcaactttctacccatgctcctcttgcttactttatcagccctgactgtccaagaaatttcagctgcaccttcctgcactgaagttgccatagaattactcccatgcctcagcttcctgtctggcaacggtgctgcagatgttccatcgcgggcatgttgtttgggtgctcaaactattgcttacgaagcacagaccaaagatgaccgacgggctatctgcgagtgccttgttaatgcattagcaaatattggcacatctgactccttcactgcgcggatacctttaattgctacccaatgcggtgttgatgtttctcttccgccaattacc

SEQ ID NO: 20294 - DNA, 346 bp, Gossypium hirsutum
  Clone ID: LIB3146-025-Q1-K2-E11
agtgcaggtcaggatgaattaaagagggcttataagaaagctgcacttaagaatcatccggataaaggtggagaccccgagaagtttaaggaactggctcatgcttatgaagtacttagtgccccatagaagagagaattttttgttcattatggtgaagatgctcttaaaaagggaatggaaggaggcggttcttctaacaacccatttgacatatttgagtcatttttcggtgggggagccttcggaggcggtggtagctcgagaggaagaaggcagaagcgaggtgaagatgtagtgcatgctcttaaagtttctctggaagatttgtacaatgggacgacaa

SEQ ID NO: 20295 - DNA, 382 bp, Gossypium hirsutum
  Clone ID: LIB3146-025-Q1-K2-E2
gatcgcgagcgcccacgcgtccgctcctgatatttctggtaccaccattgatgcgcacttgcgatacgctgccggagtcaagggatttgcttgaaggtacttcaaaggtgacgacttttctgaacagaactacattgccaaagcaggggagctcgctcctcaataccgatgatttggtggtttcttcgtccatgaaagagagtccaaatgtgttcggttggtagtaaaacgtacctactatggaaataatgtgatgtttaataggtggcaaataatgtgccatctatattgtgctttgaacttgatgttaccttgtaatgagttcagtttttgatggttcatctttttatgactggtggttgtaatcccatgagggagggcc

SEQ ID NO: 20296 - DNA, 374 bp, Gossypium hirsutum
  Clone ID: LIB3146-025-Q1-K2-E3
aacaaattgagaaagagaaagctcaaggcatacacctatctgtcctcagcattctcacgatgcccagcacccacatccggaaccccatgctctcgccttcaggtccgccacatgctgatcatactactccaggccatgctccttcttctggaccaggcccccatgcgccaccgccaggaccaggtggtccaggtcatcattccgagccacacaagcgctcgccatgatccttataccgtgtatccaatattatgtacgcttaggctccgtacccgacttgtataactctatcacctacttggtgttaggctttatgtaataaattatgaaaacctatttctactagaataataataaagtagcacgtttgatgt

SEQ ID NO: 20297 - DNA, 357 bp, Gossypium hirsutum
  unsure (1)..(357): unsure at all n locations; Clone ID: LIB3146-025-Q1-K2-E4
aattggcgggtacgacaccacgcgtccgattgctgctgatgcttcagtcttcagttttggcgacgacgaagattatgacagtgagtgagctaggtttgtctaaacatcaaaacgagaaattcccattgatttttttttgaaaaaaaaacacacacgataaaatgcaattgaacaatttattgtacgaatttgttgcactaatgagaggttgagggtgatagcttgacctctcgttagctgccatttgttctttgctttatattgaattctcttatttattattnaaaaaaaaaaaaaaaataaaaaaaaataaaaaaactatttaaaatttttttaaatatattaaaattaatttat

SEQ ID NO: 20298 - DNA, 359 bp, Gossypium hirsutum
  Clone ID: LIB3146-025-Q1-K2-E5
cccacgcgtccgcacagctgttgatgctgagtggagtaagaccggttgctcatcttagatctcacaatatcccagtggtgttagaccaacccttggttggccaaggcatgtgtgataaccccatgaacgccgtttttgtcccgtctcctattccggttgaggtttcacttatcgaagtctttggtatcacacattttgggagctacattgaagctgcaagtggtgaaacctttagtgcttctgttactactacttcaagaaactatggcatgttctcacctaagattggtcagctatctacggtgccacctaaacaaaggaccccagaagccattgccagagctgttgaatacttggat

SEQ ID NO: 20299 - DNA, 399 bp, Gossypium hirsutum
  Clone ID: LIB3146-025-Q1-K2-E6
tcaacatacaggcacgctcatgattgaacgctacagaaagtgaaagcaaggcggagctggaccgggtctgtgatactcttatctccattagggaagaaattgctgaaatcgagaatggaaaggctgatatccacaacaatgttcttaagggagctcctcatccaccatctttgctcatggccgatgcatggacaaagccgtattctcgggaatacgctgccttccctgcttcctggcttcgaactgctaagttctggcctactacaggacgtgttgacaacgtatatggtgatcgcaatgtcatctgcacccttcttccagtatcgcagatggttgaagaggctgctgcagccaacgcgtaggcctaagcctcatctatgttgcgattgaagccaacgt

SEQ ID NO: 20300 - DNA, 400 bp, Gossypium hirsutum
  Clone ID: LIB3146-025-Q1-K2-E8
tgaaatttgaaaggaagagaaaaagcgcatggcatagacctatctgactatgggtcatccaaggtcgtgggaactcaagctccagaacagctgggctcacttcgagcagccgatggcgcagaatgaagaagtaaaggtcttgttgttgctttaaagccaagttttattggcagatggggggaatgcataaaccagtttcaggtttagtatttaaaactggcattgtagagggtgtactgttggttaaaggggattgtattccaagttagctttccatgatatgcaaggcttaaataaatgccattggtgttccgctttatgtaataaattatgaaaaacctatttctactagaataataataaaagtagcacgtttgatgtaaaaaaaaaaaacaagggc

SEQ ID NO: 20301 - DNA, 241 bp, Gossypium hirsutum
  Clone ID: LIB3146-025-Q1-K2-E9
gttgaagtagtaatatctatagcatacagatatggataggcaaagaagcaagcacgtttgtttggtgatgtgggttttggttgcttcttttttcactcacaatagggtcattgcaattatctttactggcctttgttggcataaaaactaatatttcagttttttgacccttatgctggaactttcctttagtgttacatttcacttctaccattctttatgaagttgtttatcttgcttt

SEQ ID NO: 20302 - DNA, 287 bp, Gossypium hirsutum
  Clone ID: LIB3146-025-Q1-K2-F1
tattttcttactattttcatttaaatttttttttttacttgcatttccatataacacccggcaattatgatgatcttgaataaacctctcttaatatcatagctctttattttctttatttgctgtaatctaactaatcaacttcaccatggggactagaagctcgtgtgccctttttagataaagagttcatcaacattgcaatgagtatagatcctgattggaaaatgataaggcctgatcttgggatgatagattaagtgtatcttacttaatgcatttgacta

SEQ ID NO: 20303 - DNA, 81 bp, Gossypium hirsutum
  Clone ID: LIB3146-025-Q1-K2-F10
gaaaaagcttgagcgaacaagaaaatggccgatcagcttaccgacgatcagatctctgaattcaaagaggcctttagcctg

SEQ ID NO: 20304 - DNA, 329 bp, Gossypium hirsutum
  Clone ID: LIB3146-025-Q1-K2-F11
tgttaagaaaaagaagatcaagagagagataaaaatccttcagaatttgtgtggtggaccgaatattgttaagcttcttgatgttgtaagagatcatcactccaaaactcctagcttgattttcgagcacgtcaacagtacagatttcaaagttctttaccctactttgacagactatgatatccgctactacatatatgaactcctcaaggcattagattactgtcattcacaaagaataatgcacagagatgtcaagcctcacaatgtcatgatagatcatgagctgcgcaaacttcgcttgatagatatgggacttgcttaatttt

SEQ ID NO: 20305 - DNA, 159 bp, Gossypium hirsutum
  Clone ID: LIB3146-025-Q1-K2-F12
gccacgcgtccggcagcattaagagaattattcaaagcaaaacaaggaaactatcctactgctgaggaacacatgccctatgccctattttcgtttaaagaccgccaaggaaattctgaaactgaaaagctgattgatcggatgtgtatgctggctttt

SEQ ID NO: 20306 - DNA, 351 bp, Gossypium hirsutum
  Clone ID: LIB3146-025-Q1-K2-F2
ccacgcgtccgggtttgaacagtttaagttactcttattttcatgcagagcatgtaggcaccaaatctgcagttcaaattcgaagccatgctcaaaagtttttctctaaggctcattgctttgagttcattacaagatttccttgattaaatacatgtattatatcttttattaccaagatttacttgattaagaaaatgcattgtatgttttattaccttgcatatgtattatttaatttagttttggatctaaatttttaattttacttaaaaagtctaacttttggaattttaatggggtaataaattaatattttaaaatcttaaattaaattcaattatttttatt

SEQ ID NO: 20307 - DNA, 157 bp, Gossypium hirsutum
  Clone ID: LIB3146-025-Q1-K2-F3
accgacccgagaacctgagccttcggagccggagattacagggatagagatgattctgatgatgacgtgtctgctggagatgatgtggaggacggatatcatcacgtggtgcctgagtccacagtagcaaatacacctccgccggcacctagtactt

SEQ ID NO: 20308 - DNA, 376 bp, Gossypium hirsutum
  Clone ID: LIB3146-025-Q1-K2-F4
cgccaatgttaccaggattggacatgcgggggctattgttagattgcaaggctcctcctccttgacctcaatgtacactcgcaagggcaagaaggggatcaaccaggacgctatgaccgtttgggagaactttacgggggaaaagaatgtgttcttctgcggtgtatttgaccgtcacggtccatcgggtcacaaggttgcacccacgtatgcgatgccttgccattgaagctttcgacaatgcattagcctcggcccagcgctaagaaggagggcgacaaggacagcagtcacaagcattgggaggcaagtttgattagaactttccaagaattggatgaagatcttagcatggaaaattcccttgatagttact

SEQ ID NO: 20309 - DNA, 115 bp, Gossypium hirsutum
  Clone ID: LIB3146-025-Q1-K2-F6
ccgccgtaccggactcgcgtttcggcccggcgtaccgaatgtagttccaggaaatcctccagatcaagagttgaattttttatggaagttgtaattgccataattttctgtagaa

SEQ ID NO: 20310 - DNA, 276 bp, Gossypium hirsutum
  Clone ID: LIB3146-025-Q1-K2-F7
cggacgcgtgggcggacgcgtgggcttcaatactctgtaatagtttataggcaccttcgcactgtgaattcgcccgacgcctctgcactccagacccgaaaatcatcatgaggttcttctgccaatgggatgccaataatcttctcagctacatcctccggaaaggtagaaattatcaactctttcttccatgtgtctgtactttgattaattaaatccgcaactttaaaatcattcaaatttgtatttaaagctggatacctgctctttttcaca

SEQ ID NO: 20311 - DNA, 418 bp, Gossypium hirsutum
  unsure (1)..(418): unsure at all n locations; Clone ID: LIB3146-025-Q1-K2-F8
ccggaccggaaggcccgacccaaccgacccgagaacctgagccttttgagccgcagtttacaggaatagaattcggtattatcctatgttttttcttcattgagttattgcctggaatatctttgcagtttaattcatttgttataatcttgtcttccacctcattaattttcactagataacctttaaagggttttcttttaggaattaaaaccattcaatggnttctagccggcacccaacctggattccaagttggccccgtcctttttggaaaaaccatctataggggccttacaaaatggcaatttcaaggttaccagggttttattttgcctttccttaagtgaaaggtattaactttaacaagcacctaccgggcttttaagggaggaaatggatttatttcttatttctt

SEQ ID NO: 20312 - DNA, 166 bp, Gossypium hirsutum
  Clone ID: LIB3146-025-Q1-K2-F9
acacgagacggcacgcgtacgcccacgcgtacgaagctatcttgtcgaagcgaaaaaaaagagaaaaaatgagaagaagcgcaagcaaagagataattacgagcggaattcgaggcagaagaaaggttttttttttcaaaaaaaaaaattgctttttttctctttt

SEQ ID NO: 20313 - DNA, 273 bp, Gossypium hirsutum
  Clone ID: LIB3146-025-Q1-K2-G1
cgtcacacgtgattgaagtcgtatcttagagcgtatcaaattatattgttggatggattattagtggatatgatgtgggattcgcatgattgggtgtttaagcaaacagatgggagagctgagttcatgtttaggacatggagtgggtttgatagcaggctttggttagaagaaaaaagtgggtgtttggaacatagtgacaaaggaagaggtcatgagttttctttgttgatctgtgcttgtaagaatcctcgttaatttcttttttttttt

SEQ ID NO: 20314 - DNA, 170 bp, Gossypium hirsutum
  Clone ID: LIB3146-025-Q1-K2-G11
cggacgcgtgggtgggtccagtccttactgctaatatcaccatccacccaatctggtacggccggtggcagaaatcccagaagaaaatcatccgtgagttcatcaactcgatctccgccgttgattccaaacacccttcggtggctgggtggtggaagaccctacagttt

SEQ ID NO: 20315 - DNA, 203 bp, Gossypium hirsutum
  Clone ID: LIB3146-025-Q1-K2-G12
gcggaactcgatgggatcagggtacgggctttgttcaaatggtggtccataaccggaattcggtccaccggggataatttggtctttgaagttgggatggttacggctaaatatcctgctaagaactttgatgaaagccctttttgtgaaggccgtcattcgtcttcttaaaaagctaaaaccaaagtgaaaaataaagggct

SEQ ID NO: 20316 - DNA, 317 bp, Gossypium hirsutum
  Clone ID: LIB3146-025-Q1-K2-G3
ggcgggattacccgctgagtttaagcatatcaataagcggaggaaaagaaacttaccaggattcccctagtaacggcgagcaaaccagattttagcccatgaacttattcggagtggaacctctcttattcagccatagtcaaattttatcatttatcatttagctaaggttgaaagaaaaaagataatattttatcatgcatgtcctttatattttattgcaattaataaaaacaatgcaattttcttaaaaacaaaaaggacaatttgacatttggttaaaaaaggaattcaatattaaggaaaatagttggaaa

SEQ ID NO: 20317 - DNA, 244 bp, Gossypium hirsutum
  Clone ID: LIB3146-025-Q1-K2-G6
gctgatttgggtaatcactcaactgggtatagtcgtagactggatgtccctatgcagcctataaaatcattgtctgggattcttaatagtgaagtaactgcccatagggacttcgatttgaataatggccctgctgttgatgaggataatgctgagtaaactcggaaatagaatttggggcatgttttgccctgttatctttggtttggatgctataatttacttaaaaaacctgaatcttggc

SEQ ID NO: 20318 - DNA, 407 bp, Gossypium hirsutum
  Clone ID: LIB3146-025-Q1-K2-G7
cccacgcgttcggaaaggttccaggctaagcagcaggatgctagtgataattggaacgatgcactgcaaaatgctaaagcacatccatttgacgatcacactaccaaatccagaaaacggaaatctagagatgaccaaggggcaacgaaccattcagagttgaaaaaggctgaaatggaaaacgtggttgccaccgaagaaggccaagctagtaaaaagccaaagcttaacccaaccggtgaaaagagaaacccattttcgaaggaaatttttgaaggctccaatcagaagttgaaaggatcaaggcataaccccaaggatcgtaaaggtggcgcaaaacctgctattggtagttccgataaggttgaaacaaatgttaatgagaccagcaaattaaagttgaaaga

SEQ ID NO: 20319 - DNA, 399 bp, Gossypium hirsutum
  Clone ID: LIB3146-025-Q1-K2-G8
cccacgcgtccgcccacgcgtccgtttgtctatattagtaaggagctgaaaccaaggacgtatagaatcaaggctggtaacacagttaatattgctggattaatgagggtggaacattgacaagtcatttgtggaatcactatatgttacggtttgggcatccccttatctaccattacacatggggaaaactgaaaatgcacaaagaatactagaggatcatattggtcatcagttacagccaccaattggagagcaacgagaaggacagcttggcagttgggtgagaaaggaattccatatttcgggtaatagctgggaatcgagttcagtggacattgctgctgctggtattggttggtttgctattggacttaaaggagaggcagttttaggggt

SEQ ID NO: 20320 - DNA, 262 bp, Gossypium hirsutum
  Clone ID: LIB3146-025-Q1-K2-G9
cccacgcgtccggcactctgttccagaacttcactcatgattacaattcggaggatgcttctggcttctttgtttcgttactttttggcctcggacctttgctgggtggcctcattcttgttgcatttgctgttgctttctgccttaaacatgcccttctcatgggtgctgcttctggcctttgccttcatccttggtgcctggcgaccattgcaactgcttgtattttctaaaatgggatttttcccacttgtgtcgctac

SEQ ID NO: 20321 - DNA, 412 bp, Gossypium hirsutum
  Clone ID: LIB3146-025-Q1-K2-H10
accttcacgaatctcgccatcttcatgcaatgaatcgaattcggggatccggcggacgttttcttagcaaaaagaaaccgcaatggtccgatccaacctccaattacatcttggatatcggttgcttcgaccaaaaggataataatggatcggaacttgagagccgttgctcacatacggcagaatacggtggttcatgtacgagctgctccaacatttcaagtatcaccaacaatggtggcgacatatctcgccgtgcggtcagttcgtgcaatggaatacaaaactgtgcttcgcttgtccggtgagaaaacgggcgacttcagaaaacgggcgacaagaagtcggcaactcatccttggcttatatatatatcaattatagtctttggttttcatgcatagtgtaaaat

SEQ ID NO: 20322 - DNA, 368 bp, Gossypium hirsutum
  Clone ID: LIB3146-025-Q1-K2-H2
tcgatctcctcgattatgattcactcgccgccgcaatcaatggctgtgctggtgttttccaccttgcttctccatgcagcgtcgatcgagttcacgatcctcagaaggagcttttggatcctgcgattaaaggaacgcttaatgtactgacagctgccaaagagcttggtgttaaacgtgtggtggttacgtcttcaatctcctccatgtggccctgcccaaactggccagctgataaaatcagaacagaggattgctggactgatattgagtattgcaagcaaaatgaattatggtatccaatttccaaaacactagctgagaaggctgcatgggaattttccaaggagaaaggtctggatgtggtg

SEQ ID NO: 20323 - DNA, 399 bp, Gossypium hirsutum
  Clone ID: LIB3146-025-Q1-K2-H3
ctcgcttcatagacccgatgttttaccgattaatgatctcgggattcggaaaggggttcagttactctacagtttggaggagttgccgaggccttcgcagatggatcaattgtgtgagaaatggaggccttataggtcagttgcttcgtggtatctctggaggtttgtggaggccaaaggagcaccttctagtgcagctgctgttgctgctggtgctagtcttcagccactgccgcaagaggagcatcaacatcagcagcagccccagcttctcgatcccattaatagcattctggaccttggggcctgtacttgggggcaatgattatcattggaacacaatgtatgtgatttgtcacaatgcattgatcaccttgaaggacaggcacttcaaatgcg

SEQ ID NO: 20324 - DNA, 115 bp, Gossypium hirsutum
  Clone ID: LIB3146-025-Q1-K2-H4
aatgcaatctcccaccactcacttgtgcttgaaacaaaagcaatggtgctgcctgcttaatgggttggaaaatataataaccgccatggaatatccatacctccctgtttttttc

SEQ ID NO: 20325 - DNA, 336 bp, Gossypium hirsutum
  Clone ID: LIB3146-025-Q1-K2-H7
ggaaactattgttccgacaaaaaaccggctgcggtaaattggattgaaggacgaggcaaatctgttgtctgtgaagccaccattaagggtgatgtggttaggaaagtcttgaaaacaagtgtggaatctctcgttgagcttaacatgctgaagaaccttactggatcagctatggctggagctctgggtggatttaacgctcacgccagtaacatcgttgctgcaatctacatagctaccggccaagatccggctcaaaacgtcgagagctcgcattgcatcacgatgatggaagctgttaatgatggcaaagaccttcacgtctctgtcacaatg

SEQ ID NO: 20326 - DNA, 337 bp, Gossypium hirsutum
  Clone ID: LIB3146-025-Q1-K2-H8
cttgccgaggaatttcacggttagatcatcggaagaaagtgacagttacgggagagtagcagcagagtttgaaggaaatgtggatgcagtctcgacagaggatcaaaactggtcaggtctggaaggtgtgacacgagtgaactcacttgtccagcttccaagattttccgaggaaagaccaaacccttaacttttgggtattgtctagaaacgaaactgaactggttttgctgtaatatccaaagaaaagaaagccctaatgaaatggtgcctattgtgttgtacatttctgctataattaaagaaatttctcaaccaaaacaaatatataacaatt

SEQ ID NO: 20327 - DNA, 394 bp, Gossypium hirsutum
  unsure (1)..(394): unsure at all n locations; Clone ID: LIB3146-025-Q1-K2-H9
cccacccgtccgccacgcgtccggtttcatgagagggggacctaatgggcctggtctttttggccttctaaatgggcgtttttggaaaaatcgtaattaatcattttcacggcaaccctgaaactcaaaaaaaatggtnccaggggtctttttagttggggcgctttcaatgtctctccctatcttaagttggtaattcttctgtttcaatcatctcgctgaggcacattccactgaagaacgagtttttctcaacactaacggagccaatttatctggactctggactcgctgtagcaaggggtgcttcgtgataagttaggaaactggattgcgggttttcatagattcctggtaaatgctcagtttttgatgcggaactttaggtattctc

SEQ ID NO: 20328 - DNA, 407 bp, Gossypium hirsutum; identical to SEQ ID NO: 20171
  Clone ID: LIB3146-026-Q1-K2-A1

SEQ ID NO: 20329 - DNA, 379 bp, Gossypium hirsutum
  Clone ID: LIB3146-026-Q1-K2-A10
agtgaaagcaggaaaaaattcgattaagagatagaaagatggcggtgatgcagaagctgaaaatattcgtggtgcaagagccagttgtcgcagcttcttgcctcatcgctggttttggtctctttctaccagctgttgtaaggcccattctagattccttagaatcatcgaagcaagtccctcagcctgctttaagagatgtggttgctggtgtgactggtaaaaagcagggctgatgtgatttatgagttgggaagaagcagacactcaaatgtagctagtaatcagcaacaaaataaacttgactttaaagttgaactcttgcgccttcaacttcatctttagcatgaggaatttgagtgttaaatttgtttgattt

SEQ ID NO: 20330 - DNA, 383 bp, Gossypium hirsutum
  Clone ID: LIB3146-026-Q1-K2-A11
cccacgcgtccgaagcctctcagcagccctttctttctcttcttctccttctccccttctccggtccctgagcaggccagcctgtaattcaaataagatgtatacatcaatgaagaagatccacaaggataaggatgttgaaccaactgaatttgaggagtcggttgcccaggcattcttcgatttggagaataccaaccaggacctgaaaagtgacctcaaagatctctacattaattcagcagtccaaattgatgtttccgggagccggaaagctgttgttatccatgttccctacagattaaggaaagcttttcgcaaggttcatgttaagcttgtgagggaacttgaaaagaagttcagtggcaaggatgtgattctca

SEQ ID NO: 20331 - DNA, 393 bp, Gossypium hirsutum; identical to SEQ ID NO: 20167
  Clone ID: LIB3146-026-Q1-K2-A12

SEQ ID NO: 20332 - DNA, 382 bp, Gossypium hirsutum
  unsure (1)..(382): unsure at all n locations; Clone ID: LIB3146-026-Q1-K2-A2
aatgagtcgaccacgcgtccgcccacgcgtccgagtgtttcgagtggattcaaagttgctgctcgattctaaagctgggaaactaggccctcatatcgaagatgtcatatacagcttgagctactcgttgaggcttctgcgttccggaaaagttgtagcttggtattctccaaagaggaaggaagggatgatagaattgcgccttttcgaattttaactcatcttctgtcatcctatcattggttttgttcagaatttctttttctaatcatatgattatcctagntagaggctgatgtgaaatctcgcagctgaatttacagcttcatttccctttttttgcccaattcccatgttttgtaggcctttatggagcttcata

SEQ ID NO: 20333 - DNA, 435 bp, Gossypium hirsutum
  Clone ID: LIB3146-026-Q1-K2-A3
accggactggaatacccggcccacacccacgcgtcttagcaacagtgataaggtcccaccagctgattttgcaaaggtagctcaagaatattctgaatgcccttcagggaagaaaggtggagatttaggatggtttccgcggggtaagatggctggtccgtttcaggaagttgcctttaacacagtcattggagctaccagtgcacctttcaaatctacacatggataccatatcatcctctgtgaagggaggaagaattgaagcgagccaagatacagtcaggcagtgaagatgagttttatgttctatattaatgcagacatgaagtatgttcagtttgaaatattatccaatgattattcttcggatttgcaactgggataatgcttcttcttgttgaaaaatggcctgtaagttgatcttggatgtttgat

SEQ ID NO: 20334 - DNA, 391 bp, Gossypium hirsutum
  unsure (1)..(391): unsure at all n locations; Clone ID: LIB3146-026-Q1-K2-A4
cccacgcgtccggttatttttttaaacaaagatccccgatctcctgcttagagttagtttctcatatttatggggctacttgaccagttgtgggacgacaccgttgcgggtcctcgacccgataatggtctcggcaagctccgaaagcactccactttcactttccgctctaactcctccaaggaaaccgatggcgggagtgtgagatcgtacaatgatgagacgccggaggaaacaacgaaagtgacacgtacgattatgatcgtaaaatcgccgcgttaccagagcggatcgcctccggtttcgccggccgaatcgactcctccggaggaagcagagagtcgtatcggtttcggagaaggtcaacatcagatgcatacganaaggggaa

SEQ ID NO: 20335 - DNA, 62 bp, Gossypium hirsutum
  Clone ID: LIB3146-026-Q1-K2-A5
taaaaaaaaaaaaaaataaaaataaaaaaaaaaaaaaaaaaatgggcggacgatataaaaga

SEQ ID NO: 20336 - DNA, 417 bp, Gossypium hirsutum
  unsure (1)..(417): unsure at all n locations; Clone ID: LIB3146-026-Q1-K2-A6
atcaagtngaacaatgcaattttagcggaggagaaannttctcttcttctttttttttttttttttttgttcnnngnncatgtatattgctggaggtgctactcaaaattcaatcaaagttgcacagtggatgctttaaattcctggtgcaactggttacattggctgcattgggaaggacaagtttggggaggaaatgaagaagaactcaaaagctgctggtgttaatgttcaatatcttgaggatgaaactgcaccaacaggaacctgtgctgtttgtgttgntggtggtgaaaggtcactcattgcaaatctatcagctgctaactgctacaagtctgagcatttgaagaagcctgagaatttggcgtttggttgaaaggccaattactttttattttgctggatttttcctta

SEQ ID NO: 20337 - DNA, 356 bp, Gossypium hirsutum
  Clone ID: LIB3146-026-Q1-K2-A7
gctcgacctacgcgtccgcatgagttgagttgggtctggtgttaaaattattgtgtcagaactgtcaatttggtaacttattattgttgttgtgttgtgagtgttgttttccaatgcaattggatttagtgaagtgtgtggggtccagcatgagaagagttccttctcctccttctcattttcggtgtttccattgtctaataaatatctgctatcttcttcactttcttattattgcagatacttctacttccaaaaaaaaaaaaacaaaaaaaaaaaaaaaaaaaaaaaacaaaaaaaaaaaaaaaaacaaacttcaaaataaaaaaacaaaaaaaaaaaaaacaaaaaaaaca

SEQ ID NO: 20338 - DNA, 382 bp, Gossypium hirsutum
  Clone ID: LIB3146-026-Q1-K2-A8
ggcgagagccgtggcaggggaagccggggtgccctttttctcatgcgcagcttcggagtttgtggagttgttcgttggagtaggcgcgtccagggtaagggatttgttcgaaaaggcaaaatccaaagcgccttgcattgtattcatagatgagatcgatgctgttgggagacagagaggagctgggcttggaggaggaaatgatgaaagagagcagacaatcaaccagttgctgactgagatggatggattttcggggaattccggtgtcattgttttggcagcaactaacaagcccgatgttcttgatgcggctttattgaggcccggtaggtttgaccgacaggttacagttgataggcctgatgttgctgggagagtg

SEQ ID NO: 20339 - DNA, 405 bp, Gossypium hirsutum
  Clone ID: LIB3146-026-Q1-K2-A9
tttggacttccagaaaaagattactttctctaaacatgagaagccagacttgggttccagttccttattgtgcaagggagaagtgtacaagcaacttcttgaaatggaaaaggaagatgatcttcttgatcagttgtggaagtctagaagcttggctctggagagggtaagaggaaatcggcagcatattatcctagtagcatcattgattgatcgcatacccaaccttgctggattggcacgtacctgtgaggtttttaaaacacaggggttagctgttgcagatgcaaaaatagtacaggacaaacagtttcaactcatcagtgtgacagcagagaaatgggttcctattatagaggtccctgtaaatagtgtgaaacaattcttggagaaaaagaagcggga

SEQ ID NO: 20340 - DNA, 366 bp, Gossypium hirsutum
  unsure (1)..(366): unsure at all n locations; Clone ID: LIB3146-026-Q1-K2-B1
tcgcccacgcgtncggttggtcttgccgccgctgaaggtgcaagggtttgtggggcttctcggatcatcgctgttgatgtgaaccccagaagatttgaagaagctaagaggtttgggattacagaatttgtgaatccaaaagactacgataagccagttcaagaggtgattgtggagatgaccggcggaggagtggatcgcaatgtggagtgtacagggagcgtgcaagccatgatttccgcttttgaatgcgtccatgatggttggggtgtttgtgtgctggtgggtgtgccaaagaaagacgatgcattcaaaactcattcaatgaatctactaagtgagaggacccttaagggtgctttttat

SEQ ID NO: 20341 - DNA, 410 bp, Gossypium hirsutum
  Clone ID: LIB3146-026-Q1-K2-B10
tggataaattagatgcactagtgaaaaattgcaattccttttcatcattgacctatgttgctgtcaacaaaaaggggaatttgttatcaaacattggcctcacagatgtgaatgcagtaacttggggagccttccctgctaaagaaataatccaaccaactgtggtggatcctgccagttttgtggtgtggaaggacgaagcatttgaaatctggtctcgatcatggtccaccttgtacccagatggtgatccttctaagaatttgctcgaagagattcagagcagctactatttggtgagcttggtagataacaattacatggatggtaatatttttggtgtttttgaagatctttgaagatgagatttgagatattattatgctgcagtgcagtgttccacttatgct

SEQ ID NO: 20342 - DNA, 413 bp, Gossypium hirsutum
  Clone ID: LIB3146-026-Q1-K2-B11
ggactaaaaactggtggtactgtccagcagcgtgcagagaggcttttcctaaccaagcacactcctctggaaaagctggacaaaaagcattttgcaaaaggctcactcggacctcgacaaaatgggtctactgcagtttcacaagacattaacagtctgaaacatattgcattgatggaggccaagatgaagaaactcgctgatttactgaacaattgaacaaacaaaagaaaatgtggtaaagaagcaagcattgacatatgaggaaatggaacaagaacgtgaggaggaagagacacaagttgacacggaaagtgatgatgaagatcaacagatctataatcctcttaaattgccaatgggttgggatggcaagcctataccttactggctttacaaacttcatggtcttg

SEQ ID NO: 20343 - DNA, 411 bp, Gossypium hirsutum
  Clone ID: LIB3146-026-Q1-K2-B12
ctttcgatgggagcggcattaaaagactattaaccaacaagttcgaactagacaagttgcttaatacggctttagaaaatgtcccgaaagatcgtaatggtaaagtatcaaaggagtacttgcgcgtcgtgctagacgtagtggcaccatctgccagtttacctccaataggtgcagttgaacagatcgaccaggtcgttgccgatgcttttgacatgataaacgcggacgacgggaaagcggttaaagaagatgagttcaagaaactattgacggagatcttaggaagcgtcatgctgcagttagaaggcaacccggtctcgatttcttcgaattctgtcgttcacgagcctctcgcatcgtcctcatcgttactgcaaccatcatcctagttgcatatcactaatatta

SEQ ID NO: 20344 - DNA, 83 bp, Gossypium hirsutum
  Clone ID: LIB3146-026-Q1-K2-B2
ccttgaaatcaccgaaggaccattcttttgggtggtaggaaagatttttccaaagggaaacccccttacttccccaaaagggt

SEQ ID NO: 20345 - DNA, 159 bp, Gossypium hirsutum
  unsure (1)..(159): unsure at all n locations; Clone ID: LIB3146-026-Q1-K2-B3
tttttaattttttctctttaaaatttataaatgattaaatttacactttaacctttcgaaacgattaaaatttaggttagtatttttaaaatgataaaatataattattaaatgtgaaatcaatttagttttataaaaatacaactanattcgctctct

SEQ ID NO: 20346 - DNA, 283 bp, Gossypium hirsutum
  Clone ID: LIB3146-026-Q1-K2-B4
gtccgtcaacgtatacttcatatcaattctgaaatgctcccctgcatatatggtgcacagctgatcgtctccaaagatgaagacctgaacaaacgcggcatacatatgacaggggacgaatggatgcacattcctactggcgagagagctggacttcaatgtcagatggctttgtgcttataatcgaatcacgcgttccccttcacctatgcctttaccgataccttctctaacattgacatgtatcaccggaacgctcaaagaagttgagctcgattccaaa

SEQ ID NO: 20347 - DNA, 151 bp, Gossypium hirsutum
  Clone ID: LIB3146-026-Q1-K2-B5
ttacccacctttaattttaatgccaaatccaactacctttcgtttcttctcttcgagtagacccaccctagacccactaactttagctgactaccatattttttcttcttcttctctcgcttcgcgtgcgtggatttattctctttattcc

SEQ ID NO: 20348 - DNA, 246 bp, Gossypium hirsutum
  Clone ID: LIB3146-026-Q1-K2-B6
gcaaatcgaacggtacattaaaacggaccgatcaattgatggatcatgacctgtcgaatgagctaaagatctagctccaggttttgctcccagtgggatggctctagggatgactctctgtatgagttaccggcgcttgtgcctgtgcacgtacgtgttcacatatgataaaataattgatgaacctaaagctgacctaaaatatgcctgaagacatgcctggataggttccgggattggattcgg

SEQ ID NO: 20349 - DNA, 408 bp, Gossypium hirsutum
  Clone ID: LIB3146-026-Q1-K2-B7
ataccacttaaggagttgatagagaggcactgcggaggcatcagaggtggatgggacaatttacttgcagtaataccaggaggttcatctgttccacttttacccaagcacatatgtgatgatgtcctgatggattatgatgcactcaaggctgtccagtcaggactgggaactgctgcagtaattgtgatggataagtcaactgatgttgtagatgcaattgcgaggctttcgtacttctacaagcacgagagttgtggacagtgcacgccctgcagagaagggactggatggctatggatgatcatggaaagattgaaagttgggaatgcaaagttggaagagattgacatgcttcaggaggtgaccaagcagattgaagggcacacaatttgcgctttaggtgat

SEQ ID NO: 20350 - DNA, 401 bp, Gossypium hirsutum
  Clone ID: LIB3146-026-Q1-K2-B8
gggaactcggaatttccacaagactatgcattttttgagggtactacacatcctgttatagatggtgcaaacacttacaccaatgcatttgatggaaattatgacacattaattgcggccctcagtaaaatgggatacgggcagatgcccatagttattggggaagtgggctggcctacagatggtgcggtcggtgctaatctcactgctgctgaggttttcaaccaaggcctcattaagcatgtgttaagcaacaaaggaacccctctaaggccggctgttccacccatggatgtttatcttttcagtttacttgatgaaggggcaaagagcacccttccaaggaactttgaaaggcactggggaattttctcctttgatggccaggctaaatacgcact

SEQ ID NO: 20351 - DNA, 350 bp, Gossypium hirsutum
  Clone ID: LIB3146-026-Q1-K2-B9
tacgattattcgatgaacggttaaaaaacggtaagatttgtatttctgcaaaaaattatcaaaatctgttagggcttagtgtgggtgaattgctagggtcatgtcattgtttaaaaaatacatttggttagaccattcattccttggtttctaatttttgatggatcatattggtaggtaaggagactgtaacaatgatgtttgaaaactttgatgttgtttgaaaacttagttatatactctttcttttattaaaaaaaaacaaaaataaaaaaaaatgataaaacaatagataaatataataaaaatatacaaaaataaaagagcaaacagctcaaataaaaaggaac

SEQ ID NO: 20352 - DNA, 440 bp, Gossypium hirsutum
  Clone ID: LIB3146-026-Q1-K2-C1
gaccggccgaattccggtcgccacgcgccggaattgaatccttgaggcggcggtccaatggcggagaaacctcaaccggtcgtcgttcaatactgtcaagtctgcggtttgcccgccgaatactgcgagttcggatccgaattcgataaatgcaagccctggttgatccaaaacgcgcccgacctgtacccggatcttctcaaagaagcgaatgctaaagaagctgataaagttgctgatcaattacaatccactggcatctcttctgctgattcaggtagtagttcagaagctaagcaagaggaagttaaacgtcttcctggtgggaaaattaaaaagaaagagaagaaagaagttgtaattgaaaaggttgtgcggaacaaacgcaaatgtataactactggtaaaggcctggaactttttggtgtaaattaagcgat

SEQ ID NO: 20353 - DNA, 340 bp, Gossypium hirsutum
  Clone ID: LIB3146-026-Q1-K2-C10
cttataatggtgtactttgtgaccgcagattgatgtgctaagaaacagaatatgcatattctacttggcttcaatacaagaaccaataccatgggtgtcagcttatgggttttaactttgaaaagtgccatatttcttttctttcttttgcaagtgccgtgtttctcacatatgatctatatgataaaagagtatgagaggggtgacacaaatgatccaccacaaaaggggggggtgtgagaagaaaatgtgaaaatatcaccctggcaacaattttataaactgagaattgaagagacaccggaaaagggaaatggatttattattattattattaatt

SEQ ID NO: 20354 - DNA, 407 bp, Gossypium hirsutum
  Clone ID: LIB3146-026-Q1-K2-C11
cccacgcgtccgctggatcctgttcagaagctggcctctggtggatgtgacaatatggtcaaagtatggaggctgtataatgggagttggaagatggactacagccctgccctccagatgcacactgattgggtgcgggatgttgcttgggcacccaacttggggctcccaaaatccaccattgcaagtgcttctcaggatgggaaagttattatatggacttgcggtaaagaaggggaacaatggaagggtgcgattttgaaggatttcaagaccccagtttggagggtctcatggtcgctgactggaaacttattgtcggttgccgatgccaataacaatgttacattgtggaaagaaacggttgatgatgagtggcaagaagtgaatgctattgagccatgaag

SEQ ID NO: 20355 - DNA, 409 bp, Gossypium hirsutum
  Clone ID: LIB3146-026-Q1-K2-C12
atttgctgagaaagcaatgcatgagattaagaagcagtatgcagtgtttgatgcaaaggttctaagtaagattccaaggggaccattaaaggagaaaaagaaggattagatttaccggccaagagggtttctgacatacatttggtagctgccttccgtgaaaatgtgttatttactatatatcctgtatcagttagaaccctgtttgaatattttttcggttttagtacacaatgggttcaaaaagtttgatgaatttggcatctttttttctaaatcttgtttagttgttttttgatatggatccatatgctatgtgacgatatgttatcatattgcatgttggttggaatacattgagttgaaagttttttcaacttgcgttgtatatcttttcagaatgatcgag

SEQ ID NO: 20356 - DNA, 374 bp, Gossypium hirsutum
  unsure (1)..(374): unsure at all n locations; Clone ID: LIB3146-026-Q1-K2-C2
caaattccttttttttcccctccacccaaccctaaaaaatcatggcgacagctcaaatcagcaaaaagcgaaagttcgtcgctgatggagttttcttcgcggaactcaacgaggtattgaccagggaactggctgaggatggatactctggagtcgaagtcagagttactcctatgcgtacggagatcatcatcagagccacccgcacccaanacgttctcggtgagaaaggtaggaggattagggagcttacctcagtggttcagaagcgattcaagttcccagaaaacagcgtcgagctttacgctgagaaggtcaacaacagaggtctttgcgctattgctcaggccgagtctcttcgctacaagctactc

SEQ ID NO: 20357 - DNA, 339 bp, Gossypium hirsutum
  Clone ID: LIB3146-026-Q1-K2-C3
ccctgtgaccaattggttttggaaatggcccccatgtataaaactgatcggccaaagtatgaagctacagcacgtggctggacccagaagtatgccatgggatgatggtggttagtgggtaatacgtattggcttttgtacgatgccatgtatgtgttaaaaccttcatatattttggtttgggaaggaacttgtgattgtgcttagatttggatttgaattatgtggacatcttatatcaaaggtgggtctatggttgtaagagagaatgccattccattccatgtctttttatagcttgttatatgatgaagcatttcctaaaactttcatgcttat

SEQ ID NO: 20358 - DNA, 314 bp, Gossypium hirsutum
  unsure (1)..(314): unsure at all n locations; Clone ID: LIB3146-026-Q1-K2-C4
agagtgtcaagtcaccggcgaagaaagccccgtcgaggaggggaaagaaatgagagaagagagggtggtcaacataggggtagttttgtaaattcgagtgaagcttagtggctgtatttgggtccatacccatgaaaatatgacatcggatcttatctgttcttgaacttttcttcgaggggttgttttttttttgttgttgttgattgacgctaaatttctaaattccttagtttttaaagcagattttagatgtaatttttcagttgaatggattatgagatgaaatcagagctccctgatattttatcnaa

SEQ ID NO: 20359 - DNA, 410 bp, Gossypium hirsutum
  Clone ID: LIB3146-026-Q1-K2-C5
cccacgcgtccgcccacgcgtccgctcttttcaatgctctggcaaaggctaatattaacattcgtgctatagcccaaggttgttctgagtacaatatcacagtggttctcaagcgtgaagattgtatacgggctttaagagctgtgcattcaaggttttatctttcaaggacgaccatagcaatggggatcattggacctggattgattggtgcgacattactcgaccagttgagggatcaggcagcagtcctcaaggaagaatttaacattgatttgcgtgttatggggattactggttcgaggacaatgcttttaagtgaagttggtctcgacttgtcaagatggagagaacttctgaagcagaaaggacaagttgctgatttagaaaaatttactcaacacgtgcat

SEQ ID NO: 20360 - DNA, 404 bp, Gossypium hirsutum
  Clone ID: LIB3146-026-Q1-K2-C6
atcggagtctcgtgccgatgacaggcaatggcttacatattgggttctctattccatgatgacattgctggaactcacttttgccaaagtcattgaatggattcctatctggtcctatgcaaagctgattttcacttgctggctggtcatcccgtacttctctggcgctgcctatgtttacgagcactatctgcgacccttctttatgaacccacaacagacgattaacatctggtatgttccgagaaagaaggatttcttcagtaagccggacgatattttaactgccgctgagaaatacattgaagagaatggaacagatgcatttgagaagctcattcatcgggctgacaagtccaggagtagcagttatggtcacatatatgatgatgatggctacaggc

SEQ ID NO: 20361 - DNA, 413 bp, Gossypium hirsutum
  Clone ID: LIB3146-026-Q1-K2-C7
agatcatccaattattaaagacttgaatgctgcttgcaagaatgcgcctgaaagcagtgaagccaagagagcagttgacttgttgtatgatacagcattgatctccagtggtttttctcccgacagccctgccgagttaggtaacaagatatatgagatgatggcaatggcacttggaggaagatggggtagatatgaggacgatgatgaagtggaagcatcagaagttagtgctgctgaaactgatacgagtgccagtgaagcttcagagaaccaagtgatcgaaccatcggaagtaaggacagagagtgatccttggcaagattgaagtgtcaaaatttaaataaaaattttcctgtattatctgattgctattaacaaaagaatccagaaggaaagaagagttgtgggtt

SEQ ID NO: 20362 - DNA, 413 bp, Gossypium hirsutum
  Clone ID: LIB3146-026-Q1-K2-C8
caaatttgaaatgcatattcaggagaagcagagatggtggtggaaggggtggaaacggtggcggaagtggtggaaaaggtagcaacgacggcggagaaagtatcaactgaggtggcggaaaagcttcccgatgatagcatgctgaaaattgcagcaatggaggtggaacatgtttctgatataactgcccatgatgctcatgccactacacacttcattcaccaggttgaagaaataaagcatgagttggatgatttggttaacaaagttggagaagcaaggaccccaaaaaattgattcataggtaaaacttctttgaataagttctaaaaaataagtttgctattaattttaacaattcatgtaattttttttaaaaaaagtcatcgtattaattgtataaatatgaatat

SEQ ID NO: 20363 - DNA, 413 bp, Gossypium hirsutum
  Clone ID: LIB3146-026-Q1-K2-C9
ctcgcatatttgttgctagcccctccaggaggatcagcatcaaagatatcaagagccatccgtggtttttgaagaacttgcccagggaactgacagaggcagctcaagctgcttactacaggaaagaaaacccgacgttctccctccaaagtgttgatgaaatcatgaaaatagttgaagaggccaaagtcgcccctcgagtatcacggtcgatcggaggctttggctggggtggagaagaagatggggatgcaaaggaagaagatgcagaagaagaagtagaagaagaagacgaagaagatgagtacgagaaaacggtaaaagaggtacatgccagtggagaaattcacgtctcttaaggaaaaaagagagtaatatatggtttccaaacgatggagttttggtgtctttta

SEQ ID NO: 20364 - DNA, 397 bp, Gossypium hirsutum
  Clone ID: LIB3146-026-Q1-K2-D1
gtaacttttctttgactggtcagaaagggaaaacttacaaatttagggttacaaatgtgggaatatcaacatcaattaactttaggatccagggtcatccaatgactcttgttgaagttgaaggatgtcatactctgcaggaggtgtatgaatccatcgatattcatgcgggtcaatccatagctgttttggttaccttacatgggtcggttaaagactacttcattgtggcttcgacccgtttcaccaagcccatcctcaccactaccggtattcttcgctatcagggttcccaaactccgccctctttgccattgcctgttgccccaacttatcacgttcactggtccatgaaacatgccaggactatcaggatgaacttgacagcaaatgcagc

SEQ ID NO: 20365 - DNA, 400 bp, Gossypium hirsutum
  Clone ID: LIB3146-026-Q1-K2-D10
cccacgcgtccgggtttttgtttagagttataacttttttaagtgcaggaggaaacgaaggttttgaaggagctggtgggtttgggtcagctagtaatatcgggattggttgaggaatttttgcagagtaatcaacaagatttaagttcgttatgatccatgctatctatccagccatcaaagcgatcatatgcacataactcacacgtacagttaagagcccatggacaatgtcctgttttgggatctctgaacatatagtgtggtttcccatcagcagtaaagctttcagtaagctttctttttggacctggttcacagggtccacagcaacagtcttggattatctccttcctctgggtctggtactggttgcatcattaacattgtgggaaacaca

SEQ ID NO: 20366 - DNA, 409 bp, Gossypium hirsutum
  Clone ID: LIB3146-026-Q1-K2-D11
ctttgcttctgaagatccagagaatgacatgatcaaaccagcgacccaaggagtggtgaacgttttgaaagcttgtgccaaagcaaaaacagttaaacgtgtcgtcttgacatcatctgccgcagctgtgtctatcaacacactgaatgggacagatctggtcatgacagagaaagactggaccgatatcgagttcttatcatcagcaaagccaccaacttgggggtaccctgcatccaagacgttggctgaaaaggcagcttggaaatttgctgaagaaaacaacattgatctcattacagttatcccttctctcatgactggtccttccctcaccccaattgtccccagcagcataggccttgctacatctttgatttcaggcaatgaattcctcataaatgctttg

SEQ ID NO: 20367 - DNA, 388 bp, Gossypium hirsutum
  Clone ID: LIB3146-026-Q1-K2-D12
cctcactccacatttttgccttctgttgctgttactccgattgcaccacctaaccgactaaagaaaggagtcccatcagttgactccaaccatgtgaggaatgagaatgctgttttcaagaagcaagcagcagtctctaaaaatgcagctgatgatcattcgcagctgttaggaatgcagaaacaacaatcaaatggcatttcttttggtgtggtcagtagtctctcaaatgtaaaaatattgagcaaatctaaagaccctacagaaattaatagagccaattttgagagaacaagtgttgaaagcaaggcctctgctcatggaaggtctaattcgaattttgttggaaaacaggacagggcaactggggcagcattaacttctagaa

SEQ ID NO: 20368 - DNA, 410 bp, Gossypium hirsutum
  Clone ID: LIB3146-026-Q1-K2-D2
gccacgcgttcggccacgcgttcgaacaggctggagaaaccctaaatgatttcctatttcatcaccctcacaacactttcttcatgagctttggcaacgctgctggtttggcttatgtccgccatgaacgtgctgctttaagtcatcaaaaggtggtttggggggttgatgacatatactggctttttttaaggggcctggaccatctatttatgcctgataaaccatatgggctttcccaaaggggcaatggggcgatgtttgtgattgaagcatataggacgctgagggataagggtccataccctgctgatcaggttgttaaagatcttgaaggaagctttgcctttgtgatctatgacagcaagactggaaccgtgtttgctgcactggggtctgatggtggggtg

SEQ ID NO: 20369 - DNA, 402 bp, Gossypium hirsutum
  Clone ID: LIB3146-026-Q1-K2-D4
cgacaagacgaggaatgcatggaaaacggtctctcagatacggatttcgagcattacgtgaaggtaatcagatggttagaatgcaaaggacatatcgaaaagaacttcagacagaaattcctcacctggtacagcttaagagcaaccccgcaagaagtaaggatcgtgaaagtattcgttgatatcttcatttccgatccagcatctcttgcggagcagctcgtggacacattctccgattgtatctccagcaaaggatcattcgtcgtaccggctggcttttgcatgaagctttggcattgacatgaacggactgttgccgagtagtgagctacatgtttccgagtgcaaaaccggattaaagtcggtgttcggcaataattctttagacccacaacattc

SEQ ID NO: 20370 - DNA, 412 bp, Gossypium hirsutum
  Clone ID: LIB3146-026-Q1-K2-D5
gccggcacttcctctcttccgtaatctcttactttcagatttcagtctcagtaaagctttttcagcaccagccaaaatggggaagactcgtggaatgggagctggccgtaagctgagaacccaccgcagaaggcagaggtgggccgacaaggcatataagaagtcaaatcttggaaatgaatggaagaaaccttttgctggatcatcacatgccaagggcatagttcttgagaaaattggcattgaagctaagcagcctaactctgctatccgaaaatgtgctcgtgttcagttgatcaagaatggaaagaaaattgctgcttttgtacccaatgacggttgcttaaactacattgaggaaaatgatgaggtattgattgctggatttggacgaaaggggcatgctgtggga

SEQ ID NO: 20371 - DNA, 81 bp, Gossypium hirsutum
  Clone ID: LIB3146-026-Q1-K2-D6
ccacagcttactgtatattttggaaaacgttcttttaaaacctgattttcaccataacttgacgggcatcagtcagtttgg

SEQ ID NO: 20372 - DNA, 327 bp, Gossypium hirsutum
  Clone ID: LIB3146-026-Q1-K2-D7
cccacagatgcggaatgcatggaaaacggtctttcaaatactgattttgtgcattgcgtgatggtaatcagatggttagattgcaaaggacatattgctaagaactttagactgaaatacctcacctgctacagcattacgatcaacctcgcatgaagtaaggagctgacatagcactccctaatatcagaatgcgcaactcagaatatctagctaagcagcatatggactctttctactatcgtgtgagcaacaaaggatcattcgtcattccagcagttttgtccctgaagctttagcatccacatcaacggactgaggccgttt

SEQ ID NO: 20373 - DNA, 407 bp, Gossypium hirsutum
  Clone ID: LIB3146-026-Q1-K2-D8
aactagagcagactaggttattggttcttgaagcagctgaccagcttgatcgacttggaaacaagaaagcccgtggaaccattgcaatggcgaaggtagcagctccgaacatggccctgaaggtactggacagggcaatacaagtacatggtggagccggggtatcatccgacactgttttggcacacctttgggcatcagcaagaacattgagaatcgctgatggacctgatgaagtgcacttgggtaccattgctcagttagaactacgaagagcaaagctttgaaggatcttgaaactatgatcatcacacaacagtactttttattttttcttcttgcagtctcgaagataaaaataaggaaaaggaatccaaaaaattgggcattttcttagtaatattatg

SEQ ID NO: 20374 - DNA, 382 bp, Gossypium hirsutum
  Clone ID: LIB3146-026-Q1-K2-D9
ggcgaaaatgccgaagagaacaacgcacacatactcaagcgaagacgcagcaccggatggacctgactctgatcttttcgtctactattgcaagcactgcggttcccacgtccttattaccgaaaatgcccaagcgaaagactgataaagcagatgtgctagacaagaaaaagcaccttgctaggcttaacatcagcgaggcgggaaaagttctcttgaagaggggagacgggaaattggagaagcaattccgtatgaattgtataggttgtggcctatttgtttgctatcgggctgaagatgatctcgtaactgcgcctttcatttatgctgttgatggtgccctctgtacagttgcagtagagaccaagcctccagatgc

SEQ ID NO: 20375 - DNA, 410 bp, Gossypium hirsutum
  unsure (1)..(410): unsure at all n locations; Clone ID: LIB3146-026-Q1-K2-E1
atcacctgaaactccaggggtaaagatatcagttgaaccacagactttgagttntagccaagcaaatgagaagaaatcatatacggtgacgttcagtggtagttcacagccaaccggtacgaacgtgttcgctcgtttggagtggtctgatatgaagtataccgtgggcagtcctattgcaattagctggacatgataggagaataaaggggatggacagtttttaaactttaaaaagttgaatggcttcttaaactcactcaacaagatgagatgggggttggttcaattgttttagtgttttgtagttgccagattcatgatagctaaaccagctaataatggaagctggggtcttaagtgtttgatgttattctctgagagagggaacaatgaaaactaggaacatt

SEQ ID NO: 20376 - DNA, 197 bp, Gossypium hirsutum; identical to SEQ ID NO: 20208
  Clone ID: LIB3146-026-Q1-K2-E10

SEQ ID NO: 20377 - DNA, 403 bp, Gossypium hirsutum
  Clone ID: LIB3146-026-Q1-K2-E11
aacgactgcagttctgcatgccaaccctttaatccagcaactgcttaggtgactatcagcagtacttgtttacccgacctaaatctggatcttaccatagcccctgccctttaccatcaaaacttggcacttaattaattttaagtctatgatgtgatattaacatcactattctactgcttaattaatttcattctttgatcacaataacacctactatgcttataagccggttagaatatgtttgcgagttagagctcaaaaatcctggctggagtctacttaagtgggatacactgcatgtctagccactaatctagactatatctctaaaatcgtgtcctatcaagaatatacttttcatttcttttcctgctgaaactaccacttgcagttgattatg

SEQ ID NO: 20378 - DNA, 410 bp, Gossypium hirsutum
  Clone ID: LIB3146-026-Q1-K2-E12
cccacgcgtccgcccacgcgtccgcccacgcgtccgagcggtttaatctacgaggaaacccgtggggttttgaagatcttcttggagaacgtgattcgtgatgcagtaacctacaccgaacatgcgaggaggaagactgtgactgctatggatgtggtttatgcactgaagaggcagggcaggactttgtatgggtttggtggttaaatgatttagggaatagatcttttagcgatgttggcggatctggacttgttgtcatgctagcaagaatgtttgagtttaggattagggatagggcttgtaattaaggggtgctattgggattactggaaattataatttggtcgtgtagttttctttggtgatttgtaattcgtgccatgaattgcagattttaaatgaaattg

SEQ ID NO: 20379 - DNA, 390 bp, Gossypium hirsutum
  unsure (1)..(390): unsure at all n locations; Clone ID: LIB3146-026-Q1-K2-E2
ttcccggtcgcccccccgtccgttttatggccaaacctatggtttgatttattcaaatttttggtttaaattattcctttattttaaggatttattggaaaaatttttaaggttaaaatccaccttaaaatttatccatttatttaggccggtggggccatttaaccttttttttctttttaaggtagtcatcttttatatcaaagatgtttggatcgagaaaccgcagatgtatcgatctgggaaaaaggtttggaactgatagactaaaaaattggtatagaccgattgaatctgttaaaaaatcaattgnaattagggatttnttaaaattgttttaaaatgtttgatgggttttttaaaatcgaattgattaagattgatgggagc

SEQ ID NO: 20380 - DNA, 209 bp, Gossypium hirsutum
  Clone ID: LIB3146-026-Q1-K2-E3
ttctttaatttaacctttgatgtgccggtgggattggtcagaagatttcttgctgaccattaaaccttttatttctggtgatgatattttcataaccttttctggttggaatatttgggatgggatgtcattaccaacttctaaccttttgatggtcttaaaccggtttacatatgggttattaccttgaaattcctggaatttctttt

SEQ ID NO: 20381 - DNA, 406 bp, Gossypium hirsutum
  unsure (1)..(406): unsure at all n locations; Clone ID: LIB3146-026-Q1-K2-E4
attatgatcaactagtcaagatagccaaggttcttgggacagatgaattaaatgcttatctaaataagtatggtatcgaattggatccccatcttttatttcttgttgggaggcatagtcacaaaccttggacaaagttcattaatgctgagaatcaacatctggcattacctgaggccattgatttcctcgataagttgcttcgatatgatcatttggaaaggctaactgcaaaagaagcaatggctcatccttatttttacccgattagaaatgcggaaagcagcagaactcggacctagcatgccaacttcacggtgatgatgttaaggcatggcatcttcttctttcttcatatgcatggntagatcctcatccctttatagaatgacagaagattaaagtc

SEQ ID NO: 20382 - DNA, 106 bp, Gossypium hirsutum; identical to SEQ ID NO: 20212
  Clone ID: LIB3146-026-Q1-K2-E5

SEQ ID NO: 20383 - DNA, 337 bp, Gossypium hirsutum
  Clone ID: LIB3146-026-Q1-K2-E6
cggacgcgtggttcaagaggtcattgctgagatgactggtggaggagtcgaccgcagtgttgaatgtaccgggagcattcaggccatgatttctgcatttgaatgtgtccacgatggttggggagttgcagtgcttgtgggggttcccaacaaagacgatgcattctaaactcatccagtgaatctactgaatgaaaggactctcaagggtactttctttggcaactacaaacctcgaactgatattcctgctgtcgatgagagatacatgaacaaagaactcgaacttgataagttcatcactcactctgttcccttttttgagaataacaaggca

SEQ ID NO: 20384 - DNA, 398 bp, Gossypium hirsutum
  Clone ID: LIB3146-026-Q1-K2-E7
cccacgcgtccgcggacgcgttagtcaacgttttcgtaacagatgaattacatgcggaggtaaataagtatagtattgaagtggattcaaatgtttttttacatgcaaccaggactaacgtgttagctcgttcggagtggattgatatgaagtatacagagggcagttctattgcagtcatctagtcattagatgagtagattggatatgatcatttggaaaggctaactgcaaaagaagcaatggcttattcttatttttacccgattagaaatgctgaaagcagcagaacttgaacctagcatgccaactagacggtgatgatgttaacgcatggaataatcttctttcttcatatgcatggttaaatcctcattcctttatagaatgacagaaga

SEQ ID NO: 20385 - DNA, 376 bp, Gossypium hirsutum
  Clone ID: LIB3146-026-Q1-K2-E8
ggtatcttataggtcgtcgacttcataactttggggaaaactcagaagagaagcaaaatgaggcagggtcttcctcagaaacacagatttctgatctgcgggacactggaataatccagcatgaccgagaggttgatgtggggctgagactaaggcgcgctgctaattaaaaacgatgctgatgctcgaaatgcttgtatgaatctacgttccatttatgacaagctggtatacttgttaggtagtgtttgaaattggccaatacaatatttggcttacgcttactttttgtgcacagaatacacgttaactttgcaattagggtttgtcttaaaatttcagcaagttagataaataatgaattactattttattt

SEQ ID NO: 20386 - DNA, 177 bp, Gossypium hirsutum
  Clone ID: LIB3146-026-Q1-K2-E9
tcgcccacgcgttcgtccacgcgttcgcccacgcgttcgtccacgcgtccgaaaaaaaaaaaaaaaaaaaaaaaaaaaaaaaaaaaaaaaagggaggggggtgtaggtgataaaggattaagtttatgtgcatgggaattggtagggtgtattatggggtaacgtgaaattaattta

SEQ ID NO: 20387 - DNA, 396 bp, Gossypium hirsutum
  Clone ID: LIB3146-026-Q1-K2-F1
tcgcccacgcgttcgctcaaggagcatactcagtacccggtcctgatcgttataggagacatagcattgcagggtcctcaatgagagacgatgagagccttacaagctcacctgcagttccgagttatatggcaccaacacagtccacaaaggccaggtcccaaataccaagccccttatgaagtggcacaccagataggagagtggcagggtctgcaaagaaacagcttttgttctcagcgtccccagccagtagtaggagacattcagagcctcctaaagtggacataagtgaggttagaaagaatcaacatgcaccaagcaatggaaggcaagtggtttggtgaagagtgcaacaaaagttagattgaataaacaaggaagggttattacaac

SEQ ID NO: 20388 - DNA, 241 bp, Gossypium hirsutum
  Clone ID: LIB3146-026-Q1-K2-F10
atcaaagcagcagcagcagcaacaacaacaaaaaaagaagaagcctctactccgtaaattcgggagcctactgaagaagaaaggaagtaacaacctgaaatagataacgaaaaacccgaaacccgaaatccgtaatggcatgacttttagccttaccagcaagcaggtatagcaaataacgtcttgcaagctgaatgtgttttgtacattatttgacctcattacgtattcttagttttct

SEQ ID NO: 20389 - DNA, 411 bp, Gossypium hirsutum
  Clone ID: LIB3146-026-Q1-K2-F11
gccaaaatctcctgcttcgactgccctcataattatgacttctcaggcatccaagttgcagtgaagtgtgagaaagtgaagaaactagccactgcgaccactgaagaaaatggttctttcaaggtccagcttccatcaggcatctcaaacactaactgccttgccaagctcctaggtggaccaaaccagctatacagcaagaagaaaaacctggtgtccaaggttgtcaaggtgggacatcaacccaacacttacaccctctccactccactggctttctccacttcatgcccttcggcatccattgatgctaaatcatgtggagctcaaaaggggatcggttcatccaagaccgtcgatctgccactacccccggagtggggacttgcaccatccagctattatgttcct

SEQ ID NO: 20390 - DNA, 151 bp, Gossypium hirsutum
  Clone ID: LIB3146-026-Q1-K2-F12
ggagatctgctgcgaccaatcttggaaaatttgctgctactgtagaagcacctcatttgaaggtggacatcatgtctatgtttgatgatttgacacaggatgatcaagattctgttcgcctattggctgttgagggttgtgcagcacttgg

SEQ ID NO: 20391 - DNA, 178 bp, Gossypium hirsutum
  Clone ID: LIB3146-026-Q1-K2-F2
tggaccaagccgtccgccaacccttcggccaagccttccggagggttttaacaaggttttattatggtctattccacaaaatattccaggtcattttattggccctttccagaaacacttgacttttacccacccctttgagaataaaaaaccgtttcaaaggaccccgccaatttcc

SEQ ID NO: 20392 - DNA, 408 bp, Gossypium hirsutum
  unsure (1)..(408): unsure at all n locations; Clone ID: LIB3146-026-Q1-K2-F3
cactatttctattgtatctgctagttggtttttattgtctgtcagttgaaactgcagtgctaaagggtgtagctcagtagtgtggaccaaaaagcatttgtttccgtgttgcacgtttatttgctcatacgaatgtctttnnnnttnnnnnnnttttttttctctccaggtatatgggtacagtaactggcataagcgatttggatcaagttcgctggccaaattcccattggcggtctgtgaaggtaattattaacatttttttacatggatctcatagtagatggtttttattgtttgggatggataatatcatgttctattttattatgcatgtctaaagaaatttatgtgtttaacgtccatgatttcttgtttgatgtctttgatttcatggagattcaatgc

SEQ ID NO: 20393 - DNA, 406 bp, Gossypium hirsutum
  Clone ID: LIB3146-026-Q1-K2-F4
gttgatgttcttcccaagaagcctgctaaacagtttcatgagcaggaaaatgggaacattgagaaaaatggaaagcattctgagcaaaagagctcaaagaagcagcaaaatggttcagttcagccaaagaaaccatttcaaagagtgaatgtggatgaggtagaatttgttgatagcaggcttgaagataattcatactgggcaaaggatggtgctgaaactggatatggtgcaaaagcacaagaagttctaggtcaagtaagaggaaggggtttccggcacgagaagaccaagaagaaacgtggatcatacaggggagggcagattgatctgcagtcgcactctataaaattcaattattctgatgaggagtaaatgctgactttctagttggatgatgagcact

SEQ ID NO: 20394 - DNA, 361 bp, Gossypium hirsutum
  Clone ID: LIB3146-026-Q1-K2-F5
cttaaaaactggataaaggagcctactaactaccgccattcacgggtgggcgggacatatgctcataaggcactgagtctttggcgataagagctcttagaagcggacctgtgggtcaggtttatctgacaaacacacggaacgcatgggcctggctgcaagatacctatgccgtaaggaagtgtgacaacatatatgatagtgcgcacgatctgcctagaaacaggttatgttctcaacgtacacgacctgctgtgggaaacattcagagcgtgctaacgtggccataagtgcggttagaaagaatgatcatgcaccaaacggcggatggcaatgggtttggtcaatagtgcatcaaaag

SEQ ID NO: 20395 - DNA, 82 bp, Gossypium hirsutum
  Clone ID: LIB3146-026-Q1-K2-F6
aaaagttgtaaatttctatggggattatctttggtttcaataagttagatggctttgatgtggagtcatttcatttccaagt

SEQ ID NO: 20396 - DNA, 398 bp, Gossypium hirsutum
  Clone ID: LIB3146-026-Q1-K2-F7
aatactttgagctctaagtccagaggagatggggataatcttgatgtcctagctggcatggttcctgtttgacaggttatctaaggaatggtggatcgtctgaaagtggagggtaaagttgtgaatacgcgagaggggaacacagaactggtggtgttggaccaagctgacaatggacaaattcaaggtcgaccatcaggagtggtccatggggtgaaagcgacgcgatactcatggacgattcatcagaagagtgatggtgccctcaaaggtgtttatgggagtccccgtagaaatttgaggaaggatttatggtatggcctaagctgcattgctacaaatattaatctcccttggttgattactgggattttaatgctttgcttgatgaggatgag

SEQ ID NO: 20397 - DNA, 290 bp, Gossypium hirsutum
  Clone ID: LIB3146-026-Q1-K2-F8
aacgcttctacatttaattaaagaccgaccggggaccttagctatgtatttactcgaatgggacctatgagagtcgtcttcctttgcatggctgattcctttgacaaaaaccggcgatgctgtctatctgccttaggcgcactcacatatgtttgtgtctgtctgctctggcttgggagttagtgaagaagggcatgatatttgatggcgcaacaaaaagcgatctacaccttattggcactaggtaccaagagctatggcgcctttacaggggttaatgggaacttcac

SEQ ID NO: 20398 - DNA, 332 bp, Gossypium hirsutum
  Clone ID: LIB3146-026-Q1-K2-F9
ctcacgcggccgctgttctggtggcgggattacttaccgcttgacccagcgatagaccctgcgagacattctatgctgtctcttatgaaaactctaacgaaaatccttactacactggattcttcaccggattcaccaacgtctggaccgagaacggtcaaccgaacggaccaccaccatgacccgagtcgtgctatgtctggaagtgtattcgggagcgcagtaacgacatccttagtgtggtcttcggtgttcgttgcggcgctcttagcggcgctatcacggacgtgaccctgtacttggtctggaccctgtttgaggatcagtctgat

SEQ ID NO: 20399 - DNA, 415 bp, Gossypium hirsutum
  unsure (1)..(415): unsure at all n locations; Clone ID: LIB3146-026-Q1-K2-G1
cccacgcgtncgctacctgccactctgtctgaagctttgagctttcaacctttccaacaatggcagcgataattggtgagtctccaaagcttgctctgtattcatactggcaaagctcatgttcatggcgagttcgcttcgctttaaacctcaaagggatttcgtatgagtacaaagctgtgaatctttcaaaaggagagcagtttacaccagagtttgagaaattgaaccctctgcattttgttcctgttcttgatgatggtgatgttgtcgtgtctgattcatatgcaatcttgttgtatttggaagaaaaataccctcaaatagctctcttaccagctgatccccagcttaaagctctgaatcttcaggttgccagcatagtcacctctagcatacagcctcttcatatgct

SEQ ID NO: 20400 - DNA, 403 bp, Gossypium hirsutum
  Clone ID: LIB3146-026-Q1-K2-G10
cctctatcaaagagtaagcccaacaatgccgcccaagtttgacccaacacaagttgtcgatgtgttcgtccgcgtcaccggcggcgaagtcggagctgctagttccctcgctccgaagatcggtccactcggtttatctcccaaaaagatcggtgaagatattgccaaggaaaccgcaaaggaatggaagggtctccgcgtgaccgtcaagctcactgtccagaaccgtcaggcgaaagtcatggttgtcccgtcggcggcggcgctggtgattaaggctttgaaggagcctgaaagggataggaagaagaccaaaaacatcaagcataatgggaacatcggccttgatgacgtcatcgagattgctaaagtaatgaggccaaggtcgatggcgaaggactta

SEQ ID NO: 20401 - DNA, 253 bp, Gossypium hirsutum
  Clone ID: LIB3146-026-Q1-K2-G11
gcttaattttcctggattatcgtgggtctgttttgagtaaattgaaagagtgtcaattcatgtatgctattgcagctatagaaatttgtggtttctttccatcatttttttcagttaaatgctaagattaaatctttagataattcatagataaacagaataggaaaacaagaatgaggttcaaagtcgccagtatatggttagtgttcggatcatatttatgagtaatcttcttgagtgatggctgttttaa

SEQ ID NO: 20402 - DNA, 413 bp, Gossypium hirsutum
  unsure (1)..(413): unsure at all n locations; Clone ID: LIB3146-026-Q1-K2-G12
gttcttgacaatttggacgaaaaccagcacacatttcttttacttaagcgccttgctcttgagggggacgtaagctgccattccgcacctttttgtgtttattgtatataagataagcatgtgcacacgcacgcacgcgtgcacacacacacgtntgcatgtcacaacaagaagtcgcattttgaacaagaaagagcaacctattcatagcatcaaaattgcatttttataacttctgtatcatccgtataagaacaaaccaagatggggaatgaaaagagaaatctgatgatgatatagggtctgctctgcagtttgggttaaaacgatcttttgacagtaacacacgtgtttgaaatttcatccgctttactttgaaactgacatgccagtgtgctattttttttctgatg

SEQ ID NO: 20403 - DNA, 411 bp, Gossypium hirsutum
  Clone ID: LIB3146-026-Q1-K2-G2
ccccgccgtttacccaggttcagggagattcgtcgccaggtttggctttggcggcaaaaaagcagctcccaagaaagtctcgaaacgaaccccagaccgccctctatggtacccaggagcagtggcgcctgattggctcgatggaagtttggtggggtgattacgggttcgacccgttcgggttagggaaaccggcggagtacttgcaatatgatttggattctttggaccagaacctggctaagaattcggctggtgagataattggaactaggaccgaggttgccgacgtgaaggcgacgccgtttcagccttacagcgaggtttttggtctacagaggtttagggagtgtgagttgatccatggacggtgggccatgttggctacgcttggtgcactttaccgtgaat

SEQ ID NO: 20404 - DNA, 329 bp, Gossypium hirsutum
  Clone ID: LIB3146-026-Q1-K2-G3
gccttgggtcccattttgggggaccaccaaacaggggaggttggaaaggttggcttggacctttcttttgaaagctttttggaaagttggtccaaggtggaaaaccaccgggtaagatcaagtcctaatagtcagggggaatgaatatcatataaccctcatctccctctgagacataattatctgagaacccctggaatcattatgacgctgaaaagcgcttgaaagacatctgagttgagcagttacaagatcttcgcgcatatgaaagagctattctggaatttttgagaacttatgtagcgaaggacagatctggatcacagatc

SEQ ID NO: 20405 - DNA, 393 bp, Gossypium hirsutum
  Clone ID: LIB3146-026-Q1-K2-G4
cccacgcgtccgcccacgcgtccgcccacgcgtccggcattgttgatcagccagctataatgtcctactgggatcttagccaagctgagaggagcaagtacgggattttggataacttgattcgattcagcttcggggttgaagacttcgaagatttgaaggccgatatactgcaggccctggagaccatagcttaaatagcgttttgatgtgtttagtatttttcctagtctaaatggagcatgttgatctccaaaagtactttctgttgtgtttgattttggtagatccacattggttgaatgaagtcatgattttggtacccatgaataatttggaactttgggggtgcttggttttagaaaattcatctaccgagaaaatgttttctgt

SEQ ID NO: 20406 - DNA, 400 bp, Gossypium hirsutum
  Clone ID: LIB3146-026-Q1-K2-G5
gtgaagtgtttacttgaactgtttagaaaatgttattctagtccttaccctcctatcgtccatttaggtgggatgcttggcattgttaatgcttttggggcaggtgctggaaatttagttgattttcacccttttaactcctctgtgcaaactggttatgatcaaaaggaaccttcccatatttcaggtccaatacttgtgaatcctgtttgtgaagaccactcaacatcactgatgcaagagatttttcttgttgctcaaaatcctgatgataatcaattgcaacaatatgcagcgtgggcaatttcatttcttcgacagcgactgtggtctagagaaatttcgaatagtgctggtggtacacaaactgagtctgctggctcaaaatctatttcgcaag

SEQ ID NO: 20407 - DNA, 172 bp, Gossypium hirsutum
  Clone ID: LIB3146-026-Q1-K2-G6
tgggcaacacgtcctgtgtgcgaggtccatcacaaaacgggtggggtgctcatatggggaaaataatgcgacgtcgaaccctatctgattctatcaagcgagcttacatgcgcggggagagggtcctctagatttacccccgacaccccctcgtgtaagggctttttgagag

SEQ ID NO: 20408 - DNA, 316 bp, Gossypium hirsutum
  Clone ID: LIB3146-026-Q1-K2-G7
cccacgcgtccgcccacgcgtccgtgcaacctgaaaaaaaagtatgtaccattaagaatatatgtttgtaaaaaaatgttctgcagtcgcattcattggttaatgttgttgaactgaattggctttttagcagactcttccactttacatgattatatatagcttattttttctacagccaaaaagaccataacttaatatagaagccaagagaatgtgaaagattattgactcatacacgctatagatttagtttacacaagtctctctacacgatactttttgtcttttcacataaaccgctcgaagaaatcta

SEQ ID NO: 20409 - DNA, 380 bp, Gossypium hirsutum
  Clone ID: LIB3146-026-Q1-K2-G8
gtaaaagcaatgacactttccctctcggttttagttgccatcgaaatgttcaactcccttaatgccctctctgaagatggaagtctcttgacaatgcctccatgggtcaatccttggctcctcctcgccatgtctgtgtcattcggcctgcacttcttgatcctctatgtgccattccttgctcaagtattcggtatcgtacctttaagctttaacgaatggctgctggttctggccgtcgcattccctgtgattttgatcgacgaagtgttgaagttcgtagggaggttgggacggcggatgagatcctccagtcaaagacctttgaaacccaaaacagagtgaagacagatatggtataaatccgataagtggatact

SEQ ID NO: 20410 - DNA, 335 bp, Gossypium hirsutum
  Clone ID: LIB3146-026-Q1-K2-G9
acgaaacccagttgccatttctgttttttatttcttgggagaatttagaaaaaagaagaaaaataatattctcttaacatgggtatttactcgaccgagatggaggccgtgacggacgcgacagggttattctcgacggcattcttcacaaacctggcaatgatggtggtggtgtacaagatagtgtgcggcatgtttttgggtcccgaagatttacgacaaaagcttcataaagagccaattcatgtcggagatattactgaatcaaagttaagagcttacaagggttcggacaccaaaaagcctatcctaattgccatgaaaggccagatcta

SEQ ID NO: 20411 - DNA, 181 bp, Gossypium hirsutum
  Clone ID: LIB3146-026-Q1-K2-H1
ctagatcgcgagcggcccacgcgtccgcccacgcgtccggtctatattccttgtcaatttgttggcgatacatttaagttcgcccctgtttgtaagtctttgtttgtgctggtttgatggaacaatcgatatgatcgccttgtaatgcttcttttcatatgcacttctttcttctagtagc

SEQ ID NO: 20412 - DNA, 426 bp, Gossypium hirsutum
  Clone ID: LIB3146-026-Q1-K2-H10
ctacgagcaatgtcagctcaactacattatgttgattcatctcctggtgggaggttttgttttcctccagttcattcgcaattgttacgacctgctggtgctgttccatcccattacccgaggccctatgttgttagccttccttatggtagcaatagtagtggtgctgagaacggtaggcattggggaaggcaaggtctagacttaaatgctgggcctggagttccagacattgaaggaagagatgagtcggcacctcttgcatcaaggcaactgtctgttgccagttcacaagtccaggcagaggagcaagcaagaatctatcaggttcctggtagcattttgaaaaggaaggaacctgagggaggatggaatggatacaagcaatcttcatggcagtaggaatcaagaaaccttaaatgtcac

SEQ ID NO: 20413 - DNA, 414 bp, Gossypium hirsutum
  Clone ID: LIB3146-026-Q1-K2-H11
cggacgcgtgggctgatctgtctcctccactcagccatcgccatatcaagcggcgccttcatgatgttccgtatgaaagaaatctacaccttcacgcacgggatcgaaactgcctccaagctcctcggctccaccccacacgaccaactcctgatccggacctccgattcgttctccggcctgctcttgttcaccatcgggttcttgctcttcatggtctccttcgttgaagacaccgatttccagtccttcttcgccgccggctgcaccttcttgcacgttttcatggccgtgtggaggttttggttcgagaccagagtggaggatttggcttgggattgtattaggcaaacggttggcgatattttattggctctttcttgggtttcctttttggtttactcttggagagaa

SEQ ID NO: 20414 - DNA, 57 bp, Gossypium hirsutum
  Clone ID: LIB3146-026-Q1-K2-H12
ttccggttcgacaaggcgacgcgtacgcgacgcgtaggcgacgcgtttgaagatatg

SEQ ID NO: 20415 - DNA, 416 bp, Gossypium hirsutum
  unsure (1)..(416): unsure at all n locations; Clone ID: LIB3146-026-Q1-K2-H2
atggaccataaccatgtaatcgaccttcataattactgcccaagtgtgtatgaagaaggcgatgctcgctcagctctcattactatgcttcaatcactcaatcatgctaaaaatggngtcgacatcgtctctggtacgagagtaaaatcccacttcgccaagcctaattggcgcagtgtctacaagcatattgctgtcaatcacaacaactctcgagtgggggttttttattgtggggcaccggcgctgacaaaagagcttcgccagctagcttcagatttctcccacaagacgtccaccaagtttgatttccataaagagaacttttaatcccatgccagggtcccggataaggagaacctaaaaaagaaatgctttggagctaaccagactctagagacagttacaagcacctt

SEQ ID NO: 20416 - DNA, 415 bp, Gossypium hirsutum
  Clone ID: LIB3146-026-Q1-K2-H3
aactgttgaagcattaccaccaccctccttttcacgtgaccctttttcttttaccacgaaattcctctttaatgccaaacccagtagactcttttccctaactttccacataccgaggtctacattcgttacttgtacacaagatctatatctcttcattaatcctcactcaaacgatgtcgagtatcctactgttgtctatcacagcagctgtgagctgagggtcttttattgaggggcaccggcactgacatgagagctgggagcgctagctttagatttctcccacatgacgttcaccaggtttgattttcataaagagaactttttattccatgccagggtcctcggttatgagaacctaaaaaagaaatgcttttggacttacccgactctaaagacaggttacagcacc

SEQ ID NO: 20417 - DNA, 361 bp, Gossypium hirsutum
  Clone ID: LIB3146-026-Q1-K2-H4
agcaatctcaccacaaaagaacaagatgaggaacaggagctcaaacggacggcggagattgaagaatcaaacattgctattggagttggattggaggacgttggtgggagttcgtctgagatttcggctgatggtaagccgttccccgatcttccgggccttcagccggatttatgggaaggtcccaagtgggatgttctcggtttccttgttcagtatttgtgggcttttggcatcgttttcgcgttaattgcatgcgggattgctgtggcgacttacaacgaaggggcaacagattttaaggagactcctgcatacaaagagtcgatccaatctcaagagctattagaacaacctgatg

SEQ ID NO: 20418 - DNA, 309 bp, Gossypium hirsutum
  Clone ID: LIB3146-026-Q1-K2-H5
gcgtatcgcgcacgatatagcggctgatctgttgcctaatgttacgagcaagatcttagcgaaggtgatcgagtactgcaagaaacacgtcgaggctcctaagacagacgatcgatccgccgatgactagctcaagagttgggacgctgactttgtcaaggtcgatcaagctactctttttgatttcattctggtattgatcaacatcaacttcttgctcttgatggactccttcgttgaagacaccgatttccagttcttcttcgccgccggctgcaccttcttgcacgttttcatggccgtttgtag

SEQ ID NO: 20419 - DNA, 69 bp, Gossypium hirsutum
  unsure (1)..(69): unsure at all n locations; Clone ID: LIB3146-026-Q1-K2-H6
nccacgcgtccggcgacgcgtttaaaactgtgatcaatagaaaagccagaaactcggaggcgctataca

SEQ ID NO: 20420 - DNA, 286 bp, Gossypium hirsutum
  Clone ID: LIB3146-026-Q1-K2-H7
gagaaagtgaaggaattggaaaccagtgaagccgactctgaagaaaatatagagcaagtagcctgaatagcagtggagatcttgtacagtcttcaaaattgaaacaattctccccatatatggtaacacagatggcttcaatatatttgtttttgttttgttctgttggtcctccgtcgcagtttgggcattacctctgtcaagccgagagaatttgaaggaaaaatgataatattctctattgatttgatttacacgagtatatatacaaaatactatcaactct

SEQ ID NO: 20421 - DNA, 297 bp, Gossypium hirsutum
  Clone ID: LIB3146-026-Q1-K2-H8
cggacgcgtgggcggacgcgtgggtccctccttccatgtttaattttattgtctttatattcgtttaatcctaggattctaaaggtttatttatgtacttaaaaagttagtacaaaatgttccatttgggcttctgattcaaaaaaaaaaaaaaaaaaaaaaaaaaaaaaactaaaaaaaaaatagaacaattacactatataaaacctaaagaatatagaaggaaaaatgtataatattctctattgatttgatttacaccagtatatatgcgggggttctatcaactctaacatt

SEQ ID NO: 20422 - DNA, 399 bp, Gossypium hirsutum
  Clone ID: LIB3146-026-Q1-K2-H9
cccacgcgtccgcccacgcgtccgggactctttgtctttcttcaactgctaggagatatcaatcagctcttcagtcacgatctgatatgtttatggggtttgaagaaatggatggagaagacgatgtaagagaggagtttccatgccctttttgttcagagtatttcgatatcgtgggcttgtgctgtcacattgatgatgaacatcctgtggaggctaacaatgggggtatgtcctgtctgtgcaatgagggtgggagtagatatggttgcgcatataacgcaacaacatggacatatattcaagcgtaagcggagatcacgtagaagtggatctcattcaacgctttctcttctgaggaaagagctgcgagacggaaacctgcagtccctcttcggc

SEQ ID NO: 20423 - DNA, 426 bp, Gossypium hirsutum
  Clone ID: LIB3146-027-Q1-K1-A10
cccacgcgtccggagatgcgtaggaagcaggcgcaagcagctcaagaggcttatgaggaagatgatgacatgcatggtggtgcccaaagagtgcaatgcgctcagcaatgatcggtggcagacggtaaggaatggaatgtatgattgtttaacaaaaattatttgaaaataccattctggatatggttgtttgcttagaccatttcttctagagtgctatctgctttggtaactggtaaagtgtatggaaagatttagcgttggaacttgacctatttgtttatggtatacaacctattgcttcttgtgagcttagtttttttagttttgattttatatttgaatttgagaaatcatttagggatattttatgatttgaaggtgttcattgttccgatttgattcgggtcattataagatgtttgg

SEQ ID NO: 20424 - DNA, 425 bp, Gossypium hirsutum
  Clone ID: LIB3146-027-Q1-K1-A11
cagaggttgtcattggtttggaatatcttcattgtctaggaataatatacagagacctgaagccagaaaacattctactccagaaagatggacatgttgtcttaacggactttgatttatcatttatgactccctgtaaaccccaagttttaaagcatcccttgcctaacaagagaaggagatccaggaatcaacctcctcctacatttgttgctgaaccatctacacagtcaaattcatttgttggaactgaagaatacattgctcctgaaattattacaggtgcaggacacagtagtgcaattgattggtgggcactcggtattttgctgtatgagatgctgtatgggcgtacgcctttcaggggtaaaaacaggcagaagacattctccaacatcttgcacaaagatctctccttccccagt

SEQ ID NO: 20425 - DNA, 429 bp, Gossypium hirsutum
  Clone ID: LIB3146-027-Q1-K1-A12
gaaaaattgccagttccggatatctaaagaacatagaaaagctggctgaagctgaagtttatgatgccaaaaaacttgtcaggaagttgtctaccaacagatttcgtagtattctgagtggattttggcattcttgaataaatggtggaaagcaattgaggtgcttgcacatgggaaaggcatgaaaatccagaataggcatgttagcagtggcaatcaaggttttgtcagctgccatcatgggacagaagggatagtgattgatgaaagttccttctctatctgtttgtgttgttgccagcattatcttcttcatcttatcatgatttttctaattcatgaaaaccacttaatattctgatataaaagcataggcttagatcgccaggcatcagtttattattagcttgaggattgagatataggata

SEQ ID NO: 20426 - DNA, 416 bp, Gossypium hirsutum
  Clone ID: LIB3146-027-Q1-K1-A2
cccacgcgtccgccgaaattgatgagctaaccgtggatacgtcggaagaagatggtaagtttgtgatcaaagcttcactttgctgtgaagataggtccgaccttttgcctgacctaatcaaaacattgaaagctttacgcttgaagacactaaaagctgagattacaacgcttggtgggcgtgtaaagaatgttctgtttataaccggagaggaagactccagtagtagcgctgagcagcagcaacaacagctgcagtattgtattagttcaatacaagaagcattgaaagcggtgatggagaagacttccgtggacgagtcttcttcagggaatgtgaagagacaaagaaccaacatcggtattcttgaacataggtctctttagcttacaaaagaccttgaatacgtacttttt

SEQ ID NO: 20427 - DNA, 192 bp, Gossypium hirsutum
  Clone ID: LIB3146-027-Q1-K1-A3
cccacgcgtccgcccacgcgtccgaaataaaataagatatttaaaaaaaaaaaaaaaaaaaggggaaagggttgaaaaaatatgatgtggaaaaaaaattataacttaaaaactaggacttatgataaggctggggggggttgctcttgtgggcgctgggttctgtgttgggtactgtggagacccgtgggt

SEQ ID NO: 20428 - DNA, 384 bp, Gossypium hirsutum
  Clone ID: LIB3146-027-Q1-K1-A4
cccacgcgtccgtgtacacggacggcatagatggcatcccgctggatggggaaaggatccgttatttcgtaagcggcaaggaagagagctgcaagaacggtctaaagctacatgtggaggtgatgccttttgggaaccccgagcccgaaaagcccagagttgcagtggctgctgcagcgcccaccactccttctggatcagcccggctttacagaagctccgtgttattattggttgggttatggctttgccatatggctatttaattgtaccagttatgacctctctgcactctttttcctctttagactttaccttctgctttatattgttgtacgagaatctactttaaatttcaaattatgtgtatcacttgatatcttc

SEQ ID NO: 20429 - DNA, 406 bp, Gossypium hirsutum
  Clone ID: LIB3146-027-Q1-K1-A5
tcgcccacgcgttcgcccacgcgttcgcccacgcgttcgcccacgcgtccggaaaatctttccaggttcaattttctcacaacaaaactgaaaatgtcttgctgttcaagaaaatgtggctgcggcgctgattgcaagtgtggcagtggctgtaacggatgcagtatgttccctgacacaatagagaagactacaactgagactattgttcttggtgtggcaactcataaaatgcactttgagggatctgagatgggagttggggttgaaggtggatgcccgtgtggagacaactgctaatgcaacccttgcacttgctggtagtgaacaacaaagagaagcagagtggcctttgtcattttaactaaataaaatctattactttagtatgtatcagcaaatcttc
